United States Patent Application Publication US 2015/0141320 A1 - sequence listing, part 11

SEQ ID NO: 244528 - DNA, 15 bp, Homo sapiens
tcattctgtaagctc

SEQ ID NO: 244529 - DNA, 15 bp, Homo sapiens
ttcattctgtaagct

SEQ ID NO: 244530 - DNA, 15 bp, Homo sapiens
cttcattctgtaagc

SEQ ID NO: 244531 - DNA, 15 bp, Homo sapiens
tcttcattctgtaag

SEQ ID NO: 244532 - DNA, 15 bp, Homo sapiens
gtcttcattctgtaa

SEQ ID NO: 244533 - DNA, 15 bp, Homo sapiens
tgtcttcattctgta

SEQ ID NO: 244534 - DNA, 15 bp, Homo sapiens
ttgtcttcattctgt

SEQ ID NO: 244535 - DNA, 15 bp, Homo sapiens
tttgtcttcattctg

SEQ ID NO: 244536 - DNA, 15 bp, Homo sapiens
gtttgtcttcattct

SEQ ID NO: 244537 - DNA, 15 bp, Homo sapiens
agtttgtcttcattc

SEQ ID NO: 244538 - DNA, 15 bp, Homo sapiens
cagtttgtcttcatt

SEQ ID NO: 244539 - DNA, 15 bp, Homo sapiens
tcagtttgtcttcat

SEQ ID NO: 244540 - DNA, 15 bp, Homo sapiens
gtcagtttgtcttca

SEQ ID NO: 244541 - DNA, 15 bp, Homo sapiens
agtcagtttgtcttc

SEQ ID NO: 244542 - DNA, 15 bp, Homo sapiens
aagtcagtttgtctt

SEQ ID NO: 244543 - DNA, 15 bp, Homo sapiens
aaagtcagtttgtct

SEQ ID NO: 244544 - DNA, 15 bp, Homo sapiens
taaagtcagtttgtc

SEQ ID NO: 244545 - DNA, 15 bp, Homo sapiens
ataaagtcagtttgt

SEQ ID NO: 244546 - DNA, 15 bp, Homo sapiens
tataaagtcagtttg

SEQ ID NO: 244547 - DNA, 15 bp, Homo sapiens
ctataaagtcagttt

SEQ ID NO: 244548 - DNA, 15 bp, Homo sapiens
tctataaagtcagtt

SEQ ID NO: 244549 - DNA, 15 bp, Homo sapiens
ttctataaagtcagt

SEQ ID NO: 244550 - DNA, 15 bp, Homo sapiens
tttctataaagtcag

SEQ ID NO: 244551 - DNA, 15 bp, Homo sapiens
atttctataaagtca

SEQ ID NO: 244552 - DNA, 15 bp, Homo sapiens
tatttctataaagtc

SEQ ID NO: 244553 - DNA, 15 bp, Homo sapiens
ctatttctataaagt

SEQ ID NO: 244554 - DNA, 15 bp, Homo sapiens
actatttctataaag

SEQ ID NO: 244555 - DNA, 15 bp, Homo sapiens
cactatttctataaa

SEQ ID NO: 244556 - DNA, 15 bp, Homo sapiens
tcactatttctataa

SEQ ID NO: 244557 - DNA, 15 bp, Homo sapiens
ttcactatttctata

SEQ ID NO: 244558 - DNA, 15 bp, Homo sapiens
attcactatttctat

SEQ ID NO: 244559 - DNA, 15 bp, Homo sapiens
cattcactatttcta

SEQ ID NO: 244560 - DNA, 15 bp, Homo sapiens
acattcactatttct

SEQ ID NO: 244561 - DNA, 15 bp, Homo sapiens
aacattcactatttc

SEQ ID NO: 244562 - DNA, 15 bp, Homo sapiens
aaacattcactattt

SEQ ID NO: 244563 - DNA, 15 bp, Homo sapiens
gaaacattcactatt

SEQ ID NO: 244564 - DNA, 15 bp, Homo sapiens
tgaaacattcactat

SEQ ID NO: 244565 - DNA, 15 bp, Homo sapiens
ctgaaacattcacta

SEQ ID NO: 244566 - DNA, 15 bp, Homo sapiens
tctgaaacattcact

SEQ ID NO: 244567 - DNA, 15 bp, Homo sapiens
ttctgaaacattcac

SEQ ID NO: 244568 - DNA, 15 bp, Homo sapiens
cttctgaaacattca

SEQ ID NO: 244569 - DNA, 15 bp, Homo sapiens
gcttctgaaacattc

SEQ ID NO: 244570 - DNA, 15 bp, Homo sapiens
tgcttctgaaacatt

SEQ ID NO: 244571 - DNA, 15 bp, Homo sapiens
ctgcttctgaaacat

SEQ ID NO: 244572 - DNA, 15 bp, Homo sapiens
cctgcttctgaaaca

SEQ ID NO: 244573 - DNA, 15 bp, Homo sapiens
tcctgcttctgaaac

SEQ ID NO: 244574 - DNA, 15 bp, Homo sapiens
tttcctgtgctttgt

SEQ ID NO: 244575 - DNA, 15 bp, Homo sapiens
atttcctgtgctttg

SEQ ID NO: 244576 - DNA, 15 bp, Homo sapiens
gatttcctgtgcttt

SEQ ID NO: 244577 - DNA, 15 bp, Homo sapiens
cgatttcctgtgctt

SEQ ID NO: 244578 - DNA, 15 bp, Homo sapiens
ccgatttcctgtgct

SEQ ID NO: 244579 - DNA, 15 bp, Homo sapiens
accgatttcctgtgc

SEQ ID NO: 244580 - DNA, 15 bp, Homo sapiens
aaccgatttcctgtg

SEQ ID NO: 244581 - DNA, 15 bp, Homo sapiens
gaaccgatttcctgt

SEQ ID NO: 244582 - DNA, 15 bp, Homo sapiens
agaaccgatttcctg

SEQ ID NO: 244583 - DNA, 15 bp, Homo sapiens
gagaaccgatttcct

SEQ ID NO: 244584 - DNA, 15 bp, Homo sapiens
tgagaaccgatttcc

SEQ ID NO: 244585 - DNA, 15 bp, Homo sapiens
ctgagaaccgatttc

SEQ ID NO: 244586 - DNA, 15 bp, Homo sapiens
tctgagaaccgattt

SEQ ID NO: 244587 - DNA, 15 bp, Homo sapiens
ttctgagaaccgatt

SEQ ID NO: 244588 - DNA, 15 bp, Homo sapiens
gttctgagaaccgat

SEQ ID NO: 244589 - DNA, 15 bp, Homo sapiens
agttctgagaaccga

SEQ ID NO: 244590 - DNA, 15 bp, Homo sapiens
gagttctgagaaccg

SEQ ID NO: 244591 - DNA, 15 bp, Homo sapiens
tgagttctgagaacc

SEQ ID NO: 244592 - DNA, 15 bp, Homo sapiens
atgagttctgagaac

SEQ ID NO: 244593 - DNA, 15 bp, Homo sapiens
aatgagttctgagaa

SEQ ID NO: 244594 - DNA, 15 bp, Homo sapiens
aaatgagttctgaga

SEQ ID NO: 244595 - DNA, 15 bp, Homo sapiens
caaatgagttctgag

SEQ ID NO: 244596 - DNA, 15 bp, Homo sapiens
ccaaatgagttctga

SEQ ID NO: 244597 - DNA, 15 bp, Homo sapiens
cccaaatgagttctg

SEQ ID NO: 244598 - DNA, 15 bp, Homo sapiens
tcccaaatgagttct

SEQ ID NO: 244599 - DNA, 15 bp, Homo sapiens
ttcccaaatgagttc

SEQ ID NO: 244600 - DNA, 15 bp, Homo sapiens
cttcccaaatgagtt

SEQ ID NO: 244601 - DNA, 15 bp, Homo sapiens
acttcccaaatgagt

SEQ ID NO: 244602 - DNA, 15 bp, Homo sapiens
gacttcccaaatgag

SEQ ID NO: 244603 - DNA, 15 bp, Homo sapiens
tgacttcccaaatga

SEQ ID NO: 244604 - DNA, 15 bp, Homo sapiens
ctgacttcccaaatg

SEQ ID NO: 244605 - DNA, 15 bp, Homo sapiens
gctgacttcccaaat

SEQ ID NO: 244606 - DNA, 15 bp, Homo sapiens
cgctgacttcccaaa

SEQ ID NO: 244607 - DNA, 15 bp, Homo sapiens
ccgctgacttcccaa

SEQ ID NO: 244608 - DNA, 15 bp, Homo sapiens
gccgctgacttccca

SEQ ID NO: 244609 - DNA, 15 bp, Homo sapiens
tgccgctgacttccc

SEQ ID NO: 244610 - DNA, 15 bp, Homo sapiens
ttgccgctgacttcc

SEQ ID NO: 244611 - DNA, 15 bp, Homo sapiens
cttgccgctgacttc

SEQ ID NO: 244612 - DNA, 15 bp, Homo sapiens
acttgccgctgactt

SEQ ID NO: 244613 - DNA, 15 bp, Homo sapiens
aacttgccgctgact

SEQ ID NO: 244614 - DNA, 15 bp, Homo sapiens
gaacttgccgctgac

SEQ ID NO: 244615 - DNA, 15 bp, Homo sapiens
tgaacttgccgctga

SEQ ID NO: 244616 - DNA, 15 bp, Homo sapiens
gtgaacttgccgctg

SEQ ID NO: 244617 - DNA, 15 bp, Homo sapiens
tgtgaacttgccgct

SEQ ID NO: 244618 - DNA, 15 bp, Homo sapiens
gtgtgaacttgccgc

SEQ ID NO: 244619 - DNA, 15 bp, Homo sapiens
tgtgtgaacttgccg

SEQ ID NO: 244620 - DNA, 15 bp, Homo sapiens
gtgtgtgaacttgcc

SEQ ID NO: 244621 - DNA, 15 bp, Homo sapiens
ggtgtgtgaacttgc

SEQ ID NO: 244622 - DNA, 15 bp, Homo sapiens
tggtgtgtgaacttg

SEQ ID NO: 244623 - DNA, 15 bp, Homo sapiens
ttggtgtgtgaactt

SEQ ID NO: 244624 - DNA, 15 bp, Homo sapiens
cttggtgtgtgaact

SEQ ID NO: 244625 - DNA, 15 bp, Homo sapiens
ccttggtgtgtgaac

SEQ ID NO: 244626 - DNA, 15 bp, Homo sapiens
accttggtgtgtgaa

SEQ ID NO: 244627 - DNA, 15 bp, Homo sapiens
caccttggtgtgtga

SEQ ID NO: 244628 - DNA, 15 bp, Homo sapiens
tcaccttggtgtgtg

SEQ ID NO: 244629 - DNA, 15 bp, Homo sapiens
ttcaccttggtgtgt

SEQ ID NO: 244630 - DNA, 15 bp, Homo sapiens
tttcaccttggtgtg

SEQ ID NO: 244631 - DNA, 15 bp, Homo sapiens
ctttcaccttggtgt

SEQ ID NO: 244632 - DNA, 15 bp, Homo sapiens
gctttcaccttggtg

SEQ ID NO: 244633 - DNA, 15 bp, Homo sapiens
cgctttcaccttggt

SEQ ID NO: 244634 - DNA, 15 bp, Homo sapiens
ccgctttcaccttgg

SEQ ID NO: 244635 - DNA, 15 bp, Homo sapiens
gccgctttcaccttg

SEQ ID NO: 244636 - DNA, 15 bp, Homo sapiens
tgccgctttcacctt

SEQ ID NO: 244637 - DNA, 15 bp, Homo sapiens
gtgccgctttcacct

SEQ ID NO: 244638 - DNA, 15 bp, Homo sapiens
agtgccgctttcacc

SEQ ID NO: 244639 - DNA, 15 bp, Homo sapiens
tagtgccgctttcac

SEQ ID NO: 244640 - DNA, 15 bp, Homo sapiens
atagtgccgctttca

SEQ ID NO: 244641 - DNA, 15 bp, Homo sapiens
tatagtgccgctttc

SEQ ID NO: 244642 - DNA, 15 bp, Homo sapiens
ttatagtgccgcttt

SEQ ID NO: 244643 - DNA, 15 bp, Homo sapiens
tttatagtgccgctt

SEQ ID NO: 244644 - DNA, 15 bp, Homo sapiens
ttttatagtgccgct

SEQ ID NO: 244645 - DNA, 15 bp, Homo sapiens
cttttatagtgccgc

SEQ ID NO: 244646 - DNA, 15 bp, Homo sapiens
ccttttatagtgccg

SEQ ID NO: 244647 - DNA, 15 bp, Homo sapiens
tccttttatagtgcc

SEQ ID NO: 244648 - DNA, 15 bp, Homo sapiens
atccttttatagtgc

SEQ ID NO: 244649 - DNA, 15 bp, Homo sapiens
catccttttatagtg

SEQ ID NO: 244650 - DNA, 15 bp, Homo sapiens
ccatccttttatagt

SEQ ID NO: 244651 - DNA, 15 bp, Homo sapiens
tccatccttttatag

SEQ ID NO: 244652 - DNA, 15 bp, Homo sapiens
atccatccttttata

SEQ ID NO: 244653 - DNA, 15 bp, Homo sapiens
catccatccttttat

SEQ ID NO: 244654 - DNA, 15 bp, Homo sapiens
ccatccatcctttta

SEQ ID NO: 244655 - DNA, 15 bp, Homo sapiens
tccatccatcctttt

SEQ ID NO: 244656 - DNA, 15 bp, Homo sapiens
ctccatccatccttt

SEQ ID NO: 244657 - DNA, 15 bp, Homo sapiens
cctccatccatcctt

SEQ ID NO: 244658 - DNA, 15 bp, Homo sapiens
acctccatccatcct

SEQ ID NO: 244659 - DNA, 15 bp, Homo sapiens
tacctccatccatcc

SEQ ID NO: 244660 - DNA, 15 bp, Homo sapiens
gtacctccatccatc

SEQ ID NO: 244661 - DNA, 15 bp, Homo sapiens
tgtacctccatccat

SEQ ID NO: 244662 - DNA, 15 bp, Homo sapiens
ctgtacctccatcca

SEQ ID NO: 244663 - DNA, 15 bp, Homo sapiens
actgtacctccatcc

SEQ ID NO: 244664 - DNA, 15 bp, Homo sapiens
tactgtacctccatc

SEQ ID NO: 244665 - DNA, 15 bp, Homo sapiens
ttactgtacctccat

SEQ ID NO: 244666 - DNA, 15 bp, Homo sapiens
tttactgtacctcca

SEQ ID NO: 244667 - DNA, 15 bp, Homo sapiens
ctttactgtacctcc

SEQ ID NO: 244668 - DNA, 15 bp, Homo sapiens
tctttactgtacctc

SEQ ID NO: 244669 - DNA, 15 bp, Homo sapiens
ctctttactgtacct

SEQ ID NO: 244670 - DNA, 15 bp, Homo sapiens
cctctttactgtacc

SEQ ID NO: 244671 - DNA, 15 bp, Homo sapiens
tcctctttactgtac

SEQ ID NO: 244672 - DNA, 15 bp, Homo sapiens
ttcctctttactgta

SEQ ID NO: 244673 - DNA, 15 bp, Homo sapiens
cttcctctttactgt

SEQ ID NO: 244674 - DNA, 15 bp, Homo sapiens
tcttcctctttactg

SEQ ID NO: 244675 - DNA, 15 bp, Homo sapiens
ctcttcctctttact

SEQ ID NO: 244676 - DNA, 15 bp, Homo sapiens
cctcttcctctttac

SEQ ID NO: 244677 - DNA, 15 bp, Homo sapiens
tcctcttcctcttta

SEQ ID NO: 244678 - DNA, 15 bp, Homo sapiens
ttcctcttcctcttt

SEQ ID NO: 244679 - DNA, 15 bp, Homo sapiens
cttcctcttcctctt

SEQ ID NO: 244680 - DNA, 15 bp, Homo sapiens
tcttcctcttcctct

SEQ ID NO: 244681 - DNA, 15 bp, Homo sapiens
ttcttcctcttcctc

SEQ ID NO: 244682 - DNA, 15 bp, Homo sapiens
tttcttcctcttcct

SEQ ID NO: 244683 - DNA, 15 bp, Homo sapiens
ttttcttcctcttcc

SEQ ID NO: 244684 - DNA, 15 bp, Homo sapiens
cttttcttcctcttc

SEQ ID NO: 244685 - DNA, 15 bp, Homo sapiens
tcttttcttcctctt

SEQ ID NO: 244686 - DNA, 15 bp, Homo sapiens
ctcttttcttcctct

SEQ ID NO: 244687 - DNA, 15 bp, Homo sapiens
cctcttttcttcctc

SEQ ID NO: 244688 - DNA, 15 bp, Homo sapiens
tcctcttttcttcct

SEQ ID NO: 244689 - DNA, 15 bp, Homo sapiens
ttcctcttttcttcc

SEQ ID NO: 244690 - DNA, 15 bp, Homo sapiens
tttcctcttttcttc

SEQ ID NO: 244691 - DNA, 15 bp, Homo sapiens
gtttcctcttttctt

SEQ ID NO: 244692 - DNA, 15 bp, Homo sapiens
tgtttcctcttttct

SEQ ID NO: 244693 - DNA, 15 bp, Homo sapiens
ttgtttcctcttttc

SEQ ID NO: 244694 - DNA, 15 bp, Homo sapiens
tttgtttcctctttt

SEQ ID NO: 244695 - DNA, 15 bp, Homo sapiens
ttttgtttcctcttt

SEQ ID NO: 244696 - DNA, 15 bp, Homo sapiens
gttttgtttcctctt

SEQ ID NO: 244697 - DNA, 15 bp, Homo sapiens
cgttttgtttcctct

SEQ ID NO: 244698 - DNA, 15 bp, Homo sapiens
acgttttgtttcctc

SEQ ID NO: 244699 - DNA, 15 bp, Homo sapiens
cacgttttgtttcct

SEQ ID NO: 244700 - DNA, 15 bp, Homo sapiens
ccacgttttgtttcc

SEQ ID NO: 244701 - DNA, 15 bp, Homo sapiens
gccacgttttgtttc

SEQ ID NO: 244702 - DNA, 15 bp, Homo sapiens
ggccacgttttgttt

SEQ ID NO: 244703 - DNA, 15 bp, Homo sapiens
tggccacgttttgtt

SEQ ID NO: 244704 - DNA, 15 bp, Homo sapiens
atggccacgttttgt

SEQ ID NO: 244705 - DNA, 15 bp, Homo sapiens
tatggccacgttttg

SEQ ID NO: 244706 - DNA, 15 bp, Homo sapiens
ttatggccacgtttt

SEQ ID NO: 244707 - DNA, 15 bp, Homo sapiens
tttatggccacgttt

SEQ ID NO: 244708 - DNA, 15 bp, Homo sapiens
ctttatggccacgtt

SEQ ID NO: 244709 - DNA, 15 bp, Homo sapiens
actttatggccacgt

SEQ ID NO: 244710 - DNA, 15 bp, Homo sapiens
cactttatggccacg

SEQ ID NO: 244711 - DNA, 15 bp, Homo sapiens
acactttatggccac

SEQ ID NO: 244712 - DNA, 15 bp, Homo sapiens
tacactttatggcca

SEQ ID NO: 244713 - DNA, 15 bp, Homo sapiens
ctacactttatggcc

SEQ ID NO: 244714 - DNA, 15 bp, Homo sapiens
gctacactttatggc

SEQ ID NO: 244715 - DNA, 15 bp, Homo sapiens
agctacactttatgg

SEQ ID NO: 244716 - DNA, 15 bp, Homo sapiens
aagctacactttatg

SEQ ID NO: 244717 - DNA, 15 bp, Homo sapiens
gaagctacactttat

SEQ ID NO: 244718 - DNA, 15 bp, Homo sapiens
agaagctacacttta

SEQ ID NO: 244719 - DNA, 15 bp, Homo sapiens
cagaagctacacttt

SEQ ID NO: 244720 - DNA, 15 bp, Homo sapiens
tcagaagctacactt

SEQ ID NO: 244721 - DNA, 15 bp, Homo sapiens
atcagaagctacact

SEQ ID NO: 244722 - DNA, 15 bp, Homo sapiens
tatcagaagctacac

SEQ ID NO: 244723 - DNA, 15 bp, Homo sapiens
gtatcagaagctaca

SEQ ID NO: 244724 - DNA, 15 bp, Homo sapiens
tgtatcagaagctac

SEQ ID NO: 244725 - DNA, 15 bp, Homo sapiens
atgtatcagaagcta

SEQ ID NO: 244726 - DNA, 15 bp, Homo sapiens
tatgtatcagaagct

SEQ ID NO: 244727 - DNA, 15 bp, Homo sapiens
ctatgtatcagaagc

SEQ ID NO: 244728 - DNA, 15 bp, Homo sapiens
actatgtatcagaag

SEQ ID NO: 244729 - DNA, 15 bp, Homo sapiens
cactatgtatcagaa

SEQ ID NO: 244730 - DNA, 15 bp, Homo sapiens
tcactatgtatcaga

SEQ ID NO: 244731 - DNA, 15 bp, Homo sapiens
ttcactatgtatcag

SEQ ID NO: 244732 - DNA, 15 bp, Homo sapiens
cttcactatgtatca

SEQ ID NO: 244733 - DNA, 15 bp, Homo sapiens
ccttcactatgtatc

SEQ ID NO: 244734 - DNA, 15 bp, Homo sapiens
cccttcactatgtat

SEQ ID NO: 244735 - DNA, 15 bp, Homo sapiens
tcccttcactatgta

SEQ ID NO: 244736 - DNA, 15 bp, Homo sapiens
gtcccttcactatgt

SEQ ID NO: 244737 - DNA, 15 bp, Homo sapiens
tgtcccttcactatg

SEQ ID NO: 244738 - DNA, 15 bp, Homo sapiens
ctgtcccttcactat

SEQ ID NO: 244739 - DNA, 15 bp, Homo sapiens
tctgtcccttcacta

SEQ ID NO: 244740 - DNA, 15 bp, Homo sapiens
ttctgtcccttcact

SEQ ID NO: 244741 - DNA, 15 bp, Homo sapiens
cttctgtcccttcac

SEQ ID NO: 244742 - DNA, 15 bp, Homo sapiens
ccttctgtcccttca

SEQ ID NO: 244743 - DNA, 15 bp, Homo sapiens
accttctgtcccttc

SEQ ID NO: 244744 - DNA, 15 bp, Homo sapiens
caccttctgtccctt

SEQ ID NO: 244745 - DNA, 15 bp, Homo sapiens
tcaccttctgtccct

SEQ ID NO: 244746 - DNA, 15 bp, Homo sapiens
ttcaccttctgtccc

SEQ ID NO: 244747 - DNA, 15 bp, Homo sapiens
attcaccttctgtcc

SEQ ID NO: 244748 - DNA, 15 bp, Homo sapiens
gattcaccttctgtc

SEQ ID NO: 244749 - DNA, 15 bp, Homo sapiens
ggattcaccttctgt

SEQ ID NO: 244750 - DNA, 15 bp, Homo sapiens
aggattcaccttctg

SEQ ID NO: 244751 - DNA, 15 bp, Homo sapiens
aaggattcaccttct

SEQ ID NO: 244752 - DNA, 15 bp, Homo sapiens
caaggattcaccttc

SEQ ID NO: 244753 - DNA, 15 bp, Homo sapiens
acaaggattcacctt

SEQ ID NO: 244754 - DNA, 15 bp, Homo sapiens
tacaaggattcacct

SEQ ID NO: 244755 - DNA, 15 bp, Homo sapiens
ttacaaggattcacc

SEQ ID NO: 244756 - DNA, 15 bp, Homo sapiens
tttacaaggattcac

SEQ ID NO: 244757 - DNA, 15 bp, Homo sapiens
ctttacaaggattca

SEQ ID NO: 244758 - DNA, 15 bp, Homo sapiens
actttacaaggattc

SEQ ID NO: 244759 - DNA, 15 bp, Homo sapiens
cactttacaaggatt

SEQ ID NO: 244760 - DNA, 15 bp, Homo sapiens
ccactttacaaggat

SEQ ID NO: 244761 - DNA, 15 bp, Homo sapiens
gccactttacaagga

SEQ ID NO: 244762 - DNA, 15 bp, Homo sapiens
agccactttacaagg

SEQ ID NO: 244763 - DNA, 15 bp, Homo sapiens
tagccactttacaag

SEQ ID NO: 244764 - DNA, 15 bp, Homo sapiens
ctagccactttacaa

SEQ ID NO: 244765 - DNA, 15 bp, Homo sapiens
gctagccactttaca

SEQ ID NO: 244766 - DNA, 15 bp, Homo sapiens
ggctagccactttac

SEQ ID NO: 244767 - DNA, 15 bp, Homo sapiens
aggctagccacttta

SEQ ID NO: 244768 - DNA, 15 bp, Homo sapiens
caggctagccacttt

SEQ ID NO: 244769 - DNA, 15 bp, Homo sapiens
acaggctagccactt

SEQ ID NO: 244770 - DNA, 15 bp, Homo sapiens
gacaggctagccact

SEQ ID NO: 244771 - DNA, 15 bp, Homo sapiens
cgacaggctagccac

SEQ ID NO: 244772 - DNA, 15 bp, Homo sapiens
ccgacaggctagcca

SEQ ID NO: 244773 - DNA, 15 bp, Homo sapiens
cccgacaggctagcc

SEQ ID NO: 244774 - DNA, 15 bp, Homo sapiens
tcccgacaggctagc

SEQ ID NO: 244775 - DNA, 15 bp, Homo sapiens
ctcccgacaggctag

SEQ ID NO: 244776 - DNA, 15 bp, Homo sapiens
gctcccgacaggcta

SEQ ID NO: 244777 - DNA, 15 bp, Homo sapiens
ggctcccgacaggct

SEQ ID NO: 244778 - DNA, 15 bp, Homo sapiens
tggctcccgacaggc

SEQ ID NO: 244779 - DNA, 15 bp, Homo sapiens
gtggctcccgacagg

SEQ ID NO: 244780 - DNA, 15 bp, Homo sapiens
tgtggctcccgacag

SEQ ID NO: 244781 - DNA, 15 bp, Homo sapiens
gtgtggctcccgaca

SEQ ID NO: 244782 - DNA, 15 bp, Homo sapiens
agtgtggctcccgac

SEQ ID NO: 244783 - DNA, 15 bp, Homo sapiens
tagtgtggctcccga

SEQ ID NO: 244784 - DNA, 15 bp, Homo sapiens
atagtgtggctcccg

SEQ ID NO: 244785 - DNA, 15 bp, Homo sapiens
gatagtgtggctccc

SEQ ID NO: 244786 - DNA, 15 bp, Homo sapiens
tgatagtgtggctcc

SEQ ID NO: 244787 - DNA, 15 bp, Homo sapiens
gtgatagtgtggctc

SEQ ID NO: 244788 - DNA, 15 bp, Homo sapiens
ggtgatagtgtggct

SEQ ID NO: 244789 - DNA, 15 bp, Homo sapiens
aggtgatagtgtggc

SEQ ID NO: 244790 - DNA, 15 bp, Homo sapiens
caggtgatagtgtgg

SEQ ID NO: 244791 - DNA, 15 bp, Homo sapiens
gcaggtgatagtgtg

SEQ ID NO: 244792 - DNA, 15 bp, Homo sapiens
agcaggtgatagtgt

SEQ ID NO: 244793 - DNA, 15 bp, Homo sapiens
gagcaggtgatagtg

SEQ ID NO: 244794 - DNA, 15 bp, Homo sapiens
ggagcaggtgatagt

SEQ ID NO: 244795 - DNA, 15 bp, Homo sapiens
tggagcaggtgatag

SEQ ID NO: 244796 - DNA, 15 bp, Homo sapiens
ttggagcaggtgata

SEQ ID NO: 244797 - DNA, 15 bp, Homo sapiens
cttggagcaggtgat

SEQ ID NO: 244798 - DNA, 15 bp, Homo sapiens
acttggagcaggtga

SEQ ID NO: 244799 - DNA, 15 bp, Homo sapiens
aacttggagcaggtg

SEQ ID NO: 244800 - DNA, 15 bp, Homo sapiens
taacttggagcaggt

SEQ ID NO: 244801 - DNA, 15 bp, Homo sapiens
gtaacttggagcagg

SEQ ID NO: 244802 - DNA, 15 bp, Homo sapiens
ggtaacttggagcag

SEQ ID NO: 244803 - DNA, 15 bp, Homo sapiens
gggtaacttggagca

SEQ ID NO: 244804 - DNA, 15 bp, Homo sapiens
ggggtaacttggagc

SEQ ID NO: 244805 - DNA, 15 bp, Homo sapiens
aggggtaacttggag

SEQ ID NO: 244806 - DNA, 15 bp, Homo sapiens
gaggggtaacttgga

SEQ ID NO: 244807 - DNA, 15 bp, Homo sapiens
ggaggggtaacttgg

SEQ ID NO: 244808 - DNA, 15 bp, Homo sapiens
aggaggggtaacttg

SEQ ID NO: 244809 - DNA, 15 bp, Homo sapiens
gaggaggggtaactt

SEQ ID NO: 244810 - DNA, 15 bp, Homo sapiens
agaggaggggtaact

SEQ ID NO: 244811 - DNA, 15 bp, Homo sapiens
cagaggaggggtaac

SEQ ID NO: 244812 - DNA, 15 bp, Homo sapiens
gcagaggaggggtaa

SEQ ID NO: 244813 - DNA, 15 bp, Homo sapiens
ggcagaggaggggta

SEQ ID NO: 244814 - DNA, 15 bp, Homo sapiens
gggcagaggaggggt

SEQ ID NO: 244815 - DNA, 15 bp, Homo sapiens
ggggcagaggagggg

SEQ ID NO: 244816 - DNA, 15 bp, Homo sapiens
gggggcagaggaggg

SEQ ID NO: 244817 - DNA, 15 bp, Homo sapiens
tgggggcagaggagg

SEQ ID NO: 244818 - DNA, 15 bp, Homo sapiens
ttgggggcagaggag

SEQ ID NO: 244819 - DNA, 15 bp, Homo sapiens
gttgggggcagagga

SEQ ID NO: 244820 - DNA, 15 bp, Homo sapiens
ggttgggggcagagg

SEQ ID NO: 244821 - DNA, 15 bp, Homo sapiens
tggttgggggcagag

SEQ ID NO: 244822 - DNA, 15 bp, Homo sapiens
ttggttgggggcaga

SEQ ID NO: 244823 - DNA, 15 bp, Homo sapiens
tttggttgggggcag

SEQ ID NO: 244824 - DNA, 15 bp, Homo sapiens
ctttggttgggggca

SEQ ID NO: 244825 - DNA, 15 bp, Homo sapiens
tctttggttgggggc

SEQ ID NO: 244826 - DNA, 15 bp, Homo sapiens
ttctttggttggggg

SEQ ID NO: 244827 - DNA, 15 bp, Homo sapiens
cttctttggttgggg

SEQ ID NO: 244828 - DNA, 15 bp, Homo sapiens
tcttctttggttggg

SEQ ID NO: 244829 - DNA, 15 bp, Homo sapiens
atcttctttggttgg

SEQ ID NO: 244830 - DNA, 15 bp, Homo sapiens
aatcttctttggttg

SEQ ID NO: 244831 - DNA, 15 bp, Homo sapiens
caatcttctttggtt

SEQ ID NO: 244832 - DNA, 15 bp, Homo sapiens
acaatcttctttggt

SEQ ID NO: 244833 - DNA, 15 bp, Homo sapiens
cacaatcttctttgg

SEQ ID NO: 244834 - DNA, 15 bp, Homo sapiens
gcacaatcttctttg

SEQ ID NO: 244835 - DNA, 15 bp, Homo sapiens
tgcacaatcttcttt

SEQ ID NO: 244836 - DNA, 15 bp, Homo sapiens
atgcacaatcttctt

SEQ ID NO: 244837 - DNA, 15 bp, Homo sapiens
catgcacaatcttct

SEQ ID NO: 244838 - DNA, 15 bp, Homo sapiens
tcatgcacaatcttc

SEQ ID NO: 244839 - DNA, 15 bp, Homo sapiens
ctcatgcacaatctt

SEQ ID NO: 244840 - DNA, 15 bp, Homo sapiens
tctcatgcacaatct

SEQ ID NO: 244841 - DNA, 15 bp, Homo sapiens
ctctcatgcacaatc

SEQ ID NO: 244842 - DNA, 15 bp, Homo sapiens
actctcatgcacaat

SEQ ID NO: 244843 - DNA, 15 bp, Homo sapiens
aactctcatgcacaa

SEQ ID NO: 244844 - DNA, 15 bp, Homo sapiens
gaactctcatgcaca

SEQ ID NO: 244845 - DNA, 15 bp, Homo sapiens
agaactctcatgcac

SEQ ID NO: 244846 - DNA, 15 bp, Homo sapiens
tagaactctcatgca

SEQ ID NO: 244847 - DNA, 15 bp, Homo sapiens
gtagaactctcatgc

SEQ ID NO: 244848 - DNA, 15 bp, Homo sapiens
ggtagaactctcatg

SEQ ID NO: 244849 - DNA, 15 bp, Homo sapiens
tggtagaactctcat

SEQ ID NO: 244850 - DNA, 15 bp, Homo sapiens
atggtagaactctca

SEQ ID NO: 244851 - DNA, 15 bp, Homo sapiens
aatggtagaactctc

SEQ ID NO: 244852 - DNA, 15 bp, Homo sapiens
caatggtagaactct

SEQ ID NO: 244853 - DNA, 15 bp, Homo sapiens
tcaatggtagaactc

SEQ ID NO: 244854 - DNA, 15 bp, Homo sapiens
atcaatggtagaact

SEQ ID NO: 244855 - DNA, 15 bp, Homo sapiens
aatcaatggtagaac

SEQ ID NO: 244856 - DNA, 15 bp, Homo sapiens
caatcaatggtagaa

SEQ ID NO: 244857 - DNA, 15 bp, Homo sapiens
tcaatcaatggtaga

SEQ ID NO: 244858 - DNA, 15 bp, Homo sapiens
ctcaatcaatggtag

SEQ ID NO: 244859 - DNA, 15 bp, Homo sapiens
tctcaatcaatggta

SEQ ID NO: 244860 - DNA, 15 bp, Homo sapiens
ctctcaatcaatggt

SEQ ID NO: 244861 - DNA, 15 bp, Homo sapiens
tctctcaatcaatgg

SEQ ID NO: 244862 - DNA, 15 bp, Homo sapiens
gtctctcaatcaatg

SEQ ID NO: 244863 - DNA, 15 bp, Homo sapiens
agtctctcaatcaat

SEQ ID NO: 244864 - DNA, 15 bp, Homo sapiens
gagtctctcaatcaa

SEQ ID NO: 244865 - DNA, 15 bp, Homo sapiens
agagtctctcaatca

SEQ ID NO: 244866 - DNA, 15 bp, Homo sapiens
gagagtctctcaatc

SEQ ID NO: 244867 - DNA, 15 bp, Homo sapiens
agagagtctctcaat

SEQ ID NO: 244868 - DNA, 15 bp, Homo sapiens
tagagagtctctcaa

SEQ ID NO: 244869 - DNA, 15 bp, Homo sapiens
ctagagagtctctca

SEQ ID NO: 244870 - DNA, 15 bp, Homo sapiens
cctagagagtctctc

SEQ ID NO: 244871 - DNA, 15 bp, Homo sapiens
tcctagagagtctct

SEQ ID NO: 244872 - DNA, 15 bp, Homo sapiens
atcctagagagtctc

SEQ ID NO: 244873 - DNA, 15 bp, Homo sapiens
gatcctagagagtct

SEQ ID NO: 244874 - DNA, 15 bp, Homo sapiens
tgatcctagagagtc

SEQ ID NO: 244875 - DNA, 15 bp, Homo sapiens
atgatcctagagagt

SEQ ID NO: 244876 - DNA, 15 bp, Homo sapiens
tatgatcctagagag

SEQ ID NO: 244877 - DNA, 15 bp, Homo sapiens
ttatgatcctagaga

SEQ ID NO: 244878 - DNA, 15 bp, Homo sapiens
gttatgatcctagag

SEQ ID NO: 244879 - DNA, 15 bp, Homo sapiens
tgttatgatcctaga

SEQ ID NO: 244880 - DNA, 15 bp, Homo sapiens
atgttatgatcctag

SEQ ID NO: 244881 - DNA, 15 bp, Homo sapiens
gatgttatgatccta

SEQ ID NO: 244882 - DNA, 15 bp, Homo sapiens
agatgttatgatcct

SEQ ID NO: 244883 - DNA, 15 bp, Homo sapiens
cagatgttatgatcc

SEQ ID NO: 244884 - DNA, 15 bp, Homo sapiens
ccagatgttatgatc

SEQ ID NO: 244885 - DNA, 15 bp, Homo sapiens
tccagatgttatgat

SEQ ID NO: 244886 - DNA, 15 bp, Homo sapiens
ttccagatgttatga

SEQ ID NO: 244887 - DNA, 15 bp, Homo sapiens
attccagatgttatg

SEQ ID NO: 244888 - DNA, 15 bp, Homo sapiens
aattccagatgttat

SEQ ID NO: 244889 - DNA, 15 bp, Homo sapiens
gaattccagatgtta

SEQ ID NO: 244890 - DNA, 15 bp, Homo sapiens
tgaattccagatgtt

SEQ ID NO: 244891 - DNA, 15 bp, Homo sapiens
ctgaattccagatgt

SEQ ID NO: 244892 - DNA, 15 bp, Homo sapiens
actgaattccagatg

SEQ ID NO: 244893 - DNA, 15 bp, Homo sapiens
gactgaattccagat

SEQ ID NO: 244894 - DNA, 15 bp, Homo sapiens
ggactgaattccaga

SEQ ID NO: 244895 - DNA, 15 bp, Homo sapiens
aggactgaattccag

SEQ ID NO: 244896 - DNA, 15 bp, Homo sapiens
caggactgaattcca

SEQ ID NO: 244897 - DNA, 15 bp, Homo sapiens
gcaggactgaattcc

SEQ ID NO: 244898 - DNA, 15 bp, Homo sapiens
agcaggactgaattc

SEQ ID NO: 244899 - DNA, 15 bp, Homo sapiens
aagcaggactgaatt

SEQ ID NO: 244900 - DNA, 15 bp, Homo sapiens
aaagcaggactgaat

SEQ ID NO: 244901 - DNA, 15 bp, Homo sapiens
taaagcaggactgaa

SEQ ID NO: 244902 - DNA, 15 bp, Homo sapiens
ctaaagcaggactga

SEQ ID NO: 244903 - DNA, 15 bp, Homo sapiens
gctaaagcaggactg

SEQ ID NO: 244904 - DNA, 15 bp, Homo sapiens
ggctaaagcaggact

SEQ ID NO: 244905 - DNA, 15 bp, Homo sapiens
tggctaaagcaggac

SEQ ID NO: 244906 - DNA, 15 bp, Homo sapiens
atggctaaagcagga

SEQ ID NO: 244907 - DNA, 15 bp, Homo sapiens
gatggctaaagcagg

SEQ ID NO: 244908 - DNA, 15 bp, Homo sapiens
cgatggctaaagcag

SEQ ID NO: 244909 - DNA, 15 bp, Homo sapiens
acgatggctaaagca

SEQ ID NO: 244910 - DNA, 15 bp, Homo sapiens
gacgatggctaaagc

SEQ ID NO: 244911 - DNA, 15 bp, Homo sapiens
agacgatggctaaag

SEQ ID NO: 244912 - DNA, 15 bp, Homo sapiens
tagacgatggctaaa

SEQ ID NO: 244913 - DNA, 15 bp, Homo sapiens
atagacgatggctaa

SEQ ID NO: 244914 - DNA, 15 bp, Homo sapiens
catagacgatggcta

SEQ ID NO: 244915 - DNA, 15 bp, Homo sapiens
ccatagacgatggct

SEQ ID NO: 244916 - DNA, 15 bp, Homo sapiens
accatagacgatggc

SEQ ID NO: 244917 - DNA, 15 bp, Homo sapiens
taccatagacgatgg

SEQ ID NO: 244918 - DNA, 15 bp, Homo sapiens
ctaccatagacgatg

SEQ ID NO: 244919 - DNA, 15 bp, Homo sapiens
actaccatagacgat

SEQ ID NO: 244920 - DNA, 15 bp, Homo sapiens
tactaccatagacga

SEQ ID NO: 244921 - DNA, 15 bp, Homo sapiens
ttactaccatagacg

SEQ ID NO: 244922 - DNA, 15 bp, Homo sapiens
cttactaccatagac

SEQ ID NO: 244923 - DNA, 15 bp, Homo sapiens
acttactaccataga

SEQ ID NO: 244924 - DNA, 15 bp, Homo sapiens
cacttactaccatag

SEQ ID NO: 244925 - DNA, 15 bp, Homo sapiens
tcacttactaccata

SEQ ID NO: 244926 - DNA, 15 bp, Homo sapiens
atcacttactaccat

SEQ ID NO: 244927 - DNA, 15 bp, Homo sapiens
gatcacttactacca

SEQ ID NO: 244928 - DNA, 15 bp, Homo sapiens
agatcacttactacc

SEQ ID NO: 244929 - DNA, 15 bp, Homo sapiens
aagatcacttactac

SEQ ID NO: 244930 - DNA, 15 bp, Homo sapiens
caagatcacttacta

SEQ ID NO: 244931 - DNA, 15 bp, Homo sapiens
tcaagatcacttact

SEQ ID NO: 244932 - DNA, 15 bp, Homo sapiens
ttcaagatcacttac

SEQ ID NO: 244933 - DNA, 15 bp, Homo sapiens
cttcaagatcactta

SEQ ID NO: 244934 - DNA, 15 bp, Homo sapiens
tcttcaagatcactt

SEQ ID NO: 244935 - DNA, 15 bp, Homo sapiens
ttcttcaagatcact

SEQ ID NO: 244936 - DNA, 15 bp, Homo sapiens
cttcttcaagatcac

SEQ ID NO: 244937 - DNA, 15 bp, Homo sapiens
acttcttcaagatca

SEQ ID NO: 244938 - DNA, 15 bp, Homo sapiens
gacttcttcaagatc

SEQ ID NO: 244939 - DNA, 15 bp, Homo sapiens
tgacttcttcaagat

SEQ ID NO: 244940 - DNA, 15 bp, Homo sapiens
ttgacttcttcaaga

SEQ ID NO: 244941 - DNA, 15 bp, Homo sapiens
gttgacttcttcaag

SEQ ID NO: 244942 - DNA, 15 bp, Homo sapiens
agttgacttcttcaa

SEQ ID NO: 244943 - DNA, 15 bp, Homo sapiens
tagttgacttcttca

SEQ ID NO: 244944 - DNA, 15 bp, Homo sapiens
ttagttgacttcttc

SEQ ID NO: 244945 - DNA, 15 bp, Homo sapiens
tttagttgacttctt

SEQ ID NO: 244946 - DNA, 15 bp, Homo sapiens
ctttagttgacttct

SEQ ID NO: 244947 - DNA, 15 bp, Homo sapiens
gctttagttgacttc

SEQ ID NO: 244948 - DNA, 15 bp, Homo sapiens
ggctttagttgactt

SEQ ID NO: 244949 - DNA, 15 bp, Homo sapiens
aggctttagttgact

SEQ ID NO: 244950 - DNA, 15 bp, Homo sapiens
gaggctttagttgac

SEQ ID NO: 244951 - DNA, 15 bp, Homo sapiens
ggaggctttagttga

SEQ ID NO: 244952 - DNA, 15 bp, Homo sapiens
aggaggctttagttg

SEQ ID NO: 244953 - DNA, 15 bp, Homo sapiens
gaggaggctttagtt

SEQ ID NO: 244954 - DNA, 15 bp, Homo sapiens
agaggaggctttagt

SEQ ID NO: 244955 - DNA, 15 bp, Homo sapiens
aagaggaggctttag

SEQ ID NO: 244956 - DNA, 15 bp, Homo sapiens
gaagaggaggcttta

SEQ ID NO: 244957 - DNA, 15 bp, Homo sapiens
tgaagaggaggcttt

SEQ ID NO: 244958 - DNA, 15 bp, Homo sapiens
ctgaagaggaggctt

SEQ ID NO: 244959 - DNA, 15 bp, Homo sapiens
tctgaagaggaggct

SEQ ID NO: 244960 - DNA, 15 bp, Homo sapiens
ttctgaagaggaggc

SEQ ID NO: 244961 - DNA, 15 bp, Homo sapiens
cttctgaagaggagg

SEQ ID NO: 244962 - DNA, 15 bp, Homo sapiens
ccttctgaagaggag

SEQ ID NO: 244963 - DNA, 15 bp, Homo sapiens
accttctgaagagga

SEQ ID NO: 244964 - DNA, 15 bp, Homo sapiens
gaccttctgaagagg

SEQ ID NO: 244965 - DNA, 15 bp, Homo sapiens
ggaccttctgaagag

SEQ ID NO: 244966 - DNA, 15 bp, Homo sapiens
gggaccttctgaaga

SEQ ID NO: 244967 - DNA, 15 bp, Homo sapiens
ggggaccttctgaag

SEQ ID NO: 244968 - DNA, 15 bp, Homo sapiens
tggggaccttctgaa

SEQ ID NO: 244969 - DNA, 15 bp, Homo sapiens
ctggggaccttctga

SEQ ID NO: 244970 - DNA, 15 bp, Homo sapiens
tctggggaccttctg

SEQ ID NO: 244971 - DNA, 15 bp, Homo sapiens
gtctggggaccttct

SEQ ID NO: 244972 - DNA, 15 bp, Homo sapiens
tgtctggggaccttc

SEQ ID NO: 244973 - DNA, 15 bp, Homo sapiens
ttgtctggggacctt

SEQ ID NO: 244974 - DNA, 15 bp, Homo sapiens
tttgtctggggacct

SEQ ID NO: 244975 - DNA, 15 bp, Homo sapiens
ctttgtctggggacc

SEQ ID NO: 244976 - DNA, 15 bp, Homo sapiens
actttgtctggggac

SEQ ID NO: 244977 - DNA, 15 bp, Homo sapiens
tactttgtctgggga

SEQ ID NO: 244978 - DNA, 15 bp, Homo sapiens
atactttgtctgggg

SEQ ID NO: 244979 - DNA, 15 bp, Homo sapiens
gatactttgtctggg

SEQ ID NO: 244980 - DNA, 15 bp, Homo sapiens
agatactttgtctgg

SEQ ID NO: 244981 - DNA, 15 bp, Homo sapiens
tagatactttgtctg

SEQ ID NO: 244982 - DNA, 15 bp, Homo sapiens
ctagatactttgtct

SEQ ID NO: 244983 - DNA, 15 bp, Homo sapiens
cctagatactttgtc

SEQ ID NO: 244984 - DNA, 15 bp, Homo sapiens
acctagatactttgt

SEQ ID NO: 244985 - DNA, 15 bp, Homo sapiens
aacctagatactttg

SEQ ID NO: 244986 - DNA, 15 bp, Homo sapiens
caacctagatacttt

SEQ ID NO: 244987 - DNA, 15 bp, Homo sapiens
gcaacctagatactt

SEQ ID NO: 244988 - DNA, 15 bp, Homo sapiens
agcaacctagatact

SEQ ID NO: 244989 - DNA, 15 bp, Homo sapiens
cagcaacctagatac

SEQ ID NO: 244990 - DNA, 15 bp, Homo sapiens
tcagcaacctagata

SEQ ID NO: 244991 - DNA, 15 bp, Homo sapiens
ttcagcaacctagat

SEQ ID NO: 244992 - DNA, 15 bp, Homo sapiens
cttcagcaacctaga

SEQ ID NO: 244993 - DNA, 15 bp, Homo sapiens
ccttcagcaacctag

SEQ ID NO: 244994 - DNA, 15 bp, Homo sapiens
gccttcagcaaccta

SEQ ID NO: 244995 - DNA, 15 bp, Homo sapiens
agccttcagcaacct

SEQ ID NO: 244996 - DNA, 15 bp, Homo sapiens
aagccttcagcaacc

SEQ ID NO: 244997 - DNA, 15 bp, Homo sapiens
caagccttcagcaac

SEQ ID NO: 244998 - DNA, 15 bp, Homo sapiens
ccaagccttcagcaa

SEQ ID NO: 244999 - DNA, 15 bp, Homo sapiens
cccaagccttcagca

SEQ ID NO: 245000 - DNA, 15 bp, Homo sapiens
tcccaagccttcagc

SEQ ID NO: 245001 - DNA, 15 bp, Homo sapiens
ctcccaagccttcag

SEQ ID NO: 245002 - DNA, 15 bp, Homo sapiens
actcccaagccttca

SEQ ID NO: 245003 - DNA, 15 bp, Homo sapiens
cactcccaagccttc

SEQ ID NO: 245004 - DNA, 15 bp, Homo sapiens
ccactcccaagcctt

SEQ ID NO: 245005 - DNA, 15 bp, Homo sapiens
tccactcccaagcct

SEQ ID NO: 245006 - DNA, 15 bp, Homo sapiens
ctccactcccaagcc

SEQ ID NO: 245007 - DNA, 15 bp, Homo sapiens
cctccactcccaagc

SEQ ID NO: 245008 - DNA, 15 bp, Homo sapiens
tcctccactcccaag

SEQ ID NO: 245009 - DNA, 15 bp, Homo sapiens
atcctccactcccaa

SEQ ID NO: 245010 - DNA, 15 bp, Homo sapiens
catcctccactccca

SEQ ID NO: 245011 - DNA, 15 bp, Homo sapiens
gcatcctccactccc

SEQ ID NO: 245012 - DNA, 15 bp, Homo sapiens
tgcatcctccactcc

SEQ ID NO: 245013 - DNA, 15 bp, Homo sapiens
gtgcatcctccactc

SEQ ID NO: 245014 - DNA, 15 bp, Homo sapiens
tgtgcatcctccact

SEQ ID NO: 245015 - DNA, 15 bp, Homo sapiens
atgtgcatcctccac

SEQ ID NO: 245016 - DNA, 15 bp, Homo sapiens
catgtgcatcctcca

SEQ ID NO: 245017 - DNA, 15 bp, Homo sapiens
tcatgtgcatcctcc

SEQ ID NO: 245018 - DNA, 15 bp, Homo sapiens
ttcatgtgcatcctc

SEQ ID NO: 245019 - DNA, 15 bp, Homo sapiens
attcatgtgcatcct

SEQ ID NO: 245020 - DNA, 15 bp, Homo sapiens
aattcatgtgcatcc

SEQ ID NO: 245021 - DNA, 15 bp, Homo sapiens
caattcatgtgcatc

SEQ ID NO: 245022 - DNA, 15 bp, Homo sapiens
gcaattcatgtgcat

SEQ ID NO: 245023 - DNA, 15 bp, Homo sapiens
ggcaattcatgtgca

SEQ ID NO: 245024 - DNA, 15 bp, Homo sapiens
tggcaattcatgtgc

SEQ ID NO: 245025 - DNA, 15 bp, Homo sapiens
atggcaattcatgtg

SEQ ID NO: 245026 - DNA, 15 bp, Homo sapiens
aatggcaattcatgt

SEQ ID NO: 245027 - DNA, 15 bp, Homo sapiens
caatggcaattcatg

SEQ ID NO: 245028 - DNA, 15 bp, Homo sapiens
gcaatggcaattcat

SEQ ID NO: 245029 - DNA, 15 bp, Homo sapiens
ggcaatggcaattca

SEQ ID NO: 245030 - DNA, 15 bp, Homo sapiens
aggcaatggcaattc

SEQ ID NO: 245031 - DNA, 15 bp, Homo sapiens
caggcaatggcaatt

SEQ ID NO: 245032 - DNA, 15 bp, Homo sapiens
acaggcaatggcaat

SEQ ID NO: 245033 - DNA, 15 bp, Homo sapiens
gacaggcaatggcaa

SEQ ID NO: 245034 - DNA, 15 bp, Homo sapiens
agacaggcaatggca

SEQ ID NO: 245035 - DNA, 15 bp, Homo sapiens
aagacaggcaatggc

SEQ ID NO: 245036 - DNA, 15 bp, Homo sapiens
caagacaggcaatgg

SEQ ID NO: 245037 - DNA, 15 bp, Homo sapiens
ccaagacaggcaatg

SEQ ID NO: 245038 - DNA, 15 bp, Homo sapiens
cccaagacaggcaat

SEQ ID NO: 245039 - DNA, 15 bp, Homo sapiens
acccaagacaggcaa

SEQ ID NO: 245040 - DNA, 15 bp, Homo sapiens
aacccaagacaggca

SEQ ID NO: 245041 - DNA, 15 bp, Homo sapiens
caacccaagacaggc

SEQ ID NO: 245042 - DNA, 15 bp, Homo sapiens
ccaacccaagacagg

SEQ ID NO: 245043 - DNA, 15 bp, Homo sapiens
cccaacccaagacag

SEQ ID NO: 245044 - DNA, 15 bp, Homo sapiens
acccaacccaagaca

SEQ ID NO: 245045 - DNA, 15 bp, Homo sapiens
aacccaacccaagac

SEQ ID NO: 245046 - DNA, 15 bp, Homo sapiens
caacccaacccaaga

SEQ ID NO: 245047 - DNA, 15 bp, Homo sapiens
acaacccaacccaag

SEQ ID NO: 245048 - DNA, 15 bp, Homo sapiens
cacaacccaacccaa

SEQ ID NO: 245049 - DNA, 15 bp, Homo sapiens
ccacaacccaaccca

SEQ ID NO: 245050 - DNA, 15 bp, Homo sapiens
taccacaacccaacc

SEQ ID NO: 245051 - DNA, 15 bp, Homo sapiens
gtaccacaacccaac

SEQ ID NO: 245052 - DNA, 15 bp, Homo sapiens
agtaccacaacccaa

SEQ ID NO: 245053 - DNA, 15 bp, Homo sapiens
aagtaccacaaccca

SEQ ID NO: 245054 - DNA, 15 bp, Homo sapiens
aaagtaccacaaccc

SEQ ID NO: 245055 - DNA, 15 bp, Homo sapiens
aaaagtaccacaacc

SEQ ID NO: 245056 - DNA, 15 bp, Homo sapiens
caaaagtaccacaac

SEQ ID NO: 245057 - DNA, 15 bp, Homo sapiens
tcaaaagtaccacaa

SEQ ID NO: 245058 - DNA, 15 bp, Homo sapiens
ttcaaaagtaccaca

SEQ ID NO: 245059 - DNA, 15 bp, Homo sapiens
cttcaaaagtaccac

SEQ ID NO: 245060 - DNA, 15 bp, Homo sapiens
ccttcaaaagtacca

SEQ ID NO: 245061 - DNA, 15 bp, Homo sapiens
tccttcaaaagtacc

SEQ ID NO: 245062 - DNA, 15 bp, Homo sapiens
ctccttcaaaagtac

SEQ ID NO: 245063 - DNA, 15 bp, Homo sapiens
tctccttcaaaagta

SEQ ID NO: 245064 - DNA, 15 bp, Homo sapiens
gtctccttcaaaagt

SEQ ID NO: 245065 - DNA, 15 bp, Homo sapiens
tgtctccttcaaaag

SEQ ID NO: 245066 - DNA, 15 bp, Homo sapiens
ctgtctccttcaaaa

SEQ ID NO: 245067 - DNA, 15 bp, Homo sapiens
actgtctccttcaaa

SEQ ID NO: 245068 - DNA, 15 bp, Homo sapiens
cactgtctccttcaa

SEQ ID NO: 245069 - DNA, 15 bp, Homo sapiens
tcactgtctccttca

SEQ ID NO: 245070 - DNA, 15 bp, Homo sapiens
gtcactgtctccttc

SEQ ID NO: 245071 - DNA, 15 bp, Homo sapiens
tgtcactgtctcctt

SEQ ID NO: 245072 - DNA, 15 bp, Homo sapiens
ttgtcactgtctcct

SEQ ID NO: 245073 - DNA, 15 bp, Homo sapiens
cttgtcactgtctcc

SEQ ID NO: 245074 - DNA, 15 bp, Homo sapiens
ccttgtcactgtctc

SEQ ID NO: 245075 - DNA, 15 bp, Homo sapiens
accttgtcactgtct

SEQ ID NO: 245076 - DNA, 15 bp, Homo sapiens
caccttgtcactgtc

SEQ ID NO: 245077 - DNA, 15 bp, Homo sapiens
ccaccttgtcactgt

SEQ ID NO: 245078 - DNA, 15 bp, Homo sapiens
gccaccttgtcactg

SEQ ID NO: 245079 - DNA, 15 bp, Homo sapiens
agccaccttgtcact

SEQ ID NO: 245080 - DNA, 15 bp, Homo sapiens
aagccaccttgtcac

SEQ ID NO: 245081 - DNA, 15 bp, Homo sapiens
aaagccaccttgtca

SEQ ID NO: 245082 - DNA, 15 bp, Homo sapiens
caaagccaccttgtc

SEQ ID NO: 245083 - DNA, 15 bp, Homo sapiens
acaaagccaccttgt

SEQ ID NO: 245084 - DNA, 15 bp, Homo sapiens
aacaaagccaccttg

SEQ ID NO: 245085 - DNA, 15 bp, Homo sapiens
aaacaaagccacctt

SEQ ID NO: 245086 - DNA, 15 bp, Homo sapiens
gaaacaaagccacct

SEQ ID NO: 245087 - DNA, 15 bp, Homo sapiens
ggaaacaaagccacc

SEQ ID NO: 245088 - DNA, 15 bp, Homo sapiens
aggaaacaaagccac

SEQ ID NO: 245089 - DNA, 15 bp, Homo sapiens
taggaaacaaagcca

SEQ ID NO: 245090 - DNA, 15 bp, Homo sapiens
ctaggaaacaaagcc

SEQ ID NO: 245091 - DNA, 15 bp, Homo sapiens
cctaggaaacaaagc

SEQ ID NO: 245092 - DNA, 15 bp, Homo sapiens
ccctaggaaacaaag

SEQ ID NO: 245093 - DNA, 15 bp, Homo sapiens
accctaggaaacaaa

SEQ ID NO: 245094 - DNA, 15 bp, Homo sapiens
caccctaggaaacaa

SEQ ID NO: 245095 - DNA, 15 bp, Homo sapiens
ccaccctaggaaaca

SEQ ID NO: 245096 - DNA, 15 bp, Homo sapiens
cccaccctaggaaac

SEQ ID NO: 245097 - DNA, 15 bp, Homo sapiens
ccccaccctaggaaa

SEQ ID NO: 245098 - DNA, 15 bp, Homo sapiens
accccaccctaggaa

SEQ ID NO: 245099 - DNA, 15 bp, Homo sapiens
caccccaccctagga

SEQ ID NO: 245100 - DNA, 15 bp, Homo sapiens
gcaccccaccctagg

SEQ ID NO: 245101 - DNA, 15 bp, Homo sapiens
agcaccccaccctag

SEQ ID NO: 245102 - DNA, 15 bp, Homo sapiens
tagcaccccacccta

SEQ ID NO: 245103 - DNA, 15 bp, Homo sapiens
ctagcaccccaccct

SEQ ID NO: 245104 - DNA, 15 bp, Homo sapiens
tctagcaccccaccc

SEQ ID NO: 245105 - DNA, 15 bp, Homo sapiens
ctctagcaccccacc

SEQ ID NO: 245106 - DNA, 15 bp, Homo sapiens
tctctagcaccccac

SEQ ID NO: 245107 - DNA, 15 bp, Homo sapiens
ctctctagcacccca

SEQ ID NO: 245108 - DNA, 15 bp, Homo sapiens
actctctagcacccc

SEQ ID NO: 245109 - DNA, 15 bp, Homo sapiens
cactctctagcaccc

SEQ ID NO: 245110 - DNA, 15 bp, Homo sapiens
tcactctctagcacc

SEQ ID NO: 245111 - DNA, 15 bp, Homo sapiens
ctcactctctagcac

SEQ ID NO: 245112 - DNA, 15 bp, Homo sapiens
tctcactctctagca

SEQ ID NO: 245113 - DNA, 15 bp, Homo sapiens
atctcactctctagc

SEQ ID NO: 245114 - DNA, 15 bp, Homo sapiens
aatctcactctctag

SEQ ID NO: 245115 - DNA, 15 bp, Homo sapiens
caatctcactctcta

SEQ ID NO: 245116 - DNA, 15 bp, Homo sapiens
acaatctcactctct

SEQ ID NO: 245117 - DNA, 15 bp, Homo sapiens
cacaatctcactctc

SEQ ID NO: 245118 - DNA, 15 bp, Homo sapiens
tcacaatctcactct

SEQ ID NO: 245119 - DNA, 15 bp, Homo sapiens
atcacaatctcactc

SEQ ID NO: 245120 - DNA, 15 bp, Homo sapiens
catcacaatctcact

SEQ ID NO: 245121 - DNA, 15 bp, Homo sapiens
gcatcacaatctcac

SEQ ID NO: 245122 - DNA, 15 bp, Homo sapiens
agcatcacaatctca

SEQ ID NO: 245123 - DNA, 15 bp, Homo sapiens
aagcatcacaatctc

SEQ ID NO: 245124 - DNA, 15 bp, Homo sapiens
caagcatcacaatct

SEQ ID NO: 245125 - DNA, 15 bp, Homo sapiens
acaagcatcacaatc

SEQ ID NO: 245126 - DNA, 15 bp, Homo sapiens
gacaagcatcacaat

SEQ ID NO: 245127 - DNA, 15 bp, Homo sapiens
tgacaagcatcacaa

SEQ ID NO: 245128 - DNA, 15 bp, Homo sapiens
atgacaagcatcaca

SEQ ID NO: 245129 - DNA, 15 bp, Homo sapiens
aatgacaagcatcac

SEQ ID NO: 245130 - DNA, 15 bp, Homo sapiens
aaatgacaagcatca

SEQ ID NO: 245131 - DNA, 15 bp, Homo sapiens
caaatgacaagcatc

SEQ ID NO: 245132 - DNA, 15 bp, Homo sapiens
ccaaatgacaagcat

SEQ ID NO: 245133 - DNA, 15 bp, Homo sapiens
accaaatgacaagca

SEQ ID NO: 245134 - DNA, 15 bp, Homo sapiens
gaccaaatgacaagc

SEQ ID NO: 245135 - DNA, 15 bp, Homo sapiens
ggaccaaatgacaag

SEQ ID NO: 245136 - DNA, 15 bp, Homo sapiens
tggaccaaatgacaa

SEQ ID NO: 245137 - DNA, 15 bp, Homo sapiens
ttggaccaaatgaca

SEQ ID NO: 245138 - DNA, 15 bp, Homo sapiens
attggaccaaatgac

SEQ ID NO: 245139 - DNA, 15 bp, Homo sapiens
aattggaccaaatga

SEQ ID NO: 245140 - DNA, 15 bp, Homo sapiens
caattggaccaaatg

SEQ ID NO: 245141 - DNA, 15 bp, Homo sapiens
gcaattggaccaaat

SEQ ID NO: 245142 - DNA, 15 bp, Homo sapiens
agcaattggaccaaa

SEQ ID NO: 245143 - DNA, 15 bp, Homo sapiens
tagcaattggaccaa

SEQ ID NO: 245144 - DNA, 15 bp, Homo sapiens
gtagcaattggacca

SEQ ID NO: 245145 - DNA, 15 bp, Homo sapiens
agtagcaattggacc

SEQ ID NO: 245146 - DNA, 15 bp, Homo sapiens
cagtagcaattggac

SEQ ID NO: 245147 - DNA, 15 bp, Homo sapiens
gcagtagcaattgga

SEQ ID NO: 245148 - DNA, 15 bp, Homo sapiens
agcagtagcaattgg

SEQ ID NO: 245149 - DNA, 15 bp, Homo sapiens
aagcagtagcaattg

SEQ ID NO: 245150 - DNA, 15 bp, Homo sapiens
aaagcagtagcaatt

SEQ ID NO: 245151 - DNA, 15 bp, Homo sapiens
gaaagcagtagcaat

SEQ ID NO: 245152 - DNA, 15 bp, Homo sapiens
tgaaagcagtagcaa

SEQ ID NO: 245153 - DNA, 15 bp, Homo sapiens
ctgaaagcagtagca

SEQ ID NO: 245154 - DNA, 15 bp, Homo sapiens
actgaaagcagtagc

SEQ ID NO: 245155 - DNA, 15 bp, Homo sapiens
aactgaaagcagtag

SEQ ID NO: 245156 - DNA, 15 bp, Homo sapiens
caactgaaagcagta

SEQ ID NO: 245157 - DNA, 15 bp, Homo sapiens
tcaactgaaagcagt

SEQ ID NO: 245158 - DNA, 15 bp, Homo sapiens
ctcaactgaaagcag

SEQ ID NO: 245159 - DNA, 15 bp, Homo sapiens
gctcaactgaaagca

SEQ ID NO: 245160 - DNA, 15 bp, Homo sapiens
tgctcaactgaaagc

SEQ ID NO: 245161 - DNA, 15 bp, Homo sapiens
gtgctcaactgaaag

SEQ ID NO: 245162 - DNA, 15 bp, Homo sapiens
agtgctcaactgaaa

SEQ ID NO: 245163 - DNA, 15 bp, Homo sapiens
cagtgctcaactgaa

SEQ ID NO: 245164 - DNA, 15 bp, Homo sapiens
ccagtgctcaactga

SEQ ID NO: 245165 - DNA, 15 bp, Homo sapiens
accagtgctcaactg

SEQ ID NO: 245166 - DNA, 15 bp, Homo sapiens
caccagtgctcaact

SEQ ID NO: 245167 - DNA, 15 bp, Homo sapiens
tcaccagtgctcaac

SEQ ID NO: 245168 - DNA, 15 bp, Homo sapiens
ctcaccagtgctcaa

SEQ ID NO: 245169 - DNA, 15 bp, Homo sapiens
cctcaccagtgctca

SEQ ID NO: 245170 - DNA, 15 bp, Homo sapiens
tcctcaccagtgctc

SEQ ID NO: 245171 - DNA, 15 bp, Homo sapiens
ttcctcaccagtgct

SEQ ID NO: 245172 - DNA, 15 bp, Homo sapiens
gttcctcaccagtgc

SEQ ID NO: 245173 - DNA, 15 bp, Homo sapiens
ggttcctcaccagtg

SEQ ID NO: 245174 - DNA, 15 bp, Homo sapiens
aggttcctcaccagt

SEQ ID NO: 245175 - DNA, 15 bp, Homo sapiens
aaggttcctcaccag

SEQ ID NO: 245176 - DNA, 15 bp, Homo sapiens
taaggttcctcacca

SEQ ID NO: 245177 - DNA, 15 bp, Homo sapiens
ctaaggttcctcacc

SEQ ID NO: 245178 - DNA, 15 bp, Homo sapiens
actaaggttcctcac

SEQ ID NO: 245179 - DNA, 15 bp, Homo sapiens
aactaaggttcctca

SEQ ID NO: 245180 - DNA, 15 bp, Homo sapiens
caactaaggttcctc

SEQ ID NO: 245181 - DNA, 15 bp, Homo sapiens
tcaactaaggttcct

SEQ ID NO: 245182 - DNA, 15 bp, Homo sapiens
atcaactaaggttcc

SEQ ID NO: 245183 - DNA, 15 bp, Homo sapiens
aatcaactaaggttc

SEQ ID NO: 245184 - DNA, 15 bp, Homo sapiens
gaatcaactaaggtt

SEQ ID NO: 245185 - DNA, 15 bp, Homo sapiens
agaatcaactaaggt

SEQ ID NO: 245186 - DNA, 15 bp, Homo sapiens
aagaatcaactaagg

SEQ ID NO: 245187 - DNA, 15 bp, Homo sapiens
gaagaatcaactaag

SEQ ID NO: 245188 - DNA, 15 bp, Homo sapiens
agaagaatcaactaa

SEQ ID NO: 245189 - DNA, 15 bp, Homo sapiens
tagaagaatcaacta

SEQ ID NO: 245190 - DNA, 15 bp, Homo sapiens
atagaagaatcaact

SEQ ID NO: 245191 - DNA, 15 bp, Homo sapiens
catagaagaatcaac

SEQ ID NO: 245192 - DNA, 15 bp, Homo sapiens
acatagaagaatcaa

SEQ ID NO: 245193 - DNA, 15 bp, Homo sapiens
tacatagaagaatca

SEQ ID NO: 245194 - DNA, 15 bp, Homo sapiens
ttacatagaagaatc

SEQ ID NO: 245195 - DNA, 15 bp, Homo sapiens
tttacatagaagaat

SEQ ID NO: 245196 - DNA, 15 bp, Homo sapiens
atttacatagaagaa

SEQ ID NO: 245197 - DNA, 15 bp, Homo sapiens
catttacatagaaga

SEQ ID NO: 245198 - DNA, 15 bp, Homo sapiens
ccatttacatagaag

SEQ ID NO: 245199 - DNA, 15 bp, Homo sapiens
gccatttacatagaa

SEQ ID NO: 245200 - DNA, 15 bp, Homo sapiens
agccatttacataga

SEQ ID NO: 245201 - DNA, 15 bp, Homo sapiens
gagccatttacatag

SEQ ID NO: 245202 - DNA, 15 bp, Homo sapiens
agagccatttacata

SEQ ID NO: 245203 - DNA, 15 bp, Homo sapiens
aagagccatttacat

SEQ ID NO: 245204 - DNA, 15 bp, Homo sapiens
caagagccatttaca

SEQ ID NO: 245205 - DNA, 15 bp, Homo sapiens
gcaagagccatttac

SEQ ID NO: 245206 - DNA, 15 bp, Homo sapiens
tgcaagagccattta

SEQ ID NO: 245207 - DNA, 15 bp, Homo sapiens
gtgcaagagccattt

SEQ ID NO: 245208 - DNA, 15 bp, Homo sapiens
ggtgcaagagccatt

SEQ ID NO: 245209 - DNA, 15 bp, Homo sapiens
aggtgcaagagccat

SEQ ID NO: 245210 - DNA, 15 bp, Homo sapiens
gaggtgcaagagcca

SEQ ID NO: 245211 - DNA, 15 bp, Homo sapiens
tgaggtgcaagagcc

SEQ ID NO: 245212 - DNA, 15 bp, Homo sapiens
ttgaggtgcaagagc

SEQ ID NO: 245213 - DNA, 15 bp, Homo sapiens
attgaggtgcaagag

SEQ ID NO: 245214 - DNA, 15 bp, Homo sapiens
aattgaggtgcaaga

SEQ ID NO: 245215 - DNA, 15 bp, Homo sapiens
aaattgaggtgcaag

SEQ ID NO: 245216 - DNA, 15 bp, Homo sapiens
aaaattgaggtgcaa

SEQ ID NO: 245217 - DNA, 15 bp, Homo sapiens
gaaaattgaggtgca

SEQ ID NO: 245218 - DNA, 15 bp, Homo sapiens
agaaaattgaggtgc

SEQ ID NO: 245219 - DNA, 15 bp, Homo sapiens
aagaaaattgaggtg

SEQ ID NO: 245220 - DNA, 15 bp, Homo sapiens
caagaaaattgaggt

SEQ ID NO: 245221 - DNA, 15 bp, Homo sapiens
ccaagaaaattgagg

SEQ ID NO: 245222 - DNA, 15 bp, Homo sapiens
gccaagaaaattgag

SEQ ID NO: 245223 - DNA, 15 bp, Homo sapiens
tgccaagaaaattga

SEQ ID NO: 245224 - DNA, 15 bp, Homo sapiens
ttgccaagaaaattg

SEQ ID NO: 245225 - DNA, 15 bp, Homo sapiens
attgccaagaaaatt

SEQ ID NO: 245226 - DNA, 15 bp, Homo sapiens
aattgccaagaaaat

SEQ ID NO: 245227 - DNA, 15 bp, Homo sapiens
taattgccaagaaaa

SEQ ID NO: 245228 - DNA, 15 bp, Homo sapiens
gtaattgccaagaaa

SEQ ID NO: 245229 - DNA, 15 bp, Homo sapiens
agtaattgccaagaa

SEQ ID NO: 245230 - DNA, 15 bp, Homo sapiens
gagtaattgccaaga

SEQ ID NO: 245231 - DNA, 15 bp, Homo sapiens
ggagtaattgccaag

SEQ ID NO: 245232 - DNA, 15 bp, Homo sapiens
gggagtaattgccaa

SEQ ID NO: 245233 - DNA, 15 bp, Homo sapiens
ggggagtaattgcca

SEQ ID NO: 245234 - DNA, 15 bp, Homo sapiens
tggggagtaattgcc

SEQ ID NO: 245235 - DNA, 15 bp, Homo sapiens
ctggggagtaattgc

SEQ ID NO: 245236 - DNA, 15 bp, Homo sapiens
gctggggagtaattg

SEQ ID NO: 245237 - DNA, 15 bp, Homo sapiens
agctggggagtaatt

SEQ ID NO: 245238 - DNA, 15 bp, Homo sapiens
cagctggggagtaat

SEQ ID NO: 245239 - DNA, 15 bp, Homo sapiens
acagctggggagtaa

SEQ ID NO: 245240 - DNA, 15 bp, Homo sapiens
cacagctggggagta

SEQ ID NO: 245241 - DNA, 15 bp, Homo sapiens
gcacagctggggagt

SEQ ID NO: 245242 - DNA, 15 bp, Homo sapiens
ggcacagctggggag

SEQ ID NO: 245243 - DNA, 15 bp, Homo sapiens
gggcacagctgggga

SEQ ID NO: 245244 - DNA, 15 bp, Homo sapiens
agggcacagctgggg

SEQ ID NO: 245245 - DNA, 15 bp, Homo sapiens
aagggcacagctggg

SEQ ID NO: 245246 - DNA, 15 bp, Homo sapiens
gaagggcacagctgg

SEQ ID NO: 245247 - DNA, 15 bp, Homo sapiens
agaagggcacagctg

SEQ ID NO: 245248 - DNA, 15 bp, Homo sapiens
aagaagggcacagct

SEQ ID NO: 245249 - DNA, 15 bp, Homo sapiens
caagaagggcacagc

SEQ ID NO: 245250 - DNA, 15 bp, Homo sapiens
gcaagaagggcacag

SEQ ID NO: 245251 - DNA, 15 bp, Homo sapiens
agcaagaagggcaca

SEQ ID NO: 245252 - DNA, 15 bp, Homo sapiens
cagcaagaagggcac

SEQ ID NO: 245253 - DNA, 15 bp, Homo sapiens
gcagcaagaagggca

SEQ ID NO: 245254 - DNA, 15 bp, Homo sapiens
tgcagcaagaagggc

SEQ ID NO: 245255 - DNA, 15 bp, Homo sapiens
atgcagcaagaaggg

SEQ ID NO: 245256 - DNA, 15 bp, Homo sapiens
tatgcagcaagaagg

SEQ ID NO: 245257 - DNA, 15 bp, Homo sapiens
ttatgcagcaagaag

SEQ ID NO: 245258 - DNA, 15 bp, Homo sapiens
tttatgcagcaagaa

SEQ ID NO: 245259 - DNA, 15 bp, Homo sapiens
ttttatgcagcaaga

SEQ ID NO: 245260 - DNA, 15 bp, Homo sapiens
gttttatgcagcaag

SEQ ID NO: 245261 - DNA, 15 bp, Homo sapiens
ggttttatgcagcaa

SEQ ID NO: 245262 - DNA, 15 bp, Homo sapiens
aggttttatgcagca

SEQ ID NO: 245263 - DNA, 15 bp, Homo sapiens
gaggttttatgcagc

SEQ ID NO: 245264 - DNA, 15 bp, Homo sapiens
tgaggttttatgcag

SEQ ID NO: 245265 - DNA, 15 bp, Homo sapiens
ttgaggttttatgca

SEQ ID NO: 245266 - DNA, 15 bp, Homo sapiens
attgaggttttatgc

SEQ ID NO: 245267 - DNA, 15 bp, Homo sapiens
gattgaggttttatg

SEQ ID NO: 245268 - DNA, 15 bp, Homo sapiens
tgattgaggttttat

SEQ ID NO: 245269 - DNA, 15 bp, Homo sapiens
ttgattgaggtttta

SEQ ID NO: 245270 - DNA, 15 bp, Homo sapiens
attgattgaggtttt

SEQ ID NO: 245271 - DNA, 15 bp, Homo sapiens
gattgattgaggttt

SEQ ID NO: 245272 - DNA, 15 bp, Homo sapiens
ggattgattgaggtt

SEQ ID NO: 245273 - DNA, 15 bp, Homo sapiens
aggattgattgaggt

SEQ ID NO: 245274 - DNA, 15 bp, Homo sapiens
aaggattgattgagg

SEQ ID NO: 245275 - DNA, 15 bp, Homo sapiens
gaaggattgattgag

SEQ ID NO: 245276 - DNA, 15 bp, Homo sapiens
tgaaggattgattga

SEQ ID NO: 245277 - DNA, 15 bp, Homo sapiens
atgaaggattgattg

SEQ ID NO: 245278 - DNA, 15 bp, Homo sapiens
aatgaaggattgatt

SEQ ID NO: 245279 - DNA, 15 bp, Homo sapiens
taatgaaggattgat

SEQ ID NO: 245280 - DNA, 15 bp, Homo sapiens
ttaatgaaggattga

SEQ ID NO: 245281 - DNA, 15 bp, Homo sapiens
tttaatgaaggattg

SEQ ID NO: 245282 - DNA, 15 bp, Homo sapiens
ttttaatgaaggatt

SEQ ID NO: 245283 - DNA, 15 bp, Homo sapiens
attttaatgaaggat

SEQ ID NO: 245284 - DNA, 15 bp, Homo sapiens
cattttaatgaagga

SEQ ID NO: 245285 - DNA, 15 bp, Homo sapiens
gcattttaatgaagg

SEQ ID NO: 245286 - DNA, 15 bp, Homo sapiens
agcattttaatgaag

SEQ ID NO: 245287 - DNA, 15 bp, Homo sapiens
tagcattttaatgaa

SEQ ID NO: 245288 - DNA, 15 bp, Homo sapiens
gtagcattttaatga

SEQ ID NO: 245289 - DNA, 15 bp, Homo sapiens
tgtagcattttaatg

SEQ ID NO: 245290 - DNA, 15 bp, Homo sapiens
ctgtagcattttaat

SEQ ID NO: 245291 - DNA, 15 bp, Homo sapiens
tctgtagcattttaa

SEQ ID NO: 245292 - DNA, 15 bp, Homo sapiens
ttctgtagcatttta

SEQ ID NO: 245293 - DNA, 15 bp, Homo sapiens
tttctgtagcatttt

SEQ ID NO: 245294 - DNA, 15 bp, Homo sapiens
gtttctgtagcattt

SEQ ID NO: 245295 - DNA, 15 bp, Homo sapiens
agtttctgtagcatt

SEQ ID NO: 245296 - DNA, 15 bp, Homo sapiens
cagtttctgtagcat

SEQ ID NO: 245297 - DNA, 15 bp, Homo sapiens
tcagtttctgtagca

SEQ ID NO: 245298 - DNA, 15 bp, Homo sapiens
ttcagtttctgtagc

SEQ ID NO: 245299 - DNA, 15 bp, Homo sapiens
tttcagtttctgtag

SEQ ID NO: 245300 - DNA, 15 bp, Homo sapiens
ctttcagtttctgta

SEQ ID NO: 245301 - DNA, 15 bp, Homo sapiens
gctttcagtttctgt

SEQ ID NO: 245302 - DNA, 15 bp, Homo sapiens
agctttcagtttctg

SEQ ID NO: 245303 - DNA, 15 bp, Homo sapiens
aagctttcagtttct

SEQ ID NO: 245304 - DNA, 15 bp, Homo sapiens
aaagctttcagtttc

SEQ ID NO: 245305 - DNA, 15 bp, Homo sapiens
aaaagctttcagttt

SEQ ID NO: 245306 - DNA, 15 bp, Homo sapiens
gaaaagctttcagtt

SEQ ID NO: 245307 - DNA, 15 bp, Homo sapiens
ggaaaagctttcagt

SEQ ID NO: 245308 - DNA, 15 bp, Homo sapiens
gggaaaagctttcag

SEQ ID NO: 245309 - DNA, 15 bp, Homo sapiens
ggggaaaagctttca

SEQ ID NO: 245310 - DNA, 15 bp, Homo sapiens
gggggaaaagctttc

SEQ ID NO: 245311 - DNA, 15 bp, Homo sapiens
agggggaaaagcttt

SEQ ID NO: 245312 - DNA, 15 bp, Homo sapiens
aagggggaaaagctt

SEQ ID NO: 245313 - DNA, 15 bp, Homo sapiens
caagggggaaaagct

SEQ ID NO: 245314 - DNA, 15 bp, Homo sapiens
acaagggggaaaagc

SEQ ID NO: 245315 - DNA, 15 bp, Homo sapiens
aacaagggggaaaag

SEQ ID NO: 245316 - DNA, 15 bp, Homo sapiens
aaacaagggggaaaa

SEQ ID NO: 245317 - DNA, 15 bp, Homo sapiens
gaaacaagggggaaa

SEQ ID NO: 245318 - DNA, 15 bp, Homo sapiens
ggaaacaagggggaa

SEQ ID NO: 245319 - DNA, 15 bp, Homo sapiens
aggaaacaaggggga

SEQ ID NO: 245320 - DNA, 15 bp, Homo sapiens
taggaaacaaggggg

SEQ ID NO: 245321 - DNA, 15 bp, Homo sapiens
ttaggaaacaagggg

SEQ ID NO: 245322 - DNA, 15 bp, Homo sapiens
attaggaaacaaggg

SEQ ID NO: 245323 - DNA, 15 bp, Homo sapiens
aattaggaaacaagg

SEQ ID NO: 245324 - DNA, 15 bp, Homo sapiens
aaattaggaaacaag

SEQ ID NO: 245325 - DNA, 15 bp, Homo sapiens
aaaattaggaaacaa

SEQ ID NO: 245326 - DNA, 15 bp, Homo sapiens
aaaaattaggaaaca

SEQ ID NO: 245327 - DNA, 15 bp, Homo sapiens
gaaaaattaggaaac

SEQ ID NO: 245328 - DNA, 15 bp, Homo sapiens
ggaaaaattaggaaa

SEQ ID NO: 245329 - DNA, 15 bp, Homo sapiens
gggaaaaattaggaa

SEQ ID NO: 245330 - DNA, 15 bp, Homo sapiens
ggggaaaaattagga

SEQ ID NO: 245331 - DNA, 15 bp, Homo sapiens
cggggaaaaattagg

SEQ ID NO: 245332 - DNA, 15 bp, Homo sapiens
tcggggaaaaattag

SEQ ID NO: 245333 - DNA, 15 bp, Homo sapiens
ctcggggaaaaatta

SEQ ID NO: 245334 - DNA, 15 bp, Homo sapiens
actcggggaaaaatt

SEQ ID NO: 245335 - DNA, 15 bp, Homo sapiens
cactcggggaaaaat

SEQ ID NO: 245336 - DNA, 15 bp, Homo sapiens
ccactcggggaaaaa

SEQ ID NO: 245337 - DNA, 15 bp, Homo sapiens
tccactcggggaaaa

SEQ ID NO: 245338 - DNA, 15 bp, Homo sapiens
atccactcggggaaa

SEQ ID NO: 245339 - DNA, 15 bp, Homo sapiens
aatccactcggggaa

SEQ ID NO: 245340 - DNA, 15 bp, Homo sapiens
caatccactcgggga

SEQ ID NO: 245341 - DNA, 15 bp, Homo sapiens
ccaatccactcgggg

SEQ ID NO: 245342 - DNA, 15 bp, Homo sapiens
tccaatccactcggg

SEQ ID NO: 245343 - DNA, 15 bp, Homo sapiens
atccaatccactcgg

SEQ ID NO: 245344 - DNA, 15 bp, Homo sapiens
aatccaatccactcg

SEQ ID NO: 245345 - DNA, 15 bp, Homo sapiens
aaatccaatccactc

SEQ ID NO: 245346 - DNA, 15 bp, Homo sapiens
caaatccaatccact

SEQ ID NO: 245347 - DNA, 15 bp, Homo sapiens
acaaatccaatccac

SEQ ID NO: 245348 - DNA, 15 bp, Homo sapiens
aacaaatccaatcca

SEQ ID NO: 245349 - DNA, 15 bp, Homo sapiens
taacaaatccaatcc

SEQ ID NO: 245350 - DNA, 15 bp, Homo sapiens
ataacaaatccaatc

SEQ ID NO: 245351 - DNA, 15 bp, Homo sapiens
cataacaaatccaat

SEQ ID NO: 245352 - DNA, 15 bp, Homo sapiens
tcataacaaatccaa

SEQ ID NO: 245353 - DNA, 15 bp, Homo sapiens
gtcataacaaatcca

SEQ ID NO: 245354 - DNA, 15 bp, Homo sapiens
agtcataacaaatcc

SEQ ID NO: 245355 - DNA, 15 bp, Homo sapiens
gagtcataacaaatc

SEQ ID NO: 245356 - DNA, 15 bp, Homo sapiens
tgagtcataacaaat

SEQ ID NO: 245357 - DNA, 15 bp, Homo sapiens
ttgagtcataacaaa

SEQ ID NO: 245358 - DNA, 15 bp, Homo sapiens
tttgagtcataacaa

SEQ ID NO: 245359 - DNA, 15 bp, Homo sapiens
atttgagtcataaca

SEQ ID NO: 245360 - DNA, 15 bp, Homo sapiens
catttgagtcataac

SEQ ID NO: 245361 - DNA, 15 bp, Homo sapiens
ccatttgagtcataa

SEQ ID NO: 245362 - DNA, 15 bp, Homo sapiens
tccatttgagtcata

SEQ ID NO: 245363 - DNA, 15 bp, Homo sapiens
ttccatttgagtcat

SEQ ID NO: 245364 - DNA, 15 bp, Homo sapiens
tttccatttgagtca

SEQ ID NO: 245365 - DNA, 15 bp, Homo sapiens
ttttccatttgagtc

SEQ ID NO: 245366 - DNA, 15 bp, Homo sapiens
cttttccatttgagt

SEQ ID NO: 245367 - DNA, 15 bp, Homo sapiens
ccttttccatttgag

SEQ ID NO: 245368 - DNA, 15 bp, Homo sapiens
tccttttccatttga

SEQ ID NO: 245369 - DNA, 15 bp, Homo sapiens
gtccttttccatttg

SEQ ID NO: 245370 - DNA, 15 bp, Homo sapiens
agtccttttccattt

SEQ ID NO: 245371 - DNA, 15 bp, Homo sapiens
tagtccttttccatt

SEQ ID NO: 245372 - DNA, 15 bp, Homo sapiens
ctagtccttttccat

SEQ ID NO: 245373 - DNA, 15 bp, Homo sapiens
gctagtccttttcca

SEQ ID NO: 245374 - DNA, 15 bp, Homo sapiens
agctagtccttttcc

SEQ ID NO: 245375 - DNA, 15 bp, Homo sapiens
aagctagtccttttc

SEQ ID NO: 245376 - DNA, 15 bp, Homo sapiens
aaagctagtcctttt

SEQ ID NO: 245377 - DNA, 15 bp, Homo sapiens
caaagctagtccttt

SEQ ID NO: 245378 - DNA, 15 bp, Homo sapiens
acaaagctagtcctt

SEQ ID NO: 245379 - DNA, 15 bp, Homo sapiens
tacaaagctagtcct

SEQ ID NO: 245380 - DNA, 15 bp, Homo sapiens
ttacaaagctagtcc

SEQ ID NO: 245381 - DNA, 15 bp, Homo sapiens
cttacaaagctagtc

SEQ ID NO: 245382 - DNA, 15 bp, Homo sapiens
gcttacaaagctagt

SEQ ID NO: 245383 - DNA, 15 bp, Homo sapiens
tgcttacaaagctag

SEQ ID NO: 245384 - DNA, 15 bp, Homo sapiens
ctgcttacaaagcta

SEQ ID NO: 245385 - DNA, 15 bp, Homo sapiens
cctgcttacaaagct

SEQ ID NO: 245386 - DNA, 15 bp, Homo sapiens
acctgcttacaaagc

SEQ ID NO: 245387 - DNA, 15 bp, Homo sapiens
aacctgcttacaaag

SEQ ID NO: 245388 - DNA, 15 bp, Homo sapiens
gaacctgcttacaaa

SEQ ID NO: 245389 - DNA, 15 bp, Homo sapiens
tgaacctgcttacaa

SEQ ID NO: 245390 - DNA, 15 bp, Homo sapiens
ctgaacctgcttaca

SEQ ID NO: 245391 - DNA, 15 bp, Homo sapiens
tctgaacctgcttac

SEQ ID NO: 245392 - DNA, 15 bp, Homo sapiens
atctgaacctgctta

SEQ ID NO: 245393 - DNA, 15 bp, Homo sapiens
aatctgaacctgctt

SEQ ID NO: 245394 - DNA, 15 bp, Homo sapiens
gaatctgaacctgct

SEQ ID NO: 245395 - DNA, 15 bp, Homo sapiens
agaatctgaacctgc

SEQ ID NO: 245396 - DNA, 15 bp, Homo sapiens
tagaatctgaacctg

SEQ ID NO: 245397 - DNA, 15 bp, Homo sapiens
ctagaatctgaacct

SEQ ID NO: 245398 - DNA, 15 bp, Homo sapiens
gctagaatctgaacc

SEQ ID NO: 245399 - DNA, 15 bp, Homo sapiens
ggctagaatctgaac

SEQ ID NO: 245400 - DNA, 15 bp, Homo sapiens
gggctagaatctgaa

SEQ ID NO: 245401 - DNA, 15 bp, Homo sapiens
cgggctagaatctga

SEQ ID NO: 245402 - DNA, 15 bp, Homo sapiens
ccgggctagaatctg

SEQ ID NO: 245403 - DNA, 15 bp, Homo sapiens
accgggctagaatct

SEQ ID NO: 245404 - DNA, 15 bp, Homo sapiens
aaccgggctagaatc

SEQ ID NO: 245405 - DNA, 15 bp, Homo sapiens
gaaccgggctagaat

SEQ ID NO: 245406 - DNA, 15 bp, Homo sapiens
ggaaccgggctagaa

SEQ ID NO: 245407 - DNA, 15 bp, Homo sapiens
aggaaccgggctaga

SEQ ID NO: 245408 - DNA, 15 bp, Homo sapiens
taggaaccgggctag

SEQ ID NO: 245409 - DNA, 15 bp, Homo sapiens
ataggaaccgggcta

SEQ ID NO: 245410 - DNA, 15 bp, Homo sapiens
aataggaaccgggct

SEQ ID NO: 245411 - DNA, 15 bp, Homo sapiens
aaataggaaccgggc

SEQ ID NO: 245412 - DNA, 15 bp, Homo sapiens
taaataggaaccggg

SEQ ID NO: 245413 - DNA, 15 bp, Homo sapiens
ataaataggaaccgg

SEQ ID NO: 245414 - DNA, 15 bp, Homo sapiens
aataaataggaaccg

SEQ ID NO: 245415 - DNA, 15 bp, Homo sapiens
aaataaataggaacc

SEQ ID NO: 245416 - DNA, 15 bp, Homo sapiens
taaataaataggaac

SEQ ID NO: 245417 - DNA, 15 bp, Homo sapiens
ataaataaataggaa

SEQ ID NO: 245418 - DNA, 15 bp, Homo sapiens
tataaataaatagga

SEQ ID NO: 245419 - DNA, 15 bp, Homo sapiens
ctataaataaatagg

SEQ ID NO: 245420 - DNA, 15 bp, Homo sapiens
gctataaataaatag

SEQ ID NO: 245421 - DNA, 15 bp, Homo sapiens
ggctataaataaata

SEQ ID NO: 245422 - DNA, 15 bp, Homo sapiens
gggctataaataaat

SEQ ID NO: 245423 - DNA, 15 bp, Homo sapiens
tgggctataaataaa

SEQ ID NO: 245424 - DNA, 15 bp, Homo sapiens
ttgggctataaataa

SEQ ID NO: 245425 - DNA, 15 bp, Homo sapiens
tttgggctataaata

SEQ ID NO: 245426 - DNA, 15 bp, Homo sapiens
atttgggctataaat

SEQ ID NO: 245427 - DNA, 15 bp, Homo sapiens
aatttgggctataaa

SEQ ID NO: 245428 - DNA, 15 bp, Homo sapiens
taatttgggctataa

SEQ ID NO: 245429 - DNA, 15 bp, Homo sapiens
ataatttgggctata

SEQ ID NO: 245430 - DNA, 15 bp, Homo sapiens
aataatttgggctat

SEQ ID NO: 245431 - DNA, 15 bp, Homo sapiens
aaataatttgggcta

SEQ ID NO: 245432 - DNA, 15 bp, Homo sapiens
gaaataatttgggct

SEQ ID NO: 245433 - DNA, 15 bp, Homo sapiens
tgaaataatttgggc

SEQ ID NO: 245434 - DNA, 15 bp, Homo sapiens
ttgaaataatttggg

SEQ ID NO: 245435 - DNA, 15 bp, Homo sapiens
gttgaaataatttgg

SEQ ID NO: 245436 - DNA, 15 bp, Homo sapiens
tgttgaaataatttg

SEQ ID NO: 245437 - DNA, 15 bp, Homo sapiens
ttgttgaaataattt

SEQ ID NO: 245438 - DNA, 15 bp, Homo sapiens
gttgttgaaataatt

SEQ ID NO: 245439 - DNA, 15 bp, Homo sapiens
agttgttgaaataat

SEQ ID NO: 245440 - DNA, 15 bp, Homo sapiens
cagttgttgaaataa

SEQ ID NO: 245441 - DNA, 15 bp, Homo sapiens
gcagttgttgaaata

SEQ ID NO: 245442 - DNA, 15 bp, Homo sapiens
agcagttgttgaaat

SEQ ID NO: 245443 - DNA, 15 bp, Homo sapiens
cagcagttgttgaaa

SEQ ID NO: 245444 - DNA, 15 bp, Homo sapiens
acagcagttgttgaa

SEQ ID NO: 245445 - DNA, 15 bp, Homo sapiens
gacagcagttgttga

SEQ ID NO: 245446 - DNA, 15 bp, Homo sapiens
ggacagcagttgttg

SEQ ID NO: 245447 - DNA, 15 bp, Homo sapiens
tggacagcagttgtt

SEQ ID NO: 245448 - DNA, 15 bp, Homo sapiens
ctggacagcagttgt

SEQ ID NO: 245449 - DNA, 15 bp, Homo sapiens
actggacagcagttg

SEQ ID NO: 245450 - DNA, 15 bp, Homo sapiens
tactggacagcagtt

SEQ ID NO: 245451 - DNA, 15 bp, Homo sapiens
ttactggacagcagt

SEQ ID NO: 245452 - DNA, 15 bp, Homo sapiens
tttactggacagcag

SEQ ID NO: 245453 - DNA, 15 bp, Homo sapiens
ttttactggacagca

SEQ ID NO: 245454 - DNA, 15 bp, Homo sapiens
tttttactggacagc

SEQ ID NO: 245455 - DNA, 15 bp, Homo sapiens
gtttttactggacag

SEQ ID NO: 245456 - DNA, 15 bp, Homo sapiens
agtttttactggaca

SEQ ID NO: 245457 - DNA, 15 bp, Homo sapiens
gagtttttactggac

SEQ ID NO: 245458 - DNA, 15 bp, Homo sapiens
agagtttttactgga

SEQ ID NO: 245459 - DNA, 15 bp, Homo sapiens
cagagtttttactgg

SEQ ID NO: 245460 - DNA, 15 bp, Homo sapiens
acagagtttttactg

SEQ ID NO: 245461 - DNA, 15 bp, Homo sapiens
aacagagtttttact

SEQ ID NO: 245462 - DNA, 15 bp, Homo sapiens
aaacagagtttttac

SEQ ID NO: 245463 - DNA, 15 bp, Homo sapiens
taaacagagttttta

SEQ ID NO: 245464 - DNA, 15 bp, Homo sapiens
ttaaacagagttttt

SEQ ID NO: 245465 - DNA, 15 bp, Homo sapiens
attaaacagagtttt

SEQ ID NO: 245466 - DNA, 15 bp, Homo sapiens
gattaaacagagttt

SEQ ID NO: 245467 - DNA, 15 bp, Homo sapiens
tgattaaacagagtt

SEQ ID NO: 245468 - DNA, 15 bp, Homo sapiens
ctgattaaacagagt

SEQ ID NO: 245469 - DNA, 15 bp, Homo sapiens
tctgattaaacagag

SEQ ID NO: 245470 - DNA, 15 bp, Homo sapiens
ctctgattaaacaga

SEQ ID NO: 245471 - DNA, 15 bp, Homo sapiens
cctctgattaaacag

SEQ ID NO: 245472 - DNA, 15 bp, Homo sapiens
gcctctgattaaaca

SEQ ID NO: 245473 - DNA, 15 bp, Homo sapiens
tgcctctgattaaac

SEQ ID NO: 245474 - DNA, 15 bp, Homo sapiens
ctgcctctgattaaa

SEQ ID NO: 245475 - DNA, 15 bp, Homo sapiens
cctgcctctgattaa

SEQ ID NO: 245476 - DNA, 15 bp, Homo sapiens
acctgcctctgatta

SEQ ID NO: 245477 - DNA, 15 bp, Homo sapiens
tacctgcctctgatt

SEQ ID NO: 245478 - DNA, 15 bp, Homo sapiens
ttacctgcctctgat

SEQ ID NO: 245479 - DNA, 15 bp, Homo sapiens
tttacctgcctctga

SEQ ID NO: 245480 - DNA, 15 bp, Homo sapiens
gtttacctgcctctg

SEQ ID NO: 245481 - DNA, 15 bp, Homo sapiens
cgtttacctgcctct

SEQ ID NO: 245482 - DNA, 15 bp, Homo sapiens
acgtttacctgcctc

SEQ ID NO: 245483 - DNA, 15 bp, Homo sapiens
cacgtttacctgcct

SEQ ID NO: 245484 - DNA, 15 bp, Homo sapiens
gcacgtttacctgcc

SEQ ID NO: 245485 - DNA, 15 bp, Homo sapiens
ggcacgtttacctgc

SEQ ID NO: 245486 - DNA, 15 bp, Homo sapiens
tggcacgtttacctg

SEQ ID NO: 245487 - DNA, 15 bp, Homo sapiens
ttggcacgtttacct

SEQ ID NO: 245488 - DNA, 15 bp, Homo sapiens
attggcacgtttacc

SEQ ID NO: 245489 - DNA, 15 bp, Homo sapiens
aattggcacgtttac

SEQ ID NO: 245490 - DNA, 15 bp, Homo sapiens
aaattggcacgttta

SEQ ID NO: 245491 - DNA, 15 bp, Homo sapiens
gaaattggcacgttt

SEQ ID NO: 245492 - DNA, 15 bp, Homo sapiens
tgaaattggcacgtt

SEQ ID NO: 245493 - DNA, 15 bp, Homo sapiens
atgaaattggcacgt

SEQ ID NO: 245494 - DNA, 15 bp, Homo sapiens
gatgaaattggcacg

SEQ ID NO: 245495 - DNA, 15 bp, Homo sapiens
agatgaaattggcac

SEQ ID NO: 245496 - DNA, 15 bp, Homo sapiens
gagatgaaattggca

SEQ ID NO: 245497 - DNA, 15 bp, Homo sapiens
tgagatgaaattggc

SEQ ID NO: 245498 - DNA, 15 bp, Homo sapiens
atgagatgaaattgg

SEQ ID NO: 245499 - DNA, 15 bp, Homo sapiens
aatgagatgaaattg

SEQ ID NO: 245500 - DNA, 15 bp, Homo sapiens
caatgagatgaaatt

SEQ ID NO: 245501 - DNA, 15 bp, Homo sapiens
gcaatgagatgaaat

SEQ ID NO: 245502 - DNA, 15 bp, Homo sapiens
ggcaatgagatgaaa

SEQ ID NO: 245503 - DNA, 15 bp, Homo sapiens
aggcaatgagatgaa

SEQ ID NO: 245504 - DNA, 15 bp, Homo sapiens
taggcaatgagatga

SEQ ID NO: 245505 - DNA, 15 bp, Homo sapiens
ttaggcaatgagatg

SEQ ID NO: 245506 - DNA, 15 bp, Homo sapiens
cttaggcaatgagat

SEQ ID NO: 245507 - DNA, 15 bp, Homo sapiens
acttaggcaatgaga

SEQ ID NO: 245508 - DNA, 15 bp, Homo sapiens
tacttaggcaatgag

SEQ ID NO: 245509 - DNA, 15 bp, Homo sapiens
ctacttaggcaatga

SEQ ID NO: 245510 - DNA, 15 bp, Homo sapiens
actacttaggcaatg

SEQ ID NO: 245511 - DNA, 15 bp, Homo sapiens
gactacttaggcaat

SEQ ID NO: 245512 - DNA, 15 bp, Homo sapiens
agactacttaggcaa

SEQ ID NO: 245513 - DNA, 15 bp, Homo sapiens
gagactacttaggca

SEQ ID NO: 245514 - DNA, 15 bp, Homo sapiens
ggagactacttaggc

SEQ ID NO: 245515 - DNA, 15 bp, Homo sapiens
aggagactacttagg

SEQ ID NO: 245516 - DNA, 15 bp, Homo sapiens
gaggagactacttag

SEQ ID NO: 245517 - DNA, 15 bp, Homo sapiens
agaggagactactta

SEQ ID NO: 245518 - DNA, 15 bp, Homo sapiens
cagaggagactactt

SEQ ID NO: 245519 - DNA, 15 bp, Homo sapiens
gcagaggagactact

SEQ ID NO: 245520 - DNA, 15 bp, Homo sapiens
agcagaggagactac

SEQ ID NO: 245521 - DNA, 15 bp, Homo sapiens
cagcagaggagacta

SEQ ID NO: 245522 - DNA, 15 bp, Homo sapiens
acagcagaggagact

SEQ ID NO: 245523 - DNA, 15 bp, Homo sapiens
cacagcagaggagac

SEQ ID NO: 245524 - DNA, 15 bp, Homo sapiens
ccacagcagaggaga

SEQ ID NO: 245525 - DNA, 15 bp, Homo sapiens
tccacagcagaggag

SEQ ID NO: 245526 - DNA, 15 bp, Homo sapiens
ctccacagcagagga

SEQ ID NO: 245527 - DNA, 15 bp, Homo sapiens
cctccacagcagagg

SEQ ID NO: 245528 - DNA, 15 bp, Homo sapiens
tcctccacagcagag

SEQ ID NO: 245529 - DNA, 15 bp, Homo sapiens
ctcctccacagcaga

SEQ ID NO: 245530 - DNA, 15 bp, Homo sapiens
cctcctccacagcag

SEQ ID NO: 245531 - DNA, 15 bp, Homo sapiens
tcctcctccacagca

SEQ ID NO: 245532 - DNA, 15 bp, Homo sapiens
ctcctcctccacagc

SEQ ID NO: 245533 - DNA, 15 bp, Homo sapiens
cctcctcctccacag

SEQ ID NO: 245534 - DNA, 15 bp, Homo sapiens
tcctcctcctccaca

SEQ ID NO: 245535 - DNA, 15 bp, Homo sapiens
atcctcctcctccac

SEQ ID NO: 245536 - DNA, 15 bp, Homo sapiens
catcctcctcctcca

SEQ ID NO: 245537 - DNA, 15 bp, Homo sapiens
gcatcctcctcctcc

SEQ ID NO: 245538 - DNA, 15 bp, Homo sapiens
ggcatcctcctcctc

SEQ ID NO: 245539 - DNA, 15 bp, Homo sapiens
tggcatcctcctcct

SEQ ID NO: 245540 - DNA, 15 bp, Homo sapiens
gtggcatcctcctcc

SEQ ID NO: 245541 - DNA, 15 bp, Homo sapiens
agtggcatcctcctc

SEQ ID NO: 245542 - DNA, 15 bp, Homo sapiens
gagtggcatcctcct

SEQ ID NO: 245543 - DNA, 15 bp, Homo sapiens
agagtggcatcctcc

SEQ ID NO: 245544 - DNA, 15 bp, Homo sapiens
cagagtggcatcctc

SEQ ID NO: 245545 - DNA, 15 bp, Homo sapiens
ccagagtggcatcct

SEQ ID NO: 245546 - DNA, 15 bp, Homo sapiens
cccagagtggcatcc

SEQ ID NO: 245547 - DNA, 15 bp, Homo sapiens
acccagagtggcatc

SEQ ID NO: 245548 - DNA, 15 bp, Homo sapiens
gacccagagtggcat

SEQ ID NO: 245549 - DNA, 15 bp, Homo sapiens
agacccagagtggca

SEQ ID NO: 245550 - DNA, 15 bp, Homo sapiens
aagacccagagtggc

SEQ ID NO: 245551 - DNA, 15 bp, Homo sapiens
caagacccagagtgg

SEQ ID NO: 245552 - DNA, 15 bp, Homo sapiens
acaagacccagagtg

SEQ ID NO: 245553 - DNA, 15 bp, Homo sapiens
gacaagacccagagt

SEQ ID NO: 245554 - DNA, 15 bp, Homo sapiens
ggacaagacccagag

SEQ ID NO: 245555 - DNA, 15 bp, Homo sapiens
gggacaagacccaga

SEQ ID NO: 245556 - DNA, 15 bp, Homo sapiens
tgggacaagacccag

SEQ ID NO: 245557 - DNA, 15 bp, Homo sapiens
ctgggacaagaccca

SEQ ID NO: 245558 - DNA, 15 bp, Homo sapiens
cctgggacaagaccc

SEQ ID NO: 245559 - DNA, 15 bp, Homo sapiens
acctgggacaagacc

SEQ ID NO: 245560 - DNA, 15 bp, Homo sapiens
cacctgggacaagac

SEQ ID NO: 245561 - DNA, 15 bp, Homo sapiens
gcacctgggacaaga

SEQ ID NO: 245562 - DNA, 15 bp, Homo sapiens
agcacctgggacaag

SEQ ID NO: 245563 - DNA, 15 bp, Homo sapiens
cagcacctgggacaa

SEQ ID NO: 245564 - DNA, 15 bp, Homo sapiens
acagcacctgggaca

SEQ ID NO: 245565 - DNA, 15 bp, Homo sapiens
cacagcacctgggac

SEQ ID NO: 245566 - DNA, 15 bp, Homo sapiens
ccacagcacctggga

SEQ ID NO: 245567 - DNA, 15 bp, Homo sapiens
cccacagcacctggg

SEQ ID NO: 245568 - DNA, 15 bp, Homo sapiens
ccccacagcacctgg

SEQ ID NO: 245569 - DNA, 15 bp, Homo sapiens
gccccacagcacctg

SEQ ID NO: 245570 - DNA, 15 bp, Homo sapiens
agccccacagcacct

SEQ ID NO: 245571 - DNA, 15 bp, Homo sapiens
cagccccacagcacc

SEQ ID NO: 245572 - DNA, 15 bp, Homo sapiens
ccagccccacagcac

SEQ ID NO: 245573 - DNA, 15 bp, Homo sapiens
cccagccccacagca

SEQ ID NO: 245574 - DNA, 15 bp, Homo sapiens
ccccagccccacagc

SEQ ID NO: 245575 - DNA, 15 bp, Homo sapiens
tccccagccccacag

SEQ ID NO: 245576 - DNA, 15 bp, Homo sapiens
gtccccagccccaca

SEQ ID NO: 245577 - DNA, 15 bp, Homo sapiens
ggtccccagccccac

SEQ ID NO: 245578 - DNA, 15 bp, Homo sapiens
tggtccccagcccca

SEQ ID NO: 245579 - DNA, 15 bp, Homo sapiens
ttggtccccagcccc

SEQ ID NO: 245580 - DNA, 15 bp, Homo sapiens
cttggtccccagccc

SEQ ID NO: 245581 - DNA, 15 bp, Homo sapiens
ccttggtccccagcc

SEQ ID NO: 245582 - DNA, 15 bp, Homo sapiens
gccttggtccccagc

SEQ ID NO: 245583 - DNA, 15 bp, Homo sapiens
tgccttggtccccag

SEQ ID NO: 245584 - DNA, 15 bp, Homo sapiens
ctgccttggtcccca

SEQ ID NO: 245585 - DNA, 15 bp, Homo sapiens
actgccttggtcccc

SEQ ID NO: 245586 - DNA, 15 bp, Homo sapiens
aactgccttggtccc

SEQ ID NO: 245587 - DNA, 15 bp, Homo sapiens
gaactgccttggtcc

SEQ ID NO: 245588 - DNA, 15 bp, Homo sapiens
agaactgccttggtc

SEQ ID NO: 245589 - DNA, 15 bp, Homo sapiens
tagaactgccttggt

SEQ ID NO: 245590 - DNA, 15 bp, Homo sapiens
ctagaactgccttgg

SEQ ID NO: 245591 - DNA, 15 bp, Homo sapiens
tctagaactgccttg

SEQ ID NO: 245592 - DNA, 15 bp, Homo sapiens
gtctagaactgcctt

SEQ ID NO: 245593 - DNA, 15 bp, Homo sapiens
agtctagaactgcct

SEQ ID NO: 245594 - DNA, 15 bp, Homo sapiens
cagtctagaactgcc

SEQ ID NO: 245595 - DNA, 15 bp, Homo sapiens
ccagtctagaactgc

SEQ ID NO: 245596 - DNA, 15 bp, Homo sapiens
gccagtctagaactg

SEQ ID NO: 245597 - DNA, 15 bp, Homo sapiens
agccagtctagaact

SEQ ID NO: 245598 - DNA, 15 bp, Homo sapiens
tagccagtctagaac

SEQ ID NO: 245599 - DNA, 15 bp, Homo sapiens
gtagccagtctagaa

SEQ ID NO: 245600 - DNA, 15 bp, Homo sapiens
ggtagccagtctaga

SEQ ID NO: 245601 - DNA, 15 bp, Homo sapiens
gggtagccagtctag

SEQ ID NO: 245602 - DNA, 15 bp, Homo sapiens
tgggtagccagtcta

SEQ ID NO: 245603 - DNA, 15 bp, Homo sapiens
atgggtagccagtct

SEQ ID NO: 245604 - DNA, 15 bp, Homo sapiens
aatgggtagccagtc

SEQ ID NO: 245605 - DNA, 15 bp, Homo sapiens
gaatgggtagccagt

SEQ ID NO: 245606 - DNA, 15 bp, Homo sapiens
tgaatgggtagccag

SEQ ID NO: 245607 - DNA, 15 bp, Homo sapiens
ctgaatgggtagcca

SEQ ID NO: 245608 - DNA, 15 bp, Homo sapiens
cctgaatgggtagcc

SEQ ID NO: 245609 - DNA, 15 bp, Homo sapiens
gcctgaatgggtagc

SEQ ID NO: 245610 - DNA, 15 bp, Homo sapiens
ggcctgaatgggtag

SEQ ID NO: 245611 - DNA, 15 bp, Homo sapiens
aggcctgaatgggta

SEQ ID NO: 245612 - DNA, 15 bp, Homo sapiens
caggcctgaatgggt

SEQ ID NO: 245613 - DNA, 15 bp, Homo sapiens
ccaggcctgaatggg

SEQ ID NO: 245614 - DNA, 15 bp, Homo sapiens
gccaggcctgaatgg

SEQ ID NO: 245615 - DNA, 15 bp, Homo sapiens
ggccaggcctgaatg

SEQ ID NO: 245616 - DNA, 15 bp, Homo sapiens
tggccaggcctgaat

SEQ ID NO: 245617 - DNA, 15 bp, Homo sapiens
gtggccaggcctgaa

SEQ ID NO: 245618 - DNA, 15 bp, Homo sapiens
agtggccaggcctga

SEQ ID NO: 245619 - DNA, 15 bp, Homo sapiens
gagtggccaggcctg

SEQ ID NO: 245620 - DNA, 15 bp, Homo sapiens
tgagtggccaggcct

SEQ ID NO: 245621 - DNA, 15 bp, Homo sapiens
ctgagtggccaggcc

SEQ ID NO: 245622 - DNA, 15 bp, Homo sapiens
cctgagtggccaggc

SEQ ID NO: 245623 - DNA, 15 bp, Homo sapiens
acctgagtggccagg

SEQ ID NO: 245624 - DNA, 15 bp, Homo sapiens
aacctgagtggccag

SEQ ID NO: 245625 - DNA, 15 bp, Homo sapiens
caacctgagtggcca

SEQ ID NO: 245626 - DNA, 15 bp, Homo sapiens
acaacctgagtggcc

SEQ ID NO: 245627 - DNA, 15 bp, Homo sapiens
tacaacctgagtggc

SEQ ID NO: 245628 - DNA, 15 bp, Homo sapiens
ctacaacctgagtgg

SEQ ID NO: 245629 - DNA, 15 bp, Homo sapiens
gctacaacctgagtg

SEQ ID NO: 245630 - DNA, 15 bp, Homo sapiens
ggctacaacctgagt

SEQ ID NO: 245631 - DNA, 15 bp, Homo sapiens
tggctacaacctgag

SEQ ID NO: 245632 - DNA, 15 bp, Homo sapiens
gtggctacaacctga

SEQ ID NO: 245633 - DNA, 15 bp, Homo sapiens
agtggctacaacctg

SEQ ID NO: 245634 - DNA, 15 bp, Homo sapiens
aagtggctacaacct

SEQ ID NO: 245635 - DNA, 15 bp, Homo sapiens
caagtggctacaacc

SEQ ID NO: 245636 - DNA, 15 bp, Homo sapiens
acaagtggctacaac

SEQ ID NO: 245637 - DNA, 15 bp, Homo sapiens
cacaagtggctacaa

SEQ ID NO: 245638 - DNA, 15 bp, Homo sapiens
acacaagtggctaca

SEQ ID NO: 245639 - DNA, 15 bp, Homo sapiens
gacacaagtggctac

SEQ ID NO: 245640 - DNA, 15 bp, Homo sapiens
tgacacaagtggcta

SEQ ID NO: 245641 - DNA, 15 bp, Homo sapiens
atgacacaagtggct

SEQ ID NO: 245642 - DNA, 15 bp, Homo sapiens
aatgacacaagtggc

SEQ ID NO: 245643 - DNA, 15 bp, Homo sapiens
aaatgacacaagtgg

SEQ ID NO: 245644 - DNA, 15 bp, Homo sapiens
caaatgacacaagtg

SEQ ID NO: 245645 - DNA, 15 bp, Homo sapiens
ccaaatgacacaagt

SEQ ID NO: 245646 - DNA, 15 bp, Homo sapiens
accaaatgacacaag

SEQ ID NO: 245647 - DNA, 15 bp, Homo sapiens
taccaaatgacacaa

SEQ ID NO: 245648 - DNA, 15 bp, Homo sapiens
ctaccaaatgacaca

SEQ ID NO: 245649 - DNA, 15 bp, Homo sapiens
cctaccaaatgacac

SEQ ID NO: 245650 - DNA, 15 bp, Homo sapiens
tcctaccaaatgaca

SEQ ID NO: 245651 - DNA, 15 bp, Homo sapiens
ttcctaccaaatgac

SEQ ID NO: 245652 - DNA, 15 bp, Homo sapiens
tttcctaccaaatga

SEQ ID NO: 245653 - DNA, 15 bp, Homo sapiens
ttttcctaccaaatg

SEQ ID NO: 245654 - DNA, 15 bp, Homo sapiens
cttttcctaccaaat

SEQ ID NO: 245655 - DNA, 15 bp, Homo sapiens
acttttcctaccaaa

SEQ ID NO: 245656 - DNA, 15 bp, Homo sapiens
cacttttcctaccaa

SEQ ID NO: 245657 - DNA, 15 bp, Homo sapiens
tcacttttcctacca

SEQ ID NO: 245658 - DNA, 15 bp, Homo sapiens
ctcacttttcctacc

SEQ ID NO: 245659 - DNA, 15 bp, Homo sapiens
tctcacttttcctac

SEQ ID NO: 245660 - DNA, 15 bp, Homo sapiens
ttctcacttttccta

SEQ ID NO: 245661 - DNA, 15 bp, Homo sapiens
cttctcacttttcct

SEQ ID NO: 245662 - DNA, 15 bp, Homo sapiens
acttctcacttttcc

SEQ ID NO: 245663 - DNA, 15 bp, Homo sapiens
aacttctcacttttc

SEQ ID NO: 245664 - DNA, 15 bp, Homo sapiens
taacttctcactttt

SEQ ID NO: 245665 - DNA, 15 bp, Homo sapiens
ataacttctcacttt

SEQ ID NO: 245666 - DNA, 15 bp, Homo sapiens
cataacttctcactt

SEQ ID NO: 245667 - DNA, 15 bp, Homo sapiens
tcataacttctcact

SEQ ID NO: 245668 - DNA, 15 bp, Homo sapiens
ctcataacttctcac

SEQ ID NO: 245669 - DNA, 15 bp, Homo sapiens
gctcataacttctca

SEQ ID NO: 245670 - DNA, 15 bp, Homo sapiens
ggctcataacttctc

SEQ ID NO: 245671 - DNA, 15 bp, Homo sapiens
tggctcataacttct

SEQ ID NO: 245672 - DNA, 15 bp, Homo sapiens
ctggctcataacttc

SEQ ID NO: 245673 - DNA, 15 bp, Homo sapiens
tctggctcataactt

SEQ ID NO: 245674 - DNA, 15 bp, Homo sapiens
ctctggctcataact

SEQ ID NO: 245675 - DNA, 15 bp, Homo sapiens
cctctggctcataac

SEQ ID NO: 245676 - DNA, 15 bp, Homo sapiens
acctctggctcataa

SEQ ID NO: 245677 - DNA, 15 bp, Homo sapiens
aacctctggctcata

SEQ ID NO: 245678 - DNA, 15 bp, Homo sapiens
aaacctctggctcat

SEQ ID NO: 245679 - DNA, 15 bp, Homo sapiens
gaaacctctggctca

SEQ ID NO: 245680 - DNA, 15 bp, Homo sapiens
tgaaacctctggctc

SEQ ID NO: 245681 - DNA, 15 bp, Homo sapiens
ttgaaacctctggct

SEQ ID NO: 245682 - DNA, 15 bp, Homo sapiens
attgaaacctctggc

SEQ ID NO: 245683 - DNA, 15 bp, Homo sapiens
aattgaaacctctgg

SEQ ID NO: 245684 - DNA, 15 bp, Homo sapiens
taattgaaacctctg

SEQ ID NO: 245685 - DNA, 15 bp, Homo sapiens
ataattgaaacctct

SEQ ID NO: 245686 - DNA, 15 bp, Homo sapiens
cataattgaaacctc

SEQ ID NO: 245687 - DNA, 15 bp, Homo sapiens
ccataattgaaacct

SEQ ID NO: 245688 - DNA, 15 bp, Homo sapiens
accataattgaaacc

SEQ ID NO: 245689 - DNA, 15 bp, Homo sapiens
aaccataattgaaac

SEQ ID NO: 245690 - DNA, 15 bp, Homo sapiens
aaaccataattgaaa

SEQ ID NO: 245691 - DNA, 15 bp, Homo sapiens
aaaaccataattgaa

SEQ ID NO: 245692 - DNA, 15 bp, Homo sapiens
caaaaccataattga

SEQ ID NO: 245693 - DNA, 15 bp, Homo sapiens
gcaaaaccataattg

SEQ ID NO: 245694 - DNA, 15 bp, Homo sapiens
ggcaaaaccataatt

SEQ ID NO: 245695 - DNA, 15 bp, Homo sapiens
tggcaaaaccataat

SEQ ID NO: 245696 - DNA, 15 bp, Homo sapiens
gtggcaaaaccataa

SEQ ID NO: 245697 - DNA, 15 bp, Homo sapiens
agtggcaaaaccata

SEQ ID NO: 245698 - DNA, 15 bp, Homo sapiens
aagtggcaaaaccat

SEQ ID NO: 245699 - DNA, 15 bp, Homo sapiens
taagtggcaaaacca

SEQ ID NO: 245700 - DNA, 15 bp, Homo sapiens
gtaagtggcaaaacc

SEQ ID NO: 245701 - DNA, 15 bp, Homo sapiens
agtaagtggcaaaac

SEQ ID NO: 245702 - DNA, 15 bp, Homo sapiens
cagtaagtggcaaaa

SEQ ID NO: 245703 - DNA, 15 bp, Homo sapiens
tcagtaagtggcaaa

SEQ ID NO: 245704 - DNA, 15 bp, Homo sapiens
atcagtaagtggcaa

SEQ ID NO: 245705 - DNA, 15 bp, Homo sapiens
aatcagtaagtggca

SEQ ID NO: 245706 - DNA, 15 bp, Homo sapiens
gaatcagtaagtggc

SEQ ID NO: 245707 - DNA, 15 bp, Homo sapiens
agaatcagtaagtgg

SEQ ID NO: 245708 - DNA, 15 bp, Homo sapiens
tagaatcagtaagtg

SEQ ID NO: 245709 - DNA, 15 bp, Homo sapiens
atagaatcagtaagt

SEQ ID NO: 245710 - DNA, 15 bp, Homo sapiens
catagaatcagtaag

SEQ ID NO: 245711 - DNA, 15 bp, Homo sapiens
tcatagaatcagtaa

SEQ ID NO: 245712 - DNA, 15 bp, Homo sapiens
gtcatagaatcagta

SEQ ID NO: 245713 - DNA, 15 bp, Homo sapiens
agtcatagaatcagt

SEQ ID NO: 245714 - DNA, 15 bp, Homo sapiens
aagtcatagaatcag

SEQ ID NO: 245715 - DNA, 15 bp, Homo sapiens
taagtcatagaatca

SEQ ID NO: 245716 - DNA, 15 bp, Homo sapiens
ataagtcatagaatc

SEQ ID NO: 245717 - DNA, 15 bp, Homo sapiens
tataagtcatagaat

SEQ ID NO: 245718 - DNA, 15 bp, Homo sapiens
ttataagtcatagaa

SEQ ID NO: 245719 - DNA, 15 bp, Homo sapiens
cttataagtcataga

SEQ ID NO: 245720 - DNA, 15 bp, Homo sapiens
ccttataagtcatag

SEQ ID NO: 245721 - DNA, 15 bp, Homo sapiens
accttataagtcata

SEQ ID NO: 245722 - DNA, 15 bp, Homo sapiens
aaccttataagtcat

SEQ ID NO: 245723 - DNA, 15 bp, Homo sapiens
taaccttataagtca

SEQ ID NO: 245724 - DNA, 15 bp, Homo sapiens
gtaaccttataagtc

SEQ ID NO: 245725 - DNA, 15 bp, Homo sapiens
agtaaccttataagt

SEQ ID NO: 245726 - DNA, 15 bp, Homo sapiens
aagtaaccttataag

SEQ ID NO: 245727 - DNA, 15 bp, Homo sapiens
taagtaaccttataa

SEQ ID NO: 245728 - DNA, 15 bp, Homo sapiens
ctaagtaaccttata

SEQ ID NO: 245729 - DNA, 15 bp, Homo sapiens
gctaagtaaccttat

SEQ ID NO: 245730 - DNA, 15 bp, Homo sapiens
agctaagtaacctta

SEQ ID NO: 245731 - DNA, 15 bp, Homo sapiens
aagctaagtaacctt

SEQ ID NO: 245732 - DNA, 15 bp, Homo sapiens
gaagctaagtaacct

SEQ ID NO: 245733 - DNA, 15 bp, Homo sapiens
agaagctaagtaacc

SEQ ID NO: 245734 - DNA, 15 bp, Homo sapiens
aagaagctaagtaac

SEQ ID NO: 245735 - DNA, 15 bp, Homo sapiens
caagaagctaagtaa

SEQ ID NO: 245736 - DNA, 15 bp, Homo sapiens
ccaagaagctaagta

SEQ ID NO: 245737 - DNA, 15 bp, Homo sapiens
cccaagaagctaagt

SEQ ID NO: 245738 - DNA, 15 bp, Homo sapiens
ccccaagaagctaag

SEQ ID NO: 245739 - DNA, 15 bp, Homo sapiens
accccaagaagctaa

SEQ ID NO: 245740 - DNA, 15 bp, Homo sapiens
gaccccaagaagcta

SEQ ID NO: 245741 - DNA, 15 bp, Homo sapiens
tgaccccaagaagct

SEQ ID NO: 245742 - DNA, 15 bp, Homo sapiens
ctgaccccaagaagc

SEQ ID NO: 245743 - DNA, 15 bp, Homo sapiens
cctgaccccaagaag

SEQ ID NO: 245744 - DNA, 15 bp, Homo sapiens
ccctgaccccaagaa

SEQ ID NO: 245745 - DNA, 15 bp, Homo sapiens
accctgaccccaaga

SEQ ID NO: 245746 - DNA, 15 bp, Homo sapiens
aaccctgaccccaag

SEQ ID NO: 245747 - DNA, 15 bp, Homo sapiens
gaaccctgaccccaa

SEQ ID NO: 245748 - DNA, 15 bp, Homo sapiens
tgaaccctgacccca

SEQ ID NO: 245749 - DNA, 15 bp, Homo sapiens
gtgaaccctgacccc

SEQ ID NO: 245750 - DNA, 15 bp, Homo sapiens
agtgaaccctgaccc

SEQ ID NO: 245751 - DNA, 15 bp, Homo sapiens
gagtgaaccctgacc

SEQ ID NO: 245752 - DNA, 15 bp, Homo sapiens
tgagtgaaccctgac

SEQ ID NO: 245753 - DNA, 15 bp, Homo sapiens
atgagtgaaccctga

SEQ ID NO: 245754 - DNA, 15 bp, Homo sapiens
aatgagtgaaccctg

SEQ ID NO: 245755 - DNA, 15 bp, Homo sapiens
aaatgagtgaaccct

SEQ ID NO: 245756 - DNA, 15 bp, Homo sapiens
taaatgagtgaaccc

SEQ ID NO: 245757 - DNA, 15 bp, Homo sapiens
ttaaatgagtgaacc

SEQ ID NO: 245758 - DNA, 15 bp, Homo sapiens
tttaaatgagtgaac

SEQ ID NO: 245759 - DNA, 15 bp, Homo sapiens
ttttaaatgagtgaa

SEQ ID NO: 245760 - DNA, 15 bp, Homo sapiens
tttttaaatgagtga

SEQ ID NO: 245761 - DNA, 15 bp, Homo sapiens
atttttaaatgagtg

SEQ ID NO: 245762 - DNA, 15 bp, Homo sapiens
catttttaaatgagt

SEQ ID NO: 245763 - DNA, 15 bp, Homo sapiens
ccatttttaaatgag

SEQ ID NO: 245764 - DNA, 15 bp, Homo sapiens
accatttttaaatga

SEQ ID NO: 245765 - DNA, 15 bp, Homo sapiens
caccatttttaaatg

SEQ ID NO: 245766 - DNA, 15 bp, Homo sapiens
tcaccatttttaaat

SEQ ID NO: 245767 - DNA, 15 bp, Homo sapiens
atcaccatttttaaa

SEQ ID NO: 245768 - DNA, 15 bp, Homo sapiens
catcaccatttttaa

SEQ ID NO: 245769 - DNA, 15 bp, Homo sapiens
acatcaccattttta

SEQ ID NO: 245770 - DNA, 15 bp, Homo sapiens
aacatcaccattttt

SEQ ID NO: 245771 - DNA, 15 bp, Homo sapiens
taacatcaccatttt

SEQ ID NO: 245772 - DNA, 15 bp, Homo sapiens
gtaacatcaccattt

SEQ ID NO: 245773 - DNA, 15 bp, Homo sapiens
agtaacatcaccatt

SEQ ID NO: 245774 - DNA, 15 bp, Homo sapiens
tagtaacatcaccat

SEQ ID NO: 245775 - DNA, 15 bp, Homo sapiens
ttagtaacatcacca

SEQ ID NO: 245776 - DNA, 15 bp, Homo sapiens
gttagtaacatcacc

SEQ ID NO: 245777 - DNA, 15 bp, Homo sapiens
agttagtaacatcac

SEQ ID NO: 245778 - DNA, 15 bp, Homo sapiens
tagttagtaacatca

SEQ ID NO: 245779 - DNA, 15 bp, Homo sapiens
gtagttagtaacatc

SEQ ID NO: 245780 - DNA, 15 bp, Homo sapiens
tgtagttagtaacat

SEQ ID NO: 245781 - DNA, 15 bp, Homo sapiens
ttgtagttagtaaca

SEQ ID NO: 245782 - DNA, 15 bp, Homo sapiens
tttgtagttagtaac

SEQ ID NO: 245783 - DNA, 15 bp, Homo sapiens
atttgtagttagtaa

SEQ ID NO: 245784 - DNA, 15 bp, Homo sapiens
tatttgtagttagta

SEQ ID NO: 245785 - DNA, 15 bp, Homo sapiens
atatttgtagttagt

SEQ ID NO: 245786 - DNA, 15 bp, Homo sapiens
tatatttgtagttag

SEQ ID NO: 245787 - DNA, 15 bp, Homo sapiens
ttatatttgtagtta

SEQ ID NO: 245788 - DNA, 15 bp, Homo sapiens
tttatatttgtagtt

SEQ ID NO: 245789 - DNA, 15 bp, Homo sapiens
atttatatttgtagt

SEQ ID NO: 245790 - DNA, 15 bp, Homo sapiens
catttatatttgtag

SEQ ID NO: 245791 - DNA, 15 bp, Homo sapiens
tcatttatatttgta

SEQ ID NO: 245792 - DNA, 15 bp, Homo sapiens
ctcatttatatttgt

SEQ ID NO: 245793 - DNA, 15 bp, Homo sapiens
actcatttatatttg

SEQ ID NO: 245794 - DNA, 15 bp, Homo sapiens
aactcatttatattt

SEQ ID NO: 245795 - DNA, 15 bp, Homo sapiens
taactcatttatatt

SEQ ID NO: 245796 - DNA, 15 bp, Homo sapiens
ttaactcatttatat

SEQ ID NO: 245797 - DNA, 15 bp, Homo sapiens
attaactcatttata

SEQ ID NO: 245798 - DNA, 15 bp, Homo sapiens
cattaactcatttat

SEQ ID NO: 245799 - DNA, 15 bp, Homo sapiens
acattaactcattta

SEQ ID NO: 245800 - DNA, 15 bp, Homo sapiens
tacattaactcattt

SEQ ID NO: 245801 - DNA, 15 bp, Homo sapiens
ttacattaactcatt

SEQ ID NO: 245802 - DNA, 15 bp, Homo sapiens
cttacattaactcat

SEQ ID NO: 245803 - DNA, 15 bp, Homo sapiens
gcttacattaactca

SEQ ID NO: 245804 - DNA, 15 bp, Homo sapiens
ggcttacattaactc

SEQ ID NO: 245805 - DNA, 15 bp, Homo sapiens
aggcttacattaact

SEQ ID NO: 245806 - DNA, 15 bp, Homo sapiens
gaggcttacattaac

SEQ ID NO: 245807 - DNA, 15 bp, Homo sapiens
ggaggcttacattaa

SEQ ID NO: 245808 - DNA, 15 bp, Homo sapiens
tggaggcttacatta

SEQ ID NO: 245809 - DNA, 15 bp, Homo sapiens
ctggaggcttacatt

SEQ ID NO: 245810 - DNA, 15 bp, Homo sapiens
actggaggcttacat

SEQ ID NO: 245811 - DNA, 15 bp, Homo sapiens
gactggaggcttaca

SEQ ID NO: 245812 - DNA, 15 bp, Homo sapiens
tgactggaggcttac

SEQ ID NO: 245813 - DNA, 15 bp, Homo sapiens
gtgactggaggctta

SEQ ID NO: 245814 - DNA, 15 bp, Homo sapiens
tgtgactggaggctt

SEQ ID NO: 245815 - DNA, 15 bp, Homo sapiens
ctgtgactggaggct

SEQ ID NO: 245816 - DNA, 15 bp, Homo sapiens
gctgtgactggaggc

SEQ ID NO: 245817 - DNA, 15 bp, Homo sapiens
agctgtgactggagg

SEQ ID NO: 245818 - DNA, 15 bp, Homo sapiens
aagctgtgactggag

SEQ ID NO: 245819 - DNA, 15 bp, Homo sapiens
caagctgtgactgga

SEQ ID NO: 245820 - DNA, 15 bp, Homo sapiens
ccaagctgtgactgg

SEQ ID NO: 245821 - DNA, 15 bp, Homo sapiens
tccaagctgtgactg

SEQ ID NO: 245822 - DNA, 15 bp, Homo sapiens
ttccaagctgtgact

SEQ ID NO: 245823 - DNA, 15 bp, Homo sapiens
cttccaagctgtgac

SEQ ID NO: 245824 - DNA, 15 bp, Homo sapiens
tcttccaagctgtga

SEQ ID NO: 245825 - DNA, 15 bp, Homo sapiens
gtcttccaagctgtg

SEQ ID NO: 245826 - DNA, 15 bp, Homo sapiens
tgtcttccaagctgt

SEQ ID NO: 245827 - DNA, 15 bp, Homo sapiens
ctgtcttccaagctg

SEQ ID NO: 245828 - DNA, 15 bp, Homo sapiens
actgtcttccaagct

SEQ ID NO: 245829 - DNA, 15 bp, Homo sapiens
cactgtcttccaagc

SEQ ID NO: 245830 - DNA, 15 bp, Homo sapiens
acactgtcttccaag

SEQ ID NO: 245831 - DNA, 15 bp, Homo sapiens
aacactgtcttccaa

SEQ ID NO: 245832 - DNA, 15 bp, Homo sapiens
aaacactgtcttcca

SEQ ID NO: 245833 - DNA, 15 bp, Homo sapiens
aaaacactgtcttcc

SEQ ID NO: 245834 - DNA, 15 bp, Homo sapiens
gaaaacactgtcttc

SEQ ID NO: 245835 - DNA, 15 bp, Homo sapiens
agaaaacactgtctt

SEQ ID NO: 245836 - DNA, 15 bp, Homo sapiens
aagaaaacactgtct

SEQ ID NO: 245837 - DNA, 15 bp, Homo sapiens
aaagaaaacactgtc

SEQ ID NO: 245838 - DNA, 15 bp, Homo sapiens
gaaagaaaacactgt

SEQ ID NO: 245839 - DNA, 15 bp, Homo sapiens
agaaagaaaacactg

SEQ ID NO: 245840 - DNA, 15 bp, Homo sapiens
gagaaagaaaacact

SEQ ID NO: 245841 - DNA, 15 bp, Homo sapiens
agagaaagaaaacac

SEQ ID NO: 245842 - DNA, 15 bp, Homo sapiens
aagagaaagaaaaca

SEQ ID NO: 245843 - DNA, 15 bp, Homo sapiens
aaagagaaagaaaac

SEQ ID NO: 245844 - DNA, 15 bp, Homo sapiens
aaaagagaaagaaaa

SEQ ID NO: 245845 - DNA, 15 bp, Homo sapiens
aaaaagagaaagaaa

SEQ ID NO: 245846 - DNA, 15 bp, Homo sapiens
aaaaaagagaaagaa

SEQ ID NO: 245847 - DNA, 15 bp, Homo sapiens
aaaaaaagagaaaga

SEQ ID NO: 245848 - DNA, 15 bp, Homo sapiens
gaaaaaaagagaaag

SEQ ID NO: 245849 - DNA, 15 bp, Homo sapiens
agaaaaaaagagaaa

SEQ ID NO: 245850 - DNA, 15 bp, Homo sapiens
aagaaaaaaagagaa

SEQ ID NO: 245851 - DNA, 15 bp, Homo sapiens
aaagaaaaaaagaga

SEQ ID NO: 245852 - DNA, 15 bp, Homo sapiens
aaaagaaaaaaagag

SEQ ID NO: 245853 - DNA, 15 bp, Homo sapiens
gaaaagaaaaaaaga

SEQ ID NO: 245854 - DNA, 15 bp, Homo sapiens
agaaaagaaaaaaag

SEQ ID NO: 245855 - DNA, 15 bp, Homo sapiens
aagaaaagaaaaaaa

SEQ ID NO: 245856 - DNA, 15 bp, Homo sapiens
agaaaaaagaaaaga

SEQ ID NO: 245857 - DNA, 15 bp, Homo sapiens
aagaaaaaagaaaag

SEQ ID NO: 245858 - DNA, 15 bp, Homo sapiens
aaaaagaaagaaaaa

SEQ ID NO: 245859 - DNA, 15 bp, Homo sapiens
caaaaaaaagaaaga

SEQ ID NO: 245860 - DNA, 15 bp, Homo sapiens
tcaaaaaaaagaaag

SEQ ID NO: 245861 - DNA, 15 bp, Homo sapiens
ctcaaaaaaaagaaa

SEQ ID NO: 245862 - DNA, 15 bp, Homo sapiens
tctcaaaaaaaagaa

SEQ ID NO: 245863 - DNA, 15 bp, Homo sapiens
atctcaaaaaaaaga

SEQ ID NO: 245864 - DNA, 15 bp, Homo sapiens
catctcaaaaaaaag

SEQ ID NO: 245865 - DNA, 15 bp, Homo sapiens
aaagctccatctcaa

SEQ ID NO: 245866 - DNA, 15 bp, Homo sapiens
caaagctccatctca

SEQ ID NO: 245867 - DNA, 15 bp, Homo sapiens
gcaaagctccatctc

SEQ ID NO: 245868 - DNA, 15 bp, Homo sapiens
agcaaagctccatct

SEQ ID NO: 245869 - DNA, 15 bp, Homo sapiens
gagcaaagctccatc

SEQ ID NO: 245870 - DNA, 15 bp, Homo sapiens
agagcaaagctccat

SEQ ID NO: 245871 - DNA, 15 bp, Homo sapiens
cagagcaaagctcca

SEQ ID NO: 245872 - DNA, 15 bp, Homo sapiens
acagagcaaagctcc

SEQ ID NO: 245873 - DNA, 15 bp, Homo sapiens
aacagagcaaagctc

SEQ ID NO: 245874 - DNA, 15 bp, Homo sapiens
taacagagcaaagct

SEQ ID NO: 245875 - DNA, 15 bp, Homo sapiens
gtaacagagcaaagc

SEQ ID NO: 245876 - DNA, 15 bp, Homo sapiens
ggtaacagagcaaag

SEQ ID NO: 245877 - DNA, 15 bp, Homo sapiens
gggtaacagagcaaa

SEQ ID NO: 245878 - DNA, 15 bp, Homo sapiens
tgggtaacagagcaa

SEQ ID NO: 245879 - DNA, 15 bp, Homo sapiens
ttgggtaacagagca

SEQ ID NO: 245880 - DNA, 15 bp, Homo sapiens
cttgggtaacagagc

SEQ ID NO: 245881 - DNA, 15 bp, Homo sapiens
gcttgggtaacagag

SEQ ID NO: 245882 - DNA, 15 bp, Homo sapiens
agcttgggtaacaga

SEQ ID NO: 245883 - DNA, 15 bp, Homo sapiens
cagcttgggtaacag

SEQ ID NO: 245884 - DNA, 15 bp, Homo sapiens
ccagcttgggtaaca

SEQ ID NO: 245885 - DNA, 15 bp, Homo sapiens
tccagcttgggtaac

SEQ ID NO: 245886 - DNA, 15 bp, Homo sapiens
ctccagcttgggtaa

SEQ ID NO: 245887 - DNA, 15 bp, Homo sapiens
actccagcttgggta

SEQ ID NO: 245888 - DNA, 15 bp, Homo sapiens
cactccagcttgggt

SEQ ID NO: 245889 - DNA, 15 bp, Homo sapiens
agaggcagaggctgc

SEQ ID NO: 245890 - DNA, 15 bp, Homo sapiens
cagaggcagaggctg

SEQ ID NO: 245891 - DNA, 15 bp, Homo sapiens
ccagaggcagaggct

SEQ ID NO: 245892 - DNA, 15 bp, Homo sapiens
cccagaggcagaggc

SEQ ID NO: 245893 - DNA, 15 bp, Homo sapiens
ccccagaggcagagg

SEQ ID NO: 245894 - DNA, 15 bp, Homo sapiens
accccagaggcagag

SEQ ID NO: 245895 - DNA, 15 bp, Homo sapiens
aaccccagaggcaga

SEQ ID NO: 245896 - DNA, 15 bp, Homo sapiens
gaaccccagaggcag

SEQ ID NO: 245897 - DNA, 15 bp, Homo sapiens
tgaaccccagaggca

SEQ ID NO: 245898 - DNA, 15 bp, Homo sapiens
ttgaaccccagaggc

SEQ ID NO: 245899 - DNA, 15 bp, Homo sapiens
cttgaaccccagagg

SEQ ID NO: 245900 - DNA, 15 bp, Homo sapiens
tcttgaaccccagag

SEQ ID NO: 245901 - DNA, 15 bp, Homo sapiens
ctcttgaaccccaga

SEQ ID NO: 245902 - DNA, 15 bp, Homo sapiens
tctcttgaaccccag

SEQ ID NO: 245903 - DNA, 15 bp, Homo sapiens
atctcttgaacccca

SEQ ID NO: 245904 - DNA, 15 bp, Homo sapiens
aatctcttgaacccc

SEQ ID NO: 245905 - DNA, 15 bp, Homo sapiens
caatctcttgaaccc

SEQ ID NO: 245906 - DNA, 15 bp, Homo sapiens
acaatctcttgaacc

SEQ ID NO: 245907 - DNA, 15 bp, Homo sapiens
gacaatctcttgaac

SEQ ID NO: 245908 - DNA, 15 bp, Homo sapiens
ggacaatctcttgaa

SEQ ID NO: 245909 - DNA, 15 bp, Homo sapiens
aggacaatctcttga

SEQ ID NO: 245910 - DNA, 15 bp, Homo sapiens
caggacaatctcttg

SEQ ID NO: 245911 - DNA, 15 bp, Homo sapiens
gcaggacaatctctt

SEQ ID NO: 245912 - DNA, 15 bp, Homo sapiens
ggcaggacaatctct

SEQ ID NO: 245913 - DNA, 15 bp, Homo sapiens
aggcaggacaatctc

SEQ ID NO: 245914 - DNA, 15 bp, Homo sapiens
gaggcaggacaatct

SEQ ID NO: 245915 - DNA, 15 bp, Homo sapiens
tgaggcaggacaatc

SEQ ID NO: 245916 - DNA, 15 bp, Homo sapiens
ctgaggcaggacaat

SEQ ID NO: 245917 - DNA, 15 bp, Homo sapiens
gctgaggcaggacaa

SEQ ID NO: 245918 - DNA, 15 bp, Homo sapiens
ggctgaggcaggaca

SEQ ID NO: 245919 - DNA, 15 bp, Homo sapiens
aggctgaggcaggac

SEQ ID NO: 245920 - DNA, 15 bp, Homo sapiens
tcagctacttgggag

SEQ ID NO: 245921 - DNA, 15 bp, Homo sapiens
ctcagctacttggga

SEQ ID NO: 245922 - DNA, 15 bp, Homo sapiens
tctcagctacttggg

SEQ ID NO: 245923 - DNA, 15 bp, Homo sapiens
gtctcagctacttgg

SEQ ID NO: 245924 - DNA, 15 bp, Homo sapiens
agtctcagctacttg

SEQ ID NO: 245925 - DNA, 15 bp, Homo sapiens
tagtctcagctactt

SEQ ID NO: 245926 - DNA, 15 bp, Homo sapiens
gtagtctcagctact

SEQ ID NO: 245927 - DNA, 15 bp, Homo sapiens
tgtagtctcagctac

SEQ ID NO: 245928 - DNA, 15 bp, Homo sapiens
ctgtagtctcagcta

SEQ ID NO: 245929 - DNA, 15 bp, Homo sapiens
cctgtagtctcagct

SEQ ID NO: 245930 - DNA, 15 bp, Homo sapiens
gcctgtagtctcagc

SEQ ID NO: 245931 - DNA, 15 bp, Homo sapiens
tgcctgtagtctcag

SEQ ID NO: 245932 - DNA, 15 bp, Homo sapiens
gtgcctgtagtctca

SEQ ID NO: 245933 - DNA, 15 bp, Homo sapiens
tgtgcctgtagtctc

SEQ ID NO: 245934 - DNA, 15 bp, Homo sapiens
gtgtgcctgtagtct

SEQ ID NO: 245935 - DNA, 15 bp, Homo sapiens
tgtgtgcctgtagtc

SEQ ID NO: 245936 - DNA, 15 bp, Homo sapiens
gtgtgtgcctgtagt

SEQ ID NO: 245937 - DNA, 15 bp, Homo sapiens
ggtgtgtgcctgtag

SEQ ID NO: 245938 - DNA, 15 bp, Homo sapiens
tggtgtgtgcctgta

SEQ ID NO: 245939 - DNA, 15 bp, Homo sapiens
gtggtgtgtgcctgt

SEQ ID NO: 245940 - DNA, 15 bp, Homo sapiens
ggtggtgtgtgcctg

SEQ ID NO: 245941 - DNA, 15 bp, Homo sapiens
tggtggtgtgtgcct

SEQ ID NO: 245942 - DNA, 15 bp, Homo sapiens
atggtggtgtgtgcc

SEQ ID NO: 245943 - DNA, 15 bp, Homo sapiens
tatggtggtgtgtgc

SEQ ID NO: 245944 - DNA, 15 bp, Homo sapiens
gtatggtggtgtgtg

SEQ ID NO: 245945 - DNA, 15 bp, Homo sapiens
ggtatggtggtgtgt

SEQ ID NO: 245946 - DNA, 15 bp, Homo sapiens
aggtatggtggtgtg

SEQ ID NO: 245947 - DNA, 15 bp, Homo sapiens
caggtatggtggtgt

SEQ ID NO: 245948 - DNA, 15 bp, Homo sapiens
ccaggtatggtggtg

SEQ ID NO: 245949 - DNA, 15 bp, Homo sapiens
gccaggtatggtggt

SEQ ID NO: 245950 - DNA, 15 bp, Homo sapiens
agccaggtatggtgg

SEQ ID NO: 245951 - DNA, 15 bp, Homo sapiens
tagccaggtatggtg

SEQ ID NO: 245952 - DNA, 15 bp, Homo sapiens
ttagccaggtatggt

SEQ ID NO: 245953 - DNA, 15 bp, Homo sapiens
attagccaggtatgg

SEQ ID NO: 245954 - DNA, 15 bp, Homo sapiens
aattagccaggtatg

SEQ ID NO: 245955 - DNA, 15 bp, Homo sapiens
caaaaccctgtctct

SEQ ID NO: 245956 - DNA, 15 bp, Homo sapiens
gcaaaaccctgtctc

SEQ ID NO: 245957 - DNA, 15 bp, Homo sapiens
agcaaaaccctgtct

SEQ ID NO: 245958 - DNA, 15 bp, Homo sapiens
tagcaaaaccctgtc

SEQ ID NO: 245959 - DNA, 15 bp, Homo sapiens
atagcaaaaccctgt

SEQ ID NO: 245960 - DNA, 15 bp, Homo sapiens
catagcaaaaccctg

SEQ ID NO: 245961 - DNA, 15 bp, Homo sapiens
acatagcaaaaccct

SEQ ID NO: 245962 - DNA, 15 bp, Homo sapiens
aacatagcaaaaccc

SEQ ID NO: 245963 - DNA, 15 bp, Homo sapiens
caacatagcaaaacc

SEQ ID NO: 245964 - DNA, 15 bp, Homo sapiens
ccaacatagcaaaac

SEQ ID NO: 245965 - DNA, 15 bp, Homo sapiens
gccaacatagcaaaa

SEQ ID NO: 245966 - DNA, 15 bp, Homo sapiens
ggccaacatagcaaa

SEQ ID NO: 245967 - DNA, 15 bp, Homo sapiens
tggccaacatagcaa

SEQ ID NO: 245968 - DNA, 15 bp, Homo sapiens
ctggccaacatagca

SEQ ID NO: 245969 - DNA, 15 bp, Homo sapiens
cctggccaacatagc

SEQ ID NO: 245970 - DNA, 15 bp, Homo sapiens
gcctggccaacatag

SEQ ID NO: 245971 - DNA, 15 bp, Homo sapiens
agcctggccaacata

SEQ ID NO: 245972 - DNA, 15 bp, Homo sapiens
ctgagatcaggagtt

SEQ ID NO: 245973 - DNA, 15 bp, Homo sapiens
cctgagatcaggagt

SEQ ID NO: 245974 - DNA, 15 bp, Homo sapiens
acctgagatcaggag

SEQ ID NO: 245975 - DNA, 15 bp, Homo sapiens
tacctgagatcagga

SEQ ID NO: 245976 - DNA, 15 bp, Homo sapiens
ctacctgagatcagg

SEQ ID NO: 245977 - DNA, 15 bp, Homo sapiens
actacctgagatcag

SEQ ID NO: 245978 - DNA, 15 bp, Homo sapiens
gactacctgagatca

SEQ ID NO: 245979 - DNA, 15 bp, Homo sapiens
ggactacctgagatc

SEQ ID NO: 245980 - DNA, 15 bp, Homo sapiens
cggactacctgagat

SEQ ID NO: 245981 - DNA, 15 bp, Homo sapiens
gcggactacctgaga

SEQ ID NO: 245982 - DNA, 15 bp, Homo sapiens
ggcggactacctgag

SEQ ID NO: 245983 - DNA, 15 bp, Homo sapiens
gggcggactacctga

SEQ ID NO: 245984 - DNA, 15 bp, Homo sapiens
tgggcggactacctg

SEQ ID NO: 245985 - DNA, 15 bp, Homo sapiens
gtgggcggactacct

SEQ ID NO: 245986 - DNA, 15 bp, Homo sapiens
ggtgggcggactacc

SEQ ID NO: 245987 - DNA, 15 bp, Homo sapiens
aggtgggcggactac

SEQ ID NO: 245988 - DNA, 15 bp, Homo sapiens
aaggtgggcggacta

SEQ ID NO: 245989 - DNA, 15 bp, Homo sapiens
caaggtgggcggact

SEQ ID NO: 245990 - DNA, 15 bp, Homo sapiens
tcaaggtgggcggac

SEQ ID NO: 245991 - DNA, 15 bp, Homo sapiens
gtcaaggtgggcgga

SEQ ID NO: 245992 - DNA, 15 bp, Homo sapiens
ggtcaaggtgggcgg

SEQ ID NO: 245993 - DNA, 15 bp, Homo sapiens
aggtcaaggtgggcg

SEQ ID NO: 245994 - DNA, 15 bp, Homo sapiens
gaggtcaaggtgggc

SEQ ID NO: 245995 - DNA, 15 bp, Homo sapiens
ggaggtcaaggtggg

SEQ ID NO: 245996 - DNA, 15 bp, Homo sapiens
gggaggtcaaggtgg

SEQ ID NO: 245997 - DNA, 15 bp, Homo sapiens
cgcagtggctcacac

SEQ ID NO: 245998 - DNA, 15 bp, Homo sapiens
gcgcagtggctcaca

SEQ ID NO: 245999 - DNA, 15 bp, Homo sapiens
gggcgcagtggctca

SEQ ID NO: 246000 - DNA, 15 bp, Homo sapiens
cgggcgcagtggctc

SEQ ID NO: 246001 - DNA, 15 bp, Homo sapiens
ccgggcgcagtggct

SEQ ID NO: 246002 - DNA, 15 bp, Homo sapiens
gccgggcgcagtggc

SEQ ID NO: 246003 - DNA, 15 bp, Homo sapiens
ggccgggcgcagtgg

SEQ ID NO: 246004 - DNA, 15 bp, Homo sapiens
cggccgggcgcagtg

SEQ ID NO: 246005 - DNA, 15 bp, Homo sapiens
gcggccgggcgcagt

SEQ ID NO: 246006 - DNA, 15 bp, Homo sapiens
tgcggccgggcgcag

SEQ ID NO: 246007 - DNA, 15 bp, Homo sapiens
gtgcggccgggcgca

SEQ ID NO: 246008 - DNA, 15 bp, Homo sapiens
tgtgcggccgggcgc

SEQ ID NO: 246009 - DNA, 15 bp, Homo sapiens
ctgtgcggccgggcg

SEQ ID NO: 246010 - DNA, 15 bp, Homo sapiens
actgtgcggccgggc

SEQ ID NO: 246011 - DNA, 15 bp, Homo sapiens
cactgtgcggccggg

SEQ ID NO: 246012 - DNA, 15 bp, Homo sapiens
tcactgtgcggccgg

SEQ ID NO: 246013 - DNA, 15 bp, Homo sapiens
atcactgtgcggccg

SEQ ID NO: 246014 - DNA, 15 bp, Homo sapiens
aatcactgtgcggcc

SEQ ID NO: 246015 - DNA, 15 bp, Homo sapiens
aaatcactgtgcggc

SEQ ID NO: 246016 - DNA, 15 bp, Homo sapiens
gaaatcactgtgcgg

SEQ ID NO: 246017 - DNA, 15 bp, Homo sapiens
agaaatcactgtgcg

SEQ ID NO: 246018 - DNA, 15 bp, Homo sapiens
aagaaatcactgtgc

SEQ ID NO: 246019 - DNA, 15 bp, Homo sapiens
taagaaatcactgtg

SEQ ID NO: 246020 - DNA, 15 bp, Homo sapiens
ttaagaaatcactgt

SEQ ID NO: 246021 - DNA, 15 bp, Homo sapiens
attaagaaatcactg

SEQ ID NO: 246022 - DNA, 15 bp, Homo sapiens
aattaagaaatcact

SEQ ID NO: 246023 - DNA, 15 bp, Homo sapiens
aaattaagaaatcac

SEQ ID NO: 246024 - DNA, 15 bp, Homo sapiens
taaattaagaaatca

SEQ ID NO: 246025 - DNA, 15 bp, Homo sapiens
ataaattaagaaatc

SEQ ID NO: 246026 - DNA, 15 bp, Homo sapiens
cataaattaagaaat

SEQ ID NO: 246027 - DNA, 15 bp, Homo sapiens
ccataaattaagaaa

SEQ ID NO: 246028 - DNA, 15 bp, Homo sapiens
accataaattaagaa

SEQ ID NO: 246029 - DNA, 15 bp, Homo sapiens
aaccataaattaaga

SEQ ID NO: 246030 - DNA, 15 bp, Homo sapiens
gaaccataaattaag

SEQ ID NO: 246031 - DNA, 15 bp, Homo sapiens
tgaaccataaattaa

SEQ ID NO: 246032 - DNA, 15 bp, Homo sapiens
atgaaccataaatta

SEQ ID NO: 246033 - DNA, 15 bp, Homo sapiens
catgaaccataaatt

SEQ ID NO: 246034 - DNA, 15 bp, Homo sapiens
ccatgaaccataaat

SEQ ID NO: 246035 - DNA, 15 bp, Homo sapiens
tccatgaaccataaa

SEQ ID NO: 246036 - DNA, 15 bp, Homo sapiens
ctccatgaaccataa

SEQ ID NO: 246037 - DNA, 15 bp, Homo sapiens
tctccatgaaccata

SEQ ID NO: 246038 - DNA, 15 bp, Homo sapiens
atctccatgaaccat

SEQ ID NO: 246039 - DNA, 15 bp, Homo sapiens
aatctccatgaacca

SEQ ID NO: 246040 - DNA, 15 bp, Homo sapiens
taatctccatgaacc

SEQ ID NO: 246041 - DNA, 15 bp, Homo sapiens
ataatctccatgaac

SEQ ID NO: 246042 - DNA, 15 bp, Homo sapiens
tataatctccatgaa

SEQ ID NO: 246043 - DNA, 15 bp, Homo sapiens
ttataatctccatga

SEQ ID NO: 246044 - DNA, 15 bp, Homo sapiens
tttataatctccatg

SEQ ID NO: 246045 - DNA, 15 bp, Homo sapiens
ttttataatctccat

SEQ ID NO: 246046 - DNA, 15 bp, Homo sapiens
tttttataatctcca

SEQ ID NO: 246047 - DNA, 15 bp, Homo sapiens
atttttataatctcc

SEQ ID NO: 246048 - DNA, 15 bp, Homo sapiens
aatttttataatctc

SEQ ID NO: 246049 - DNA, 15 bp, Homo sapiens
caatttttataatct

SEQ ID NO: 246050 - DNA, 15 bp, Homo sapiens
ccaatttttataatc

SEQ ID NO: 246051 - DNA, 15 bp, Homo sapiens
gccaatttttataat

SEQ ID NO: 246052 - DNA, 15 bp, Homo sapiens
tgccaatttttataa

SEQ ID NO: 246053 - DNA, 15 bp, Homo sapiens
atgccaatttttata

SEQ ID NO: 246054 - DNA, 15 bp, Homo sapiens
aatgccaatttttat

SEQ ID NO: 246055 - DNA, 15 bp, Homo sapiens
aaatgccaattttta

SEQ ID NO: 246056 - DNA, 15 bp, Homo sapiens
aaaatgccaattttt

SEQ ID NO: 246057 - DNA, 15 bp, Homo sapiens
taaaatgccaatttt

SEQ ID NO: 246058 - DNA, 15 bp, Homo sapiens
ttaaaatgccaattt

SEQ ID NO: 246059 - DNA, 15 bp, Homo sapiens
attaaaatgccaatt

SEQ ID NO: 246060 - DNA, 15 bp, Homo sapiens
aattaaaatgccaat

SEQ ID NO: 246061 - DNA, 15 bp, Homo sapiens
taattaaaatgccaa

SEQ ID NO: 246062 - DNA, 15 bp, Homo sapiens
ataattaaaatgcca

SEQ ID NO: 246063 - DNA, 15 bp, Homo sapiens
tataattaaaatgcc

SEQ ID NO: 246064 - DNA, 15 bp, Homo sapiens
ttataattaaaatgc

SEQ ID NO: 246065 - DNA, 15 bp, Homo sapiens
cttataattaaaatg

SEQ ID NO: 246066 - DNA, 15 bp, Homo sapiens
acttataattaaaat

SEQ ID NO: 246067 - DNA, 15 bp, Homo sapiens
cacttataattaaaa

SEQ ID NO: 246068 - DNA, 15 bp, Homo sapiens
tcacttataattaaa

SEQ ID NO: 246069 - DNA, 15 bp, Homo sapiens
atcacttataattaa

SEQ ID NO: 246070 - DNA, 15 bp, Homo sapiens
aatcacttataatta

SEQ ID NO: 246071 - DNA, 15 bp, Homo sapiens
caatcacttataatt

SEQ ID NO: 246072 - DNA, 15 bp, Homo sapiens
tcaatcacttataat

SEQ ID NO: 246073 - DNA, 15 bp, Homo sapiens
ttcaatcacttataa

SEQ ID NO: 246074 - DNA, 15 bp, Homo sapiens
attcaatcacttata

SEQ ID NO: 246075 - DNA, 15 bp, Homo sapiens
cattcaatcacttat

SEQ ID NO: 246076 - DNA, 15 bp, Homo sapiens
tcattcaatcactta

SEQ ID NO: 246077 - DNA, 15 bp, Homo sapiens
ttcattcaatcactt

SEQ ID NO: 246078 - DNA, 15 bp, Homo sapiens
cttcattcaatcact

SEQ ID NO: 246079 - DNA, 15 bp, Homo sapiens
acttcattcaatcac

SEQ ID NO: 246080 - DNA, 15 bp, Homo sapiens
gacttcattcaatca

SEQ ID NO: 246081 - DNA, 15 bp, Homo sapiens
tgacttcattcaatc

SEQ ID NO: 246082 - DNA, 15 bp, Homo sapiens
ctgacttcattcaat

SEQ ID NO: 246083 - DNA, 15 bp, Homo sapiens
tctgacttcattcaa

SEQ ID NO: 246084 - DNA, 15 bp, Homo sapiens
gtctgacttcattca

SEQ ID NO: 246085 - DNA, 15 bp, Homo sapiens
tgtctgacttcattc

SEQ ID NO: 246086 - DNA, 15 bp, Homo sapiens
atgtctgacttcatt

SEQ ID NO: 246087 - DNA, 15 bp, Homo sapiens
aatgtctgacttcat

SEQ ID NO: 246088 - DNA, 15 bp, Homo sapiens
caatgtctgacttca

SEQ ID NO: 246089 - DNA, 15 bp, Homo sapiens
ccaatgtctgacttc

SEQ ID NO: 246090 - DNA, 15 bp, Homo sapiens
tccaatgtctgactt

SEQ ID NO: 246091 - DNA, 15 bp, Homo sapiens
ctccaatgtctgact

SEQ ID NO: 246092 - DNA, 15 bp, Homo sapiens
tctccaatgtctgac

SEQ ID NO: 246093 - DNA, 15 bp, Homo sapiens
ttctccaatgtctga

SEQ ID NO: 246094 - DNA, 15 bp, Homo sapiens
gttctccaatgtctg

SEQ ID NO: 246095 - DNA, 15 bp, Homo sapiens
agttctccaatgtct

SEQ ID NO: 246096 - DNA, 15 bp, Homo sapiens
cagttctccaatgtc

SEQ ID NO: 246097 - DNA, 15 bp, Homo sapiens
tcagttctccaatgt

SEQ ID NO: 246098 - DNA, 15 bp, Homo sapiens
ttcagttctccaatg

SEQ ID NO: 246099 - DNA, 15 bp, Homo sapiens
attcagttctccaat

SEQ ID NO: 246100 - DNA, 15 bp, Homo sapiens
tattcagttctccaa

SEQ ID NO: 246101 - DNA, 15 bp, Homo sapiens
ttattcagttctcca

SEQ ID NO: 246102 - DNA, 15 bp, Homo sapiens
tttattcagttctcc

SEQ ID NO: 246103 - DNA, 15 bp, Homo sapiens
atttattcagttctc

SEQ ID NO: 246104 - DNA, 15 bp, Homo sapiens
catttattcagttct

SEQ ID NO: 246105 - DNA, 15 bp, Homo sapiens
ccatttattcagttc

SEQ ID NO: 246106 - DNA, 15 bp, Homo sapiens
tccatttattcagtt

SEQ ID NO: 246107 - DNA, 15 bp, Homo sapiens
gtccatttattcagt

SEQ ID NO: 246108 - DNA, 15 bp, Homo sapiens
tgtccatttattcag

SEQ ID NO: 246109 - DNA, 15 bp, Homo sapiens
gtgtccatttattca

SEQ ID NO: 246110 - DNA, 15 bp, Homo sapiens
tgtgtccatttattc

SEQ ID NO: 246111 - DNA, 15 bp, Homo sapiens
atgtgtccatttatt

SEQ ID NO: 246112 - DNA, 15 bp, Homo sapiens
aatgtgtccatttat

SEQ ID NO: 246113 - DNA, 15 bp, Homo sapiens
aaatgtgtccattta

SEQ ID NO: 246114 - DNA, 15 bp, Homo sapiens
taaatgtgtccattt

SEQ ID NO: 246115 - DNA, 15 bp, Homo sapiens
ataaatgtgtccatt

SEQ ID NO: 246116 - DNA, 15 bp, Homo sapiens
aataaatgtgtccat

SEQ ID NO: 246117 - DNA, 15 bp, Homo sapiens
gaataaatgtgtcca

SEQ ID NO: 246118 - DNA, 15 bp, Homo sapiens
tgaataaatgtgtcc

SEQ ID NO: 246119 - DNA, 15 bp, Homo sapiens
ttgaataaatgtgtc

SEQ ID NO: 246120 - DNA, 15 bp, Homo sapiens
gttgaataaatgtgt

SEQ ID NO: 246121 - DNA, 15 bp, Homo sapiens
tgttgaataaatgtg

SEQ ID NO: 246122 - DNA, 15 bp, Homo sapiens
ttgttgaataaatgt

SEQ ID NO: 246123 - DNA, 15 bp, Homo sapiens
tttgttgaataaatg

SEQ ID NO: 246124 - DNA, 15 bp, Homo sapiens
ctttgttgaataaat

SEQ ID NO: 246125 - DNA, 15 bp, Homo sapiens
cctttgttgaataaa

SEQ ID NO: 246126 - DNA, 15 bp, Homo sapiens
acctttgttgaataa

SEQ ID NO: 246127 - DNA, 15 bp, Homo sapiens
aacctttgttgaata

SEQ ID NO: 246128 - DNA, 15 bp, Homo sapiens
caacctttgttgaat

SEQ ID NO: 246129 - DNA, 15 bp, Homo sapiens
acaacctttgttgaa

SEQ ID NO: 246130 - DNA, 15 bp, Homo sapiens
aacaacctttgttga

SEQ ID NO: 246131 - DNA, 15 bp, Homo sapiens
caacaacctttgttg

SEQ ID NO: 246132 - DNA, 15 bp, Homo sapiens
tcaacaacctttgtt

SEQ ID NO: 246133 - DNA, 15 bp, Homo sapiens
ctcaacaacctttgt

SEQ ID NO: 246134 - DNA, 15 bp, Homo sapiens
cctcaacaacctttg

SEQ ID NO: 246135 - DNA, 15 bp, Homo sapiens
tcctcaacaaccttt

SEQ ID NO: 246136 - DNA, 15 bp, Homo sapiens
atcctcaacaacctt

SEQ ID NO: 246137 - DNA, 15 bp, Homo sapiens
gatcctcaacaacct

SEQ ID NO: 246138 - DNA, 15 bp, Homo sapiens
agatcctcaacaacc

SEQ ID NO: 246139 - DNA, 15 bp, Homo sapiens
cagatcctcaacaac

SEQ ID NO: 246140 - DNA, 15 bp, Homo sapiens
gcagatcctcaacaa

SEQ ID NO: 246141 - DNA, 15 bp, Homo sapiens
agcagatcctcaaca

SEQ ID NO: 246142 - DNA, 15 bp, Homo sapiens
tagcagatcctcaac

SEQ ID NO: 246143 - DNA, 15 bp, Homo sapiens
ctagcagatcctcaa

SEQ ID NO: 246144 - DNA, 15 bp, Homo sapiens
cctagcagatcctca

SEQ ID NO: 246145 - DNA, 15 bp, Homo sapiens
acctagcagatcctc

SEQ ID NO: 246146 - DNA, 15 bp, Homo sapiens
cacctagcagatcct

SEQ ID NO: 246147 - DNA, 15 bp, Homo sapiens
acacctagcagatcc

SEQ ID NO: 246148 - DNA, 15 bp, Homo sapiens
gacacctagcagatc

SEQ ID NO: 246149 - DNA, 15 bp, Homo sapiens
tgacacctagcagat

SEQ ID NO: 246150 - DNA, 15 bp, Homo sapiens
ctgacacctagcaga

SEQ ID NO: 246151 - DNA, 15 bp, Homo sapiens
cctgacacctagcag

SEQ ID NO: 246152 - DNA, 15 bp, Homo sapiens
gcctgacacctagca

SEQ ID NO: 246153 - DNA, 15 bp, Homo sapiens
tgcctgacacctagc

SEQ ID NO: 246154 - DNA, 15 bp, Homo sapiens
atgcctgacacctag

SEQ ID NO: 246155 - DNA, 15 bp, Homo sapiens
aatgcctgacaccta

SEQ ID NO: 246156 - DNA, 15 bp, Homo sapiens
caatgcctgacacct

SEQ ID NO: 246157 - DNA, 15 bp, Homo sapiens
acaatgcctgacacc

SEQ ID NO: 246158 - DNA, 15 bp, Homo sapiens
cacaatgcctgacac

SEQ ID NO: 246159 - DNA, 15 bp, Homo sapiens
gcacaatgcctgaca

SEQ ID NO: 246160 - DNA, 15 bp, Homo sapiens
tgcacaatgcctgac

SEQ ID NO: 246161 - DNA, 15 bp, Homo sapiens
ttgcacaatgcctga

SEQ ID NO: 246162 - DNA, 15 bp, Homo sapiens
tttgcacaatgcctg

SEQ ID NO: 246163 - DNA, 15 bp, Homo sapiens
gtttgcacaatgcct

SEQ ID NO: 246164 - DNA, 15 bp, Homo sapiens
agtttgcacaatgcc

SEQ ID NO: 246165 - DNA, 15 bp, Homo sapiens
cagtttgcacaatgc

SEQ ID NO: 246166 - DNA, 15 bp, Homo sapiens
ccagtttgcacaatg

SEQ ID NO: 246167 - DNA, 15 bp, Homo sapiens
accagtttgcacaat

SEQ ID NO: 246168 - DNA, 15 bp, Homo sapiens
gaccagtttgcacaa

SEQ ID NO: 246169 - DNA, 15 bp, Homo sapiens
cgaccagtttgcaca

SEQ ID NO: 246170 - DNA, 15 bp, Homo sapiens
tcgaccagtttgcac

SEQ ID NO: 246171 - DNA, 15 bp, Homo sapiens
ctcgaccagtttgca

SEQ ID NO: 246172 - DNA, 15 bp, Homo sapiens
tctcgaccagtttgc

SEQ ID NO: 246173 - DNA, 15 bp, Homo sapiens
ctctcgaccagtttg

SEQ ID NO: 246174 - DNA, 15 bp, Homo sapiens
tctctcgaccagttt

SEQ ID NO: 246175 - DNA, 15 bp, Homo sapiens
ttctctcgaccagtt

SEQ ID NO: 246176 - DNA, 15 bp, Homo sapiens
attctctcgaccagt

SEQ ID NO: 246177 - DNA, 15 bp, Homo sapiens
tattctctcgaccag

SEQ ID NO: 246178 - DNA, 15 bp, Homo sapiens
ttattctctcgacca

SEQ ID NO: 246179 - DNA, 15 bp, Homo sapiens
cttattctctcgacc

SEQ ID NO: 246180 - DNA, 15 bp, Homo sapiens
tcttattctctcgac

SEQ ID NO: 246181 - DNA, 15 bp, Homo sapiens
atcttattctctcga

SEQ ID NO: 246182 - DNA, 15 bp, Homo sapiens
tatcttattctctcg

SEQ ID NO: 246183 - DNA, 15 bp, Homo sapiens
atatcttattctctc

SEQ ID NO: 246184 - DNA, 15 bp, Homo sapiens
aatatcttattctct

SEQ ID NO: 246185 - DNA, 15 bp, Homo sapiens
gaatatcttattctc

SEQ ID NO: 246186 - DNA, 15 bp, Homo sapiens
agaatatcttattct

SEQ ID NO: 246187 - DNA, 15 bp, Homo sapiens
gagaatatcttattc

SEQ ID NO: 246188 - DNA, 15 bp, Homo sapiens
agagaatatcttatt

SEQ ID NO: 246189 - DNA, 15 bp, Homo sapiens
gagagaatatcttat

SEQ ID NO: 246190 - DNA, 15 bp, Homo sapiens
agagagaatatctta

SEQ ID NO: 246191 - DNA, 15 bp, Homo sapiens
cagagagaatatctt

SEQ ID NO: 246192 - DNA, 15 bp, Homo sapiens
ccagagagaatatct

SEQ ID NO: 246193 - DNA, 15 bp, Homo sapiens
gccagagagaatatc

SEQ ID NO: 246194 - DNA, 15 bp, Homo sapiens
agccagagagaatat

SEQ ID NO: 246195 - DNA, 15 bp, Homo sapiens
aagccagagagaata

SEQ ID NO: 246196 - DNA, 15 bp, Homo sapiens
gaagccagagagaat

SEQ ID NO: 246197 - DNA, 15 bp, Homo sapiens
tgaagccagagagaa

SEQ ID NO: 246198 - DNA, 15 bp, Homo sapiens
atgaagccagagaga

SEQ ID NO: 246199 - DNA, 15 bp, Homo sapiens
tatgaagccagagag

SEQ ID NO: 246200 - DNA, 15 bp, Homo sapiens
ctatgaagccagaga

SEQ ID NO: 246201 - DNA, 15 bp, Homo sapiens
tctatgaagccagag

SEQ ID NO: 246202 - DNA, 15 bp, Homo sapiens
ctctatgaagccaga

SEQ ID NO: 246203 - DNA, 15 bp, Homo sapiens
actctatgaagccag

SEQ ID NO: 246204 - DNA, 15 bp, Homo sapiens
aactctatgaagcca

SEQ ID NO: 246205 - DNA, 15 bp, Homo sapiens
aaactctatgaagcc

SEQ ID NO: 246206 - DNA, 15 bp, Homo sapiens
taaactctatgaagc

SEQ ID NO: 246207 - DNA, 15 bp, Homo sapiens
gtaaactctatgaag

SEQ ID NO: 246208 - DNA, 15 bp, Homo sapiens
tgtaaactctatgaa

SEQ ID NO: 246209 - DNA, 15 bp, Homo sapiens
atgtaaactctatga

SEQ ID NO: 246210 - DNA, 15 bp, Homo sapiens
catgtaaactctatg

SEQ ID NO: 246211 - DNA, 15 bp, Homo sapiens
ccatgtaaactctat

SEQ ID NO: 246212 - DNA, 15 bp, Homo sapiens
accatgtaaactcta

SEQ ID NO: 246213 - DNA, 15 bp, Homo sapiens
gaccatgtaaactct

SEQ ID NO: 246214 - DNA, 15 bp, Homo sapiens
tgaccatgtaaactc

SEQ ID NO: 246215 - DNA, 15 bp, Homo sapiens
ctgaccatgtaaact

SEQ ID NO: 246216 - DNA, 15 bp, Homo sapiens
tctgaccatgtaaac

SEQ ID NO: 246217 - DNA, 15 bp, Homo sapiens
ctctgaccatgtaaa

SEQ ID NO: 246218 - DNA, 15 bp, Homo sapiens
tctctgaccatgtaa

SEQ ID NO: 246219 - DNA, 15 bp, Homo sapiens
ctctctgaccatgta

SEQ ID NO: 246220 - DNA, 15 bp, Homo sapiens
gctctctgaccatgt

SEQ ID NO: 246221 - DNA, 15 bp, Homo sapiens
cgctctctgaccatg

SEQ ID NO: 246222 - DNA, 15 bp, Homo sapiens
tcgctctctgaccat

SEQ ID NO: 246223 - DNA, 15 bp, Homo sapiens
ctcgctctctgacca

SEQ ID NO: 246224 - DNA, 15 bp, Homo sapiens
cctcgctctctgacc

SEQ ID NO: 246225 - DNA, 15 bp, Homo sapiens
tcctcgctctctgac

SEQ ID NO: 246226 - DNA, 15 bp, Homo sapiens
gtcctcgctctctga

SEQ ID NO: 246227 - DNA, 15 bp, Homo sapiens
tgtcctcgctctctg

SEQ ID NO: 246228 - DNA, 15 bp, Homo sapiens
ttgtcctcgctctct

SEQ ID NO: 246229 - DNA, 15 bp, Homo sapiens
attgtcctcgctctc

SEQ ID NO: 246230 - DNA, 15 bp, Homo sapiens
tattgtcctcgctct

SEQ ID NO: 246231 - DNA, 15 bp, Homo sapiens
ttattgtcctcgctc

SEQ ID NO: 246232 - DNA, 15 bp, Homo sapiens
tttattgtcctcgct

SEQ ID NO: 246233 - DNA, 15 bp, Homo sapiens
gtttattgtcctcgc

SEQ ID NO: 246234 - DNA, 15 bp, Homo sapiens
tgtttattgtcctcg

SEQ ID NO: 246235 - DNA, 15 bp, Homo sapiens
gtgtttattgtcctc

SEQ ID NO: 246236 - DNA, 15 bp, Homo sapiens
tgtgtttattgtcct

SEQ ID NO: 246237 - DNA, 15 bp, Homo sapiens
ttgtgtttattgtcc

SEQ ID NO: 246238 - DNA, 15 bp, Homo sapiens
tttgtgtttattgtc

SEQ ID NO: 246239 - DNA, 15 bp, Homo sapiens
ttttgtgtttattgt

SEQ ID NO: 246240 - DNA, 15 bp, Homo sapiens
tttttgtgtttattg

SEQ ID NO: 246241 - DNA, 15 bp, Homo sapiens
gtttttgtgtttatt

SEQ ID NO: 246242 - DNA, 15 bp, Homo sapiens
tgtttttgtgtttat

SEQ ID NO: 246243 - DNA, 15 bp, Homo sapiens
atgtttttgtgttta

SEQ ID NO: 246244 - DNA, 15 bp, Homo sapiens
tatgtttttgtgttt

SEQ ID NO: 246245 - DNA, 15 bp, Homo sapiens
atatgtttttgtgtt

SEQ ID NO: 246246 - DNA, 15 bp, Homo sapiens
gatatgtttttgtgt

SEQ ID NO: 246247 - DNA, 15 bp, Homo sapiens
cgatatgtttttgtg

SEQ ID NO: 246248 - DNA, 15 bp, Homo sapiens
acgatatgtttttgt

SEQ ID NO: 246249 - DNA, 15 bp, Homo sapiens
gacgatatgtttttg

SEQ ID NO: 246250 - DNA, 15 bp, Homo sapiens
tgacgatatgttttt

SEQ ID NO: 246251 - DNA, 15 bp, Homo sapiens
atgacgatatgtttt

SEQ ID NO: 246252 - DNA, 15 bp, Homo sapiens
catgacgatatgttt

SEQ ID NO: 246253 - DNA, 15 bp, Homo sapiens
gcatgacgatatgtt

SEQ ID NO: 246254 - DNA, 15 bp, Homo sapiens
tgcatgacgatatgt

SEQ ID NO: 246255 - DNA, 15 bp, Homo sapiens
atgcatgacgatatg

SEQ ID NO: 246256 - DNA, 15 bp, Homo sapiens
tatgcatgacgatat

SEQ ID NO: 246257 - DNA, 15 bp, Homo sapiens
atatgcatgacgata

SEQ ID NO: 246258 - DNA, 15 bp, Homo sapiens
aatatgcatgacgat

SEQ ID NO: 246259 - DNA, 15 bp, Homo sapiens
caatatgcatgacga

SEQ ID NO: 246260 - DNA, 15 bp, Homo sapiens
tcaatatgcatgacg

SEQ ID NO: 246261 - DNA, 15 bp, Homo sapiens
gtcaatatgcatgac

SEQ ID NO: 246262 - DNA, 15 bp, Homo sapiens
tgtcaatatgcatga

SEQ ID NO: 246263 - DNA, 15 bp, Homo sapiens
ttgtcaatatgcatg

SEQ ID NO: 246264 - DNA, 15 bp, Homo sapiens
cttgtcaatatgcat

SEQ ID NO: 246265 - DNA, 15 bp, Homo sapiens
acttgtcaatatgca

SEQ ID NO: 246266 - DNA, 15 bp, Homo sapiens
gacttgtcaatatgc

SEQ ID NO: 246267 - DNA, 15 bp, Homo sapiens
ggacttgtcaatatg

SEQ ID NO: 246268 - DNA, 15 bp, Homo sapiens
tggacttgtcaatat

SEQ ID NO: 246269 - DNA, 15 bp, Homo sapiens
atggacttgtcaata

SEQ ID NO: 246270 - DNA, 15 bp, Homo sapiens
aatggacttgtcaat

SEQ ID NO: 246271 - DNA, 15 bp, Homo sapiens
aaatggacttgtcaa

SEQ ID NO: 246272 - DNA, 15 bp, Homo sapiens
aaaatggacttgtca

SEQ ID NO: 246273 - DNA, 15 bp, Homo sapiens
taaaatggacttgtc

SEQ ID NO: 246274 - DNA, 15 bp, Homo sapiens
ttaaaatggacttgt

SEQ ID NO: 246275 - DNA, 15 bp, Homo sapiens
tttaaaatggacttg

SEQ ID NO: 246276 - DNA, 15 bp, Homo sapiens
ttttaaaatggactt

SEQ ID NO: 246277 - DNA, 15 bp, Homo sapiens
tttttaaaatggact

SEQ ID NO: 246278 - DNA, 15 bp, Homo sapiens
ctttttaaaatggac

SEQ ID NO: 246279 - DNA, 15 bp, Homo sapiens
tctttttaaaatgga

SEQ ID NO: 246280 - DNA, 15 bp, Homo sapiens
ttctttttaaaatgg

SEQ ID NO: 246281 - DNA, 15 bp, Homo sapiens
gttctttttaaaatg

SEQ ID NO: 246282 - DNA, 15 bp, Homo sapiens
tgttctttttaaaat

SEQ ID NO: 246283 - DNA, 15 bp, Homo sapiens
ctgttctttttaaaa

SEQ ID NO: 246284 - DNA, 15 bp, Homo sapiens
cctgttctttttaaa

SEQ ID NO: 246285 - DNA, 15 bp, Homo sapiens
ccctgttctttttaa

SEQ ID NO: 246286 - DNA, 15 bp, Homo sapiens
tccctgttcttttta

SEQ ID NO: 246287 - DNA, 15 bp, Homo sapiens
ttccctgttcttttt

SEQ ID NO: 246288 - DNA, 15 bp, Homo sapiens
gttccctgttctttt

SEQ ID NO: 246289 - DNA, 15 bp, Homo sapiens
agttccctgttcttt

SEQ ID NO: 246290 - DNA, 15 bp, Homo sapiens
tagttccctgttctt

SEQ ID NO: 246291 - DNA, 15 bp, Homo sapiens
atagttccctgttct

SEQ ID NO: 246292 - DNA, 15 bp, Homo sapiens
tatagttccctgttc

SEQ ID NO: 246293 - DNA, 15 bp, Homo sapiens
ctatagttccctgtt

SEQ ID NO: 246294 - DNA, 15 bp, Homo sapiens
cctatagttccctgt

SEQ ID NO: 246295 - DNA, 15 bp, Homo sapiens
tcctatagttccctg

SEQ ID NO: 246296 - DNA, 15 bp, Homo sapiens
ctcctatagttccct

SEQ ID NO: 246297 - DNA, 15 bp, Homo sapiens
tctcctatagttccc

SEQ ID NO: 246298 - DNA, 15 bp, Homo sapiens
ctctcctatagttcc

SEQ ID NO: 246299 - DNA, 15 bp, Homo sapiens
tctctcctatagttc

SEQ ID NO: 246300 - DNA, 15 bp, Homo sapiens
ttctctcctatagtt

SEQ ID NO: 246301 - DNA, 15 bp, Homo sapiens
cttctctcctatagt

SEQ ID NO: 246302 - DNA, 15 bp, Homo sapiens
ccttctctcctatag

SEQ ID NO: 246303 - DNA, 15 bp, Homo sapiens
cccttctctcctata

SEQ ID NO: 246304 - DNA, 15 bp, Homo sapiens
ccccttctctcctat

SEQ ID NO: 246305 - DNA, 15 bp, Homo sapiens
cccccttctctccta

SEQ ID NO: 246306 - DNA, 15 bp, Homo sapiens
gcccccttctctcct

SEQ ID NO: 246307 - DNA, 15 bp, Homo sapiens
tgcccccttctctcc

SEQ ID NO: 246308 - DNA, 15 bp, Homo sapiens
ctgcccccttctctc

SEQ ID NO: 246309 - DNA, 15 bp, Homo sapiens
cctgcccccttctct

SEQ ID NO: 246310 - DNA, 15 bp, Homo sapiens
tcctgcccccttctc

SEQ ID NO: 246311 - DNA, 15 bp, Homo sapiens
ctcctgcccccttct

SEQ ID NO: 246312 - DNA, 15 bp, Homo sapiens
actcctgcccccttc

SEQ ID NO: 246313 - DNA, 15 bp, Homo sapiens
cactcctgccccctt

SEQ ID NO: 246314 - DNA, 15 bp, Homo sapiens
ccactcctgccccct

SEQ ID NO: 246315 - DNA, 15 bp, Homo sapiens
cccactcctgccccc

SEQ ID NO: 246316 - DNA, 15 bp, Homo sapiens
tcccactcctgcccc

SEQ ID NO: 246317 - DNA, 15 bp, Homo sapiens
ttcccactcctgccc

SEQ ID NO: 246318 - DNA, 15 bp, Homo sapiens
attcccactcctgcc

SEQ ID NO: 246319 - DNA, 15 bp, Homo sapiens
tattcccactcctgc

SEQ ID NO: 246320 - DNA, 15 bp, Homo sapiens
ttattcccactcctg

SEQ ID NO: 246321 - DNA, 15 bp, Homo sapiens
tttattcccactcct

SEQ ID NO: 246322 - DNA, 15 bp, Homo sapiens
atttattcccactcc

SEQ ID NO: 246323 - DNA, 15 bp, Homo sapiens
aatttattcccactc

SEQ ID NO: 246324 - DNA, 15 bp, Homo sapiens
caatttattcccact

SEQ ID NO: 246325 - DNA, 15 bp, Homo sapiens
acaatttattcccac

SEQ ID NO: 246326 - DNA, 15 bp, Homo sapiens
tacaatttattccca

SEQ ID NO: 246327 - DNA, 15 bp, Homo sapiens
gtacaatttattccc

SEQ ID NO: 246328 - DNA, 15 bp, Homo sapiens
agtacaatttattcc

SEQ ID NO: 246329 - DNA, 15 bp, Homo sapiens
cagtacaatttattc

SEQ ID NO: 246330 - DNA, 15 bp, Homo sapiens
ccagtacaatttatt

SEQ ID NO: 246331 - DNA, 15 bp, Homo sapiens
cccagtacaatttat

SEQ ID NO: 246332 - DNA, 15 bp, Homo sapiens
tcccagtacaattta

SEQ ID NO: 246333 - DNA, 15 bp, Homo sapiens
ttcccagtacaattt

SEQ ID NO: 246334 - DNA, 15 bp, Homo sapiens
cttcccagtacaatt

SEQ ID NO: 246335 - DNA, 15 bp, Homo sapiens
gcttcccagtacaat

SEQ ID NO: 246336 - DNA, 15 bp, Homo sapiens
tgcttcccagtacaa

SEQ ID NO: 246337 - DNA, 15 bp, Homo sapiens
ctgcttcccagtaca

SEQ ID NO: 246338 - DNA, 15 bp, Homo sapiens
actgcttcccagtac

SEQ ID NO: 246339 - DNA, 15 bp, Homo sapiens
gactgcttcccagta

SEQ ID NO: 246340 - DNA, 15 bp, Homo sapiens
tgactgcttcccagt

SEQ ID NO: 246341 - DNA, 15 bp, Homo sapiens
ctgactgcttcccag

SEQ ID NO: 246342 - DNA, 15 bp, Homo sapiens
cctgactgcttccca

SEQ ID NO: 246343 - DNA, 15 bp, Homo sapiens
ccctgactgcttccc

SEQ ID NO: 246344 - DNA, 15 bp, Homo sapiens
cccctgactgcttcc

SEQ ID NO: 246345 - DNA, 15 bp, Homo sapiens
tcccctgactgcttc

SEQ ID NO: 246346 - DNA, 15 bp, Homo sapiens
ctcccctgactgctt

SEQ ID NO: 246347 - DNA, 15 bp, Homo sapiens
actcccctgactgct

SEQ ID NO: 246348 - DNA, 15 bp, Homo sapiens
aactcccctgactgc

SEQ ID NO: 246349 - DNA, 15 bp, Homo sapiens
aaactcccctgactg

SEQ ID NO: 246350 - DNA, 15 bp, Homo sapiens
aaaactcccctgact

SEQ ID NO: 246351 - DNA, 15 bp, Homo sapiens
aaaaactcccctgac

SEQ ID NO: 246352 - DNA, 15 bp, Homo sapiens
gaaaaactcccctga

SEQ ID NO: 246353 - DNA, 15 bp, Homo sapiens
agaaaaactcccctg

SEQ ID NO: 246354 - DNA, 15 bp, Homo sapiens
aagaaaaactcccct

SEQ ID NO: 246355 - DNA, 15 bp, Homo sapiens
caagaaaaactcccc

SEQ ID NO: 246356 - DNA, 15 bp, Homo sapiens
tcaagaaaaactccc

SEQ ID NO: 246357 - DNA, 15 bp, Homo sapiens
ctcaagaaaaactcc

SEQ ID NO: 246358 - DNA, 15 bp, Homo sapiens
cctcaagaaaaactc

SEQ ID NO: 246359 - DNA, 15 bp, Homo sapiens
tcctcaagaaaaact

SEQ ID NO: 246360 - DNA, 15 bp, Homo sapiens
ctcctcaagaaaaac

SEQ ID NO: 246361 - DNA, 15 bp, Homo sapiens
cctcctcaagaaaaa

SEQ ID NO: 246362 - DNA, 15 bp, Homo sapiens
gcctcctcaagaaaa

SEQ ID NO: 246363 - DNA, 15 bp, Homo sapiens
tgcctcctcaagaaa

SEQ ID NO: 246364 - DNA, 15 bp, Homo sapiens
ttgcctcctcaagaa

SEQ ID NO: 246365 - DNA, 15 bp, Homo sapiens
gttgcctcctcaaga

SEQ ID NO: 246366 - DNA, 15 bp, Homo sapiens
tgttgcctcctcaag

SEQ ID NO: 246367 - DNA, 15 bp, Homo sapiens
atgttgcctcctcaa

SEQ ID NO: 246368 - DNA, 15 bp, Homo sapiens
aatgttgcctcctca

SEQ ID NO: 246369 - DNA, 15 bp, Homo sapiens
aaatgttgcctcctc

SEQ ID NO: 246370 - DNA, 15 bp, Homo sapiens
caaatgttgcctcct

SEQ ID NO: 246371 - DNA, 15 bp, Homo sapiens
tcaaatgttgcctcc

SEQ ID NO: 246372 - DNA, 15 bp, Homo sapiens
ctcaaatgttgcctc

SEQ ID NO: 246373 - DNA, 15 bp, Homo sapiens
gctcaaatgttgcct

SEQ ID NO: 246374 - DNA, 15 bp, Homo sapiens
agctcaaatgttgcc

SEQ ID NO: 246375 - DNA, 15 bp, Homo sapiens
cagctcaaatgttgc

SEQ ID NO: 246376 - DNA, 15 bp, Homo sapiens
tcagctcaaatgttg

SEQ ID NO: 246377 - DNA, 15 bp, Homo sapiens
ctcagctcaaatgtt

SEQ ID NO: 246378 - DNA, 15 bp, Homo sapiens
tctcagctcaaatgt

SEQ ID NO: 246379 - DNA, 15 bp, Homo sapiens
gtctcagctcaaatg

SEQ ID NO: 246380 - DNA, 15 bp, Homo sapiens
ggtctcagctcaaat

SEQ ID NO: 246381 - DNA, 15 bp, Homo sapiens
tggtctcagctcaaa

SEQ ID NO: 246382 - DNA, 15 bp, Homo sapiens
ctggtctcagctcaa

SEQ ID NO: 246383 - DNA, 15 bp, Homo sapiens
tctggtctcagctca

SEQ ID NO: 246384 - DNA, 15 bp, Homo sapiens
ttctggtctcagctc

SEQ ID NO: 246385 - DNA, 15 bp, Homo sapiens
tttctggtctcagct

SEQ ID NO: 246386 - DNA, 15 bp, Homo sapiens
ttttctggtctcagc

SEQ ID NO: 246387 - DNA, 15 bp, Homo sapiens
cttttctggtctcag

SEQ ID NO: 246388 - DNA, 15 bp, Homo sapiens
ccttttctggtctca

SEQ ID NO: 246389 - DNA, 15 bp, Homo sapiens
cccttttctggtctc

SEQ ID NO: 246390 - DNA, 15 bp, Homo sapiens
tcccttttctggtct

SEQ ID NO: 246391 - DNA, 15 bp, Homo sapiens
ctcccttttctggtc

SEQ ID NO: 246392 - DNA, 15 bp, Homo sapiens
gctcccttttctggt

SEQ ID NO: 246393 - DNA, 15 bp, Homo sapiens
tgctcccttttctgg

SEQ ID NO: 246394 - DNA, 15 bp, Homo sapiens
ctgctcccttttctg

SEQ ID NO: 246395 - DNA, 15 bp, Homo sapiens
cctgctcccttttct

SEQ ID NO: 246396 - DNA, 15 bp, Homo sapiens
tcctgctcccttttc

SEQ ID NO: 246397 - DNA, 15 bp, Homo sapiens
ttcctgctccctttt

SEQ ID NO: 246398 - DNA, 15 bp, Homo sapiens
attcctgctcccttt

SEQ ID NO: 246399 - DNA, 15 bp, Homo sapiens
aattcctgctccctt

SEQ ID NO: 246400 - DNA, 15 bp, Homo sapiens
taattcctgctccct

SEQ ID NO: 246401 - DNA, 15 bp, Homo sapiens
ttaattcctgctccc

SEQ ID NO: 246402 - DNA, 15 bp, Homo sapiens
gttaattcctgctcc

SEQ ID NO: 246403 - DNA, 15 bp, Homo sapiens
agttaattcctgctc

SEQ ID NO: 246404 - DNA, 15 bp, Homo sapiens
cagttaattcctgct

SEQ ID NO: 246405 - DNA, 15 bp, Homo sapiens
ccagttaattcctgc

SEQ ID NO: 246406 - DNA, 15 bp, Homo sapiens
tccagttaattcctg

SEQ ID NO: 246407 - DNA, 15 bp, Homo sapiens
gtccagttaattcct

SEQ ID NO: 246408 - DNA, 15 bp, Homo sapiens
tgtccagttaattcc

SEQ ID NO: 246409 - DNA, 15 bp, Homo sapiens
ttgtccagttaattc

SEQ ID NO: 246410 - DNA, 15 bp, Homo sapiens
tttgtccagttaatt

SEQ ID NO: 246411 - DNA, 15 bp, Homo sapiens
ctttgtccagttaat

SEQ ID NO: 246412 - DNA, 15 bp, Homo sapiens
tctttgtccagttaa

SEQ ID NO: 246413 - DNA, 15 bp, Homo sapiens
gtctttgtccagtta

SEQ ID NO: 246414 - DNA, 15 bp, Homo sapiens
cgtctttgtccagtt

SEQ ID NO: 246415 - DNA, 15 bp, Homo sapiens
ccgtctttgtccagt

SEQ ID NO: 246416 - DNA, 15 bp, Homo sapiens
cccgtctttgtccag

SEQ ID NO: 246417 - DNA, 15 bp, Homo sapiens
ccccgtctttgtcca

SEQ ID NO: 246418 - DNA, 15 bp, Homo sapiens
tccccgtctttgtcc

SEQ ID NO: 246419 - DNA, 15 bp, Homo sapiens
ctccccgtctttgtc

SEQ ID NO: 246420 - DNA, 15 bp, Homo sapiens
cctccccgtctttgt

SEQ ID NO: 246421 - DNA, 15 bp, Homo sapiens
tcctccccgtctttg

SEQ ID NO: 246422 - DNA, 15 bp, Homo sapiens
ctcctccccgtcttt

SEQ ID NO: 246423 - DNA, 15 bp, Homo sapiens
actcctccccgtctt

SEQ ID NO: 246424 - DNA, 15 bp, Homo sapiens
cactcctccccgtct

SEQ ID NO: 246425 - DNA, 15 bp, Homo sapiens
acactcctccccgtc

SEQ ID NO: 246426 - DNA, 15 bp, Homo sapiens
tacactcctccccgt

SEQ ID NO: 246427 - DNA, 15 bp, Homo sapiens
atacactcctccccg

SEQ ID NO: 246428 - DNA, 15 bp, Homo sapiens
catacactcctcccc

SEQ ID NO: 246429 - DNA, 15 bp, Homo sapiens
acatacactcctccc

SEQ ID NO: 246430 - DNA, 15 bp, Homo sapiens
gacatacactcctcc

SEQ ID NO: 246431 - DNA, 15 bp, Homo sapiens
agacatacactcctc

SEQ ID NO: 246432 - DNA, 15 bp, Homo sapiens
gagacatacactcct

SEQ ID NO: 246433 - DNA, 15 bp, Homo sapiens
tgagacatacactcc

SEQ ID NO: 246434 - DNA, 15 bp, Homo sapiens
gtgagacatacactc

SEQ ID NO: 246435 - DNA, 15 bp, Homo sapiens
agtgagacatacact

SEQ ID NO: 246436 - DNA, 15 bp, Homo sapiens
tagtgagacatacac

SEQ ID NO: 246437 - DNA, 15 bp, Homo sapiens
gtagtgagacataca

SEQ ID NO: 246438 - DNA, 15 bp, Homo sapiens
tgtagtgagacatac

SEQ ID NO: 246439 - DNA, 15 bp, Homo sapiens
ttgtagtgagacata

SEQ ID NO: 246440 - DNA, 15 bp, Homo sapiens
tttgtagtgagacat

SEQ ID NO: 246441 - DNA, 15 bp, Homo sapiens
ctttgtagtgagaca

SEQ ID NO: 246442 - DNA, 15 bp, Homo sapiens
gctttgtagtgagac

SEQ ID NO: 246443 - DNA, 15 bp, Homo sapiens
tgctttgtagtgaga

SEQ ID NO: 246444 - DNA, 15 bp, Homo sapiens
ttgctttgtagtgag

SEQ ID NO: 246445 - DNA, 15 bp, Homo sapiens
cttgctttgtagtga

SEQ ID NO: 246446 - DNA, 15 bp, Homo sapiens
tcttgctttgtagtg

SEQ ID NO: 246447 - DNA, 15 bp, Homo sapiens
ttcttgctttgtagt

SEQ ID NO: 246448 - DNA, 15 bp, Homo sapiens
tttcttgctttgtag

SEQ ID NO: 246449 - DNA, 15 bp, Homo sapiens
ctttcttgctttgta

SEQ ID NO: 246450 - DNA, 15 bp, Homo sapiens
tctttcttgctttgt

SEQ ID NO: 246451 - DNA, 15 bp, Homo sapiens
ctctttcttgctttg

SEQ ID NO: 246452 - DNA, 15 bp, Homo sapiens
gctctttcttgcttt

SEQ ID NO: 246453 - DNA, 15 bp, Homo sapiens
agctctttcttgctt

SEQ ID NO: 246454 - DNA, 15 bp, Homo sapiens
tagctctttcttgct

SEQ ID NO: 246455 - DNA, 15 bp, Homo sapiens
gtagctctttcttgc

SEQ ID NO: 246456 - DNA, 15 bp, Homo sapiens
cgtagctctttcttg

SEQ ID NO: 246457 - DNA, 15 bp, Homo sapiens
gcgtagctctttctt

SEQ ID NO: 246458 - DNA, 15 bp, Homo sapiens
tgcgtagctctttct

SEQ ID NO: 246459 - DNA, 15 bp, Homo sapiens
gtgcgtagctctttc

SEQ ID NO: 246460 - DNA, 15 bp, Homo sapiens
tgtgcgtagctcttt

SEQ ID NO: 246461 - DNA, 15 bp, Homo sapiens
ctgtgcgtagctctt

SEQ ID NO: 246462 - DNA, 15 bp, Homo sapiens
actgtgcgtagctct

SEQ ID NO: 246463 - DNA, 15 bp, Homo sapiens
gactgtgcgtagctc

SEQ ID NO: 246464 - DNA, 15 bp, Homo sapiens
tgactgtgcgtagct

SEQ ID NO: 246465 - DNA, 15 bp, Homo sapiens
ttgactgtgcgtagc

SEQ ID NO: 246466 - DNA, 15 bp, Homo sapiens
cttgactgtgcgtag

SEQ ID NO: 246467 - DNA, 15 bp, Homo sapiens
ccttgactgtgcgta

SEQ ID NO: 246468 - DNA, 15 bp, Homo sapiens
tccttgactgtgcgt

SEQ ID NO: 246469 - DNA, 15 bp, Homo sapiens
ttccttgactgtgcg

SEQ ID NO: 246470 - DNA, 15 bp, Homo sapiens
cttccttgactgtgc

SEQ ID NO: 246471 - DNA, 15 bp, Homo sapiens
ccttccttgactgtg

SEQ ID NO: 246472 - DNA, 15 bp, Homo sapiens
tccttccttgactgt

SEQ ID NO: 246473 - DNA, 15 bp, Homo sapiens
ctccttccttgactg

SEQ ID NO: 246474 - DNA, 15 bp, Homo sapiens
tctccttccttgact

SEQ ID NO: 246475 - DNA, 15 bp, Homo sapiens
ttctccttccttgac

SEQ ID NO: 246476 - DNA, 15 bp, Homo sapiens
cttctccttccttga

SEQ ID NO: 246477 - DNA, 15 bp, Homo sapiens
acttctccttccttg

SEQ ID NO: 246478 - DNA, 15 bp, Homo sapiens
cacttctccttcctt

SEQ ID NO: 246479 - DNA, 15 bp, Homo sapiens
tcacttctccttcct

SEQ ID NO: 246480 - DNA, 15 bp, Homo sapiens
ttcacttctccttcc

SEQ ID NO: 246481 - DNA, 15 bp, Homo sapiens
cttcacttctccttc

SEQ ID NO: 246482 - DNA, 15 bp, Homo sapiens
gcttcacttctcctt

SEQ ID NO: 246483 - DNA, 15 bp, Homo sapiens
ggcttcacttctcct

SEQ ID NO: 246484 - DNA, 15 bp, Homo sapiens
tggcttcacttctcc

SEQ ID NO: 246485 - DNA, 15 bp, Homo sapiens
ctggcttcacttctc

SEQ ID NO: 246486 - DNA, 15 bp, Homo sapiens
cctggcttcacttct

SEQ ID NO: 246487 - DNA, 15 bp, Homo sapiens
ccctggcttcacttc

SEQ ID NO: 246488 - DNA, 15 bp, Homo sapiens
tccctggcttcactt

SEQ ID NO: 246489 - DNA, 15 bp, Homo sapiens
ctccctggcttcact

SEQ ID NO: 246490 - DNA, 15 bp, Homo sapiens
actccctggcttcac

SEQ ID NO: 246491 - DNA, 15 bp, Homo sapiens
gactccctggcttca

SEQ ID NO: 246492 - DNA, 15 bp, Homo sapiens
agactccctggcttc

SEQ ID NO: 246493 - DNA, 15 bp, Homo sapiens
cagactccctggctt

SEQ ID NO: 246494 - DNA, 15 bp, Homo sapiens
tcagactccctggct

SEQ ID NO: 246495 - DNA, 15 bp, Homo sapiens
ttcagactccctggc

SEQ ID NO: 246496 - DNA, 15 bp, Homo sapiens
attcagactccctgg

SEQ ID NO: 246497 - DNA, 15 bp, Homo sapiens
aattcagactccctg

SEQ ID NO: 246498 - DNA, 15 bp, Homo sapiens
caattcagactccct

SEQ ID NO: 246499 - DNA, 15 bp, Homo sapiens
ccaattcagactccc

SEQ ID NO: 246500 - DNA, 15 bp, Homo sapiens
tccaattcagactcc

SEQ ID NO: 246501 - DNA, 15 bp, Homo sapiens
atccaattcagactc

SEQ ID NO: 246502 - DNA, 15 bp, Homo sapiens
catccaattcagact

SEQ ID NO: 246503 - DNA, 15 bp, Homo sapiens
ccatccaattcagac

SEQ ID NO: 246504 - DNA, 15 bp, Homo sapiens
gccatccaattcaga

SEQ ID NO: 246505 - DNA, 15 bp, Homo sapiens
ggccatccaattcag

SEQ ID NO: 246506 - DNA, 15 bp, Homo sapiens
tggccatccaattca

SEQ ID NO: 246507 - DNA, 15 bp, Homo sapiens
ttggccatccaattc

SEQ ID NO: 246508 - DNA, 15 bp, Homo sapiens
cttggccatccaatt

SEQ ID NO: 246509 - DNA, 15 bp, Homo sapiens
gcttggccatccaat

SEQ ID NO: 246510 - DNA, 15 bp, Homo sapiens
ggcttggccatccaa

SEQ ID NO: 246511 - DNA, 15 bp, Homo sapiens
tggcttggccatcca

SEQ ID NO: 246512 - DNA, 15 bp, Homo sapiens
ctggcttggccatcc

SEQ ID NO: 246513 - DNA, 15 bp, Homo sapiens
actggcttggccatc

SEQ ID NO: 246514 - DNA, 15 bp, Homo sapiens
cactggcttggccat

SEQ ID NO: 246515 - DNA, 15 bp, Homo sapiens
tcactggcttggcca

SEQ ID NO: 246516 - DNA, 15 bp, Homo sapiens
gtcactggcttggcc

SEQ ID NO: 246517 - DNA, 15 bp, Homo sapiens
agtcactggcttggc

SEQ ID NO: 246518 - DNA, 15 bp, Homo sapiens
cagtcactggcttgg

SEQ ID NO: 246519 - DNA, 15 bp, Homo sapiens
ccagtcactggcttg

SEQ ID NO: 246520 - DNA, 15 bp, Homo sapiens
gccagtcactggctt

SEQ ID NO: 246521 - DNA, 15 bp, Homo sapiens
tgccagtcactggct

SEQ ID NO: 246522 - DNA, 15 bp, Homo sapiens
atgccagtcactggc

SEQ ID NO: 246523 - DNA, 15 bp, Homo sapiens
catgccagtcactgg

SEQ ID NO: 246524 - DNA, 15 bp, Homo sapiens
tcatgccagtcactg

SEQ ID NO: 246525 - DNA, 15 bp, Homo sapiens
ttcatgccagtcact

SEQ ID NO: 246526 - DNA, 15 bp, Homo sapiens
cttcatgccagtcac

SEQ ID NO: 246527 - DNA, 15 bp, Homo sapiens
ccttcatgccagtca

SEQ ID NO: 246528 - DNA, 15 bp, Homo sapiens
tccttcatgccagtc

SEQ ID NO: 246529 - DNA, 15 bp, Homo sapiens
ctccttcatgccagt

SEQ ID NO: 246530 - DNA, 15 bp, Homo sapiens
cctccttcatgccag

SEQ ID NO: 246531 - DNA, 15 bp, Homo sapiens
gcctccttcatgcca

SEQ ID NO: 246532 - DNA, 15 bp, Homo sapiens
agcctccttcatgcc

SEQ ID NO: 246533 - DNA, 15 bp, Homo sapiens
cagcctccttcatgc

SEQ ID NO: 246534 - DNA, 15 bp, Homo sapiens
ccagcctccttcatg

SEQ ID NO: 246535 - DNA, 15 bp, Homo sapiens
tccagcctccttcat

SEQ ID NO: 246536 - DNA, 15 bp, Homo sapiens
ctccagcctccttca

SEQ ID NO: 246537 - DNA, 15 bp, Homo sapiens
tctccagcctccttc

SEQ ID NO: 246538 - DNA, 15 bp, Homo sapiens
ctctccagcctcctt

SEQ ID NO: 246539 - DNA, 15 bp, Homo sapiens
cctctccagcctcct

SEQ ID NO: 246540 - DNA, 15 bp, Homo sapiens
tcctctccagcctcc

SEQ ID NO: 246541 - DNA, 15 bp, Homo sapiens
ctcctctccagcctc

SEQ ID NO: 246542 - DNA, 15 bp, Homo sapiens
cctcctctccagcct

SEQ ID NO: 246543 - DNA, 15 bp, Homo sapiens
ccctcctctccagcc

SEQ ID NO: 246544 - DNA, 15 bp, Homo sapiens
gccctcctctccagc

SEQ ID NO: 246545 - DNA, 15 bp, Homo sapiens
tgccctcctctccag

SEQ ID NO: 246546 - DNA, 15 bp, Homo sapiens
ttgccctcctctcca

SEQ ID NO: 246547 - DNA, 15 bp, Homo sapiens
cttgccctcctctcc

SEQ ID NO: 246548 - DNA, 15 bp, Homo sapiens
tcttgccctcctctc

SEQ ID NO: 246549 - DNA, 15 bp, Homo sapiens
ctcttgccctcctct

SEQ ID NO: 246550 - DNA, 15 bp, Homo sapiens
gctcttgccctcctc

SEQ ID NO: 246551 - DNA, 15 bp, Homo sapiens
tgctcttgccctcct

SEQ ID NO: 246552 - DNA, 15 bp, Homo sapiens
atgctcttgccctcc

SEQ ID NO: 246553 - DNA, 15 bp, Homo sapiens
catgctcttgccctc

SEQ ID NO: 246554 - DNA, 15 bp, Homo sapiens
acatgctcttgccct

SEQ ID NO: 246555 - DNA, 15 bp, Homo sapiens
cacatgctcttgccc

SEQ ID NO: 246556 - DNA, 15 bp, Homo sapiens
ccacatgctcttgcc

SEQ ID NO: 246557 - DNA, 15 bp, Homo sapiens
cccacatgctcttgc

SEQ ID NO: 246558 - DNA, 15 bp, Homo sapiens
gcccacatgctcttg

SEQ ID NO: 246559 - DNA, 15 bp, Homo sapiens
agcccacatgctctt

SEQ ID NO: 246560 - DNA, 15 bp, Homo sapiens
aagcccacatgctct

SEQ ID NO: 246561 - DNA, 15 bp, Homo sapiens
aaagcccacatgctc

SEQ ID NO: 246562 - DNA, 15 bp, Homo sapiens
caaagcccacatgct

SEQ ID NO: 246563 - DNA, 15 bp, Homo sapiens
acaaagcccacatgc

SEQ ID NO: 246564 - DNA, 15 bp, Homo sapiens
cacaaagcccacatg

SEQ ID NO: 246565 - DNA, 15 bp, Homo sapiens
acacaaagcccacat

SEQ ID NO: 246566 - DNA, 15 bp, Homo sapiens
cacacaaagcccaca

SEQ ID NO: 246567 - DNA, 15 bp, Homo sapiens
gcacacaaagcccac

SEQ ID NO: 246568 - DNA, 15 bp, Homo sapiens
ggcacacaaagccca

SEQ ID NO: 246569 - DNA, 15 bp, Homo sapiens
tggcacacaaagccc

SEQ ID NO: 246570 - DNA, 15 bp, Homo sapiens
ctggcacacaaagcc

SEQ ID NO: 246571 - DNA, 15 bp, Homo sapiens
tctggcacacaaagc

SEQ ID NO: 246572 - DNA, 15 bp, Homo sapiens
ctctggcacacaaag

SEQ ID NO: 246573 - DNA, 15 bp, Homo sapiens
tctctggcacacaaa

SEQ ID NO: 246574 - DNA, 15 bp, Homo sapiens
ttctctggcacacaa

SEQ ID NO: 246575 - DNA, 15 bp, Homo sapiens
tttctctggcacaca

SEQ ID NO: 246576 - DNA, 15 bp, Homo sapiens
ctttctctggcacac

SEQ ID NO: 246577 - DNA, 15 bp, Homo sapiens
actttctctggcaca

SEQ ID NO: 246578 - DNA, 15 bp, Homo sapiens
tactttctctggcac

SEQ ID NO: 246579 - DNA, 15 bp, Homo sapiens
atactttctctggca

SEQ ID NO: 246580 - DNA, 15 bp, Homo sapiens
aatactttctctggc

SEQ ID NO: 246581 - DNA, 15 bp, Homo sapiens
aaatactttctctgg

SEQ ID NO: 246582 - DNA, 15 bp, Homo sapiens
aaaatactttctctg

SEQ ID NO: 246583 - DNA, 15 bp, Homo sapiens
taaaatactttctct

SEQ ID NO: 246584 - DNA, 15 bp, Homo sapiens
gtaaaatactttctc

SEQ ID NO: 246585 - DNA, 15 bp, Homo sapiens
tgtaaaatactttct

SEQ ID NO: 246586 - DNA, 15 bp, Homo sapiens
atgtaaaatactttc

SEQ ID NO: 246587 - DNA, 15 bp, Homo sapiens
aatgtaaaatacttt

SEQ ID NO: 246588 - DNA, 15 bp, Homo sapiens
aaatgtaaaatactt

SEQ ID NO: 246589 - DNA, 15 bp, Homo sapiens
aaaatgtaaaatact

SEQ ID NO: 246590 - DNA, 15 bp, Homo sapiens
aaaaatgtaaaatac

SEQ ID NO: 246591 - DNA, 15 bp, Homo sapiens
caaaaatgtaaaata

SEQ ID NO: 246592 - DNA, 15 bp, Homo sapiens
gcaaaaatgtaaaat

SEQ ID NO: 246593 - DNA, 15 bp, Homo sapiens
tgcaaaaatgtaaaa

SEQ ID NO: 246594 - DNA, 15 bp, Homo sapiens
atgcaaaaatgtaaa

SEQ ID NO: 246595 - DNA, 15 bp, Homo sapiens
tatgcaaaaatgtaa

SEQ ID NO: 246596 - DNA, 15 bp, Homo sapiens
ctatgcaaaaatgta

SEQ ID NO: 246597 - DNA, 15 bp, Homo sapiens
cctatgcaaaaatgt

SEQ ID NO: 246598 - DNA, 15 bp, Homo sapiens
gcctatgcaaaaatg

SEQ ID NO: 246599 - DNA, 15 bp, Homo sapiens
tgcctatgcaaaaat

SEQ ID NO: 246600 - DNA, 15 bp, Homo sapiens
gtgcctatgcaaaaa

SEQ ID NO: 246601 - DNA, 15 bp, Homo sapiens
ggtgcctatgcaaaa

SEQ ID NO: 246602 - DNA, 15 bp, Homo sapiens
tggtgcctatgcaaa

SEQ ID NO: 246603 - DNA, 15 bp, Homo sapiens
atggtgcctatgcaa

SEQ ID NO: 246604 - DNA, 15 bp, Homo sapiens
catggtgcctatgca

SEQ ID NO: 246605 - DNA, 15 bp, Homo sapiens
ccatggtgcctatgc

SEQ ID NO: 246606 - DNA, 15 bp, Homo sapiens
tccatggtgcctatg

SEQ ID NO: 246607 - DNA, 15 bp, Homo sapiens
ttccatggtgcctat

SEQ ID NO: 246608 - DNA, 15 bp, Homo sapiens
cttccatggtgccta

SEQ ID NO: 246609 - DNA, 15 bp, Homo sapiens
acttccatggtgcct

SEQ ID NO: 246610 - DNA, 15 bp, Homo sapiens
cacttccatggtgcc

SEQ ID NO: 246611 - DNA, 15 bp, Homo sapiens
acacttccatggtgc

SEQ ID NO: 246612 - DNA, 15 bp, Homo sapiens
aacacttccatggtg

SEQ ID NO: 246613 - DNA, 15 bp, Homo sapiens
aaacacttccatggt

SEQ ID NO: 246614 - DNA, 15 bp, Homo sapiens
aaaacacttccatgg

SEQ ID NO: 246615 - DNA, 15 bp, Homo sapiens
taaaacacttccatg

SEQ ID NO: 246616 - DNA, 15 bp, Homo sapiens
ttaaaacacttccat

SEQ ID NO: 246617 - DNA, 15 bp, Homo sapiens
cttaaaacacttcca

SEQ ID NO: 246618 - DNA, 15 bp, Homo sapiens
gcttaaaacacttcc

SEQ ID NO: 246619 - DNA, 15 bp, Homo sapiens
tgcttaaaacacttc

SEQ ID NO: 246620 - DNA, 15 bp, Homo sapiens
ttgcttaaaacactt

SEQ ID NO: 246621 - DNA, 15 bp, Homo sapiens
cttgcttaaaacact

SEQ ID NO: 246622 - DNA, 15 bp, Homo sapiens
ccttgcttaaaacac

SEQ ID NO: 246623 - DNA, 15 bp, Homo sapiens
tccttgcttaaaaca

SEQ ID NO: 246624 - DNA, 15 bp, Homo sapiens
ttccttgcttaaaac

SEQ ID NO: 246625 - DNA, 15 bp, Homo sapiens
cttccttgcttaaaa

SEQ ID NO: 246626 - DNA, 15 bp, Homo sapiens
acttccttgcttaaa

SEQ ID NO: 246627 - DNA, 15 bp, Homo sapiens
tacttccttgcttaa

SEQ ID NO: 246628 - DNA, 15 bp, Homo sapiens
ttacttccttgctta

SEQ ID NO: 246629 - DNA, 15 bp, Homo sapiens
attacttccttgctt

SEQ ID NO: 246630 - DNA, 15 bp, Homo sapiens
cattacttccttgct

SEQ ID NO: 246631 - DNA, 15 bp, Homo sapiens
acattacttccttgc

SEQ ID NO: 246632 - DNA, 15 bp, Homo sapiens
tacattacttccttg

SEQ ID NO: 246633 - DNA, 15 bp, Homo sapiens
ttacattacttcctt

SEQ ID NO: 246634 - DNA, 15 bp, Homo sapiens
attacattacttcct

SEQ ID NO: 246635 - DNA, 15 bp, Homo sapiens
aattacattacttcc

SEQ ID NO: 246636 - DNA, 15 bp, Homo sapiens
gaattacattacttc

SEQ ID NO: 246637 - DNA, 15 bp, Homo sapiens
agaattacattactt

SEQ ID NO: 246638 - DNA, 15 bp, Homo sapiens
tagaattacattact

SEQ ID NO: 246639 - DNA, 15 bp, Homo sapiens
atagaattacattac

SEQ ID NO: 246640 - DNA, 15 bp, Homo sapiens
aatagaattacatta

SEQ ID NO: 246641 - DNA, 15 bp, Homo sapiens
aaatagaattacatt

SEQ ID NO: 246642 - DNA, 15 bp, Homo sapiens
taaatagaattacat

SEQ ID NO: 246643 - DNA, 15 bp, Homo sapiens
gtaaatagaattaca

SEQ ID NO: 246644 - DNA, 15 bp, Homo sapiens
agtaaatagaattac

SEQ ID NO: 246645 - DNA, 15 bp, Homo sapiens
tagtaaatagaatta

SEQ ID NO: 246646 - DNA, 15 bp, Homo sapiens
ctagtaaatagaatt

SEQ ID NO: 246647 - DNA, 15 bp, Homo sapiens
cctagtaaatagaat

SEQ ID NO: 246648 - DNA, 15 bp, Homo sapiens
tcctagtaaatagaa

SEQ ID NO: 246649 - DNA, 15 bp, Homo sapiens
gtcctagtaaataga

SEQ ID NO: 246650 - DNA, 15 bp, Homo sapiens
agtcctagtaaatag

SEQ ID NO: 246651 - DNA, 15 bp, Homo sapiens
tagtcctagtaaata

SEQ ID NO: 246652 - DNA, 15 bp, Homo sapiens
ctagtcctagtaaat

SEQ ID NO: 246653 - DNA, 15 bp, Homo sapiens
tctagtcctagtaaa

SEQ ID NO: 246654 - DNA, 15 bp, Homo sapiens
atctagtcctagtaa

SEQ ID NO: 246655 - DNA, 15 bp, Homo sapiens
catctagtcctagta

SEQ ID NO: 246656 - DNA, 15 bp, Homo sapiens
tcatctagtcctagt

SEQ ID NO: 246657 - DNA, 15 bp, Homo sapiens
ttcatctagtcctag

SEQ ID NO: 246658 - DNA, 15 bp, Homo sapiens
cttcatctagtccta

SEQ ID NO: 246659 - DNA, 15 bp, Homo sapiens
acttcatctagtcct

SEQ ID NO: 246660 - DNA, 15 bp, Homo sapiens
aacttcatctagtcc

SEQ ID NO: 246661 - DNA, 15 bp, Homo sapiens
caacttcatctagtc

SEQ ID NO: 246662 - DNA, 15 bp, Homo sapiens
tcaacttcatctagt

SEQ ID NO: 246663 - DNA, 15 bp, Homo sapiens
ttcaacttcatctag

SEQ ID NO: 246664 - DNA, 15 bp, Homo sapiens
attcaacttcatcta

SEQ ID NO: 246665 - DNA, 15 bp, Homo sapiens
aattcaacttcatct

SEQ ID NO: 246666 - DNA, 15 bp, Homo sapiens
caattcaacttcatc

SEQ ID NO: 246667 - DNA, 15 bp, Homo sapiens
tcaattcaacttcat

SEQ ID NO: 246668 - DNA, 15 bp, Homo sapiens
ttcaattcaacttca

SEQ ID NO: 246669 - DNA, 15 bp, Homo sapiens
attcaattcaacttc

SEQ ID NO: 246670 - DNA, 15 bp, Homo sapiens
tattcaattcaactt

SEQ ID NO: 246671 - DNA, 15 bp, Homo sapiens
ttattcaattcaact

SEQ ID NO: 246672 - DNA, 15 bp, Homo sapiens
tttattcaattcaac

SEQ ID NO: 246673 - DNA, 15 bp, Homo sapiens
ttttattcaattcaa

SEQ ID NO: 246674 - DNA, 15 bp, Homo sapiens
cttttattcaattca

SEQ ID NO: 246675 - DNA, 15 bp, Homo sapiens
ccttttattcaattc

SEQ ID NO: 246676 - DNA, 15 bp, Homo sapiens
accttttattcaatt

SEQ ID NO: 246677 - DNA, 15 bp, Homo sapiens
aaccttttattcaat

SEQ ID NO: 246678 - DNA, 15 bp, Homo sapiens
taaccttttattcaa

SEQ ID NO: 246679 - DNA, 15 bp, Homo sapiens
gtaaccttttattca

SEQ ID NO: 246680 - DNA, 15 bp, Homo sapiens
agtaaccttttattc

SEQ ID NO: 246681 - DNA, 15 bp, Homo sapiens
tagtaaccttttatt

SEQ ID NO: 246682 - DNA, 15 bp, Homo sapiens
ttagtaaccttttat

SEQ ID NO: 246683 - DNA, 15 bp, Homo sapiens
cttagtaacctttta

SEQ ID NO: 246684 - DNA, 15 bp, Homo sapiens
ccttagtaacctttt

SEQ ID NO: 246685 - DNA, 15 bp, Homo sapiens
cccttagtaaccttt

SEQ ID NO: 246686 - DNA, 15 bp, Homo sapiens
acccttagtaacctt

SEQ ID NO: 246687 - DNA, 15 bp, Homo sapiens
cacccttagtaacct

SEQ ID NO: 246688 - DNA, 15 bp, Homo sapiens
gcacccttagtaacc

SEQ ID NO: 246689 - DNA, 15 bp, Homo sapiens
tgcacccttagtaac

SEQ ID NO: 246690 - DNA, 15 bp, Homo sapiens
ttgcacccttagtaa

SEQ ID NO: 246691 - DNA, 15 bp, Homo sapiens
tttgcacccttagta

SEQ ID NO: 246692 - DNA, 15 bp, Homo sapiens
atttgcacccttagt

SEQ ID NO: 246693 - DNA, 15 bp, Homo sapiens
catttgcacccttag

SEQ ID NO: 246694 - DNA, 15 bp, Homo sapiens
gcatttgcaccctta

SEQ ID NO: 246695 - DNA, 15 bp, Homo sapiens
ggcatttgcaccctt

SEQ ID NO: 246696 - DNA, 15 bp, Homo sapiens
tggcatttgcaccct

SEQ ID NO: 246697 - DNA, 15 bp, Homo sapiens
atggcatttgcaccc

SEQ ID NO: 246698 - DNA, 15 bp, Homo sapiens
aatggcatttgcacc

SEQ ID NO: 246699 - DNA, 15 bp, Homo sapiens
aaatggcatttgcac

SEQ ID NO: 246700 - DNA, 15 bp, Homo sapiens
aaaatggcatttgca

SEQ ID NO: 246701 - DNA, 15 bp, Homo sapiens
aaaaatggcatttgc

SEQ ID NO: 246702 - DNA, 15 bp, Homo sapiens
taaaaatggcatttg

SEQ ID NO: 246703 - DNA, 15 bp, Homo sapiens
ataaaaatggcattt

SEQ ID NO: 246704 - DNA, 15 bp, Homo sapiens
cttcccataaaaatg

SEQ ID NO: 246705 - DNA, 15 bp, Homo sapiens
tcttcccataaaaat

SEQ ID NO: 246706 - DNA, 15 bp, Homo sapiens
ctcttcccataaaaa

SEQ ID NO: 246707 - DNA, 15 bp, Homo sapiens
gctcttcccataaaa

SEQ ID NO: 246708 - DNA, 15 bp, Homo sapiens
agctcttcccataaa

SEQ ID NO: 246709 - DNA, 15 bp, Homo sapiens
aagctcttcccataa

SEQ ID NO: 246710 - DNA, 15 bp, Homo sapiens
taagctcttcccata

SEQ ID NO: 246711 - DNA, 15 bp, Homo sapiens
ataagctcttcccat

SEQ ID NO: 246712 - DNA, 15 bp, Homo sapiens
cataagctcttccca

SEQ ID NO: 246713 - DNA, 15 bp, Homo sapiens
gcataagctcttccc

SEQ ID NO: 246714 - DNA, 15 bp, Homo sapiens
tgcataagctcttcc

SEQ ID NO: 246715 - DNA, 15 bp, Homo sapiens
gtgcataagctcttc

SEQ ID NO: 246716 - DNA, 15 bp, Homo sapiens
agtgcataagctctt

SEQ ID NO: 246717 - DNA, 15 bp, Homo sapiens
gagtgcataagctct

SEQ ID NO: 246718 - DNA, 15 bp, Homo sapiens
tgagtgcataagctc

SEQ ID NO: 246719 - DNA, 15 bp, Homo sapiens
gtgagtgcataagct

SEQ ID NO: 246720 - DNA, 15 bp, Homo sapiens
ggtgagtgcataagc

SEQ ID NO: 246721 - DNA, 15 bp, Homo sapiens
gggtgagtgcataag

SEQ ID NO: 246722 - DNA, 15 bp, Homo sapiens
agggtgagtgcataa

SEQ ID NO: 246723 - DNA, 15 bp, Homo sapiens
cagggtgagtgcata

SEQ ID NO: 246724 - DNA, 15 bp, Homo sapiens
tcagggtgagtgcat

SEQ ID NO: 246725 - DNA, 15 bp, Homo sapiens
ctcagggtgagtgca

SEQ ID NO: 246726 - DNA, 15 bp, Homo sapiens
cctcagggtgagtgc

SEQ ID NO: 246727 - DNA, 15 bp, Homo sapiens
ccctcagggtgagtg

SEQ ID NO: 246728 - DNA, 15 bp, Homo sapiens
gccctcagggtgagt

SEQ ID NO: 246729 - DNA, 15 bp, Homo sapiens
agccctcagggtgag

SEQ ID NO: 246730 - DNA, 15 bp, Homo sapiens
cagccctcagggtga

SEQ ID NO: 246731 - DNA, 15 bp, Homo sapiens
ccagccctcagggtg

SEQ ID NO: 246732 - DNA, 15 bp, Homo sapiens
gccagccctcagggt

SEQ ID NO: 246733 - DNA, 15 bp, Homo sapiens
tgccagccctcaggg

SEQ ID NO: 246734 - DNA, 15 bp, Homo sapiens
atgccagccctcagg

SEQ ID NO: 246735 - DNA, 15 bp, Homo sapiens
tatgccagccctcag

SEQ ID NO: 246736 - DNA, 15 bp, Homo sapiens
ttatgccagccctca

SEQ ID NO: 246737 - DNA, 15 bp, Homo sapiens
cttatgccagccctc

SEQ ID NO: 246738 - DNA, 15 bp, Homo sapiens
ccttatgccagccct

SEQ ID NO: 246739 - DNA, 15 bp, Homo sapiens
gccttatgccagccc

SEQ ID NO: 246740 - DNA, 15 bp, Homo sapiens
tgccttatgccagcc

SEQ ID NO: 246741 - DNA, 15 bp, Homo sapiens
ctgccttatgccagc

SEQ ID NO: 246742 - DNA, 15 bp, Homo sapiens
cctgccttatgccag

SEQ ID NO: 246743 - DNA, 15 bp, Homo sapiens
tcctgccttatgcca

SEQ ID NO: 246744 - DNA, 15 bp, Homo sapiens
ctcctgccttatgcc

SEQ ID NO: 246745 - DNA, 15 bp, Homo sapiens
actcctgccttatgc

SEQ ID NO: 246746 - DNA, 15 bp, Homo sapiens
cactcctgccttatg

SEQ ID NO: 246747 - DNA, 15 bp, Homo sapiens
ccactcctgccttat

SEQ ID NO: 246748 - DNA, 15 bp, Homo sapiens
gccactcctgcctta

SEQ ID NO: 246749 - DNA, 15 bp, Homo sapiens
tgccactcctgcctt

SEQ ID NO: 246750 - DNA, 15 bp, Homo sapiens
atgccactcctgcct

SEQ ID NO: 246751 - DNA, 15 bp, Homo sapiens
aatgccactcctgcc

SEQ ID NO: 246752 - DNA, 15 bp, Homo sapiens
caatgccactcctgc

SEQ ID NO: 246753 - DNA, 15 bp, Homo sapiens
tcaatgccactcctg

SEQ ID NO: 246754 - DNA, 15 bp, Homo sapiens
ctcaatgccactcct

SEQ ID NO: 246755 - DNA, 15 bp, Homo sapiens
actcaatgccactcc

SEQ ID NO: 246756 - DNA, 15 bp, Homo sapiens
cactcaatgccactc

SEQ ID NO: 246757 - DNA, 15 bp, Homo sapiens
acactcaatgccact

SEQ ID NO: 246758 - DNA, 15 bp, Homo sapiens
gacactcaatgccac

SEQ ID NO: 246759 - DNA, 15 bp, Homo sapiens
ggacactcaatgcca

SEQ ID NO: 246760 - DNA, 15 bp, Homo sapiens
aggacactcaatgcc

SEQ ID NO: 246761 - DNA, 15 bp, Homo sapiens
aaggacactcaatgc

SEQ ID NO: 246762 - DNA, 15 bp, Homo sapiens
caaggacactcaatg

SEQ ID NO: 246763 - DNA, 15 bp, Homo sapiens
ccaaggacactcaat

SEQ ID NO: 246764 - DNA, 15 bp, Homo sapiens
gccaaggacactcaa

SEQ ID NO: 246765 - DNA, 15 bp, Homo sapiens
agccaaggacactca

SEQ ID NO: 246766 - DNA, 15 bp, Homo sapiens
cagccaaggacactc

SEQ ID NO: 246767 - DNA, 15 bp, Homo sapiens
acagccaaggacact

SEQ ID NO: 246768 - DNA, 15 bp, Homo sapiens
aacagccaaggacac

SEQ ID NO: 246769 - DNA, 15 bp, Homo sapiens
gaacagccaaggaca

SEQ ID NO: 246770 - DNA, 15 bp, Homo sapiens
ggaacagccaaggac

SEQ ID NO: 246771 - DNA, 15 bp, Homo sapiens
aggaacagccaagga

SEQ ID NO: 246772 - DNA, 15 bp, Homo sapiens
caggaacagccaagg

SEQ ID NO: 246773 - DNA, 15 bp, Homo sapiens
ccaggaacagccaag

SEQ ID NO: 246774 - DNA, 15 bp, Homo sapiens
gccaggaacagccaa

SEQ ID NO: 246775 - DNA, 15 bp, Homo sapiens
agccaggaacagcca

SEQ ID NO: 246776 - DNA, 15 bp, Homo sapiens
aagccaggaacagcc

SEQ ID NO: 246777 - DNA, 15 bp, Homo sapiens
aaagccaggaacagc

SEQ ID NO: 246778 - DNA, 15 bp, Homo sapiens
caaagccaggaacag

SEQ ID NO: 246779 - DNA, 15 bp, Homo sapiens
ccaaagccaggaaca

SEQ ID NO: 246780 - DNA, 15 bp, Homo sapiens
accaaagccaggaac

SEQ ID NO: 246781 - DNA, 15 bp, Homo sapiens
gaccaaagccaggaa

SEQ ID NO: 246782 - DNA, 15 bp, Homo sapiens
ggaccaaagccagga

SEQ ID NO: 246783 - DNA, 15 bp, Homo sapiens
gggaccaaagccagg

SEQ ID NO: 246784 - DNA, 15 bp, Homo sapiens
agggaccaaagccag

SEQ ID NO: 246785 - DNA, 15 bp, Homo sapiens
cagggaccaaagcca

SEQ ID NO: 246786 - DNA, 15 bp, Homo sapiens
gcagggaccaaagcc

SEQ ID NO: 246787 - DNA, 15 bp, Homo sapiens
agcagggaccaaagc

SEQ ID NO: 246788 - DNA, 15 bp, Homo sapiens
cagcagggaccaaag

SEQ ID NO: 246789 - DNA, 15 bp, Homo sapiens
acagcagggaccaaa

SEQ ID NO: 246790 - DNA, 15 bp, Homo sapiens
cacagcagggaccaa

SEQ ID NO: 246791 - DNA, 15 bp, Homo sapiens
acacagcagggacca

SEQ ID NO: 246792 - DNA, 15 bp, Homo sapiens
cacacagcagggacc

SEQ ID NO: 246793 - DNA, 15 bp, Homo sapiens
gcacacagcagggac

SEQ ID NO: 246794 - DNA, 15 bp, Homo sapiens
agcacacagcaggga

SEQ ID NO: 246795 - DNA, 15 bp, Homo sapiens
cagcacacagcaggg

SEQ ID NO: 246796 - DNA, 15 bp, Homo sapiens
gcagcacacagcagg

SEQ ID NO: 246797 - DNA, 15 bp, Homo sapiens
tgcagcacacagcag

SEQ ID NO: 246798 - DNA, 15 bp, Homo sapiens
ctgcagcacacagca

SEQ ID NO: 246799 - DNA, 15 bp, Homo sapiens
gctgcagcacacagc

SEQ ID NO: 246800 - DNA, 15 bp, Homo sapiens
ggctgcagcacacag

SEQ ID NO: 246801 - DNA, 15 bp, Homo sapiens
aggctgcagcacaca

SEQ ID NO: 246802 - DNA, 15 bp, Homo sapiens
gaggctgcagcacac

SEQ ID NO: 246803 - DNA, 15 bp, Homo sapiens
tgaggctgcagcaca

SEQ ID NO: 246804 - DNA, 15 bp, Homo sapiens
ctgaggctgcagcac

SEQ ID NO: 246805 - DNA, 15 bp, Homo sapiens
actgaggctgcagca

SEQ ID NO: 246806 - DNA, 15 bp, Homo sapiens
cactgaggctgcagc

SEQ ID NO: 246807 - DNA, 15 bp, Homo sapiens
ccactgaggctgcag

SEQ ID NO: 246808 - DNA, 15 bp, Homo sapiens
gccactgaggctgca

SEQ ID NO: 246809 - DNA, 15 bp, Homo sapiens
agccactgaggctgc

SEQ ID NO: 246810 - DNA, 15 bp, Homo sapiens
cagccactgaggctg

SEQ ID NO: 246811 - DNA, 15 bp, Homo sapiens
gcagccactgaggct

SEQ ID NO: 246812 - DNA, 15 bp, Homo sapiens
tgcagccactgaggc

SEQ ID NO: 246813 - DNA, 15 bp, Homo sapiens
ctgcagccactgagg

SEQ ID NO: 246814 - DNA, 15 bp, Homo sapiens
tctgcagccactgag

SEQ ID NO: 246815 - DNA, 15 bp, Homo sapiens
atctgcagccactga

SEQ ID NO: 246816 - DNA, 15 bp, Homo sapiens
aatctgcagccactg

SEQ ID NO: 246817 - DNA, 15 bp, Homo sapiens
gaatctgcagccact

SEQ ID NO: 246818 - DNA, 15 bp, Homo sapiens
agaatctgcagccac

SEQ ID NO: 246819 - DNA, 15 bp, Homo sapiens
cagaatctgcagcca

SEQ ID NO: 246820 - DNA, 15 bp, Homo sapiens
gcagaatctgcagcc

SEQ ID NO: 246821 - DNA, 15 bp, Homo sapiens
ggcagaatctgcagc

SEQ ID NO: 246822 - DNA, 15 bp, Homo sapiens
gggcagaatctgcag

SEQ ID NO: 246823 - DNA, 15 bp, Homo sapiens
tgggcagaatctgca

SEQ ID NO: 246824 - DNA, 15 bp, Homo sapiens
atgggcagaatctgc

SEQ ID NO: 246825 - DNA, 15 bp, Homo sapiens
gatgggcagaatctg

SEQ ID NO: 246826 - DNA, 15 bp, Homo sapiens
agatgggcagaatct

SEQ ID NO: 246827 - DNA, 15 bp, Homo sapiens
tagatgggcagaatc

SEQ ID NO: 246828 - DNA, 15 bp, Homo sapiens
ttagatgggcagaat

SEQ ID NO: 246829 - DNA, 15 bp, Homo sapiens
tttagatgggcagaa

SEQ ID NO: 246830 - DNA, 15 bp, Homo sapiens
ctttagatgggcaga

SEQ ID NO: 246831 - DNA, 15 bp, Homo sapiens
gctttagatgggcag

SEQ ID NO: 246832 - DNA, 15 bp, Homo sapiens
ggctttagatgggca

SEQ ID NO: 246833 - DNA, 15 bp, Homo sapiens
tggctttagatgggc

SEQ ID NO: 246834 - DNA, 15 bp, Homo sapiens
atggctttagatggg

SEQ ID NO: 246835 - DNA, 15 bp, Homo sapiens
catggctttagatgg

SEQ ID NO: 246836 - DNA, 15 bp, Homo sapiens
ccatggctttagatg

SEQ ID NO: 246837 - DNA, 15 bp, Homo sapiens
tccatggctttagat

SEQ ID NO: 246838 - DNA, 15 bp, Homo sapiens
gtccatggctttaga

SEQ ID NO: 246839 - DNA, 15 bp, Homo sapiens
agtccatggctttag

SEQ ID NO: 246840 - DNA, 15 bp, Homo sapiens
aagtccatggcttta

SEQ ID NO: 246841 - DNA, 15 bp, Homo sapiens
aaagtccatggcttt

SEQ ID NO: 246842 - DNA, 15 bp, Homo sapiens
gaaagtccatggctt

SEQ ID NO: 246843 - DNA, 15 bp, Homo sapiens
ggaaagtccatggct

SEQ ID NO: 246844 - DNA, 15 bp, Homo sapiens
gggaaagtccatggc

SEQ ID NO: 246845 - DNA, 15 bp, Homo sapiens
tgggaaagtccatgg

SEQ ID NO: 246846 - DNA, 15 bp, Homo sapiens
atgggaaagtccatg

SEQ ID NO: 246847 - DNA, 15 bp, Homo sapiens
catgggaaagtccat

SEQ ID NO: 246848 - DNA, 15 bp, Homo sapiens
tcatgggaaagtcca

SEQ ID NO: 246849 - DNA, 15 bp, Homo sapiens
gtcatgggaaagtcc

SEQ ID NO: 246850 - DNA, 15 bp, Homo sapiens
ggtcatgggaaagtc

SEQ ID NO: 246851 - DNA, 15 bp, Homo sapiens
tggtcatgggaaagt

SEQ ID NO: 246852 - DNA, 15 bp, Homo sapiens
ctggtcatgggaaag

SEQ ID NO: 246853 - DNA, 15 bp, Homo sapiens
cctggtcatgggaaa

SEQ ID NO: 246854 - DNA, 15 bp, Homo sapiens
ccctggtcatgggaa

SEQ ID NO: 246855 - DNA, 15 bp, Homo sapiens
gccctggtcatggga

SEQ ID NO: 246856 - DNA, 15 bp, Homo sapiens
ggccctggtcatggg

SEQ ID NO: 246857 - DNA, 15 bp, Homo sapiens
gggccctggtcatgg

SEQ ID NO: 246858 - DNA, 15 bp, Homo sapiens
tgggccctggtcatg

SEQ ID NO: 246859 - DNA, 15 bp, Homo sapiens
atgggccctggtcat

SEQ ID NO: 246860 - DNA, 15 bp, Homo sapiens
aatgggccctggtca

SEQ ID NO: 246861 - DNA, 15 bp, Homo sapiens
aaatgggccctggtc

SEQ ID NO: 246862 - DNA, 15 bp, Homo sapiens
aaaatgggccctggt

SEQ ID NO: 246863 - DNA, 15 bp, Homo sapiens
caaaatgggccctgg

SEQ ID NO: 246864 - DNA, 15 bp, Homo sapiens
gcaaaatgggccctg

SEQ ID NO: 246865 - DNA, 15 bp, Homo sapiens
ggcaaaatgggccct

SEQ ID NO: 246866 - DNA, 15 bp, Homo sapiens
aggcaaaatgggccc

SEQ ID NO: 246867 - DNA, 15 bp, Homo sapiens
aaggcaaaatgggcc

SEQ ID NO: 246868 - DNA, 15 bp, Homo sapiens
aaaggcaaaatgggc

SEQ ID NO: 246869 - DNA, 15 bp, Homo sapiens
caaaggcaaaatggg

SEQ ID NO: 246870 - DNA, 15 bp, Homo sapiens
ccaaaggcaaaatgg

SEQ ID NO: 246871 - DNA, 15 bp, Homo sapiens
cccaaaggcaaaatg

SEQ ID NO: 246872 - DNA, 15 bp, Homo sapiens
acccaaaggcaaaat

SEQ ID NO: 246873 - DNA, 15 bp, Homo sapiens
gacccaaaggcaaaa

SEQ ID NO: 246874 - DNA, 15 bp, Homo sapiens
agacccaaaggcaaa

SEQ ID NO: 246875 - DNA, 15 bp, Homo sapiens
cagacccaaaggcaa

SEQ ID NO: 246876 - DNA, 15 bp, Homo sapiens
tcagacccaaaggca

SEQ ID NO: 246877 - DNA, 15 bp, Homo sapiens
ctcagacccaaaggc

SEQ ID NO: 246878 - DNA, 15 bp, Homo sapiens
tctcagacccaaagg

SEQ ID NO: 246879 - DNA, 15 bp, Homo sapiens
ttctcagacccaaag

SEQ ID NO: 246880 - DNA, 15 bp, Homo sapiens
attctcagacccaaa

SEQ ID NO: 246881 - DNA, 15 bp, Homo sapiens
gattctcagacccaa

SEQ ID NO: 246882 - DNA, 15 bp, Homo sapiens
ggattctcagaccca

SEQ ID NO: 246883 - DNA, 15 bp, Homo sapiens
gggattctcagaccc

SEQ ID NO: 246884 - DNA, 15 bp, Homo sapiens
ggggattctcagacc

SEQ ID NO: 246885 - DNA, 15 bp, Homo sapiens
tggggattctcagac

SEQ ID NO: 246886 - DNA, 15 bp, Homo sapiens
ctggggattctcaga

SEQ ID NO: 246887 - DNA, 15 bp, Homo sapiens
cctggggattctcag

SEQ ID NO: 246888 - DNA, 15 bp, Homo sapiens
tcctggggattctca

SEQ ID NO: 246889 - DNA, 15 bp, Homo sapiens
ctcctggggattctc

SEQ ID NO: 246890 - DNA, 15 bp, Homo sapiens
actcctggggattct

SEQ ID NO: 246891 - DNA, 15 bp, Homo sapiens
cactcctggggattc

SEQ ID NO: 246892 - DNA, 15 bp, Homo sapiens
ccactcctggggatt

SEQ ID NO: 246893 - DNA, 15 bp, Homo sapiens
cccactcctggggat

SEQ ID NO: 246894 - DNA, 15 bp, Homo sapiens
tcccactcctgggga

SEQ ID NO: 246895 - DNA, 15 bp, Homo sapiens
ttcccactcctgggg

SEQ ID NO: 246896 - DNA, 15 bp, Homo sapiens
attcccactcctggg

SEQ ID NO: 246897 - DNA, 15 bp, Homo sapiens
gattcccactcctgg

SEQ ID NO: 246898 - DNA, 15 bp, Homo sapiens
ggattcccactcctg

SEQ ID NO: 246899 - DNA, 15 bp, Homo sapiens
tggattcccactcct

SEQ ID NO: 246900 - DNA, 15 bp, Homo sapiens
ctggattcccactcc

SEQ ID NO: 246901 - DNA, 15 bp, Homo sapiens
tctggattcccactc

SEQ ID NO: 246902 - DNA, 15 bp, Homo sapiens
ttctggattcccact

SEQ ID NO: 246903 - DNA, 15 bp, Homo sapiens
cttctggattcccac

SEQ ID NO: 246904 - DNA, 15 bp, Homo sapiens
tcttctggattccca

SEQ ID NO: 246905 - DNA, 15 bp, Homo sapiens
atcttctggattccc

SEQ ID NO: 246906 - DNA, 15 bp, Homo sapiens
catcttctggattcc

SEQ ID NO: 246907 - DNA, 15 bp, Homo sapiens
acatcttctggattc

SEQ ID NO: 246908 - DNA, 15 bp, Homo sapiens
gacatcttctggatt

SEQ ID NO: 246909 - DNA, 15 bp, Homo sapiens
tgacatcttctggat

SEQ ID NO: 246910 - DNA, 15 bp, Homo sapiens
ctgacatcttctgga

SEQ ID NO: 246911 - DNA, 15 bp, Homo sapiens
gctgacatcttctgg

SEQ ID NO: 246912 - DNA, 15 bp, Homo sapiens
agctgacatcttctg

SEQ ID NO: 246913 - DNA, 15 bp, Homo sapiens
gagctgacatcttct

SEQ ID NO: 246914 - DNA, 15 bp, Homo sapiens
agagctgacatcttc

SEQ ID NO: 246915 - DNA, 15 bp, Homo sapiens
cagagctgacatctt

SEQ ID NO: 246916 - DNA, 15 bp, Homo sapiens
acagagctgacatct

SEQ ID NO: 246917 - DNA, 15 bp, Homo sapiens
cacagagctgacatc

SEQ ID NO: 246918 - DNA, 15 bp, Homo sapiens
ccacagagctgacat

SEQ ID NO: 246919 - DNA, 15 bp, Homo sapiens
gccacagagctgaca

SEQ ID NO: 246920 - DNA, 15 bp, Homo sapiens
ggccacagagctgac

SEQ ID NO: 246921 - DNA, 15 bp, Homo sapiens
aggccacagagctga

SEQ ID NO: 246922 - DNA, 15 bp, Homo sapiens
caggccacagagctg

SEQ ID NO: 246923 - DNA, 15 bp, Homo sapiens
tcaggccacagagct

SEQ ID NO: 246924 - DNA, 15 bp, Homo sapiens
ttcaggccacagagc

SEQ ID NO: 246925 - DNA, 15 bp, Homo sapiens
gttcaggccacagag

SEQ ID NO: 246926 - DNA, 15 bp, Homo sapiens
agttcaggccacaga

SEQ ID NO: 246927 - DNA, 15 bp, Homo sapiens
cagttcaggccacag

SEQ ID NO: 246928 - DNA, 15 bp, Homo sapiens
ccagttcaggccaca

SEQ ID NO: 246929 - DNA, 15 bp, Homo sapiens
tccagttcaggccac

SEQ ID NO: 246930 - DNA, 15 bp, Homo sapiens
ttccagttcaggcca

SEQ ID NO: 246931 - DNA, 15 bp, Homo sapiens
attccagttcaggcc

SEQ ID NO: 246932 - DNA, 15 bp, Homo sapiens
aattccagttcaggc

SEQ ID NO: 246933 - DNA, 15 bp, Homo sapiens
gaattccagttcagg

SEQ ID NO: 246934 - DNA, 15 bp, Homo sapiens
ggaattccagttcag

SEQ ID NO: 246935 - DNA, 15 bp, Homo sapiens
tggaattccagttca

SEQ ID NO: 246936 - DNA, 15 bp, Homo sapiens
ttggaattccagttc

SEQ ID NO: 246937 - DNA, 15 bp, Homo sapiens
gttggaattccagtt

SEQ ID NO: 246938 - DNA, 15 bp, Homo sapiens
agttggaattccagt

SEQ ID NO: 246939 - DNA, 15 bp, Homo sapiens
cagttggaattccag

SEQ ID NO: 246940 - DNA, 15 bp, Homo sapiens
ccagttggaattcca

SEQ ID NO: 246941 - DNA, 15 bp, Homo sapiens
tccagttggaattcc

SEQ ID NO: 246942 - DNA, 15 bp, Homo sapiens
atccagttggaattc

SEQ ID NO: 246943 - DNA, 15 bp, Homo sapiens
gatccagttggaatt

SEQ ID NO: 246944 - DNA, 15 bp, Homo sapiens
tgatccagttggaat

SEQ ID NO: 246945 - DNA, 15 bp, Homo sapiens
atgatccagttggaa

SEQ ID NO: 246946 - DNA, 15 bp, Homo sapiens
aatgatccagttgga

SEQ ID NO: 246947 - DNA, 15 bp, Homo sapiens
aaatgatccagttgg

SEQ ID NO: 246948 - DNA, 15 bp, Homo sapiens
gaaatgatccagttg

SEQ ID NO: 246949 - DNA, 15 bp, Homo sapiens
tgaaatgatccagtt

SEQ ID NO: 246950 - DNA, 15 bp, Homo sapiens
atgaaatgatccagt

SEQ ID NO: 246951 - DNA, 15 bp, Homo sapiens
aatgaaatgatccag

SEQ ID NO: 246952 - DNA, 15 bp, Homo sapiens
gaatgaaatgatcca

SEQ ID NO: 246953 - DNA, 15 bp, Homo sapiens
ggaatgaaatgatcc

SEQ ID NO: 246954 - DNA, 15 bp, Homo sapiens
tggaatgaaatgatc

SEQ ID NO: 246955 - DNA, 15 bp, Homo sapiens
gtggaatgaaatgat

SEQ ID NO: 246956 - DNA, 15 bp, Homo sapiens
agtggaatgaaatga

SEQ ID NO: 246957 - DNA, 15 bp, Homo sapiens
tagtggaatgaaatg

SEQ ID NO: 246958 - DNA, 15 bp, Homo sapiens
atagtggaatgaaat

SEQ ID NO: 246959 - DNA, 15 bp, Homo sapiens
aatagtggaatgaaa

SEQ ID NO: 246960 - DNA, 15 bp, Homo sapiens
caatagtggaatgaa

SEQ ID NO: 246961 - DNA, 15 bp, Homo sapiens
tcaatagtggaatga

SEQ ID NO: 246962 - DNA, 15 bp, Homo sapiens
atcaatagtggaatg

SEQ ID NO: 246963 - DNA, 15 bp, Homo sapiens
aatcaatagtggaat

SEQ ID NO: 246964 - DNA, 15 bp, Homo sapiens
caatcaatagtggaa

SEQ ID NO: 246965 - DNA, 15 bp, Homo sapiens
ccaatcaatagtgga

SEQ ID NO: 246966 - DNA, 15 bp, Homo sapiens
tccaatcaatagtgg

SEQ ID NO: 246967 - DNA, 15 bp, Homo sapiens
ttccaatcaatagtg

SEQ ID NO: 246968 - DNA, 15 bp, Homo sapiens
cttccaatcaatagt

SEQ ID NO: 246969 - DNA, 15 bp, Homo sapiens
tcttccaatcaatag

SEQ ID NO: 246970 - DNA, 15 bp, Homo sapiens
ctcttccaatcaata

SEQ ID NO: 246971 - DNA, 15 bp, Homo sapiens
cctcttccaatcaat

SEQ ID NO: 246972 - DNA, 15 bp, Homo sapiens
tcctcttccaatcaa

SEQ ID NO: 246973 - DNA, 15 bp, Homo sapiens
ttcctcttccaatca

SEQ ID NO: 246974 - DNA, 15 bp, Homo sapiens
gttcctcttccaatc

SEQ ID NO: 246975 - DNA, 15 bp, Homo sapiens
tgttcctcttccaat

SEQ ID NO: 246976 - DNA, 15 bp, Homo sapiens
ctgttcctcttccaa

SEQ ID NO: 246977 - DNA, 15 bp, Homo sapiens
actgttcctcttcca

SEQ ID NO: 246978 - DNA, 15 bp, Homo sapiens
tactgttcctcttcc

SEQ ID NO: 246979 - DNA, 15 bp, Homo sapiens
ttactgttcctcttc

SEQ ID NO: 246980 - DNA, 15 bp, Homo sapiens
tttactgttcctctt

SEQ ID NO: 246981 - DNA, 15 bp, Homo sapiens
ctttactgttcctct

SEQ ID NO: 246982 - DNA, 15 bp, Homo sapiens
gctttactgttcctc

SEQ ID NO: 246983 - DNA, 15 bp, Homo sapiens
agctttactgttcct

SEQ ID NO: 246984 - DNA, 15 bp, Homo sapiens
cagctttactgttcc

SEQ ID NO: 246985 - DNA, 15 bp, Homo sapiens
acagctttactgttc

SEQ ID NO: 246986 - DNA, 15 bp, Homo sapiens
cacagctttactgtt

SEQ ID NO: 246987 - DNA, 15 bp, Homo sapiens
ccacagctttactgt

SEQ ID NO: 246988 - DNA, 15 bp, Homo sapiens
accacagctttactg

SEQ ID NO: 246989 - DNA, 15 bp, Homo sapiens
caccacagctttact

SEQ ID NO: 246990 - DNA, 15 bp, Homo sapiens
acaccacagctttac

SEQ ID NO: 246991 - DNA, 15 bp, Homo sapiens
aacaccacagcttta

SEQ ID NO: 246992 - DNA, 15 bp, Homo sapiens
taacaccacagcttt

SEQ ID NO: 246993 - DNA, 15 bp, Homo sapiens
ctaacaccacagctt

SEQ ID NO: 246994 - DNA, 15 bp, Homo sapiens
gctaacaccacagct

SEQ ID NO: 246995 - DNA, 15 bp, Homo sapiens
agctaacaccacagc

SEQ ID NO: 246996 - DNA, 15 bp, Homo sapiens
cagctaacaccacag

SEQ ID NO: 246997 - DNA, 15 bp, Homo sapiens
ccagctaacaccaca

SEQ ID NO: 246998 - DNA, 15 bp, Homo sapiens
tccagctaacaccac

SEQ ID NO: 246999 - DNA, 15 bp, Homo sapiens
ctccagctaacacca

SEQ ID NO: 247000 - DNA, 15 bp, Homo sapiens
actccagctaacacc

SEQ ID NO: 247001 - DNA, 15 bp, Homo sapiens
tactccagctaacac

SEQ ID NO: 247002 - DNA, 15 bp, Homo sapiens
ttactccagctaaca

SEQ ID NO: 247003 - DNA, 15 bp, Homo sapiens
tttactccagctaac

SEQ ID NO: 247004 - DNA, 15 bp, Homo sapiens
gtttactccagctaa

SEQ ID NO: 247005 - DNA, 15 bp, Homo sapiens
agtttactccagcta

SEQ ID NO: 247006 - DNA, 15 bp, Homo sapiens
cagtttactccagct

SEQ ID NO: 247007 - DNA, 15 bp, Homo sapiens
ccagtttactccagc

SEQ ID NO: 247008 - DNA, 15 bp, Homo sapiens
tccagtttactccag

SEQ ID NO: 247009 - DNA, 15 bp, Homo sapiens
ctccagtttactcca

SEQ ID NO: 247010 - DNA, 15 bp, Homo sapiens
actccagtttactcc

SEQ ID NO: 247011 - DNA, 15 bp, Homo sapiens
aactccagtttactc

SEQ ID NO: 247012 - DNA, 15 bp, Homo sapiens
caactccagtttact

SEQ ID NO: 247013 - DNA, 15 bp, Homo sapiens
tcaactccagtttac

SEQ ID NO: 247014 - DNA, 15 bp, Homo sapiens
ctcaactccagttta

SEQ ID NO: 247015 - DNA, 15 bp, Homo sapiens
tctcaactccagttt

SEQ ID NO: 247016 - DNA, 15 bp, Homo sapiens
ttctcaactccagtt

SEQ ID NO: 247017 - DNA, 15 bp, Homo sapiens
tttctcaactccagt

SEQ ID NO: 247018 - DNA, 15 bp, Homo sapiens
gtttctcaactccag

SEQ ID NO: 247019 - DNA, 15 bp, Homo sapiens
agtttctcaactcca

SEQ ID NO: 247020 - DNA, 15 bp, Homo sapiens
gagtttctcaactcc

SEQ ID NO: 247021 - DNA, 15 bp, Homo sapiens
tgagtttctcaactc

SEQ ID NO: 247022 - DNA, 15 bp, Homo sapiens
gtgagtttctcaact

SEQ ID NO: 247023 - DNA, 15 bp, Homo sapiens
agtgagtttctcaac

SEQ ID NO: 247024 - DNA, 15 bp, Homo sapiens
cagtgagtttctcaa

SEQ ID NO: 247025 - DNA, 15 bp, Homo sapiens
acagtgagtttctca

SEQ ID NO: 247026 - DNA, 15 bp, Homo sapiens
cacagtgagtttctc

SEQ ID NO: 247027 - DNA, 15 bp, Homo sapiens
acacagtgagtttct

SEQ ID NO: 247028 - DNA, 15 bp, Homo sapiens
tacacagtgagtttc

SEQ ID NO: 247029 - DNA, 15 bp, Homo sapiens
atacacagtgagttt

SEQ ID NO: 247030 - DNA, 15 bp, Homo sapiens
aatacacagtgagtt

SEQ ID NO: 247031 - DNA, 15 bp, Homo sapiens
aaatacacagtgagt

SEQ ID NO: 247032 - DNA, 15 bp, Homo sapiens
aaaatacacagtgag

SEQ ID NO: 247033 - DNA, 15 bp, Homo sapiens
aaaaatacacagtga

SEQ ID NO: 247034 - DNA, 15 bp, Homo sapiens
gaaaaatacacagtg

SEQ ID NO: 247035 - DNA, 15 bp, Homo sapiens
tgaaaaatacacagt

SEQ ID NO: 247036 - DNA, 15 bp, Homo sapiens
ctgaaaaatacacag

SEQ ID NO: 247037 - DNA, 15 bp, Homo sapiens
tctgaaaaatacaca

SEQ ID NO: 247038 - DNA, 15 bp, Homo sapiens
ttctgaaaaatacac

SEQ ID NO: 247039 - DNA, 15 bp, Homo sapiens
tttctgaaaaataca

SEQ ID NO: 247040 - DNA, 15 bp, Homo sapiens
ttttctgaaaaatac

SEQ ID NO: 247041 - DNA, 15 bp, Homo sapiens
tttttctgaaaaata

SEQ ID NO: 247042 - DNA, 15 bp, Homo sapiens
ttttttctgaaaaat

SEQ ID NO: 247043 - DNA, 15 bp, Homo sapiens
tttttttctgaaaaa

SEQ ID NO: 247044 - DNA, 15 bp, Homo sapiens
ttttttttctgaaaa

SEQ ID NO: 247045 - DNA, 15 bp, Homo sapiens
tttttttttctgaaa

SEQ ID NO: 247046 - DNA, 15 bp, Homo sapiens
ttttttttttctgaa

SEQ ID NO: 247047 - DNA, 15 bp, Homo sapiens
attttttttttctga

SEQ ID NO: 247048 - DNA, 15 bp, Homo sapiens
tattttttttttctg

SEQ ID NO: 247049 - DNA, 15 bp, Homo sapiens
ttattttttttttct

SEQ ID NO: 247050 - DNA, 15 bp, Homo sapiens
attattttttttttc

SEQ ID NO: 247051 - DNA, 15 bp, Homo sapiens
tattatttttttttt

SEQ ID NO: 247052 - DNA, 15 bp, Homo sapiens
ttattattttttttt

SEQ ID NO: 247053 - DNA, 15 bp, Homo sapiens
attattatttttttt

SEQ ID NO: 247054 - DNA, 15 bp, Homo sapiens
tattattattttttt

SEQ ID NO: 247055 - DNA, 15 bp, Homo sapiens
ttattattatttttt

SEQ ID NO: 247056 - DNA, 15 bp, Homo sapiens
attattattattttt

SEQ ID NO: 247057 - DNA, 15 bp, Homo sapiens
aattattattatttt

SEQ ID NO: 247058 - DNA, 15 bp, Homo sapiens
gaattattattattt

SEQ ID NO: 247059 - DNA, 15 bp, Homo sapiens
agaattattattatt

SEQ ID NO: 247060 - DNA, 15 bp, Homo sapiens
aagaattattattat

SEQ ID NO: 247061 - DNA, 15 bp, Homo sapiens
taagaattattatta

SEQ ID NO: 247062 - DNA, 15 bp, Homo sapiens
ttaagaattattatt

SEQ ID NO: 247063 - DNA, 15 bp, Homo sapiens
gttaagaattattat

SEQ ID NO: 247064 - DNA, 15 bp, Homo sapiens
tgttaagaattatta

SEQ ID NO: 247065 - DNA, 15 bp, Homo sapiens
ttgttaagaattatt

SEQ ID NO: 247066 - DNA, 15 bp, Homo sapiens
attgttaagaattat

SEQ ID NO: 247067 - DNA, 15 bp, Homo sapiens
gattgttaagaatta

SEQ ID NO: 247068 - DNA, 15 bp, Homo sapiens
agattgttaagaatt

SEQ ID NO: 247069 - DNA, 15 bp, Homo sapiens
gagattgttaagaat

SEQ ID NO: 247070 - DNA, 15 bp, Homo sapiens
tgagattgttaagaa

SEQ ID NO: 247071 - DNA, 15 bp, Homo sapiens
ttgagattgttaaga

SEQ ID NO: 247072 - DNA, 15 bp, Homo sapiens
tttgagattgttaag

SEQ ID NO: 247073 - DNA, 15 bp, Homo sapiens
gtttgagattgttaa

SEQ ID NO: 247074 - DNA, 15 bp, Homo sapiens
agtttgagattgtta

SEQ ID NO: 247075 - DNA, 15 bp, Homo sapiens
tagtttgagattgtt

SEQ ID NO: 247076 - DNA, 15 bp, Homo sapiens
gtagtttgagattgt

SEQ ID NO: 247077 - DNA, 15 bp, Homo sapiens
agtagtttgagattg

SEQ ID NO: 247078 - DNA, 15 bp, Homo sapiens
gagtagtttgagatt

SEQ ID NO: 247079 - DNA, 15 bp, Homo sapiens
agagtagtttgagat

SEQ ID NO: 247080 - DNA, 15 bp, Homo sapiens
gagagtagtttgaga

SEQ ID NO: 247081 - DNA, 15 bp, Homo sapiens
tgagagtagtttgag

SEQ ID NO: 247082 - DNA, 15 bp, Homo sapiens
ttgagagtagtttga

SEQ ID NO: 247083 - DNA, 15 bp, Homo sapiens
attgagagtagtttg

SEQ ID NO: 247084 - DNA, 15 bp, Homo sapiens
tattgagagtagttt

SEQ ID NO: 247085 - DNA, 15 bp, Homo sapiens
atattgagagtagtt

SEQ ID NO: 247086 - DNA, 15 bp, Homo sapiens
aatattgagagtagt

SEQ ID NO: 247087 - DNA, 15 bp, Homo sapiens
caatattgagagtag

SEQ ID NO: 247088 - DNA, 15 bp, Homo sapiens
acaatattgagagta

SEQ ID NO: 247089 - DNA, 15 bp, Homo sapiens
tacaatattgagagt

SEQ ID NO: 247090 - DNA, 15 bp, Homo sapiens
ttacaatattgagag

SEQ ID NO: 247091 - DNA, 15 bp, Homo sapiens
cttacaatattgaga

SEQ ID NO: 247092 - DNA, 15 bp, Homo sapiens
acttacaatattgag

SEQ ID NO: 247093 - DNA, 15 bp, Homo sapiens
gacttacaatattga

SEQ ID NO: 247094 - DNA, 15 bp, Homo sapiens
tgacttacaatattg

SEQ ID NO: 247095 - DNA, 15 bp, Homo sapiens
gtgacttacaatatt

SEQ ID NO: 247096 - DNA, 15 bp, Homo sapiens
ggtgacttacaatat

SEQ ID NO: 247097 - DNA, 15 bp, Homo sapiens
aggtgacttacaata

SEQ ID NO: 247098 - DNA, 15 bp, Homo sapiens
aaggtgacttacaat

SEQ ID NO: 247099 - DNA, 15 bp, Homo sapiens
caaggtgacttacaa

SEQ ID NO: 247100 - DNA, 15 bp, Homo sapiens
tcaaggtgacttaca

SEQ ID NO: 247101 - DNA, 15 bp, Homo sapiens
gtcaaggtgacttac

SEQ ID NO: 247102 - DNA, 15 bp, Homo sapiens
tgtcaaggtgactta

SEQ ID NO: 247103 - DNA, 15 bp, Homo sapiens
ctgtcaaggtgactt

SEQ ID NO: 247104 - DNA, 15 bp, Homo sapiens
gctgtcaaggtgact

SEQ ID NO: 247105 - DNA, 15 bp, Homo sapiens
tgctgtcaaggtgac

SEQ ID NO: 247106 - DNA, 15 bp, Homo sapiens
gtgctgtcaaggtga

SEQ ID NO: 247107 - DNA, 15 bp, Homo sapiens
cgtgctgtcaaggtg

SEQ ID NO: 247108 - DNA, 15 bp, Homo sapiens
tcgtgctgtcaaggt

SEQ ID NO: 247109 - DNA, 15 bp, Homo sapiens
ctcgtgctgtcaagg

SEQ ID NO: 247110 - DNA, 15 bp, Homo sapiens
cctcgtgctgtcaag

SEQ ID NO: 247111 - DNA, 15 bp, Homo sapiens
tcctcgtgctgtcaa

SEQ ID NO: 247112 - DNA, 15 bp, Homo sapiens
gtcctcgtgctgtca

SEQ ID NO: 247113 - DNA, 15 bp, Homo sapiens
agtcctcgtgctgtc

SEQ ID NO: 247114 - DNA, 15 bp, Homo sapiens
aagtcctcgtgctgt

SEQ ID NO: 247115 - DNA, 15 bp, Homo sapiens
caagtcctcgtgctg

SEQ ID NO: 247116 - DNA, 15 bp, Homo sapiens
tcaagtcctcgtgct

SEQ ID NO: 247117 - DNA, 15 bp, Homo sapiens
ttcaagtcctcgtgc

SEQ ID NO: 247118 - DNA, 15 bp, Homo sapiens
attcaagtcctcgtg

SEQ ID NO: 247119 - DNA, 15 bp, Homo sapiens
cattcaagtcctcgt

SEQ ID NO: 247120 - DNA, 15 bp, Homo sapiens
ccattcaagtcctcg

SEQ ID NO: 247121 - DNA, 15 bp, Homo sapiens
accattcaagtcctc

SEQ ID NO: 247122 - DNA, 15 bp, Homo sapiens
aaccattcaagtcct

SEQ ID NO: 247123 - DNA, 15 bp, Homo sapiens
aaaccattcaagtcc

SEQ ID NO: 247124 - DNA, 15 bp, Homo sapiens
caaaccattcaagtc

SEQ ID NO: 247125 - DNA, 15 bp, Homo sapiens
gcaaaccattcaagt

SEQ ID NO: 247126 - DNA, 15 bp, Homo sapiens
ggcaaaccattcaag

SEQ ID NO: 247127 - DNA, 15 bp, Homo sapiens
aggcaaaccattcaa

SEQ ID NO: 247128 - DNA, 15 bp, Homo sapiens
caggcaaaccattca

SEQ ID NO: 247129 - DNA, 15 bp, Homo sapiens
ccaggcaaaccattc

SEQ ID NO: 247130 - DNA, 15 bp, Homo sapiens
tccaggcaaaccatt

SEQ ID NO: 247131 - DNA, 15 bp, Homo sapiens
ctccaggcaaaccat

SEQ ID NO: 247132 - DNA, 15 bp, Homo sapiens
cctccaggcaaacca

SEQ ID NO: 247133 - DNA, 15 bp, Homo sapiens
ccctccaggcaaacc

SEQ ID NO: 247134 - DNA, 15 bp, Homo sapiens
gccctccaggcaaac

SEQ ID NO: 247135 - DNA, 15 bp, Homo sapiens
agccctccaggcaaa

SEQ ID NO: 247136 - DNA, 15 bp, Homo sapiens
tagccctccaggcaa

SEQ ID NO: 247137 - DNA, 15 bp, Homo sapiens
ttagccctccaggca

SEQ ID NO: 247138 - DNA, 15 bp, Homo sapiens
gttagccctccaggc

SEQ ID NO: 247139 - DNA, 15 bp, Homo sapiens
cgttagccctccagg

SEQ ID NO: 247140 - DNA, 15 bp, Homo sapiens
tcgttagccctccag

SEQ ID NO: 247141 - DNA, 15 bp, Homo sapiens
atcgttagccctcca

SEQ ID NO: 247142 - DNA, 15 bp, Homo sapiens
gatcgttagccctcc

SEQ ID NO: 247143 - DNA, 15 bp, Homo sapiens
agatcgttagccctc

SEQ ID NO: 247144 - DNA, 15 bp, Homo sapiens
aagatcgttagccct

SEQ ID NO: 247145 - DNA, 15 bp, Homo sapiens
caagatcgttagccc

SEQ ID NO: 247146 - DNA, 15 bp, Homo sapiens
ccaagatcgttagcc

SEQ ID NO: 247147 - DNA, 15 bp, Homo sapiens
gccaagatcgttagc

SEQ ID NO: 247148 - DNA, 15 bp, Homo sapiens
agccaagatcgttag

SEQ ID NO: 247149 - DNA, 15 bp, Homo sapiens
gagccaagatcgtta

SEQ ID NO: 247150 - DNA, 15 bp, Homo sapiens
agagccaagatcgtt

SEQ ID NO: 247151 - DNA, 15 bp, Homo sapiens
gagagccaagatcgt

SEQ ID NO: 247152 - DNA, 15 bp, Homo sapiens
ggagagccaagatcg

SEQ ID NO: 247153 - DNA, 15 bp, Homo sapiens
gggagagccaagatc

SEQ ID NO: 247154 - DNA, 15 bp, Homo sapiens
tgggagagccaagat

SEQ ID NO: 247155 - DNA, 15 bp, Homo sapiens
ctgggagagccaaga

SEQ ID NO: 247156 - DNA, 15 bp, Homo sapiens
cctgggagagccaag

SEQ ID NO: 247157 - DNA, 15 bp, Homo sapiens
acctgggagagccaa

SEQ ID NO: 247158 - DNA, 15 bp, Homo sapiens
cacctgggagagcca

SEQ ID NO: 247159 - DNA, 15 bp, Homo sapiens
gcacctgggagagcc

SEQ ID NO: 247160 - DNA, 15 bp, Homo sapiens
ggcacctgggagagc

SEQ ID NO: 247161 - DNA, 15 bp, Homo sapiens
aggcacctgggagag

SEQ ID NO: 247162 - DNA, 15 bp, Homo sapiens
caggcacctgggaga

SEQ ID NO: 247163 - DNA, 15 bp, Homo sapiens
acaggcacctgggag

SEQ ID NO: 247164 - DNA, 15 bp, Homo sapiens
gacaggcacctggga

SEQ ID NO: 247165 - DNA, 15 bp, Homo sapiens
ggacaggcacctggg

SEQ ID NO: 247166 - DNA, 15 bp, Homo sapiens
cggacaggcacctgg

SEQ ID NO: 247167 - DNA, 15 bp, Homo sapiens
gcggacaggcacctg

SEQ ID NO: 247168 - DNA, 15 bp, Homo sapiens
tgcggacaggcacct

SEQ ID NO: 247169 - DNA, 15 bp, Homo sapiens
atgcggacaggcacc

SEQ ID NO: 247170 - DNA, 15 bp, Homo sapiens
aatgcggacaggcac

SEQ ID NO: 247171 - DNA, 15 bp, Homo sapiens
caatgcggacaggca

SEQ ID NO: 247172 - DNA, 15 bp, Homo sapiens
ccaatgcggacaggc

SEQ ID NO: 247173 - DNA, 15 bp, Homo sapiens
cccaatgcggacagg

SEQ ID NO: 247174 - DNA, 15 bp, Homo sapiens
tcccaatgcggacag

SEQ ID NO: 247175 - DNA, 15 bp, Homo sapiens
ctcccaatgcggaca

SEQ ID NO: 247176 - DNA, 15 bp, Homo sapiens
tctcccaatgcggac

SEQ ID NO: 247177 - DNA, 15 bp, Homo sapiens
gtctcccaatgcgga

SEQ ID NO: 247178 - DNA, 15 bp, Homo sapiens
cgtctcccaatgcgg

SEQ ID NO: 247179 - DNA, 15 bp, Homo sapiens
ccgtctcccaatgcg

SEQ ID NO: 247180 - DNA, 15 bp, Homo sapiens
gccgtctcccaatgc

SEQ ID NO: 247181 - DNA, 15 bp, Homo sapiens
cgccgtctcccaatg

SEQ ID NO: 247182 - DNA, 15 bp, Homo sapiens
gcgccgtctcccaat

SEQ ID NO: 247183 - DNA, 15 bp, Homo sapiens
tgcgccgtctcccaa

SEQ ID NO: 247184 - DNA, 15 bp, Homo sapiens
ttgcgccgtctccca

SEQ ID NO: 247185 - DNA, 15 bp, Homo sapiens
cttgcgccgtctccc

SEQ ID NO: 247186 - DNA, 15 bp, Homo sapiens
gcttgcgccgtctcc

SEQ ID NO: 247187 - DNA, 15 bp, Homo sapiens
agcttgcgccgtctc

SEQ ID NO: 247188 - DNA, 15 bp, Homo sapiens
tagcttgcgccgtct

SEQ ID NO: 247189 - DNA, 15 bp, Homo sapiens
ttagcttgcgccgtc

SEQ ID NO: 247190 - DNA, 15 bp, Homo sapiens
cttagcttgcgccgt

SEQ ID NO: 247191 - DNA, 15 bp, Homo sapiens
gcttagcttgcgccg

SEQ ID NO: 247192 - DNA, 15 bp, Homo sapiens
ggcttagcttgcgcc

SEQ ID NO: 247193 - DNA, 15 bp, Homo sapiens
tggcttagcttgcgc

SEQ ID NO: 247194 - DNA, 15 bp, Homo sapiens
ctggcttagcttgcg

SEQ ID NO: 247195 - DNA, 15 bp, Homo sapiens
gctggcttagcttgc

SEQ ID NO: 247196 - DNA, 15 bp, Homo sapiens
agctggcttagcttg

SEQ ID NO: 247197 - DNA, 15 bp, Homo sapiens
cagctggcttagctt

SEQ ID NO: 247198 - DNA, 15 bp, Homo sapiens
acagctggcttagct

SEQ ID NO: 247199 - DNA, 15 bp, Homo sapiens
cacagctggcttagc

SEQ ID NO: 247200 - DNA, 15 bp, Homo sapiens
gcacagctggcttag

SEQ ID NO: 247201 - DNA, 15 bp, Homo sapiens
tgcacagctggctta

SEQ ID NO: 247202 - DNA, 15 bp, Homo sapiens
atgcacagctggctt

SEQ ID NO: 247203 - DNA, 15 bp, Homo sapiens
gatgcacagctggct

SEQ ID NO: 247204 - DNA, 15 bp, Homo sapiens
agatgcacagctggc

SEQ ID NO: 247205 - DNA, 15 bp, Homo sapiens
gagatgcacagctgg

SEQ ID NO: 247206 - DNA, 15 bp, Homo sapiens
agagatgcacagctg

SEQ ID NO: 247207 - DNA, 15 bp, Homo sapiens
gagagatgcacagct

SEQ ID NO: 247208 - DNA, 15 bp, Homo sapiens
ggagagatgcacagc

SEQ ID NO: 247209 - DNA, 15 bp, Homo sapiens
aggagagatgcacag

SEQ ID NO: 247210 - DNA, 15 bp, Homo sapiens
taggagagatgcaca

SEQ ID NO: 247211 - DNA, 15 bp, Homo sapiens
ataggagagatgcac

SEQ ID NO: 247212 - DNA, 15 bp, Homo sapiens
aataggagagatgca

SEQ ID NO: 247213 - DNA, 15 bp, Homo sapiens
taataggagagatgc

SEQ ID NO: 247214 - DNA, 15 bp, Homo sapiens
ataataggagagatg

SEQ ID NO: 247215 - DNA, 15 bp, Homo sapiens
tataataggagagat

SEQ ID NO: 247216 - DNA, 15 bp, Homo sapiens
atataataggagaga

SEQ ID NO: 247217 - DNA, 15 bp, Homo sapiens
gatataataggagag

SEQ ID NO: 247218 - DNA, 15 bp, Homo sapiens
tgatataataggaga

SEQ ID NO: 247219 - DNA, 15 bp, Homo sapiens
atgatataataggag

SEQ ID NO: 247220 - DNA, 15 bp, Homo sapiens
catgatataatagga

SEQ ID NO: 247221 - DNA, 15 bp, Homo sapiens
ccatgatataatagg

SEQ ID NO: 247222 - DNA, 15 bp, Homo sapiens
tccatgatataatag

SEQ ID NO: 247223 - DNA, 15 bp, Homo sapiens
gtccatgatataata

SEQ ID NO: 247224 - DNA, 15 bp, Homo sapiens
ggtccatgatataat

SEQ ID NO: 247225 - DNA, 15 bp, Homo sapiens
tggtccatgatataa

SEQ ID NO: 247226 - DNA, 15 bp, Homo sapiens
ctggtccatgatata

SEQ ID NO: 247227 - DNA, 15 bp, Homo sapiens
cctggtccatgatat

SEQ ID NO: 247228 - DNA, 15 bp, Homo sapiens
ccctggtccatgata

SEQ ID NO: 247229 - DNA, 15 bp, Homo sapiens
cccctggtccatgat

SEQ ID NO: 247230 - DNA, 15 bp, Homo sapiens
tcccctggtccatga

SEQ ID NO: 247231 - DNA, 15 bp, Homo sapiens
gtcccctggtccatg

SEQ ID NO: 247232 - DNA, 15 bp, Homo sapiens
ggtcccctggtccat

SEQ ID NO: 247233 - DNA, 15 bp, Homo sapiens
tggtcccctggtcca

SEQ ID NO: 247234 - DNA, 15 bp, Homo sapiens
atggtcccctggtcc

SEQ ID NO: 247235 - DNA, 15 bp, Homo sapiens
tatggtcccctggtc

SEQ ID NO: 247236 - DNA, 15 bp, Homo sapiens
ctatggtcccctggt

SEQ ID NO: 247237 - DNA, 15 bp, Homo sapiens
tctatggtcccctgg

SEQ ID NO: 247238 - DNA, 15 bp, Homo sapiens
gtctatggtcccctg

SEQ ID NO: 247239 - DNA, 15 bp, Homo sapiens
tgtctatggtcccct

SEQ ID NO: 247240 - DNA, 15 bp, Homo sapiens
atgtctatggtcccc

SEQ ID NO: 247241 - DNA, 15 bp, Homo sapiens
aatgtctatggtccc

SEQ ID NO: 247242 - DNA, 15 bp, Homo sapiens
aaatgtctatggtcc

SEQ ID NO: 247243 - DNA, 15 bp, Homo sapiens
aaaatgtctatggtc

SEQ ID NO: 247244 - DNA, 15 bp, Homo sapiens
caaaatgtctatggt

SEQ ID NO: 247245 - DNA, 15 bp, Homo sapiens
tcaaaatgtctatgg

SEQ ID NO: 247246 - DNA, 15 bp, Homo sapiens
ttcaaaatgtctatg

SEQ ID NO: 247247 - DNA, 15 bp, Homo sapiens
tttcaaaatgtctat

SEQ ID NO: 247248 - DNA, 15 bp, Homo sapiens
ctttcaaaatgtcta

SEQ ID NO: 247249 - DNA, 15 bp, Homo sapiens
cctttcaaaatgtct

SEQ ID NO: 247250 - DNA, 15 bp, Homo sapiens
ccctttcaaaatgtc

SEQ ID NO: 247251 - DNA, 15 bp, Homo sapiens
tccctttcaaaatgt

SEQ ID NO: 247252 - DNA, 15 bp, Homo sapiens
ttccctttcaaaatg

SEQ ID NO: 247253 - DNA, 15 bp, Homo sapiens
attccctttcaaaat

SEQ ID NO: 247254 - DNA, 15 bp, Homo sapiens
cattccctttcaaaa

SEQ ID NO: 247255 - DNA, 15 bp, Homo sapiens
acattccctttcaaa

SEQ ID NO: 247256 - DNA, 15 bp, Homo sapiens
tacattccctttcaa

SEQ ID NO: 247257 - DNA, 15 bp, Homo sapiens
atacattccctttca

SEQ ID NO: 247258 - DNA, 15 bp, Homo sapiens
gatacattccctttc

SEQ ID NO: 247259 - DNA, 15 bp, Homo sapiens
agatacattcccttt

SEQ ID NO: 247260 - DNA, 15 bp, Homo sapiens
cagatacattccctt

SEQ ID NO: 247261 - DNA, 15 bp, Homo sapiens
gcagatacattccct

SEQ ID NO: 247262 - DNA, 15 bp, Homo sapiens
ggcagatacattccc

SEQ ID NO: 247263 - DNA, 15 bp, Homo sapiens
aggcagatacattcc

SEQ ID NO: 247264 - DNA, 15 bp, Homo sapiens
gaggcagatacattc

SEQ ID NO: 247265 - DNA, 15 bp, Homo sapiens
agaggcagatacatt

SEQ ID NO: 247266 - DNA, 15 bp, Homo sapiens
gagaggcagatacat

SEQ ID NO: 247267 - DNA, 15 bp, Homo sapiens
agagaggcagataca

SEQ ID NO: 247268 - DNA, 15 bp, Homo sapiens
gagagaggcagatac

SEQ ID NO: 247269 - DNA, 15 bp, Homo sapiens
tgagagaggcagata

SEQ ID NO: 247270 - DNA, 15 bp, Homo sapiens
gtgagagaggcagat

SEQ ID NO: 247271 - DNA, 15 bp, Homo sapiens
tgtgagagaggcaga

SEQ ID NO: 247272 - DNA, 15 bp, Homo sapiens
gtgtgagagaggcag

SEQ ID NO: 247273 - DNA, 15 bp, Homo sapiens
agtgtgagagaggca

SEQ ID NO: 247274 - DNA, 15 bp, Homo sapiens
aagtgtgagagaggc

SEQ ID NO: 247275 - DNA, 15 bp, Homo sapiens
gaagtgtgagagagg

SEQ ID NO: 247276 - DNA, 15 bp, Homo sapiens
tgaagtgtgagagag

SEQ ID NO: 247277 - DNA, 15 bp, Homo sapiens
ctgaagtgtgagaga

SEQ ID NO: 247278 - DNA, 15 bp, Homo sapiens
gctgaagtgtgagag

SEQ ID NO: 247279 - DNA, 15 bp, Homo sapiens
ggctgaagtgtgaga

SEQ ID NO: 247280 - DNA, 15 bp, Homo sapiens
aggctgaagtgtgag

SEQ ID NO: 247281 - DNA, 15 bp, Homo sapiens
caggctgaagtgtga

SEQ ID NO: 247282 - DNA, 15 bp, Homo sapiens
gcaggctgaagtgtg

SEQ ID NO: 247283 - DNA, 15 bp, Homo sapiens
agcaggctgaagtgt

SEQ ID NO: 247284 - DNA, 15 bp, Homo sapiens
aagcaggctgaagtg

SEQ ID NO: 247285 - DNA, 15 bp, Homo sapiens
caagcaggctgaagt

SEQ ID NO: 247286 - DNA, 15 bp, Homo sapiens
acaagcaggctgaag

SEQ ID NO: 247287 - DNA, 15 bp, Homo sapiens
cacaagcaggctgaa

SEQ ID NO: 247288 - DNA, 15 bp, Homo sapiens
ccacaagcaggctga

SEQ ID NO: 247289 - DNA, 15 bp, Homo sapiens
cccacaagcaggctg

SEQ ID NO: 247290 - DNA, 15 bp, Homo sapiens
tcccacaagcaggct

SEQ ID NO: 247291 - DNA, 15 bp, Homo sapiens
atcccacaagcaggc

SEQ ID NO: 247292 - DNA, 15 bp, Homo sapiens
catcccacaagcagg

SEQ ID NO: 247293 - DNA, 15 bp, Homo sapiens
ccatcccacaagcag

SEQ ID NO: 247294 - DNA, 15 bp, Homo sapiens
gccatcccacaagca

SEQ ID NO: 247295 - DNA, 15 bp, Homo sapiens
agccatcccacaagc

SEQ ID NO: 247296 - DNA, 15 bp, Homo sapiens
aagccatcccacaag

SEQ ID NO: 247297 - DNA, 15 bp, Homo sapiens
caagccatcccacaa

SEQ ID NO: 247298 - DNA, 15 bp, Homo sapiens
ccaagccatcccaca

SEQ ID NO: 247299 - DNA, 15 bp, Homo sapiens
gccaagccatcccac

SEQ ID NO: 247300 - DNA, 15 bp, Homo sapiens
ggccaagccatccca

SEQ ID NO: 247301 - DNA, 15 bp, Homo sapiens
gggccaagccatccc

SEQ ID NO: 247302 - DNA, 15 bp, Homo sapiens
tgggccaagccatcc

SEQ ID NO: 247303 - DNA, 15 bp, Homo sapiens
ctgggccaagccatc

SEQ ID NO: 247304 - DNA, 15 bp, Homo sapiens
tctgggccaagccat

SEQ ID NO: 247305 - DNA, 15 bp, Homo sapiens
gtctgggccaagcca

SEQ ID NO: 247306 - DNA, 15 bp, Homo sapiens
tgtctgggccaagcc

SEQ ID NO: 247307 - DNA, 15 bp, Homo sapiens
ctgtctgggccaagc

SEQ ID NO: 247308 - DNA, 15 bp, Homo sapiens
gctgtctgggccaag

SEQ ID NO: 247309 - DNA, 15 bp, Homo sapiens
tgctgtctgggccaa

SEQ ID NO: 247310 - DNA, 15 bp, Homo sapiens
ctgctgtctgggcca

SEQ ID NO: 247311 - DNA, 15 bp, Homo sapiens
gctgctgtctgggcc

SEQ ID NO: 247312 - DNA, 15 bp, Homo sapiens
tgctgctgtctgggc

SEQ ID NO: 247313 - DNA, 15 bp, Homo sapiens
ctgctgctgtctggg

SEQ ID NO: 247314 - DNA, 15 bp, Homo sapiens
cctgctgctgtctgg

SEQ ID NO: 247315 - DNA, 15 bp, Homo sapiens
gcctgctgctgtctg

SEQ ID NO: 247316 - DNA, 15 bp, Homo sapiens
tgcctgctgctgtct

SEQ ID NO: 247317 - DNA, 15 bp, Homo sapiens
gtgcctgctgctgtc

SEQ ID NO: 247318 - DNA, 15 bp, Homo sapiens
agtgcctgctgctgt

SEQ ID NO: 247319 - DNA, 15 bp, Homo sapiens
tagtgcctgctgctg

SEQ ID NO: 247320 - DNA, 15 bp, Homo sapiens
atagtgcctgctgct

SEQ ID NO: 247321 - DNA, 15 bp, Homo sapiens
catagtgcctgctgc

SEQ ID NO: 247322 - DNA, 15 bp, Homo sapiens
acatagtgcctgctg

SEQ ID NO: 247323 - DNA, 15 bp, Homo sapiens
gacatagtgcctgct

SEQ ID NO: 247324 - DNA, 15 bp, Homo sapiens
agacatagtgcctgc

SEQ ID NO: 247325 - DNA, 15 bp, Homo sapiens
aagacatagtgcctg

SEQ ID NO: 247326 - DNA, 15 bp, Homo sapiens
aaagacatagtgcct

SEQ ID NO: 247327 - DNA, 15 bp, Homo sapiens
aaaagacatagtgcc

SEQ ID NO: 247328 - DNA, 15 bp, Homo sapiens
gaaaagacatagtgc

SEQ ID NO: 247329 - DNA, 15 bp, Homo sapiens
agaaaagacatagtg

SEQ ID NO: 247330 - DNA, 15 bp, Homo sapiens
tagaaaagacatagt

SEQ ID NO: 247331 - DNA, 15 bp, Homo sapiens
ttagaaaagacatag

SEQ ID NO: 247332 - DNA, 15 bp, Homo sapiens
tttagaaaagacata

SEQ ID NO: 247333 - DNA, 15 bp, Homo sapiens
atttagaaaagacat

SEQ ID NO: 247334 - DNA, 15 bp, Homo sapiens
catttagaaaagaca

SEQ ID NO: 247335 - DNA, 15 bp, Homo sapiens
acatttagaaaagac

SEQ ID NO: 247336 - DNA, 15 bp, Homo sapiens
aacatttagaaaaga

SEQ ID NO: 247337 - DNA, 15 bp, Homo sapiens
gaacatttagaaaag

SEQ ID NO: 247338 - DNA, 15 bp, Homo sapiens
agaacatttagaaaa

SEQ ID NO: 247339 - DNA, 15 bp, Homo sapiens
cagaacatttagaaa

SEQ ID NO: 247340 - DNA, 15 bp, Homo sapiens
gcagaacatttagaa

SEQ ID NO: 247341 - DNA, 15 bp, Homo sapiens
ggcagaacatttaga

SEQ ID NO: 247342 - DNA, 15 bp, Homo sapiens
aggcagaacatttag

SEQ ID NO: 247343 - DNA, 15 bp, Homo sapiens
gaggcagaacattta

SEQ ID NO: 247344 - DNA, 15 bp, Homo sapiens
agaggcagaacattt

SEQ ID NO: 247345 - DNA, 15 bp, Homo sapiens
aagaggcagaacatt

SEQ ID NO: 247346 - DNA, 15 bp, Homo sapiens
caagaggcagaacat

SEQ ID NO: 247347 - DNA, 15 bp, Homo sapiens
tcaagaggcagaaca

SEQ ID NO: 247348 - DNA, 15 bp, Homo sapiens
atcaagaggcagaac

SEQ ID NO: 247349 - DNA, 15 bp, Homo sapiens
tatcaagaggcagaa

SEQ ID NO: 247350 - DNA, 15 bp, Homo sapiens
atatcaagaggcaga

SEQ ID NO: 247351 - DNA, 15 bp, Homo sapiens
tatatcaagaggcag

SEQ ID NO: 247352 - DNA, 15 bp, Homo sapiens
ttatatcaagaggca

SEQ ID NO: 247353 - DNA, 15 bp, Homo sapiens
cttatatcaagaggc

SEQ ID NO: 247354 - DNA, 15 bp, Homo sapiens
gcttatatcaagagg

SEQ ID NO: 247355 - DNA, 15 bp, Homo sapiens
tgcttatatcaagag

SEQ ID NO: 247356 - DNA, 15 bp, Homo sapiens
ttgcttatatcaaga

SEQ ID NO: 247357 - DNA, 15 bp, Homo sapiens
cttgcttatatcaag

SEQ ID NO: 247358 - DNA, 15 bp, Homo sapiens
gcttgcttatatcaa

SEQ ID NO: 247359 - DNA, 15 bp, Homo sapiens
cgcttgcttatatca

SEQ ID NO: 247360 - DNA, 15 bp, Homo sapiens
ccgcttgcttatatc

SEQ ID NO: 247361 - DNA, 15 bp, Homo sapiens
accgcttgcttatat

SEQ ID NO: 247362 - DNA, 15 bp, Homo sapiens
gaccgcttgcttata

SEQ ID NO: 247363 - DNA, 15 bp, Homo sapiens
ggaccgcttgcttat

SEQ ID NO: 247364 - DNA, 15 bp, Homo sapiens
cggaccgcttgctta

SEQ ID NO: 247365 - DNA, 15 bp, Homo sapiens
acggaccgcttgctt

SEQ ID NO: 247366 - DNA, 15 bp, Homo sapiens
cacggaccgcttgct

SEQ ID NO: 247367 - DNA, 15 bp, Homo sapiens
tcacggaccgcttgc

SEQ ID NO: 247368 - DNA, 15 bp, Homo sapiens
ttcacggaccgcttg

SEQ ID NO: 247369 - DNA, 15 bp, Homo sapiens
cttcacggaccgctt

SEQ ID NO: 247370 - DNA, 15 bp, Homo sapiens
tcttcacggaccgct

SEQ ID NO: 247371 - DNA, 15 bp, Homo sapiens
ctcttcacggaccgc

SEQ ID NO: 247372 - DNA, 15 bp, Homo sapiens
tctcttcacggaccg

SEQ ID NO: 247373 - DNA, 15 bp, Homo sapiens
atctcttcacggacc

SEQ ID NO: 247374 - DNA, 15 bp, Homo sapiens
aatctcttcacggac

SEQ ID NO: 247375 - DNA, 15 bp, Homo sapiens
aaatctcttcacgga

SEQ ID NO: 247376 - DNA, 15 bp, Homo sapiens
taaatctcttcacgg

SEQ ID NO: 247377 - DNA, 15 bp, Homo sapiens
ataaatctcttcacg

SEQ ID NO: 247378 - DNA, 15 bp, Homo sapiens
gataaatctcttcac

SEQ ID NO: 247379 - DNA, 15 bp, Homo sapiens
tgataaatctcttca

SEQ ID NO: 247380 - DNA, 15 bp, Homo sapiens
ctgataaatctcttc

SEQ ID NO: 247381 - DNA, 15 bp, Homo sapiens
tctgataaatctctt

SEQ ID NO: 247382 - DNA, 15 bp, Homo sapiens
ctctgataaatctct

SEQ ID NO: 247383 - DNA, 15 bp, Homo sapiens
cctctgataaatctc

SEQ ID NO: 247384 - DNA, 15 bp, Homo sapiens
gcctctgataaatct

SEQ ID NO: 247385 - DNA, 15 bp, Homo sapiens
ggcctctgataaatc

SEQ ID NO: 247386 - DNA, 15 bp, Homo sapiens
gggcctctgataaat

SEQ ID NO: 247387 - DNA, 15 bp, Homo sapiens
agggcctctgataaa

SEQ ID NO: 247388 - DNA, 15 bp, Homo sapiens
aagggcctctgataa

SEQ ID NO: 247389 - DNA, 15 bp, Homo sapiens
caagggcctctgata

SEQ ID NO: 247390 - DNA, 15 bp, Homo sapiens
acaagggcctctgat

SEQ ID NO: 247391 - DNA, 15 bp, Homo sapiens
cacaagggcctctga

SEQ ID NO: 247392 - DNA, 15 bp, Homo sapiens
tcacaagggcctctg

SEQ ID NO: 247393 - DNA, 15 bp, Homo sapiens
atcacaagggcctct

SEQ ID NO: 247394 - DNA, 15 bp, Homo sapiens
catcacaagggcctc

SEQ ID NO: 247395 - DNA, 15 bp, Homo sapiens
ccatcacaagggcct

SEQ ID NO: 247396 - DNA, 15 bp, Homo sapiens
tccatcacaagggcc

SEQ ID NO: 247397 - DNA, 15 bp, Homo sapiens
atccatcacaagggc

SEQ ID NO: 247398 - DNA, 15 bp, Homo sapiens
tatccatcacaaggg

SEQ ID NO: 247399 - DNA, 15 bp, Homo sapiens
gtatccatcacaagg

SEQ ID NO: 247400 - DNA, 15 bp, Homo sapiens
tgtatccatcacaag

SEQ ID NO: 247401 - DNA, 15 bp, Homo sapiens
atgtatccatcacaa

SEQ ID NO: 247402 - DNA, 15 bp, Homo sapiens
catgtatccatcaca

SEQ ID NO: 247403 - DNA, 15 bp, Homo sapiens
acatgtatccatcac

SEQ ID NO: 247404 - DNA, 15 bp, Homo sapiens
gacatgtatccatca

SEQ ID NO: 247405 - DNA, 15 bp, Homo sapiens
agacatgtatccatc

SEQ ID NO: 247406 - DNA, 15 bp, Homo sapiens
aagacatgtatccat

SEQ ID NO: 247407 - DNA, 15 bp, Homo sapiens
gaagacatgtatcca

SEQ ID NO: 247408 - DNA, 15 bp, Homo sapiens
agaagacatgtatcc

SEQ ID NO: 247409 - DNA, 15 bp, Homo sapiens
aagaagacatgtatc

SEQ ID NO: 247410 - DNA, 15 bp, Homo sapiens
taagaagacatgtat

SEQ ID NO: 247411 - DNA, 15 bp, Homo sapiens
ataagaagacatgta

SEQ ID NO: 247412 - DNA, 15 bp, Homo sapiens
tataagaagacatgt

SEQ ID NO: 247413 - DNA, 15 bp, Homo sapiens
ttataagaagacatg

SEQ ID NO: 247414 - DNA, 15 bp, Homo sapiens
cttataagaagacat

SEQ ID NO: 247415 - DNA, 15 bp, Homo sapiens
gcttataagaagaca

SEQ ID NO: 247416 - DNA, 15 bp, Homo sapiens
agcttataagaagac

SEQ ID NO: 247417 - DNA, 15 bp, Homo sapiens
cagcttataagaaga

SEQ ID NO: 247418 - DNA, 15 bp, Homo sapiens
tcagcttataagaag

SEQ ID NO: 247419 - DNA, 15 bp, Homo sapiens
atcagcttataagaa

SEQ ID NO: 247420 - DNA, 15 bp, Homo sapiens
tatcagcttataaga

SEQ ID NO: 247421 - DNA, 15 bp, Homo sapiens
ctatcagcttataag

SEQ ID NO: 247422 - DNA, 15 bp, Homo sapiens
actatcagcttataa

SEQ ID NO: 247423 - DNA, 15 bp, Homo sapiens
gactatcagcttata

SEQ ID NO: 247424 - DNA, 15 bp, Homo sapiens
ggactatcagcttat

SEQ ID NO: 247425 - DNA, 15 bp, Homo sapiens
tggactatcagctta

SEQ ID NO: 247426 - DNA, 15 bp, Homo sapiens
ctggactatcagctt

SEQ ID NO: 247427 - DNA, 15 bp, Homo sapiens
cctggactatcagct

SEQ ID NO: 247428 - DNA, 15 bp, Homo sapiens
ccctggactatcagc

SEQ ID NO: 247429 - DNA, 15 bp, Homo sapiens
cccctggactatcag

SEQ ID NO: 247430 - DNA, 15 bp, Homo sapiens
tcccctggactatca

SEQ ID NO: 247431 - DNA, 15 bp, Homo sapiens
ctcccctggactatc

SEQ ID NO: 247432 - DNA, 15 bp, Homo sapiens
tctcccctggactat

SEQ ID NO: 247433 - DNA, 15 bp, Homo sapiens
gtctcccctggacta

SEQ ID NO: 247434 - DNA, 15 bp, Homo sapiens
agtctcccctggact

SEQ ID NO: 247435 - DNA, 15 bp, Homo sapiens
gagtctcccctggac

SEQ ID NO: 247436 - DNA, 15 bp, Homo sapiens
ggagtctcccctgga

SEQ ID NO: 247437 - DNA, 15 bp, Homo sapiens
aggagtctcccctgg

SEQ ID NO: 247438 - DNA, 15 bp, Homo sapiens
taggagtctcccctg

SEQ ID NO: 247439 - DNA, 15 bp, Homo sapiens
ttaggagtctcccct

SEQ ID NO: 247440 - DNA, 15 bp, Homo sapiens
tttaggagtctcccc

SEQ ID NO: 247441 - DNA, 15 bp, Homo sapiens
gtttaggagtctccc

SEQ ID NO: 247442 - DNA, 15 bp, Homo sapiens
tgtttaggagtctcc

SEQ ID NO: 247443 - DNA, 15 bp, Homo sapiens
ttgtttaggagtctc

SEQ ID NO: 247444 - DNA, 15 bp, Homo sapiens
gttgtttaggagtct

SEQ ID NO: 247445 - DNA, 15 bp, Homo sapiens
tgttgtttaggagtc

SEQ ID NO: 247446 - DNA, 15 bp, Homo sapiens
ttgttgtttaggagt

SEQ ID NO: 247447 - DNA, 15 bp, Homo sapiens
tttgttgtttaggag

SEQ ID NO: 247448 - DNA, 15 bp, Homo sapiens
ctttgttgtttagga

SEQ ID NO: 247449 - DNA, 15 bp, Homo sapiens
cctttgttgtttagg

SEQ ID NO: 247450 - DNA, 15 bp, Homo sapiens
ccctttgttgtttag

SEQ ID NO: 247451 - DNA, 15 bp, Homo sapiens
tccctttgttgttta

SEQ ID NO: 247452 - DNA, 15 bp, Homo sapiens
ttccctttgttgttt

SEQ ID NO: 247453 - DNA, 15 bp, Homo sapiens
gttccctttgttgtt

SEQ ID NO: 247454 - DNA, 15 bp, Homo sapiens
agttccctttgttgt

SEQ ID NO: 247455 - DNA, 15 bp, Homo sapiens
cagttccctttgttg

SEQ ID NO: 247456 - DNA, 15 bp, Homo sapiens
tcagttccctttgtt

SEQ ID NO: 247457 - DNA, 15 bp, Homo sapiens
ttcagttccctttgt

SEQ ID NO: 247458 - DNA, 15 bp, Homo sapiens
cttcagttccctttg

SEQ ID NO: 247459 - DNA, 15 bp, Homo sapiens
ccttcagttcccttt

SEQ ID NO: 247460 - DNA, 15 bp, Homo sapiens
gccttcagttccctt

SEQ ID NO: 247461 - DNA, 15 bp, Homo sapiens
tgccttcagttccct

SEQ ID NO: 247462 - DNA, 15 bp, Homo sapiens
ctgccttcagttccc

SEQ ID NO: 247463 - DNA, 15 bp, Homo sapiens
tctgccttcagttcc

SEQ ID NO: 247464 - DNA, 15 bp, Homo sapiens
gtctgccttcagttc

SEQ ID NO: 247465 - DNA, 15 bp, Homo sapiens
agtctgccttcagtt

SEQ ID NO: 247466 - DNA, 15 bp, Homo sapiens
cagtctgccttcagt

SEQ ID NO: 247467 - DNA, 15 bp, Homo sapiens
ccagtctgccttcag

SEQ ID NO: 247468 - DNA, 15 bp, Homo sapiens
gccagtctgccttca

SEQ ID NO: 247469 - DNA, 15 bp, Homo sapiens
tgccagtctgccttc

SEQ ID NO: 247470 - DNA, 15 bp, Homo sapiens
ctgccagtctgcctt

SEQ ID NO: 247471 - DNA, 15 bp, Homo sapiens
gctgccagtctgcct

SEQ ID NO: 247472 - DNA, 15 bp, Homo sapiens
tgctgccagtctgcc

SEQ ID NO: 247473 - DNA, 15 bp, Homo sapiens
ttgctgccagtctgc

SEQ ID NO: 247474 - DNA, 15 bp, Homo sapiens
attgctgccagtctg

SEQ ID NO: 247475 - DNA, 15 bp, Homo sapiens
aattgctgccagtct

SEQ ID NO: 247476 - DNA, 15 bp, Homo sapiens
gaattgctgccagtc

SEQ ID NO: 247477 - DNA, 15 bp, Homo sapiens
agaattgctgccagt

SEQ ID NO: 247478 - DNA, 15 bp, Homo sapiens
tagaattgctgccag

SEQ ID NO: 247479 - DNA, 15 bp, Homo sapiens
ctagaattgctgcca

SEQ ID NO: 247480 - DNA, 15 bp, Homo sapiens
actagaattgctgcc

SEQ ID NO: 247481 - DNA, 15 bp, Homo sapiens
cactagaattgctgc

SEQ ID NO: 247482 - DNA, 15 bp, Homo sapiens
acactagaattgctg

SEQ ID NO: 247483 - DNA, 15 bp, Homo sapiens
gacactagaattgct

SEQ ID NO: 247484 - DNA, 15 bp, Homo sapiens
ggacactagaattgc

SEQ ID NO: 247485 - DNA, 15 bp, Homo sapiens
aggacactagaattg

SEQ ID NO: 247486 - DNA, 15 bp, Homo sapiens
taggacactagaatt

SEQ ID NO: 247487 - DNA, 15 bp, Homo sapiens
gtaggacactagaat

SEQ ID NO: 247488 - DNA, 15 bp, Homo sapiens
tgtaggacactagaa

SEQ ID NO: 247489 - DNA, 15 bp, Homo sapiens
ttgtaggacactaga

SEQ ID NO: 247490 - DNA, 15 bp, Homo sapiens
cttgtaggacactag

SEQ ID NO: 247491 - DNA, 15 bp, Homo sapiens
ccttgtaggacacta

SEQ ID NO: 247492 - DNA, 15 bp, Homo sapiens
gccttgtaggacact

SEQ ID NO: 247493 - DNA, 15 bp, Homo sapiens
agccttgtaggacac

SEQ ID NO: 247494 - DNA, 15 bp, Homo sapiens
cagccttgtaggaca

SEQ ID NO: 247495 - DNA, 15 bp, Homo sapiens
acagccttgtaggac

SEQ ID NO: 247496 - DNA, 15 bp, Homo sapiens
cacagccttgtagga

SEQ ID NO: 247497 - DNA, 15 bp, Homo sapiens
ccacagccttgtagg

SEQ ID NO: 247498 - DNA, 15 bp, Homo sapiens
gccacagccttgtag

SEQ ID NO: 247499 - DNA, 15 bp, Homo sapiens
agccacagccttgta

SEQ ID NO: 247500 - DNA, 15 bp, Homo sapiens
aagccacagccttgt

SEQ ID NO: 247501 - DNA, 15 bp, Homo sapiens
caagccacagccttg

SEQ ID NO: 247502 - DNA, 15 bp, Homo sapiens
acaagccacagcctt

SEQ ID NO: 247503 - DNA, 15 bp, Homo sapiens
gacaagccacagcct

SEQ ID NO: 247504 - DNA, 15 bp, Homo sapiens
ggacaagccacagcc

SEQ ID NO: 247505 - DNA, 15 bp, Homo sapiens
aggacaagccacagc

SEQ ID NO: 247506 - DNA, 15 bp, Homo sapiens
caggacaagccacag

SEQ ID NO: 247507 - DNA, 15 bp, Homo sapiens
acaggacaagccaca

SEQ ID NO: 247508 - DNA, 15 bp, Homo sapiens
cacaggacaagccac

SEQ ID NO: 247509 - DNA, 15 bp, Homo sapiens
tcacaggacaagcca

SEQ ID NO: 247510 - DNA, 15 bp, Homo sapiens
ctcacaggacaagcc

SEQ ID NO: 247511 - DNA, 15 bp, Homo sapiens
gctcacaggacaagc

SEQ ID NO: 247512 - DNA, 15 bp, Homo sapiens
agctcacaggacaag

SEQ ID NO: 247513 - DNA, 15 bp, Homo sapiens
cagctcacaggacaa

SEQ ID NO: 247514 - DNA, 15 bp, Homo sapiens
ccagctcacaggaca

SEQ ID NO: 247515 - DNA, 15 bp, Homo sapiens
tccagctcacaggac

SEQ ID NO: 247516 - DNA, 15 bp, Homo sapiens
gtccagctcacagga

SEQ ID NO: 247517 - DNA, 15 bp, Homo sapiens
cgtccagctcacagg

SEQ ID NO: 247518 - DNA, 15 bp, Homo sapiens
ccgtccagctcacag

SEQ ID NO: 247519 - DNA, 15 bp, Homo sapiens
gccgtccagctcaca

SEQ ID NO: 247520 - DNA, 15 bp, Homo sapiens
cgccgtccagctcac

SEQ ID NO: 247521 - DNA, 15 bp, Homo sapiens
ccgccgtccagctca

SEQ ID NO: 247522 - DNA, 15 bp, Homo sapiens
cccgccgtccagctc

SEQ ID NO: 247523 - DNA, 15 bp, Homo sapiens
ccccgccgtccagct

SEQ ID NO: 247524 - DNA, 15 bp, Homo sapiens
accccgccgtccagc

SEQ ID NO: 247525 - DNA, 15 bp, Homo sapiens
gaccccgccgtccag

SEQ ID NO: 247526 - DNA, 15 bp, Homo sapiens
agaccccgccgtcca

SEQ ID NO: 247527 - DNA, 15 bp, Homo sapiens
cagaccccgccgtcc

SEQ ID NO: 247528 - DNA, 15 bp, Homo sapiens
tcagaccccgccgtc

SEQ ID NO: 247529 - DNA, 15 bp, Homo sapiens
ctcagaccccgccgt

SEQ ID NO: 247530 - DNA, 15 bp, Homo sapiens
cctcagaccccgccg

SEQ ID NO: 247531 - DNA, 15 bp, Homo sapiens
gcctcagaccccgcc

SEQ ID NO: 247532 - DNA, 15 bp, Homo sapiens
tgcctcagaccccgc

SEQ ID NO: 247533 - DNA, 15 bp, Homo sapiens
ctgcctcagaccccg

SEQ ID NO: 247534 - DNA, 15 bp, Homo sapiens
cctgcctcagacccc

SEQ ID NO: 247535 - DNA, 15 bp, Homo sapiens
tcctgcctcagaccc

SEQ ID NO: 247536 - DNA, 15 bp, Homo sapiens
gtcctgcctcagacc

SEQ ID NO: 247537 - DNA, 15 bp, Homo sapiens
cgtcctgcctcagac

SEQ ID NO: 247538 - DNA, 15 bp, Homo sapiens
acgtcctgcctcaga

SEQ ID NO: 247539 - DNA, 15 bp, Homo sapiens
gacgtcctgcctcag

SEQ ID NO: 247540 - DNA, 15 bp, Homo sapiens
tgacgtcctgcctca

SEQ ID NO: 247541 - DNA, 15 bp, Homo sapiens
ctgacgtcctgcctc

SEQ ID NO: 247542 - DNA, 15 bp, Homo sapiens
cctgacgtcctgcct

SEQ ID NO: 247543 - DNA, 15 bp, Homo sapiens
gcctgacgtcctgcc

SEQ ID NO: 247544 - DNA, 15 bp, Homo sapiens
tgcctgacgtcctgc

SEQ ID NO: 247545 - DNA, 15 bp, Homo sapiens
ctgcctgacgtcctg

SEQ ID NO: 247546 - DNA, 15 bp, Homo sapiens
cctgcctgacgtcct

SEQ ID NO: 247547 - DNA, 15 bp, Homo sapiens
ccctgcctgacgtcc

SEQ ID NO: 247548 - DNA, 15 bp, Homo sapiens
gccctgcctgacgtc

SEQ ID NO: 247549 - DNA, 15 bp, Homo sapiens
ggccctgcctgacgt

SEQ ID NO: 247550 - DNA, 15 bp, Homo sapiens
tggccctgcctgacg

SEQ ID NO: 247551 - DNA, 15 bp, Homo sapiens
atggccctgcctgac

SEQ ID NO: 247552 - DNA, 15 bp, Homo sapiens
catggccctgcctga

SEQ ID NO: 247553 - DNA, 15 bp, Homo sapiens
gcatggccctgcctg

SEQ ID NO: 247554 - DNA, 15 bp, Homo sapiens
agcatggccctgcct

SEQ ID NO: 247555 - DNA, 15 bp, Homo sapiens
cagcatggccctgcc

SEQ ID NO: 247556 - DNA, 15 bp, Homo sapiens
tcagcatggccctgc

SEQ ID NO: 247557 - DNA, 15 bp, Homo sapiens
ctcagcatggccctg

SEQ ID NO: 247558 - DNA, 15 bp, Homo sapiens
tctcagcatggccct

SEQ ID NO: 247559 - DNA, 15 bp, Homo sapiens
ctctcagcatggccc

SEQ ID NO: 247560 - DNA, 15 bp, Homo sapiens
gctctcagcatggcc

SEQ ID NO: 247561 - DNA, 15 bp, Homo sapiens
tgctctcagcatggc

SEQ ID NO: 247562 - DNA, 15 bp, Homo sapiens
atgctctcagcatgg

SEQ ID NO: 247563 - DNA, 15 bp, Homo sapiens
aatgctctcagcatg

SEQ ID NO: 247564 - DNA, 15 bp, Homo sapiens
aaatgctctcagcat

SEQ ID NO: 247565 - DNA, 15 bp, Homo sapiens
gaaatgctctcagca

SEQ ID NO: 247566 - DNA, 15 bp, Homo sapiens
tgaaatgctctcagc

SEQ ID NO: 247567 - DNA, 15 bp, Homo sapiens
gtgaaatgctctcag

SEQ ID NO: 247568 - DNA, 15 bp, Homo sapiens
tgtgaaatgctctca

SEQ ID NO: 247569 - DNA, 15 bp, Homo sapiens
atgtgaaatgctctc

SEQ ID NO: 247570 - DNA, 15 bp, Homo sapiens
aatgtgaaatgctct

SEQ ID NO: 247571 - DNA, 15 bp, Homo sapiens
aaatgtgaaatgctc

SEQ ID NO: 247572 - DNA, 15 bp, Homo sapiens
taaatgtgaaatgct

SEQ ID NO: 247573 - DNA, 15 bp, Homo sapiens
ataaatgtgaaatgc

SEQ ID NO: 247574 - DNA, 15 bp, Homo sapiens
aataaatgtgaaatg

SEQ ID NO: 247575 - DNA, 15 bp, Homo sapiens
caataaatgtgaaat

SEQ ID NO: 247576 - DNA, 15 bp, Homo sapiens
tcaataaatgtgaaa

SEQ ID NO: 247577 - DNA, 15 bp, Homo sapiens
ttcaataaatgtgaa

SEQ ID NO: 247578 - DNA, 15 bp, Homo sapiens
tttcaataaatgtga

SEQ ID NO: 247579 - DNA, 15 bp, Homo sapiens
ctttcaataaatgtg

SEQ ID NO: 247580 - DNA, 15 bp, Homo sapiens
gctttcaataaatgt

SEQ ID NO: 247581 - DNA, 15 bp, Homo sapiens
ggctttcaataaatg

SEQ ID NO: 247582 - DNA, 15 bp, Homo sapiens
aggctttcaataaat

SEQ ID NO: 247583 - DNA, 15 bp, Homo sapiens
caggctttcaataaa

SEQ ID NO: 247584 - DNA, 15 bp, Homo sapiens
gcaggctttcaataa

SEQ ID NO: 247585 - DNA, 15 bp, Homo sapiens
agcaggctttcaata

SEQ ID NO: 247586 - DNA, 15 bp, Homo sapiens
cagcaggctttcaat

SEQ ID NO: 247587 - DNA, 15 bp, Homo sapiens
acagcaggctttcaa

SEQ ID NO: 247588 - DNA, 15 bp, Homo sapiens
gacagcaggctttca

SEQ ID NO: 247589 - DNA, 15 bp, Homo sapiens
ggacagcaggctttc

SEQ ID NO: 247590 - DNA, 15 bp, Homo sapiens
aggacagcaggcttt

SEQ ID NO: 247591 - DNA, 15 bp, Homo sapiens
gaggacagcaggctt

SEQ ID NO: 247592 - DNA, 15 bp, Homo sapiens
agaggacagcaggct

SEQ ID NO: 247593 - DNA, 15 bp, Homo sapiens
cagaggacagcaggc

SEQ ID NO: 247594 - DNA, 15 bp, Homo sapiens
ccagaggacagcagg

SEQ ID NO: 247595 - DNA, 15 bp, Homo sapiens
cccagaggacagcag

SEQ ID NO: 247596 - DNA, 15 bp, Homo sapiens
gcccagaggacagca

SEQ ID NO: 247597 - DNA, 15 bp, Homo sapiens
tgcccagaggacagc

SEQ ID NO: 247598 - DNA, 15 bp, Homo sapiens
gtgcccagaggacag

SEQ ID NO: 247599 - DNA, 15 bp, Homo sapiens
agtgcccagaggaca

SEQ ID NO: 247600 - DNA, 15 bp, Homo sapiens
cagtgcccagaggac

SEQ ID NO: 247601 - DNA, 15 bp, Homo sapiens
acagtgcccagagga

SEQ ID NO: 247602 - DNA, 15 bp, Homo sapiens
cacagtgcccagagg

SEQ ID NO: 247603 - DNA, 15 bp, Homo sapiens
acacagtgcccagag

SEQ ID NO: 247604 - DNA, 15 bp, Homo sapiens
aacacagtgcccaga

SEQ ID NO: 247605 - DNA, 15 bp, Homo sapiens
aaacacagtgcccag

SEQ ID NO: 247606 - DNA, 15 bp, Homo sapiens
aaaacacagtgccca

SEQ ID NO: 247607 - DNA, 15 bp, Homo sapiens
gaaaacacagtgccc

SEQ ID NO: 247608 - DNA, 15 bp, Homo sapiens
ggaaaacacagtgcc

SEQ ID NO: 247609 - DNA, 15 bp, Homo sapiens
aggaaaacacagtgc

SEQ ID NO: 247610 - DNA, 15 bp, Homo sapiens
gaggaaaacacagtg

SEQ ID NO: 247611 - DNA, 15 bp, Homo sapiens
agaggaaaacacagt

SEQ ID NO: 247612 - DNA, 15 bp, Homo sapiens
aagaggaaaacacag

SEQ ID NO: 247613 - DNA, 15 bp, Homo sapiens
caagaggaaaacaca

SEQ ID NO: 247614 - DNA, 15 bp, Homo sapiens
gcaagaggaaaacac

SEQ ID NO: 247615 - DNA, 15 bp, Homo sapiens
ggcaagaggaaaaca

SEQ ID NO: 247616 - DNA, 15 bp, Homo sapiens
tggcaagaggaaaac

SEQ ID NO: 247617 - DNA, 15 bp, Homo sapiens
atggcaagaggaaaa

SEQ ID NO: 247618 - DNA, 15 bp, Homo sapiens
aatggcaagaggaaa

SEQ ID NO: 247619 - DNA, 15 bp, Homo sapiens
gaatggcaagaggaa

SEQ ID NO: 247620 - DNA, 15 bp, Homo sapiens
ggaatggcaagagga

SEQ ID NO: 247621 - DNA, 15 bp, Homo sapiens
tggaatggcaagagg

SEQ ID NO: 247622 - DNA, 15 bp, Homo sapiens
atggaatggcaagag

SEQ ID NO: 247623 - DNA, 15 bp, Homo sapiens
aatggaatggcaaga

SEQ ID NO: 247624 - DNA, 15 bp, Homo sapiens
aaatggaatggcaag

SEQ ID NO: 247625 - DNA, 15 bp, Homo sapiens
taaatggaatggcaa

SEQ ID NO: 247626 - DNA, 15 bp, Homo sapiens
ataaatggaatggca

SEQ ID NO: 247627 - DNA, 15 bp, Homo sapiens
gataaatggaatggc

SEQ ID NO: 247628 - DNA, 15 bp, Homo sapiens
ggataaatggaatgg

SEQ ID NO: 247629 - DNA, 15 bp, Homo sapiens
gggataaatggaatg

SEQ ID NO: 247630 - DNA, 15 bp, Homo sapiens
agggataaatggaat

SEQ ID NO: 247631 - DNA, 15 bp, Homo sapiens
gagggataaatggaa

SEQ ID NO: 247632 - DNA, 15 bp, Homo sapiens
ggagggataaatgga

SEQ ID NO: 247633 - DNA, 15 bp, Homo sapiens
gggagggataaatgg

SEQ ID NO: 247634 - DNA, 15 bp, Homo sapiens
tgggagggataaatg

SEQ ID NO: 247635 - DNA, 15 bp, Homo sapiens
ctgggagggataaat

SEQ ID NO: 247636 - DNA, 15 bp, Homo sapiens
actgggagggataaa

SEQ ID NO: 247637 - DNA, 15 bp, Homo sapiens
gactgggagggataa

SEQ ID NO: 247638 - DNA, 15 bp, Homo sapiens
tgactgggagggata

SEQ ID NO: 247639 - DNA, 15 bp, Homo sapiens
atgactgggagggat

SEQ ID NO: 247640 - DNA, 15 bp, Homo sapiens
catgactgggaggga

SEQ ID NO: 247641 - DNA, 15 bp, Homo sapiens
gcatgactgggaggg

SEQ ID NO: 247642 - DNA, 15 bp, Homo sapiens
agcatgactgggagg

SEQ ID NO: 247643 - DNA, 15 bp, Homo sapiens
gagcatgactgggag

SEQ ID NO: 247644 - DNA, 15 bp, Homo sapiens
ggagcatgactggga

SEQ ID NO: 247645 - DNA, 15 bp, Homo sapiens
cggagcatgactggg

SEQ ID NO: 247646 - DNA, 15 bp, Homo sapiens
gcggagcatgactgg

SEQ ID NO: 247647 - DNA, 15 bp, Homo sapiens
agcggagcatgactg

SEQ ID NO: 247648 - DNA, 15 bp, Homo sapiens
aagcggagcatgact

SEQ ID NO: 247649 - DNA, 15 bp, Homo sapiens
aaagcggagcatgac

SEQ ID NO: 247650 - DNA, 15 bp, Homo sapiens
taaagcggagcatga

SEQ ID NO: 247651 - DNA, 15 bp, Homo sapiens
ataaagcggagcatg

SEQ ID NO: 247652 - DNA, 15 bp, Homo sapiens
cataaagcggagcat

SEQ ID NO: 247653 - DNA, 15 bp, Homo sapiens
ccataaagcggagca

SEQ ID NO: 247654 - DNA, 15 bp, Homo sapiens
tccataaagcggagc

SEQ ID NO: 247655 - DNA, 15 bp, Homo sapiens
atccataaagcggag

SEQ ID NO: 247656 - DNA, 15 bp, Homo sapiens
catccataaagcgga

SEQ ID NO: 247657 - DNA, 15 bp, Homo sapiens
ccatccataaagcgg

SEQ ID NO: 247658 - DNA, 15 bp, Homo sapiens
tccatccataaagcg

SEQ ID NO: 247659 - DNA, 15 bp, Homo sapiens
ctccatccataaagc

SEQ ID NO: 247660 - DNA, 15 bp, Homo sapiens
gctccatccataaag

SEQ ID NO: 247661 - DNA, 15 bp, Homo sapiens
tgctccatccataaa

SEQ ID NO: 247662 - DNA, 15 bp, Homo sapiens
ctgctccatccataa

SEQ ID NO: 247663 - DNA, 15 bp, Homo sapiens
actgctccatccata

SEQ ID NO: 247664 - DNA, 15 bp, Homo sapiens
aactgctccatccat

SEQ ID NO: 247665 - DNA, 15 bp, Homo sapiens
caactgctccatcca

SEQ ID NO: 247666 - DNA, 15 bp, Homo sapiens
tcaactgctccatcc

SEQ ID NO: 247667 - DNA, 15 bp, Homo sapiens
ctcaactgctccatc

SEQ ID NO: 247668 - DNA, 15 bp, Homo sapiens
cctcaactgctccat

SEQ ID NO: 247669 - DNA, 15 bp, Homo sapiens
gcctcaactgctcca

SEQ ID NO: 247670 - DNA, 15 bp, Homo sapiens
agcctcaactgctcc

SEQ ID NO: 247671 - DNA, 15 bp, Homo sapiens
gagcctcaactgctc

SEQ ID NO: 247672 - DNA, 15 bp, Homo sapiens
tgagcctcaactgct

SEQ ID NO: 247673 - DNA, 15 bp, Homo sapiens
ctgagcctcaactgc

SEQ ID NO: 247674 - DNA, 15 bp, Homo sapiens
tctgagcctcaactg

SEQ ID NO: 247675 - DNA, 15 bp, Homo sapiens
ctctgagcctcaact

SEQ ID NO: 247676 - DNA, 15 bp, Homo sapiens
cctctgagcctcaac

SEQ ID NO: 247677 - DNA, 15 bp, Homo sapiens
ccctctgagcctcaa

SEQ ID NO: 247678 - DNA, 15 bp, Homo sapiens
cccctctgagcctca

SEQ ID NO: 247679 - DNA, 15 bp, Homo sapiens
acccctctgagcctc

SEQ ID NO: 247680 - DNA, 15 bp, Homo sapiens
aacccctctgagcct

SEQ ID NO: 247681 - DNA, 15 bp, Homo sapiens
taacccctctgagcc

SEQ ID NO: 247682 - DNA, 15 bp, Homo sapiens
gtaacccctctgagc

SEQ ID NO: 247683 - DNA, 15 bp, Homo sapiens
tgtaacccctctgag

SEQ ID NO: 247684 - DNA, 15 bp, Homo sapiens
atgtaacccctctga

SEQ ID NO: 247685 - DNA, 15 bp, Homo sapiens
tatgtaacccctctg

SEQ ID NO: 247686 - DNA, 15 bp, Homo sapiens
ttatgtaacccctct

SEQ ID NO: 247687 - DNA, 15 bp, Homo sapiens
tttatgtaacccctc

SEQ ID NO: 247688 - DNA, 15 bp, Homo sapiens
ctttatgtaacccct

SEQ ID NO: 247689 - DNA, 15 bp, Homo sapiens
gctttatgtaacccc

SEQ ID NO: 247690 - DNA, 15 bp, Homo sapiens
tgctttatgtaaccc

SEQ ID NO: 247691 - DNA, 15 bp, Homo sapiens
gtgctttatgtaacc

SEQ ID NO: 247692 - DNA, 15 bp, Homo sapiens
ggtgctttatgtaac

SEQ ID NO: 247693 - DNA, 15 bp, Homo sapiens
gggtgctttatgtaa

SEQ ID NO: 247694 - DNA, 15 bp, Homo sapiens
tgggtgctttatgta

SEQ ID NO: 247695 - DNA, 15 bp, Homo sapiens
ttgggtgctttatgt

SEQ ID NO: 247696 - DNA, 15 bp, Homo sapiens
tttgggtgctttatg

SEQ ID NO: 247697 - DNA, 15 bp, Homo sapiens
ctttgggtgctttat

SEQ ID NO: 247698 - DNA, 15 bp, Homo sapiens
tctttgggtgcttta

SEQ ID NO: 247699 - DNA, 15 bp, Homo sapiens
gtctttgggtgcttt

SEQ ID NO: 247700 - DNA, 15 bp, Homo sapiens
tgtctttgggtgctt

SEQ ID NO: 247701 - DNA, 15 bp, Homo sapiens
atgtctttgggtgct

SEQ ID NO: 247702 - DNA, 15 bp, Homo sapiens
tatgtctttgggtgc

SEQ ID NO: 247703 - DNA, 15 bp, Homo sapiens
atatgtctttgggtg

SEQ ID NO: 247704 - DNA, 15 bp, Homo sapiens
catatgtctttgggt

SEQ ID NO: 247705 - DNA, 15 bp, Homo sapiens
ccatatgtctttggg

SEQ ID NO: 247706 - DNA, 15 bp, Homo sapiens
cccatatgtctttgg

SEQ ID NO: 247707 - DNA, 15 bp, Homo sapiens
gcccatatgtctttg

SEQ ID NO: 247708 - DNA, 15 bp, Homo sapiens
tgcccatatgtcttt

SEQ ID NO: 247709 - DNA, 15 bp, Homo sapiens
ctgcccatatgtctt

SEQ ID NO: 247710 - DNA, 15 bp, Homo sapiens
cctgcccatatgtct

SEQ ID NO: 247711 - DNA, 15 bp, Homo sapiens
tcctgcccatatgtc

SEQ ID NO: 247712 - DNA, 15 bp, Homo sapiens
ttcctgcccatatgt

SEQ ID NO: 247713 - DNA, 15 bp, Homo sapiens
cttcctgcccatatg

SEQ ID NO: 247714 - DNA, 15 bp, Homo sapiens
acttcctgcccatat

SEQ ID NO: 247715 - DNA, 15 bp, Homo sapiens
cacttcctgcccata

SEQ ID NO: 247716 - DNA, 15 bp, Homo sapiens
tcacttcctgcccat

SEQ ID NO: 247717 - DNA, 15 bp, Homo sapiens
gtcacttcctgccca

SEQ ID NO: 247718 - DNA, 15 bp, Homo sapiens
tgtcacttcctgccc

SEQ ID NO: 247719 - DNA, 15 bp, Homo sapiens
gtgtcacttcctgcc

SEQ ID NO: 247720 - DNA, 15 bp, Homo sapiens
tgtgtcacttcctgc

SEQ ID NO: 247721 - DNA, 15 bp, Homo sapiens
ttgtgtcacttcctg

SEQ ID NO: 247722 - DNA, 15 bp, Homo sapiens
gttgtgtcacttcct

SEQ ID NO: 247723 - DNA, 15 bp, Homo sapiens
ggttgtgtcacttcc

SEQ ID NO: 247724 - DNA, 15 bp, Homo sapiens
aggttgtgtcacttc

SEQ ID NO: 247725 - DNA, 15 bp, Homo sapiens
caggttgtgtcactt

SEQ ID NO: 247726 - DNA, 15 bp, Homo sapiens
ccaggttgtgtcact

SEQ ID NO: 247727 - DNA, 15 bp, Homo sapiens
tccaggttgtgtcac

SEQ ID NO: 247728 - DNA, 15 bp, Homo sapiens
atccaggttgtgtca

SEQ ID NO: 247729 - DNA, 15 bp, Homo sapiens
aatccaggttgtgtc

SEQ ID NO: 247730 - DNA, 15 bp, Homo sapiens
aaatccaggttgtgt

SEQ ID NO: 247731 - DNA, 15 bp, Homo sapiens
caaatccaggttgtg

SEQ ID NO: 247732 - DNA, 15 bp, Homo sapiens
tcaaatccaggttgt

SEQ ID NO: 247733 - DNA, 15 bp, Homo sapiens
ttcaaatccaggttg

SEQ ID NO: 247734 - DNA, 15 bp, Homo sapiens
attcaaatccaggtt

SEQ ID NO: 247735 - DNA, 15 bp, Homo sapiens
cattcaaatccaggt

SEQ ID NO: 247736 - DNA, 15 bp, Homo sapiens
gcattcaaatccagg

SEQ ID NO: 247737 - DNA, 15 bp, Homo sapiens
tgcattcaaatccag

SEQ ID NO: 247738 - DNA, 15 bp, Homo sapiens
ttgcattcaaatcca

SEQ ID NO: 247739 - DNA, 15 bp, Homo sapiens
tttgcattcaaatcc

SEQ ID NO: 247740 - DNA, 15 bp, Homo sapiens
atttgcattcaaatc

SEQ ID NO: 247741 - DNA, 15 bp, Homo sapiens
gatttgcattcaaat

SEQ ID NO: 247742 - DNA, 15 bp, Homo sapiens
agatttgcattcaaa

SEQ ID NO: 247743 - DNA, 15 bp, Homo sapiens
aagatttgcattcaa

SEQ ID NO: 247744 - DNA, 15 bp, Homo sapiens
aaagatttgcattca

SEQ ID NO: 247745 - DNA, 15 bp, Homo sapiens
gaaagatttgcattc

SEQ ID NO: 247746 - DNA, 15 bp, Homo sapiens
agaaagatttgcatt

SEQ ID NO: 247747 - DNA, 15 bp, Homo sapiens
cagaaagatttgcat

SEQ ID NO: 247748 - DNA, 15 bp, Homo sapiens
ccagaaagatttgca

SEQ ID NO: 247749 - DNA, 15 bp, Homo sapiens
gccagaaagatttgc

SEQ ID NO: 247750 - DNA, 15 bp, Homo sapiens
agccagaaagatttg

SEQ ID NO: 247751 - DNA, 15 bp, Homo sapiens
cagccagaaagattt

SEQ ID NO: 247752 - DNA, 15 bp, Homo sapiens
acagccagaaagatt

SEQ ID NO: 247753 - DNA, 15 bp, Homo sapiens
aacagccagaaagat

SEQ ID NO: 247754 - DNA, 15 bp, Homo sapiens
aaacagccagaaaga

SEQ ID NO: 247755 - DNA, 15 bp, Homo sapiens
gaaacagccagaaag

SEQ ID NO: 247756 - DNA, 15 bp, Homo sapiens
ggaaacagccagaaa

SEQ ID NO: 247757 - DNA, 15 bp, Homo sapiens
tggaaacagccagaa

SEQ ID NO: 247758 - DNA, 15 bp, Homo sapiens
atggaaacagccaga

SEQ ID NO: 247759 - DNA, 15 bp, Homo sapiens
tatggaaacagccag

SEQ ID NO: 247760 - DNA, 15 bp, Homo sapiens
atatggaaacagcca

SEQ ID NO: 247761 - DNA, 15 bp, Homo sapiens
aatatggaaacagcc

SEQ ID NO: 247762 - DNA, 15 bp, Homo sapiens
caatatggaaacagc

SEQ ID NO: 247763 - DNA, 15 bp, Homo sapiens
acaatatggaaacag

SEQ ID NO: 247764 - DNA, 15 bp, Homo sapiens
gacaatatggaaaca

SEQ ID NO: 247765 - DNA, 15 bp, Homo sapiens
agacaatatggaaac

SEQ ID NO: 247766 - DNA, 15 bp, Homo sapiens
gagacaatatggaaa

SEQ ID NO: 247767 - DNA, 15 bp, Homo sapiens
tgagacaatatggaa

SEQ ID NO: 247768 - DNA, 15 bp, Homo sapiens
gtgagacaatatgga

SEQ ID NO: 247769 - DNA, 15 bp, Homo sapiens
tgtgagacaatatgg

SEQ ID NO: 247770 - DNA, 15 bp, Homo sapiens
ctgtgagacaatatg

SEQ ID NO: 247771 - DNA, 15 bp, Homo sapiens
gctgtgagacaatat

SEQ ID NO: 247772 - DNA, 15 bp, Homo sapiens
ggctgtgagacaata

SEQ ID NO: 247773 - DNA, 15 bp, Homo sapiens
aggctgtgagacaat

SEQ ID NO: 247774 - DNA, 15 bp, Homo sapiens
taggctgtgagacaa

SEQ ID NO: 247775 - DNA, 15 bp, Homo sapiens
ataggctgtgagaca

SEQ ID NO: 247776 - DNA, 15 bp, Homo sapiens
gataggctgtgagac

SEQ ID NO: 247777 - DNA, 15 bp, Homo sapiens
ggataggctgtgaga

SEQ ID NO: 247778 - DNA, 15 bp, Homo sapiens
gggataggctgtgag

SEQ ID NO: 247779 - DNA, 15 bp, Homo sapiens
tgggataggctgtga

SEQ ID NO: 247780 - DNA, 15 bp, Homo sapiens
ctgggataggctgtg

SEQ ID NO: 247781 - DNA, 15 bp, Homo sapiens
gctgggataggctgt

SEQ ID NO: 247782 - DNA, 15 bp, Homo sapiens
tgctgggataggctg

SEQ ID NO: 247783 - DNA, 15 bp, Homo sapiens
atgctgggataggct

SEQ ID NO: 247784 - DNA, 15 bp, Homo sapiens
gatgctgggataggc

SEQ ID NO: 247785 - DNA, 15 bp, Homo sapiens
cgatgctgggatagg

SEQ ID NO: 247786 - DNA, 15 bp, Homo sapiens
acgatgctgggatag

SEQ ID NO: 247787 - DNA, 15 bp, Homo sapiens
cacgatgctgggata

SEQ ID NO: 247788 - DNA, 15 bp, Homo sapiens
acacgatgctgggat

SEQ ID NO: 247789 - DNA, 15 bp, Homo sapiens
cacacgatgctggga

SEQ ID NO: 247790 - DNA, 15 bp, Homo sapiens
acacacgatgctggg

SEQ ID NO: 247791 - DNA, 15 bp, Homo sapiens
cacacacgatgctgg

SEQ ID NO: 247792 - DNA, 15 bp, Homo sapiens
acacacacgatgctg

SEQ ID NO: 247793 - DNA, 15 bp, Homo sapiens
cacacacacgatgct

SEQ ID NO: 247794 - DNA, 15 bp, Homo sapiens
acacacacacgatgc

SEQ ID NO: 247795 - DNA, 15 bp, Homo sapiens
cacacacacacgatg

SEQ ID NO: 247796 - DNA, 15 bp, Homo sapiens
acacacacacacgat

SEQ ID NO: 247797 - DNA, 15 bp, Homo sapiens
cacacacacacacga

SEQ ID NO: 247798 - DNA, 15 bp, Homo sapiens
cccacacacacacac

SEQ ID NO: 247799 - DNA, 15 bp, Homo sapiens
ccccacacacacaca

SEQ ID NO: 247800 - DNA, 15 bp, Homo sapiens
accccacacacacac

SEQ ID NO: 247801 - DNA, 15 bp, Homo sapiens
caccccacacacaca

SEQ ID NO: 247802 - DNA, 15 bp, Homo sapiens
ccaccccacacacac

SEQ ID NO: 247803 - DNA, 15 bp, Homo sapiens
cccaccccacacaca

SEQ ID NO: 247804 - DNA, 15 bp, Homo sapiens
ccccaccccacacac

SEQ ID NO: 247805 - DNA, 15 bp, Homo sapiens
cccccaccccacaca

SEQ ID NO: 247806 - DNA, 15 bp, Homo sapiens
ccccccaccccacac

SEQ ID NO: 247807 - DNA, 15 bp, Homo sapiens
cccccccaccccaca

SEQ ID NO: 247808 - DNA, 15 bp, Homo sapiens
ccccccccaccccac

SEQ ID NO: 247809 - DNA, 15 bp, Homo sapiens
accccccccacccca

SEQ ID NO: 247810 - DNA, 15 bp, Homo sapiens
caccccccccacccc

SEQ ID NO: 247811 - DNA, 15 bp, Homo sapiens
ccaccccccccaccc

SEQ ID NO: 247812 - DNA, 15 bp, Homo sapiens
cccaccccccccacc

SEQ ID NO: 247813 - DNA, 15 bp, Homo sapiens
ccccaccccccccac

SEQ ID NO: 247814 - DNA, 15 bp, Homo sapiens
cccccacccccccca

SEQ ID NO: 247815 - DNA, 15 bp, Homo sapiens
ccccccacccccccc

SEQ ID NO: 247816 - DNA, 15 bp, Homo sapiens
cccccccaccccccc

SEQ ID NO: 247817 - DNA, 15 bp, Homo sapiens
ccccccccacccccc

SEQ ID NO: 247818 - DNA, 15 bp, Homo sapiens
tccccccccaccccc

SEQ ID NO: 247819 - DNA, 15 bp, Homo sapiens
atccccccccacccc

SEQ ID NO: 247820 - DNA, 15 bp, Homo sapiens
tatccccccccaccc

SEQ ID NO: 247821 - DNA, 15 bp, Homo sapiens
ctatccccccccacc

SEQ ID NO: 247822 - DNA, 15 bp, Homo sapiens
cctatccccccccac

SEQ ID NO: 247823 - DNA, 15 bp, Homo sapiens
ccctatcccccccca

SEQ ID NO: 247824 - DNA, 15 bp, Homo sapiens
cccctatcccccccc

SEQ ID NO: 247825 - DNA, 15 bp, Homo sapiens
ccccctatccccccc

SEQ ID NO: 247826 - DNA, 15 bp, Homo sapiens
accccctatcccccc

SEQ ID NO: 247827 - DNA, 15 bp, Homo sapiens
caccccctatccccc

SEQ ID NO: 247828 - DNA, 15 bp, Homo sapiens
ccaccccctatcccc

SEQ ID NO: 247829 - DNA, 15 bp, Homo sapiens
cccaccccctatccc

SEQ ID NO: 247830 - DNA, 15 bp, Homo sapiens
ccccaccccctatcc

SEQ ID NO: 247831 - DNA, 15 bp, Homo sapiens
cccccaccccctatc

SEQ ID NO: 247832 - DNA, 15 bp, Homo sapiens
gcccccaccccctat

SEQ ID NO: 247833 - DNA, 15 bp, Homo sapiens
agcccccacccccta

SEQ ID NO: 247834 - DNA, 15 bp, Homo sapiens
cagcccccaccccct

SEQ ID NO: 247835 - DNA, 15 bp, Homo sapiens
ccagcccccaccccc

SEQ ID NO: 247836 - DNA, 15 bp, Homo sapiens
accagcccccacccc

SEQ ID NO: 247837 - DNA, 15 bp, Homo sapiens
caccagcccccaccc

SEQ ID NO: 247838 - DNA, 15 bp, Homo sapiens
ccaccagcccccacc

SEQ ID NO: 247839 - DNA, 15 bp, Homo sapiens
accaccagcccccac

SEQ ID NO: 247840 - DNA, 15 bp, Homo sapiens
taccaccagccccca

SEQ ID NO: 247841 - DNA, 15 bp, Homo sapiens
ataccaccagccccc

SEQ ID NO: 247842 - DNA, 15 bp, Homo sapiens
aataccaccagcccc

SEQ ID NO: 247843 - DNA, 15 bp, Homo sapiens
aaataccaccagccc

SEQ ID NO: 247844 - DNA, 15 bp, Homo sapiens
taaataccaccagcc

SEQ ID NO: 247845 - DNA, 15 bp, Homo sapiens
ctaaataccaccagc

SEQ ID NO: 247846 - DNA, 15 bp, Homo sapiens
cctaaataccaccag

SEQ ID NO: 247847 - DNA, 15 bp, Homo sapiens
ccctaaataccacca

SEQ ID NO: 247848 - DNA, 15 bp, Homo sapiens
tccctaaataccacc

SEQ ID NO: 247849 - DNA, 15 bp, Homo sapiens
atccctaaataccac

SEQ ID NO: 247850 - DNA, 15 bp, Homo sapiens
catccctaaatacca

SEQ ID NO: 247851 - DNA, 15 bp, Homo sapiens
gcatccctaaatacc

SEQ ID NO: 247852 - DNA, 15 bp, Homo sapiens
ggcatccctaaatac

SEQ ID NO: 247853 - DNA, 15 bp, Homo sapiens
gggcatccctaaata

SEQ ID NO: 247854 - DNA, 15 bp, Homo sapiens
agggcatccctaaat

SEQ ID NO: 247855 - DNA, 15 bp, Homo sapiens
gagggcatccctaaa

SEQ ID NO: 247856 - DNA, 15 bp, Homo sapiens
agagggcatccctaa

SEQ ID NO: 247857 - DNA, 15 bp, Homo sapiens
aagagggcatcccta

SEQ ID NO: 247858 - DNA, 15 bp, Homo sapiens
gaagagggcatccct

SEQ ID NO: 247859 - DNA, 15 bp, Homo sapiens
agaagagggcatccc

SEQ ID NO: 247860 - DNA, 15 bp, Homo sapiens
aagaagagggcatcc

SEQ ID NO: 247861 - DNA, 15 bp, Homo sapiens
taagaagagggcatc

SEQ ID NO: 247862 - DNA, 15 bp, Homo sapiens
ttaagaagagggcat

SEQ ID NO: 247863 - DNA, 15 bp, Homo sapiens
cttaagaagagggca

SEQ ID NO: 247864 - DNA, 15 bp, Homo sapiens
ccttaagaagagggc

SEQ ID NO: 247865 - DNA, 15 bp, Homo sapiens
tccttaagaagaggg

SEQ ID NO: 247866 - DNA, 15 bp, Homo sapiens
atccttaagaagagg

SEQ ID NO: 247867 - DNA, 15 bp, Homo sapiens
catccttaagaagag

SEQ ID NO: 247868 - DNA, 15 bp, Homo sapiens
acatccttaagaaga

SEQ ID NO: 247869 - DNA, 15 bp, Homo sapiens
cacatccttaagaag

SEQ ID NO: 247870 - DNA, 15 bp, Homo sapiens
acacatccttaagaa

SEQ ID NO: 247871 - DNA, 15 bp, Homo sapiens
gacacatccttaaga

SEQ ID NO: 247872 - DNA, 15 bp, Homo sapiens
ggacacatccttaag

SEQ ID NO: 247873 - DNA, 15 bp, Homo sapiens
aggacacatccttaa

SEQ ID NO: 247874 - DNA, 15 bp, Homo sapiens
caggacacatcctta

SEQ ID NO: 247875 - DNA, 15 bp, Homo sapiens
ccaggacacatcctt

SEQ ID NO: 247876 - DNA, 15 bp, Homo sapiens
cccaggacacatcct

SEQ ID NO: 247877 - DNA, 15 bp, Homo sapiens
ccccaggacacatcc

SEQ ID NO: 247878 - DNA, 15 bp, Homo sapiens
gccccaggacacatc

SEQ ID NO: 247879 - DNA, 15 bp, Homo sapiens
agccccaggacacat

SEQ ID NO: 247880 - DNA, 15 bp, Homo sapiens
tagccccaggacaca

SEQ ID NO: 247881 - DNA, 15 bp, Homo sapiens
ttagccccaggacac

SEQ ID NO: 247882 - DNA, 15 bp, Homo sapiens
cttagccccaggaca

SEQ ID NO: 247883 - DNA, 15 bp, Homo sapiens
acttagccccaggac

SEQ ID NO: 247884 - DNA, 15 bp, Homo sapiens
gacttagccccagga

SEQ ID NO: 247885 - DNA, 15 bp, Homo sapiens
tgacttagccccagg

SEQ ID NO: 247886 - DNA, 15 bp, Homo sapiens
atgacttagccccag

SEQ ID NO: 247887 - DNA, 15 bp, Homo sapiens
aatgacttagcccca

SEQ ID NO: 247888 - DNA, 15 bp, Homo sapiens
caatgacttagcccc

SEQ ID NO: 247889 - DNA, 15 bp, Homo sapiens
acaatgacttagccc

SEQ ID NO: 247890 - DNA, 15 bp, Homo sapiens
aacaatgacttagcc

SEQ ID NO: 247891 - DNA, 15 bp, Homo sapiens
gaacaatgacttagc

SEQ ID NO: 247892 - DNA, 15 bp, Homo sapiens
agaacaatgacttag

SEQ ID NO: 247893 - DNA, 15 bp, Homo sapiens
aagaacaatgactta

SEQ ID NO: 247894 - DNA, 15 bp, Homo sapiens
caagaacaatgactt

SEQ ID NO: 247895 - DNA, 15 bp, Homo sapiens
ccaagaacaatgact

SEQ ID NO: 247896 - DNA, 15 bp, Homo sapiens
cccaagaacaatgac

SEQ ID NO: 247897 - DNA, 15 bp, Homo sapiens
ccccaagaacaatga

SEQ ID NO: 247898 - DNA, 15 bp, Homo sapiens
cccccaagaacaatg

SEQ ID NO: 247899 - DNA, 15 bp, Homo sapiens
acccccaagaacaat

SEQ ID NO: 247900 - DNA, 15 bp, Homo sapiens
cacccccaagaacaa

SEQ ID NO: 247901 - DNA, 15 bp, Homo sapiens
gcacccccaagaaca

SEQ ID NO: 247902 - DNA, 15 bp, Homo sapiens
tgcacccccaagaac

SEQ ID NO: 247903 - DNA, 15 bp, Homo sapiens
ctgcacccccaagaa

SEQ ID NO: 247904 - DNA, 15 bp, Homo sapiens
cctgcacccccaaga

SEQ ID NO: 247905 - DNA, 15 bp, Homo sapiens
ccctgcacccccaag

SEQ ID NO: 247906 - DNA, 15 bp, Homo sapiens
tccctgcacccccaa

SEQ ID NO: 247907 - DNA, 15 bp, Homo sapiens
ttccctgcaccccca

SEQ ID NO: 247908 - DNA, 15 bp, Homo sapiens
cttccctgcaccccc

SEQ ID NO: 247909 - DNA, 15 bp, Homo sapiens
ccttccctgcacccc

SEQ ID NO: 247910 - DNA, 15 bp, Homo sapiens
cccttccctgcaccc

SEQ ID NO: 247911 - DNA, 15 bp, Homo sapiens
tcccttccctgcacc

SEQ ID NO: 247912 - DNA, 15 bp, Homo sapiens
gtcccttccctgcac

SEQ ID NO: 247913 - DNA, 15 bp, Homo sapiens
tgtcccttccctgca

SEQ ID NO: 247914 - DNA, 15 bp, Homo sapiens
ttgtcccttccctgc

SEQ ID NO: 247915 - DNA, 15 bp, Homo sapiens
attgtcccttccctg

SEQ ID NO: 247916 - DNA, 15 bp, Homo sapiens
cattgtcccttccct

SEQ ID NO: 247917 - DNA, 15 bp, Homo sapiens
ccattgtcccttccc

SEQ ID NO: 247918 - DNA, 15 bp, Homo sapiens
tccattgtcccttcc

SEQ ID NO: 247919 - DNA, 15 bp, Homo sapiens
atccattgtcccttc

SEQ ID NO: 247920 - DNA, 15 bp, Homo sapiens
gatccattgtccctt

SEQ ID NO: 247921 - DNA, 15 bp, Homo sapiens
cgatccattgtccct

SEQ ID NO: 247922 - DNA, 15 bp, Homo sapiens
ccgatccattgtccc

SEQ ID NO: 247923 - DNA, 15 bp, Homo sapiens
tccgatccattgtcc

SEQ ID NO: 247924 - DNA, 15 bp, Homo sapiens
ttccgatccattgtc

SEQ ID NO: 247925 - DNA, 15 bp, Homo sapiens
cttccgatccattgt

SEQ ID NO: 247926 - DNA, 15 bp, Homo sapiens
ccttccgatccattg

SEQ ID NO: 247927 - DNA, 15 bp, Homo sapiens
cccttccgatccatt

SEQ ID NO: 247928 - DNA, 15 bp, Homo sapiens
acccttccgatccat

SEQ ID NO: 247929 - DNA, 15 bp, Homo sapiens
gacccttccgatcca

SEQ ID NO: 247930 - DNA, 15 bp, Homo sapiens
agacccttccgatcc

SEQ ID NO: 247931 - DNA, 15 bp, Homo sapiens
gagacccttccgatc

SEQ ID NO: 247932 - DNA, 15 bp, Homo sapiens
tgagacccttccgat

SEQ ID NO: 247933 - DNA, 15 bp, Homo sapiens
ctgagacccttccga

SEQ ID NO: 247934 - DNA, 15 bp, Homo sapiens
actgagacccttccg

SEQ ID NO: 247935 - DNA, 15 bp, Homo sapiens
aactgagacccttcc

SEQ ID NO: 247936 - DNA, 15 bp, Homo sapiens
aaactgagacccttc

SEQ ID NO: 247937 - DNA, 15 bp, Homo sapiens
caaactgagaccctt

SEQ ID NO: 247938 - DNA, 15 bp, Homo sapiens
gcaaactgagaccct

SEQ ID NO: 247939 - DNA, 15 bp, Homo sapiens
ggcaaactgagaccc

SEQ ID NO: 247940 - DNA, 15 bp, Homo sapiens
aggcaaactgagacc

SEQ ID NO: 247941 - DNA, 15 bp, Homo sapiens
gaggcaaactgagac

SEQ ID NO: 247942 - DNA, 15 bp, Homo sapiens
agaggcaaactgaga

SEQ ID NO: 247943 - DNA, 15 bp, Homo sapiens
cagaggcaaactgag

SEQ ID NO: 247944 - DNA, 15 bp, Homo sapiens
ccagaggcaaactga

SEQ ID NO: 247945 - DNA, 15 bp, Homo sapiens
gccagaggcaaactg

SEQ ID NO: 247946 - DNA, 15 bp, Homo sapiens
ggccagaggcaaact

SEQ ID NO: 247947 - DNA, 15 bp, Homo sapiens
aggccagaggcaaac

SEQ ID NO: 247948 - DNA, 15 bp, Homo sapiens
caggccagaggcaaa

SEQ ID NO: 247949 - DNA, 15 bp, Homo sapiens
acaggccagaggcaa

SEQ ID NO: 247950 - DNA, 15 bp, Homo sapiens
gacaggccagaggca

SEQ ID NO: 247951 - DNA, 15 bp, Homo sapiens
tgacaggccagaggc

SEQ ID NO: 247952 - DNA, 15 bp, Homo sapiens
ctgacaggccagagg

SEQ ID NO: 247953 - DNA, 15 bp, Homo sapiens
actgacaggccagag

SEQ ID NO: 247954 - DNA, 15 bp, Homo sapiens
cactgacaggccaga

SEQ ID NO: 247955 - DNA, 15 bp, Homo sapiens
ccactgacaggccag

SEQ ID NO: 247956 - DNA, 15 bp, Homo sapiens
cccactgacaggcca

SEQ ID NO: 247957 - DNA, 15 bp, Homo sapiens
gcccactgacaggcc

SEQ ID NO: 247958 - DNA, 15 bp, Homo sapiens
ggcccactgacaggc

SEQ ID NO: 247959 - DNA, 15 bp, Homo sapiens
tggcccactgacagg

SEQ ID NO: 247960 - DNA, 15 bp, Homo sapiens
gtggcccactgacag

SEQ ID NO: 247961 - DNA, 15 bp, Homo sapiens
ggtggcccactgaca

SEQ ID NO: 247962 - DNA, 15 bp, Homo sapiens
gggtggcccactgac

SEQ ID NO: 247963 - DNA, 15 bp, Homo sapiens
agggtggcccactga

SEQ ID NO: 247964 - DNA, 15 bp, Homo sapiens
gagggtggcccactg

SEQ ID NO: 247965 - DNA, 15 bp, Homo sapiens
ggagggtggcccact

SEQ ID NO: 247966 - DNA, 15 bp, Homo sapiens
aggagggtggcccac

SEQ ID NO: 247967 - DNA, 15 bp, Homo sapiens
gaggagggtggccca

SEQ ID NO: 247968 - DNA, 15 bp, Homo sapiens
agaggagggtggccc

SEQ ID NO: 247969 - DNA, 15 bp, Homo sapiens
gagaggagggtggcc

SEQ ID NO: 247970 - DNA, 15 bp, Homo sapiens
ggagaggagggtggc

SEQ ID NO: 247971 - DNA, 15 bp, Homo sapiens
aggagaggagggtgg

SEQ ID NO: 247972 - DNA, 15 bp, Homo sapiens
gaggagaggagggtg

SEQ ID NO: 247973 - DNA, 15 bp, Homo sapiens
agaggagaggagggt

SEQ ID NO: 247974 - DNA, 15 bp, Homo sapiens
cagaggagaggaggg

SEQ ID NO: 247975 - DNA, 15 bp, Homo sapiens
acagaggagaggagg

SEQ ID NO: 247976 - DNA, 15 bp, Homo sapiens
cacagaggagaggag

SEQ ID NO: 247977 - DNA, 15 bp, Homo sapiens
tcacagaggagagga

SEQ ID NO: 247978 - DNA, 15 bp, Homo sapiens
atcacagaggagagg

SEQ ID NO: 247979 - DNA, 15 bp, Homo sapiens
catcacagaggagag

SEQ ID NO: 247980 - DNA, 15 bp, Homo sapiens
gcatcacagaggaga

SEQ ID NO: 247981 - DNA, 15 bp, Homo sapiens
tgcatcacagaggag

SEQ ID NO: 247982 - DNA, 15 bp, Homo sapiens
ctgcatcacagagga

SEQ ID NO: 247983 - DNA, 15 bp, Homo sapiens
cctgcatcacagagg

SEQ ID NO: 247984 - DNA, 15 bp, Homo sapiens
ccctgcatcacagag

SEQ ID NO: 247985 - DNA, 15 bp, Homo sapiens
cccctgcatcacaga

SEQ ID NO: 247986 - DNA, 15 bp, Homo sapiens
gcccctgcatcacag

SEQ ID NO: 247987 - DNA, 15 bp, Homo sapiens
tgcccctgcatcaca

SEQ ID NO: 247988 - DNA, 15 bp, Homo sapiens
ctgcccctgcatcac

SEQ ID NO: 247989 - DNA, 15 bp, Homo sapiens
actgcccctgcatca

SEQ ID NO: 247990 - DNA, 15 bp, Homo sapiens
cactgcccctgcatc

SEQ ID NO: 247991 - DNA, 15 bp, Homo sapiens
acactgcccctgcat

SEQ ID NO: 247992 - DNA, 15 bp, Homo sapiens
cacactgcccctgca

SEQ ID NO: 247993 - DNA, 15 bp, Homo sapiens
ccacactgcccctgc

SEQ ID NO: 247994 - DNA, 15 bp, Homo sapiens
gccacactgcccctg

SEQ ID NO: 247995 - DNA, 15 bp, Homo sapiens
agccacactgcccct

SEQ ID NO: 247996 - DNA, 15 bp, Homo sapiens
cagccacactgcccc

SEQ ID NO: 247997 - DNA, 15 bp, Homo sapiens
gcagccacactgccc

SEQ ID NO: 247998 - DNA, 15 bp, Homo sapiens
ggcagccacactgcc

SEQ ID NO: 247999 - DNA, 15 bp, Homo sapiens
aggcagccacactgc

SEQ ID NO: 248000 - DNA, 15 bp, Homo sapiens
aaggcagccacactg

SEQ ID NO: 248001 - DNA, 15 bp, Homo sapiens
caaggcagccacact

SEQ ID NO: 248002 - DNA, 15 bp, Homo sapiens
gcaaggcagccacac

SEQ ID NO: 248003 - DNA, 15 bp, Homo sapiens
ggcaaggcagccaca

SEQ ID NO: 248004 - DNA, 15 bp, Homo sapiens
tggcaaggcagccac

SEQ ID NO: 248005 - DNA, 15 bp, Homo sapiens
ctggcaaggcagcca

SEQ ID NO: 248006 - DNA, 15 bp, Homo sapiens
gctggcaaggcagcc

SEQ ID NO: 248007 - DNA, 15 bp, Homo sapiens
ggctggcaaggcagc

SEQ ID NO: 248008 - DNA, 15 bp, Homo sapiens
aggctggcaaggcag

SEQ ID NO: 248009 - DNA, 15 bp, Homo sapiens
caggctggcaaggca

SEQ ID NO: 248010 - DNA, 15 bp, Homo sapiens
gcaggctggcaaggc

SEQ ID NO: 248011 - DNA, 15 bp, Homo sapiens
ggcaggctggcaagg

SEQ ID NO: 248012 - DNA, 15 bp, Homo sapiens
gggcaggctggcaag

SEQ ID NO: 248013 - DNA, 15 bp, Homo sapiens
agggcaggctggcaa

SEQ ID NO: 248014 - DNA, 15 bp, Homo sapiens
gagggcaggctggca

SEQ ID NO: 248015 - DNA, 15 bp, Homo sapiens
ggagggcaggctggc

SEQ ID NO: 248016 - DNA, 15 bp, Homo sapiens
aggagggcaggctgg

SEQ ID NO: 248017 - DNA, 15 bp, Homo sapiens
gaggagggcaggctg

SEQ ID NO: 248018 - DNA, 15 bp, Homo sapiens
ggaggagggcaggct

SEQ ID NO: 248019 - DNA, 15 bp, Homo sapiens
tggaggagggcaggc

SEQ ID NO: 248020 - DNA, 15 bp, Homo sapiens
ctggaggagggcagg

SEQ ID NO: 248021 - DNA, 15 bp, Homo sapiens
gctggaggagggcag

SEQ ID NO: 248022 - DNA, 15 bp, Homo sapiens
ggctggaggagggca

SEQ ID NO: 248023 - DNA, 15 bp, Homo sapiens
aggctggaggagggc

SEQ ID NO: 248024 - DNA, 15 bp, Homo sapiens
caggctggaggaggg

SEQ ID NO: 248025 - DNA, 15 bp, Homo sapiens
gcaggctggaggagg

SEQ ID NO: 248026 - DNA, 15 bp, Homo sapiens
agcaggctggaggag

SEQ ID NO: 248027 - DNA, 15 bp, Homo sapiens
cagcaggctggagga

SEQ ID NO: 248028 - DNA, 15 bp, Homo sapiens
ccagcaggctggagg

SEQ ID NO: 248029 - DNA, 15 bp, Homo sapiens
cccagcaggctggag

SEQ ID NO: 248030 - DNA, 15 bp, Homo sapiens
tcccagcaggctgga

SEQ ID NO: 248031 - DNA, 15 bp, Homo sapiens
ctcccagcaggctgg

SEQ ID NO: 248032 - DNA, 15 bp, Homo sapiens
gctcccagcaggctg

SEQ ID NO: 248033 - DNA, 15 bp, Homo sapiens
ggctcccagcaggct

SEQ ID NO: 248034 - DNA, 15 bp, Homo sapiens
aggctcccagcaggc

SEQ ID NO: 248035 - DNA, 15 bp, Homo sapiens
gaggctcccagcagg

SEQ ID NO: 248036 - DNA, 15 bp, Homo sapiens
cgaggctcccagcag

SEQ ID NO: 248037 - DNA, 15 bp, Homo sapiens
gcgaggctcccagca

SEQ ID NO: 248038 - DNA, 15 bp, Homo sapiens
cgcgaggctcccagc

SEQ ID NO: 248039 - DNA, 15 bp, Homo sapiens
acgcgaggctcccag

SEQ ID NO: 248040 - DNA, 15 bp, Homo sapiens
cacgcgaggctccca

SEQ ID NO: 248041 - DNA, 15 bp, Homo sapiens
tcacgcgaggctccc

SEQ ID NO: 248042 - DNA, 15 bp, Homo sapiens
ctcacgcgaggctcc

SEQ ID NO: 248043 - DNA, 15 bp, Homo sapiens
tctcacgcgaggctc

SEQ ID NO: 248044 - DNA, 15 bp, Homo sapiens
gtctcacgcgaggct

SEQ ID NO: 248045 - DNA, 15 bp, Homo sapiens
tgtctcacgcgaggc

SEQ ID NO: 248046 - DNA, 15 bp, Homo sapiens
ttgtctcacgcgagg

SEQ ID NO: 248047 - DNA, 15 bp, Homo sapiens
gttgtctcacgcgag

SEQ ID NO: 248048 - DNA, 15 bp, Homo sapiens
ggttgtctcacgcga

SEQ ID NO: 248049 - DNA, 15 bp, Homo sapiens
cggttgtctcacgcg

SEQ ID NO: 248050 - DNA, 15 bp, Homo sapiens
tcggttgtctcacgc

SEQ ID NO: 248051 - DNA, 15 bp, Homo sapiens
atcggttgtctcacg

SEQ ID NO: 248052 - DNA, 15 bp, Homo sapiens
gatcggttgtctcac

SEQ ID NO: 248053 - DNA, 15 bp, Homo sapiens
agatcggttgtctca

SEQ ID NO: 248054 - DNA, 15 bp, Homo sapiens
cagatcggttgtctc

SEQ ID NO: 248055 - DNA, 15 bp, Homo sapiens
ccagatcggttgtct

SEQ ID NO: 248056 - DNA, 15 bp, Homo sapiens
tccagatcggttgtc

SEQ ID NO: 248057 - DNA, 15 bp, Homo sapiens
ttccagatcggttgt

SEQ ID NO: 248058 - DNA, 15 bp, Homo sapiens
cttccagatcggttg

SEQ ID NO: 248059 - DNA, 15 bp, Homo sapiens
gcttccagatcggtt

SEQ ID NO: 248060 - DNA, 15 bp, Homo sapiens
ggcttccagatcggt

SEQ ID NO: 248061 - DNA, 15 bp, Homo sapiens
gggcttccagatcgg

SEQ ID NO: 248062 - DNA, 15 bp, Homo sapiens
ggggcttccagatcg

SEQ ID NO: 248063 - DNA, 15 bp, Homo sapiens
aggggcttccagatc

SEQ ID NO: 248064 - DNA, 15 bp, Homo sapiens
aaggggcttccagat

SEQ ID NO: 248065 - DNA, 15 bp, Homo sapiens
taaggggcttccaga

SEQ ID NO: 248066 - DNA, 15 bp, Homo sapiens
ctaaggggcttccag

SEQ ID NO: 248067 - DNA, 15 bp, Homo sapiens
cctaaggggcttcca

SEQ ID NO: 248068 - DNA, 15 bp, Homo sapiens
ccctaaggggcttcc

SEQ ID NO: 248069 - DNA, 15 bp, Homo sapiens
tccctaaggggcttc

SEQ ID NO: 248070 - DNA, 15 bp, Homo sapiens
ctccctaaggggctt

SEQ ID NO: 248071 - DNA, 15 bp, Homo sapiens
cctccctaaggggct

SEQ ID NO: 248072 - DNA, 15 bp, Homo sapiens
tcctccctaaggggc

SEQ ID NO: 248073 - DNA, 15 bp, Homo sapiens
gtcctccctaagggg

SEQ ID NO: 248074 - DNA, 15 bp, Homo sapiens
tgtcctccctaaggg

SEQ ID NO: 248075 - DNA, 15 bp, Homo sapiens
gtgtcctccctaagg

SEQ ID NO: 248076 - DNA, 15 bp, Homo sapiens
tgtgtcctccctaag

SEQ ID NO: 248077 - DNA, 15 bp, Homo sapiens
ctgtgtcctccctaa

SEQ ID NO: 248078 - DNA, 15 bp, Homo sapiens
gctgtgtcctcccta

SEQ ID NO: 248079 - DNA, 15 bp, Homo sapiens
cgctgtgtcctccct

SEQ ID NO: 248080 - DNA, 15 bp, Homo sapiens
gcgctgtgtcctccc

SEQ ID NO: 248081 - DNA, 15 bp, Homo sapiens
tgcgctgtgtcctcc

SEQ ID NO: 248082 - DNA, 15 bp, Homo sapiens
ctgcgctgtgtcctc

SEQ ID NO: 248083 - DNA, 15 bp, Homo sapiens
cctgcgctgtgtcct

SEQ ID NO: 248084 - DNA, 15 bp, Homo sapiens
tcctgcgctgtgtcc

SEQ ID NO: 248085 - DNA, 15 bp, Homo sapiens
ctcctgcgctgtgtc

SEQ ID NO: 248086 - DNA, 15 bp, Homo sapiens
tctcctgcgctgtgt

SEQ ID NO: 248087 - DNA, 15 bp, Homo sapiens
ctctcctgcgctgtg

SEQ ID NO: 248088 - DNA, 15 bp, Homo sapiens
cctctcctgcgctgt

SEQ ID NO: 248089 - DNA, 15 bp, Homo sapiens
gcctctcctgcgctg

SEQ ID NO: 248090 - DNA, 15 bp, Homo sapiens
tgcctctcctgcgct

SEQ ID NO: 248091 - DNA, 15 bp, Homo sapiens
ctgcctctcctgcgc

SEQ ID NO: 248092 - DNA, 15 bp, Homo sapiens
gctgcctctcctgcg

SEQ ID NO: 248093 - DNA, 15 bp, Homo sapiens
agctgcctctcctgc

SEQ ID NO: 248094 - DNA, 15 bp, Homo sapiens
cagctgcctctcctg

SEQ ID NO: 248095 - DNA, 15 bp, Homo sapiens
tcagctgcctctcct

SEQ ID NO: 248096 - DNA, 15 bp, Homo sapiens
ctcagctgcctctcc

SEQ ID NO: 248097 - DNA, 15 bp, Homo sapiens
cctcagctgcctctc

SEQ ID NO: 248098 - DNA, 15 bp, Homo sapiens
gcctcagctgcctct

SEQ ID NO: 248099 - DNA, 15 bp, Homo sapiens
agcctcagctgcctc

SEQ ID NO: 248100 - DNA, 15 bp, Homo sapiens
gagcctcagctgcct

SEQ ID NO: 248101 - DNA, 15 bp, Homo sapiens
agagcctcagctgcc

SEQ ID NO: 248102 - DNA, 15 bp, Homo sapiens
tagagcctcagctgc

SEQ ID NO: 248103 - DNA, 15 bp, Homo sapiens
ttagagcctcagctg

SEQ ID NO: 248104 - DNA, 15 bp, Homo sapiens
cttagagcctcagct

SEQ ID NO: 248105 - DNA, 15 bp, Homo sapiens
ccttagagcctcagc

SEQ ID NO: 248106 - DNA, 15 bp, Homo sapiens
tccttagagcctcag

SEQ ID NO: 248107 - DNA, 15 bp, Homo sapiens
gtccttagagcctca

SEQ ID NO: 248108 - DNA, 15 bp, Homo sapiens
tgtccttagagcctc

SEQ ID NO: 248109 - DNA, 15 bp, Homo sapiens
ctgtccttagagcct

SEQ ID NO: 248110 - DNA, 15 bp, Homo sapiens
gctgtccttagagcc

SEQ ID NO: 248111 - DNA, 15 bp, Homo sapiens
agctgtccttagagc

SEQ ID NO: 248112 - DNA, 15 bp, Homo sapiens
cagctgtccttagag

SEQ ID NO: 248113 - DNA, 15 bp, Homo sapiens
gcagctgtccttaga

SEQ ID NO: 248114 - DNA, 15 bp, Homo sapiens
agcagctgtccttag

SEQ ID NO: 248115 - DNA, 15 bp, Homo sapiens
tagcagctgtcctta

SEQ ID NO: 248116 - DNA, 15 bp, Homo sapiens
atagcagctgtcctt

SEQ ID NO: 248117 - DNA, 15 bp, Homo sapiens
gatagcagctgtcct

SEQ ID NO: 248118 - DNA, 15 bp, Homo sapiens
tgatagcagctgtcc

SEQ ID NO: 248119 - DNA, 15 bp, Homo sapiens
ttgatagcagctgtc

SEQ ID NO: 248120 - DNA, 15 bp, Homo sapiens
gttgatagcagctgt

SEQ ID NO: 248121 - DNA, 15 bp, Homo sapiens
agttgatagcagctg

SEQ ID NO: 248122 - DNA, 15 bp, Homo sapiens
cagttgatagcagct

SEQ ID NO: 248123 - DNA, 15 bp, Homo sapiens
gcagttgatagcagc

SEQ ID NO: 248124 - DNA, 15 bp, Homo sapiens
ggcagttgatagcag

SEQ ID NO: 248125 - DNA, 15 bp, Homo sapiens
tggcagttgatagca

SEQ ID NO: 248126 - DNA, 15 bp, Homo sapiens
ctggcagttgatagc

SEQ ID NO: 248127 - DNA, 15 bp, Homo sapiens
gctggcagttgatag

SEQ ID NO: 248128 - DNA, 15 bp, Homo sapiens
tgctggcagttgata

SEQ ID NO: 248129 - DNA, 15 bp, Homo sapiens
ctgctggcagttgat

SEQ ID NO: 248130 - DNA, 15 bp, Homo sapiens
gctgctggcagttga

SEQ ID NO: 248131 - DNA, 15 bp, Homo sapiens
ggctgctggcagttg

SEQ ID NO: 248132 - DNA, 15 bp, Homo sapiens
tggctgctggcagtt

SEQ ID NO: 248133 - DNA, 15 bp, Homo sapiens
gtggctgctggcagt

SEQ ID NO: 248134 - DNA, 15 bp, Homo sapiens
agtggctgctggcag

SEQ ID NO: 248135 - DNA, 15 bp, Homo sapiens
cagtggctgctggca

SEQ ID NO: 248136 - DNA, 15 bp, Homo sapiens
tcagtggctgctggc

SEQ ID NO: 248137 - DNA, 15 bp, Homo sapiens
ctcagtggctgctgg

SEQ ID NO: 248138 - DNA, 15 bp, Homo sapiens
cctcagtggctgctg

SEQ ID NO: 248139 - DNA, 15 bp, Homo sapiens
ccctcagtggctgct

SEQ ID NO: 248140 - DNA, 15 bp, Homo sapiens
tccctcagtggctgc

SEQ ID NO: 248141 - DNA, 15 bp, Homo sapiens
ctccctcagtggctg

SEQ ID NO: 248142 - DNA, 15 bp, Homo sapiens
tctccctcagtggct

SEQ ID NO: 248143 - DNA, 15 bp, Homo sapiens
gtctccctcagtggc

SEQ ID NO: 248144 - DNA, 15 bp, Homo sapiens
ggtctccctcagtgg

SEQ ID NO: 248145 - DNA, 15 bp, Homo sapiens
gggtctccctcagtg

SEQ ID NO: 248146 - DNA, 15 bp, Homo sapiens
agggtctccctcagt

SEQ ID NO: 248147 - DNA, 15 bp, Homo sapiens
cagggtctccctcag

SEQ ID NO: 248148 - DNA, 15 bp, Homo sapiens
ccagggtctccctca

SEQ ID NO: 248149 - DNA, 15 bp, Homo sapiens
cccagggtctccctc

SEQ ID NO: 248150 - DNA, 15 bp, Homo sapiens
gcccagggtctccct

SEQ ID NO: 248151 - DNA, 15 bp, Homo sapiens
ggcccagggtctccc

SEQ ID NO: 248152 - DNA, 15 bp, Homo sapiens
aggcccagggtctcc

SEQ ID NO: 248153 - DNA, 15 bp, Homo sapiens
caggcccagggtctc

SEQ ID NO: 248154 - DNA, 15 bp, Homo sapiens
ccaggcccagggtct

SEQ ID NO: 248155 - DNA, 15 bp, Homo sapiens
gccaggcccagggtc

SEQ ID NO: 248156 - DNA, 15 bp, Homo sapiens
tgccaggcccagggt

SEQ ID NO: 248157 - DNA, 15 bp, Homo sapiens
atgccaggcccaggg

SEQ ID NO: 248158 - DNA, 15 bp, Homo sapiens
catgccaggcccagg

SEQ ID NO: 248159 - DNA, 15 bp, Homo sapiens
ccatgccaggcccag

SEQ ID NO: 248160 - DNA, 15 bp, Homo sapiens
gccatgccaggccca

SEQ ID NO: 248161 - DNA, 15 bp, Homo sapiens
agccatgccaggccc

SEQ ID NO: 248162 - DNA, 15 bp, Homo sapiens
tagccatgccaggcc

SEQ ID NO: 248163 - DNA, 15 bp, Homo sapiens
gtagccatgccaggc

SEQ ID NO: 248164 - DNA, 15 bp, Homo sapiens
tgtagccatgccagg

SEQ ID NO: 248165 - DNA, 15 bp, Homo sapiens
ttgtagccatgccag

SEQ ID NO: 248166 - DNA, 15 bp, Homo sapiens
tttgtagccatgcca

SEQ ID NO: 248167 - DNA, 15 bp, Homo sapiens
atttgtagccatgcc

SEQ ID NO: 248168 - DNA, 15 bp, Homo sapiens
catttgtagccatgc

SEQ ID NO: 248169 - DNA, 15 bp, Homo sapiens
ccatttgtagccatg

SEQ ID NO: 248170 - DNA, 15 bp, Homo sapiens
cccatttgtagccat

SEQ ID NO: 248171 - DNA, 15 bp, Homo sapiens
gcccatttgtagcca

SEQ ID NO: 248172 - DNA, 15 bp, Homo sapiens
agcccatttgtagcc

SEQ ID NO: 248173 - DNA, 15 bp, Homo sapiens
gagcccatttgtagc

SEQ ID NO: 248174 - DNA, 15 bp, Homo sapiens
tgagcccatttgtag

SEQ ID NO: 248175 - DNA, 15 bp, Homo sapiens
ctgagcccatttgta

SEQ ID NO: 248176 - DNA, 15 bp, Homo sapiens
gctgagcccatttgt

SEQ ID NO: 248177 - DNA, 15 bp, Homo sapiens
agctgagcccatttg

SEQ ID NO: 248178 - DNA, 15 bp, Homo sapiens
gagctgagcccattt

SEQ ID NO: 248179 - DNA, 15 bp, Homo sapiens
ggagctgagcccatt

SEQ ID NO: 248180 - DNA, 15 bp, Homo sapiens
tggagctgagcccat

SEQ ID NO: 248181 - DNA, 15 bp, Homo sapiens
ttggagctgagccca

SEQ ID NO: 248182 - DNA, 15 bp, Homo sapiens
cttggagctgagccc

SEQ ID NO: 248183 - DNA, 15 bp, Homo sapiens
ccttggagctgagcc

SEQ ID NO: 248184 - DNA, 15 bp, Homo sapiens
cccttggagctgagc

SEQ ID NO: 248185 - DNA, 15 bp, Homo sapiens
tcccttggagctgag

SEQ ID NO: 248186 - DNA, 15 bp, Homo sapiens
ttcccttggagctga

SEQ ID NO: 248187 - DNA, 15 bp, Homo sapiens
gttcccttggagctg

SEQ ID NO: 248188 - DNA, 15 bp, Homo sapiens
tgttcccttggagct

SEQ ID NO: 248189 - DNA, 15 bp, Homo sapiens
ctgttcccttggagc

SEQ ID NO: 248190 - DNA, 15 bp, Homo sapiens
tctgttcccttggag

SEQ ID NO: 248191 - DNA, 15 bp, Homo sapiens
ctctgttcccttgga

SEQ ID NO: 248192 - DNA, 15 bp, Homo sapiens
tctctgttcccttgg

SEQ ID NO: 248193 - DNA, 15 bp, Homo sapiens
ttctctgttcccttg

SEQ ID NO: 248194 - DNA, 15 bp, Homo sapiens
attctctgttccctt

SEQ ID NO: 248195 - DNA, 15 bp, Homo sapiens
aattctctgttccct

SEQ ID NO: 248196 - DNA, 15 bp, Homo sapiens
caattctctgttccc

SEQ ID NO: 248197 - DNA, 15 bp, Homo sapiens
ccaattctctgttcc

SEQ ID NO: 248198 - DNA, 15 bp, Homo sapiens
cccaattctctgttc

SEQ ID NO: 248199 - DNA, 15 bp, Homo sapiens
gcccaattctctgtt

SEQ ID NO: 248200 - DNA, 15 bp, Homo sapiens
ggcccaattctctgt

SEQ ID NO: 248201 - DNA, 15 bp, Homo sapiens
tggcccaattctctg

SEQ ID NO: 248202 - DNA, 15 bp, Homo sapiens
gtggcccaattctct

SEQ ID NO: 248203 - DNA, 15 bp, Homo sapiens
tgtggcccaattctc

SEQ ID NO: 248204 - DNA, 15 bp, Homo sapiens
atgtggcccaattct

SEQ ID NO: 248205 - DNA, 15 bp, Homo sapiens
aatgtggcccaattc

SEQ ID NO: 248206 - DNA, 15 bp, Homo sapiens
aaatgtggcccaatt

SEQ ID NO: 248207 - DNA, 15 bp, Homo sapiens
caaatgtggcccaat

SEQ ID NO: 248208 - DNA, 15 bp, Homo sapiens
acaaatgtggcccaa

SEQ ID NO: 248209 - DNA, 15 bp, Homo sapiens
gacaaatgtggccca

SEQ ID NO: 248210 - DNA, 15 bp, Homo sapiens
agacaaatgtggccc

SEQ ID NO: 248211 - DNA, 15 bp, Homo sapiens
cagacaaatgtggcc

SEQ ID NO: 248212 - DNA, 15 bp, Homo sapiens
ccagacaaatgtggc

SEQ ID NO: 248213 - DNA, 15 bp, Homo sapiens
cccagacaaatgtgg

SEQ ID NO: 248214 - DNA, 15 bp, Homo sapiens
gcccagacaaatgtg

SEQ ID NO: 248215 - DNA, 15 bp, Homo sapiens
agcccagacaaatgt

SEQ ID NO: 248216 - DNA, 15 bp, Homo sapiens
cagcccagacaaatg

SEQ ID NO: 248217 - DNA, 15 bp, Homo sapiens
ccagcccagacaaat

SEQ ID NO: 248218 - DNA, 15 bp, Homo sapiens
cccagcccagacaaa

SEQ ID NO: 248219 - DNA, 15 bp, Homo sapiens
acccagcccagacaa

SEQ ID NO: 248220 - DNA, 15 bp, Homo sapiens
gacccagcccagaca

SEQ ID NO: 248221 - DNA, 15 bp, Homo sapiens
tgacccagcccagac

SEQ ID NO: 248222 - DNA, 15 bp, Homo sapiens
ctgacccagcccaga

SEQ ID NO: 248223 - DNA, 15 bp, Homo sapiens
tctgacccagcccag

SEQ ID NO: 248224 - DNA, 15 bp, Homo sapiens
ttctgacccagccca

SEQ ID NO: 248225 - DNA, 15 bp, Homo sapiens
tttctgacccagccc

SEQ ID NO: 248226 - DNA, 15 bp, Homo sapiens
atttctgacccagcc

SEQ ID NO: 248227 - DNA, 15 bp, Homo sapiens
catttctgacccagc

SEQ ID NO: 248228 - DNA, 15 bp, Homo sapiens
ccatttctgacccag

SEQ ID NO: 248229 - DNA, 15 bp, Homo sapiens
gccatttctgaccca

SEQ ID NO: 248230 - DNA, 15 bp, Homo sapiens
tgccatttctgaccc

SEQ ID NO: 248231 - DNA, 15 bp, Homo sapiens
ctgccatttctgacc

SEQ ID NO: 248232 - DNA, 15 bp, Homo sapiens
actgccatttctgac

SEQ ID NO: 248233 - DNA, 15 bp, Homo sapiens
aactgccatttctga

SEQ ID NO: 248234 - DNA, 15 bp, Homo sapiens
gaactgccatttctg

SEQ ID NO: 248235 - DNA, 15 bp, Homo sapiens
ggaactgccatttct

SEQ ID NO: 248236 - DNA, 15 bp, Homo sapiens
aggaactgccatttc

SEQ ID NO: 248237 - DNA, 15 bp, Homo sapiens
caggaactgccattt

SEQ ID NO: 248238 - DNA, 15 bp, Homo sapiens
tcaggaactgccatt

SEQ ID NO: 248239 - DNA, 15 bp, Homo sapiens
ctcaggaactgccat

SEQ ID NO: 248240 - DNA, 15 bp, Homo sapiens
gctcaggaactgcca

SEQ ID NO: 248241 - DNA, 15 bp, Homo sapiens
ggctcaggaactgcc

SEQ ID NO: 248242 - DNA, 15 bp, Homo sapiens
gggctcaggaactgc

SEQ ID NO: 248243 - DNA, 15 bp, Homo sapiens
tgggctcaggaactg

SEQ ID NO: 248244 - DNA, 15 bp, Homo sapiens
atgggctcaggaact

SEQ ID NO: 248245 - DNA, 15 bp, Homo sapiens
tatgggctcaggaac

SEQ ID NO: 248246 - DNA, 15 bp, Homo sapiens
atatgggctcaggaa

SEQ ID NO: 248247 - DNA, 15 bp, Homo sapiens
gatatgggctcagga

SEQ ID NO: 248248 - DNA, 15 bp, Homo sapiens
tgatatgggctcagg

SEQ ID NO: 248249 - DNA, 15 bp, Homo sapiens
gtgatatgggctcag

SEQ ID NO: 248250 - DNA, 15 bp, Homo sapiens
ggtgatatgggctca

SEQ ID NO: 248251 - DNA, 15 bp, Homo sapiens
tggtgatatgggctc

SEQ ID NO: 248252 - DNA, 15 bp, Homo sapiens
ctggtgatatgggct

SEQ ID NO: 248253 - DNA, 15 bp, Homo sapiens
gctggtgatatgggc

SEQ ID NO: 248254 - DNA, 15 bp, Homo sapiens
agctggtgatatggg

SEQ ID NO: 248255 - DNA, 15 bp, Homo sapiens
gagctggtgatatgg

SEQ ID NO: 248256 - DNA, 15 bp, Homo sapiens
ggagctggtgatatg

SEQ ID NO: 248257 - DNA, 15 bp, Homo sapiens
gggagctggtgatat

SEQ ID NO: 248258 - DNA, 15 bp, Homo sapiens
tgggagctggtgata

SEQ ID NO: 248259 - DNA, 15 bp, Homo sapiens
atgggagctggtgat

SEQ ID NO: 248260 - DNA, 15 bp, Homo sapiens
aatgggagctggtga

SEQ ID NO: 248261 - DNA, 15 bp, Homo sapiens
aaatgggagctggtg

SEQ ID NO: 248262 - DNA, 15 bp, Homo sapiens
caaatgggagctggt

SEQ ID NO: 248263 - DNA, 15 bp, Homo sapiens
gcaaatgggagctgg

SEQ ID NO: 248264 - DNA, 15 bp, Homo sapiens
tgcaaatgggagctg

SEQ ID NO: 248265 - DNA, 15 bp, Homo sapiens
ttgcaaatgggagct

SEQ ID NO: 248266 - DNA, 15 bp, Homo sapiens
cttgcaaatgggagc

SEQ ID NO: 248267 - DNA, 15 bp, Homo sapiens
ccttgcaaatgggag

SEQ ID NO: 248268 - DNA, 15 bp, Homo sapiens
gccttgcaaatggga

SEQ ID NO: 248269 - DNA, 15 bp, Homo sapiens
agccttgcaaatggg

SEQ ID NO: 248270 - DNA, 15 bp, Homo sapiens
cagccttgcaaatgg

SEQ ID NO: 248271 - DNA, 15 bp, Homo sapiens
tcagccttgcaaatg

SEQ ID NO: 248272 - DNA, 15 bp, Homo sapiens
ctcagccttgcaaat

SEQ ID NO: 248273 - DNA, 15 bp, Homo sapiens
cctcagccttgcaaa

SEQ ID NO: 248274 - DNA, 15 bp, Homo sapiens
tcctcagccttgcaa

SEQ ID NO: 248275 - DNA, 15 bp, Homo sapiens
ctcctcagccttgca

SEQ ID NO: 248276 - DNA, 15 bp, Homo sapiens
cctcctcagccttgc

SEQ ID NO: 248277 - DNA, 15 bp, Homo sapiens
acctcctcagccttg

SEQ ID NO: 248278 - DNA, 15 bp, Homo sapiens
cacctcctcagcctt

SEQ ID NO: 248279 - DNA, 15 bp, Homo sapiens
gcacctcctcagcct

SEQ ID NO: 248280 - DNA, 15 bp, Homo sapiens
ggcacctcctcagcc

SEQ ID NO: 248281 - DNA, 15 bp, Homo sapiens
aggcacctcctcagc

SEQ ID NO: 248282 - DNA, 15 bp, Homo sapiens
caggcacctcctcag

SEQ ID NO: 248283 - DNA, 15 bp, Homo sapiens
ccaggcacctcctca

SEQ ID NO: 248284 - DNA, 15 bp, Homo sapiens
cccaggcacctcctc

SEQ ID NO: 248285 - DNA, 15 bp, Homo sapiens
gcccaggcacctcct

SEQ ID NO: 248286 - DNA, 15 bp, Homo sapiens
agcccaggcacctcc

SEQ ID NO: 248287 - DNA, 15 bp, Homo sapiens
aagcccaggcacctc

SEQ ID NO: 248288 - DNA, 15 bp, Homo sapiens
caagcccaggcacct

SEQ ID NO: 248289 - DNA, 15 bp, Homo sapiens
gcaagcccaggcacc

SEQ ID NO: 248290 - DNA, 15 bp, Homo sapiens
agcaagcccaggcac

SEQ ID NO: 248291 - DNA, 15 bp, Homo sapiens
cagcaagcccaggca

SEQ ID NO: 248292 - DNA, 15 bp, Homo sapiens
acagcaagcccaggc

SEQ ID NO: 248293 - DNA, 15 bp, Homo sapiens
cacagcaagcccagg

SEQ ID NO: 248294 - DNA, 15 bp, Homo sapiens
acacagcaagcccag

SEQ ID NO: 248295 - DNA, 15 bp, Homo sapiens
cacacagcaagccca

SEQ ID NO: 248296 - DNA, 15 bp, Homo sapiens
gcacacagcaagccc

SEQ ID NO: 248297 - DNA, 15 bp, Homo sapiens
agcacacagcaagcc

SEQ ID NO: 248298 - DNA, 15 bp, Homo sapiens
cagcacacagcaagc

SEQ ID NO: 248299 - DNA, 15 bp, Homo sapiens
gcagcacacagcaag

SEQ ID NO: 248300 - DNA, 15 bp, Homo sapiens
ggcagcacacagcaa

SEQ ID NO: 248301 - DNA, 15 bp, Homo sapiens
aggcagcacacagca

SEQ ID NO: 248302 - DNA, 15 bp, Homo sapiens
aaggcagcacacagc

SEQ ID NO: 248303 - DNA, 15 bp, Homo sapiens
caaggcagcacacag

SEQ ID NO: 248304 - DNA, 15 bp, Homo sapiens
gcaaggcagcacaca

SEQ ID NO: 248305 - DNA, 15 bp, Homo sapiens
agcaaggcagcacac

SEQ ID NO: 248306 - DNA, 15 bp, Homo sapiens
aagcaaggcagcaca

SEQ ID NO: 248307 - DNA, 15 bp, Homo sapiens
aaagcaaggcagcac

SEQ ID NO: 248308 - DNA, 15 bp, Homo sapiens
gaaagcaaggcagca

SEQ ID NO: 248309 - DNA, 15 bp, Homo sapiens
cgaaagcaaggcagc

SEQ ID NO: 248310 - DNA, 15 bp, Homo sapiens
acgaaagcaaggcag

SEQ ID NO: 248311 - DNA, 15 bp, Homo sapiens
aacgaaagcaaggca

SEQ ID NO: 248312 - DNA, 15 bp, Homo sapiens
gaacgaaagcaaggc

SEQ ID NO: 248313 - DNA, 15 bp, Homo sapiens
ggaacgaaagcaagg

SEQ ID NO: 248314 - DNA, 15 bp, Homo sapiens
gggaacgaaagcaag

SEQ ID NO: 248315 - DNA, 15 bp, Homo sapiens
cgggaacgaaagcaa

SEQ ID NO: 248316 - DNA, 15 bp, Homo sapiens
gcgggaacgaaagca

SEQ ID NO: 248317 - DNA, 15 bp, Homo sapiens
agcgggaacgaaagc

SEQ ID NO: 248318 - DNA, 15 bp, Homo sapiens
aagcgggaacgaaag

SEQ ID NO: 248319 - DNA, 15 bp, Homo sapiens
aaagcgggaacgaaa

SEQ ID NO: 248320 - DNA, 15 bp, Homo sapiens
aaaagcgggaacgaa

SEQ ID NO: 248321 - DNA, 15 bp, Homo sapiens
aaaaagcgggaacga

SEQ ID NO: 248322 - DNA, 15 bp, Homo sapiens
taaaaagcgggaacg

SEQ ID NO: 248323 - DNA, 15 bp, Homo sapiens
ttaaaaagcgggaac

SEQ ID NO: 248324 - DNA, 15 bp, Homo sapiens
cttaaaaagcgggaa

SEQ ID NO: 248325 - DNA, 15 bp, Homo sapiens
ccttaaaaagcggga

SEQ ID NO: 248326 - DNA, 15 bp, Homo sapiens
gccttaaaaagcggg

SEQ ID NO: 248327 - DNA, 15 bp, Homo sapiens
tgccttaaaaagcgg

SEQ ID NO: 248328 - DNA, 15 bp, Homo sapiens
gtgccttaaaaagcg

SEQ ID NO: 248329 - DNA, 15 bp, Homo sapiens
tgtgccttaaaaagc

SEQ ID NO: 248330 - DNA, 15 bp, Homo sapiens
atgtgccttaaaaag

SEQ ID NO: 248331 - DNA, 15 bp, Homo sapiens
tatgtgccttaaaaa

SEQ ID NO: 248332 - DNA, 15 bp, Homo sapiens
atatgtgccttaaaa

SEQ ID NO: 248333 - DNA, 15 bp, Homo sapiens
gatatgtgccttaaa

SEQ ID NO: 248334 - DNA, 15 bp, Homo sapiens
tgatatgtgccttaa

SEQ ID NO: 248335 - DNA, 15 bp, Homo sapiens
ctgatatgtgcctta

SEQ ID NO: 248336 - DNA, 15 bp, Homo sapiens
gctgatatgtgcctt

SEQ ID NO: 248337 - DNA, 15 bp, Homo sapiens
ggctgatatgtgcct

SEQ ID NO: 248338 - DNA, 15 bp, Homo sapiens
aggctgatatgtgcc

SEQ ID NO: 248339 - DNA, 15 bp, Homo sapiens
caggctgatatgtgc

SEQ ID NO: 248340 - DNA, 15 bp, Homo sapiens
ccaggctgatatgtg

SEQ ID NO: 248341 - DNA, 15 bp, Homo sapiens
cccaggctgatatgt

SEQ ID NO: 248342 - DNA, 15 bp, Homo sapiens
gcccaggctgatatg

SEQ ID NO: 248343 - DNA, 15 bp, Homo sapiens
tgcccaggctgatat

SEQ ID NO: 248344 - DNA, 15 bp, Homo sapiens
ctgcccaggctgata

SEQ ID NO: 248345 - DNA, 15 bp, Homo sapiens
gctgcccaggctgat

SEQ ID NO: 248346 - DNA, 15 bp, Homo sapiens
agctgcccaggctga

SEQ ID NO: 248347 - DNA, 15 bp, Homo sapiens
gagctgcccaggctg

SEQ ID NO: 248348 - DNA, 15 bp, Homo sapiens
agagctgcccaggct

SEQ ID NO: 248349 - DNA, 15 bp, Homo sapiens
aagagctgcccaggc

SEQ ID NO: 248350 - DNA, 15 bp, Homo sapiens
caagagctgcccagg

SEQ ID NO: 248351 - DNA, 15 bp, Homo sapiens
tcaagagctgcccag

SEQ ID NO: 248352 - DNA, 15 bp, Homo sapiens
gtcaagagctgccca

SEQ ID NO: 248353 - DNA, 15 bp, Homo sapiens
ggtcaagagctgccc

SEQ ID NO: 248354 - DNA, 15 bp, Homo sapiens
gggtcaagagctgcc

SEQ ID NO: 248355 - DNA, 15 bp, Homo sapiens
tgggtcaagagctgc

SEQ ID NO: 248356 - DNA, 15 bp, Homo sapiens
gtgggtcaagagctg

SEQ ID NO: 248357 - DNA, 15 bp, Homo sapiens
tgtgggtcaagagct

SEQ ID NO: 248358 - DNA, 15 bp, Homo sapiens
ttgtgggtcaagagc

SEQ ID NO: 248359 - DNA, 15 bp, Homo sapiens
cttgtgggtcaagag

SEQ ID NO: 248360 - DNA, 15 bp, Homo sapiens
ccttgtgggtcaaga

SEQ ID NO: 248361 - DNA, 15 bp, Homo sapiens
accttgtgggtcaag

SEQ ID NO: 248362 - DNA, 15 bp, Homo sapiens
caccttgtgggtcaa

SEQ ID NO: 248363 - DNA, 15 bp, Homo sapiens
ccaccttgtgggtca

SEQ ID NO: 248364 - DNA, 15 bp, Homo sapiens
tccaccttgtgggtc

SEQ ID NO: 248365 - DNA, 15 bp, Homo sapiens
gtccaccttgtgggt

SEQ ID NO: 248366 - DNA, 15 bp, Homo sapiens
agtccaccttgtggg

SEQ ID NO: 248367 - DNA, 15 bp, Homo sapiens
gagtccaccttgtgg

SEQ ID NO: 248368 - DNA, 15 bp, Homo sapiens
agagtccaccttgtg

SEQ ID NO: 248369 - DNA, 15 bp, Homo sapiens
aagagtccaccttgt

SEQ ID NO: 248370 - DNA, 15 bp, Homo sapiens
gaagagtccaccttg

SEQ ID NO: 248371 - DNA, 15 bp, Homo sapiens
agaagagtccacctt

SEQ ID NO: 248372 - DNA, 15 bp, Homo sapiens
cagaagagtccacct

SEQ ID NO: 248373 - DNA, 15 bp, Homo sapiens
ccagaagagtccacc

SEQ ID NO: 248374 - DNA, 15 bp, Homo sapiens
cccagaagagtccac

SEQ ID NO: 248375 - DNA, 15 bp, Homo sapiens
gcccagaagagtcca

SEQ ID NO: 248376 - DNA, 15 bp, Homo sapiens
ggcccagaagagtcc

SEQ ID NO: 248377 - DNA, 15 bp, Homo sapiens
tggcccagaagagtc

SEQ ID NO: 248378 - DNA, 15 bp, Homo sapiens
ctggcccagaagagt

SEQ ID NO: 248379 - DNA, 15 bp, Homo sapiens
gctggcccagaagag

SEQ ID NO: 248380 - DNA, 15 bp, Homo sapiens
ggctggcccagaaga

SEQ ID NO: 248381 - DNA, 15 bp, Homo sapiens
tggctggcccagaag

SEQ ID NO: 248382 - DNA, 15 bp, Homo sapiens
gtggctggcccagaa

SEQ ID NO: 248383 - DNA, 15 bp, Homo sapiens
cgtggctggcccaga

SEQ ID NO: 248384 - DNA, 15 bp, Homo sapiens
ccgtggctggcccag

SEQ ID NO: 248385 - DNA, 15 bp, Homo sapiens
cccgtggctggccca

SEQ ID NO: 248386 - DNA, 15 bp, Homo sapiens
gcccgtggctggccc

SEQ ID NO: 248387 - DNA, 15 bp, Homo sapiens
tgcccgtggctggcc

SEQ ID NO: 248388 - DNA, 15 bp, Homo sapiens
ctgcccgtggctggc

SEQ ID NO: 248389 - DNA, 15 bp, Homo sapiens
actgcccgtggctgg

SEQ ID NO: 248390 - DNA, 15 bp, Homo sapiens
cactgcccgtggctg

SEQ ID NO: 248391 - DNA, 15 bp, Homo sapiens
ccactgcccgtggct

SEQ ID NO: 248392 - DNA, 15 bp, Homo sapiens
gccactgcccgtggc

SEQ ID NO: 248393 - DNA, 15 bp, Homo sapiens
ggccactgcccgtgg

SEQ ID NO: 248394 - DNA, 15 bp, Homo sapiens
tggccactgcccgtg

SEQ ID NO: 248395 - DNA, 15 bp, Homo sapiens
gtggccactgcccgt

SEQ ID NO: 248396 - DNA, 15 bp, Homo sapiens
ggtggccactgcccg

SEQ ID NO: 248397 - DNA, 15 bp, Homo sapiens
gggtggccactgccc

SEQ ID NO: 248398 - DNA, 15 bp, Homo sapiens
agggtggccactgcc

SEQ ID NO: 248399 - DNA, 15 bp, Homo sapiens
cagggtggccactgc

SEQ ID NO: 248400 - DNA, 15 bp, Homo sapiens
acagggtggccactg

SEQ ID NO: 248401 - DNA, 15 bp, Homo sapiens
gacagggtggccact

SEQ ID NO: 248402 - DNA, 15 bp, Homo sapiens
ggacagggtggccac

SEQ ID NO: 248403 - DNA, 15 bp, Homo sapiens
aggacagggtggcca

SEQ ID NO: 248404 - DNA, 15 bp, Homo sapiens
caggacagggtggcc

SEQ ID NO: 248405 - DNA, 15 bp, Homo sapiens
gcaggacagggtggc

SEQ ID NO: 248406 - DNA, 15 bp, Homo sapiens
ggcaggacagggtgg

SEQ ID NO: 248407 - DNA, 15 bp, Homo sapiens
tggcaggacagggtg

SEQ ID NO: 248408 - DNA, 15 bp, Homo sapiens
ctggcaggacagggt

SEQ ID NO: 248409 - DNA, 15 bp, Homo sapiens
cctggcaggacaggg

SEQ ID NO: 248410 - DNA, 15 bp, Homo sapiens
gcctggcaggacagg

SEQ ID NO: 248411 - DNA, 15 bp, Homo sapiens
ggcctggcaggacag

SEQ ID NO: 248412 - DNA, 15 bp, Homo sapiens
cggcctggcaggaca

SEQ ID NO: 248413 - DNA, 15 bp, Homo sapiens
gcggcctggcaggac

SEQ ID NO: 248414 - DNA, 15 bp, Homo sapiens
tgcggcctggcagga

SEQ ID NO: 248415 - DNA, 15 bp, Homo sapiens
ctgcggcctggcagg

SEQ ID NO: 248416 - DNA, 15 bp, Homo sapiens
tctgcggcctggcag

SEQ ID NO: 248417 - DNA, 15 bp, Homo sapiens
ttctgcggcctggca

SEQ ID NO: 248418 - DNA, 15 bp, Homo sapiens
tttctgcggcctggc

SEQ ID NO: 248419 - DNA, 15 bp, Homo sapiens
ctttctgcggcctgg

SEQ ID NO: 248420 - DNA, 15 bp, Homo sapiens
cctttctgcggcctg

SEQ ID NO: 248421 - DNA, 15 bp, Homo sapiens
gcctttctgcggcct

SEQ ID NO: 248422 - DNA, 15 bp, Homo sapiens
ggcctttctgcggcc

SEQ ID NO: 248423 - DNA, 15 bp, Homo sapiens
gggcctttctgcggc

SEQ ID NO: 248424 - DNA, 15 bp, Homo sapiens
agggcctttctgcgg

SEQ ID NO: 248425 - DNA, 15 bp, Homo sapiens
cagggcctttctgcg

SEQ ID NO: 248426 - DNA, 15 bp, Homo sapiens
ccagggcctttctgc

SEQ ID NO: 248427 - DNA, 15 bp, Homo sapiens
cccagggcctttctg

SEQ ID NO: 248428 - DNA, 15 bp, Homo sapiens
gcccagggcctttct

SEQ ID NO: 248429 - DNA, 15 bp, Homo sapiens
ggcccagggcctttc

SEQ ID NO: 248430 - DNA, 15 bp, Homo sapiens
tggcccagggccttt

SEQ ID NO: 248431 - DNA, 15 bp, Homo sapiens
gtggcccagggcctt

SEQ ID NO: 248432 - DNA, 15 bp, Homo sapiens
agtggcccagggcct

SEQ ID NO: 248433 - DNA, 15 bp, Homo sapiens
gagtggcccagggcc

SEQ ID NO: 248434 - DNA, 15 bp, Homo sapiens
ggagtggcccagggc

SEQ ID NO: 248435 - DNA, 15 bp, Homo sapiens
gggagtggcccaggg

SEQ ID NO: 248436 - DNA, 15 bp, Homo sapiens
tgggagtggcccagg

SEQ ID NO: 248437 - DNA, 15 bp, Homo sapiens
ttgggagtggcccag

SEQ ID NO: 248438 - DNA, 15 bp, Homo sapiens
gttgggagtggccca

SEQ ID NO: 248439 - DNA, 15 bp, Homo sapiens
agttgggagtggccc

SEQ ID NO: 248440 - DNA, 15 bp, Homo sapiens
cagttgggagtggcc

SEQ ID NO: 248441 - DNA, 15 bp, Homo sapiens
ccagttgggagtggc

SEQ ID NO: 248442 - DNA, 15 bp, Homo sapiens
tccagttgggagtgg

SEQ ID NO: 248443 - DNA, 15 bp, Homo sapiens
ctccagttgggagtg

SEQ ID NO: 248444 - DNA, 15 bp, Homo sapiens
gctccagttgggagt

SEQ ID NO: 248445 - DNA, 15 bp, Homo sapiens
ggctccagttgggag

SEQ ID NO: 248446 - DNA, 15 bp, Homo sapiens
tggctccagttggga

SEQ ID NO: 248447 - DNA, 15 bp, Homo sapiens
ctggctccagttggg

SEQ ID NO: 248448 - DNA, 15 bp, Homo sapiens
actggctccagttgg

SEQ ID NO: 248449 - DNA, 15 bp, Homo sapiens
cactggctccagttg

SEQ ID NO: 248450 - DNA, 15 bp, Homo sapiens
gcactggctccagtt

SEQ ID NO: 248451 - DNA, 15 bp, Homo sapiens
agcactggctccagt

SEQ ID NO: 248452 - DNA, 15 bp, Homo sapiens
gagcactggctccag

SEQ ID NO: 248453 - DNA, 15 bp, Homo sapiens
ggagcactggctcca

SEQ ID NO: 248454 - DNA, 15 bp, Homo sapiens
aggagcactggctcc

SEQ ID NO: 248455 - DNA, 15 bp, Homo sapiens
caggagcactggctc

SEQ ID NO: 248456 - DNA, 15 bp, Homo sapiens
ccaggagcactggct

SEQ ID NO: 248457 - DNA, 15 bp, Homo sapiens
tccaggagcactggc

SEQ ID NO: 248458 - DNA, 15 bp, Homo sapiens
ctccaggagcactgg

SEQ ID NO: 248459 - DNA, 15 bp, Homo sapiens
tctccaggagcactg

SEQ ID NO: 248460 - DNA, 15 bp, Homo sapiens
ctctccaggagcact

SEQ ID NO: 248461 - DNA, 15 bp, Homo sapiens
tctctccaggagcac

SEQ ID NO: 248462 - DNA, 15 bp, Homo sapiens
ctctctccaggagca

SEQ ID NO: 248463 - DNA, 15 bp, Homo sapiens
gctctctccaggagc

SEQ ID NO: 248464 - DNA, 15 bp, Homo sapiens
tgctctctccaggag

SEQ ID NO: 248465 - DNA, 15 bp, Homo sapiens
ctgctctctccagga

SEQ ID NO: 248466 - DNA, 15 bp, Homo sapiens
actgctctctccagg

SEQ ID NO: 248467 - DNA, 15 bp, Homo sapiens
cactgctctctccag

SEQ ID NO: 248468 - DNA, 15 bp, Homo sapiens
tcactgctctctcca

SEQ ID NO: 248469 - DNA, 15 bp, Homo sapiens
gtcactgctctctcc

SEQ ID NO: 248470 - DNA, 15 bp, Homo sapiens
ggtcactgctctctc

SEQ ID NO: 248471 - DNA, 15 bp, Homo sapiens
aggtcactgctctct

SEQ ID NO: 248472 - DNA, 15 bp, Homo sapiens
caggtcactgctctc

SEQ ID NO: 248473 - DNA, 15 bp, Homo sapiens
ccaggtcactgctct

SEQ ID NO: 248474 - DNA, 15 bp, Homo sapiens
tccaggtcactgctc

SEQ ID NO: 248475 - DNA, 15 bp, Homo sapiens
gtccaggtcactgct

SEQ ID NO: 248476 - DNA, 15 bp, Homo sapiens
ggtccaggtcactgc

SEQ ID NO: 248477 - DNA, 15 bp, Homo sapiens
tggtccaggtcactg

SEQ ID NO: 248478 - DNA, 15 bp, Homo sapiens
ctggtccaggtcact

SEQ ID NO: 248479 - DNA, 15 bp, Homo sapiens
gctggtccaggtcac

SEQ ID NO: 248480 - DNA, 15 bp, Homo sapiens
tgctggtccaggtca

SEQ ID NO: 248481 - DNA, 15 bp, Homo sapiens
ctgctggtccaggtc

SEQ ID NO: 248482 - DNA, 15 bp, Homo sapiens
tctgctggtccaggt

SEQ ID NO: 248483 - DNA, 15 bp, Homo sapiens
gtctgctggtccagg

SEQ ID NO: 248484 - DNA, 15 bp, Homo sapiens
ggtctgctggtccag

SEQ ID NO: 248485 - DNA, 15 bp, Homo sapiens
aggtctgctggtcca

SEQ ID NO: 248486 - DNA, 15 bp, Homo sapiens
taggtctgctggtcc

SEQ ID NO: 248487 - DNA, 15 bp, Homo sapiens
ataggtctgctggtc

SEQ ID NO: 248488 - DNA, 15 bp, Homo sapiens
cataggtctgctggt

SEQ ID NO: 248489 - DNA, 15 bp, Homo sapiens
ccataggtctgctgg

SEQ ID NO: 248490 - DNA, 15 bp, Homo sapiens
tccataggtctgctg

SEQ ID NO: 248491 - DNA, 15 bp, Homo sapiens
atccataggtctgct

SEQ ID NO: 248492 - DNA, 15 bp, Homo sapiens
gatccataggtctgc

SEQ ID NO: 248493 - DNA, 15 bp, Homo sapiens
ggatccataggtctg

SEQ ID NO: 248494 - DNA, 15 bp, Homo sapiens
gggatccataggtct

SEQ ID NO: 248495 - DNA, 15 bp, Homo sapiens
ggggatccataggtc

SEQ ID NO: 248496 - DNA, 15 bp, Homo sapiens
aggggatccataggt

SEQ ID NO: 248497 - DNA, 15 bp, Homo sapiens
gaggggatccatagg

SEQ ID NO: 248498 - DNA, 15 bp, Homo sapiens
agaggggatccatag

SEQ ID NO: 248499 - DNA, 15 bp, Homo sapiens
aagaggggatccata

SEQ ID NO: 248500 - DNA, 15 bp, Homo sapiens
caagaggggatccat

SEQ ID NO: 248501 - DNA, 15 bp, Homo sapiens
gcaagaggggatcca

SEQ ID NO: 248502 - DNA, 15 bp, Homo sapiens
agcaagaggggatcc

SEQ ID NO: 248503 - DNA, 15 bp, Homo sapiens
gagcaagaggggatc

SEQ ID NO: 248504 - DNA, 15 bp, Homo sapiens
ggagcaagaggggat

SEQ ID NO: 248505 - DNA, 15 bp, Homo sapiens
aggagcaagagggga

SEQ ID NO: 248506 - DNA, 15 bp, Homo sapiens
caggagcaagagggg

SEQ ID NO: 248507 - DNA, 15 bp, Homo sapiens
gcaggagcaagaggg

SEQ ID NO: 248508 - DNA, 15 bp, Homo sapiens
tgcaggagcaagagg

SEQ ID NO: 248509 - DNA, 15 bp, Homo sapiens
gtgcaggagcaagag

SEQ ID NO: 248510 - DNA, 15 bp, Homo sapiens
agtgcaggagcaaga

SEQ ID NO: 248511 - DNA, 15 bp, Homo sapiens
gagtgcaggagcaag

SEQ ID NO: 248512 - DNA, 15 bp, Homo sapiens
cgagtgcaggagcaa

SEQ ID NO: 248513 - DNA, 15 bp, Homo sapiens
gcgagtgcaggagca

SEQ ID NO: 248514 - DNA, 15 bp, Homo sapiens
ggcgagtgcaggagc

SEQ ID NO: 248515 - DNA, 15 bp, Homo sapiens
aggcgagtgcaggag

SEQ ID NO: 248516 - DNA, 15 bp, Homo sapiens
caggcgagtgcagga

SEQ ID NO: 248517 - DNA, 15 bp, Homo sapiens
gcaggcgagtgcagg

SEQ ID NO: 248518 - DNA, 15 bp, Homo sapiens
agcaggcgagtgcag

SEQ ID NO: 248519 - DNA, 15 bp, Homo sapiens
gagcaggcgagtgca

SEQ ID NO: 248520 - DNA, 15 bp, Homo sapiens
ggagcaggcgagtgc

SEQ ID NO: 248521 - DNA, 15 bp, Homo sapiens
aggagcaggcgagtg

SEQ ID NO: 248522 - DNA, 15 bp, Homo sapiens
aaggagcaggcgagt

SEQ ID NO: 248523 - DNA, 15 bp, Homo sapiens
caaggagcaggcgag

SEQ ID NO: 248524 - DNA, 15 bp, Homo sapiens
gcaaggagcaggcga

SEQ ID NO: 248525 - DNA, 15 bp, Homo sapiens
tgcaaggagcaggcg

SEQ ID NO: 248526 - DNA, 15 bp, Homo sapiens
ctgcaaggagcaggc

SEQ ID NO: 248527 - DNA, 15 bp, Homo sapiens
actgcaaggagcagg

SEQ ID NO: 248528 - DNA, 15 bp, Homo sapiens
cactgcaaggagcag

SEQ ID NO: 248529 - DNA, 15 bp, Homo sapiens
tcactgcaaggagca

SEQ ID NO: 248530 - DNA, 15 bp, Homo sapiens
gtcactgcaaggagc

SEQ ID NO: 248531 - DNA, 15 bp, Homo sapiens
agtcactgcaaggag

SEQ ID NO: 248532 - DNA, 15 bp, Homo sapiens
gagtcactgcaagga

SEQ ID NO: 248533 - DNA, 15 bp, Homo sapiens
cgagtcactgcaagg

SEQ ID NO: 248534 - DNA, 15 bp, Homo sapiens
ccgagtcactgcaag

SEQ ID NO: 248535 - DNA, 15 bp, Homo sapiens
gccgagtcactgcaa

SEQ ID NO: 248536 - DNA, 15 bp, Homo sapiens
tgccgagtcactgca

SEQ ID NO: 248537 - DNA, 15 bp, Homo sapiens
ctgccgagtcactgc

SEQ ID NO: 248538 - DNA, 15 bp, Homo sapiens
actgccgagtcactg

SEQ ID NO: 248539 - DNA, 15 bp, Homo sapiens
cactgccgagtcact

SEQ ID NO: 248540 - DNA, 15 bp, Homo sapiens
ccactgccgagtcac

SEQ ID NO: 248541 - DNA, 15 bp, Homo sapiens
cccactgccgagtca

SEQ ID NO: 248542 - DNA, 15 bp, Homo sapiens
tcccactgccgagtc

SEQ ID NO: 248543 - DNA, 15 bp, Homo sapiens
ctcccactgccgagt

SEQ ID NO: 248544 - DNA, 15 bp, Homo sapiens
actcccactgccgag

SEQ ID NO: 248545 - DNA, 15 bp, Homo sapiens
cactcccactgccga

SEQ ID NO: 248546 - DNA, 15 bp, Homo sapiens
ccactcccactgccg

SEQ ID NO: 248547 - DNA, 15 bp, Homo sapiens
cccactcccactgcc

SEQ ID NO: 248548 - DNA, 15 bp, Homo sapiens
tcccactcccactgc

SEQ ID NO: 248549 - DNA, 15 bp, Homo sapiens
ctcccactcccactg

SEQ ID NO: 248550 - DNA, 15 bp, Homo sapiens
cctcccactcccact

SEQ ID NO: 248551 - DNA, 15 bp, Homo sapiens
acctcccactcccac

SEQ ID NO: 248552 - DNA, 15 bp, Homo sapiens
cacctcccactccca

SEQ ID NO: 248553 - DNA, 15 bp, Homo sapiens
acacctcccactccc

SEQ ID NO: 248554 - DNA, 15 bp, Homo sapiens
gacacctcccactcc

SEQ ID NO: 248555 - DNA, 15 bp, Homo sapiens
tgacacctcccactc

SEQ ID NO: 248556 - DNA, 15 bp, Homo sapiens
ctgacacctcccact

SEQ ID NO: 248557 - DNA, 15 bp, Homo sapiens
tctgacacctcccac

SEQ ID NO: 248558 - DNA, 15 bp, Homo sapiens
ctctgacacctccca

SEQ ID NO: 248559 - DNA, 15 bp, Homo sapiens
gctctgacacctccc

SEQ ID NO: 248560 - DNA, 15 bp, Homo sapiens
tgctctgacacctcc

SEQ ID NO: 248561 - DNA, 15 bp, Homo sapiens
ttgctctgacacctc

SEQ ID NO: 248562 - DNA, 15 bp, Homo sapiens
attgctctgacacct

SEQ ID NO: 248563 - DNA, 15 bp, Homo sapiens
aattgctctgacacc

SEQ ID NO: 248564 - DNA, 15 bp, Homo sapiens
taattgctctgacac

SEQ ID NO: 248565 - DNA, 15 bp, Homo sapiens
ctaattgctctgaca

SEQ ID NO: 248566 - DNA, 15 bp, Homo sapiens
cctaattgctctgac

SEQ ID NO: 248567 - DNA, 15 bp, Homo sapiens
gcctaattgctctga

SEQ ID NO: 248568 - DNA, 15 bp, Homo sapiens
cgcctaattgctctg

SEQ ID NO: 248569 - DNA, 15 bp, Homo sapiens
ccgcctaattgctct

SEQ ID NO: 248570 - DNA, 15 bp, Homo sapiens
tccgcctaattgctc

SEQ ID NO: 248571 - DNA, 15 bp, Homo sapiens
ttccgcctaattgct

SEQ ID NO: 248572 - DNA, 15 bp, Homo sapiens
tttccgcctaattgc

SEQ ID NO: 248573 - DNA, 15 bp, Homo sapiens
gtttccgcctaattg

SEQ ID NO: 248574 - DNA, 15 bp, Homo sapiens
agtttccgcctaatt

SEQ ID NO: 248575 - DNA, 15 bp, Homo sapiens
gagtttccgcctaat

SEQ ID NO: 248576 - DNA, 15 bp, Homo sapiens
ggagtttccgcctaa

SEQ ID NO: 248577 - DNA, 15 bp, Homo sapiens
aggagtttccgccta

SEQ ID NO: 248578 - DNA, 15 bp, Homo sapiens
aaggagtttccgcct

SEQ ID NO: 248579 - DNA, 15 bp, Homo sapiens
aaaggagtttccgcc

SEQ ID NO: 248580 - DNA, 15 bp, Homo sapiens
gaaaggagtttccgc

SEQ ID NO: 248581 - DNA, 15 bp, Homo sapiens
cgaaaggagtttccg

SEQ ID NO: 248582 - DNA, 15 bp, Homo sapiens
acgaaaggagtttcc

SEQ ID NO: 248583 - DNA, 15 bp, Homo sapiens
cacgaaaggagtttc

SEQ ID NO: 248584 - DNA, 15 bp, Homo sapiens
gcacgaaaggagttt

SEQ ID NO: 248585 - DNA, 15 bp, Homo sapiens
tgcacgaaaggagtt

SEQ ID NO: 248586 - DNA, 15 bp, Homo sapiens
gtgcacgaaaggagt

SEQ ID NO: 248587 - DNA, 15 bp, Homo sapiens
ggtgcacgaaaggag

SEQ ID NO: 248588 - DNA, 15 bp, Homo sapiens
aggtgcacgaaagga

SEQ ID NO: 248589 - DNA, 15 bp, Homo sapiens
gaggtgcacgaaagg

SEQ ID NO: 248590 - DNA, 15 bp, Homo sapiens
agaggtgcacgaaag

SEQ ID NO: 248591 - DNA, 15 bp, Homo sapiens
tagaggtgcacgaaa

SEQ ID NO: 248592 - DNA, 15 bp, Homo sapiens
ttagaggtgcacgaa

SEQ ID NO: 248593 - DNA, 15 bp, Homo sapiens
attagaggtgcacga

SEQ ID NO: 248594 - DNA, 15 bp, Homo sapiens
aattagaggtgcacg

SEQ ID NO: 248595 - DNA, 15 bp, Homo sapiens
aaattagaggtgcac

SEQ ID NO: 248596 - DNA, 15 bp, Homo sapiens
aaaattagaggtgca

SEQ ID NO: 248597 - DNA, 15 bp, Homo sapiens
gaaaattagaggtgc

SEQ ID NO: 248598 - DNA, 15 bp, Homo sapiens
cgaaaattagaggtg

SEQ ID NO: 248599 - DNA, 15 bp, Homo sapiens
tcgaaaattagaggt

SEQ ID NO: 248600 - DNA, 15 bp, Homo sapiens
ctcgaaaattagagg

SEQ ID NO: 248601 - DNA, 15 bp, Homo sapiens
gctcgaaaattagag

SEQ ID NO: 248602 - DNA, 15 bp, Homo sapiens
agctcgaaaattaga

SEQ ID NO: 248603 - DNA, 15 bp, Homo sapiens
gagctcgaaaattag

SEQ ID NO: 248604 - DNA, 15 bp, Homo sapiens
agagctcgaaaatta

SEQ ID NO: 248605 - DNA, 15 bp, Homo sapiens
gagagctcgaaaatt

SEQ ID NO: 248606 - DNA, 15 bp, Homo sapiens
agagagctcgaaaat

SEQ ID NO: 248607 - DNA, 15 bp, Homo sapiens
cagagagctcgaaaa

SEQ ID NO: 248608 - DNA, 15 bp, Homo sapiens
tcagagagctcgaaa

SEQ ID NO: 248609 - DNA, 15 bp, Homo sapiens
ttcagagagctcgaa

SEQ ID NO: 248610 - DNA, 15 bp, Homo sapiens
attcagagagctcga

SEQ ID NO: 248611 - DNA, 15 bp, Homo sapiens
gattcagagagctcg

SEQ ID NO: 248612 - DNA, 15 bp, Homo sapiens
agattcagagagctc

SEQ ID NO: 248613 - DNA, 15 bp, Homo sapiens
gagattcagagagct

SEQ ID NO: 248614 - DNA, 15 bp, Homo sapiens
tgagattcagagagc

SEQ ID NO: 248615 - DNA, 15 bp, Homo sapiens
atgagattcagagag

SEQ ID NO: 248616 - DNA, 15 bp, Homo sapiens
aatgagattcagaga

SEQ ID NO: 248617 - DNA, 15 bp, Homo sapiens
taatgagattcagag

SEQ ID NO: 248618 - DNA, 15 bp, Homo sapiens
ctaatgagattcaga

SEQ ID NO: 248619 - DNA, 15 bp, Homo sapiens
actaatgagattcag

SEQ ID NO: 248620 - DNA, 15 bp, Homo sapiens
aactaatgagattca

SEQ ID NO: 248621 - DNA, 15 bp, Homo sapiens
gaactaatgagattc

SEQ ID NO: 248622 - DNA, 15 bp, Homo sapiens
ggaactaatgagatt

SEQ ID NO: 248623 - DNA, 15 bp, Homo sapiens
gggaactaatgagat

SEQ ID NO: 248624 - DNA, 15 bp, Homo sapiens
cgggaactaatgaga

SEQ ID NO: 248625 - DNA, 15 bp, Homo sapiens
ccgggaactaatgag

SEQ ID NO: 248626 - DNA, 15 bp, Homo sapiens
cccgggaactaatga

SEQ ID NO: 248627 - DNA, 15 bp, Homo sapiens
gcccgggaactaatg

SEQ ID NO: 248628 - DNA, 15 bp, Homo sapiens
agcccgggaactaat

SEQ ID NO: 248629 - DNA, 15 bp, Homo sapiens
aagcccgggaactaa

SEQ ID NO: 248630 - DNA, 15 bp, Homo sapiens
aaagcccgggaacta

SEQ ID NO: 248631 - DNA, 15 bp, Homo sapiens
aaaagcccgggaact

SEQ ID NO: 248632 - DNA, 15 bp, Homo sapiens
gaaaagcccgggaac

SEQ ID NO: 248633 - DNA, 15 bp, Homo sapiens
agaaaagcccgggaa

SEQ ID NO: 248634 - DNA, 15 bp, Homo sapiens
cagaaaagcccggga

SEQ ID NO: 248635 - DNA, 15 bp, Homo sapiens
gcagaaaagcccggg

SEQ ID NO: 248636 - DNA, 15 bp, Homo sapiens
agcagaaaagcccgg

SEQ ID NO: 248637 - DNA, 15 bp, Homo sapiens
gagcagaaaagcccg

SEQ ID NO: 248638 - DNA, 15 bp, Homo sapiens
agagcagaaaagccc

SEQ ID NO: 248639 - DNA, 15 bp, Homo sapiens
cagagcagaaaagcc

SEQ ID NO: 248640 - DNA, 15 bp, Homo sapiens
gcagagcagaaaagc

SEQ ID NO: 248641 - DNA, 15 bp, Homo sapiens
ggcagagcagaaaag

SEQ ID NO: 248642 - DNA, 15 bp, Homo sapiens
gggcagagcagaaaa

SEQ ID NO: 248643 - DNA, 15 bp, Homo sapiens
agggcagagcagaaa

SEQ ID NO: 248644 - DNA, 15 bp, Homo sapiens
gagggcagagcagaa

SEQ ID NO: 248645 - DNA, 15 bp, Homo sapiens
ggagggcagagcaga

SEQ ID NO: 248646 - DNA, 15 bp, Homo sapiens
aggagggcagagcag

SEQ ID NO: 248647 - DNA, 15 bp, Homo sapiens
caggagggcagagca

SEQ ID NO: 248648 - DNA, 15 bp, Homo sapiens
acaggagggcagagc

SEQ ID NO: 248649 - DNA, 15 bp, Homo sapiens
aacaggagggcagag

SEQ ID NO: 248650 - DNA, 15 bp, Homo sapiens
gaacaggagggcaga

SEQ ID NO: 248651 - DNA, 15 bp, Homo sapiens
agaacaggagggcag

SEQ ID NO: 248652 - DNA, 15 bp, Homo sapiens
aagaacaggagggca

SEQ ID NO: 248653 - DNA, 15 bp, Homo sapiens
aaagaacaggagggc

SEQ ID NO: 248654 - DNA, 15 bp, Homo sapiens
caaagaacaggaggg

SEQ ID NO: 248655 - DNA, 15 bp, Homo sapiens
gcaaagaacaggagg

SEQ ID NO: 248656 - DNA, 15 bp, Homo sapiens
agcaaagaacaggag

SEQ ID NO: 248657 - DNA, 15 bp, Homo sapiens
aagcaaagaacagga

SEQ ID NO: 248658 - DNA, 15 bp, Homo sapiens
caagcaaagaacagg

SEQ ID NO: 248659 - DNA, 15 bp, Homo sapiens
gcaagcaaagaacag

SEQ ID NO: 248660 - DNA, 15 bp, Homo sapiens
tgcaagcaaagaaca

SEQ ID NO: 248661 - DNA, 15 bp, Homo sapiens
ctgcaagcaaagaac

SEQ ID NO: 248662 - DNA, 15 bp, Homo sapiens
tctgcaagcaaagaa

SEQ ID NO: 248663 - DNA, 15 bp, Homo sapiens
ttctgcaagcaaaga

SEQ ID NO: 248664 - DNA, 15 bp, Homo sapiens
tttctgcaagcaaag

SEQ ID NO: 248665 - DNA, 15 bp, Homo sapiens
ttttctgcaagcaaa

SEQ ID NO: 248666 - DNA, 15 bp, Homo sapiens
attttctgcaagcaa

SEQ ID NO: 248667 - DNA, 15 bp, Homo sapiens
gattttctgcaagca

SEQ ID NO: 248668 - DNA, 15 bp, Homo sapiens
ggattttctgcaagc

SEQ ID NO: 248669 - DNA, 15 bp, Homo sapiens
tggattttctgcaag

SEQ ID NO: 248670 - DNA, 15 bp, Homo sapiens
ctggattttctgcaa

SEQ ID NO: 248671 - DNA, 15 bp, Homo sapiens
cctggattttctgca

SEQ ID NO: 248672 - DNA, 15 bp, Homo sapiens
ccctggattttctgc

SEQ ID NO: 248673 - DNA, 15 bp, Homo sapiens
cccctggattttctg

SEQ ID NO: 248674 - DNA, 15 bp, Homo sapiens
ccccctggattttct

SEQ ID NO: 248675 - DNA, 15 bp, Homo sapiens
gccccctggattttc

SEQ ID NO: 248676 - DNA, 15 bp, Homo sapiens
tgccccctggatttt

SEQ ID NO: 248677 - DNA, 15 bp, Homo sapiens
ctgccccctggattt

SEQ ID NO: 248678 - DNA, 15 bp, Homo sapiens
gctgccccctggatt

SEQ ID NO: 248679 - DNA, 15 bp, Homo sapiens
ggctgccccctggat

SEQ ID NO: 248680 - DNA, 15 bp, Homo sapiens
tggctgccccctgga

SEQ ID NO: 248681 - DNA, 15 bp, Homo sapiens
ctggctgccccctgg

SEQ ID NO: 248682 - DNA, 15 bp, Homo sapiens
actggctgccccctg

SEQ ID NO: 248683 - DNA, 15 bp, Homo sapiens
gactggctgccccct

SEQ ID NO: 248684 - DNA, 15 bp, Homo sapiens
tgactggctgccccc

SEQ ID NO: 248685 - DNA, 15 bp, Homo sapiens
gtgactggctgcccc

SEQ ID NO: 248686 - DNA, 15 bp, Homo sapiens
ggtgactggctgccc

SEQ ID NO: 248687 - DNA, 15 bp, Homo sapiens
gggtgactggctgcc

SEQ ID NO: 248688 - DNA, 15 bp, Homo sapiens
agggtgactggctgc

SEQ ID NO: 248689 - DNA, 15 bp, Homo sapiens
cagggtgactggctg

SEQ ID NO: 248690 - DNA, 15 bp, Homo sapiens
acagggtgactggct

SEQ ID NO: 248691 - DNA, 15 bp, Homo sapiens
aacagggtgactggc

SEQ ID NO: 248692 - DNA, 15 bp, Homo sapiens
caacagggtgactgg

SEQ ID NO: 248693 - DNA, 15 bp, Homo sapiens
gcaacagggtgactg

SEQ ID NO: 248694 - DNA, 15 bp, Homo sapiens
agcaacagggtgact

SEQ ID NO: 248695 - DNA, 15 bp, Homo sapiens
cagcaacagggtgac

SEQ ID NO: 248696 - DNA, 15 bp, Homo sapiens
ccagcaacagggtga

SEQ ID NO: 248697 - DNA, 15 bp, Homo sapiens
gccagcaacagggtg

SEQ ID NO: 248698 - DNA, 15 bp, Homo sapiens
cgccagcaacagggt

SEQ ID NO: 248699 - DNA, 15 bp, Homo sapiens
ccgccagcaacaggg

SEQ ID NO: 248700 - DNA, 15 bp, Homo sapiens
accgccagcaacagg

SEQ ID NO: 248701 - DNA, 15 bp, Homo sapiens
caccgccagcaacag

SEQ ID NO: 248702 - DNA, 15 bp, Homo sapiens
tcaccgccagcaaca

SEQ ID NO: 248703 - DNA, 15 bp, Homo sapiens
atcaccgccagcaac

SEQ ID NO: 248704 - DNA, 15 bp, Homo sapiens
catcaccgccagcaa

SEQ ID NO: 248705 - DNA, 15 bp, Homo sapiens
tcatcaccgccagca

SEQ ID NO: 248706 - DNA, 15 bp, Homo sapiens
atcatcaccgccagc

SEQ ID NO: 248707 - DNA, 15 bp, Homo sapiens
catcatcaccgccag

SEQ ID NO: 248708 - DNA, 15 bp, Homo sapiens
tcatcatcaccgcca

SEQ ID NO: 248709 - DNA, 15 bp, Homo sapiens
ctcatcatcaccgcc

SEQ ID NO: 248710 - DNA, 15 bp, Homo sapiens
tctcatcatcaccgc

SEQ ID NO: 248711 - DNA, 15 bp, Homo sapiens
gtctcatcatcaccg

SEQ ID NO: 248712 - DNA, 15 bp, Homo sapiens
ggtctcatcatcacc

SEQ ID NO: 248713 - DNA, 15 bp, Homo sapiens
gggtctcatcatcac

SEQ ID NO: 248714 - DNA, 15 bp, Homo sapiens
ggggtctcatcatca

SEQ ID NO: 248715 - DNA, 15 bp, Homo sapiens
tggggtctcatcatc

SEQ ID NO: 248716 - DNA, 15 bp, Homo sapiens
ctggggtctcatcat

SEQ ID NO: 248717 - DNA, 15 bp, Homo sapiens
cctggggtctcatca

SEQ ID NO: 248718 - DNA, 15 bp, Homo sapiens
gcctggggtctcatc

SEQ ID NO: 248719 - DNA, 15 bp, Homo sapiens
ggcctggggtctcat

SEQ ID NO: 248720 - DNA, 15 bp, Homo sapiens
tggcctggggtctca

SEQ ID NO: 248721 - DNA, 15 bp, Homo sapiens
ctggcctggggtctc

SEQ ID NO: 248722 - DNA, 15 bp, Homo sapiens
actggcctggggtct

SEQ ID NO: 248723 - DNA, 15 bp, Homo sapiens
cactggcctggggtc

SEQ ID NO: 248724 - DNA, 15 bp, Homo sapiens
ccactggcctggggt

SEQ ID NO: 248725 - DNA, 15 bp, Homo sapiens
gccactggcctgggg

SEQ ID NO: 248726 - DNA, 15 bp, Homo sapiens
tgccactggcctggg

SEQ ID NO: 248727 - DNA, 15 bp, Homo sapiens
gtgccactggcctgg

SEQ ID NO: 248728 - DNA, 15 bp, Homo sapiens
tgtgccactggcctg

SEQ ID NO: 248729 - DNA, 15 bp, Homo sapiens
ctgtgccactggcct

SEQ ID NO: 248730 - DNA, 15 bp, Homo sapiens
tctgtgccactggcc

SEQ ID NO: 248731 - DNA, 15 bp, Homo sapiens
ctctgtgccactggc

SEQ ID NO: 248732 - DNA, 15 bp, Homo sapiens
cctctgtgccactgg

SEQ ID NO: 248733 - DNA, 15 bp, Homo sapiens
gcctctgtgccactg

SEQ ID NO: 248734 - DNA, 15 bp, Homo sapiens
ggcctctgtgccact

SEQ ID NO: 248735 - DNA, 15 bp, Homo sapiens
aggcctctgtgccac

SEQ ID NO: 248736 - DNA, 15 bp, Homo sapiens
gaggcctctgtgcca

SEQ ID NO: 248737 - DNA, 15 bp, Homo sapiens
ggaggcctctgtgcc

SEQ ID NO: 248738 - DNA, 15 bp, Homo sapiens
aggaggcctctgtgc

SEQ ID NO: 248739 - DNA, 15 bp, Homo sapiens
caggaggcctctgtg

SEQ ID NO: 248740 - DNA, 15 bp, Homo sapiens
ccaggaggcctctgt

SEQ ID NO: 248741 - DNA, 15 bp, Homo sapiens
cccaggaggcctctg

SEQ ID NO: 248742 - DNA, 15 bp, Homo sapiens
tcccaggaggcctct

SEQ ID NO: 248743 - DNA, 15 bp, Homo sapiens
ctcccaggaggcctc

SEQ ID NO: 248744 - DNA, 15 bp, Homo sapiens
cctcccaggaggcct

SEQ ID NO: 248745 - DNA, 15 bp, Homo sapiens
tcctcccaggaggcc

SEQ ID NO: 248746 - DNA, 15 bp, Homo sapiens
ttcctcccaggaggc

SEQ ID NO: 248747 - DNA, 15 bp, Homo sapiens
cttcctcccaggagg

SEQ ID NO: 248748 - DNA, 15 bp, Homo sapiens
acttcctcccaggag

SEQ ID NO: 248749 - DNA, 15 bp, Homo sapiens
gacttcctcccagga

SEQ ID NO: 248750 - DNA, 15 bp, Homo sapiens
ggacttcctcccagg

SEQ ID NO: 248751 - DNA, 15 bp, Homo sapiens
gggacttcctcccag

SEQ ID NO: 248752 - DNA, 15 bp, Homo sapiens
agggacttcctccca

SEQ ID NO: 248753 - DNA, 15 bp, Homo sapiens
cagggacttcctccc

SEQ ID NO: 248754 - DNA, 15 bp, Homo sapiens
acagggacttcctcc

SEQ ID NO: 248755 - DNA, 15 bp, Homo sapiens
aacagggacttcctc

SEQ ID NO: 248756 - DNA, 15 bp, Homo sapiens
aaacagggacttcct

SEQ ID NO: 248757 - DNA, 15 bp, Homo sapiens
caaacagggacttcc

SEQ ID NO: 248758 - DNA, 15 bp, Homo sapiens
ccaaacagggacttc

SEQ ID NO: 248759 - DNA, 15 bp, Homo sapiens
cccaaacagggactt

SEQ ID NO: 248760 - DNA, 15 bp, Homo sapiens
gcccaaacagggact

SEQ ID NO: 248761 - DNA, 15 bp, Homo sapiens
cgcccaaacagggac

SEQ ID NO: 248762 - DNA, 15 bp, Homo sapiens
gcgcccaaacaggga

SEQ ID NO: 248763 - DNA, 15 bp, Homo sapiens
ggcgcccaaacaggg

SEQ ID NO: 248764 - DNA, 15 bp, Homo sapiens
gggcgcccaaacagg

SEQ ID NO: 248765 - DNA, 15 bp, Homo sapiens
tgggcgcccaaacag

SEQ ID NO: 248766 - DNA, 15 bp, Homo sapiens
ctgggcgcccaaaca

SEQ ID NO: 248767 - DNA, 15 bp, Homo sapiens
gctgggcgcccaaac

SEQ ID NO: 248768 - DNA, 15 bp, Homo sapiens
tgctgggcgcccaaa

SEQ ID NO: 248769 - DNA, 15 bp, Homo sapiens
gtgctgggcgcccaa

SEQ ID NO: 248770 - DNA, 15 bp, Homo sapiens
agtgctgggcgccca

SEQ ID NO: 248771 - DNA, 15 bp, Homo sapiens
cagtgctgggcgccc

SEQ ID NO: 248772 - DNA, 15 bp, Homo sapiens
acagtgctgggcgcc

SEQ ID NO: 248773 - DNA, 15 bp, Homo sapiens
aacagtgctgggcgc

SEQ ID NO: 248774 - DNA, 15 bp, Homo sapiens
gaacagtgctgggcg

SEQ ID NO: 248775 - DNA, 15 bp, Homo sapiens
tgaacagtgctgggc

SEQ ID NO: 248776 - DNA, 15 bp, Homo sapiens
ctgaacagtgctggg

SEQ ID NO: 248777 - DNA, 15 bp, Homo sapiens
cctgaacagtgctgg

SEQ ID NO: 248778 - DNA, 15 bp, Homo sapiens
ccctgaacagtgctg

SEQ ID NO: 248779 - DNA, 15 bp, Homo sapiens
gccctgaacagtgct

SEQ ID NO: 248780 - DNA, 15 bp, Homo sapiens
ggccctgaacagtgc

SEQ ID NO: 248781 - DNA, 15 bp, Homo sapiens
aggccctgaacagtg

SEQ ID NO: 248782 - DNA, 15 bp, Homo sapiens
gaggccctgaacagt

SEQ ID NO: 248783 - DNA, 15 bp, Homo sapiens
ggaggccctgaacag

SEQ ID NO: 248784 - DNA, 15 bp, Homo sapiens
aggaggccctgaaca

SEQ ID NO: 248785 - DNA, 15 bp, Homo sapiens
gaggaggccctgaac

SEQ ID NO: 248786 - DNA, 15 bp, Homo sapiens
agaggaggccctgaa

SEQ ID NO: 248787 - DNA, 15 bp, Homo sapiens
tagaggaggccctga

SEQ ID NO: 248788 - DNA, 15 bp, Homo sapiens
ctagaggaggccctg

SEQ ID NO: 248789 - DNA, 15 bp, Homo sapiens
actagaggaggccct

SEQ ID NO: 248790 - DNA, 15 bp, Homo sapiens
gactagaggaggccc

SEQ ID NO: 248791 - DNA, 15 bp, Homo sapiens
agactagaggaggcc

SEQ ID NO: 248792 - DNA, 15 bp, Homo sapiens
aagactagaggaggc

SEQ ID NO: 248793 - DNA, 15 bp, Homo sapiens
caagactagaggagg

SEQ ID NO: 248794 - DNA, 15 bp, Homo sapiens
acaagactagaggag

SEQ ID NO: 248795 - DNA, 15 bp, Homo sapiens
aacaagactagagga

SEQ ID NO: 248796 - DNA, 15 bp, Homo sapiens
gaacaagactagagg

SEQ ID NO: 248797 - DNA, 15 bp, Homo sapiens
agaacaagactagag

SEQ ID NO: 248798 - DNA, 15 bp, Homo sapiens
tagaacaagactaga

SEQ ID NO: 248799 - DNA, 15 bp, Homo sapiens
gtagaacaagactag

SEQ ID NO: 248800 - DNA, 15 bp, Homo sapiens
agtagaacaagacta

SEQ ID NO: 248801 - DNA, 15 bp, Homo sapiens
aagtagaacaagact

SEQ ID NO: 248802 - DNA, 15 bp, Homo sapiens
aaagtagaacaagac

SEQ ID NO: 248803 - DNA, 15 bp, Homo sapiens
taaagtagaacaaga

SEQ ID NO: 248804 - DNA, 15 bp, Homo sapiens
ctaaagtagaacaag

SEQ ID NO: 248805 - DNA, 15 bp, Homo sapiens
cctaaagtagaacaa

SEQ ID NO: 248806 - DNA, 15 bp, Homo sapiens
gcctaaagtagaaca

SEQ ID NO: 248807 - DNA, 15 bp, Homo sapiens
ggcctaaagtagaac

SEQ ID NO: 248808 - DNA, 15 bp, Homo sapiens
aggcctaaagtagaa

SEQ ID NO: 248809 - DNA, 15 bp, Homo sapiens
aaggcctaaagtaga

SEQ ID NO: 248810 - DNA, 15 bp, Homo sapiens
taaggcctaaagtag

SEQ ID NO: 248811 - DNA, 15 bp, Homo sapiens
gtaaggcctaaagta

SEQ ID NO: 248812 - DNA, 15 bp, Homo sapiens
ggtaaggcctaaagt

SEQ ID NO: 248813 - DNA, 15 bp, Homo sapiens
aggtaaggcctaaag

SEQ ID NO: 248814 - DNA, 15 bp, Homo sapiens
aaggtaaggcctaaa

SEQ ID NO: 248815 - DNA, 15 bp, Homo sapiens
gaaggtaaggcctaa

SEQ ID NO: 248816 - DNA, 15 bp, Homo sapiens
agaaggtaaggccta

SEQ ID NO: 248817 - DNA, 15 bp, Homo sapiens
gagaaggtaaggcct

SEQ ID NO: 248818 - DNA, 15 bp, Homo sapiens
tgagaaggtaaggcc

SEQ ID NO: 248819 - DNA, 15 bp, Homo sapiens
atgagaaggtaaggc

SEQ ID NO: 248820 - DNA, 15 bp, Homo sapiens
aatgagaaggtaagg

SEQ ID NO: 248821 - DNA, 15 bp, Homo sapiens
aaatgagaaggtaag

SEQ ID NO: 248822 - DNA, 15 bp, Homo sapiens
gaaatgagaaggtaa

SEQ ID NO: 248823 - DNA, 15 bp, Homo sapiens
agaaatgagaaggta

SEQ ID NO: 248824 - DNA, 15 bp, Homo sapiens
cagaaatgagaaggt

SEQ ID NO: 248825 - DNA, 15 bp, Homo sapiens
acagaaatgagaagg

SEQ ID NO: 248826 - DNA, 15 bp, Homo sapiens
aacagaaatgagaag

SEQ ID NO: 248827 - DNA, 15 bp, Homo sapiens
caacagaaatgagaa

SEQ ID NO: 248828 - DNA, 15 bp, Homo sapiens
gcaacagaaatgaga

SEQ ID NO: 248829 - DNA, 15 bp, Homo sapiens
agcaacagaaatgag

SEQ ID NO: 248830 - DNA, 15 bp, Homo sapiens
cagcaacagaaatga

SEQ ID NO: 248831 - DNA, 15 bp, Homo sapiens
ccagcaacagaaatg

SEQ ID NO: 248832 - DNA, 15 bp, Homo sapiens
tccagcaacagaaat

SEQ ID NO: 248833 - DNA, 15 bp, Homo sapiens
ctccagcaacagaaa

SEQ ID NO: 248834 - DNA, 15 bp, Homo sapiens
gctccagcaacagaa

SEQ ID NO: 248835 - DNA, 15 bp, Homo sapiens
tgctccagcaacaga

SEQ ID NO: 248836 - DNA, 15 bp, Homo sapiens
ttgctccagcaacag

SEQ ID NO: 248837 - DNA, 15 bp, Homo sapiens
tttgctccagcaaca

SEQ ID NO: 248838 - DNA, 15 bp, Homo sapiens
ttttgctccagcaac

SEQ ID NO: 248839 - DNA, 15 bp, Homo sapiens
cttttgctccagcaa

SEQ ID NO: 248840 - DNA, 15 bp, Homo sapiens
ccttttgctccagca

SEQ ID NO: 248841 - DNA, 15 bp, Homo sapiens
gccttttgctccagc

SEQ ID NO: 248842 - DNA, 15 bp, Homo sapiens
agccttttgctccag

SEQ ID NO: 248843 - DNA, 15 bp, Homo sapiens
gagccttttgctcca

SEQ ID NO: 248844 - DNA, 15 bp, Homo sapiens
agagccttttgctcc

SEQ ID NO: 248845 - DNA, 15 bp, Homo sapiens
cagagccttttgctc

SEQ ID NO: 248846 - DNA, 15 bp, Homo sapiens
tcagagccttttgct

SEQ ID NO: 248847 - DNA, 15 bp, Homo sapiens
ttcagagccttttgc

SEQ ID NO: 248848 - DNA, 15 bp, Homo sapiens
attcagagccttttg

SEQ ID NO: 248849 - DNA, 15 bp, Homo sapiens
aattcagagcctttt

SEQ ID NO: 248850 - DNA, 15 bp, Homo sapiens
gaattcagagccttt

SEQ ID NO: 248851 - DNA, 15 bp, Homo sapiens
tgaattcagagcctt

SEQ ID NO: 248852 - DNA, 15 bp, Homo sapiens
ctgaattcagagcct

SEQ ID NO: 248853 - DNA, 15 bp, Homo sapiens
tctgaattcagagcc

SEQ ID NO: 248854 - DNA, 15 bp, Homo sapiens
ctctgaattcagagc

SEQ ID NO: 248855 - DNA, 15 bp, Homo sapiens
actctgaattcagag

SEQ ID NO: 248856 - DNA, 15 bp, Homo sapiens
aactctgaattcaga

SEQ ID NO: 248857 - DNA, 15 bp, Homo sapiens
caactctgaattcag

SEQ ID NO: 248858 - DNA, 15 bp, Homo sapiens
ccaactctgaattca

SEQ ID NO: 248859 - DNA, 15 bp, Homo sapiens
cccaactctgaattc

SEQ ID NO: 248860 - DNA, 15 bp, Homo sapiens
tcccaactctgaatt

SEQ ID NO: 248861 - DNA, 15 bp, Homo sapiens
ttcccaactctgaat

SEQ ID NO: 248862 - DNA, 15 bp, Homo sapiens
attcccaactctgaa

SEQ ID NO: 248863 - DNA, 15 bp, Homo sapiens
aattcccaactctga

SEQ ID NO: 248864 - DNA, 15 bp, Homo sapiens
gaattcccaactctg

SEQ ID NO: 248865 - DNA, 15 bp, Homo sapiens
agaattcccaactct

SEQ ID NO: 248866 - DNA, 15 bp, Homo sapiens
gagaattcccaactc

SEQ ID NO: 248867 - DNA, 15 bp, Homo sapiens
tgagaattcccaact

SEQ ID NO: 248868 - DNA, 15 bp, Homo sapiens
ctgagaattcccaac

SEQ ID NO: 248869 - DNA, 15 bp, Homo sapiens
cctgagaattcccaa

SEQ ID NO: 248870 - DNA, 15 bp, Homo sapiens
gcctgagaattccca

SEQ ID NO: 248871 - DNA, 15 bp, Homo sapiens
ggcctgagaattccc

SEQ ID NO: 248872 - DNA, 15 bp, Homo sapiens
aggcctgagaattcc

SEQ ID NO: 248873 - DNA, 15 bp, Homo sapiens
caggcctgagaattc

SEQ ID NO: 248874 - DNA, 15 bp, Homo sapiens
ccaggcctgagaatt

SEQ ID NO: 248875 - DNA, 15 bp, Homo sapiens
accaggcctgagaat

SEQ ID NO: 248876 - DNA, 15 bp, Homo sapiens
gaccaggcctgagaa

SEQ ID NO: 248877 - DNA, 15 bp, Homo sapiens
agaccaggcctgaga

SEQ ID NO: 248878 - DNA, 15 bp, Homo sapiens
cagaccaggcctgag

SEQ ID NO: 248879 - DNA, 15 bp, Homo sapiens
tcagaccaggcctga

SEQ ID NO: 248880 - DNA, 15 bp, Homo sapiens
ctcagaccaggcctg

SEQ ID NO: 248881 - DNA, 15 bp, Homo sapiens
tctcagaccaggcct

SEQ ID NO: 248882 - DNA, 15 bp, Homo sapiens
atctcagaccaggcc

SEQ ID NO: 248883 - DNA, 15 bp, Homo sapiens
aatctcagaccaggc

SEQ ID NO: 248884 - DNA, 15 bp, Homo sapiens
aaatctcagaccagg

SEQ ID NO: 248885 - DNA, 15 bp, Homo sapiens
caaatctcagaccag

SEQ ID NO: 248886 - DNA, 15 bp, Homo sapiens
acaaatctcagacca

SEQ ID NO: 248887 - DNA, 15 bp, Homo sapiens
gacaaatctcagacc

SEQ ID NO: 248888 - DNA, 15 bp, Homo sapiens
agacaaatctcagac

SEQ ID NO: 248889 - DNA, 15 bp, Homo sapiens
cagacaaatctcaga

SEQ ID NO: 248890 - DNA, 15 bp, Homo sapiens
gcagacaaatctcag

SEQ ID NO: 248891 - DNA, 15 bp, Homo sapiens
ggcagacaaatctca

SEQ ID NO: 248892 - DNA, 15 bp, Homo sapiens
gggcagacaaatctc

SEQ ID NO: 248893 - DNA, 15 bp, Homo sapiens
ggggcagacaaatct

SEQ ID NO: 248894 - DNA, 15 bp, Homo sapiens
tggggcagacaaatc

SEQ ID NO: 248895 - DNA, 15 bp, Homo sapiens
ttggggcagacaaat

SEQ ID NO: 248896 - DNA, 15 bp, Homo sapiens
attggggcagacaaa

SEQ ID NO: 248897 - DNA, 15 bp, Homo sapiens
cattggggcagacaa

SEQ ID NO: 248898 - DNA, 15 bp, Homo sapiens
tcattggggcagaca

SEQ ID NO: 248899 - DNA, 15 bp, Homo sapiens
atcattggggcagac

SEQ ID NO: 248900 - DNA, 15 bp, Homo sapiens
catcattggggcaga

SEQ ID NO: 248901 - DNA, 15 bp, Homo sapiens
tcatcattggggcag

SEQ ID NO: 248902 - DNA, 15 bp, Homo sapiens
atcatcattggggca

SEQ ID NO: 248903 - DNA, 15 bp, Homo sapiens
catcatcattggggc

SEQ ID NO: 248904 - DNA, 15 bp, Homo sapiens
tcatcatcattgggg

SEQ ID NO: 248905 - DNA, 15 bp, Homo sapiens
atcatcatcattggg

SEQ ID NO: 248906 - DNA, 15 bp, Homo sapiens
catcatcatcattgg

SEQ ID NO: 248907 - DNA, 15 bp, Homo sapiens
tcatcatcatcattg

SEQ ID NO: 248908 - DNA, 15 bp, Homo sapiens
atcatcatcatcatt

SEQ ID NO: 248909 - DNA, 15 bp, Homo sapiens
catcatcatcatcat

SEQ ID NO: 248910 - DNA, 15 bp, Homo sapiens
tcatcatcatcatca

SEQ ID NO: 248911 - DNA, 15 bp, Homo sapiens
gtcatcatcatcatc

SEQ ID NO: 248912 - DNA, 15 bp, Homo sapiens
cgtcatcatcatcat

SEQ ID NO: 248913 - DNA, 15 bp, Homo sapiens
tcgtcatcatcatca

SEQ ID NO: 248914 - DNA, 15 bp, Homo sapiens
atcgtcatcatcatc

SEQ ID NO: 248915 - DNA, 15 bp, Homo sapiens
catcgtcatcatcat

SEQ ID NO: 248916 - DNA, 15 bp, Homo sapiens
tcatcgtcatcatca

SEQ ID NO: 248917 - DNA, 15 bp, Homo sapiens
gtcatcgtcatcatc

SEQ ID NO: 248918 - DNA, 15 bp, Homo sapiens
cgtcatcgtcatcat

SEQ ID NO: 248919 - DNA, 15 bp, Homo sapiens
tcgtcatcgtcatca

SEQ ID NO: 248920 - DNA, 15 bp, Homo sapiens
atcgtcatcgtcatc

SEQ ID NO: 248921 - DNA, 15 bp, Homo sapiens
gatcgtcatcgtcat

SEQ ID NO: 248922 - DNA, 15 bp, Homo sapiens
tgatcgtcatcgtca

SEQ ID NO: 248923 - DNA, 15 bp, Homo sapiens
atgatcgtcatcgtc

SEQ ID NO: 248924 - DNA, 15 bp, Homo sapiens
catgatcgtcatcgt

SEQ ID NO: 248925 - DNA, 15 bp, Homo sapiens
tcatgatcgtcatcg

SEQ ID NO: 248926 - DNA, 15 bp, Homo sapiens
atcatgatcgtcatc

SEQ ID NO: 248927 - DNA, 15 bp, Homo sapiens
tatcatgatcgtcat

SEQ ID NO: 248928 - DNA, 15 bp, Homo sapiens
ttatcatgatcgtca

SEQ ID NO: 248929 - DNA, 15 bp, Homo sapiens
attatcatgatcgtc

SEQ ID NO: 248930 - DNA, 15 bp, Homo sapiens
tattatcatgatcgt

SEQ ID NO: 248931 - DNA, 15 bp, Homo sapiens
gtattatcatgatcg

SEQ ID NO: 248932 - DNA, 15 bp, Homo sapiens
agtattatcatgatc

SEQ ID NO: 248933 - DNA, 15 bp, Homo sapiens
tagtattatcatgat

SEQ ID NO: 248934 - DNA, 15 bp, Homo sapiens
gtagtattatcatga

SEQ ID NO: 248935 - DNA, 15 bp, Homo sapiens
tgtagtattatcatg

SEQ ID NO: 248936 - DNA, 15 bp, Homo sapiens
gtgtagtattatcat

SEQ ID NO: 248937 - DNA, 15 bp, Homo sapiens
agtgtagtattatca

SEQ ID NO: 248938 - DNA, 15 bp, Homo sapiens
tagtgtagtattatc

SEQ ID NO: 248939 - DNA, 15 bp, Homo sapiens
ttagtgtagtattat

SEQ ID NO: 248940 - DNA, 15 bp, Homo sapiens
attagtgtagtatta

SEQ ID NO: 248941 - DNA, 15 bp, Homo sapiens
tattagtgtagtatt

SEQ ID NO: 248942 - DNA, 15 bp, Homo sapiens
ctattagtgtagtat

SEQ ID NO: 248943 - DNA, 15 bp, Homo sapiens
actattagtgtagta

SEQ ID NO: 248944 - DNA, 15 bp, Homo sapiens
tactattagtgtagt

SEQ ID NO: 248945 - DNA, 15 bp, Homo sapiens
ctactattagtgtag

SEQ ID NO: 248946 - DNA, 15 bp, Homo sapiens
actactattagtgta

SEQ ID NO: 248947 - DNA, 15 bp, Homo sapiens
aactactattagtgt

SEQ ID NO: 248948 - DNA, 15 bp, Homo sapiens
taactactattagtg

SEQ ID NO: 248949 - DNA, 15 bp, Homo sapiens
ttaactactattagt

SEQ ID NO: 248950 - DNA, 15 bp, Homo sapiens
cttaactactattag

SEQ ID NO: 248951 - DNA, 15 bp, Homo sapiens
tcttaactactatta

SEQ ID NO: 248952 - DNA, 15 bp, Homo sapiens
ctcttaactactatt

SEQ ID NO: 248953 - DNA, 15 bp, Homo sapiens
actcttaactactat

SEQ ID NO: 248954 - DNA, 15 bp, Homo sapiens
aactcttaactacta

SEQ ID NO: 248955 - DNA, 15 bp, Homo sapiens
taactcttaactact

SEQ ID NO: 248956 - DNA, 15 bp, Homo sapiens
gtaactcttaactac

SEQ ID NO: 248957 - DNA, 15 bp, Homo sapiens
ggtaactcttaacta

SEQ ID NO: 248958 - DNA, 15 bp, Homo sapiens
tggtaactcttaact

SEQ ID NO: 248959 - DNA, 15 bp, Homo sapiens
ttggtaactcttaac

SEQ ID NO: 248960 - DNA, 15 bp, Homo sapiens
attggtaactcttaa

SEQ ID NO: 248961 - DNA, 15 bp, Homo sapiens
aattggtaactctta

SEQ ID NO: 248962 - DNA, 15 bp, Homo sapiens
caattggtaactctt

SEQ ID NO: 248963 - DNA, 15 bp, Homo sapiens
gcaattggtaactct

SEQ ID NO: 248964 - DNA, 15 bp, Homo sapiens
ggcaattggtaactc

SEQ ID NO: 248965 - DNA, 15 bp, Homo sapiens
aggcaattggtaact

SEQ ID NO: 248966 - DNA, 15 bp, Homo sapiens
taggcaattggtaac

SEQ ID NO: 248967 - DNA, 15 bp, Homo sapiens
ataggcaattggtaa

SEQ ID NO: 248968 - DNA, 15 bp, Homo sapiens
aataggcaattggta

SEQ ID NO: 248969 - DNA, 15 bp, Homo sapiens
gaataggcaattggt

SEQ ID NO: 248970 - DNA, 15 bp, Homo sapiens
agaataggcaattgg

SEQ ID NO: 248971 - DNA, 15 bp, Homo sapiens
cagaataggcaattg

SEQ ID NO: 248972 - DNA, 15 bp, Homo sapiens
acagaataggcaatt

SEQ ID NO: 248973 - DNA, 15 bp, Homo sapiens
tacagaataggcaat

SEQ ID NO: 248974 - DNA, 15 bp, Homo sapiens
gtacagaataggcaa

SEQ ID NO: 248975 - DNA, 15 bp, Homo sapiens
agtacagaataggca

SEQ ID NO: 248976 - DNA, 15 bp, Homo sapiens
tagtacagaataggc

SEQ ID NO: 248977 - DNA, 15 bp, Homo sapiens
ctagtacagaatagg

SEQ ID NO: 248978 - DNA, 15 bp, Homo sapiens
cctagtacagaatag

SEQ ID NO: 248979 - DNA, 15 bp, Homo sapiens
tcctagtacagaata

SEQ ID NO: 248980 - DNA, 15 bp, Homo sapiens
ctcctagtacagaat

SEQ ID NO: 248981 - DNA, 15 bp, Homo sapiens
gctcctagtacagaa

SEQ ID NO: 248982 - DNA, 15 bp, Homo sapiens
tgctcctagtacaga

SEQ ID NO: 248983 - DNA, 15 bp, Homo sapiens
ttgctcctagtacag

SEQ ID NO: 248984 - DNA, 15 bp, Homo sapiens
attgctcctagtaca

SEQ ID NO: 248985 - DNA, 15 bp, Homo sapiens
aattgctcctagtac

SEQ ID NO: 248986 - DNA, 15 bp, Homo sapiens
aaattgctcctagta

SEQ ID NO: 248987 - DNA, 15 bp, Homo sapiens
taaattgctcctagt

SEQ ID NO: 248988 - DNA, 15 bp, Homo sapiens
ctaaattgctcctag

SEQ ID NO: 248989 - DNA, 15 bp, Homo sapiens
tctaaattgctccta

SEQ ID NO: 248990 - DNA, 15 bp, Homo sapiens
gtctaaattgctcct

SEQ ID NO: 248991 - DNA, 15 bp, Homo sapiens
ggtctaaattgctcc

SEQ ID NO: 248992 - DNA, 15 bp, Homo sapiens
aggtctaaattgctc

SEQ ID NO: 248993 - DNA, 15 bp, Homo sapiens
gaggtctaaattgct

SEQ ID NO: 248994 - DNA, 15 bp, Homo sapiens
tgaggtctaaattgc

SEQ ID NO: 248995 - DNA, 15 bp, Homo sapiens
atgaggtctaaattg

SEQ ID NO: 248996 - DNA, 15 bp, Homo sapiens
gatgaggtctaaatt

SEQ ID NO: 248997 - DNA, 15 bp, Homo sapiens
tgatgaggtctaaat

SEQ ID NO: 248998 - DNA, 15 bp, Homo sapiens
gtgatgaggtctaaa

SEQ ID NO: 248999 - DNA, 15 bp, Homo sapiens
tgtgatgaggtctaa

SEQ ID NO: 249000 - DNA, 15 bp, Homo sapiens
atgtgatgaggtcta

SEQ ID NO: 249001 - DNA, 15 bp, Homo sapiens
catgtgatgaggtct

SEQ ID NO: 249002 - DNA, 15 bp, Homo sapiens
acatgtgatgaggtc

SEQ ID NO: 249003 - DNA, 15 bp, Homo sapiens
tacatgtgatgaggt

SEQ ID NO: 249004 - DNA, 15 bp, Homo sapiens
ttacatgtgatgagg

SEQ ID NO: 249005 - DNA, 15 bp, Homo sapiens
attacatgtgatgag

SEQ ID NO: 249006 - DNA, 15 bp, Homo sapiens
aattacatgtgatga

SEQ ID NO: 249007 - DNA, 15 bp, Homo sapiens
gaattacatgtgatg

SEQ ID NO: 249008 - DNA, 15 bp, Homo sapiens
agaattacatgtgat

SEQ ID NO: 249009 - DNA, 15 bp, Homo sapiens
tagaattacatgtga

SEQ ID NO: 249010 - DNA, 15 bp, Homo sapiens
ttagaattacatgtg

SEQ ID NO: 249011 - DNA, 15 bp, Homo sapiens
gttagaattacatgt

SEQ ID NO: 249012 - DNA, 15 bp, Homo sapiens
tgttagaattacatg

SEQ ID NO: 249013 - DNA, 15 bp, Homo sapiens
ttgttagaattacat

SEQ ID NO: 249014 - DNA, 15 bp, Homo sapiens
gttgttagaattaca

SEQ ID NO: 249015 - DNA, 15 bp, Homo sapiens
tgttgttagaattac

SEQ ID NO: 249016 - DNA, 15 bp, Homo sapiens
atgttgttagaatta

SEQ ID NO: 249017 - DNA, 15 bp, Homo sapiens
gatgttgttagaatt

SEQ ID NO: 249018 - DNA, 15 bp, Homo sapiens
ggatgttgttagaat

SEQ ID NO: 249019 - DNA, 15 bp, Homo sapiens
gggatgttgttagaa

SEQ ID NO: 249020 - DNA, 15 bp, Homo sapiens
ggggatgttgttaga

SEQ ID NO: 249021 - DNA, 15 bp, Homo sapiens
cggggatgttgttag

SEQ ID NO: 249022 - DNA, 15 bp, Homo sapiens
gcggggatgttgtta

SEQ ID NO: 249023 - DNA, 15 bp, Homo sapiens
tgcggggatgttgtt

SEQ ID NO: 249024 - DNA, 15 bp, Homo sapiens
ttgcggggatgttgt

SEQ ID NO: 249025 - DNA, 15 bp, Homo sapiens
cttgcggggatgttg

SEQ ID NO: 249026 - DNA, 15 bp, Homo sapiens
tcttgcggggatgtt

SEQ ID NO: 249027 - DNA, 15 bp, Homo sapiens
gtcttgcggggatgt

SEQ ID NO: 249028 - DNA, 15 bp, Homo sapiens
tgtcttgcggggatg

SEQ ID NO: 249029 - DNA, 15 bp, Homo sapiens
ttgtcttgcggggat

SEQ ID NO: 249030 - DNA, 15 bp, Homo sapiens
cttgtcttgcgggga

SEQ ID NO: 249031 - DNA, 15 bp, Homo sapiens
gcttgtcttgcgggg

SEQ ID NO: 249032 - DNA, 15 bp, Homo sapiens
tgcttgtcttgcggg

SEQ ID NO: 249033 - DNA, 15 bp, Homo sapiens
atgcttgtcttgcgg

SEQ ID NO: 249034 - DNA, 15 bp, Homo sapiens
aatgcttgtcttgcg

SEQ ID NO: 249035 - DNA, 15 bp, Homo sapiens
taatgcttgtcttgc

SEQ ID NO: 249036 - DNA, 15 bp, Homo sapiens
ataatgcttgtcttg

SEQ ID NO: 249037 - DNA, 15 bp, Homo sapiens
tataatgcttgtctt

SEQ ID NO: 249038 - DNA, 15 bp, Homo sapiens
ctataatgcttgtct

SEQ ID NO: 249039 - DNA, 15 bp, Homo sapiens
actataatgcttgtc

SEQ ID NO: 249040 - DNA, 15 bp, Homo sapiens
gactataatgcttgt

SEQ ID NO: 249041 - DNA, 15 bp, Homo sapiens
ggactataatgcttg

SEQ ID NO: 249042 - DNA, 15 bp, Homo sapiens
aggactataatgctt

SEQ ID NO: 249043 - DNA, 15 bp, Homo sapiens
aaggactataatgct

SEQ ID NO: 249044 - DNA, 15 bp, Homo sapiens
aaaggactataatgc

SEQ ID NO: 249045 - DNA, 15 bp, Homo sapiens
gaaaggactataatg

SEQ ID NO: 249046 - DNA, 15 bp, Homo sapiens
tgaaaggactataat

SEQ ID NO: 249047 - DNA, 15 bp, Homo sapiens
atgaaaggactataa

SEQ ID NO: 249048 - DNA, 15 bp, Homo sapiens
tatgaaaggactata

SEQ ID NO: 249049 - DNA, 15 bp, Homo sapiens
ctatgaaaggactat

SEQ ID NO: 249050 - DNA, 15 bp, Homo sapiens
tctatgaaaggacta

SEQ ID NO: 249051 - DNA, 15 bp, Homo sapiens
atctatgaaaggact

SEQ ID NO: 249052 - DNA, 15 bp, Homo sapiens
catctatgaaaggac

SEQ ID NO: 249053 - DNA, 15 bp, Homo sapiens
tcatctatgaaagga

SEQ ID NO: 249054 - DNA, 15 bp, Homo sapiens
ctcatctatgaaagg

SEQ ID NO: 249055 - DNA, 15 bp, Homo sapiens
tctcatctatgaaag

SEQ ID NO: 249056 - DNA, 15 bp, Homo sapiens
ttctcatctatgaaa

SEQ ID NO: 249057 - DNA, 15 bp, Homo sapiens
gttctcatctatgaa

SEQ ID NO: 249058 - DNA, 15 bp, Homo sapiens
tgttctcatctatga

SEQ ID NO: 249059 - DNA, 15 bp, Homo sapiens
atgttctcatctatg

SEQ ID NO: 249060 - DNA, 15 bp, Homo sapiens
gatgttctcatctat

SEQ ID NO: 249061 - DNA, 15 bp, Homo sapiens
agatgttctcatcta

SEQ ID NO: 249062 - DNA, 15 bp, Homo sapiens
cagatgttctcatct

SEQ ID NO: 249063 - DNA, 15 bp, Homo sapiens
acagatgttctcatc

SEQ ID NO: 249064 - DNA, 15 bp, Homo sapiens
cacagatgttctcat

SEQ ID NO: 249065 - DNA, 15 bp, Homo sapiens
gcacagatgttctca

SEQ ID NO: 249066 - DNA, 15 bp, Homo sapiens
agcacagatgttctc

SEQ ID NO: 249067 - DNA, 15 bp, Homo sapiens
aagcacagatgttct

SEQ ID NO: 249068 - DNA, 15 bp, Homo sapiens
taagcacagatgttc

SEQ ID NO: 249069 - DNA, 15 bp, Homo sapiens
ctaagcacagatgtt

SEQ ID NO: 249070 - DNA, 15 bp, Homo sapiens
tctaagcacagatgt

SEQ ID NO: 249071 - DNA, 15 bp, Homo sapiens
ctctaagcacagatg

SEQ ID NO: 249072 - DNA, 15 bp, Homo sapiens
tctctaagcacagat

SEQ ID NO: 249073 - DNA, 15 bp, Homo sapiens
ctctctaagcacaga

SEQ ID NO: 249074 - DNA, 15 bp, Homo sapiens
tctctctaagcacag

SEQ ID NO: 249075 - DNA, 15 bp, Homo sapiens
atctctctaagcaca

SEQ ID NO: 249076 - DNA, 15 bp, Homo sapiens
aatctctctaagcac

SEQ ID NO: 249077 - DNA, 15 bp, Homo sapiens
taatctctctaagca

SEQ ID NO: 249078 - DNA, 15 bp, Homo sapiens
ttaatctctctaagc

SEQ ID NO: 249079 - DNA, 15 bp, Homo sapiens
cttaatctctctaag

SEQ ID NO: 249080 - DNA, 15 bp, Homo sapiens
acttaatctctctaa

SEQ ID NO: 249081 - DNA, 15 bp, Homo sapiens
tacttaatctctcta

SEQ ID NO: 249082 - DNA, 15 bp, Homo sapiens
ttacttaatctctct

SEQ ID NO: 249083 - DNA, 15 bp, Homo sapiens
gttacttaatctctc

SEQ ID NO: 249084 - DNA, 15 bp, Homo sapiens
agttacttaatctct

SEQ ID NO: 249085 - DNA, 15 bp, Homo sapiens
aagttacttaatctc

SEQ ID NO: 249086 - DNA, 15 bp, Homo sapiens
aaagttacttaatct

SEQ ID NO: 249087 - DNA, 15 bp, Homo sapiens
gaaagttacttaatc

SEQ ID NO: 249088 - DNA, 15 bp, Homo sapiens
tgaaagttacttaat

SEQ ID NO: 249089 - DNA, 15 bp, Homo sapiens
ctgaaagttacttaa

SEQ ID NO: 249090 - DNA, 15 bp, Homo sapiens
tctgaaagttactta

SEQ ID NO: 249091 - DNA, 15 bp, Homo sapiens
gtctgaaagttactt

SEQ ID NO: 249092 - DNA, 15 bp, Homo sapiens
agtctgaaagttact

SEQ ID NO: 249093 - DNA, 15 bp, Homo sapiens
gagtctgaaagttac

SEQ ID NO: 249094 - DNA, 15 bp, Homo sapiens
tgagtctgaaagtta

SEQ ID NO: 249095 - DNA, 15 bp, Homo sapiens
ttgagtctgaaagtt

SEQ ID NO: 249096 - DNA, 15 bp, Homo sapiens
tttgagtctgaaagt

SEQ ID NO: 249097 - DNA, 15 bp, Homo sapiens
gtttgagtctgaaag

SEQ ID NO: 249098 - DNA, 15 bp, Homo sapiens
tgtttgagtctgaaa

SEQ ID NO: 249099 - DNA, 15 bp, Homo sapiens
ctgtttgagtctgaa

SEQ ID NO: 249100 - DNA, 15 bp, Homo sapiens
gctgtttgagtctga

SEQ ID NO: 249101 - DNA, 15 bp, Homo sapiens
agctgtttgagtctg

SEQ ID NO: 249102 - DNA, 15 bp, Homo sapiens
cagctgtttgagtct

SEQ ID NO: 249103 - DNA, 15 bp, Homo sapiens
ccagctgtttgagtc

SEQ ID NO: 249104 - DNA, 15 bp, Homo sapiens
tccagctgtttgagt

SEQ ID NO: 249105 - DNA, 15 bp, Homo sapiens
atccagctgtttgag

SEQ ID NO: 249106 - DNA, 15 bp, Homo sapiens
catccagctgtttga

SEQ ID NO: 249107 - DNA, 15 bp, Homo sapiens
ccatccagctgtttg

SEQ ID NO: 249108 - DNA, 15 bp, Homo sapiens
accatccagctgttt

SEQ ID NO: 249109 - DNA, 15 bp, Homo sapiens
caccatccagctgtt

SEQ ID NO: 249110 - DNA, 15 bp, Homo sapiens
tcaccatccagctgt

SEQ ID NO: 249111 - DNA, 15 bp, Homo sapiens
gtcaccatccagctg

SEQ ID NO: 249112 - DNA, 15 bp, Homo sapiens
agtcaccatccagct

SEQ ID NO: 249113 - DNA, 15 bp, Homo sapiens
cagtcaccatccagc

SEQ ID NO: 249114 - DNA, 15 bp, Homo sapiens
tcagtcaccatccag

SEQ ID NO: 249115 - DNA, 15 bp, Homo sapiens
ctcagtcaccatcca

SEQ ID NO: 249116 - DNA, 15 bp, Homo sapiens
gctcagtcaccatcc

SEQ ID NO: 249117 - DNA, 15 bp, Homo sapiens
agctcagtcaccatc

SEQ ID NO: 249118 - DNA, 15 bp, Homo sapiens
cagctcagtcaccat

SEQ ID NO: 249119 - DNA, 15 bp, Homo sapiens
tcagctcagtcacca

SEQ ID NO: 249120 - DNA, 15 bp, Homo sapiens
ctcagctcagtcacc

SEQ ID NO: 249121 - DNA, 15 bp, Homo sapiens
cctcagctcagtcac

SEQ ID NO: 249122 - DNA, 15 bp, Homo sapiens
acctcagctcagtca

SEQ ID NO: 249123 - DNA, 15 bp, Homo sapiens
aacctcagctcagtc

SEQ ID NO: 249124 - DNA, 15 bp, Homo sapiens
aaacctcagctcagt

SEQ ID NO: 249125 - DNA, 15 bp, Homo sapiens
caaacctcagctcag

SEQ ID NO: 249126 - DNA, 15 bp, Homo sapiens
acaaacctcagctca

SEQ ID NO: 249127 - DNA, 15 bp, Homo sapiens
tacaaacctcagctc

SEQ ID NO: 249128 - DNA, 15 bp, Homo sapiens
gtacaaacctcagct

SEQ ID NO: 249129 - DNA, 15 bp, Homo sapiens
ggtacaaacctcagc

SEQ ID NO: 249130 - DNA, 15 bp, Homo sapiens
gggtacaaacctcag

SEQ ID NO: 249131 - DNA, 15 bp, Homo sapiens
tgggtacaaacctca

SEQ ID NO: 249132 - DNA, 15 bp, Homo sapiens
atgggtacaaacctc

SEQ ID NO: 249133 - DNA, 15 bp, Homo sapiens
catgggtacaaacct

SEQ ID NO: 249134 - DNA, 15 bp, Homo sapiens
acatgggtacaaacc

SEQ ID NO: 249135 - DNA, 15 bp, Homo sapiens
gacatgggtacaaac

SEQ ID NO: 249136 - DNA, 15 bp, Homo sapiens
agacatgggtacaaa

SEQ ID NO: 249137 - DNA, 15 bp, Homo sapiens
aagacatgggtacaa

SEQ ID NO: 249138 - DNA, 15 bp, Homo sapiens
caagacatgggtaca

SEQ ID NO: 249139 - DNA, 15 bp, Homo sapiens
tcaagacatgggtac

SEQ ID NO: 249140 - DNA, 15 bp, Homo sapiens
atcaagacatgggta

SEQ ID NO: 249141 - DNA, 15 bp, Homo sapiens
catcaagacatgggt

SEQ ID NO: 249142 - DNA, 15 bp, Homo sapiens
tcatcaagacatggg

SEQ ID NO: 249143 - DNA, 15 bp, Homo sapiens
gtcatcaagacatgg

SEQ ID NO: 249144 - DNA, 15 bp, Homo sapiens
agtcatcaagacatg

SEQ ID NO: 249145 - DNA, 15 bp, Homo sapiens
tagtcatcaagacat

SEQ ID NO: 249146 - DNA, 15 bp, Homo sapiens
ttagtcatcaagaca

SEQ ID NO: 249147 - DNA, 15 bp, Homo sapiens
cttagtcatcaagac

SEQ ID NO: 249148 - DNA, 15 bp, Homo sapiens
gcttagtcatcaaga

SEQ ID NO: 249149 - DNA, 15 bp, Homo sapiens
ggcttagtcatcaag

SEQ ID NO: 249150 - DNA, 15 bp, Homo sapiens
gggcttagtcatcaa

SEQ ID NO: 249151 - DNA, 15 bp, Homo sapiens
tgggcttagtcatca

SEQ ID NO: 249152 - DNA, 15 bp, Homo sapiens
ctgggcttagtcatc

SEQ ID NO: 249153 - DNA, 15 bp, Homo sapiens
gctgggcttagtcat

SEQ ID NO: 249154 - DNA, 15 bp, Homo sapiens
agctgggcttagtca

SEQ ID NO: 249155 - DNA, 15 bp, Homo sapiens
cagctgggcttagtc

SEQ ID NO: 249156 - DNA, 15 bp, Homo sapiens
acagctgggcttagt

SEQ ID NO: 249157 - DNA, 15 bp, Homo sapiens
cacagctgggcttag

SEQ ID NO: 249158 - DNA, 15 bp, Homo sapiens
gcacagctgggctta

SEQ ID NO: 249159 - DNA, 15 bp, Homo sapiens
ggcacagctgggctt

SEQ ID NO: 249160 - DNA, 15 bp, Homo sapiens
gggcacagctgggct

SEQ ID NO: 249161 - DNA, 15 bp, Homo sapiens
tgggcacagctgggc

SEQ ID NO: 249162 - DNA, 15 bp, Homo sapiens
gtgggcacagctggg

SEQ ID NO: 249163 - DNA, 15 bp, Homo sapiens
ggtgggcacagctgg

SEQ ID NO: 249164 - DNA, 15 bp, Homo sapiens
cggtgggcacagctg

SEQ ID NO: 249165 - DNA, 15 bp, Homo sapiens
ccggtgggcacagct

SEQ ID NO: 249166 - DNA, 15 bp, Homo sapiens
cccggtgggcacagc

SEQ ID NO: 249167 - DNA, 15 bp, Homo sapiens
tcccggtgggcacag

SEQ ID NO: 249168 - DNA, 15 bp, Homo sapiens
gtcccggtgggcaca

SEQ ID NO: 249169 - DNA, 15 bp, Homo sapiens
tgtcccggtgggcac

SEQ ID NO: 249170 - DNA, 15 bp, Homo sapiens
gtgtcccggtgggca

SEQ ID NO: 249171 - DNA, 15 bp, Homo sapiens
ggtgtcccggtgggc

SEQ ID NO: 249172 - DNA, 15 bp, Homo sapiens
aggtgtcccggtggg

SEQ ID NO: 249173 - DNA, 15 bp, Homo sapiens
aaggtgtcccggtgg

SEQ ID NO: 249174 - DNA, 15 bp, Homo sapiens
caaggtgtcccggtg

SEQ ID NO: 249175 - DNA, 15 bp, Homo sapiens
tcaaggtgtcccggt

SEQ ID NO: 249176 - DNA, 15 bp, Homo sapiens
gtcaaggtgtcccgg

SEQ ID NO: 249177 - DNA, 15 bp, Homo sapiens
ggtcaaggtgtcccg

SEQ ID NO: 249178 - DNA, 15 bp, Homo sapiens
aggtcaaggtgtccc

SEQ ID NO: 249179 - DNA, 15 bp, Homo sapiens
taggtcaaggtgtcc

SEQ ID NO: 249180 - DNA, 15 bp, Homo sapiens
ctaggtcaaggtgtc

SEQ ID NO: 249181 - DNA, 15 bp, Homo sapiens
actaggtcaaggtgt

SEQ ID NO: 249182 - DNA, 15 bp, Homo sapiens
tactaggtcaaggtg

SEQ ID NO: 249183 - DNA, 15 bp, Homo sapiens
gtactaggtcaaggt

SEQ ID NO: 249184 - DNA, 15 bp, Homo sapiens
agtactaggtcaagg

SEQ ID NO: 249185 - DNA, 15 bp, Homo sapiens
aagtactaggtcaag

SEQ ID NO: 249186 - DNA, 15 bp, Homo sapiens
gaagtactaggtcaa

SEQ ID NO: 249187 - DNA, 15 bp, Homo sapiens
agaagtactaggtca

SEQ ID NO: 249188 - DNA, 15 bp, Homo sapiens
cagaagtactaggtc

SEQ ID NO: 249189 - DNA, 15 bp, Homo sapiens
tcagaagtactaggt

SEQ ID NO: 249190 - DNA, 15 bp, Homo sapiens
ctcagaagtactagg

SEQ ID NO: 249191 - DNA, 15 bp, Homo sapiens
tctcagaagtactag

SEQ ID NO: 249192 - DNA, 15 bp, Homo sapiens
ctctcagaagtacta

SEQ ID NO: 249193 - DNA, 15 bp, Homo sapiens
gctctcagaagtact

SEQ ID NO: 249194 - DNA, 15 bp, Homo sapiens
ggctctcagaagtac

SEQ ID NO: 249195 - DNA, 15 bp, Homo sapiens
gggctctcagaagta

SEQ ID NO: 249196 - DNA, 15 bp, Homo sapiens
ggggctctcagaagt

SEQ ID NO: 249197 - DNA, 15 bp, Homo sapiens
tggggctctcagaag

SEQ ID NO: 249198 - DNA, 15 bp, Homo sapiens
ctggggctctcagaa

SEQ ID NO: 249199 - DNA, 15 bp, Homo sapiens
cctggggctctcaga

SEQ ID NO: 249200 - DNA, 15 bp, Homo sapiens
ccctggggctctcag

SEQ ID NO: 249201 - DNA, 15 bp, Homo sapiens
accctggggctctca

SEQ ID NO: 249202 - DNA, 15 bp, Homo sapiens
gaccctggggctctc

SEQ ID NO: 249203 - DNA, 15 bp, Homo sapiens
tgaccctggggctct

SEQ ID NO: 249204 - DNA, 15 bp, Homo sapiens
gtgaccctggggctc

SEQ ID NO: 249205 - DNA, 15 bp, Homo sapiens
agtgaccctggggct

SEQ ID NO: 249206 - DNA, 15 bp, Homo sapiens
tagtgaccctggggc

SEQ ID NO: 249207 - DNA, 15 bp, Homo sapiens
atagtgaccctgggg

SEQ ID NO: 249208 - DNA, 15 bp, Homo sapiens
aatagtgaccctggg

SEQ ID NO: 249209 - DNA, 15 bp, Homo sapiens
gaatagtgaccctgg

SEQ ID NO: 249210 - DNA, 15 bp, Homo sapiens
tgaatagtgaccctg

SEQ ID NO: 249211 - DNA, 15 bp, Homo sapiens
ctgaatagtgaccct

SEQ ID NO: 249212 - DNA, 15 bp, Homo sapiens
tctgaatagtgaccc

SEQ ID NO: 249213 - DNA, 15 bp, Homo sapiens
ctctgaatagtgacc

SEQ ID NO: 249214 - DNA, 15 bp, Homo sapiens
cctctgaatagtgac

SEQ ID NO: 249215 - DNA, 15 bp, Homo sapiens
gcctctgaatagtga

SEQ ID NO: 249216 - DNA, 15 bp, Homo sapiens
agcctctgaatagtg

SEQ ID NO: 249217 - DNA, 15 bp, Homo sapiens
gagcctctgaatagt

SEQ ID NO: 249218 - DNA, 15 bp, Homo sapiens
ggagcctctgaatag

SEQ ID NO: 249219 - DNA, 15 bp, Homo sapiens
gggagcctctgaata

SEQ ID NO: 249220 - DNA, 15 bp, Homo sapiens
tgggagcctctgaat

SEQ ID NO: 249221 - DNA, 15 bp, Homo sapiens
ctgggagcctctgaa

SEQ ID NO: 249222 - DNA, 15 bp, Homo sapiens
tctgggagcctctga

SEQ ID NO: 249223 - DNA, 15 bp, Homo sapiens
ctctgggagcctctg

SEQ ID NO: 249224 - DNA, 15 bp, Homo sapiens
gctctgggagcctct

SEQ ID NO: 249225 - DNA, 15 bp, Homo sapiens
agctctgggagcctc

SEQ ID NO: 249226 - DNA, 15 bp, Homo sapiens
cagctctgggagcct

SEQ ID NO: 249227 - DNA, 15 bp, Homo sapiens
gcagctctgggagcc

SEQ ID NO: 249228 - DNA, 15 bp, Homo sapiens
ggcagctctgggagc

SEQ ID NO: 249229 - DNA, 15 bp, Homo sapiens
tggcagctctgggag

SEQ ID NO: 249230 - DNA, 15 bp, Homo sapiens
ctggcagctctggga

SEQ ID NO: 249231 - DNA, 15 bp, Homo sapiens
actggcagctctggg

SEQ ID NO: 249232 - DNA, 15 bp, Homo sapiens
tactggcagctctgg

SEQ ID NO: 249233 - DNA, 15 bp, Homo sapiens
gtactggcagctctg

SEQ ID NO: 249234 - DNA, 15 bp, Homo sapiens
ggtactggcagctct

SEQ ID NO: 249235 - DNA, 15 bp, Homo sapiens
gggtactggcagctc

SEQ ID NO: 249236 - DNA, 15 bp, Homo sapiens
ggggtactggcagct

SEQ ID NO: 249237 - DNA, 15 bp, Homo sapiens
tggggtactggcagc

SEQ ID NO: 249238 - DNA, 15 bp, Homo sapiens
ctggggtactggcag

SEQ ID NO: 249239 - DNA, 15 bp, Homo sapiens
tctggggtactggca

SEQ ID NO: 249240 - DNA, 15 bp, Homo sapiens
atctggggtactggc

SEQ ID NO: 249241 - DNA, 15 bp, Homo sapiens
gatctggggtactgg

SEQ ID NO: 249242 - DNA, 15 bp, Homo sapiens
tgatctggggtactg

SEQ ID NO: 249243 - DNA, 15 bp, Homo sapiens
atgatctggggtact

SEQ ID NO: 249244 - DNA, 15 bp, Homo sapiens
aatgatctggggtac

SEQ ID NO: 249245 - DNA, 15 bp, Homo sapiens
caatgatctggggta

SEQ ID NO: 249246 - DNA, 15 bp, Homo sapiens
gcaatgatctggggt

SEQ ID NO: 249247 - DNA, 15 bp, Homo sapiens
cgcaatgatctgggg

SEQ ID NO: 249248 - DNA, 15 bp, Homo sapiens
ccgcaatgatctggg

SEQ ID NO: 249249 - DNA, 15 bp, Homo sapiens
gccgcaatgatctgg

SEQ ID NO: 249250 - DNA, 15 bp, Homo sapiens
agccgcaatgatctg

SEQ ID NO: 249251 - DNA, 15 bp, Homo sapiens
gagccgcaatgatct

SEQ ID NO: 249252 - DNA, 15 bp, Homo sapiens
ggagccgcaatgatc

SEQ ID NO: 249253 - DNA, 15 bp, Homo sapiens
gggagccgcaatgat

SEQ ID NO: 249254 - DNA, 15 bp, Homo sapiens
agggagccgcaatga

SEQ ID NO: 249255 - DNA, 15 bp, Homo sapiens
gagggagccgcaatg

SEQ ID NO: 249256 - DNA, 15 bp, Homo sapiens
tgagggagccgcaat

SEQ ID NO: 249257 - DNA, 15 bp, Homo sapiens
atgagggagccgcaa

SEQ ID NO: 249258 - DNA, 15 bp, Homo sapiens
gatgagggagccgca

SEQ ID NO: 249259 - DNA, 15 bp, Homo sapiens
ggatgagggagccgc

SEQ ID NO: 249260 - DNA, 15 bp, Homo sapiens
aggatgagggagccg

SEQ ID NO: 249261 - DNA, 15 bp, Homo sapiens
caggatgagggagcc

SEQ ID NO: 249262 - DNA, 15 bp, Homo sapiens
ccaggatgagggagc

SEQ ID NO: 249263 - DNA, 15 bp, Homo sapiens
gccaggatgagggag

SEQ ID NO: 249264 - DNA, 15 bp, Homo sapiens
tgccaggatgaggga

SEQ ID NO: 249265 - DNA, 15 bp, Homo sapiens
ctgccaggatgaggg

SEQ ID NO: 249266 - DNA, 15 bp, Homo sapiens
actgccaggatgagg

SEQ ID NO: 249267 - DNA, 15 bp, Homo sapiens
cactgccaggatgag

SEQ ID NO: 249268 - DNA, 15 bp, Homo sapiens
tcactgccaggatga

SEQ ID NO: 249269 - DNA, 15 bp, Homo sapiens
ctcactgccaggatg

SEQ ID NO: 249270 - DNA, 15 bp, Homo sapiens
cctcactgccaggat

SEQ ID NO: 249271 - DNA, 15 bp, Homo sapiens
tcctcactgccagga

SEQ ID NO: 249272 - DNA, 15 bp, Homo sapiens
ctcctcactgccagg

SEQ ID NO: 249273 - DNA, 15 bp, Homo sapiens
cctcctcactgccag

SEQ ID NO: 249274 - DNA, 15 bp, Homo sapiens
gcctcctcactgcca

SEQ ID NO: 249275 - DNA, 15 bp, Homo sapiens
agcctcctcactgcc

SEQ ID NO: 249276 - DNA, 15 bp, Homo sapiens
gagcctcctcactgc

SEQ ID NO: 249277 - DNA, 15 bp, Homo sapiens
tgagcctcctcactg

SEQ ID NO: 249278 - DNA, 15 bp, Homo sapiens
ctgagcctcctcact

SEQ ID NO: 249279 - DNA, 15 bp, Homo sapiens
cctgagcctcctcac

SEQ ID NO: 249280 - DNA, 15 bp, Homo sapiens
gcctgagcctcctca

SEQ ID NO: 249281 - DNA, 15 bp, Homo sapiens
ggcctgagcctcctc

SEQ ID NO: 249282 - DNA, 15 bp, Homo sapiens
aggcctgagcctcct

SEQ ID NO: 249283 - DNA, 15 bp, Homo sapiens
gaggcctgagcctcc

SEQ ID NO: 249284 - DNA, 15 bp, Homo sapiens
ggaggcctgagcctc

SEQ ID NO: 249285 - DNA, 15 bp, Homo sapiens
cggaggcctgagcct

SEQ ID NO: 249286 - DNA, 15 bp, Homo sapiens
acggaggcctgagcc

SEQ ID NO: 249287 - DNA, 15 bp, Homo sapiens
cacggaggcctgagc

SEQ ID NO: 249288 - DNA, 15 bp, Homo sapiens
gcacggaggcctgag

SEQ ID NO: 249289 - DNA, 15 bp, Homo sapiens
agcacggaggcctga

SEQ ID NO: 249290 - DNA, 15 bp, Homo sapiens
tagcacggaggcctg

SEQ ID NO: 249291 - DNA, 15 bp, Homo sapiens
ctagcacggaggcct

SEQ ID NO: 249292 - DNA, 15 bp, Homo sapiens
actagcacggaggcc

SEQ ID NO: 249293 - DNA, 15 bp, Homo sapiens
cactagcacggaggc

SEQ ID NO: 249294 - DNA, 15 bp, Homo sapiens
gcactagcacggagg

SEQ ID NO: 249295 - DNA, 15 bp, Homo sapiens
ggcactagcacggag

SEQ ID NO: 249296 - DNA, 15 bp, Homo sapiens
gggcactagcacgga

SEQ ID NO: 249297 - DNA, 15 bp, Homo sapiens
ggggcactagcacgg

SEQ ID NO: 249298 - DNA, 15 bp, Homo sapiens
tggggcactagcacg

SEQ ID NO: 249299 - DNA, 15 bp, Homo sapiens
gtggggcactagcac

SEQ ID NO: 249300 - DNA, 15 bp, Homo sapiens
agtggggcactagca

SEQ ID NO: 249301 - DNA, 15 bp, Homo sapiens
gagtggggcactagc

SEQ ID NO: 249302 - DNA, 15 bp, Homo sapiens
ggagtggggcactag

SEQ ID NO: 249303 - DNA, 15 bp, Homo sapiens
aggagtggggcacta

SEQ ID NO: 249304 - DNA, 15 bp, Homo sapiens
aaggagtggggcact

SEQ ID NO: 249305 - DNA, 15 bp, Homo sapiens
caaggagtggggcac

SEQ ID NO: 249306 - DNA, 15 bp, Homo sapiens
tcaaggagtggggca

SEQ ID NO: 249307 - DNA, 15 bp, Homo sapiens
atcaaggagtggggc

SEQ ID NO: 249308 - DNA, 15 bp, Homo sapiens
aatcaaggagtgggg

SEQ ID NO: 249309 - DNA, 15 bp, Homo sapiens
gaatcaaggagtggg

SEQ ID NO: 249310 - DNA, 15 bp, Homo sapiens
agaatcaaggagtgg

SEQ ID NO: 249311 - DNA, 15 bp, Homo sapiens
tagaatcaaggagtg

SEQ ID NO: 249312 - DNA, 15 bp, Homo sapiens
gtagaatcaaggagt

SEQ ID NO: 249313 - DNA, 15 bp, Homo sapiens
ggtagaatcaaggag

SEQ ID NO: 249314 - DNA, 15 bp, Homo sapiens
gggtagaatcaagga

SEQ ID NO: 249315 - DNA, 15 bp, Homo sapiens
cgggtagaatcaagg

SEQ ID NO: 249316 - DNA, 15 bp, Homo sapiens
acgggtagaatcaag

SEQ ID NO: 249317 - DNA, 15 bp, Homo sapiens
gacgggtagaatcaa

SEQ ID NO: 249318 - DNA, 15 bp, Homo sapiens
ggacgggtagaatca

SEQ ID NO: 249319 - DNA, 15 bp, Homo sapiens
gggacgggtagaatc

SEQ ID NO: 249320 - DNA, 15 bp, Homo sapiens
agggacgggtagaat

SEQ ID NO: 249321 - DNA, 15 bp, Homo sapiens
gagggacgggtagaa

SEQ ID NO: 249322 - DNA, 15 bp, Homo sapiens
ggagggacgggtaga

SEQ ID NO: 249323 - DNA, 15 bp, Homo sapiens
gggagggacgggtag

SEQ ID NO: 249324 - DNA, 15 bp, Homo sapiens
agggagggacgggta

SEQ ID NO: 249325 - DNA, 15 bp, Homo sapiens
gagggagggacgggt

SEQ ID NO: 249326 - DNA, 15 bp, Homo sapiens
ggagggagggacggg

SEQ ID NO: 249327 - DNA, 15 bp, Homo sapiens
gggagggagggacgg

SEQ ID NO: 249328 - DNA, 15 bp, Homo sapiens
agggagggagggacg

SEQ ID NO: 249329 - DNA, 15 bp, Homo sapiens
cagggagggagggac

SEQ ID NO: 249330 - DNA, 15 bp, Homo sapiens
acagggagggaggga

SEQ ID NO: 249331 - DNA, 15 bp, Homo sapiens
cacagggagggaggg

SEQ ID NO: 249332 - DNA, 15 bp, Homo sapiens
ccacagggagggagg

SEQ ID NO: 249333 - DNA, 15 bp, Homo sapiens
cctactcactcatca

SEQ ID NO: 249334 - DNA, 15 bp, Homo sapiens
tcctactcactcatc

SEQ ID NO: 249335 - DNA, 15 bp, Homo sapiens
ctcctactcactcat

SEQ ID NO: 249336 - DNA, 15 bp, Homo sapiens
actcctactcactca

SEQ ID NO: 249337 - DNA, 15 bp, Homo sapiens
aactcctactcactc

SEQ ID NO: 249338 - DNA, 15 bp, Homo sapiens
aaactcctactcact

SEQ ID NO: 249339 - DNA, 15 bp, Homo sapiens
gaaactcctactcac

SEQ ID NO: 249340 - DNA, 15 bp, Homo sapiens
ggaaactcctactca

SEQ ID NO: 249341 - DNA, 15 bp, Homo sapiens
gggaaactcctactc

SEQ ID NO: 249342 - DNA, 15 bp, Homo sapiens
tgggaaactcctact

SEQ ID NO: 249343 - DNA, 15 bp, Homo sapiens
gtgggaaactcctac

SEQ ID NO: 249344 - DNA, 15 bp, Homo sapiens
cgtgggaaactccta

SEQ ID NO: 249345 - DNA, 15 bp, Homo sapiens
acgtgggaaactcct

SEQ ID NO: 249346 - DNA, 15 bp, Homo sapiens
cacgtgggaaactcc

SEQ ID NO: 249347 - DNA, 15 bp, Homo sapiens
ccacgtgggaaactc

SEQ ID NO: 249348 - DNA, 15 bp, Homo sapiens
tccacgtgggaaact

SEQ ID NO: 249349 - DNA, 15 bp, Homo sapiens
atccacgtgggaaac

SEQ ID NO: 249350 - DNA, 15 bp, Homo sapiens
tatccacgtgggaaa

SEQ ID NO: 249351 - DNA, 15 bp, Homo sapiens
atatccacgtgggaa

SEQ ID NO: 249352 - DNA, 15 bp, Homo sapiens
aatatccacgtggga

SEQ ID NO: 249353 - DNA, 15 bp, Homo sapiens
caatatccacgtggg

SEQ ID NO: 249354 - DNA, 15 bp, Homo sapiens
acaatatccacgtgg

SEQ ID NO: 249355 - DNA, 15 bp, Homo sapiens
cacaatatccacgtg

SEQ ID NO: 249356 - DNA, 15 bp, Homo sapiens
acacaatatccacgt

SEQ ID NO: 249357 - DNA, 15 bp, Homo sapiens
tacacaatatccacg

SEQ ID NO: 249358 - DNA, 15 bp, Homo sapiens
gtacacaatatccac

SEQ ID NO: 249359 - DNA, 15 bp, Homo sapiens
tgtacacaatatcca

SEQ ID NO: 249360 - DNA, 15 bp, Homo sapiens
ctgtacacaatatcc

SEQ ID NO: 249361 - DNA, 15 bp, Homo sapiens
cctgtacacaatatc

SEQ ID NO: 249362 - DNA, 15 bp, Homo sapiens
ccctgtacacaatat

SEQ ID NO: 249363 - DNA, 15 bp, Homo sapiens
cccctgtacacaata

SEQ ID NO: 249364 - DNA, 15 bp, Homo sapiens
ccccctgtacacaat

SEQ ID NO: 249365 - DNA, 15 bp, Homo sapiens
accccctgtacacaa

SEQ ID NO: 249366 - DNA, 15 bp, Homo sapiens
gaccccctgtacaca

SEQ ID NO: 249367 - DNA, 15 bp, Homo sapiens
cgaccccctgtacac

SEQ ID NO: 249368 - DNA, 15 bp, Homo sapiens
acgaccccctgtaca

SEQ ID NO: 249369 - DNA, 15 bp, Homo sapiens
aacgaccccctgtac

SEQ ID NO: 249370 - DNA, 15 bp, Homo sapiens
aaacgaccccctgta

SEQ ID NO: 249371 - DNA, 15 bp, Homo sapiens
aaaacgaccccctgt

SEQ ID NO: 249372 - DNA, 15 bp, Homo sapiens
aaaaacgaccccctg

SEQ ID NO: 249373 - DNA, 15 bp, Homo sapiens
aaaaaacgaccccct

SEQ ID NO: 249374 - DNA, 15 bp, Homo sapiens
gaaaaaacgaccccc

SEQ ID NO: 249375 - DNA, 15 bp, Homo sapiens
tgaaaaaacgacccc

SEQ ID NO: 249376 - DNA, 15 bp, Homo sapiens
gtgaaaaaacgaccc

SEQ ID NO: 249377 - DNA, 15 bp, Homo sapiens
agtgaaaaaacgacc

SEQ ID NO: 249378 - DNA, 15 bp, Homo sapiens
cagtgaaaaaacgac

SEQ ID NO: 249379 - DNA, 15 bp, Homo sapiens
tcagtgaaaaaacga

SEQ ID NO: 249380 - DNA, 15 bp, Homo sapiens
ctcagtgaaaaaacg

SEQ ID NO: 249381 - DNA, 15 bp, Homo sapiens
actcagtgaaaaaac

SEQ ID NO: 249382 - DNA, 15 bp, Homo sapiens
tactcagtgaaaaaa

SEQ ID NO: 249383 - DNA, 15 bp, Homo sapiens
ttactcagtgaaaaa

SEQ ID NO: 249384 - DNA, 15 bp, Homo sapiens
attactcagtgaaaa

SEQ ID NO: 249385 - DNA, 15 bp, Homo sapiens
cattactcagtgaaa

SEQ ID NO: 249386 - DNA, 15 bp, Homo sapiens
gcattactcagtgaa

SEQ ID NO: 249387 - DNA, 15 bp, Homo sapiens
cgcattactcagtga

SEQ ID NO: 249388 - DNA, 15 bp, Homo sapiens
acgcattactcagtg

SEQ ID NO: 249389 - DNA, 15 bp, Homo sapiens
cacgcattactcagt

SEQ ID NO: 249390 - DNA, 15 bp, Homo sapiens
tcacgcattactcag

SEQ ID NO: 249391 - DNA, 15 bp, Homo sapiens
ctcacgcattactca

SEQ ID NO: 249392 - DNA, 15 bp, Homo sapiens
actcacgcattactc

SEQ ID NO: 249393 - DNA, 15 bp, Homo sapiens
aactcacgcattact

SEQ ID NO: 249394 - DNA, 15 bp, Homo sapiens
aaactcacgcattac

SEQ ID NO: 249395 - DNA, 15 bp, Homo sapiens
aaaactcacgcatta

SEQ ID NO: 249396 - DNA, 15 bp, Homo sapiens
gaaaactcacgcatt

SEQ ID NO: 249397 - DNA, 15 bp, Homo sapiens
agaaaactcacgcat

SEQ ID NO: 249398 - DNA, 15 bp, Homo sapiens
tagaaaactcacgca

SEQ ID NO: 249399 - DNA, 15 bp, Homo sapiens
atagaaaactcacgc

SEQ ID NO: 249400 - DNA, 15 bp, Homo sapiens
catagaaaactcacg

SEQ ID NO: 249401 - DNA, 15 bp, Homo sapiens
tcatagaaaactcac

SEQ ID NO: 249402 - DNA, 15 bp, Homo sapiens
ctcatagaaaactca

SEQ ID NO: 249403 - DNA, 15 bp, Homo sapiens
tctcatagaaaactc

SEQ ID NO: 249404 - DNA, 15 bp, Homo sapiens
atctcatagaaaact

SEQ ID NO: 249405 - DNA, 15 bp, Homo sapiens
catctcatagaaaac

SEQ ID NO: 249406 - DNA, 15 bp, Homo sapiens
ccatctcatagaaaa

SEQ ID NO: 249407 - DNA, 15 bp, Homo sapiens
tccatctcatagaaa

SEQ ID NO: 249408 - DNA, 15 bp, Homo sapiens
ctccatctcatagaa

SEQ ID NO: 249409 - DNA, 15 bp, Homo sapiens
gctccatctcataga

SEQ ID NO: 249410 - DNA, 15 bp, Homo sapiens
agctccatctcatag

SEQ ID NO: 249411 - DNA, 15 bp, Homo sapiens
cagctccatctcata

SEQ ID NO: 249412 - DNA, 15 bp, Homo sapiens
gcagctccatctcat

SEQ ID NO: 249413 - DNA, 15 bp, Homo sapiens
ggcagctccatctca

SEQ ID NO: 249414 - DNA, 15 bp, Homo sapiens
tggcagctccatctc

SEQ ID NO: 249415 - DNA, 15 bp, Homo sapiens
ctggcagctccatct

SEQ ID NO: 249416 - DNA, 15 bp, Homo sapiens
actggcagctccatc

SEQ ID NO: 249417 - DNA, 15 bp, Homo sapiens
aactggcagctccat

SEQ ID NO: 249418 - DNA, 15 bp, Homo sapiens
aaactggcagctcca

SEQ ID NO: 249419 - DNA, 15 bp, Homo sapiens
gaaactggcagctcc

SEQ ID NO: 249420 - DNA, 15 bp, Homo sapiens
tgaaactggcagctc

SEQ ID NO: 249421 - DNA, 15 bp, Homo sapiens
ctgaaactggcagct

SEQ ID NO: 249422 - DNA, 15 bp, Homo sapiens
cctgaaactggcagc

SEQ ID NO: 249423 - DNA, 15 bp, Homo sapiens
tcctgaaactggcag

SEQ ID NO: 249424 - DNA, 15 bp, Homo sapiens
ttcctgaaactggca

SEQ ID NO: 249425 - DNA, 15 bp, Homo sapiens
tttcctgaaactggc

SEQ ID NO: 249426 - DNA, 15 bp, Homo sapiens
atttcctgaaactgg

SEQ ID NO: 249427 - DNA, 15 bp, Homo sapiens
catttcctgaaactg

SEQ ID NO: 249428 - DNA, 15 bp, Homo sapiens
acatttcctgaaact

SEQ ID NO: 249429 - DNA, 15 bp, Homo sapiens
tacatttcctgaaac

SEQ ID NO: 249430 - DNA, 15 bp, Homo sapiens
ttacatttcctgaaa

SEQ ID NO: 249431 - DNA, 15 bp, Homo sapiens
attacatttcctgaa

SEQ ID NO: 249432 - DNA, 15 bp, Homo sapiens
cattacatttcctga

SEQ ID NO: 249433 - DNA, 15 bp, Homo sapiens
acattacatttcctg

SEQ ID NO: 249434 - DNA, 15 bp, Homo sapiens
gacattacatttcct

SEQ ID NO: 249435 - DNA, 15 bp, Homo sapiens
tgacattacatttcc

SEQ ID NO: 249436 - DNA, 15 bp, Homo sapiens
gtgacattacatttc

SEQ ID NO: 249437 - DNA, 15 bp, Homo sapiens
ggtgacattacattt

SEQ ID NO: 249438 - DNA, 15 bp, Homo sapiens
gggtgacattacatt

SEQ ID NO: 249439 - DNA, 15 bp, Homo sapiens
agggtgacattacat

SEQ ID NO: 249440 - DNA, 15 bp, Homo sapiens
aagggtgacattaca

SEQ ID NO: 249441 - DNA, 15 bp, Homo sapiens
caagggtgacattac

SEQ ID NO: 249442 - DNA, 15 bp, Homo sapiens
tcaagggtgacatta

SEQ ID NO: 249443 - DNA, 15 bp, Homo sapiens
gtcaagggtgacatt

SEQ ID NO: 249444 - DNA, 15 bp, Homo sapiens
agtcaagggtgacat

SEQ ID NO: 249445 - DNA, 15 bp, Homo sapiens
gagtcaagggtgaca

SEQ ID NO: 249446 - DNA, 15 bp, Homo sapiens
agagtcaagggtgac

SEQ ID NO: 249447 - DNA, 15 bp, Homo sapiens
cagagtcaagggtga

SEQ ID NO: 249448 - DNA, 15 bp, Homo sapiens
gcagagtcaagggtg

SEQ ID NO: 249449 - DNA, 15 bp, Homo sapiens
ggcagagtcaagggt

SEQ ID NO: 249450 - DNA, 15 bp, Homo sapiens
aggcagagtcaaggg

SEQ ID NO: 249451 - DNA, 15 bp, Homo sapiens
aaggcagagtcaagg

SEQ ID NO: 249452 - DNA, 15 bp, Homo sapiens
gaaggcagagtcaag

SEQ ID NO: 249453 - DNA, 15 bp, Homo sapiens
agaaggcagagtcaa

SEQ ID NO: 249454 - DNA, 15 bp, Homo sapiens
gagaaggcagagtca

SEQ ID NO: 249455 - DNA, 15 bp, Homo sapiens
ggagaaggcagagtc

SEQ ID NO: 249456 - DNA, 15 bp, Homo sapiens
aggagaaggcagagt

SEQ ID NO: 249457 - DNA, 15 bp, Homo sapiens
aaggagaaggcagag

SEQ ID NO: 249458 - DNA, 15 bp, Homo sapiens
aaaggagaaggcaga

SEQ ID NO: 249459 - DNA, 15 bp, Homo sapiens
aaaaggagaaggcag

SEQ ID NO: 249460 - DNA, 15 bp, Homo sapiens
taaaaggagaaggca

SEQ ID NO: 249461 - DNA, 15 bp, Homo sapiens
gtaaaaggagaaggc

SEQ ID NO: 249462 - DNA, 15 bp, Homo sapiens
ggtaaaaggagaagg

SEQ ID NO: 249463 - DNA, 15 bp, Homo sapiens
tggtaaaaggagaag

SEQ ID NO: 249464 - DNA, 15 bp, Homo sapiens
ctggtaaaaggagaa

SEQ ID NO: 249465 - DNA, 15 bp, Homo sapiens
tctggtaaaaggaga

SEQ ID NO: 249466 - DNA, 15 bp, Homo sapiens
ttctggtaaaaggag

SEQ ID NO: 249467 - DNA, 15 bp, Homo sapiens
cttctggtaaaagga

SEQ ID NO: 249468 - DNA, 15 bp, Homo sapiens
ccttctggtaaaagg

SEQ ID NO: 249469 - DNA, 15 bp, Homo sapiens
tccttctggtaaaag

SEQ ID NO: 249470 - DNA, 15 bp, Homo sapiens
atccttctggtaaaa

SEQ ID NO: 249471 - DNA, 15 bp, Homo sapiens
catccttctggtaaa

SEQ ID NO: 249472 - DNA, 15 bp, Homo sapiens
ccatccttctggtaa

SEQ ID NO: 249473 - DNA, 15 bp, Homo sapiens
gccatccttctggta

SEQ ID NO: 249474 - DNA, 15 bp, Homo sapiens
ggccatccttctggt

SEQ ID NO: 249475 - DNA, 15 bp, Homo sapiens
tggccatccttctgg

SEQ ID NO: 249476 - DNA, 15 bp, Homo sapiens
gtggccatccttctg

SEQ ID NO: 249477 - DNA, 15 bp, Homo sapiens
tgtggccatccttct

SEQ ID NO: 249478 - DNA, 15 bp, Homo sapiens
ctgtggccatccttc

SEQ ID NO: 249479 - DNA, 15 bp, Homo sapiens
tctgtggccatcctt

SEQ ID NO: 249480 - DNA, 15 bp, Homo sapiens
ctctgtggccatcct

SEQ ID NO: 249481 - DNA, 15 bp, Homo sapiens
tctctgtggccatcc

SEQ ID NO: 249482 - DNA, 15 bp, Homo sapiens
atctctgtggccatc

SEQ ID NO: 249483 - DNA, 15 bp, Homo sapiens
gatctctgtggccat

SEQ ID NO: 249484 - DNA, 15 bp, Homo sapiens
agatctctgtggcca

SEQ ID NO: 249485 - DNA, 15 bp, Homo sapiens
tagatctctgtggcc

SEQ ID NO: 249486 - DNA, 15 bp, Homo sapiens
gtagatctctgtggc

SEQ ID NO: 249487 - DNA, 15 bp, Homo sapiens
tgtagatctctgtgg

SEQ ID NO: 249488 - DNA, 15 bp, Homo sapiens
atgtagatctctgtg

SEQ ID NO: 249489 - DNA, 15 bp, Homo sapiens
aatgtagatctctgt

SEQ ID NO: 249490 - DNA, 15 bp, Homo sapiens
taatgtagatctctg

SEQ ID NO: 249491 - DNA, 15 bp, Homo sapiens
ctaatgtagatctct

SEQ ID NO: 249492 - DNA, 15 bp, Homo sapiens
actaatgtagatctc

SEQ ID NO: 249493 - DNA, 15 bp, Homo sapiens
tactaatgtagatct

SEQ ID NO: 249494 - DNA, 15 bp, Homo sapiens
atactaatgtagatc

SEQ ID NO: 249495 - DNA, 15 bp, Homo sapiens
aatactaatgtagat

SEQ ID NO: 249496 - DNA, 15 bp, Homo sapiens
taatactaatgtaga

SEQ ID NO: 249497 - DNA, 15 bp, Homo sapiens
ctaatactaatgtag

SEQ ID NO: 249498 - DNA, 15 bp, Homo sapiens
actaatactaatgta

SEQ ID NO: 249499 - DNA, 15 bp, Homo sapiens
aactaatactaatgt

SEQ ID NO: 249500 - DNA, 15 bp, Homo sapiens
taactaatactaatg

SEQ ID NO: 249501 - DNA, 15 bp, Homo sapiens
ctaactaatactaat

SEQ ID NO: 249502 - DNA, 15 bp, Homo sapiens
cctaactaatactaa

SEQ ID NO: 249503 - DNA, 15 bp, Homo sapiens
acctaactaatacta

SEQ ID NO: 249504 - DNA, 15 bp, Homo sapiens
cacctaactaatact

SEQ ID NO: 249505 - DNA, 15 bp, Homo sapiens
gcacctaactaatac

SEQ ID NO: 249506 - DNA, 15 bp, Homo sapiens
agcacctaactaata

SEQ ID NO: 249507 - DNA, 15 bp, Homo sapiens
aagcacctaactaat

SEQ ID NO: 249508 - DNA, 15 bp, Homo sapiens
aaagcacctaactaa

SEQ ID NO: 249509 - DNA, 15 bp, Homo sapiens
gaaagcacctaacta

SEQ ID NO: 249510 - DNA, 15 bp, Homo sapiens
tgaaagcacctaact

SEQ ID NO: 249511 - DNA, 15 bp, Homo sapiens
atgaaagcacctaac

SEQ ID NO: 249512 - DNA, 15 bp, Homo sapiens
aatgaaagcacctaa

SEQ ID NO: 249513 - DNA, 15 bp, Homo sapiens
aaatgaaagcaccta

SEQ ID NO: 249514 - DNA, 15 bp, Homo sapiens
caaatgaaagcacct

SEQ ID NO: 249515 - DNA, 15 bp, Homo sapiens
gcaaatgaaagcacc

SEQ ID NO: 249516 - DNA, 15 bp, Homo sapiens
tgcaaatgaaagcac

SEQ ID NO: 249517 - DNA, 15 bp, Homo sapiens
ttgcaaatgaaagca

SEQ ID NO: 249518 - DNA, 15 bp, Homo sapiens
tttgcaaatgaaagc

SEQ ID NO: 249519 - DNA, 15 bp, Homo sapiens
ctttgcaaatgaaag

SEQ ID NO: 249520 - DNA, 15 bp, Homo sapiens
tctttgcaaatgaaa

SEQ ID NO: 249521 - DNA, 15 bp, Homo sapiens
gtctttgcaaatgaa

SEQ ID NO: 249522 - DNA, 15 bp, Homo sapiens
agtctttgcaaatga

SEQ ID NO: 249523 - DNA, 15 bp, Homo sapiens
tagtctttgcaaatg

SEQ ID NO: 249524 - DNA, 15 bp, Homo sapiens
ctagtctttgcaaat

SEQ ID NO: 249525 - DNA, 15 bp, Homo sapiens
tctagtctttgcaaa

SEQ ID NO: 249526 - DNA, 15 bp, Homo sapiens
ttctagtctttgcaa

SEQ ID NO: 249527 - DNA, 15 bp, Homo sapiens
gttctagtctttgca

SEQ ID NO: 249528 - DNA, 15 bp, Homo sapiens
agttctagtctttgc

SEQ ID NO: 249529 - DNA, 15 bp, Homo sapiens
gagttctagtctttg

SEQ ID NO: 249530 - DNA, 15 bp, Homo sapiens
ggagttctagtcttt

SEQ ID NO: 249531 - DNA, 15 bp, Homo sapiens
aggagttctagtctt

SEQ ID NO: 249532 - DNA, 15 bp, Homo sapiens
taggagttctagtct

SEQ ID NO: 249533 - DNA, 15 bp, Homo sapiens
ttaggagttctagtc

SEQ ID NO: 249534 - DNA, 15 bp, Homo sapiens
gttaggagttctagt

SEQ ID NO: 249535 - DNA, 15 bp, Homo sapiens
tgttaggagttctag

SEQ ID NO: 249536 - DNA, 15 bp, Homo sapiens
gtgttaggagttcta

SEQ ID NO: 249537 - DNA, 15 bp, Homo sapiens
tgtgttaggagttct

SEQ ID NO: 249538 - DNA, 15 bp, Homo sapiens
ttgtgttaggagttc

SEQ ID NO: 249539 - DNA, 15 bp, Homo sapiens
tttgtgttaggagtt

SEQ ID NO: 249540 - DNA, 15 bp, Homo sapiens
atttgtgttaggagt

SEQ ID NO: 249541 - DNA, 15 bp, Homo sapiens
tatttgtgttaggag

SEQ ID NO: 249542 - DNA, 15 bp, Homo sapiens
ctatttgtgttagga

SEQ ID NO: 249543 - DNA, 15 bp, Homo sapiens
cctatttgtgttagg

SEQ ID NO: 249544 - DNA, 15 bp, Homo sapiens
gcctatttgtgttag

SEQ ID NO: 249545 - DNA, 15 bp, Homo sapiens
agcctatttgtgtta

SEQ ID NO: 249546 - DNA, 15 bp, Homo sapiens
aagcctatttgtgtt

SEQ ID NO: 249547 - DNA, 15 bp, Homo sapiens
taagcctatttgtgt

SEQ ID NO: 249548 - DNA, 15 bp, Homo sapiens
ttaagcctatttgtg

SEQ ID NO: 249549 - DNA, 15 bp, Homo sapiens
tttaagcctatttgt

SEQ ID NO: 249550 - DNA, 15 bp, Homo sapiens
atttaagcctatttg

SEQ ID NO: 249551 - DNA, 15 bp, Homo sapiens
tatttaagcctattt

SEQ ID NO: 249552 - DNA, 15 bp, Homo sapiens
ttatttaagcctatt

SEQ ID NO: 249553 - DNA, 15 bp, Homo sapiens
attatttaagcctat

SEQ ID NO: 249554 - DNA, 15 bp, Homo sapiens
tattatttaagccta

SEQ ID NO: 249555 - DNA, 15 bp, Homo sapiens
ttattatttaagcct

SEQ ID NO: 249556 - DNA, 15 bp, Homo sapiens
tttattatttaagcc

SEQ ID NO: 249557 - DNA, 15 bp, Homo sapiens
ctttattatttaagc

SEQ ID NO: 249558 - DNA, 15 bp, Homo sapiens
cctttattatttaag

SEQ ID NO: 249559 - DNA, 15 bp, Homo sapiens
ccctttattatttaa

SEQ ID NO: 249560 - DNA, 15 bp, Homo sapiens
gccctttattattta

SEQ ID NO: 249561 - DNA, 15 bp, Homo sapiens
tgccctttattattt

SEQ ID NO: 249562 - DNA, 15 bp, Homo sapiens
atgccctttattatt

SEQ ID NO: 249563 - DNA, 15 bp, Homo sapiens
catgccctttattat

SEQ ID NO: 249564 - DNA, 15 bp, Homo sapiens
acatgccctttatta

SEQ ID NO: 249565 - DNA, 15 bp, Homo sapiens
tacatgccctttatt

SEQ ID NO: 249566 - DNA, 15 bp, Homo sapiens
atacatgccctttat

SEQ ID NO: 249567 - DNA, 15 bp, Homo sapiens
aatacatgcccttta

SEQ ID NO: 249568 - DNA, 15 bp, Homo sapiens
caatacatgcccttt

SEQ ID NO: 249569 - DNA, 15 bp, Homo sapiens
acaatacatgccctt

SEQ ID NO: 249570 - DNA, 15 bp, Homo sapiens
gacaatacatgccct

SEQ ID NO: 249571 - DNA, 15 bp, Homo sapiens
agacaatacatgccc

SEQ ID NO: 249572 - DNA, 15 bp, Homo sapiens
aagacaatacatgcc

SEQ ID NO: 249573 - DNA, 15 bp, Homo sapiens
taagacaatacatgc

SEQ ID NO: 249574 - DNA, 15 bp, Homo sapiens
ataagacaatacatg

SEQ ID NO: 249575 - DNA, 15 bp, Homo sapiens
gataagacaatacat

SEQ ID NO: 249576 - DNA, 15 bp, Homo sapiens
agataagacaataca

SEQ ID NO: 249577 - DNA, 15 bp, Homo sapiens
tagataagacaatac

SEQ ID NO: 249578 - DNA, 15 bp, Homo sapiens
ttagataagacaata

SEQ ID NO: 249579 - DNA, 15 bp, Homo sapiens
attagataagacaat

SEQ ID NO: 249580 - DNA, 15 bp, Homo sapiens
aattagataagacaa

SEQ ID NO: 249581 - DNA, 15 bp, Homo sapiens
caattagataagaca

SEQ ID NO: 249582 - DNA, 15 bp, Homo sapiens
tcaattagataagac

SEQ ID NO: 249583 - DNA, 15 bp, Homo sapiens
ttcaattagataaga

SEQ ID NO: 249584 - DNA, 15 bp, Homo sapiens
tttcaattagataag

SEQ ID NO: 249585 - DNA, 15 bp, Homo sapiens
ttttcaattagataa

SEQ ID NO: 249586 - DNA, 15 bp, Homo sapiens
cttttcaattagata

SEQ ID NO: 249587 - DNA, 15 bp, Homo sapiens
gcttttcaattagat

SEQ ID NO: 249588 - DNA, 15 bp, Homo sapiens
tgcttttcaattaga

SEQ ID NO: 249589 - DNA, 15 bp, Homo sapiens
gtgcttttcaattag

SEQ ID NO: 249590 - DNA, 15 bp, Homo sapiens
tgtgcttttcaatta

SEQ ID NO: 249591 - DNA, 15 bp, Homo sapiens
ctgtgcttttcaatt

SEQ ID NO: 249592 - DNA, 15 bp, Homo sapiens
tctgtgcttttcaat

SEQ ID NO: 249593 - DNA, 15 bp, Homo sapiens
ttctgtgcttttcaa

SEQ ID NO: 249594 - DNA, 15 bp, Homo sapiens
attctgtgcttttca

SEQ ID NO: 249595 - DNA, 15 bp, Homo sapiens
aattctgtgcttttc

SEQ ID NO: 249596 - DNA, 15 bp, Homo sapiens
taattctgtgctttt

SEQ ID NO: 249597 - DNA, 15 bp, Homo sapiens
ctaattctgtgcttt

SEQ ID NO: 249598 - DNA, 15 bp, Homo sapiens
cctaattctgtgctt

SEQ ID NO: 249599 - DNA, 15 bp, Homo sapiens
ccctaattctgtgct

SEQ ID NO: 249600 - DNA, 15 bp, Homo sapiens
gccctaattctgtgc

SEQ ID NO: 249601 - DNA, 15 bp, Homo sapiens
agccctaattctgtg

SEQ ID NO: 249602 - DNA, 15 bp, Homo sapiens
cagccctaattctgt

SEQ ID NO: 249603 - DNA, 15 bp, Homo sapiens
tcagccctaattctg

SEQ ID NO: 249604 - DNA, 15 bp, Homo sapiens
gtcagccctaattct

SEQ ID NO: 249605 - DNA, 15 bp, Homo sapiens
agtcagccctaattc

SEQ ID NO: 249606 - DNA, 15 bp, Homo sapiens
aagtcagccctaatt

SEQ ID NO: 249607 - DNA, 15 bp, Homo sapiens
taagtcagccctaat

SEQ ID NO: 249608 - DNA, 15 bp, Homo sapiens
ttaagtcagccctaa

SEQ ID NO: 249609 - DNA, 15 bp, Homo sapiens
cttaagtcagcccta

SEQ ID NO: 249610 - DNA, 15 bp, Homo sapiens
ccttaagtcagccct

SEQ ID NO: 249611 - DNA, 15 bp, Homo sapiens
gccttaagtcagccc

SEQ ID NO: 249612 - DNA, 15 bp, Homo sapiens
ggccttaagtcagcc

SEQ ID NO: 249613 - DNA, 15 bp, Homo sapiens
tggccttaagtcagc

SEQ ID NO: 249614 - DNA, 15 bp, Homo sapiens
ttggccttaagtcag

SEQ ID NO: 249615 - DNA, 15 bp, Homo sapiens
tttggccttaagtca

SEQ ID NO: 249616 - DNA, 15 bp, Homo sapiens
gtttggccttaagtc

SEQ ID NO: 249617 - DNA, 15 bp, Homo sapiens
agtttggccttaagt

SEQ ID NO: 249618 - DNA, 15 bp, Homo sapiens
aagtttggccttaag

SEQ ID NO: 249619 - DNA, 15 bp, Homo sapiens
caagtttggccttaa

SEQ ID NO: 249620 - DNA, 15 bp, Homo sapiens
tcaagtttggcctta

SEQ ID NO: 249621 - DNA, 15 bp, Homo sapiens
atcaagtttggcctt

SEQ ID NO: 249622 - DNA, 15 bp, Homo sapiens
gatcaagtttggcct

SEQ ID NO: 249623 - DNA, 15 bp, Homo sapiens
agatcaagtttggcc

SEQ ID NO: 249624 - DNA, 15 bp, Homo sapiens
cagatcaagtttggc

SEQ ID NO: 249625 - DNA, 15 bp, Homo sapiens
acagatcaagtttgg

SEQ ID NO: 249626 - DNA, 15 bp, Homo sapiens
aacagatcaagtttg

SEQ ID NO: 249627 - DNA, 15 bp, Homo sapiens
caacagatcaagttt

SEQ ID NO: 249628 - DNA, 15 bp, Homo sapiens
ccaacagatcaagtt

SEQ ID NO: 249629 - DNA, 15 bp, Homo sapiens
gccaacagatcaagt

SEQ ID NO: 249630 - DNA, 15 bp, Homo sapiens
agccaacagatcaag

SEQ ID NO: 249631 - DNA, 15 bp, Homo sapiens
gagccaacagatcaa

SEQ ID NO: 249632 - DNA, 15 bp, Homo sapiens
tgagccaacagatca

SEQ ID NO: 249633 - DNA, 15 bp, Homo sapiens
ttgagccaacagatc

SEQ ID NO: 249634 - DNA, 15 bp, Homo sapiens
gttgagccaacagat

SEQ ID NO: 249635 - DNA, 15 bp, Homo sapiens
tgttgagccaacaga

SEQ ID NO: 249636 - DNA, 15 bp, Homo sapiens
ttgttgagccaacag

SEQ ID NO: 249637 - DNA, 15 bp, Homo sapiens
attgttgagccaaca

SEQ ID NO: 249638 - DNA, 15 bp, Homo sapiens
tattgttgagccaac

SEQ ID NO: 249639 - DNA, 15 bp, Homo sapiens
atattgttgagccaa

SEQ ID NO: 249640 - DNA, 15 bp, Homo sapiens
gatattgttgagcca

SEQ ID NO: 249641 - DNA, 15 bp, Homo sapiens
tgatattgttgagcc

SEQ ID NO: 249642 - DNA, 15 bp, Homo sapiens
gtgatattgttgagc

SEQ ID NO: 249643 - DNA, 15 bp, Homo sapiens
ggtgatattgttgag

SEQ ID NO: 249644 - DNA, 15 bp, Homo sapiens
tggtgatattgttga

SEQ ID NO: 249645 - DNA, 15 bp, Homo sapiens
ttggtgatattgttg

SEQ ID NO: 249646 - DNA, 15 bp, Homo sapiens
cttggtgatattgtt

SEQ ID NO: 249647 - DNA, 15 bp, Homo sapiens
ccttggtgatattgt

SEQ ID NO: 249648 - DNA, 15 bp, Homo sapiens
tccttggtgatattg

SEQ ID NO: 249649 - DNA, 15 bp, Homo sapiens
atccttggtgatatt

SEQ ID NO: 249650 - DNA, 15 bp, Homo sapiens
gatccttggtgatat

SEQ ID NO: 249651 - DNA, 15 bp, Homo sapiens
agatccttggtgata

SEQ ID NO: 249652 - DNA, 15 bp, Homo sapiens
cagatccttggtgat

SEQ ID NO: 249653 - DNA, 15 bp, Homo sapiens
ccagatccttggtga

SEQ ID NO: 249654 - DNA, 15 bp, Homo sapiens
gccagatccttggtg

SEQ ID NO: 249655 - DNA, 15 bp, Homo sapiens
agccagatccttggt

SEQ ID NO: 249656 - DNA, 15 bp, Homo sapiens
aagccagatccttgg

SEQ ID NO: 249657 - DNA, 15 bp, Homo sapiens
gaagccagatccttg

SEQ ID NO: 249658 - DNA, 15 bp, Homo sapiens
agaagccagatcctt

SEQ ID NO: 249659 - DNA, 15 bp, Homo sapiens
aagaagccagatcct

SEQ ID NO: 249660 - DNA, 15 bp, Homo sapiens
aaagaagccagatcc

SEQ ID NO: 249661 - DNA, 15 bp, Homo sapiens
gaaagaagccagatc

SEQ ID NO: 249662 - DNA, 15 bp, Homo sapiens
ggaaagaagccagat

SEQ ID NO: 249663 - DNA, 15 bp, Homo sapiens
tggaaagaagccaga

SEQ ID NO: 249664 - DNA, 15 bp, Homo sapiens
atggaaagaagccag

SEQ ID NO: 249665 - DNA, 15 bp, Homo sapiens
gatggaaagaagcca

SEQ ID NO: 249666 - DNA, 15 bp, Homo sapiens
agatggaaagaagcc

SEQ ID NO: 249667 - DNA, 15 bp, Homo sapiens
gagatggaaagaagc

SEQ ID NO: 249668 - DNA, 15 bp, Homo sapiens
agagatggaaagaag

SEQ ID NO: 249669 - DNA, 15 bp, Homo sapiens
gagagatggaaagaa

SEQ ID NO: 249670 - DNA, 15 bp, Homo sapiens
ggagagatggaaaga

SEQ ID NO: 249671 - DNA, 15 bp, Homo sapiens
cggagagatggaaag

SEQ ID NO: 249672 - DNA, 15 bp, Homo sapiens
acggagagatggaaa

SEQ ID NO: 249673 - DNA, 15 bp, Homo sapiens
aacggagagatggaa

SEQ ID NO: 249674 - DNA, 15 bp, Homo sapiens
gaacggagagatgga

SEQ ID NO: 249675 - DNA, 15 bp, Homo sapiens
agaacggagagatgg

SEQ ID NO: 249676 - DNA, 15 bp, Homo sapiens
cagaacggagagatg

SEQ ID NO: 249677 - DNA, 15 bp, Homo sapiens
acagaacggagagat

SEQ ID NO: 249678 - DNA, 15 bp, Homo sapiens
gacagaacggagaga

SEQ ID NO: 249679 - DNA, 15 bp, Homo sapiens
agacagaacggagag

SEQ ID NO: 249680 - DNA, 15 bp, Homo sapiens
aagacagaacggaga

SEQ ID NO: 249681 - DNA, 15 bp, Homo sapiens
taagacagaacggag

SEQ ID NO: 249682 - DNA, 15 bp, Homo sapiens
ataagacagaacgga

SEQ ID NO: 249683 - DNA, 15 bp, Homo sapiens
cataagacagaacgg

SEQ ID NO: 249684 - DNA, 15 bp, Homo sapiens
gcataagacagaacg

SEQ ID NO: 249685 - DNA, 15 bp, Homo sapiens
agcataagacagaac

SEQ ID NO: 249686 - DNA, 15 bp, Homo sapiens
tagcataagacagaa

SEQ ID NO: 249687 - DNA, 15 bp, Homo sapiens
atagcataagacaga

SEQ ID NO: 249688 - DNA, 15 bp, Homo sapiens
gatagcataagacag

SEQ ID NO: 249689 - DNA, 15 bp, Homo sapiens
agatagcataagaca

SEQ ID NO: 249690 - DNA, 15 bp, Homo sapiens
aagatagcataagac

SEQ ID NO: 249691 - DNA, 15 bp, Homo sapiens
aaagatagcataaga

SEQ ID NO: 249692 - DNA, 15 bp, Homo sapiens
gaaagatagcataag

SEQ ID NO: 249693 - DNA, 15 bp, Homo sapiens
tgaaagatagcataa

SEQ ID NO: 249694 - DNA, 15 bp, Homo sapiens
atgaaagatagcata

SEQ ID NO: 249695 - DNA, 15 bp, Homo sapiens
tatgaaagatagcat

SEQ ID NO: 249696 - DNA, 15 bp, Homo sapiens
atatgaaagatagca

SEQ ID NO: 249697 - DNA, 15 bp, Homo sapiens
gatatgaaagatagc

SEQ ID NO: 249698 - DNA, 15 bp, Homo sapiens
ggatatgaaagatag

SEQ ID NO: 249699 - DNA, 15 bp, Homo sapiens
aggatatgaaagata

SEQ ID NO: 249700 - DNA, 15 bp, Homo sapiens
aaggatatgaaagat

SEQ ID NO: 249701 - DNA, 15 bp, Homo sapiens
aaaggatatgaaaga

SEQ ID NO: 249702 - DNA, 15 bp, Homo sapiens
caaaggatatgaaag

SEQ ID NO: 249703 - DNA, 15 bp, Homo sapiens
ccaaaggatatgaaa

SEQ ID NO: 249704 - DNA, 15 bp, Homo sapiens
accaaaggatatgaa

SEQ ID NO: 249705 - DNA, 15 bp, Homo sapiens
caccaaaggatatga

SEQ ID NO: 249706 - DNA, 15 bp, Homo sapiens
acaccaaaggatatg

SEQ ID NO: 249707 - DNA, 15 bp, Homo sapiens
gacaccaaaggatat

SEQ ID NO: 249708 - DNA, 15 bp, Homo sapiens
agacaccaaaggata

SEQ ID NO: 249709 - DNA, 15 bp, Homo sapiens
aagacaccaaaggat

SEQ ID NO: 249710 - DNA, 15 bp, Homo sapiens
aaagacaccaaagga

SEQ ID NO: 249711 - DNA, 15 bp, Homo sapiens
taaagacaccaaagg

SEQ ID NO: 249712 - DNA, 15 bp, Homo sapiens
ataaagacaccaaag

SEQ ID NO: 249713 - DNA, 15 bp, Homo sapiens
gataaagacaccaaa

SEQ ID NO: 249714 - DNA, 15 bp, Homo sapiens
tgataaagacaccaa

SEQ ID NO: 249715 - DNA, 15 bp, Homo sapiens
ttgataaagacacca

SEQ ID NO: 249716 - DNA, 15 bp, Homo sapiens
tttgataaagacacc

SEQ ID NO: 249717 - DNA, 15 bp, Homo sapiens
ctttgataaagacac

SEQ ID NO: 249718 - DNA, 15 bp, Homo sapiens
cctttgataaagaca

SEQ ID NO: 249719 - DNA, 15 bp, Homo sapiens
gcctttgataaagac

SEQ ID NO: 249720 - DNA, 15 bp, Homo sapiens
agcctttgataaaga

SEQ ID NO: 249721 - DNA, 15 bp, Homo sapiens
cagcctttgataaag

SEQ ID NO: 249722 - DNA, 15 bp, Homo sapiens
ccagcctttgataaa

SEQ ID NO: 249723 - DNA, 15 bp, Homo sapiens
gccagcctttgataa

SEQ ID NO: 249724 - DNA, 15 bp, Homo sapiens
tgccagcctttgata

SEQ ID NO: 249725 - DNA, 15 bp, Homo sapiens
gtgccagcctttgat

SEQ ID NO: 249726 - DNA, 15 bp, Homo sapiens
ggtgccagcctttga

SEQ ID NO: 249727 - DNA, 15 bp, Homo sapiens
aggtgccagcctttg

SEQ ID NO: 249728 - DNA, 15 bp, Homo sapiens
aaggtgccagccttt

SEQ ID NO: 249729 - DNA, 15 bp, Homo sapiens
aaaggtgccagcctt

SEQ ID NO: 249730 - DNA, 15 bp, Homo sapiens
aaaaggtgccagcct

SEQ ID NO: 249731 - DNA, 15 bp, Homo sapiens
taaaaggtgccagcc

SEQ ID NO: 249732 - DNA, 15 bp, Homo sapiens
ctaaaaggtgccagc

SEQ ID NO: 249733 - DNA, 15 bp, Homo sapiens
cctaaaaggtgccag

SEQ ID NO: 249734 - DNA, 15 bp, Homo sapiens
gcctaaaaggtgcca

SEQ ID NO: 249735 - DNA, 15 bp, Homo sapiens
ggcctaaaaggtgcc

SEQ ID NO: 249736 - DNA, 15 bp, Homo sapiens
gggcctaaaaggtgc

SEQ ID NO: 249737 - DNA, 15 bp, Homo sapiens
agggcctaaaaggtg

SEQ ID NO: 249738 - DNA, 15 bp, Homo sapiens
tagggcctaaaaggt

SEQ ID NO: 249739 - DNA, 15 bp, Homo sapiens
ttagggcctaaaagg

SEQ ID NO: 249740 - DNA, 15 bp, Homo sapiens
attagggcctaaaag

SEQ ID NO: 249741 - DNA, 15 bp, Homo sapiens
tattagggcctaaaa

SEQ ID NO: 249742 - DNA, 15 bp, Homo sapiens
atattagggcctaaa

SEQ ID NO: 249743 - DNA, 15 bp, Homo sapiens
catattagggcctaa

SEQ ID NO: 249744 - DNA, 15 bp, Homo sapiens
tcatattagggccta

SEQ ID NO: 249745 - DNA, 15 bp, Homo sapiens
gtcatattagggcct

SEQ ID NO: 249746 - DNA, 15 bp, Homo sapiens
agtcatattagggcc

SEQ ID NO: 249747 - DNA, 15 bp, Homo sapiens
cagtcatattagggc

SEQ ID NO: 249748 - DNA, 15 bp, Homo sapiens
tcagtcatattaggg

SEQ ID NO: 249749 - DNA, 15 bp, Homo sapiens
ttcagtcatattagg

SEQ ID NO: 249750 - DNA, 15 bp, Homo sapiens
cttcagtcatattag

SEQ ID NO: 249751 - DNA, 15 bp, Homo sapiens
ccttcagtcatatta

SEQ ID NO: 249752 - DNA, 15 bp, Homo sapiens
tccttcagtcatatt

SEQ ID NO: 249753 - DNA, 15 bp, Homo sapiens
ctccttcagtcatat

SEQ ID NO: 249754 - DNA, 15 bp, Homo sapiens
gctccttcagtcata

SEQ ID NO: 249755 - DNA, 15 bp, Homo sapiens
agctccttcagtcat

SEQ ID NO: 249756 - DNA, 15 bp, Homo sapiens
gagctccttcagtca

SEQ ID NO: 249757 - DNA, 15 bp, Homo sapiens
ggagctccttcagtc

SEQ ID NO: 249758 - DNA, 15 bp, Homo sapiens
aggagctccttcagt

SEQ ID NO: 249759 - DNA, 15 bp, Homo sapiens
caggagctccttcag

SEQ ID NO: 249760 - DNA, 15 bp, Homo sapiens
ccaggagctccttca

SEQ ID NO: 249761 - DNA, 15 bp, Homo sapiens
cccaggagctccttc

SEQ ID NO: 249762 - DNA, 15 bp, Homo sapiens
ccccaggagctcctt

SEQ ID NO: 249763 - DNA, 15 bp, Homo sapiens
gccccaggagctcct

SEQ ID NO: 249764 - DNA, 15 bp, Homo sapiens
agccccaggagctcc

SEQ ID NO: 249765 - DNA, 15 bp, Homo sapiens
tagccccaggagctc

SEQ ID NO: 249766 - DNA, 15 bp, Homo sapiens
ctagccccaggagct

SEQ ID NO: 249767 - DNA, 15 bp, Homo sapiens
tctagccccaggagc

SEQ ID NO: 249768 - DNA, 15 bp, Homo sapiens
atctagccccaggag

SEQ ID NO: 249769 - DNA, 15 bp, Homo sapiens
catctagccccagga

SEQ ID NO: 249770 - DNA, 15 bp, Homo sapiens
gcatctagccccagg

SEQ ID NO: 249771 - DNA, 15 bp, Homo sapiens
agcatctagccccag

SEQ ID NO: 249772 - DNA, 15 bp, Homo sapiens
aagcatctagcccca

SEQ ID NO: 249773 - DNA, 15 bp, Homo sapiens
gaagcatctagcccc

SEQ ID NO: 249774 - DNA, 15 bp, Homo sapiens
ggaagcatctagccc

SEQ ID NO: 249775 - DNA, 15 bp, Homo sapiens
aggaagcatctagcc

SEQ ID NO: 249776 - DNA, 15 bp, Homo sapiens
aaggaagcatctagc

SEQ ID NO: 249777 - DNA, 15 bp, Homo sapiens
gaaggaagcatctag

SEQ ID NO: 249778 - DNA, 15 bp, Homo sapiens
tgaaggaagcatcta

SEQ ID NO: 249779 - DNA, 15 bp, Homo sapiens
atgaaggaagcatct

SEQ ID NO: 249780 - DNA, 15 bp, Homo sapiens
gatgaaggaagcatc

SEQ ID NO: 249781 - DNA, 15 bp, Homo sapiens
tgatgaaggaagcat

SEQ ID NO: 249782 - DNA, 15 bp, Homo sapiens
atgatgaaggaagca

SEQ ID NO: 249783 - DNA, 15 bp, Homo sapiens
catgatgaaggaagc

SEQ ID NO: 249784 - DNA, 15 bp, Homo sapiens
gcatgatgaaggaag

SEQ ID NO: 249785 - DNA, 15 bp, Homo sapiens
ggcatgatgaaggaa

SEQ ID NO: 249786 - DNA, 15 bp, Homo sapiens
gggcatgatgaagga

SEQ ID NO: 249787 - DNA, 15 bp, Homo sapiens
tgggcatgatgaagg

SEQ ID NO: 249788 - DNA, 15 bp, Homo sapiens
ttgggcatgatgaag

SEQ ID NO: 249789 - DNA, 15 bp, Homo sapiens
gttgggcatgatgaa

SEQ ID NO: 249790 - DNA, 15 bp, Homo sapiens
tgttgggcatgatga

SEQ ID NO: 249791 - DNA, 15 bp, Homo sapiens
ctgttgggcatgatg

SEQ ID NO: 249792 - DNA, 15 bp, Homo sapiens
cctgttgggcatgat

SEQ ID NO: 249793 - DNA, 15 bp, Homo sapiens
tcctgttgggcatga

SEQ ID NO: 249794 - DNA, 15 bp, Homo sapiens
ttcctgttgggcatg

SEQ ID NO: 249795 - DNA, 15 bp, Homo sapiens
cttcctgttgggcat

SEQ ID NO: 249796 - DNA, 15 bp, Homo sapiens
ccttcctgttgggca

SEQ ID NO: 249797 - DNA, 15 bp, Homo sapiens
tccttcctgttgggc

SEQ ID NO: 249798 - DNA, 15 bp, Homo sapiens
ttccttcctgttggg

SEQ ID NO: 249799 - DNA, 15 bp, Homo sapiens
tttccttcctgttgg

SEQ ID NO: 249800 - DNA, 15 bp, Homo sapiens
atttccttcctgttg

SEQ ID NO: 249801 - DNA, 15 bp, Homo sapiens
catttccttcctgtt

SEQ ID NO: 249802 - DNA, 15 bp, Homo sapiens
ccatttccttcctgt

SEQ ID NO: 249803 - DNA, 15 bp, Homo sapiens
gccatttccttcctg

SEQ ID NO: 249804 - DNA, 15 bp, Homo sapiens
tgccatttccttcct

SEQ ID NO: 249805 - DNA, 15 bp, Homo sapiens
atgccatttccttcc

SEQ ID NO: 249806 - DNA, 15 bp, Homo sapiens
gatgccatttccttc

SEQ ID NO: 249807 - DNA, 15 bp, Homo sapiens
cgatgccatttcctt

SEQ ID NO: 249808 - DNA, 15 bp, Homo sapiens
acgatgccatttcct

SEQ ID NO: 249809 - DNA, 15 bp, Homo sapiens
aacgatgccatttcc

SEQ ID NO: 249810 - DNA, 15 bp, Homo sapiens
aaacgatgccatttc

SEQ ID NO: 249811 - DNA, 15 bp, Homo sapiens
gaaacgatgccattt

SEQ ID NO: 249812 - DNA, 15 bp, Homo sapiens
ggaaacgatgccatt

SEQ ID NO: 249813 - DNA, 15 bp, Homo sapiens
tggaaacgatgccat

SEQ ID NO: 249814 - DNA, 15 bp, Homo sapiens
ctggaaacgatgcca

SEQ ID NO: 249815 - DNA, 15 bp, Homo sapiens
cctggaaacgatgcc

SEQ ID NO: 249816 - DNA, 15 bp, Homo sapiens
gcctggaaacgatgc

SEQ ID NO: 249817 - DNA, 15 bp, Homo sapiens
tgcctggaaacgatg

SEQ ID NO: 249818 - DNA, 15 bp, Homo sapiens
gtgcctggaaacgat

SEQ ID NO: 249819 - DNA, 15 bp, Homo sapiens
agtgcctggaaacga

SEQ ID NO: 249820 - DNA, 15 bp, Homo sapiens
aagtgcctggaaacg

SEQ ID NO: 249821 - DNA, 15 bp, Homo sapiens
aaagtgcctggaaac

SEQ ID NO: 249822 - DNA, 15 bp, Homo sapiens
gaaagtgcctggaaa

SEQ ID NO: 249823 - DNA, 15 bp, Homo sapiens
tgaaagtgcctggaa

SEQ ID NO: 249824 - DNA, 15 bp, Homo sapiens
ctgaaagtgcctgga

SEQ ID NO: 249825 - DNA, 15 bp, Homo sapiens
gctgaaagtgcctgg

SEQ ID NO: 249826 - DNA, 15 bp, Homo sapiens
tgctgaaagtgcctg

SEQ ID NO: 249827 - DNA, 15 bp, Homo sapiens
ttgctgaaagtgcct

SEQ ID NO: 249828 - DNA, 15 bp, Homo sapiens
cttgctgaaagtgcc

SEQ ID NO: 249829 - DNA, 15 bp, Homo sapiens
tcttgctgaaagtgc

SEQ ID NO: 249830 - DNA, 15 bp, Homo sapiens
gtcttgctgaaagtg

SEQ ID NO: 249831 - DNA, 15 bp, Homo sapiens
ggtcttgctgaaagt

SEQ ID NO: 249832 - DNA, 15 bp, Homo sapiens
aggtcttgctgaaag

SEQ ID NO: 249833 - DNA, 15 bp, Homo sapiens
caggtcttgctgaaa

SEQ ID NO: 249834 - DNA, 15 bp, Homo sapiens
tcaggtcttgctgaa

SEQ ID NO: 249835 - DNA, 15 bp, Homo sapiens
ctcaggtcttgctga

SEQ ID NO: 249836 - DNA, 15 bp, Homo sapiens
tctcaggtcttgctg

SEQ ID NO: 249837 - DNA, 15 bp, Homo sapiens
ctctcaggtcttgct

SEQ ID NO: 249838 - DNA, 15 bp, Homo sapiens
actctcaggtcttgc

SEQ ID NO: 249839 - DNA, 15 bp, Homo sapiens
gactctcaggtcttg

SEQ ID NO: 249840 - DNA, 15 bp, Homo sapiens
tgactctcaggtctt

SEQ ID NO: 249841 - DNA, 15 bp, Homo sapiens
gtgactctcaggtct

SEQ ID NO: 249842 - DNA, 15 bp, Homo sapiens
agtgactctcaggtc

SEQ ID NO: 249843 - DNA, 15 bp, Homo sapiens
gagtgactctcaggt

SEQ ID NO: 249844 - DNA, 15 bp, Homo sapiens
agagtgactctcagg

SEQ ID NO: 249845 - DNA, 15 bp, Homo sapiens
cagagtgactctcag

SEQ ID NO: 249846 - DNA, 15 bp, Homo sapiens
tcagagtgactctca

SEQ ID NO: 249847 - DNA, 15 bp, Homo sapiens
atcagagtgactctc

SEQ ID NO: 249848 - DNA, 15 bp, Homo sapiens
aatcagagtgactct

SEQ ID NO: 249849 - DNA, 15 bp, Homo sapiens
caatcagagtgactc

SEQ ID NO: 249850 - DNA, 15 bp, Homo sapiens
ccaatcagagtgact

SEQ ID NO: 249851 - DNA, 15 bp, Homo sapiens
tccaatcagagtgac

SEQ ID NO: 249852 - DNA, 15 bp, Homo sapiens
gtccaatcagagtga

SEQ ID NO: 249853 - DNA, 15 bp, Homo sapiens
agtccaatcagagtg

SEQ ID NO: 249854 - DNA, 15 bp, Homo sapiens
cagtccaatcagagt

SEQ ID NO: 249855 - DNA, 15 bp, Homo sapiens
ccagtccaatcagag

SEQ ID NO: 249856 - DNA, 15 bp, Homo sapiens
gccagtccaatcaga

SEQ ID NO: 249857 - DNA, 15 bp, Homo sapiens
agccagtccaatcag

SEQ ID NO: 249858 - DNA, 15 bp, Homo sapiens
aagccagtccaatca

SEQ ID NO: 249859 - DNA, 15 bp, Homo sapiens
taagccagtccaatc

SEQ ID NO: 249860 - DNA, 15 bp, Homo sapiens
ctaagccagtccaat

SEQ ID NO: 249861 - DNA, 15 bp, Homo sapiens
cctaagccagtccaa

SEQ ID NO: 249862 - DNA, 15 bp, Homo sapiens
acctaagccagtcca

SEQ ID NO: 249863 - DNA, 15 bp, Homo sapiens
gacctaagccagtcc

SEQ ID NO: 249864 - DNA, 15 bp, Homo sapiens
tgacctaagccagtc

SEQ ID NO: 249865 - DNA, 15 bp, Homo sapiens
gtgacctaagccagt

SEQ ID NO: 249866 - DNA, 15 bp, Homo sapiens
tgtgacctaagccag

SEQ ID NO: 249867 - DNA, 15 bp, Homo sapiens
atgtgacctaagcca

SEQ ID NO: 249868 - DNA, 15 bp, Homo sapiens
catgtgacctaagcc

SEQ ID NO: 249869 - DNA, 15 bp, Homo sapiens
gcatgtgacctaagc

SEQ ID NO: 249870 - DNA, 15 bp, Homo sapiens
ggcatgtgacctaag

SEQ ID NO: 249871 - DNA, 15 bp, Homo sapiens
gggcatgtgacctaa

SEQ ID NO: 249872 - DNA, 15 bp, Homo sapiens
tgggcatgtgaccta

SEQ ID NO: 249873 - DNA, 15 bp, Homo sapiens
atgggcatgtgacct

SEQ ID NO: 249874 - DNA, 15 bp, Homo sapiens
gatgggcatgtgacc

SEQ ID NO: 249875 - DNA, 15 bp, Homo sapiens
ggatgggcatgtgac

SEQ ID NO: 249876 - DNA, 15 bp, Homo sapiens
gggatgggcatgtga

SEQ ID NO: 249877 - DNA, 15 bp, Homo sapiens
agggatgggcatgtg

SEQ ID NO: 249878 - DNA, 15 bp, Homo sapiens
cagggatgggcatgt

SEQ ID NO: 249879 - DNA, 15 bp, Homo sapiens
tcagggatgggcatg

SEQ ID NO: 249880 - DNA, 15 bp, Homo sapiens
ttcagggatgggcat

SEQ ID NO: 249881 - DNA, 15 bp, Homo sapiens
gttcagggatgggca

SEQ ID NO: 249882 - DNA, 15 bp, Homo sapiens
ggttcagggatgggc

SEQ ID NO: 249883 - DNA, 15 bp, Homo sapiens
gggttcagggatggg

SEQ ID NO: 249884 - DNA, 15 bp, Homo sapiens
tgggttcagggatgg

SEQ ID NO: 249885 - DNA, 15 bp, Homo sapiens
atgggttcagggatg

SEQ ID NO: 249886 - DNA, 15 bp, Homo sapiens
gatgggttcagggat

SEQ ID NO: 249887 - DNA, 15 bp, Homo sapiens
tgatgggttcaggga

SEQ ID NO: 249888 - DNA, 15 bp, Homo sapiens
gtgatgggttcaggg

SEQ ID NO: 249889 - DNA, 15 bp, Homo sapiens
agtgatgggttcagg

SEQ ID NO: 249890 - DNA, 15 bp, Homo sapiens
cagtgatgggttcag

SEQ ID NO: 249891 - DNA, 15 bp, Homo sapiens
gcagtgatgggttca

SEQ ID NO: 249892 - DNA, 15 bp, Homo sapiens
agcagtgatgggttc

SEQ ID NO: 249893 - DNA, 15 bp, Homo sapiens
cagcagtgatgggtt

SEQ ID NO: 249894 - DNA, 15 bp, Homo sapiens
gcagcagtgatgggt

SEQ ID NO: 249895 - DNA, 15 bp, Homo sapiens
ggcagcagtgatggg

SEQ ID NO: 249896 - DNA, 15 bp, Homo sapiens
tggcagcagtgatgg

SEQ ID NO: 249897 - DNA, 15 bp, Homo sapiens
gtggcagcagtgatg

SEQ ID NO: 249898 - DNA, 15 bp, Homo sapiens
cgtggcagcagtgat

SEQ ID NO: 249899 - DNA, 15 bp, Homo sapiens
ccgtggcagcagtga

SEQ ID NO: 249900 - DNA, 15 bp, Homo sapiens
tccgtggcagcagtg

SEQ ID NO: 249901 - DNA, 15 bp, Homo sapiens
ttccgtggcagcagt

SEQ ID NO: 249902 - DNA, 15 bp, Homo sapiens
gttccgtggcagcag

SEQ ID NO: 249903 - DNA, 15 bp, Homo sapiens
tgttccgtggcagca

SEQ ID NO: 249904 - DNA, 15 bp, Homo sapiens
ctgttccgtggcagc

SEQ ID NO: 249905 - DNA, 15 bp, Homo sapiens
tctgttccgtggcag

SEQ ID NO: 249906 - DNA, 15 bp, Homo sapiens
ctctgttccgtggca

SEQ ID NO: 249907 - DNA, 15 bp, Homo sapiens
tctctgttccgtggc

SEQ ID NO: 249908 - DNA, 15 bp, Homo sapiens
ttctctgttccgtgg

SEQ ID NO: 249909 - DNA, 15 bp, Homo sapiens
gttctctgttccgtg

SEQ ID NO: 249910 - DNA, 15 bp, Homo sapiens
tgttctctgttccgt

SEQ ID NO: 249911 - DNA, 15 bp, Homo sapiens
atgttctctgttccg

SEQ ID NO: 249912 - DNA, 15 bp, Homo sapiens
aatgttctctgttcc

SEQ ID NO: 249913 - DNA, 15 bp, Homo sapiens
caatgttctctgttc

SEQ ID NO: 249914 - DNA, 15 bp, Homo sapiens
tcaatgttctctgtt

SEQ ID NO: 249915 - DNA, 15 bp, Homo sapiens
atcaatgttctctgt

SEQ ID NO: 249916 - DNA, 15 bp, Homo sapiens
tatcaatgttctctg

SEQ ID NO: 249917 - DNA, 15 bp, Homo sapiens
ttatcaatgttctct

SEQ ID NO: 249918 - DNA, 15 bp, Homo sapiens
tttatcaatgttctc

SEQ ID NO: 249919 - DNA, 15 bp, Homo sapiens
ctttatcaatgttct

SEQ ID NO: 249920 - DNA, 15 bp, Homo sapiens
actttatcaatgttc

SEQ ID NO: 249921 - DNA, 15 bp, Homo sapiens
aactttatcaatgtt

SEQ ID NO: 249922 - DNA, 15 bp, Homo sapiens
caactttatcaatgt

SEQ ID NO: 249923 - DNA, 15 bp, Homo sapiens
tcaactttatcaatg

SEQ ID NO: 249924 - DNA, 15 bp, Homo sapiens
atcaactttatcaat

SEQ ID NO: 249925 - DNA, 15 bp, Homo sapiens
aatcaactttatcaa

SEQ ID NO: 249926 - DNA, 15 bp, Homo sapiens
aaatcaactttatca

SEQ ID NO: 249927 - DNA, 15 bp, Homo sapiens
gaaatcaactttatc

SEQ ID NO: 249928 - DNA, 15 bp, Homo sapiens
ggaaatcaactttat

SEQ ID NO: 249929 - DNA, 15 bp, Homo sapiens
gggaaatcaacttta

SEQ ID NO: 249930 - DNA, 15 bp, Homo sapiens
agggaaatcaacttt

SEQ ID NO: 249931 - DNA, 15 bp, Homo sapiens
cagggaaatcaactt

SEQ ID NO: 249932 - DNA, 15 bp, Homo sapiens
tcagggaaatcaact

SEQ ID NO: 249933 - DNA, 15 bp, Homo sapiens
ttcagggaaatcaac

SEQ ID NO: 249934 - DNA, 15 bp, Homo sapiens
cttcagggaaatcaa

SEQ ID NO: 249935 - DNA, 15 bp, Homo sapiens
gcttcagggaaatca

SEQ ID NO: 249936 - DNA, 15 bp, Homo sapiens
ggcttcagggaaatc

SEQ ID NO: 249937 - DNA, 15 bp, Homo sapiens
tggcttcagggaaat

SEQ ID NO: 249938 - DNA, 15 bp, Homo sapiens
gtggcttcagggaaa

SEQ ID NO: 249939 - DNA, 15 bp, Homo sapiens
tgtggcttcagggaa

SEQ ID NO: 249940 - DNA, 15 bp, Homo sapiens
atgtggcttcaggga

SEQ ID NO: 249941 - DNA, 15 bp, Homo sapiens
catgtggcttcaggg

SEQ ID NO: 249942 - DNA, 15 bp, Homo sapiens
ccatgtggcttcagg

SEQ ID NO: 249943 - DNA, 15 bp, Homo sapiens
tccatgtggcttcag

SEQ ID NO: 249944 - DNA, 15 bp, Homo sapiens
atccatgtggcttca

SEQ ID NO: 249945 - DNA, 15 bp, Homo sapiens
gatccatgtggcttc

SEQ ID NO: 249946 - DNA, 15 bp, Homo sapiens
ggatccatgtggctt

SEQ ID NO: 249947 - DNA, 15 bp, Homo sapiens
gggatccatgtggct

SEQ ID NO: 249948 - DNA, 15 bp, Homo sapiens
ggggatccatgtggc

SEQ ID NO: 249949 - DNA, 15 bp, Homo sapiens
tggggatccatgtgg

SEQ ID NO: 249950 - DNA, 15 bp, Homo sapiens
ttggggatccatgtg

SEQ ID NO: 249951 - DNA, 15 bp, Homo sapiens
tttggggatccatgt

SEQ ID NO: 249952 - DNA, 15 bp, Homo sapiens
atttggggatccatg

SEQ ID NO: 249953 - DNA, 15 bp, Homo sapiens
catttggggatccat

SEQ ID NO: 249954 - DNA, 15 bp, Homo sapiens
ccatttggggatcca

SEQ ID NO: 249955 - DNA, 15 bp, Homo sapiens
tccatttggggatcc

SEQ ID NO: 249956 - DNA, 15 bp, Homo sapiens
ttccatttggggatc

SEQ ID NO: 249957 - DNA, 15 bp, Homo sapiens
attccatttggggat

SEQ ID NO: 249958 - DNA, 15 bp, Homo sapiens
aattccatttgggga

SEQ ID NO: 249959 - DNA, 15 bp, Homo sapiens
aaattccatttgggg

SEQ ID NO: 249960 - DNA, 15 bp, Homo sapiens
aaaattccatttggg

SEQ ID NO: 249961 - DNA, 15 bp, Homo sapiens
caaaattccatttgg

SEQ ID NO: 249962 - DNA, 15 bp, Homo sapiens
gcaaaattccatttg

SEQ ID NO: 249963 - DNA, 15 bp, Homo sapiens
tgcaaaattccattt

SEQ ID NO: 249964 - DNA, 15 bp, Homo sapiens
ctgcaaaattccatt

SEQ ID NO: 249965 - DNA, 15 bp, Homo sapiens
tctgcaaaattccat

SEQ ID NO: 249966 - DNA, 15 bp, Homo sapiens
gtctgcaaaattcca

SEQ ID NO: 249967 - DNA, 15 bp, Homo sapiens
agtctgcaaaattcc

SEQ ID NO: 249968 - DNA, 15 bp, Homo sapiens
cagtctgcaaaattc

SEQ ID NO: 249969 - DNA, 15 bp, Homo sapiens
tcagtctgcaaaatt

SEQ ID NO: 249970 - DNA, 15 bp, Homo sapiens
atcagtctgcaaaat

SEQ ID NO: 249971 - DNA, 15 bp, Homo sapiens
catcagtctgcaaaa

SEQ ID NO: 249972 - DNA, 15 bp, Homo sapiens
ccatcagtctgcaaa

SEQ ID NO: 249973 - DNA, 15 bp, Homo sapiens
tccatcagtctgcaa

SEQ ID NO: 249974 - DNA, 15 bp, Homo sapiens
ttccatcagtctgca

SEQ ID NO: 249975 - DNA, 15 bp, Homo sapiens
cttccatcagtctgc

SEQ ID NO: 249976 - DNA, 15 bp, Homo sapiens
ccttccatcagtctg

SEQ ID NO: 249977 - DNA, 15 bp, Homo sapiens
tccttccatcagtct

SEQ ID NO: 249978 - DNA, 15 bp, Homo sapiens
ctccttccatcagtc

SEQ ID NO: 249979 - DNA, 15 bp, Homo sapiens
cctccttccatcagt

SEQ ID NO: 249980 - DNA, 15 bp, Homo sapiens
tcctccttccatcag

SEQ ID NO: 249981 - DNA, 15 bp, Homo sapiens
ttcctccttccatca

SEQ ID NO: 249982 - DNA, 15 bp, Homo sapiens
cttcctccttccatc

SEQ ID NO: 249983 - DNA, 15 bp, Homo sapiens
acttcctccttccat

SEQ ID NO: 249984 - DNA, 15 bp, Homo sapiens
cacttcctccttcca

SEQ ID NO: 249985 - DNA, 15 bp, Homo sapiens
ccacttcctccttcc

SEQ ID NO: 249986 - DNA, 15 bp, Homo sapiens
tccacttcctccttc

SEQ ID NO: 249987 - DNA, 15 bp, Homo sapiens
gtccacttcctcctt

SEQ ID NO: 249988 - DNA, 15 bp, Homo sapiens
tgtccacttcctcct

SEQ ID NO: 249989 - DNA, 15 bp, Homo sapiens
ttgtccacttcctcc

SEQ ID NO: 249990 - DNA, 15 bp, Homo sapiens
gttgtccacttcctc

SEQ ID NO: 249991 - DNA, 15 bp, Homo sapiens
cgttgtccacttcct

SEQ ID NO: 249992 - DNA, 15 bp, Homo sapiens
ccgttgtccacttcc

SEQ ID NO: 249993 - DNA, 15 bp, Homo sapiens
tccgttgtccacttc

SEQ ID NO: 249994 - DNA, 15 bp, Homo sapiens
atccgttgtccactt

SEQ ID NO: 249995 - DNA, 15 bp, Homo sapiens
catccgttgtccact

SEQ ID NO: 249996 - DNA, 15 bp, Homo sapiens
gcatccgttgtccac

SEQ ID NO: 249997 - DNA, 15 bp, Homo sapiens
agcatccgttgtcca

SEQ ID NO: 249998 - DNA, 15 bp, Homo sapiens
tagcatccgttgtcc

SEQ ID NO: 249999 - DNA, 15 bp, Homo sapiens
atagcatccgttgtc

SEQ ID NO: 250000 - DNA, 15 bp, Homo sapiens
tatagcatccgttgt

SEQ ID NO: 250001 - DNA, 15 bp, Homo sapiens
atatagcatccgttg

SEQ ID NO: 250002 - DNA, 15 bp, Homo sapiens
aatatagcatccgtt

SEQ ID NO: 250003 - DNA, 15 bp, Homo sapiens
taatatagcatccgt

SEQ ID NO: 250004 - DNA, 15 bp, Homo sapiens
ctaatatagcatccg

SEQ ID NO: 250005 - DNA, 15 bp, Homo sapiens
actaatatagcatcc

SEQ ID NO: 250006 - DNA, 15 bp, Homo sapiens
gactaatatagcatc

SEQ ID NO: 250007 - DNA, 15 bp, Homo sapiens
ggactaatatagcat

SEQ ID NO: 250008 - DNA, 15 bp, Homo sapiens
cggactaatatagca

SEQ ID NO: 250009 - DNA, 15 bp, Homo sapiens
acggactaatatagc

SEQ ID NO: 250010 - DNA, 15 bp, Homo sapiens
aacggactaatatag

SEQ ID NO: 250011 - DNA, 15 bp, Homo sapiens
aaacggactaatata

SEQ ID NO: 250012 - DNA, 15 bp, Homo sapiens
aaaacggactaatat

SEQ ID NO: 250013 - DNA, 15 bp, Homo sapiens
gaaaacggactaata

SEQ ID NO: 250014 - DNA, 15 bp, Homo sapiens
tgaaaacggactaat

SEQ ID NO: 250015 - DNA, 15 bp, Homo sapiens
gtgaaaacggactaa

SEQ ID NO: 250016 - DNA, 15 bp, Homo sapiens
tgtgaaaacggacta

SEQ ID NO: 250017 - DNA, 15 bp, Homo sapiens
gtgtgaaaacggact

SEQ ID NO: 250018 - DNA, 15 bp, Homo sapiens
agtgtgaaaacggac

SEQ ID NO: 250019 - DNA, 15 bp, Homo sapiens
cagtgtgaaaacgga

SEQ ID NO: 250020 - DNA, 15 bp, Homo sapiens
gcagtgtgaaaacgg

SEQ ID NO: 250021 - DNA, 15 bp, Homo sapiens
agcagtgtgaaaacg

SEQ ID NO: 250022 - DNA, 15 bp, Homo sapiens
cagcagtgtgaaaac

SEQ ID NO: 250023 - DNA, 15 bp, Homo sapiens
tcagcagtgtgaaaa

SEQ ID NO: 250024 - DNA, 15 bp, Homo sapiens
atcagcagtgtgaaa

SEQ ID NO: 250025 - DNA, 15 bp, Homo sapiens
tatcagcagtgtgaa

SEQ ID NO: 250026 - DNA, 15 bp, Homo sapiens
ttatcagcagtgtga

SEQ ID NO: 250027 - DNA, 15 bp, Homo sapiens
tttatcagcagtgtg

SEQ ID NO: 250028 - DNA, 15 bp, Homo sapiens
ctttatcagcagtgt

SEQ ID NO: 250029 - DNA, 15 bp, Homo sapiens
tctttatcagcagtg

SEQ ID NO: 250030 - DNA, 15 bp, Homo sapiens
gtctttatcagcagt

SEQ ID NO: 250031 - DNA, 15 bp, Homo sapiens
tgtctttatcagcag

SEQ ID NO: 250032 - DNA, 15 bp, Homo sapiens
atgtctttatcagca

SEQ ID NO: 250033 - DNA, 15 bp, Homo sapiens
tatgtctttatcagc

SEQ ID NO: 250034 - DNA, 15 bp, Homo sapiens
gtatgtctttatcag

SEQ ID NO: 250035 - DNA, 15 bp, Homo sapiens
ggtatgtctttatca

SEQ ID NO: 250036 - DNA, 15 bp, Homo sapiens
aggtatgtctttatc

SEQ ID NO: 250037 - DNA, 15 bp, Homo sapiens
acagtctcaggtatg

SEQ ID NO: 250038 - DNA, 15 bp, Homo sapiens
cacagtctcaggtat

SEQ ID NO: 250039 - DNA, 15 bp, Homo sapiens
tcacagtctcaggta

SEQ ID NO: 250040 - DNA, 15 bp, Homo sapiens
ttcacagtctcaggt

SEQ ID NO: 250041 - DNA, 15 bp, Homo sapiens
cttcacagtctcagg

SEQ ID NO: 250042 - DNA, 15 bp, Homo sapiens
tcttcacagtctcag

SEQ ID NO: 250043 - DNA, 15 bp, Homo sapiens
ttcttcacagtctca

SEQ ID NO: 250044 - DNA, 15 bp, Homo sapiens
tttcttcacagtctc

SEQ ID NO: 250045 - DNA, 15 bp, Homo sapiens
ttttcttcacagtct

SEQ ID NO: 250046 - DNA, 15 bp, Homo sapiens
tttttcttcacagtc

SEQ ID NO: 250047 - DNA, 15 bp, Homo sapiens
ctttttcttcacagt

SEQ ID NO: 250048 - DNA, 15 bp, Homo sapiens
tctttttcttcacag

SEQ ID NO: 250049 - DNA, 15 bp, Homo sapiens
ctctttttcttcaca

SEQ ID NO: 250050 - DNA, 15 bp, Homo sapiens
cctctttttcttcac

SEQ ID NO: 250051 - DNA, 15 bp, Homo sapiens
acctctttttcttca

SEQ ID NO: 250052 - DNA, 15 bp, Homo sapiens
aacctctttttcttc

SEQ ID NO: 250053 - DNA, 15 bp, Homo sapiens
taacctctttttctt

SEQ ID NO: 250054 - DNA, 15 bp, Homo sapiens
ttaacctctttttct

SEQ ID NO: 250055 - DNA, 15 bp, Homo sapiens
tttaacctctttttc

SEQ ID NO: 250056 - DNA, 15 bp, Homo sapiens
atttaacctcttttt

SEQ ID NO: 250057 - DNA, 15 bp, Homo sapiens
aatttaacctctttt

SEQ ID NO: 250058 - DNA, 15 bp, Homo sapiens
caatttaacctcttt

SEQ ID NO: 250059 - DNA, 15 bp, Homo sapiens
ccaatttaacctctt

SEQ ID NO: 250060 - DNA, 15 bp, Homo sapiens
tccaatttaacctct

SEQ ID NO: 250061 - DNA, 15 bp, Homo sapiens
gtccaatttaacctc

SEQ ID NO: 250062 - DNA, 15 bp, Homo sapiens
agtccaatttaacct

SEQ ID NO: 250063 - DNA, 15 bp, Homo sapiens
aagtccaatttaacc

SEQ ID NO: 250064 - DNA, 15 bp, Homo sapiens
taagtccaatttaac

SEQ ID NO: 250065 - DNA, 15 bp, Homo sapiens
gtaagtccaatttaa

SEQ ID NO: 250066 - DNA, 15 bp, Homo sapiens
tgtaagtccaattta

SEQ ID NO: 250067 - DNA, 15 bp, Homo sapiens
ctgtaagtccaattt

SEQ ID NO: 250068 - DNA, 15 bp, Homo sapiens
actgtaagtccaatt

SEQ ID NO: 250069 - DNA, 15 bp, Homo sapiens
aactgtaagtccaat

SEQ ID NO: 250070 - DNA, 15 bp, Homo sapiens
gaactgtaagtccaa

SEQ ID NO: 250071 - DNA, 15 bp, Homo sapiens
ggaactgtaagtcca

SEQ ID NO: 250072 - DNA, 15 bp, Homo sapiens
tggaactgtaagtcc

SEQ ID NO: 250073 - DNA, 15 bp, Homo sapiens
gtggaactgtaagtc

SEQ ID NO: 250074 - DNA, 15 bp, Homo sapiens
tgtggaactgtaagt

SEQ ID NO: 250075 - DNA, 15 bp, Homo sapiens
atgtggaactgtaag

SEQ ID NO: 250076 - DNA, 15 bp, Homo sapiens
catgtggaactgtaa

SEQ ID NO: 250077 - DNA, 15 bp, Homo sapiens
ccatgtggaactgta

SEQ ID NO: 250078 - DNA, 15 bp, Homo sapiens
ctgaggcctccccag

SEQ ID NO: 250079 - DNA, 15 bp, Homo sapiens
tctgaggcctcccca

SEQ ID NO: 250080 - DNA, 15 bp, Homo sapiens
ttctgaggcctcccc

SEQ ID NO: 250081 - DNA, 15 bp, Homo sapiens
attctgaggcctccc

SEQ ID NO: 250082 - DNA, 15 bp, Homo sapiens
gattctgaggcctcc

SEQ ID NO: 250083 - DNA, 15 bp, Homo sapiens
tgattctgaggcctc

SEQ ID NO: 250084 - DNA, 15 bp, Homo sapiens
gtgattctgaggcct

SEQ ID NO: 250085 - DNA, 15 bp, Homo sapiens
tgtgattctgaggcc

SEQ ID NO: 250086 - DNA, 15 bp, Homo sapiens
ctgtgattctgaggc

SEQ ID NO: 250087 - DNA, 15 bp, Homo sapiens
actgtgattctgagg

SEQ ID NO: 250088 - DNA, 15 bp, Homo sapiens
cactgtgattctgag

SEQ ID NO: 250089 - DNA, 15 bp, Homo sapiens
ccactgtgattctga

SEQ ID NO: 250090 - DNA, 15 bp, Homo sapiens
cccactgtgattctg

SEQ ID NO: 250091 - DNA, 15 bp, Homo sapiens
tcccactgtgattct

SEQ ID NO: 250092 - DNA, 15 bp, Homo sapiens
ctcccactgtgattc

SEQ ID NO: 250093 - DNA, 15 bp, Homo sapiens
cctcccactgtgatt

SEQ ID NO: 250094 - DNA, 15 bp, Homo sapiens
acctcccactgtgat

SEQ ID NO: 250095 - DNA, 15 bp, Homo sapiens
cacctcccactgtga

SEQ ID NO: 250096 - DNA, 15 bp, Homo sapiens
tcacctcccactgtg

SEQ ID NO: 250097 - DNA, 15 bp, Homo sapiens
ttcacctcccactgt

SEQ ID NO: 250098 - DNA, 15 bp, Homo sapiens
tttcacctcccactg

SEQ ID NO: 250099 - DNA, 15 bp, Homo sapiens
ctttcacctcccact

SEQ ID NO: 250100 - DNA, 15 bp, Homo sapiens
cctttcacctcccac

SEQ ID NO: 250101 - DNA, 15 bp, Homo sapiens
gcctttcacctccca

SEQ ID NO: 250102 - DNA, 15 bp, Homo sapiens
tgcctttcacctccc

SEQ ID NO: 250103 - DNA, 15 bp, Homo sapiens
gtgcctttcacctcc

SEQ ID NO: 250104 - DNA, 15 bp, Homo sapiens
agtgcctttcacctc

SEQ ID NO: 250105 - DNA, 15 bp, Homo sapiens
aagtgcctttcacct

SEQ ID NO: 250106 - DNA, 15 bp, Homo sapiens
gaagtgcctttcacc

SEQ ID NO: 250107 - DNA, 15 bp, Homo sapiens
agaagtgcctttcac

SEQ ID NO: 250108 - DNA, 15 bp, Homo sapiens
aagaagtgcctttca

SEQ ID NO: 250109 - DNA, 15 bp, Homo sapiens
aaagaagtgcctttc

SEQ ID NO: 250110 - DNA, 15 bp, Homo sapiens
taaagaagtgccttt

SEQ ID NO: 250111 - DNA, 15 bp, Homo sapiens
gtaaagaagtgcctt

SEQ ID NO: 250112 - DNA, 15 bp, Homo sapiens
ggtaaagaagtgcct

SEQ ID NO: 250113 - DNA, 15 bp, Homo sapiens
aggtaaagaagtgcc

SEQ ID NO: 250114 - DNA, 15 bp, Homo sapiens
caggtaaagaagtgc

SEQ ID NO: 250115 - DNA, 15 bp, Homo sapiens
tcaggtaaagaagtg

SEQ ID NO: 250116 - DNA, 15 bp, Homo sapiens
gtcaggtaaagaagt

SEQ ID NO: 250117 - DNA, 15 bp, Homo sapiens
tgtcaggtaaagaag

SEQ ID NO: 250118 - DNA, 15 bp, Homo sapiens
ctgtcaggtaaagaa

SEQ ID NO: 250119 - DNA, 15 bp, Homo sapiens
gctgtcaggtaaaga

SEQ ID NO: 250120 - DNA, 15 bp, Homo sapiens
tgctgtcaggtaaag

SEQ ID NO: 250121 - DNA, 15 bp, Homo sapiens
ctgctgtcaggtaaa

SEQ ID NO: 250122 - DNA, 15 bp, Homo sapiens
gctgctgtcaggtaa

SEQ ID NO: 250123 - DNA, 15 bp, Homo sapiens
tgctgctgtcaggta

SEQ ID NO: 250124 - DNA, 15 bp, Homo sapiens
ttgctgctgtcaggt

SEQ ID NO: 250125 - DNA, 15 bp, Homo sapiens
cttgctgctgtcagg

SEQ ID NO: 250126 - DNA, 15 bp, Homo sapiens
tcttgctgctgtcag

SEQ ID NO: 250127 - DNA, 15 bp, Homo sapiens
atcttgctgctgtca

SEQ ID NO: 250128 - DNA, 15 bp, Homo sapiens
tatcttgctgctgtc

SEQ ID NO: 250129 - DNA, 15 bp, Homo sapiens
ttatcttgctgctgt

SEQ ID NO: 250130 - DNA, 15 bp, Homo sapiens
tttatcttgctgctg

SEQ ID NO: 250131 - DNA, 15 bp, Homo sapiens
ttttatcttgctgct

SEQ ID NO: 250132 - DNA, 15 bp, Homo sapiens
tttttatcttgctgc

SEQ ID NO: 250133 - DNA, 15 bp, Homo sapiens
atttttatcttgctg

SEQ ID NO: 250134 - DNA, 15 bp, Homo sapiens
catttttatcttgct

SEQ ID NO: 250135 - DNA, 15 bp, Homo sapiens
tcatttttatcttgc

SEQ ID NO: 250136 - DNA, 15 bp, Homo sapiens
ctcatttttatcttg

SEQ ID NO: 250137 - DNA, 15 bp, Homo sapiens
cctcatttttatctt

SEQ ID NO: 250138 - DNA, 15 bp, Homo sapiens
tcctcatttttatct

SEQ ID NO: 250139 - DNA, 15 bp, Homo sapiens
ctcctcatttttatc

SEQ ID NO: 250140 - DNA, 15 bp, Homo sapiens
cctcctcatttttat

SEQ ID NO: 250141 - DNA, 15 bp, Homo sapiens
tcctcctcattttta

SEQ ID NO: 250142 - DNA, 15 bp, Homo sapiens
atcctcctcattttt

SEQ ID NO: 250143 - DNA, 15 bp, Homo sapiens
catcctcctcatttt

SEQ ID NO: 250144 - DNA, 15 bp, Homo sapiens
gcatcctcctcattt

SEQ ID NO: 250145 - DNA, 15 bp, Homo sapiens
tgcatcctcctcatt

SEQ ID NO: 250146 - DNA, 15 bp, Homo sapiens
ttgcatcctcctcat

SEQ ID NO: 250147 - DNA, 15 bp, Homo sapiens
tttgcatcctcctca

SEQ ID NO: 250148 - DNA, 15 bp, Homo sapiens
ttttgcatcctcctc

SEQ ID NO: 250149 - DNA, 15 bp, Homo sapiens
cttttgcatcctcct

SEQ ID NO: 250150 - DNA, 15 bp, Homo sapiens
acttttgcatcctcc

SEQ ID NO: 250151 - DNA, 15 bp, Homo sapiens
cacttttgcatcctc

SEQ ID NO: 250152 - DNA, 15 bp, Homo sapiens
ccacttttgcatcct

SEQ ID NO: 250153 - DNA, 15 bp, Homo sapiens
tccacttttgcatcc

SEQ ID NO: 250154 - DNA, 15 bp, Homo sapiens
ttccacttttgcatc

SEQ ID NO: 250155 - DNA, 15 bp, Homo sapiens
tttccacttttgcat

SEQ ID NO: 250156 - DNA, 15 bp, Homo sapiens
gtttccacttttgca

SEQ ID NO: 250157 - DNA, 15 bp, Homo sapiens
ggtttccacttttgc

SEQ ID NO: 250158 - DNA, 15 bp, Homo sapiens
gggtttccacttttg

SEQ ID NO: 250159 - DNA, 15 bp, Homo sapiens
ggggtttccactttt

SEQ ID NO: 250160 - DNA, 15 bp, Homo sapiens
aggggtttccacttt

SEQ ID NO: 250161 - DNA, 15 bp, Homo sapiens
caggggtttccactt

SEQ ID NO: 250162 - DNA, 15 bp, Homo sapiens
tcaggggtttccact

SEQ ID NO: 250163 - DNA, 15 bp, Homo sapiens
atcaggggtttccac

SEQ ID NO: 250164 - DNA, 15 bp, Homo sapiens
tatcaggggtttcca

SEQ ID NO: 250165 - DNA, 15 bp, Homo sapiens
ttatcaggggtttcc

SEQ ID NO: 250166 - DNA, 15 bp, Homo sapiens
tttatcaggggtttc

SEQ ID NO: 250167 - DNA, 15 bp, Homo sapiens
ttttatcaggggttt

SEQ ID NO: 250168 - DNA, 15 bp, Homo sapiens
gttttatcaggggtt

SEQ ID NO: 250169 - DNA, 15 bp, Homo sapiens
ggttttatcaggggt

SEQ ID NO: 250170 - DNA, 15 bp, Homo sapiens
tggttttatcagggg

SEQ ID NO: 250171 - DNA, 15 bp, Homo sapiens
atggttttatcaggg

SEQ ID NO: 250172 - DNA, 15 bp, Homo sapiens
gatggttttatcagg

SEQ ID NO: 250173 - DNA, 15 bp, Homo sapiens
tgatggttttatcag

SEQ ID NO: 250174 - DNA, 15 bp, Homo sapiens
ctgatggttttatca

SEQ ID NO: 250175 - DNA, 15 bp, Homo sapiens
tctgatggttttatc

SEQ ID NO: 250176 - DNA, 15 bp, Homo sapiens
atctcatgagatctg

SEQ ID NO: 250177 - DNA, 15 bp, Homo sapiens
aatctcatgagatct

SEQ ID NO: 250178 - DNA, 15 bp, Homo sapiens
aaatctcatgagatc

SEQ ID NO: 250179 - DNA, 15 bp, Homo sapiens
taaatctcatgagat

SEQ ID NO: 250180 - DNA, 15 bp, Homo sapiens
ataaatctcatgaga

SEQ ID NO: 250181 - DNA, 15 bp, Homo sapiens
aataaatctcatgag

SEQ ID NO: 250182 - DNA, 15 bp, Homo sapiens
gaataaatctcatga

SEQ ID NO: 250183 - DNA, 15 bp, Homo sapiens
cgaataaatctcatg

SEQ ID NO: 250184 - DNA, 15 bp, Homo sapiens
gcgaataaatctcat

SEQ ID NO: 250185 - DNA, 15 bp, Homo sapiens
agcgaataaatctca

SEQ ID NO: 250186 - DNA, 15 bp, Homo sapiens
tagcgaataaatctc

SEQ ID NO: 250187 - DNA, 15 bp, Homo sapiens
gtagcgaataaatct

SEQ ID NO: 250188 - DNA, 15 bp, Homo sapiens
ggtagcgaataaatc

SEQ ID NO: 250189 - DNA, 15 bp, Homo sapiens
tggtagcgaataaat

SEQ ID NO: 250190 - DNA, 15 bp, Homo sapiens
gtggtagcgaataaa

SEQ ID NO: 250191 - DNA, 15 bp, Homo sapiens
cgtggtagcgaataa

SEQ ID NO: 250192 - DNA, 15 bp, Homo sapiens
tcgtggtagcgaata

SEQ ID NO: 250193 - DNA, 15 bp, Homo sapiens
ctcgtggtagcgaat

SEQ ID NO: 250194 - DNA, 15 bp, Homo sapiens
tctcgtggtagcgaa

SEQ ID NO: 250195 - DNA, 15 bp, Homo sapiens
ttctcgtggtagcga

SEQ ID NO: 250196 - DNA, 15 bp, Homo sapiens
gttctcgtggtagcg

SEQ ID NO: 250197 - DNA, 15 bp, Homo sapiens
tgttctcgtggtagc

SEQ ID NO: 250198 - DNA, 15 bp, Homo sapiens
ctgttctcgtggtag

SEQ ID NO: 250199 - DNA, 15 bp, Homo sapiens
actgttctcgtggta

SEQ ID NO: 250200 - DNA, 15 bp, Homo sapiens
tactgttctcgtggt

SEQ ID NO: 250201 - DNA, 15 bp, Homo sapiens
atactgttctcgtgg

SEQ ID NO: 250202 - DNA, 15 bp, Homo sapiens
catactgttctcgtg

SEQ ID NO: 250203 - DNA, 15 bp, Homo sapiens
ccatactgttctcgt

SEQ ID NO: 250204 - DNA, 15 bp, Homo sapiens
cccatactgttctcg

SEQ ID NO: 250205 - DNA, 15 bp, Homo sapiens
ccccatactgttctc

SEQ ID NO: 250206 - DNA, 15 bp, Homo sapiens
cccccatactgttct

SEQ ID NO: 250207 - DNA, 15 bp, Homo sapiens
tcccccatactgttc

SEQ ID NO: 250208 - DNA, 15 bp, Homo sapiens
ttcccccatactgtt

SEQ ID NO: 250209 - DNA, 15 bp, Homo sapiens
tttcccccatactgt

SEQ ID NO: 250210 - DNA, 15 bp, Homo sapiens
gtttcccccatactg

SEQ ID NO: 250211 - DNA, 15 bp, Homo sapiens
ggtttcccccatact

SEQ ID NO: 250212 - DNA, 15 bp, Homo sapiens
tggtttcccccatac

SEQ ID NO: 250213 - DNA, 15 bp, Homo sapiens
gtggtttcccccata

SEQ ID NO: 250214 - DNA, 15 bp, Homo sapiens
ggtggtttcccccat

SEQ ID NO: 250215 - DNA, 15 bp, Homo sapiens
gggtggtttccccca

SEQ ID NO: 250216 - DNA, 15 bp, Homo sapiens
ggggtggtttccccc

SEQ ID NO: 250217 - DNA, 15 bp, Homo sapiens
cggggtggtttcccc

SEQ ID NO: 250218 - DNA, 15 bp, Homo sapiens
acggggtggtttccc

SEQ ID NO: 250219 - DNA, 15 bp, Homo sapiens
cacggggtggtttcc

SEQ ID NO: 250220 - DNA, 15 bp, Homo sapiens
tcacggggtggtttc

SEQ ID NO: 250221 - DNA, 15 bp, Homo sapiens
atcacggggtggttt

SEQ ID NO: 250222 - DNA, 15 bp, Homo sapiens
aatcacggggtggtt

SEQ ID NO: 250223 - DNA, 15 bp, Homo sapiens
gaatcacggggtggt

SEQ ID NO: 250224 - DNA, 15 bp, Homo sapiens
tgaatcacggggtgg

SEQ ID NO: 250225 - DNA, 15 bp, Homo sapiens
ctgaatcacggggtg

SEQ ID NO: 250226 - DNA, 15 bp, Homo sapiens
tctgaatcacggggt

SEQ ID NO: 250227 - DNA, 15 bp, Homo sapiens
atctgaatcacgggg

SEQ ID NO: 250228 - DNA, 15 bp, Homo sapiens
aatctgaatcacggg

SEQ ID NO: 250229 - DNA, 15 bp, Homo sapiens
taatctgaatcacgg

SEQ ID NO: 250230 - DNA, 15 bp, Homo sapiens
ataatctgaatcacg

SEQ ID NO: 250231 - DNA, 15 bp, Homo sapiens
gataatctgaatcac

SEQ ID NO: 250232 - DNA, 15 bp, Homo sapiens
agataatctgaatca

SEQ ID NO: 250233 - DNA, 15 bp, Homo sapiens
gagataatctgaatc

SEQ ID NO: 250234 - DNA, 15 bp, Homo sapiens
ggagataatctgaat

SEQ ID NO: 250235 - DNA, 15 bp, Homo sapiens
gggagataatctgaa

SEQ ID NO: 250236 - DNA, 15 bp, Homo sapiens
tgggagataatctga

SEQ ID NO: 250237 - DNA, 15 bp, Homo sapiens
gtgggagataatctg

SEQ ID NO: 250238 - DNA, 15 bp, Homo sapiens
cgtgggagataatct

SEQ ID NO: 250239 - DNA, 15 bp, Homo sapiens
ccgtgggagataatc

SEQ ID NO: 250240 - DNA, 15 bp, Homo sapiens
tccgtgggagataat

SEQ ID NO: 250241 - DNA, 15 bp, Homo sapiens
ttccgtgggagataa

SEQ ID NO: 250242 - DNA, 15 bp, Homo sapiens
attccgtgggagata

SEQ ID NO: 250243 - DNA, 15 bp, Homo sapiens
gattccgtgggagat

SEQ ID NO: 250244 - DNA, 15 bp, Homo sapiens
ggattccgtgggaga

SEQ ID NO: 250245 - DNA, 15 bp, Homo sapiens
gggattccgtgggag

SEQ ID NO: 250246 - DNA, 15 bp, Homo sapiens
agggattccgtggga

SEQ ID NO: 250247 - DNA, 15 bp, Homo sapiens
gagggattccgtggg

SEQ ID NO: 250248 - DNA, 15 bp, Homo sapiens
ggagggattccgtgg

SEQ ID NO: 250249 - DNA, 15 bp, Homo sapiens
gggagggattccgtg

SEQ ID NO: 250250 - DNA, 15 bp, Homo sapiens
tgggagggattccgt

SEQ ID NO: 250251 - DNA, 15 bp, Homo sapiens
gtgggagggattccg

SEQ ID NO: 250252 - DNA, 15 bp, Homo sapiens
tgtgggagggattcc

SEQ ID NO: 250253 - DNA, 15 bp, Homo sapiens
ttgtgggagggattc

SEQ ID NO: 250254 - DNA, 15 bp, Homo sapiens
attgtgggagggatt

SEQ ID NO: 250255 - DNA, 15 bp, Homo sapiens
tattgtgggagggat

SEQ ID NO: 250256 - DNA, 15 bp, Homo sapiens
gtattgtgggaggga

SEQ ID NO: 250257 - DNA, 15 bp, Homo sapiens
cgtattgtgggaggg

SEQ ID NO: 250258 - DNA, 15 bp, Homo sapiens
acgtattgtgggagg

SEQ ID NO: 250259 - DNA, 15 bp, Homo sapiens
cacgtattgtgggag

SEQ ID NO: 250260 - DNA, 15 bp, Homo sapiens
ataattcccacgtat

SEQ ID NO: 250261 - DNA, 15 bp, Homo sapiens
cataattcccacgta

SEQ ID NO: 250262 - DNA, 15 bp, Homo sapiens
ccataattcccacgt

SEQ ID NO: 250263 - DNA, 15 bp, Homo sapiens
cccataattcccacg

SEQ ID NO: 250264 - DNA, 15 bp, Homo sapiens
tcccataattcccac

SEQ ID NO: 250265 - DNA, 15 bp, Homo sapiens
ttcccataattccca

SEQ ID NO: 250266 - DNA, 15 bp, Homo sapiens
attcccataattccc

SEQ ID NO: 250267 - DNA, 15 bp, Homo sapiens
tattcccataattcc

SEQ ID NO: 250268 - DNA, 15 bp, Homo sapiens
gtattcccataattc

SEQ ID NO: 250269 - DNA, 15 bp, Homo sapiens
tgtattcccataatt

SEQ ID NO: 250270 - DNA, 15 bp, Homo sapiens
ttgtattcccataat

SEQ ID NO: 250271 - DNA, 15 bp, Homo sapiens
attgtattcccataa

SEQ ID NO: 250272 - DNA, 15 bp, Homo sapiens
aattgtattcccata

SEQ ID NO: 250273 - DNA, 15 bp, Homo sapiens
gaattgtattcccat

SEQ ID NO: 250274 - DNA, 15 bp, Homo sapiens
tgaattgtattccca

SEQ ID NO: 250275 - DNA, 15 bp, Homo sapiens
ttgaattgtattccc

SEQ ID NO: 250276 - DNA, 15 bp, Homo sapiens
cttgaattgtattcc

SEQ ID NO: 250277 - DNA, 15 bp, Homo sapiens
tcttgaattgtattc

SEQ ID NO: 250278 - DNA, 15 bp, Homo sapiens
atcttgaattgtatt

SEQ ID NO: 250279 - DNA, 15 bp, Homo sapiens
catcttgaattgtat

SEQ ID NO: 250280 - DNA, 15 bp, Homo sapiens
tcatcttgaattgta

SEQ ID NO: 250281 - DNA, 15 bp, Homo sapiens
ctcatcttgaattgt

SEQ ID NO: 250282 - DNA, 15 bp, Homo sapiens
tctcatcttgaattg

SEQ ID NO: 250283 - DNA, 15 bp, Homo sapiens
atctcatcttgaatt

SEQ ID NO: 250284 - DNA, 15 bp, Homo sapiens
aatctcatcttgaat

SEQ ID NO: 250285 - DNA, 15 bp, Homo sapiens
aaatctcatcttgaa

SEQ ID NO: 250286 - DNA, 15 bp, Homo sapiens
caaatctcatcttga

SEQ ID NO: 250287 - DNA, 15 bp, Homo sapiens
ccaaatctcatcttg

SEQ ID NO: 250288 - DNA, 15 bp, Homo sapiens
cccaaatctcatctt

SEQ ID NO: 250289 - DNA, 15 bp, Homo sapiens
acccaaatctcatct

SEQ ID NO: 250290 - DNA, 15 bp, Homo sapiens
cacccaaatctcatc

SEQ ID NO: 250291 - DNA, 15 bp, Homo sapiens
ccacccaaatctcat

SEQ ID NO: 250292 - DNA, 15 bp, Homo sapiens
cccacccaaatctca

SEQ ID NO: 250293 - DNA, 15 bp, Homo sapiens
tctgtgtccccaccc

SEQ ID NO: 250294 - DNA, 15 bp, Homo sapiens
ctctgtgtccccacc

SEQ ID NO: 250295 - DNA, 15 bp, Homo sapiens
tatggtttggctctg

SEQ ID NO: 250296 - DNA, 15 bp, Homo sapiens
atatggtttggctct

SEQ ID NO: 250297 - DNA, 15 bp, Homo sapiens
gatatggtttggctc

SEQ ID NO: 250298 - DNA, 15 bp, Homo sapiens
tgatatggtttggct

SEQ ID NO: 250299 - DNA, 15 bp, Homo sapiens
ttgatatggtttggc

SEQ ID NO: 250300 - DNA, 15 bp, Homo sapiens
tttgatatggtttgg

SEQ ID NO: 250301 - DNA, 15 bp, Homo sapiens
atttgatatggtttg

SEQ ID NO: 250302 - DNA, 15 bp, Homo sapiens
catttgatatggttt

SEQ ID NO: 250303 - DNA, 15 bp, Homo sapiens
gcatttgatatggtt

SEQ ID NO: 250304 - DNA, 15 bp, Homo sapiens
agcatttgatatggt

SEQ ID NO: 250305 - DNA, 15 bp, Homo sapiens
gagcatttgatatgg

SEQ ID NO: 250306 - DNA, 15 bp, Homo sapiens
tgagcatttgatatg

SEQ ID NO: 250307 - DNA, 15 bp, Homo sapiens
ctgagcatttgatat

SEQ ID NO: 250308 - DNA, 15 bp, Homo sapiens
tctgagcatttgata

SEQ ID NO: 250309 - DNA, 15 bp, Homo sapiens
ttctgagcatttgat

SEQ ID NO: 250310 - DNA, 15 bp, Homo sapiens
cttctgagcatttga

SEQ ID NO: 250311 - DNA, 15 bp, Homo sapiens
ccttctgagcatttg

SEQ ID NO: 250312 - DNA, 15 bp, Homo sapiens
gccttctgagcattt

SEQ ID NO: 250313 - DNA, 15 bp, Homo sapiens
tgccttctgagcatt

SEQ ID NO: 250314 - DNA, 15 bp, Homo sapiens
atgccttctgagcat

SEQ ID NO: 250315 - DNA, 15 bp, Homo sapiens
tatgccttctgagca

SEQ ID NO: 250316 - DNA, 15 bp, Homo sapiens
atatgccttctgagc

SEQ ID NO: 250317 - DNA, 15 bp, Homo sapiens
catatgccttctgag

SEQ ID NO: 250318 - DNA, 15 bp, Homo sapiens
acatatgccttctga

SEQ ID NO: 250319 - DNA, 15 bp, Homo sapiens
aacatatgccttctg

SEQ ID NO: 250320 - DNA, 15 bp, Homo sapiens
aaacatatgccttct

SEQ ID NO: 250321 - DNA, 15 bp, Homo sapiens
aaaacatatgccttc

SEQ ID NO: 250322 - DNA, 15 bp, Homo sapiens
caaaacatatgcctt

SEQ ID NO: 250323 - DNA, 15 bp, Homo sapiens
ccaaaacatatgcct

SEQ ID NO: 250324 - DNA, 15 bp, Homo sapiens
accaaaacatatgcc

SEQ ID NO: 250325 - DNA, 15 bp, Homo sapiens
taccaaaacatatgc

SEQ ID NO: 250326 - DNA, 15 bp, Homo sapiens
ttaccaaaacatatg

SEQ ID NO: 250327 - DNA, 15 bp, Homo sapiens
cttaccaaaacatat

SEQ ID NO: 250328 - DNA, 15 bp, Homo sapiens
ccttaccaaaacata

SEQ ID NO: 250329 - DNA, 15 bp, Homo sapiens
gccttaccaaaacat

SEQ ID NO: 250330 - DNA, 15 bp, Homo sapiens
tgccttaccaaaaca

SEQ ID NO: 250331 - DNA, 15 bp, Homo sapiens
atgccttaccaaaac

SEQ ID NO: 250332 - DNA, 15 bp, Homo sapiens
gatgccttaccaaaa

SEQ ID NO: 250333 - DNA, 15 bp, Homo sapiens
tgatgccttaccaaa

SEQ ID NO: 250334 - DNA, 15 bp, Homo sapiens
ttgatgccttaccaa

SEQ ID NO: 250335 - DNA, 15 bp, Homo sapiens
tttgatgccttacca

SEQ ID NO: 250336 - DNA, 15 bp, Homo sapiens
ctttgatgccttacc

SEQ ID NO: 250337 - DNA, 15 bp, Homo sapiens
tctttgatgccttac

SEQ ID NO: 250338 - DNA, 15 bp, Homo sapiens
ttctttgatgcctta

SEQ ID NO: 250339 - DNA, 15 bp, Homo sapiens
tttctttgatgcctt

SEQ ID NO: 250340 - DNA, 15 bp, Homo sapiens
atttctttgatgcct

SEQ ID NO: 250341 - DNA, 15 bp, Homo sapiens
catttctttgatgcc

SEQ ID NO: 250342 - DNA, 15 bp, Homo sapiens
acatttctttgatgc

SEQ ID NO: 250343 - DNA, 15 bp, Homo sapiens
aacatttctttgatg

SEQ ID NO: 250344 - DNA, 15 bp, Homo sapiens
aaacatttctttgat

SEQ ID NO: 250345 - DNA, 15 bp, Homo sapiens
taaacatttctttga

SEQ ID NO: 250346 - DNA, 15 bp, Homo sapiens
gtaaacatttctttg

SEQ ID NO: 250347 - DNA, 15 bp, Homo sapiens
ggtaaacatttcttt

SEQ ID NO: 250348 - DNA, 15 bp, Homo sapiens
tggtaaacatttctt

SEQ ID NO: 250349 - DNA, 15 bp, Homo sapiens
ctggtaaacatttct

SEQ ID NO: 250350 - DNA, 15 bp, Homo sapiens
tctggtaaacatttc

SEQ ID NO: 250351 - DNA, 15 bp, Homo sapiens
ctctggtaaacattt

SEQ ID NO: 250352 - DNA, 15 bp, Homo sapiens
gctctggtaaacatt

SEQ ID NO: 250353 - DNA, 15 bp, Homo sapiens
tgctctggtaaacat

SEQ ID NO: 250354 - DNA, 15 bp, Homo sapiens
gtgctctggtaaaca

SEQ ID NO: 250355 - DNA, 15 bp, Homo sapiens
agtgctctggtaaac

SEQ ID NO: 250356 - DNA, 15 bp, Homo sapiens
cagtgctctggtaaa

SEQ ID NO: 250357 - DNA, 15 bp, Homo sapiens
tcagtgctctggtaa

SEQ ID NO: 250358 - DNA, 15 bp, Homo sapiens
ttcagtgctctggta

SEQ ID NO: 250359 - DNA, 15 bp, Homo sapiens
cttcagtgctctggt

SEQ ID NO: 250360 - DNA, 15 bp, Homo sapiens
acttcagtgctctgg

SEQ ID NO: 250361 - DNA, 15 bp, Homo sapiens
aacttcagtgctctg

SEQ ID NO: 250362 - DNA, 15 bp, Homo sapiens
aaacttcagtgctct

SEQ ID NO: 250363 - DNA, 15 bp, Homo sapiens
gaaacttcagtgctc

SEQ ID NO: 250364 - DNA, 15 bp, Homo sapiens
ggaaacttcagtgct

SEQ ID NO: 250365 - DNA, 15 bp, Homo sapiens
tggaaacttcagtgc

SEQ ID NO: 250366 - DNA, 15 bp, Homo sapiens
atggaaacttcagtg

SEQ ID NO: 250367 - DNA, 15 bp, Homo sapiens
tatggaaacttcagt

SEQ ID NO: 250368 - DNA, 15 bp, Homo sapiens
ctatggaaacttcag

SEQ ID NO: 250369 - DNA, 15 bp, Homo sapiens
actatggaaacttca

SEQ ID NO: 250370 - DNA, 15 bp, Homo sapiens
gactatggaaacttc

SEQ ID NO: 250371 - DNA, 15 bp, Homo sapiens
agactatggaaactt

SEQ ID NO: 250372 - DNA, 15 bp, Homo sapiens
gagactatggaaact

SEQ ID NO: 250373 - DNA, 15 bp, Homo sapiens
agagactatggaaac

SEQ ID NO: 250374 - DNA, 15 bp, Homo sapiens
gagagactatggaaa

SEQ ID NO: 250375 - DNA, 15 bp, Homo sapiens
agagagactatggaa

SEQ ID NO: 250376 - DNA, 15 bp, Homo sapiens
aagagagactatgga

SEQ ID NO: 250377 - DNA, 15 bp, Homo sapiens
aaagagagactatgg

SEQ ID NO: 250378 - DNA, 15 bp, Homo sapiens
aaaagagagactatg

SEQ ID NO: 250379 - DNA, 15 bp, Homo sapiens
aaaaagagagactat

SEQ ID NO: 250380 - DNA, 15 bp, Homo sapiens
aaaaaagagagacta

SEQ ID NO: 250381 - DNA, 15 bp, Homo sapiens
caaaaaagagagact

SEQ ID NO: 250382 - DNA, 15 bp, Homo sapiens
ccaaaaaagagagac

SEQ ID NO: 250383 - DNA, 15 bp, Homo sapiens
cccaaaaaagagaga

SEQ ID NO: 250384 - DNA, 15 bp, Homo sapiens
gcccaaaaaagagag

SEQ ID NO: 250385 - DNA, 15 bp, Homo sapiens
tgcccaaaaaagaga

SEQ ID NO: 250386 - DNA, 15 bp, Homo sapiens
ctgcccaaaaaagag

SEQ ID NO: 250387 - DNA, 15 bp, Homo sapiens
actgcccaaaaaaga

SEQ ID NO: 250388 - DNA, 15 bp, Homo sapiens
tactgcccaaaaaag

SEQ ID NO: 250389 - DNA, 15 bp, Homo sapiens
ttactgcccaaaaaa

SEQ ID NO: 250390 - DNA, 15 bp, Homo sapiens
tttactgcccaaaaa

SEQ ID NO: 250391 - DNA, 15 bp, Homo sapiens
ctttactgcccaaaa

SEQ ID NO: 250392 - DNA, 15 bp, Homo sapiens
cctttactgcccaaa

SEQ ID NO: 250393 - DNA, 15 bp, Homo sapiens
acctttactgcccaa

SEQ ID NO: 250394 - DNA, 15 bp, Homo sapiens
aacctttactgccca

SEQ ID NO: 250395 - DNA, 15 bp, Homo sapiens
gaacctttactgccc

SEQ ID NO: 250396 - DNA, 15 bp, Homo sapiens
agaacctttactgcc

SEQ ID NO: 250397 - DNA, 15 bp, Homo sapiens
tagaacctttactgc

SEQ ID NO: 250398 - DNA, 15 bp, Homo sapiens
atagaacctttactg

SEQ ID NO: 250399 - DNA, 15 bp, Homo sapiens
tatagaacctttact

SEQ ID NO: 250400 - DNA, 15 bp, Homo sapiens
atatagaacctttac

SEQ ID NO: 250401 - DNA, 15 bp, Homo sapiens
tatatagaaccttta

SEQ ID NO: 250402 - DNA, 15 bp, Homo sapiens
ctatatagaaccttt

SEQ ID NO: 250403 - DNA, 15 bp, Homo sapiens
gctatatagaacctt

SEQ ID NO: 250404 - DNA, 15 bp, Homo sapiens
agctatatagaacct

SEQ ID NO: 250405 - DNA, 15 bp, Homo sapiens
gagctatatagaacc

SEQ ID NO: 250406 - DNA, 15 bp, Homo sapiens
ggagctatatagaac

SEQ ID NO: 250407 - DNA, 15 bp, Homo sapiens
tggagctatatagaa

SEQ ID NO: 250408 - DNA, 15 bp, Homo sapiens
ttggagctatataga

SEQ ID NO: 250409 - DNA, 15 bp, Homo sapiens
cttggagctatatag

SEQ ID NO: 250410 - DNA, 15 bp, Homo sapiens
tcttggagctatata

SEQ ID NO: 250411 - DNA, 15 bp, Homo sapiens
gtcttggagctatat

SEQ ID NO: 250412 - DNA, 15 bp, Homo sapiens
tgtcttggagctata

SEQ ID NO: 250413 - DNA, 15 bp, Homo sapiens
atgtcttggagctat

SEQ ID NO: 250414 - DNA, 15 bp, Homo sapiens
tatgtcttggagcta

SEQ ID NO: 250415 - DNA, 15 bp, Homo sapiens
ttatgtcttggagct

SEQ ID NO: 250416 - DNA, 15 bp, Homo sapiens
attatgtcttggagc

SEQ ID NO: 250417 - DNA, 15 bp, Homo sapiens
gattatgtcttggag

SEQ ID NO: 250418 - DNA, 15 bp, Homo sapiens
agattatgtcttgga

SEQ ID NO: 250419 - DNA, 15 bp, Homo sapiens
aagattatgtcttgg

SEQ ID NO: 250420 - DNA, 15 bp, Homo sapiens
aaagattatgtcttg

SEQ ID NO: 250421 - DNA, 15 bp, Homo sapiens
caaagattatgtctt

SEQ ID NO: 250422 - DNA, 15 bp, Homo sapiens
tcaaagattatgtct

SEQ ID NO: 250423 - DNA, 15 bp, Homo sapiens
atcaaagattatgtc

SEQ ID NO: 250424 - DNA, 15 bp, Homo sapiens
catcaaagattatgt

SEQ ID NO: 250425 - DNA, 15 bp, Homo sapiens
gcatcaaagattatg

SEQ ID NO: 250426 - DNA, 15 bp, Homo sapiens
agcatcaaagattat

SEQ ID NO: 250427 - DNA, 15 bp, Homo sapiens
gagcatcaaagatta

SEQ ID NO: 250428 - DNA, 15 bp, Homo sapiens
tgagcatcaaagatt

SEQ ID NO: 250429 - DNA, 15 bp, Homo sapiens
ctgagcatcaaagat

SEQ ID NO: 250430 - DNA, 15 bp, Homo sapiens
actgagcatcaaaga

SEQ ID NO: 250431 - DNA, 15 bp, Homo sapiens
gactgagcatcaaag

SEQ ID NO: 250432 - DNA, 15 bp, Homo sapiens
agactgagcatcaaa

SEQ ID NO: 250433 - DNA, 15 bp, Homo sapiens
tagactgagcatcaa

SEQ ID NO: 250434 - DNA, 15 bp, Homo sapiens
atagactgagcatca

SEQ ID NO: 250435 - DNA, 15 bp, Homo sapiens
catagactgagcatc

SEQ ID NO: 250436 - DNA, 15 bp, Homo sapiens
tcatagactgagcat

SEQ ID NO: 250437 - DNA, 15 bp, Homo sapiens
gtcatagactgagca

SEQ ID NO: 250438 - DNA, 15 bp, Homo sapiens
tgtcatagactgagc

SEQ ID NO: 250439 - DNA, 15 bp, Homo sapiens
ttgtcatagactgag

SEQ ID NO: 250440 - DNA, 15 bp, Homo sapiens
gttgtcatagactga

SEQ ID NO: 250441 - DNA, 15 bp, Homo sapiens
agttgtcatagactg

SEQ ID NO: 250442 - DNA, 15 bp, Homo sapiens
gagttgtcatagact

SEQ ID NO: 250443 - DNA, 15 bp, Homo sapiens
tgagttgtcatagac

SEQ ID NO: 250444 - DNA, 15 bp, Homo sapiens
ttgagttgtcataga

SEQ ID NO: 250445 - DNA, 15 bp, Homo sapiens
tttgagttgtcatag

SEQ ID NO: 250446 - DNA, 15 bp, Homo sapiens
atttgagttgtcata

SEQ ID NO: 250447 - DNA, 15 bp, Homo sapiens
aatttgagttgtcat

SEQ ID NO: 250448 - DNA, 15 bp, Homo sapiens
gaatttgagttgtca

SEQ ID NO: 250449 - DNA, 15 bp, Homo sapiens
agaatttgagttgtc

SEQ ID NO: 250450 - DNA, 15 bp, Homo sapiens
tagaatttgagttgt

SEQ ID NO: 250451 - DNA, 15 bp, Homo sapiens
ctagaatttgagttg

SEQ ID NO: 250452 - DNA, 15 bp, Homo sapiens
cctagaatttgagtt

SEQ ID NO: 250453 - DNA, 15 bp, Homo sapiens
gcctagaatttgagt

SEQ ID NO: 250454 - DNA, 15 bp, Homo sapiens
ggcctagaatttgag

SEQ ID NO: 250455 - DNA, 15 bp, Homo sapiens
aggcctagaatttga

SEQ ID NO: 250456 - DNA, 15 bp, Homo sapiens
aaggcctagaatttg

SEQ ID NO: 250457 - DNA, 15 bp, Homo sapiens
aaaggcctagaattt

SEQ ID NO: 250458 - DNA, 15 bp, Homo sapiens
gaaaggcctagaatt

SEQ ID NO: 250459 - DNA, 15 bp, Homo sapiens
ggaaaggcctagaat

SEQ ID NO: 250460 - DNA, 15 bp, Homo sapiens
aggaaaggcctagaa

SEQ ID NO: 250461 - DNA, 15 bp, Homo sapiens
aaggaaaggcctaga

SEQ ID NO: 250462 - DNA, 15 bp, Homo sapiens
caaggaaaggcctag

SEQ ID NO: 250463 - DNA, 15 bp, Homo sapiens
ccaaggaaaggccta

SEQ ID NO: 250464 - DNA, 15 bp, Homo sapiens
tccaaggaaaggcct

SEQ ID NO: 250465 - DNA, 15 bp, Homo sapiens
atccaaggaaaggcc

SEQ ID NO: 250466 - DNA, 15 bp, Homo sapiens
tatccaaggaaaggc

SEQ ID NO: 250467 - DNA, 15 bp, Homo sapiens
ttatccaaggaaagg

SEQ ID NO: 250468 - DNA, 15 bp, Homo sapiens
attatccaaggaaag

SEQ ID NO: 250469 - DNA, 15 bp, Homo sapiens
aattatccaaggaaa

SEQ ID NO: 250470 - DNA, 15 bp, Homo sapiens
gaattatccaaggaa

SEQ ID NO: 250471 - DNA, 15 bp, Homo sapiens
tgaattatccaagga

SEQ ID NO: 250472 - DNA, 15 bp, Homo sapiens
ctgaattatccaagg

SEQ ID NO: 250473 - DNA, 15 bp, Homo sapiens
gctgaattatccaag

SEQ ID NO: 250474 - DNA, 15 bp, Homo sapiens
ggctgaattatccaa

SEQ ID NO: 250475 - DNA, 15 bp, Homo sapiens
tggctgaattatcca

SEQ ID NO: 250476 - DNA, 15 bp, Homo sapiens
gtggctgaattatcc

SEQ ID NO: 250477 - DNA, 15 bp, Homo sapiens
agtggctgaattatc

SEQ ID NO: 250478 - DNA, 15 bp, Homo sapiens
cagtggctgaattat

SEQ ID NO: 250479 - DNA, 15 bp, Homo sapiens
tcagtggctgaatta

SEQ ID NO: 250480 - DNA, 15 bp, Homo sapiens
ttcagtggctgaatt

SEQ ID NO: 250481 - DNA, 15 bp, Homo sapiens
gttcagtggctgaat

SEQ ID NO: 250482 - DNA, 15 bp, Homo sapiens
agttcagtggctgaa

SEQ ID NO: 250483 - DNA, 15 bp, Homo sapiens
tagttcagtggctga

SEQ ID NO: 250484 - DNA, 15 bp, Homo sapiens
gtagttcagtggctg

SEQ ID NO: 250485 - DNA, 15 bp, Homo sapiens
ggtagttcagtggct

SEQ ID NO: 250486 - DNA, 15 bp, Homo sapiens
aggtagttcagtggc

SEQ ID NO: 250487 - DNA, 15 bp, Homo sapiens
aaggtagttcagtgg

SEQ ID NO: 250488 - DNA, 15 bp, Homo sapiens
aaaggtagttcagtg

SEQ ID NO: 250489 - DNA, 15 bp, Homo sapiens
aaaaggtagttcagt

SEQ ID NO: 250490 - DNA, 15 bp, Homo sapiens
caaaaggtagttcag

SEQ ID NO: 250491 - DNA, 15 bp, Homo sapiens
gcaaaaggtagttca

SEQ ID NO: 250492 - DNA, 15 bp, Homo sapiens
agcaaaaggtagttc

SEQ ID NO: 250493 - DNA, 15 bp, Homo sapiens
aagcaaaaggtagtt

SEQ ID NO: 250494 - DNA, 15 bp, Homo sapiens
gaagcaaaaggtagt

SEQ ID NO: 250495 - DNA, 15 bp, Homo sapiens
ggaagcaaaaggtag

SEQ ID NO: 250496 - DNA, 15 bp, Homo sapiens
gggaagcaaaaggta

SEQ ID NO: 250497 - DNA, 15 bp, Homo sapiens
agggaagcaaaaggt

SEQ ID NO: 250498 - DNA, 15 bp, Homo sapiens
gagggaagcaaaagg

SEQ ID NO: 250499 - DNA, 15 bp, Homo sapiens
agagggaagcaaaag

SEQ ID NO: 250500 - DNA, 15 bp, Homo sapiens
cagagggaagcaaaa

SEQ ID NO: 250501 - DNA, 15 bp, Homo sapiens
acagagggaagcaaa

SEQ ID NO: 250502 - DNA, 15 bp, Homo sapiens
tacagagggaagcaa

SEQ ID NO: 250503 - DNA, 15 bp, Homo sapiens
ctacagagggaagca

SEQ ID NO: 250504 - DNA, 15 bp, Homo sapiens
actacagagggaagc

SEQ ID NO: 250505 - DNA, 15 bp, Homo sapiens
gactacagagggaag

SEQ ID NO: 250506 - DNA, 15 bp, Homo sapiens
agactacagagggaa

SEQ ID NO: 250507 - DNA, 15 bp, Homo sapiens
gagactacagaggga

SEQ ID NO: 250508 - DNA, 15 bp, Homo sapiens
agagactacagaggg

SEQ ID NO: 250509 - DNA, 15 bp, Homo sapiens
aagagactacagagg

SEQ ID NO: 250510 - DNA, 15 bp, Homo sapiens
gaagagactacagag

SEQ ID NO: 250511 - DNA, 15 bp, Homo sapiens
agaagagactacaga

SEQ ID NO: 250512 - DNA, 15 bp, Homo sapiens
aagaagagactacag

SEQ ID NO: 250513 - DNA, 15 bp, Homo sapiens
taagaagagactaca

SEQ ID NO: 250514 - DNA, 15 bp, Homo sapiens
ctaagaagagactac

SEQ ID NO: 250515 - DNA, 15 bp, Homo sapiens
actaagaagagacta

SEQ ID NO: 250516 - DNA, 15 bp, Homo sapiens
aactaagaagagact

SEQ ID NO: 250517 - DNA, 15 bp, Homo sapiens
taactaagaagagac

SEQ ID NO: 250518 - DNA, 15 bp, Homo sapiens
ctaactaagaagaga

SEQ ID NO: 250519 - DNA, 15 bp, Homo sapiens
actaactaagaagag

SEQ ID NO: 250520 - DNA, 15 bp, Homo sapiens
tactaactaagaaga

SEQ ID NO: 250521 - DNA, 15 bp, Homo sapiens
gtactaactaagaag

SEQ ID NO: 250522 - DNA, 15 bp, Homo sapiens
agtactaactaagaa

SEQ ID NO: 250523 - DNA, 15 bp, Homo sapiens
gagtactaactaaga

SEQ ID NO: 250524 - DNA, 15 bp, Homo sapiens
agagtactaactaag

SEQ ID NO: 250525 - DNA, 15 bp, Homo sapiens
cagagtactaactaa

SEQ ID NO: 250526 - DNA, 15 bp, Homo sapiens
ccagagtactaacta

SEQ ID NO: 250527 - DNA, 15 bp, Homo sapiens
tccagagtactaact

SEQ ID NO: 250528 - DNA, 15 bp, Homo sapiens
gtccagagtactaac

SEQ ID NO: 250529 - DNA, 15 bp, Homo sapiens
tgtccagagtactaa

SEQ ID NO: 250530 - DNA, 15 bp, Homo sapiens
ttgtccagagtacta

SEQ ID NO: 250531 - DNA, 15 bp, Homo sapiens
tttgtccagagtact

SEQ ID NO: 250532 - DNA, 15 bp, Homo sapiens
gtttgtccagagtac

SEQ ID NO: 250533 - DNA, 15 bp, Homo sapiens
agtttgtccagagta

SEQ ID NO: 250534 - DNA, 15 bp, Homo sapiens
aagtttgtccagagt

SEQ ID NO: 250535 - DNA, 15 bp, Homo sapiens
caagtttgtccagag

SEQ ID NO: 250536 - DNA, 15 bp, Homo sapiens
gcaagtttgtccaga

SEQ ID NO: 250537 - DNA, 15 bp, Homo sapiens
agcaagtttgtccag

SEQ ID NO: 250538 - DNA, 15 bp, Homo sapiens
aagcaagtttgtcca

SEQ ID NO: 250539 - DNA, 15 bp, Homo sapiens
aaagcaagtttgtcc

SEQ ID NO: 250540 - DNA, 15 bp, Homo sapiens
caaagcaagtttgtc

SEQ ID NO: 250541 - DNA, 15 bp, Homo sapiens
tcaaagcaagtttgt

SEQ ID NO: 250542 - DNA, 15 bp, Homo sapiens
gtcaaagcaagtttg

SEQ ID NO: 250543 - DNA, 15 bp, Homo sapiens
agtcaaagcaagttt

SEQ ID NO: 250544 - DNA, 15 bp, Homo sapiens
aagtcaaagcaagtt

SEQ ID NO: 250545 - DNA, 15 bp, Homo sapiens
aaagtcaaagcaagt

SEQ ID NO: 250546 - DNA, 15 bp, Homo sapiens
caaagtcaaagcaag

SEQ ID NO: 250547 - DNA, 15 bp, Homo sapiens
acaaagtcaaagcaa

SEQ ID NO: 250548 - DNA, 15 bp, Homo sapiens
gacaaagtcaaagca

SEQ ID NO: 250549 - DNA, 15 bp, Homo sapiens
ggacaaagtcaaagc

SEQ ID NO: 250550 - DNA, 15 bp, Homo sapiens
tggacaaagtcaaag

SEQ ID NO: 250551 - DNA, 15 bp, Homo sapiens
ttggacaaagtcaaa

SEQ ID NO: 250552 - DNA, 15 bp, Homo sapiens
tttggacaaagtcaa

SEQ ID NO: 250553 - DNA, 15 bp, Homo sapiens
ctttggacaaagtca

SEQ ID NO: 250554 - DNA, 15 bp, Homo sapiens
tctttggacaaagtc

SEQ ID NO: 250555 - DNA, 15 bp, Homo sapiens
gtctttggacaaagt

SEQ ID NO: 250556 - DNA, 15 bp, Homo sapiens
tgtctttggacaaag

SEQ ID NO: 250557 - DNA, 15 bp, Homo sapiens
gtgtctttggacaaa

SEQ ID NO: 250558 - DNA, 15 bp, Homo sapiens
ggtgtctttggacaa

SEQ ID NO: 250559 - DNA, 15 bp, Homo sapiens
gggtgtctttggaca

SEQ ID NO: 250560 - DNA, 15 bp, Homo sapiens
tgggtgtctttggac

SEQ ID NO: 250561 - DNA, 15 bp, Homo sapiens
atgggtgtctttgga

SEQ ID NO: 250562 - DNA, 15 bp, Homo sapiens
aatgggtgtctttgg

SEQ ID NO: 250563 - DNA, 15 bp, Homo sapiens
gaatgggtgtctttg

SEQ ID NO: 250564 - DNA, 15 bp, Homo sapiens
agaatgggtgtcttt

SEQ ID NO: 250565 - DNA, 15 bp, Homo sapiens
aagaatgggtgtctt

SEQ ID NO: 250566 - DNA, 15 bp, Homo sapiens
aaagaatgggtgtct

SEQ ID NO: 250567 - DNA, 15 bp, Homo sapiens
taaagaatgggtgtc

SEQ ID NO: 250568 - DNA, 15 bp, Homo sapiens
ataaagaatgggtgt

SEQ ID NO: 250569 - DNA, 15 bp, Homo sapiens
aataaagaatgggtg

SEQ ID NO: 250570 - DNA, 15 bp, Homo sapiens
taataaagaatgggt

SEQ ID NO: 250571 - DNA, 15 bp, Homo sapiens
ctaataaagaatggg

SEQ ID NO: 250572 - DNA, 15 bp, Homo sapiens
actaataaagaatgg

SEQ ID NO: 250573 - DNA, 15 bp, Homo sapiens
tactaataaagaatg

SEQ ID NO: 250574 - DNA, 15 bp, Homo sapiens
atactaataaagaat

SEQ ID NO: 250575 - DNA, 15 bp, Homo sapiens
tatactaataaagaa

SEQ ID NO: 250576 - DNA, 15 bp, Homo sapiens
atatactaataaaga

SEQ ID NO: 250577 - DNA, 15 bp, Homo sapiens
catatactaataaag

SEQ ID NO: 250578 - DNA, 15 bp, Homo sapiens
tcatatactaataaa

SEQ ID NO: 250579 - DNA, 15 bp, Homo sapiens
gtcatatactaataa

SEQ ID NO: 250580 - DNA, 15 bp, Homo sapiens
cgtcatatactaata

SEQ ID NO: 250581 - DNA, 15 bp, Homo sapiens
tcgtcatatactaat

SEQ ID NO: 250582 - DNA, 15 bp, Homo sapiens
ttcgtcatatactaa

SEQ ID NO: 250583 - DNA, 15 bp, Homo sapiens
attcgtcatatacta

SEQ ID NO: 250584 - DNA, 15 bp, Homo sapiens
aattcgtcatatact

SEQ ID NO: 250585 - DNA, 15 bp, Homo sapiens
aaattcgtcatatac

SEQ ID NO: 250586 - DNA, 15 bp, Homo sapiens
aaaattcgtcatata

SEQ ID NO: 250587 - DNA, 15 bp, Homo sapiens
caaaattcgtcatat

SEQ ID NO: 250588 - DNA, 15 bp, Homo sapiens
acaaaattcgtcata

SEQ ID NO: 250589 - DNA, 15 bp, Homo sapiens
cacaaaattcgtcat

SEQ ID NO: 250590 - DNA, 15 bp, Homo sapiens
ccacaaaattcgtca

SEQ ID NO: 250591 - DNA, 15 bp, Homo sapiens
tccacaaaattcgtc

SEQ ID NO: 250592 - DNA, 15 bp, Homo sapiens
gtccacaaaattcgt

SEQ ID NO: 250593 - DNA, 15 bp, Homo sapiens
tgtccacaaaattcg

SEQ ID NO: 250594 - DNA, 15 bp, Homo sapiens
ctgtccacaaaattc

SEQ ID NO: 250595 - DNA, 15 bp, Homo sapiens
tctgtccacaaaatt

SEQ ID NO: 250596 - DNA, 15 bp, Homo sapiens
ctctgtccacaaaat

SEQ ID NO: 250597 - DNA, 15 bp, Homo sapiens
tctctgtccacaaaa

SEQ ID NO: 250598 - DNA, 15 bp, Homo sapiens
ttctctgtccacaaa

SEQ ID NO: 250599 - DNA, 15 bp, Homo sapiens
cttctctgtccacaa

SEQ ID NO: 250600 - DNA, 15 bp, Homo sapiens
tcttctctgtccaca

SEQ ID NO: 250601 - DNA, 15 bp, Homo sapiens
ctcttctctgtccac

SEQ ID NO: 250602 - DNA, 15 bp, Homo sapiens
actcttctctgtcca

SEQ ID NO: 250603 - DNA, 15 bp, Homo sapiens
cactcttctctgtcc

SEQ ID NO: 250604 - DNA, 15 bp, Homo sapiens
gcactcttctctgtc

SEQ ID NO: 250605 - DNA, 15 bp, Homo sapiens
agcactcttctctgt

SEQ ID NO: 250606 - DNA, 15 bp, Homo sapiens
tagcactcttctctg

SEQ ID NO: 250607 - DNA, 15 bp, Homo sapiens
atagcactcttctct

SEQ ID NO: 250608 - DNA, 15 bp, Homo sapiens
catagcactcttctc

SEQ ID NO: 250609 - DNA, 15 bp, Homo sapiens
ccatagcactcttct

SEQ ID NO: 250610 - DNA, 15 bp, Homo sapiens
cccatagcactcttc

SEQ ID NO: 250611 - DNA, 15 bp, Homo sapiens
gcccatagcactctt

SEQ ID NO: 250612 - DNA, 15 bp, Homo sapiens
tgcccatagcactct

SEQ ID NO: 250613 - DNA, 15 bp, Homo sapiens
atgcccatagcactc

SEQ ID NO: 250614 - DNA, 15 bp, Homo sapiens
catgcccatagcact

SEQ ID NO: 250615 - DNA, 15 bp, Homo sapiens
tcatgcccatagcac

SEQ ID NO: 250616 - DNA, 15 bp, Homo sapiens
atcatgcccatagca

SEQ ID NO: 250617 - DNA, 15 bp, Homo sapiens
catcatgcccatagc

SEQ ID NO: 250618 - DNA, 15 bp, Homo sapiens
ccatcatgcccatag

SEQ ID NO: 250619 - DNA, 15 bp, Homo sapiens
gccatcatgcccata

SEQ ID NO: 250620 - DNA, 15 bp, Homo sapiens
tgccatcatgcccat

SEQ ID NO: 250621 - DNA, 15 bp, Homo sapiens
atgccatcatgccca

SEQ ID NO: 250622 - DNA, 15 bp, Homo sapiens
tatgccatcatgccc

SEQ ID NO: 250623 - DNA, 15 bp, Homo sapiens
gtatgccatcatgcc

SEQ ID NO: 250624 - DNA, 15 bp, Homo sapiens
agtatgccatcatgc

SEQ ID NO: 250625 - DNA, 15 bp, Homo sapiens
aagtatgccatcatg

SEQ ID NO: 250626 - DNA, 15 bp, Homo sapiens
taagtatgccatcat

SEQ ID NO: 250627 - DNA, 15 bp, Homo sapiens
gtaagtatgccatca

SEQ ID NO: 250628 - DNA, 15 bp, Homo sapiens
ggtaagtatgccatc

SEQ ID NO: 250629 - DNA, 15 bp, Homo sapiens
tggtaagtatgccat

SEQ ID NO: 250630 - DNA, 15 bp, Homo sapiens
gtggtaagtatgcca

SEQ ID NO: 250631 - DNA, 15 bp, Homo sapiens
tgtggtaagtatgcc

SEQ ID NO: 250632 - DNA, 15 bp, Homo sapiens
gtgtggtaagtatgc

SEQ ID NO: 250633 - DNA, 15 bp, Homo sapiens
tgtgtggtaagtatg

SEQ ID NO: 250634 - DNA, 15 bp, Homo sapiens
ctgtgtggtaagtat

SEQ ID NO: 250635 - DNA, 15 bp, Homo sapiens
tctgtgtggtaagta

SEQ ID NO: 250636 - DNA, 15 bp, Homo sapiens
ttctgtgtggtaagt

SEQ ID NO: 250637 - DNA, 15 bp, Homo sapiens
attctgtgtggtaag

SEQ ID NO: 250638 - DNA, 15 bp, Homo sapiens
cattctgtgtggtaa

SEQ ID NO: 250639 - DNA, 15 bp, Homo sapiens
tcattctgtgtggta

SEQ ID NO: 250640 - DNA, 15 bp, Homo sapiens
atcattctgtgtggt

SEQ ID NO: 250641 - DNA, 15 bp, Homo sapiens
gatcattctgtgtgg

SEQ ID NO: 250642 - DNA, 15 bp, Homo sapiens
agatcattctgtgtg

SEQ ID NO: 250643 - DNA, 15 bp, Homo sapiens
tagatcattctgtgt

SEQ ID NO: 250644 - DNA, 15 bp, Homo sapiens
ctagatcattctgtg

SEQ ID NO: 250645 - DNA, 15 bp, Homo sapiens
tctagatcattctgt

SEQ ID NO: 250646 - DNA, 15 bp, Homo sapiens
ttctagatcattctg

SEQ ID NO: 250647 - DNA, 15 bp, Homo sapiens
gttctagatcattct

SEQ ID NO: 250648 - DNA, 15 bp, Homo sapiens
agttctagatcattc

SEQ ID NO: 250649 - DNA, 15 bp, Homo sapiens
aagttctagatcatt

SEQ ID NO: 250650 - DNA, 15 bp, Homo sapiens
aaagttctagatcat

SEQ ID NO: 250651 - DNA, 15 bp, Homo sapiens
caaagttctagatca

SEQ ID NO: 250652 - DNA, 15 bp, Homo sapiens
acaaagttctagatc

SEQ ID NO: 250653 - DNA, 15 bp, Homo sapiens
tacaaagttctagat

SEQ ID NO: 250654 - DNA, 15 bp, Homo sapiens
ctacaaagttctaga

SEQ ID NO: 250655 - DNA, 15 bp, Homo sapiens
gctacaaagttctag

SEQ ID NO: 250656 - DNA, 15 bp, Homo sapiens
tgctacaaagttcta

SEQ ID NO: 250657 - DNA, 15 bp, Homo sapiens
ttgctacaaagttct

SEQ ID NO: 250658 - DNA, 15 bp, Homo sapiens
gttgctacaaagttc

SEQ ID NO: 250659 - DNA, 15 bp, Homo sapiens
agttgctacaaagtt

SEQ ID NO: 250660 - DNA, 15 bp, Homo sapiens
tagttgctacaaagt

SEQ ID NO: 250661 - DNA, 15 bp, Homo sapiens
ttagttgctacaaag

SEQ ID NO: 250662 - DNA, 15 bp, Homo sapiens
attagttgctacaaa

SEQ ID NO: 250663 - DNA, 15 bp, Homo sapiens
cattagttgctacaa

SEQ ID NO: 250664 - DNA, 15 bp, Homo sapiens
acattagttgctaca

SEQ ID NO: 250665 - DNA, 15 bp, Homo sapiens
gacattagttgctac

SEQ ID NO: 250666 - DNA, 15 bp, Homo sapiens
ggacattagttgcta

SEQ ID NO: 250667 - DNA, 15 bp, Homo sapiens
aggacattagttgct

SEQ ID NO: 250668 - DNA, 15 bp, Homo sapiens
taggacattagttgc

SEQ ID NO: 250669 - DNA, 15 bp, Homo sapiens
ctaggacattagttg

SEQ ID NO: 250670 - DNA, 15 bp, Homo sapiens
cctaggacattagtt

SEQ ID NO: 250671 - DNA, 15 bp, Homo sapiens
gcctaggacattagt

SEQ ID NO: 250672 - DNA, 15 bp, Homo sapiens
ggcctaggacattag

SEQ ID NO: 250673 - DNA, 15 bp, Homo sapiens
aggcctaggacatta

SEQ ID NO: 250674 - DNA, 15 bp, Homo sapiens
aaggcctaggacatt

SEQ ID NO: 250675 - DNA, 15 bp, Homo sapiens
aaaggcctaggacat

SEQ ID NO: 250676 - DNA, 15 bp, Homo sapiens
aaaaggcctaggaca

SEQ ID NO: 250677 - DNA, 15 bp, Homo sapiens
gaaaaggcctaggac

SEQ ID NO: 250678 - DNA, 15 bp, Homo sapiens
ggaaaaggcctagga

SEQ ID NO: 250679 - DNA, 15 bp, Homo sapiens
tggaaaaggcctagg

SEQ ID NO: 250680 - DNA, 15 bp, Homo sapiens
ctggaaaaggcctag

SEQ ID NO: 250681 - DNA, 15 bp, Homo sapiens
tctggaaaaggccta

SEQ ID NO: 250682 - DNA, 15 bp, Homo sapiens
ctctggaaaaggcct

SEQ ID NO: 250683 - DNA, 15 bp, Homo sapiens
gctctggaaaaggcc

SEQ ID NO: 250684 - DNA, 15 bp, Homo sapiens
agctctggaaaaggc

SEQ ID NO: 250685 - DNA, 15 bp, Homo sapiens
cagctctggaaaagg

SEQ ID NO: 250686 - DNA, 15 bp, Homo sapiens
gcagctctggaaaag

SEQ ID NO: 250687 - DNA, 15 bp, Homo sapiens
agcagctctggaaaa

SEQ ID NO: 250688 - DNA, 15 bp, Homo sapiens
aagcagctctggaaa

SEQ ID NO: 250689 - DNA, 15 bp, Homo sapiens
aaagcagctctggaa

SEQ ID NO: 250690 - DNA, 15 bp, Homo sapiens
gaaagcagctctgga

SEQ ID NO: 250691 - DNA, 15 bp, Homo sapiens
agaaagcagctctgg

SEQ ID NO: 250692 - DNA, 15 bp, Homo sapiens
aagaaagcagctctg

SEQ ID NO: 250693 - DNA, 15 bp, Homo sapiens
gaagaaagcagctct

SEQ ID NO: 250694 - DNA, 15 bp, Homo sapiens
tgaagaaagcagctc

SEQ ID NO: 250695 - DNA, 15 bp, Homo sapiens
ttgaagaaagcagct

SEQ ID NO: 250696 - DNA, 15 bp, Homo sapiens
tttgaagaaagcagc

SEQ ID NO: 250697 - DNA, 15 bp, Homo sapiens
atttgaagaaagcag

SEQ ID NO: 250698 - DNA, 15 bp, Homo sapiens
catttgaagaaagca

SEQ ID NO: 250699 - DNA, 15 bp, Homo sapiens
ccatttgaagaaagc

SEQ ID NO: 250700 - DNA, 15 bp, Homo sapiens
cccatttgaagaaag

SEQ ID NO: 250701 - DNA, 15 bp, Homo sapiens
ccccatttgaagaaa

SEQ ID NO: 250702 - DNA, 15 bp, Homo sapiens
gccccatttgaagaa

SEQ ID NO: 250703 - DNA, 15 bp, Homo sapiens
tgccccatttgaaga

SEQ ID NO: 250704 - DNA, 15 bp, Homo sapiens
ttgccccatttgaag

SEQ ID NO: 250705 - DNA, 15 bp, Homo sapiens
gttgccccatttgaa

SEQ ID NO: 250706 - DNA, 15 bp, Homo sapiens
tgttgccccatttga

SEQ ID NO: 250707 - DNA, 15 bp, Homo sapiens
ctgttgccccatttg

SEQ ID NO: 250708 - DNA, 15 bp, Homo sapiens
tctgttgccccattt

SEQ ID NO: 250709 - DNA, 15 bp, Homo sapiens
gtctgttgccccatt

SEQ ID NO: 250710 - DNA, 15 bp, Homo sapiens
cgtctgttgccccat

SEQ ID NO: 250711 - DNA, 15 bp, Homo sapiens
acgtctgttgcccca

SEQ ID NO: 250712 - DNA, 15 bp, Homo sapiens
cacgtctgttgcccc

SEQ ID NO: 250713 - DNA, 15 bp, Homo sapiens
tcacgtctgttgccc

SEQ ID NO: 250714 - DNA, 15 bp, Homo sapiens
atcacgtctgttgcc

SEQ ID NO: 250715 - DNA, 15 bp, Homo sapiens
catcacgtctgttgc

SEQ ID NO: 250716 - DNA, 15 bp, Homo sapiens
gcatcacgtctgttg

SEQ ID NO: 250717 - DNA, 15 bp, Homo sapiens
ggcatcacgtctgtt

SEQ ID NO: 250718 - DNA, 15 bp, Homo sapiens
cggcatcacgtctgt

SEQ ID NO: 250719 - DNA, 15 bp, Homo sapiens
gcggcatcacgtctg

SEQ ID NO: 250720 - DNA, 15 bp, Homo sapiens
tgcggcatcacgtct

SEQ ID NO: 250721 - DNA, 15 bp, Homo sapiens
atgcggcatcacgtc

SEQ ID NO: 250722 - DNA, 15 bp, Homo sapiens
aatgcggcatcacgt

SEQ ID NO: 250723 - DNA, 15 bp, Homo sapiens
aaatgcggcatcacg

SEQ ID NO: 250724 - DNA, 15 bp, Homo sapiens
aaaatgcggcatcac

SEQ ID NO: 250725 - DNA, 15 bp, Homo sapiens
gaaaatgcggcatca

SEQ ID NO: 250726 - DNA, 15 bp, Homo sapiens
agaaaatgcggcatc

SEQ ID NO: 250727 - DNA, 15 bp, Homo sapiens
tagaaaatgcggcat

SEQ ID NO: 250728 - DNA, 15 bp, Homo sapiens
ttagaaaatgcggca

SEQ ID NO: 250729 - DNA, 15 bp, Homo sapiens
tttagaaaatgcggc

SEQ ID NO: 250730 - DNA, 15 bp, Homo sapiens
ctttagaaaatgcgg

SEQ ID NO: 250731 - DNA, 15 bp, Homo sapiens
gctttagaaaatgcg

SEQ ID NO: 250732 - DNA, 15 bp, Homo sapiens
agctttagaaaatgc

SEQ ID NO: 250733 - DNA, 15 bp, Homo sapiens
gagctttagaaaatg

SEQ ID NO: 250734 - DNA, 15 bp, Homo sapiens
agagctttagaaaat

SEQ ID NO: 250735 - DNA, 15 bp, Homo sapiens
aagagctttagaaaa

SEQ ID NO: 250736 - DNA, 15 bp, Homo sapiens
gaagagctttagaaa

SEQ ID NO: 250737 - DNA, 15 bp, Homo sapiens
ggaagagctttagaa

SEQ ID NO: 250738 - DNA, 15 bp, Homo sapiens
gggaagagctttaga

SEQ ID NO: 250739 - DNA, 15 bp, Homo sapiens
tgggaagagctttag

SEQ ID NO: 250740 - DNA, 15 bp, Homo sapiens
ttgggaagagcttta

SEQ ID NO: 250741 - DNA, 15 bp, Homo sapiens
gttgggaagagcttt

SEQ ID NO: 250742 - DNA, 15 bp, Homo sapiens
ggttgggaagagctt

SEQ ID NO: 250743 - DNA, 15 bp, Homo sapiens
aggttgggaagagct

SEQ ID NO: 250744 - DNA, 15 bp, Homo sapiens
gaggttgggaagagc

SEQ ID NO: 250745 - DNA, 15 bp, Homo sapiens
ggaggttgggaagag

SEQ ID NO: 250746 - DNA, 15 bp, Homo sapiens
tggaggttgggaaga

SEQ ID NO: 250747 - DNA, 15 bp, Homo sapiens
ttggaggttgggaag

SEQ ID NO: 250748 - DNA, 15 bp, Homo sapiens
tttggaggttgggaa

SEQ ID NO: 250749 - DNA, 15 bp, Homo sapiens
ttttggaggttggga

SEQ ID NO: 250750 - DNA, 15 bp, Homo sapiens
gttttggaggttggg

SEQ ID NO: 250751 - DNA, 15 bp, Homo sapiens
tgttttggaggttgg

SEQ ID NO: 250752 - DNA, 15 bp, Homo sapiens
ctgttttggaggttg

SEQ ID NO: 250753 - DNA, 15 bp, Homo sapiens
gctgttttggaggtt

SEQ ID NO: 250754 - DNA, 15 bp, Homo sapiens
agctgttttggaggt

SEQ ID NO: 250755 - DNA, 15 bp, Homo sapiens
aagctgttttggagg

SEQ ID NO: 250756 - DNA, 15 bp, Homo sapiens
gaagctgttttggag

SEQ ID NO: 250757 - DNA, 15 bp, Homo sapiens
agaagctgttttgga

SEQ ID NO: 250758 - DNA, 15 bp, Homo sapiens
aagaagctgttttgg

SEQ ID NO: 250759 - DNA, 15 bp, Homo sapiens
aaagaagctgttttg

SEQ ID NO: 250760 - DNA, 15 bp, Homo sapiens
aaaagaagctgtttt

SEQ ID NO: 250761 - DNA, 15 bp, Homo sapiens
gaaaagaagctgttt

SEQ ID NO: 250762 - DNA, 15 bp, Homo sapiens
agaaaagaagctgtt

SEQ ID NO: 250763 - DNA, 15 bp, Homo sapiens
aagaaaagaagctgt

SEQ ID NO: 250764 - DNA, 15 bp, Homo sapiens
aaagaaaagaagctg

SEQ ID NO: 250765 - DNA, 15 bp, Homo sapiens
gaaagaaaagaagct

SEQ ID NO: 250766 - DNA, 15 bp, Homo sapiens
agaaagaaaagaagc

SEQ ID NO: 250767 - DNA, 15 bp, Homo sapiens
cagaaagaaaagaag

SEQ ID NO: 250768 - DNA, 15 bp, Homo sapiens
gcagaaagaaaagaa

SEQ ID NO: 250769 - DNA, 15 bp, Homo sapiens
agcagaaagaaaaga

SEQ ID NO: 250770 - DNA, 15 bp, Homo sapiens
cagcagaaagaaaag

SEQ ID NO: 250771 - DNA, 15 bp, Homo sapiens
tcagcagaaagaaaa

SEQ ID NO: 250772 - DNA, 15 bp, Homo sapiens
ctcagcagaaagaaa

SEQ ID NO: 250773 - DNA, 15 bp, Homo sapiens
cctcagcagaaagaa

SEQ ID NO: 250774 - DNA, 15 bp, Homo sapiens
tcctcagcagaaaga

SEQ ID NO: 250775 - DNA, 15 bp, Homo sapiens
ttcctcagcagaaag

SEQ ID NO: 250776 - DNA, 15 bp, Homo sapiens
cttcctcagcagaaa

SEQ ID NO: 250777 - DNA, 15 bp, Homo sapiens
gcttcctcagcagaa

SEQ ID NO: 250778 - DNA, 15 bp, Homo sapiens
agcttcctcagcaga

SEQ ID NO: 250779 - DNA, 15 bp, Homo sapiens
tagcttcctcagcag

SEQ ID NO: 250780 - DNA, 15 bp, Homo sapiens
ttagcttcctcagca

SEQ ID NO: 250781 - DNA, 15 bp, Homo sapiens
tttagcttcctcagc

SEQ ID NO: 250782 - DNA, 15 bp, Homo sapiens
atttagcttcctcag

SEQ ID NO: 250783 - DNA, 15 bp, Homo sapiens
aatttagcttcctca

SEQ ID NO: 250784 - DNA, 15 bp, Homo sapiens
aaatttagcttcctc

SEQ ID NO: 250785 - DNA, 15 bp, Homo sapiens
taaatttagcttcct

SEQ ID NO: 250786 - DNA, 15 bp, Homo sapiens
gtaaatttagcttcc

SEQ ID NO: 250787 - DNA, 15 bp, Homo sapiens
agtaaatttagcttc

SEQ ID NO: 250788 - DNA, 15 bp, Homo sapiens
aagtaaatttagctt

SEQ ID NO: 250789 - DNA, 15 bp, Homo sapiens
aaagtaaatttagct

SEQ ID NO: 250790 - DNA, 15 bp, Homo sapiens
gaaagtaaatttagc

SEQ ID NO: 250791 - DNA, 15 bp, Homo sapiens
tgaaagtaaatttag

SEQ ID NO: 250792 - DNA, 15 bp, Homo sapiens
ctgaaagtaaattta

SEQ ID NO: 250793 - DNA, 15 bp, Homo sapiens
actgaaagtaaattt

SEQ ID NO: 250794 - DNA, 15 bp, Homo sapiens
gactgaaagtaaatt

SEQ ID NO: 250795 - DNA, 15 bp, Homo sapiens
ggactgaaagtaaat

SEQ ID NO: 250796 - DNA, 15 bp, Homo sapiens
aggactgaaagtaaa

SEQ ID NO: 250797 - DNA, 15 bp, Homo sapiens
gaggactgaaagtaa

SEQ ID NO: 250798 - DNA, 15 bp, Homo sapiens
tgaggactgaaagta

SEQ ID NO: 250799 - DNA, 15 bp, Homo sapiens
ttgaggactgaaagt

SEQ ID NO: 250800 - DNA, 15 bp, Homo sapiens
tttgaggactgaaag

SEQ ID NO: 250801 - DNA, 15 bp, Homo sapiens
atttgaggactgaaa

SEQ ID NO: 250802 - DNA, 15 bp, Homo sapiens
catttgaggactgaa

SEQ ID NO: 250803 - DNA, 15 bp, Homo sapiens
ccatttgaggactga

SEQ ID NO: 250804 - DNA, 15 bp, Homo sapiens
accatttgaggactg

SEQ ID NO: 250805 - DNA, 15 bp, Homo sapiens
caccatttgaggact

SEQ ID NO: 250806 - DNA, 15 bp, Homo sapiens
tcaccatttgaggac

SEQ ID NO: 250807 - DNA, 15 bp, Homo sapiens
ttcaccatttgagga

SEQ ID NO: 250808 - DNA, 15 bp, Homo sapiens
tttcaccatttgagg

SEQ ID NO: 250809 - DNA, 15 bp, Homo sapiens
ttttcaccatttgag

SEQ ID NO: 250810 - DNA, 15 bp, Homo sapiens
tttttcaccatttga

SEQ ID NO: 250811 - DNA, 15 bp, Homo sapiens
ttttttcaccatttg

SEQ ID NO: 250812 - DNA, 15 bp, Homo sapiens
tttttttcaccattt

SEQ ID NO: 250813 - DNA, 15 bp, Homo sapiens
ctttttttcaccatt

SEQ ID NO: 250814 - DNA, 15 bp, Homo sapiens
cctttttttcaccat

SEQ ID NO: 250815 - DNA, 15 bp, Homo sapiens
ccctttttttcacca

SEQ ID NO: 250816 - DNA, 15 bp, Homo sapiens
cccctttttttcacc

SEQ ID NO: 250817 - DNA, 15 bp, Homo sapiens
tcccctttttttcac

SEQ ID NO: 250818 - DNA, 15 bp, Homo sapiens
ctcccctttttttca

SEQ ID NO: 250819 - DNA, 15 bp, Homo sapiens
gctcccctttttttc

SEQ ID NO: 250820 - DNA, 15 bp, Homo sapiens
ggctccccttttttt

SEQ ID NO: 250821 - DNA, 15 bp, Homo sapiens
aggctcccctttttt

SEQ ID NO: 250822 - DNA, 15 bp, Homo sapiens
gaggctccccttttt

SEQ ID NO: 250823 - DNA, 15 bp, Homo sapiens
ggaggctcccctttt

SEQ ID NO: 250824 - DNA, 15 bp, Homo sapiens
gggaggctccccttt

SEQ ID NO: 250825 - DNA, 15 bp, Homo sapiens
ggggaggctcccctt

SEQ ID NO: 250826 - DNA, 15 bp, Homo sapiens
tggggaggctcccct

SEQ ID NO: 250827 - DNA, 15 bp, Homo sapiens
ctggggaggctcccc

SEQ ID NO: 250828 - DNA, 15 bp, Homo sapiens
tctggggaggctccc

SEQ ID NO: 250829 - DNA, 15 bp, Homo sapiens
atctggggaggctcc

SEQ ID NO: 250830 - DNA, 15 bp, Homo sapiens
catctggggaggctc

SEQ ID NO: 250831 - DNA, 15 bp, Homo sapiens
acatctggggaggct

SEQ ID NO: 250832 - DNA, 15 bp, Homo sapiens
gacatctggggaggc

SEQ ID NO: 250833 - DNA, 15 bp, Homo sapiens
agacatctggggagg

SEQ ID NO: 250834 - DNA, 15 bp, Homo sapiens
gagacatctggggag

SEQ ID NO: 250835 - DNA, 15 bp, Homo sapiens
tgagacatctgggga

SEQ ID NO: 250836 - DNA, 15 bp, Homo sapiens
gtgagacatctgggg

SEQ ID NO: 250837 - DNA, 15 bp, Homo sapiens
tgtgagacatctggg

SEQ ID NO: 250838 - DNA, 15 bp, Homo sapiens
gtgtgagacatctgg

SEQ ID NO: 250839 - DNA, 15 bp, Homo sapiens
agtgtgagacatctg

SEQ ID NO: 250840 - DNA, 15 bp, Homo sapiens
cagtgtgagacatct

SEQ ID NO: 250841 - DNA, 15 bp, Homo sapiens
tcagtgtgagacatc

SEQ ID NO: 250842 - DNA, 15 bp, Homo sapiens
atcagtgtgagacat

SEQ ID NO: 250843 - DNA, 15 bp, Homo sapiens
tatcagtgtgagaca

SEQ ID NO: 250844 - DNA, 15 bp, Homo sapiens
ttatcagtgtgagac

SEQ ID NO: 250845 - DNA, 15 bp, Homo sapiens
cttatcagtgtgaga

SEQ ID NO: 250846 - DNA, 15 bp, Homo sapiens
tcttatcagtgtgag

SEQ ID NO: 250847 - DNA, 15 bp, Homo sapiens
ctcttatcagtgtga

SEQ ID NO: 250848 - DNA, 15 bp, Homo sapiens
cctcttatcagtgtg

SEQ ID NO: 250849 - DNA, 15 bp, Homo sapiens
tcctcttatcagtgt

SEQ ID NO: 250850 - DNA, 15 bp, Homo sapiens
ttcctcttatcagtg

SEQ ID NO: 250851 - DNA, 15 bp, Homo sapiens
cttcctcttatcagt

SEQ ID NO: 250852 - DNA, 15 bp, Homo sapiens
tcttcctcttatcag

SEQ ID NO: 250853 - DNA, 15 bp, Homo sapiens
ttcttcctcttatca

SEQ ID NO: 250854 - DNA, 15 bp, Homo sapiens
tttcttcctcttatc

SEQ ID NO: 250855 - DNA, 15 bp, Homo sapiens
atttcttcctcttat

SEQ ID NO: 250856 - DNA, 15 bp, Homo sapiens
tatttcttcctctta

SEQ ID NO: 250857 - DNA, 15 bp, Homo sapiens
atatttcttcctctt

SEQ ID NO: 250858 - DNA, 15 bp, Homo sapiens
gatatttcttcctct

SEQ ID NO: 250859 - DNA, 15 bp, Homo sapiens
ggatatttcttcctc

SEQ ID NO: 250860 - DNA, 15 bp, Homo sapiens
tggatatttcttcct

SEQ ID NO: 250861 - DNA, 15 bp, Homo sapiens
ttggatatttcttcc

SEQ ID NO: 250862 - DNA, 15 bp, Homo sapiens
tttggatatttcttc

SEQ ID NO: 250863 - DNA, 15 bp, Homo sapiens
ctttggatatttctt

SEQ ID NO: 250864 - DNA, 15 bp, Homo sapiens
gctttggatatttct

SEQ ID NO: 250865 - DNA, 15 bp, Homo sapiens
ggctttggatatttc

SEQ ID NO: 250866 - DNA, 15 bp, Homo sapiens
tggctttggatattt

SEQ ID NO: 250867 - DNA, 15 bp, Homo sapiens
atggctttggatatt

SEQ ID NO: 250868 - DNA, 15 bp, Homo sapiens
aatggctttggatat

SEQ ID NO: 250869 - DNA, 15 bp, Homo sapiens
taatggctttggata

SEQ ID NO: 250870 - DNA, 15 bp, Homo sapiens
ctaatggctttggat

SEQ ID NO: 250871 - DNA, 15 bp, Homo sapiens
gctaatggctttgga

SEQ ID NO: 250872 - DNA, 15 bp, Homo sapiens
ggctaatggctttgg

SEQ ID NO: 250873 - DNA, 15 bp, Homo sapiens
tggctaatggctttg

SEQ ID NO: 250874 - DNA, 15 bp, Homo sapiens
ctggctaatggcttt

SEQ ID NO: 250875 - DNA, 15 bp, Homo sapiens
actggctaatggctt

SEQ ID NO: 250876 - DNA, 15 bp, Homo sapiens
cactggctaatggct

SEQ ID NO: 250877 - DNA, 15 bp, Homo sapiens
ccactggctaatggc

SEQ ID NO: 250878 - DNA, 15 bp, Homo sapiens
accactggctaatgg

SEQ ID NO: 250879 - DNA, 15 bp, Homo sapiens
caccactggctaatg

SEQ ID NO: 250880 - DNA, 15 bp, Homo sapiens
tcaccactggctaat

SEQ ID NO: 250881 - DNA, 15 bp, Homo sapiens
gtcaccactggctaa

SEQ ID NO: 250882 - DNA, 15 bp, Homo sapiens
tgtcaccactggcta

SEQ ID NO: 250883 - DNA, 15 bp, Homo sapiens
ttgtcaccactggct

SEQ ID NO: 250884 - DNA, 15 bp, Homo sapiens
tttgtcaccactggc

SEQ ID NO: 250885 - DNA, 15 bp, Homo sapiens
gtttgtcaccactgg

SEQ ID NO: 250886 - DNA, 15 bp, Homo sapiens
tgtttgtcaccactg

SEQ ID NO: 250887 - DNA, 15 bp, Homo sapiens
ctgtttgtcaccact

SEQ ID NO: 250888 - DNA, 15 bp, Homo sapiens
actgtttgtcaccac

SEQ ID NO: 250889 - DNA, 15 bp, Homo sapiens
cactgtttgtcacca

SEQ ID NO: 250890 - DNA, 15 bp, Homo sapiens
acactgtttgtcacc

SEQ ID NO: 250891 - DNA, 15 bp, Homo sapiens
cacactgtttgtcac

SEQ ID NO: 250892 - DNA, 15 bp, Homo sapiens
acacactgtttgtca

SEQ ID NO: 250893 - DNA, 15 bp, Homo sapiens
cacacactgtttgtc

SEQ ID NO: 250894 - DNA, 15 bp, Homo sapiens
tcacacactgtttgt

SEQ ID NO: 250895 - DNA, 15 bp, Homo sapiens
ttcacacactgtttg

SEQ ID NO: 250896 - DNA, 15 bp, Homo sapiens
attcacacactgttt

SEQ ID NO: 250897 - DNA, 15 bp, Homo sapiens
aattcacacactgtt

SEQ ID NO: 250898 - DNA, 15 bp, Homo sapiens
caattcacacactgt

SEQ ID NO: 250899 - DNA, 15 bp, Homo sapiens
acaattcacacactg

SEQ ID NO: 250900 - DNA, 15 bp, Homo sapiens
tacaattcacacact

SEQ ID NO: 250901 - DNA, 15 bp, Homo sapiens
ttacaattcacacac

SEQ ID NO: 250902 - DNA, 15 bp, Homo sapiens
gttacaattcacaca

SEQ ID NO: 250903 - DNA, 15 bp, Homo sapiens
cgttacaattcacac

SEQ ID NO: 250904 - DNA, 15 bp, Homo sapiens
ccgttacaattcaca

SEQ ID NO: 250905 - DNA, 15 bp, Homo sapiens
tccgttacaattcac

SEQ ID NO: 250906 - DNA, 15 bp, Homo sapiens
gtccgttacaattca

SEQ ID NO: 250907 - DNA, 15 bp, Homo sapiens
cgtccgttacaattc

SEQ ID NO: 250908 - DNA, 15 bp, Homo sapiens
gcgtccgttacaatt

SEQ ID NO: 250909 - DNA, 15 bp, Homo sapiens
tgcgtccgttacaat

SEQ ID NO: 250910 - DNA, 15 bp, Homo sapiens
ctgcgtccgttacaa

SEQ ID NO: 250911 - DNA, 15 bp, Homo sapiens
cctgcgtccgttaca

SEQ ID NO: 250912 - DNA, 15 bp, Homo sapiens
ccctgcgtccgttac

SEQ ID NO: 250913 - DNA, 15 bp, Homo sapiens
accctgcgtccgtta

SEQ ID NO: 250914 - DNA, 15 bp, Homo sapiens
caccctgcgtccgtt

SEQ ID NO: 250915 - DNA, 15 bp, Homo sapiens
ccaccctgcgtccgt

SEQ ID NO: 250916 - DNA, 15 bp, Homo sapiens
gccaccctgcgtccg

SEQ ID NO: 250917 - DNA, 15 bp, Homo sapiens
agccaccctgcgtcc

SEQ ID NO: 250918 - DNA, 15 bp, Homo sapiens
cagccaccctgcgtc

SEQ ID NO: 250919 - DNA, 15 bp, Homo sapiens
tcagccaccctgcgt

SEQ ID NO: 250920 - DNA, 15 bp, Homo sapiens
ttcagccaccctgcg

SEQ ID NO: 250921 - DNA, 15 bp, Homo sapiens
cttcagccaccctgc

SEQ ID NO: 250922 - DNA, 15 bp, Homo sapiens
tcttcagccaccctg

SEQ ID NO: 250923 - DNA, 15 bp, Homo sapiens
ttcttcagccaccct

SEQ ID NO: 250924 - DNA, 15 bp, Homo sapiens
tttcttcagccaccc

SEQ ID NO: 250925 - DNA, 15 bp, Homo sapiens
ttttcttcagccacc

SEQ ID NO: 250926 - DNA, 15 bp, Homo sapiens
cttttcttcagccac

SEQ ID NO: 250927 - DNA, 15 bp, Homo sapiens
tcttttcttcagcca

SEQ ID NO: 250928 - DNA, 15 bp, Homo sapiens
gtcttttcttcagcc

SEQ ID NO: 250929 - DNA, 15 bp, Homo sapiens
agtcttttcttcagc

SEQ ID NO: 250930 - DNA, 15 bp, Homo sapiens
cagtcttttcttcag

SEQ ID NO: 250931 - DNA, 15 bp, Homo sapiens
tcagtcttttcttca

SEQ ID NO: 250932 - DNA, 15 bp, Homo sapiens
ctcagtcttttcttc

SEQ ID NO: 250933 - DNA, 15 bp, Homo sapiens
actcagtcttttctt

SEQ ID NO: 250934 - DNA, 15 bp, Homo sapiens
cactcagtcttttct

SEQ ID NO: 250935 - DNA, 15 bp, Homo sapiens
ccactcagtcttttc

SEQ ID NO: 250936 - DNA, 15 bp, Homo sapiens
accactcagtctttt

SEQ ID NO: 250937 - DNA, 15 bp, Homo sapiens
aaccactcagtcttt

SEQ ID NO: 250938 - DNA, 15 bp, Homo sapiens
caaccactcagtctt

SEQ ID NO: 250939 - DNA, 15 bp, Homo sapiens
ccaaccactcagtct

SEQ ID NO: 250940 - DNA, 15 bp, Homo sapiens
tccaaccactcagtc

SEQ ID NO: 250941 - DNA, 15 bp, Homo sapiens
ctccaaccactcagt

SEQ ID NO: 250942 - DNA, 15 bp, Homo sapiens
tctccaaccactcag

SEQ ID NO: 250943 - DNA, 15 bp, Homo sapiens
gtctccaaccactca

SEQ ID NO: 250944 - DNA, 15 bp, Homo sapiens
tgtctccaaccactc

SEQ ID NO: 250945 - DNA, 15 bp, Homo sapiens
ctgtctccaaccact

SEQ ID NO: 250946 - DNA, 15 bp, Homo sapiens
cctgtctccaaccac

SEQ ID NO: 250947 - DNA, 15 bp, Homo sapiens
gcctgtctccaacca

SEQ ID NO: 250948 - DNA, 15 bp, Homo sapiens
tgcctgtctccaacc

SEQ ID NO: 250949 - DNA, 15 bp, Homo sapiens
ctgcctgtctccaac

SEQ ID NO: 250950 - DNA, 15 bp, Homo sapiens
cctgcctgtctccaa

SEQ ID NO: 250951 - DNA, 15 bp, Homo sapiens
gcctgcctgtctcca

SEQ ID NO: 250952 - DNA, 15 bp, Homo sapiens
tgcctgcctgtctcc

SEQ ID NO: 250953 - DNA, 15 bp, Homo sapiens
ctgcctgcctgtctc

SEQ ID NO: 250954 - DNA, 15 bp, Homo sapiens
cctgcctgcctgtct

SEQ ID NO: 250955 - DNA, 15 bp, Homo sapiens
gcctgcctgcctgtc

SEQ ID NO: 250956 - DNA, 15 bp, Homo sapiens
ggcctgcctgcctgt

SEQ ID NO: 250957 - DNA, 15 bp, Homo sapiens
aggcctgcctgcctg

SEQ ID NO: 250958 - DNA, 15 bp, Homo sapiens
caggcctgcctgcct

SEQ ID NO: 250959 - DNA, 15 bp, Homo sapiens
tcaggcctgcctgcc

SEQ ID NO: 250960 - DNA, 15 bp, Homo sapiens
ctcaggcctgcctgc

SEQ ID NO: 250961 - DNA, 15 bp, Homo sapiens
actcaggcctgcctg

SEQ ID NO: 250962 - DNA, 15 bp, Homo sapiens
aactcaggcctgcct

SEQ ID NO: 250963 - DNA, 15 bp, Homo sapiens
aaactcaggcctgcc

SEQ ID NO: 250964 - DNA, 15 bp, Homo sapiens
gaaactcaggcctgc

SEQ ID NO: 250965 - DNA, 15 bp, Homo sapiens
tgaaactcaggcctg

SEQ ID NO: 250966 - DNA, 15 bp, Homo sapiens
ttgaaactcaggcct

SEQ ID NO: 250967 - DNA, 15 bp, Homo sapiens
tttgaaactcaggcc

SEQ ID NO: 250968 - DNA, 15 bp, Homo sapiens
atttgaaactcaggc

SEQ ID NO: 250969 - DNA, 15 bp, Homo sapiens
gatttgaaactcagg

SEQ ID NO: 250970 - DNA, 15 bp, Homo sapiens
ggatttgaaactcag

SEQ ID NO: 250971 - DNA, 15 bp, Homo sapiens
aggatttgaaactca

SEQ ID NO: 250972 - DNA, 15 bp, Homo sapiens
aaggatttgaaactc

SEQ ID NO: 250973 - DNA, 15 bp, Homo sapiens
taaggatttgaaact

SEQ ID NO: 250974 - DNA, 15 bp, Homo sapiens
gtaaggatttgaaac

SEQ ID NO: 250975 - DNA, 15 bp, Homo sapiens
ggtaaggatttgaaa

SEQ ID NO: 250976 - DNA, 15 bp, Homo sapiens
gggtaaggatttgaa

SEQ ID NO: 250977 - DNA, 15 bp, Homo sapiens
agggtaaggatttga

SEQ ID NO: 250978 - DNA, 15 bp, Homo sapiens
cagggtaaggatttg

SEQ ID NO: 250979 - DNA, 15 bp, Homo sapiens
acagggtaaggattt

SEQ ID NO: 250980 - DNA, 15 bp, Homo sapiens
gacagggtaaggatt

SEQ ID NO: 250981 - DNA, 15 bp, Homo sapiens
tgacagggtaaggat

SEQ ID NO: 250982 - DNA, 15 bp, Homo sapiens
gtgacagggtaagga

SEQ ID NO: 250983 - DNA, 15 bp, Homo sapiens
agtgacagggtaagg

SEQ ID NO: 250984 - DNA, 15 bp, Homo sapiens
aagtgacagggtaag

SEQ ID NO: 250985 - DNA, 15 bp, Homo sapiens
aaagtgacagggtaa

SEQ ID NO: 250986 - DNA, 15 bp, Homo sapiens
gaaagtgacagggta

SEQ ID NO: 250987 - DNA, 15 bp, Homo sapiens
tgaaagtgacagggt

SEQ ID NO: 250988 - DNA, 15 bp, Homo sapiens
ctgaaagtgacaggg

SEQ ID NO: 250989 - DNA, 15 bp, Homo sapiens
gctgaaagtgacagg

SEQ ID NO: 250990 - DNA, 15 bp, Homo sapiens
tgctgaaagtgacag

SEQ ID NO: 250991 - DNA, 15 bp, Homo sapiens
gtgctgaaagtgaca

SEQ ID NO: 250992 - DNA, 15 bp, Homo sapiens
agtgctgaaagtgac

SEQ ID NO: 250993 - DNA, 15 bp, Homo sapiens
aagtgctgaaagtga

SEQ ID NO: 250994 - DNA, 15 bp, Homo sapiens
aaagtgctgaaagtg

SEQ ID NO: 250995 - DNA, 15 bp, Homo sapiens
caaagtgctgaaagt

SEQ ID NO: 250996 - DNA, 15 bp, Homo sapiens
ccaaagtgctgaaag

SEQ ID NO: 250997 - DNA, 15 bp, Homo sapiens
cccaaagtgctgaaa

SEQ ID NO: 250998 - DNA, 15 bp, Homo sapiens
tcccaaagtgctgaa

SEQ ID NO: 250999 - DNA, 15 bp, Homo sapiens
atcccaaagtgctga

SEQ ID NO: 251000 - DNA, 15 bp, Homo sapiens
catcccaaagtgctg

SEQ ID NO: 251001 - DNA, 15 bp, Homo sapiens
gcatcccaaagtgct

SEQ ID NO: 251002 - DNA, 15 bp, Homo sapiens
agcatcccaaagtgc

SEQ ID NO: 251003 - DNA, 15 bp, Homo sapiens
cagcatcccaaagtg

SEQ ID NO: 251004 - DNA, 15 bp, Homo sapiens
tcagcatcccaaagt

SEQ ID NO: 251005 - DNA, 15 bp, Homo sapiens
ctcagcatcccaaag

SEQ ID NO: 251006 - DNA, 15 bp, Homo sapiens
cctcagcatcccaaa

SEQ ID NO: 251007 - DNA, 15 bp, Homo sapiens
gcctcagcatcccaa

SEQ ID NO: 251008 - DNA, 15 bp, Homo sapiens
tgcctcagcatccca

SEQ ID NO: 251009 - DNA, 15 bp, Homo sapiens
ctgcctcagcatccc

SEQ ID NO: 251010 - DNA, 15 bp, Homo sapiens
cctgcctcagcatcc

SEQ ID NO: 251011 - DNA, 15 bp, Homo sapiens
gcctgcctcagcatc

SEQ ID NO: 251012 - DNA, 15 bp, Homo sapiens
tgcctgcctcagcat

SEQ ID NO: 251013 - DNA, 15 bp, Homo sapiens
ctgcctgcctcagca

SEQ ID NO: 251014 - DNA, 15 bp, Homo sapiens
gtgatctgcctgcct

SEQ ID NO: 251015 - DNA, 15 bp, Homo sapiens
cgtgatctgcctgcc

SEQ ID NO: 251016 - DNA, 15 bp, Homo sapiens
tcgtgatctgcctgc

SEQ ID NO: 251017 - DNA, 15 bp, Homo sapiens
ctcgtgatctgcctg

SEQ ID NO: 251018 - DNA, 15 bp, Homo sapiens
cctcgtgatctgcct

SEQ ID NO: 251019 - DNA, 15 bp, Homo sapiens
acctcgtgatctgcc

SEQ ID NO: 251020 - DNA, 15 bp, Homo sapiens
gacctcgtgatctgc

SEQ ID NO: 251021 - DNA, 15 bp, Homo sapiens
tgacctcgtgatctg

SEQ ID NO: 251022 - DNA, 15 bp, Homo sapiens
ttgacctcgtgatct

SEQ ID NO: 251023 - DNA, 15 bp, Homo sapiens
cttgacctcgtgatc

SEQ ID NO: 251024 - DNA, 15 bp, Homo sapiens
tcttgacctcgtgat

SEQ ID NO: 251025 - DNA, 15 bp, Homo sapiens
ctcttgacctcgtga

SEQ ID NO: 251026 - DNA, 15 bp, Homo sapiens
tctcttgacctcgtg

SEQ ID NO: 251027 - DNA, 15 bp, Homo sapiens
atctcttgacctcgt

SEQ ID NO: 251028 - DNA, 15 bp, Homo sapiens
gatctcttgacctcg

SEQ ID NO: 251029 - DNA, 15 bp, Homo sapiens
cgatctcttgacctc

SEQ ID NO: 251030 - DNA, 15 bp, Homo sapiens
tcgatctcttgacct

SEQ ID NO: 251031 - DNA, 15 bp, Homo sapiens
ctcgatctcttgacc

SEQ ID NO: 251032 - DNA, 15 bp, Homo sapiens
atggtctcgatctct

SEQ ID NO: 251033 - DNA, 15 bp, Homo sapiens
cgatggtctcgatct

SEQ ID NO: 251034 - DNA, 15 bp, Homo sapiens
acgatggtctcgatc

SEQ ID NO: 251035 - DNA, 15 bp, Homo sapiens
cacgatggtctcgat

SEQ ID NO: 251036 - DNA, 15 bp, Homo sapiens
gcacgatggtctcga

SEQ ID NO: 251037 - DNA, 15 bp, Homo sapiens
ggcacgatggtctcg

SEQ ID NO: 251038 - DNA, 15 bp, Homo sapiens
tggcacgatggtctc

SEQ ID NO: 251039 - DNA, 15 bp, Homo sapiens
atggcacgatggtct

SEQ ID NO: 251040 - DNA, 15 bp, Homo sapiens
gatggcacgatggtc

SEQ ID NO: 251041 - DNA, 15 bp, Homo sapiens
tgatggcacgatggt

SEQ ID NO: 251042 - DNA, 15 bp, Homo sapiens
atgatggcacgatgg

SEQ ID NO: 251043 - DNA, 15 bp, Homo sapiens
catgatggcacgatg

SEQ ID NO: 251044 - DNA, 15 bp, Homo sapiens
ccatgatggcacgat

SEQ ID NO: 251045 - DNA, 15 bp, Homo sapiens
gccatgatggcacga

SEQ ID NO: 251046 - DNA, 15 bp, Homo sapiens
ggccatgatggcacg

SEQ ID NO: 251047 - DNA, 15 bp, Homo sapiens
tggccatgatggcac

SEQ ID NO: 251048 - DNA, 15 bp, Homo sapiens
ttggccatgatggca

SEQ ID NO: 251049 - DNA, 15 bp, Homo sapiens
gttggccatgatggc

SEQ ID NO: 251050 - DNA, 15 bp, Homo sapiens
tgttggccatgatgg

SEQ ID NO: 251051 - DNA, 15 bp, Homo sapiens
atgttggccatgatg

SEQ ID NO: 251052 - DNA, 15 bp, Homo sapiens
catgttggccatgat

SEQ ID NO: 251053 - DNA, 15 bp, Homo sapiens
ccatgttggccatga

SEQ ID NO: 251054 - DNA, 15 bp, Homo sapiens
accatgttggccatg

SEQ ID NO: 251055 - DNA, 15 bp, Homo sapiens
caccatgttggccat

SEQ ID NO: 251056 - DNA, 15 bp, Homo sapiens
acccagctaattttt

SEQ ID NO: 251057 - DNA, 15 bp, Homo sapiens
cacccagctaatttt

SEQ ID NO: 251058 - DNA, 15 bp, Homo sapiens
acacccagctaattt

SEQ ID NO: 251059 - DNA, 15 bp, Homo sapiens
cacacccagctaatt

SEQ ID NO: 251060 - DNA, 15 bp, Homo sapiens
ccacacccagctaat

SEQ ID NO: 251061 - DNA, 15 bp, Homo sapiens
accacacccagctaa

SEQ ID NO: 251062 - DNA, 15 bp, Homo sapiens
tgccaccacacccag

SEQ ID NO: 251063 - DNA, 15 bp, Homo sapiens
gtgccaccacaccca

SEQ ID NO: 251064 - DNA, 15 bp, Homo sapiens
cgtgccaccacaccc

SEQ ID NO: 251065 - DNA, 15 bp, Homo sapiens
gcgtgccaccacacc

SEQ ID NO: 251066 - DNA, 15 bp, Homo sapiens
tgcgtgccaccacac

SEQ ID NO: 251067 - DNA, 15 bp, Homo sapiens
atgcgtgccaccaca

SEQ ID NO: 251068 - DNA, 15 bp, Homo sapiens
gatgcgtgccaccac

SEQ ID NO: 251069 - DNA, 15 bp, Homo sapiens
agatgcgtgccacca

SEQ ID NO: 251070 - DNA, 15 bp, Homo sapiens
cagatgcgtgccacc

SEQ ID NO: 251071 - DNA, 15 bp, Homo sapiens
acagatgcgtgccac

SEQ ID NO: 251072 - DNA, 15 bp, Homo sapiens
tacagatgcgtgcca

SEQ ID NO: 251073 - DNA, 15 bp, Homo sapiens
ctacagatgcgtgcc

SEQ ID NO: 251074 - DNA, 15 bp, Homo sapiens
actacagatgcgtgc

SEQ ID NO: 251075 - DNA, 15 bp, Homo sapiens
gactacagatgcgtg

SEQ ID NO: 251076 - DNA, 15 bp, Homo sapiens
ggactacagatgcgt

SEQ ID NO: 251077 - DNA, 15 bp, Homo sapiens
gggactacagatgcg

SEQ ID NO: 251078 - DNA, 15 bp, Homo sapiens
tgggactacagatgc

SEQ ID NO: 251079 - DNA, 15 bp, Homo sapiens
aactgcaacctccgc

SEQ ID NO: 251080 - DNA, 15 bp, Homo sapiens
taactgcaacctccg

SEQ ID NO: 251081 - DNA, 15 bp, Homo sapiens
ctaactgcaacctcc

SEQ ID NO: 251082 - DNA, 15 bp, Homo sapiens
gctaactgcaacctc

SEQ ID NO: 251083 - DNA, 15 bp, Homo sapiens
ggctaactgcaacct

SEQ ID NO: 251084 - DNA, 15 bp, Homo sapiens
cggctaactgcaacc

SEQ ID NO: 251085 - DNA, 15 bp, Homo sapiens
tcggctaactgcaac

SEQ ID NO: 251086 - DNA, 15 bp, Homo sapiens
ctcggctaactgcaa

SEQ ID NO: 251087 - DNA, 15 bp, Homo sapiens
tctcggctaactgca

SEQ ID NO: 251088 - DNA, 15 bp, Homo sapiens
atctcggctaactgc

SEQ ID NO: 251089 - DNA, 15 bp, Homo sapiens
aatctcggctaactg

SEQ ID NO: 251090 - DNA, 15 bp, Homo sapiens
caatctcggctaact

SEQ ID NO: 251091 - DNA, 15 bp, Homo sapiens
gcaatctcggctaac

SEQ ID NO: 251092 - DNA, 15 bp, Homo sapiens
tgcaatctcggctaa

SEQ ID NO: 251093 - DNA, 15 bp, Homo sapiens
gtgcaatctcggcta

SEQ ID NO: 251094 - DNA, 15 bp, Homo sapiens
ggtgcaatctcggct

SEQ ID NO: 251095 - DNA, 15 bp, Homo sapiens
tggtgcaatctcggc

SEQ ID NO: 251096 - DNA, 15 bp, Homo sapiens
gtggtgcaatctcgg

SEQ ID NO: 251097 - DNA, 15 bp, Homo sapiens
agtggtgcaatctcg

SEQ ID NO: 251098 - DNA, 15 bp, Homo sapiens
gagtggtgcaatctc

SEQ ID NO: 251099 - DNA, 15 bp, Homo sapiens
tgagtggtgcaatct

SEQ ID NO: 251100 - DNA, 15 bp, Homo sapiens
gtgagtggtgcaatc

SEQ ID NO: 251101 - DNA, 15 bp, Homo sapiens
agtgagtggtgcaat

SEQ ID NO: 251102 - DNA, 15 bp, Homo sapiens
cagtgagtggtgcaa

SEQ ID NO: 251103 - DNA, 15 bp, Homo sapiens
tcagtgagtggtgca

SEQ ID NO: 251104 - DNA, 15 bp, Homo sapiens
ttcagtgagtggtgc

SEQ ID NO: 251105 - DNA, 15 bp, Homo sapiens
gttcagtgagtggtg

SEQ ID NO: 251106 - DNA, 15 bp, Homo sapiens
agttcagtgagtggt

SEQ ID NO: 251107 - DNA, 15 bp, Homo sapiens
gagttcagtgagtgg

SEQ ID NO: 251108 - DNA, 15 bp, Homo sapiens
ggagttcagtgagtg

SEQ ID NO: 251109 - DNA, 15 bp, Homo sapiens
tggagttcagtgagt

SEQ ID NO: 251110 - DNA, 15 bp, Homo sapiens
ctggagttcagtgag

SEQ ID NO: 251111 - DNA, 15 bp, Homo sapiens
gctggagttcagtga

SEQ ID NO: 251112 - DNA, 15 bp, Homo sapiens
ggctggagttcagtg

SEQ ID NO: 251113 - DNA, 15 bp, Homo sapiens
aggctggagttcagt

SEQ ID NO: 251114 - DNA, 15 bp, Homo sapiens
caggctggagttcag

SEQ ID NO: 251115 - DNA, 15 bp, Homo sapiens
ccaggctggagttca

SEQ ID NO: 251116 - DNA, 15 bp, Homo sapiens
cccaggctggagttc

SEQ ID NO: 251117 - DNA, 15 bp, Homo sapiens
acccaggctggagtt

SEQ ID NO: 251118 - DNA, 15 bp, Homo sapiens
ttctgtcacccaggc

SEQ ID NO: 251119 - DNA, 15 bp, Homo sapiens
gttctgtcacccagg

SEQ ID NO: 251120 - DNA, 15 bp, Homo sapiens
tgttctgtcacccag

SEQ ID NO: 251121 - DNA, 15 bp, Homo sapiens
ttgttctgtcaccca

SEQ ID NO: 251122 - DNA, 15 bp, Homo sapiens
cttgttctgtcaccc

SEQ ID NO: 251123 - DNA, 15 bp, Homo sapiens
tcttgttctgtcacc

SEQ ID NO: 251124 - DNA, 15 bp, Homo sapiens
gtcttgttctgtcac

SEQ ID NO: 251125 - DNA, 15 bp, Homo sapiens
agtcttgttctgtca

SEQ ID NO: 251126 - DNA, 15 bp, Homo sapiens
gagtcttgttctgtc

SEQ ID NO: 251127 - DNA, 15 bp, Homo sapiens
ggagtcttgttctgt

SEQ ID NO: 251128 - DNA, 15 bp, Homo sapiens
tggagtcttgttctg

SEQ ID NO: 251129 - DNA, 15 bp, Homo sapiens
atggagtcttgttct

SEQ ID NO: 251130 - DNA, 15 bp, Homo sapiens
gatggagtcttgttc

SEQ ID NO: 251131 - DNA, 15 bp, Homo sapiens
ggatggagtcttgtt

SEQ ID NO: 251132 - DNA, 15 bp, Homo sapiens
gggatggagtcttgt

SEQ ID NO: 251133 - DNA, 15 bp, Homo sapiens
ggggatggagtcttg

SEQ ID NO: 251134 - DNA, 15 bp, Homo sapiens
tggggatggagtctt

SEQ ID NO: 251135 - DNA, 15 bp, Homo sapiens
gtggggatggagtct

SEQ ID NO: 251136 - DNA, 15 bp, Homo sapiens
ggtggggatggagtc

SEQ ID NO: 251137 - DNA, 15 bp, Homo sapiens
gggtggggatggagt

SEQ ID NO: 251138 - DNA, 15 bp, Homo sapiens
ggggtggggatggag

SEQ ID NO: 251139 - DNA, 15 bp, Homo sapiens
aggggtggggatgga

SEQ ID NO: 251140 - DNA, 15 bp, Homo sapiens
gaggggtggggatgg

SEQ ID NO: 251141 - DNA, 15 bp, Homo sapiens
ggaggggtggggatg

SEQ ID NO: 251142 - DNA, 15 bp, Homo sapiens
tggaggggtggggat

SEQ ID NO: 251143 - DNA, 15 bp, Homo sapiens
gtggaggggtgggga

SEQ ID NO: 251144 - DNA, 15 bp, Homo sapiens
ggtggaggggtgggg

SEQ ID NO: 251145 - DNA, 15 bp, Homo sapiens
gggtggaggggtggg

SEQ ID NO: 251146 - DNA, 15 bp, Homo sapiens
ggggtggaggggtgg

SEQ ID NO: 251147 - DNA, 15 bp, Homo sapiens
gggggtggaggggtg

SEQ ID NO: 251148 - DNA, 15 bp, Homo sapiens
tgggggtggaggggt

SEQ ID NO: 251149 - DNA, 15 bp, Homo sapiens
gtgggggtggagggg

SEQ ID NO: 251150 - DNA, 15 bp, Homo sapiens
ggtgggggtggaggg

SEQ ID NO: 251151 - DNA, 15 bp, Homo sapiens
tggtgggggtggagg

SEQ ID NO: 251152 - DNA, 15 bp, Homo sapiens
gtggtgggggtggag

SEQ ID NO: 251153 - DNA, 15 bp, Homo sapiens
ggtggtgggggtgga

SEQ ID NO: 251154 - DNA, 15 bp, Homo sapiens
gggtggtgggggtgg

SEQ ID NO: 251155 - DNA, 15 bp, Homo sapiens
ggggtggtgggggtg

SEQ ID NO: 251156 - DNA, 15 bp, Homo sapiens
gggggtggtgggggt

SEQ ID NO: 251157 - DNA, 15 bp, Homo sapiens
ggggggtggtggggg

SEQ ID NO: 251158 - DNA, 15 bp, Homo sapiens
gggggggtggtgggg

SEQ ID NO: 251159 - DNA, 15 bp, Homo sapiens
ggggggggtggtggg

SEQ ID NO: 251160 - DNA, 15 bp, Homo sapiens
gggggggggtggtgg

SEQ ID NO: 251161 - DNA, 15 bp, Homo sapiens
ggggggggggtggtg

SEQ ID NO: 251162 - DNA, 15 bp, Homo sapiens
gggggggggggtggt

SEQ ID NO: 251163 - DNA, 15 bp, Homo sapiens
tgggggggggggtgg

SEQ ID NO: 251164 - DNA, 15 bp, Homo sapiens
ttgggggggggggtg

SEQ ID NO: 251165 - DNA, 15 bp, Homo sapiens
tttgggggggggggt

SEQ ID NO: 251166 - DNA, 15 bp, Homo sapiens
ttttggggggggggg

SEQ ID NO: 251167 - DNA, 15 bp, Homo sapiens
tttttgggggggggg

SEQ ID NO: 251168 - DNA, 15 bp, Homo sapiens
ttttttggggggggg

SEQ ID NO: 251169 - DNA, 15 bp, Homo sapiens
tttttttgggggggg

SEQ ID NO: 251170 - DNA, 15 bp, Homo sapiens
ctttttttggggggg

SEQ ID NO: 251171 - DNA, 15 bp, Homo sapiens
tctttttttgggggg

SEQ ID NO: 251172 - DNA, 15 bp, Homo sapiens
ctctttttttggggg

SEQ ID NO: 251173 - DNA, 15 bp, Homo sapiens
cctctttttttgggg

SEQ ID NO: 251174 - DNA, 15 bp, Homo sapiens
gcctctttttttggg

SEQ ID NO: 251175 - DNA, 15 bp, Homo sapiens
tgcctctttttttgg

SEQ ID NO: 251176 - DNA, 15 bp, Homo sapiens
ctgcctctttttttg

SEQ ID NO: 251177 - DNA, 15 bp, Homo sapiens
cctgcctcttttttt

SEQ ID NO: 251178 - DNA, 15 bp, Homo sapiens
tcctgcctctttttt

SEQ ID NO: 251179 - DNA, 15 bp, Homo sapiens
atcctgcctcttttt

SEQ ID NO: 251180 - DNA, 15 bp, Homo sapiens
catcctgcctctttt

SEQ ID NO: 251181 - DNA, 15 bp, Homo sapiens
gcatcctgcctcttt

SEQ ID NO: 251182 - DNA, 15 bp, Homo sapiens
ggcatcctgcctctt

SEQ ID NO: 251183 - DNA, 15 bp, Homo sapiens
tggcatcctgcctct

SEQ ID NO: 251184 - DNA, 15 bp, Homo sapiens
atggcatcctgcctc

SEQ ID NO: 251185 - DNA, 15 bp, Homo sapiens
catggcatcctgcct

SEQ ID NO: 251186 - DNA, 15 bp, Homo sapiens
ccatggcatcctgcc

SEQ ID NO: 251187 - DNA, 15 bp, Homo sapiens
cccatggcatcctgc

SEQ ID NO: 251188 - DNA, 15 bp, Homo sapiens
ccccatggcatcctg

SEQ ID NO: 251189 - DNA, 15 bp, Homo sapiens
accccatggcatcct

SEQ ID NO: 251190 - DNA, 15 bp, Homo sapiens
aaccccatggcatcc

SEQ ID NO: 251191 - DNA, 15 bp, Homo sapiens
caaccccatggcatc

SEQ ID NO: 251192 - DNA, 15 bp, Homo sapiens
tcaaccccatggcat

SEQ ID NO: 251193 - DNA, 15 bp, Homo sapiens
ttcaaccccatggca

SEQ ID NO: 251194 - DNA, 15 bp, Homo sapiens
cttcaaccccatggc

SEQ ID NO: 251195 - DNA, 15 bp, Homo sapiens
tcttcaaccccatgg

SEQ ID NO: 251196 - DNA, 15 bp, Homo sapiens
ttcttcaaccccatg

SEQ ID NO: 251197 - DNA, 15 bp, Homo sapiens
tttcttcaaccccat

SEQ ID NO: 251198 - DNA, 15 bp, Homo sapiens
ttttcttcaacccca

SEQ ID NO: 251199 - DNA, 15 bp, Homo sapiens
gttttcttcaacccc

SEQ ID NO: 251200 - DNA, 15 bp, Homo sapiens
tgttttcttcaaccc

SEQ ID NO: 251201 - DNA, 15 bp, Homo sapiens
ctgttttcttcaacc

SEQ ID NO: 251202 - DNA, 15 bp, Homo sapiens
cctgttttcttcaac

SEQ ID NO: 251203 - DNA, 15 bp, Homo sapiens
gcctgttttcttcaa

SEQ ID NO: 251204 - DNA, 15 bp, Homo sapiens
ggcctgttttcttca

SEQ ID NO: 251205 - DNA, 15 bp, Homo sapiens
gggcctgttttcttc

SEQ ID NO: 251206 - DNA, 15 bp, Homo sapiens
agggcctgttttctt

SEQ ID NO: 251207 - DNA, 15 bp, Homo sapiens
cagggcctgttttct

SEQ ID NO: 251208 - DNA, 15 bp, Homo sapiens
acagggcctgttttc

SEQ ID NO: 251209 - DNA, 15 bp, Homo sapiens
tacagggcctgtttt

SEQ ID NO: 251210 - DNA, 15 bp, Homo sapiens
ctacagggcctgttt

SEQ ID NO: 251211 - DNA, 15 bp, Homo sapiens
gctacagggcctgtt

SEQ ID NO: 251212 - DNA, 15 bp, Homo sapiens
ggctacagggcctgt

SEQ ID NO: 251213 - DNA, 15 bp, Homo sapiens
tggctacagggcctg

SEQ ID NO: 251214 - DNA, 15 bp, Homo sapiens
ctggctacagggcct

SEQ ID NO: 251215 - DNA, 15 bp, Homo sapiens
cctggctacagggcc

SEQ ID NO: 251216 - DNA, 15 bp, Homo sapiens
gcctggctacagggc

SEQ ID NO: 251217 - DNA, 15 bp, Homo sapiens
agcctggctacaggg

SEQ ID NO: 251218 - DNA, 15 bp, Homo sapiens
cagcctggctacagg

SEQ ID NO: 251219 - DNA, 15 bp, Homo sapiens
gcagcctggctacag

SEQ ID NO: 251220 - DNA, 15 bp, Homo sapiens
ggcagcctggctaca

SEQ ID NO: 251221 - DNA, 15 bp, Homo sapiens
aggcagcctggctac

SEQ ID NO: 251222 - DNA, 15 bp, Homo sapiens
caggcagcctggcta

SEQ ID NO: 251223 - DNA, 15 bp, Homo sapiens
tcaggcagcctggct

SEQ ID NO: 251224 - DNA, 15 bp, Homo sapiens
ctcaggcagcctggc

SEQ ID NO: 251225 - DNA, 15 bp, Homo sapiens
actcaggcagcctgg

SEQ ID NO: 251226 - DNA, 15 bp, Homo sapiens
gactcaggcagcctg

SEQ ID NO: 251227 - DNA, 15 bp, Homo sapiens
agactcaggcagcct

SEQ ID NO: 251228 - DNA, 15 bp, Homo sapiens
cagactcaggcagcc

SEQ ID NO: 251229 - DNA, 15 bp, Homo sapiens
tcagactcaggcagc

SEQ ID NO: 251230 - DNA, 15 bp, Homo sapiens
ttcagactcaggcag

SEQ ID NO: 251231 - DNA, 15 bp, Homo sapiens
attcagactcaggca

SEQ ID NO: 251232 - DNA, 15 bp, Homo sapiens
gattcagactcaggc

SEQ ID NO: 251233 - DNA, 15 bp, Homo sapiens
ggattcagactcagg

SEQ ID NO: 251234 - DNA, 15 bp, Homo sapiens
aggattcagactcag

SEQ ID NO: 251235 - DNA, 15 bp, Homo sapiens
caggattcagactca

SEQ ID NO: 251236 - DNA, 15 bp, Homo sapiens
ccaggattcagactc

SEQ ID NO: 251237 - DNA, 15 bp, Homo sapiens
gccaggattcagact

SEQ ID NO: 251238 - DNA, 15 bp, Homo sapiens
agccaggattcagac

SEQ ID NO: 251239 - DNA, 15 bp, Homo sapiens
gagccaggattcaga

SEQ ID NO: 251240 - DNA, 15 bp, Homo sapiens
agagccaggattcag

SEQ ID NO: 251241 - DNA, 15 bp, Homo sapiens
tagagccaggattca

SEQ ID NO: 251242 - DNA, 15 bp, Homo sapiens
gtagagccaggattc

SEQ ID NO: 251243 - DNA, 15 bp, Homo sapiens
agtagagccaggatt

SEQ ID NO: 251244 - DNA, 15 bp, Homo sapiens
cagtagagccaggat

SEQ ID NO: 251245 - DNA, 15 bp, Homo sapiens
acagtagagccagga

SEQ ID NO: 251246 - DNA, 15 bp, Homo sapiens
aacagtagagccagg

SEQ ID NO: 251247 - DNA, 15 bp, Homo sapiens
gaacagtagagccag

SEQ ID NO: 251248 - DNA, 15 bp, Homo sapiens
tgaacagtagagcca

SEQ ID NO: 251249 - DNA, 15 bp, Homo sapiens
gtgaacagtagagcc

SEQ ID NO: 251250 - DNA, 15 bp, Homo sapiens
ggtgaacagtagagc

SEQ ID NO: 251251 - DNA, 15 bp, Homo sapiens
tggtgaacagtagag

SEQ ID NO: 251252 - DNA, 15 bp, Homo sapiens
ttggtgaacagtaga

SEQ ID NO: 251253 - DNA, 15 bp, Homo sapiens
gttggtgaacagtag

SEQ ID NO: 251254 - DNA, 15 bp, Homo sapiens
agttggtgaacagta

SEQ ID NO: 251255 - DNA, 15 bp, Homo sapiens
cagttggtgaacagt

SEQ ID NO: 251256 - DNA, 15 bp, Homo sapiens
acagttggtgaacag

SEQ ID NO: 251257 - DNA, 15 bp, Homo sapiens
cacagttggtgaaca

SEQ ID NO: 251258 - DNA, 15 bp, Homo sapiens
gcacagttggtgaac

SEQ ID NO: 251259 - DNA, 15 bp, Homo sapiens
ggcacagttggtgaa

SEQ ID NO: 251260 - DNA, 15 bp, Homo sapiens
aggcacagttggtga

SEQ ID NO: 251261 - DNA, 15 bp, Homo sapiens
caggcacagttggtg

SEQ ID NO: 251262 - DNA, 15 bp, Homo sapiens
gcaggcacagttggt

SEQ ID NO: 251263 - DNA, 15 bp, Homo sapiens
cgcaggcacagttgg

SEQ ID NO: 251264 - DNA, 15 bp, Homo sapiens
acgcaggcacagttg

SEQ ID NO: 251265 - DNA, 15 bp, Homo sapiens
aacgcaggcacagtt

SEQ ID NO: 251266 - DNA, 15 bp, Homo sapiens
gaacgcaggcacagt

SEQ ID NO: 251267 - DNA, 15 bp, Homo sapiens
tgaacgcaggcacag

SEQ ID NO: 251268 - DNA, 15 bp, Homo sapiens
atgaacgcaggcaca

SEQ ID NO: 251269 - DNA, 15 bp, Homo sapiens
catgaacgcaggcac

SEQ ID NO: 251270 - DNA, 15 bp, Homo sapiens
acatgaacgcaggca

SEQ ID NO: 251271 - DNA, 15 bp, Homo sapiens
gacatgaacgcaggc

SEQ ID NO: 251272 - DNA, 15 bp, Homo sapiens
ggacatgaacgcagg

SEQ ID NO: 251273 - DNA, 15 bp, Homo sapiens
gggacatgaacgcag

SEQ ID NO: 251274 - DNA, 15 bp, Homo sapiens
tgggacatgaacgca

SEQ ID NO: 251275 - DNA, 15 bp, Homo sapiens
ctgggacatgaacgc

SEQ ID NO: 251276 - DNA, 15 bp, Homo sapiens
gctgggacatgaacg

SEQ ID NO: 251277 - DNA, 15 bp, Homo sapiens
agctgggacatgaac

SEQ ID NO: 251278 - DNA, 15 bp, Homo sapiens
gagctgggacatgaa

SEQ ID NO: 251279 - DNA, 15 bp, Homo sapiens
agagctgggacatga

SEQ ID NO: 251280 - DNA, 15 bp, Homo sapiens
aagagctgggacatg

SEQ ID NO: 251281 - DNA, 15 bp, Homo sapiens
gaagagctgggacat

SEQ ID NO: 251282 - DNA, 15 bp, Homo sapiens
ggaagagctgggaca

SEQ ID NO: 251283 - DNA, 15 bp, Homo sapiens
tggaagagctgggac

SEQ ID NO: 251284 - DNA, 15 bp, Homo sapiens
atggaagagctggga

SEQ ID NO: 251285 - DNA, 15 bp, Homo sapiens
aatggaagagctggg

SEQ ID NO: 251286 - DNA, 15 bp, Homo sapiens
caatggaagagctgg

SEQ ID NO: 251287 - DNA, 15 bp, Homo sapiens
tcaatggaagagctg

SEQ ID NO: 251288 - DNA, 15 bp, Homo sapiens
gtcaatggaagagct

SEQ ID NO: 251289 - DNA, 15 bp, Homo sapiens
agtcaatggaagagc

SEQ ID NO: 251290 - DNA, 15 bp, Homo sapiens
tagtcaatggaagag

SEQ ID NO: 251291 - DNA, 15 bp, Homo sapiens
ttagtcaatggaaga

SEQ ID NO: 251292 - DNA, 15 bp, Homo sapiens
cttagtcaatggaag

SEQ ID NO: 251293 - DNA, 15 bp, Homo sapiens
gcttagtcaatggaa

SEQ ID NO: 251294 - DNA, 15 bp, Homo sapiens
ggcttagtcaatgga

SEQ ID NO: 251295 - DNA, 15 bp, Homo sapiens
aggcttagtcaatgg

SEQ ID NO: 251296 - DNA, 15 bp, Homo sapiens
caggcttagtcaatg

SEQ ID NO: 251297 - DNA, 15 bp, Homo sapiens
ccaggcttagtcaat

SEQ ID NO: 251298 - DNA, 15 bp, Homo sapiens
tccaggcttagtcaa

SEQ ID NO: 251299 - DNA, 15 bp, Homo sapiens
atccaggcttagtca

SEQ ID NO: 251300 - DNA, 15 bp, Homo sapiens
gatccaggcttagtc

SEQ ID NO: 251301 - DNA, 15 bp, Homo sapiens
tgatccaggcttagt

SEQ ID NO: 251302 - DNA, 15 bp, Homo sapiens
ttgatccaggcttag

SEQ ID NO: 251303 - DNA, 15 bp, Homo sapiens
cttgatccaggctta

SEQ ID NO: 251304 - DNA, 15 bp, Homo sapiens
tcttgatccaggctt

SEQ ID NO: 251305 - DNA, 15 bp, Homo sapiens
ttcttgatccaggct

SEQ ID NO: 251306 - DNA, 15 bp, Homo sapiens
tttcttgatccaggc

SEQ ID NO: 251307 - DNA, 15 bp, Homo sapiens
atttcttgatccagg

SEQ ID NO: 251308 - DNA, 15 bp, Homo sapiens
tatttcttgatccag

SEQ ID NO: 251309 - DNA, 15 bp, Homo sapiens
ttatttcttgatcca

SEQ ID NO: 251310 - DNA, 15 bp, Homo sapiens
attatttcttgatcc

SEQ ID NO: 251311 - DNA, 15 bp, Homo sapiens
gattatttcttgatc

SEQ ID NO: 251312 - DNA, 15 bp, Homo sapiens
ggattatttcttgat

SEQ ID NO: 251313 - DNA, 15 bp, Homo sapiens
gggattatttcttga

SEQ ID NO: 251314 - DNA, 15 bp, Homo sapiens
agggattatttcttg

SEQ ID NO: 251315 - DNA, 15 bp, Homo sapiens
cagggattatttctt

SEQ ID NO: 251316 - DNA, 15 bp, Homo sapiens
tcagggattatttct

SEQ ID NO: 251317 - DNA, 15 bp, Homo sapiens
ctcagggattatttc

SEQ ID NO: 251318 - DNA, 15 bp, Homo sapiens
actcagggattattt

SEQ ID NO: 251319 - DNA, 15 bp, Homo sapiens
aactcagggattatt

SEQ ID NO: 251320 - DNA, 15 bp, Homo sapiens
gaactcagggattat

SEQ ID NO: 251321 - DNA, 15 bp, Homo sapiens
agaactcagggatta

SEQ ID NO: 251322 - DNA, 15 bp, Homo sapiens
tagaactcagggatt

SEQ ID NO: 251323 - DNA, 15 bp, Homo sapiens
ttagaactcagggat

SEQ ID NO: 251324 - DNA, 15 bp, Homo sapiens
attagaactcaggga

SEQ ID NO: 251325 - DNA, 15 bp, Homo sapiens
gattagaactcaggg

SEQ ID NO: 251326 - DNA, 15 bp, Homo sapiens
agattagaactcagg

SEQ ID NO: 251327 - DNA, 15 bp, Homo sapiens
cagattagaactcag

SEQ ID NO: 251328 - DNA, 15 bp, Homo sapiens
acagattagaactca

SEQ ID NO: 251329 - DNA, 15 bp, Homo sapiens
gacagattagaactc

SEQ ID NO: 251330 - DNA, 15 bp, Homo sapiens
tgacagattagaact

SEQ ID NO: 251331 - DNA, 15 bp, Homo sapiens
atgacagattagaac

SEQ ID NO: 251332 - DNA, 15 bp, Homo sapiens
aatgacagattagaa

SEQ ID NO: 251333 - DNA, 15 bp, Homo sapiens
gaatgacagattaga

SEQ ID NO: 251334 - DNA, 15 bp, Homo sapiens
tgaatgacagattag

SEQ ID NO: 251335 - DNA, 15 bp, Homo sapiens
ctgaatgacagatta

SEQ ID NO: 251336 - DNA, 15 bp, Homo sapiens
cctgaatgacagatt

SEQ ID NO: 251337 - DNA, 15 bp, Homo sapiens
acctgaatgacagat

SEQ ID NO: 251338 - DNA, 15 bp, Homo sapiens
tacctgaatgacaga

SEQ ID NO: 251339 - DNA, 15 bp, Homo sapiens
ttacctgaatgacag

SEQ ID NO: 251340 - DNA, 15 bp, Homo sapiens
attacctgaatgaca

SEQ ID NO: 251341 - DNA, 15 bp, Homo sapiens
aattacctgaatgac

SEQ ID NO: 251342 - DNA, 15 bp, Homo sapiens
caattacctgaatga

SEQ ID NO: 251343 - DNA, 15 bp, Homo sapiens
gcaattacctgaatg

SEQ ID NO: 251344 - DNA, 15 bp, Homo sapiens
cgcaattacctgaat

SEQ ID NO: 251345 - DNA, 15 bp, Homo sapiens
acgcaattacctgaa

SEQ ID NO: 251346 - DNA, 15 bp, Homo sapiens
aacgcaattacctga

SEQ ID NO: 251347 - DNA, 15 bp, Homo sapiens
gaacgcaattacctg

SEQ ID NO: 251348 - DNA, 15 bp, Homo sapiens
agaacgcaattacct

SEQ ID NO: 251349 - DNA, 15 bp, Homo sapiens
aagaacgcaattacc

SEQ ID NO: 251350 - DNA, 15 bp, Homo sapiens
taagaacgcaattac

SEQ ID NO: 251351 - DNA, 15 bp, Homo sapiens
ataagaacgcaatta

SEQ ID NO: 251352 - DNA, 15 bp, Homo sapiens
cataagaacgcaatt

SEQ ID NO: 251353 - DNA, 15 bp, Homo sapiens
acataagaacgcaat

SEQ ID NO: 251354 - DNA, 15 bp, Homo sapiens
aacataagaacgcaa

SEQ ID NO: 251355 - DNA, 15 bp, Homo sapiens
aaacataagaacgca

SEQ ID NO: 251356 - DNA, 15 bp, Homo sapiens
gaaacataagaacgc

SEQ ID NO: 251357 - DNA, 15 bp, Homo sapiens
ggaaacataagaacg

SEQ ID NO: 251358 - DNA, 15 bp, Homo sapiens
aggaaacataagaac

SEQ ID NO: 251359 - DNA, 15 bp, Homo sapiens
aaggaaacataagaa

SEQ ID NO: 251360 - DNA, 15 bp, Homo sapiens
aaaggaaacataaga

SEQ ID NO: 251361 - DNA, 15 bp, Homo sapiens
aaaaggaaacataag

SEQ ID NO: 251362 - DNA, 15 bp, Homo sapiens
caaaaggaaacataa

SEQ ID NO: 251363 - DNA, 15 bp, Homo sapiens
acaaaaggaaacata

SEQ ID NO: 251364 - DNA, 15 bp, Homo sapiens
gacaaaaggaaacat

SEQ ID NO: 251365 - DNA, 15 bp, Homo sapiens
tgacaaaaggaaaca

SEQ ID NO: 251366 - DNA, 15 bp, Homo sapiens
atgacaaaaggaaac

SEQ ID NO: 251367 - DNA, 15 bp, Homo sapiens
aatgacaaaaggaaa

SEQ ID NO: 251368 - DNA, 15 bp, Homo sapiens
aaatgacaaaaggaa

SEQ ID NO: 251369 - DNA, 15 bp, Homo sapiens
caaatgacaaaagga

SEQ ID NO: 251370 - DNA, 15 bp, Homo sapiens
ccaaatgacaaaagg

SEQ ID NO: 251371 - DNA, 15 bp, Homo sapiens
gccaaatgacaaaag

SEQ ID NO: 251372 - DNA, 15 bp, Homo sapiens
ggccaaatgacaaaa

SEQ ID NO: 251373 - DNA, 15 bp, Homo sapiens
aggccaaatgacaaa

SEQ ID NO: 251374 - DNA, 15 bp, Homo sapiens
aaggccaaatgacaa

SEQ ID NO: 251375 - DNA, 15 bp, Homo sapiens
gaaggccaaatgaca

SEQ ID NO: 251376 - DNA, 15 bp, Homo sapiens
ggaaggccaaatgac

SEQ ID NO: 251377 - DNA, 15 bp, Homo sapiens
tggccttccctccct

SEQ ID NO: 251378 - DNA, 15 bp, Homo sapiens
ctggccttccctccc

SEQ ID NO: 251379 - DNA, 15 bp, Homo sapiens
actggccttccctcc

SEQ ID NO: 251380 - DNA, 15 bp, Homo sapiens
cactggccttccctc

SEQ ID NO: 251381 - DNA, 15 bp, Homo sapiens
tcactggccttccct

SEQ ID NO: 251382 - DNA, 15 bp, Homo sapiens
ctcactggccttccc

SEQ ID NO: 251383 - DNA, 15 bp, Homo sapiens
tctcactggccttcc

SEQ ID NO: 251384 - DNA, 15 bp, Homo sapiens
ctctcactggccttc

SEQ ID NO: 251385 - DNA, 15 bp, Homo sapiens
cctctcactggcctt

SEQ ID NO: 251386 - DNA, 15 bp, Homo sapiens
ccctctcactggcct

SEQ ID NO: 251387 - DNA, 15 bp, Homo sapiens
gccctctcactggcc

SEQ ID NO: 251388 - DNA, 15 bp, Homo sapiens
tgccctctcactggc

SEQ ID NO: 251389 - DNA, 15 bp, Homo sapiens
ttgccctctcactgg

SEQ ID NO: 251390 - DNA, 15 bp, Homo sapiens
cttgccctctcactg

SEQ ID NO: 251391 - DNA, 15 bp, Homo sapiens
tcttgccctctcact

SEQ ID NO: 251392 - DNA, 15 bp, Homo sapiens
atcttgccctctcac

SEQ ID NO: 251393 - DNA, 15 bp, Homo sapiens
aatcttgccctctca

SEQ ID NO: 251394 - DNA, 15 bp, Homo sapiens
taatcttgccctctc

SEQ ID NO: 251395 - DNA, 15 bp, Homo sapiens
ataatcttgccctct

SEQ ID NO: 251396 - DNA, 15 bp, Homo sapiens
aataatcttgccctc

SEQ ID NO: 251397 - DNA, 15 bp, Homo sapiens
taataatcttgccct

SEQ ID NO: 251398 - DNA, 15 bp, Homo sapiens
ttaataatcttgccc

SEQ ID NO: 251399 - DNA, 15 bp, Homo sapiens
attaataatcttgcc

SEQ ID NO: 251400 - DNA, 15 bp, Homo sapiens
tattaataatcttgc

SEQ ID NO: 251401 - DNA, 15 bp, Homo sapiens
atattaataatcttg

SEQ ID NO: 251402 - DNA, 15 bp, Homo sapiens
catattaataatctt

SEQ ID NO: 251403 - DNA, 15 bp, Homo sapiens
gcatattaataatct

SEQ ID NO: 251404 - DNA, 15 bp, Homo sapiens
agcatattaataatc

SEQ ID NO: 251405 - DNA, 15 bp, Homo sapiens
aagcatattaataat

SEQ ID NO: 251406 - DNA, 15 bp, Homo sapiens
aaagcatattaataa

SEQ ID NO: 251407 - DNA, 15 bp, Homo sapiens
aaaagcatattaata

SEQ ID NO: 251408 - DNA, 15 bp, Homo sapiens
gaaaagcatattaat

SEQ ID NO: 251409 - DNA, 15 bp, Homo sapiens
agaaaagcatattaa

SEQ ID NO: 251410 - DNA, 15 bp, Homo sapiens
aagaaaagcatatta

SEQ ID NO: 251411 - DNA, 15 bp, Homo sapiens
taagaaaagcatatt

SEQ ID NO: 251412 - DNA, 15 bp, Homo sapiens
gtaagaaaagcatat

SEQ ID NO: 251413 - DNA, 15 bp, Homo sapiens
agtaagaaaagcata

SEQ ID NO: 251414 - DNA, 15 bp, Homo sapiens
tagtaagaaaagcat

SEQ ID NO: 251415 - DNA, 15 bp, Homo sapiens
ttagtaagaaaagca

SEQ ID NO: 251416 - DNA, 15 bp, Homo sapiens
tttagtaagaaaagc

SEQ ID NO: 251417 - DNA, 15 bp, Homo sapiens
atttagtaagaaaag

SEQ ID NO: 251418 - DNA, 15 bp, Homo sapiens
aatttagtaagaaaa

SEQ ID NO: 251419 - DNA, 15 bp, Homo sapiens
caatttagtaagaaa

SEQ ID NO: 251420 - DNA, 15 bp, Homo sapiens
ccaatttagtaagaa

SEQ ID NO: 251421 - DNA, 15 bp, Homo sapiens
gccaatttagtaaga

SEQ ID NO: 251422 - DNA, 15 bp, Homo sapiens
agccaatttagtaag

SEQ ID NO: 251423 - DNA, 15 bp, Homo sapiens
aagccaatttagtaa

SEQ ID NO: 251424 - DNA, 15 bp, Homo sapiens
aaagccaatttagta

SEQ ID NO: 251425 - DNA, 15 bp, Homo sapiens
gaaagccaatttagt

SEQ ID NO: 251426 - DNA, 15 bp, Homo sapiens
tgaaagccaatttag

SEQ ID NO: 251427 - DNA, 15 bp, Homo sapiens
ctgaaagccaattta

SEQ ID NO: 251428 - DNA, 15 bp, Homo sapiens
tctgaaagccaattt

SEQ ID NO: 251429 - DNA, 15 bp, Homo sapiens
ttctgaaagccaatt

SEQ ID NO: 251430 - DNA, 15 bp, Homo sapiens
attctgaaagccaat

SEQ ID NO: 251431 - DNA, 15 bp, Homo sapiens
gattctgaaagccaa

SEQ ID NO: 251432 - DNA, 15 bp, Homo sapiens
tgattctgaaagcca

SEQ ID NO: 251433 - DNA, 15 bp, Homo sapiens
ttgattctgaaagcc

SEQ ID NO: 251434 - DNA, 15 bp, Homo sapiens
cttgattctgaaagc

SEQ ID NO: 251435 - DNA, 15 bp, Homo sapiens
ccttgattctgaaag

SEQ ID NO: 251436 - DNA, 15 bp, Homo sapiens
cccttgattctgaaa

SEQ ID NO: 251437 - DNA, 15 bp, Homo sapiens
ccccttgattctgaa

SEQ ID NO: 251438 - DNA, 15 bp, Homo sapiens
tccccttgattctga

SEQ ID NO: 251439 - DNA, 15 bp, Homo sapiens
ttccccttgattctg

SEQ ID NO: 251440 - DNA, 15 bp, Homo sapiens
cttccccttgattct

SEQ ID NO: 251441 - DNA, 15 bp, Homo sapiens
tcttccccttgattc

SEQ ID NO: 251442 - DNA, 15 bp, Homo sapiens
ttcttccccttgatt

SEQ ID NO: 251443 - DNA, 15 bp, Homo sapiens
gttcttccccttgat

SEQ ID NO: 251444 - DNA, 15 bp, Homo sapiens
ggttcttccccttga

SEQ ID NO: 251445 - DNA, 15 bp, Homo sapiens
tggttcttccccttg

SEQ ID NO: 251446 - DNA, 15 bp, Homo sapiens
ttggttcttcccctt

SEQ ID NO: 251447 - DNA, 15 bp, Homo sapiens
cttggttcttcccct

SEQ ID NO: 251448 - DNA, 15 bp, Homo sapiens
ccttggttcttcccc

SEQ ID NO: 251449 - DNA, 15 bp, Homo sapiens
accttggttcttccc

SEQ ID NO: 251450 - DNA, 15 bp, Homo sapiens
caccttggttcttcc

SEQ ID NO: 251451 - DNA, 15 bp, Homo sapiens
ccaccttggttcttc

SEQ ID NO: 251452 - DNA, 15 bp, Homo sapiens
cccaccttggttctt

SEQ ID NO: 251453 - DNA, 15 bp, Homo sapiens
acccaccttggttct

SEQ ID NO: 251454 - DNA, 15 bp, Homo sapiens
aacccaccttggttc

SEQ ID NO: 251455 - DNA, 15 bp, Homo sapiens
caacccaccttggtt

SEQ ID NO: 251456 - DNA, 15 bp, Homo sapiens
acaacccaccttggt

SEQ ID NO: 251457 - DNA, 15 bp, Homo sapiens
aacaacccaccttgg

SEQ ID NO: 251458 - DNA, 15 bp, Homo sapiens
taacaacccaccttg

SEQ ID NO: 251459 - DNA, 15 bp, Homo sapiens
ttaacaacccacctt

SEQ ID NO: 251460 - DNA, 15 bp, Homo sapiens
cttaacaacccacct

SEQ ID NO: 251461 - DNA, 15 bp, Homo sapiens
ccttaacaacccacc

SEQ ID NO: 251462 - DNA, 15 bp, Homo sapiens
cccttaacaacccac

SEQ ID NO: 251463 - DNA, 15 bp, Homo sapiens
tcccttaacaaccca

SEQ ID NO: 251464 - DNA, 15 bp, Homo sapiens
ctcccttaacaaccc

SEQ ID NO: 251465 - DNA, 15 bp, Homo sapiens
actcccttaacaacc

SEQ ID NO: 251466 - DNA, 15 bp, Homo sapiens
tactcccttaacaac

SEQ ID NO: 251467 - DNA, 15 bp, Homo sapiens
gtactcccttaacaa

SEQ ID NO: 251468 - DNA, 15 bp, Homo sapiens
agtactcccttaaca

SEQ ID NO: 251469 - DNA, 15 bp, Homo sapiens
cagtactcccttaac

SEQ ID NO: 251470 - DNA, 15 bp, Homo sapiens
tcagtactcccttaa

SEQ ID NO: 251471 - DNA, 15 bp, Homo sapiens
atcagtactccctta

SEQ ID NO: 251472 - DNA, 15 bp, Homo sapiens
aatcagtactccctt

SEQ ID NO: 251473 - DNA, 15 bp, Homo sapiens
aaatcagtactccct

SEQ ID NO: 251474 - DNA, 15 bp, Homo sapiens
taaatcagtactccc

SEQ ID NO: 251475 - DNA, 15 bp, Homo sapiens
ctaaatcagtactcc

SEQ ID NO: 251476 - DNA, 15 bp, Homo sapiens
tctaaatcagtactc

SEQ ID NO: 251477 - DNA, 15 bp, Homo sapiens
atctaaatcagtact

SEQ ID NO: 251478 - DNA, 15 bp, Homo sapiens
catctaaatcagtac

SEQ ID NO: 251479 - DNA, 15 bp, Homo sapiens
acatctaaatcagta

SEQ ID NO: 251480 - DNA, 15 bp, Homo sapiens
cacatctaaatcagt

SEQ ID NO: 251481 - DNA, 15 bp, Homo sapiens
gcacatctaaatcag

SEQ ID NO: 251482 - DNA, 15 bp, Homo sapiens
agcacatctaaatca

SEQ ID NO: 251483 - DNA, 15 bp, Homo sapiens
cagcacatctaaatc

SEQ ID NO: 251484 - DNA, 15 bp, Homo sapiens
tcagcacatctaaat

SEQ ID NO: 251485 - DNA, 15 bp, Homo sapiens
ctcagcacatctaaa

SEQ ID NO: 251486 - DNA, 15 bp, Homo sapiens
gctcagcacatctaa

SEQ ID NO: 251487 - DNA, 15 bp, Homo sapiens
tgctcagcacatcta

SEQ ID NO: 251488 - DNA, 15 bp, Homo sapiens
ctgctcagcacatct

SEQ ID NO: 251489 - DNA, 15 bp, Homo sapiens
actgctcagcacatc

SEQ ID NO: 251490 - DNA, 15 bp, Homo sapiens
aactgctcagcacat

SEQ ID NO: 251491 - DNA, 15 bp, Homo sapiens
caactgctcagcaca

SEQ ID NO: 251492 - DNA, 15 bp, Homo sapiens
tcaactgctcagcac

SEQ ID NO: 251493 - DNA, 15 bp, Homo sapiens
ttcaactgctcagca

SEQ ID NO: 251494 - DNA, 15 bp, Homo sapiens
tttcaactgctcagc

SEQ ID NO: 251495 - DNA, 15 bp, Homo sapiens
atttcaactgctcag

SEQ ID NO: 251496 - DNA, 15 bp, Homo sapiens
catttcaactgctca

SEQ ID NO: 251497 - DNA, 15 bp, Homo sapiens
acatttcaactgctc

SEQ ID NO: 251498 - DNA, 15 bp, Homo sapiens
aacatttcaactgct

SEQ ID NO: 251499 - DNA, 15 bp, Homo sapiens
aaacatttcaactgc

SEQ ID NO: 251500 - DNA, 15 bp, Homo sapiens
aaaacatttcaactg

SEQ ID NO: 251501 - DNA, 15 bp, Homo sapiens
aaaaacatttcaact

SEQ ID NO: 251502 - DNA, 15 bp, Homo sapiens
caaaaacatttcaac

SEQ ID NO: 251503 - DNA, 15 bp, Homo sapiens
acaaaaacatttcaa

SEQ ID NO: 251504 - DNA, 15 bp, Homo sapiens
aacaaaaacatttca

SEQ ID NO: 251505 - DNA, 15 bp, Homo sapiens
aaacaaaaacatttc

SEQ ID NO: 251506 - DNA, 15 bp, Homo sapiens
gaaacaaaaacattt

SEQ ID NO: 251507 - DNA, 15 bp, Homo sapiens
agaaacaaaaacatt

SEQ ID NO: 251508 - DNA, 15 bp, Homo sapiens
gagaaacaaaaacat

SEQ ID NO: 251509 - DNA, 15 bp, Homo sapiens
tgagaaacaaaaaca

SEQ ID NO: 251510 - DNA, 15 bp, Homo sapiens
ttgagaaacaaaaac

SEQ ID NO: 251511 - DNA, 15 bp, Homo sapiens
tttgagaaacaaaaa

SEQ ID NO: 251512 - DNA, 15 bp, Homo sapiens
gtttgagaaacaaaa

SEQ ID NO: 251513 - DNA, 15 bp, Homo sapiens
tgtttgagaaacaaa

SEQ ID NO: 251514 - DNA, 15 bp, Homo sapiens
atgtttgagaaacaa

SEQ ID NO: 251515 - DNA, 15 bp, Homo sapiens
catgtttgagaaaca

SEQ ID NO: 251516 - DNA, 15 bp, Homo sapiens
tcatgtttgagaaac

SEQ ID NO: 251517 - DNA, 15 bp, Homo sapiens
ttcatgtttgagaaa

SEQ ID NO: 251518 - DNA, 15 bp, Homo sapiens
tttcatgtttgagaa

SEQ ID NO: 251519 - DNA, 15 bp, Homo sapiens
ctttcatgtttgaga

SEQ ID NO: 251520 - DNA, 15 bp, Homo sapiens
gctttcatgtttgag

SEQ ID NO: 251521 - DNA, 15 bp, Homo sapiens
tgctttcatgtttga

SEQ ID NO: 251522 - DNA, 15 bp, Homo sapiens
gtgctttcatgtttg

SEQ ID NO: 251523 - DNA, 15 bp, Homo sapiens
agtgctttcatgttt

SEQ ID NO: 251524 - DNA, 15 bp, Homo sapiens
aagtgctttcatgtt

SEQ ID NO: 251525 - DNA, 15 bp, Homo sapiens
caagtgctttcatgt

SEQ ID NO: 251526 - DNA, 15 bp, Homo sapiens
ccaagtgctttcatg

SEQ ID NO: 251527 - DNA, 15 bp, Homo sapiens
gccaagtgctttcat

SEQ ID NO: 251528 - DNA, 15 bp, Homo sapiens
agccaagtgctttca

SEQ ID NO: 251529 - DNA, 15 bp, Homo sapiens
aagccaagtgctttc

SEQ ID NO: 251530 - DNA, 15 bp, Homo sapiens
aaagccaagtgcttt

SEQ ID NO: 251531 - DNA, 15 bp, Homo sapiens
caaagccaagtgctt

SEQ ID NO: 251532 - DNA, 15 bp, Homo sapiens
gcaaagccaagtgct

SEQ ID NO: 251533 - DNA, 15 bp, Homo sapiens
tgcaaagccaagtgc

SEQ ID NO: 251534 - DNA, 15 bp, Homo sapiens
atgcaaagccaagtg

SEQ ID NO: 251535 - DNA, 15 bp, Homo sapiens
catgcaaagccaagt

SEQ ID NO: 251536 - DNA, 15 bp, Homo sapiens
tcatgcaaagccaag

SEQ ID NO: 251537 - DNA, 15 bp, Homo sapiens
gtcatgcaaagccaa

SEQ ID NO: 251538 - DNA, 15 bp, Homo sapiens
agtcatgcaaagcca

SEQ ID NO: 251539 - DNA, 15 bp, Homo sapiens
cagtcatgcaaagcc

SEQ ID NO: 251540 - DNA, 15 bp, Homo sapiens
ccagtcatgcaaagc

SEQ ID NO: 251541 - DNA, 15 bp, Homo sapiens
cccagtcatgcaaag

SEQ ID NO: 251542 - DNA, 15 bp, Homo sapiens
acccagtcatgcaaa

SEQ ID NO: 251543 - DNA, 15 bp, Homo sapiens
aacccagtcatgcaa

SEQ ID NO: 251544 - DNA, 15 bp, Homo sapiens
aaacccagtcatgca

SEQ ID NO: 251545 - DNA, 15 bp, Homo sapiens
aaaacccagtcatgc

SEQ ID NO: 251546 - DNA, 15 bp, Homo sapiens
taaaacccagtcatg

SEQ ID NO: 251547 - DNA, 15 bp, Homo sapiens
ttaaaacccagtcat

SEQ ID NO: 251548 - DNA, 15 bp, Homo sapiens
tttaaaacccagtca

SEQ ID NO: 251549 - DNA, 15 bp, Homo sapiens
atttaaaacccagtc

SEQ ID NO: 251550 - DNA, 15 bp, Homo sapiens
aatttaaaacccagt

SEQ ID NO: 251551 - DNA, 15 bp, Homo sapiens
caatttaaaacccag

SEQ ID NO: 251552 - DNA, 15 bp, Homo sapiens
gcaatttaaaaccca

SEQ ID NO: 251553 - DNA, 15 bp, Homo sapiens
agcaatttaaaaccc

SEQ ID NO: 251554 - DNA, 15 bp, Homo sapiens
gagcaatttaaaacc

SEQ ID NO: 251555 - DNA, 15 bp, Homo sapiens
tgagcaatttaaaac

SEQ ID NO: 251556 - DNA, 15 bp, Homo sapiens
ctgagcaatttaaaa

SEQ ID NO: 251557 - DNA, 15 bp, Homo sapiens
gctgagcaatttaaa

SEQ ID NO: 251558 - DNA, 15 bp, Homo sapiens
tgctgagcaatttaa

SEQ ID NO: 251559 - DNA, 15 bp, Homo sapiens
ttgctgagcaattta

SEQ ID NO: 251560 - DNA, 15 bp, Homo sapiens
tttgctgagcaattt

SEQ ID NO: 251561 - DNA, 15 bp, Homo sapiens
ctttgctgagcaatt

SEQ ID NO: 251562 - DNA, 15 bp, Homo sapiens
gctttgctgagcaat

SEQ ID NO: 251563 - DNA, 15 bp, Homo sapiens
tgctttgctgagcaa

SEQ ID NO: 251564 - DNA, 15 bp, Homo sapiens
atgctttgctgagca

SEQ ID NO: 251565 - DNA, 15 bp, Homo sapiens
gatgctttgctgagc

SEQ ID NO: 251566 - DNA, 15 bp, Homo sapiens
tgatgctttgctgag

SEQ ID NO: 251567 - DNA, 15 bp, Homo sapiens
gtgatgctttgctga

SEQ ID NO: 251568 - DNA, 15 bp, Homo sapiens
agtgatgctttgctg

SEQ ID NO: 251569 - DNA, 15 bp, Homo sapiens
aagtgatgctttgct

SEQ ID NO: 251570 - DNA, 15 bp, Homo sapiens
caagtgatgctttgc

SEQ ID NO: 251571 - DNA, 15 bp, Homo sapiens
ccaagtgatgctttg

SEQ ID NO: 251572 - DNA, 15 bp, Homo sapiens
cccaagtgatgcttt

SEQ ID NO: 251573 - DNA, 15 bp, Homo sapiens
ccccaagtgatgctt

SEQ ID NO: 251574 - DNA, 15 bp, Homo sapiens
gccccaagtgatgct

SEQ ID NO: 251575 - DNA, 15 bp, Homo sapiens
agccccaagtgatgc

SEQ ID NO: 251576 - DNA, 15 bp, Homo sapiens
tagccccaagtgatg

SEQ ID NO: 251577 - DNA, 15 bp, Homo sapiens
ttagccccaagtgat

SEQ ID NO: 251578 - DNA, 15 bp, Homo sapiens
gttagccccaagtga

SEQ ID NO: 251579 - DNA, 15 bp, Homo sapiens
ggttagccccaagtg

SEQ ID NO: 251580 - DNA, 15 bp, Homo sapiens
aggttagccccaagt

SEQ ID NO: 251581 - DNA, 15 bp, Homo sapiens
caggttagccccaag

SEQ ID NO: 251582 - DNA, 15 bp, Homo sapiens
tcaggttagccccaa

SEQ ID NO: 251583 - DNA, 15 bp, Homo sapiens
ctcaggttagcccca

SEQ ID NO: 251584 - DNA, 15 bp, Homo sapiens
actcaggttagcccc

SEQ ID NO: 251585 - DNA, 15 bp, Homo sapiens
gactcaggttagccc

SEQ ID NO: 251586 - DNA, 15 bp, Homo sapiens
agactcaggttagcc

SEQ ID NO: 251587 - DNA, 15 bp, Homo sapiens
cagactcaggttagc

SEQ ID NO: 251588 - DNA, 15 bp, Homo sapiens
acagactcaggttag

SEQ ID NO: 251589 - DNA, 15 bp, Homo sapiens
cacagactcaggtta

SEQ ID NO: 251590 - DNA, 15 bp, Homo sapiens
tcacagactcaggtt

SEQ ID NO: 251591 - DNA, 15 bp, Homo sapiens
ttcacagactcaggt

SEQ ID NO: 251592 - DNA, 15 bp, Homo sapiens
cttcacagactcagg

SEQ ID NO: 251593 - DNA, 15 bp, Homo sapiens
acttcacagactcag

SEQ ID NO: 251594 - DNA, 15 bp, Homo sapiens
aacttcacagactca

SEQ ID NO: 251595 - DNA, 15 bp, Homo sapiens
gaacttcacagactc

SEQ ID NO: 251596 - DNA, 15 bp, Homo sapiens
ggaacttcacagact

SEQ ID NO: 251597 - DNA, 15 bp, Homo sapiens
tggaacttcacagac

SEQ ID NO: 251598 - DNA, 15 bp, Homo sapiens
gtggaacttcacaga

SEQ ID NO: 251599 - DNA, 15 bp, Homo sapiens
tgtggaacttcacag

SEQ ID NO: 251600 - DNA, 15 bp, Homo sapiens
ttgtggaacttcaca

SEQ ID NO: 251601 - DNA, 15 bp, Homo sapiens
attgtggaacttcac

SEQ ID NO: 251602 - DNA, 15 bp, Homo sapiens
aattgtggaacttca

SEQ ID NO: 251603 - DNA, 15 bp, Homo sapiens
gaattgtggaacttc

SEQ ID NO: 251604 - DNA, 15 bp, Homo sapiens
tgaattgtggaactt

SEQ ID NO: 251605 - DNA, 15 bp, Homo sapiens
ctgaattgtggaact

SEQ ID NO: 251606 - DNA, 15 bp, Homo sapiens
cctgaattgtggaac

SEQ ID NO: 251607 - DNA, 15 bp, Homo sapiens
tcctgaattgtggaa

SEQ ID NO: 251608 - DNA, 15 bp, Homo sapiens
ttcctgaattgtgga

SEQ ID NO: 251609 - DNA, 15 bp, Homo sapiens
attcctgaattgtgg

SEQ ID NO: 251610 - DNA, 15 bp, Homo sapiens
cattcctgaattgtg

SEQ ID NO: 251611 - DNA, 15 bp, Homo sapiens
tcattcctgaattgt

SEQ ID NO: 251612 - DNA, 15 bp, Homo sapiens
atcattcctgaattg

SEQ ID NO: 251613 - DNA, 15 bp, Homo sapiens
catcattcctgaatt

SEQ ID NO: 251614 - DNA, 15 bp, Homo sapiens
ccatcattcctgaat

SEQ ID NO: 251615 - DNA, 15 bp, Homo sapiens
accatcattcctgaa

SEQ ID NO: 251616 - DNA, 15 bp, Homo sapiens
aaccatcattcctga

SEQ ID NO: 251617 - DNA, 15 bp, Homo sapiens
taaccatcattcctg

SEQ ID NO: 251618 - DNA, 15 bp, Homo sapiens
gtaaccatcattcct

SEQ ID NO: 251619 - DNA, 15 bp, Homo sapiens
agtaaccatcattcc

SEQ ID NO: 251620 - DNA, 15 bp, Homo sapiens
cagtaaccatcattc

SEQ ID NO: 251621 - DNA, 15 bp, Homo sapiens
gcagtaaccatcatt

SEQ ID NO: 251622 - DNA, 15 bp, Homo sapiens
tgcagtaaccatcat

SEQ ID NO: 251623 - DNA, 15 bp, Homo sapiens
ctgcagtaaccatca

SEQ ID NO: 251624 - DNA, 15 bp, Homo sapiens
gctgcagtaaccatc

SEQ ID NO: 251625 - DNA, 15 bp, Homo sapiens
tgctgcagtaaccat

SEQ ID NO: 251626 - DNA, 15 bp, Homo sapiens
gtgctgcagtaacca

SEQ ID NO: 251627 - DNA, 15 bp, Homo sapiens
agtgctgcagtaacc

SEQ ID NO: 251628 - DNA, 15 bp, Homo sapiens
gagtgctgcagtaac

SEQ ID NO: 251629 - DNA, 15 bp, Homo sapiens
agagtgctgcagtaa

SEQ ID NO: 251630 - DNA, 15 bp, Homo sapiens
aagagtgctgcagta

SEQ ID NO: 251631 - DNA, 15 bp, Homo sapiens
caagagtgctgcagt

SEQ ID NO: 251632 - DNA, 15 bp, Homo sapiens
acaagagtgctgcag

SEQ ID NO: 251633 - DNA, 15 bp, Homo sapiens
cacaagagtgctgca

SEQ ID NO: 251634 - DNA, 15 bp, Homo sapiens
acacaagagtgctgc

SEQ ID NO: 251635 - DNA, 15 bp, Homo sapiens
aacacaagagtgctg

SEQ ID NO: 251636 - DNA, 15 bp, Homo sapiens
aaacacaagagtgct

SEQ ID NO: 251637 - DNA, 15 bp, Homo sapiens
gaaacacaagagtgc

SEQ ID NO: 251638 - DNA, 15 bp, Homo sapiens
tgaaacacaagagtg

SEQ ID NO: 251639 - DNA, 15 bp, Homo sapiens
ttgaaacacaagagt

SEQ ID NO: 251640 - DNA, 15 bp, Homo sapiens
cttgaaacacaagag

SEQ ID NO: 251641 - DNA, 15 bp, Homo sapiens
ccttgaaacacaaga

SEQ ID NO: 251642 - DNA, 15 bp, Homo sapiens
accttgaaacacaag

SEQ ID NO: 251643 - DNA, 15 bp, Homo sapiens
aaccttgaaacacaa

SEQ ID NO: 251644 - DNA, 15 bp, Homo sapiens
gaaccttgaaacaca

SEQ ID NO: 251645 - DNA, 15 bp, Homo sapiens
cgaaccttgaaacac

SEQ ID NO: 251646 - DNA, 15 bp, Homo sapiens
acgaaccttgaaaca

SEQ ID NO: 251647 - DNA, 15 bp, Homo sapiens
gacgaaccttgaaac

SEQ ID NO: 251648 - DNA, 15 bp, Homo sapiens
tgacgaaccttgaaa

SEQ ID NO: 251649 - DNA, 15 bp, Homo sapiens
atgacgaaccttgaa

SEQ ID NO: 251650 - DNA, 15 bp, Homo sapiens
catgacgaaccttga

SEQ ID NO: 251651 - DNA, 15 bp, Homo sapiens
tcatgacgaaccttg

SEQ ID NO: 251652 - DNA, 15 bp, Homo sapiens
ttcatgacgaacctt

SEQ ID NO: 251653 - DNA, 15 bp, Homo sapiens
cttcatgacgaacct

SEQ ID NO: 251654 - DNA, 15 bp, Homo sapiens
tcttcatgacgaacc

SEQ ID NO: 251655 - DNA, 15 bp, Homo sapiens
gtcttcatgacgaac

SEQ ID NO: 251656 - DNA, 15 bp, Homo sapiens
agtcttcatgacgaa

SEQ ID NO: 251657 - DNA, 15 bp, Homo sapiens
tagtcttcatgacga

SEQ ID NO: 251658 - DNA, 15 bp, Homo sapiens
ctagtcttcatgacg

SEQ ID NO: 251659 - DNA, 15 bp, Homo sapiens
gctagtcttcatgac

SEQ ID NO: 251660 - DNA, 15 bp, Homo sapiens
tgctagtcttcatga

SEQ ID NO: 251661 - DNA, 15 bp, Homo sapiens
atgctagtcttcatg

SEQ ID NO: 251662 - DNA, 15 bp, Homo sapiens
tatgctagtcttcat

SEQ ID NO: 251663 - DNA, 15 bp, Homo sapiens
ctatgctagtcttca

SEQ ID NO: 251664 - DNA, 15 bp, Homo sapiens
tctatgctagtcttc

SEQ ID NO: 251665 - DNA, 15 bp, Homo sapiens
atctatgctagtctt

SEQ ID NO: 251666 - DNA, 15 bp, Homo sapiens
aatctatgctagtct

SEQ ID NO: 251667 - DNA, 15 bp, Homo sapiens
gaatctatgctagtc

SEQ ID NO: 251668 - DNA, 15 bp, Homo sapiens
ggaatctatgctagt

SEQ ID NO: 251669 - DNA, 15 bp, Homo sapiens
tggaatctatgctag

SEQ ID NO: 251670 - DNA, 15 bp, Homo sapiens
gtggaatctatgcta

SEQ ID NO: 251671 - DNA, 15 bp, Homo sapiens
agtggaatctatgct

SEQ ID NO: 251672 - DNA, 15 bp, Homo sapiens
cagtggaatctatgc

SEQ ID NO: 251673 - DNA, 15 bp, Homo sapiens
acagtggaatctatg

SEQ ID NO: 251674 - DNA, 15 bp, Homo sapiens
aacagtggaatctat

SEQ ID NO: 251675 - DNA, 15 bp, Homo sapiens
gaacagtggaatcta

SEQ ID NO: 251676 - DNA, 15 bp, Homo sapiens
tgaacagtggaatct

SEQ ID NO: 251677 - DNA, 15 bp, Homo sapiens
ttgaacagtggaatc

SEQ ID NO: 251678 - DNA, 15 bp, Homo sapiens
attgaacagtggaat

SEQ ID NO: 251679 - DNA, 15 bp, Homo sapiens
aattgaacagtggaa

SEQ ID NO: 251680 - DNA, 15 bp, Homo sapiens
taattgaacagtgga

SEQ ID NO: 251681 - DNA, 15 bp, Homo sapiens
ttaattgaacagtgg

SEQ ID NO: 251682 - DNA, 15 bp, Homo sapiens
tttaattgaacagtg

SEQ ID NO: 251683 - DNA, 15 bp, Homo sapiens
ctttaattgaacagt

SEQ ID NO: 251684 - DNA, 15 bp, Homo sapiens
gctttaattgaacag

SEQ ID NO: 251685 - DNA, 15 bp, Homo sapiens
tgctttaattgaaca

SEQ ID NO: 251686 - DNA, 15 bp, Homo sapiens
ttgctttaattgaac

SEQ ID NO: 251687 - DNA, 15 bp, Homo sapiens
gttgctttaattgaa

SEQ ID NO: 251688 - DNA, 15 bp, Homo sapiens
cgttgctttaattga

SEQ ID NO: 251689 - DNA, 15 bp, Homo sapiens
acgttgctttaattg

SEQ ID NO: 251690 - DNA, 15 bp, Homo sapiens
aacgttgctttaatt

SEQ ID NO: 251691 - DNA, 15 bp, Homo sapiens
aaacgttgctttaat

SEQ ID NO: 251692 - DNA, 15 bp, Homo sapiens
taaacgttgctttaa

SEQ ID NO: 251693 - DNA, 15 bp, Homo sapiens
gtaaacgttgcttta

SEQ ID NO: 251694 - DNA, 15 bp, Homo sapiens
ggtaaacgttgcttt

SEQ ID NO: 251695 - DNA, 15 bp, Homo sapiens
tggtaaacgttgctt

SEQ ID NO: 251696 - DNA, 15 bp, Homo sapiens
atggtaaacgttgct

SEQ ID NO: 251697 - DNA, 15 bp, Homo sapiens
catggtaaacgttgc

SEQ ID NO: 251698 - DNA, 15 bp, Homo sapiens
tcatggtaaacgttg

SEQ ID NO: 251699 - DNA, 15 bp, Homo sapiens
atcatggtaaacgtt

SEQ ID NO: 251700 - DNA, 15 bp, Homo sapiens
tatcatggtaaacgt

SEQ ID NO: 251701 - DNA, 15 bp, Homo sapiens
atatcatggtaaacg

SEQ ID NO: 251702 - DNA, 15 bp, Homo sapiens
aatatcatggtaaac

SEQ ID NO: 251703 - DNA, 15 bp, Homo sapiens
gaatatcatggtaaa

SEQ ID NO: 251704 - DNA, 15 bp, Homo sapiens
ggaatatcatggtaa

SEQ ID NO: 251705 - DNA, 15 bp, Homo sapiens
aggaatatcatggta

SEQ ID NO: 251706 - DNA, 15 bp, Homo sapiens
taggaatatcatggt

SEQ ID NO: 251707 - DNA, 15 bp, Homo sapiens
ataggaatatcatgg

SEQ ID NO: 251708 - DNA, 15 bp, Homo sapiens
aataggaatatcatg

SEQ ID NO: 251709 - DNA, 15 bp, Homo sapiens
aaataggaatatcat

SEQ ID NO: 251710 - DNA, 15 bp, Homo sapiens
aaaataggaatatca

SEQ ID NO: 251711 - DNA, 15 bp, Homo sapiens
gaaaataggaatatc

SEQ ID NO: 251712 - DNA, 15 bp, Homo sapiens
ggaaaataggaatat

SEQ ID NO: 251713 - DNA, 15 bp, Homo sapiens
tggaaaataggaata

SEQ ID NO: 251714 - DNA, 15 bp, Homo sapiens
atggaaaataggaat

SEQ ID NO: 251715 - DNA, 15 bp, Homo sapiens
catggaaaataggaa

SEQ ID NO: 251716 - DNA, 15 bp, Homo sapiens
tcatggaaaatagga

SEQ ID NO: 251717 - DNA, 15 bp, Homo sapiens
atcatggaaaatagg

SEQ ID NO: 251718 - DNA, 15 bp, Homo sapiens
catcatggaaaatag

SEQ ID NO: 251719 - DNA, 15 bp, Homo sapiens
gcatcatggaaaata

SEQ ID NO: 251720 - DNA, 15 bp, Homo sapiens
tgcatcatggaaaat

SEQ ID NO: 251721 - DNA, 15 bp, Homo sapiens
ctgcatcatggaaaa

SEQ ID NO: 251722 - DNA, 15 bp, Homo sapiens
cctgcatcatggaaa

SEQ ID NO: 251723 - DNA, 15 bp, Homo sapiens
ccctgcatcatggaa

SEQ ID NO: 251724 - DNA, 15 bp, Homo sapiens
accctgcatcatgga

SEQ ID NO: 251725 - DNA, 15 bp, Homo sapiens
gaccctgcatcatgg

SEQ ID NO: 251726 - DNA, 15 bp, Homo sapiens
ggaccctgcatcatg

SEQ ID NO: 251727 - DNA, 15 bp, Homo sapiens
aggaccctgcatcat

SEQ ID NO: 251728 - DNA, 15 bp, Homo sapiens
caggaccctgcatca

SEQ ID NO: 251729 - DNA, 15 bp, Homo sapiens
ccaggaccctgcatc

SEQ ID NO: 251730 - DNA, 15 bp, Homo sapiens
cccaggaccctgcat

SEQ ID NO: 251731 - DNA, 15 bp, Homo sapiens
tcccaggaccctgca

SEQ ID NO: 251732 - DNA, 15 bp, Homo sapiens
ttcccaggaccctgc

SEQ ID NO: 251733 - DNA, 15 bp, Homo sapiens
cttcccaggaccctg

SEQ ID NO: 251734 - DNA, 15 bp, Homo sapiens
gcttcccaggaccct

SEQ ID NO: 251735 - DNA, 15 bp, Homo sapiens
tgcttcccaggaccc

SEQ ID NO: 251736 - DNA, 15 bp, Homo sapiens
atgcttcccaggacc

SEQ ID NO: 251737 - DNA, 15 bp, Homo sapiens
gatgcttcccaggac

SEQ ID NO: 251738 - DNA, 15 bp, Homo sapiens
agatgcttcccagga

SEQ ID NO: 251739 - DNA, 15 bp, Homo sapiens
gagatgcttcccagg

SEQ ID NO: 251740 - DNA, 15 bp, Homo sapiens
agagatgcttcccag

SEQ ID NO: 251741 - DNA, 15 bp, Homo sapiens
aagagatgcttccca

SEQ ID NO: 251742 - DNA, 15 bp, Homo sapiens
aaagagatgcttccc

SEQ ID NO: 251743 - DNA, 15 bp, Homo sapiens
gaaagagatgcttcc

SEQ ID NO: 251744 - DNA, 15 bp, Homo sapiens
tgaaagagatgcttc

SEQ ID NO: 251745 - DNA, 15 bp, Homo sapiens
ctgaaagagatgctt

SEQ ID NO: 251746 - DNA, 15 bp, Homo sapiens
cctgaaagagatgct

SEQ ID NO: 251747 - DNA, 15 bp, Homo sapiens
tcctgaaagagatgc

SEQ ID NO: 251748 - DNA, 15 bp, Homo sapiens
ttcctgaaagagatg

SEQ ID NO: 251749 - DNA, 15 bp, Homo sapiens
cttcctgaaagagat

SEQ ID NO: 251750 - DNA, 15 bp, Homo sapiens
ccttcctgaaagaga

SEQ ID NO: 251751 - DNA, 15 bp, Homo sapiens
cccttcctgaaagag

SEQ ID NO: 251752 - DNA, 15 bp, Homo sapiens
tcccttcctgaaaga

SEQ ID NO: 251753 - DNA, 15 bp, Homo sapiens
ctcccttcctgaaag

SEQ ID NO: 251754 - DNA, 15 bp, Homo sapiens
actcccttcctgaaa

SEQ ID NO: 251755 - DNA, 15 bp, Homo sapiens
tactcccttcctgaa

SEQ ID NO: 251756 - DNA, 15 bp, Homo sapiens
atactcccttcctga

SEQ ID NO: 251757 - DNA, 15 bp, Homo sapiens
catactcccttcctg

SEQ ID NO: 251758 - DNA, 15 bp, Homo sapiens
acatactcccttcct

SEQ ID NO: 251759 - DNA, 15 bp, Homo sapiens
tacatactcccttcc

SEQ ID NO: 251760 - DNA, 15 bp, Homo sapiens
atacatactcccttc

SEQ ID NO: 251761 - DNA, 15 bp, Homo sapiens
aatacatactccctt

SEQ ID NO: 251762 - DNA, 15 bp, Homo sapiens
gaatacatactccct

SEQ ID NO: 251763 - DNA, 15 bp, Homo sapiens
tgaatacatactccc

SEQ ID NO: 251764 - DNA, 15 bp, Homo sapiens
ttgaatacatactcc

SEQ ID NO: 251765 - DNA, 15 bp, Homo sapiens
cttgaatacatactc

SEQ ID NO: 251766 - DNA, 15 bp, Homo sapiens
ccttgaatacatact

SEQ ID NO: 251767 - DNA, 15 bp, Homo sapiens
accttgaatacatac

SEQ ID NO: 251768 - DNA, 15 bp, Homo sapiens
gaccttgaatacata

SEQ ID NO: 251769 - DNA, 15 bp, Homo sapiens
tgaccttgaatacat

SEQ ID NO: 251770 - DNA, 15 bp, Homo sapiens
ctgaccttgaataca

SEQ ID NO: 251771 - DNA, 15 bp, Homo sapiens
actgaccttgaatac

SEQ ID NO: 251772 - DNA, 15 bp, Homo sapiens
gactgaccttgaata

SEQ ID NO: 251773 - DNA, 15 bp, Homo sapiens
tgactgaccttgaat

SEQ ID NO: 251774 - DNA, 15 bp, Homo sapiens
ctgactgaccttgaa

SEQ ID NO: 251775 - DNA, 15 bp, Homo sapiens
actgactgaccttga

SEQ ID NO: 251776 - DNA, 15 bp, Homo sapiens
tactgactgaccttg

SEQ ID NO: 251777 - DNA, 15 bp, Homo sapiens
atactgactgacctt

SEQ ID NO: 251778 - DNA, 15 bp, Homo sapiens
tatactgactgacct

SEQ ID NO: 251779 - DNA, 15 bp, Homo sapiens
atatactgactgacc

SEQ ID NO: 251780 - DNA, 15 bp, Homo sapiens
catatactgactgac

SEQ ID NO: 251781 - DNA, 15 bp, Homo sapiens
tcatatactgactga

SEQ ID NO: 251782 - DNA, 15 bp, Homo sapiens
ttcatatactgactg

SEQ ID NO: 251783 - DNA, 15 bp, Homo sapiens
attcatatactgact

SEQ ID NO: 251784 - DNA, 15 bp, Homo sapiens
cattcatatactgac

SEQ ID NO: 251785 - DNA, 15 bp, Homo sapiens
acattcatatactga

SEQ ID NO: 251786 - DNA, 15 bp, Homo sapiens
cacattcatatactg

SEQ ID NO: 251787 - DNA, 15 bp, Homo sapiens
acacattcatatact

SEQ ID NO: 251788 - DNA, 15 bp, Homo sapiens
gacacattcatatac

SEQ ID NO: 251789 - DNA, 15 bp, Homo sapiens
agacacattcatata

SEQ ID NO: 251790 - DNA, 15 bp, Homo sapiens
cagacacattcatat

SEQ ID NO: 251791 - DNA, 15 bp, Homo sapiens
tcagacacattcata

SEQ ID NO: 251792 - DNA, 15 bp, Homo sapiens
ctcagacacattcat

SEQ ID NO: 251793 - DNA, 15 bp, Homo sapiens
tctcagacacattca

SEQ ID NO: 251794 - DNA, 15 bp, Homo sapiens
gtctcagacacattc

SEQ ID NO: 251795 - DNA, 15 bp, Homo sapiens
agtctcagacacatt

SEQ ID NO: 251796 - DNA, 15 bp, Homo sapiens
aagtctcagacacat

SEQ ID NO: 251797 - DNA, 15 bp, Homo sapiens
caagtctcagacaca

SEQ ID NO: 251798 - DNA, 15 bp, Homo sapiens
ccaagtctcagacac

SEQ ID NO: 251799 - DNA, 15 bp, Homo sapiens
tccaagtctcagaca

SEQ ID NO: 251800 - DNA, 15 bp, Homo sapiens
atccaagtctcagac

SEQ ID NO: 251801 - DNA, 15 bp, Homo sapiens
catccaagtctcaga

SEQ ID NO: 251802 - DNA, 15 bp, Homo sapiens
ccatccaagtctcag

SEQ ID NO: 251803 - DNA, 15 bp, Homo sapiens
gccatccaagtctca

SEQ ID NO: 251804 - DNA, 15 bp, Homo sapiens
agccatccaagtctc

SEQ ID NO: 251805 - DNA, 15 bp, Homo sapiens
gagccatccaagtct

SEQ ID NO: 251806 - DNA, 15 bp, Homo sapiens
tgagccatccaagtc

SEQ ID NO: 251807 - DNA, 15 bp, Homo sapiens
ttgagccatccaagt

SEQ ID NO: 251808 - DNA, 15 bp, Homo sapiens
cttgagccatccaag

SEQ ID NO: 251809 - DNA, 15 bp, Homo sapiens
ccttgagccatccaa

SEQ ID NO: 251810 - DNA, 15 bp, Homo sapiens
cccttgagccatcca

SEQ ID NO: 251811 - DNA, 15 bp, Homo sapiens
ccccttgagccatcc

SEQ ID NO: 251812 - DNA, 15 bp, Homo sapiens
tccccttgagccatc

SEQ ID NO: 251813 - DNA, 15 bp, Homo sapiens
atccccttgagccat

SEQ ID NO: 251814 - DNA, 15 bp, Homo sapiens
tatccccttgagcca

SEQ ID NO: 251815 - DNA, 15 bp, Homo sapiens
ctatccccttgagcc

SEQ ID NO: 251816 - DNA, 15 bp, Homo sapiens
tctatccccttgagc

SEQ ID NO: 251817 - DNA, 15 bp, Homo sapiens
ctctatccccttgag

SEQ ID NO: 251818 - DNA, 15 bp, Homo sapiens
gctctatccccttga

SEQ ID NO: 251819 - DNA, 15 bp, Homo sapiens
agctctatccccttg

SEQ ID NO: 251820 - DNA, 15 bp, Homo sapiens
tagctctatcccctt

SEQ ID NO: 251821 - DNA, 15 bp, Homo sapiens
ctagctctatcccct

SEQ ID NO: 251822 - DNA, 15 bp, Homo sapiens
cctagctctatcccc

SEQ ID NO: 251823 - DNA, 15 bp, Homo sapiens
acctagctctatccc

SEQ ID NO: 251824 - DNA, 15 bp, Homo sapiens
cacctagctctatcc

SEQ ID NO: 251825 - DNA, 15 bp, Homo sapiens
acacctagctctatc

SEQ ID NO: 251826 - DNA, 15 bp, Homo sapiens
aacacctagctctat

SEQ ID NO: 251827 - DNA, 15 bp, Homo sapiens
taacacctagctcta

SEQ ID NO: 251828 - DNA, 15 bp, Homo sapiens
ataacacctagctct

SEQ ID NO: 251829 - DNA, 15 bp, Homo sapiens
gataacacctagctc

SEQ ID NO: 251830 - DNA, 15 bp, Homo sapiens
agataacacctagct

SEQ ID NO: 251831 - DNA, 15 bp, Homo sapiens
cagataacacctagc

SEQ ID NO: 251832 - DNA, 15 bp, Homo sapiens
ccagataacacctag

SEQ ID NO: 251833 - DNA, 15 bp, Homo sapiens
gccagataacaccta

SEQ ID NO: 251834 - DNA, 15 bp, Homo sapiens
tgccagataacacct

SEQ ID NO: 251835 - DNA, 15 bp, Homo sapiens
ctgccagataacacc

SEQ ID NO: 251836 - DNA, 15 bp, Homo sapiens
actgccagataacac

SEQ ID NO: 251837 - DNA, 15 bp, Homo sapiens
gactgccagataaca

SEQ ID NO: 251838 - DNA, 15 bp, Homo sapiens
cgactgccagataac

SEQ ID NO: 251839 - DNA, 15 bp, Homo sapiens
gcgactgccagataa

SEQ ID NO: 251840 - DNA, 15 bp, Homo sapiens
tgcgactgccagata

SEQ ID NO: 251841 - DNA, 15 bp, Homo sapiens
ttgcgactgccagat

SEQ ID NO: 251842 - DNA, 15 bp, Homo sapiens
tttgcgactgccaga

SEQ ID NO: 251843 - DNA, 15 bp, Homo sapiens
ttttgcgactgccag

SEQ ID NO: 251844 - DNA, 15 bp, Homo sapiens
cttttgcgactgcca

SEQ ID NO: 251845 - DNA, 15 bp, Homo sapiens
acttttgcgactgcc

SEQ ID NO: 251846 - DNA, 15 bp, Homo sapiens
cacttttgcgactgc

SEQ ID NO: 251847 - DNA, 15 bp, Homo sapiens
tcacttttgcgactg

SEQ ID NO: 251848 - DNA, 15 bp, Homo sapiens
ctcacttttgcgact

SEQ ID NO: 251849 - DNA, 15 bp, Homo sapiens
tctcacttttgcgac

SEQ ID NO: 251850 - DNA, 15 bp, Homo sapiens
ctctcacttttgcga

SEQ ID NO: 251851 - DNA, 15 bp, Homo sapiens
tctctcacttttgcg

SEQ ID NO: 251852 - DNA, 15 bp, Homo sapiens
atctctcacttttgc

SEQ ID NO: 251853 - DNA, 15 bp, Homo sapiens
catctctcacttttg

SEQ ID NO: 251854 - DNA, 15 bp, Homo sapiens
tcatctctcactttt

SEQ ID NO: 251855 - DNA, 15 bp, Homo sapiens
atcatctctcacttt

SEQ ID NO: 251856 - DNA, 15 bp, Homo sapiens
catcatctctcactt

SEQ ID NO: 251857 - DNA, 15 bp, Homo sapiens
tcatcatctctcact

SEQ ID NO: 251858 - DNA, 15 bp, Homo sapiens
gtcatcatctctcac

SEQ ID NO: 251859 - DNA, 15 bp, Homo sapiens
tgtcatcatctctca

SEQ ID NO: 251860 - DNA, 15 bp, Homo sapiens
ttgtcatcatctctc

SEQ ID NO: 251861 - DNA, 15 bp, Homo sapiens
cttgtcatcatctct

SEQ ID NO: 251862 - DNA, 15 bp, Homo sapiens
ccttgtcatcatctc

SEQ ID NO: 251863 - DNA, 15 bp, Homo sapiens
gccttgtcatcatct

SEQ ID NO: 251864 - DNA, 15 bp, Homo sapiens
ggccttgtcatcatc

SEQ ID NO: 251865 - DNA, 15 bp, Homo sapiens
tggccttgtcatcat

SEQ ID NO: 251866 - DNA, 15 bp, Homo sapiens
ttggccttgtcatca

SEQ ID NO: 251867 - DNA, 15 bp, Homo sapiens
cttggccttgtcatc

SEQ ID NO: 251868 - DNA, 15 bp, Homo sapiens
ccttggccttgtcat

SEQ ID NO: 251869 - DNA, 15 bp, Homo sapiens
accttggccttgtca

SEQ ID NO: 251870 - DNA, 15 bp, Homo sapiens
taccttggccttgtc

SEQ ID NO: 251871 - DNA, 15 bp, Homo sapiens
ctaccttggccttgt

SEQ ID NO: 251872 - DNA, 15 bp, Homo sapiens
cctaccttggccttg

SEQ ID NO: 251873 - DNA, 15 bp, Homo sapiens
acctaccttggcctt

SEQ ID NO: 251874 - DNA, 15 bp, Homo sapiens
tacctaccttggcct

SEQ ID NO: 251875 - DNA, 15 bp, Homo sapiens
ctacctaccttggcc

SEQ ID NO: 251876 - DNA, 15 bp, Homo sapiens
cctacctaccttggc

SEQ ID NO: 251877 - DNA, 15 bp, Homo sapiens
tcctacctaccttgg

SEQ ID NO: 251878 - DNA, 15 bp, Homo sapiens
ctcctacctaccttg

SEQ ID NO: 251879 - DNA, 15 bp, Homo sapiens
tctcctacctacctt

SEQ ID NO: 251880 - DNA, 15 bp, Homo sapiens
ttctcctacctacct

SEQ ID NO: 251881 - DNA, 15 bp, Homo sapiens
attctcctacctacc

SEQ ID NO: 251882 - DNA, 15 bp, Homo sapiens
cattctcctacctac

SEQ ID NO: 251883 - DNA, 15 bp, Homo sapiens
ccattctcctaccta

SEQ ID NO: 251884 - DNA, 15 bp, Homo sapiens
cccattctcctacct

SEQ ID NO: 251885 - DNA, 15 bp, Homo sapiens
ccccattctcctacc

SEQ ID NO: 251886 - DNA, 15 bp, Homo sapiens
tccccattctcctac

SEQ ID NO: 251887 - DNA, 15 bp, Homo sapiens
atccccattctccta

SEQ ID NO: 251888 - DNA, 15 bp, Homo sapiens
gatccccattctcct

SEQ ID NO: 251889 - DNA, 15 bp, Homo sapiens
ggatccccattctcc

SEQ ID NO: 251890 - DNA, 15 bp, Homo sapiens
gggatccccattctc

SEQ ID NO: 251891 - DNA, 15 bp, Homo sapiens
agggatccccattct

SEQ ID NO: 251892 - DNA, 15 bp, Homo sapiens
gagggatccccattc

SEQ ID NO: 251893 - DNA, 15 bp, Homo sapiens
tgagggatccccatt

SEQ ID NO: 251894 - DNA, 15 bp, Homo sapiens
atgagggatccccat

SEQ ID NO: 251895 - DNA, 15 bp, Homo sapiens
aatgagggatcccca

SEQ ID NO: 251896 - DNA, 15 bp, Homo sapiens
gaatgagggatcccc

SEQ ID NO: 251897 - DNA, 15 bp, Homo sapiens
tgaatgagggatccc

SEQ ID NO: 251898 - DNA, 15 bp, Homo sapiens
atgaatgagggatcc

SEQ ID NO: 251899 - DNA, 15 bp, Homo sapiens
aatgaatgagggatc

SEQ ID NO: 251900 - DNA, 15 bp, Homo sapiens
aaatgaatgagggat

SEQ ID NO: 251901 - DNA, 15 bp, Homo sapiens
taaatgaatgaggga

SEQ ID NO: 251902 - DNA, 15 bp, Homo sapiens
ataaatgaatgaggg

SEQ ID NO: 251903 - DNA, 15 bp, Homo sapiens
gataaatgaatgagg

SEQ ID NO: 251904 - DNA, 15 bp, Homo sapiens
ggataaatgaatgag

SEQ ID NO: 251905 - DNA, 15 bp, Homo sapiens
gggataaatgaatga

SEQ ID NO: 251906 - DNA, 15 bp, Homo sapiens
tgggataaatgaatg

SEQ ID NO: 251907 - DNA, 15 bp, Homo sapiens
atgggataaatgaat

SEQ ID NO: 251908 - DNA, 15 bp, Homo sapiens
gatgggataaatgaa

SEQ ID NO: 251909 - DNA, 15 bp, Homo sapiens
tgatgggataaatga

SEQ ID NO: 251910 - DNA, 15 bp, Homo sapiens
atgatgggataaatg

SEQ ID NO: 251911 - DNA, 15 bp, Homo sapiens
aatgatgggataaat

SEQ ID NO: 251912 - DNA, 15 bp, Homo sapiens
taatgatgggataaa

SEQ ID NO: 251913 - DNA, 15 bp, Homo sapiens
ataatgatgggataa

SEQ ID NO: 251914 - DNA, 15 bp, Homo sapiens
aataatgatgggata

SEQ ID NO: 251915 - DNA, 15 bp, Homo sapiens
aaataatgatgggat

SEQ ID NO: 251916 - DNA, 15 bp, Homo sapiens
taaataatgatggga

SEQ ID NO: 251917 - DNA, 15 bp, Homo sapiens
ataaataatgatggg

SEQ ID NO: 251918 - DNA, 15 bp, Homo sapiens
aataaataatgatgg

SEQ ID NO: 251919 - DNA, 15 bp, Homo sapiens
caataaataatgatg

SEQ ID NO: 251920 - DNA, 15 bp, Homo sapiens
tcaataaataatgat

SEQ ID NO: 251921 - DNA, 15 bp, Homo sapiens
ctcaataaataatga

SEQ ID NO: 251922 - DNA, 15 bp, Homo sapiens
gctcaataaataatg

SEQ ID NO: 251923 - DNA, 15 bp, Homo sapiens
tgctcaataaataat

SEQ ID NO: 251924 - DNA, 15 bp, Homo sapiens
gtgctcaataaataa

SEQ ID NO: 251925 - DNA, 15 bp, Homo sapiens
ggtgctcaataaata

SEQ ID NO: 251926 - DNA, 15 bp, Homo sapiens
tggtgctcaataaat

SEQ ID NO: 251927 - DNA, 15 bp, Homo sapiens
ttggtgctcaataaa

SEQ ID NO: 251928 - DNA, 15 bp, Homo sapiens
gttggtgctcaataa

SEQ ID NO: 251929 - DNA, 15 bp, Homo sapiens
agttggtgctcaata

SEQ ID NO: 251930 - DNA, 15 bp, Homo sapiens
cagttggtgctcaat

SEQ ID NO: 251931 - DNA, 15 bp, Homo sapiens
acagttggtgctcaa

SEQ ID NO: 251932 - DNA, 15 bp, Homo sapiens
cacagttggtgctca

SEQ ID NO: 251933 - DNA, 15 bp, Homo sapiens
acacagttggtgctc

SEQ ID NO: 251934 - DNA, 15 bp, Homo sapiens
gacacagttggtgct

SEQ ID NO: 251935 - DNA, 15 bp, Homo sapiens
ggacacagttggtgc

SEQ ID NO: 251936 - DNA, 15 bp, Homo sapiens
gggacacagttggtg

SEQ ID NO: 251937 - DNA, 15 bp, Homo sapiens
tgggacacagttggt

SEQ ID NO: 251938 - DNA, 15 bp, Homo sapiens
ctgggacacagttgg

SEQ ID NO: 251939 - DNA, 15 bp, Homo sapiens
cctgggacacagttg

SEQ ID NO: 251940 - DNA, 15 bp, Homo sapiens
gcctgggacacagtt

SEQ ID NO: 251941 - DNA, 15 bp, Homo sapiens
tgcctgggacacagt

SEQ ID NO: 251942 - DNA, 15 bp, Homo sapiens
atgcctgggacacag

SEQ ID NO: 251943 - DNA, 15 bp, Homo sapiens
aatgcctgggacaca

SEQ ID NO: 251944 - DNA, 15 bp, Homo sapiens
caatgcctgggacac

SEQ ID NO: 251945 - DNA, 15 bp, Homo sapiens
acaatgcctgggaca

SEQ ID NO: 251946 - DNA, 15 bp, Homo sapiens
aacaatgcctgggac

SEQ ID NO: 251947 - DNA, 15 bp, Homo sapiens
gaacaatgcctggga

SEQ ID NO: 251948 - DNA, 15 bp, Homo sapiens
tgaacaatgcctggg

SEQ ID NO: 251949 - DNA, 15 bp, Homo sapiens
atttcaattcattga

SEQ ID NO: 251950 - DNA, 15 bp, Homo sapiens
aatttcaattcattg

SEQ ID NO: 251951 - DNA, 15 bp, Homo sapiens
taatttcaattcatt

SEQ ID NO: 251952 - DNA, 15 bp, Homo sapiens
ttaatttcaattcat

SEQ ID NO: 251953 - DNA, 15 bp, Homo sapiens
cttaatttcaattca

SEQ ID NO: 251954 - DNA, 15 bp, Homo sapiens
ccttaatttcaattc

SEQ ID NO: 251955 - DNA, 15 bp, Homo sapiens
tccttaatttcaatt

SEQ ID NO: 251956 - DNA, 15 bp, Homo sapiens
gtccttaatttcaat

SEQ ID NO: 251957 - DNA, 15 bp, Homo sapiens
ggtccttaatttcaa

SEQ ID NO: 251958 - DNA, 15 bp, Homo sapiens
cggtccttaatttca

SEQ ID NO: 251959 - DNA, 15 bp, Homo sapiens
acggtccttaatttc

SEQ ID NO: 251960 - DNA, 15 bp, Homo sapiens
aacggtccttaattt

SEQ ID NO: 251961 - DNA, 15 bp, Homo sapiens
gaacggtccttaatt

SEQ ID NO: 251962 - DNA, 15 bp, Homo sapiens
tgaacggtccttaat

SEQ ID NO: 251963 - DNA, 15 bp, Homo sapiens
atgaacggtccttaa

SEQ ID NO: 251964 - DNA, 15 bp, Homo sapiens
aatgaacggtcctta

SEQ ID NO: 251965 - DNA, 15 bp, Homo sapiens
aaatgaacggtcctt

SEQ ID NO: 251966 - DNA, 15 bp, Homo sapiens
caaatgaacggtcct

SEQ ID NO: 251967 - DNA, 15 bp, Homo sapiens
ccaaatgaacggtcc

SEQ ID NO: 251968 - DNA, 15 bp, Homo sapiens
tccaaatgaacggtc

SEQ ID NO: 251969 - DNA, 15 bp, Homo sapiens
ttccaaatgaacggt

SEQ ID NO: 251970 - DNA, 15 bp, Homo sapiens
tttccaaatgaacgg

SEQ ID NO: 251971 - DNA, 15 bp, Homo sapiens
ttttccaaatgaacg

SEQ ID NO: 251972 - DNA, 15 bp, Homo sapiens
tttttccaaatgaac

SEQ ID NO: 251973 - DNA, 15 bp, Homo sapiens
gtttttccaaatgaa

SEQ ID NO: 251974 - DNA, 15 bp, Homo sapiens
ggtttttccaaatga

SEQ ID NO: 251975 - DNA, 15 bp, Homo sapiens
aggtttttccaaatg

SEQ ID NO: 251976 - DNA, 15 bp, Homo sapiens
taggtttttccaaat

SEQ ID NO: 251977 - DNA, 15 bp, Homo sapiens
ataggtttttccaaa

SEQ ID NO: 251978 - DNA, 15 bp, Homo sapiens
aataggtttttccaa

SEQ ID NO: 251979 - DNA, 15 bp, Homo sapiens
taataggtttttcca

SEQ ID NO: 251980 - DNA, 15 bp, Homo sapiens
ttaataggtttttcc

SEQ ID NO: 251981 - DNA, 15 bp, Homo sapiens
gttaataggtttttc

SEQ ID NO: 251982 - DNA, 15 bp, Homo sapiens
agttaataggttttt

SEQ ID NO: 251983 - DNA, 15 bp, Homo sapiens
gagttaataggtttt

SEQ ID NO: 251984 - DNA, 15 bp, Homo sapiens
ggagttaataggttt

SEQ ID NO: 251985 - DNA, 15 bp, Homo sapiens
gggagttaataggtt

SEQ ID NO: 251986 - DNA, 15 bp, Homo sapiens
agggagttaataggt

SEQ ID NO: 251987 - DNA, 15 bp, Homo sapiens
cagggagttaatagg

SEQ ID NO: 251988 - DNA, 15 bp, Homo sapiens
gcagggagttaatag

SEQ ID NO: 251989 - DNA, 15 bp, Homo sapiens
agcagggagttaata

SEQ ID NO: 251990 - DNA, 15 bp, Homo sapiens
aagcagggagttaat

SEQ ID NO: 251991 - DNA, 15 bp, Homo sapiens
caagcagggagttaa

SEQ ID NO: 251992 - DNA, 15 bp, Homo sapiens
acaagcagggagtta

SEQ ID NO: 251993 - DNA, 15 bp, Homo sapiens
gacaagcagggagtt

SEQ ID NO: 251994 - DNA, 15 bp, Homo sapiens
cgacaagcagggagt

SEQ ID NO: 251995 - DNA, 15 bp, Homo sapiens
tcgacaagcagggag

SEQ ID NO: 251996 - DNA, 15 bp, Homo sapiens
atcgacaagcaggga

SEQ ID NO: 251997 - DNA, 15 bp, Homo sapiens
catcgacaagcaggg

SEQ ID NO: 251998 - DNA, 15 bp, Homo sapiens
ccatcgacaagcagg

SEQ ID NO: 251999 - DNA, 15 bp, Homo sapiens
gccatcgacaagcag

SEQ ID NO: 252000 - DNA, 15 bp, Homo sapiens
agccatcgacaagca

SEQ ID NO: 252001 - DNA, 15 bp, Homo sapiens
aagccatcgacaagc

SEQ ID NO: 252002 - DNA, 15 bp, Homo sapiens
taagccatcgacaag

SEQ ID NO: 252003 - DNA, 15 bp, Homo sapiens
gtaagccatcgacaa

SEQ ID NO: 252004 - DNA, 15 bp, Homo sapiens
agtaagccatcgaca

SEQ ID NO: 252005 - DNA, 15 bp, Homo sapiens
aagtaagccatcgac

SEQ ID NO: 252006 - DNA, 15 bp, Homo sapiens
aaagtaagccatcga

SEQ ID NO: 252007 - DNA, 15 bp, Homo sapiens
gaaagtaagccatcg

SEQ ID NO: 252008 - DNA, 15 bp, Homo sapiens
agaaagtaagccatc

SEQ ID NO: 252009 - DNA, 15 bp, Homo sapiens
tagaaagtaagccat

SEQ ID NO: 252010 - DNA, 15 bp, Homo sapiens
gtagaaagtaagcca

SEQ ID NO: 252011 - DNA, 15 bp, Homo sapiens
agtagaaagtaagcc

SEQ ID NO: 252012 - DNA, 15 bp, Homo sapiens
gagtagaaagtaagc

SEQ ID NO: 252013 - DNA, 15 bp, Homo sapiens
tgagtagaaagtaag

SEQ ID NO: 252014 - DNA, 15 bp, Homo sapiens
ctgagtagaaagtaa

SEQ ID NO: 252015 - DNA, 15 bp, Homo sapiens
gctgagtagaaagta

SEQ ID NO: 252016 - DNA, 15 bp, Homo sapiens
ggctgagtagaaagt

SEQ ID NO: 252017 - DNA, 15 bp, Homo sapiens
aggctgagtagaaag

SEQ ID NO: 252018 - DNA, 15 bp, Homo sapiens
caggctgagtagaaa

SEQ ID NO: 252019 - DNA, 15 bp, Homo sapiens
ccaggctgagtagaa

SEQ ID NO: 252020 - DNA, 15 bp, Homo sapiens
gccaggctgagtaga

SEQ ID NO: 252021 - DNA, 15 bp, Homo sapiens
agccaggctgagtag

SEQ ID NO: 252022 - DNA, 15 bp, Homo sapiens
cagccaggctgagta

SEQ ID NO: 252023 - DNA, 15 bp, Homo sapiens
ccagccaggctgagt

SEQ ID NO: 252024 - DNA, 15 bp, Homo sapiens
cccagccaggctgag

SEQ ID NO: 252025 - DNA, 15 bp, Homo sapiens
acccagccaggctga

SEQ ID NO: 252026 - DNA, 15 bp, Homo sapiens
aacccagccaggctg

SEQ ID NO: 252027 - DNA, 15 bp, Homo sapiens
gaacccagccaggct

SEQ ID NO: 252028 - DNA, 15 bp, Homo sapiens
ggaacccagccaggc

SEQ ID NO: 252029 - DNA, 15 bp, Homo sapiens
tggaacccagccagg

SEQ ID NO: 252030 - DNA, 15 bp, Homo sapiens
gtggaacccagccag

SEQ ID NO: 252031 - DNA, 15 bp, Homo sapiens
ggtggaacccagcca

SEQ ID NO: 252032 - DNA, 15 bp, Homo sapiens
aggtggaacccagcc

SEQ ID NO: 252033 - DNA, 15 bp, Homo sapiens
gaggtggaacccagc

SEQ ID NO: 252034 - DNA, 15 bp, Homo sapiens
agaggtggaacccag

SEQ ID NO: 252035 - DNA, 15 bp, Homo sapiens
aagaggtggaaccca

SEQ ID NO: 252036 - DNA, 15 bp, Homo sapiens
taagaggtggaaccc

SEQ ID NO: 252037 - DNA, 15 bp, Homo sapiens
ctaagaggtggaacc

SEQ ID NO: 252038 - DNA, 15 bp, Homo sapiens
gctaagaggtggaac

SEQ ID NO: 252039 - DNA, 15 bp, Homo sapiens
agctaagaggtggaa

SEQ ID NO: 252040 - DNA, 15 bp, Homo sapiens
gagctaagaggtgga

SEQ ID NO: 252041 - DNA, 15 bp, Homo sapiens
cgagctaagaggtgg

SEQ ID NO: 252042 - DNA, 15 bp, Homo sapiens
acgagctaagaggtg

SEQ ID NO: 252043 - DNA, 15 bp, Homo sapiens
cacgagctaagaggt

SEQ ID NO: 252044 - DNA, 15 bp, Homo sapiens
tcacgagctaagagg

SEQ ID NO: 252045 - DNA, 15 bp, Homo sapiens
ctcacgagctaagag

SEQ ID NO: 252046 - DNA, 15 bp, Homo sapiens
gctcacgagctaaga

SEQ ID NO: 252047 - DNA, 15 bp, Homo sapiens
ggctcacgagctaag

SEQ ID NO: 252048 - DNA, 15 bp, Homo sapiens
gggctcacgagctaa

SEQ ID NO: 252049 - DNA, 15 bp, Homo sapiens
agggctcacgagcta

SEQ ID NO: 252050 - DNA, 15 bp, Homo sapiens
gagggctcacgagct

SEQ ID NO: 252051 - DNA, 15 bp, Homo sapiens
tgagggctcacgagc

SEQ ID NO: 252052 - DNA, 15 bp, Homo sapiens
gtgagggctcacgag

SEQ ID NO: 252053 - DNA, 15 bp, Homo sapiens
cgtgagggctcacga

SEQ ID NO: 252054 - DNA, 15 bp, Homo sapiens
gcgtgagggctcacg

SEQ ID NO: 252055 - DNA, 15 bp, Homo sapiens
tgcgtgagggctcac

SEQ ID NO: 252056 - DNA, 15 bp, Homo sapiens
ttgcgtgagggctca

SEQ ID NO: 252057 - DNA, 15 bp, Homo sapiens
gttgcgtgagggctc

SEQ ID NO: 252058 - DNA, 15 bp, Homo sapiens
agttgcgtgagggct

SEQ ID NO: 252059 - DNA, 15 bp, Homo sapiens
gagttgcgtgagggc

SEQ ID NO: 252060 - DNA, 15 bp, Homo sapiens
agagttgcgtgaggg

SEQ ID NO: 252061 - DNA, 15 bp, Homo sapiens
cagagttgcgtgagg

SEQ ID NO: 252062 - DNA, 15 bp, Homo sapiens
gcagagttgcgtgag

SEQ ID NO: 252063 - DNA, 15 bp, Homo sapiens
agcagagttgcgtga

SEQ ID NO: 252064 - DNA, 15 bp, Homo sapiens
cagcagagttgcgtg

SEQ ID NO: 252065 - DNA, 15 bp, Homo sapiens
acagcagagttgcgt

SEQ ID NO: 252066 - DNA, 15 bp, Homo sapiens
gacagcagagttgcg

SEQ ID NO: 252067 - DNA, 15 bp, Homo sapiens
agacagcagagttgc

SEQ ID NO: 252068 - DNA, 15 bp, Homo sapiens
gagacagcagagttg

SEQ ID NO: 252069 - DNA, 15 bp, Homo sapiens
ggagacagcagagtt

SEQ ID NO: 252070 - DNA, 15 bp, Homo sapiens
tggagacagcagagt

SEQ ID NO: 252071 - DNA, 15 bp, Homo sapiens
atggagacagcagag

SEQ ID NO: 252072 - DNA, 15 bp, Homo sapiens
aatggagacagcaga

SEQ ID NO: 252073 - DNA, 15 bp, Homo sapiens
taatggagacagcag

SEQ ID NO: 252074 - DNA, 15 bp, Homo sapiens
ctaatggagacagca

SEQ ID NO: 252075 - DNA, 15 bp, Homo sapiens
actaatggagacagc

SEQ ID NO: 252076 - DNA, 15 bp, Homo sapiens
cactaatggagacag

SEQ ID NO: 252077 - DNA, 15 bp, Homo sapiens
acactaatggagaca

SEQ ID NO: 252078 - DNA, 15 bp, Homo sapiens
gacactaatggagac

SEQ ID NO: 252079 - DNA, 15 bp, Homo sapiens
ggacactaatggaga

SEQ ID NO: 252080 - DNA, 15 bp, Homo sapiens
gggacactaatggag

SEQ ID NO: 252081 - DNA, 15 bp, Homo sapiens
agggacactaatgga

SEQ ID NO: 252082 - DNA, 15 bp, Homo sapiens
aagggacactaatgg

SEQ ID NO: 252083 - DNA, 15 bp, Homo sapiens
caagggacactaatg

SEQ ID NO: 252084 - DNA, 15 bp, Homo sapiens
acaagggacactaat

SEQ ID NO: 252085 - DNA, 15 bp, Homo sapiens
cacaagggacactaa

SEQ ID NO: 252086 - DNA, 15 bp, Homo sapiens
ccacaagggacacta

SEQ ID NO: 252087 - DNA, 15 bp, Homo sapiens
cccacaagggacact

SEQ ID NO: 252088 - DNA, 15 bp, Homo sapiens
gcccacaagggacac

SEQ ID NO: 252089 - DNA, 15 bp, Homo sapiens
agcccacaagggaca

SEQ ID NO: 252090 - DNA, 15 bp, Homo sapiens
cagcccacaagggac

SEQ ID NO: 252091 - DNA, 15 bp, Homo sapiens
ccagcccacaaggga

SEQ ID NO: 252092 - DNA, 15 bp, Homo sapiens
accagcccacaaggg

SEQ ID NO: 252093 - DNA, 15 bp, Homo sapiens
caccagcccacaagg

SEQ ID NO: 252094 - DNA, 15 bp, Homo sapiens
ccaccagcccacaag

SEQ ID NO: 252095 - DNA, 15 bp, Homo sapiens
gccaccagcccacaa

SEQ ID NO: 252096 - DNA, 15 bp, Homo sapiens
ggccaccagcccaca

SEQ ID NO: 252097 - DNA, 15 bp, Homo sapiens
cggccaccagcccac

SEQ ID NO: 252098 - DNA, 15 bp, Homo sapiens
tcggccaccagccca

SEQ ID NO: 252099 - DNA, 15 bp, Homo sapiens
ctcggccaccagccc

SEQ ID NO: 252100 - DNA, 15 bp, Homo sapiens
cctcggccaccagcc

SEQ ID NO: 252101 - DNA, 15 bp, Homo sapiens
gcctcggccaccagc

SEQ ID NO: 252102 - DNA, 15 bp, Homo sapiens
tgcctcggccaccag

SEQ ID NO: 252103 - DNA, 15 bp, Homo sapiens
ctgcctcggccacca

SEQ ID NO: 252104 - DNA, 15 bp, Homo sapiens
actgcctcggccacc

SEQ ID NO: 252105 - DNA, 15 bp, Homo sapiens
aactgcctcggccac

SEQ ID NO: 252106 - DNA, 15 bp, Homo sapiens
taactgcctcggcca

SEQ ID NO: 252107 - DNA, 15 bp, Homo sapiens
ctaactgcctcggcc

SEQ ID NO: 252108 - DNA, 15 bp, Homo sapiens
cctaactgcctcggc

SEQ ID NO: 252109 - DNA, 15 bp, Homo sapiens
gcctaactgcctcgg

SEQ ID NO: 252110 - DNA, 15 bp, Homo sapiens
agcctaactgcctcg

SEQ ID NO: 252111 - DNA, 15 bp, Homo sapiens
aagcctaactgcctc

SEQ ID NO: 252112 - DNA, 15 bp, Homo sapiens
taagcctaactgcct

SEQ ID NO: 252113 - DNA, 15 bp, Homo sapiens
ataagcctaactgcc

SEQ ID NO: 252114 - DNA, 15 bp, Homo sapiens
cataagcctaactgc

SEQ ID NO: 252115 - DNA, 15 bp, Homo sapiens
tcataagcctaactg

SEQ ID NO: 252116 - DNA, 15 bp, Homo sapiens
ttcataagcctaact

SEQ ID NO: 252117 - DNA, 15 bp, Homo sapiens
attcataagcctaac

SEQ ID NO: 252118 - DNA, 15 bp, Homo sapiens
tattcataagcctaa

SEQ ID NO: 252119 - DNA, 15 bp, Homo sapiens
atattcataagccta

SEQ ID NO: 252120 - DNA, 15 bp, Homo sapiens
aatattcataagcct

SEQ ID NO: 252121 - DNA, 15 bp, Homo sapiens
gaatattcataagcc

SEQ ID NO: 252122 - DNA, 15 bp, Homo sapiens
ggaatattcataagc

SEQ ID NO: 252123 - DNA, 15 bp, Homo sapiens
tggaatattcataag

SEQ ID NO: 252124 - DNA, 15 bp, Homo sapiens
ctggaatattcataa

SEQ ID NO: 252125 - DNA, 15 bp, Homo sapiens
actggaatattcata

SEQ ID NO: 252126 - DNA, 15 bp, Homo sapiens
aactggaatattcat

SEQ ID NO: 252127 - DNA, 15 bp, Homo sapiens
caactggaatattca

SEQ ID NO: 252128 - DNA, 15 bp, Homo sapiens
gcaactggaatattc

SEQ ID NO: 252129 - DNA, 15 bp, Homo sapiens
agcaactggaatatt

SEQ ID NO: 252130 - DNA, 15 bp, Homo sapiens
gagcaactggaatat

SEQ ID NO: 252131 - DNA, 15 bp, Homo sapiens
ggagcaactggaata

SEQ ID NO: 252132 - DNA, 15 bp, Homo sapiens
aggagcaactggaat

SEQ ID NO: 252133 - DNA, 15 bp, Homo sapiens
caggagcaactggaa

SEQ ID NO: 252134 - DNA, 15 bp, Homo sapiens
acaggagcaactgga

SEQ ID NO: 252135 - DNA, 15 bp, Homo sapiens
tacaggagcaactgg

SEQ ID NO: 252136 - DNA, 15 bp, Homo sapiens
ttacaggagcaactg

SEQ ID NO: 252137 - DNA, 15 bp, Homo sapiens
tttacaggagcaact

SEQ ID NO: 252138 - DNA, 15 bp, Homo sapiens
atttacaggagcaac

SEQ ID NO: 252139 - DNA, 15 bp, Homo sapiens
aatttacaggagcaa

SEQ ID NO: 252140 - DNA, 15 bp, Homo sapiens
aaatttacaggagca

SEQ ID NO: 252141 - DNA, 15 bp, Homo sapiens
gaaatttacaggagc

SEQ ID NO: 252142 - DNA, 15 bp, Homo sapiens
ggaaatttacaggag

SEQ ID NO: 252143 - DNA, 15 bp, Homo sapiens
tggaaatttacagga

SEQ ID NO: 252144 - DNA, 15 bp, Homo sapiens
ctggaaatttacagg

SEQ ID NO: 252145 - DNA, 15 bp, Homo sapiens
gctggaaatttacag

SEQ ID NO: 252146 - DNA, 15 bp, Homo sapiens
tgctggaaatttaca

SEQ ID NO: 252147 - DNA, 15 bp, Homo sapiens
atgctggaaatttac

SEQ ID NO: 252148 - DNA, 15 bp, Homo sapiens
gatgctggaaattta

SEQ ID NO: 252149 - DNA, 15 bp, Homo sapiens
ggatgctggaaattt

SEQ ID NO: 252150 - DNA, 15 bp, Homo sapiens
tggatgctggaaatt

SEQ ID NO: 252151 - DNA, 15 bp, Homo sapiens
gtggatgctggaaat

SEQ ID NO: 252152 - DNA, 15 bp, Homo sapiens
agtggatgctggaaa

SEQ ID NO: 252153 - DNA, 15 bp, Homo sapiens
cagtggatgctggaa

SEQ ID NO: 252154 - DNA, 15 bp, Homo sapiens
acagtggatgctgga

SEQ ID NO: 252155 - DNA, 15 bp, Homo sapiens
aacagtggatgctgg

SEQ ID NO: 252156 - DNA, 15 bp, Homo sapiens
taacagtggatgctg

SEQ ID NO: 252157 - DNA, 15 bp, Homo sapiens
ctaacagtggatgct

SEQ ID NO: 252158 - DNA, 15 bp, Homo sapiens
cctaacagtggatgc

SEQ ID NO: 252159 - DNA, 15 bp, Homo sapiens
gcctaacagtggatg

SEQ ID NO: 252160 - DNA, 15 bp, Homo sapiens
tgcctaacagtggat

SEQ ID NO: 252161 - DNA, 15 bp, Homo sapiens
ctgcctaacagtgga

SEQ ID NO: 252162 - DNA, 15 bp, Homo sapiens
cctgcctaacagtgg

SEQ ID NO: 252163 - DNA, 15 bp, Homo sapiens
tcctgcctaacagtg

SEQ ID NO: 252164 - DNA, 15 bp, Homo sapiens
gtcctgcctaacagt

SEQ ID NO: 252165 - DNA, 15 bp, Homo sapiens
tgtcctgcctaacag

SEQ ID NO: 252166 - DNA, 15 bp, Homo sapiens
atgtcctgcctaaca

SEQ ID NO: 252167 - DNA, 15 bp, Homo sapiens
catgtcctgcctaac

SEQ ID NO: 252168 - DNA, 15 bp, Homo sapiens
tcatgtcctgcctaa

SEQ ID NO: 252169 - DNA, 15 bp, Homo sapiens
ctcatgtcctgccta

SEQ ID NO: 252170 - DNA, 15 bp, Homo sapiens
cctcatgtcctgcct

SEQ ID NO: 252171 - DNA, 15 bp, Homo sapiens
gcctcatgtcctgcc

SEQ ID NO: 252172 - DNA, 15 bp, Homo sapiens
tgcctcatgtcctgc

SEQ ID NO: 252173 - DNA, 15 bp, Homo sapiens
gtgcctcatgtcctg

SEQ ID NO: 252174 - DNA, 15 bp, Homo sapiens
agtgcctcatgtcct

SEQ ID NO: 252175 - DNA, 15 bp, Homo sapiens
tagtgcctcatgtcc

SEQ ID NO: 252176 - DNA, 15 bp, Homo sapiens
ttagtgcctcatgtc

SEQ ID NO: 252177 - DNA, 15 bp, Homo sapiens
cttagtgcctcatgt

SEQ ID NO: 252178 - DNA, 15 bp, Homo sapiens
ccttagtgcctcatg

SEQ ID NO: 252179 - DNA, 15 bp, Homo sapiens
cccttagtgcctcat

SEQ ID NO: 252180 - DNA, 15 bp, Homo sapiens
tcccttagtgcctca

SEQ ID NO: 252181 - DNA, 15 bp, Homo sapiens
atcccttagtgcctc

SEQ ID NO: 252182 - DNA, 15 bp, Homo sapiens
catcccttagtgcct

SEQ ID NO: 252183 - DNA, 15 bp, Homo sapiens
acatcccttagtgcc

SEQ ID NO: 252184 - DNA, 15 bp, Homo sapiens
cacatcccttagtgc

SEQ ID NO: 252185 - DNA, 15 bp, Homo sapiens
gcacatcccttagtg

SEQ ID NO: 252186 - DNA, 15 bp, Homo sapiens
tgcacatcccttagt

SEQ ID NO: 252187 - DNA, 15 bp, Homo sapiens
atgcacatcccttag

SEQ ID NO: 252188 - DNA, 15 bp, Homo sapiens
gatgcacatccctta

SEQ ID NO: 252189 - DNA, 15 bp, Homo sapiens
tgatgcacatccctt

SEQ ID NO: 252190 - DNA, 15 bp, Homo sapiens
gtgatgcacatccct

SEQ ID NO: 252191 - DNA, 15 bp, Homo sapiens
agtgatgcacatccc

SEQ ID NO: 252192 - DNA, 15 bp, Homo sapiens
aagtgatgcacatcc

SEQ ID NO: 252193 - DNA, 15 bp, Homo sapiens
gaagtgatgcacatc

SEQ ID NO: 252194 - DNA, 15 bp, Homo sapiens
agaagtgatgcacat

SEQ ID NO: 252195 - DNA, 15 bp, Homo sapiens
cagaagtgatgcaca

SEQ ID NO: 252196 - DNA, 15 bp, Homo sapiens
ccagaagtgatgcac

SEQ ID NO: 252197 - DNA, 15 bp, Homo sapiens
cccagaagtgatgca

SEQ ID NO: 252198 - DNA, 15 bp, Homo sapiens
gcccagaagtgatgc

SEQ ID NO: 252199 - DNA, 15 bp, Homo sapiens
agcccagaagtgatg

SEQ ID NO: 252200 - DNA, 15 bp, Homo sapiens
cagcccagaagtgat

SEQ ID NO: 252201 - DNA, 15 bp, Homo sapiens
ccagcccagaagtga

SEQ ID NO: 252202 - DNA, 15 bp, Homo sapiens
cccagcccagaagtg

SEQ ID NO: 252203 - DNA, 15 bp, Homo sapiens
ccccagcccagaagt

SEQ ID NO: 252204 - DNA, 15 bp, Homo sapiens
gccccagcccagaag

SEQ ID NO: 252205 - DNA, 15 bp, Homo sapiens
tgccccagcccagaa

SEQ ID NO: 252206 - DNA, 15 bp, Homo sapiens
ctgccccagcccaga

SEQ ID NO: 252207 - DNA, 15 bp, Homo sapiens
cctgccccagcccag

SEQ ID NO: 252208 - DNA, 15 bp, Homo sapiens
ccctgccccagccca

SEQ ID NO: 252209 - DNA, 15 bp, Homo sapiens
cccctgccccagccc

SEQ ID NO: 252210 - DNA, 15 bp, Homo sapiens
tcccctgccccagcc

SEQ ID NO: 252211 - DNA, 15 bp, Homo sapiens
atcccctgccccagc

SEQ ID NO: 252212 - DNA, 15 bp, Homo sapiens
catcccctgccccag

SEQ ID NO: 252213 - DNA, 15 bp, Homo sapiens
gcatcccctgcccca

SEQ ID NO: 252214 - DNA, 15 bp, Homo sapiens
ggcatcccctgcccc

SEQ ID NO: 252215 - DNA, 15 bp, Homo sapiens
aggcatcccctgccc

SEQ ID NO: 252216 - DNA, 15 bp, Homo sapiens
caggcatcccctgcc

SEQ ID NO: 252217 - DNA, 15 bp, Homo sapiens
acaggcatcccctgc

SEQ ID NO: 252218 - DNA, 15 bp, Homo sapiens
cacaggcatcccctg

SEQ ID NO: 252219 - DNA, 15 bp, Homo sapiens
acacaggcatcccct

SEQ ID NO: 252220 - DNA, 15 bp, Homo sapiens
cacacaggcatcccc

SEQ ID NO: 252221 - DNA, 15 bp, Homo sapiens
acacacaggcatccc

SEQ ID NO: 252222 - DNA, 15 bp, Homo sapiens
cacacacaggcatcc

SEQ ID NO: 252223 - DNA, 15 bp, Homo sapiens
ccacacacaggcatc

SEQ ID NO: 252224 - DNA, 15 bp, Homo sapiens
accacacacaggcat

SEQ ID NO: 252225 - DNA, 15 bp, Homo sapiens
caccacacacaggca

SEQ ID NO: 252226 - DNA, 15 bp, Homo sapiens
ccaccacacacaggc

SEQ ID NO: 252227 - DNA, 15 bp, Homo sapiens
accaccacacacagg

SEQ ID NO: 252228 - DNA, 15 bp, Homo sapiens
caccaccacacacag

SEQ ID NO: 252229 - DNA, 15 bp, Homo sapiens
gcaccaccacacaca

SEQ ID NO: 252230 - DNA, 15 bp, Homo sapiens
tgcaccaccacacac

SEQ ID NO: 252231 - DNA, 15 bp, Homo sapiens
ctgcaccaccacaca

SEQ ID NO: 252232 - DNA, 15 bp, Homo sapiens
actgcaccaccacac

SEQ ID NO: 252233 - DNA, 15 bp, Homo sapiens
aactgcaccaccaca

SEQ ID NO: 252234 - DNA, 15 bp, Homo sapiens
caactgcaccaccac

SEQ ID NO: 252235 - DNA, 15 bp, Homo sapiens
gcaactgcaccacca

SEQ ID NO: 252236 - DNA, 15 bp, Homo sapiens
agcaactgcaccacc

SEQ ID NO: 252237 - DNA, 15 bp, Homo sapiens
cagcaactgcaccac

SEQ ID NO: 252238 - DNA, 15 bp, Homo sapiens
acagcaactgcacca

SEQ ID NO: 252239 - DNA, 15 bp, Homo sapiens
gacagcaactgcacc

SEQ ID NO: 252240 - DNA, 15 bp, Homo sapiens
agacagcaactgcac

SEQ ID NO: 252241 - DNA, 15 bp, Homo sapiens
aagacagcaactgca

SEQ ID NO: 252242 - DNA, 15 bp, Homo sapiens
gaagacagcaactgc

SEQ ID NO: 252243 - DNA, 15 bp, Homo sapiens
gggaagacagcaact

SEQ ID NO: 252244 - DNA, 15 bp, Homo sapiens
agggaagacagcaac

SEQ ID NO: 252245 - DNA, 15 bp, Homo sapiens
cagggaagacagcaa

SEQ ID NO: 252246 - DNA, 15 bp, Homo sapiens
tcagggaagacagca

SEQ ID NO: 252247 - DNA, 15 bp, Homo sapiens
atcagggaagacagc

SEQ ID NO: 252248 - DNA, 15 bp, Homo sapiens
catcagggaagacag

SEQ ID NO: 252249 - DNA, 15 bp, Homo sapiens
ccatcagggaagaca

SEQ ID NO: 252250 - DNA, 15 bp, Homo sapiens
gccatcagggaagac

SEQ ID NO: 252251 - DNA, 15 bp, Homo sapiens
tgccatcagggaaga

SEQ ID NO: 252252 - DNA, 15 bp, Homo sapiens
gtgccatcagggaag

SEQ ID NO: 252253 - DNA, 15 bp, Homo sapiens
agtgccatcagggaa

SEQ ID NO: 252254 - DNA, 15 bp, Homo sapiens
cagtgccatcaggga

SEQ ID NO: 252255 - DNA, 15 bp, Homo sapiens
tcagtgccatcaggg

SEQ ID NO: 252256 - DNA, 15 bp, Homo sapiens
ttcagtgccatcagg

SEQ ID NO: 252257 - DNA, 15 bp, Homo sapiens
cttcagtgccatcag

SEQ ID NO: 252258 - DNA, 15 bp, Homo sapiens
tcttcagtgccatca

SEQ ID NO: 252259 - DNA, 15 bp, Homo sapiens
ctcttcagtgccatc

SEQ ID NO: 252260 - DNA, 15 bp, Homo sapiens
tctcttcagtgccat

SEQ ID NO: 252261 - DNA, 15 bp, Homo sapiens
gtctcttcagtgcca

SEQ ID NO: 252262 - DNA, 15 bp, Homo sapiens
agtctcttcagtgcc

SEQ ID NO: 252263 - DNA, 15 bp, Homo sapiens
cagtctcttcagtgc

SEQ ID NO: 252264 - DNA, 15 bp, Homo sapiens
acagtctcttcagtg

SEQ ID NO: 252265 - DNA, 15 bp, Homo sapiens
cacagtctcttcagt

SEQ ID NO: 252266 - DNA, 15 bp, Homo sapiens
ccacagtctcttcag

SEQ ID NO: 252267 - DNA, 15 bp, Homo sapiens
gccacagtctcttca

SEQ ID NO: 252268 - DNA, 15 bp, Homo sapiens
agccacagtctcttc

SEQ ID NO: 252269 - DNA, 15 bp, Homo sapiens
aagccacagtctctt

SEQ ID NO: 252270 - DNA, 15 bp, Homo sapiens
gaagccacagtctct

SEQ ID NO: 252271 - DNA, 15 bp, Homo sapiens
ggaagccacagtctc

SEQ ID NO: 252272 - DNA, 15 bp, Homo sapiens
tggaagccacagtct

SEQ ID NO: 252273 - DNA, 15 bp, Homo sapiens
ctggaagccacagtc

SEQ ID NO: 252274 - DNA, 15 bp, Homo sapiens
cctggaagccacagt

SEQ ID NO: 252275 - DNA, 15 bp, Homo sapiens
ccctggaagccacag

SEQ ID NO: 252276 - DNA, 15 bp, Homo sapiens
accctggaagccaca

SEQ ID NO: 252277 - DNA, 15 bp, Homo sapiens
aaccctggaagccac

SEQ ID NO: 252278 - DNA, 15 bp, Homo sapiens
caaccctggaagcca

SEQ ID NO: 252279 - DNA, 15 bp, Homo sapiens
gcaaccctggaagcc

SEQ ID NO: 252280 - DNA, 15 bp, Homo sapiens
tgcaaccctggaagc

SEQ ID NO: 252281 - DNA, 15 bp, Homo sapiens
ctgcaaccctggaag

SEQ ID NO: 252282 - DNA, 15 bp, Homo sapiens
actgcaaccctggaa

SEQ ID NO: 252283 - DNA, 15 bp, Homo sapiens
cactgcaaccctgga

SEQ ID NO: 252284 - DNA, 15 bp, Homo sapiens
gcactgcaaccctgg

SEQ ID NO: 252285 - DNA, 15 bp, Homo sapiens
tgcactgcaaccctg

SEQ ID NO: 252286 - DNA, 15 bp, Homo sapiens
ttgcactgcaaccct

SEQ ID NO: 252287 - DNA, 15 bp, Homo sapiens
cttgcactgcaaccc

SEQ ID NO: 252288 - DNA, 15 bp, Homo sapiens
tcttgcactgcaacc

SEQ ID NO: 252289 - DNA, 15 bp, Homo sapiens
atcttgcactgcaac

SEQ ID NO: 252290 - DNA, 15 bp, Homo sapiens
catcttgcactgcaa

SEQ ID NO: 252291 - DNA, 15 bp, Homo sapiens
ccatcttgcactgca

SEQ ID NO: 252292 - DNA, 15 bp, Homo sapiens
gccatcttgcactgc

SEQ ID NO: 252293 - DNA, 15 bp, Homo sapiens
cgccatcttgcactg

SEQ ID NO: 252294 - DNA, 15 bp, Homo sapiens
ccgccatcttgcact

SEQ ID NO: 252295 - DNA, 15 bp, Homo sapiens
tccgccatcttgcac

SEQ ID NO: 252296 - DNA, 15 bp, Homo sapiens
ctccgccatcttgca

SEQ ID NO: 252297 - DNA, 15 bp, Homo sapiens
gctccgccatcttgc

SEQ ID NO: 252298 - DNA, 15 bp, Homo sapiens
agctccgccatcttg

SEQ ID NO: 252299 - DNA, 15 bp, Homo sapiens
aagctccgccatctt

SEQ ID NO: 252300 - DNA, 15 bp, Homo sapiens
gaagctccgccatct

SEQ ID NO: 252301 - DNA, 15 bp, Homo sapiens
agaagctccgccatc

SEQ ID NO: 252302 - DNA, 15 bp, Homo sapiens
cagaagctccgccat

SEQ ID NO: 252303 - DNA, 15 bp, Homo sapiens
tcagaagctccgcca

SEQ ID NO: 252304 - DNA, 15 bp, Homo sapiens
atcagaagctccgcc

SEQ ID NO: 252305 - DNA, 15 bp, Homo sapiens
catcagaagctccgc

SEQ ID NO: 252306 - DNA, 15 bp, Homo sapiens
gcatcagaagctccg

SEQ ID NO: 252307 - DNA, 15 bp, Homo sapiens
ggcatcagaagctcc

SEQ ID NO: 252308 - DNA, 15 bp, Homo sapiens
aggcatcagaagctc

SEQ ID NO: 252309 - DNA, 15 bp, Homo sapiens
taggcatcagaagct

SEQ ID NO: 252310 - DNA, 15 bp, Homo sapiens
ctaggcatcagaagc

SEQ ID NO: 252311 - DNA, 15 bp, Homo sapiens
cctaggcatcagaag

SEQ ID NO: 252312 - DNA, 15 bp, Homo sapiens
gcctaggcatcagaa

SEQ ID NO: 252313 - DNA, 15 bp, Homo sapiens
ggcctaggcatcaga

SEQ ID NO: 252314 - DNA, 15 bp, Homo sapiens
gggcctaggcatcag

SEQ ID NO: 252315 - DNA, 15 bp, Homo sapiens
tgggcctaggcatca

SEQ ID NO: 252316 - DNA, 15 bp, Homo sapiens
atgggcctaggcatc

SEQ ID NO: 252317 - DNA, 15 bp, Homo sapiens
catgggcctaggcat

SEQ ID NO: 252318 - DNA, 15 bp, Homo sapiens
tcatgggcctaggca

SEQ ID NO: 252319 - DNA, 15 bp, Homo sapiens
ctcatgggcctaggc

SEQ ID NO: 252320 - DNA, 15 bp, Homo sapiens
actcatgggcctagg

SEQ ID NO: 252321 - DNA, 15 bp, Homo sapiens
cactcatgggcctag

SEQ ID NO: 252322 - DNA, 15 bp, Homo sapiens
ccactcatgggccta

SEQ ID NO: 252323 - DNA, 15 bp, Homo sapiens
cccactcatgggcct

SEQ ID NO: 252324 - DNA, 15 bp, Homo sapiens
gcccactcatgggcc

SEQ ID NO: 252325 - DNA, 15 bp, Homo sapiens
tgcccactcatgggc

SEQ ID NO: 252326 - DNA, 15 bp, Homo sapiens
ctgcccactcatggg

SEQ ID NO: 252327 - DNA, 15 bp, Homo sapiens
cctgcccactcatgg

SEQ ID NO: 252328 - DNA, 15 bp, Homo sapiens
acctgcccactcatg

SEQ ID NO: 252329 - DNA, 15 bp, Homo sapiens
cacctgcccactcat

SEQ ID NO: 252330 - DNA, 15 bp, Homo sapiens
ccacctgcccactca

SEQ ID NO: 252331 - DNA, 15 bp, Homo sapiens
tccacctgcccactc

SEQ ID NO: 252332 - DNA, 15 bp, Homo sapiens
ctccacctgcccact

SEQ ID NO: 252333 - DNA, 15 bp, Homo sapiens
gctccacctgcccac

SEQ ID NO: 252334 - DNA, 15 bp, Homo sapiens
tgctccacctgccca

SEQ ID NO: 252335 - DNA, 15 bp, Homo sapiens
ctgctccacctgccc

SEQ ID NO: 252336 - DNA, 15 bp, Homo sapiens
tctgctccacctgcc

SEQ ID NO: 252337 - DNA, 15 bp, Homo sapiens
ctctgctccacctgc

SEQ ID NO: 252338 - DNA, 15 bp, Homo sapiens
gctctgctccacctg

SEQ ID NO: 252339 - DNA, 15 bp, Homo sapiens
ggctctgctccacct

SEQ ID NO: 252340 - DNA, 15 bp, Homo sapiens
gggctctgctccacc

SEQ ID NO: 252341 - DNA, 15 bp, Homo sapiens
tgggctctgctccac

SEQ ID NO: 252342 - DNA, 15 bp, Homo sapiens
ctgggctctgctcca

SEQ ID NO: 252343 - DNA, 15 bp, Homo sapiens
cctgggctctgctcc

SEQ ID NO: 252344 - DNA, 15 bp, Homo sapiens
gcctgggctctgctc

SEQ ID NO: 252345 - DNA, 15 bp, Homo sapiens
agcctgggctctgct

SEQ ID NO: 252346 - DNA, 15 bp, Homo sapiens
cagcctgggctctgc

SEQ ID NO: 252347 - DNA, 15 bp, Homo sapiens
gcagcctgggctctg

SEQ ID NO: 252348 - DNA, 15 bp, Homo sapiens
ggcagcctgggctct

SEQ ID NO: 252349 - DNA, 15 bp, Homo sapiens
aggcagcctgggctc

SEQ ID NO: 252350 - DNA, 15 bp, Homo sapiens
aaggcagcctgggct

SEQ ID NO: 252351 - DNA, 15 bp, Homo sapiens
aaaggcagcctgggc

SEQ ID NO: 252352 - DNA, 15 bp, Homo sapiens
caaaggcagcctggg

SEQ ID NO: 252353 - DNA, 15 bp, Homo sapiens
acaaaggcagcctgg

SEQ ID NO: 252354 - DNA, 15 bp, Homo sapiens
gacaaaggcagcctg

SEQ ID NO: 252355 - DNA, 15 bp, Homo sapiens
agacaaaggcagcct

SEQ ID NO: 252356 - DNA, 15 bp, Homo sapiens
aagacaaaggcagcc

SEQ ID NO: 252357 - DNA, 15 bp, Homo sapiens
gaagacaaaggcagc

SEQ ID NO: 252358 - DNA, 15 bp, Homo sapiens
tgaagacaaaggcag

SEQ ID NO: 252359 - DNA, 15 bp, Homo sapiens
atgaagacaaaggca

SEQ ID NO: 252360 - DNA, 15 bp, Homo sapiens
tatgaagacaaaggc

SEQ ID NO: 252361 - DNA, 15 bp, Homo sapiens
ctatgaagacaaagg

SEQ ID NO: 252362 - DNA, 15 bp, Homo sapiens
cctatgaagacaaag

SEQ ID NO: 252363 - DNA, 15 bp, Homo sapiens
acctatgaagacaaa

SEQ ID NO: 252364 - DNA, 15 bp, Homo sapiens
gacctatgaagacaa

SEQ ID NO: 252365 - DNA, 15 bp, Homo sapiens
agacctatgaagaca

SEQ ID NO: 252366 - DNA, 15 bp, Homo sapiens
gagacctatgaagac

SEQ ID NO: 252367 - DNA, 15 bp, Homo sapiens
agagacctatgaaga

SEQ ID NO: 252368 - DNA, 15 bp, Homo sapiens
tagagacctatgaag

SEQ ID NO: 252369 - DNA, 15 bp, Homo sapiens
ttagagacctatgaa

SEQ ID NO: 252370 - DNA, 15 bp, Homo sapiens
gttagagacctatga

SEQ ID NO: 252371 - DNA, 15 bp, Homo sapiens
agttagagacctatg

SEQ ID NO: 252372 - DNA, 15 bp, Homo sapiens
aagttagagacctat

SEQ ID NO: 252373 - DNA, 15 bp, Homo sapiens
gaagttagagaccta

SEQ ID NO: 252374 - DNA, 15 bp, Homo sapiens
agaagttagagacct

SEQ ID NO: 252375 - DNA, 15 bp, Homo sapiens
aagaagttagagacc

SEQ ID NO: 252376 - DNA, 15 bp, Homo sapiens
caagaagttagagac

SEQ ID NO: 252377 - DNA, 15 bp, Homo sapiens
tcaagaagttagaga

SEQ ID NO: 252378 - DNA, 15 bp, Homo sapiens
gtcaagaagttagag

SEQ ID NO: 252379 - DNA, 15 bp, Homo sapiens
agtcaagaagttaga

SEQ ID NO: 252380 - DNA, 15 bp, Homo sapiens
aagtcaagaagttag

SEQ ID NO: 252381 - DNA, 15 bp, Homo sapiens
gaagtcaagaagtta

SEQ ID NO: 252382 - DNA, 15 bp, Homo sapiens
agaagtcaagaagtt

SEQ ID NO: 252383 - DNA, 15 bp, Homo sapiens
gagaagtcaagaagt

SEQ ID NO: 252384 - DNA, 15 bp, Homo sapiens
tgagaagtcaagaag

SEQ ID NO: 252385 - DNA, 15 bp, Homo sapiens
ttgagaagtcaagaa

SEQ ID NO: 252386 - DNA, 15 bp, Homo sapiens
attgagaagtcaaga

SEQ ID NO: 252387 - DNA, 15 bp, Homo sapiens
tattgagaagtcaag

SEQ ID NO: 252388 - DNA, 15 bp, Homo sapiens
ctattgagaagtcaa

SEQ ID NO: 252389 - DNA, 15 bp, Homo sapiens
gctattgagaagtca

SEQ ID NO: 252390 - DNA, 15 bp, Homo sapiens
ggctattgagaagtc

SEQ ID NO: 252391 - DNA, 15 bp, Homo sapiens
aggctattgagaagt

SEQ ID NO: 252392 - DNA, 15 bp, Homo sapiens
gaggctattgagaag

SEQ ID NO: 252393 - DNA, 15 bp, Homo sapiens
tgaggctattgagaa

SEQ ID NO: 252394 - DNA, 15 bp, Homo sapiens
ttgaggctattgaga

SEQ ID NO: 252395 - DNA, 15 bp, Homo sapiens
attgaggctattgag

SEQ ID NO: 252396 - DNA, 15 bp, Homo sapiens
cattgaggctattga

SEQ ID NO: 252397 - DNA, 15 bp, Homo sapiens
tcattgaggctattg

SEQ ID NO: 252398 - DNA, 15 bp, Homo sapiens
gtcattgaggctatt

SEQ ID NO: 252399 - DNA, 15 bp, Homo sapiens
agtcattgaggctat

SEQ ID NO: 252400 - DNA, 15 bp, Homo sapiens
cagtcattgaggcta

SEQ ID NO: 252401 - DNA, 15 bp, Homo sapiens
ccagtcattgaggct

SEQ ID NO: 252402 - DNA, 15 bp, Homo sapiens
accagtcattgaggc

SEQ ID NO: 252403 - DNA, 15 bp, Homo sapiens
aaccagtcattgagg

SEQ ID NO: 252404 - DNA, 15 bp, Homo sapiens
gaaccagtcattgag

SEQ ID NO: 252405 - DNA, 15 bp, Homo sapiens
ggaaccagtcattga

SEQ ID NO: 252406 - DNA, 15 bp, Homo sapiens
aggaaccagtcattg

SEQ ID NO: 252407 - DNA, 15 bp, Homo sapiens
aaggaaccagtcatt

SEQ ID NO: 252408 - DNA, 15 bp, Homo sapiens
gaaggaaccagtcat

SEQ ID NO: 252409 - DNA, 15 bp, Homo sapiens
ggaaggaaccagtca

SEQ ID NO: 252410 - DNA, 15 bp, Homo sapiens
aggaaggaaccagtc

SEQ ID NO: 252411 - DNA, 15 bp, Homo sapiens
caggaaggaaccagt

SEQ ID NO: 252412 - DNA, 15 bp, Homo sapiens
acaggaaggaaccag

SEQ ID NO: 252413 - DNA, 15 bp, Homo sapiens
tacaggaaggaacca

SEQ ID NO: 252414 - DNA, 15 bp, Homo sapiens
atacaggaaggaacc

SEQ ID NO: 252415 - DNA, 15 bp, Homo sapiens
aatacaggaaggaac

SEQ ID NO: 252416 - DNA, 15 bp, Homo sapiens
aaatacaggaaggaa

SEQ ID NO: 252417 - DNA, 15 bp, Homo sapiens
caaatacaggaagga

SEQ ID NO: 252418 - DNA, 15 bp, Homo sapiens
ccaaatacaggaagg

SEQ ID NO: 252419 - DNA, 15 bp, Homo sapiens
accaaatacaggaag

SEQ ID NO: 252420 - DNA, 15 bp, Homo sapiens
taccaaatacaggaa

SEQ ID NO: 252421 - DNA, 15 bp, Homo sapiens
ctaccaaatacagga

SEQ ID NO: 252422 - DNA, 15 bp, Homo sapiens
cctaccaaatacagg

SEQ ID NO: 252423 - DNA, 15 bp, Homo sapiens
acctaccaaatacag

SEQ ID NO: 252424 - DNA, 15 bp, Homo sapiens
cacctaccaaataca

SEQ ID NO: 252425 - DNA, 15 bp, Homo sapiens
tcacctaccaaatac

SEQ ID NO: 252426 - DNA, 15 bp, Homo sapiens
atcacctaccaaata

SEQ ID NO: 252427 - DNA, 15 bp, Homo sapiens
aatcacctaccaaat

SEQ ID NO: 252428 - DNA, 15 bp, Homo sapiens
caatcacctaccaaa

SEQ ID NO: 252429 - DNA, 15 bp, Homo sapiens
tcaatcacctaccaa

SEQ ID NO: 252430 - DNA, 15 bp, Homo sapiens
ttcaatcacctacca

SEQ ID NO: 252431 - DNA, 15 bp, Homo sapiens
tttcaatcacctacc

SEQ ID NO: 252432 - DNA, 15 bp, Homo sapiens
ttttcaatcacctac

SEQ ID NO: 252433 - DNA, 15 bp, Homo sapiens
gttttcaatcaccta

SEQ ID NO: 252434 - DNA, 15 bp, Homo sapiens
ggttttcaatcacct

SEQ ID NO: 252435 - DNA, 15 bp, Homo sapiens
aggttttcaatcacc

SEQ ID NO: 252436 - DNA, 15 bp, Homo sapiens
gaggttttcaatcac

SEQ ID NO: 252437 - DNA, 15 bp, Homo sapiens
agaggttttcaatca

SEQ ID NO: 252438 - DNA, 15 bp, Homo sapiens
aagaggttttcaatc

SEQ ID NO: 252439 - DNA, 15 bp, Homo sapiens
taagaggttttcaat

SEQ ID NO: 252440 - DNA, 15 bp, Homo sapiens
ttaagaggttttcaa

SEQ ID NO: 252441 - DNA, 15 bp, Homo sapiens
gttaagaggttttca

SEQ ID NO: 252442 - DNA, 15 bp, Homo sapiens
tgttaagaggttttc

SEQ ID NO: 252443 - DNA, 15 bp, Homo sapiens
gtgttaagaggtttt

SEQ ID NO: 252444 - DNA, 15 bp, Homo sapiens
tgtgttaagaggttt

SEQ ID NO: 252445 - DNA, 15 bp, Homo sapiens
atgtgttaagaggtt

SEQ ID NO: 252446 - DNA, 15 bp, Homo sapiens
catgtgttaagaggt

SEQ ID NO: 252447 - DNA, 15 bp, Homo sapiens
tcatgtgttaagagg

SEQ ID NO: 252448 - DNA, 15 bp, Homo sapiens
ttcatgtgttaagag

SEQ ID NO: 252449 - DNA, 15 bp, Homo sapiens
attcatgtgttaaga

SEQ ID NO: 252450 - DNA, 15 bp, Homo sapiens
aattcatgtgttaag

SEQ ID NO: 252451 - DNA, 15 bp, Homo sapiens
taattcatgtgttaa

SEQ ID NO: 252452 - DNA, 15 bp, Homo sapiens
ataattcatgtgtta

SEQ ID NO: 252453 - DNA, 15 bp, Homo sapiens
aataattcatgtgtt

SEQ ID NO: 252454 - DNA, 15 bp, Homo sapiens
gaataattcatgtgt

SEQ ID NO: 252455 - DNA, 15 bp, Homo sapiens
tgaataattcatgtg

SEQ ID NO: 252456 - DNA, 15 bp, Homo sapiens
ctgaataattcatgt

SEQ ID NO: 252457 - DNA, 15 bp, Homo sapiens
actgaataattcatg

SEQ ID NO: 252458 - DNA, 15 bp, Homo sapiens
gactgaataattcat

SEQ ID NO: 252459 - DNA, 15 bp, Homo sapiens
agactgaataattca

SEQ ID NO: 252460 - DNA, 15 bp, Homo sapiens
aagactgaataattc

SEQ ID NO: 252461 - DNA, 15 bp, Homo sapiens
caagactgaataatt

SEQ ID NO: 252462 - DNA, 15 bp, Homo sapiens
ccaagactgaataat

SEQ ID NO: 252463 - DNA, 15 bp, Homo sapiens
gccaagactgaataa

SEQ ID NO: 252464 - DNA, 15 bp, Homo sapiens
agccaagactgaata

SEQ ID NO: 252465 - DNA, 15 bp, Homo sapiens
tagccaagactgaat

SEQ ID NO: 252466 - DNA, 15 bp, Homo sapiens
ctagccaagactgaa

SEQ ID NO: 252467 - DNA, 15 bp, Homo sapiens
cctagccaagactga

SEQ ID NO: 252468 - DNA, 15 bp, Homo sapiens
gcctagccaagactg

SEQ ID NO: 252469 - DNA, 15 bp, Homo sapiens
ggcctagccaagact

SEQ ID NO: 252470 - DNA, 15 bp, Homo sapiens
aggcctagccaagac

SEQ ID NO: 252471 - DNA, 15 bp, Homo sapiens
aaggcctagccaaga

SEQ ID NO: 252472 - DNA, 15 bp, Homo sapiens
gaaggcctagccaag

SEQ ID NO: 252473 - DNA, 15 bp, Homo sapiens
agaaggcctagccaa

SEQ ID NO: 252474 - DNA, 15 bp, Homo sapiens
gagaaggcctagcca

SEQ ID NO: 252475 - DNA, 15 bp, Homo sapiens
ggagaaggcctagcc

SEQ ID NO: 252476 - DNA, 15 bp, Homo sapiens
aggagaaggcctagc

SEQ ID NO: 252477 - DNA, 15 bp, Homo sapiens
taggagaaggcctag

SEQ ID NO: 252478 - DNA, 15 bp, Homo sapiens
ttaggagaaggccta

SEQ ID NO: 252479 - DNA, 15 bp, Homo sapiens
tttaggagaaggcct

SEQ ID NO: 252480 - DNA, 15 bp, Homo sapiens
gtttaggagaaggcc

SEQ ID NO: 252481 - DNA, 15 bp, Homo sapiens
tgtttaggagaaggc

SEQ ID NO: 252482 - DNA, 15 bp, Homo sapiens
ctgtttaggagaagg

SEQ ID NO: 252483 - DNA, 15 bp, Homo sapiens
actgtttaggagaag

SEQ ID NO: 252484 - DNA, 15 bp, Homo sapiens
aactgtttaggagaa

SEQ ID NO: 252485 - DNA, 15 bp, Homo sapiens
caactgtttaggaga

SEQ ID NO: 252486 - DNA, 15 bp, Homo sapiens
acaactgtttaggag

SEQ ID NO: 252487 - DNA, 15 bp, Homo sapiens
gacaactgtttagga

SEQ ID NO: 252488 - DNA, 15 bp, Homo sapiens
agacaactgtttagg

SEQ ID NO: 252489 - DNA, 15 bp, Homo sapiens
gagacaactgtttag

SEQ ID NO: 252490 - DNA, 15 bp, Homo sapiens
agagacaactgttta

SEQ ID NO: 252491 - DNA, 15 bp, Homo sapiens
cagagacaactgttt

SEQ ID NO: 252492 - DNA, 15 bp, Homo sapiens
ccagagacaactgtt

SEQ ID NO: 252493 - DNA, 15 bp, Homo sapiens
accagagacaactgt

SEQ ID NO: 252494 - DNA, 15 bp, Homo sapiens
aaccagagacaactg

SEQ ID NO: 252495 - DNA, 15 bp, Homo sapiens
gaaccagagacaact

SEQ ID NO: 252496 - DNA, 15 bp, Homo sapiens
agaaccagagacaac

SEQ ID NO: 252497 - DNA, 15 bp, Homo sapiens
aagaaccagagacaa

SEQ ID NO: 252498 - DNA, 15 bp, Homo sapiens
taagaaccagagaca

SEQ ID NO: 252499 - DNA, 15 bp, Homo sapiens
ttaagaaccagagac

SEQ ID NO: 252500 - DNA, 15 bp, Homo sapiens
tttaagaaccagaga

SEQ ID NO: 252501 - DNA, 15 bp, Homo sapiens
ctttaagaaccagag

SEQ ID NO: 252502 - DNA, 15 bp, Homo sapiens
actttaagaaccaga

SEQ ID NO: 252503 - DNA, 15 bp, Homo sapiens
aactttaagaaccag

SEQ ID NO: 252504 - DNA, 15 bp, Homo sapiens
taactttaagaacca

SEQ ID NO: 252505 - DNA, 15 bp, Homo sapiens
gtaactttaagaacc

SEQ ID NO: 252506 - DNA, 15 bp, Homo sapiens
ggtaactttaagaac

SEQ ID NO: 252507 - DNA, 15 bp, Homo sapiens
aggtaactttaagaa

SEQ ID NO: 252508 - DNA, 15 bp, Homo sapiens
aaggtaactttaaga

SEQ ID NO: 252509 - DNA, 15 bp, Homo sapiens
aaaggtaactttaag

SEQ ID NO: 252510 - DNA, 15 bp, Homo sapiens
aaaaggtaactttaa

SEQ ID NO: 252511 - DNA, 15 bp, Homo sapiens
gaaaaggtaacttta

SEQ ID NO: 252512 - DNA, 15 bp, Homo sapiens
ggaaaaggtaacttt

SEQ ID NO: 252513 - DNA, 15 bp, Homo sapiens
aggaaaaggtaactt

SEQ ID NO: 252514 - DNA, 15 bp, Homo sapiens
gaggaaaaggtaact

SEQ ID NO: 252515 - DNA, 15 bp, Homo sapiens
ggaggaaaaggtaac

SEQ ID NO: 252516 - DNA, 15 bp, Homo sapiens
aggaggaaaaggtaa

SEQ ID NO: 252517 - DNA, 15 bp, Homo sapiens
gaggaggaaaaggta

SEQ ID NO: 252518 - DNA, 15 bp, Homo sapiens
agaggaggaaaaggt

SEQ ID NO: 252519 - DNA, 15 bp, Homo sapiens
gagaggaggaaaagg

SEQ ID NO: 252520 - DNA, 15 bp, Homo sapiens
agagaggaggaaaag

SEQ ID NO: 252521 - DNA, 15 bp, Homo sapiens
tagagaggaggaaaa

SEQ ID NO: 252522 - DNA, 15 bp, Homo sapiens
ttagagaggaggaaa

SEQ ID NO: 252523 - DNA, 15 bp, Homo sapiens
tttagagaggaggaa

SEQ ID NO: 252524 - DNA, 15 bp, Homo sapiens
ttttagagaggagga

SEQ ID NO: 252525 - DNA, 15 bp, Homo sapiens
attttagagaggagg

SEQ ID NO: 252526 - DNA, 15 bp, Homo sapiens
tattttagagaggag

SEQ ID NO: 252527 - DNA, 15 bp, Homo sapiens
ttattttagagagga

SEQ ID NO: 252528 - DNA, 15 bp, Homo sapiens
gttattttagagagg

SEQ ID NO: 252529 - DNA, 15 bp, Homo sapiens
agttattttagagag

SEQ ID NO: 252530 - DNA, 15 bp, Homo sapiens
aagttattttagaga

SEQ ID NO: 252531 - DNA, 15 bp, Homo sapiens
taagttattttagag

SEQ ID NO: 252532 - DNA, 15 bp, Homo sapiens
gtaagttattttaga

SEQ ID NO: 252533 - DNA, 15 bp, Homo sapiens
agtaagttattttag

SEQ ID NO: 252534 - DNA, 15 bp, Homo sapiens
aagtaagttatttta

SEQ ID NO: 252535 - DNA, 15 bp, Homo sapiens
taagtaagttatttt

SEQ ID NO: 252536 - DNA, 15 bp, Homo sapiens
gtaagtaagttattt

SEQ ID NO: 252537 - DNA, 15 bp, Homo sapiens
ggtaagtaagttatt

SEQ ID NO: 252538 - DNA, 15 bp, Homo sapiens
aggtaagtaagttat

SEQ ID NO: 252539 - DNA, 15 bp, Homo sapiens
aaggtaagtaagtta

SEQ ID NO: 252540 - DNA, 15 bp, Homo sapiens
aaaggtaagtaagtt

SEQ ID NO: 252541 - DNA, 15 bp, Homo sapiens
aaaaggtaagtaagt

SEQ ID NO: 252542 - DNA, 15 bp, Homo sapiens
gaaaaggtaagtaag

SEQ ID NO: 252543 - DNA, 15 bp, Homo sapiens
ggaaaaggtaagtaa

SEQ ID NO: 252544 - DNA, 15 bp, Homo sapiens
aggaaaaggtaagta

SEQ ID NO: 252545 - DNA, 15 bp, Homo sapiens
caggaaaaggtaagt

SEQ ID NO: 252546 - DNA, 15 bp, Homo sapiens
gcaggaaaaggtaag

SEQ ID NO: 252547 - DNA, 15 bp, Homo sapiens
ggcaggaaaaggtaa

SEQ ID NO: 252548 - DNA, 15 bp, Homo sapiens
tggcaggaaaaggta

SEQ ID NO: 252549 - DNA, 15 bp, Homo sapiens
gtggcaggaaaaggt

SEQ ID NO: 252550 - DNA, 15 bp, Homo sapiens
cgtggcaggaaaagg

SEQ ID NO: 252551 - DNA, 15 bp, Homo sapiens
ccgtggcaggaaaag

SEQ ID NO: 252552 - DNA, 15 bp, Homo sapiens
tccgtggcaggaaaa

SEQ ID NO: 252553 - DNA, 15 bp, Homo sapiens
gtccgtggcaggaaa

SEQ ID NO: 252554 - DNA, 15 bp, Homo sapiens
tgtccgtggcaggaa

SEQ ID NO: 252555 - DNA, 15 bp, Homo sapiens
gtgtccgtggcagga

SEQ ID NO: 252556 - DNA, 15 bp, Homo sapiens
agtgtccgtggcagg

SEQ ID NO: 252557 - DNA, 15 bp, Homo sapiens
tagtgtccgtggcag

SEQ ID NO: 252558 - DNA, 15 bp, Homo sapiens
atagtgtccgtggca

SEQ ID NO: 252559 - DNA, 15 bp, Homo sapiens
catagtgtccgtggc

SEQ ID NO: 252560 - DNA, 15 bp, Homo sapiens
tcatagtgtccgtgg

SEQ ID NO: 252561 - DNA, 15 bp, Homo sapiens
gtcatagtgtccgtg

SEQ ID NO: 252562 - DNA, 15 bp, Homo sapiens
ggtcatagtgtccgt

SEQ ID NO: 252563 - DNA, 15 bp, Homo sapiens
aggtcatagtgtccg

SEQ ID NO: 252564 - DNA, 15 bp, Homo sapiens
gaggtcatagtgtcc

SEQ ID NO: 252565 - DNA, 15 bp, Homo sapiens
agaggtcatagtgtc

SEQ ID NO: 252566 - DNA, 15 bp, Homo sapiens
aagaggtcatagtgt

SEQ ID NO: 252567 - DNA, 15 bp, Homo sapiens
caagaggtcatagtg

SEQ ID NO: 252568 - DNA, 15 bp, Homo sapiens
ccaagaggtcatagt

SEQ ID NO: 252569 - DNA, 15 bp, Homo sapiens
accaagaggtcatag

SEQ ID NO: 252570 - DNA, 15 bp, Homo sapiens
aaccaagaggtcata

SEQ ID NO: 252571 - DNA, 15 bp, Homo sapiens
aaaccaagaggtcat

SEQ ID NO: 252572 - DNA, 15 bp, Homo sapiens
aaaaccaagaggtca

SEQ ID NO: 252573 - DNA, 15 bp, Homo sapiens
taaaaccaagaggtc

SEQ ID NO: 252574 - DNA, 15 bp, Homo sapiens
ataaaaccaagaggt

SEQ ID NO: 252575 - DNA, 15 bp, Homo sapiens
aataaaaccaagagg

SEQ ID NO: 252576 - DNA, 15 bp, Homo sapiens
aaataaaaccaagag

SEQ ID NO: 252577 - DNA, 15 bp, Homo sapiens
aaaataaaaccaaga

SEQ ID NO: 252578 - DNA, 15 bp, Homo sapiens
gaaaataaaaccaag

SEQ ID NO: 252579 - DNA, 15 bp, Homo sapiens
agaaaataaaaccaa

SEQ ID NO: 252580 - DNA, 15 bp, Homo sapiens
aagaaaataaaacca

SEQ ID NO: 252581 - DNA, 15 bp, Homo sapiens
caagaaaataaaacc

SEQ ID NO: 252582 - DNA, 15 bp, Homo sapiens
tcaagaaaataaaac

SEQ ID NO: 252583 - DNA, 15 bp, Homo sapiens
atcaagaaaataaaa

SEQ ID NO: 252584 - DNA, 15 bp, Homo sapiens
aatcaagaaaataaa

SEQ ID NO: 252585 - DNA, 15 bp, Homo sapiens
caatcaagaaaataa

SEQ ID NO: 252586 - DNA, 15 bp, Homo sapiens
acaatcaagaaaata

SEQ ID NO: 252587 - DNA, 15 bp, Homo sapiens
tacaatcaagaaaat

SEQ ID NO: 252588 - DNA, 15 bp, Homo sapiens
atacaatcaagaaaa

SEQ ID NO: 252589 - DNA, 15 bp, Homo sapiens
aatacaatcaagaaa

SEQ ID NO: 252590 - DNA, 15 bp, Homo sapiens
aaatacaatcaagaa

SEQ ID NO: 252591 - DNA, 15 bp, Homo sapiens
caaatacaatcaaga

SEQ ID NO: 252592 - DNA, 15 bp, Homo sapiens
ccaaatacaatcaag

SEQ ID NO: 252593 - DNA, 15 bp, Homo sapiens
gccaaatacaatcaa

SEQ ID NO: 252594 - DNA, 15 bp, Homo sapiens
tgccaaatacaatca

SEQ ID NO: 252595 - DNA, 15 bp, Homo sapiens
atgccaaatacaatc

SEQ ID NO: 252596 - DNA, 15 bp, Homo sapiens
aatgccaaatacaat

SEQ ID NO: 252597 - DNA, 15 bp, Homo sapiens
gaatgccaaatacaa

SEQ ID NO: 252598 - DNA, 15 bp, Homo sapiens
agaatgccaaataca

SEQ ID NO: 252599 - DNA, 15 bp, Homo sapiens
gagaatgccaaatac

SEQ ID NO: 252600 - DNA, 15 bp, Homo sapiens
agagaatgccaaata

SEQ ID NO: 252601 - DNA, 15 bp, Homo sapiens
cagagaatgccaaat

SEQ ID NO: 252602 - DNA, 15 bp, Homo sapiens
tcagagaatgccaaa

SEQ ID NO: 252603 - DNA, 15 bp, Homo sapiens
ttcagagaatgccaa

SEQ ID NO: 252604 - DNA, 15 bp, Homo sapiens
tttcagagaatgcca

SEQ ID NO: 252605 - DNA, 15 bp, Homo sapiens
atttcagagaatgcc

SEQ ID NO: 252606 - DNA, 15 bp, Homo sapiens
aatttcagagaatgc

SEQ ID NO: 252607 - DNA, 15 bp, Homo sapiens
caatttcagagaatg

SEQ ID NO: 252608 - DNA, 15 bp, Homo sapiens
acaatttcagagaat

SEQ ID NO: 252609 - DNA, 15 bp, Homo sapiens
gacaatttcagagaa

SEQ ID NO: 252610 - DNA, 15 bp, Homo sapiens
agacaatttcagaga

SEQ ID NO: 252611 - DNA, 15 bp, Homo sapiens
aagacaatttcagag

SEQ ID NO: 252612 - DNA, 15 bp, Homo sapiens
taagacaatttcaga

SEQ ID NO: 252613 - DNA, 15 bp, Homo sapiens
ataagacaatttcag

SEQ ID NO: 252614 - DNA, 15 bp, Homo sapiens
aataagacaatttca

SEQ ID NO: 252615 - DNA, 15 bp, Homo sapiens
aaataagacaatttc

SEQ ID NO: 252616 - DNA, 15 bp, Homo sapiens
caaataagacaattt

SEQ ID NO: 252617 - DNA, 15 bp, Homo sapiens
acaaataagacaatt

SEQ ID NO: 252618 - DNA, 15 bp, Homo sapiens
tacaaataagacaat

SEQ ID NO: 252619 - DNA, 15 bp, Homo sapiens
gtacaaataagacaa

SEQ ID NO: 252620 - DNA, 15 bp, Homo sapiens
tgtacaaataagaca

SEQ ID NO: 252621 - DNA, 15 bp, Homo sapiens
atgtacaaataagac

SEQ ID NO: 252622 - DNA, 15 bp, Homo sapiens
aatgtacaaataaga

SEQ ID NO: 252623 - DNA, 15 bp, Homo sapiens
aaatgtacaaataag

SEQ ID NO: 252624 - DNA, 15 bp, Homo sapiens
taaatgtacaaataa

SEQ ID NO: 252625 - DNA, 15 bp, Homo sapiens
ataaatgtacaaata

SEQ ID NO: 252626 - DNA, 15 bp, Homo sapiens
tataaatgtacaaat

SEQ ID NO: 252627 - DNA, 15 bp, Homo sapiens
atataaatgtacaaa

SEQ ID NO: 252628 - DNA, 15 bp, Homo sapiens
catataaatgtacaa

SEQ ID NO: 252629 - DNA, 15 bp, Homo sapiens
ccatataaatgtaca

SEQ ID NO: 252630 - DNA, 15 bp, Homo sapiens
cccatataaatgtac

SEQ ID NO: 252631 - DNA, 15 bp, Homo sapiens
tcccatataaatgta

SEQ ID NO: 252632 - DNA, 15 bp, Homo sapiens
atcccatataaatgt

SEQ ID NO: 252633 - DNA, 15 bp, Homo sapiens
aatcccatataaatg

SEQ ID NO: 252634 - DNA, 15 bp, Homo sapiens
aaatcccatataaat

SEQ ID NO: 252635 - DNA, 15 bp, Homo sapiens
caaatcccatataaa

SEQ ID NO: 252636 - DNA, 15 bp, Homo sapiens
acaaatcccatataa

SEQ ID NO: 252637 - DNA, 15 bp, Homo sapiens
cacaaatcccatata

SEQ ID NO: 252638 - DNA, 15 bp, Homo sapiens
acacaaatcccatat

SEQ ID NO: 252639 - DNA, 15 bp, Homo sapiens
gacacaaatcccata

SEQ ID NO: 252640 - DNA, 15 bp, Homo sapiens
agacacaaatcccat

SEQ ID NO: 252641 - DNA, 15 bp, Homo sapiens
gagacacaaatccca

SEQ ID NO: 252642 - DNA, 15 bp, Homo sapiens
ggagacacaaatccc

SEQ ID NO: 252643 - DNA, 15 bp, Homo sapiens
aggagacacaaatcc

SEQ ID NO: 252644 - DNA, 15 bp, Homo sapiens
gaggagacacaaatc

SEQ ID NO: 252645 - DNA, 15 bp, Homo sapiens
cgaggagacacaaat

SEQ ID NO: 252646 - DNA, 15 bp, Homo sapiens
gcgaggagacacaaa

SEQ ID NO: 252647 - DNA, 15 bp, Homo sapiens
agcgaggagacacaa

SEQ ID NO: 252648 - DNA, 15 bp, Homo sapiens
tagcgaggagacaca

SEQ ID NO: 252649 - DNA, 15 bp, Homo sapiens
ctagcgaggagacac

SEQ ID NO: 252650 - DNA, 15 bp, Homo sapiens
tctagcgaggagaca

SEQ ID NO: 252651 - DNA, 15 bp, Homo sapiens
ttctagcgaggagac

SEQ ID NO: 252652 - DNA, 15 bp, Homo sapiens
attctagcgaggaga

SEQ ID NO: 252653 - DNA, 15 bp, Homo sapiens
tattctagcgaggag

SEQ ID NO: 252654 - DNA, 15 bp, Homo sapiens
atattctagcgagga

SEQ ID NO: 252655 - DNA, 15 bp, Homo sapiens
tatattctagcgagg

SEQ ID NO: 252656 - DNA, 15 bp, Homo sapiens
ttatattctagcgag

SEQ ID NO: 252657 - DNA, 15 bp, Homo sapiens
gttatattctagcga

SEQ ID NO: 252658 - DNA, 15 bp, Homo sapiens
agttatattctagcg

SEQ ID NO: 252659 - DNA, 15 bp, Homo sapiens
gagttatattctagc

SEQ ID NO: 252660 - DNA, 15 bp, Homo sapiens
agagttatattctag

SEQ ID NO: 252661 - DNA, 15 bp, Homo sapiens
aagagttatattcta

SEQ ID NO: 252662 - DNA, 15 bp, Homo sapiens
taagagttatattct

SEQ ID NO: 252663 - DNA, 15 bp, Homo sapiens
ataagagttatattc

SEQ ID NO: 252664 - DNA, 15 bp, Homo sapiens
gataagagttatatt

SEQ ID NO: 252665 - DNA, 15 bp, Homo sapiens
agataagagttatat

SEQ ID NO: 252666 - DNA, 15 bp, Homo sapiens
tagataagagttata

SEQ ID NO: 252667 - DNA, 15 bp, Homo sapiens
atagataagagttat

SEQ ID NO: 252668 - DNA, 15 bp, Homo sapiens
aatagataagagtta

SEQ ID NO: 252669 - DNA, 15 bp, Homo sapiens
aaatagataagagtt

SEQ ID NO: 252670 - DNA, 15 bp, Homo sapiens
taaatagataagagt

SEQ ID NO: 252671 - DNA, 15 bp, Homo sapiens
ataaatagataagag

SEQ ID NO: 252672 - DNA, 15 bp, Homo sapiens
tataaatagataaga

SEQ ID NO: 252673 - DNA, 15 bp, Homo sapiens
gtataaatagataag

SEQ ID NO: 252674 - DNA, 15 bp, Homo sapiens
agtataaatagataa

SEQ ID NO: 252675 - DNA, 15 bp, Homo sapiens
gagtataaatagata

SEQ ID NO: 252676 - DNA, 15 bp, Homo sapiens
ggagtataaatagat

SEQ ID NO: 252677 - DNA, 15 bp, Homo sapiens
tggagtataaataga

SEQ ID NO: 252678 - DNA, 15 bp, Homo sapiens
gtggagtataaatag

SEQ ID NO: 252679 - DNA, 15 bp, Homo sapiens
agtggagtataaata

SEQ ID NO: 252680 - DNA, 15 bp, Homo sapiens
cagtggagtataaat

SEQ ID NO: 252681 - DNA, 15 bp, Homo sapiens
acagtggagtataaa

SEQ ID NO: 252682 - DNA, 15 bp, Homo sapiens
tacagtggagtataa

SEQ ID NO: 252683 - DNA, 15 bp, Homo sapiens
atacagtggagtata

SEQ ID NO: 252684 - DNA, 15 bp, Homo sapiens
gatacagtggagtat

SEQ ID NO: 252685 - DNA, 15 bp, Homo sapiens
ggatacagtggagta

SEQ ID NO: 252686 - DNA, 15 bp, Homo sapiens
aggatacagtggagt

SEQ ID NO: 252687 - DNA, 15 bp, Homo sapiens
gaggatacagtggag

SEQ ID NO: 252688 - DNA, 15 bp, Homo sapiens
tgaggatacagtgga

SEQ ID NO: 252689 - DNA, 15 bp, Homo sapiens
ctgaggatacagtgg

SEQ ID NO: 252690 - DNA, 15 bp, Homo sapiens
actgaggatacagtg

SEQ ID NO: 252691 - DNA, 15 bp, Homo sapiens
cactgaggatacagt

SEQ ID NO: 252692 - DNA, 15 bp, Homo sapiens
gcactgaggatacag

SEQ ID NO: 252693 - DNA, 15 bp, Homo sapiens
ggcactgaggataca

SEQ ID NO: 252694 - DNA, 15 bp, Homo sapiens
aggcactgaggatac

SEQ ID NO: 252695 - DNA, 15 bp, Homo sapiens
taggcactgaggata

SEQ ID NO: 252696 - DNA, 15 bp, Homo sapiens
gtaggcactgaggat

SEQ ID NO: 252697 - DNA, 15 bp, Homo sapiens
tgtaggcactgagga

SEQ ID NO: 252698 - DNA, 15 bp, Homo sapiens
ctgtaggcactgagg

SEQ ID NO: 252699 - DNA, 15 bp, Homo sapiens
gctgtaggcactgag

SEQ ID NO: 252700 - DNA, 15 bp, Homo sapiens
tgctgtaggcactga

SEQ ID NO: 252701 - DNA, 15 bp, Homo sapiens
ctgctgtaggcactg

SEQ ID NO: 252702 - DNA, 15 bp, Homo sapiens
actgctgtaggcact

SEQ ID NO: 252703 - DNA, 15 bp, Homo sapiens
tactgctgtaggcac

SEQ ID NO: 252704 - DNA, 15 bp, Homo sapiens
atactgctgtaggca

SEQ ID NO: 252705 - DNA, 15 bp, Homo sapiens
gatactgctgtaggc

SEQ ID NO: 252706 - DNA, 15 bp, Homo sapiens
agatactgctgtagg

SEQ ID NO: 252707 - DNA, 15 bp, Homo sapiens
cagatactgctgtag

SEQ ID NO: 252708 - DNA, 15 bp, Homo sapiens
ccagatactgctgta

SEQ ID NO: 252709 - DNA, 15 bp, Homo sapiens
accagatactgctgt

SEQ ID NO: 252710 - DNA, 15 bp, Homo sapiens
aaccagatactgctg

SEQ ID NO: 252711 - DNA, 15 bp, Homo sapiens
caaccagatactgct

SEQ ID NO: 252712 - DNA, 15 bp, Homo sapiens
tcaaccagatactgc

SEQ ID NO: 252713 - DNA, 15 bp, Homo sapiens
ttcaaccagatactg

SEQ ID NO: 252714 - DNA, 15 bp, Homo sapiens
tttcaaccagatact

SEQ ID NO: 252715 - DNA, 15 bp, Homo sapiens
ctttcaaccagatac

SEQ ID NO: 252716 - DNA, 15 bp, Homo sapiens
cctttcaaccagata

SEQ ID NO: 252717 - DNA, 15 bp, Homo sapiens
ccctttcaaccagat

SEQ ID NO: 252718 - DNA, 15 bp, Homo sapiens
cccctttcaaccaga

SEQ ID NO: 252719 - DNA, 15 bp, Homo sapiens
acccctttcaaccag

SEQ ID NO: 252720 - DNA, 15 bp, Homo sapiens
cacccctttcaacca

SEQ ID NO: 252721 - DNA, 15 bp, Homo sapiens
gcacccctttcaacc

SEQ ID NO: 252722 - DNA, 15 bp, Homo sapiens
ggcacccctttcaac

SEQ ID NO: 252723 - DNA, 15 bp, Homo sapiens
aggcacccctttcaa

SEQ ID NO: 252724 - DNA, 15 bp, Homo sapiens
caggcacccctttca

SEQ ID NO: 252725 - DNA, 15 bp, Homo sapiens
tcaggcacccctttc

SEQ ID NO: 252726 - DNA, 15 bp, Homo sapiens
atcaggcaccccttt

SEQ ID NO: 252727 - DNA, 15 bp, Homo sapiens
tatcaggcacccctt

SEQ ID NO: 252728 - DNA, 15 bp, Homo sapiens
ttatcaggcacccct

SEQ ID NO: 252729 - DNA, 15 bp, Homo sapiens
tttatcaggcacccc

SEQ ID NO: 252730 - DNA, 15 bp, Homo sapiens
ttttatcaggcaccc

SEQ ID NO: 252731 - DNA, 15 bp, Homo sapiens
tttttatcaggcacc

SEQ ID NO: 252732 - DNA, 15 bp, Homo sapiens
atttttatcaggcac

SEQ ID NO: 252733 - DNA, 15 bp, Homo sapiens
catttttatcaggca

SEQ ID NO: 252734 - DNA, 15 bp, Homo sapiens
acatttttatcaggc

SEQ ID NO: 252735 - DNA, 15 bp, Homo sapiens
cacatttttatcagg

SEQ ID NO: 252736 - DNA, 15 bp, Homo sapiens
tcacatttttatcag

SEQ ID NO: 252737 - DNA, 15 bp, Homo sapiens
ttcacatttttatca

SEQ ID NO: 252738 - DNA, 15 bp, Homo sapiens
attcacatttttatc

SEQ ID NO: 252739 - DNA, 15 bp, Homo sapiens
cattcacatttttat

SEQ ID NO: 252740 - DNA, 15 bp, Homo sapiens
tcattcacattttta

SEQ ID NO: 252741 - DNA, 15 bp, Homo sapiens
ttcattcacattttt

SEQ ID NO: 252742 - DNA, 15 bp, Homo sapiens
tttcattcacatttt

SEQ ID NO: 252743 - DNA, 15 bp, Homo sapiens
atttcattcacattt

SEQ ID NO: 252744 - DNA, 15 bp, Homo sapiens
catttcattcacatt

SEQ ID NO: 252745 - DNA, 15 bp, Homo sapiens
tcatttcattcacat

SEQ ID NO: 252746 - DNA, 15 bp, Homo sapiens
ttcatttcattcaca

SEQ ID NO: 252747 - DNA, 15 bp, Homo sapiens
attcatttcattcac

SEQ ID NO: 252748 - DNA, 15 bp, Homo sapiens
cattcatttcattca

SEQ ID NO: 252749 - DNA, 15 bp, Homo sapiens
gcattcatttcattc

SEQ ID NO: 252750 - DNA, 15 bp, Homo sapiens
ggcattcatttcatt

SEQ ID NO: 252751 - DNA, 15 bp, Homo sapiens
tggcattcatttcat

SEQ ID NO: 252752 - DNA, 15 bp, Homo sapiens
ttggcattcatttca

SEQ ID NO: 252753 - DNA, 15 bp, Homo sapiens
gttggcattcatttc

SEQ ID NO: 252754 - DNA, 15 bp, Homo sapiens
tgttggcattcattt

SEQ ID NO: 252755 - DNA, 15 bp, Homo sapiens
ctgttggcattcatt

SEQ ID NO: 252756 - DNA, 15 bp, Homo sapiens
gctgttggcattcat

SEQ ID NO: 252757 - DNA, 15 bp, Homo sapiens
ggctgttggcattca

SEQ ID NO: 252758 - DNA, 15 bp, Homo sapiens
tggctgttggcattc

SEQ ID NO: 252759 - DNA, 15 bp, Homo sapiens
ctggctgttggcatt

SEQ ID NO: 252760 - DNA, 15 bp, Homo sapiens
cctggctgttggcat

SEQ ID NO: 252761 - DNA, 15 bp, Homo sapiens
tcctggctgttggca

SEQ ID NO: 252762 - DNA, 15 bp, Homo sapiens
ttcctggctgttggc

SEQ ID NO: 252763 - DNA, 15 bp, Homo sapiens
cttcctggctgttgg

SEQ ID NO: 252764 - DNA, 15 bp, Homo sapiens
ccttcctggctgttg

SEQ ID NO: 252765 - DNA, 15 bp, Homo sapiens
gccttcctggctgtt

SEQ ID NO: 252766 - DNA, 15 bp, Homo sapiens
tgccttcctggctgt

SEQ ID NO: 252767 - DNA, 15 bp, Homo sapiens
gtgccttcctggctg

SEQ ID NO: 252768 - DNA, 15 bp, Homo sapiens
ggtgccttcctggct

SEQ ID NO: 252769 - DNA, 15 bp, Homo sapiens
aggtgccttcctggc

SEQ ID NO: 252770 - DNA, 15 bp, Homo sapiens
gaggtgccttcctgg

SEQ ID NO: 252771 - DNA, 15 bp, Homo sapiens
tgaggtgccttcctg

SEQ ID NO: 252772 - DNA, 15 bp, Homo sapiens
atgaggtgccttcct

SEQ ID NO: 252773 - DNA, 15 bp, Homo sapiens
gatgaggtgccttcc

SEQ ID NO: 252774 - DNA, 15 bp, Homo sapiens
ggatgaggtgccttc

SEQ ID NO: 252775 - DNA, 15 bp, Homo sapiens
gggatgaggtgcctt

SEQ ID NO: 252776 - DNA, 15 bp, Homo sapiens
ggggatgaggtgcct

SEQ ID NO: 252777 - DNA, 15 bp, Homo sapiens
gggggatgaggtgcc

SEQ ID NO: 252778 - DNA, 15 bp, Homo sapiens
agggggatgaggtgc

SEQ ID NO: 252779 - DNA, 15 bp, Homo sapiens
gagggggatgaggtg

SEQ ID NO: 252780 - DNA, 15 bp, Homo sapiens
ggagggggatgaggt

SEQ ID NO: 252781 - DNA, 15 bp, Homo sapiens
gggagggggatgagg

SEQ ID NO: 252782 - DNA, 15 bp, Homo sapiens
ggggagggggatgag

SEQ ID NO: 252783 - DNA, 15 bp, Homo sapiens
aggggagggggatga

SEQ ID NO: 252784 - DNA, 15 bp, Homo sapiens
gaggggagggggatg

SEQ ID NO: 252785 - DNA, 15 bp, Homo sapiens
agaggggagggggat

SEQ ID NO: 252786 - DNA, 15 bp, Homo sapiens
cagaggggaggggga

SEQ ID NO: 252787 - DNA, 15 bp, Homo sapiens
gcagaggggaggggg

SEQ ID NO: 252788 - DNA, 15 bp, Homo sapiens
ggcagaggggagggg

SEQ ID NO: 252789 - DNA, 15 bp, Homo sapiens
tggcagaggggaggg

SEQ ID NO: 252790 - DNA, 15 bp, Homo sapiens
gtggcagaggggagg

SEQ ID NO: 252791 - DNA, 15 bp, Homo sapiens
ggtggcagaggggag

SEQ ID NO: 252792 - DNA, 15 bp, Homo sapiens
gggtggcagagggga

SEQ ID NO: 252793 - DNA, 15 bp, Homo sapiens
ggggtggcagagggg

SEQ ID NO: 252794 - DNA, 15 bp, Homo sapiens
gggggtggcagaggg

SEQ ID NO: 252795 - DNA, 15 bp, Homo sapiens
agggggtggcagagg

SEQ ID NO: 252796 - DNA, 15 bp, Homo sapiens
aagggggtggcagag

SEQ ID NO: 252797 - DNA, 15 bp, Homo sapiens
aaagggggtggcaga

SEQ ID NO: 252798 - DNA, 15 bp, Homo sapiens
taaagggggtggcag

SEQ ID NO: 252799 - DNA, 15 bp, Homo sapiens
ataaagggggtggca

SEQ ID NO: 252800 - DNA, 15 bp, Homo sapiens
gataaagggggtggc

SEQ ID NO: 252801 - DNA, 15 bp, Homo sapiens
tgataaagggggtgg

SEQ ID NO: 252802 - DNA, 15 bp, Homo sapiens
ctgataaagggggtg

SEQ ID NO: 252803 - DNA, 15 bp, Homo sapiens
cctgataaagggggt

SEQ ID NO: 252804 - DNA, 15 bp, Homo sapiens
ccctgataaaggggg

SEQ ID NO: 252805 - DNA, 15 bp, Homo sapiens
gccctgataaagggg

SEQ ID NO: 252806 - DNA, 15 bp, Homo sapiens
agccctgataaaggg

SEQ ID NO: 252807 - DNA, 15 bp, Homo sapiens
cagccctgataaagg

SEQ ID NO: 252808 - DNA, 15 bp, Homo sapiens
ccagccctgataaag

SEQ ID NO: 252809 - DNA, 15 bp, Homo sapiens
cccagccctgataaa

SEQ ID NO: 252810 - DNA, 15 bp, Homo sapiens
gcccagccctgataa

SEQ ID NO: 252811 - DNA, 15 bp, Homo sapiens
agcccagccctgata

SEQ ID NO: 252812 - DNA, 15 bp, Homo sapiens
cagcccagccctgat

SEQ ID NO: 252813 - DNA, 15 bp, Homo sapiens
acagcccagccctga

SEQ ID NO: 252814 - DNA, 15 bp, Homo sapiens
cacagcccagccctg

SEQ ID NO: 252815 - DNA, 15 bp, Homo sapiens
acacagcccagccct

SEQ ID NO: 252816 - DNA, 15 bp, Homo sapiens
gacacagcccagccc

SEQ ID NO: 252817 - DNA, 15 bp, Homo sapiens
tgacacagcccagcc

SEQ ID NO: 252818 - DNA, 15 bp, Homo sapiens
ctgacacagcccagc

SEQ ID NO: 252819 - DNA, 15 bp, Homo sapiens
gctgacacagcccag

SEQ ID NO: 252820 - DNA, 15 bp, Homo sapiens
agctgacacagccca

SEQ ID NO: 252821 - DNA, 15 bp, Homo sapiens
gagctgacacagccc

SEQ ID NO: 252822 - DNA, 15 bp, Homo sapiens
tgagctgacacagcc

SEQ ID NO: 252823 - DNA, 15 bp, Homo sapiens
atgagctgacacagc

SEQ ID NO: 252824 - DNA, 15 bp, Homo sapiens
aatgagctgacacag

SEQ ID NO: 252825 - DNA, 15 bp, Homo sapiens
caatgagctgacaca

SEQ ID NO: 252826 - DNA, 15 bp, Homo sapiens
tcaatgagctgacac

SEQ ID NO: 252827 - DNA, 15 bp, Homo sapiens
ctcaatgagctgaca

SEQ ID NO: 252828 - DNA, 15 bp, Homo sapiens
cctcaatgagctgac

SEQ ID NO: 252829 - DNA, 15 bp, Homo sapiens
gcctcaatgagctga

SEQ ID NO: 252830 - DNA, 15 bp, Homo sapiens
tgcctcaatgagctg

SEQ ID NO: 252831 - DNA, 15 bp, Homo sapiens
ctgcctcaatgagct

SEQ ID NO: 252832 - DNA, 15 bp, Homo sapiens
actgcctcaatgagc

SEQ ID NO: 252833 - DNA, 15 bp, Homo sapiens
tactgcctcaatgag

SEQ ID NO: 252834 - DNA, 15 bp, Homo sapiens
ctactgcctcaatga

SEQ ID NO: 252835 - DNA, 15 bp, Homo sapiens
cctactgcctcaatg

SEQ ID NO: 252836 - DNA, 15 bp, Homo sapiens
ccctactgcctcaat

SEQ ID NO: 252837 - DNA, 15 bp, Homo sapiens
tccctactgcctcaa

SEQ ID NO: 252838 - DNA, 15 bp, Homo sapiens
ctccctactgcctca

SEQ ID NO: 252839 - DNA, 15 bp, Homo sapiens
actccctactgcctc

SEQ ID NO: 252840 - DNA, 15 bp, Homo sapiens
tactccctactgcct

SEQ ID NO: 252841 - DNA, 15 bp, Homo sapiens
atactccctactgcc

SEQ ID NO: 252842 - DNA, 15 bp, Homo sapiens
catactccctactgc

SEQ ID NO: 252843 - DNA, 15 bp, Homo sapiens
ccatactccctactg

SEQ ID NO: 252844 - DNA, 15 bp, Homo sapiens
accatactccctact

SEQ ID NO: 252845 - DNA, 15 bp, Homo sapiens
aaccatactccctac

SEQ ID NO: 252846 - DNA, 15 bp, Homo sapiens
taaccatactcccta

SEQ ID NO: 252847 - DNA, 15 bp, Homo sapiens
ctaaccatactccct

SEQ ID NO: 252848 - DNA, 15 bp, Homo sapiens
cctaaccatactccc

SEQ ID NO: 252849 - DNA, 15 bp, Homo sapiens
tcctaaccatactcc

SEQ ID NO: 252850 - DNA, 15 bp, Homo sapiens
atcctaaccatactc

SEQ ID NO: 252851 - DNA, 15 bp, Homo sapiens
catcctaaccatact

SEQ ID NO: 252852 - DNA, 15 bp, Homo sapiens
tcatcctaaccatac

SEQ ID NO: 252853 - DNA, 15 bp, Homo sapiens
atcatcctaaccata

SEQ ID NO: 252854 - DNA, 15 bp, Homo sapiens
catcatcctaaccat

SEQ ID NO: 252855 - DNA, 15 bp, Homo sapiens
ccatcatcctaacca

SEQ ID NO: 252856 - DNA, 15 bp, Homo sapiens
tccatcatcctaacc

SEQ ID NO: 252857 - DNA, 15 bp, Homo sapiens
gtccatcatcctaac

SEQ ID NO: 252858 - DNA, 15 bp, Homo sapiens
agtccatcatcctaa

SEQ ID NO: 252859 - DNA, 15 bp, Homo sapiens
cagtccatcatccta

SEQ ID NO: 252860 - DNA, 15 bp, Homo sapiens
gcagtccatcatcct

SEQ ID NO: 252861 - DNA, 15 bp, Homo sapiens
ggcagtccatcatcc

SEQ ID NO: 252862 - DNA, 15 bp, Homo sapiens
gggcagtccatcatc

SEQ ID NO: 252863 - DNA, 15 bp, Homo sapiens
cgggcagtccatcat

SEQ ID NO: 252864 - DNA, 15 bp, Homo sapiens
ccgggcagtccatca

SEQ ID NO: 252865 - DNA, 15 bp, Homo sapiens
cccgggcagtccatc

SEQ ID NO: 252866 - DNA, 15 bp, Homo sapiens
gcccgggcagtccat

SEQ ID NO: 252867 - DNA, 15 bp, Homo sapiens
agcccgggcagtcca

SEQ ID NO: 252868 - DNA, 15 bp, Homo sapiens
gagcccgggcagtcc

SEQ ID NO: 252869 - DNA, 15 bp, Homo sapiens
tgagcccgggcagtc

SEQ ID NO: 252870 - DNA, 15 bp, Homo sapiens
ttgagcccgggcagt

SEQ ID NO: 252871 - DNA, 15 bp, Homo sapiens
tttgagcccgggcag

SEQ ID NO: 252872 - DNA, 15 bp, Homo sapiens
gtttgagcccgggca

SEQ ID NO: 252873 - DNA, 15 bp, Homo sapiens
tgtttgagcccgggc

SEQ ID NO: 252874 - DNA, 15 bp, Homo sapiens
gtgtttgagcccggg

SEQ ID NO: 252875 - DNA, 15 bp, Homo sapiens
tgtgtttgagcccgg

SEQ ID NO: 252876 - DNA, 15 bp, Homo sapiens
ttgtgtttgagcccg

SEQ ID NO: 252877 - DNA, 15 bp, Homo sapiens
gttgtgtttgagccc

SEQ ID NO: 252878 - DNA, 15 bp, Homo sapiens
agttgtgtttgagcc

SEQ ID NO: 252879 - DNA, 15 bp, Homo sapiens
aagttgtgtttgagc

SEQ ID NO: 252880 - DNA, 15 bp, Homo sapiens
gaagttgtgtttgag

SEQ ID NO: 252881 - DNA, 15 bp, Homo sapiens
ggaagttgtgtttga

SEQ ID NO: 252882 - DNA, 15 bp, Homo sapiens
gggaagttgtgtttg

SEQ ID NO: 252883 - DNA, 15 bp, Homo sapiens
tgggaagttgtgttt

SEQ ID NO: 252884 - DNA, 15 bp, Homo sapiens
gtgggaagttgtgtt

SEQ ID NO: 252885 - DNA, 15 bp, Homo sapiens
ggtgggaagttgtgt

SEQ ID NO: 252886 - DNA, 15 bp, Homo sapiens
aggtgggaagttgtg

SEQ ID NO: 252887 - DNA, 15 bp, Homo sapiens
caggtgggaagttgt

SEQ ID NO: 252888 - DNA, 15 bp, Homo sapiens
acaggtgggaagttg

SEQ ID NO: 252889 - DNA, 15 bp, Homo sapiens
cacaggtgggaagtt

SEQ ID NO: 252890 - DNA, 15 bp, Homo sapiens
acacaggtgggaagt

SEQ ID NO: 252891 - DNA, 15 bp, Homo sapiens
cacacaggtgggaag

SEQ ID NO: 252892 - DNA, 15 bp, Homo sapiens
tcacacaggtgggaa

SEQ ID NO: 252893 - DNA, 15 bp, Homo sapiens
atcacacaggtggga

SEQ ID NO: 252894 - DNA, 15 bp, Homo sapiens
gatcacacaggtggg

SEQ ID NO: 252895 - DNA, 15 bp, Homo sapiens
agatcacacaggtgg

SEQ ID NO: 252896 - DNA, 15 bp, Homo sapiens
aagatcacacaggtg

SEQ ID NO: 252897 - DNA, 15 bp, Homo sapiens
taagatcacacaggt

SEQ ID NO: 252898 - DNA, 15 bp, Homo sapiens
ctaagatcacacagg

SEQ ID NO: 252899 - DNA, 15 bp, Homo sapiens
tctaagatcacacag

SEQ ID NO: 252900 - DNA, 15 bp, Homo sapiens
atctaagatcacaca

SEQ ID NO: 252901 - DNA, 15 bp, Homo sapiens
tatctaagatcacac

SEQ ID NO: 252902 - DNA, 15 bp, Homo sapiens
ttatctaagatcaca

SEQ ID NO: 252903 - DNA, 15 bp, Homo sapiens
tttatctaagatcac

SEQ ID NO: 252904 - DNA, 15 bp, Homo sapiens
atttatctaagatca

SEQ ID NO: 252905 - DNA, 15 bp, Homo sapiens
aatttatctaagatc

SEQ ID NO: 252906 - DNA, 15 bp, Homo sapiens
gaatttatctaagat

SEQ ID NO: 252907 - DNA, 15 bp, Homo sapiens
tgaatttatctaaga

SEQ ID NO: 252908 - DNA, 15 bp, Homo sapiens
gtgaatttatctaag

SEQ ID NO: 252909 - DNA, 15 bp, Homo sapiens
ggtgaatttatctaa

SEQ ID NO: 252910 - DNA, 15 bp, Homo sapiens
aggtgaatttatcta

SEQ ID NO: 252911 - DNA, 15 bp, Homo sapiens
gaggtgaatttatct

SEQ ID NO: 252912 - DNA, 15 bp, Homo sapiens
agaggtgaatttatc

SEQ ID NO: 252913 - DNA, 15 bp, Homo sapiens
gagaggtgaatttat

SEQ ID NO: 252914 - DNA, 15 bp, Homo sapiens
agagaggtgaattta

SEQ ID NO: 252915 - DNA, 15 bp, Homo sapiens
cagagaggtgaattt

SEQ ID NO: 252916 - DNA, 15 bp, Homo sapiens
acagagaggtgaatt

SEQ ID NO: 252917 - DNA, 15 bp, Homo sapiens
cacagagaggtgaat

SEQ ID NO: 252918 - DNA, 15 bp, Homo sapiens
gcacagagaggtgaa

SEQ ID NO: 252919 - DNA, 15 bp, Homo sapiens
ggcacagagaggtga

SEQ ID NO: 252920 - DNA, 15 bp, Homo sapiens
aggcacagagaggtg

SEQ ID NO: 252921 - DNA, 15 bp, Homo sapiens
gaggcacagagaggt

SEQ ID NO: 252922 - DNA, 15 bp, Homo sapiens
tgaggcacagagagg

SEQ ID NO: 252923 - DNA, 15 bp, Homo sapiens
ttgaggcacagagag

SEQ ID NO: 252924 - DNA, 15 bp, Homo sapiens
attgaggcacagaga

SEQ ID NO: 252925 - DNA, 15 bp, Homo sapiens
aattgaggcacagag

SEQ ID NO: 252926 - DNA, 15 bp, Homo sapiens
aaattgaggcacaga

SEQ ID NO: 252927 - DNA, 15 bp, Homo sapiens
gaaattgaggcacag

SEQ ID NO: 252928 - DNA, 15 bp, Homo sapiens
agaaattgaggcaca

SEQ ID NO: 252929 - DNA, 15 bp, Homo sapiens
aagaaattgaggcac

SEQ ID NO: 252930 - DNA, 15 bp, Homo sapiens
aaagaaattgaggca

SEQ ID NO: 252931 - DNA, 15 bp, Homo sapiens
taaagaaattgaggc

SEQ ID NO: 252932 - DNA, 15 bp, Homo sapiens
ataaagaaattgagg

SEQ ID NO: 252933 - DNA, 15 bp, Homo sapiens
gataaagaaattgag

SEQ ID NO: 252934 - DNA, 15 bp, Homo sapiens
agataaagaaattga

SEQ ID NO: 252935 - DNA, 15 bp, Homo sapiens
tagataaagaaattg

SEQ ID NO: 252936 - DNA, 15 bp, Homo sapiens
atagataaagaaatt

SEQ ID NO: 252937 - DNA, 15 bp, Homo sapiens
tatagataaagaaat

SEQ ID NO: 252938 - DNA, 15 bp, Homo sapiens
gtatagataaagaaa

SEQ ID NO: 252939 - DNA, 15 bp, Homo sapiens
tgtatagataaagaa

SEQ ID NO: 252940 - DNA, 15 bp, Homo sapiens
ttgtatagataaaga

SEQ ID NO: 252941 - DNA, 15 bp, Homo sapiens
attgtatagataaag

SEQ ID NO: 252942 - DNA, 15 bp, Homo sapiens
gattgtatagataaa

SEQ ID NO: 252943 - DNA, 15 bp, Homo sapiens
tgattgtatagataa

SEQ ID NO: 252944 - DNA, 15 bp, Homo sapiens
ctgattgtatagata

SEQ ID NO: 252945 - DNA, 15 bp, Homo sapiens
cctgattgtatagat

SEQ ID NO: 252946 - DNA, 15 bp, Homo sapiens
tcctgattgtataga

SEQ ID NO: 252947 - DNA, 15 bp, Homo sapiens
gtcctgattgtatag

SEQ ID NO: 252948 - DNA, 15 bp, Homo sapiens
tgtcctgattgtata

SEQ ID NO: 252949 - DNA, 15 bp, Homo sapiens
ttgtcctgattgtat

SEQ ID NO: 252950 - DNA, 15 bp, Homo sapiens
attgtcctgattgta

SEQ ID NO: 252951 - DNA, 15 bp, Homo sapiens
cattgtcctgattgt

SEQ ID NO: 252952 - DNA, 15 bp, Homo sapiens
ccattgtcctgattg

SEQ ID NO: 252953 - DNA, 15 bp, Homo sapiens
gccattgtcctgatt

SEQ ID NO: 252954 - DNA, 15 bp, Homo sapiens
tgccattgtcctgat

SEQ ID NO: 252955 - DNA, 15 bp, Homo sapiens
ttgccattgtcctga

SEQ ID NO: 252956 - DNA, 15 bp, Homo sapiens
attgccattgtcctg

SEQ ID NO: 252957 - DNA, 15 bp, Homo sapiens
tattgccattgtcct

SEQ ID NO: 252958 - DNA, 15 bp, Homo sapiens
gtattgccattgtcc

SEQ ID NO: 252959 - DNA, 15 bp, Homo sapiens
ggtattgccattgtc

SEQ ID NO: 252960 - DNA, 15 bp, Homo sapiens
aggtattgccattgt

SEQ ID NO: 252961 - DNA, 15 bp, Homo sapiens
taggtattgccattg

SEQ ID NO: 252962 - DNA, 15 bp, Homo sapiens
ataggtattgccatt

SEQ ID NO: 252963 - DNA, 15 bp, Homo sapiens
gataggtattgccat

SEQ ID NO: 252964 - DNA, 15 bp, Homo sapiens
tgataggtattgcca

SEQ ID NO: 252965 - DNA, 15 bp, Homo sapiens
gtgataggtattgcc

SEQ ID NO: 252966 - DNA, 15 bp, Homo sapiens
tgtgataggtattgc

SEQ ID NO: 252967 - DNA, 15 bp, Homo sapiens
atgtgataggtattg

SEQ ID NO: 252968 - DNA, 15 bp, Homo sapiens
catgtgataggtatt

SEQ ID NO: 252969 - DNA, 15 bp, Homo sapiens
ccatgtgataggtat

SEQ ID NO: 252970 - DNA, 15 bp, Homo sapiens
tccatgtgataggta

SEQ ID NO: 252971 - DNA, 15 bp, Homo sapiens
atccatgtgataggt

SEQ ID NO: 252972 - DNA, 15 bp, Homo sapiens
aatccatgtgatagg

SEQ ID NO: 252973 - DNA, 15 bp, Homo sapiens
caatccatgtgatag

SEQ ID NO: 252974 - DNA, 15 bp, Homo sapiens
acaatccatgtgata

SEQ ID NO: 252975 - DNA, 15 bp, Homo sapiens
aacaatccatgtgat

SEQ ID NO: 252976 - DNA, 15 bp, Homo sapiens
aaacaatccatgtga

SEQ ID NO: 252977 - DNA, 15 bp, Homo sapiens
aaaacaatccatgtg

SEQ ID NO: 252978 - DNA, 15 bp, Homo sapiens
aaaaacaatccatgt

SEQ ID NO: 252979 - DNA, 15 bp, Homo sapiens
gaaaaacaatccatg

SEQ ID NO: 252980 - DNA, 15 bp, Homo sapiens
tgaaaaacaatccat

SEQ ID NO: 252981 - DNA, 15 bp, Homo sapiens
ctgaaaaacaatcca

SEQ ID NO: 252982 - DNA, 15 bp, Homo sapiens
actgaaaaacaatcc

SEQ ID NO: 252983 - DNA, 15 bp, Homo sapiens
aactgaaaaacaatc

SEQ ID NO: 252984 - DNA, 15 bp, Homo sapiens
aaactgaaaaacaat

SEQ ID NO: 252985 - DNA, 15 bp, Homo sapiens
taaactgaaaaacaa

SEQ ID NO: 252986 - DNA, 15 bp, Homo sapiens
ttaaactgaaaaaca

SEQ ID NO: 252987 - DNA, 15 bp, Homo sapiens
tttaaactgaaaaac

SEQ ID NO: 252988 - DNA, 15 bp, Homo sapiens
atttaaactgaaaaa

SEQ ID NO: 252989 - DNA, 15 bp, Homo sapiens
catttaaactgaaaa

SEQ ID NO: 252990 - DNA, 15 bp, Homo sapiens
tcatttaaactgaaa

SEQ ID NO: 252991 - DNA, 15 bp, Homo sapiens
ctcatttaaactgaa

SEQ ID NO: 252992 - DNA, 15 bp, Homo sapiens
actcatttaaactga

SEQ ID NO: 252993 - DNA, 15 bp, Homo sapiens
aactcatttaaactg

SEQ ID NO: 252994 - DNA, 15 bp, Homo sapiens
taactcatttaaact

SEQ ID NO: 252995 - DNA, 15 bp, Homo sapiens
ttaactcatttaaac

SEQ ID NO: 252996 - DNA, 15 bp, Homo sapiens
attaactcatttaaa

SEQ ID NO: 252997 - DNA, 15 bp, Homo sapiens
tattaactcatttaa

SEQ ID NO: 252998 - DNA, 15 bp, Homo sapiens
atattaactcattta

SEQ ID NO: 252999 - DNA, 15 bp, Homo sapiens
tatattaactcattt

SEQ ID NO: 253000 - DNA, 15 bp, Homo sapiens
gtatattaactcatt

SEQ ID NO: 253001 - DNA, 15 bp, Homo sapiens
tgtatattaactcat

SEQ ID NO: 253002 - DNA, 15 bp, Homo sapiens
atgtatattaactca

SEQ ID NO: 253003 - DNA, 15 bp, Homo sapiens
tatgtatattaactc

SEQ ID NO: 253004 - DNA, 15 bp, Homo sapiens
ttatgtatattaact

SEQ ID NO: 253005 - DNA, 15 bp, Homo sapiens
tttatgtatattaac

SEQ ID NO: 253006 - DNA, 15 bp, Homo sapiens
ctttatgtatattaa

SEQ ID NO: 253007 - DNA, 15 bp, Homo sapiens
actttatgtatatta

SEQ ID NO: 253008 - DNA, 15 bp, Homo sapiens
gactttatgtatatt

SEQ ID NO: 253009 - DNA, 15 bp, Homo sapiens
ggactttatgtatat

SEQ ID NO: 253010 - DNA, 15 bp, Homo sapiens
aggactttatgtata

SEQ ID NO: 253011 - DNA, 15 bp, Homo sapiens
gaggactttatgtat

SEQ ID NO: 253012 - DNA, 15 bp, Homo sapiens
tgaggactttatgta

SEQ ID NO: 253013 - DNA, 15 bp, Homo sapiens
ctgaggactttatgt

SEQ ID NO: 253014 - DNA, 15 bp, Homo sapiens
tctgaggactttatg

SEQ ID NO: 253015 - DNA, 15 bp, Homo sapiens
ttctgaggactttat

SEQ ID NO: 253016 - DNA, 15 bp, Homo sapiens
tttctgaggacttta

SEQ ID NO: 253017 - DNA, 15 bp, Homo sapiens
ttttctgaggacttt

SEQ ID NO: 253018 - DNA, 15 bp, Homo sapiens
attttctgaggactt

SEQ ID NO: 253019 - DNA, 15 bp, Homo sapiens
aattttctgaggact

SEQ ID NO: 253020 - DNA, 15 bp, Homo sapiens
taattttctgaggac

SEQ ID NO: 253021 - DNA, 15 bp, Homo sapiens
ataattttctgagga

SEQ ID NO: 253022 - DNA, 15 bp, Homo sapiens
gataattttctgagg

SEQ ID NO: 253023 - DNA, 15 bp, Homo sapiens
agataattttctgag

SEQ ID NO: 253024 - DNA, 15 bp, Homo sapiens
cagataattttctga

SEQ ID NO: 253025 - DNA, 15 bp, Homo sapiens
tcagataattttctg

SEQ ID NO: 253026 - DNA, 15 bp, Homo sapiens
atcagataattttct

SEQ ID NO: 253027 - DNA, 15 bp, Homo sapiens
aatcagataattttc

SEQ ID NO: 253028 - DNA, 15 bp, Homo sapiens
gaatcagataatttt

SEQ ID NO: 253029 - DNA, 15 bp, Homo sapiens
tgaatcagataattt

SEQ ID NO: 253030 - DNA, 15 bp, Homo sapiens
atgaatcagataatt

SEQ ID NO: 253031 - DNA, 15 bp, Homo sapiens
tatgaatcagataat

SEQ ID NO: 253032 - DNA, 15 bp, Homo sapiens
ctatgaatcagataa

SEQ ID NO: 253033 - DNA, 15 bp, Homo sapiens
actatgaatcagata

SEQ ID NO: 253034 - DNA, 15 bp, Homo sapiens
tactatgaatcagat

SEQ ID NO: 253035 - DNA, 15 bp, Homo sapiens
ctactatgaatcaga

SEQ ID NO: 253036 - DNA, 15 bp, Homo sapiens
cctactatgaatcag

SEQ ID NO: 253037 - DNA, 15 bp, Homo sapiens
ccctactatgaatca

SEQ ID NO: 253038 - DNA, 15 bp, Homo sapiens
cccctactatgaatc

SEQ ID NO: 253039 - DNA, 15 bp, Homo sapiens
gcccctactatgaat

SEQ ID NO: 253040 - DNA, 15 bp, Homo sapiens
ggcccctactatgaa

SEQ ID NO: 253041 - DNA, 15 bp, Homo sapiens
tggcccctactatga

SEQ ID NO: 253042 - DNA, 15 bp, Homo sapiens
atggcccctactatg

SEQ ID NO: 253043 - DNA, 15 bp, Homo sapiens
catggcccctactat

SEQ ID NO: 253044 - DNA, 15 bp, Homo sapiens
ccatggcccctacta

SEQ ID NO: 253045 - DNA, 15 bp, Homo sapiens
tccatggcccctact

SEQ ID NO: 253046 - DNA, 15 bp, Homo sapiens
ctccatggcccctac

SEQ ID NO: 253047 - DNA, 15 bp, Homo sapiens
cctccatggccccta

SEQ ID NO: 253048 - DNA, 15 bp, Homo sapiens
acctccatggcccct

SEQ ID NO: 253049 - DNA, 15 bp, Homo sapiens
tacctccatggcccc

SEQ ID NO: 253050 - DNA, 15 bp, Homo sapiens
atacctccatggccc

SEQ ID NO: 253051 - DNA, 15 bp, Homo sapiens
aatacctccatggcc

SEQ ID NO: 253052 - DNA, 15 bp, Homo sapiens
taatacctccatggc

SEQ ID NO: 253053 - DNA, 15 bp, Homo sapiens
gtaatacctccatgg

SEQ ID NO: 253054 - DNA, 15 bp, Homo sapiens
ggtaatacctccatg

SEQ ID NO: 253055 - DNA, 15 bp, Homo sapiens
tggtaatacctccat

SEQ ID NO: 253056 - DNA, 15 bp, Homo sapiens
atggtaatacctcca

SEQ ID NO: 253057 - DNA, 15 bp, Homo sapiens
aatggtaatacctcc

SEQ ID NO: 253058 - DNA, 15 bp, Homo sapiens
caatggtaatacctc

SEQ ID NO: 253059 - DNA, 15 bp, Homo sapiens
acaatggtaatacct

SEQ ID NO: 253060 - DNA, 15 bp, Homo sapiens
gacaatggtaatacc

SEQ ID NO: 253061 - DNA, 15 bp, Homo sapiens
tgacaatggtaatac

SEQ ID NO: 253062 - DNA, 15 bp, Homo sapiens
ttgacaatggtaata

SEQ ID NO: 253063 - DNA, 15 bp, Homo sapiens
gttgacaatggtaat

SEQ ID NO: 253064 - DNA, 15 bp, Homo sapiens
tgttgacaatggtaa

SEQ ID NO: 253065 - DNA, 15 bp, Homo sapiens
ctgttgacaatggta

SEQ ID NO: 253066 - DNA, 15 bp, Homo sapiens
actgttgacaatggt

SEQ ID NO: 253067 - DNA, 15 bp, Homo sapiens
aactgttgacaatgg

SEQ ID NO: 253068 - DNA, 15 bp, Homo sapiens
taactgttgacaatg

SEQ ID NO: 253069 - DNA, 15 bp, Homo sapiens
gtaactgttgacaat

SEQ ID NO: 253070 - DNA, 15 bp, Homo sapiens
agtaactgttgacaa

SEQ ID NO: 253071 - DNA, 15 bp, Homo sapiens
cagtaactgttgaca

SEQ ID NO: 253072 - DNA, 15 bp, Homo sapiens
ccagtaactgttgac

SEQ ID NO: 253073 - DNA, 15 bp, Homo sapiens
cccagtaactgttga

SEQ ID NO: 253074 - DNA, 15 bp, Homo sapiens
ccccagtaactgttg

SEQ ID NO: 253075 - DNA, 15 bp, Homo sapiens
tccccagtaactgtt

SEQ ID NO: 253076 - DNA, 15 bp, Homo sapiens
ttccccagtaactgt

SEQ ID NO: 253077 - DNA, 15 bp, Homo sapiens
cttccccagtaactg

SEQ ID NO: 253078 - DNA, 15 bp, Homo sapiens
gcttccccagtaact

SEQ ID NO: 253079 - DNA, 15 bp, Homo sapiens
tgcttccccagtaac

SEQ ID NO: 253080 - DNA, 15 bp, Homo sapiens
ttgcttccccagtaa

SEQ ID NO: 253081 - DNA, 15 bp, Homo sapiens
tttgcttccccagta

SEQ ID NO: 253082 - DNA, 15 bp, Homo sapiens
ctttgcttccccagt

SEQ ID NO: 253083 - DNA, 15 bp, Homo sapiens
cctttgcttccccag

SEQ ID NO: 253084 - DNA, 15 bp, Homo sapiens
ccctttgcttcccca

SEQ ID NO: 253085 - DNA, 15 bp, Homo sapiens
gccctttgcttcccc

SEQ ID NO: 253086 - DNA, 15 bp, Homo sapiens
ggccctttgcttccc

SEQ ID NO: 253087 - DNA, 15 bp, Homo sapiens
aggccctttgcttcc

SEQ ID NO: 253088 - DNA, 15 bp, Homo sapiens
caggccctttgcttc

SEQ ID NO: 253089 - DNA, 15 bp, Homo sapiens
acaggccctttgctt

SEQ ID NO: 253090 - DNA, 15 bp, Homo sapiens
gacaggccctttgct

SEQ ID NO: 253091 - DNA, 15 bp, Homo sapiens
ggacaggccctttgc

SEQ ID NO: 253092 - DNA, 15 bp, Homo sapiens
aggacaggccctttg

SEQ ID NO: 253093 - DNA, 15 bp, Homo sapiens
gaggacaggcccttt

SEQ ID NO: 253094 - DNA, 15 bp, Homo sapiens
agaggacaggccctt

SEQ ID NO: 253095 - DNA, 15 bp, Homo sapiens
gagaggacaggccct

SEQ ID NO: 253096 - DNA, 15 bp, Homo sapiens
agagaggacaggccc

SEQ ID NO: 253097 - DNA, 15 bp, Homo sapiens
gagagaggacaggcc

SEQ ID NO: 253098 - DNA, 15 bp, Homo sapiens
agagagaggacaggc

SEQ ID NO: 253099 - DNA, 15 bp, Homo sapiens
cagagagaggacagg

SEQ ID NO: 253100 - DNA, 15 bp, Homo sapiens
ccagagagaggacag

SEQ ID NO: 253101 - DNA, 15 bp, Homo sapiens
accagagagaggaca

SEQ ID NO: 253102 - DNA, 15 bp, Homo sapiens
taccagagagaggac

SEQ ID NO: 253103 - DNA, 15 bp, Homo sapiens
ttaccagagagagga

SEQ ID NO: 253104 - DNA, 15 bp, Homo sapiens
gttaccagagagagg

SEQ ID NO: 253105 - DNA, 15 bp, Homo sapiens
ggttaccagagagag

SEQ ID NO: 253106 - DNA, 15 bp, Homo sapiens
gggttaccagagaga

SEQ ID NO: 253107 - DNA, 15 bp, Homo sapiens
ggggttaccagagag

SEQ ID NO: 253108 - DNA, 15 bp, Homo sapiens
gggggttaccagaga

SEQ ID NO: 253109 - DNA, 15 bp, Homo sapiens
ggggggttaccagag

SEQ ID NO: 253110 - DNA, 15 bp, Homo sapiens
cggggggttaccaga

SEQ ID NO: 253111 - DNA, 15 bp, Homo sapiens
tcggggggttaccag

SEQ ID NO: 253112 - DNA, 15 bp, Homo sapiens
gtcggggggttacca

SEQ ID NO: 253113 - DNA, 15 bp, Homo sapiens
ggtcggggggttacc

SEQ ID NO: 253114 - DNA, 15 bp, Homo sapiens
gggtcggggggttac

SEQ ID NO: 253115 - DNA, 15 bp, Homo sapiens
ggggtcggggggtta

SEQ ID NO: 253116 - DNA, 15 bp, Homo sapiens
gggggtcggggggtt

SEQ ID NO: 253117 - DNA, 15 bp, Homo sapiens
agggggtcggggggt

SEQ ID NO: 253118 - DNA, 15 bp, Homo sapiens
aagggggtcgggggg

SEQ ID NO: 253119 - DNA, 15 bp, Homo sapiens
gaagggggtcggggg

SEQ ID NO: 253120 - DNA, 15 bp, Homo sapiens
tgaagggggtcgggg

SEQ ID NO: 253121 - DNA, 15 bp, Homo sapiens
ctgaagggggtcggg

SEQ ID NO: 253122 - DNA, 15 bp, Homo sapiens
actgaagggggtcgg

SEQ ID NO: 253123 - DNA, 15 bp, Homo sapiens
gactgaagggggtcg

SEQ ID NO: 253124 - DNA, 15 bp, Homo sapiens
agactgaagggggtc

SEQ ID NO: 253125 - DNA, 15 bp, Homo sapiens
gagactgaagggggt

SEQ ID NO: 253126 - DNA, 15 bp, Homo sapiens
agagactgaaggggg

SEQ ID NO: 253127 - DNA, 15 bp, Homo sapiens
aagagactgaagggg

SEQ ID NO: 253128 - DNA, 15 bp, Homo sapiens
caagagactgaaggg

SEQ ID NO: 253129 - DNA, 15 bp, Homo sapiens
tcaagagactgaagg

SEQ ID NO: 253130 - DNA, 15 bp, Homo sapiens
ctcaagagactgaag

SEQ ID NO: 253131 - DNA, 15 bp, Homo sapiens
tctcaagagactgaa

SEQ ID NO: 253132 - DNA, 15 bp, Homo sapiens
ttctcaagagactga

SEQ ID NO: 253133 - DNA, 15 bp, Homo sapiens
gttctcaagagactg

SEQ ID NO: 253134 - DNA, 15 bp, Homo sapiens
ggttctcaagagact

SEQ ID NO: 253135 - DNA, 15 bp, Homo sapiens
gggttctcaagagac

SEQ ID NO: 253136 - DNA, 15 bp, Homo sapiens
cgggttctcaagaga

SEQ ID NO: 253137 - DNA, 15 bp, Homo sapiens
ccgggttctcaagag

SEQ ID NO: 253138 - DNA, 15 bp, Homo sapiens
gccgggttctcaaga

SEQ ID NO: 253139 - DNA, 15 bp, Homo sapiens
ggccgggttctcaag

SEQ ID NO: 253140 - DNA, 15 bp, Homo sapiens
aggccgggttctcaa

SEQ ID NO: 253141 - DNA, 15 bp, Homo sapiens
gaggccgggttctca

SEQ ID NO: 253142 - DNA, 15 bp, Homo sapiens
tgaggccgggttctc

SEQ ID NO: 253143 - DNA, 15 bp, Homo sapiens
ttgaggccgggttct

SEQ ID NO: 253144 - DNA, 15 bp, Homo sapiens
attgaggccgggttc

SEQ ID NO: 253145 - DNA, 15 bp, Homo sapiens
cattgaggccgggtt

SEQ ID NO: 253146 - DNA, 15 bp, Homo sapiens
gcattgaggccgggt

SEQ ID NO: 253147 - DNA, 15 bp, Homo sapiens
agcattgaggccggg

SEQ ID NO: 253148 - DNA, 15 bp, Homo sapiens
gagcattgaggccgg

SEQ ID NO: 253149 - DNA, 15 bp, Homo sapiens
tgagcattgaggccg

SEQ ID NO: 253150 - DNA, 15 bp, Homo sapiens
gtgagcattgaggcc

SEQ ID NO: 253151 - DNA, 15 bp, Homo sapiens
ggtgagcattgaggc

SEQ ID NO: 253152 - DNA, 15 bp, Homo sapiens
aggtgagcattgagg

SEQ ID NO: 253153 - DNA, 15 bp, Homo sapiens
caggtgagcattgag

SEQ ID NO: 253154 - DNA, 15 bp, Homo sapiens
ccaggtgagcattga

SEQ ID NO: 253155 - DNA, 15 bp, Homo sapiens
cccaggtgagcattg

SEQ ID NO: 253156 - DNA, 15 bp, Homo sapiens
ccccaggtgagcatt

SEQ ID NO: 253157 - DNA, 15 bp, Homo sapiens
accccaggtgagcat

SEQ ID NO: 253158 - DNA, 15 bp, Homo sapiens
gaccccaggtgagca

SEQ ID NO: 253159 - DNA, 15 bp, Homo sapiens
ggaccccaggtgagc

SEQ ID NO: 253160 - DNA, 15 bp, Homo sapiens
gggaccccaggtgag

SEQ ID NO: 253161 - DNA, 15 bp, Homo sapiens
ggggaccccaggtga

SEQ ID NO: 253162 - DNA, 15 bp, Homo sapiens
aggggaccccaggtg

SEQ ID NO: 253163 - DNA, 15 bp, Homo sapiens
caggggaccccaggt

SEQ ID NO: 253164 - DNA, 15 bp, Homo sapiens
ccaggggaccccagg

SEQ ID NO: 253165 - DNA, 15 bp, Homo sapiens
cccaggggaccccag

SEQ ID NO: 253166 - DNA, 15 bp, Homo sapiens
tcccaggggacccca

SEQ ID NO: 253167 - DNA, 15 bp, Homo sapiens
atcccaggggacccc

SEQ ID NO: 253168 - DNA, 15 bp, Homo sapiens
gatcccaggggaccc

SEQ ID NO: 253169 - DNA, 15 bp, Homo sapiens
ggatcccaggggacc

SEQ ID NO: 253170 - DNA, 15 bp, Homo sapiens
tggatcccaggggac

SEQ ID NO: 253171 - DNA, 15 bp, Homo sapiens
atggatcccagggga

SEQ ID NO: 253172 - DNA, 15 bp, Homo sapiens
aatggatcccagggg

SEQ ID NO: 253173 - DNA, 15 bp, Homo sapiens
gaatggatcccaggg

SEQ ID NO: 253174 - DNA, 15 bp, Homo sapiens
tgaatggatcccagg

SEQ ID NO: 253175 - DNA, 15 bp, Homo sapiens
ctgaatggatcccag

SEQ ID NO: 253176 - DNA, 15 bp, Homo sapiens
gctgaatggatccca

SEQ ID NO: 253177 - DNA, 15 bp, Homo sapiens
tgctgaatggatccc

SEQ ID NO: 253178 - DNA, 15 bp, Homo sapiens
ttgctgaatggatcc

SEQ ID NO: 253179 - DNA, 15 bp, Homo sapiens
cttgctgaatggatc

SEQ ID NO: 253180 - DNA, 15 bp, Homo sapiens
tcttgctgaatggat

SEQ ID NO: 253181 - DNA, 15 bp, Homo sapiens
ttcttgctgaatgga

SEQ ID NO: 253182 - DNA, 15 bp, Homo sapiens
cttcttgctgaatgg

SEQ ID NO: 253183 - DNA, 15 bp, Homo sapiens
ccttcttgctgaatg

SEQ ID NO: 253184 - DNA, 15 bp, Homo sapiens
accttcttgctgaat

SEQ ID NO: 253185 - DNA, 15 bp, Homo sapiens
aaccttcttgctgaa

SEQ ID NO: 253186 - DNA, 15 bp, Homo sapiens
gaaccttcttgctga

SEQ ID NO: 253187 - DNA, 15 bp, Homo sapiens
tgaaccttcttgctg

SEQ ID NO: 253188 - DNA, 15 bp, Homo sapiens
ctgaaccttcttgct

SEQ ID NO: 253189 - DNA, 15 bp, Homo sapiens
gctgaaccttcttgc

SEQ ID NO: 253190 - DNA, 15 bp, Homo sapiens
ggctgaaccttcttg

SEQ ID NO: 253191 - DNA, 15 bp, Homo sapiens
tggctgaaccttctt

SEQ ID NO: 253192 - DNA, 15 bp, Homo sapiens
gtggctgaaccttct

SEQ ID NO: 253193 - DNA, 15 bp, Homo sapiens
tgtggctgaaccttc

SEQ ID NO: 253194 - DNA, 15 bp, Homo sapiens
gtgtggctgaacctt

SEQ ID NO: 253195 - DNA, 15 bp, Homo sapiens
ggtgtggctgaacct

SEQ ID NO: 253196 - DNA, 15 bp, Homo sapiens
tggtgtggctgaacc

SEQ ID NO: 253197 - DNA, 15 bp, Homo sapiens
ttggtgtggctgaac

SEQ ID NO: 253198 - DNA, 15 bp, Homo sapiens
cttggtgtggctgaa

SEQ ID NO: 253199 - DNA, 15 bp, Homo sapiens
gcttggtgtggctga

SEQ ID NO: 253200 - DNA, 15 bp, Homo sapiens
ggcttggtgtggctg

SEQ ID NO: 253201 - DNA, 15 bp, Homo sapiens
gggcttggtgtggct

SEQ ID NO: 253202 - DNA, 15 bp, Homo sapiens
agggcttggtgtggc

SEQ ID NO: 253203 - DNA, 15 bp, Homo sapiens
cagggcttggtgtgg

SEQ ID NO: 253204 - DNA, 15 bp, Homo sapiens
acagggcttggtgtg

SEQ ID NO: 253205 - DNA, 15 bp, Homo sapiens
aacagggcttggtgt

SEQ ID NO: 253206 - DNA, 15 bp, Homo sapiens
gaacagggcttggtg

SEQ ID NO: 253207 - DNA, 15 bp, Homo sapiens
ggaacagggcttggt

SEQ ID NO: 253208 - DNA, 15 bp, Homo sapiens
aggaacagggcttgg

SEQ ID NO: 253209 - DNA, 15 bp, Homo sapiens
aaggaacagggcttg

SEQ ID NO: 253210 - DNA, 15 bp, Homo sapiens
taaggaacagggctt

SEQ ID NO: 253211 - DNA, 15 bp, Homo sapiens
ttaaggaacagggct

SEQ ID NO: 253212 - DNA, 15 bp, Homo sapiens
cttaaggaacagggc

SEQ ID NO: 253213 - DNA, 15 bp, Homo sapiens
gcttaaggaacaggg

SEQ ID NO: 253214 - DNA, 15 bp, Homo sapiens
ggcttaaggaacagg

SEQ ID NO: 253215 - DNA, 15 bp, Homo sapiens
gggcttaaggaacag

SEQ ID NO: 253216 - DNA, 15 bp, Homo sapiens
tgggcttaaggaaca

SEQ ID NO: 253217 - DNA, 15 bp, Homo sapiens
ctgggcttaaggaac

SEQ ID NO: 253218 - DNA, 15 bp, Homo sapiens
cctgggcttaaggaa

SEQ ID NO: 253219 - DNA, 15 bp, Homo sapiens
tcctgggcttaagga

SEQ ID NO: 253220 - DNA, 15 bp, Homo sapiens
ctcctgggcttaagg

SEQ ID NO: 253221 - DNA, 15 bp, Homo sapiens
tctcctgggcttaag

SEQ ID NO: 253222 - DNA, 15 bp, Homo sapiens
gtctcctgggcttaa

SEQ ID NO: 253223 - DNA, 15 bp, Homo sapiens
tgtctcctgggctta

SEQ ID NO: 253224 - DNA, 15 bp, Homo sapiens
atgtctcctgggctt

SEQ ID NO: 253225 - DNA, 15 bp, Homo sapiens
tatgtctcctgggct

SEQ ID NO: 253226 - DNA, 15 bp, Homo sapiens
ttatgtctcctgggc

SEQ ID NO: 253227 - DNA, 15 bp, Homo sapiens
tttatgtctcctggg

SEQ ID NO: 253228 - DNA, 15 bp, Homo sapiens
atttatgtctcctgg

SEQ ID NO: 253229 - DNA, 15 bp, Homo sapiens
gatttatgtctcctg

SEQ ID NO: 253230 - DNA, 15 bp, Homo sapiens
ggatttatgtctcct

SEQ ID NO: 253231 - DNA, 15 bp, Homo sapiens
tggatttatgtctcc

SEQ ID NO: 253232 - DNA, 15 bp, Homo sapiens
gtggatttatgtctc

SEQ ID NO: 253233 - DNA, 15 bp, Homo sapiens
tgtggatttatgtct

SEQ ID NO: 253234 - DNA, 15 bp, Homo sapiens
ttgtggatttatgtc

SEQ ID NO: 253235 - DNA, 15 bp, Homo sapiens
tttgtggatttatgt

SEQ ID NO: 253236 - DNA, 15 bp, Homo sapiens
ctttgtggatttatg

SEQ ID NO: 253237 - DNA, 15 bp, Homo sapiens
gctttgtggatttat

SEQ ID NO: 253238 - DNA, 15 bp, Homo sapiens
ggctttgtggattta

SEQ ID NO: 253239 - DNA, 15 bp, Homo sapiens
aggctttgtggattt

SEQ ID NO: 253240 - DNA, 15 bp, Homo sapiens
taggctttgtggatt

SEQ ID NO: 253241 - DNA, 15 bp, Homo sapiens
gtaggctttgtggat

SEQ ID NO: 253242 - DNA, 15 bp, Homo sapiens
tgtaggctttgtgga

SEQ ID NO: 253243 - DNA, 15 bp, Homo sapiens
ctgtaggctttgtgg

SEQ ID NO: 253244 - DNA, 15 bp, Homo sapiens
cctgtaggctttgtg

SEQ ID NO: 253245 - DNA, 15 bp, Homo sapiens
tcctgtaggctttgt

SEQ ID NO: 253246 - DNA, 15 bp, Homo sapiens
ctcctgtaggctttg

SEQ ID NO: 253247 - DNA, 15 bp, Homo sapiens
tctcctgtaggcttt

SEQ ID NO: 253248 - DNA, 15 bp, Homo sapiens
ctctcctgtaggctt

SEQ ID NO: 253249 - DNA, 15 bp, Homo sapiens
tctctcctgtaggct

SEQ ID NO: 253250 - DNA, 15 bp, Homo sapiens
atctctcctgtaggc

SEQ ID NO: 253251 - DNA, 15 bp, Homo sapiens
gatctctcctgtagg

SEQ ID NO: 253252 - DNA, 15 bp, Homo sapiens
ggatctctcctgtag

SEQ ID NO: 253253 - DNA, 15 bp, Homo sapiens
gggatctctcctgta

SEQ ID NO: 253254 - DNA, 15 bp, Homo sapiens
agggatctctcctgt

SEQ ID NO: 253255 - DNA, 15 bp, Homo sapiens
cagggatctctcctg

SEQ ID NO: 253256 - DNA, 15 bp, Homo sapiens
tcagggatctctcct

SEQ ID NO: 253257 - DNA, 15 bp, Homo sapiens
ctcagggatctctcc

SEQ ID NO: 253258 - DNA, 15 bp, Homo sapiens
cctcagggatctctc

SEQ ID NO: 253259 - DNA, 15 bp, Homo sapiens
tcctcagggatctct

SEQ ID NO: 253260 - DNA, 15 bp, Homo sapiens
ttcctcagggatctc

SEQ ID NO: 253261 - DNA, 15 bp, Homo sapiens
tttcctcagggatct

SEQ ID NO: 253262 - DNA, 15 bp, Homo sapiens
ctttcctcagggatc

SEQ ID NO: 253263 - DNA, 15 bp, Homo sapiens
actttcctcagggat

SEQ ID NO: 253264 - DNA, 15 bp, Homo sapiens
cactttcctcaggga

SEQ ID NO: 253265 - DNA, 15 bp, Homo sapiens
ccactttcctcaggg

SEQ ID NO: 253266 - DNA, 15 bp, Homo sapiens
gccactttcctcagg

SEQ ID NO: 253267 - DNA, 15 bp, Homo sapiens
agccactttcctcag

SEQ ID NO: 253268 - DNA, 15 bp, Homo sapiens
tagccactttcctca

SEQ ID NO: 253269 - DNA, 15 bp, Homo sapiens
atagccactttcctc

SEQ ID NO: 253270 - DNA, 15 bp, Homo sapiens
aatagccactttcct

SEQ ID NO: 253271 - DNA, 15 bp, Homo sapiens
gaatagccactttcc

SEQ ID NO: 253272 - DNA, 15 bp, Homo sapiens
agaatagccactttc

SEQ ID NO: 253273 - DNA, 15 bp, Homo sapiens
cagaatagccacttt

SEQ ID NO: 253274 - DNA, 15 bp, Homo sapiens
ccagaatagccactt

SEQ ID NO: 253275 - DNA, 15 bp, Homo sapiens
tccagaatagccact

SEQ ID NO: 253276 - DNA, 15 bp, Homo sapiens
atccagaatagccac

SEQ ID NO: 253277 - DNA, 15 bp, Homo sapiens
catccagaatagcca

SEQ ID NO: 253278 - DNA, 15 bp, Homo sapiens
ccatccagaatagcc

SEQ ID NO: 253279 - DNA, 15 bp, Homo sapiens
cccatccagaatagc

SEQ ID NO: 253280 - DNA, 15 bp, Homo sapiens
ccccatccagaatag

SEQ ID NO: 253281 - DNA, 15 bp, Homo sapiens
gccccatccagaata

SEQ ID NO: 253282 - DNA, 15 bp, Homo sapiens
ggccccatccagaat

SEQ ID NO: 253283 - DNA, 15 bp, Homo sapiens
tggccccatccagaa

SEQ ID NO: 253284 - DNA, 15 bp, Homo sapiens
ctggccccatccaga

SEQ ID NO: 253285 - DNA, 15 bp, Homo sapiens
tctggccccatccag

SEQ ID NO: 253286 - DNA, 15 bp, Homo sapiens
ttctggccccatcca

SEQ ID NO: 253287 - DNA, 15 bp, Homo sapiens
cttctggccccatcc

SEQ ID NO: 253288 - DNA, 15 bp, Homo sapiens
ccttctggccccatc

SEQ ID NO: 253289 - DNA, 15 bp, Homo sapiens
accttctggccccat

SEQ ID NO: 253290 - DNA, 15 bp, Homo sapiens
aaccttctggcccca

SEQ ID NO: 253291 - DNA, 15 bp, Homo sapiens
gaaccttctggcccc

SEQ ID NO: 253292 - DNA, 15 bp, Homo sapiens
agaaccttctggccc

SEQ ID NO: 253293 - DNA, 15 bp, Homo sapiens
aagaaccttctggcc

SEQ ID NO: 253294 - DNA, 15 bp, Homo sapiens
aaagaaccttctggc

SEQ ID NO: 253295 - DNA, 15 bp, Homo sapiens
gaaagaaccttctgg

SEQ ID NO: 253296 - DNA, 15 bp, Homo sapiens
agaaagaaccttctg

SEQ ID NO: 253297 - DNA, 15 bp, Homo sapiens
gagaaagaaccttct

SEQ ID NO: 253298 - DNA, 15 bp, Homo sapiens
tgagaaagaaccttc

SEQ ID NO: 253299 - DNA, 15 bp, Homo sapiens
ttgagaaagaacctt

SEQ ID NO: 253300 - DNA, 15 bp, Homo sapiens
cttgagaaagaacct

SEQ ID NO: 253301 - DNA, 15 bp, Homo sapiens
ccttgagaaagaacc

SEQ ID NO: 253302 - DNA, 15 bp, Homo sapiens
accttgagaaagaac

SEQ ID NO: 253303 - DNA, 15 bp, Homo sapiens
gaccttgagaaagaa

SEQ ID NO: 253304 - DNA, 15 bp, Homo sapiens
tgaccttgagaaaga

SEQ ID NO: 253305 - DNA, 15 bp, Homo sapiens
ttgaccttgagaaag

SEQ ID NO: 253306 - DNA, 15 bp, Homo sapiens
tttgaccttgagaaa

SEQ ID NO: 253307 - DNA, 15 bp, Homo sapiens
ctttgaccttgagaa

SEQ ID NO: 253308 - DNA, 15 bp, Homo sapiens
gctttgaccttgaga

SEQ ID NO: 253309 - DNA, 15 bp, Homo sapiens
agctttgaccttgag

SEQ ID NO: 253310 - DNA, 15 bp, Homo sapiens
gagctttgaccttga

SEQ ID NO: 253311 - DNA, 15 bp, Homo sapiens
agagctttgaccttg

SEQ ID NO: 253312 - DNA, 15 bp, Homo sapiens
gagagctttgacctt

SEQ ID NO: 253313 - DNA, 15 bp, Homo sapiens
cgagagctttgacct

SEQ ID NO: 253314 - DNA, 15 bp, Homo sapiens
ccgagagctttgacc

SEQ ID NO: 253315 - DNA, 15 bp, Homo sapiens
tccgagagctttgac

SEQ ID NO: 253316 - DNA, 15 bp, Homo sapiens
ctccgagagctttga

SEQ ID NO: 253317 - DNA, 15 bp, Homo sapiens
tctccgagagctttg

SEQ ID NO: 253318 - DNA, 15 bp, Homo sapiens
gtctccgagagcttt

SEQ ID NO: 253319 - DNA, 15 bp, Homo sapiens
ggtctccgagagctt

SEQ ID NO: 253320 - DNA, 15 bp, Homo sapiens
aggtctccgagagct

SEQ ID NO: 253321 - DNA, 15 bp, Homo sapiens
caggtctccgagagc

SEQ ID NO: 253322 - DNA, 15 bp, Homo sapiens
tcaggtctccgagag

SEQ ID NO: 253323 - DNA, 15 bp, Homo sapiens
atcaggtctccgaga

SEQ ID NO: 253324 - DNA, 15 bp, Homo sapiens
catcaggtctccgag

SEQ ID NO: 253325 - DNA, 15 bp, Homo sapiens
tcatcaggtctccga

SEQ ID NO: 253326 - DNA, 15 bp, Homo sapiens
ctcatcaggtctccg

SEQ ID NO: 253327 - DNA, 15 bp, Homo sapiens
cctcatcaggtctcc

SEQ ID NO: 253328 - DNA, 15 bp, Homo sapiens
gcctcatcaggtctc

SEQ ID NO: 253329 - DNA, 15 bp, Homo sapiens
ggcctcatcaggtct

SEQ ID NO: 253330 - DNA, 15 bp, Homo sapiens
gggcctcatcaggtc

SEQ ID NO: 253331 - DNA, 15 bp, Homo sapiens
agggcctcatcaggt

SEQ ID NO: 253332 - DNA, 15 bp, Homo sapiens
cagggcctcatcagg

SEQ ID NO: 253333 - DNA, 15 bp, Homo sapiens
gcagggcctcatcag

SEQ ID NO: 253334 - DNA, 15 bp, Homo sapiens
ggcagggcctcatca

SEQ ID NO: 253335 - DNA, 15 bp, Homo sapiens
gggcagggcctcatc

SEQ ID NO: 253336 - DNA, 15 bp, Homo sapiens
ggggcagggcctcat

SEQ ID NO: 253337 - DNA, 15 bp, Homo sapiens
aggggcagggcctca

SEQ ID NO: 253338 - DNA, 15 bp, Homo sapiens
gaggggcagggcctc

SEQ ID NO: 253339 - DNA, 15 bp, Homo sapiens
tgaggggcagggcct

SEQ ID NO: 253340 - DNA, 15 bp, Homo sapiens
ttgaggggcagggcc

SEQ ID NO: 253341 - DNA, 15 bp, Homo sapiens
cttgaggggcagggc

SEQ ID NO: 253342 - DNA, 15 bp, Homo sapiens
gcttgaggggcaggg

SEQ ID NO: 253343 - DNA, 15 bp, Homo sapiens
agcttgaggggcagg

SEQ ID NO: 253344 - DNA, 15 bp, Homo sapiens
aagcttgaggggcag

SEQ ID NO: 253345 - DNA, 15 bp, Homo sapiens
gaagcttgaggggca

SEQ ID NO: 253346 - DNA, 15 bp, Homo sapiens
agaagcttgaggggc

SEQ ID NO: 253347 - DNA, 15 bp, Homo sapiens
cagaagcttgagggg

SEQ ID NO: 253348 - DNA, 15 bp, Homo sapiens
acagaagcttgaggg

SEQ ID NO: 253349 - DNA, 15 bp, Homo sapiens
gacagaagcttgagg

SEQ ID NO: 253350 - DNA, 15 bp, Homo sapiens
ggacagaagcttgag

SEQ ID NO: 253351 - DNA, 15 bp, Homo sapiens
aggacagaagcttga

SEQ ID NO: 253352 - DNA, 15 bp, Homo sapiens
aaggacagaagcttg

SEQ ID NO: 253353 - DNA, 15 bp, Homo sapiens
aaaggacagaagctt

SEQ ID NO: 253354 - DNA, 15 bp, Homo sapiens
gaaaggacagaagct

SEQ ID NO: 253355 - DNA, 15 bp, Homo sapiens
ggaaaggacagaagc

SEQ ID NO: 253356 - DNA, 15 bp, Homo sapiens
tggaaaggacagaag

SEQ ID NO: 253357 - DNA, 15 bp, Homo sapiens
gtggaaaggacagaa

SEQ ID NO: 253358 - DNA, 15 bp, Homo sapiens
tgtggaaaggacaga

SEQ ID NO: 253359 - DNA, 15 bp, Homo sapiens
ctgtggaaaggacag

SEQ ID NO: 253360 - DNA, 15 bp, Homo sapiens
gctgtggaaaggaca

SEQ ID NO: 253361 - DNA, 15 bp, Homo sapiens
ggctgtggaaaggac

SEQ ID NO: 253362 - DNA, 15 bp, Homo sapiens
gggctgtggaaagga

SEQ ID NO: 253363 - DNA, 15 bp, Homo sapiens
agggctgtggaaagg

SEQ ID NO: 253364 - DNA, 15 bp, Homo sapiens
cagggctgtggaaag

SEQ ID NO: 253365 - DNA, 15 bp, Homo sapiens
gcagggctgtggaaa

SEQ ID NO: 253366 - DNA, 15 bp, Homo sapiens
tgcagggctgtggaa

SEQ ID NO: 253367 - DNA, 15 bp, Homo sapiens
ctgcagggctgtgga

SEQ ID NO: 253368 - DNA, 15 bp, Homo sapiens
gctgcagggctgtgg

SEQ ID NO: 253369 - DNA, 15 bp, Homo sapiens
tgctgcagggctgtg

SEQ ID NO: 253370 - DNA, 15 bp, Homo sapiens
atgctgcagggctgt

SEQ ID NO: 253371 - DNA, 15 bp, Homo sapiens
aatgctgcagggctg

SEQ ID NO: 253372 - DNA, 15 bp, Homo sapiens
taatgctgcagggct

SEQ ID NO: 253373 - DNA, 15 bp, Homo sapiens
ataatgctgcagggc

SEQ ID NO: 253374 - DNA, 15 bp, Homo sapiens
aataatgctgcaggg

SEQ ID NO: 253375 - DNA, 15 bp, Homo sapiens
aaataatgctgcagg

SEQ ID NO: 253376 - DNA, 15 bp, Homo sapiens
gaaataatgctgcag

SEQ ID NO: 253377 - DNA, 15 bp, Homo sapiens
ggaaataatgctgca

SEQ ID NO: 253378 - DNA, 15 bp, Homo sapiens
tggaaataatgctgc

SEQ ID NO: 253379 - DNA, 15 bp, Homo sapiens
atggaaataatgctg

SEQ ID NO: 253380 - DNA, 15 bp, Homo sapiens
tatggaaataatgct

SEQ ID NO: 253381 - DNA, 15 bp, Homo sapiens
ttatggaaataatgc

SEQ ID NO: 253382 - DNA, 15 bp, Homo sapiens
attatggaaataatg

SEQ ID NO: 253383 - DNA, 15 bp, Homo sapiens
cattatggaaataat

SEQ ID NO: 253384 - DNA, 15 bp, Homo sapiens
acattatggaaataa

SEQ ID NO: 253385 - DNA, 15 bp, Homo sapiens
aacattatggaaata

SEQ ID NO: 253386 - DNA, 15 bp, Homo sapiens
taacattatggaaat

SEQ ID NO: 253387 - DNA, 15 bp, Homo sapiens
ataacattatggaaa

SEQ ID NO: 253388 - DNA, 15 bp, Homo sapiens
aataacattatggaa

SEQ ID NO: 253389 - DNA, 15 bp, Homo sapiens
taataacattatgga

SEQ ID NO: 253390 - DNA, 15 bp, Homo sapiens
ttaataacattatgg

SEQ ID NO: 253391 - DNA, 15 bp, Homo sapiens
tttaataacattatg

SEQ ID NO: 253392 - DNA, 15 bp, Homo sapiens
ttttaataacattat

SEQ ID NO: 253393 - DNA, 15 bp, Homo sapiens
tttttaataacatta

SEQ ID NO: 253394 - DNA, 15 bp, Homo sapiens
gtttttaataacatt

SEQ ID NO: 253395 - DNA, 15 bp, Homo sapiens
ggtttttaataacat

SEQ ID NO: 253396 - DNA, 15 bp, Homo sapiens
tggtttttaataaca

SEQ ID NO: 253397 - DNA, 15 bp, Homo sapiens
ttggtttttaataac

SEQ ID NO: 253398 - DNA, 15 bp, Homo sapiens
attggtttttaataa

SEQ ID NO: 253399 - DNA, 15 bp, Homo sapiens
cattggtttttaata

SEQ ID NO: 253400 - DNA, 15 bp, Homo sapiens
acattggtttttaat

SEQ ID NO: 253401 - DNA, 15 bp, Homo sapiens
cacattggtttttaa

SEQ ID NO: 253402 - DNA, 15 bp, Homo sapiens
acacattggttttta

SEQ ID NO: 253403 - DNA, 15 bp, Homo sapiens
cacacattggttttt

SEQ ID NO: 253404 - DNA, 15 bp, Homo sapiens
gcacacattggtttt

SEQ ID NO: 253405 - DNA, 15 bp, Homo sapiens
agcacacattggttt

SEQ ID NO: 253406 - DNA, 15 bp, Homo sapiens
cagcacacattggtt

SEQ ID NO: 253407 - DNA, 15 bp, Homo sapiens
ccagcacacattggt

SEQ ID NO: 253408 - DNA, 15 bp, Homo sapiens
gccagcacacattgg

SEQ ID NO: 253409 - DNA, 15 bp, Homo sapiens
ggccagcacacattg

SEQ ID NO: 253410 - DNA, 15 bp, Homo sapiens
tggccagcacacatt

SEQ ID NO: 253411 - DNA, 15 bp, Homo sapiens
ctggccagcacacat

SEQ ID NO: 253412 - DNA, 15 bp, Homo sapiens
tctggccagcacaca

SEQ ID NO: 253413 - DNA, 15 bp, Homo sapiens
atctggccagcacac

SEQ ID NO: 253414 - DNA, 15 bp, Homo sapiens
catctggccagcaca

SEQ ID NO: 253415 - DNA, 15 bp, Homo sapiens
tcatctggccagcac

SEQ ID NO: 253416 - DNA, 15 bp, Homo sapiens
ctcatctggccagca

SEQ ID NO: 253417 - DNA, 15 bp, Homo sapiens
actcatctggccagc

SEQ ID NO: 253418 - DNA, 15 bp, Homo sapiens
cactcatctggccag

SEQ ID NO: 253419 - DNA, 15 bp, Homo sapiens
tcactcatctggcca

SEQ ID NO: 253420 - DNA, 15 bp, Homo sapiens
gtcactcatctggcc

SEQ ID NO: 253421 - DNA, 15 bp, Homo sapiens
tgtcactcatctggc

SEQ ID NO: 253422 - DNA, 15 bp, Homo sapiens
gtgtcactcatctgg

SEQ ID NO: 253423 - DNA, 15 bp, Homo sapiens
agtgtcactcatctg

SEQ ID NO: 253424 - DNA, 15 bp, Homo sapiens
aagtgtcactcatct

SEQ ID NO: 253425 - DNA, 15 bp, Homo sapiens
gaagtgtcactcatc

SEQ ID NO: 253426 - DNA, 15 bp, Homo sapiens
ggaagtgtcactcat

SEQ ID NO: 253427 - DNA, 15 bp, Homo sapiens
gggaagtgtcactca

SEQ ID NO: 253428 - DNA, 15 bp, Homo sapiens
tgggaagtgtcactc

SEQ ID NO: 253429 - DNA, 15 bp, Homo sapiens
ctgggaagtgtcact

SEQ ID NO: 253430 - DNA, 15 bp, Homo sapiens
actgggaagtgtcac

SEQ ID NO: 253431 - DNA, 15 bp, Homo sapiens
cactgggaagtgtca

SEQ ID NO: 253432 - DNA, 15 bp, Homo sapiens
tcactgggaagtgtc

SEQ ID NO: 253433 - DNA, 15 bp, Homo sapiens
atcactgggaagtgt

SEQ ID NO: 253434 - DNA, 15 bp, Homo sapiens
catcactgggaagtg

SEQ ID NO: 253435 - DNA, 15 bp, Homo sapiens
ccatcactgggaagt

SEQ ID NO: 253436 - DNA, 15 bp, Homo sapiens
cccatcactgggaag

SEQ ID NO: 253437 - DNA, 15 bp, Homo sapiens
ccccatcactgggaa

SEQ ID NO: 253438 - DNA, 15 bp, Homo sapiens
gccccatcactggga

SEQ ID NO: 253439 - DNA, 15 bp, Homo sapiens
agccccatcactggg

SEQ ID NO: 253440 - DNA, 15 bp, Homo sapiens
gagccccatcactgg

SEQ ID NO: 253441 - DNA, 15 bp, Homo sapiens
cgagccccatcactg

SEQ ID NO: 253442 - DNA, 15 bp, Homo sapiens
ccgagccccatcact

SEQ ID NO: 253443 - DNA, 15 bp, Homo sapiens
gccgagccccatcac

SEQ ID NO: 253444 - DNA, 15 bp, Homo sapiens
agccgagccccatca

SEQ ID NO: 253445 - DNA, 15 bp, Homo sapiens
gagccgagccccatc

SEQ ID NO: 253446 - DNA, 15 bp, Homo sapiens
agagccgagccccat

SEQ ID NO: 253447 - DNA, 15 bp, Homo sapiens
cagagccgagcccca

SEQ ID NO: 253448 - DNA, 15 bp, Homo sapiens
gcagagccgagcccc

SEQ ID NO: 253449 - DNA, 15 bp, Homo sapiens
agcagagccgagccc

SEQ ID NO: 253450 - DNA, 15 bp, Homo sapiens
gagcagagccgagcc

SEQ ID NO: 253451 - DNA, 15 bp, Homo sapiens
ggagcagagccgagc

SEQ ID NO: 253452 - DNA, 15 bp, Homo sapiens
aggagcagagccgag

SEQ ID NO: 253453 - DNA, 15 bp, Homo sapiens
gaggagcagagccga

SEQ ID NO: 253454 - DNA, 15 bp, Homo sapiens
ggaggagcagagccg

SEQ ID NO: 253455 - DNA, 15 bp, Homo sapiens
tggaggagcagagcc

SEQ ID NO: 253456 - DNA, 15 bp, Homo sapiens
ctggaggagcagagc

SEQ ID NO: 253457 - DNA, 15 bp, Homo sapiens
cctggaggagcagag

SEQ ID NO: 253458 - DNA, 15 bp, Homo sapiens
gcctggaggagcaga

SEQ ID NO: 253459 - DNA, 15 bp, Homo sapiens
tgcctggaggagcag

SEQ ID NO: 253460 - DNA, 15 bp, Homo sapiens
atgcctggaggagca

SEQ ID NO: 253461 - DNA, 15 bp, Homo sapiens
catgcctggaggagc

SEQ ID NO: 253462 - DNA, 15 bp, Homo sapiens
ccatgcctggaggag

SEQ ID NO: 253463 - DNA, 15 bp, Homo sapiens
tccatgcctggagga

SEQ ID NO: 253464 - DNA, 15 bp, Homo sapiens
ctccatgcctggagg

SEQ ID NO: 253465 - DNA, 15 bp, Homo sapiens
tctccatgcctggag

SEQ ID NO: 253466 - DNA, 15 bp, Homo sapiens
ttctccatgcctgga

SEQ ID NO: 253467 - DNA, 15 bp, Homo sapiens
gttctccatgcctgg

SEQ ID NO: 253468 - DNA, 15 bp, Homo sapiens
agttctccatgcctg

SEQ ID NO: 253469 - DNA, 15 bp, Homo sapiens
aagttctccatgcct

SEQ ID NO: 253470 - DNA, 15 bp, Homo sapiens
caagttctccatgcc

SEQ ID NO: 253471 - DNA, 15 bp, Homo sapiens
acaagttctccatgc

SEQ ID NO: 253472 - DNA, 15 bp, Homo sapiens
aacaagttctccatg

SEQ ID NO: 253473 - DNA, 15 bp, Homo sapiens
gaacaagttctccat

SEQ ID NO: 253474 - DNA, 15 bp, Homo sapiens
tgaacaagttctcca

SEQ ID NO: 253475 - DNA, 15 bp, Homo sapiens
ttgaacaagttctcc

SEQ ID NO: 253476 - DNA, 15 bp, Homo sapiens
attgaacaagttctc

SEQ ID NO: 253477 - DNA, 15 bp, Homo sapiens
aattgaacaagttct

SEQ ID NO: 253478 - DNA, 15 bp, Homo sapiens
taattgaacaagttc

SEQ ID NO: 253479 - DNA, 15 bp, Homo sapiens
ataattgaacaagtt

SEQ ID NO: 253480 - DNA, 15 bp, Homo sapiens
cataattgaacaagt

SEQ ID NO: 253481 - DNA, 15 bp, Homo sapiens
acataattgaacaag

SEQ ID NO: 253482 - DNA, 15 bp, Homo sapiens
cacataattgaacaa

SEQ ID NO: 253483 - DNA, 15 bp, Homo sapiens
gcacataattgaaca

SEQ ID NO: 253484 - DNA, 15 bp, Homo sapiens
ggcacataattgaac

SEQ ID NO: 253485 - DNA, 15 bp, Homo sapiens
tggcacataattgaa

SEQ ID NO: 253486 - DNA, 15 bp, Homo sapiens
gtggcacataattga

SEQ ID NO: 253487 - DNA, 15 bp, Homo sapiens
ggtggcacataattg

SEQ ID NO: 253488 - DNA, 15 bp, Homo sapiens
gggtggcacataatt

SEQ ID NO: 253489 - DNA, 15 bp, Homo sapiens
ggggtggcacataat

SEQ ID NO: 253490 - DNA, 15 bp, Homo sapiens
cggggtggcacataa

SEQ ID NO: 253491 - DNA, 15 bp, Homo sapiens
acggggtggcacata

SEQ ID NO: 253492 - DNA, 15 bp, Homo sapiens
cacggggtggcacat

SEQ ID NO: 253493 - DNA, 15 bp, Homo sapiens
tcacggggtggcaca

SEQ ID NO: 253494 - DNA, 15 bp, Homo sapiens
atcacggggtggcac

SEQ ID NO: 253495 - DNA, 15 bp, Homo sapiens
catcacggggtggca

SEQ ID NO: 253496 - DNA, 15 bp, Homo sapiens
ccatcacggggtggc

SEQ ID NO: 253497 - DNA, 15 bp, Homo sapiens
cccatcacggggtgg

SEQ ID NO: 253498 - DNA, 15 bp, Homo sapiens
gcccatcacggggtg

SEQ ID NO: 253499 - DNA, 15 bp, Homo sapiens
ggcccatcacggggt

SEQ ID NO: 253500 - DNA, 15 bp, Homo sapiens
gggcccatcacgggg

SEQ ID NO: 253501 - DNA, 15 bp, Homo sapiens
tgggcccatcacggg

SEQ ID NO: 253502 - DNA, 15 bp, Homo sapiens
ttgggcccatcacgg

SEQ ID NO: 253503 - DNA, 15 bp, Homo sapiens
attgggcccatcacg

SEQ ID NO: 253504 - DNA, 15 bp, Homo sapiens
gattgggcccatcac

SEQ ID NO: 253505 - DNA, 15 bp, Homo sapiens
tgattgggcccatca

SEQ ID NO: 253506 - DNA, 15 bp, Homo sapiens
gtgattgggcccatc

SEQ ID NO: 253507 - DNA, 15 bp, Homo sapiens
tgtgattgggcccat

SEQ ID NO: 253508 - DNA, 15 bp, Homo sapiens
ctgtgattgggccca

SEQ ID NO: 253509 - DNA, 15 bp, Homo sapiens
actgtgattgggccc

SEQ ID NO: 253510 - DNA, 15 bp, Homo sapiens
tactgtgattgggcc

SEQ ID NO: 253511 - DNA, 15 bp, Homo sapiens
gtactgtgattgggc

SEQ ID NO: 253512 - DNA, 15 bp, Homo sapiens
tgtactgtgattggg

SEQ ID NO: 253513 - DNA, 15 bp, Homo sapiens
gtgtactgtgattgg

SEQ ID NO: 253514 - DNA, 15 bp, Homo sapiens
tgtgtactgtgattg

SEQ ID NO: 253515 - DNA, 15 bp, Homo sapiens
gtgtgtactgtgatt

SEQ ID NO: 253516 - DNA, 15 bp, Homo sapiens
tgtgtgtactgtgat

SEQ ID NO: 253517 - DNA, 15 bp, Homo sapiens
atgtgtgtactgtga

SEQ ID NO: 253518 - DNA, 15 bp, Homo sapiens
aatgtgtgtactgtg

SEQ ID NO: 253519 - DNA, 15 bp, Homo sapiens
taatgtgtgtactgt

SEQ ID NO: 253520 - DNA, 15 bp, Homo sapiens
ctaatgtgtgtactg

SEQ ID NO: 253521 - DNA, 15 bp, Homo sapiens
gctaatgtgtgtact

SEQ ID NO: 253522 - DNA, 15 bp, Homo sapiens
agctaatgtgtgtac

SEQ ID NO: 253523 - DNA, 15 bp, Homo sapiens
aagctaatgtgtgta

SEQ ID NO: 253524 - DNA, 15 bp, Homo sapiens
gaagctaatgtgtgt

SEQ ID NO: 253525 - DNA, 15 bp, Homo sapiens
agaagctaatgtgtg

SEQ ID NO: 253526 - DNA, 15 bp, Homo sapiens
cagaagctaatgtgt

SEQ ID NO: 253527 - DNA, 15 bp, Homo sapiens
tcagaagctaatgtg

SEQ ID NO: 253528 - DNA, 15 bp, Homo sapiens
atcagaagctaatgt

SEQ ID NO: 253529 - DNA, 15 bp, Homo sapiens
aatcagaagctaatg

SEQ ID NO: 253530 - DNA, 15 bp, Homo sapiens
taatcagaagctaat

SEQ ID NO: 253531 - DNA, 15 bp, Homo sapiens
ataatcagaagctaa

SEQ ID NO: 253532 - DNA, 15 bp, Homo sapiens
tataatcagaagcta

SEQ ID NO: 253533 - DNA, 15 bp, Homo sapiens
gtataatcagaagct

SEQ ID NO: 253534 - DNA, 15 bp, Homo sapiens
ggtataatcagaagc

SEQ ID NO: 253535 - DNA, 15 bp, Homo sapiens
gggtataatcagaag

SEQ ID NO: 253536 - DNA, 15 bp, Homo sapiens
agggtataatcagaa

SEQ ID NO: 253537 - DNA, 15 bp, Homo sapiens
aagggtataatcaga

SEQ ID NO: 253538 - DNA, 15 bp, Homo sapiens
caagggtataatcag

SEQ ID NO: 253539 - DNA, 15 bp, Homo sapiens
acaagggtataatca

SEQ ID NO: 253540 - DNA, 15 bp, Homo sapiens
aacaagggtataatc

SEQ ID NO: 253541 - DNA, 15 bp, Homo sapiens
cattgtggaagacag

SEQ ID NO: 253542 - DNA, 15 bp, Homo sapiens
ccattgtggaagaca

SEQ ID NO: 253543 - DNA, 15 bp, Homo sapiens
accattgtggaagac

SEQ ID NO: 253544 - DNA, 15 bp, Homo sapiens
aaccattgtggaaga

SEQ ID NO: 253545 - DNA, 15 bp, Homo sapiens
caaccattgtggaag

SEQ ID NO: 253546 - DNA, 15 bp, Homo sapiens
tcaaccattgtggaa

SEQ ID NO: 253547 - DNA, 15 bp, Homo sapiens
ttcaaccattgtgga

SEQ ID NO: 253548 - DNA, 15 bp, Homo sapiens
gttcaaccattgtgg

SEQ ID NO: 253549 - DNA, 15 bp, Homo sapiens
agttcaaccattgtg

SEQ ID NO: 253550 - DNA, 15 bp, Homo sapiens
tagttcaaccattgt

SEQ ID NO: 253551 - DNA, 15 bp, Homo sapiens
caaaagtcaggaaac

SEQ ID NO: 253552 - DNA, 15 bp, Homo sapiens
tcaaaagtcaggaaa

SEQ ID NO: 253553 - DNA, 15 bp, Homo sapiens
ttcaaaagtcaggaa

SEQ ID NO: 253554 - DNA, 15 bp, Homo sapiens
attcaaaagtcagga

SEQ ID NO: 253555 - DNA, 15 bp, Homo sapiens
cattcaaaagtcagg

SEQ ID NO: 253556 - DNA, 15 bp, Homo sapiens
tcattcaaaagtcag

SEQ ID NO: 253557 - DNA, 15 bp, Homo sapiens
atcattcaaaagtca

SEQ ID NO: 253558 - DNA, 15 bp, Homo sapiens
gatcattcaaaagtc

SEQ ID NO: 253559 - DNA, 15 bp, Homo sapiens
tgatcattcaaaagt

SEQ ID NO: 253560 - DNA, 15 bp, Homo sapiens
gtgatcattcaaaag

SEQ ID NO: 253561 - DNA, 15 bp, Homo sapiens
ggtgatcattcaaaa

SEQ ID NO: 253562 - DNA, 15 bp, Homo sapiens
tggtgatcattcaaa

SEQ ID NO: 253563 - DNA, 15 bp, Homo sapiens
atggtgatcattcaa

SEQ ID NO: 253564 - DNA, 15 bp, Homo sapiens
aatggtgatcattca

SEQ ID NO: 253565 - DNA, 15 bp, Homo sapiens
gaatggtgatcattc

SEQ ID NO: 253566 - DNA, 15 bp, Homo sapiens
agaatggtgatcatt

SEQ ID NO: 253567 - DNA, 15 bp, Homo sapiens
tagaatggtgatcat

SEQ ID NO: 253568 - DNA, 15 bp, Homo sapiens
ttagaatggtgatca

SEQ ID NO: 253569 - DNA, 15 bp, Homo sapiens
gttagaatggtgatc

SEQ ID NO: 253570 - DNA, 15 bp, Homo sapiens
agttagaatggtgat

SEQ ID NO: 253571 - DNA, 15 bp, Homo sapiens
cagttagaatggtga

SEQ ID NO: 253572 - DNA, 15 bp, Homo sapiens
ccagttagaatggtg

SEQ ID NO: 253573 - DNA, 15 bp, Homo sapiens
accagttagaatggt

SEQ ID NO: 253574 - DNA, 15 bp, Homo sapiens
caccagttagaatgg

SEQ ID NO: 253575 - DNA, 15 bp, Homo sapiens
acaccagttagaatg

SEQ ID NO: 253576 - DNA, 15 bp, Homo sapiens
cacaccagttagaat

SEQ ID NO: 253577 - DNA, 15 bp, Homo sapiens
tcacaccagttagaa

SEQ ID NO: 253578 - DNA, 15 bp, Homo sapiens
ctcacaccagttaga

SEQ ID NO: 253579 - DNA, 15 bp, Homo sapiens
tctcacaccagttag

SEQ ID NO: 253580 - DNA, 15 bp, Homo sapiens
atctcacaccagtta

SEQ ID NO: 253581 - DNA, 15 bp, Homo sapiens
tcatcactggccatc

SEQ ID NO: 253582 - DNA, 15 bp, Homo sapiens
atcatcactggccat

SEQ ID NO: 253583 - DNA, 15 bp, Homo sapiens
catcatcactggcca

SEQ ID NO: 253584 - DNA, 15 bp, Homo sapiens
tcatcatcactggcc

SEQ ID NO: 253585 - DNA, 15 bp, Homo sapiens
ctcatcatcactggc

SEQ ID NO: 253586 - DNA, 15 bp, Homo sapiens
gctcatcatcactgg

SEQ ID NO: 253587 - DNA, 15 bp, Homo sapiens
tgctcatcatcactg

SEQ ID NO: 253588 - DNA, 15 bp, Homo sapiens
atgctcatcatcact

SEQ ID NO: 253589 - DNA, 15 bp, Homo sapiens
aatgctcatcatcac

SEQ ID NO: 253590 - DNA, 15 bp, Homo sapiens
aaatgctcatcatca

SEQ ID NO: 253591 - DNA, 15 bp, Homo sapiens
aaaatgctcatcatc

SEQ ID NO: 253592 - DNA, 15 bp, Homo sapiens
aaaaatgctcatcat

SEQ ID NO: 253593 - DNA, 15 bp, Homo sapiens
aaaaaatgctcatca

SEQ ID NO: 253594 - DNA, 15 bp, Homo sapiens
gaaaaaatgctcatc

SEQ ID NO: 253595 - DNA, 15 bp, Homo sapiens
tgaaaaaatgctcat

SEQ ID NO: 253596 - DNA, 15 bp, Homo sapiens
atgaaaaaatgctca

SEQ ID NO: 253597 - DNA, 15 bp, Homo sapiens
catgaaaaaatgctc

SEQ ID NO: 253598 - DNA, 15 bp, Homo sapiens
acatgaaaaaatgct

SEQ ID NO: 253599 - DNA, 15 bp, Homo sapiens
cacatgaaaaaatgc

SEQ ID NO: 253600 - DNA, 15 bp, Homo sapiens
acacatgaaaaaatg

SEQ ID NO: 253601 - DNA, 15 bp, Homo sapiens
gacacatgaaaaaat

SEQ ID NO: 253602 - DNA, 15 bp, Homo sapiens
agacacatgaaaaaa

SEQ ID NO: 253603 - DNA, 15 bp, Homo sapiens
cagacacatgaaaaa

SEQ ID NO: 253604 - DNA, 15 bp, Homo sapiens
acagacacatgaaaa

SEQ ID NO: 253605 - DNA, 15 bp, Homo sapiens
cacagacacatgaaa

SEQ ID NO: 253606 - DNA, 15 bp, Homo sapiens
gcacagacacatgaa

SEQ ID NO: 253607 - DNA, 15 bp, Homo sapiens
ggcacagacacatga

SEQ ID NO: 253608 - DNA, 15 bp, Homo sapiens
aggcacagacacatg

SEQ ID NO: 253609 - DNA, 15 bp, Homo sapiens
caggcacagacacat

SEQ ID NO: 253610 - DNA, 15 bp, Homo sapiens
acaggcacagacaca

SEQ ID NO: 253611 - DNA, 15 bp, Homo sapiens
gacaggcacagacac

SEQ ID NO: 253612 - DNA, 15 bp, Homo sapiens
tgacaggcacagaca

SEQ ID NO: 253613 - DNA, 15 bp, Homo sapiens
agtgacaggcacaga

SEQ ID NO: 253614 - DNA, 15 bp, Homo sapiens
gagtgacaggcacag

SEQ ID NO: 253615 - DNA, 15 bp, Homo sapiens
agagtgacaggcaca

SEQ ID NO: 253616 - DNA, 15 bp, Homo sapiens
aagagtgacaggcac

SEQ ID NO: 253617 - DNA, 15 bp, Homo sapiens
caagagtgacaggca

SEQ ID NO: 253618 - DNA, 15 bp, Homo sapiens
tcaagagtgacaggc

SEQ ID NO: 253619 - DNA, 15 bp, Homo sapiens
gtcaagagtgacagg

SEQ ID NO: 253620 - DNA, 15 bp, Homo sapiens
agtcaagagtgacag

SEQ ID NO: 253621 - DNA, 15 bp, Homo sapiens
aagtcaagagtgaca

SEQ ID NO: 253622 - DNA, 15 bp, Homo sapiens
gaagtcaagagtgac

SEQ ID NO: 253623 - DNA, 15 bp, Homo sapiens
agaagtcaagagtga

SEQ ID NO: 253624 - DNA, 15 bp, Homo sapiens
cagaagtcaagagtg

SEQ ID NO: 253625 - DNA, 15 bp, Homo sapiens
acagaagtcaagagt

SEQ ID NO: 253626 - DNA, 15 bp, Homo sapiens
cacagaagtcaagag

SEQ ID NO: 253627 - DNA, 15 bp, Homo sapiens
acacagaagtcaaga

SEQ ID NO: 253628 - DNA, 15 bp, Homo sapiens
aacacagaagtcaag

SEQ ID NO: 253629 - DNA, 15 bp, Homo sapiens
taacacagaagtcaa

SEQ ID NO: 253630 - DNA, 15 bp, Homo sapiens
ctaacacagaagtca

SEQ ID NO: 253631 - DNA, 15 bp, Homo sapiens
actaacacagaagtc

SEQ ID NO: 253632 - DNA, 15 bp, Homo sapiens
aactaacacagaagt

SEQ ID NO: 253633 - DNA, 15 bp, Homo sapiens
taactaacacagaag

SEQ ID NO: 253634 - DNA, 15 bp, Homo sapiens
ctaactaacacagaa

SEQ ID NO: 253635 - DNA, 15 bp, Homo sapiens
cctaactaacacaga

SEQ ID NO: 253636 - DNA, 15 bp, Homo sapiens
tcctaactaacacag

SEQ ID NO: 253637 - DNA, 15 bp, Homo sapiens
atcctaactaacaca

SEQ ID NO: 253638 - DNA, 15 bp, Homo sapiens
aatcctaactaacac

SEQ ID NO: 253639 - DNA, 15 bp, Homo sapiens
gaatcctaactaaca

SEQ ID NO: 253640 - DNA, 15 bp, Homo sapiens
ggaatcctaactaac

SEQ ID NO: 253641 - DNA, 15 bp, Homo sapiens
aggaatcctaactaa

SEQ ID NO: 253642 - DNA, 15 bp, Homo sapiens
aaggaatcctaacta

SEQ ID NO: 253643 - DNA, 15 bp, Homo sapiens
caaggaatcctaact

SEQ ID NO: 253644 - DNA, 15 bp, Homo sapiens
ccaaggaatcctaac

SEQ ID NO: 253645 - DNA, 15 bp, Homo sapiens
cccaaggaatcctaa

SEQ ID NO: 253646 - DNA, 15 bp, Homo sapiens
gcccaaggaatccta

SEQ ID NO: 253647 - DNA, 15 bp, Homo sapiens
agcccaaggaatcct

SEQ ID NO: 253648 - DNA, 15 bp, Homo sapiens
aagcccaaggaatcc

SEQ ID NO: 253649 - DNA, 15 bp, Homo sapiens
gaagcccaaggaatc

SEQ ID NO: 253650 - DNA, 15 bp, Homo sapiens
tgaagcccaaggaat

SEQ ID NO: 253651 - DNA, 15 bp, Homo sapiens
atgaagcccaaggaa

SEQ ID NO: 253652 - DNA, 15 bp, Homo sapiens
catgaagcccaagga

SEQ ID NO: 253653 - DNA, 15 bp, Homo sapiens
acatgaagcccaagg

SEQ ID NO: 253654 - DNA, 15 bp, Homo sapiens
tacatgaagcccaag

SEQ ID NO: 253655 - DNA, 15 bp, Homo sapiens
ttacatgaagcccaa

SEQ ID NO: 253656 - DNA, 15 bp, Homo sapiens
gttacatgaagccca

SEQ ID NO: 253657 - DNA, 15 bp, Homo sapiens
tgttacatgaagccc

SEQ ID NO: 253658 - DNA, 15 bp, Homo sapiens
ctgttacatgaagcc

SEQ ID NO: 253659 - DNA, 15 bp, Homo sapiens
tctgttacatgaagc

SEQ ID NO: 253660 - DNA, 15 bp, Homo sapiens
ctctgttacatgaag

SEQ ID NO: 253661 - DNA, 15 bp, Homo sapiens
tctctgttacatgaa

SEQ ID NO: 253662 - DNA, 15 bp, Homo sapiens
ctctctgttacatga

SEQ ID NO: 253663 - DNA, 15 bp, Homo sapiens
tctctctgttacatg

SEQ ID NO: 253664 - DNA, 15 bp, Homo sapiens
ttctctctgttacat

SEQ ID NO: 253665 - DNA, 15 bp, Homo sapiens
tttctctctgttaca

SEQ ID NO: 253666 - DNA, 15 bp, Homo sapiens
ttttctctctgttac

SEQ ID NO: 253667 - DNA, 15 bp, Homo sapiens
cttttctctctgtta

SEQ ID NO: 253668 - DNA, 15 bp, Homo sapiens
gcttttctctctgtt

SEQ ID NO: 253669 - DNA, 15 bp, Homo sapiens
tgcttttctctctgt

SEQ ID NO: 253670 - DNA, 15 bp, Homo sapiens
ctgcttttctctctg

SEQ ID NO: 253671 - DNA, 15 bp, Homo sapiens
actgcttttctctct

SEQ ID NO: 253672 - DNA, 15 bp, Homo sapiens
aactgcttttctctc

SEQ ID NO: 253673 - DNA, 15 bp, Homo sapiens
aaactgcttttctct

SEQ ID NO: 253674 - DNA, 15 bp, Homo sapiens
aaaactgcttttctc

SEQ ID NO: 253675 - DNA, 15 bp, Homo sapiens
aaaaactgcttttct

SEQ ID NO: 253676 - DNA, 15 bp, Homo sapiens
gaaaaactgcttttc

SEQ ID NO: 253677 - DNA, 15 bp, Homo sapiens
ggaaaaactgctttt

SEQ ID NO: 253678 - DNA, 15 bp, Homo sapiens
aggaaaaactgcttt

SEQ ID NO: 253679 - DNA, 15 bp, Homo sapiens
taggaaaaactgctt

SEQ ID NO: 253680 - DNA, 15 bp, Homo sapiens
gtaggaaaaactgct

SEQ ID NO: 253681 - DNA, 15 bp, Homo sapiens
tgtaggaaaaactgc

SEQ ID NO: 253682 - DNA, 15 bp, Homo sapiens
ttgtaggaaaaactg

SEQ ID NO: 253683 - DNA, 15 bp, Homo sapiens
cttgtaggaaaaact

SEQ ID NO: 253684 - DNA, 15 bp, Homo sapiens
acttgtaggaaaaac

SEQ ID NO: 253685 - DNA, 15 bp, Homo sapiens
tacttgtaggaaaaa

SEQ ID NO: 253686 - DNA, 15 bp, Homo sapiens
ctacttgtaggaaaa

SEQ ID NO: 253687 - DNA, 15 bp, Homo sapiens
tctacttgtaggaaa

SEQ ID NO: 253688 - DNA, 15 bp, Homo sapiens
ttctacttgtaggaa

SEQ ID NO: 253689 - DNA, 15 bp, Homo sapiens
cttctacttgtagga

SEQ ID NO: 253690 - DNA, 15 bp, Homo sapiens
acttctacttgtagg

SEQ ID NO: 253691 - DNA, 15 bp, Homo sapiens
gacttctacttgtag

SEQ ID NO: 253692 - DNA, 15 bp, Homo sapiens
agacttctacttgta

SEQ ID NO: 253693 - DNA, 15 bp, Homo sapiens
tagacttctacttgt

SEQ ID NO: 253694 - DNA, 15 bp, Homo sapiens
ctagacttctacttg

SEQ ID NO: 253695 - DNA, 15 bp, Homo sapiens
tctagacttctactt

SEQ ID NO: 253696 - DNA, 15 bp, Homo sapiens
atctagacttctact

SEQ ID NO: 253697 - DNA, 15 bp, Homo sapiens
catctagacttctac

SEQ ID NO: 253698 - DNA, 15 bp, Homo sapiens
acatctagacttcta

SEQ ID NO: 253699 - DNA, 15 bp, Homo sapiens
tacatctagacttct

SEQ ID NO: 253700 - DNA, 15 bp, Homo sapiens
ctacatctagacttc

SEQ ID NO: 253701 - DNA, 15 bp, Homo sapiens
cctacatctagactt

SEQ ID NO: 253702 - DNA, 15 bp, Homo sapiens
ccctacatctagact

SEQ ID NO: 253703 - DNA, 15 bp, Homo sapiens
cccctacatctagac

SEQ ID NO: 253704 - DNA, 15 bp, Homo sapiens
acccctacatctaga

SEQ ID NO: 253705 - DNA, 15 bp, Homo sapiens
aacccctacatctag

SEQ ID NO: 253706 - DNA, 15 bp, Homo sapiens
aaacccctacatcta

SEQ ID NO: 253707 - DNA, 15 bp, Homo sapiens
gaaacccctacatct

SEQ ID NO: 253708 - DNA, 15 bp, Homo sapiens
agaaacccctacatc

SEQ ID NO: 253709 - DNA, 15 bp, Homo sapiens
cagaaacccctacat

SEQ ID NO: 253710 - DNA, 15 bp, Homo sapiens
ccagaaacccctaca

SEQ ID NO: 253711 - DNA, 15 bp, Homo sapiens
gccagaaacccctac

SEQ ID NO: 253712 - DNA, 15 bp, Homo sapiens
tgccagaaaccccta

SEQ ID NO: 253713 - DNA, 15 bp, Homo sapiens
gtgccagaaacccct

SEQ ID NO: 253714 - DNA, 15 bp, Homo sapiens
agtgccagaaacccc

SEQ ID NO: 253715 - DNA, 15 bp, Homo sapiens
tagtgccagaaaccc

SEQ ID NO: 253716 - DNA, 15 bp, Homo sapiens
ctagtgccagaaacc

SEQ ID NO: 253717 - DNA, 15 bp, Homo sapiens
actagtgccagaaac

SEQ ID NO: 253718 - DNA, 15 bp, Homo sapiens
cactagtgccagaaa

SEQ ID NO: 253719 - DNA, 15 bp, Homo sapiens
gcactagtgccagaa

SEQ ID NO: 253720 - DNA, 15 bp, Homo sapiens
agcactagtgccaga

SEQ ID NO: 253721 - DNA, 15 bp, Homo sapiens
cagcactagtgccag

SEQ ID NO: 253722 - DNA, 15 bp, Homo sapiens
gcagcactagtgcca

SEQ ID NO: 253723 - DNA, 15 bp, Homo sapiens
agcagcactagtgcc

SEQ ID NO: 253724 - DNA, 15 bp, Homo sapiens
cagcagcactagtgc

SEQ ID NO: 253725 - DNA, 15 bp, Homo sapiens
gcagcagcactagtg

SEQ ID NO: 253726 - DNA, 15 bp, Homo sapiens
agcagcagcactagt

SEQ ID NO: 253727 - DNA, 15 bp, Homo sapiens
tagcagcagcactag

SEQ ID NO: 253728 - DNA, 15 bp, Homo sapiens
gtagcagcagcacta

SEQ ID NO: 253729 - DNA, 15 bp, Homo sapiens
tgtagcagcagcact

SEQ ID NO: 253730 - DNA, 15 bp, Homo sapiens
atgtagcagcagcac

SEQ ID NO: 253731 - DNA, 15 bp, Homo sapiens
gatgtagcagcagca

SEQ ID NO: 253732 - DNA, 15 bp, Homo sapiens
tgatgtagcagcagc

SEQ ID NO: 253733 - DNA, 15 bp, Homo sapiens
atgatgtagcagcag

SEQ ID NO: 253734 - DNA, 15 bp, Homo sapiens
catgatgtagcagca

SEQ ID NO: 253735 - DNA, 15 bp, Homo sapiens
acatgatgtagcagc

SEQ ID NO: 253736 - DNA, 15 bp, Homo sapiens
gacatgatgtagcag

SEQ ID NO: 253737 - DNA, 15 bp, Homo sapiens
tgacatgatgtagca

SEQ ID NO: 253738 - DNA, 15 bp, Homo sapiens
ttgacatgatgtagc

SEQ ID NO: 253739 - DNA, 15 bp, Homo sapiens
cttgacatgatgtag

SEQ ID NO: 253740 - DNA, 15 bp, Homo sapiens
tcttgacatgatgta

SEQ ID NO: 253741 - DNA, 15 bp, Homo sapiens
atcttgacatgatgt

SEQ ID NO: 253742 - DNA, 15 bp, Homo sapiens
tatcttgacatgatg

SEQ ID NO: 253743 - DNA, 15 bp, Homo sapiens
ctatcttgacatgat

SEQ ID NO: 253744 - DNA, 15 bp, Homo sapiens
actatcttgacatga

SEQ ID NO: 253745 - DNA, 15 bp, Homo sapiens
cactatcttgacatg

SEQ ID NO: 253746 - DNA, 15 bp, Homo sapiens
acactatcttgacat

SEQ ID NO: 253747 - DNA, 15 bp, Homo sapiens
gacactatcttgaca

SEQ ID NO: 253748 - DNA, 15 bp, Homo sapiens
agacactatcttgac

SEQ ID NO: 253749 - DNA, 15 bp, Homo sapiens
cagacactatcttga

SEQ ID NO: 253750 - DNA, 15 bp, Homo sapiens
acagacactatcttg

SEQ ID NO: 253751 - DNA, 15 bp, Homo sapiens
tacagacactatctt

SEQ ID NO: 253752 - DNA, 15 bp, Homo sapiens
ctacagacactatct

SEQ ID NO: 253753 - DNA, 15 bp, Homo sapiens
cctacagacactatc

SEQ ID NO: 253754 - DNA, 15 bp, Homo sapiens
tcctacagacactat

SEQ ID NO: 253755 - DNA, 15 bp, Homo sapiens
atcctacagacacta

SEQ ID NO: 253756 - DNA, 15 bp, Homo sapiens
catcctacagacact

SEQ ID NO: 253757 - DNA, 15 bp, Homo sapiens
acatcctacagacac

SEQ ID NO: 253758 - DNA, 15 bp, Homo sapiens
gacatcctacagaca

SEQ ID NO: 253759 - DNA, 15 bp, Homo sapiens
tgacatcctacagac

SEQ ID NO: 253760 - DNA, 15 bp, Homo sapiens
ctgacatcctacaga

SEQ ID NO: 253761 - DNA, 15 bp, Homo sapiens
cctgacatcctacag

SEQ ID NO: 253762 - DNA, 15 bp, Homo sapiens
tcctgacatcctaca

SEQ ID NO: 253763 - DNA, 15 bp, Homo sapiens
atcctgacatcctac

SEQ ID NO: 253764 - DNA, 15 bp, Homo sapiens
aatcctgacatccta

SEQ ID NO: 253765 - DNA, 15 bp, Homo sapiens
gaatcctgacatcct

SEQ ID NO: 253766 - DNA, 15 bp, Homo sapiens
ggaatcctgacatcc

SEQ ID NO: 253767 - DNA, 15 bp, Homo sapiens
gggaatcctgacatc

SEQ ID NO: 253768 - DNA, 15 bp, Homo sapiens
agggaatcctgacat

SEQ ID NO: 253769 - DNA, 15 bp, Homo sapiens
aagggaatcctgaca

SEQ ID NO: 253770 - DNA, 15 bp, Homo sapiens
caagggaatcctgac

SEQ ID NO: 253771 - DNA, 15 bp, Homo sapiens
ccaagggaatcctga

SEQ ID NO: 253772 - DNA, 15 bp, Homo sapiens
gccaagggaatcctg

SEQ ID NO: 253773 - DNA, 15 bp, Homo sapiens
agccaagggaatcct

SEQ ID NO: 253774 - DNA, 15 bp, Homo sapiens
aagccaagggaatcc

SEQ ID NO: 253775 - DNA, 15 bp, Homo sapiens
aaagccaagggaatc

SEQ ID NO: 253776 - DNA, 15 bp, Homo sapiens
aaaagccaagggaat

SEQ ID NO: 253777 - DNA, 15 bp, Homo sapiens
gaaaagccaagggaa

SEQ ID NO: 253778 - DNA, 15 bp, Homo sapiens
tgaaaagccaaggga

SEQ ID NO: 253779 - DNA, 15 bp, Homo sapiens
gtgaaaagccaaggg

SEQ ID NO: 253780 - DNA, 15 bp, Homo sapiens
agtgaaaagccaagg

SEQ ID NO: 253781 - DNA, 15 bp, Homo sapiens
gagtgaaaagccaag

SEQ ID NO: 253782 - DNA, 15 bp, Homo sapiens
tgagtgaaaagccaa

SEQ ID NO: 253783 - DNA, 15 bp, Homo sapiens
atgagtgaaaagcca

SEQ ID NO: 253784 - DNA, 15 bp, Homo sapiens
catgagtgaaaagcc

SEQ ID NO: 253785 - DNA, 15 bp, Homo sapiens
ccatgagtgaaaagc

SEQ ID NO: 253786 - DNA, 15 bp, Homo sapiens
gccatgagtgaaaag

SEQ ID NO: 253787 - DNA, 15 bp, Homo sapiens
agccatgagtgaaaa

SEQ ID NO: 253788 - DNA, 15 bp, Homo sapiens
cagccatgagtgaaa

SEQ ID NO: 253789 - DNA, 15 bp, Homo sapiens
gcagccatgagtgaa

SEQ ID NO: 253790 - DNA, 15 bp, Homo sapiens
tgcagccatgagtga

SEQ ID NO: 253791 - DNA, 15 bp, Homo sapiens
ttgcagccatgagtg

SEQ ID NO: 253792 - DNA, 15 bp, Homo sapiens
cttgcagccatgagt

SEQ ID NO: 253793 - DNA, 15 bp, Homo sapiens
tcttgcagccatgag

SEQ ID NO: 253794 - DNA, 15 bp, Homo sapiens
ctcttgcagccatga

SEQ ID NO: 253795 - DNA, 15 bp, Homo sapiens
tctcttgcagccatg

SEQ ID NO: 253796 - DNA, 15 bp, Homo sapiens
ctctcttgcagccat

SEQ ID NO: 253797 - DNA, 15 bp, Homo sapiens
tctctcttgcagcca

SEQ ID NO: 253798 - DNA, 15 bp, Homo sapiens
atctctcttgcagcc

SEQ ID NO: 253799 - DNA, 15 bp, Homo sapiens
catctctcttgcagc

SEQ ID NO: 253800 - DNA, 15 bp, Homo sapiens
ccatctctcttgcag

SEQ ID NO: 253801 - DNA, 15 bp, Homo sapiens
tccatctctcttgca

SEQ ID NO: 253802 - DNA, 15 bp, Homo sapiens
ctccatctctcttgc

SEQ ID NO: 253803 - DNA, 15 bp, Homo sapiens
tctccatctctcttg

SEQ ID NO: 253804 - DNA, 15 bp, Homo sapiens
ctctccatctctctt

SEQ ID NO: 253805 - DNA, 15 bp, Homo sapiens
gctctccatctctct

SEQ ID NO: 253806 - DNA, 15 bp, Homo sapiens
agctctccatctctc

SEQ ID NO: 253807 - DNA, 15 bp, Homo sapiens
aagctctccatctct

SEQ ID NO: 253808 - DNA, 15 bp, Homo sapiens
gaagctctccatctc

SEQ ID NO: 253809 - DNA, 15 bp, Homo sapiens
tgaagctctccatct

SEQ ID NO: 253810 - DNA, 15 bp, Homo sapiens
ctgaagctctccatc

SEQ ID NO: 253811 - DNA, 15 bp, Homo sapiens
tctgaagctctccat

SEQ ID NO: 253812 - DNA, 15 bp, Homo sapiens
gtctgaagctctcca

SEQ ID NO: 253813 - DNA, 15 bp, Homo sapiens
agtctgaagctctcc

SEQ ID NO: 253814 - DNA, 15 bp, Homo sapiens
aagtctgaagctctc

SEQ ID NO: 253815 - DNA, 15 bp, Homo sapiens
aaagtctgaagctct

SEQ ID NO: 253816 - DNA, 15 bp, Homo sapiens
caaagtctgaagctc

SEQ ID NO: 253817 - DNA, 15 bp, Homo sapiens
ccaaagtctgaagct

SEQ ID NO: 253818 - DNA, 15 bp, Homo sapiens
cccaaagtctgaagc

SEQ ID NO: 253819 - DNA, 15 bp, Homo sapiens
acccaaagtctgaag

SEQ ID NO: 253820 - DNA, 15 bp, Homo sapiens
gacccaaagtctgaa

SEQ ID NO: 253821 - DNA, 15 bp, Homo sapiens
ggacccaaagtctga

SEQ ID NO: 253822 - DNA, 15 bp, Homo sapiens
tggacccaaagtctg

SEQ ID NO: 253823 - DNA, 15 bp, Homo sapiens
atggacccaaagtct

SEQ ID NO: 253824 - DNA, 15 bp, Homo sapiens
aatggacccaaagtc

SEQ ID NO: 253825 - DNA, 15 bp, Homo sapiens
aaatggacccaaagt

SEQ ID NO: 253826 - DNA, 15 bp, Homo sapiens
gaaatggacccaaag

SEQ ID NO: 253827 - DNA, 15 bp, Homo sapiens
tgaaatggacccaaa

SEQ ID NO: 253828 - DNA, 15 bp, Homo sapiens
ttgaaatggacccaa

SEQ ID NO: 253829 - DNA, 15 bp, Homo sapiens
cttgaaatggaccca

SEQ ID NO: 253830 - DNA, 15 bp, Homo sapiens
ccttgaaatggaccc

SEQ ID NO: 253831 - DNA, 15 bp, Homo sapiens
accttgaaatggacc

SEQ ID NO: 253832 - DNA, 15 bp, Homo sapiens
taccttgaaatggac

SEQ ID NO: 253833 - DNA, 15 bp, Homo sapiens
ctaccttgaaatgga

SEQ ID NO: 253834 - DNA, 15 bp, Homo sapiens
tctaccttgaaatgg

SEQ ID NO: 253835 - DNA, 15 bp, Homo sapiens
ttctaccttgaaatg

SEQ ID NO: 253836 - DNA, 15 bp, Homo sapiens
tttctaccttgaaat

SEQ ID NO: 253837 - DNA, 15 bp, Homo sapiens
ctttctaccttgaaa

SEQ ID NO: 253838 - DNA, 15 bp, Homo sapiens
tctttctaccttgaa

SEQ ID NO: 253839 - DNA, 15 bp, Homo sapiens
ttctttctaccttga

SEQ ID NO: 253840 - DNA, 15 bp, Homo sapiens
tttctttctaccttg

SEQ ID NO: 253841 - DNA, 15 bp, Homo sapiens
ttttctttctacctt

SEQ ID NO: 253842 - DNA, 15 bp, Homo sapiens
cttttctttctacct

SEQ ID NO: 253843 - DNA, 15 bp, Homo sapiens
ccttttctttctacc

SEQ ID NO: 253844 - DNA, 15 bp, Homo sapiens
cccttttctttctac

SEQ ID NO: 253845 - DNA, 15 bp, Homo sapiens
ccccttttctttcta

SEQ ID NO: 253846 - DNA, 15 bp, Homo sapiens
cccccttttctttct

SEQ ID NO: 253847 - DNA, 15 bp, Homo sapiens
tcccccttttctttc

SEQ ID NO: 253848 - DNA, 15 bp, Homo sapiens
ttcccccttttcttt

SEQ ID NO: 253849 - DNA, 15 bp, Homo sapiens
cttcccccttttctt

SEQ ID NO: 253850 - DNA, 15 bp, Homo sapiens
ccttcccccttttct

SEQ ID NO: 253851 - DNA, 15 bp, Homo sapiens
cccttcccccttttc

SEQ ID NO: 253852 - DNA, 15 bp, Homo sapiens
gcccttccccctttt

SEQ ID NO: 253853 - DNA, 15 bp, Homo sapiens
tgcccttcccccttt

SEQ ID NO: 253854 - DNA, 15 bp, Homo sapiens
ttgcccttccccctt

SEQ ID NO: 253855 - DNA, 15 bp, Homo sapiens
attgcccttccccct

SEQ ID NO: 253856 - DNA, 15 bp, Homo sapiens
tattgcccttccccc

SEQ ID NO: 253857 - DNA, 15 bp, Homo sapiens
atattgcccttcccc

SEQ ID NO: 253858 - DNA, 15 bp, Homo sapiens
gatattgcccttccc

SEQ ID NO: 253859 - DNA, 15 bp, Homo sapiens
tgatattgcccttcc

SEQ ID NO: 253860 - DNA, 15 bp, Homo sapiens
ctgatattgcccttc

SEQ ID NO: 253861 - DNA, 15 bp, Homo sapiens
cctgatattgccctt

SEQ ID NO: 253862 - DNA, 15 bp, Homo sapiens
acctgatattgccct

SEQ ID NO: 253863 - DNA, 15 bp, Homo sapiens
aacctgatattgccc

SEQ ID NO: 253864 - DNA, 15 bp, Homo sapiens
taacctgatattgcc

SEQ ID NO: 253865 - DNA, 15 bp, Homo sapiens
ttaacctgatattgc

SEQ ID NO: 253866 - DNA, 15 bp, Homo sapiens
cttaacctgatattg

SEQ ID NO: 253867 - DNA, 15 bp, Homo sapiens
gcttaacctgatatt

SEQ ID NO: 253868 - DNA, 15 bp, Homo sapiens
agcttaacctgatat

SEQ ID NO: 253869 - DNA, 15 bp, Homo sapiens
cagcttaacctgata

SEQ ID NO: 253870 - DNA, 15 bp, Homo sapiens
acagcttaacctgat

SEQ ID NO: 253871 - DNA, 15 bp, Homo sapiens
aacagcttaacctga

SEQ ID NO: 253872 - DNA, 15 bp, Homo sapiens
gaacagcttaacctg

SEQ ID NO: 253873 - DNA, 15 bp, Homo sapiens
ggaacagcttaacct

SEQ ID NO: 253874 - DNA, 15 bp, Homo sapiens
gggaacagcttaacc

SEQ ID NO: 253875 - DNA, 15 bp, Homo sapiens
agggaacagcttaac

SEQ ID NO: 253876 - DNA, 15 bp, Homo sapiens
gagggaacagcttaa

SEQ ID NO: 253877 - DNA, 15 bp, Homo sapiens
ggagggaacagctta

SEQ ID NO: 253878 - DNA, 15 bp, Homo sapiens
aggagggaacagctt

SEQ ID NO: 253879 - DNA, 15 bp, Homo sapiens
caggagggaacagct

SEQ ID NO: 253880 - DNA, 15 bp, Homo sapiens
gcaggagggaacagc

SEQ ID NO: 253881 - DNA, 15 bp, Homo sapiens
agcaggagggaacag

SEQ ID NO: 253882 - DNA, 15 bp, Homo sapiens
aagcaggagggaaca

SEQ ID NO: 253883 - DNA, 15 bp, Homo sapiens
aaagcaggagggaac

SEQ ID NO: 253884 - DNA, 15 bp, Homo sapiens
aaaagcaggagggaa

SEQ ID NO: 253885 - DNA, 15 bp, Homo sapiens
aaaaagcaggaggga

SEQ ID NO: 253886 - DNA, 15 bp, Homo sapiens
taaaaagcaggaggg

SEQ ID NO: 253887 - DNA, 15 bp, Homo sapiens
ataaaaagcaggagg

SEQ ID NO: 253888 - DNA, 15 bp, Homo sapiens
gataaaaagcaggag

SEQ ID NO: 253889 - DNA, 15 bp, Homo sapiens
tgataaaaagcagga

SEQ ID NO: 253890 - DNA, 15 bp, Homo sapiens
ctgataaaaagcagg

SEQ ID NO: 253891 - DNA, 15 bp, Homo sapiens
tctgataaaaagcag

SEQ ID NO: 253892 - DNA, 15 bp, Homo sapiens
gtctgataaaaagca

SEQ ID NO: 253893 - DNA, 15 bp, Homo sapiens
tgtctgataaaaagc

SEQ ID NO: 253894 - DNA, 15 bp, Homo sapiens
atgtctgataaaaag

SEQ ID NO: 253895 - DNA, 15 bp, Homo sapiens
gatgtctgataaaaa

SEQ ID NO: 253896 - DNA, 15 bp, Homo sapiens
agatgtctgataaaa

SEQ ID NO: 253897 - DNA, 15 bp, Homo sapiens
aagatgtctgataaa

SEQ ID NO: 253898 - DNA, 15 bp, Homo sapiens
gaagatgtctgataa

SEQ ID NO: 253899 - DNA, 15 bp, Homo sapiens
ggaagatgtctgata

SEQ ID NO: 253900 - DNA, 15 bp, Homo sapiens
gggaagatgtctgat

SEQ ID NO: 253901 - DNA, 15 bp, Homo sapiens
ggggaagatgtctga

SEQ ID NO: 253902 - DNA, 15 bp, Homo sapiens
aggggaagatgtctg

SEQ ID NO: 253903 - DNA, 15 bp, Homo sapiens
caggggaagatgtct

SEQ ID NO: 253904 - DNA, 15 bp, Homo sapiens
gcaggggaagatgtc

SEQ ID NO: 253905 - DNA, 15 bp, Homo sapiens
tgcaggggaagatgt

SEQ ID NO: 253906 - DNA, 15 bp, Homo sapiens
ctgcaggggaagatg

SEQ ID NO: 253907 - DNA, 15 bp, Homo sapiens
tctgcaggggaagat

SEQ ID NO: 253908 - DNA, 15 bp, Homo sapiens
ttctgcaggggaaga

SEQ ID NO: 253909 - DNA, 15 bp, Homo sapiens
attctgcaggggaag

SEQ ID NO: 253910 - DNA, 15 bp, Homo sapiens
tattctgcaggggaa

SEQ ID NO: 253911 - DNA, 15 bp, Homo sapiens
atattctgcagggga

SEQ ID NO: 253912 - DNA, 15 bp, Homo sapiens
catattctgcagggg

SEQ ID NO: 253913 - DNA, 15 bp, Homo sapiens
acatattctgcaggg

SEQ ID NO: 253914 - DNA, 15 bp, Homo sapiens
cacatattctgcagg

SEQ ID NO: 253915 - DNA, 15 bp, Homo sapiens
ccacatattctgcag

SEQ ID NO: 253916 - DNA, 15 bp, Homo sapiens
gccacatattctgca

SEQ ID NO: 253917 - DNA, 15 bp, Homo sapiens
cgccacatattctgc

SEQ ID NO: 253918 - DNA, 15 bp, Homo sapiens
acgccacatattctg

SEQ ID NO: 253919 - DNA, 15 bp, Homo sapiens
cacgccacatattct

SEQ ID NO: 253920 - DNA, 15 bp, Homo sapiens
ccacgccacatattc

SEQ ID NO: 253921 - DNA, 15 bp, Homo sapiens
gccacgccacatatt

SEQ ID NO: 253922 - DNA, 15 bp, Homo sapiens
ggccacgccacatat

SEQ ID NO: 253923 - DNA, 15 bp, Homo sapiens
tggccacgccacata

SEQ ID NO: 253924 - DNA, 15 bp, Homo sapiens
gtggccacgccacat

SEQ ID NO: 253925 - DNA, 15 bp, Homo sapiens
ggtggccacgccaca

SEQ ID NO: 253926 - DNA, 15 bp, Homo sapiens
aggtggccacgccac

SEQ ID NO: 253927 - DNA, 15 bp, Homo sapiens
taggtggccacgcca

SEQ ID NO: 253928 - DNA, 15 bp, Homo sapiens
ataggtggccacgcc

SEQ ID NO: 253929 - DNA, 15 bp, Homo sapiens
tataggtggccacgc

SEQ ID NO: 253930 - DNA, 15 bp, Homo sapiens
ctataggtggccacg

SEQ ID NO: 253931 - DNA, 15 bp, Homo sapiens
gctataggtggccac

SEQ ID NO: 253932 - DNA, 15 bp, Homo sapiens
agctataggtggcca

SEQ ID NO: 253933 - DNA, 15 bp, Homo sapiens
cagctataggtggcc

SEQ ID NO: 253934 - DNA, 15 bp, Homo sapiens
gcagctataggtggc

SEQ ID NO: 253935 - DNA, 15 bp, Homo sapiens
tgcagctataggtgg

SEQ ID NO: 253936 - DNA, 15 bp, Homo sapiens
ttgcagctataggtg

SEQ ID NO: 253937 - DNA, 15 bp, Homo sapiens
cttgcagctataggt

SEQ ID NO: 253938 - DNA, 15 bp, Homo sapiens
ccttgcagctatagg

SEQ ID NO: 253939 - DNA, 15 bp, Homo sapiens
cccttgcagctatag

SEQ ID NO: 253940 - DNA, 15 bp, Homo sapiens
tcccttgcagctata

SEQ ID NO: 253941 - DNA, 15 bp, Homo sapiens
ctcccttgcagctat

SEQ ID NO: 253942 - DNA, 15 bp, Homo sapiens
cctcccttgcagcta

SEQ ID NO: 253943 - DNA, 15 bp, Homo sapiens
gcctcccttgcagct

SEQ ID NO: 253944 - DNA, 15 bp, Homo sapiens
agcctcccttgcagc

SEQ ID NO: 253945 - DNA, 15 bp, Homo sapiens
cagcctcccttgcag

SEQ ID NO: 253946 - DNA, 15 bp, Homo sapiens
ccagcctcccttgca

SEQ ID NO: 253947 - DNA, 15 bp, Homo sapiens
tccagcctcccttgc

SEQ ID NO: 253948 - DNA, 15 bp, Homo sapiens
ttccagcctcccttg

SEQ ID NO: 253949 - DNA, 15 bp, Homo sapiens
cttccagcctccctt

SEQ ID NO: 253950 - DNA, 15 bp, Homo sapiens
ccttccagcctccct

SEQ ID NO: 253951 - DNA, 15 bp, Homo sapiens
accttccagcctccc

SEQ ID NO: 253952 - DNA, 15 bp, Homo sapiens
caccttccagcctcc

SEQ ID NO: 253953 - DNA, 15 bp, Homo sapiens
tcaccttccagcctc

SEQ ID NO: 253954 - DNA, 15 bp, Homo sapiens
atcaccttccagcct

SEQ ID NO: 253955 - DNA, 15 bp, Homo sapiens
aatcaccttccagcc

SEQ ID NO: 253956 - DNA, 15 bp, Homo sapiens
taatcaccttccagc

SEQ ID NO: 253957 - DNA, 15 bp, Homo sapiens
ataatcaccttccag

SEQ ID NO: 253958 - DNA, 15 bp, Homo sapiens
aataatcaccttcca

SEQ ID NO: 253959 - DNA, 15 bp, Homo sapiens
gaataatcaccttcc

SEQ ID NO: 253960 - DNA, 15 bp, Homo sapiens
tgaataatcaccttc

SEQ ID NO: 253961 - DNA, 15 bp, Homo sapiens
ctgaataatcacctt

SEQ ID NO: 253962 - DNA, 15 bp, Homo sapiens
gctgaataatcacct

SEQ ID NO: 253963 - DNA, 15 bp, Homo sapiens
agctgaataatcacc

SEQ ID NO: 253964 - DNA, 15 bp, Homo sapiens
aagctgaataatcac

SEQ ID NO: 253965 - DNA, 15 bp, Homo sapiens
aaagctgaataatca

SEQ ID NO: 253966 - DNA, 15 bp, Homo sapiens
gaaagctgaataatc

SEQ ID NO: 253967 - DNA, 15 bp, Homo sapiens
ggaaagctgaataat

SEQ ID NO: 253968 - DNA, 15 bp, Homo sapiens
tggaaagctgaataa

SEQ ID NO: 253969 - DNA, 15 bp, Homo sapiens
atggaaagctgaata

SEQ ID NO: 253970 - DNA, 15 bp, Homo sapiens
gatggaaagctgaat

SEQ ID NO: 253971 - DNA, 15 bp, Homo sapiens
agatggaaagctgaa

SEQ ID NO: 253972 - DNA, 15 bp, Homo sapiens
aagatggaaagctga

SEQ ID NO: 253973 - DNA, 15 bp, Homo sapiens
gaagatggaaagctg

SEQ ID NO: 253974 - DNA, 15 bp, Homo sapiens
cgaagatggaaagct

SEQ ID NO: 253975 - DNA, 15 bp, Homo sapiens
tcgaagatggaaagc

SEQ ID NO: 253976 - DNA, 15 bp, Homo sapiens
ctcgaagatggaaag

SEQ ID NO: 253977 - DNA, 15 bp, Homo sapiens
cctcgaagatggaaa

SEQ ID NO: 253978 - DNA, 15 bp, Homo sapiens
tcctcgaagatggaa

SEQ ID NO: 253979 - DNA, 15 bp, Homo sapiens
gtcctcgaagatgga

SEQ ID NO: 253980 - DNA, 15 bp, Homo sapiens
tgtcctcgaagatgg

SEQ ID NO: 253981 - DNA, 15 bp, Homo sapiens
ctgtcctcgaagatg

SEQ ID NO: 253982 - DNA, 15 bp, Homo sapiens
cctgtcctcgaagat

SEQ ID NO: 253983 - DNA, 15 bp, Homo sapiens
gcctgtcctcgaaga

SEQ ID NO: 253984 - DNA, 15 bp, Homo sapiens
tgcctgtcctcgaag

SEQ ID NO: 253985 - DNA, 15 bp, Homo sapiens
ttgcctgtcctcgaa

SEQ ID NO: 253986 - DNA, 15 bp, Homo sapiens
cttgcctgtcctcga

SEQ ID NO: 253987 - DNA, 15 bp, Homo sapiens
ccttgcctgtcctcg

SEQ ID NO: 253988 - DNA, 15 bp, Homo sapiens
accttgcctgtcctc

SEQ ID NO: 253989 - DNA, 15 bp, Homo sapiens
aaccttgcctgtcct

SEQ ID NO: 253990 - DNA, 15 bp, Homo sapiens
caaccttgcctgtcc

SEQ ID NO: 253991 - DNA, 15 bp, Homo sapiens
ccaaccttgcctgtc

SEQ ID NO: 253992 - DNA, 15 bp, Homo sapiens
tccaaccttgcctgt

SEQ ID NO: 253993 - DNA, 15 bp, Homo sapiens
gtccaaccttgcctg

SEQ ID NO: 253994 - DNA, 15 bp, Homo sapiens
agtccaaccttgcct

SEQ ID NO: 253995 - DNA, 15 bp, Homo sapiens
gagtccaaccttgcc

SEQ ID NO: 253996 - DNA, 15 bp, Homo sapiens
ggagtccaaccttgc

SEQ ID NO: 253997 - DNA, 15 bp, Homo sapiens
tggagtccaaccttg

SEQ ID NO: 253998 - DNA, 15 bp, Homo sapiens
gtggagtccaacctt

SEQ ID NO: 253999 - DNA, 15 bp, Homo sapiens
ggtggagtccaacct

SEQ ID NO: 254000 - DNA, 15 bp, Homo sapiens
aggtggagtccaacc

SEQ ID NO: 254001 - DNA, 15 bp, Homo sapiens
aaggtggagtccaac

SEQ ID NO: 254002 - DNA, 15 bp, Homo sapiens
caaggtggagtccaa

SEQ ID NO: 254003 - DNA, 15 bp, Homo sapiens
ccaaggtggagtcca

SEQ ID NO: 254004 - DNA, 15 bp, Homo sapiens
cccaaggtggagtcc

SEQ ID NO: 254005 - DNA, 15 bp, Homo sapiens
acccaaggtggagtc

SEQ ID NO: 254006 - DNA, 15 bp, Homo sapiens
cacccaaggtggagt

SEQ ID NO: 254007 - DNA, 15 bp, Homo sapiens
tcacccaaggtggag

SEQ ID NO: 254008 - DNA, 15 bp, Homo sapiens
ctcacccaaggtgga

SEQ ID NO: 254009 - DNA, 15 bp, Homo sapiens
gctcacccaaggtgg

SEQ ID NO: 254010 - DNA, 15 bp, Homo sapiens
ggctcacccaaggtg

SEQ ID NO: 254011 - DNA, 15 bp, Homo sapiens
tggctcacccaaggt

SEQ ID NO: 254012 - DNA, 15 bp, Homo sapiens
ttggctcacccaagg

SEQ ID NO: 254013 - DNA, 15 bp, Homo sapiens
tttggctcacccaag

SEQ ID NO: 254014 - DNA, 15 bp, Homo sapiens
gtttggctcacccaa

SEQ ID NO: 254015 - DNA, 15 bp, Homo sapiens
agtttggctcaccca

SEQ ID NO: 254016 - DNA, 15 bp, Homo sapiens
cagtttggctcaccc

SEQ ID NO: 254017 - DNA, 15 bp, Homo sapiens
gcagtttggctcacc

SEQ ID NO: 254018 - DNA, 15 bp, Homo sapiens
tgcagtttggctcac

SEQ ID NO: 254019 - DNA, 15 bp, Homo sapiens
ctgcagtttggctca

SEQ ID NO: 254020 - DNA, 15 bp, Homo sapiens
actgcagtttggctc

SEQ ID NO: 254021 - DNA, 15 bp, Homo sapiens
cactgcagtttggct

SEQ ID NO: 254022 - DNA, 15 bp, Homo sapiens
acactgcagtttggc

SEQ ID NO: 254023 - DNA, 15 bp, Homo sapiens
gacactgcagtttgg

SEQ ID NO: 254024 - DNA, 15 bp, Homo sapiens
tgacactgcagtttg

SEQ ID NO: 254025 - DNA, 15 bp, Homo sapiens
ctgacactgcagttt

SEQ ID NO: 254026 - DNA, 15 bp, Homo sapiens
gctgacactgcagtt

SEQ ID NO: 254027 - DNA, 15 bp, Homo sapiens
ggctgacactgcagt

SEQ ID NO: 254028 - DNA, 15 bp, Homo sapiens
tggctgacactgcag

SEQ ID NO: 254029 - DNA, 15 bp, Homo sapiens
gtggctgacactgca

SEQ ID NO: 254030 - DNA, 15 bp, Homo sapiens
ggtggctgacactgc

SEQ ID NO: 254031 - DNA, 15 bp, Homo sapiens
aggtggctgacactg

SEQ ID NO: 254032 - DNA, 15 bp, Homo sapiens
aaggtggctgacact

SEQ ID NO: 254033 - DNA, 15 bp, Homo sapiens
gaaggtggctgacac

SEQ ID NO: 254034 - DNA, 15 bp, Homo sapiens
ggaaggtggctgaca

SEQ ID NO: 254035 - DNA, 15 bp, Homo sapiens
tggaaggtggctgac

SEQ ID NO: 254036 - DNA, 15 bp, Homo sapiens
ttggaaggtggctga

SEQ ID NO: 254037 - DNA, 15 bp, Homo sapiens
gttggaaggtggctg

SEQ ID NO: 254038 - DNA, 15 bp, Homo sapiens
tgttggaaggtggct

SEQ ID NO: 254039 - DNA, 15 bp, Homo sapiens
ttgttggaaggtggc

SEQ ID NO: 254040 - DNA, 15 bp, Homo sapiens
tttgttggaaggtgg

SEQ ID NO: 254041 - DNA, 15 bp, Homo sapiens
gtttgttggaaggtg

SEQ ID NO: 254042 - DNA, 15 bp, Homo sapiens
ggtttgttggaaggt

SEQ ID NO: 254043 - DNA, 15 bp, Homo sapiens
tggtttgttggaagg

SEQ ID NO: 254044 - DNA, 15 bp, Homo sapiens
ctggtttgttggaag

SEQ ID NO: 254045 - DNA, 15 bp, Homo sapiens
gctggtttgttggaa

SEQ ID NO: 254046 - DNA, 15 bp, Homo sapiens
ggctggtttgttgga

SEQ ID NO: 254047 - DNA, 15 bp, Homo sapiens
aggctggtttgttgg

SEQ ID NO: 254048 - DNA, 15 bp, Homo sapiens
taggctggtttgttg

SEQ ID NO: 254049 - DNA, 15 bp, Homo sapiens
ttaggctggtttgtt

SEQ ID NO: 254050 - DNA, 15 bp, Homo sapiens
cttaggctggtttgt

SEQ ID NO: 254051 - DNA, 15 bp, Homo sapiens
gcttaggctggtttg

SEQ ID NO: 254052 - DNA, 15 bp, Homo sapiens
ggcttaggctggttt

SEQ ID NO: 254053 - DNA, 15 bp, Homo sapiens
gggcttaggctggtt

SEQ ID NO: 254054 - DNA, 15 bp, Homo sapiens
tgggcttaggctggt

SEQ ID NO: 254055 - DNA, 15 bp, Homo sapiens
ttgggcttaggctgg

SEQ ID NO: 254056 - DNA, 15 bp, Homo sapiens
tttgggcttaggctg

SEQ ID NO: 254057 - DNA, 15 bp, Homo sapiens
gtttgggcttaggct

SEQ ID NO: 254058 - DNA, 15 bp, Homo sapiens
ggtttgggcttaggc

SEQ ID NO: 254059 - DNA, 15 bp, Homo sapiens
gggtttgggcttagg

SEQ ID NO: 254060 - DNA, 15 bp, Homo sapiens
tgggtttgggcttag

SEQ ID NO: 254061 - DNA, 15 bp, Homo sapiens
gtgggtttgggctta

SEQ ID NO: 254062 - DNA, 15 bp, Homo sapiens
ggtgggtttgggctt

SEQ ID NO: 254063 - DNA, 15 bp, Homo sapiens
tggtgggtttgggct

SEQ ID NO: 254064 - DNA, 15 bp, Homo sapiens
ctggtgggtttgggc

SEQ ID NO: 254065 - DNA, 15 bp, Homo sapiens
actggtgggtttggg

SEQ ID NO: 254066 - DNA, 15 bp, Homo sapiens
tactggtgggtttgg

SEQ ID NO: 254067 - DNA, 15 bp, Homo sapiens
ttactggtgggtttg

SEQ ID NO: 254068 - DNA, 15 bp, Homo sapiens
gttactggtgggttt

SEQ ID NO: 254069 - DNA, 15 bp, Homo sapiens
ggttactggtgggtt

SEQ ID NO: 254070 - DNA, 15 bp, Homo sapiens
gggttactggtgggt

SEQ ID NO: 254071 - DNA, 15 bp, Homo sapiens
agggttactggtggg

SEQ ID NO: 254072 - DNA, 15 bp, Homo sapiens
gagggttactggtgg

SEQ ID NO: 254073 - DNA, 15 bp, Homo sapiens
ggagggttactggtg

SEQ ID NO: 254074 - DNA, 15 bp, Homo sapiens
gggagggttactggt

SEQ ID NO: 254075 - DNA, 15 bp, Homo sapiens
ggggagggttactgg

SEQ ID NO: 254076 - DNA, 15 bp, Homo sapiens
aggggagggttactg

SEQ ID NO: 254077 - DNA, 15 bp, Homo sapiens
taggggagggttact

SEQ ID NO: 254078 - DNA, 15 bp, Homo sapiens
ctaggggagggttac

SEQ ID NO: 254079 - DNA, 15 bp, Homo sapiens
actaggggagggtta

SEQ ID NO: 254080 - DNA, 15 bp, Homo sapiens
cactaggggagggtt

SEQ ID NO: 254081 - DNA, 15 bp, Homo sapiens
ccactaggggagggt

SEQ ID NO: 254082 - DNA, 15 bp, Homo sapiens
tccactaggggaggg

SEQ ID NO: 254083 - DNA, 15 bp, Homo sapiens
ctccactaggggagg

SEQ ID NO: 254084 - DNA, 15 bp, Homo sapiens
cctccactaggggag

SEQ ID NO: 254085 - DNA, 15 bp, Homo sapiens
ccctccactagggga

SEQ ID NO: 254086 - DNA, 15 bp, Homo sapiens
tccctccactagggg

SEQ ID NO: 254087 - DNA, 15 bp, Homo sapiens
ttccctccactaggg

SEQ ID NO: 254088 - DNA, 15 bp, Homo sapiens
tttccctccactagg

SEQ ID NO: 254089 - DNA, 15 bp, Homo sapiens
gtttccctccactag

SEQ ID NO: 254090 - DNA, 15 bp, Homo sapiens
tgtttccctccacta

SEQ ID NO: 254091 - DNA, 15 bp, Homo sapiens
atgtttccctccact

SEQ ID NO: 254092 - DNA, 15 bp, Homo sapiens
aatgtttccctccac

SEQ ID NO: 254093 - DNA, 15 bp, Homo sapiens
aaatgtttccctcca

SEQ ID NO: 254094 - DNA, 15 bp, Homo sapiens
taaatgtttccctcc

SEQ ID NO: 254095 - DNA, 15 bp, Homo sapiens
ctaaatgtttccctc

SEQ ID NO: 254096 - DNA, 15 bp, Homo sapiens
actaaatgtttccct

SEQ ID NO: 254097 - DNA, 15 bp, Homo sapiens
aactaaatgtttccc

SEQ ID NO: 254098 - DNA, 15 bp, Homo sapiens
gaactaaatgtttcc

SEQ ID NO: 254099 - DNA, 15 bp, Homo sapiens
agaactaaatgtttc

SEQ ID NO: 254100 - DNA, 15 bp, Homo sapiens
gagaactaaatgttt

SEQ ID NO: 254101 - DNA, 15 bp, Homo sapiens
agagaactaaatgtt

SEQ ID NO: 254102 - DNA, 15 bp, Homo sapiens
aagagaactaaatgt

SEQ ID NO: 254103 - DNA, 15 bp, Homo sapiens
caagagaactaaatg

SEQ ID NO: 254104 - DNA, 15 bp, Homo sapiens
ccaagagaactaaat

SEQ ID NO: 254105 - DNA, 15 bp, Homo sapiens
cccaagagaactaaa

SEQ ID NO: 254106 - DNA, 15 bp, Homo sapiens
tcccaagagaactaa

SEQ ID NO: 254107 - DNA, 15 bp, Homo sapiens
ctcccaagagaacta

SEQ ID NO: 254108 - DNA, 15 bp, Homo sapiens
actcccaagagaact

SEQ ID NO: 254109 - DNA, 15 bp, Homo sapiens
aactcccaagagaac

SEQ ID NO: 254110 - DNA, 15 bp, Homo sapiens
caactcccaagagaa

SEQ ID NO: 254111 - DNA, 15 bp, Homo sapiens
gcaactcccaagaga

SEQ ID NO: 254112 - DNA, 15 bp, Homo sapiens
tgcaactcccaagag

SEQ ID NO: 254113 - DNA, 15 bp, Homo sapiens
ctgcaactcccaaga

SEQ ID NO: 254114 - DNA, 15 bp, Homo sapiens
cctgcaactcccaag

SEQ ID NO: 254115 - DNA, 15 bp, Homo sapiens
gcctgcaactcccaa

SEQ ID NO: 254116 - DNA, 15 bp, Homo sapiens
tgcctgcaactccca

SEQ ID NO: 254117 - DNA, 15 bp, Homo sapiens
ctgcctgcaactccc

SEQ ID NO: 254118 - DNA, 15 bp, Homo sapiens
cctgcctgcaactcc

SEQ ID NO: 254119 - DNA, 15 bp, Homo sapiens
acctgcctgcaactc

SEQ ID NO: 254120 - DNA, 15 bp, Homo sapiens
gacctgcctgcaact

SEQ ID NO: 254121 - DNA, 15 bp, Homo sapiens
agacctgcctgcaac

SEQ ID NO: 254122 - DNA, 15 bp, Homo sapiens
aagacctgcctgcaa

SEQ ID NO: 254123 - DNA, 15 bp, Homo sapiens
aaagacctgcctgca

SEQ ID NO: 254124 - DNA, 15 bp, Homo sapiens
caaagacctgcctgc

SEQ ID NO: 254125 - DNA, 15 bp, Homo sapiens
tcaaagacctgcctg

SEQ ID NO: 254126 - DNA, 15 bp, Homo sapiens
gtcaaagacctgcct

SEQ ID NO: 254127 - DNA, 15 bp, Homo sapiens
agtcaaagacctgcc

SEQ ID NO: 254128 - DNA, 15 bp, Homo sapiens
aagtcaaagacctgc

SEQ ID NO: 254129 - DNA, 15 bp, Homo sapiens
caagtcaaagacctg

SEQ ID NO: 254130 - DNA, 15 bp, Homo sapiens
tcaagtcaaagacct

SEQ ID NO: 254131 - DNA, 15 bp, Homo sapiens
ctcaagtcaaagacc

SEQ ID NO: 254132 - DNA, 15 bp, Homo sapiens
cctcaagtcaaagac

SEQ ID NO: 254133 - DNA, 15 bp, Homo sapiens
gcctcaagtcaaaga

SEQ ID NO: 254134 - DNA, 15 bp, Homo sapiens
tgcctcaagtcaaag

SEQ ID NO: 254135 - DNA, 15 bp, Homo sapiens
gtgcctcaagtcaaa

SEQ ID NO: 254136 - DNA, 15 bp, Homo sapiens
ggtgcctcaagtcaa

SEQ ID NO: 254137 - DNA, 15 bp, Homo sapiens
tggtgcctcaagtca

SEQ ID NO: 254138 - DNA, 15 bp, Homo sapiens
atggtgcctcaagtc

SEQ ID NO: 254139 - DNA, 15 bp, Homo sapiens
aatggtgcctcaagt

SEQ ID NO: 254140 - DNA, 15 bp, Homo sapiens
gaatggtgcctcaag

SEQ ID NO: 254141 - DNA, 15 bp, Homo sapiens
agaatggtgcctcaa

SEQ ID NO: 254142 - DNA, 15 bp, Homo sapiens
cagaatggtgcctca

SEQ ID NO: 254143 - DNA, 15 bp, Homo sapiens
tcagaatggtgcctc

SEQ ID NO: 254144 - DNA, 15 bp, Homo sapiens
ctcagaatggtgcct

SEQ ID NO: 254145 - DNA, 15 bp, Homo sapiens
actcagaatggtgcc

SEQ ID NO: 254146 - DNA, 15 bp, Homo sapiens
gactcagaatggtgc

SEQ ID NO: 254147 - DNA, 15 bp, Homo sapiens
tgactcagaatggtg

SEQ ID NO: 254148 - DNA, 15 bp, Homo sapiens
ttgactcagaatggt

SEQ ID NO: 254149 - DNA, 15 bp, Homo sapiens
cttgactcagaatgg

SEQ ID NO: 254150 - DNA, 15 bp, Homo sapiens
gcttgactcagaatg

SEQ ID NO: 254151 - DNA, 15 bp, Homo sapiens
agcttgactcagaat

SEQ ID NO: 254152 - DNA, 15 bp, Homo sapiens
cagcttgactcagaa

SEQ ID NO: 254153 - DNA, 15 bp, Homo sapiens
ccagcttgactcaga

SEQ ID NO: 254154 - DNA, 15 bp, Homo sapiens
cccagcttgactcag

SEQ ID NO: 254155 - DNA, 15 bp, Homo sapiens
acccagcttgactca

SEQ ID NO: 254156 - DNA, 15 bp, Homo sapiens
cacccagcttgactc

SEQ ID NO: 254157 - DNA, 15 bp, Homo sapiens
ccacccagcttgact

SEQ ID NO: 254158 - DNA, 15 bp, Homo sapiens
accacccagcttgac

SEQ ID NO: 254159 - DNA, 15 bp, Homo sapiens
caccacccagcttga

SEQ ID NO: 254160 - DNA, 15 bp, Homo sapiens
ccaccacccagcttg

SEQ ID NO: 254161 - DNA, 15 bp, Homo sapiens
cccaccacccagctt

SEQ ID NO: 254162 - DNA, 15 bp, Homo sapiens
ccccaccacccagct

SEQ ID NO: 254163 - DNA, 15 bp, Homo sapiens
tccccaccacccagc

SEQ ID NO: 254164 - DNA, 15 bp, Homo sapiens
ctccccaccacccag

SEQ ID NO: 254165 - DNA, 15 bp, Homo sapiens
cctccccaccaccca

SEQ ID NO: 254166 - DNA, 15 bp, Homo sapiens
acctccccaccaccc

SEQ ID NO: 254167 - DNA, 15 bp, Homo sapiens
cacctccccaccacc

SEQ ID NO: 254168 - DNA, 15 bp, Homo sapiens
ccacctccccaccac

SEQ ID NO: 254169 - DNA, 15 bp, Homo sapiens
cccacctccccacca

SEQ ID NO: 254170 - DNA, 15 bp, Homo sapiens
ccccacctccccacc

SEQ ID NO: 254171 - DNA, 15 bp, Homo sapiens
accccacctccccac

SEQ ID NO: 254172 - DNA, 15 bp, Homo sapiens
caccccacctcccca

SEQ ID NO: 254173 - DNA, 15 bp, Homo sapiens
tcaccccacctcccc

SEQ ID NO: 254174 - DNA, 15 bp, Homo sapiens
ctcaccccacctccc

SEQ ID NO: 254175 - DNA, 15 bp, Homo sapiens
cctcaccccacctcc

SEQ ID NO: 254176 - DNA, 15 bp, Homo sapiens
gcctcaccccacctc

SEQ ID NO: 254177 - DNA, 15 bp, Homo sapiens
tgcctcaccccacct

SEQ ID NO: 254178 - DNA, 15 bp, Homo sapiens
ctgcctcaccccacc

SEQ ID NO: 254179 - DNA, 15 bp, Homo sapiens
cctgcctcaccccac

SEQ ID NO: 254180 - DNA, 15 bp, Homo sapiens
tcctgcctcacccca

SEQ ID NO: 254181 - DNA, 15 bp, Homo sapiens
ctcctgcctcacccc

SEQ ID NO: 254182 - DNA, 15 bp, Homo sapiens
actcctgcctcaccc

SEQ ID NO: 254183 - DNA, 15 bp, Homo sapiens
cactcctgcctcacc

SEQ ID NO: 254184 - DNA, 15 bp, Homo sapiens
gcactcctgcctcac

SEQ ID NO: 254185 - DNA, 15 bp, Homo sapiens
ggcactcctgcctca

SEQ ID NO: 254186 - DNA, 15 bp, Homo sapiens
aggcactcctgcctc

SEQ ID NO: 254187 - DNA, 15 bp, Homo sapiens
taggcactcctgcct

SEQ ID NO: 254188 - DNA, 15 bp, Homo sapiens
ctaggcactcctgcc

SEQ ID NO: 254189 - DNA, 15 bp, Homo sapiens
gctaggcactcctgc

SEQ ID NO: 254190 - DNA, 15 bp, Homo sapiens
agctaggcactcctg

SEQ ID NO: 254191 - DNA, 15 bp, Homo sapiens
gagctaggcactcct

SEQ ID NO: 254192 - DNA, 15 bp, Homo sapiens
agagctaggcactcc

SEQ ID NO: 254193 - DNA, 15 bp, Homo sapiens
cagagctaggcactc

SEQ ID NO: 254194 - DNA, 15 bp, Homo sapiens
gcagagctaggcact

SEQ ID NO: 254195 - DNA, 15 bp, Homo sapiens
agcagagctaggcac

SEQ ID NO: 254196 - DNA, 15 bp, Homo sapiens
aagcagagctaggca

SEQ ID NO: 254197 - DNA, 15 bp, Homo sapiens
gaagcagagctaggc

SEQ ID NO: 254198 - DNA, 15 bp, Homo sapiens
ggaagcagagctagg

SEQ ID NO: 254199 - DNA, 15 bp, Homo sapiens
gggaagcagagctag

SEQ ID NO: 254200 - DNA, 15 bp, Homo sapiens
ggggaagcagagcta

SEQ ID NO: 254201 - DNA, 15 bp, Homo sapiens
tggggaagcagagct

SEQ ID NO: 254202 - DNA, 15 bp, Homo sapiens
atggggaagcagagc

SEQ ID NO: 254203 - DNA, 15 bp, Homo sapiens
catggggaagcagag

SEQ ID NO: 254204 - DNA, 15 bp, Homo sapiens
ccatggggaagcaga

SEQ ID NO: 254205 - DNA, 15 bp, Homo sapiens
accatggggaagcag

SEQ ID NO: 254206 - DNA, 15 bp, Homo sapiens
caccatggggaagca

SEQ ID NO: 254207 - DNA, 15 bp, Homo sapiens
acaccatggggaagc

SEQ ID NO: 254208 - DNA, 15 bp, Homo sapiens
aacaccatggggaag

SEQ ID NO: 254209 - DNA, 15 bp, Homo sapiens
caacaccatggggaa

SEQ ID NO: 254210 - DNA, 15 bp, Homo sapiens
gcaacaccatgggga

SEQ ID NO: 254211 - DNA, 15 bp, Homo sapiens
agcaacaccatgggg

SEQ ID NO: 254212 - DNA, 15 bp, Homo sapiens
cagcaacaccatggg

SEQ ID NO: 254213 - DNA, 15 bp, Homo sapiens
ccagcaacaccatgg

SEQ ID NO: 254214 - DNA, 15 bp, Homo sapiens
cccagcaacaccatg

SEQ ID NO: 254215 - DNA, 15 bp, Homo sapiens
ccccagcaacaccat

SEQ ID NO: 254216 - DNA, 15 bp, Homo sapiens
cccccagcaacacca

SEQ ID NO: 254217 - DNA, 15 bp, Homo sapiens
acccccagcaacacc

SEQ ID NO: 254218 - DNA, 15 bp, Homo sapiens
tacccccagcaacac

SEQ ID NO: 254219 - DNA, 15 bp, Homo sapiens
ctacccccagcaaca

SEQ ID NO: 254220 - DNA, 15 bp, Homo sapiens
tctacccccagcaac

SEQ ID NO: 254221 - DNA, 15 bp, Homo sapiens
atctacccccagcaa

SEQ ID NO: 254222 - DNA, 15 bp, Homo sapiens
tatctacccccagca

SEQ ID NO: 254223 - DNA, 15 bp, Homo sapiens
gtatctacccccagc

SEQ ID NO: 254224 - DNA, 15 bp, Homo sapiens
tgtatctacccccag

SEQ ID NO: 254225 - DNA, 15 bp, Homo sapiens
ttgtatctaccccca

SEQ ID NO: 254226 - DNA, 15 bp, Homo sapiens
tttgtatctaccccc

SEQ ID NO: 254227 - DNA, 15 bp, Homo sapiens
gtttgtatctacccc

SEQ ID NO: 254228 - DNA, 15 bp, Homo sapiens
tgtttgtatctaccc

SEQ ID NO: 254229 - DNA, 15 bp, Homo sapiens
gtgtttgtatctacc

SEQ ID NO: 254230 - DNA, 15 bp, Homo sapiens
tgtgtttgtatctac

SEQ ID NO: 254231 - DNA, 15 bp, Homo sapiens
ctgtgtttgtatcta

SEQ ID NO: 254232 - DNA, 15 bp, Homo sapiens
actgtgtttgtatct

SEQ ID NO: 254233 - DNA, 15 bp, Homo sapiens
gactgtgtttgtatc

SEQ ID NO: 254234 - DNA, 15 bp, Homo sapiens
tgactgtgtttgtat

SEQ ID NO: 254235 - DNA, 15 bp, Homo sapiens
gtgactgtgtttgta

SEQ ID NO: 254236 - DNA, 15 bp, Homo sapiens
tgtgactgtgtttgt

SEQ ID NO: 254237 - DNA, 15 bp, Homo sapiens
atgtgactgtgtttg

SEQ ID NO: 254238 - DNA, 15 bp, Homo sapiens
gatgtgactgtgttt

SEQ ID NO: 254239 - DNA, 15 bp, Homo sapiens
agatgtgactgtgtt

SEQ ID NO: 254240 - DNA, 15 bp, Homo sapiens
gcagatgtgactgtg

SEQ ID NO: 254241 - DNA, 15 bp, Homo sapiens
agcagatgtgactgt

SEQ ID NO: 254242 - DNA, 15 bp, Homo sapiens
tagcagatgtgactg

SEQ ID NO: 254243 - DNA, 15 bp, Homo sapiens
atagcagatgtgact

SEQ ID NO: 254244 - DNA, 15 bp, Homo sapiens
catagcagatgtgac

SEQ ID NO: 254245 - DNA, 15 bp, Homo sapiens
acatagcagatgtga

SEQ ID NO: 254246 - DNA, 15 bp, Homo sapiens
gacatagcagatgtg

SEQ ID NO: 254247 - DNA, 15 bp, Homo sapiens
agacatagcagatgt

SEQ ID NO: 254248 - DNA, 15 bp, Homo sapiens
cagacatagcagatg

SEQ ID NO: 254249 - DNA, 15 bp, Homo sapiens
ccagacatagcagat

SEQ ID NO: 254250 - DNA, 15 bp, Homo sapiens
tccagacatagcaga

SEQ ID NO: 254251 - DNA, 15 bp, Homo sapiens
ttccagacatagcag

SEQ ID NO: 254252 - DNA, 15 bp, Homo sapiens
tttccagacatagca

SEQ ID NO: 254253 - DNA, 15 bp, Homo sapiens
ttttccagacatagc

SEQ ID NO: 254254 - DNA, 15 bp, Homo sapiens
gttttccagacatag

SEQ ID NO: 254255 - DNA, 15 bp, Homo sapiens
ggttttccagacata

SEQ ID NO: 254256 - DNA, 15 bp, Homo sapiens
tggttttccagacat

SEQ ID NO: 254257 - DNA, 15 bp, Homo sapiens
ttggttttccagaca

SEQ ID NO: 254258 - DNA, 15 bp, Homo sapiens
cttggttttccagac

SEQ ID NO: 254259 - DNA, 15 bp, Homo sapiens
tcttggttttccaga

SEQ ID NO: 254260 - DNA, 15 bp, Homo sapiens
gtcttggttttccag

SEQ ID NO: 254261 - DNA, 15 bp, Homo sapiens
agtcttggttttcca

SEQ ID NO: 254262 - DNA, 15 bp, Homo sapiens
cagtcttggttttcc

SEQ ID NO: 254263 - DNA, 15 bp, Homo sapiens
ccagtcttggttttc

SEQ ID NO: 254264 - DNA, 15 bp, Homo sapiens
tccagtcttggtttt

SEQ ID NO: 254265 - DNA, 15 bp, Homo sapiens
ctccagtcttggttt

SEQ ID NO: 254266 - DNA, 15 bp, Homo sapiens
actccagtcttggtt

SEQ ID NO: 254267 - DNA, 15 bp, Homo sapiens
gactccagtcttggt

SEQ ID NO: 254268 - DNA, 15 bp, Homo sapiens
agactccagtcttgg

SEQ ID NO: 254269 - DNA, 15 bp, Homo sapiens
gagactccagtcttg

SEQ ID NO: 254270 - DNA, 15 bp, Homo sapiens
agagactccagtctt

SEQ ID NO: 254271 - DNA, 15 bp, Homo sapiens
gagagactccagtct

SEQ ID NO: 254272 - DNA, 15 bp, Homo sapiens
tgagagactccagtc

SEQ ID NO: 254273 - DNA, 15 bp, Homo sapiens
ctgagagactccagt

SEQ ID NO: 254274 - DNA, 15 bp, Homo sapiens
gctgagagactccag

SEQ ID NO: 254275 - DNA, 15 bp, Homo sapiens
agctgagagactcca

SEQ ID NO: 254276 - DNA, 15 bp, Homo sapiens
gagctgagagactcc

SEQ ID NO: 254277 - DNA, 15 bp, Homo sapiens
agagctgagagactc

SEQ ID NO: 254278 - DNA, 15 bp, Homo sapiens
gagagctgagagact

SEQ ID NO: 254279 - DNA, 15 bp, Homo sapiens
ggagagctgagagac

SEQ ID NO: 254280 - DNA, 15 bp, Homo sapiens
tggagagctgagaga

SEQ ID NO: 254281 - DNA, 15 bp, Homo sapiens
ctggagagctgagag

SEQ ID NO: 254282 - DNA, 15 bp, Homo sapiens
actggagagctgaga

SEQ ID NO: 254283 - DNA, 15 bp, Homo sapiens
cactggagagctgag

SEQ ID NO: 254284 - DNA, 15 bp, Homo sapiens
gcactggagagctga

SEQ ID NO: 254285 - DNA, 15 bp, Homo sapiens
ggcactggagagctg

SEQ ID NO: 254286 - DNA, 15 bp, Homo sapiens
aggcactggagagct

SEQ ID NO: 254287 - DNA, 15 bp, Homo sapiens
caggcactggagagc

SEQ ID NO: 254288 - DNA, 15 bp, Homo sapiens
gaaagcaggcactgg

SEQ ID NO: 254289 - DNA, 15 bp, Homo sapiens
ggaaagcaggcactg

SEQ ID NO: 254290 - DNA, 15 bp, Homo sapiens
gggaaagcaggcact

SEQ ID NO: 254291 - DNA, 15 bp, Homo sapiens
agggaaagcaggcac

SEQ ID NO: 254292 - DNA, 15 bp, Homo sapiens
cagggaaagcaggca

SEQ ID NO: 254293 - DNA, 15 bp, Homo sapiens
acagggaaagcaggc

SEQ ID NO: 254294 - DNA, 15 bp, Homo sapiens
tacagggaaagcagg

SEQ ID NO: 254295 - DNA, 15 bp, Homo sapiens
ctacagggaaagcag

SEQ ID NO: 254296 - DNA, 15 bp, Homo sapiens
gctacagggaaagca

SEQ ID NO: 254297 - DNA, 15 bp, Homo sapiens
ggctacagggaaagc

SEQ ID NO: 254298 - DNA, 15 bp, Homo sapiens
tggctacagggaaag

SEQ ID NO: 254299 - DNA, 15 bp, Homo sapiens
ttggctacagggaaa

SEQ ID NO: 254300 - DNA, 15 bp, Homo sapiens
attggctacagggaa

SEQ ID NO: 254301 - DNA, 15 bp, Homo sapiens
aattggctacaggga

SEQ ID NO: 254302 - DNA, 15 bp, Homo sapiens
caattggctacaggg

SEQ ID NO: 254303 - DNA, 15 bp, Homo sapiens
gcaattggctacagg

SEQ ID NO: 254304 - DNA, 15 bp, Homo sapiens
tgcaattggctacag

SEQ ID NO: 254305 - DNA, 15 bp, Homo sapiens
ttgcaattggctaca

SEQ ID NO: 254306 - DNA, 15 bp, Homo sapiens
cttgcaattggctac

SEQ ID NO: 254307 - DNA, 15 bp, Homo sapiens
ccttgcaattggcta

SEQ ID NO: 254308 - DNA, 15 bp, Homo sapiens
gccttgcaattggct

SEQ ID NO: 254309 - DNA, 15 bp, Homo sapiens
agccttgcaattggc

SEQ ID NO: 254310 - DNA, 15 bp, Homo sapiens
cagccttgcaattgg

SEQ ID NO: 254311 - DNA, 15 bp, Homo sapiens
tcagccttgcaattg

SEQ ID NO: 254312 - DNA, 15 bp, Homo sapiens
gtcagccttgcaatt

SEQ ID NO: 254313 - DNA, 15 bp, Homo sapiens
tgtcagccttgcaat

SEQ ID NO: 254314 - DNA, 15 bp, Homo sapiens
atgtcagccttgcaa

SEQ ID NO: 254315 - DNA, 15 bp, Homo sapiens
gatgtcagccttgca

SEQ ID NO: 254316 - DNA, 15 bp, Homo sapiens
ggatgtcagccttgc

SEQ ID NO: 254317 - DNA, 15 bp, Homo sapiens
gggatgtcagccttg

SEQ ID NO: 254318 - DNA, 15 bp, Homo sapiens
tgggatgtcagcctt

SEQ ID NO: 254319 - DNA, 15 bp, Homo sapiens
ctgggatgtcagcct

SEQ ID NO: 254320 - DNA, 15 bp, Homo sapiens
cctgggatgtcagcc

SEQ ID NO: 254321 - DNA, 15 bp, Homo sapiens
tcctgggatgtcagc

SEQ ID NO: 254322 - DNA, 15 bp, Homo sapiens
ttcctgggatgtcag

SEQ ID NO: 254323 - DNA, 15 bp, Homo sapiens
tttcctgggatgtca

SEQ ID NO: 254324 - DNA, 15 bp, Homo sapiens
ctttcctgggatgtc

SEQ ID NO: 254325 - DNA, 15 bp, Homo sapiens
cctttcctgggatgt

SEQ ID NO: 254326 - DNA, 15 bp, Homo sapiens
gcctttcctgggatg

SEQ ID NO: 254327 - DNA, 15 bp, Homo sapiens
tgcctttcctgggat

SEQ ID NO: 254328 - DNA, 15 bp, Homo sapiens
ctgcctttcctggga

SEQ ID NO: 254329 - DNA, 15 bp, Homo sapiens
gctgcctttcctggg

SEQ ID NO: 254330 - DNA, 15 bp, Homo sapiens
tgctgcctttcctgg

SEQ ID NO: 254331 - DNA, 15 bp, Homo sapiens
ctgctgcctttcctg

SEQ ID NO: 254332 - DNA, 15 bp, Homo sapiens
tctgctgcctttcct

SEQ ID NO: 254333 - DNA, 15 bp, Homo sapiens
atctgctgcctttcc

SEQ ID NO: 254334 - DNA, 15 bp, Homo sapiens
aatctgctgcctttc

SEQ ID NO: 254335 - DNA, 15 bp, Homo sapiens
taatctgctgccttt

SEQ ID NO: 254336 - DNA, 15 bp, Homo sapiens
ctaatctgctgcctt

SEQ ID NO: 254337 - DNA, 15 bp, Homo sapiens
tctaatctgctgcct

SEQ ID NO: 254338 - DNA, 15 bp, Homo sapiens
atctaatctgctgcc

SEQ ID NO: 254339 - DNA, 15 bp, Homo sapiens
catctaatctgctgc

SEQ ID NO: 254340 - DNA, 15 bp, Homo sapiens
tcatctaatctgctg

SEQ ID NO: 254341 - DNA, 15 bp, Homo sapiens
ctcatctaatctgct

SEQ ID NO: 254342 - DNA, 15 bp, Homo sapiens
gctcatctaatctgc

SEQ ID NO: 254343 - DNA, 15 bp, Homo sapiens
tgctcatctaatctg

SEQ ID NO: 254344 - DNA, 15 bp, Homo sapiens
gtgctcatctaatct

SEQ ID NO: 254345 - DNA, 15 bp, Homo sapiens
tgtgctcatctaatc

SEQ ID NO: 254346 - DNA, 15 bp, Homo sapiens
ctgtgctcatctaat

SEQ ID NO: 254347 - DNA, 15 bp, Homo sapiens
cctgtgctcatctaa

SEQ ID NO: 254348 - DNA, 15 bp, Homo sapiens
tcctgtgctcatcta

SEQ ID NO: 254349 - DNA, 15 bp, Homo sapiens
ctcctgtgctcatct

SEQ ID NO: 254350 - DNA, 15 bp, Homo sapiens
gctcctgtgctcatc

SEQ ID NO: 254351 - DNA, 15 bp, Homo sapiens
tgctcctgtgctcat

SEQ ID NO: 254352 - DNA, 15 bp, Homo sapiens
ctgctcctgtgctca

SEQ ID NO: 254353 - DNA, 15 bp, Homo sapiens
tctgctcctgtgctc

SEQ ID NO: 254354 - DNA, 15 bp, Homo sapiens
ctctgctcctgtgct

SEQ ID NO: 254355 - DNA, 15 bp, Homo sapiens
tctctgctcctgtgc

SEQ ID NO: 254356 - DNA, 15 bp, Homo sapiens
ctctctgctcctgtg

SEQ ID NO: 254357 - DNA, 15 bp, Homo sapiens
cctctctgctcctgt

SEQ ID NO: 254358 - DNA, 15 bp, Homo sapiens
gcctctctgctcctg

SEQ ID NO: 254359 - DNA, 15 bp, Homo sapiens
agcctctctgctcct

SEQ ID NO: 254360 - DNA, 15 bp, Homo sapiens
cagcctctctgctcc

SEQ ID NO: 254361 - DNA, 15 bp, Homo sapiens
ccagcctctctgctc

SEQ ID NO: 254362 - DNA, 15 bp, Homo sapiens
cccagcctctctgct

SEQ ID NO: 254363 - DNA, 15 bp, Homo sapiens
tcccagcctctctgc

SEQ ID NO: 254364 - DNA, 15 bp, Homo sapiens
ttcccagcctctctg

SEQ ID NO: 254365 - DNA, 15 bp, Homo sapiens
cttcccagcctctct

SEQ ID NO: 254366 - DNA, 15 bp, Homo sapiens
ccttcccagcctctc

SEQ ID NO: 254367 - DNA, 15 bp, Homo sapiens
gccttcccagcctct

SEQ ID NO: 254368 - DNA, 15 bp, Homo sapiens
cgccttcccagcctc

SEQ ID NO: 254369 - DNA, 15 bp, Homo sapiens
ccgccttcccagcct

SEQ ID NO: 254370 - DNA, 15 bp, Homo sapiens
accgccttcccagcc

SEQ ID NO: 254371 - DNA, 15 bp, Homo sapiens
caccgccttcccagc

SEQ ID NO: 254372 - DNA, 15 bp, Homo sapiens
ccaccgccttcccag

SEQ ID NO: 254373 - DNA, 15 bp, Homo sapiens
tccaccgccttccca

SEQ ID NO: 254374 - DNA, 15 bp, Homo sapiens
ctccaccgccttccc

SEQ ID NO: 254375 - DNA, 15 bp, Homo sapiens
cctccaccgccttcc

SEQ ID NO: 254376 - DNA, 15 bp, Homo sapiens
tcctccaccgccttc

SEQ ID NO: 254377 - DNA, 15 bp, Homo sapiens
ctcctccaccgcctt

SEQ ID NO: 254378 - DNA, 15 bp, Homo sapiens
cctcctccaccgcct

SEQ ID NO: 254379 - DNA, 15 bp, Homo sapiens
ccctcctccaccgcc

SEQ ID NO: 254380 - DNA, 15 bp, Homo sapiens
tccctcctccaccgc

SEQ ID NO: 254381 - DNA, 15 bp, Homo sapiens
ctccctcctccaccg

SEQ ID NO: 254382 - DNA, 15 bp, Homo sapiens
tctccctcctccacc

SEQ ID NO: 254383 - DNA, 15 bp, Homo sapiens
ttctccctcctccac

SEQ ID NO: 254384 - DNA, 15 bp, Homo sapiens
tttctccctcctcca

SEQ ID NO: 254385 - DNA, 15 bp, Homo sapiens
atttctccctcctcc

SEQ ID NO: 254386 - DNA, 15 bp, Homo sapiens
catttctccctcctc

SEQ ID NO: 254387 - DNA, 15 bp, Homo sapiens
cacatttctccctcc

SEQ ID NO: 254388 - DNA, 15 bp, Homo sapiens
ccacatttctccctc

SEQ ID NO: 254389 - DNA, 15 bp, Homo sapiens
cccacatttctccct

SEQ ID NO: 254390 - DNA, 15 bp, Homo sapiens
acccacatttctccc

SEQ ID NO: 254391 - DNA, 15 bp, Homo sapiens
aacccacatttctcc

SEQ ID NO: 254392 - DNA, 15 bp, Homo sapiens
aaacccacatttctc

SEQ ID NO: 254393 - DNA, 15 bp, Homo sapiens
caaacccacatttct

SEQ ID NO: 254394 - DNA, 15 bp, Homo sapiens
ccaaacccacatttc

SEQ ID NO: 254395 - DNA, 15 bp, Homo sapiens
gccaaacccacattt

SEQ ID NO: 254396 - DNA, 15 bp, Homo sapiens
tgccaaacccacatt

SEQ ID NO: 254397 - DNA, 15 bp, Homo sapiens
ctgccaaacccacat

SEQ ID NO: 254398 - DNA, 15 bp, Homo sapiens
tctgccaaacccaca

SEQ ID NO: 254399 - DNA, 15 bp, Homo sapiens
ttctgccaaacccac

SEQ ID NO: 254400 - DNA, 15 bp, Homo sapiens
attctgccaaaccca

SEQ ID NO: 254401 - DNA, 15 bp, Homo sapiens
aattctgccaaaccc

SEQ ID NO: 254402 - DNA, 15 bp, Homo sapiens
aaattctgccaaacc

SEQ ID NO: 254403 - DNA, 15 bp, Homo sapiens
aaaattctgccaaac

SEQ ID NO: 254404 - DNA, 15 bp, Homo sapiens
gaaaattctgccaaa

SEQ ID NO: 254405 - DNA, 15 bp, Homo sapiens
agaaaattctgccaa

SEQ ID NO: 254406 - DNA, 15 bp, Homo sapiens
tagaaaattctgcca

SEQ ID NO: 254407 - DNA, 15 bp, Homo sapiens
ttagaaaattctgcc

SEQ ID NO: 254408 - DNA, 15 bp, Homo sapiens
tttagaaaattctgc

SEQ ID NO: 254409 - DNA, 15 bp, Homo sapiens
ttttagaaaattctg

SEQ ID NO: 254410 - DNA, 15 bp, Homo sapiens
attttagaaaattct

SEQ ID NO: 254411 - DNA, 15 bp, Homo sapiens
tattttagaaaattc

SEQ ID NO: 254412 - DNA, 15 bp, Homo sapiens
atattttagaaaatt

SEQ ID NO: 254413 - DNA, 15 bp, Homo sapiens
gatattttagaaaat

SEQ ID NO: 254414 - DNA, 15 bp, Homo sapiens
tgatattttagaaaa

SEQ ID NO: 254415 - DNA, 15 bp, Homo sapiens
gtgatattttagaaa

SEQ ID NO: 254416 - DNA, 15 bp, Homo sapiens
agtgatattttagaa

SEQ ID NO: 254417 - DNA, 15 bp, Homo sapiens
aagtgatattttaga

SEQ ID NO: 254418 - DNA, 15 bp, Homo sapiens
aaagtgatattttag

SEQ ID NO: 254419 - DNA, 15 bp, Homo sapiens
taaagtgatatttta

SEQ ID NO: 254420 - DNA, 15 bp, Homo sapiens
ataaagtgatatttt

SEQ ID NO: 254421 - DNA, 15 bp, Homo sapiens
aataaagtgatattt

SEQ ID NO: 254422 - DNA, 15 bp, Homo sapiens
caataaagtgatatt

SEQ ID NO: 254423 - DNA, 15 bp, Homo sapiens
tcaataaagtgatat

SEQ ID NO: 254424 - DNA, 15 bp, Homo sapiens
atcaataaagtgata

SEQ ID NO: 254425 - DNA, 15 bp, Homo sapiens
aatcaataaagtgat

SEQ ID NO: 254426 - DNA, 15 bp, Homo sapiens
aaatcaataaagtga

SEQ ID NO: 254427 - DNA, 15 bp, Homo sapiens
caaatcaataaagtg

SEQ ID NO: 254428 - DNA, 15 bp, Homo sapiens
ccaaatcaataaagt

SEQ ID NO: 254429 - DNA, 15 bp, Homo sapiens
tccaaatcaataaag

SEQ ID NO: 254430 - DNA, 15 bp, Homo sapiens
ttccaaatcaataaa

SEQ ID NO: 254431 - DNA, 15 bp, Homo sapiens
cttccaaatcaataa

SEQ ID NO: 254432 - DNA, 15 bp, Homo sapiens
tcttccaaatcaata

SEQ ID NO: 254433 - DNA, 15 bp, Homo sapiens
ctcttccaaatcaat

SEQ ID NO: 254434 - DNA, 15 bp, Homo sapiens
tctcttccaaatcaa

SEQ ID NO: 254435 - DNA, 15 bp, Homo sapiens
gtctcttccaaatca

SEQ ID NO: 254436 - DNA, 15 bp, Homo sapiens
tgtctcttccaaatc

SEQ ID NO: 254437 - DNA, 15 bp, Homo sapiens
gtgtctcttccaaat

SEQ ID NO: 254438 - DNA, 15 bp, Homo sapiens
tgtgtctcttccaaa

SEQ ID NO: 254439 - DNA, 15 bp, Homo sapiens
ttgtgtctcttccaa

SEQ ID NO: 254440 - DNA, 15 bp, Homo sapiens
cttgtgtctcttcca

SEQ ID NO: 254441 - DNA, 15 bp, Homo sapiens
tcttgtgtctcttcc

SEQ ID NO: 254442 - DNA, 15 bp, Homo sapiens
ctcttgtgtctcttc

SEQ ID NO: 254443 - DNA, 15 bp, Homo sapiens
tctcttgtgtctctt

SEQ ID NO: 254444 - DNA, 15 bp, Homo sapiens
ctctcttgtgtctct

SEQ ID NO: 254445 - DNA, 15 bp, Homo sapiens
cctctcttgtgtctc

SEQ ID NO: 254446 - DNA, 15 bp, Homo sapiens
tcctctcttgtgtct

SEQ ID NO: 254447 - DNA, 15 bp, Homo sapiens
ttcctctcttgtgtc

SEQ ID NO: 254448 - DNA, 15 bp, Homo sapiens
tttcctctcttgtgt

SEQ ID NO: 254449 - DNA, 15 bp, Homo sapiens
atttcctctcttgtg

SEQ ID NO: 254450 - DNA, 15 bp, Homo sapiens
tatttcctctcttgt

SEQ ID NO: 254451 - DNA, 15 bp, Homo sapiens
atatttcctctcttg

SEQ ID NO: 254452 - DNA, 15 bp, Homo sapiens
tatatttcctctctt

SEQ ID NO: 254453 - DNA, 15 bp, Homo sapiens
ttatatttcctctct

SEQ ID NO: 254454 - DNA, 15 bp, Homo sapiens
cttatatttcctctc

SEQ ID NO: 254455 - DNA, 15 bp, Homo sapiens
tcttatatttcctct

SEQ ID NO: 254456 - DNA, 15 bp, Homo sapiens
ctcttatatttcctc

SEQ ID NO: 254457 - DNA, 15 bp, Homo sapiens
tctcttatatttcct

SEQ ID NO: 254458 - DNA, 15 bp, Homo sapiens
gtctcttatatttcc

SEQ ID NO: 254459 - DNA, 15 bp, Homo sapiens
tgtctcttatatttc

SEQ ID NO: 254460 - DNA, 15 bp, Homo sapiens
ttgtctcttatattt

SEQ ID NO: 254461 - DNA, 15 bp, Homo sapiens
cttgtctcttatatt

SEQ ID NO: 254462 - DNA, 15 bp, Homo sapiens
acttgtctcttatat

SEQ ID NO: 254463 - DNA, 15 bp, Homo sapiens
cacttgtctcttata

SEQ ID NO: 254464 - DNA, 15 bp, Homo sapiens
tcacttgtctcttat

SEQ ID NO: 254465 - DNA, 15 bp, Homo sapiens
atcacttgtctctta

SEQ ID NO: 254466 - DNA, 15 bp, Homo sapiens
tatcacttgtctctt

SEQ ID NO: 254467 - DNA, 15 bp, Homo sapiens
ttatcacttgtctct

SEQ ID NO: 254468 - DNA, 15 bp, Homo sapiens
cttatcacttgtctc

SEQ ID NO: 254469 - DNA, 15 bp, Homo sapiens
tcttatcacttgtct

SEQ ID NO: 254470 - DNA, 15 bp, Homo sapiens
ctcttatcacttgtc

SEQ ID NO: 254471 - DNA, 15 bp, Homo sapiens
cctcttatcacttgt

SEQ ID NO: 254472 - DNA, 15 bp, Homo sapiens
gcctcttatcacttg

SEQ ID NO: 254473 - DNA, 15 bp, Homo sapiens
agcctcttatcactt

SEQ ID NO: 254474 - DNA, 15 bp, Homo sapiens
gagcctcttatcact

SEQ ID NO: 254475 - DNA, 15 bp, Homo sapiens
tgagcctcttatcac

SEQ ID NO: 254476 - DNA, 15 bp, Homo sapiens
ctgagcctcttatca

SEQ ID NO: 254477 - DNA, 15 bp, Homo sapiens
gctgagcctcttatc

SEQ ID NO: 254478 - DNA, 15 bp, Homo sapiens
agctgagcctcttat

SEQ ID NO: 254479 - DNA, 15 bp, Homo sapiens
cagctgagcctctta

SEQ ID NO: 254480 - DNA, 15 bp, Homo sapiens
tcagctgagcctctt

SEQ ID NO: 254481 - DNA, 15 bp, Homo sapiens
ctcagctgagcctct

SEQ ID NO: 254482 - DNA, 15 bp, Homo sapiens
tctcagctgagcctc

SEQ ID NO: 254483 - DNA, 15 bp, Homo sapiens
atctcagctgagcct

SEQ ID NO: 254484 - DNA, 15 bp, Homo sapiens
catctcagctgagcc

SEQ ID NO: 254485 - DNA, 15 bp, Homo sapiens
ccatctcagctgagc

SEQ ID NO: 254486 - DNA, 15 bp, Homo sapiens
cccatctcagctgag

SEQ ID NO: 254487 - DNA, 15 bp, Homo sapiens
gcccatctcagctga

SEQ ID NO: 254488 - DNA, 15 bp, Homo sapiens
tgcccatctcagctg

SEQ ID NO: 254489 - DNA, 15 bp, Homo sapiens
atgcccatctcagct

SEQ ID NO: 254490 - DNA, 15 bp, Homo sapiens
catgcccatctcagc

SEQ ID NO: 254491 - DNA, 15 bp, Homo sapiens
ccatgcccatctcag

SEQ ID NO: 254492 - DNA, 15 bp, Homo sapiens
tccatgcccatctca

SEQ ID NO: 254493 - DNA, 15 bp, Homo sapiens
ttccatgcccatctc

SEQ ID NO: 254494 - DNA, 15 bp, Homo sapiens
cttccatgcccatct

SEQ ID NO: 254495 - DNA, 15 bp, Homo sapiens
tcttccatgcccatc

SEQ ID NO: 254496 - DNA, 15 bp, Homo sapiens
ctcttccatgcccat

SEQ ID NO: 254497 - DNA, 15 bp, Homo sapiens
gctcttccatgccca

SEQ ID NO: 254498 - DNA, 15 bp, Homo sapiens
ggctcttccatgccc

SEQ ID NO: 254499 - DNA, 15 bp, Homo sapiens
aggctcttccatgcc

SEQ ID NO: 254500 - DNA, 15 bp, Homo sapiens
caggctcttccatgc

SEQ ID NO: 254501 - DNA, 15 bp, Homo sapiens
gcaggctcttccatg

SEQ ID NO: 254502 - DNA, 15 bp, Homo sapiens
ggcaggctcttccat

SEQ ID NO: 254503 - DNA, 15 bp, Homo sapiens
aggcaggctcttcca

SEQ ID NO: 254504 - DNA, 15 bp, Homo sapiens
aaggcaggctcttcc

SEQ ID NO: 254505 - DNA, 15 bp, Homo sapiens
aaaggcaggctcttc

SEQ ID NO: 254506 - DNA, 15 bp, Homo sapiens
aaaaggcaggctctt

SEQ ID NO: 254507 - DNA, 15 bp, Homo sapiens
aaaaaggcaggctct

SEQ ID NO: 254508 - DNA, 15 bp, Homo sapiens
aaaaaaggcaggctc

SEQ ID NO: 254509 - DNA, 15 bp, Homo sapiens
aaaaaaaggcaggct

SEQ ID NO: 254510 - DNA, 15 bp, Homo sapiens
aaaaaaaaggcaggc

SEQ ID NO: 254511 - DNA, 15 bp, Homo sapiens
aaaaaaaaaggcagg

SEQ ID NO: 254512 - DNA, 15 bp, Homo sapiens
aaaaaaaaaaggcag

SEQ ID NO: 254513 - DNA, 15 bp, Homo sapiens
gaaaaaaaaaaggca

SEQ ID NO: 254514 - DNA, 15 bp, Homo sapiens
ggaaaaaaaaaaggc

SEQ ID NO: 254515 - DNA, 15 bp, Homo sapiens
aggaaaaaaaaaagg

SEQ ID NO: 254516 - DNA, 15 bp, Homo sapiens
aaggaaaaaaaaaag

SEQ ID NO: 254517 - DNA, 15 bp, Homo sapiens
aaaggaaaaaaaaaa

SEQ ID NO: 254518 - DNA, 15 bp, Homo sapiens
taaaggaaaaaaaaa

SEQ ID NO: 254519 - DNA, 15 bp, Homo sapiens
ataaaggaaaaaaaa

SEQ ID NO: 254520 - DNA, 15 bp, Homo sapiens
aataaaggaaaaaaa

SEQ ID NO: 254521 - DNA, 15 bp, Homo sapiens
caataaaggaaaaaa

SEQ ID NO: 254522 - DNA, 15 bp, Homo sapiens
gcaataaaggaaaaa

SEQ ID NO: 254523 - DNA, 15 bp, Homo sapiens
tgcaataaaggaaaa

SEQ ID NO: 254524 - DNA, 15 bp, Homo sapiens
atgcaataaaggaaa

SEQ ID NO: 254525 - DNA, 15 bp, Homo sapiens
tatgcaataaaggaa

SEQ ID NO: 254526 - DNA, 15 bp, Homo sapiens
gtatgcaataaagga

SEQ ID NO: 254527 - DNA, 15 bp, Homo sapiens
ggtatgcaataaagg

SEQ ID NO: 254528 - DNA, 15 bp, Homo sapiens
aggtatgcaataaag

SEQ ID NO: 254529 - DNA, 15 bp, Homo sapiens
taggtatgcaataaa

SEQ ID NO: 254530 - DNA, 15 bp, Homo sapiens
ataggtatgcaataa

SEQ ID NO: 254531 - DNA, 15 bp, Homo sapiens
cataggtatgcaata

SEQ ID NO: 254532 - DNA, 15 bp, Homo sapiens
ccataggtatgcaat

SEQ ID NO: 254533 - DNA, 15 bp, Homo sapiens
tccataggtatgcaa

SEQ ID NO: 254534 - DNA, 15 bp, Homo sapiens
ctccataggtatgca

SEQ ID NO: 254535 - DNA, 15 bp, Homo sapiens
gctccataggtatgc

SEQ ID NO: 254536 - DNA, 15 bp, Homo sapiens
agctccataggtatg

SEQ ID NO: 254537 - DNA, 15 bp, Homo sapiens
aagctccataggtat

SEQ ID NO: 254538 - DNA, 15 bp, Homo sapiens
aaagctccataggta

SEQ ID NO: 254539 - DNA, 15 bp, Homo sapiens
aaaagctccataggt

SEQ ID NO: 254540 - DNA, 15 bp, Homo sapiens
gaaaagctccatagg

SEQ ID NO: 254541 - DNA, 15 bp, Homo sapiens
agaaaagctccatag

SEQ ID NO: 254542 - DNA, 15 bp, Homo sapiens
tagaaaagctccata

SEQ ID NO: 254543 - DNA, 15 bp, Homo sapiens
ttagaaaagctccat

SEQ ID NO: 254544 - DNA, 15 bp, Homo sapiens
cttagaaaagctcca

SEQ ID NO: 254545 - DNA, 15 bp, Homo sapiens
gcttagaaaagctcc

SEQ ID NO: 254546 - DNA, 15 bp, Homo sapiens
tgcttagaaaagctc

SEQ ID NO: 254547 - DNA, 15 bp, Homo sapiens
atgcttagaaaagct

SEQ ID NO: 254548 - DNA, 15 bp, Homo sapiens
aatgcttagaaaagc

SEQ ID NO: 254549 - DNA, 15 bp, Homo sapiens
taatgcttagaaaag

SEQ ID NO: 254550 - DNA, 15 bp, Homo sapiens
ttaatgcttagaaaa

SEQ ID NO: 254551 - DNA, 15 bp, Homo sapiens
tttaatgcttagaaa

SEQ ID NO: 254552 - DNA, 15 bp, Homo sapiens
ttttaatgcttagaa

SEQ ID NO: 254553 - DNA, 15 bp, Homo sapiens
tttttaatgcttaga

SEQ ID NO: 254554 - DNA, 15 bp, Homo sapiens
ttttttaatgcttag

SEQ ID NO: 254555 - DNA, 15 bp, Homo sapiens
tttttttaatgctta

SEQ ID NO: 254556 - DNA, 15 bp, Homo sapiens
gtttttttaatgctt

SEQ ID NO: 254557 - DNA, 15 bp, Homo sapiens
tgtttttttaatgct

SEQ ID NO: 254558 - DNA, 15 bp, Homo sapiens
gtgtttttttaatgc

SEQ ID NO: 254559 - DNA, 15 bp, Homo sapiens
agtgtttttttaatg

SEQ ID NO: 254560 - DNA, 15 bp, Homo sapiens
aagtgtttttttaat

SEQ ID NO: 254561 - DNA, 15 bp, Homo sapiens
gaagtgtttttttaa

SEQ ID NO: 254562 - DNA, 15 bp, Homo sapiens
ggaagtgttttttta

SEQ ID NO: 254563 - DNA, 15 bp, Homo sapiens
aggaagtgttttttt

SEQ ID NO: 254564 - DNA, 15 bp, Homo sapiens
aaggaagtgtttttt

SEQ ID NO: 254565 - DNA, 15 bp, Homo sapiens
taaggaagtgttttt

SEQ ID NO: 254566 - DNA, 15 bp, Homo sapiens
gtaaggaagtgtttt

SEQ ID NO: 254567 - DNA, 15 bp, Homo sapiens
ggtaaggaagtgttt

SEQ ID NO: 254568 - DNA, 15 bp, Homo sapiens
gggtaaggaagtgtt

SEQ ID NO: 254569 - DNA, 15 bp, Homo sapiens
ggggtaaggaagtgt

SEQ ID NO: 254570 - DNA, 15 bp, Homo sapiens
gggggtaaggaagtg

SEQ ID NO: 254571 - DNA, 15 bp, Homo sapiens
agggggtaaggaagt

SEQ ID NO: 254572 - DNA, 15 bp, Homo sapiens
gagggggtaaggaag

SEQ ID NO: 254573 - DNA, 15 bp, Homo sapiens
ggagggggtaaggaa

SEQ ID NO: 254574 - DNA, 15 bp, Homo sapiens
gggagggggtaagga

SEQ ID NO: 254575 - DNA, 15 bp, Homo sapiens
ggggagggggtaagg

SEQ ID NO: 254576 - DNA, 15 bp, Homo sapiens
tggggagggggtaag

SEQ ID NO: 254577 - DNA, 15 bp, Homo sapiens
atggggagggggtaa

SEQ ID NO: 254578 - DNA, 15 bp, Homo sapiens
catggggagggggta

SEQ ID NO: 254579 - DNA, 15 bp, Homo sapiens
tcatggggagggggt

SEQ ID NO: 254580 - DNA, 15 bp, Homo sapiens
ctcatggggaggggg

SEQ ID NO: 254581 - DNA, 15 bp, Homo sapiens
tctcatggggagggg

SEQ ID NO: 254582 - DNA, 15 bp, Homo sapiens
atctcatggggaggg

SEQ ID NO: 254583 - DNA, 15 bp, Homo sapiens
aatctcatggggagg

SEQ ID NO: 254584 - DNA, 15 bp, Homo sapiens
aaatctcatggggag

SEQ ID NO: 254585 - DNA, 15 bp, Homo sapiens
aaaatctcatgggga

SEQ ID NO: 254586 - DNA, 15 bp, Homo sapiens
taaaatctcatgggg

SEQ ID NO: 254587 - DNA, 15 bp, Homo sapiens
ttaaaatctcatggg

SEQ ID NO: 254588 - DNA, 15 bp, Homo sapiens
attaaaatctcatgg

SEQ ID NO: 254589 - DNA, 15 bp, Homo sapiens
tattaaaatctcatg

SEQ ID NO: 254590 - DNA, 15 bp, Homo sapiens
gtattaaaatctcat

SEQ ID NO: 254591 - DNA, 15 bp, Homo sapiens
ggtattaaaatctca

SEQ ID NO: 254592 - DNA, 15 bp, Homo sapiens
tggtattaaaatctc

SEQ ID NO: 254593 - DNA, 15 bp, Homo sapiens
gtggtattaaaatct

SEQ ID NO: 254594 - DNA, 15 bp, Homo sapiens
tgtggtattaaaatc

SEQ ID NO: 254595 - DNA, 15 bp, Homo sapiens
ctgtggtattaaaat

SEQ ID NO: 254596 - DNA, 15 bp, Homo sapiens
tctgtggtattaaaa

SEQ ID NO: 254597 - DNA, 15 bp, Homo sapiens
atctgtggtattaaa

SEQ ID NO: 254598 - DNA, 15 bp, Homo sapiens
tatctgtggtattaa

SEQ ID NO: 254599 - DNA, 15 bp, Homo sapiens
gtatctgtggtatta

SEQ ID NO: 254600 - DNA, 15 bp, Homo sapiens
tgtatctgtggtatt

SEQ ID NO: 254601 - DNA, 15 bp, Homo sapiens
gtgtatctgtggtat

SEQ ID NO: 254602 - DNA, 15 bp, Homo sapiens
agtgtatctgtggta

SEQ ID NO: 254603 - DNA, 15 bp, Homo sapiens
cagtgtatctgtggt

SEQ ID NO: 254604 - DNA, 15 bp, Homo sapiens
acagtgtatctgtgg

SEQ ID NO: 254605 - DNA, 15 bp, Homo sapiens
tacagtgtatctgtg

SEQ ID NO: 254606 - DNA, 15 bp, Homo sapiens
atacagtgtatctgt

SEQ ID NO: 254607 - DNA, 15 bp, Homo sapiens
tatacagtgtatctg

SEQ ID NO: 254608 - DNA, 15 bp, Homo sapiens
atatacagtgtatct

SEQ ID NO: 254609 - DNA, 15 bp, Homo sapiens
gatatacagtgtatc

SEQ ID NO: 254610 - DNA, 15 bp, Homo sapiens
agatatacagtgtat

SEQ ID NO: 254611 - DNA, 15 bp, Homo sapiens
cagatatacagtgta

SEQ ID NO: 254612 - DNA, 15 bp, Homo sapiens
acagatatacagtgt

SEQ ID NO: 254613 - DNA, 15 bp, Homo sapiens
cacagatatacagtg

SEQ ID NO: 254614 - DNA, 15 bp, Homo sapiens
acacagatatacagt

SEQ ID NO: 254615 - DNA, 15 bp, Homo sapiens
cacacagatatacag

SEQ ID NO: 254616 - DNA, 15 bp, Homo sapiens
acacacagatataca

SEQ ID NO: 254617 - DNA, 15 bp, Homo sapiens
cacacacagatatac

SEQ ID NO: 254618 - DNA, 15 bp, Homo sapiens
acacacacagatata

SEQ ID NO: 254619 - DNA, 15 bp, Homo sapiens
tacacacacagatat

SEQ ID NO: 254620 - DNA, 15 bp, Homo sapiens
gtacacacacagata

SEQ ID NO: 254621 - DNA, 15 bp, Homo sapiens
agtacacacacagat

SEQ ID NO: 254622 - DNA, 15 bp, Homo sapiens
gagtacacacacaga

SEQ ID NO: 254623 - DNA, 15 bp, Homo sapiens
agagtacacacacag

SEQ ID NO: 254624 - DNA, 15 bp, Homo sapiens
cagagtacacacaca

SEQ ID NO: 254625 - DNA, 15 bp, Homo sapiens
acagagtacacacac

SEQ ID NO: 254626 - DNA, 15 bp, Homo sapiens
tacagagtacacaca

SEQ ID NO: 254627 - DNA, 15 bp, Homo sapiens
atacagagtacacac

SEQ ID NO: 254628 - DNA, 15 bp, Homo sapiens
catacagagtacaca

SEQ ID NO: 254629 - DNA, 15 bp, Homo sapiens
acatacagagtacac

SEQ ID NO: 254630 - DNA, 15 bp, Homo sapiens
tacatacagagtaca

SEQ ID NO: 254631 - DNA, 15 bp, Homo sapiens
atacatacagagtac

SEQ ID NO: 254632 - DNA, 15 bp, Homo sapiens
gatacatacagagta

SEQ ID NO: 254633 - DNA, 15 bp, Homo sapiens
agatacatacagagt

SEQ ID NO: 254634 - DNA, 15 bp, Homo sapiens
cagatacatacagag

SEQ ID NO: 254635 - DNA, 15 bp, Homo sapiens
acagatacatacaga

SEQ ID NO: 254636 - DNA, 15 bp, Homo sapiens
cacagatacatacag

SEQ ID NO: 254637 - DNA, 15 bp, Homo sapiens
acacagatacataca

SEQ ID NO: 254638 - DNA, 15 bp, Homo sapiens
aacacagatacatac

SEQ ID NO: 254639 - DNA, 15 bp, Homo sapiens
aaacacagatacata

SEQ ID NO: 254640 - DNA, 15 bp, Homo sapiens
taaacacagatacat

SEQ ID NO: 254641 - DNA, 15 bp, Homo sapiens
ataaacacagataca

SEQ ID NO: 254642 - DNA, 15 bp, Homo sapiens
tataaacacagatac

SEQ ID NO: 254643 - DNA, 15 bp, Homo sapiens
gtataaacacagata

SEQ ID NO: 254644 - DNA, 15 bp, Homo sapiens
tgtataaacacagat

SEQ ID NO: 254645 - DNA, 15 bp, Homo sapiens
atgtataaacacaga

SEQ ID NO: 254646 - DNA, 15 bp, Homo sapiens
tatgtataaacacag

SEQ ID NO: 254647 - DNA, 15 bp, Homo sapiens
ttatgtataaacaca

SEQ ID NO: 254648 - DNA, 15 bp, Homo sapiens
tttatgtataaacac

SEQ ID NO: 254649 - DNA, 15 bp, Homo sapiens
ctttatgtataaaca

SEQ ID NO: 254650 - DNA, 15 bp, Homo sapiens
cctttatgtataaac

SEQ ID NO: 254651 - DNA, 15 bp, Homo sapiens
acctttatgtataaa

SEQ ID NO: 254652 - DNA, 15 bp, Homo sapiens
aacctttatgtataa

SEQ ID NO: 254653 - DNA, 15 bp, Homo sapiens
caacctttatgtata

SEQ ID NO: 254654 - DNA, 15 bp, Homo sapiens
acaacctttatgtat

SEQ ID NO: 254655 - DNA, 15 bp, Homo sapiens
aacaacctttatgta

SEQ ID NO: 254656 - DNA, 15 bp, Homo sapiens
aaacaacctttatgt

SEQ ID NO: 254657 - DNA, 15 bp, Homo sapiens
aaaacaacctttatg

SEQ ID NO: 254658 - DNA, 15 bp, Homo sapiens
aaaaacaacctttat

SEQ ID NO: 254659 - DNA, 15 bp, Homo sapiens
aaaaaacaaccttta

SEQ ID NO: 254660 - DNA, 15 bp, Homo sapiens
gaaaaaacaaccttt

SEQ ID NO: 254661 - DNA, 15 bp, Homo sapiens
tgaaaaaacaacctt

SEQ ID NO: 254662 - DNA, 15 bp, Homo sapiens
gtgaaaaaacaacct

SEQ ID NO: 254663 - DNA, 15 bp, Homo sapiens
agtgaaaaaacaacc

SEQ ID NO: 254664 - DNA, 15 bp, Homo sapiens
aagtgaaaaaacaac

SEQ ID NO: 254665 - DNA, 15 bp, Homo sapiens
aaagtgaaaaaacaa

SEQ ID NO: 254666 - DNA, 15 bp, Homo sapiens
aaaagtgaaaaaaca

SEQ ID NO: 254667 - DNA, 15 bp, Homo sapiens
gaaaagtgaaaaaac

SEQ ID NO: 254668 - DNA, 15 bp, Homo sapiens
tgaaaagtgaaaaaa

SEQ ID NO: 254669 - DNA, 15 bp, Homo sapiens
ttgaaaagtgaaaaa

SEQ ID NO: 254670 - DNA, 15 bp, Homo sapiens
attgaaaagtgaaaa

SEQ ID NO: 254671 - DNA, 15 bp, Homo sapiens
cattgaaaagtgaaa

SEQ ID NO: 254672 - DNA, 15 bp, Homo sapiens
acattgaaaagtgaa

SEQ ID NO: 254673 - DNA, 15 bp, Homo sapiens
gacattgaaaagtga

SEQ ID NO: 254674 - DNA, 15 bp, Homo sapiens
agacattgaaaagtg

SEQ ID NO: 254675 - DNA, 15 bp, Homo sapiens
cagacattgaaaagt

SEQ ID NO: 254676 - DNA, 15 bp, Homo sapiens
gcagacattgaaaag

SEQ ID NO: 254677 - DNA, 15 bp, Homo sapiens
ggcagacattgaaaa

SEQ ID NO: 254678 - DNA, 15 bp, Homo sapiens
aggcagacattgaaa

SEQ ID NO: 254679 - DNA, 15 bp, Homo sapiens
aaggcagacattgaa

SEQ ID NO: 254680 - DNA, 15 bp, Homo sapiens
gaaggcagacattga

SEQ ID NO: 254681 - DNA, 15 bp, Homo sapiens
ggaaggcagacattg

SEQ ID NO: 254682 - DNA, 15 bp, Homo sapiens
aggaaggcagacatt

SEQ ID NO: 254683 - DNA, 15 bp, Homo sapiens
caggaaggcagacat

SEQ ID NO: 254684 - DNA, 15 bp, Homo sapiens
ccaggaaggcagaca

SEQ ID NO: 254685 - DNA, 15 bp, Homo sapiens
tccaggaaggcagac

SEQ ID NO: 254686 - DNA, 15 bp, Homo sapiens
ctccaggaaggcaga

SEQ ID NO: 254687 - DNA, 15 bp, Homo sapiens
cctccaggaaggcag

SEQ ID NO: 254688 - DNA, 15 bp, Homo sapiens
tcctccaggaaggca

SEQ ID NO: 254689 - DNA, 15 bp, Homo sapiens
ctcctccaggaaggc

SEQ ID NO: 254690 - DNA, 15 bp, Homo sapiens
tctcctccaggaagg

SEQ ID NO: 254691 - DNA, 15 bp, Homo sapiens
gtctcctccaggaag

SEQ ID NO: 254692 - DNA, 15 bp, Homo sapiens
agtctcctccaggaa

SEQ ID NO: 254693 - DNA, 15 bp, Homo sapiens
aagtctcctccagga

SEQ ID NO: 254694 - DNA, 15 bp, Homo sapiens
aaagtctcctccagg

SEQ ID NO: 254695 - DNA, 15 bp, Homo sapiens
caaagtctcctccag

SEQ ID NO: 254696 - DNA, 15 bp, Homo sapiens
gcaaagtctcctcca

SEQ ID NO: 254697 - DNA, 15 bp, Homo sapiens
ggcaaagtctcctcc

SEQ ID NO: 254698 - DNA, 15 bp, Homo sapiens
gggcaaagtctcctc

SEQ ID NO: 254699 - DNA, 15 bp, Homo sapiens
ggggcaaagtctcct

SEQ ID NO: 254700 - DNA, 15 bp, Homo sapiens
gggggcaaagtctcc

SEQ ID NO: 254701 - DNA, 15 bp, Homo sapiens
tgggggcaaagtctc

SEQ ID NO: 254702 - DNA, 15 bp, Homo sapiens
atgggggcaaagtct

SEQ ID NO: 254703 - DNA, 15 bp, Homo sapiens
aatgggggcaaagtc

SEQ ID NO: 254704 - DNA, 15 bp, Homo sapiens
caatgggggcaaagt

SEQ ID NO: 254705 - DNA, 15 bp, Homo sapiens
tcaatgggggcaaag

SEQ ID NO: 254706 - DNA, 15 bp, Homo sapiens
ctcaatgggggcaaa

SEQ ID NO: 254707 - DNA, 15 bp, Homo sapiens
tctcaatgggggcaa

SEQ ID NO: 254708 - DNA, 15 bp, Homo sapiens
ttctcaatgggggca

SEQ ID NO: 254709 - DNA, 15 bp, Homo sapiens
attctcaatgggggc

SEQ ID NO: 254710 - DNA, 15 bp, Homo sapiens
tattctcaatggggg

SEQ ID NO: 254711 - DNA, 15 bp, Homo sapiens
gtattctcaatgggg

SEQ ID NO: 254712 - DNA, 15 bp, Homo sapiens
tgtattctcaatggg

SEQ ID NO: 254713 - DNA, 15 bp, Homo sapiens
atgtattctcaatgg

SEQ ID NO: 254714 - DNA, 15 bp, Homo sapiens
catgtattctcaatg

SEQ ID NO: 254715 - DNA, 15 bp, Homo sapiens
gcatgtattctcaat

SEQ ID NO: 254716 - DNA, 15 bp, Homo sapiens
tgcatgtattctcaa

SEQ ID NO: 254717 - DNA, 15 bp, Homo sapiens
atgcatgtattctca

SEQ ID NO: 254718 - DNA, 15 bp, Homo sapiens
catgcatgtattctc

SEQ ID NO: 254719 - DNA, 15 bp, Homo sapiens
tcatgcatgtattct

SEQ ID NO: 254720 - DNA, 15 bp, Homo sapiens
ctcatgcatgtattc

SEQ ID NO: 254721 - DNA, 15 bp, Homo sapiens
tctcatgcatgtatt

SEQ ID NO: 254722 - DNA, 15 bp, Homo sapiens
gtctcatgcatgtat

SEQ ID NO: 254723 - DNA, 15 bp, Homo sapiens
tgtctcatgcatgta

SEQ ID NO: 254724 - DNA, 15 bp, Homo sapiens
gtgtctcatgcatgt

SEQ ID NO: 254725 - DNA, 15 bp, Homo sapiens
tgtgtctcatgcatg

SEQ ID NO: 254726 - DNA, 15 bp, Homo sapiens
atgtgtctcatgcat

SEQ ID NO: 254727 - DNA, 15 bp, Homo sapiens
gatgtgtctcatgca

SEQ ID NO: 254728 - DNA, 15 bp, Homo sapiens
agatgtgtctcatgc

SEQ ID NO: 254729 - DNA, 15 bp, Homo sapiens
gagatgtgtctcatg

SEQ ID NO: 254730 - DNA, 15 bp, Homo sapiens
agagatgtgtctcat

SEQ ID NO: 254731 - DNA, 15 bp, Homo sapiens
tagagatgtgtctca

SEQ ID NO: 254732 - DNA, 15 bp, Homo sapiens
ctagagatgtgtctc

SEQ ID NO: 254733 - DNA, 15 bp, Homo sapiens
tctagagatgtgtct

SEQ ID NO: 254734 - DNA, 15 bp, Homo sapiens
ctctagagatgtgtc

SEQ ID NO: 254735 - DNA, 15 bp, Homo sapiens
tctctagagatgtgt

SEQ ID NO: 254736 - DNA, 15 bp, Homo sapiens
gtctctagagatgtg

SEQ ID NO: 254737 - DNA, 15 bp, Homo sapiens
cgtctctagagatgt

SEQ ID NO: 254738 - DNA, 15 bp, Homo sapiens
gcgtctctagagatg

SEQ ID NO: 254739 - DNA, 15 bp, Homo sapiens
tgcgtctctagagat

SEQ ID NO: 254740 - DNA, 15 bp, Homo sapiens
atgcgtctctagaga

SEQ ID NO: 254741 - DNA, 15 bp, Homo sapiens
gatgcgtctctagag

SEQ ID NO: 254742 - DNA, 15 bp, Homo sapiens
agatgcgtctctaga

SEQ ID NO: 254743 - DNA, 15 bp, Homo sapiens
cagatgcgtctctag

SEQ ID NO: 254744 - DNA, 15 bp, Homo sapiens
ccagatgcgtctcta

SEQ ID NO: 254745 - DNA, 15 bp, Homo sapiens
cccagatgcgtctct

SEQ ID NO: 254746 - DNA, 15 bp, Homo sapiens
gcccagatgcgtctc

SEQ ID NO: 254747 - DNA, 15 bp, Homo sapiens
agcccagatgcgtct

SEQ ID NO: 254748 - DNA, 15 bp, Homo sapiens
aagcccagatgcgtc

SEQ ID NO: 254749 - DNA, 15 bp, Homo sapiens
taagcccagatgcgt

SEQ ID NO: 254750 - DNA, 15 bp, Homo sapiens
gtaagcccagatgcg

SEQ ID NO: 254751 - DNA, 15 bp, Homo sapiens
agtaagcccagatgc

SEQ ID NO: 254752 - DNA, 15 bp, Homo sapiens
cagtaagcccagatg

SEQ ID NO: 254753 - DNA, 15 bp, Homo sapiens
acagtaagcccagat

SEQ ID NO: 254754 - DNA, 15 bp, Homo sapiens
cacagtaagcccaga

SEQ ID NO: 254755 - DNA, 15 bp, Homo sapiens
ccacagtaagcccag

SEQ ID NO: 254756 - DNA, 15 bp, Homo sapiens
cccacagtaagccca

SEQ ID NO: 254757 - DNA, 15 bp, Homo sapiens
tcccacagtaagccc

SEQ ID NO: 254758 - DNA, 15 bp, Homo sapiens
ctcccacagtaagcc

SEQ ID NO: 254759 - DNA, 15 bp, Homo sapiens
cctcccacagtaagc

SEQ ID NO: 254760 - DNA, 15 bp, Homo sapiens
tcctcccacagtaag

SEQ ID NO: 254761 - DNA, 15 bp, Homo sapiens
ctcctcccacagtaa

SEQ ID NO: 254762 - DNA, 15 bp, Homo sapiens
tctcctcccacagta

SEQ ID NO: 254763 - DNA, 15 bp, Homo sapiens
ttctcctcccacagt

SEQ ID NO: 254764 - DNA, 15 bp, Homo sapiens
cttctcctcccacag

SEQ ID NO: 254765 - DNA, 15 bp, Homo sapiens
tcttctcctcccaca

SEQ ID NO: 254766 - DNA, 15 bp, Homo sapiens
ctcttctcctcccac

SEQ ID NO: 254767 - DNA, 15 bp, Homo sapiens
gctcttctcctccca

SEQ ID NO: 254768 - DNA, 15 bp, Homo sapiens
agctcttctcctccc

SEQ ID NO: 254769 - DNA, 15 bp, Homo sapiens
cagctcttctcctcc

SEQ ID NO: 254770 - DNA, 15 bp, Homo sapiens
ccagctcttctcctc

SEQ ID NO: 254771 - DNA, 15 bp, Homo sapiens
accagctcttctcct

SEQ ID NO: 254772 - DNA, 15 bp, Homo sapiens
gaccagctcttctcc

SEQ ID NO: 254773 - DNA, 15 bp, Homo sapiens
ggaccagctcttctc

SEQ ID NO: 254774 - DNA, 15 bp, Homo sapiens
gggaccagctcttct

SEQ ID NO: 254775 - DNA, 15 bp, Homo sapiens
tgggaccagctcttc

SEQ ID NO: 254776 - DNA, 15 bp, Homo sapiens
gtgggaccagctctt

SEQ ID NO: 254777 - DNA, 15 bp, Homo sapiens
agtgggaccagctct

SEQ ID NO: 254778 - DNA, 15 bp, Homo sapiens
aagtgggaccagctc

SEQ ID NO: 254779 - DNA, 15 bp, Homo sapiens
aaagtgggaccagct

SEQ ID NO: 254780 - DNA, 15 bp, Homo sapiens
caaagtgggaccagc

SEQ ID NO: 254781 - DNA, 15 bp, Homo sapiens
acaaagtgggaccag

SEQ ID NO: 254782 - DNA, 15 bp, Homo sapiens
gacaaagtgggacca

SEQ ID NO: 254783 - DNA, 15 bp, Homo sapiens
tgacaaagtgggacc

SEQ ID NO: 254784 - DNA, 15 bp, Homo sapiens
ttgacaaagtgggac

SEQ ID NO: 254785 - DNA, 15 bp, Homo sapiens
tttgacaaagtggga

SEQ ID NO: 254786 - DNA, 15 bp, Homo sapiens
gtttgacaaagtggg

SEQ ID NO: 254787 - DNA, 15 bp, Homo sapiens
agtttgacaaagtgg

SEQ ID NO: 254788 - DNA, 15 bp, Homo sapiens
cagtttgacaaagtg

SEQ ID NO: 254789 - DNA, 15 bp, Homo sapiens
acagtttgacaaagt

SEQ ID NO: 254790 - DNA, 15 bp, Homo sapiens
gacagtttgacaaag

SEQ ID NO: 254791 - DNA, 15 bp, Homo sapiens
agacagtttgacaaa

SEQ ID NO: 254792 - DNA, 15 bp, Homo sapiens
aagacagtttgacaa

SEQ ID NO: 254793 - DNA, 15 bp, Homo sapiens
caagacagtttgaca

SEQ ID NO: 254794 - DNA, 15 bp, Homo sapiens
acaagacagtttgac

SEQ ID NO: 254795 - DNA, 15 bp, Homo sapiens
tacaagacagtttga

SEQ ID NO: 254796 - DNA, 15 bp, Homo sapiens
ctacaagacagtttg

SEQ ID NO: 254797 - DNA, 15 bp, Homo sapiens
tctacaagacagttt

SEQ ID NO: 254798 - DNA, 15 bp, Homo sapiens
gtctacaagacagtt

SEQ ID NO: 254799 - DNA, 15 bp, Homo sapiens
tgtctacaagacagt

SEQ ID NO: 254800 - DNA, 15 bp, Homo sapiens
ttgtctacaagacag

SEQ ID NO: 254801 - DNA, 15 bp, Homo sapiens
tttgtctacaagaca

SEQ ID NO: 254802 - DNA, 15 bp, Homo sapiens
ctttgtctacaagac

SEQ ID NO: 254803 - DNA, 15 bp, Homo sapiens
cctttgtctacaaga

SEQ ID NO: 254804 - DNA, 15 bp, Homo sapiens
ccctttgtctacaag

SEQ ID NO: 254805 - DNA, 15 bp, Homo sapiens
tccctttgtctacaa

SEQ ID NO: 254806 - DNA, 15 bp, Homo sapiens
ttccctttgtctaca

SEQ ID NO: 254807 - DNA, 15 bp, Homo sapiens
attccctttgtctac

SEQ ID NO: 254808 - DNA, 15 bp, Homo sapiens
aattccctttgtcta

SEQ ID NO: 254809 - DNA, 15 bp, Homo sapiens
caattccctttgtct

SEQ ID NO: 254810 - DNA, 15 bp, Homo sapiens
tcaattccctttgtc

SEQ ID NO: 254811 - DNA, 15 bp, Homo sapiens
ctcaattccctttgt

SEQ ID NO: 254812 - DNA, 15 bp, Homo sapiens
tctcaattccctttg

SEQ ID NO: 254813 - DNA, 15 bp, Homo sapiens
ttctcaattcccttt

SEQ ID NO: 254814 - DNA, 15 bp, Homo sapiens
cttctcaattccctt

SEQ ID NO: 254815 - DNA, 15 bp, Homo sapiens
tcttctcaattccct

SEQ ID NO: 254816 - DNA, 15 bp, Homo sapiens
ctcttctcaattccc

SEQ ID NO: 254817 - DNA, 15 bp, Homo sapiens
actcttctcaattcc

SEQ ID NO: 254818 - DNA, 15 bp, Homo sapiens
gactcttctcaattc

SEQ ID NO: 254819 - DNA, 15 bp, Homo sapiens
agactcttctcaatt

SEQ ID NO: 254820 - DNA, 15 bp, Homo sapiens
aagactcttctcaat

SEQ ID NO: 254821 - DNA, 15 bp, Homo sapiens
taagactcttctcaa

SEQ ID NO: 254822 - DNA, 15 bp, Homo sapiens
gtaagactcttctca

SEQ ID NO: 254823 - DNA, 15 bp, Homo sapiens
tgtaagactcttctc

SEQ ID NO: 254824 - DNA, 15 bp, Homo sapiens
atgtaagactcttct

SEQ ID NO: 254825 - DNA, 15 bp, Homo sapiens
aatgtaagactcttc

SEQ ID NO: 254826 - DNA, 15 bp, Homo sapiens
aaatgtaagactctt

SEQ ID NO: 254827 - DNA, 15 bp, Homo sapiens
gaaatgtaagactct

SEQ ID NO: 254828 - DNA, 15 bp, Homo sapiens
agaaatgtaagactc

SEQ ID NO: 254829 - DNA, 15 bp, Homo sapiens
aagaaatgtaagact

SEQ ID NO: 254830 - DNA, 15 bp, Homo sapiens
caagaaatgtaagac

SEQ ID NO: 254831 - DNA, 15 bp, Homo sapiens
tcaagaaatgtaaga

SEQ ID NO: 254832 - DNA, 15 bp, Homo sapiens
ctcaagaaatgtaag

SEQ ID NO: 254833 - DNA, 15 bp, Homo sapiens
gctcaagaaatgtaa

SEQ ID NO: 254834 - DNA, 15 bp, Homo sapiens
tgctcaagaaatgta

SEQ ID NO: 254835 - DNA, 15 bp, Homo sapiens
gtgctcaagaaatgt

SEQ ID NO: 254836 - DNA, 15 bp, Homo sapiens
ggtgctcaagaaatg

SEQ ID NO: 254837 - DNA, 15 bp, Homo sapiens
aggtgctcaagaaat

SEQ ID NO: 254838 - DNA, 15 bp, Homo sapiens
caggtgctcaagaaa

SEQ ID NO: 254839 - DNA, 15 bp, Homo sapiens
acaggtgctcaagaa

SEQ ID NO: 254840 - DNA, 15 bp, Homo sapiens
aacaggtgctcaaga

SEQ ID NO: 254841 - DNA, 15 bp, Homo sapiens
taacaggtgctcaag

SEQ ID NO: 254842 - DNA, 15 bp, Homo sapiens
ctaacaggtgctcaa

SEQ ID NO: 254843 - DNA, 15 bp, Homo sapiens
cctaacaggtgctca

SEQ ID NO: 254844 - DNA, 15 bp, Homo sapiens
acctaacaggtgctc

SEQ ID NO: 254845 - DNA, 15 bp, Homo sapiens
tacctaacaggtgct

SEQ ID NO: 254846 - DNA, 15 bp, Homo sapiens
atacctaacaggtgc

SEQ ID NO: 254847 - DNA, 15 bp, Homo sapiens
aatacctaacaggtg

SEQ ID NO: 254848 - DNA, 15 bp, Homo sapiens
aaatacctaacaggt

SEQ ID NO: 254849 - DNA, 15 bp, Homo sapiens
caaatacctaacagg

SEQ ID NO: 254850 - DNA, 15 bp, Homo sapiens
ccaaatacctaacag

SEQ ID NO: 254851 - DNA, 15 bp, Homo sapiens
gccaaatacctaaca

SEQ ID NO: 254852 - DNA, 15 bp, Homo sapiens
tgccaaatacctaac

SEQ ID NO: 254853 - DNA, 15 bp, Homo sapiens
gtgccaaatacctaa

SEQ ID NO: 254854 - DNA, 15 bp, Homo sapiens
ggtgccaaataccta

SEQ ID NO: 254855 - DNA, 15 bp, Homo sapiens
tggtgccaaatacct

SEQ ID NO: 254856 - DNA, 15 bp, Homo sapiens
ttggtgccaaatacc

SEQ ID NO: 254857 - DNA, 15 bp, Homo sapiens
cttggtgccaaatac

SEQ ID NO: 254858 - DNA, 15 bp, Homo sapiens
tcttggtgccaaata

SEQ ID NO: 254859 - DNA, 15 bp, Homo sapiens
gtcttggtgccaaat

SEQ ID NO: 254860 - DNA, 15 bp, Homo sapiens
tgtcttggtgccaaa

SEQ ID NO: 254861 - DNA, 15 bp, Homo sapiens
ctgtcttggtgccaa

SEQ ID NO: 254862 - DNA, 15 bp, Homo sapiens
cctgtcttggtgcca

SEQ ID NO: 254863 - DNA, 15 bp, Homo sapiens
ccctgtcttggtgcc

SEQ ID NO: 254864 - DNA, 15 bp, Homo sapiens
cccctgtcttggtgc

SEQ ID NO: 254865 - DNA, 15 bp, Homo sapiens
gcccctgtcttggtg

SEQ ID NO: 254866 - DNA, 15 bp, Homo sapiens
agcccctgtcttggt

SEQ ID NO: 254867 - DNA, 15 bp, Homo sapiens
aagcccctgtcttgg

SEQ ID NO: 254868 - DNA, 15 bp, Homo sapiens
aaagcccctgtcttg

SEQ ID NO: 254869 - DNA, 15 bp, Homo sapiens
taaagcccctgtctt

SEQ ID NO: 254870 - DNA, 15 bp, Homo sapiens
ctaaagcccctgtct

SEQ ID NO: 254871 - DNA, 15 bp, Homo sapiens
tctaaagcccctgtc

SEQ ID NO: 254872 - DNA, 15 bp, Homo sapiens
atctaaagcccctgt

SEQ ID NO: 254873 - DNA, 15 bp, Homo sapiens
gatctaaagcccctg

SEQ ID NO: 254874 - DNA, 15 bp, Homo sapiens
agatctaaagcccct

SEQ ID NO: 254875 - DNA, 15 bp, Homo sapiens
cagatctaaagcccc

SEQ ID NO: 254876 - DNA, 15 bp, Homo sapiens
tcagatctaaagccc

SEQ ID NO: 254877 - DNA, 15 bp, Homo sapiens
gtcagatctaaagcc

SEQ ID NO: 254878 - DNA, 15 bp, Homo sapiens
tgtcagatctaaagc

SEQ ID NO: 254879 - DNA, 15 bp, Homo sapiens
ttgtcagatctaaag

SEQ ID NO: 254880 - DNA, 15 bp, Homo sapiens
gttgtcagatctaaa

SEQ ID NO: 254881 - DNA, 15 bp, Homo sapiens
agttgtcagatctaa

SEQ ID NO: 254882 - DNA, 15 bp, Homo sapiens
gagttgtcagatcta

SEQ ID NO: 254883 - DNA, 15 bp, Homo sapiens
tgagttgtcagatct

SEQ ID NO: 254884 - DNA, 15 bp, Homo sapiens
gtgagttgtcagatc

SEQ ID NO: 254885 - DNA, 15 bp, Homo sapiens
ggtgagttgtcagat

SEQ ID NO: 254886 - DNA, 15 bp, Homo sapiens
aggtgagttgtcaga

SEQ ID NO: 254887 - DNA, 15 bp, Homo sapiens
caggtgagttgtcag

SEQ ID NO: 254888 - DNA, 15 bp, Homo sapiens
tcaggtgagttgtca

SEQ ID NO: 254889 - DNA, 15 bp, Homo sapiens
atcaggtgagttgtc

SEQ ID NO: 254890 - DNA, 15 bp, Homo sapiens
catcaggtgagttgt

SEQ ID NO: 254891 - DNA, 15 bp, Homo sapiens
gcatcaggtgagttg

SEQ ID NO: 254892 - DNA, 15 bp, Homo sapiens
ggcatcaggtgagtt

SEQ ID NO: 254893 - DNA, 15 bp, Homo sapiens
gggcatcaggtgagt

SEQ ID NO: 254894 - DNA, 15 bp, Homo sapiens
tgggcatcaggtgag

SEQ ID NO: 254895 - DNA, 15 bp, Homo sapiens
ttgggcatcaggtga

SEQ ID NO: 254896 - DNA, 15 bp, Homo sapiens
attgggcatcaggtg

SEQ ID NO: 254897 - DNA, 15 bp, Homo sapiens
cattgggcatcaggt

SEQ ID NO: 254898 - DNA, 15 bp, Homo sapiens
ccattgggcatcagg

SEQ ID NO: 254899 - DNA, 15 bp, Homo sapiens
gccattgggcatcag

SEQ ID NO: 254900 - DNA, 15 bp, Homo sapiens
tgccattgggcatca

SEQ ID NO: 254901 - DNA, 15 bp, Homo sapiens
ctgccattgggcatc

SEQ ID NO: 254902 - DNA, 15 bp, Homo sapiens
actgccattgggcat

SEQ ID NO: 254903 - DNA, 15 bp, Homo sapiens
aactgccattgggca

SEQ ID NO: 254904 - DNA, 15 bp, Homo sapiens
gaactgccattgggc

SEQ ID NO: 254905 - DNA, 15 bp, Homo sapiens
agaactgccattggg

SEQ ID NO: 254906 - DNA, 15 bp, Homo sapiens
cagaactgccattgg

SEQ ID NO: 254907 - DNA, 15 bp, Homo sapiens
tcagaactgccattg

SEQ ID NO: 254908 - DNA, 15 bp, Homo sapiens
ctcagaactgccatt

SEQ ID NO: 254909 - DNA, 15 bp, Homo sapiens
actcagaactgccat

SEQ ID NO: 254910 - DNA, 15 bp, Homo sapiens
cactcagaactgcca

SEQ ID NO: 254911 - DNA, 15 bp, Homo sapiens
ccactcagaactgcc

SEQ ID NO: 254912 - DNA, 15 bp, Homo sapiens
accactcagaactgc

SEQ ID NO: 254913 - DNA, 15 bp, Homo sapiens
gaccactcagaactg

SEQ ID NO: 254914 - DNA, 15 bp, Homo sapiens
tgaccactcagaact

SEQ ID NO: 254915 - DNA, 15 bp, Homo sapiens
ctgaccactcagaac

SEQ ID NO: 254916 - DNA, 15 bp, Homo sapiens
tctgaccactcagaa

SEQ ID NO: 254917 - DNA, 15 bp, Homo sapiens
ctctgaccactcaga

SEQ ID NO: 254918 - DNA, 15 bp, Homo sapiens
gctctgaccactcag

SEQ ID NO: 254919 - DNA, 15 bp, Homo sapiens
tgctctgaccactca

SEQ ID NO: 254920 - DNA, 15 bp, Homo sapiens
ctgctctgaccactc

SEQ ID NO: 254921 - DNA, 15 bp, Homo sapiens
cctgctctgaccact

SEQ ID NO: 254922 - DNA, 15 bp, Homo sapiens
ccctgctctgaccac

SEQ ID NO: 254923 - DNA, 15 bp, Homo sapiens
cccctgctctgacca

SEQ ID NO: 254924 - DNA, 15 bp, Homo sapiens
gcccctgctctgacc

SEQ ID NO: 254925 - DNA, 15 bp, Homo sapiens
ggcccctgctctgac

SEQ ID NO: 254926 - DNA, 15 bp, Homo sapiens
aggcccctgctctga

SEQ ID NO: 254927 - DNA, 15 bp, Homo sapiens
gaggcccctgctctg

SEQ ID NO: 254928 - DNA, 15 bp, Homo sapiens
tgaggcccctgctct

SEQ ID NO: 254929 - DNA, 15 bp, Homo sapiens
atgaggcccctgctc

SEQ ID NO: 254930 - DNA, 15 bp, Homo sapiens
aatgaggcccctgct

SEQ ID NO: 254931 - DNA, 15 bp, Homo sapiens
aaatgaggcccctgc

SEQ ID NO: 254932 - DNA, 15 bp, Homo sapiens
gaaatgaggcccctg

SEQ ID NO: 254933 - DNA, 15 bp, Homo sapiens
tgaaatgaggcccct

SEQ ID NO: 254934 - DNA, 15 bp, Homo sapiens
gtgaaatgaggcccc

SEQ ID NO: 254935 - DNA, 15 bp, Homo sapiens
tgtgaaatgaggccc

SEQ ID NO: 254936 - DNA, 15 bp, Homo sapiens
ttgtgaaatgaggcc

SEQ ID NO: 254937 - DNA, 15 bp, Homo sapiens
tttgtgaaatgaggc

SEQ ID NO: 254938 - DNA, 15 bp, Homo sapiens
atttgtgaaatgagg

SEQ ID NO: 254939 - DNA, 15 bp, Homo sapiens
catttgtgaaatgag

SEQ ID NO: 254940 - DNA, 15 bp, Homo sapiens
tcatttgtgaaatga

SEQ ID NO: 254941 - DNA, 15 bp, Homo sapiens
gtcatttgtgaaatg

SEQ ID NO: 254942 - DNA, 15 bp, Homo sapiens
tgtcatttgtgaaat

SEQ ID NO: 254943 - DNA, 15 bp, Homo sapiens
atgtcatttgtgaaa

SEQ ID NO: 254944 - DNA, 15 bp, Homo sapiens
gatgtcatttgtgaa

SEQ ID NO: 254945 - DNA, 15 bp, Homo sapiens
tgatgtcatttgtga

SEQ ID NO: 254946 - DNA, 15 bp, Homo sapiens
atgatgtcatttgtg

SEQ ID NO: 254947 - DNA, 15 bp, Homo sapiens
gatgatgtcatttgt

SEQ ID NO: 254948 - DNA, 15 bp, Homo sapiens
tgatgatgtcatttg

SEQ ID NO: 254949 - DNA, 15 bp, Homo sapiens
ttgatgatgtcattt

SEQ ID NO: 254950 - DNA, 15 bp, Homo sapiens
cttgatgatgtcatt

SEQ ID NO: 254951 - DNA, 15 bp, Homo sapiens
tcttgatgatgtcat

SEQ ID NO: 254952 - DNA, 15 bp, Homo sapiens
atcttgatgatgtca

SEQ ID NO: 254953 - DNA, 15 bp, Homo sapiens
aatcttgatgatgtc

SEQ ID NO: 254954 - DNA, 15 bp, Homo sapiens
aaatcttgatgatgt

SEQ ID NO: 254955 - DNA, 15 bp, Homo sapiens
taaatcttgatgatg

SEQ ID NO: 254956 - DNA, 15 bp, Homo sapiens
ctaaatcttgatgat

SEQ ID NO: 254957 - DNA, 15 bp, Homo sapiens
cctaaatcttgatga

SEQ ID NO: 254958 - DNA, 15 bp, Homo sapiens
ccctaaatcttgatg

SEQ ID NO: 254959 - DNA, 15 bp, Homo sapiens
cccctaaatcttgat

SEQ ID NO: 254960 - DNA, 15 bp, Homo sapiens
acccctaaatcttga

SEQ ID NO: 254961 - DNA, 15 bp, Homo sapiens
aacccctaaatcttg

SEQ ID NO: 254962 - DNA, 15 bp, Homo sapiens
gaacccctaaatctt

SEQ ID NO: 254963 - DNA, 15 bp, Homo sapiens
ggaacccctaaatct

SEQ ID NO: 254964 - DNA, 15 bp, Homo sapiens
aggaacccctaaatc

SEQ ID NO: 254965 - DNA, 15 bp, Homo sapiens
gaggaacccctaaat

SEQ ID NO: 254966 - DNA, 15 bp, Homo sapiens
ggaggaacccctaaa

SEQ ID NO: 254967 - DNA, 15 bp, Homo sapiens
gggaggaacccctaa

SEQ ID NO: 254968 - DNA, 15 bp, Homo sapiens
agggaggaaccccta

SEQ ID NO: 254969 - DNA, 15 bp, Homo sapiens
gagggaggaacccct

SEQ ID NO: 254970 - DNA, 15 bp, Homo sapiens
ggagggaggaacccc

SEQ ID NO: 254971 - DNA, 15 bp, Homo sapiens
aggagggaggaaccc

SEQ ID NO: 254972 - DNA, 15 bp, Homo sapiens
aaggagggaggaacc

SEQ ID NO: 254973 - DNA, 15 bp, Homo sapiens
aaaggagggaggaac

SEQ ID NO: 254974 - DNA, 15 bp, Homo sapiens
caaaggagggaggaa

SEQ ID NO: 254975 - DNA, 15 bp, Homo sapiens
tcaaaggagggagga

SEQ ID NO: 254976 - DNA, 15 bp, Homo sapiens
ttcaaaggagggagg

SEQ ID NO: 254977 - DNA, 15 bp, Homo sapiens
cttcaaaggagggag

SEQ ID NO: 254978 - DNA, 15 bp, Homo sapiens
tcttcaaaggaggga

SEQ ID NO: 254979 - DNA, 15 bp, Homo sapiens
ctcttcaaaggaggg

SEQ ID NO: 254980 - DNA, 15 bp, Homo sapiens
tctcttcaaaggagg

SEQ ID NO: 254981 - DNA, 15 bp, Homo sapiens
atctcttcaaaggag

SEQ ID NO: 254982 - DNA, 15 bp, Homo sapiens
gatctcttcaaagga

SEQ ID NO: 254983 - DNA, 15 bp, Homo sapiens
ggatctcttcaaagg

SEQ ID NO: 254984 - DNA, 15 bp, Homo sapiens
tggatctcttcaaag

SEQ ID NO: 254985 - DNA, 15 bp, Homo sapiens
ttggatctcttcaaa

SEQ ID NO: 254986 - DNA, 15 bp, Homo sapiens
gttggatctcttcaa

SEQ ID NO: 254987 - DNA, 15 bp, Homo sapiens
ggttggatctcttca

SEQ ID NO: 254988 - DNA, 15 bp, Homo sapiens
aggttggatctcttc

SEQ ID NO: 254989 - DNA, 15 bp, Homo sapiens
caggttggatctctt

SEQ ID NO: 254990 - DNA, 15 bp, Homo sapiens
gcaggttggatctct

SEQ ID NO: 254991 - DNA, 15 bp, Homo sapiens
ggcaggttggatctc

SEQ ID NO: 254992 - DNA, 15 bp, Homo sapiens
gggcaggttggatct

SEQ ID NO: 254993 - DNA, 15 bp, Homo sapiens
tgggcaggttggatc

SEQ ID NO: 254994 - DNA, 15 bp, Homo sapiens
ctgggcaggttggat

SEQ ID NO: 254995 - DNA, 15 bp, Homo sapiens
tctgggcaggttgga

SEQ ID NO: 254996 - DNA, 15 bp, Homo sapiens
atctgggcaggttgg

SEQ ID NO: 254997 - DNA, 15 bp, Homo sapiens
catctgggcaggttg

SEQ ID NO: 254998 - DNA, 15 bp, Homo sapiens
tcatctgggcaggtt

SEQ ID NO: 254999 - DNA, 15 bp, Homo sapiens
ttcatctgggcaggt

SEQ ID NO: 255000 - DNA, 15 bp, Homo sapiens
gttcatctgggcagg

SEQ ID NO: 255001 - DNA, 15 bp, Homo sapiens
tgttcatctgggcag

SEQ ID NO: 255002 - DNA, 15 bp, Homo sapiens
ttgttcatctgggca

SEQ ID NO: 255003 - DNA, 15 bp, Homo sapiens
cttgttcatctgggc

SEQ ID NO: 255004 - DNA, 15 bp, Homo sapiens
gcttgttcatctggg

SEQ ID NO: 255005 - DNA, 15 bp, Homo sapiens
agcttgttcatctgg

SEQ ID NO: 255006 - DNA, 15 bp, Homo sapiens
tagcttgttcatctg

SEQ ID NO: 255007 - DNA, 15 bp, Homo sapiens
ctagcttgttcatct

SEQ ID NO: 255008 - DNA, 15 bp, Homo sapiens
gctagcttgttcatc

SEQ ID NO: 255009 - DNA, 15 bp, Homo sapiens
tgctagcttgttcat

SEQ ID NO: 255010 - DNA, 15 bp, Homo sapiens
gtgctagcttgttca

SEQ ID NO: 255011 - DNA, 15 bp, Homo sapiens
agtgctagcttgttc

SEQ ID NO: 255012 - DNA, 15 bp, Homo sapiens
tagtgctagcttgtt

SEQ ID NO: 255013 - DNA, 15 bp, Homo sapiens
atagtgctagcttgt

SEQ ID NO: 255014 - DNA, 15 bp, Homo sapiens
aatagtgctagcttg

SEQ ID NO: 255015 - DNA, 15 bp, Homo sapiens
gaatagtgctagctt

SEQ ID NO: 255016 - DNA, 15 bp, Homo sapiens
agaatagtgctagct

SEQ ID NO: 255017 - DNA, 15 bp, Homo sapiens
cagaatagtgctagc

SEQ ID NO: 255018 - DNA, 15 bp, Homo sapiens
tcagaatagtgctag

SEQ ID NO: 255019 - DNA, 15 bp, Homo sapiens
atcagaatagtgcta

SEQ ID NO: 255020 - DNA, 15 bp, Homo sapiens
catcagaatagtgct

SEQ ID NO: 255021 - DNA, 15 bp, Homo sapiens
tcatcagaatagtgc

SEQ ID NO: 255022 - DNA, 15 bp, Homo sapiens
gtcatcagaatagtg

SEQ ID NO: 255023 - DNA, 15 bp, Homo sapiens
tgtcatcagaatagt

SEQ ID NO: 255024 - DNA, 15 bp, Homo sapiens
ctgtcatcagaatag

SEQ ID NO: 255025 - DNA, 15 bp, Homo sapiens
cctgtcatcagaata

SEQ ID NO: 255026 - DNA, 15 bp, Homo sapiens
ccctgtcatcagaat

SEQ ID NO: 255027 - DNA, 15 bp, Homo sapiens
gccctgtcatcagaa

SEQ ID NO: 255028 - DNA, 15 bp, Homo sapiens
tgccctgtcatcaga

SEQ ID NO: 255029 - DNA, 15 bp, Homo sapiens
atgccctgtcatcag

SEQ ID NO: 255030 - DNA, 15 bp, Homo sapiens
catgccctgtcatca

SEQ ID NO: 255031 - DNA, 15 bp, Homo sapiens
ccatgccctgtcatc

SEQ ID NO: 255032 - DNA, 15 bp, Homo sapiens
accatgccctgtcat

SEQ ID NO: 255033 - DNA, 15 bp, Homo sapiens
aaccatgccctgtca

SEQ ID NO: 255034 - DNA, 15 bp, Homo sapiens
caaccatgccctgtc

SEQ ID NO: 255035 - DNA, 15 bp, Homo sapiens
tcaaccatgccctgt

SEQ ID NO: 255036 - DNA, 15 bp, Homo sapiens
ctcaaccatgccctg

SEQ ID NO: 255037 - DNA, 15 bp, Homo sapiens
actcaaccatgccct

SEQ ID NO: 255038 - DNA, 15 bp, Homo sapiens
cactcaaccatgccc

SEQ ID NO: 255039 - DNA, 15 bp, Homo sapiens
acactcaaccatgcc

SEQ ID NO: 255040 - DNA, 15 bp, Homo sapiens
gacactcaaccatgc

SEQ ID NO: 255041 - DNA, 15 bp, Homo sapiens
tgacactcaaccatg

SEQ ID NO: 255042 - DNA, 15 bp, Homo sapiens
ctgacactcaaccat

SEQ ID NO: 255043 - DNA, 15 bp, Homo sapiens
tctgacactcaacca

SEQ ID NO: 255044 - DNA, 15 bp, Homo sapiens
atctgacactcaacc

SEQ ID NO: 255045 - DNA, 15 bp, Homo sapiens
catctgacactcaac

SEQ ID NO: 255046 - DNA, 15 bp, Homo sapiens
ccatctgacactcaa

SEQ ID NO: 255047 - DNA, 15 bp, Homo sapiens
cccatctgacactca

SEQ ID NO: 255048 - DNA, 15 bp, Homo sapiens
acccatctgacactc

SEQ ID NO: 255049 - DNA, 15 bp, Homo sapiens
aacccatctgacact

SEQ ID NO: 255050 - DNA, 15 bp, Homo sapiens
gaacccatctgacac

SEQ ID NO: 255051 - DNA, 15 bp, Homo sapiens
tgaacccatctgaca

SEQ ID NO: 255052 - DNA, 15 bp, Homo sapiens
ttgaacccatctgac

SEQ ID NO: 255053 - DNA, 15 bp, Homo sapiens
tttgaacccatctga

SEQ ID NO: 255054 - DNA, 15 bp, Homo sapiens
ctttgaacccatctg

SEQ ID NO: 255055 - DNA, 15 bp, Homo sapiens
gctttgaacccatct

SEQ ID NO: 255056 - DNA, 15 bp, Homo sapiens
agctttgaacccatc

SEQ ID NO: 255057 - DNA, 15 bp, Homo sapiens
gagctttgaacccat

SEQ ID NO: 255058 - DNA, 15 bp, Homo sapiens
cgagctttgaaccca

SEQ ID NO: 255059 - DNA, 15 bp, Homo sapiens
acgagctttgaaccc

SEQ ID NO: 255060 - DNA, 15 bp, Homo sapiens
tacgagctttgaacc

SEQ ID NO: 255061 - DNA, 15 bp, Homo sapiens
ctacgagctttgaac

SEQ ID NO: 255062 - DNA, 15 bp, Homo sapiens
cctacgagctttgaa

SEQ ID NO: 255063 - DNA, 15 bp, Homo sapiens
tcctacgagctttga

SEQ ID NO: 255064 - DNA, 15 bp, Homo sapiens
atcctacgagctttg

SEQ ID NO: 255065 - DNA, 15 bp, Homo sapiens
catcctacgagcttt

SEQ ID NO: 255066 - DNA, 15 bp, Homo sapiens
tcatcctacgagctt

SEQ ID NO: 255067 - DNA, 15 bp, Homo sapiens
ctcatcctacgagct

SEQ ID NO: 255068 - DNA, 15 bp, Homo sapiens
gctcatcctacgagc

SEQ ID NO: 255069 - DNA, 15 bp, Homo sapiens
tgctcatcctacgag

SEQ ID NO: 255070 - DNA, 15 bp, Homo sapiens
gtgctcatcctacga

SEQ ID NO: 255071 - DNA, 15 bp, Homo sapiens
tgtgctcatcctacg

SEQ ID NO: 255072 - DNA, 15 bp, Homo sapiens
ctgtgctcatcctac

SEQ ID NO: 255073 - DNA, 15 bp, Homo sapiens
tctgtgctcatccta

SEQ ID NO: 255074 - DNA, 15 bp, Homo sapiens
ttctgtgctcatcct

SEQ ID NO: 255075 - DNA, 15 bp, Homo sapiens
attctgtgctcatcc

SEQ ID NO: 255076 - DNA, 15 bp, Homo sapiens
tattctgtgctcatc

SEQ ID NO: 255077 - DNA, 15 bp, Homo sapiens
ctattctgtgctcat

SEQ ID NO: 255078 - DNA, 15 bp, Homo sapiens
cctattctgtgctca

SEQ ID NO: 255079 - DNA, 15 bp, Homo sapiens
gcctattctgtgctc

SEQ ID NO: 255080 - DNA, 15 bp, Homo sapiens
agcctattctgtgct

SEQ ID NO: 255081 - DNA, 15 bp, Homo sapiens
cagcctattctgtgc

SEQ ID NO: 255082 - DNA, 15 bp, Homo sapiens
ccagcctattctgtg

SEQ ID NO: 255083 - DNA, 15 bp, Homo sapiens
tccagcctattctgt

SEQ ID NO: 255084 - DNA, 15 bp, Homo sapiens
ctccagcctattctg

SEQ ID NO: 255085 - DNA, 15 bp, Homo sapiens
actccagcctattct

SEQ ID NO: 255086 - DNA, 15 bp, Homo sapiens
gactccagcctattc

SEQ ID NO: 255087 - DNA, 15 bp, Homo sapiens
acagactccagccta

SEQ ID NO: 255088 - DNA, 15 bp, Homo sapiens
tacagactccagcct

SEQ ID NO: 255089 - DNA, 15 bp, Homo sapiens
ctacagactccagcc

SEQ ID NO: 255090 - DNA, 15 bp, Homo sapiens
actacagactccagc

SEQ ID NO: 255091 - DNA, 15 bp, Homo sapiens
cactacagactccag

SEQ ID NO: 255092 - DNA, 15 bp, Homo sapiens
ccactacagactcca

SEQ ID NO: 255093 - DNA, 15 bp, Homo sapiens
accactacagactcc

SEQ ID NO: 255094 - DNA, 15 bp, Homo sapiens
gaccactacagactc

SEQ ID NO: 255095 - DNA, 15 bp, Homo sapiens
ggaccactacagact

SEQ ID NO: 255096 - DNA, 15 bp, Homo sapiens
aggaccactacagac

SEQ ID NO: 255097 - DNA, 15 bp, Homo sapiens
gaggaccactacaga

SEQ ID NO: 255098 - DNA, 15 bp, Homo sapiens
ggaggaccactacag

SEQ ID NO: 255099 - DNA, 15 bp, Homo sapiens
gggaggaccactaca

SEQ ID NO: 255100 - DNA, 15 bp, Homo sapiens
agggaggaccactac

SEQ ID NO: 255101 - DNA, 15 bp, Homo sapiens
cagggaggaccacta

SEQ ID NO: 255102 - DNA, 15 bp, Homo sapiens
ccagggaggaccact

SEQ ID NO: 255103 - DNA, 15 bp, Homo sapiens
tccagggaggaccac

SEQ ID NO: 255104 - DNA, 15 bp, Homo sapiens
ctccagggaggacca

SEQ ID NO: 255105 - DNA, 15 bp, Homo sapiens
cctccagggaggacc

SEQ ID NO: 255106 - DNA, 15 bp, Homo sapiens
tcctccagggaggac

SEQ ID NO: 255107 - DNA, 15 bp, Homo sapiens
ctcctccagggagga

SEQ ID NO: 255108 - DNA, 15 bp, Homo sapiens
tctcctccagggagg

SEQ ID NO: 255109 - DNA, 15 bp, Homo sapiens
atctcctccagggag

SEQ ID NO: 255110 - DNA, 15 bp, Homo sapiens
catctcctccaggga

SEQ ID NO: 255111 - DNA, 15 bp, Homo sapiens
ccatctcctccaggg

SEQ ID NO: 255112 - DNA, 15 bp, Homo sapiens
cccatctcctccagg

SEQ ID NO: 255113 - DNA, 15 bp, Homo sapiens
ccccatctcctccag

SEQ ID NO: 255114 - DNA, 15 bp, Homo sapiens
accccatctcctcca

SEQ ID NO: 255115 - DNA, 15 bp, Homo sapiens
caccccatctcctcc

SEQ ID NO: 255116 - DNA, 15 bp, Homo sapiens
acaccccatctcctc

SEQ ID NO: 255117 - DNA, 15 bp, Homo sapiens
cacaccccatctcct

SEQ ID NO: 255118 - DNA, 15 bp, Homo sapiens
tcacaccccatctcc

SEQ ID NO: 255119 - DNA, 15 bp, Homo sapiens
ttcacaccccatctc

SEQ ID NO: 255120 - DNA, 15 bp, Homo sapiens
gttcacaccccatct

SEQ ID NO: 255121 - DNA, 15 bp, Homo sapiens
agttcacaccccatc

SEQ ID NO: 255122 - DNA, 15 bp, Homo sapiens
cagttcacaccccat

SEQ ID NO: 255123 - DNA, 15 bp, Homo sapiens
tcagttcacacccca

SEQ ID NO: 255124 - DNA, 15 bp, Homo sapiens
ctcagttcacacccc

SEQ ID NO: 255125 - DNA, 15 bp, Homo sapiens
gctcagttcacaccc

SEQ ID NO: 255126 - DNA, 15 bp, Homo sapiens
agctcagttcacacc

SEQ ID NO: 255127 - DNA, 15 bp, Homo sapiens
gagctcagttcacac

SEQ ID NO: 255128 - DNA, 15 bp, Homo sapiens
agagctcagttcaca

SEQ ID NO: 255129 - DNA, 15 bp, Homo sapiens
cagagctcagttcac

SEQ ID NO: 255130 - DNA, 15 bp, Homo sapiens
gcagagctcagttca

SEQ ID NO: 255131 - DNA, 15 bp, Homo sapiens
tgcagagctcagttc

SEQ ID NO: 255132 - DNA, 15 bp, Homo sapiens
ctgcagagctcagtt

SEQ ID NO: 255133 - DNA, 15 bp, Homo sapiens
cctgcagagctcagt

SEQ ID NO: 255134 - DNA, 15 bp, Homo sapiens
tcctgcagagctcag

SEQ ID NO: 255135 - DNA, 15 bp, Homo sapiens
gtcctgcagagctca

SEQ ID NO: 255136 - DNA, 15 bp, Homo sapiens
tgtcctgcagagctc

SEQ ID NO: 255137 - DNA, 15 bp, Homo sapiens
ctgtcctgcagagct

SEQ ID NO: 255138 - DNA, 15 bp, Homo sapiens
tctgtcctgcagagc

SEQ ID NO: 255139 - DNA, 15 bp, Homo sapiens
gtctgtcctgcagag

SEQ ID NO: 255140 - DNA, 15 bp, Homo sapiens
tgtctgtcctgcaga

SEQ ID NO: 255141 - DNA, 15 bp, Homo sapiens
ctgtctgtcctgcag

SEQ ID NO: 255142 - DNA, 15 bp, Homo sapiens
tctgtctgtcctgca

SEQ ID NO: 255143 - DNA, 15 bp, Homo sapiens
atctgtctgtcctgc

SEQ ID NO: 255144 - DNA, 15 bp, Homo sapiens
catctgtctgtcctg

SEQ ID NO: 255145 - DNA, 15 bp, Homo sapiens
gcatctgtctgtcct

SEQ ID NO: 255146 - DNA, 15 bp, Homo sapiens
tgcatctgtctgtcc

SEQ ID NO: 255147 - DNA, 15 bp, Homo sapiens
ctgcatctgtctgtc

SEQ ID NO: 255148 - DNA, 15 bp, Homo sapiens
tctgcatctgtctgt

SEQ ID NO: 255149 - DNA, 15 bp, Homo sapiens
ctctgcatctgtctg

SEQ ID NO: 255150 - DNA, 15 bp, Homo sapiens
tctctgcatctgtct

SEQ ID NO: 255151 - DNA, 15 bp, Homo sapiens
atctctgcatctgtc

SEQ ID NO: 255152 - DNA, 15 bp, Homo sapiens
catctctgcatctgt

SEQ ID NO: 255153 - DNA, 15 bp, Homo sapiens
tcatctctgcatctg

SEQ ID NO: 255154 - DNA, 15 bp, Homo sapiens
ctcatctctgcatct

SEQ ID NO: 255155 - DNA, 15 bp, Homo sapiens
tctcatctctgcatc

SEQ ID NO: 255156 - DNA, 15 bp, Homo sapiens
ttctcatctctgcat

SEQ ID NO: 255157 - DNA, 15 bp, Homo sapiens
cttctcatctctgca

SEQ ID NO: 255158 - DNA, 15 bp, Homo sapiens
ccttctcatctctgc

SEQ ID NO: 255159 - DNA, 15 bp, Homo sapiens
cccttctcatctctg

SEQ ID NO: 255160 - DNA, 15 bp, Homo sapiens
ccccttctcatctct

SEQ ID NO: 255161 - DNA, 15 bp, Homo sapiens
tccccttctcatctc

SEQ ID NO: 255162 - DNA, 15 bp, Homo sapiens
ctccccttctcatct

SEQ ID NO: 255163 - DNA, 15 bp, Homo sapiens
cctccccttctcatc

SEQ ID NO: 255164 - DNA, 15 bp, Homo sapiens
gcctccccttctcat

SEQ ID NO: 255165 - DNA, 15 bp, Homo sapiens
tgcctccccttctca

SEQ ID NO: 255166 - DNA, 15 bp, Homo sapiens
ctgcctccccttctc

SEQ ID NO: 255167 - DNA, 15 bp, Homo sapiens
gctgcctccccttct

SEQ ID NO: 255168 - DNA, 15 bp, Homo sapiens
tgctgcctccccttc

SEQ ID NO: 255169 - DNA, 15 bp, Homo sapiens
gtgctgcctcccctt

SEQ ID NO: 255170 - DNA, 15 bp, Homo sapiens
ggtgctgcctcccct

SEQ ID NO: 255171 - DNA, 15 bp, Homo sapiens
aggtgctgcctcccc

SEQ ID NO: 255172 - DNA, 15 bp, Homo sapiens
caggtgctgcctccc

SEQ ID NO: 255173 - DNA, 15 bp, Homo sapiens
gcaggtgctgcctcc

SEQ ID NO: 255174 - DNA, 15 bp, Homo sapiens
agcaggtgctgcctc

SEQ ID NO: 255175 - DNA, 15 bp, Homo sapiens
cagcaggtgctgcct

SEQ ID NO: 255176 - DNA, 15 bp, Homo sapiens
ccagcaggtgctgcc

SEQ ID NO: 255177 - DNA, 15 bp, Homo sapiens
tccagcaggtgctgc

SEQ ID NO: 255178 - DNA, 15 bp, Homo sapiens
ctccagcaggtgctg

SEQ ID NO: 255179 - DNA, 15 bp, Homo sapiens
tctccagcaggtgct

SEQ ID NO: 255180 - DNA, 15 bp, Homo sapiens
ttctccagcaggtgc

SEQ ID NO: 255181 - DNA, 15 bp, Homo sapiens
cttctccagcaggtg

SEQ ID NO: 255182 - DNA, 15 bp, Homo sapiens
tcttctccagcaggt

SEQ ID NO: 255183 - DNA, 15 bp, Homo sapiens
ctcttctccagcagg

SEQ ID NO: 255184 - DNA, 15 bp, Homo sapiens
gctcttctccagcag

SEQ ID NO: 255185 - DNA, 15 bp, Homo sapiens
tgctcttctccagca

SEQ ID NO: 255186 - DNA, 15 bp, Homo sapiens
ctgctcttctccagc

SEQ ID NO: 255187 - DNA, 15 bp, Homo sapiens
cctgctcttctccag

SEQ ID NO: 255188 - DNA, 15 bp, Homo sapiens
tcctgctcttctcca

SEQ ID NO: 255189 - DNA, 15 bp, Homo sapiens
ctcctgctcttctcc

SEQ ID NO: 255190 - DNA, 15 bp, Homo sapiens
gctcctgctcttctc

SEQ ID NO: 255191 - DNA, 15 bp, Homo sapiens
tgctcctgctcttct

SEQ ID NO: 255192 - DNA, 15 bp, Homo sapiens
ctgctcctgctcttc

SEQ ID NO: 255193 - DNA, 15 bp, Homo sapiens
tctgctcctgctctt

SEQ ID NO: 255194 - DNA, 15 bp, Homo sapiens
ctctgctcctgctct

SEQ ID NO: 255195 - DNA, 15 bp, Homo sapiens
cctctgctcctgctc

SEQ ID NO: 255196 - DNA, 15 bp, Homo sapiens
gcctctgctcctgct

SEQ ID NO: 255197 - DNA, 15 bp, Homo sapiens
agcctctgctcctgc

SEQ ID NO: 255198 - DNA, 15 bp, Homo sapiens
aagcctctgctcctg

SEQ ID NO: 255199 - DNA, 15 bp, Homo sapiens
taagcctctgctcct

SEQ ID NO: 255200 - DNA, 15 bp, Homo sapiens
ctaagcctctgctcc

SEQ ID NO: 255201 - DNA, 15 bp, Homo sapiens
cctaagcctctgctc

SEQ ID NO: 255202 - DNA, 15 bp, Homo sapiens
ccctaagcctctgct

SEQ ID NO: 255203 - DNA, 15 bp, Homo sapiens
accctaagcctctgc

SEQ ID NO: 255204 - DNA, 15 bp, Homo sapiens
gaccctaagcctctg

SEQ ID NO: 255205 - DNA, 15 bp, Homo sapiens
agaccctaagcctct

SEQ ID NO: 255206 - DNA, 15 bp, Homo sapiens
cagaccctaagcctc

SEQ ID NO: 255207 - DNA, 15 bp, Homo sapiens
acagaccctaagcct

SEQ ID NO: 255208 - DNA, 15 bp, Homo sapiens
tacagaccctaagcc

SEQ ID NO: 255209 - DNA, 15 bp, Homo sapiens
ttacagaccctaagc

SEQ ID NO: 255210 - DNA, 15 bp, Homo sapiens
cttacagaccctaag

SEQ ID NO: 255211 - DNA, 15 bp, Homo sapiens
ccttacagaccctaa

SEQ ID NO: 255212 - DNA, 15 bp, Homo sapiens
cccttacagacccta

SEQ ID NO: 255213 - DNA, 15 bp, Homo sapiens
gcccttacagaccct

SEQ ID NO: 255214 - DNA, 15 bp, Homo sapiens
ggcccttacagaccc

SEQ ID NO: 255215 - DNA, 15 bp, Homo sapiens
aggcccttacagacc

SEQ ID NO: 255216 - DNA, 15 bp, Homo sapiens
gaggcccttacagac

SEQ ID NO: 255217 - DNA, 15 bp, Homo sapiens
agaggcccttacaga

SEQ ID NO: 255218 - DNA, 15 bp, Homo sapiens
cagaggcccttacag

SEQ ID NO: 255219 - DNA, 15 bp, Homo sapiens
ccagaggcccttaca

SEQ ID NO: 255220 - DNA, 15 bp, Homo sapiens
gccagaggcccttac

SEQ ID NO: 255221 - DNA, 15 bp, Homo sapiens
agccagaggccctta

SEQ ID NO: 255222 - DNA, 15 bp, Homo sapiens
cagccagaggccctt

SEQ ID NO: 255223 - DNA, 15 bp, Homo sapiens
gcagccagaggccct

SEQ ID NO: 255224 - DNA, 15 bp, Homo sapiens
tgcagccagaggccc

SEQ ID NO: 255225 - DNA, 15 bp, Homo sapiens
ctgcagccagaggcc

SEQ ID NO: 255226 - DNA, 15 bp, Homo sapiens
cctgcagccagaggc

SEQ ID NO: 255227 - DNA, 15 bp, Homo sapiens
ccctgcagccagagg

SEQ ID NO: 255228 - DNA, 15 bp, Homo sapiens
cccctgcagccagag

SEQ ID NO: 255229 - DNA, 15 bp, Homo sapiens
tcccctgcagccaga

SEQ ID NO: 255230 - DNA, 15 bp, Homo sapiens
ctcccctgcagccag

SEQ ID NO: 255231 - DNA, 15 bp, Homo sapiens
cctcccctgcagcca

SEQ ID NO: 255232 - DNA, 15 bp, Homo sapiens
tcctcccctgcagcc

SEQ ID NO: 255233 - DNA, 15 bp, Homo sapiens
atcctcccctgcagc

SEQ ID NO: 255234 - DNA, 15 bp, Homo sapiens
aatcctcccctgcag

SEQ ID NO: 255235 - DNA, 15 bp, Homo sapiens
aaatcctcccctgca

SEQ ID NO: 255236 - DNA, 15 bp, Homo sapiens
aaaatcctcccctgc

SEQ ID NO: 255237 - DNA, 15 bp, Homo sapiens
gaaaatcctcccctg

SEQ ID NO: 255238 - DNA, 15 bp, Homo sapiens
cgaaaatcctcccct

SEQ ID NO: 255239 - DNA, 15 bp, Homo sapiens
gcgaaaatcctcccc

SEQ ID NO: 255240 - DNA, 15 bp, Homo sapiens
agcgaaaatcctccc

SEQ ID NO: 255241 - DNA, 15 bp, Homo sapiens
cagcgaaaatcctcc

SEQ ID NO: 255242 - DNA, 15 bp, Homo sapiens
tcagcgaaaatcctc

SEQ ID NO: 255243 - DNA, 15 bp, Homo sapiens
ctcagcgaaaatcct

SEQ ID NO: 255244 - DNA, 15 bp, Homo sapiens
tctcagcgaaaatcc

SEQ ID NO: 255245 - DNA, 15 bp, Homo sapiens
ctctcagcgaaaatc

SEQ ID NO: 255246 - DNA, 15 bp, Homo sapiens
gctctcagcgaaaat

SEQ ID NO: 255247 - DNA, 15 bp, Homo sapiens
agctctcagcgaaaa

SEQ ID NO: 255248 - DNA, 15 bp, Homo sapiens
cagctctcagcgaaa

SEQ ID NO: 255249 - DNA, 15 bp, Homo sapiens
tcagctctcagcgaa

SEQ ID NO: 255250 - DNA, 15 bp, Homo sapiens
ctcagctctcagcga

SEQ ID NO: 255251 - DNA, 15 bp, Homo sapiens
tctcagctctcagcg

SEQ ID NO: 255252 - DNA, 15 bp, Homo sapiens
ctctcagctctcagc

SEQ ID NO: 255253 - DNA, 15 bp, Homo sapiens
tctctcagctctcag

SEQ ID NO: 255254 - DNA, 15 bp, Homo sapiens
ctctctcagctctca

SEQ ID NO: 255255 - DNA, 15 bp, Homo sapiens
tctctctcagctctc

SEQ ID NO: 255256 - DNA, 15 bp, Homo sapiens
atctctctcagctct

SEQ ID NO: 255257 - DNA, 15 bp, Homo sapiens
catctctctcagctc

SEQ ID NO: 255258 - DNA, 15 bp, Homo sapiens
ccatctctctcagct

SEQ ID NO: 255259 - DNA, 15 bp, Homo sapiens
tccatctctctcagc

SEQ ID NO: 255260 - DNA, 15 bp, Homo sapiens
ctccatctctctcag

SEQ ID NO: 255261 - DNA, 15 bp, Homo sapiens
cctccatctctctca

SEQ ID NO: 255262 - DNA, 15 bp, Homo sapiens
gcctccatctctctc

SEQ ID NO: 255263 - DNA, 15 bp, Homo sapiens
tgcctccatctctct

SEQ ID NO: 255264 - DNA, 15 bp, Homo sapiens
ctgcctccatctctc

SEQ ID NO: 255265 - DNA, 15 bp, Homo sapiens
tctgcctccatctct

SEQ ID NO: 255266 - DNA, 15 bp, Homo sapiens
ctctgcctccatctc

SEQ ID NO: 255267 - DNA, 15 bp, Homo sapiens
gctctgcctccatct

SEQ ID NO: 255268 - DNA, 15 bp, Homo sapiens
ggctctgcctccatc

SEQ ID NO: 255269 - DNA, 15 bp, Homo sapiens
tggctctgcctccat

SEQ ID NO: 255270 - DNA, 15 bp, Homo sapiens
atggctctgcctcca

SEQ ID NO: 255271 - DNA, 15 bp, Homo sapiens
gatggctctgcctcc

SEQ ID NO: 255272 - DNA, 15 bp, Homo sapiens
ggatggctctgcctc

SEQ ID NO: 255273 - DNA, 15 bp, Homo sapiens
gggatggctctgcct

SEQ ID NO: 255274 - DNA, 15 bp, Homo sapiens
cgggatggctctgcc

SEQ ID NO: 255275 - DNA, 15 bp, Homo sapiens
ccgggatggctctgc

SEQ ID NO: 255276 - DNA, 15 bp, Homo sapiens
cccgggatggctctg

SEQ ID NO: 255277 - DNA, 15 bp, Homo sapiens
gcccgggatggctct

SEQ ID NO: 255278 - DNA, 15 bp, Homo sapiens
tgcccgggatggctc

SEQ ID NO: 255279 - DNA, 15 bp, Homo sapiens
ttgcccgggatggct

SEQ ID NO: 255280 - DNA, 15 bp, Homo sapiens
tttgcccgggatggc

SEQ ID NO: 255281 - DNA, 15 bp, Homo sapiens
ctttgcccgggatgg

SEQ ID NO: 255282 - DNA, 15 bp, Homo sapiens
tctttgcccgggatg

SEQ ID NO: 255283 - DNA, 15 bp, Homo sapiens
ctctttgcccgggat

SEQ ID NO: 255284 - DNA, 15 bp, Homo sapiens
tctctttgcccggga

SEQ ID NO: 255285 - DNA, 15 bp, Homo sapiens
ttctctttgcccggg

SEQ ID NO: 255286 - DNA, 15 bp, Homo sapiens
tttctctttgcccgg

SEQ ID NO: 255287 - DNA, 15 bp, Homo sapiens
ttttctctttgcccg

SEQ ID NO: 255288 - DNA, 15 bp, Homo sapiens
tttttctctttgccc

SEQ ID NO: 255289 - DNA, 15 bp, Homo sapiens
ctttttctctttgcc

SEQ ID NO: 255290 - DNA, 15 bp, Homo sapiens
gctttttctctttgc

SEQ ID NO: 255291 - DNA, 15 bp, Homo sapiens
ggctttttctctttg

SEQ ID NO: 255292 - DNA, 15 bp, Homo sapiens
gggctttttctcttt

SEQ ID NO: 255293 - DNA, 15 bp, Homo sapiens
ggggctttttctctt

SEQ ID NO: 255294 - DNA, 15 bp, Homo sapiens
tggggctttttctct

SEQ ID NO: 255295 - DNA, 15 bp, Homo sapiens
gtggggctttttctc

SEQ ID NO: 255296 - DNA, 15 bp, Homo sapiens
ggtggggctttttct

SEQ ID NO: 255297 - DNA, 15 bp, Homo sapiens
gggtggggctttttc

SEQ ID NO: 255298 - DNA, 15 bp, Homo sapiens
agggtggggcttttt

SEQ ID NO: 255299 - DNA, 15 bp, Homo sapiens
cagggtggggctttt

SEQ ID NO: 255300 - DNA, 15 bp, Homo sapiens
ccagggtggggcttt

SEQ ID NO: 255301 - DNA, 15 bp, Homo sapiens
gccagggtggggctt

SEQ ID NO: 255302 - DNA, 15 bp, Homo sapiens
tgccagggtggggct

SEQ ID NO: 255303 - DNA, 15 bp, Homo sapiens
atgccagggtggggc

SEQ ID NO: 255304 - DNA, 15 bp, Homo sapiens
catgccagggtgggg

SEQ ID NO: 255305 - DNA, 15 bp, Homo sapiens
acatgccagggtggg

SEQ ID NO: 255306 - DNA, 15 bp, Homo sapiens
aacatgccagggtgg

SEQ ID NO: 255307 - DNA, 15 bp, Homo sapiens
aaacatgccagggtg

SEQ ID NO: 255308 - DNA, 15 bp, Homo sapiens
taaacatgccagggt

SEQ ID NO: 255309 - DNA, 15 bp, Homo sapiens
aataaacatgccagg

SEQ ID NO: 255310 - DNA, 15 bp, Homo sapiens
gaataaacatgccag

SEQ ID NO: 255311 - DNA, 15 bp, Homo sapiens
ggaataaacatgcca

SEQ ID NO: 255312 - DNA, 15 bp, Homo sapiens
aggaataaacatgcc

SEQ ID NO: 255313 - DNA, 15 bp, Homo sapiens
gaggaataaacatgc

SEQ ID NO: 255314 - DNA, 15 bp, Homo sapiens
tgaggaataaacatg

SEQ ID NO: 255315 - DNA, 15 bp, Homo sapiens
ctgaggaataaacat

SEQ ID NO: 255316 - DNA, 15 bp, Homo sapiens
actgaggaataaaca

SEQ ID NO: 255317 - DNA, 15 bp, Homo sapiens
gactgaggaataaac

SEQ ID NO: 255318 - DNA, 15 bp, Homo sapiens
agactgaggaataaa

SEQ ID NO: 255319 - DNA, 15 bp, Homo sapiens
gagactgaggaataa

SEQ ID NO: 255320 - DNA, 15 bp, Homo sapiens
agagactgaggaata

SEQ ID NO: 255321 - DNA, 15 bp, Homo sapiens
cagagactgaggaat

SEQ ID NO: 255322 - DNA, 15 bp, Homo sapiens
ccagagactgaggaa

SEQ ID NO: 255323 - DNA, 15 bp, Homo sapiens
accagagactgagga

SEQ ID NO: 255324 - DNA, 15 bp, Homo sapiens
aaccagagactgagg

SEQ ID NO: 255325 - DNA, 15 bp, Homo sapiens
caaccagagactgag

SEQ ID NO: 255326 - DNA, 15 bp, Homo sapiens
acaaccagagactga

SEQ ID NO: 255327 - DNA, 15 bp, Homo sapiens
cacaaccagagactg

SEQ ID NO: 255328 - DNA, 15 bp, Homo sapiens
tcacaaccagagact

SEQ ID NO: 255329 - DNA, 15 bp, Homo sapiens
atcacaaccagagac

SEQ ID NO: 255330 - DNA, 15 bp, Homo sapiens
catcacaaccagaga

SEQ ID NO: 255331 - DNA, 15 bp, Homo sapiens
acatcacaaccagag

SEQ ID NO: 255332 - DNA, 15 bp, Homo sapiens
tacatcacaaccaga

SEQ ID NO: 255333 - DNA, 15 bp, Homo sapiens
ctacatcacaaccag

SEQ ID NO: 255334 - DNA, 15 bp, Homo sapiens
actacatcacaacca

SEQ ID NO: 255335 - DNA, 15 bp, Homo sapiens
tactacatcacaacc

SEQ ID NO: 255336 - DNA, 15 bp, Homo sapiens
ttactacatcacaac

SEQ ID NO: 255337 - DNA, 15 bp, Homo sapiens
attactacatcacaa

SEQ ID NO: 255338 - DNA, 15 bp, Homo sapiens
aattactacatcaca

SEQ ID NO: 255339 - DNA, 15 bp, Homo sapiens
caattactacatcac

SEQ ID NO: 255340 - DNA, 15 bp, Homo sapiens
tcaattactacatca

SEQ ID NO: 255341 - DNA, 15 bp, Homo sapiens
ctcaattactacatc

SEQ ID NO: 255342 - DNA, 15 bp, Homo sapiens
gctcaattactacat

SEQ ID NO: 255343 - DNA, 15 bp, Homo sapiens
ggctcaattactaca

SEQ ID NO: 255344 - DNA, 15 bp, Homo sapiens
tggctcaattactac

SEQ ID NO: 255345 - DNA, 15 bp, Homo sapiens
ctggctcaattacta

SEQ ID NO: 255346 - DNA, 15 bp, Homo sapiens
cctggctcaattact

SEQ ID NO: 255347 - DNA, 15 bp, Homo sapiens
ccctggctcaattac

SEQ ID NO: 255348 - DNA, 15 bp, Homo sapiens
tccctggctcaatta

SEQ ID NO: 255349 - DNA, 15 bp, Homo sapiens
atccctggctcaatt

SEQ ID NO: 255350 - DNA, 15 bp, Homo sapiens
gatccctggctcaat

SEQ ID NO: 255351 - DNA, 15 bp, Homo sapiens
ggatccctggctcaa

SEQ ID NO: 255352 - DNA, 15 bp, Homo sapiens
tggatccctggctca

SEQ ID NO: 255353 - DNA, 15 bp, Homo sapiens
ttggatccctggctc

SEQ ID NO: 255354 - DNA, 15 bp, Homo sapiens
gttggatccctggct

SEQ ID NO: 255355 - DNA, 15 bp, Homo sapiens
ggttggatccctggc

SEQ ID NO: 255356 - DNA, 15 bp, Homo sapiens
gggttggatccctgg

SEQ ID NO: 255357 - DNA, 15 bp, Homo sapiens
tgggttggatccctg

SEQ ID NO: 255358 - DNA, 15 bp, Homo sapiens
ctgggttggatccct

SEQ ID NO: 255359 - DNA, 15 bp, Homo sapiens
gctgggttggatccc

SEQ ID NO: 255360 - DNA, 15 bp, Homo sapiens
agctgggttggatcc

SEQ ID NO: 255361 - DNA, 15 bp, Homo sapiens
tagctgggttggatc

SEQ ID NO: 255362 - DNA, 15 bp, Homo sapiens
atagctgggttggat

SEQ ID NO: 255363 - DNA, 15 bp, Homo sapiens
tatagctgggttgga

SEQ ID NO: 255364 - DNA, 15 bp, Homo sapiens
gtatagctgggttgg

SEQ ID NO: 255365 - DNA, 15 bp, Homo sapiens
agtatagctgggttg

SEQ ID NO: 255366 - DNA, 15 bp, Homo sapiens
aagtatagctgggtt

SEQ ID NO: 255367 - DNA, 15 bp, Homo sapiens
taagtatagctgggt

SEQ ID NO: 255368 - DNA, 15 bp, Homo sapiens
ctaagtatagctggg

SEQ ID NO: 255369 - DNA, 15 bp, Homo sapiens
gctaagtatagctgg

SEQ ID NO: 255370 - DNA, 15 bp, Homo sapiens
tgctaagtatagctg

SEQ ID NO: 255371 - DNA, 15 bp, Homo sapiens
gtgctaagtatagct

SEQ ID NO: 255372 - DNA, 15 bp, Homo sapiens
ggtgctaagtatagc

SEQ ID NO: 255373 - DNA, 15 bp, Homo sapiens
tggtgctaagtatag

SEQ ID NO: 255374 - DNA, 15 bp, Homo sapiens
atggtgctaagtata

SEQ ID NO: 255375 - DNA, 15 bp, Homo sapiens
aatggtgctaagtat

SEQ ID NO: 255376 - DNA, 15 bp, Homo sapiens
aaatggtgctaagta

SEQ ID NO: 255377 - DNA, 15 bp, Homo sapiens
gaaatggtgctaagt

SEQ ID NO: 255378 - DNA, 15 bp, Homo sapiens
ggaaatggtgctaag

SEQ ID NO: 255379 - DNA, 15 bp, Homo sapiens
tggaaatggtgctaa

SEQ ID NO: 255380 - DNA, 15 bp, Homo sapiens
ctggaaatggtgcta

SEQ ID NO: 255381 - DNA, 15 bp, Homo sapiens
tctggaaatggtgct

SEQ ID NO: 255382 - DNA, 15 bp, Homo sapiens
ttctggaaatggtgc

SEQ ID NO: 255383 - DNA, 15 bp, Homo sapiens
cttctggaaatggtg

SEQ ID NO: 255384 - DNA, 15 bp, Homo sapiens
ccttctggaaatggt

SEQ ID NO: 255385 - DNA, 15 bp, Homo sapiens
gccttctggaaatgg

SEQ ID NO: 255386 - DNA, 15 bp, Homo sapiens
tgccttctggaaatg

SEQ ID NO: 255387 - DNA, 15 bp, Homo sapiens
atgccttctggaaat

SEQ ID NO: 255388 - DNA, 15 bp, Homo sapiens
catgccttctggaaa

SEQ ID NO: 255389 - DNA, 15 bp, Homo sapiens
tcatgccttctggaa

SEQ ID NO: 255390 - DNA, 15 bp, Homo sapiens
ctcatgccttctgga

SEQ ID NO: 255391 - DNA, 15 bp, Homo sapiens
cctcatgccttctgg

SEQ ID NO: 255392 - DNA, 15 bp, Homo sapiens
ccctcatgccttctg

SEQ ID NO: 255393 - DNA, 15 bp, Homo sapiens
gccctcatgccttct

SEQ ID NO: 255394 - DNA, 15 bp, Homo sapiens
cgccctcatgccttc

SEQ ID NO: 255395 - DNA, 15 bp, Homo sapiens
ccgccctcatgcctt

SEQ ID NO: 255396 - DNA, 15 bp, Homo sapiens
cccgccctcatgcct

SEQ ID NO: 255397 - DNA, 15 bp, Homo sapiens
tcccgccctcatgcc

SEQ ID NO: 255398 - DNA, 15 bp, Homo sapiens
ctcccgccctcatgc

SEQ ID NO: 255399 - DNA, 15 bp, Homo sapiens
tctcccgccctcatg

SEQ ID NO: 255400 - DNA, 15 bp, Homo sapiens
atctcccgccctcat

SEQ ID NO: 255401 - DNA, 15 bp, Homo sapiens
catctcccgccctca

SEQ ID NO: 255402 - DNA, 15 bp, Homo sapiens
ccatctcccgccctc

SEQ ID NO: 255403 - DNA, 15 bp, Homo sapiens
cccatctcccgccct

SEQ ID NO: 255404 - DNA, 15 bp, Homo sapiens
acccatctcccgccc

SEQ ID NO: 255405 - DNA, 15 bp, Homo sapiens
tacccatctcccgcc

SEQ ID NO: 255406 - DNA, 15 bp, Homo sapiens
atacccatctcccgc

SEQ ID NO: 255407 - DNA, 15 bp, Homo sapiens
tatacccatctcccg

SEQ ID NO: 255408 - DNA, 15 bp, Homo sapiens
atatacccatctccc

SEQ ID NO: 255409 - DNA, 15 bp, Homo sapiens
tatatacccatctcc

SEQ ID NO: 255410 - DNA, 15 bp, Homo sapiens
ttatatacccatctc

SEQ ID NO: 255411 - DNA, 15 bp, Homo sapiens
tttatatacccatct

SEQ ID NO: 255412 - DNA, 15 bp, Homo sapiens
ttttatatacccatc

SEQ ID NO: 255413 - DNA, 15 bp, Homo sapiens
cttttatatacccat

SEQ ID NO: 255414 - DNA, 15 bp, Homo sapiens
ccttttatataccca

SEQ ID NO: 255415 - DNA, 15 bp, Homo sapiens
gccttttatataccc

SEQ ID NO: 255416 - DNA, 15 bp, Homo sapiens
tgccttttatatacc

SEQ ID NO: 255417 - DNA, 15 bp, Homo sapiens
ctgccttttatatac

SEQ ID NO: 255418 - DNA, 15 bp, Homo sapiens
cctgccttttatata

SEQ ID NO: 255419 - DNA, 15 bp, Homo sapiens
tcctgccttttatat

SEQ ID NO: 255420 - DNA, 15 bp, Homo sapiens
ctcctgccttttata

SEQ ID NO: 255421 - DNA, 15 bp, Homo sapiens
actcctgccttttat

SEQ ID NO: 255422 - DNA, 15 bp, Homo sapiens
gactcctgcctttta

SEQ ID NO: 255423 - DNA, 15 bp, Homo sapiens
agactcctgcctttt

SEQ ID NO: 255424 - DNA, 15 bp, Homo sapiens
cagactcctgccttt

SEQ ID NO: 255425 - DNA, 15 bp, Homo sapiens
ccagactcctgcctt

SEQ ID NO: 255426 - DNA, 15 bp, Homo sapiens
cccagactcctgcct

SEQ ID NO: 255427 - DNA, 15 bp, Homo sapiens
ccccagactcctgcc

SEQ ID NO: 255428 - DNA, 15 bp, Homo sapiens
gccccagactcctgc

SEQ ID NO: 255429 - DNA, 15 bp, Homo sapiens
agccccagactcctg

SEQ ID NO: 255430 - DNA, 15 bp, Homo sapiens
gagccccagactcct

SEQ ID NO: 255431 - DNA, 15 bp, Homo sapiens
ggagccccagactcc

SEQ ID NO: 255432 - DNA, 15 bp, Homo sapiens
aggagccccagactc

SEQ ID NO: 255433 - DNA, 15 bp, Homo sapiens
gaggagccccagact

SEQ ID NO: 255434 - DNA, 15 bp, Homo sapiens
tgaggagccccagac

SEQ ID NO: 255435 - DNA, 15 bp, Homo sapiens
gtgaggagccccaga

SEQ ID NO: 255436 - DNA, 15 bp, Homo sapiens
agtgaggagccccag

SEQ ID NO: 255437 - DNA, 15 bp, Homo sapiens
gagtgaggagcccca

SEQ ID NO: 255438 - DNA, 15 bp, Homo sapiens
tgagtgaggagcccc

SEQ ID NO: 255439 - DNA, 15 bp, Homo sapiens
ctgagtgaggagccc

SEQ ID NO: 255440 - DNA, 15 bp, Homo sapiens
tctgagtgaggagcc

SEQ ID NO: 255441 - DNA, 15 bp, Homo sapiens
ctctgagtgaggagc

SEQ ID NO: 255442 - DNA, 15 bp, Homo sapiens
cctctgagtgaggag

SEQ ID NO: 255443 - DNA, 15 bp, Homo sapiens
gcctctgagtgagga

SEQ ID NO: 255444 - DNA, 15 bp, Homo sapiens
agcctctgagtgagg

SEQ ID NO: 255445 - DNA, 15 bp, Homo sapiens
aagcctctgagtgag

SEQ ID NO: 255446 - DNA, 15 bp, Homo sapiens
gaagcctctgagtga

SEQ ID NO: 255447 - DNA, 15 bp, Homo sapiens
agaagcctctgagtg

SEQ ID NO: 255448 - DNA, 15 bp, Homo sapiens
cagaagcctctgagt

SEQ ID NO: 255449 - DNA, 15 bp, Homo sapiens
tcagaagcctctgag

SEQ ID NO: 255450 - DNA, 15 bp, Homo sapiens
ttcagaagcctctga

SEQ ID NO: 255451 - DNA, 15 bp, Homo sapiens
tttcagaagcctctg

SEQ ID NO: 255452 - DNA, 15 bp, Homo sapiens
gtttcagaagcctct

SEQ ID NO: 255453 - DNA, 15 bp, Homo sapiens
ggtttcagaagcctc

SEQ ID NO: 255454 - DNA, 15 bp, Homo sapiens
aggtttcagaagcct

SEQ ID NO: 255455 - DNA, 15 bp, Homo sapiens
caggtttcagaagcc

SEQ ID NO: 255456 - DNA, 15 bp, Homo sapiens
tcaggtttcagaagc

SEQ ID NO: 255457 - DNA, 15 bp, Homo sapiens
ctcaggtttcagaag

SEQ ID NO: 255458 - DNA, 15 bp, Homo sapiens
actcaggtttcagaa

SEQ ID NO: 255459 - DNA, 15 bp, Homo sapiens
cactcaggtttcaga

SEQ ID NO: 255460 - DNA, 15 bp, Homo sapiens
ccactcaggtttcag

SEQ ID NO: 255461 - DNA, 15 bp, Homo sapiens
gccactcaggtttca

SEQ ID NO: 255462 - DNA, 15 bp, Homo sapiens
tgccactcaggtttc

SEQ ID NO: 255463 - DNA, 15 bp, Homo sapiens
atgccactcaggttt

SEQ ID NO: 255464 - DNA, 15 bp, Homo sapiens
aatgccactcaggtt

SEQ ID NO: 255465 - DNA, 15 bp, Homo sapiens
aaatgccactcaggt

SEQ ID NO: 255466 - DNA, 15 bp, Homo sapiens
aaaatgccactcagg

SEQ ID NO: 255467 - DNA, 15 bp, Homo sapiens
gaaaatgccactcag

SEQ ID NO: 255468 - DNA, 15 bp, Homo sapiens
tgaaaatgccactca

SEQ ID NO: 255469 - DNA, 15 bp, Homo sapiens
ctgaaaatgccactc

SEQ ID NO: 255470 - DNA, 15 bp, Homo sapiens
actgaaaatgccact

SEQ ID NO: 255471 - DNA, 15 bp, Homo sapiens
cactgaaaatgccac

SEQ ID NO: 255472 - DNA, 15 bp, Homo sapiens
acactgaaaatgcca

SEQ ID NO: 255473 - DNA, 15 bp, Homo sapiens
tacactgaaaatgcc

SEQ ID NO: 255474 - DNA, 15 bp, Homo sapiens
atacactgaaaatgc

SEQ ID NO: 255475 - DNA, 15 bp, Homo sapiens
gatacactgaaaatg

SEQ ID NO: 255476 - DNA, 15 bp, Homo sapiens
ggatacactgaaaat

SEQ ID NO: 255477 - DNA, 15 bp, Homo sapiens
gggatacactgaaaa

SEQ ID NO: 255478 - DNA, 15 bp, Homo sapiens
agggatacactgaaa

SEQ ID NO: 255479 - DNA, 15 bp, Homo sapiens
cagggatacactgaa

SEQ ID NO: 255480 - DNA, 15 bp, Homo sapiens
acagggatacactga

SEQ ID NO: 255481 - DNA, 15 bp, Homo sapiens
cacagggatacactg

SEQ ID NO: 255482 - DNA, 15 bp, Homo sapiens
ccacagggatacact

SEQ ID NO: 255483 - DNA, 15 bp, Homo sapiens
tccacagggatacac

SEQ ID NO: 255484 - DNA, 15 bp, Homo sapiens
ctccacagggataca

SEQ ID NO: 255485 - DNA, 15 bp, Homo sapiens
cctccacagggatac

SEQ ID NO: 255486 - DNA, 15 bp, Homo sapiens
tcctccacagggata

SEQ ID NO: 255487 - DNA, 15 bp, Homo sapiens
ttcctccacagggat

SEQ ID NO: 255488 - DNA, 15 bp, Homo sapiens
tttcctccacaggga

SEQ ID NO: 255489 - DNA, 15 bp, Homo sapiens
atttcctccacaggg

SEQ ID NO: 255490 - DNA, 15 bp, Homo sapiens
gatttcctccacagg

SEQ ID NO: 255491 - DNA, 15 bp, Homo sapiens
agatttcctccacag

SEQ ID NO: 255492 - DNA, 15 bp, Homo sapiens
gagatttcctccaca

SEQ ID NO: 255493 - DNA, 15 bp, Homo sapiens
ggagatttcctccac

SEQ ID NO: 255494 - DNA, 15 bp, Homo sapiens
cggagatttcctcca

SEQ ID NO: 255495 - DNA, 15 bp, Homo sapiens
tcggagatttcctcc

SEQ ID NO: 255496 - DNA, 15 bp, Homo sapiens
ttcggagatttcctc

SEQ ID NO: 255497 - DNA, 15 bp, Homo sapiens
tttcggagatttcct

SEQ ID NO: 255498 - DNA, 15 bp, Homo sapiens
ctttcggagatttcc

SEQ ID NO: 255499 - DNA, 15 bp, Homo sapiens
tctttcggagatttc

SEQ ID NO: 255500 - DNA, 15 bp, Homo sapiens
ttctttcggagattt

SEQ ID NO: 255501 - DNA, 15 bp, Homo sapiens
cttctttcggagatt

SEQ ID NO: 255502 - DNA, 15 bp, Homo sapiens
ccttctttcggagat

SEQ ID NO: 255503 - DNA, 15 bp, Homo sapiens
accttctttcggaga

SEQ ID NO: 255504 - DNA, 15 bp, Homo sapiens
taccttctttcggag

SEQ ID NO: 255505 - DNA, 15 bp, Homo sapiens
ctaccttctttcgga

SEQ ID NO: 255506 - DNA, 15 bp, Homo sapiens
gctaccttctttcgg

SEQ ID NO: 255507 - DNA, 15 bp, Homo sapiens
agctaccttctttcg

SEQ ID NO: 255508 - DNA, 15 bp, Homo sapiens
cagctaccttctttc

SEQ ID NO: 255509 - DNA, 15 bp, Homo sapiens
tcagctaccttcttt

SEQ ID NO: 255510 - DNA, 15 bp, Homo sapiens
ctcagctaccttctt

SEQ ID NO: 255511 - DNA, 15 bp, Homo sapiens
actcagctaccttct

SEQ ID NO: 255512 - DNA, 15 bp, Homo sapiens
gactcagctaccttc

SEQ ID NO: 255513 - DNA, 15 bp, Homo sapiens
agactcagctacctt

SEQ ID NO: 255514 - DNA, 15 bp, Homo sapiens
cagactcagctacct

SEQ ID NO: 255515 - DNA, 15 bp, Homo sapiens
acagactcagctacc

SEQ ID NO: 255516 - DNA, 15 bp, Homo sapiens
cacagactcagctac

SEQ ID NO: 255517 - DNA, 15 bp, Homo sapiens
tcacagactcagcta

SEQ ID NO: 255518 - DNA, 15 bp, Homo sapiens
gtcacagactcagct

SEQ ID NO: 255519 - DNA, 15 bp, Homo sapiens
ggtcacagactcagc

SEQ ID NO: 255520 - DNA, 15 bp, Homo sapiens
tggtcacagactcag

SEQ ID NO: 255521 - DNA, 15 bp, Homo sapiens
ttggtcacagactca

SEQ ID NO: 255522 - DNA, 15 bp, Homo sapiens
tttggtcacagactc

SEQ ID NO: 255523 - DNA, 15 bp, Homo sapiens
ctttggtcacagact

SEQ ID NO: 255524 - DNA, 15 bp, Homo sapiens
tctttggtcacagac

SEQ ID NO: 255525 - DNA, 15 bp, Homo sapiens
ctctttggtcacaga

SEQ ID NO: 255526 - DNA, 15 bp, Homo sapiens
tctctttggtcacag

SEQ ID NO: 255527 - DNA, 15 bp, Homo sapiens
ctctctttggtcaca

SEQ ID NO: 255528 - DNA, 15 bp, Homo sapiens
cctctctttggtcac

SEQ ID NO: 255529 - DNA, 15 bp, Homo sapiens
gcctctctttggtca

SEQ ID NO: 255530 - DNA, 15 bp, Homo sapiens
agcctctctttggtc

SEQ ID NO: 255531 - DNA, 15 bp, Homo sapiens
aagcctctctttggt

SEQ ID NO: 255532 - DNA, 15 bp, Homo sapiens
caagcctctctttgg

SEQ ID NO: 255533 - DNA, 15 bp, Homo sapiens
tcaagcctctctttg

SEQ ID NO: 255534 - DNA, 15 bp, Homo sapiens
ctcaagcctctcttt

SEQ ID NO: 255535 - DNA, 15 bp, Homo sapiens
actcaagcctctctt

SEQ ID NO: 255536 - DNA, 15 bp, Homo sapiens
gactcaagcctctct

SEQ ID NO: 255537 - DNA, 15 bp, Homo sapiens
ggactcaagcctctc

SEQ ID NO: 255538 - DNA, 15 bp, Homo sapiens
aggactcaagcctct

SEQ ID NO: 255539 - DNA, 15 bp, Homo sapiens
caggactcaagcctc

SEQ ID NO: 255540 - DNA, 15 bp, Homo sapiens
acaggactcaagcct

SEQ ID NO: 255541 - DNA, 15 bp, Homo sapiens
aacaggactcaagcc

SEQ ID NO: 255542 - DNA, 15 bp, Homo sapiens
aaacaggactcaagc

SEQ ID NO: 255543 - DNA, 15 bp, Homo sapiens
gaaacaggactcaag

SEQ ID NO: 255544 - DNA, 15 bp, Homo sapiens
ggaaacaggactcaa

SEQ ID NO: 255545 - DNA, 15 bp, Homo sapiens
aggaaacaggactca

SEQ ID NO: 255546 - DNA, 15 bp, Homo sapiens
aaggaaacaggactc

SEQ ID NO: 255547 - DNA, 15 bp, Homo sapiens
aaaggaaacaggact

SEQ ID NO: 255548 - DNA, 15 bp, Homo sapiens
aaaaggaaacaggac

SEQ ID NO: 255549 - DNA, 15 bp, Homo sapiens
gaaaaggaaacagga

SEQ ID NO: 255550 - DNA, 15 bp, Homo sapiens
tgaaaaggaaacagg

SEQ ID NO: 255551 - DNA, 15 bp, Homo sapiens
gtgaaaaggaaacag

SEQ ID NO: 255552 - DNA, 15 bp, Homo sapiens
agtgaaaaggaaaca

SEQ ID NO: 255553 - DNA, 15 bp, Homo sapiens
gagtgaaaaggaaac

SEQ ID NO: 255554 - DNA, 15 bp, Homo sapiens
agagtgaaaaggaaa

SEQ ID NO: 255555 - DNA, 15 bp, Homo sapiens
gagagtgaaaaggaa

SEQ ID NO: 255556 - DNA, 15 bp, Homo sapiens
tgagagtgaaaagga

SEQ ID NO: 255557 - DNA, 15 bp, Homo sapiens
ttgagagtgaaaagg

SEQ ID NO: 255558 - DNA, 15 bp, Homo sapiens
cttgagagtgaaaag

SEQ ID NO: 255559 - DNA, 15 bp, Homo sapiens
tcttgagagtgaaaa

SEQ ID NO: 255560 - DNA, 15 bp, Homo sapiens
ctcttgagagtgaaa

SEQ ID NO: 255561 - DNA, 15 bp, Homo sapiens
gctcttgagagtgaa

SEQ ID NO: 255562 - DNA, 15 bp, Homo sapiens
ggctcttgagagtga

SEQ ID NO: 255563 - DNA, 15 bp, Homo sapiens
aggctcttgagagtg

SEQ ID NO: 255564 - DNA, 15 bp, Homo sapiens
aaggctcttgagagt

SEQ ID NO: 255565 - DNA, 15 bp, Homo sapiens
gaaggctcttgagag

SEQ ID NO: 255566 - DNA, 15 bp, Homo sapiens
tgaaggctcttgaga

SEQ ID NO: 255567 - DNA, 15 bp, Homo sapiens
ctgaaggctcttgag

SEQ ID NO: 255568 - DNA, 15 bp, Homo sapiens
cctgaaggctcttga

SEQ ID NO: 255569 - DNA, 15 bp, Homo sapiens
gcctgaaggctcttg

SEQ ID NO: 255570 - DNA, 15 bp, Homo sapiens
agcctgaaggctctt

SEQ ID NO: 255571 - DNA, 15 bp, Homo sapiens
gagcctgaaggctct

SEQ ID NO: 255572 - DNA, 15 bp, Homo sapiens
tgagcctgaaggctc

SEQ ID NO: 255573 - DNA, 15 bp, Homo sapiens
gtgagcctgaaggct

SEQ ID NO: 255574 - DNA, 15 bp, Homo sapiens
agtgagcctgaaggc

SEQ ID NO: 255575 - DNA, 15 bp, Homo sapiens
gagtgagcctgaagg

SEQ ID NO: 255576 - DNA, 15 bp, Homo sapiens
tgagtgagcctgaag

SEQ ID NO: 255577 - DNA, 15 bp, Homo sapiens
gtgagtgagcctgaa

SEQ ID NO: 255578 - DNA, 15 bp, Homo sapiens
ggtgagtgagcctga

SEQ ID NO: 255579 - DNA, 15 bp, Homo sapiens
gggtgagtgagcctg

SEQ ID NO: 255580 - DNA, 15 bp, Homo sapiens
ggggtgagtgagcct

SEQ ID NO: 255581 - DNA, 15 bp, Homo sapiens
aggggtgagtgagcc

SEQ ID NO: 255582 - DNA, 15 bp, Homo sapiens
aaggggtgagtgagc

SEQ ID NO: 255583 - DNA, 15 bp, Homo sapiens
gaaggggtgagtgag

SEQ ID NO: 255584 - DNA, 15 bp, Homo sapiens
ggaaggggtgagtga

SEQ ID NO: 255585 - DNA, 15 bp, Homo sapiens
gggaaggggtgagtg

SEQ ID NO: 255586 - DNA, 15 bp, Homo sapiens
agggaaggggtgagt

SEQ ID NO: 255587 - DNA, 15 bp, Homo sapiens
aagggaaggggtgag

SEQ ID NO: 255588 - DNA, 15 bp, Homo sapiens
taagggaaggggtga

SEQ ID NO: 255589 - DNA, 15 bp, Homo sapiens
gtaagggaaggggtg

SEQ ID NO: 255590 - DNA, 15 bp, Homo sapiens
tgtaagggaaggggt

SEQ ID NO: 255591 - DNA, 15 bp, Homo sapiens
ctgtaagggaagggg

SEQ ID NO: 255592 - DNA, 15 bp, Homo sapiens
tctgtaagggaaggg

SEQ ID NO: 255593 - DNA, 15 bp, Homo sapiens
atctgtaagggaagg

SEQ ID NO: 255594 - DNA, 15 bp, Homo sapiens
tatctgtaagggaag

SEQ ID NO: 255595 - DNA, 15 bp, Homo sapiens
gtatctgtaagggaa

SEQ ID NO: 255596 - DNA, 15 bp, Homo sapiens
agtatctgtaaggga

SEQ ID NO: 255597 - DNA, 15 bp, Homo sapiens
aagtatctgtaaggg

SEQ ID NO: 255598 - DNA, 15 bp, Homo sapiens
aaagtatctgtaagg

SEQ ID NO: 255599 - DNA, 15 bp, Homo sapiens
caaagtatctgtaag

SEQ ID NO: 255600 - DNA, 15 bp, Homo sapiens
gcaaagtatctgtaa

SEQ ID NO: 255601 - DNA, 15 bp, Homo sapiens
agcaaagtatctgta

SEQ ID NO: 255602 - DNA, 15 bp, Homo sapiens
cagcaaagtatctgt

SEQ ID NO: 255603 - DNA, 15 bp, Homo sapiens
ccagcaaagtatctg

SEQ ID NO: 255604 - DNA, 15 bp, Homo sapiens
tccagcaaagtatct

SEQ ID NO: 255605 - DNA, 15 bp, Homo sapiens
ctccagcaaagtatc

SEQ ID NO: 255606 - DNA, 15 bp, Homo sapiens
gctccagcaaagtat

SEQ ID NO: 255607 - DNA, 15 bp, Homo sapiens
agctccagcaaagta

SEQ ID NO: 255608 - DNA, 15 bp, Homo sapiens
gagctccagcaaagt

SEQ ID NO: 255609 - DNA, 15 bp, Homo sapiens
ggagctccagcaaag

SEQ ID NO: 255610 - DNA, 15 bp, Homo sapiens
aggagctccagcaaa

SEQ ID NO: 255611 - DNA, 15 bp, Homo sapiens
gaggagctccagcaa

SEQ ID NO: 255612 - DNA, 15 bp, Homo sapiens
ggaggagctccagca

SEQ ID NO: 255613 - DNA, 15 bp, Homo sapiens
aggaggagctccagc

SEQ ID NO: 255614 - DNA, 15 bp, Homo sapiens
caggaggagctccag

SEQ ID NO: 255615 - DNA, 15 bp, Homo sapiens
tcaggaggagctcca

SEQ ID NO: 255616 - DNA, 15 bp, Homo sapiens
gtcaggaggagctcc

SEQ ID NO: 255617 - DNA, 15 bp, Homo sapiens
tgtcaggaggagctc

SEQ ID NO: 255618 - DNA, 15 bp, Homo sapiens
atgtcaggaggagct

SEQ ID NO: 255619 - DNA, 15 bp, Homo sapiens
catgtcaggaggagc

SEQ ID NO: 255620 - DNA, 15 bp, Homo sapiens
tcatgtcaggaggag

SEQ ID NO: 255621 - DNA, 15 bp, Homo sapiens
atcatgtcaggagga

SEQ ID NO: 255622 - DNA, 15 bp, Homo sapiens
aatcatgtcaggagg

SEQ ID NO: 255623 - DNA, 15 bp, Homo sapiens
caatcatgtcaggag

SEQ ID NO: 255624 - DNA, 15 bp, Homo sapiens
acaatcatgtcagga

SEQ ID NO: 255625 - DNA, 15 bp, Homo sapiens
tacaatcatgtcagg

SEQ ID NO: 255626 - DNA, 15 bp, Homo sapiens
atacaatcatgtcag

SEQ ID NO: 255627 - DNA, 15 bp, Homo sapiens
aatacaatcatgtca

SEQ ID NO: 255628 - DNA, 15 bp, Homo sapiens
taatacaatcatgtc

SEQ ID NO: 255629 - DNA, 15 bp, Homo sapiens
ctaatacaatcatgt

SEQ ID NO: 255630 - DNA, 15 bp, Homo sapiens
actaatacaatcatg

SEQ ID NO: 255631 - DNA, 15 bp, Homo sapiens
tactaatacaatcat

SEQ ID NO: 255632 - DNA, 15 bp, Homo sapiens
ttactaatacaatca

SEQ ID NO: 255633 - DNA, 15 bp, Homo sapiens
tttactaatacaatc

SEQ ID NO: 255634 - DNA, 15 bp, Homo sapiens
ctttactaatacaat

SEQ ID NO: 255635 - DNA, 15 bp, Homo sapiens
tctttactaatacaa

SEQ ID NO: 255636 - DNA, 15 bp, Homo sapiens
ctctttactaataca

SEQ ID NO: 255637 - DNA, 15 bp, Homo sapiens
tctctttactaatac

SEQ ID NO: 255638 - DNA, 15 bp, Homo sapiens
ctctctttactaata

SEQ ID NO: 255639 - DNA, 15 bp, Homo sapiens
cctctctttactaat

SEQ ID NO: 255640 - DNA, 15 bp, Homo sapiens
gcctctctttactaa

SEQ ID NO: 255641 - DNA, 15 bp, Homo sapiens
cgcctctctttacta

SEQ ID NO: 255642 - DNA, 15 bp, Homo sapiens
gcgcctctctttact

SEQ ID NO: 255643 - DNA, 15 bp, Homo sapiens
ggcgcctctctttac

SEQ ID NO: 255644 - DNA, 15 bp, Homo sapiens
tggcgcctctcttta

SEQ ID NO: 255645 - DNA, 15 bp, Homo sapiens
ttggcgcctctcttt

SEQ ID NO: 255646 - DNA, 15 bp, Homo sapiens
attggcgcctctctt

SEQ ID NO: 255647 - DNA, 15 bp, Homo sapiens
tattggcgcctctct

SEQ ID NO: 255648 - DNA, 15 bp, Homo sapiens
ttattggcgcctctc

SEQ ID NO: 255649 - DNA, 15 bp, Homo sapiens
gttattggcgcctct

SEQ ID NO: 255650 - DNA, 15 bp, Homo sapiens
tgttattggcgcctc

SEQ ID NO: 255651 - DNA, 15 bp, Homo sapiens
ttgttattggcgcct

SEQ ID NO: 255652 - DNA, 15 bp, Homo sapiens
tttgttattggcgcc

SEQ ID NO: 255653 - DNA, 15 bp, Homo sapiens
atttgttattggcgc

SEQ ID NO: 255654 - DNA, 15 bp, Homo sapiens
catttgttattggcg

SEQ ID NO: 255655 - DNA, 15 bp, Homo sapiens
ccatttgttattggc

SEQ ID NO: 255656 - DNA, 15 bp, Homo sapiens
gccatttgttattgg

SEQ ID NO: 255657 - DNA, 15 bp, Homo sapiens
ggccatttgttattg

SEQ ID NO: 255658 - DNA, 15 bp, Homo sapiens
gggccatttgttatt

SEQ ID NO: 255659 - DNA, 15 bp, Homo sapiens
ggggccatttgttat

SEQ ID NO: 255660 - DNA, 15 bp, Homo sapiens
gggggccatttgtta

SEQ ID NO: 255661 - DNA, 15 bp, Homo sapiens
tgggggccatttgtt

SEQ ID NO: 255662 - DNA, 15 bp, Homo sapiens
ttgggggccatttgt

SEQ ID NO: 255663 - DNA, 15 bp, Homo sapiens
tttgggggccatttg

SEQ ID NO: 255664 - DNA, 15 bp, Homo sapiens
atttgggggccattt

SEQ ID NO: 255665 - DNA, 15 bp, Homo sapiens
gatttgggggccatt

SEQ ID NO: 255666 - DNA, 15 bp, Homo sapiens
agatttgggggccat

SEQ ID NO: 255667 - DNA, 15 bp, Homo sapiens
gagatttgggggcca

SEQ ID NO: 255668 - DNA, 15 bp, Homo sapiens
tgagatttgggggcc

SEQ ID NO: 255669 - DNA, 15 bp, Homo sapiens
ctgagatttgggggc

SEQ ID NO: 255670 - DNA, 15 bp, Homo sapiens
actgagatttggggg

SEQ ID NO: 255671 - DNA, 15 bp, Homo sapiens
gactgagatttgggg

SEQ ID NO: 255672 - DNA, 15 bp, Homo sapiens
cgactgagatttggg

SEQ ID NO: 255673 - DNA, 15 bp, Homo sapiens
ccgactgagatttgg

SEQ ID NO: 255674 - DNA, 15 bp, Homo sapiens
tccgactgagatttg

SEQ ID NO: 255675 - DNA, 15 bp, Homo sapiens
atccgactgagattt

SEQ ID NO: 255676 - DNA, 15 bp, Homo sapiens
aatccgactgagatt

SEQ ID NO: 255677 - DNA, 15 bp, Homo sapiens
gaatccgactgagat

SEQ ID NO: 255678 - DNA, 15 bp, Homo sapiens
agaatccgactgaga

SEQ ID NO: 255679 - DNA, 15 bp, Homo sapiens
cagaatccgactgag

SEQ ID NO: 255680 - DNA, 15 bp, Homo sapiens
gcagaatccgactga

SEQ ID NO: 255681 - DNA, 15 bp, Homo sapiens
tgcagaatccgactg

SEQ ID NO: 255682 - DNA, 15 bp, Homo sapiens
ttgcagaatccgact

SEQ ID NO: 255683 - DNA, 15 bp, Homo sapiens
gttgcagaatccgac

SEQ ID NO: 255684 - DNA, 15 bp, Homo sapiens
tgttgcagaatccga

SEQ ID NO: 255685 - DNA, 15 bp, Homo sapiens
ttgttgcagaatccg

SEQ ID NO: 255686 - DNA, 15 bp, Homo sapiens
tttgttgcagaatcc

SEQ ID NO: 255687 - DNA, 15 bp, Homo sapiens
ctttgttgcagaatc

SEQ ID NO: 255688 - DNA, 15 bp, Homo sapiens
cctttgttgcagaat

SEQ ID NO: 255689 - DNA, 15 bp, Homo sapiens
acctttgttgcagaa

SEQ ID NO: 255690 - DNA, 15 bp, Homo sapiens
cacctttgttgcaga

SEQ ID NO: 255691 - DNA, 15 bp, Homo sapiens
acacctttgttgcag

SEQ ID NO: 255692 - DNA, 15 bp, Homo sapiens
tacacctttgttgca

SEQ ID NO: 255693 - DNA, 15 bp, Homo sapiens
atacacctttgttgc

SEQ ID NO: 255694 - DNA, 15 bp, Homo sapiens
aatacacctttgttg

SEQ ID NO: 255695 - DNA, 15 bp, Homo sapiens
aaatacacctttgtt

SEQ ID NO: 255696 - DNA, 15 bp, Homo sapiens
gaaatacacctttgt

SEQ ID NO: 255697 - DNA, 15 bp, Homo sapiens
agaaatacacctttg

SEQ ID NO: 255698 - DNA, 15 bp, Homo sapiens
aagaaatacaccttt

SEQ ID NO: 255699 - DNA, 15 bp, Homo sapiens
caagaaatacacctt

SEQ ID NO: 255700 - DNA, 15 bp, Homo sapiens
gcaagaaatacacct

SEQ ID NO: 255701 - DNA, 15 bp, Homo sapiens
agcaagaaatacacc

SEQ ID NO: 255702 - DNA, 15 bp, Homo sapiens
aagcaagaaatacac

SEQ ID NO: 255703 - DNA, 15 bp, Homo sapiens
caagcaagaaataca

SEQ ID NO: 255704 - DNA, 15 bp, Homo sapiens
acaagcaagaaatac

SEQ ID NO: 255705 - DNA, 15 bp, Homo sapiens
gacaagcaagaaata

SEQ ID NO: 255706 - DNA, 15 bp, Homo sapiens
ggacaagcaagaaat

SEQ ID NO: 255707 - DNA, 15 bp, Homo sapiens
aggacaagcaagaaa

SEQ ID NO: 255708 - DNA, 15 bp, Homo sapiens
aaggacaagcaagaa

SEQ ID NO: 255709 - DNA, 15 bp, Homo sapiens
gaaggacaagcaaga

SEQ ID NO: 255710 - DNA, 15 bp, Homo sapiens
tgaaggacaagcaag

SEQ ID NO: 255711 - DNA, 15 bp, Homo sapiens
atgaaggacaagcaa

SEQ ID NO: 255712 - DNA, 15 bp, Homo sapiens
catgaaggacaagca

SEQ ID NO: 255713 - DNA, 15 bp, Homo sapiens
acatgaaggacaagc

SEQ ID NO: 255714 - DNA, 15 bp, Homo sapiens
aacatgaaggacaag

SEQ ID NO: 255715 - DNA, 15 bp, Homo sapiens
gaacatgaaggacaa

SEQ ID NO: 255716 - DNA, 15 bp, Homo sapiens
agaacatgaaggaca

SEQ ID NO: 255717 - DNA, 15 bp, Homo sapiens
cagaacatgaaggac

SEQ ID NO: 255718 - DNA, 15 bp, Homo sapiens
acagaacatgaagga

SEQ ID NO: 255719 - DNA, 15 bp, Homo sapiens
tacagaacatgaagg

SEQ ID NO: 255720 - DNA, 15 bp, Homo sapiens
atacagaacatgaag

SEQ ID NO: 255721 - DNA, 15 bp, Homo sapiens
tatacagaacatgaa

SEQ ID NO: 255722 - DNA, 15 bp, Homo sapiens
ctatacagaacatga

SEQ ID NO: 255723 - DNA, 15 bp, Homo sapiens
cctatacagaacatg

SEQ ID NO: 255724 - DNA, 15 bp, Homo sapiens
acctatacagaacat

SEQ ID NO: 255725 - DNA, 15 bp, Homo sapiens
aacctatacagaaca

SEQ ID NO: 255726 - DNA, 15 bp, Homo sapiens
caacctatacagaac

SEQ ID NO: 255727 - DNA, 15 bp, Homo sapiens
acaacctatacagaa

SEQ ID NO: 255728 - DNA, 15 bp, Homo sapiens
tacaacctatacaga

SEQ ID NO: 255729 - DNA, 15 bp, Homo sapiens
gtacaacctatacag

SEQ ID NO: 255730 - DNA, 15 bp, Homo sapiens
agtacaacctataca

SEQ ID NO: 255731 - DNA, 15 bp, Homo sapiens
cagtacaacctatac

SEQ ID NO: 255732 - DNA, 15 bp, Homo sapiens
tcagtacaacctata

SEQ ID NO: 255733 - DNA, 15 bp, Homo sapiens
ttcagtacaacctat

SEQ ID NO: 255734 - DNA, 15 bp, Homo sapiens
tttcagtacaaccta

SEQ ID NO: 255735 - DNA, 15 bp, Homo sapiens
gtttcagtacaacct

SEQ ID NO: 255736 - DNA, 15 bp, Homo sapiens
ggtttcagtacaacc

SEQ ID NO: 255737 - DNA, 15 bp, Homo sapiens
gggtttcagtacaac

SEQ ID NO: 255738 - DNA, 15 bp, Homo sapiens
ggggtttcagtacaa

SEQ ID NO: 255739 - DNA, 15 bp, Homo sapiens
aggggtttcagtaca

SEQ ID NO: 255740 - DNA, 15 bp, Homo sapiens
caggggtttcagtac

SEQ ID NO: 255741 - DNA, 15 bp, Homo sapiens
gcaggggtttcagta

SEQ ID NO: 255742 - DNA, 15 bp, Homo sapiens
agcaggggtttcagt

SEQ ID NO: 255743 - DNA, 15 bp, Homo sapiens
aagcaggggtttcag

SEQ ID NO: 255744 - DNA, 15 bp, Homo sapiens
gaagcaggggtttca

SEQ ID NO: 255745 - DNA, 15 bp, Homo sapiens
agaagcaggggtttc

SEQ ID NO: 255746 - DNA, 15 bp, Homo sapiens
cagaagcaggggttt

SEQ ID NO: 255747 - DNA, 15 bp, Homo sapiens
ccagaagcaggggtt

SEQ ID NO: 255748 - DNA, 15 bp, Homo sapiens
tccagaagcaggggt

SEQ ID NO: 255749 - DNA, 15 bp, Homo sapiens
ctccagaagcagggg

SEQ ID NO: 255750 - DNA, 15 bp, Homo sapiens
gctccagaagcaggg

SEQ ID NO: 255751 - DNA, 15 bp, Homo sapiens
ggctccagaagcagg

SEQ ID NO: 255752 - DNA, 15 bp, Homo sapiens
tggctccagaagcag

SEQ ID NO: 255753 - DNA, 15 bp, Homo sapiens
atggctccagaagca

SEQ ID NO: 255754 - DNA, 15 bp, Homo sapiens
aatggctccagaagc

SEQ ID NO: 255755 - DNA, 15 bp, Homo sapiens
aaatggctccagaag

SEQ ID NO: 255756 - DNA, 15 bp, Homo sapiens
aaaatggctccagaa

SEQ ID NO: 255757 - DNA, 15 bp, Homo sapiens
gaaaatggctccaga

SEQ ID NO: 255758 - DNA, 15 bp, Homo sapiens
ggaaaatggctccag

SEQ ID NO: 255759 - DNA, 15 bp, Homo sapiens
gggaaaatggctcca

SEQ ID NO: 255760 - DNA, 15 bp, Homo sapiens
ggggaaaatggctcc

SEQ ID NO: 255761 - DNA, 15 bp, Homo sapiens
gggggaaaatggctc

SEQ ID NO: 255762 - DNA, 15 bp, Homo sapiens
tgggggaaaatggct

SEQ ID NO: 255763 - DNA, 15 bp, Homo sapiens
ttgggggaaaatggc

SEQ ID NO: 255764 - DNA, 15 bp, Homo sapiens
cttgggggaaaatgg

SEQ ID NO: 255765 - DNA, 15 bp, Homo sapiens
tcttgggggaaaatg

SEQ ID NO: 255766 - DNA, 15 bp, Homo sapiens
atcttgggggaaaat

SEQ ID NO: 255767 - DNA, 15 bp, Homo sapiens
aatcttgggggaaaa

SEQ ID NO: 255768 - DNA, 15 bp, Homo sapiens
gaatcttgggggaaa

SEQ ID NO: 255769 - DNA, 15 bp, Homo sapiens
agaatcttgggggaa

SEQ ID NO: 255770 - DNA, 15 bp, Homo sapiens
aagaatcttggggga

SEQ ID NO: 255771 - DNA, 15 bp, Homo sapiens
gaagaatcttggggg

SEQ ID NO: 255772 - DNA, 15 bp, Homo sapiens
tgaagaatcttgggg

SEQ ID NO: 255773 - DNA, 15 bp, Homo sapiens
atgaagaatcttggg

SEQ ID NO: 255774 - DNA, 15 bp, Homo sapiens
aatgaagaatcttgg

SEQ ID NO: 255775 - DNA, 15 bp, Homo sapiens
aaatgaagaatcttg

SEQ ID NO: 255776 - DNA, 15 bp, Homo sapiens
aaaatgaagaatctt

SEQ ID NO: 255777 - DNA, 15 bp, Homo sapiens
taaaatgaagaatct

SEQ ID NO: 255778 - DNA, 15 bp, Homo sapiens
ttaaaatgaagaatc

SEQ ID NO: 255779 - DNA, 15 bp, Homo sapiens
gttaaaatgaagaat

SEQ ID NO: 255780 - DNA, 15 bp, Homo sapiens
tgttaaaatgaagaa

SEQ ID NO: 255781 - DNA, 15 bp, Homo sapiens
atgttaaaatgaaga

SEQ ID NO: 255782 - DNA, 15 bp, Homo sapiens
catgttaaaatgaag

SEQ ID NO: 255783 - DNA, 15 bp, Homo sapiens
acatgttaaaatgaa

SEQ ID NO: 255784 - DNA, 15 bp, Homo sapiens
gacatgttaaaatga

SEQ ID NO: 255785 - DNA, 15 bp, Homo sapiens
ggacatgttaaaatg

SEQ ID NO: 255786 - DNA, 15 bp, Homo sapiens
aggacatgttaaaat

SEQ ID NO: 255787 - DNA, 15 bp, Homo sapiens
aaggacatgttaaaa

SEQ ID NO: 255788 - DNA, 15 bp, Homo sapiens
gaaggacatgttaaa

SEQ ID NO: 255789 - DNA, 15 bp, Homo sapiens
ggaaggacatgttaa

SEQ ID NO: 255790 - DNA, 15 bp, Homo sapiens
tggaaggacatgtta

SEQ ID NO: 255791 - DNA, 15 bp, Homo sapiens
atggaaggacatgtt

SEQ ID NO: 255792 - DNA, 15 bp, Homo sapiens
aatggaaggacatgt

SEQ ID NO: 255793 - DNA, 15 bp, Homo sapiens
aaatggaaggacatg

SEQ ID NO: 255794 - DNA, 15 bp, Homo sapiens
caaatggaaggacat

SEQ ID NO: 255795 - DNA, 15 bp, Homo sapiens
gcaaatggaaggaca

SEQ ID NO: 255796 - DNA, 15 bp, Homo sapiens
ggcaaatggaaggac

SEQ ID NO: 255797 - DNA, 15 bp, Homo sapiens
tggcaaatggaagga

SEQ ID NO: 255798 - DNA, 15 bp, Homo sapiens
atggcaaatggaagg

SEQ ID NO: 255799 - DNA, 15 bp, Homo sapiens
tatggcaaatggaag

SEQ ID NO: 255800 - DNA, 15 bp, Homo sapiens
gtatggcaaatggaa

SEQ ID NO: 255801 - DNA, 15 bp, Homo sapiens
agtatggcaaatgga

SEQ ID NO: 255802 - DNA, 15 bp, Homo sapiens
cagtatggcaaatgg

SEQ ID NO: 255803 - DNA, 15 bp, Homo sapiens
gcagtatggcaaatg

SEQ ID NO: 255804 - DNA, 15 bp, Homo sapiens
tgcagtatggcaaat

SEQ ID NO: 255805 - DNA, 15 bp, Homo sapiens
ctgcagtatggcaaa

SEQ ID NO: 255806 - DNA, 15 bp, Homo sapiens
cctgcagtatggcaa

SEQ ID NO: 255807 - DNA, 15 bp, Homo sapiens
tcctgcagtatggca

SEQ ID NO: 255808 - DNA, 15 bp, Homo sapiens
ttcctgcagtatggc

SEQ ID NO: 255809 - DNA, 15 bp, Homo sapiens
cttcctgcagtatgg

SEQ ID NO: 255810 - DNA, 15 bp, Homo sapiens
tcttcctgcagtatg

SEQ ID NO: 255811 - DNA, 15 bp, Homo sapiens
ttcttcctgcagtat

SEQ ID NO: 255812 - DNA, 15 bp, Homo sapiens
tttcttcctgcagta

SEQ ID NO: 255813 - DNA, 15 bp, Homo sapiens
ttttcttcctgcagt

SEQ ID NO: 255814 - DNA, 15 bp, Homo sapiens
gttttcttcctgcag

SEQ ID NO: 255815 - DNA, 15 bp, Homo sapiens
tgttttcttcctgca

SEQ ID NO: 255816 - DNA, 15 bp, Homo sapiens
atgttttcttcctgc

SEQ ID NO: 255817 - DNA, 15 bp, Homo sapiens
catgttttcttcctg

SEQ ID NO: 255818 - DNA, 15 bp, Homo sapiens
ccatgttttcttcct

SEQ ID NO: 255819 - DNA, 15 bp, Homo sapiens
tccatgttttcttcc

SEQ ID NO: 255820 - DNA, 15 bp, Homo sapiens
ctccatgttttcttc

SEQ ID NO: 255821 - DNA, 15 bp, Homo sapiens
tctccatgttttctt

SEQ ID NO: 255822 - DNA, 15 bp, Homo sapiens
ttctccatgttttct

SEQ ID NO: 255823 - DNA, 15 bp, Homo sapiens
gttctccatgttttc

SEQ ID NO: 255824 - DNA, 15 bp, Homo sapiens
agttctccatgtttt

SEQ ID NO: 255825 - DNA, 15 bp, Homo sapiens
cagttctccatgttt

SEQ ID NO: 255826 - DNA, 15 bp, Homo sapiens
gcagttctccatgtt

SEQ ID NO: 255827 - DNA, 15 bp, Homo sapiens
tgcagttctccatgt

SEQ ID NO: 255828 - DNA, 15 bp, Homo sapiens
gtgcagttctccatg

SEQ ID NO: 255829 - DNA, 15 bp, Homo sapiens
tgtgcagttctccat

SEQ ID NO: 255830 - DNA, 15 bp, Homo sapiens
ctgtgcagttctcca

SEQ ID NO: 255831 - DNA, 15 bp, Homo sapiens
gctgtgcagttctcc

SEQ ID NO: 255832 - DNA, 15 bp, Homo sapiens
agctgtgcagttctc

SEQ ID NO: 255833 - DNA, 15 bp, Homo sapiens
gagctgtgcagttct

SEQ ID NO: 255834 - DNA, 15 bp, Homo sapiens
ggagctgtgcagttc

SEQ ID NO: 255835 - DNA, 15 bp, Homo sapiens
aggagctgtgcagtt

SEQ ID NO: 255836 - DNA, 15 bp, Homo sapiens
taggagctgtgcagt

SEQ ID NO: 255837 - DNA, 15 bp, Homo sapiens
ttaggagctgtgcag

SEQ ID NO: 255838 - DNA, 15 bp, Homo sapiens
tttaggagctgtgca

SEQ ID NO: 255839 - DNA, 15 bp, Homo sapiens
ctttaggagctgtgc

SEQ ID NO: 255840 - DNA, 15 bp, Homo sapiens
actttaggagctgtg

SEQ ID NO: 255841 - DNA, 15 bp, Homo sapiens
aactttaggagctgt

SEQ ID NO: 255842 - DNA, 15 bp, Homo sapiens
aaactttaggagctg

SEQ ID NO: 255843 - DNA, 15 bp, Homo sapiens
gaaactttaggagct

SEQ ID NO: 255844 - DNA, 15 bp, Homo sapiens
agaaactttaggagc

SEQ ID NO: 255845 - DNA, 15 bp, Homo sapiens
cagaaactttaggag

SEQ ID NO: 255846 - DNA, 15 bp, Homo sapiens
gcagaaactttagga

SEQ ID NO: 255847 - DNA, 15 bp, Homo sapiens
ggcagaaactttagg

SEQ ID NO: 255848 - DNA, 15 bp, Homo sapiens
tggcagaaactttag

SEQ ID NO: 255849 - DNA, 15 bp, Homo sapiens
ttggcagaaacttta

SEQ ID NO: 255850 - DNA, 15 bp, Homo sapiens
tttggcagaaacttt

SEQ ID NO: 255851 - DNA, 15 bp, Homo sapiens
ttttggcagaaactt

SEQ ID NO: 255852 - DNA, 15 bp, Homo sapiens
attttggcagaaact

SEQ ID NO: 255853 - DNA, 15 bp, Homo sapiens
cattttggcagaaac

SEQ ID NO: 255854 - DNA, 15 bp, Homo sapiens
ccattttggcagaaa

SEQ ID NO: 255855 - DNA, 15 bp, Homo sapiens
cccattttggcagaa

SEQ ID NO: 255856 - DNA, 15 bp, Homo sapiens
tcccattttggcaga

SEQ ID NO: 255857 - DNA, 15 bp, Homo sapiens
gtcccattttggcag

SEQ ID NO: 255858 - DNA, 15 bp, Homo sapiens
tgtcccattttggca

SEQ ID NO: 255859 - DNA, 15 bp, Homo sapiens
atgtcccattttggc

SEQ ID NO: 255860 - DNA, 15 bp, Homo sapiens
tatgtcccattttgg

SEQ ID NO: 255861 - DNA, 15 bp, Homo sapiens
atatgtcccattttg

SEQ ID NO: 255862 - DNA, 15 bp, Homo sapiens
catatgtcccatttt

SEQ ID NO: 255863 - DNA, 15 bp, Homo sapiens
gcatatgtcccattt

SEQ ID NO: 255864 - DNA, 15 bp, Homo sapiens
ggcatatgtcccatt

SEQ ID NO: 255865 - DNA, 15 bp, Homo sapiens
tggcatatgtcccat

SEQ ID NO: 255866 - DNA, 15 bp, Homo sapiens
gtggcatatgtccca

SEQ ID NO: 255867 - DNA, 15 bp, Homo sapiens
agtggcatatgtccc

SEQ ID NO: 255868 - DNA, 15 bp, Homo sapiens
aagtggcatatgtcc

SEQ ID NO: 255869 - DNA, 15 bp, Homo sapiens
gaagtggcatatgtc

SEQ ID NO: 255870 - DNA, 15 bp, Homo sapiens
agaagtggcatatgt

SEQ ID NO: 255871 - DNA, 15 bp, Homo sapiens
cagaagtggcatatg

SEQ ID NO: 255872 - DNA, 15 bp, Homo sapiens
gcagaagtggcatat

SEQ ID NO: 255873 - DNA, 15 bp, Homo sapiens
agcagaagtggcata

SEQ ID NO: 255874 - DNA, 15 bp, Homo sapiens
cagcagaagtggcat

SEQ ID NO: 255875 - DNA, 15 bp, Homo sapiens
tcagcagaagtggca

SEQ ID NO: 255876 - DNA, 15 bp, Homo sapiens
atcagcagaagtggc

SEQ ID NO: 255877 - DNA, 15 bp, Homo sapiens
catcagcagaagtgg

SEQ ID NO: 255878 - DNA, 15 bp, Homo sapiens
acatcagcagaagtg

SEQ ID NO: 255879 - DNA, 15 bp, Homo sapiens
aacatcagcagaagt

SEQ ID NO: 255880 - DNA, 15 bp, Homo sapiens
aaacatcagcagaag

SEQ ID NO: 255881 - DNA, 15 bp, Homo sapiens
gaaacatcagcagaa

SEQ ID NO: 255882 - DNA, 15 bp, Homo sapiens
tgaaacatcagcaga

SEQ ID NO: 255883 - DNA, 15 bp, Homo sapiens
atgaaacatcagcag

SEQ ID NO: 255884 - DNA, 15 bp, Homo sapiens
aatgaaacatcagca

SEQ ID NO: 255885 - DNA, 15 bp, Homo sapiens
caatgaaacatcagc

SEQ ID NO: 255886 - DNA, 15 bp, Homo sapiens
ccaatgaaacatcag

SEQ ID NO: 255887 - DNA, 15 bp, Homo sapiens
gccaatgaaacatca

SEQ ID NO: 255888 - DNA, 15 bp, Homo sapiens
ggccaatgaaacatc

SEQ ID NO: 255889 - DNA, 15 bp, Homo sapiens
tggccaatgaaacat

SEQ ID NO: 255890 - DNA, 15 bp, Homo sapiens
ctggccaatgaaaca

SEQ ID NO: 255891 - DNA, 15 bp, Homo sapiens
actggccaatgaaac

SEQ ID NO: 255892 - DNA, 15 bp, Homo sapiens
cactggccaatgaaa

SEQ ID NO: 255893 - DNA, 15 bp, Homo sapiens
acactggccaatgaa

SEQ ID NO: 255894 - DNA, 15 bp, Homo sapiens
tacactggccaatga

SEQ ID NO: 255895 - DNA, 15 bp, Homo sapiens
ctacactggccaatg

SEQ ID NO: 255896 - DNA, 15 bp, Homo sapiens
cctacactggccaat

SEQ ID NO: 255897 - DNA, 15 bp, Homo sapiens
tcctacactggccaa

SEQ ID NO: 255898 - DNA, 15 bp, Homo sapiens
gtcctacactggcca

SEQ ID NO: 255899 - DNA, 15 bp, Homo sapiens
ggtcctacactggcc

SEQ ID NO: 255900 - DNA, 15 bp, Homo sapiens
gggtcctacactggc

SEQ ID NO: 255901 - DNA, 15 bp, Homo sapiens
tgggtcctacactgg

SEQ ID NO: 255902 - DNA, 15 bp, Homo sapiens
atgggtcctacactg

SEQ ID NO: 255903 - DNA, 15 bp, Homo sapiens
catgggtcctacact

SEQ ID NO: 255904 - DNA, 15 bp, Homo sapiens
ccatgggtcctacac

SEQ ID NO: 255905 - DNA, 15 bp, Homo sapiens
gccatgggtcctaca

SEQ ID NO: 255906 - DNA, 15 bp, Homo sapiens
agccatgggtcctac

SEQ ID NO: 255907 - DNA, 15 bp, Homo sapiens
aagccatgggtccta

SEQ ID NO: 255908 - DNA, 15 bp, Homo sapiens
taagccatgggtcct

SEQ ID NO: 255909 - DNA, 15 bp, Homo sapiens
ctaagccatgggtcc

SEQ ID NO: 255910 - DNA, 15 bp, Homo sapiens
gctaagccatgggtc

SEQ ID NO: 255911 - DNA, 15 bp, Homo sapiens
ggctaagccatgggt

SEQ ID NO: 255912 - DNA, 15 bp, Homo sapiens
aggctaagccatggg

SEQ ID NO: 255913 - DNA, 15 bp, Homo sapiens
taggctaagccatgg

SEQ ID NO: 255914 - DNA, 15 bp, Homo sapiens
ttaggctaagccatg

SEQ ID NO: 255915 - DNA, 15 bp, Homo sapiens
gttaggctaagccat

SEQ ID NO: 255916 - DNA, 15 bp, Homo sapiens
agttaggctaagcca

SEQ ID NO: 255917 - DNA, 15 bp, Homo sapiens
aagttaggctaagcc

SEQ ID NO: 255918 - DNA, 15 bp, Homo sapiens
gaagttaggctaagc

SEQ ID NO: 255919 - DNA, 15 bp, Homo sapiens
tgaagttaggctaag

SEQ ID NO: 255920 - DNA, 15 bp, Homo sapiens
ctgaagttaggctaa

SEQ ID NO: 255921 - DNA, 15 bp, Homo sapiens
tctgaagttaggcta

SEQ ID NO: 255922 - DNA, 15 bp, Homo sapiens
ctctgaagttaggct

SEQ ID NO: 255923 - DNA, 15 bp, Homo sapiens
cctctgaagttaggc

SEQ ID NO: 255924 - DNA, 15 bp, Homo sapiens
ccctctgaagttagg

SEQ ID NO: 255925 - DNA, 15 bp, Homo sapiens
accctctgaagttag

SEQ ID NO: 255926 - DNA, 15 bp, Homo sapiens
caccctctgaagtta

SEQ ID NO: 255927 - DNA, 15 bp, Homo sapiens
gcaccctctgaagtt

SEQ ID NO: 255928 - DNA, 15 bp, Homo sapiens
tgcaccctctgaagt

SEQ ID NO: 255929 - DNA, 15 bp, Homo sapiens
ctgcaccctctgaag

SEQ ID NO: 255930 - DNA, 15 bp, Homo sapiens
cctgcaccctctgaa

SEQ ID NO: 255931 - DNA, 15 bp, Homo sapiens
ccctgcaccctctga

SEQ ID NO: 255932 - DNA, 15 bp, Homo sapiens
accctgcaccctctg

SEQ ID NO: 255933 - DNA, 15 bp, Homo sapiens
taccctgcaccctct

SEQ ID NO: 255934 - DNA, 15 bp, Homo sapiens
ttaccctgcaccctc

SEQ ID NO: 255935 - DNA, 15 bp, Homo sapiens
attaccctgcaccct

SEQ ID NO: 255936 - DNA, 15 bp, Homo sapiens
cattaccctgcaccc

SEQ ID NO: 255937 - DNA, 15 bp, Homo sapiens
acattaccctgcacc

SEQ ID NO: 255938 - DNA, 15 bp, Homo sapiens
tacattaccctgcac

SEQ ID NO: 255939 - DNA, 15 bp, Homo sapiens
ttacattaccctgca

SEQ ID NO: 255940 - DNA, 15 bp, Homo sapiens
attacattaccctgc

SEQ ID NO: 255941 - DNA, 15 bp, Homo sapiens
gattacattaccctg

SEQ ID NO: 255942 - DNA, 15 bp, Homo sapiens
ggattacattaccct

SEQ ID NO: 255943 - DNA, 15 bp, Homo sapiens
aggattacattaccc

SEQ ID NO: 255944 - DNA, 15 bp, Homo sapiens
caggattacattacc

SEQ ID NO: 255945 - DNA, 15 bp, Homo sapiens
gcaggattacattac

SEQ ID NO: 255946 - DNA, 15 bp, Homo sapiens
agcaggattacatta

SEQ ID NO: 255947 - DNA, 15 bp, Homo sapiens
cagcaggattacatt

SEQ ID NO: 255948 - DNA, 15 bp, Homo sapiens
gcagcaggattacat

SEQ ID NO: 255949 - DNA, 15 bp, Homo sapiens
tgcagcaggattaca

SEQ ID NO: 255950 - DNA, 15 bp, Homo sapiens
atgcagcaggattac

SEQ ID NO: 255951 - DNA, 15 bp, Homo sapiens
catgcagcaggatta

SEQ ID NO: 255952 - DNA, 15 bp, Homo sapiens
gcatgcagcaggatt

SEQ ID NO: 255953 - DNA, 15 bp, Homo sapiens
ggcatgcagcaggat

SEQ ID NO: 255954 - DNA, 15 bp, Homo sapiens
aggcatgcagcagga

SEQ ID NO: 255955 - DNA, 15 bp, Homo sapiens
taggcatgcagcagg

SEQ ID NO: 255956 - DNA, 15 bp, Homo sapiens
ctaggcatgcagcag

SEQ ID NO: 255957 - DNA, 15 bp, Homo sapiens
cctaggcatgcagca

SEQ ID NO: 255958 - DNA, 15 bp, Homo sapiens
tcctaggcatgcagc

SEQ ID NO: 255959 - DNA, 15 bp, Homo sapiens
atcctaggcatgcag

SEQ ID NO: 255960 - DNA, 15 bp, Homo sapiens
catcctaggcatgca

SEQ ID NO: 255961 - DNA, 15 bp, Homo sapiens
acatcctaggcatgc

SEQ ID NO: 255962 - DNA, 15 bp, Homo sapiens
cacatcctaggcatg

SEQ ID NO: 255963 - DNA, 15 bp, Homo sapiens
tcacatcctaggcat

SEQ ID NO: 255964 - DNA, 15 bp, Homo sapiens
ttcacatcctaggca

SEQ ID NO: 255965 - DNA, 15 bp, Homo sapiens
cttcacatcctaggc

SEQ ID NO: 255966 - DNA, 15 bp, Homo sapiens
tcttcacatcctagg

SEQ ID NO: 255967 - DNA, 15 bp, Homo sapiens
ctcttcacatcctag

SEQ ID NO: 255968 - DNA, 15 bp, Homo sapiens
gctcttcacatccta

SEQ ID NO: 255969 - DNA, 15 bp, Homo sapiens
tgctcttcacatcct

SEQ ID NO: 255970 - DNA, 15 bp, Homo sapiens
ctgctcttcacatcc

SEQ ID NO: 255971 - DNA, 15 bp, Homo sapiens
cctgctcttcacatc

SEQ ID NO: 255972 - DNA, 15 bp, Homo sapiens
tcctgctcttcacat

SEQ ID NO: 255973 - DNA, 15 bp, Homo sapiens
ttcctgctcttcaca

SEQ ID NO: 255974 - DNA, 15 bp, Homo sapiens
tttcctgctcttcac

SEQ ID NO: 255975 - DNA, 15 bp, Homo sapiens
atttcctgctcttca

SEQ ID NO: 255976 - DNA, 15 bp, Homo sapiens
tatttcctgctcttc

SEQ ID NO: 255977 - DNA, 15 bp, Homo sapiens
atatttcctgctctt

SEQ ID NO: 255978 - DNA, 15 bp, Homo sapiens
aatatttcctgctct

SEQ ID NO: 255979 - DNA, 15 bp, Homo sapiens
aaatatttcctgctc

SEQ ID NO: 255980 - DNA, 15 bp, Homo sapiens
caaatatttcctgct

SEQ ID NO: 255981 - DNA, 15 bp, Homo sapiens
acaaatatttcctgc

SEQ ID NO: 255982 - DNA, 15 bp, Homo sapiens
gacaaatatttcctg

SEQ ID NO: 255983 - DNA, 15 bp, Homo sapiens
tgacaaatatttcct

SEQ ID NO: 255984 - DNA, 15 bp, Homo sapiens
ttgacaaatatttcc

SEQ ID NO: 255985 - DNA, 15 bp, Homo sapiens
gttgacaaatatttc

SEQ ID NO: 255986 - DNA, 15 bp, Homo sapiens
tgttgacaaatattt

SEQ ID NO: 255987 - DNA, 15 bp, Homo sapiens
ctgttgacaaatatt

SEQ ID NO: 255988 - DNA, 15 bp, Homo sapiens
gctgttgacaaatat

SEQ ID NO: 255989 - DNA, 15 bp, Homo sapiens
tgctgttgacaaata

SEQ ID NO: 255990 - DNA, 15 bp, Homo sapiens
atgctgttgacaaat

SEQ ID NO: 255991 - DNA, 15 bp, Homo sapiens
aatgctgttgacaaa

SEQ ID NO: 255992 - DNA, 15 bp, Homo sapiens
taatgctgttgacaa

SEQ ID NO: 255993 - DNA, 15 bp, Homo sapiens
ttaatgctgttgaca

SEQ ID NO: 255994 - DNA, 15 bp, Homo sapiens
tttaatgctgttgac

SEQ ID NO: 255995 - DNA, 15 bp, Homo sapiens
gtttaatgctgttga

SEQ ID NO: 255996 - DNA, 15 bp, Homo sapiens
tgtttaatgctgttg

SEQ ID NO: 255997 - DNA, 15 bp, Homo sapiens
atgtttaatgctgtt

SEQ ID NO: 255998 - DNA, 15 bp, Homo sapiens
catgtttaatgctgt

SEQ ID NO: 255999 - DNA, 15 bp, Homo sapiens
tcatgtttaatgctg

SEQ ID NO: 256000 - DNA, 15 bp, Homo sapiens
gtcatgtttaatgct

SEQ ID NO: 256001 - DNA, 15 bp, Homo sapiens
ggtcatgtttaatgc

SEQ ID NO: 256002 - DNA, 15 bp, Homo sapiens
tggtcatgtttaatg

SEQ ID NO: 256003 - DNA, 15 bp, Homo sapiens
gtggtcatgtttaat

SEQ ID NO: 256004 - DNA, 15 bp, Homo sapiens
tgtggtcatgtttaa

SEQ ID NO: 256005 - DNA, 15 bp, Homo sapiens
ctgtggtcatgttta

SEQ ID NO: 256006 - DNA, 15 bp, Homo sapiens
actgtggtcatgttt

SEQ ID NO: 256007 - DNA, 15 bp, Homo sapiens
cactgtggtcatgtt

SEQ ID NO: 256008 - DNA, 15 bp, Homo sapiens
tcactgtggtcatgt

SEQ ID NO: 256009 - DNA, 15 bp, Homo sapiens
atcactgtggtcatg

SEQ ID NO: 256010 - DNA, 15 bp, Homo sapiens
aatcactgtggtcat

SEQ ID NO: 256011 - DNA, 15 bp, Homo sapiens
taatcactgtggtca

SEQ ID NO: 256012 - DNA, 15 bp, Homo sapiens
ataatcactgtggtc

SEQ ID NO: 256013 - DNA, 15 bp, Homo sapiens
tataatcactgtggt

SEQ ID NO: 256014 - DNA, 15 bp, Homo sapiens
ttataatcactgtgg

SEQ ID NO: 256015 - DNA, 15 bp, Homo sapiens
attataatcactgtg

SEQ ID NO: 256016 - DNA, 15 bp, Homo sapiens
tattataatcactgt

SEQ ID NO: 256017 - DNA, 15 bp, Homo sapiens
ttattataatcactg

SEQ ID NO: 256018 - DNA, 15 bp, Homo sapiens
tttattataatcact

SEQ ID NO: 256019 - DNA, 15 bp, Homo sapiens
atttattataatcac

SEQ ID NO: 256020 - DNA, 15 bp, Homo sapiens
catttattataatca

SEQ ID NO: 256021 - DNA, 15 bp, Homo sapiens
tcatttattataatc

SEQ ID NO: 256022 - DNA, 15 bp, Homo sapiens
atcatttattataat

SEQ ID NO: 256023 - DNA, 15 bp, Homo sapiens
aatcatttattataa

SEQ ID NO: 256024 - DNA, 15 bp, Homo sapiens
aaatcatttattata

SEQ ID NO: 256025 - DNA, 15 bp, Homo sapiens
aaaatcatttattat

SEQ ID NO: 256026 - DNA, 15 bp, Homo sapiens
aaaaatcatttatta

SEQ ID NO: 256027 - DNA, 15 bp, Homo sapiens
gaaaaatcatttatt

SEQ ID NO: 256028 - DNA, 15 bp, Homo sapiens
tgaaaaatcatttat

SEQ ID NO: 256029 - DNA, 15 bp, Homo sapiens
ttgaaaaatcattta

SEQ ID NO: 256030 - DNA, 15 bp, Homo sapiens
attgaaaaatcattt

SEQ ID NO: 256031 - DNA, 15 bp, Homo sapiens
tattgaaaaatcatt

SEQ ID NO: 256032 - DNA, 15 bp, Homo sapiens
atattgaaaaatcat

SEQ ID NO: 256033 - DNA, 15 bp, Homo sapiens
gatattgaaaaatca

SEQ ID NO: 256034 - DNA, 15 bp, Homo sapiens
ggatattgaaaaatc

SEQ ID NO: 256035 - DNA, 15 bp, Homo sapiens
tggatattgaaaaat

SEQ ID NO: 256036 - DNA, 15 bp, Homo sapiens
ctggatattgaaaaa

SEQ ID NO: 256037 - DNA, 15 bp, Homo sapiens
actggatattgaaaa

SEQ ID NO: 256038 - DNA, 15 bp, Homo sapiens
aactggatattgaaa

SEQ ID NO: 256039 - DNA, 15 bp, Homo sapiens
caactggatattgaa

SEQ ID NO: 256040 - DNA, 15 bp, Homo sapiens
tcaactggatattga

SEQ ID NO: 256041 - DNA, 15 bp, Homo sapiens
ttcaactggatattg

SEQ ID NO: 256042 - DNA, 15 bp, Homo sapiens
tttcaactggatatt

SEQ ID NO: 256043 - DNA, 15 bp, Homo sapiens
atttcaactggatat

SEQ ID NO: 256044 - DNA, 15 bp, Homo sapiens
catttcaactggata

SEQ ID NO: 256045 - DNA, 15 bp, Homo sapiens
tcatttcaactggat

SEQ ID NO: 256046 - DNA, 15 bp, Homo sapiens
atcatttcaactgga

SEQ ID NO: 256047 - DNA, 15 bp, Homo sapiens
aatcatttcaactgg

SEQ ID NO: 256048 - DNA, 15 bp, Homo sapiens
aaatcatttcaactg

SEQ ID NO: 256049 - DNA, 15 bp, Homo sapiens
aaaatcatttcaact

SEQ ID NO: 256050 - DNA, 15 bp, Homo sapiens
aaaaatcatttcaac

SEQ ID NO: 256051 - DNA, 15 bp, Homo sapiens
gaaaaatcatttcaa

SEQ ID NO: 256052 - DNA, 15 bp, Homo sapiens
agaaaaatcatttca

SEQ ID NO: 256053 - DNA, 15 bp, Homo sapiens
cagaaaaatcatttc

SEQ ID NO: 256054 - DNA, 15 bp, Homo sapiens
acagaaaaatcattt

SEQ ID NO: 256055 - DNA, 15 bp, Homo sapiens
aacagaaaaatcatt

SEQ ID NO: 256056 - DNA, 15 bp, Homo sapiens
aaacagaaaaatcat

SEQ ID NO: 256057 - DNA, 15 bp, Homo sapiens
gaaacagaaaaatca

SEQ ID NO: 256058 - DNA, 15 bp, Homo sapiens
agaaacagaaaaatc

SEQ ID NO: 256059 - DNA, 15 bp, Homo sapiens
aagaaacagaaaaat

SEQ ID NO: 256060 - DNA, 15 bp, Homo sapiens
aaagaaacagaaaaa

SEQ ID NO: 256061 - DNA, 15 bp, Homo sapiens
aaaagaaacagaaaa

SEQ ID NO: 256062 - DNA, 15 bp, Homo sapiens
gaaaagaaacagaaa

SEQ ID NO: 256063 - DNA, 15 bp, Homo sapiens
agaaaagaaacagaa

SEQ ID NO: 256064 - DNA, 15 bp, Homo sapiens
aagaaaagaaacaga

SEQ ID NO: 256065 - DNA, 15 bp, Homo sapiens
aaagaaaagaaacag

SEQ ID NO: 256066 - DNA, 15 bp, Homo sapiens
aaaagaaaagaaaca

SEQ ID NO: 256067 - DNA, 15 bp, Homo sapiens
aaaaagaaaagaaac

SEQ ID NO: 256068 - DNA, 15 bp, Homo sapiens
caaaaaaagaaaaga

SEQ ID NO: 256069 - DNA, 15 bp, Homo sapiens
tcaaaaaaagaaaag

SEQ ID NO: 256070 - DNA, 15 bp, Homo sapiens
gtcaaaaaaagaaaa

SEQ ID NO: 256071 - DNA, 15 bp, Homo sapiens
tgtcaaaaaaagaaa

SEQ ID NO: 256072 - DNA, 15 bp, Homo sapiens
gtgtcaaaaaaagaa

SEQ ID NO: 256073 - DNA, 15 bp, Homo sapiens
tgtgtcaaaaaaaga

SEQ ID NO: 256074 - DNA, 15 bp, Homo sapiens
ctgtgtcaaaaaaag

SEQ ID NO: 256075 - DNA, 15 bp, Homo sapiens
tctgtgtcaaaaaaa

SEQ ID NO: 256076 - DNA, 15 bp, Homo sapiens
ctctgtgtcaaaaaa

SEQ ID NO: 256077 - DNA, 15 bp, Homo sapiens
actctgtgtcaaaaa

SEQ ID NO: 256078 - DNA, 15 bp, Homo sapiens
gactctgtgtcaaaa

SEQ ID NO: 256079 - DNA, 15 bp, Homo sapiens
agactctgtgtcaaa

SEQ ID NO: 256080 - DNA, 15 bp, Homo sapiens
gagactctgtgtcaa

SEQ ID NO: 256081 - DNA, 15 bp, Homo sapiens
tgagactctgtgtca

SEQ ID NO: 256082 - DNA, 15 bp, Homo sapiens
gtgagactctgtgtc

SEQ ID NO: 256083 - DNA, 15 bp, Homo sapiens
agtgagactctgtgt

SEQ ID NO: 256084 - DNA, 15 bp, Homo sapiens
gagtgagactctgtg

SEQ ID NO: 256085 - DNA, 15 bp, Homo sapiens
agagtgagactctgt

SEQ ID NO: 256086 - DNA, 15 bp, Homo sapiens
cagagtgagactctg

SEQ ID NO: 256087 - DNA, 15 bp, Homo sapiens
acagagtgagactct

SEQ ID NO: 256088 - DNA, 15 bp, Homo sapiens
gacagagtgagactc

SEQ ID NO: 256089 - DNA, 15 bp, Homo sapiens
tgacagagtgagact

SEQ ID NO: 256090 - DNA, 15 bp, Homo sapiens
gtgacagagtgagac

SEQ ID NO: 256091 - DNA, 15 bp, Homo sapiens
aagattgcaccactg

SEQ ID NO: 256092 - DNA, 15 bp, Homo sapiens
caagattgcaccact

SEQ ID NO: 256093 - DNA, 15 bp, Homo sapiens
ccaagattgcaccac

SEQ ID NO: 256094 - DNA, 15 bp, Homo sapiens
gccaagattgcacca

SEQ ID NO: 256095 - DNA, 15 bp, Homo sapiens
agccaagattgcacc

SEQ ID NO: 256096 - DNA, 15 bp, Homo sapiens
gagccaagattgcac

SEQ ID NO: 256097 - DNA, 15 bp, Homo sapiens
tgagccaagattgca

SEQ ID NO: 256098 - DNA, 15 bp, Homo sapiens
tagtgagccaagatt

SEQ ID NO: 256099 - DNA, 15 bp, Homo sapiens
gtagtgagccaagat

SEQ ID NO: 256100 - DNA, 15 bp, Homo sapiens
tgtagtgagccaaga

SEQ ID NO: 256101 - DNA, 15 bp, Homo sapiens
ttgtagtgagccaag

SEQ ID NO: 256102 - DNA, 15 bp, Homo sapiens
gttgtagtgagccaa

SEQ ID NO: 256103 - DNA, 15 bp, Homo sapiens
ggttgtagtgagcca

SEQ ID NO: 256104 - DNA, 15 bp, Homo sapiens
ggaggttgtagtgag

SEQ ID NO: 256105 - DNA, 15 bp, Homo sapiens
cggaggttgtagtga

SEQ ID NO: 256106 - DNA, 15 bp, Homo sapiens
gcggaggttgtagtg

SEQ ID NO: 256107 - DNA, 15 bp, Homo sapiens
ggcggaggttgtagt

SEQ ID NO: 256108 - DNA, 15 bp, Homo sapiens
aggcggaggttgtag

SEQ ID NO: 256109 - DNA, 15 bp, Homo sapiens
gaggcggaggttgta

SEQ ID NO: 256110 - DNA, 15 bp, Homo sapiens
agaggcggaggttgt

SEQ ID NO: 256111 - DNA, 15 bp, Homo sapiens
gagaggcggaggttg

SEQ ID NO: 256112 - DNA, 15 bp, Homo sapiens
cgagaggcggaggtt

SEQ ID NO: 256113 - DNA, 15 bp, Homo sapiens
ccgagaggcggaggt

SEQ ID NO: 256114 - DNA, 15 bp, Homo sapiens
cccgagaggcggagg

SEQ ID NO: 256115 - DNA, 15 bp, Homo sapiens
gcccgagaggcggag

SEQ ID NO: 256116 - DNA, 15 bp, Homo sapiens
agcccgagaggcgga

SEQ ID NO: 256117 - DNA, 15 bp, Homo sapiens
gagcccgagaggcgg

SEQ ID NO: 256118 - DNA, 15 bp, Homo sapiens
tgagcccgagaggcg

SEQ ID NO: 256119 - DNA, 15 bp, Homo sapiens
ttgagcccgagaggc

SEQ ID NO: 256120 - DNA, 15 bp, Homo sapiens
cttgagcccgagagg

SEQ ID NO: 256121 - DNA, 15 bp, Homo sapiens
gcttgagcccgagag

SEQ ID NO: 256122 - DNA, 15 bp, Homo sapiens
cgcttgagcccgaga

SEQ ID NO: 256123 - DNA, 15 bp, Homo sapiens
tcgcttgagcccgag

SEQ ID NO: 256124 - DNA, 15 bp, Homo sapiens
ctcgcttgagcccga

SEQ ID NO: 256125 - DNA, 15 bp, Homo sapiens
actcgcttgagcccg

SEQ ID NO: 256126 - DNA, 15 bp, Homo sapiens
gactcgcttgagccc

SEQ ID NO: 256127 - DNA, 15 bp, Homo sapiens
agactcgcttgagcc

SEQ ID NO: 256128 - DNA, 15 bp, Homo sapiens
gagactcgcttgagc

SEQ ID NO: 256129 - DNA, 15 bp, Homo sapiens
ggagactcgcttgag

SEQ ID NO: 256130 - DNA, 15 bp, Homo sapiens
aggagactcgcttga

SEQ ID NO: 256131 - DNA, 15 bp, Homo sapiens
caggagactcgcttg

SEQ ID NO: 256132 - DNA, 15 bp, Homo sapiens
gcaggagactcgctt

SEQ ID NO: 256133 - DNA, 15 bp, Homo sapiens
ggcaggagactcgct

SEQ ID NO: 256134 - DNA, 15 bp, Homo sapiens
aggcaggagactcgc

SEQ ID NO: 256135 - DNA, 15 bp, Homo sapiens
gaggcaggagactcg

SEQ ID NO: 256136 - DNA, 15 bp, Homo sapiens
tgaggcaggagactc

SEQ ID NO: 256137 - DNA, 15 bp, Homo sapiens
ttgaggcaggagact

SEQ ID NO: 256138 - DNA, 15 bp, Homo sapiens
gttgaggcaggagac

SEQ ID NO: 256139 - DNA, 15 bp, Homo sapiens
ggttgaggcaggaga

SEQ ID NO: 256140 - DNA, 15 bp, Homo sapiens
aggttgaggcaggag

SEQ ID NO: 256141 - DNA, 15 bp, Homo sapiens
gaggttgaggcagga

SEQ ID NO: 256142 - DNA, 15 bp, Homo sapiens
ggaggttgaggcagg

SEQ ID NO: 256143 - DNA, 15 bp, Homo sapiens
gggaggttgaggcag

SEQ ID NO: 256144 - DNA, 15 bp, Homo sapiens
aaatcccagctactc

SEQ ID NO: 256145 - DNA, 15 bp, Homo sapiens
gaaatcccagctact

SEQ ID NO: 256146 - DNA, 15 bp, Homo sapiens
tgaaatcccagctac

SEQ ID NO: 256147 - DNA, 15 bp, Homo sapiens
ctgaaatcccagcta

SEQ ID NO: 256148 - DNA, 15 bp, Homo sapiens
cctgaaatcccagct

SEQ ID NO: 256149 - DNA, 15 bp, Homo sapiens
acctgaaatcccagc

SEQ ID NO: 256150 - DNA, 15 bp, Homo sapiens
cacctgaaatcccag

SEQ ID NO: 256151 - DNA, 15 bp, Homo sapiens
acacctgaaatccca

SEQ ID NO: 256152 - DNA, 15 bp, Homo sapiens
cacacctgaaatccc

SEQ ID NO: 256153 - DNA, 15 bp, Homo sapiens
gcacacctgaaatcc

SEQ ID NO: 256154 - DNA, 15 bp, Homo sapiens
tgcacacctgaaatc

SEQ ID NO: 256155 - DNA, 15 bp, Homo sapiens
ctgcacacctgaaat

SEQ ID NO: 256156 - DNA, 15 bp, Homo sapiens
gctgcacacctgaaa

SEQ ID NO: 256157 - DNA, 15 bp, Homo sapiens
tgctgcacacctgaa

SEQ ID NO: 256158 - DNA, 15 bp, Homo sapiens
gtgctgcacacctga

SEQ ID NO: 256159 - DNA, 15 bp, Homo sapiens
ggtgctgcacacctg

SEQ ID NO: 256160 - DNA, 15 bp, Homo sapiens
tggtgctgcacacct

SEQ ID NO: 256161 - DNA, 15 bp, Homo sapiens
gtggtgctgcacacc

SEQ ID NO: 256162 - DNA, 15 bp, Homo sapiens
tgtggtgctgcacac

SEQ ID NO: 256163 - DNA, 15 bp, Homo sapiens
gtgtggtgctgcaca

SEQ ID NO: 256164 - DNA, 15 bp, Homo sapiens
ggtgtggtgctgcac

SEQ ID NO: 256165 - DNA, 15 bp, Homo sapiens
gggtgtggtgctgca

SEQ ID NO: 256166 - DNA, 15 bp, Homo sapiens
tgggtgtggtgctgc

SEQ ID NO: 256167 - DNA, 15 bp, Homo sapiens
ctgggtgtggtgctg

SEQ ID NO: 256168 - DNA, 15 bp, Homo sapiens
gctgggtgtggtgct

SEQ ID NO: 256169 - DNA, 15 bp, Homo sapiens
agctgggtgtggtgc

SEQ ID NO: 256170 - DNA, 15 bp, Homo sapiens
tagctgggtgtggtg

SEQ ID NO: 256171 - DNA, 15 bp, Homo sapiens
ttagctgggtgtggt

SEQ ID NO: 256172 - DNA, 15 bp, Homo sapiens
attagctgggtgtgg

SEQ ID NO: 256173 - DNA, 15 bp, Homo sapiens
aattagctgggtgtg

SEQ ID NO: 256174 - DNA, 15 bp, Homo sapiens
aaattagctgggtgt

SEQ ID NO: 256175 - DNA, 15 bp, Homo sapiens
aaaattagctgggtg

SEQ ID NO: 256176 - DNA, 15 bp, Homo sapiens
aaaaattagctgggt

SEQ ID NO: 256177 - DNA, 15 bp, Homo sapiens
aaaaaatacaaaaat

SEQ ID NO: 256178 - DNA, 15 bp, Homo sapiens
taaaaaatacaaaaa

SEQ ID NO: 256179 - DNA, 15 bp, Homo sapiens
ctaaaaaatacaaaa

SEQ ID NO: 256180 - DNA, 15 bp, Homo sapiens
actaaaaaatacaaa

SEQ ID NO: 256181 - DNA, 15 bp, Homo sapiens
tactaaaaaatacaa

SEQ ID NO: 256182 - DNA, 15 bp, Homo sapiens
ctactaaaaaataca

SEQ ID NO: 256183 - DNA, 15 bp, Homo sapiens
tctactaaaaaatac

SEQ ID NO: 256184 - DNA, 15 bp, Homo sapiens
ctctactaaaaaata

SEQ ID NO: 256185 - DNA, 15 bp, Homo sapiens
ttctctactaaaaaa

SEQ ID NO: 256186 - DNA, 15 bp, Homo sapiens
cttctctactaaaaa

SEQ ID NO: 256187 - DNA, 15 bp, Homo sapiens
ccttctctactaaaa

SEQ ID NO: 256188 - DNA, 15 bp, Homo sapiens
cccttctctactaaa

SEQ ID NO: 256189 - DNA, 15 bp, Homo sapiens
ccccttctctactaa

SEQ ID NO: 256190 - DNA, 15 bp, Homo sapiens
accccttctctacta

SEQ ID NO: 256191 - DNA, 15 bp, Homo sapiens
aaccccttctctact

SEQ ID NO: 256192 - DNA, 15 bp, Homo sapiens
aaaccccttctctac

SEQ ID NO: 256193 - DNA, 15 bp, Homo sapiens
gaaaccccttctcta

SEQ ID NO: 256194 - DNA, 15 bp, Homo sapiens
tgaaaccccttctct

SEQ ID NO: 256195 - DNA, 15 bp, Homo sapiens
gtgaaaccccttctc

SEQ ID NO: 256196 - DNA, 15 bp, Homo sapiens
agtgaaaccccttct

SEQ ID NO: 256197 - DNA, 15 bp, Homo sapiens
tagtgaaaccccttc

SEQ ID NO: 256198 - DNA, 15 bp, Homo sapiens
atagtgaaacccctt

SEQ ID NO: 256199 - DNA, 15 bp, Homo sapiens
catagtgaaacccct

SEQ ID NO: 256200 - DNA, 15 bp, Homo sapiens
caacatagtgaaacc

SEQ ID NO: 256201 - DNA, 15 bp, Homo sapiens
gcaacatagtgaaac

SEQ ID NO: 256202 - DNA, 15 bp, Homo sapiens
ggcaacatagtgaaa

SEQ ID NO: 256203 - DNA, 15 bp, Homo sapiens
gggcaacatagtgaa

SEQ ID NO: 256204 - DNA, 15 bp, Homo sapiens
tgggcaacatagtga

SEQ ID NO: 256205 - DNA, 15 bp, Homo sapiens
atgggcaacatagtg

SEQ ID NO: 256206 - DNA, 15 bp, Homo sapiens
catgggcaacatagt

SEQ ID NO: 256207 - DNA, 15 bp, Homo sapiens
gcatgggcaacatag

SEQ ID NO: 256208 - DNA, 15 bp, Homo sapiens
tgcatgggcaacata

SEQ ID NO: 256209 - DNA, 15 bp, Homo sapiens
ctgcatgggcaacat

SEQ ID NO: 256210 - DNA, 15 bp, Homo sapiens
cctgcatgggcaaca

SEQ ID NO: 256211 - DNA, 15 bp, Homo sapiens
acctgcatgggcaac

SEQ ID NO: 256212 - DNA, 15 bp, Homo sapiens
gacctgcatgggcaa

SEQ ID NO: 256213 - DNA, 15 bp, Homo sapiens
agacctgcatgggca

SEQ ID NO: 256214 - DNA, 15 bp, Homo sapiens
cagacctgcatgggc

SEQ ID NO: 256215 - DNA, 15 bp, Homo sapiens
ccagacctgcatggg

SEQ ID NO: 256216 - DNA, 15 bp, Homo sapiens
tccagacctgcatgg

SEQ ID NO: 256217 - DNA, 15 bp, Homo sapiens
ttccagacctgcatg

SEQ ID NO: 256218 - DNA, 15 bp, Homo sapiens
gttccagacctgcat

SEQ ID NO: 256219 - DNA, 15 bp, Homo sapiens
agttccagacctgca

SEQ ID NO: 256220 - DNA, 15 bp, Homo sapiens
gagttccagacctgc

SEQ ID NO: 256221 - DNA, 15 bp, Homo sapiens
cgagttccagacctg

SEQ ID NO: 256222 - DNA, 15 bp, Homo sapiens
tcgagttccagacct

SEQ ID NO: 256223 - DNA, 15 bp, Homo sapiens
gtcgagttccagacc

SEQ ID NO: 256224 - DNA, 15 bp, Homo sapiens
ggtcgagttccagac

SEQ ID NO: 256225 - DNA, 15 bp, Homo sapiens
aggtcgagttccaga

SEQ ID NO: 256226 - DNA, 15 bp, Homo sapiens
gaggtcgagttccag

SEQ ID NO: 256227 - DNA, 15 bp, Homo sapiens
tgaggtcgagttcca

SEQ ID NO: 256228 - DNA, 15 bp, Homo sapiens
ttgaggtcgagttcc

SEQ ID NO: 256229 - DNA, 15 bp, Homo sapiens
tttgaggtcgagttc

SEQ ID NO: 256230 - DNA, 15 bp, Homo sapiens
atttgaggtcgagtt

SEQ ID NO: 256231 - DNA, 15 bp, Homo sapiens
catttgaggtcgagt

SEQ ID NO: 256232 - DNA, 15 bp, Homo sapiens
tcatttgaggtcgag

SEQ ID NO: 256233 - DNA, 15 bp, Homo sapiens
gtcatttgaggtcga

SEQ ID NO: 256234 - DNA, 15 bp, Homo sapiens
ggtcatttgaggtcg

SEQ ID NO: 256235 - DNA, 15 bp, Homo sapiens
gggtcatttgaggtc

SEQ ID NO: 256236 - DNA, 15 bp, Homo sapiens
cgggtcatttgaggt

SEQ ID NO: 256237 - DNA, 15 bp, Homo sapiens
gcgggtcatttgagg

SEQ ID NO: 256238 - DNA, 15 bp, Homo sapiens
ggcgggtcatttgag

SEQ ID NO: 256239 - DNA, 15 bp, Homo sapiens
aggcgggtcatttga

SEQ ID NO: 256240 - DNA, 15 bp, Homo sapiens
caggcgggtcatttg

SEQ ID NO: 256241 - DNA, 15 bp, Homo sapiens
gcaggcgggtcattt

SEQ ID NO: 256242 - DNA, 15 bp, Homo sapiens
ggcaggcgggtcatt

SEQ ID NO: 256243 - DNA, 15 bp, Homo sapiens
aggcaggcgggtcat

SEQ ID NO: 256244 - DNA, 15 bp, Homo sapiens
aaggcaggcgggtca

SEQ ID NO: 256245 - DNA, 15 bp, Homo sapiens
taaggcaggcgggtc

SEQ ID NO: 256246 - DNA, 15 bp, Homo sapiens
ctaaggcaggcgggt

SEQ ID NO: 256247 - DNA, 15 bp, Homo sapiens
gctaaggcaggcggg

SEQ ID NO: 256248 - DNA, 15 bp, Homo sapiens
ggctaaggcaggcgg

SEQ ID NO: 256249 - DNA, 15 bp, Homo sapiens
aggctaaggcaggcg

SEQ ID NO: 256250 - DNA, 15 bp, Homo sapiens
aaggctaaggcaggc

SEQ ID NO: 256251 - DNA, 15 bp, Homo sapiens
caaggctaaggcagg

SEQ ID NO: 256252 - DNA, 15 bp, Homo sapiens
ccaaggctaaggcag

SEQ ID NO: 256253 - DNA, 15 bp, Homo sapiens
gccaaggctaaggca

SEQ ID NO: 256254 - DNA, 15 bp, Homo sapiens
tgccaaggctaaggc

SEQ ID NO: 256255 - DNA, 15 bp, Homo sapiens
atgccaaggctaagg

SEQ ID NO: 256256 - DNA, 15 bp, Homo sapiens
aatgccaaggctaag

SEQ ID NO: 256257 - DNA, 15 bp, Homo sapiens
caatgccaaggctaa

SEQ ID NO: 256258 - DNA, 15 bp, Homo sapiens
ccaatgccaaggcta

SEQ ID NO: 256259 - DNA, 15 bp, Homo sapiens
cccaatgccaaggct

SEQ ID NO: 256260 - DNA, 15 bp, Homo sapiens
gcccaatgccaaggc

SEQ ID NO: 256261 - DNA, 15 bp, Homo sapiens
ggcccaatgccaagg

SEQ ID NO: 256262 - DNA, 15 bp, Homo sapiens
aggcccaatgccaag

SEQ ID NO: 256263 - DNA, 15 bp, Homo sapiens
gaggcccaatgccaa

SEQ ID NO: 256264 - DNA, 15 bp, Homo sapiens
agaggcccaatgcca

SEQ ID NO: 256265 - DNA, 15 bp, Homo sapiens
gagaggcccaatgcc

SEQ ID NO: 256266 - DNA, 15 bp, Homo sapiens
tgagaggcccaatgc

SEQ ID NO: 256267 - DNA, 15 bp, Homo sapiens
ttgagaggcccaatg

SEQ ID NO: 256268 - DNA, 15 bp, Homo sapiens
tttgagaggcccaat

SEQ ID NO: 256269 - DNA, 15 bp, Homo sapiens
ctttgagaggcccaa

SEQ ID NO: 256270 - DNA, 15 bp, Homo sapiens
actttgagaggccca

SEQ ID NO: 256271 - DNA, 15 bp, Homo sapiens
cactttgagaggccc

SEQ ID NO: 256272 - DNA, 15 bp, Homo sapiens
gcactttgagaggcc

SEQ ID NO: 256273 - DNA, 15 bp, Homo sapiens
agcactttgagaggc

SEQ ID NO: 256274 - DNA, 15 bp, Homo sapiens
cagcactttgagagg

SEQ ID NO: 256275 - DNA, 15 bp, Homo sapiens
ccagcactttgagag

SEQ ID NO: 256276 - DNA, 15 bp, Homo sapiens
cccagcactttgaga

SEQ ID NO: 256277 - DNA, 15 bp, Homo sapiens
tcccagcactttgag

SEQ ID NO: 256278 - DNA, 15 bp, Homo sapiens
atcccagcactttga

SEQ ID NO: 256279 - DNA, 15 bp, Homo sapiens
aggccgggcatggtg

SEQ ID NO: 256280 - DNA, 15 bp, Homo sapiens
taggccgggcatggt

SEQ ID NO: 256281 - DNA, 15 bp, Homo sapiens
ctaggccgggcatgg

SEQ ID NO: 256282 - DNA, 15 bp, Homo sapiens
actaggccgggcatg

SEQ ID NO: 256283 - DNA, 15 bp, Homo sapiens
cactaggccgggcat

SEQ ID NO: 256284 - DNA, 15 bp, Homo sapiens
acactaggccgggca

SEQ ID NO: 256285 - DNA, 15 bp, Homo sapiens
aacactaggccgggc

SEQ ID NO: 256286 - DNA, 15 bp, Homo sapiens
aaacactaggccggg

SEQ ID NO: 256287 - DNA, 15 bp, Homo sapiens
gaaacactaggccgg

SEQ ID NO: 256288 - DNA, 15 bp, Homo sapiens
agaaacactaggccg

SEQ ID NO: 256289 - DNA, 15 bp, Homo sapiens
aagaaacactaggcc

SEQ ID NO: 256290 - DNA, 15 bp, Homo sapiens
gaagaaacactaggc

SEQ ID NO: 256291 - DNA, 15 bp, Homo sapiens
agaagaaacactagg

SEQ ID NO: 256292 - DNA, 15 bp, Homo sapiens
aagaagaaacactag

SEQ ID NO: 256293 - DNA, 15 bp, Homo sapiens
gaagaagaaacacta

SEQ ID NO: 256294 - DNA, 15 bp, Homo sapiens
ggaagaagaaacact

SEQ ID NO: 256295 - DNA, 15 bp, Homo sapiens
aggaagaagaaacac

SEQ ID NO: 256296 - DNA, 15 bp, Homo sapiens
gaggaagaagaaaca

SEQ ID NO: 256297 - DNA, 15 bp, Homo sapiens
agaggaagaagaaac

SEQ ID NO: 256298 - DNA, 15 bp, Homo sapiens
cagaggaagaagaaa

SEQ ID NO: 256299 - DNA, 15 bp, Homo sapiens
acagaggaagaagaa

SEQ ID NO: 256300 - DNA, 15 bp, Homo sapiens
tacagaggaagaaga

SEQ ID NO: 256301 - DNA, 15 bp, Homo sapiens
ttacagaggaagaag

SEQ ID NO: 256302 - DNA, 15 bp, Homo sapiens
attacagaggaagaa

SEQ ID NO: 256303 - DNA, 15 bp, Homo sapiens
cattacagaggaaga

SEQ ID NO: 256304 - DNA, 15 bp, Homo sapiens
gcattacagaggaag

SEQ ID NO: 256305 - DNA, 15 bp, Homo sapiens
agcattacagaggaa

SEQ ID NO: 256306 - DNA, 15 bp, Homo sapiens
gagcattacagagga

SEQ ID NO: 256307 - DNA, 15 bp, Homo sapiens
agagcattacagagg

SEQ ID NO: 256308 - DNA, 15 bp, Homo sapiens
cagagcattacagag

SEQ ID NO: 256309 - DNA, 15 bp, Homo sapiens
tcagagcattacaga

SEQ ID NO: 256310 - DNA, 15 bp, Homo sapiens
atcagagcattacag

SEQ ID NO: 256311 - DNA, 15 bp, Homo sapiens
catcagagcattaca

SEQ ID NO: 256312 - DNA, 15 bp, Homo sapiens
ccatcagagcattac

SEQ ID NO: 256313 - DNA, 15 bp, Homo sapiens
accatcagagcatta

SEQ ID NO: 256314 - DNA, 15 bp, Homo sapiens
gaccatcagagcatt

SEQ ID NO: 256315 - DNA, 15 bp, Homo sapiens
agaccatcagagcat

SEQ ID NO: 256316 - DNA, 15 bp, Homo sapiens
gagaccatcagagca

SEQ ID NO: 256317 - DNA, 15 bp, Homo sapiens
agagaccatcagagc

SEQ ID NO: 256318 - DNA, 15 bp, Homo sapiens
cagagaccatcagag

SEQ ID NO: 256319 - DNA, 15 bp, Homo sapiens
gcagagaccatcaga

SEQ ID NO: 256320 - DNA, 15 bp, Homo sapiens
tgcagagaccatcag

SEQ ID NO: 256321 - DNA, 15 bp, Homo sapiens
atgcagagaccatca

SEQ ID NO: 256322 - DNA, 15 bp, Homo sapiens
gatgcagagaccatc

SEQ ID NO: 256323 - DNA, 15 bp, Homo sapiens
tgatgcagagaccat

SEQ ID NO: 256324 - DNA, 15 bp, Homo sapiens
ctgatgcagagacca

SEQ ID NO: 256325 - DNA, 15 bp, Homo sapiens
actgatgcagagacc

SEQ ID NO: 256326 - DNA, 15 bp, Homo sapiens
tactgatgcagagac

SEQ ID NO: 256327 - DNA, 15 bp, Homo sapiens
gtactgatgcagaga

SEQ ID NO: 256328 - DNA, 15 bp, Homo sapiens
agtactgatgcagag

SEQ ID NO: 256329 - DNA, 15 bp, Homo sapiens
aagtactgatgcaga

SEQ ID NO: 256330 - DNA, 15 bp, Homo sapiens
taagtactgatgcag

SEQ ID NO: 256331 - DNA, 15 bp, Homo sapiens
ataagtactgatgca

SEQ ID NO: 256332 - DNA, 15 bp, Homo sapiens
tataagtactgatgc

SEQ ID NO: 256333 - DNA, 15 bp, Homo sapiens
atataagtactgatg

SEQ ID NO: 256334 - DNA, 15 bp, Homo sapiens
aatataagtactgat

SEQ ID NO: 256335 - DNA, 15 bp, Homo sapiens
taatataagtactga

SEQ ID NO: 256336 - DNA, 15 bp, Homo sapiens
ataatataagtactg

SEQ ID NO: 256337 - DNA, 15 bp, Homo sapiens
cataatataagtact

SEQ ID NO: 256338 - DNA, 15 bp, Homo sapiens
gcataatataagtac

SEQ ID NO: 256339 - DNA, 15 bp, Homo sapiens
agcataatataagta

SEQ ID NO: 256340 - DNA, 15 bp, Homo sapiens
aagcataatataagt

SEQ ID NO: 256341 - DNA, 15 bp, Homo sapiens
caagcataatataag

SEQ ID NO: 256342 - DNA, 15 bp, Homo sapiens
ccaagcataatataa

SEQ ID NO: 256343 - DNA, 15 bp, Homo sapiens
accaagcataatata

SEQ ID NO: 256344 - DNA, 15 bp, Homo sapiens
taccaagcataatat

SEQ ID NO: 256345 - DNA, 15 bp, Homo sapiens
ttaccaagcataata

SEQ ID NO: 256346 - DNA, 15 bp, Homo sapiens
tttaccaagcataat

SEQ ID NO: 256347 - DNA, 15 bp, Homo sapiens
atttaccaagcataa

SEQ ID NO: 256348 - DNA, 15 bp, Homo sapiens
tatttaccaagcata

SEQ ID NO: 256349 - DNA, 15 bp, Homo sapiens
atatttaccaagcat

SEQ ID NO: 256350 - DNA, 15 bp, Homo sapiens
aatatttaccaagca

SEQ ID NO: 256351 - DNA, 15 bp, Homo sapiens
aaatatttaccaagc

SEQ ID NO: 256352 - DNA, 15 bp, Homo sapiens
caaatatttaccaag

SEQ ID NO: 256353 - DNA, 15 bp, Homo sapiens
acaaatatttaccaa

SEQ ID NO: 256354 - DNA, 15 bp, Homo sapiens
gacaaatatttacca

SEQ ID NO: 256355 - DNA, 15 bp, Homo sapiens
agacaaatatttacc

SEQ ID NO: 256356 - DNA, 15 bp, Homo sapiens
aagacaaatatttac

SEQ ID NO: 256357 - DNA, 15 bp, Homo sapiens
gaagacaaatattta

SEQ ID NO: 256358 - DNA, 15 bp, Homo sapiens
ggaagacaaatattt

SEQ ID NO: 256359 - DNA, 15 bp, Homo sapiens
gggaagacaaatatt

SEQ ID NO: 256360 - DNA, 15 bp, Homo sapiens
tgggaagacaaatat

SEQ ID NO: 256361 - DNA, 15 bp, Homo sapiens
atgggaagacaaata

SEQ ID NO: 256362 - DNA, 15 bp, Homo sapiens
gatgggaagacaaat

SEQ ID NO: 256363 - DNA, 15 bp, Homo sapiens
agatgggaagacaaa

SEQ ID NO: 256364 - DNA, 15 bp, Homo sapiens
tagatgggaagacaa

SEQ ID NO: 256365 - DNA, 15 bp, Homo sapiens
ttagatgggaagaca

SEQ ID NO: 256366 - DNA, 15 bp, Homo sapiens
tttagatgggaagac

SEQ ID NO: 256367 - DNA, 15 bp, Homo sapiens
ctttagatgggaaga

SEQ ID NO: 256368 - DNA, 15 bp, Homo sapiens
actttagatgggaag

SEQ ID NO: 256369 - DNA, 15 bp, Homo sapiens
gactttagatgggaa

SEQ ID NO: 256370 - DNA, 15 bp, Homo sapiens
tgactttagatggga

SEQ ID NO: 256371 - DNA, 15 bp, Homo sapiens
ttgactttagatggg

SEQ ID NO: 256372 - DNA, 15 bp, Homo sapiens
tttgactttagatgg

SEQ ID NO: 256373 - DNA, 15 bp, Homo sapiens
ttttgactttagatg

SEQ ID NO: 256374 - DNA, 15 bp, Homo sapiens
gttttgactttagat

SEQ ID NO: 256375 - DNA, 15 bp, Homo sapiens
tgttttgactttaga

SEQ ID NO: 256376 - DNA, 15 bp, Homo sapiens
atgttttgactttag

SEQ ID NO: 256377 - DNA, 15 bp, Homo sapiens
aatgttttgacttta

SEQ ID NO: 256378 - DNA, 15 bp, Homo sapiens
taatgttttgacttt

SEQ ID NO: 256379 - DNA, 15 bp, Homo sapiens
ctaatgttttgactt

SEQ ID NO: 256380 - DNA, 15 bp, Homo sapiens
cctaatgttttgact

SEQ ID NO: 256381 - DNA, 15 bp, Homo sapiens
ccctaatgttttgac

SEQ ID NO: 256382 - DNA, 15 bp, Homo sapiens
tccctaatgttttga

SEQ ID NO: 256383 - DNA, 15 bp, Homo sapiens
gtccctaatgttttg

SEQ ID NO: 256384 - DNA, 15 bp, Homo sapiens
tgtccctaatgtttt

SEQ ID NO: 256385 - DNA, 15 bp, Homo sapiens
ttgtccctaatgttt

SEQ ID NO: 256386 - DNA, 15 bp, Homo sapiens
cttgtccctaatgtt

SEQ ID NO: 256387 - DNA, 15 bp, Homo sapiens
tcttgtccctaatgt

SEQ ID NO: 256388 - DNA, 15 bp, Homo sapiens
atcttgtccctaatg

SEQ ID NO: 256389 - DNA, 15 bp, Homo sapiens
gatcttgtccctaat

SEQ ID NO: 256390 - DNA, 15 bp, Homo sapiens
ggatcttgtccctaa

SEQ ID NO: 256391 - DNA, 15 bp, Homo sapiens
aggatcttgtcccta

SEQ ID NO: 256392 - DNA, 15 bp, Homo sapiens
caggatcttgtccct

SEQ ID NO: 256393 - DNA, 15 bp, Homo sapiens
acaggatcttgtccc

SEQ ID NO: 256394 - DNA, 15 bp, Homo sapiens
aacaggatcttgtcc

SEQ ID NO: 256395 - DNA, 15 bp, Homo sapiens
caacaggatcttgtc

SEQ ID NO: 256396 - DNA, 15 bp, Homo sapiens
tcaacaggatcttgt

SEQ ID NO: 256397 - DNA, 15 bp, Homo sapiens
ttcaacaggatcttg

SEQ ID NO: 256398 - DNA, 15 bp, Homo sapiens
attcaacaggatctt

SEQ ID NO: 256399 - DNA, 15 bp, Homo sapiens
cattcaacaggatct

SEQ ID NO: 256400 - DNA, 15 bp, Homo sapiens
tcattcaacaggatc

SEQ ID NO: 256401 - DNA, 15 bp, Homo sapiens
ctcattcaacaggat

SEQ ID NO: 256402 - DNA, 15 bp, Homo sapiens
cctcattcaacagga

SEQ ID NO: 256403 - DNA, 15 bp, Homo sapiens
ccctcattcaacagg

SEQ ID NO: 256404 - DNA, 15 bp, Homo sapiens
tccctcattcaacag

SEQ ID NO: 256405 - DNA, 15 bp, Homo sapiens
ttccctcattcaaca

SEQ ID NO: 256406 - DNA, 15 bp, Homo sapiens
gttccctcattcaac

SEQ ID NO: 256407 - DNA, 15 bp, Homo sapiens
agttccctcattcaa

SEQ ID NO: 256408 - DNA, 15 bp, Homo sapiens
tagttccctcattca

SEQ ID NO: 256409 - DNA, 15 bp, Homo sapiens
gtagttccctcattc

SEQ ID NO: 256410 - DNA, 15 bp, Homo sapiens
tgtagttccctcatt

SEQ ID NO: 256411 - DNA, 15 bp, Homo sapiens
ttgtagttccctcat

SEQ ID NO: 256412 - DNA, 15 bp, Homo sapiens
tttgtagttccctca

SEQ ID NO: 256413 - DNA, 15 bp, Homo sapiens
atttgtagttccctc

SEQ ID NO: 256414 - DNA, 15 bp, Homo sapiens
tatttgtagttccct

SEQ ID NO: 256415 - DNA, 15 bp, Homo sapiens
gtatttgtagttccc

SEQ ID NO: 256416 - DNA, 15 bp, Homo sapiens
agtatttgtagttcc

SEQ ID NO: 256417 - DNA, 15 bp, Homo sapiens
aagtatttgtagttc

SEQ ID NO: 256418 - DNA, 15 bp, Homo sapiens
taagtatttgtagtt

SEQ ID NO: 256419 - DNA, 15 bp, Homo sapiens
ataagtatttgtagt

SEQ ID NO: 256420 - DNA, 15 bp, Homo sapiens
aataagtatttgtag

SEQ ID NO: 256421 - DNA, 15 bp, Homo sapiens
caataagtatttgta

SEQ ID NO: 256422 - DNA, 15 bp, Homo sapiens
tcaataagtatttgt

SEQ ID NO: 256423 - DNA, 15 bp, Homo sapiens
ctcaataagtatttg

SEQ ID NO: 256424 - DNA, 15 bp, Homo sapiens
cctcaataagtattt

SEQ ID NO: 256425 - DNA, 15 bp, Homo sapiens
tcctcaataagtatt

SEQ ID NO: 256426 - DNA, 15 bp, Homo sapiens
atcctcaataagtat

SEQ ID NO: 256427 - DNA, 15 bp, Homo sapiens
gatcctcaataagta

SEQ ID NO: 256428 - DNA, 15 bp, Homo sapiens
ggatcctcaataagt

SEQ ID NO: 256429 - DNA, 15 bp, Homo sapiens
tggatcctcaataag

SEQ ID NO: 256430 - DNA, 15 bp, Homo sapiens
gtggatcctcaataa

SEQ ID NO: 256431 - DNA, 15 bp, Homo sapiens
agtggatcctcaata

SEQ ID NO: 256432 - DNA, 15 bp, Homo sapiens
gagtggatcctcaat

SEQ ID NO: 256433 - DNA, 15 bp, Homo sapiens
tgagtggatcctcaa

SEQ ID NO: 256434 - DNA, 15 bp, Homo sapiens
gtgagtggatcctca

SEQ ID NO: 256435 - DNA, 15 bp, Homo sapiens
agtgagtggatcctc

SEQ ID NO: 256436 - DNA, 15 bp, Homo sapiens
cagtgagtggatcct

SEQ ID NO: 256437 - DNA, 15 bp, Homo sapiens
acagtgagtggatcc

SEQ ID NO: 256438 - DNA, 15 bp, Homo sapiens
tacagtgagtggatc

SEQ ID NO: 256439 - DNA, 15 bp, Homo sapiens
atacagtgagtggat

SEQ ID NO: 256440 - DNA, 15 bp, Homo sapiens
tatacagtgagtgga

SEQ ID NO: 256441 - DNA, 15 bp, Homo sapiens
gtatacagtgagtgg

SEQ ID NO: 256442 - DNA, 15 bp, Homo sapiens
ggtatacagtgagtg

SEQ ID NO: 256443 - DNA, 15 bp, Homo sapiens
tggtatacagtgagt

SEQ ID NO: 256444 - DNA, 15 bp, Homo sapiens
ctggtatacagtgag

SEQ ID NO: 256445 - DNA, 15 bp, Homo sapiens
cctggtatacagtga

SEQ ID NO: 256446 - DNA, 15 bp, Homo sapiens
gcctggtatacagtg

SEQ ID NO: 256447 - DNA, 15 bp, Homo sapiens
tgcctggtatacagt

SEQ ID NO: 256448 - DNA, 15 bp, Homo sapiens
gtgcctggtatacag

SEQ ID NO: 256449 - DNA, 15 bp, Homo sapiens
tgtgcctggtataca

SEQ ID NO: 256450 - DNA, 15 bp, Homo sapiens
ctgtgcctggtatac

SEQ ID NO: 256451 - DNA, 15 bp, Homo sapiens
actgtgcctggtata

SEQ ID NO: 256452 - DNA, 15 bp, Homo sapiens
cactgtgcctggtat

SEQ ID NO: 256453 - DNA, 15 bp, Homo sapiens
gcactgtgcctggta

SEQ ID NO: 256454 - DNA, 15 bp, Homo sapiens
agcactgtgcctggt

SEQ ID NO: 256455 - DNA, 15 bp, Homo sapiens
tagcactgtgcctgg

SEQ ID NO: 256456 - DNA, 15 bp, Homo sapiens
ctagcactgtgcctg

SEQ ID NO: 256457 - DNA, 15 bp, Homo sapiens
cctagcactgtgcct

SEQ ID NO: 256458 - DNA, 15 bp, Homo sapiens
acctagcactgtgcc

SEQ ID NO: 256459 - DNA, 15 bp, Homo sapiens
tacctagcactgtgc

SEQ ID NO: 256460 - DNA, 15 bp, Homo sapiens
gtacctagcactgtg

SEQ ID NO: 256461 - DNA, 15 bp, Homo sapiens
tgtacctagcactgt

SEQ ID NO: 256462 - DNA, 15 bp, Homo sapiens
gtgtacctagcactg

SEQ ID NO: 256463 - DNA, 15 bp, Homo sapiens
tgtgtacctagcact

SEQ ID NO: 256464 - DNA, 15 bp, Homo sapiens
ctgtgtacctagcac

SEQ ID NO: 256465 - DNA, 15 bp, Homo sapiens
tctgtgtacctagca

SEQ ID NO: 256466 - DNA, 15 bp, Homo sapiens
ctctgtgtacctagc

SEQ ID NO: 256467 - DNA, 15 bp, Homo sapiens
gctctgtgtacctag

SEQ ID NO: 256468 - DNA, 15 bp, Homo sapiens
tgctctgtgtaccta

SEQ ID NO: 256469 - DNA, 15 bp, Homo sapiens
ttgctctgtgtacct

SEQ ID NO: 256470 - DNA, 15 bp, Homo sapiens
tttgctctgtgtacc

SEQ ID NO: 256471 - DNA, 15 bp, Homo sapiens
gtttgctctgtgtac

SEQ ID NO: 256472 - DNA, 15 bp, Homo sapiens
agtttgctctgtgta

SEQ ID NO: 256473 - DNA, 15 bp, Homo sapiens
gagtttgctctgtgt

SEQ ID NO: 256474 - DNA, 15 bp, Homo sapiens
ggagtttgctctgtg

SEQ ID NO: 256475 - DNA, 15 bp, Homo sapiens
gggagtttgctctgt

SEQ ID NO: 256476 - DNA, 15 bp, Homo sapiens
tgggagtttgctctg

SEQ ID NO: 256477 - DNA, 15 bp, Homo sapiens
ctgggagtttgctct

SEQ ID NO: 256478 - DNA, 15 bp, Homo sapiens
actgggagtttgctc

SEQ ID NO: 256479 - DNA, 15 bp, Homo sapiens
gactgggagtttgct

SEQ ID NO: 256480 - DNA, 15 bp, Homo sapiens
ggactgggagtttgc

SEQ ID NO: 256481 - DNA, 15 bp, Homo sapiens
aggactgggagtttg

SEQ ID NO: 256482 - DNA, 15 bp, Homo sapiens
taggactgggagttt

SEQ ID NO: 256483 - DNA, 15 bp, Homo sapiens
gtaggactgggagtt

SEQ ID NO: 256484 - DNA, 15 bp, Homo sapiens
tgtaggactgggagt

SEQ ID NO: 256485 - DNA, 15 bp, Homo sapiens
ttgtaggactgggag

SEQ ID NO: 256486 - DNA, 15 bp, Homo sapiens
cttgtaggactggga

SEQ ID NO: 256487 - DNA, 15 bp, Homo sapiens
ccttgtaggactggg

SEQ ID NO: 256488 - DNA, 15 bp, Homo sapiens
accttgtaggactgg

SEQ ID NO: 256489 - DNA, 15 bp, Homo sapiens
caccttgtaggactg

SEQ ID NO: 256490 - DNA, 15 bp, Homo sapiens
ccaccttgtaggact

SEQ ID NO: 256491 - DNA, 15 bp, Homo sapiens
accaccttgtaggac

SEQ ID NO: 256492 - DNA, 15 bp, Homo sapiens
caccaccttgtagga

SEQ ID NO: 256493 - DNA, 15 bp, Homo sapiens
ccaccaccttgtagg

SEQ ID NO: 256494 - DNA, 15 bp, Homo sapiens
tccaccaccttgtag

SEQ ID NO: 256495 - DNA, 15 bp, Homo sapiens
atccaccaccttgta

SEQ ID NO: 256496 - DNA, 15 bp, Homo sapiens
gatccaccaccttgt

SEQ ID NO: 256497 - DNA, 15 bp, Homo sapiens
agatccaccaccttg

SEQ ID NO: 256498 - DNA, 15 bp, Homo sapiens
tagatccaccacctt

SEQ ID NO: 256499 - DNA, 15 bp, Homo sapiens
ttagatccaccacct

SEQ ID NO: 256500 - DNA, 15 bp, Homo sapiens
attagatccaccacc

SEQ ID NO: 256501 - DNA, 15 bp, Homo sapiens
cattagatccaccac

SEQ ID NO: 256502 - DNA, 15 bp, Homo sapiens
tcattagatccacca

SEQ ID NO: 256503 - DNA, 15 bp, Homo sapiens
gtcattagatccacc

SEQ ID NO: 256504 - DNA, 15 bp, Homo sapiens
cgtcattagatccac

SEQ ID NO: 256505 - DNA, 15 bp, Homo sapiens
acgtcattagatcca

SEQ ID NO: 256506 - DNA, 15 bp, Homo sapiens
cacgtcattagatcc

SEQ ID NO: 256507 - DNA, 15 bp, Homo sapiens
tcacgtcattagatc

SEQ ID NO: 256508 - DNA, 15 bp, Homo sapiens
gtcacgtcattagat

SEQ ID NO: 256509 - DNA, 15 bp, Homo sapiens
tgtcacgtcattaga

SEQ ID NO: 256510 - DNA, 15 bp, Homo sapiens
ctgtcacgtcattag

SEQ ID NO: 256511 - DNA, 15 bp, Homo sapiens
tctgtcacgtcatta

SEQ ID NO: 256512 - DNA, 15 bp, Homo sapiens
atctgtcacgtcatt

SEQ ID NO: 256513 - DNA, 15 bp, Homo sapiens
catctgtcacgtcat

SEQ ID NO: 256514 - DNA, 15 bp, Homo sapiens
tcatctgtcacgtca

SEQ ID NO: 256515 - DNA, 15 bp, Homo sapiens
gtcatctgtcacgtc

SEQ ID NO: 256516 - DNA, 15 bp, Homo sapiens
agtcatctgtcacgt

SEQ ID NO: 256517 - DNA, 15 bp, Homo sapiens
aagtcatctgtcacg

SEQ ID NO: 256518 - DNA, 15 bp, Homo sapiens
caagtcatctgtcac

SEQ ID NO: 256519 - DNA, 15 bp, Homo sapiens
acaagtcatctgtca

SEQ ID NO: 256520 - DNA, 15 bp, Homo sapiens
gacaagtcatctgtc

SEQ ID NO: 256521 - DNA, 15 bp, Homo sapiens
agacaagtcatctgt

SEQ ID NO: 256522 - DNA, 15 bp, Homo sapiens
gagacaagtcatctg

SEQ ID NO: 256523 - DNA, 15 bp, Homo sapiens
ggagacaagtcatct

SEQ ID NO: 256524 - DNA, 15 bp, Homo sapiens
cggagacaagtcatc

SEQ ID NO: 256525 - DNA, 15 bp, Homo sapiens
tcggagacaagtcat

SEQ ID NO: 256526 - DNA, 15 bp, Homo sapiens
ctcggagacaagtca

SEQ ID NO: 256527 - DNA, 15 bp, Homo sapiens
actcggagacaagtc

SEQ ID NO: 256528 - DNA, 15 bp, Homo sapiens
aactcggagacaagt

SEQ ID NO: 256529 - DNA, 15 bp, Homo sapiens
gaactcggagacaag

SEQ ID NO: 256530 - DNA, 15 bp, Homo sapiens
agaactcggagacaa

SEQ ID NO: 256531 - DNA, 15 bp, Homo sapiens
cagaactcggagaca

SEQ ID NO: 256532 - DNA, 15 bp, Homo sapiens
ccagaactcggagac

SEQ ID NO: 256533 - DNA, 15 bp, Homo sapiens
tccagaactcggaga

SEQ ID NO: 256534 - DNA, 15 bp, Homo sapiens
ttccagaactcggag

SEQ ID NO: 256535 - DNA, 15 bp, Homo sapiens
gttccagaactcgga

SEQ ID NO: 256536 - DNA, 15 bp, Homo sapiens
tgttccagaactcgg

SEQ ID NO: 256537 - DNA, 15 bp, Homo sapiens
atgttccagaactcg

SEQ ID NO: 256538 - DNA, 15 bp, Homo sapiens
gatgttccagaactc

SEQ ID NO: 256539 - DNA, 15 bp, Homo sapiens
ggatgttccagaact

SEQ ID NO: 256540 - DNA, 15 bp, Homo sapiens
aggatgttccagaac

SEQ ID NO: 256541 - DNA, 15 bp, Homo sapiens
caggatgttccagaa

SEQ ID NO: 256542 - DNA, 15 bp, Homo sapiens
tcaggatgttccaga

SEQ ID NO: 256543 - DNA, 15 bp, Homo sapiens
ctcaggatgttccag

SEQ ID NO: 256544 - DNA, 15 bp, Homo sapiens
gctcaggatgttcca

SEQ ID NO: 256545 - DNA, 15 bp, Homo sapiens
tgctcaggatgttcc

SEQ ID NO: 256546 - DNA, 15 bp, Homo sapiens
atgctcaggatgttc

SEQ ID NO: 256547 - DNA, 15 bp, Homo sapiens
catgctcaggatgtt

SEQ ID NO: 256548 - DNA, 15 bp, Homo sapiens
acatgctcaggatgt

SEQ ID NO: 256549 - DNA, 15 bp, Homo sapiens
aacatgctcaggatg

SEQ ID NO: 256550 - DNA, 15 bp, Homo sapiens
gaacatgctcaggat

SEQ ID NO: 256551 - DNA, 15 bp, Homo sapiens
agaacatgctcagga

SEQ ID NO: 256552 - DNA, 15 bp, Homo sapiens
gagaacatgctcagg

SEQ ID NO: 256553 - DNA, 15 bp, Homo sapiens
tgagaacatgctcag

SEQ ID NO: 256554 - DNA, 15 bp, Homo sapiens
atgagaacatgctca

SEQ ID NO: 256555 - DNA, 15 bp, Homo sapiens
gatgagaacatgctc

SEQ ID NO: 256556 - DNA, 15 bp, Homo sapiens
ggatgagaacatgct

SEQ ID NO: 256557 - DNA, 15 bp, Homo sapiens
gggatgagaacatgc

SEQ ID NO: 256558 - DNA, 15 bp, Homo sapiens
tgggatgagaacatg

SEQ ID NO: 256559 - DNA, 15 bp, Homo sapiens
ctgggatgagaacat

SEQ ID NO: 256560 - DNA, 15 bp, Homo sapiens
gctgggatgagaaca

SEQ ID NO: 256561 - DNA, 15 bp, Homo sapiens
tgctgggatgagaac

SEQ ID NO: 256562 - DNA, 15 bp, Homo sapiens
gtgctgggatgagaa

SEQ ID NO: 256563 - DNA, 15 bp, Homo sapiens
agtgctgggatgaga

SEQ ID NO: 256564 - DNA, 15 bp, Homo sapiens
cagtgctgggatgag

SEQ ID NO: 256565 - DNA, 15 bp, Homo sapiens
tcagtgctgggatga

SEQ ID NO: 256566 - DNA, 15 bp, Homo sapiens
gtcagtgctgggatg

SEQ ID NO: 256567 - DNA, 15 bp, Homo sapiens
agtcagtgctgggat

SEQ ID NO: 256568 - DNA, 15 bp, Homo sapiens
tagtcagtgctggga

SEQ ID NO: 256569 - DNA, 15 bp, Homo sapiens
ctagtcagtgctggg

SEQ ID NO: 256570 - DNA, 15 bp, Homo sapiens
actagtcagtgctgg

SEQ ID NO: 256571 - DNA, 15 bp, Homo sapiens
gactagtcagtgctg

SEQ ID NO: 256572 - DNA, 15 bp, Homo sapiens
ggactagtcagtgct

SEQ ID NO: 256573 - DNA, 15 bp, Homo sapiens
tggactagtcagtgc

SEQ ID NO: 256574 - DNA, 15 bp, Homo sapiens
ttggactagtcagtg

SEQ ID NO: 256575 - DNA, 15 bp, Homo sapiens
gttggactagtcagt

SEQ ID NO: 256576 - DNA, 15 bp, Homo sapiens
agttggactagtcag

SEQ ID NO: 256577 - DNA, 15 bp, Homo sapiens
tagttggactagtca

SEQ ID NO: 256578 - DNA, 15 bp, Homo sapiens
gtagttggactagtc

SEQ ID NO: 256579 - DNA, 15 bp, Homo sapiens
agtagttggactagt

SEQ ID NO: 256580 - DNA, 15 bp, Homo sapiens
aagtagttggactag

SEQ ID NO: 256581 - DNA, 15 bp, Homo sapiens
caagtagttggacta

SEQ ID NO: 256582 - DNA, 15 bp, Homo sapiens
acaagtagttggact

SEQ ID NO: 256583 - DNA, 15 bp, Homo sapiens
aacaagtagttggac

SEQ ID NO: 256584 - DNA, 15 bp, Homo sapiens
caacaagtagttgga

SEQ ID NO: 256585 - DNA, 15 bp, Homo sapiens
tcaacaagtagttgg

SEQ ID NO: 256586 - DNA, 15 bp, Homo sapiens
atcaacaagtagttg

SEQ ID NO: 256587 - DNA, 15 bp, Homo sapiens
aatcaacaagtagtt

SEQ ID NO: 256588 - DNA, 15 bp, Homo sapiens
gaatcaacaagtagt

SEQ ID NO: 256589 - DNA, 15 bp, Homo sapiens
agaatcaacaagtag

SEQ ID NO: 256590 - DNA, 15 bp, Homo sapiens
gagaatcaacaagta

SEQ ID NO: 256591 - DNA, 15 bp, Homo sapiens
agagaatcaacaagt

SEQ ID NO: 256592 - DNA, 15 bp, Homo sapiens
tagagaatcaacaag

SEQ ID NO: 256593 - DNA, 15 bp, Homo sapiens
ttagagaatcaacaa

SEQ ID NO: 256594 - DNA, 15 bp, Homo sapiens
cttagagaatcaaca

SEQ ID NO: 256595 - DNA, 15 bp, Homo sapiens
acttagagaatcaac

SEQ ID NO: 256596 - DNA, 15 bp, Homo sapiens
aacttagagaatcaa

SEQ ID NO: 256597 - DNA, 15 bp, Homo sapiens
taacttagagaatca

SEQ ID NO: 256598 - DNA, 15 bp, Homo sapiens
ctaacttagagaatc

SEQ ID NO: 256599 - DNA, 15 bp, Homo sapiens
tctaacttagagaat

SEQ ID NO: 256600 - DNA, 15 bp, Homo sapiens
ttctaacttagagaa

SEQ ID NO: 256601 - DNA, 15 bp, Homo sapiens
attctaacttagaga

SEQ ID NO: 256602 - DNA, 15 bp, Homo sapiens
aattctaacttagag

SEQ ID NO: 256603 - DNA, 15 bp, Homo sapiens
caattctaacttaga

SEQ ID NO: 256604 - DNA, 15 bp, Homo sapiens
ccaattctaacttag

SEQ ID NO: 256605 - DNA, 15 bp, Homo sapiens
cccaattctaactta

SEQ ID NO: 256606 - DNA, 15 bp, Homo sapiens
tcccaattctaactt

SEQ ID NO: 256607 - DNA, 15 bp, Homo sapiens
ctcccaattctaact

SEQ ID NO: 256608 - DNA, 15 bp, Homo sapiens
tctcccaattctaac

SEQ ID NO: 256609 - DNA, 15 bp, Homo sapiens
atctcccaattctaa

SEQ ID NO: 256610 - DNA, 15 bp, Homo sapiens
catctcccaattcta

SEQ ID NO: 256611 - DNA, 15 bp, Homo sapiens
acatctcccaattct

SEQ ID NO: 256612 - DNA, 15 bp, Homo sapiens
cacatctcccaattc

SEQ ID NO: 256613 - DNA, 15 bp, Homo sapiens
ccacatctcccaatt

SEQ ID NO: 256614 - DNA, 15 bp, Homo sapiens
cccacatctcccaat

SEQ ID NO: 256615 - DNA, 15 bp, Homo sapiens
tcccacatctcccaa

SEQ ID NO: 256616 - DNA, 15 bp, Homo sapiens
ttcccacatctccca

SEQ ID NO: 256617 - DNA, 15 bp, Homo sapiens
cttcccacatctccc

SEQ ID NO: 256618 - DNA, 15 bp, Homo sapiens
gcttcccacatctcc

SEQ ID NO: 256619 - DNA, 15 bp, Homo sapiens
agcttcccacatctc

SEQ ID NO: 256620 - DNA, 15 bp, Homo sapiens
aagcttcccacatct

SEQ ID NO: 256621 - DNA, 15 bp, Homo sapiens
gaagcttcccacatc

SEQ ID NO: 256622 - DNA, 15 bp, Homo sapiens
ggaagcttcccacat

SEQ ID NO: 256623 - DNA, 15 bp, Homo sapiens
tggaagcttcccaca

SEQ ID NO: 256624 - DNA, 15 bp, Homo sapiens
ctggaagcttcccac

SEQ ID NO: 256625 - DNA, 15 bp, Homo sapiens
tctggaagcttccca

SEQ ID NO: 256626 - DNA, 15 bp, Homo sapiens
ttctggaagcttccc

SEQ ID NO: 256627 - DNA, 15 bp, Homo sapiens
tttctggaagcttcc

SEQ ID NO: 256628 - DNA, 15 bp, Homo sapiens
ctttctggaagcttc

SEQ ID NO: 256629 - DNA, 15 bp, Homo sapiens
tctttctggaagctt

SEQ ID NO: 256630 - DNA, 15 bp, Homo sapiens
ctctttctggaagct

SEQ ID NO: 256631 - DNA, 15 bp, Homo sapiens
cctctttctggaagc

SEQ ID NO: 256632 - DNA, 15 bp, Homo sapiens
acctctttctggaag

SEQ ID NO: 256633 - DNA, 15 bp, Homo sapiens
cacctctttctggaa

SEQ ID NO: 256634 - DNA, 15 bp, Homo sapiens
tcacctctttctgga

SEQ ID NO: 256635 - DNA, 15 bp, Homo sapiens
gtcacctctttctgg

SEQ ID NO: 256636 - DNA, 15 bp, Homo sapiens
ggtcacctctttctg

SEQ ID NO: 256637 - DNA, 15 bp, Homo sapiens
aggtcacctctttct

SEQ ID NO: 256638 - DNA, 15 bp, Homo sapiens
caggtcacctctttc

SEQ ID NO: 256639 - DNA, 15 bp, Homo sapiens
acaggtcacctcttt

SEQ ID NO: 256640 - DNA, 15 bp, Homo sapiens
cacaggtcacctctt

SEQ ID NO: 256641 - DNA, 15 bp, Homo sapiens
tcacaggtcacctct

SEQ ID NO: 256642 - DNA, 15 bp, Homo sapiens
gtcacaggtcacctc

SEQ ID NO: 256643 - DNA, 15 bp, Homo sapiens
ggtcacaggtcacct

SEQ ID NO: 256644 - DNA, 15 bp, Homo sapiens
aggtcacaggtcacc

SEQ ID NO: 256645 - DNA, 15 bp, Homo sapiens
taggtcacaggtcac

SEQ ID NO: 256646 - DNA, 15 bp, Homo sapiens
ctaggtcacaggtca

SEQ ID NO: 256647 - DNA, 15 bp, Homo sapiens
gctaggtcacaggtc

SEQ ID NO: 256648 - DNA, 15 bp, Homo sapiens
tgctaggtcacaggt

SEQ ID NO: 256649 - DNA, 15 bp, Homo sapiens
gtgctaggtcacagg

SEQ ID NO: 256650 - DNA, 15 bp, Homo sapiens
tgtgctaggtcacag

SEQ ID NO: 256651 - DNA, 15 bp, Homo sapiens
ctgtgctaggtcaca

SEQ ID NO: 256652 - DNA, 15 bp, Homo sapiens
cctgtgctaggtcac

SEQ ID NO: 256653 - DNA, 15 bp, Homo sapiens
gcctgtgctaggtca

SEQ ID NO: 256654 - DNA, 15 bp, Homo sapiens
agcctgtgctaggtc

SEQ ID NO: 256655 - DNA, 15 bp, Homo sapiens
gagcctgtgctaggt

SEQ ID NO: 256656 - DNA, 15 bp, Homo sapiens
agagcctgtgctagg

SEQ ID NO: 256657 - DNA, 15 bp, Homo sapiens
tagagcctgtgctag

SEQ ID NO: 256658 - DNA, 15 bp, Homo sapiens
gtagagcctgtgcta

SEQ ID NO: 256659 - DNA, 15 bp, Homo sapiens
ggtagagcctgtgct

SEQ ID NO: 256660 - DNA, 15 bp, Homo sapiens
gggtagagcctgtgc

SEQ ID NO: 256661 - DNA, 15 bp, Homo sapiens
tgggtagagcctgtg

SEQ ID NO: 256662 - DNA, 15 bp, Homo sapiens
gtgggtagagcctgt

SEQ ID NO: 256663 - DNA, 15 bp, Homo sapiens
tgtgggtagagcctg

SEQ ID NO: 256664 - DNA, 15 bp, Homo sapiens
ctgtgggtagagcct

SEQ ID NO: 256665 - DNA, 15 bp, Homo sapiens
gctgtgggtagagcc

SEQ ID NO: 256666 - DNA, 15 bp, Homo sapiens
cgctgtgggtagagc

SEQ ID NO: 256667 - DNA, 15 bp, Homo sapiens
ccgctgtgggtagag

SEQ ID NO: 256668 - DNA, 15 bp, Homo sapiens
cccgctgtgggtaga

SEQ ID NO: 256669 - DNA, 15 bp, Homo sapiens
tcccgctgtgggtag

SEQ ID NO: 256670 - DNA, 15 bp, Homo sapiens
ctcccgctgtgggta

SEQ ID NO: 256671 - DNA, 15 bp, Homo sapiens
gctcccgctgtgggt

SEQ ID NO: 256672 - DNA, 15 bp, Homo sapiens
tgctcccgctgtggg

SEQ ID NO: 256673 - DNA, 15 bp, Homo sapiens
gtgctcccgctgtgg

SEQ ID NO: 256674 - DNA, 15 bp, Homo sapiens
tgtgctcccgctgtg

SEQ ID NO: 256675 - DNA, 15 bp, Homo sapiens
ttgtgctcccgctgt

SEQ ID NO: 256676 - DNA, 15 bp, Homo sapiens
attgtgctcccgctg

SEQ ID NO: 256677 - DNA, 15 bp, Homo sapiens
cattgtgctcccgct

SEQ ID NO: 256678 - DNA, 15 bp, Homo sapiens
gcattgtgctcccgc

SEQ ID NO: 256679 - DNA, 15 bp, Homo sapiens
tgcattgtgctcccg

SEQ ID NO: 256680 - DNA, 15 bp, Homo sapiens
atgcattgtgctccc

SEQ ID NO: 256681 - DNA, 15 bp, Homo sapiens
aatgcattgtgctcc

SEQ ID NO: 256682 - DNA, 15 bp, Homo sapiens
gaatgcattgtgctc

SEQ ID NO: 256683 - DNA, 15 bp, Homo sapiens
agaatgcattgtgct

SEQ ID NO: 256684 - DNA, 15 bp, Homo sapiens
aagaatgcattgtgc

SEQ ID NO: 256685 - DNA, 15 bp, Homo sapiens
atgtaatatattata

SEQ ID NO: 256686 - DNA, 15 bp, Homo sapiens
tatgtaatatattat

SEQ ID NO: 256687 - DNA, 15 bp, Homo sapiens
atatgtaatatatta

SEQ ID NO: 256688 - DNA, 15 bp, Homo sapiens
tatatgtaatatatt

SEQ ID NO: 256689 - DNA, 15 bp, Homo sapiens
atatatgtaatatat

SEQ ID NO: 256690 - DNA, 15 bp, Homo sapiens
aatatatgtaatata

SEQ ID NO: 256691 - DNA, 15 bp, Homo sapiens
caatatatgtaatat

SEQ ID NO: 256692 - DNA, 15 bp, Homo sapiens
ccaatatatgtaata

SEQ ID NO: 256693 - DNA, 15 bp, Homo sapiens
cccaatatatgtaat

SEQ ID NO: 256694 - DNA, 15 bp, Homo sapiens
acccaatatatgtaa

SEQ ID NO: 256695 - DNA, 15 bp, Homo sapiens
aacccaatatatgta

SEQ ID NO: 256696 - DNA, 15 bp, Homo sapiens
taacccaatatatgt

SEQ ID NO: 256697 - DNA, 15 bp, Homo sapiens
ataacccaatatatg

SEQ ID NO: 256698 - DNA, 15 bp, Homo sapiens
cataacccaatatat

SEQ ID NO: 256699 - DNA, 15 bp, Homo sapiens
gcataacccaatata

SEQ ID NO: 256700 - DNA, 15 bp, Homo sapiens
tgcataacccaatat

SEQ ID NO: 256701 - DNA, 15 bp, Homo sapiens
ttgcataacccaata

SEQ ID NO: 256702 - DNA, 15 bp, Homo sapiens
tttgcataacccaat

SEQ ID NO: 256703 - DNA, 15 bp, Homo sapiens
ttttgcataacccaa

SEQ ID NO: 256704 - DNA, 15 bp, Homo sapiens
attttgcataaccca

SEQ ID NO: 256705 - DNA, 15 bp, Homo sapiens
tattttgcataaccc

SEQ ID NO: 256706 - DNA, 15 bp, Homo sapiens
ctattttgcataacc

SEQ ID NO: 256707 - DNA, 15 bp, Homo sapiens
actattttgcataac

SEQ ID NO: 256708 - DNA, 15 bp, Homo sapiens
tactattttgcataa

SEQ ID NO: 256709 - DNA, 15 bp, Homo sapiens
atactattttgcata

SEQ ID NO: 256710 - DNA, 15 bp, Homo sapiens
gatactattttgcat

SEQ ID NO: 256711 - DNA, 15 bp, Homo sapiens
tgatactattttgca

SEQ ID NO: 256712 - DNA, 15 bp, Homo sapiens
ttgatactattttgc

SEQ ID NO: 256713 - DNA, 15 bp, Homo sapiens
tttgatactattttg

SEQ ID NO: 256714 - DNA, 15 bp, Homo sapiens
ttttgatactatttt

SEQ ID NO: 256715 - DNA, 15 bp, Homo sapiens
attttgatactattt

SEQ ID NO: 256716 - DNA, 15 bp, Homo sapiens
aattttgatactatt

SEQ ID NO: 256717 - DNA, 15 bp, Homo sapiens
taattttgatactat

SEQ ID NO: 256718 - DNA, 15 bp, Homo sapiens
ttaattttgatacta

SEQ ID NO: 256719 - DNA, 15 bp, Homo sapiens
gttaattttgatact

SEQ ID NO: 256720 - DNA, 15 bp, Homo sapiens
agttaattttgatac

SEQ ID NO: 256721 - DNA, 15 bp, Homo sapiens
aagttaattttgata

SEQ ID NO: 256722 - DNA, 15 bp, Homo sapiens
aaagttaattttgat

SEQ ID NO: 256723 - DNA, 15 bp, Homo sapiens
taaagttaattttga

SEQ ID NO: 256724 - DNA, 15 bp, Homo sapiens
gtaaagttaattttg

SEQ ID NO: 256725 - DNA, 15 bp, Homo sapiens
agtaaagttaatttt

SEQ ID NO: 256726 - DNA, 15 bp, Homo sapiens
aagtaaagttaattt

SEQ ID NO: 256727 - DNA, 15 bp, Homo sapiens
caagtaaagttaatt

SEQ ID NO: 256728 - DNA, 15 bp, Homo sapiens
acaagtaaagttaat

SEQ ID NO: 256729 - DNA, 15 bp, Homo sapiens
aacaagtaaagttaa

SEQ ID NO: 256730 - DNA, 15 bp, Homo sapiens
aaacaagtaaagtta

SEQ ID NO: 256731 - DNA, 15 bp, Homo sapiens
taaacaagtaaagtt

SEQ ID NO: 256732 - DNA, 15 bp, Homo sapiens
ataaacaagtaaagt

SEQ ID NO: 256733 - DNA, 15 bp, Homo sapiens
aataaacaagtaaag

SEQ ID NO: 256734 - DNA, 15 bp, Homo sapiens
aaataaacaagtaaa

SEQ ID NO: 256735 - DNA, 15 bp, Homo sapiens
aaaataaacaagtaa

SEQ ID NO: 256736 - DNA, 15 bp, Homo sapiens
aaaaataaacaagta

SEQ ID NO: 256737 - DNA, 15 bp, Homo sapiens
gaaaaataaacaagt

SEQ ID NO: 256738 - DNA, 15 bp, Homo sapiens
tgaaaaataaacaag

SEQ ID NO: 256739 - DNA, 15 bp, Homo sapiens
atgaaaaataaacaa

SEQ ID NO: 256740 - DNA, 15 bp, Homo sapiens
aatgaaaaataaaca

SEQ ID NO: 256741 - DNA, 15 bp, Homo sapiens
aaatgaaaaataaac

SEQ ID NO: 256742 - DNA, 15 bp, Homo sapiens
aaaatgaaaaataaa

SEQ ID NO: 256743 - DNA, 15 bp, Homo sapiens
aaaaatgaaaaataa

SEQ ID NO: 256744 - DNA, 15 bp, Homo sapiens
aaaaaatgaaaaata

SEQ ID NO: 256745 - DNA, 15 bp, Homo sapiens
taaaaaatgaaaaat

SEQ ID NO: 256746 - DNA, 15 bp, Homo sapiens
ttaaaaaatgaaaaa

SEQ ID NO: 256747 - DNA, 15 bp, Homo sapiens
attaaaaaatgaaaa

SEQ ID NO: 256748 - DNA, 15 bp, Homo sapiens
tattaaaaaatgaaa

SEQ ID NO: 256749 - DNA, 15 bp, Homo sapiens
atattaaaaaatgaa

SEQ ID NO: 256750 - DNA, 15 bp, Homo sapiens
catattaaaaaatga

SEQ ID NO: 256751 - DNA, 15 bp, Homo sapiens
tcatattaaaaaatg

SEQ ID NO: 256752 - DNA, 15 bp, Homo sapiens
ctcatattaaaaaat

SEQ ID NO: 256753 - DNA, 15 bp, Homo sapiens
actcatattaaaaaa

SEQ ID NO: 256754 - DNA, 15 bp, Homo sapiens
tactcatattaaaaa

SEQ ID NO: 256755 - DNA, 15 bp, Homo sapiens
ttactcatattaaaa

SEQ ID NO: 256756 - DNA, 15 bp, Homo sapiens
attactcatattaaa

SEQ ID NO: 256757 - DNA, 15 bp, Homo sapiens
tattactcatattaa

SEQ ID NO: 256758 - DNA, 15 bp, Homo sapiens
ctattactcatatta

SEQ ID NO: 256759 - DNA, 15 bp, Homo sapiens
tctattactcatatt

SEQ ID NO: 256760 - DNA, 15 bp, Homo sapiens
gtctattactcatat

SEQ ID NO: 256761 - DNA, 15 bp, Homo sapiens
tgtctattactcata

SEQ ID NO: 256762 - DNA, 15 bp, Homo sapiens
ttgtctattactcat

SEQ ID NO: 256763 - DNA, 15 bp, Homo sapiens
tttgtctattactca

SEQ ID NO: 256764 - DNA, 15 bp, Homo sapiens
atttgtctattactc

SEQ ID NO: 256765 - DNA, 15 bp, Homo sapiens
aatttgtctattact

SEQ ID NO: 256766 - DNA, 15 bp, Homo sapiens
aaatttgtctattac

SEQ ID NO: 256767 - DNA, 15 bp, Homo sapiens
taaatttgtctatta

SEQ ID NO: 256768 - DNA, 15 bp, Homo sapiens
ttaaatttgtctatt

SEQ ID NO: 256769 - DNA, 15 bp, Homo sapiens
tttaaatttgtctat

SEQ ID NO: 256770 - DNA, 15 bp, Homo sapiens
atttaaatttgtcta

SEQ ID NO: 256771 - DNA, 15 bp, Homo sapiens
aatttaaatttgtct

SEQ ID NO: 256772 - DNA, 15 bp, Homo sapiens
taatttaaatttgtc

SEQ ID NO: 256773 - DNA, 15 bp, Homo sapiens
ctaatttaaatttgt

SEQ ID NO: 256774 - DNA, 15 bp, Homo sapiens
gctaatttaaatttg

SEQ ID NO: 256775 - DNA, 15 bp, Homo sapiens
agctaatttaaattt

SEQ ID NO: 256776 - DNA, 15 bp, Homo sapiens
tagctaatttaaatt

SEQ ID NO: 256777 - DNA, 15 bp, Homo sapiens
atagctaatttaaat

SEQ ID NO: 256778 - DNA, 15 bp, Homo sapiens
tatagctaatttaaa

SEQ ID NO: 256779 - DNA, 15 bp, Homo sapiens
atatagctaatttaa

SEQ ID NO: 256780 - DNA, 15 bp, Homo sapiens
tatatagctaattta

SEQ ID NO: 256781 - DNA, 15 bp, Homo sapiens
ctatatagctaattt

SEQ ID NO: 256782 - DNA, 15 bp, Homo sapiens
gctatatagctaatt

SEQ ID NO: 256783 - DNA, 15 bp, Homo sapiens
agctatatagctaat

SEQ ID NO: 256784 - DNA, 15 bp, Homo sapiens
gagctatatagctaa

SEQ ID NO: 256785 - DNA, 15 bp, Homo sapiens
agagctatatagcta

SEQ ID NO: 256786 - DNA, 15 bp, Homo sapiens
gagagctatatagct

SEQ ID NO: 256787 - DNA, 15 bp, Homo sapiens
tgagagctatatagc

SEQ ID NO: 256788 - DNA, 15 bp, Homo sapiens
atgagagctatatag

SEQ ID NO: 256789 - DNA, 15 bp, Homo sapiens
aatgagagctatata

SEQ ID NO: 256790 - DNA, 15 bp, Homo sapiens
taatgagagctatat

SEQ ID NO: 256791 - DNA, 15 bp, Homo sapiens
ataatgagagctata

SEQ ID NO: 256792 - DNA, 15 bp, Homo sapiens
aataatgagagctat

SEQ ID NO: 256793 - DNA, 15 bp, Homo sapiens
taataatgagagcta

SEQ ID NO: 256794 - DNA, 15 bp, Homo sapiens
ataataatgagagct

SEQ ID NO: 256795 - DNA, 15 bp, Homo sapiens
tataataatgagagc

SEQ ID NO: 256796 - DNA, 15 bp, Homo sapiens
atataataatgagag

SEQ ID NO: 256797 - DNA, 15 bp, Homo sapiens
aatataataatgaga

SEQ ID NO: 256798 - DNA, 15 bp, Homo sapiens
aaatataataatgag

SEQ ID NO: 256799 - DNA, 15 bp, Homo sapiens
gaaatataataatga

SEQ ID NO: 256800 - DNA, 15 bp, Homo sapiens
agaaatataataatg

SEQ ID NO: 256801 - DNA, 15 bp, Homo sapiens
cagaaatataataat

SEQ ID NO: 256802 - DNA, 15 bp, Homo sapiens
acagaaatataataa

SEQ ID NO: 256803 - DNA, 15 bp, Homo sapiens
gacagaaatataata

SEQ ID NO: 256804 - DNA, 15 bp, Homo sapiens
tgacagaaatataat

SEQ ID NO: 256805 - DNA, 15 bp, Homo sapiens
ctgacagaaatataa

SEQ ID NO: 256806 - DNA, 15 bp, Homo sapiens
tctgacagaaatata

SEQ ID NO: 256807 - DNA, 15 bp, Homo sapiens
gtctgacagaaatat

SEQ ID NO: 256808 - DNA, 15 bp, Homo sapiens
tgtctgacagaaata

SEQ ID NO: 256809 - DNA, 15 bp, Homo sapiens
ctgtctgacagaaat

SEQ ID NO: 256810 - DNA, 15 bp, Homo sapiens
tctgtctgacagaaa

SEQ ID NO: 256811 - DNA, 15 bp, Homo sapiens
ttctgtctgacagaa

SEQ ID NO: 256812 - DNA, 15 bp, Homo sapiens
gttctgtctgacaga

SEQ ID NO: 256813 - DNA, 15 bp, Homo sapiens
agttctgtctgacag

SEQ ID NO: 256814 - DNA, 15 bp, Homo sapiens
cagttctgtctgaca

SEQ ID NO: 256815 - DNA, 15 bp, Homo sapiens
ccagttctgtctgac

SEQ ID NO: 256816 - DNA, 15 bp, Homo sapiens
accagttctgtctga

SEQ ID NO: 256817 - DNA, 15 bp, Homo sapiens
aaccagttctgtctg

SEQ ID NO: 256818 - DNA, 15 bp, Homo sapiens
gaaccagttctgtct

SEQ ID NO: 256819 - DNA, 15 bp, Homo sapiens
tgaaccagttctgtc

SEQ ID NO: 256820 - DNA, 15 bp, Homo sapiens
ttgaaccagttctgt

SEQ ID NO: 256821 - DNA, 15 bp, Homo sapiens
gttgaaccagttctg

SEQ ID NO: 256822 - DNA, 15 bp, Homo sapiens
ggttgaaccagttct

SEQ ID NO: 256823 - DNA, 15 bp, Homo sapiens
gggttgaaccagttc

SEQ ID NO: 256824 - DNA, 15 bp, Homo sapiens
cgggttgaaccagtt

SEQ ID NO: 256825 - DNA, 15 bp, Homo sapiens
acgggttgaaccagt

SEQ ID NO: 256826 - DNA, 15 bp, Homo sapiens
aacgggttgaaccag

SEQ ID NO: 256827 - DNA, 15 bp, Homo sapiens
caacgggttgaacca

SEQ ID NO: 256828 - DNA, 15 bp, Homo sapiens
acaacgggttgaacc

SEQ ID NO: 256829 - DNA, 15 bp, Homo sapiens
aacaacgggttgaac

SEQ ID NO: 256830 - DNA, 15 bp, Homo sapiens
aaacaacgggttgaa

SEQ ID NO: 256831 - DNA, 15 bp, Homo sapiens
caaacaacgggttga

SEQ ID NO: 256832 - DNA, 15 bp, Homo sapiens
tcaaacaacgggttg

SEQ ID NO: 256833 - DNA, 15 bp, Homo sapiens
gtcaaacaacgggtt

SEQ ID NO: 256834 - DNA, 15 bp, Homo sapiens
tgtcaaacaacgggt

SEQ ID NO: 256835 - DNA, 15 bp, Homo sapiens
gtgtcaaacaacggg

SEQ ID NO: 256836 - DNA, 15 bp, Homo sapiens
agtgtcaaacaacgg

SEQ ID NO: 256837 - DNA, 15 bp, Homo sapiens
cagtgtcaaacaacg

SEQ ID NO: 256838 - DNA, 15 bp, Homo sapiens
tcagtgtcaaacaac

SEQ ID NO: 256839 - DNA, 15 bp, Homo sapiens
ctcagtgtcaaacaa

SEQ ID NO: 256840 - DNA, 15 bp, Homo sapiens
actcagtgtcaaaca

SEQ ID NO: 256841 - DNA, 15 bp, Homo sapiens
cactcagtgtcaaac

SEQ ID NO: 256842 - DNA, 15 bp, Homo sapiens
acactcagtgtcaaa

SEQ ID NO: 256843 - DNA, 15 bp, Homo sapiens
tacactcagtgtcaa

SEQ ID NO: 256844 - DNA, 15 bp, Homo sapiens
atacactcagtgtca

SEQ ID NO: 256845 - DNA, 15 bp, Homo sapiens
catacactcagtgtc

SEQ ID NO: 256846 - DNA, 15 bp, Homo sapiens
acatacactcagtgt

SEQ ID NO: 256847 - DNA, 15 bp, Homo sapiens
aacatacactcagtg

SEQ ID NO: 256848 - DNA, 15 bp, Homo sapiens
aaacatacactcagt

SEQ ID NO: 256849 - DNA, 15 bp, Homo sapiens
gaaacatacactcag

SEQ ID NO: 256850 - DNA, 15 bp, Homo sapiens
tgaaacatacactca

SEQ ID NO: 256851 - DNA, 15 bp, Homo sapiens
atgaaacatacactc

SEQ ID NO: 256852 - DNA, 15 bp, Homo sapiens
catgaaacatacact

SEQ ID NO: 256853 - DNA, 15 bp, Homo sapiens
acatgaaacatacac

SEQ ID NO: 256854 - DNA, 15 bp, Homo sapiens
cacatgaaacataca

SEQ ID NO: 256855 - DNA, 15 bp, Homo sapiens
acacatgaaacatac

SEQ ID NO: 256856 - DNA, 15 bp, Homo sapiens
tacacatgaaacata

SEQ ID NO: 256857 - DNA, 15 bp, Homo sapiens
ttacacatgaaacat

SEQ ID NO: 256858 - DNA, 15 bp, Homo sapiens
tttacacatgaaaca

SEQ ID NO: 256859 - DNA, 15 bp, Homo sapiens
atttacacatgaaac

SEQ ID NO: 256860 - DNA, 15 bp, Homo sapiens
tatttacacatgaaa

SEQ ID NO: 256861 - DNA, 15 bp, Homo sapiens
atatttacacatgaa

SEQ ID NO: 256862 - DNA, 15 bp, Homo sapiens
catatttacacatga

SEQ ID NO: 256863 - DNA, 15 bp, Homo sapiens
acatatttacacatg

SEQ ID NO: 256864 - DNA, 15 bp, Homo sapiens
gacatatttacacat

SEQ ID NO: 256865 - DNA, 15 bp, Homo sapiens
agacatatttacaca

SEQ ID NO: 256866 - DNA, 15 bp, Homo sapiens
gagacatatttacac

SEQ ID NO: 256867 - DNA, 15 bp, Homo sapiens
tgagacatatttaca

SEQ ID NO: 256868 - DNA, 15 bp, Homo sapiens
ttgagacatatttac

SEQ ID NO: 256869 - DNA, 15 bp, Homo sapiens
gttgagacatattta

SEQ ID NO: 256870 - DNA, 15 bp, Homo sapiens
cgttgagacatattt

SEQ ID NO: 256871 - DNA, 15 bp, Homo sapiens
gcgttgagacatatt

SEQ ID NO: 256872 - DNA, 15 bp, Homo sapiens
agcgttgagacatat

SEQ ID NO: 256873 - DNA, 15 bp, Homo sapiens
aagcgttgagacata

SEQ ID NO: 256874 - DNA, 15 bp, Homo sapiens
caagcgttgagacat

SEQ ID NO: 256875 - DNA, 15 bp, Homo sapiens
gcaagcgttgagaca

SEQ ID NO: 256876 - DNA, 15 bp, Homo sapiens
tgcaagcgttgagac

SEQ ID NO: 256877 - DNA, 15 bp, Homo sapiens
atgcaagcgttgaga

SEQ ID NO: 256878 - DNA, 15 bp, Homo sapiens
aatgcaagcgttgag

SEQ ID NO: 256879 - DNA, 15 bp, Homo sapiens
taatgcaagcgttga

SEQ ID NO: 256880 - DNA, 15 bp, Homo sapiens
ctaatgcaagcgttg

SEQ ID NO: 256881 - DNA, 15 bp, Homo sapiens
tctaatgcaagcgtt

SEQ ID NO: 256882 - DNA, 15 bp, Homo sapiens
atctaatgcaagcgt

SEQ ID NO: 256883 - DNA, 15 bp, Homo sapiens
catctaatgcaagcg

SEQ ID NO: 256884 - DNA, 15 bp, Homo sapiens
ccatctaatgcaagc

SEQ ID NO: 256885 - DNA, 15 bp, Homo sapiens
cccatctaatgcaag

SEQ ID NO: 256886 - DNA, 15 bp, Homo sapiens
gcccatctaatgcaa

SEQ ID NO: 256887 - DNA, 15 bp, Homo sapiens
tgcccatctaatgca

SEQ ID NO: 256888 - DNA, 15 bp, Homo sapiens
ctgcccatctaatgc

SEQ ID NO: 256889 - DNA, 15 bp, Homo sapiens
actgcccatctaatg

SEQ ID NO: 256890 - DNA, 15 bp, Homo sapiens
aactgcccatctaat

SEQ ID NO: 256891 - DNA, 15 bp, Homo sapiens
aaactgcccatctaa

SEQ ID NO: 256892 - DNA, 15 bp, Homo sapiens
caaactgcccatcta

SEQ ID NO: 256893 - DNA, 15 bp, Homo sapiens
tcaaactgcccatct

SEQ ID NO: 256894 - DNA, 15 bp, Homo sapiens
ctcaaactgcccatc

SEQ ID NO: 256895 - DNA, 15 bp, Homo sapiens
tctcaaactgcccat

SEQ ID NO: 256896 - DNA, 15 bp, Homo sapiens
ttctcaaactgccca

SEQ ID NO: 256897 - DNA, 15 bp, Homo sapiens
gttctcaaactgccc

SEQ ID NO: 256898 - DNA, 15 bp, Homo sapiens
tgttctcaaactgcc

SEQ ID NO: 256899 - DNA, 15 bp, Homo sapiens
ctgttctcaaactgc

SEQ ID NO: 256900 - DNA, 15 bp, Homo sapiens
tctgttctcaaactg

SEQ ID NO: 256901 - DNA, 15 bp, Homo sapiens
ctctgttctcaaact

SEQ ID NO: 256902 - DNA, 15 bp, Homo sapiens
tctctgttctcaaac

SEQ ID NO: 256903 - DNA, 15 bp, Homo sapiens
gtctctgttctcaaa

SEQ ID NO: 256904 - DNA, 15 bp, Homo sapiens
ggtctctgttctcaa

SEQ ID NO: 256905 - DNA, 15 bp, Homo sapiens
aggtctctgttctca

SEQ ID NO: 256906 - DNA, 15 bp, Homo sapiens
gaggtctctgttctc

SEQ ID NO: 256907 - DNA, 15 bp, Homo sapiens
tgaggtctctgttct

SEQ ID NO: 256908 - DNA, 15 bp, Homo sapiens
ctgaggtctctgttc

SEQ ID NO: 256909 - DNA, 15 bp, Homo sapiens
gctgaggtctctgtt

SEQ ID NO: 256910 - DNA, 15 bp, Homo sapiens
tgctgaggtctctgt

SEQ ID NO: 256911 - DNA, 15 bp, Homo sapiens
atgctgaggtctctg

SEQ ID NO: 256912 - DNA, 15 bp, Homo sapiens
gatgctgaggtctct

SEQ ID NO: 256913 - DNA, 15 bp, Homo sapiens
ggatgctgaggtctc

SEQ ID NO: 256914 - DNA, 15 bp, Homo sapiens
gggatgctgaggtct

SEQ ID NO: 256915 - DNA, 15 bp, Homo sapiens
tgggatgctgaggtc

SEQ ID NO: 256916 - DNA, 15 bp, Homo sapiens
atgggatgctgaggt

SEQ ID NO: 256917 - DNA, 15 bp, Homo sapiens
aatgggatgctgagg

SEQ ID NO: 256918 - DNA, 15 bp, Homo sapiens
gaatgggatgctgag

SEQ ID NO: 256919 - DNA, 15 bp, Homo sapiens
tgaatgggatgctga

SEQ ID NO: 256920 - DNA, 15 bp, Homo sapiens
atgaatgggatgctg

SEQ ID NO: 256921 - DNA, 15 bp, Homo sapiens
aatgaatgggatgct

SEQ ID NO: 256922 - DNA, 15 bp, Homo sapiens
aaatgaatgggatgc

SEQ ID NO: 256923 - DNA, 15 bp, Homo sapiens
aaaatgaatgggatg

SEQ ID NO: 256924 - DNA, 15 bp, Homo sapiens
gaaaatgaatgggat

SEQ ID NO: 256925 - DNA, 15 bp, Homo sapiens
agaaaatgaatggga

SEQ ID NO: 256926 - DNA, 15 bp, Homo sapiens
cagaaaatgaatggg

SEQ ID NO: 256927 - DNA, 15 bp, Homo sapiens
ccagaaaatgaatgg

SEQ ID NO: 256928 - DNA, 15 bp, Homo sapiens
gccagaaaatgaatg

SEQ ID NO: 256929 - DNA, 15 bp, Homo sapiens
ggccagaaaatgaat

SEQ ID NO: 256930 - DNA, 15 bp, Homo sapiens
gggccagaaaatgaa

SEQ ID NO: 256931 - DNA, 15 bp, Homo sapiens
ggggccagaaaatga

SEQ ID NO: 256932 - DNA, 15 bp, Homo sapiens
gggggccagaaaatg

SEQ ID NO: 256933 - DNA, 15 bp, Homo sapiens
tgggggccagaaaat

SEQ ID NO: 256934 - DNA, 15 bp, Homo sapiens
ttgggggccagaaaa

SEQ ID NO: 256935 - DNA, 15 bp, Homo sapiens
tttgggggccagaaa

SEQ ID NO: 256936 - DNA, 15 bp, Homo sapiens
gtttgggggccagaa

SEQ ID NO: 256937 - DNA, 15 bp, Homo sapiens
tgtttgggggccaga

SEQ ID NO: 256938 - DNA, 15 bp, Homo sapiens
gtgtttgggggccag

SEQ ID NO: 256939 - DNA, 15 bp, Homo sapiens
ggtgtttgggggcca

SEQ ID NO: 256940 - DNA, 15 bp, Homo sapiens
aggtgtttgggggcc

SEQ ID NO: 256941 - DNA, 15 bp, Homo sapiens
taggtgtttgggggc

SEQ ID NO: 256942 - DNA, 15 bp, Homo sapiens
ataggtgtttggggg

SEQ ID NO: 256943 - DNA, 15 bp, Homo sapiens
aataggtgtttgggg

SEQ ID NO: 256944 - DNA, 15 bp, Homo sapiens
aaataggtgtttggg

SEQ ID NO: 256945 - DNA, 15 bp, Homo sapiens
aaaataggtgtttgg

SEQ ID NO: 256946 - DNA, 15 bp, Homo sapiens
gaaaataggtgtttg

SEQ ID NO: 256947 - DNA, 15 bp, Homo sapiens
tgaaaataggtgttt

SEQ ID NO: 256948 - DNA, 15 bp, Homo sapiens
ttgaaaataggtgtt

SEQ ID NO: 256949 - DNA, 15 bp, Homo sapiens
tttgaaaataggtgt

SEQ ID NO: 256950 - DNA, 15 bp, Homo sapiens
ttttgaaaataggtg

SEQ ID NO: 256951 - DNA, 15 bp, Homo sapiens
attttgaaaataggt

SEQ ID NO: 256952 - DNA, 15 bp, Homo sapiens
cattttgaaaatagg

SEQ ID NO: 256953 - DNA, 15 bp, Homo sapiens
gcattttgaaaatag

SEQ ID NO: 256954 - DNA, 15 bp, Homo sapiens
ggcattttgaaaata

SEQ ID NO: 256955 - DNA, 15 bp, Homo sapiens
aggcattttgaaaat

SEQ ID NO: 256956 - DNA, 15 bp, Homo sapiens
aaggcattttgaaaa

SEQ ID NO: 256957 - DNA, 15 bp, Homo sapiens
caaggcattttgaaa

SEQ ID NO: 256958 - DNA, 15 bp, Homo sapiens
acaaggcattttgaa

SEQ ID NO: 256959 - DNA, 15 bp, Homo sapiens
tacaaggcattttga

SEQ ID NO: 256960 - DNA, 15 bp, Homo sapiens
gtacaaggcattttg

SEQ ID NO: 256961 - DNA, 15 bp, Homo sapiens
agtacaaggcatttt

SEQ ID NO: 256962 - DNA, 15 bp, Homo sapiens
gagtacaaggcattt

SEQ ID NO: 256963 - DNA, 15 bp, Homo sapiens
tgagtacaaggcatt

SEQ ID NO: 256964 - DNA, 15 bp, Homo sapiens
ctgagtacaaggcat

SEQ ID NO: 256965 - DNA, 15 bp, Homo sapiens
gctgagtacaaggca

SEQ ID NO: 256966 - DNA, 15 bp, Homo sapiens
tgctgagtacaaggc

SEQ ID NO: 256967 - DNA, 15 bp, Homo sapiens
ctgctgagtacaagg

SEQ ID NO: 256968 - DNA, 15 bp, Homo sapiens
cctgctgagtacaag

SEQ ID NO: 256969 - DNA, 15 bp, Homo sapiens
gcctgctgagtacaa

SEQ ID NO: 256970 - DNA, 15 bp, Homo sapiens
tgcctgctgagtaca

SEQ ID NO: 256971 - DNA, 15 bp, Homo sapiens
ctgcctgctgagtac

SEQ ID NO: 256972 - DNA, 15 bp, Homo sapiens
actgcctgctgagta

SEQ ID NO: 256973 - DNA, 15 bp, Homo sapiens
aactgcctgctgagt

SEQ ID NO: 256974 - DNA, 15 bp, Homo sapiens
caactgcctgctgag

SEQ ID NO: 256975 - DNA, 15 bp, Homo sapiens
ccaactgcctgctga

SEQ ID NO: 256976 - DNA, 15 bp, Homo sapiens
accaactgcctgctg

SEQ ID NO: 256977 - DNA, 15 bp, Homo sapiens
taccaactgcctgct

SEQ ID NO: 256978 - DNA, 15 bp, Homo sapiens
ttaccaactgcctgc

SEQ ID NO: 256979 - DNA, 15 bp, Homo sapiens
tttaccaactgcctg

SEQ ID NO: 256980 - DNA, 15 bp, Homo sapiens
atttaccaactgcct

SEQ ID NO: 256981 - DNA, 15 bp, Homo sapiens
catttaccaactgcc

SEQ ID NO: 256982 - DNA, 15 bp, Homo sapiens
acatttaccaactgc

SEQ ID NO: 256983 - DNA, 15 bp, Homo sapiens
aacatttaccaactg

SEQ ID NO: 256984 - DNA, 15 bp, Homo sapiens
aaacatttaccaact

SEQ ID NO: 256985 - DNA, 15 bp, Homo sapiens
aaaacatttaccaac

SEQ ID NO: 256986 - DNA, 15 bp, Homo sapiens
gaaaacatttaccaa

SEQ ID NO: 256987 - DNA, 15 bp, Homo sapiens
agaaaacatttacca

SEQ ID NO: 256988 - DNA, 15 bp, Homo sapiens
cagaaaacatttacc

SEQ ID NO: 256989 - DNA, 15 bp, Homo sapiens
acagaaaacatttac

SEQ ID NO: 256990 - DNA, 15 bp, Homo sapiens
tacagaaaacattta

SEQ ID NO: 256991 - DNA, 15 bp, Homo sapiens
ttacagaaaacattt

SEQ ID NO: 256992 - DNA, 15 bp, Homo sapiens
attacagaaaacatt

SEQ ID NO: 256993 - DNA, 15 bp, Homo sapiens
aattacagaaaacat

SEQ ID NO: 256994 - DNA, 15 bp, Homo sapiens
caattacagaaaaca

SEQ ID NO: 256995 - DNA, 15 bp, Homo sapiens
acaattacagaaaac

SEQ ID NO: 256996 - DNA, 15 bp, Homo sapiens
cacaattacagaaaa

SEQ ID NO: 256997 - DNA, 15 bp, Homo sapiens
tcacaattacagaaa

SEQ ID NO: 256998 - DNA, 15 bp, Homo sapiens
ttcacaattacagaa

SEQ ID NO: 256999 - DNA, 15 bp, Homo sapiens
attcacaattacaga

SEQ ID NO: 257000 - DNA, 15 bp, Homo sapiens
cattcacaattacag

SEQ ID NO: 257001 - DNA, 15 bp, Homo sapiens
tcattcacaattaca

SEQ ID NO: 257002 - DNA, 15 bp, Homo sapiens
atcattcacaattac

SEQ ID NO: 257003 - DNA, 15 bp, Homo sapiens
tatcattcacaatta

SEQ ID NO: 257004 - DNA, 15 bp, Homo sapiens
ttatcattcacaatt

SEQ ID NO: 257005 - DNA, 15 bp, Homo sapiens
gttatcattcacaat

SEQ ID NO: 257006 - DNA, 15 bp, Homo sapiens
tgttatcattcacaa

SEQ ID NO: 257007 - DNA, 15 bp, Homo sapiens
ctgttatcattcaca

SEQ ID NO: 257008 - DNA, 15 bp, Homo sapiens
actgttatcattcac

SEQ ID NO: 257009 - DNA, 15 bp, Homo sapiens
cactgttatcattca

SEQ ID NO: 257010 - DNA, 15 bp, Homo sapiens
tcactgttatcattc

SEQ ID NO: 257011 - DNA, 15 bp, Homo sapiens
atcactgttatcatt

SEQ ID NO: 257012 - DNA, 15 bp, Homo sapiens
catcactgttatcat

SEQ ID NO: 257013 - DNA, 15 bp, Homo sapiens
ccatcactgttatca

SEQ ID NO: 257014 - DNA, 15 bp, Homo sapiens
accatcactgttatc

SEQ ID NO: 257015 - DNA, 15 bp, Homo sapiens
taccatcactgttat

SEQ ID NO: 257016 - DNA, 15 bp, Homo sapiens
ctaccatcactgtta

SEQ ID NO: 257017 - DNA, 15 bp, Homo sapiens
actaccatcactgtt

SEQ ID NO: 257018 - DNA, 15 bp, Homo sapiens
cactaccatcactgt

SEQ ID NO: 257019 - DNA, 15 bp, Homo sapiens
tcactaccatcactg

SEQ ID NO: 257020 - DNA, 15 bp, Homo sapiens
atcactaccatcact

SEQ ID NO: 257021 - DNA, 15 bp, Homo sapiens
catcactaccatcac

SEQ ID NO: 257022 - DNA, 15 bp, Homo sapiens
tcatcactaccatca

SEQ ID NO: 257023 - DNA, 15 bp, Homo sapiens
atcatcactaccatc

SEQ ID NO: 257024 - DNA, 15 bp, Homo sapiens
aatcatcactaccat

SEQ ID NO: 257025 - DNA, 15 bp, Homo sapiens
caatcatcactacca

SEQ ID NO: 257026 - DNA, 15 bp, Homo sapiens
acaatcatcactacc

SEQ ID NO: 257027 - DNA, 15 bp, Homo sapiens
cacaatcatcactac

SEQ ID NO: 257028 - DNA, 15 bp, Homo sapiens
ccacaatcatcacta

SEQ ID NO: 257029 - DNA, 15 bp, Homo sapiens
accacaatcatcact

SEQ ID NO: 257030 - DNA, 15 bp, Homo sapiens
taccacaatcatcac

SEQ ID NO: 257031 - DNA, 15 bp, Homo sapiens
ttaccacaatcatca

SEQ ID NO: 257032 - DNA, 15 bp, Homo sapiens
attaccacaatcatc

SEQ ID NO: 257033 - DNA, 15 bp, Homo sapiens
cattaccacaatcat

SEQ ID NO: 257034 - DNA, 15 bp, Homo sapiens
tcattaccacaatca

SEQ ID NO: 257035 - DNA, 15 bp, Homo sapiens
ttcattaccacaatc

SEQ ID NO: 257036 - DNA, 15 bp, Homo sapiens
cttcattaccacaat

SEQ ID NO: 257037 - DNA, 15 bp, Homo sapiens
tcttcattaccacaa

SEQ ID NO: 257038 - DNA, 15 bp, Homo sapiens
ttcttcattaccaca

SEQ ID NO: 257039 - DNA, 15 bp, Homo sapiens
cttcttcattaccac

SEQ ID NO: 257040 - DNA, 15 bp, Homo sapiens
tcttcttcattacca

SEQ ID NO: 257041 - DNA, 15 bp, Homo sapiens
atcttcttcattacc

SEQ ID NO: 257042 - DNA, 15 bp, Homo sapiens
catcttcttcattac

SEQ ID NO: 257043 - DNA, 15 bp, Homo sapiens
tcatcttcttcatta

SEQ ID NO: 257044 - DNA, 15 bp, Homo sapiens
atcatcttcttcatt

SEQ ID NO: 257045 - DNA, 15 bp, Homo sapiens
catcatcttcttcat

SEQ ID NO: 257046 - DNA, 15 bp, Homo sapiens
acatcatcttcttca

SEQ ID NO: 257047 - DNA, 15 bp, Homo sapiens
tacatcatcttcttc

SEQ ID NO: 257048 - DNA, 15 bp, Homo sapiens
ttacatcatcttctt

SEQ ID NO: 257049 - DNA, 15 bp, Homo sapiens
attacatcatcttct

SEQ ID NO: 257050 - DNA, 15 bp, Homo sapiens
tattacatcatcttc

SEQ ID NO: 257051 - DNA, 15 bp, Homo sapiens
ttattacatcatctt

SEQ ID NO: 257052 - DNA, 15 bp, Homo sapiens
tttattacatcatct

SEQ ID NO: 257053 - DNA, 15 bp, Homo sapiens
ctttattacatcatc

SEQ ID NO: 257054 - DNA, 15 bp, Homo sapiens
gctttattacatcat

SEQ ID NO: 257055 - DNA, 15 bp, Homo sapiens
agctttattacatca

SEQ ID NO: 257056 - DNA, 15 bp, Homo sapiens
gagctttattacatc

SEQ ID NO: 257057 - DNA, 15 bp, Homo sapiens
tgagctttattacat

SEQ ID NO: 257058 - DNA, 15 bp, Homo sapiens
ttgagctttattaca

SEQ ID NO: 257059 - DNA, 15 bp, Homo sapiens
tttgagctttattac

SEQ ID NO: 257060 - DNA, 15 bp, Homo sapiens
atttgagctttatta

SEQ ID NO: 257061 - DNA, 15 bp, Homo sapiens
catttgagctttatt

SEQ ID NO: 257062 - DNA, 15 bp, Homo sapiens
ccatttgagctttat

SEQ ID NO: 257063 - DNA, 15 bp, Homo sapiens
accatttgagcttta

SEQ ID NO: 257064 - DNA, 15 bp, Homo sapiens
taccatttgagcttt

SEQ ID NO: 257065 - DNA, 15 bp, Homo sapiens
ataccatttgagctt

SEQ ID NO: 257066 - DNA, 15 bp, Homo sapiens
cataccatttgagct

SEQ ID NO: 257067 - DNA, 15 bp, Homo sapiens
acataccatttgagc

SEQ ID NO: 257068 - DNA, 15 bp, Homo sapiens
aacataccatttgag

SEQ ID NO: 257069 - DNA, 15 bp, Homo sapiens
caacataccatttga

SEQ ID NO: 257070 - DNA, 15 bp, Homo sapiens
ccaacataccatttg

SEQ ID NO: 257071 - DNA, 15 bp, Homo sapiens
cccaacataccattt

SEQ ID NO: 257072 - DNA, 15 bp, Homo sapiens
ccccaacataccatt

SEQ ID NO: 257073 - DNA, 15 bp, Homo sapiens
gccccaacataccat

SEQ ID NO: 257074 - DNA, 15 bp, Homo sapiens
ggccccaacatacca

SEQ ID NO: 257075 - DNA, 15 bp, Homo sapiens
tggccccaacatacc

SEQ ID NO: 257076 - DNA, 15 bp, Homo sapiens
ttggccccaacatac

SEQ ID NO: 257077 - DNA, 15 bp, Homo sapiens
tttggccccaacata

SEQ ID NO: 257078 - DNA, 15 bp, Homo sapiens
atttggccccaacat

SEQ ID NO: 257079 - DNA, 15 bp, Homo sapiens
aatttggccccaaca

SEQ ID NO: 257080 - DNA, 15 bp, Homo sapiens
taatttggccccaac

SEQ ID NO: 257081 - DNA, 15 bp, Homo sapiens
gtaatttggccccaa

SEQ ID NO: 257082 - DNA, 15 bp, Homo sapiens
tgtaatttggcccca

SEQ ID NO: 257083 - DNA, 15 bp, Homo sapiens
ttgtaatttggcccc

SEQ ID NO: 257084 - DNA, 15 bp, Homo sapiens
tttgtaatttggccc

SEQ ID NO: 257085 - DNA, 15 bp, Homo sapiens
ctttgtaatttggcc

SEQ ID NO: 257086 - DNA, 15 bp, Homo sapiens
tctttgtaatttggc

SEQ ID NO: 257087 - DNA, 15 bp, Homo sapiens
atctttgtaatttgg

SEQ ID NO: 257088 - DNA, 15 bp, Homo sapiens
aatctttgtaatttg

SEQ ID NO: 257089 - DNA, 15 bp, Homo sapiens
aaatctttgtaattt

SEQ ID NO: 257090 - DNA, 15 bp, Homo sapiens
aaaatctttgtaatt

SEQ ID NO: 257091 - DNA, 15 bp, Homo sapiens
aaaaatctttgtaat

SEQ ID NO: 257092 - DNA, 15 bp, Homo sapiens
caaaaatctttgtaa

SEQ ID NO: 257093 - DNA, 15 bp, Homo sapiens
acaaaaatctttgta

SEQ ID NO: 257094 - DNA, 15 bp, Homo sapiens
tacaaaaatctttgt

SEQ ID NO: 257095 - DNA, 15 bp, Homo sapiens
ttacaaaaatctttg

SEQ ID NO: 257096 - DNA, 15 bp, Homo sapiens
cttacaaaaatcttt

SEQ ID NO: 257097 - DNA, 15 bp, Homo sapiens
tcttacaaaaatctt

SEQ ID NO: 257098 - DNA, 15 bp, Homo sapiens
ttcttacaaaaatct

SEQ ID NO: 257099 - DNA, 15 bp, Homo sapiens
tttcttacaaaaatc

SEQ ID NO: 257100 - DNA, 15 bp, Homo sapiens
ttttcttacaaaaat

SEQ ID NO: 257101 - DNA, 15 bp, Homo sapiens
gttttcttacaaaaa

SEQ ID NO: 257102 - DNA, 15 bp, Homo sapiens
tgttttcttacaaaa

SEQ ID NO: 257103 - DNA, 15 bp, Homo sapiens
ctgttttcttacaaa

SEQ ID NO: 257104 - DNA, 15 bp, Homo sapiens
actgttttcttacaa

SEQ ID NO: 257105 - DNA, 15 bp, Homo sapiens
cactgttttcttaca

SEQ ID NO: 257106 - DNA, 15 bp, Homo sapiens
gcactgttttcttac

SEQ ID NO: 257107 - DNA, 15 bp, Homo sapiens
tgcactgttttctta

SEQ ID NO: 257108 - DNA, 15 bp, Homo sapiens
ttgcactgttttctt

SEQ ID NO: 257109 - DNA, 15 bp, Homo sapiens
cttgcactgttttct

SEQ ID NO: 257110 - DNA, 15 bp, Homo sapiens
ccttgcactgttttc

SEQ ID NO: 257111 - DNA, 15 bp, Homo sapiens
accttgcactgtttt

SEQ ID NO: 257112 - DNA, 15 bp, Homo sapiens
caccttgcactgttt

SEQ ID NO: 257113 - DNA, 15 bp, Homo sapiens
ccaccttgcactgtt

SEQ ID NO: 257114 - DNA, 15 bp, Homo sapiens
tccaccttgcactgt

SEQ ID NO: 257115 - DNA, 15 bp, Homo sapiens
ttccaccttgcactg

SEQ ID NO: 257116 - DNA, 15 bp, Homo sapiens
attccaccttgcact

SEQ ID NO: 257117 - DNA, 15 bp, Homo sapiens
cattccaccttgcac

SEQ ID NO: 257118 - DNA, 15 bp, Homo sapiens
ccattccaccttgca

SEQ ID NO: 257119 - DNA, 15 bp, Homo sapiens
accattccaccttgc

SEQ ID NO: 257120 - DNA, 15 bp, Homo sapiens
aaccattccaccttg

SEQ ID NO: 257121 - DNA, 15 bp, Homo sapiens
taaccattccacctt

SEQ ID NO: 257122 - DNA, 15 bp, Homo sapiens
gtaaccattccacct

SEQ ID NO: 257123 - DNA, 15 bp, Homo sapiens
tgtaaccattccacc

SEQ ID NO: 257124 - DNA, 15 bp, Homo sapiens
atgtaaccattccac

SEQ ID NO: 257125 - DNA, 15 bp, Homo sapiens
aatgtaaccattcca

SEQ ID NO: 257126 - DNA, 15 bp, Homo sapiens
aaatgtaaccattcc

SEQ ID NO: 257127 - DNA, 15 bp, Homo sapiens
aaaatgtaaccattc

SEQ ID NO: 257128 - DNA, 15 bp, Homo sapiens
aaaaatgtaaccatt

SEQ ID NO: 257129 - DNA, 15 bp, Homo sapiens
taaaaatgtaaccat

SEQ ID NO: 257130 - DNA, 15 bp, Homo sapiens
ttaaaaatgtaacca

SEQ ID NO: 257131 - DNA, 15 bp, Homo sapiens
cttaaaaatgtaacc

SEQ ID NO: 257132 - DNA, 15 bp, Homo sapiens
tcttaaaaatgtaac

SEQ ID NO: 257133 - DNA, 15 bp, Homo sapiens
gtcttaaaaatgtaa

SEQ ID NO: 257134 - DNA, 15 bp, Homo sapiens
ggtcttaaaaatgta

SEQ ID NO: 257135 - DNA, 15 bp, Homo sapiens
tggtcttaaaaatgt

SEQ ID NO: 257136 - DNA, 15 bp, Homo sapiens
ttggtcttaaaaatg

SEQ ID NO: 257137 - DNA, 15 bp, Homo sapiens
cttggtcttaaaaat

SEQ ID NO: 257138 - DNA, 15 bp, Homo sapiens
gcttggtcttaaaaa

SEQ ID NO: 257139 - DNA, 15 bp, Homo sapiens
cgcttggtcttaaaa

SEQ ID NO: 257140 - DNA, 15 bp, Homo sapiens
gcgcttggtcttaaa

SEQ ID NO: 257141 - DNA, 15 bp, Homo sapiens
ggcgcttggtcttaa

SEQ ID NO: 257142 - DNA, 15 bp, Homo sapiens
gggcgcttggtctta

SEQ ID NO: 257143 - DNA, 15 bp, Homo sapiens
agggcgcttggtctt

SEQ ID NO: 257144 - DNA, 15 bp, Homo sapiens
gagggcgcttggtct

SEQ ID NO: 257145 - DNA, 15 bp, Homo sapiens
tgagggcgcttggtc

SEQ ID NO: 257146 - DNA, 15 bp, Homo sapiens
ttgagggcgcttggt

SEQ ID NO: 257147 - DNA, 15 bp, Homo sapiens
tttgagggcgcttgg

SEQ ID NO: 257148 - DNA, 15 bp, Homo sapiens
atttgagggcgcttg

SEQ ID NO: 257149 - DNA, 15 bp, Homo sapiens
tatttgagggcgctt

SEQ ID NO: 257150 - DNA, 15 bp, Homo sapiens
gtatttgagggcgct

SEQ ID NO: 257151 - DNA, 15 bp, Homo sapiens
tgtatttgagggcgc

SEQ ID NO: 257152 - DNA, 15 bp, Homo sapiens
gtgtatttgagggcg

SEQ ID NO: 257153 - DNA, 15 bp, Homo sapiens
ggtgtatttgagggc

SEQ ID NO: 257154 - DNA, 15 bp, Homo sapiens
aggtgtatttgaggg

SEQ ID NO: 257155 - DNA, 15 bp, Homo sapiens
aaggtgtatttgagg

SEQ ID NO: 257156 - DNA, 15 bp, Homo sapiens
taaggtgtatttgag

SEQ ID NO: 257157 - DNA, 15 bp, Homo sapiens
ttaaggtgtatttga

SEQ ID NO: 257158 - DNA, 15 bp, Homo sapiens
attaaggtgtatttg

SEQ ID NO: 257159 - DNA, 15 bp, Homo sapiens
aattaaggtgtattt

SEQ ID NO: 257160 - DNA, 15 bp, Homo sapiens
aaattaaggtgtatt

SEQ ID NO: 257161 - DNA, 15 bp, Homo sapiens
aaaattaaggtgtat

SEQ ID NO: 257162 - DNA, 15 bp, Homo sapiens
aaaaattaaggtgta

SEQ ID NO: 257163 - DNA, 15 bp, Homo sapiens
caaaaattaaggtgt

SEQ ID NO: 257164 - DNA, 15 bp, Homo sapiens
tcaaaaattaaggtg

SEQ ID NO: 257165 - DNA, 15 bp, Homo sapiens
atcaaaaattaaggt

SEQ ID NO: 257166 - DNA, 15 bp, Homo sapiens
aatcaaaaattaagg

SEQ ID NO: 257167 - DNA, 15 bp, Homo sapiens
taatcaaaaattaag

SEQ ID NO: 257168 - DNA, 15 bp, Homo sapiens
ttaatcaaaaattaa

SEQ ID NO: 257169 - DNA, 15 bp, Homo sapiens
attaatcaaaaatta

SEQ ID NO: 257170 - DNA, 15 bp, Homo sapiens
aattaatcaaaaatt

SEQ ID NO: 257171 - DNA, 15 bp, Homo sapiens
aaattaatcaaaaat

SEQ ID NO: 257172 - DNA, 15 bp, Homo sapiens
taaattaatcaaaaa

SEQ ID NO: 257173 - DNA, 15 bp, Homo sapiens
gtaaattaatcaaaa

SEQ ID NO: 257174 - DNA, 15 bp, Homo sapiens
tgtaaattaatcaaa

SEQ ID NO: 257175 - DNA, 15 bp, Homo sapiens
atgtaaattaatcaa

SEQ ID NO: 257176 - DNA, 15 bp, Homo sapiens
tatgtaaattaatca

SEQ ID NO: 257177 - DNA, 15 bp, Homo sapiens
atatgtaaattaatc

SEQ ID NO: 257178 - DNA, 15 bp, Homo sapiens
tatatgtaaattaat

SEQ ID NO: 257179 - DNA, 15 bp, Homo sapiens
atatatgtaaattaa

SEQ ID NO: 257180 - DNA, 15 bp, Homo sapiens
tatatatgtaaatta

SEQ ID NO: 257181 - DNA, 15 bp, Homo sapiens
ttatatatgtaaatt

SEQ ID NO: 257182 - DNA, 15 bp, Homo sapiens
tttatatatgtaaat

SEQ ID NO: 257183 - DNA, 15 bp, Homo sapiens
ctttatatatgtaaa

SEQ ID NO: 257184 - DNA, 15 bp, Homo sapiens
tctttatatatgtaa

SEQ ID NO: 257185 - DNA, 15 bp, Homo sapiens
gtctttatatatgta

SEQ ID NO: 257186 - DNA, 15 bp, Homo sapiens
ggtctttatatatgt

SEQ ID NO: 257187 - DNA, 15 bp, Homo sapiens
gggtctttatatatg

SEQ ID NO: 257188 - DNA, 15 bp, Homo sapiens
agggtctttatatat

SEQ ID NO: 257189 - DNA, 15 bp, Homo sapiens
aagggtctttatata

SEQ ID NO: 257190 - DNA, 15 bp, Homo sapiens
caagggtctttatat

SEQ ID NO: 257191 - DNA, 15 bp, Homo sapiens
tcaagggtctttata

SEQ ID NO: 257192 - DNA, 15 bp, Homo sapiens
atcaagggtctttat

SEQ ID NO: 257193 - DNA, 15 bp, Homo sapiens
tatcaagggtcttta

SEQ ID NO: 257194 - DNA, 15 bp, Homo sapiens
gtatcaagggtcttt

SEQ ID NO: 257195 - DNA, 15 bp, Homo sapiens
tgtatcaagggtctt

SEQ ID NO: 257196 - DNA, 15 bp, Homo sapiens
gtgtatcaagggtct

SEQ ID NO: 257197 - DNA, 15 bp, Homo sapiens
tgtgtatcaagggtc

SEQ ID NO: 257198 - DNA, 15 bp, Homo sapiens
ctgtgtatcaagggt

SEQ ID NO: 257199 - DNA, 15 bp, Homo sapiens
tctgtgtatcaaggg

SEQ ID NO: 257200 - DNA, 15 bp, Homo sapiens
ttctgtgtatcaagg

SEQ ID NO: 257201 - DNA, 15 bp, Homo sapiens
gttctgtgtatcaag

SEQ ID NO: 257202 - DNA, 15 bp, Homo sapiens
tgttctgtgtatcaa

SEQ ID NO: 257203 - DNA, 15 bp, Homo sapiens
ttgttctgtgtatca

SEQ ID NO: 257204 - DNA, 15 bp, Homo sapiens
tttgttctgtgtatc

SEQ ID NO: 257205 - DNA, 15 bp, Homo sapiens
ttttgttctgtgtat

SEQ ID NO: 257206 - DNA, 15 bp, Homo sapiens
tttttgttctgtgta

SEQ ID NO: 257207 - DNA, 15 bp, Homo sapiens
gtttttgttctgtgt

SEQ ID NO: 257208 - DNA, 15 bp, Homo sapiens
tgtttttgttctgtg

SEQ ID NO: 257209 - DNA, 15 bp, Homo sapiens
atgtttttgttctgt

SEQ ID NO: 257210 - DNA, 15 bp, Homo sapiens
gatgtttttgttctg

SEQ ID NO: 257211 - DNA, 15 bp, Homo sapiens
agatgtttttgttct

SEQ ID NO: 257212 - DNA, 15 bp, Homo sapiens
aagatgtttttgttc

SEQ ID NO: 257213 - DNA, 15 bp, Homo sapiens
gaagatgtttttgtt

SEQ ID NO: 257214 - DNA, 15 bp, Homo sapiens
ggaagatgtttttgt

SEQ ID NO: 257215 - DNA, 15 bp, Homo sapiens
tggaagatgtttttg

SEQ ID NO: 257216 - DNA, 15 bp, Homo sapiens
atggaagatgttttt

SEQ ID NO: 257217 - DNA, 15 bp, Homo sapiens
gatggaagatgtttt

SEQ ID NO: 257218 - DNA, 15 bp, Homo sapiens
tgatggaagatgttt

SEQ ID NO: 257219 - DNA, 15 bp, Homo sapiens
atgatggaagatgtt

SEQ ID NO: 257220 - DNA, 15 bp, Homo sapiens
aatgatggaagatgt

SEQ ID NO: 257221 - DNA, 15 bp, Homo sapiens
aaatgatggaagatg

SEQ ID NO: 257222 - DNA, 15 bp, Homo sapiens
gaaatgatggaagat

SEQ ID NO: 257223 - DNA, 15 bp, Homo sapiens
agaaatgatggaaga

SEQ ID NO: 257224 - DNA, 15 bp, Homo sapiens
cagaaatgatggaag

SEQ ID NO: 257225 - DNA, 15 bp, Homo sapiens
acagaaatgatggaa

SEQ ID NO: 257226 - DNA, 15 bp, Homo sapiens
aacagaaatgatgga

SEQ ID NO: 257227 - DNA, 15 bp, Homo sapiens
aaacagaaatgatgg

SEQ ID NO: 257228 - DNA, 15 bp, Homo sapiens
taaacagaaatgatg

SEQ ID NO: 257229 - DNA, 15 bp, Homo sapiens
ctaaacagaaatgat

SEQ ID NO: 257230 - DNA, 15 bp, Homo sapiens
tctaaacagaaatga

SEQ ID NO: 257231 - DNA, 15 bp, Homo sapiens
ctctaaacagaaatg

SEQ ID NO: 257232 - DNA, 15 bp, Homo sapiens
tctctaaacagaaat

SEQ ID NO: 257233 - DNA, 15 bp, Homo sapiens
atctctaaacagaaa

SEQ ID NO: 257234 - DNA, 15 bp, Homo sapiens
tatctctaaacagaa

SEQ ID NO: 257235 - DNA, 15 bp, Homo sapiens
ctatctctaaacaga

SEQ ID NO: 257236 - DNA, 15 bp, Homo sapiens
tctatctctaaacag

SEQ ID NO: 257237 - DNA, 15 bp, Homo sapiens
ctctatctctaaaca

SEQ ID NO: 257238 - DNA, 15 bp, Homo sapiens
actctatctctaaac

SEQ ID NO: 257239 - DNA, 15 bp, Homo sapiens
cactctatctctaaa

SEQ ID NO: 257240 - DNA, 15 bp, Homo sapiens
tcactctatctctaa

SEQ ID NO: 257241 - DNA, 15 bp, Homo sapiens
atcactctatctcta

SEQ ID NO: 257242 - DNA, 15 bp, Homo sapiens
aatcactctatctct

SEQ ID NO: 257243 - DNA, 15 bp, Homo sapiens
gaatcactctatctc

SEQ ID NO: 257244 - DNA, 15 bp, Homo sapiens
agaatcactctatct

SEQ ID NO: 257245 - DNA, 15 bp, Homo sapiens
aagaatcactctatc

SEQ ID NO: 257246 - DNA, 15 bp, Homo sapiens
taagaatcactctat

SEQ ID NO: 257247 - DNA, 15 bp, Homo sapiens
ttaagaatcactcta

SEQ ID NO: 257248 - DNA, 15 bp, Homo sapiens
tttaagaatcactct

SEQ ID NO: 257249 - DNA, 15 bp, Homo sapiens
ctttaagaatcactc

SEQ ID NO: 257250 - DNA, 15 bp, Homo sapiens
tctttaagaatcact

SEQ ID NO: 257251 - DNA, 15 bp, Homo sapiens
ctctttaagaatcac

SEQ ID NO: 257252 - DNA, 15 bp, Homo sapiens
actctttaagaatca

SEQ ID NO: 257253 - DNA, 15 bp, Homo sapiens
gactctttaagaatc

SEQ ID NO: 257254 - DNA, 15 bp, Homo sapiens
agactctttaagaat

SEQ ID NO: 257255 - DNA, 15 bp, Homo sapiens
aagactctttaagaa

SEQ ID NO: 257256 - DNA, 15 bp, Homo sapiens
taagactctttaaga

SEQ ID NO: 257257 - DNA, 15 bp, Homo sapiens
gtaagactctttaag

SEQ ID NO: 257258 - DNA, 15 bp, Homo sapiens
tgtaagactctttaa

SEQ ID NO: 257259 - DNA, 15 bp, Homo sapiens
ttgtaagactcttta

SEQ ID NO: 257260 - DNA, 15 bp, Homo sapiens
attgtaagactcttt

SEQ ID NO: 257261 - DNA, 15 bp, Homo sapiens
cattgtaagactctt

SEQ ID NO: 257262 - DNA, 15 bp, Homo sapiens
tcattgtaagactct

SEQ ID NO: 257263 - DNA, 15 bp, Homo sapiens
ttcattgtaagactc

SEQ ID NO: 257264 - DNA, 15 bp, Homo sapiens
gttcattgtaagact

SEQ ID NO: 257265 - DNA, 15 bp, Homo sapiens
agttcattgtaagac

SEQ ID NO: 257266 - DNA, 15 bp, Homo sapiens
gagttcattgtaaga

SEQ ID NO: 257267 - DNA, 15 bp, Homo sapiens
ggagttcattgtaag

SEQ ID NO: 257268 - DNA, 15 bp, Homo sapiens
gggagttcattgtaa

SEQ ID NO: 257269 - DNA, 15 bp, Homo sapiens
ggggagttcattgta

SEQ ID NO: 257270 - DNA, 15 bp, Homo sapiens
gggggagttcattgt

SEQ ID NO: 257271 - DNA, 15 bp, Homo sapiens
tgggggagttcattg

SEQ ID NO: 257272 - DNA, 15 bp, Homo sapiens
gtgggggagttcatt

SEQ ID NO: 257273 - DNA, 15 bp, Homo sapiens
tgtgggggagttcat

SEQ ID NO: 257274 - DNA, 15 bp, Homo sapiens
ttgtgggggagttca

SEQ ID NO: 257275 - DNA, 15 bp, Homo sapiens
tttgtgggggagttc

SEQ ID NO: 257276 - DNA, 15 bp, Homo sapiens
ttttgtgggggagtt

SEQ ID NO: 257277 - DNA, 15 bp, Homo sapiens
attttgtgggggagt

SEQ ID NO: 257278 - DNA, 15 bp, Homo sapiens
cattttgtgggggag

SEQ ID NO: 257279 - DNA, 15 bp, Homo sapiens
gcattttgtggggga

SEQ ID NO: 257280 - DNA, 15 bp, Homo sapiens
agcattttgtggggg

SEQ ID NO: 257281 - DNA, 15 bp, Homo sapiens
gagcattttgtgggg

SEQ ID NO: 257282 - DNA, 15 bp, Homo sapiens
tgagcattttgtggg

SEQ ID NO: 257283 - DNA, 15 bp, Homo sapiens
ctgagcattttgtgg

SEQ ID NO: 257284 - DNA, 15 bp, Homo sapiens
actgagcattttgtg

SEQ ID NO: 257285 - DNA, 15 bp, Homo sapiens
cactgagcattttgt

SEQ ID NO: 257286 - DNA, 15 bp, Homo sapiens
tcactgagcattttg

SEQ ID NO: 257287 - DNA, 15 bp, Homo sapiens
ttcactgagcatttt

SEQ ID NO: 257288 - DNA, 15 bp, Homo sapiens
gttcactgagcattt

SEQ ID NO: 257289 - DNA, 15 bp, Homo sapiens
agttcactgagcatt

SEQ ID NO: 257290 - DNA, 15 bp, Homo sapiens
gagttcactgagcat

SEQ ID NO: 257291 - DNA, 15 bp, Homo sapiens
agagttcactgagca

SEQ ID NO: 257292 - DNA, 15 bp, Homo sapiens
aagagttcactgagc

SEQ ID NO: 257293 - DNA, 15 bp, Homo sapiens
caagagttcactgag

SEQ ID NO: 257294 - DNA, 15 bp, Homo sapiens
gcaagagttcactga

SEQ ID NO: 257295 - DNA, 15 bp, Homo sapiens
agcaagagttcactg

SEQ ID NO: 257296 - DNA, 15 bp, Homo sapiens
tagcaagagttcact

SEQ ID NO: 257297 - DNA, 15 bp, Homo sapiens
ctagcaagagttcac

SEQ ID NO: 257298 - DNA, 15 bp, Homo sapiens
cctagcaagagttca

SEQ ID NO: 257299 - DNA, 15 bp, Homo sapiens
ccctagcaagagttc

SEQ ID NO: 257300 - DNA, 15 bp, Homo sapiens
tccctagcaagagtt

SEQ ID NO: 257301 - DNA, 15 bp, Homo sapiens
gtccctagcaagagt

SEQ ID NO: 257302 - DNA, 15 bp, Homo sapiens
ggtccctagcaagag

SEQ ID NO: 257303 - DNA, 15 bp, Homo sapiens
tggtccctagcaaga

SEQ ID NO: 257304 - DNA, 15 bp, Homo sapiens
ctggtccctagcaag

SEQ ID NO: 257305 - DNA, 15 bp, Homo sapiens
actggtccctagcaa

SEQ ID NO: 257306 - DNA, 15 bp, Homo sapiens
aactggtccctagca

SEQ ID NO: 257307 - DNA, 15 bp, Homo sapiens
gaactggtccctagc

SEQ ID NO: 257308 - DNA, 15 bp, Homo sapiens
agaactggtccctag

SEQ ID NO: 257309 - DNA, 15 bp, Homo sapiens
tagaactggtcccta

SEQ ID NO: 257310 - DNA, 15 bp, Homo sapiens
ctagaactggtccct

SEQ ID NO: 257311 - DNA, 15 bp, Homo sapiens
cctagaactggtccc

SEQ ID NO: 257312 - DNA, 15 bp, Homo sapiens
acctagaactggtcc

SEQ ID NO: 257313 - DNA, 15 bp, Homo sapiens
cacctagaactggtc

SEQ ID NO: 257314 - DNA, 15 bp, Homo sapiens
ccacctagaactggt

SEQ ID NO: 257315 - DNA, 15 bp, Homo sapiens
accacctagaactgg

SEQ ID NO: 257316 - DNA, 15 bp, Homo sapiens
caccacctagaactg

SEQ ID NO: 257317 - DNA, 15 bp, Homo sapiens
ccaccacctagaact

SEQ ID NO: 257318 - DNA, 15 bp, Homo sapiens
cccaccacctagaac

SEQ ID NO: 257319 - DNA, 15 bp, Homo sapiens
tcccaccacctagaa

SEQ ID NO: 257320 - DNA, 15 bp, Homo sapiens
ctcccaccacctaga

SEQ ID NO: 257321 - DNA, 15 bp, Homo sapiens
actcccaccacctag

SEQ ID NO: 257322 - DNA, 15 bp, Homo sapiens
tactcccaccaccta

SEQ ID NO: 257323 - DNA, 15 bp, Homo sapiens
ctactcccaccacct

SEQ ID NO: 257324 - DNA, 15 bp, Homo sapiens
tctactcccaccacc

SEQ ID NO: 257325 - DNA, 15 bp, Homo sapiens
ctctactcccaccac

SEQ ID NO: 257326 - DNA, 15 bp, Homo sapiens
gctctactcccacca

SEQ ID NO: 257327 - DNA, 15 bp, Homo sapiens
cgctctactcccacc

SEQ ID NO: 257328 - DNA, 15 bp, Homo sapiens
ccgctctactcccac

SEQ ID NO: 257329 - DNA, 15 bp, Homo sapiens
accgctctactccca

SEQ ID NO: 257330 - DNA, 15 bp, Homo sapiens
caccgctctactccc

SEQ ID NO: 257331 - DNA, 15 bp, Homo sapiens
tcaccgctctactcc

SEQ ID NO: 257332 - DNA, 15 bp, Homo sapiens
ctcaccgctctactc

SEQ ID NO: 257333 - DNA, 15 bp, Homo sapiens
gctcaccgctctact

SEQ ID NO: 257334 - DNA, 15 bp, Homo sapiens
cgctcaccgctctac

SEQ ID NO: 257335 - DNA, 15 bp, Homo sapiens
tcgctcaccgctcta

SEQ ID NO: 257336 - DNA, 15 bp, Homo sapiens
ttcgctcaccgctct

SEQ ID NO: 257337 - DNA, 15 bp, Homo sapiens
attcgctcaccgctc

SEQ ID NO: 257338 - DNA, 15 bp, Homo sapiens
cattcgctcaccgct

SEQ ID NO: 257339 - DNA, 15 bp, Homo sapiens
tcattcgctcaccgc

SEQ ID NO: 257340 - DNA, 15 bp, Homo sapiens
ctcattcgctcaccg

SEQ ID NO: 257341 - DNA, 15 bp, Homo sapiens
tctcattcgctcacc

SEQ ID NO: 257342 - DNA, 15 bp, Homo sapiens
atctcattcgctcac

SEQ ID NO: 257343 - DNA, 15 bp, Homo sapiens
tatctcattcgctca

SEQ ID NO: 257344 - DNA, 15 bp, Homo sapiens
ttatctcattcgctc

SEQ ID NO: 257345 - DNA, 15 bp, Homo sapiens
tttatctcattcgct

SEQ ID NO: 257346 - DNA, 15 bp, Homo sapiens
ttttatctcattcgc

SEQ ID NO: 257347 - DNA, 15 bp, Homo sapiens
tttttatctcattcg

SEQ ID NO: 257348 - DNA, 15 bp, Homo sapiens
atttttatctcattc

SEQ ID NO: 257349 - DNA, 15 bp, Homo sapiens
gatttttatctcatt

SEQ ID NO: 257350 - DNA, 15 bp, Homo sapiens
ggatttttatctcat

SEQ ID NO: 257351 - DNA, 15 bp, Homo sapiens
tggatttttatctca

SEQ ID NO: 257352 - DNA, 15 bp, Homo sapiens
atggatttttatctc

SEQ ID NO: 257353 - DNA, 15 bp, Homo sapiens
catggatttttatct

SEQ ID NO: 257354 - DNA, 15 bp, Homo sapiens
gcatggatttttatc

SEQ ID NO: 257355 - DNA, 15 bp, Homo sapiens
ggcatggatttttat

SEQ ID NO: 257356 - DNA, 15 bp, Homo sapiens
gggcatggattttta

SEQ ID NO: 257357 - DNA, 15 bp, Homo sapiens
agggcatggattttt

SEQ ID NO: 257358 - DNA, 15 bp, Homo sapiens
aagggcatggatttt

SEQ ID NO: 257359 - DNA, 15 bp, Homo sapiens
aaagggcatggattt

SEQ ID NO: 257360 - DNA, 15 bp, Homo sapiens
caaagggcatggatt

SEQ ID NO: 257361 - DNA, 15 bp, Homo sapiens
ccaaagggcatggat

SEQ ID NO: 257362 - DNA, 15 bp, Homo sapiens
tccaaagggcatgga

SEQ ID NO: 257363 - DNA, 15 bp, Homo sapiens
gtccaaagggcatgg

SEQ ID NO: 257364 - DNA, 15 bp, Homo sapiens
agtccaaagggcatg

SEQ ID NO: 257365 - DNA, 15 bp, Homo sapiens
aagtccaaagggcat

SEQ ID NO: 257366 - DNA, 15 bp, Homo sapiens
aaagtccaaagggca

SEQ ID NO: 257367 - DNA, 15 bp, Homo sapiens
taaagtccaaagggc

SEQ ID NO: 257368 - DNA, 15 bp, Homo sapiens
gtaaagtccaaaggg

SEQ ID NO: 257369 - DNA, 15 bp, Homo sapiens
tgtaaagtccaaagg

SEQ ID NO: 257370 - DNA, 15 bp, Homo sapiens
gtgtaaagtccaaag

SEQ ID NO: 257371 - DNA, 15 bp, Homo sapiens
tgtgtaaagtccaaa

SEQ ID NO: 257372 - DNA, 15 bp, Homo sapiens
ctgtgtaaagtccaa

SEQ ID NO: 257373 - DNA, 15 bp, Homo sapiens
gctgtgtaaagtcca

SEQ ID NO: 257374 - DNA, 15 bp, Homo sapiens
tgctgtgtaaagtcc

SEQ ID NO: 257375 - DNA, 15 bp, Homo sapiens
atgctgtgtaaagtc

SEQ ID NO: 257376 - DNA, 15 bp, Homo sapiens
catgctgtgtaaagt

SEQ ID NO: 257377 - DNA, 15 bp, Homo sapiens
acatgctgtgtaaag

SEQ ID NO: 257378 - DNA, 15 bp, Homo sapiens
cacatgctgtgtaaa

SEQ ID NO: 257379 - DNA, 15 bp, Homo sapiens
tcacatgctgtgtaa

SEQ ID NO: 257380 - DNA, 15 bp, Homo sapiens
ttcacatgctgtgta

SEQ ID NO: 257381 - DNA, 15 bp, Homo sapiens
tttcacatgctgtgt

SEQ ID NO: 257382 - DNA, 15 bp, Homo sapiens
ttttcacatgctgtg

SEQ ID NO: 257383 - DNA, 15 bp, Homo sapiens
attttcacatgctgt

SEQ ID NO: 257384 - DNA, 15 bp, Homo sapiens
tattttcacatgctg

SEQ ID NO: 257385 - DNA, 15 bp, Homo sapiens
ttattttcacatgct

SEQ ID NO: 257386 - DNA, 15 bp, Homo sapiens
tttattttcacatgc

SEQ ID NO: 257387 - DNA, 15 bp, Homo sapiens
gtttattttcacatg

SEQ ID NO: 257388 - DNA, 15 bp, Homo sapiens
tgtttattttcacat

SEQ ID NO: 257389 - DNA, 15 bp, Homo sapiens
gtgtttattttcaca

SEQ ID NO: 257390 - DNA, 15 bp, Homo sapiens
tgtgtttattttcac

SEQ ID NO: 257391 - DNA, 15 bp, Homo sapiens
atgtgtttattttca

SEQ ID NO: 257392 - DNA, 15 bp, Homo sapiens
aatgtgtttattttc

SEQ ID NO: 257393 - DNA, 15 bp, Homo sapiens
aaatgtgtttatttt

SEQ ID NO: 257394 - DNA, 15 bp, Homo sapiens
gaaatgtgtttattt

SEQ ID NO: 257395 - DNA, 15 bp, Homo sapiens
ggaaatgtgtttatt

SEQ ID NO: 257396 - DNA, 15 bp, Homo sapiens
tggaaatgtgtttat

SEQ ID NO: 257397 - DNA, 15 bp, Homo sapiens
ttggaaatgtgttta

SEQ ID NO: 257398 - DNA, 15 bp, Homo sapiens
cttggaaatgtgttt

SEQ ID NO: 257399 - DNA, 15 bp, Homo sapiens
acttggaaatgtgtt

SEQ ID NO: 257400 - DNA, 15 bp, Homo sapiens
tacttggaaatgtgt

SEQ ID NO: 257401 - DNA, 15 bp, Homo sapiens
ttacttggaaatgtg

SEQ ID NO: 257402 - DNA, 15 bp, Homo sapiens
tttacttggaaatgt

SEQ ID NO: 257403 - DNA, 15 bp, Homo sapiens
ctttacttggaaatg

SEQ ID NO: 257404 - DNA, 15 bp, Homo sapiens
actttacttggaaat

SEQ ID NO: 257405 - DNA, 15 bp, Homo sapiens
cactttacttggaaa

SEQ ID NO: 257406 - DNA, 15 bp, Homo sapiens
gcactttacttggaa

SEQ ID NO: 257407 - DNA, 15 bp, Homo sapiens
agcactttacttgga

SEQ ID NO: 257408 - DNA, 15 bp, Homo sapiens
aagcactttacttgg

SEQ ID NO: 257409 - DNA, 15 bp, Homo sapiens
taagcactttacttg

SEQ ID NO: 257410 - DNA, 15 bp, Homo sapiens
gtaagcactttactt

SEQ ID NO: 257411 - DNA, 15 bp, Homo sapiens
tgtaagcactttact

SEQ ID NO: 257412 - DNA, 15 bp, Homo sapiens
atgtaagcactttac

SEQ ID NO: 257413 - DNA, 15 bp, Homo sapiens
catgtaagcacttta

SEQ ID NO: 257414 - DNA, 15 bp, Homo sapiens
acatgtaagcacttt

SEQ ID NO: 257415 - DNA, 15 bp, Homo sapiens
gacatgtaagcactt

SEQ ID NO: 257416 - DNA, 15 bp, Homo sapiens
ggacatgtaagcact

SEQ ID NO: 257417 - DNA, 15 bp, Homo sapiens
cggacatgtaagcac

SEQ ID NO: 257418 - DNA, 15 bp, Homo sapiens
tcggacatgtaagca

SEQ ID NO: 257419 - DNA, 15 bp, Homo sapiens
atcggacatgtaagc

SEQ ID NO: 257420 - DNA, 15 bp, Homo sapiens
tatcggacatgtaag

SEQ ID NO: 257421 - DNA, 15 bp, Homo sapiens
ctatcggacatgtaa

SEQ ID NO: 257422 - DNA, 15 bp, Homo sapiens
actatcggacatgta

SEQ ID NO: 257423 - DNA, 15 bp, Homo sapiens
tactatcggacatgt

SEQ ID NO: 257424 - DNA, 15 bp, Homo sapiens
atactatcggacatg

SEQ ID NO: 257425 - DNA, 15 bp, Homo sapiens
tatactatcggacat

SEQ ID NO: 257426 - DNA, 15 bp, Homo sapiens
ttatactatcggaca

SEQ ID NO: 257427 - DNA, 15 bp, Homo sapiens
attatactatcggac

SEQ ID NO: 257428 - DNA, 15 bp, Homo sapiens
tattatactatcgga

SEQ ID NO: 257429 - DNA, 15 bp, Homo sapiens
ttattatactatcgg

SEQ ID NO: 257430 - DNA, 15 bp, Homo sapiens
cttattatactatcg

SEQ ID NO: 257431 - DNA, 15 bp, Homo sapiens
gcttattatactatc

SEQ ID NO: 257432 - DNA, 15 bp, Homo sapiens
tgcttattatactat

SEQ ID NO: 257433 - DNA, 15 bp, Homo sapiens
ctgcttattatacta

SEQ ID NO: 257434 - DNA, 15 bp, Homo sapiens
gctgcttattatact

SEQ ID NO: 257435 - DNA, 15 bp, Homo sapiens
ggctgcttattatac

SEQ ID NO: 257436 - DNA, 15 bp, Homo sapiens
aggctgcttattata

SEQ ID NO: 257437 - DNA, 15 bp, Homo sapiens
caggctgcttattat

SEQ ID NO: 257438 - DNA, 15 bp, Homo sapiens
ccaggctgcttatta

SEQ ID NO: 257439 - DNA, 15 bp, Homo sapiens
accaggctgcttatt

SEQ ID NO: 257440 - DNA, 15 bp, Homo sapiens
caccaggctgcttat

SEQ ID NO: 257441 - DNA, 15 bp, Homo sapiens
ccaccaggctgctta

SEQ ID NO: 257442 - DNA, 15 bp, Homo sapiens
tccaccaggctgctt

SEQ ID NO: 257443 - DNA, 15 bp, Homo sapiens
ttccaccaggctgct

SEQ ID NO: 257444 - DNA, 15 bp, Homo sapiens
tttccaccaggctgc

SEQ ID NO: 257445 - DNA, 15 bp, Homo sapiens
ttttccaccaggctg

SEQ ID NO: 257446 - DNA, 15 bp, Homo sapiens
attttccaccaggct

SEQ ID NO: 257447 - DNA, 15 bp, Homo sapiens
gattttccaccaggc

SEQ ID NO: 257448 - DNA, 15 bp, Homo sapiens
tgattttccaccagg

SEQ ID NO: 257449 - DNA, 15 bp, Homo sapiens
ttgattttccaccag

SEQ ID NO: 257450 - DNA, 15 bp, Homo sapiens
tttgattttccacca

SEQ ID NO: 257451 - DNA, 15 bp, Homo sapiens
gtttgattttccacc

SEQ ID NO: 257452 - DNA, 15 bp, Homo sapiens
tgtttgattttccac

SEQ ID NO: 257453 - DNA, 15 bp, Homo sapiens
ttgtttgattttcca

SEQ ID NO: 257454 - DNA, 15 bp, Homo sapiens
cttgtttgattttcc

SEQ ID NO: 257455 - DNA, 15 bp, Homo sapiens
ccttgtttgattttc

SEQ ID NO: 257456 - DNA, 15 bp, Homo sapiens
gccttgtttgatttt

SEQ ID NO: 257457 - DNA, 15 bp, Homo sapiens
tgccttgtttgattt

SEQ ID NO: 257458 - DNA, 15 bp, Homo sapiens
ttgccttgtttgatt

SEQ ID NO: 257459 - DNA, 15 bp, Homo sapiens
tttgccttgtttgat

SEQ ID NO: 257460 - DNA, 15 bp, Homo sapiens
ctttgccttgtttga

SEQ ID NO: 257461 - DNA, 15 bp, Homo sapiens
cctttgccttgtttg

SEQ ID NO: 257462 - DNA, 15 bp, Homo sapiens
tcctttgccttgttt

SEQ ID NO: 257463 - DNA, 15 bp, Homo sapiens
ttcctttgccttgtt

SEQ ID NO: 257464 - DNA, 15 bp, Homo sapiens
tttcctttgccttgt

SEQ ID NO: 257465 - DNA, 15 bp, Homo sapiens
ctttcctttgccttg

SEQ ID NO: 257466 - DNA, 15 bp, Homo sapiens
cctttcctttgcctt

SEQ ID NO: 257467 - DNA, 15 bp, Homo sapiens
tcctttcctttgcct

SEQ ID NO: 257468 - DNA, 15 bp, Homo sapiens
ctcctttcctttgcc

SEQ ID NO: 257469 - DNA, 15 bp, Homo sapiens
cctcctttcctttgc

SEQ ID NO: 257470 - DNA, 15 bp, Homo sapiens
acctcctttcctttg

SEQ ID NO: 257471 - DNA, 15 bp, Homo sapiens
cacctcctttccttt

SEQ ID NO: 257472 - DNA, 15 bp, Homo sapiens
acacctcctttcctt

SEQ ID NO: 257473 - DNA, 15 bp, Homo sapiens
cacacctcctttcct

SEQ ID NO: 257474 - DNA, 15 bp, Homo sapiens
ccacacctcctttcc

SEQ ID NO: 257475 - DNA, 15 bp, Homo sapiens
accacacctcctttc

SEQ ID NO: 257476 - DNA, 15 bp, Homo sapiens
aaccacacctccttt

SEQ ID NO: 257477 - DNA, 15 bp, Homo sapiens
caaccacacctcctt

SEQ ID NO: 257478 - DNA, 15 bp, Homo sapiens
ccaaccacacctcct

SEQ ID NO: 257479 - DNA, 15 bp, Homo sapiens
cccaaccacacctcc

SEQ ID NO: 257480 - DNA, 15 bp, Homo sapiens
ccccaaccacacctc

SEQ ID NO: 257481 - DNA, 15 bp, Homo sapiens
gccccaaccacacct

SEQ ID NO: 257482 - DNA, 15 bp, Homo sapiens
tgccccaaccacacc

SEQ ID NO: 257483 - DNA, 15 bp, Homo sapiens
ctgccccaaccacac

SEQ ID NO: 257484 - DNA, 15 bp, Homo sapiens
cctgccccaaccaca

SEQ ID NO: 257485 - DNA, 15 bp, Homo sapiens
gcctgccccaaccac

SEQ ID NO: 257486 - DNA, 15 bp, Homo sapiens
tgcctgccccaacca

SEQ ID NO: 257487 - DNA, 15 bp, Homo sapiens
ctgcctgccccaacc

SEQ ID NO: 257488 - DNA, 15 bp, Homo sapiens
cctgcctgccccaac

SEQ ID NO: 257489 - DNA, 15 bp, Homo sapiens
ccctgcctgccccaa

SEQ ID NO: 257490 - DNA, 15 bp, Homo sapiens
cccctgcctgcccca

SEQ ID NO: 257491 - DNA, 15 bp, Homo sapiens
ccccctgcctgcccc

SEQ ID NO: 257492 - DNA, 15 bp, Homo sapiens
gccccctgcctgccc

SEQ ID NO: 257493 - DNA, 15 bp, Homo sapiens
tgccccctgcctgcc

SEQ ID NO: 257494 - DNA, 15 bp, Homo sapiens
atgccccctgcctgc

SEQ ID NO: 257495 - DNA, 15 bp, Homo sapiens
catgccccctgcctg

SEQ ID NO: 257496 - DNA, 15 bp, Homo sapiens
acatgccccctgcct

SEQ ID NO: 257497 - DNA, 15 bp, Homo sapiens
cacatgccccctgcc

SEQ ID NO: 257498 - DNA, 15 bp, Homo sapiens
tcacatgccccctgc

SEQ ID NO: 257499 - DNA, 15 bp, Homo sapiens
ttcacatgccccctg

SEQ ID NO: 257500 - DNA, 15 bp, Homo sapiens
cttcacatgccccct

SEQ ID NO: 257501 - DNA, 15 bp, Homo sapiens
tcttcacatgccccc

SEQ ID NO: 257502 - DNA, 15 bp, Homo sapiens
ttcttcacatgcccc

SEQ ID NO: 257503 - DNA, 15 bp, Homo sapiens
cttcttcacatgccc

SEQ ID NO: 257504 - DNA, 15 bp, Homo sapiens
ccttcttcacatgcc

SEQ ID NO: 257505 - DNA, 15 bp, Homo sapiens
accttcttcacatgc

SEQ ID NO: 257506 - DNA, 15 bp, Homo sapiens
caccttcttcacatg

SEQ ID NO: 257507 - DNA, 15 bp, Homo sapiens
tcaccttcttcacat

SEQ ID NO: 257508 - DNA, 15 bp, Homo sapiens
ttcaccttcttcaca

SEQ ID NO: 257509 - DNA, 15 bp, Homo sapiens
gttcaccttcttcac

SEQ ID NO: 257510 - DNA, 15 bp, Homo sapiens
tgttcaccttcttca

SEQ ID NO: 257511 - DNA, 15 bp, Homo sapiens
ttgttcaccttcttc

SEQ ID NO: 257512 - DNA, 15 bp, Homo sapiens
tttgttcaccttctt

SEQ ID NO: 257513 - DNA, 15 bp, Homo sapiens
atttgttcaccttct

SEQ ID NO: 257514 - DNA, 15 bp, Homo sapiens
gatttgttcaccttc

SEQ ID NO: 257515 - DNA, 15 bp, Homo sapiens
agatttgttcacctt

SEQ ID NO: 257516 - DNA, 15 bp, Homo sapiens
tagatttgttcacct

SEQ ID NO: 257517 - DNA, 15 bp, Homo sapiens
atagatttgttcacc

SEQ ID NO: 257518 - DNA, 15 bp, Homo sapiens
catagatttgttcac

SEQ ID NO: 257519 - DNA, 15 bp, Homo sapiens
acatagatttgttca

SEQ ID NO: 257520 - DNA, 15 bp, Homo sapiens
cacatagatttgttc

SEQ ID NO: 257521 - DNA, 15 bp, Homo sapiens
ccacatagatttgtt

SEQ ID NO: 257522 - DNA, 15 bp, Homo sapiens
cccacatagatttgt

SEQ ID NO: 257523 - DNA, 15 bp, Homo sapiens
gcccacatagatttg

SEQ ID NO: 257524 - DNA, 15 bp, Homo sapiens
agcccacatagattt

SEQ ID NO: 257525 - DNA, 15 bp, Homo sapiens
aagcccacatagatt

SEQ ID NO: 257526 - DNA, 15 bp, Homo sapiens
taagcccacatagat

SEQ ID NO: 257527 - DNA, 15 bp, Homo sapiens
gtaagcccacataga

SEQ ID NO: 257528 - DNA, 15 bp, Homo sapiens
agtaagcccacatag

SEQ ID NO: 257529 - DNA, 15 bp, Homo sapiens
aagtaagcccacata

SEQ ID NO: 257530 - DNA, 15 bp, Homo sapiens
caagtaagcccacat

SEQ ID NO: 257531 - DNA, 15 bp, Homo sapiens
tcaagtaagcccaca

SEQ ID NO: 257532 - DNA, 15 bp, Homo sapiens
atcaagtaagcccac

SEQ ID NO: 257533 - DNA, 15 bp, Homo sapiens
gatcaagtaagccca

SEQ ID NO: 257534 - DNA, 15 bp, Homo sapiens
agatcaagtaagccc

SEQ ID NO: 257535 - DNA, 15 bp, Homo sapiens
aagatcaagtaagcc

SEQ ID NO: 257536 - DNA, 15 bp, Homo sapiens
taagatcaagtaagc

SEQ ID NO: 257537 - DNA, 15 bp, Homo sapiens
ataagatcaagtaag

SEQ ID NO: 257538 - DNA, 15 bp, Homo sapiens
aataagatcaagtaa

SEQ ID NO: 257539 - DNA, 15 bp, Homo sapiens
caataagatcaagta

SEQ ID NO: 257540 - DNA, 15 bp, Homo sapiens
acaataagatcaagt

SEQ ID NO: 257541 - DNA, 15 bp, Homo sapiens
aacaataagatcaag

SEQ ID NO: 257542 - DNA, 15 bp, Homo sapiens
aaacaataagatcaa

SEQ ID NO: 257543 - DNA, 15 bp, Homo sapiens
gaaacaataagatca

SEQ ID NO: 257544 - DNA, 15 bp, Homo sapiens
tgaaacaataagatc

SEQ ID NO: 257545 - DNA, 15 bp, Homo sapiens
ttgaaacaataagat

SEQ ID NO: 257546 - DNA, 15 bp, Homo sapiens
attgaaacaataaga

SEQ ID NO: 257547 - DNA, 15 bp, Homo sapiens
tattgaaacaataag

SEQ ID NO: 257548 - DNA, 15 bp, Homo sapiens
ttattgaaacaataa

SEQ ID NO: 257549 - DNA, 15 bp, Homo sapiens
attattgaaacaata

SEQ ID NO: 257550 - DNA, 15 bp, Homo sapiens
aattattgaaacaat

SEQ ID NO: 257551 - DNA, 15 bp, Homo sapiens
gaattattgaaacaa

SEQ ID NO: 257552 - DNA, 15 bp, Homo sapiens
tgaattattgaaaca

SEQ ID NO: 257553 - DNA, 15 bp, Homo sapiens
ctgaattattgaaac

SEQ ID NO: 257554 - DNA, 15 bp, Homo sapiens
gctgaattattgaaa

SEQ ID NO: 257555 - DNA, 15 bp, Homo sapiens
agctgaattattgaa

SEQ ID NO: 257556 - DNA, 15 bp, Homo sapiens
tagctgaattattga

SEQ ID NO: 257557 - DNA, 15 bp, Homo sapiens
ttagctgaattattg

SEQ ID NO: 257558 - DNA, 15 bp, Homo sapiens
attagctgaattatt

SEQ ID NO: 257559 - DNA, 15 bp, Homo sapiens
tattagctgaattat

SEQ ID NO: 257560 - DNA, 15 bp, Homo sapiens
atattagctgaatta

SEQ ID NO: 257561 - DNA, 15 bp, Homo sapiens
catattagctgaatt

SEQ ID NO: 257562 - DNA, 15 bp, Homo sapiens
acatattagctgaat

SEQ ID NO: 257563 - DNA, 15 bp, Homo sapiens
aacatattagctgaa

SEQ ID NO: 257564 - DNA, 15 bp, Homo sapiens
aaacatattagctga

SEQ ID NO: 257565 - DNA, 15 bp, Homo sapiens
gaaacatattagctg

SEQ ID NO: 257566 - DNA, 15 bp, Homo sapiens
agaaacatattagct

SEQ ID NO: 257567 - DNA, 15 bp, Homo sapiens
aagaaacatattagc

SEQ ID NO: 257568 - DNA, 15 bp, Homo sapiens
aaagaaacatattag

SEQ ID NO: 257569 - DNA, 15 bp, Homo sapiens
taaagaaacatatta

SEQ ID NO: 257570 - DNA, 15 bp, Homo sapiens
ataaagaaacatatt

SEQ ID NO: 257571 - DNA, 15 bp, Homo sapiens
aataaagaaacatat

SEQ ID NO: 257572 - DNA, 15 bp, Homo sapiens
gaataaagaaacata

SEQ ID NO: 257573 - DNA, 15 bp, Homo sapiens
tgaataaagaaacat

SEQ ID NO: 257574 - DNA, 15 bp, Homo sapiens
atgaataaagaaaca

SEQ ID NO: 257575 - DNA, 15 bp, Homo sapiens
aatgaataaagaaac

SEQ ID NO: 257576 - DNA, 15 bp, Homo sapiens
aaatgaataaagaaa

SEQ ID NO: 257577 - DNA, 15 bp, Homo sapiens
taaatgaataaagaa

SEQ ID NO: 257578 - DNA, 15 bp, Homo sapiens
ataaatgaataaaga

SEQ ID NO: 257579 - DNA, 15 bp, Homo sapiens
aataaatgaataaag

SEQ ID NO: 257580 - DNA, 15 bp, Homo sapiens
gaataaatgaataaa

SEQ ID NO: 257581 - DNA, 15 bp, Homo sapiens
tgaataaatgaataa

SEQ ID NO: 257582 - DNA, 15 bp, Homo sapiens
gtgaataaatgaata

SEQ ID NO: 257583 - DNA, 15 bp, Homo sapiens
agtgaataaatgaat

SEQ ID NO: 257584 - DNA, 15 bp, Homo sapiens
gagtgaataaatgaa

SEQ ID NO: 257585 - DNA, 15 bp, Homo sapiens
tgagtgaataaatga

SEQ ID NO: 257586 - DNA, 15 bp, Homo sapiens
ttgagtgaataaatg

SEQ ID NO: 257587 - DNA, 15 bp, Homo sapiens
gttgagtgaataaat

SEQ ID NO: 257588 - DNA, 15 bp, Homo sapiens
tgttgagtgaataaa

SEQ ID NO: 257589 - DNA, 15 bp, Homo sapiens
ttgttgagtgaataa

SEQ ID NO: 257590 - DNA, 15 bp, Homo sapiens
attgttgagtgaata

SEQ ID NO: 257591 - DNA, 15 bp, Homo sapiens
aattgttgagtgaat

SEQ ID NO: 257592 - DNA, 15 bp, Homo sapiens
caattgttgagtgaa

SEQ ID NO: 257593 - DNA, 15 bp, Homo sapiens
gcaattgttgagtga

SEQ ID NO: 257594 - DNA, 15 bp, Homo sapiens
tgcaattgttgagtg

SEQ ID NO: 257595 - DNA, 15 bp, Homo sapiens
atgcaattgttgagt

SEQ ID NO: 257596 - DNA, 15 bp, Homo sapiens
tatgcaattgttgag

SEQ ID NO: 257597 - DNA, 15 bp, Homo sapiens
atatgcaattgttga

SEQ ID NO: 257598 - DNA, 15 bp, Homo sapiens
tatatgcaattgttg

SEQ ID NO: 257599 - DNA, 15 bp, Homo sapiens
gtatatgcaattgtt

SEQ ID NO: 257600 - DNA, 15 bp, Homo sapiens
agtatatgcaattgt

SEQ ID NO: 257601 - DNA, 15 bp, Homo sapiens
cagtatatgcaattg

SEQ ID NO: 257602 - DNA, 15 bp, Homo sapiens
tcagtatatgcaatt

SEQ ID NO: 257603 - DNA, 15 bp, Homo sapiens
ttcagtatatgcaat

SEQ ID NO: 257604 - DNA, 15 bp, Homo sapiens
tttcagtatatgcaa

SEQ ID NO: 257605 - DNA, 15 bp, Homo sapiens
atttcagtatatgca

SEQ ID NO: 257606 - DNA, 15 bp, Homo sapiens
gatttcagtatatgc

SEQ ID NO: 257607 - DNA, 15 bp, Homo sapiens
ggatttcagtatatg

SEQ ID NO: 257608 - DNA, 15 bp, Homo sapiens
aggatttcagtatat

SEQ ID NO: 257609 - DNA, 15 bp, Homo sapiens
taggatttcagtata

SEQ ID NO: 257610 - DNA, 15 bp, Homo sapiens
ataggatttcagtat

SEQ ID NO: 257611 - DNA, 15 bp, Homo sapiens
aataggatttcagta

SEQ ID NO: 257612 - DNA, 15 bp, Homo sapiens
taataggatttcagt

SEQ ID NO: 257613 - DNA, 15 bp, Homo sapiens
ataataggatttcag

SEQ ID NO: 257614 - DNA, 15 bp, Homo sapiens
cataataggatttca

SEQ ID NO: 257615 - DNA, 15 bp, Homo sapiens
acataataggatttc

SEQ ID NO: 257616 - DNA, 15 bp, Homo sapiens
gacataataggattt

SEQ ID NO: 257617 - DNA, 15 bp, Homo sapiens
tgacataataggatt

SEQ ID NO: 257618 - DNA, 15 bp, Homo sapiens
atgacataataggat

SEQ ID NO: 257619 - DNA, 15 bp, Homo sapiens
aatgacataatagga

SEQ ID NO: 257620 - DNA, 15 bp, Homo sapiens
gaatgacataatagg

SEQ ID NO: 257621 - DNA, 15 bp, Homo sapiens
tgaatgacataatag

SEQ ID NO: 257622 - DNA, 15 bp, Homo sapiens
ttgaatgacataata

SEQ ID NO: 257623 - DNA, 15 bp, Homo sapiens
cttgaatgacataat

SEQ ID NO: 257624 - DNA, 15 bp, Homo sapiens
gcttgaatgacataa

SEQ ID NO: 257625 - DNA, 15 bp, Homo sapiens
ggcttgaatgacata

SEQ ID NO: 257626 - DNA, 15 bp, Homo sapiens
tggcttgaatgacat

SEQ ID NO: 257627 - DNA, 15 bp, Homo sapiens
atggcttgaatgaca

SEQ ID NO: 257628 - DNA, 15 bp, Homo sapiens
catggcttgaatgac

SEQ ID NO: 257629 - DNA, 15 bp, Homo sapiens
ccatggcttgaatga

SEQ ID NO: 257630 - DNA, 15 bp, Homo sapiens
accatggcttgaatg

SEQ ID NO: 257631 - DNA, 15 bp, Homo sapiens
caccatggcttgaat

SEQ ID NO: 257632 - DNA, 15 bp, Homo sapiens
tcaccatggcttgaa

SEQ ID NO: 257633 - DNA, 15 bp, Homo sapiens
ctcaccatggcttga

SEQ ID NO: 257634 - DNA, 15 bp, Homo sapiens
tctcaccatggcttg

SEQ ID NO: 257635 - DNA, 15 bp, Homo sapiens
gtctcaccatggctt

SEQ ID NO: 257636 - DNA, 15 bp, Homo sapiens
tgtctcaccatggct

SEQ ID NO: 257637 - DNA, 15 bp, Homo sapiens
ttgtctcaccatggc

SEQ ID NO: 257638 - DNA, 15 bp, Homo sapiens
cttgtctcaccatgg

SEQ ID NO: 257639 - DNA, 15 bp, Homo sapiens
ccttgtctcaccatg

SEQ ID NO: 257640 - DNA, 15 bp, Homo sapiens
tccttgtctcaccat

SEQ ID NO: 257641 - DNA, 15 bp, Homo sapiens
ttccttgtctcacca

SEQ ID NO: 257642 - DNA, 15 bp, Homo sapiens
cttccttgtctcacc

SEQ ID NO: 257643 - DNA, 15 bp, Homo sapiens
acttccttgtctcac

SEQ ID NO: 257644 - DNA, 15 bp, Homo sapiens
cacttccttgtctca

SEQ ID NO: 257645 - DNA, 15 bp, Homo sapiens
ccacttccttgtctc

SEQ ID NO: 257646 - DNA, 15 bp, Homo sapiens
cccacttccttgtct

SEQ ID NO: 257647 - DNA, 15 bp, Homo sapiens
acccacttccttgtc

SEQ ID NO: 257648 - DNA, 15 bp, Homo sapiens
aacccacttccttgt

SEQ ID NO: 257649 - DNA, 15 bp, Homo sapiens
aaacccacttccttg

SEQ ID NO: 257650 - DNA, 15 bp, Homo sapiens
gaaacccacttcctt

SEQ ID NO: 257651 - DNA, 15 bp, Homo sapiens
tgaaacccacttcct

SEQ ID NO: 257652 - DNA, 15 bp, Homo sapiens
gtgaaacccacttcc

SEQ ID NO: 257653 - DNA, 15 bp, Homo sapiens
ggtgaaacccacttc

SEQ ID NO: 257654 - DNA, 15 bp, Homo sapiens
aggtgaaacccactt

SEQ ID NO: 257655 - DNA, 15 bp, Homo sapiens
gaggtgaaacccact

SEQ ID NO: 257656 - DNA, 15 bp, Homo sapiens
ggaggtgaaacccac

SEQ ID NO: 257657 - DNA, 15 bp, Homo sapiens
gggaggtgaaaccca

SEQ ID NO: 257658 - DNA, 15 bp, Homo sapiens
tgggaggtgaaaccc

SEQ ID NO: 257659 - DNA, 15 bp, Homo sapiens
ttgggaggtgaaacc

SEQ ID NO: 257660 - DNA, 15 bp, Homo sapiens
cttgggaggtgaaac

SEQ ID NO: 257661 - DNA, 15 bp, Homo sapiens
ccttgggaggtgaaa

SEQ ID NO: 257662 - DNA, 15 bp, Homo sapiens
tccttgggaggtgaa

SEQ ID NO: 257663 - DNA, 15 bp, Homo sapiens
ctccttgggaggtga

SEQ ID NO: 257664 - DNA, 15 bp, Homo sapiens
gctccttgggaggtg

SEQ ID NO: 257665 - DNA, 15 bp, Homo sapiens
cgctccttgggaggt

SEQ ID NO: 257666 - DNA, 15 bp, Homo sapiens
gcgctccttgggagg

SEQ ID NO: 257667 - DNA, 15 bp, Homo sapiens
tgcgctccttgggag

SEQ ID NO: 257668 - DNA, 15 bp, Homo sapiens
gtgcgctccttggga

SEQ ID NO: 257669 - DNA, 15 bp, Homo sapiens
tgtgcgctccttggg

SEQ ID NO: 257670 - DNA, 15 bp, Homo sapiens
ctgtgcgctccttgg

SEQ ID NO: 257671 - DNA, 15 bp, Homo sapiens
gctgtgcgctccttg

SEQ ID NO: 257672 - DNA, 15 bp, Homo sapiens
agctgtgcgctcctt

SEQ ID NO: 257673 - DNA, 15 bp, Homo sapiens
aagctgtgcgctcct

SEQ ID NO: 257674 - DNA, 15 bp, Homo sapiens
taagctgtgcgctcc

SEQ ID NO: 257675 - DNA, 15 bp, Homo sapiens
gtaagctgtgcgctc

SEQ ID NO: 257676 - DNA, 15 bp, Homo sapiens
agtaagctgtgcgct

SEQ ID NO: 257677 - DNA, 15 bp, Homo sapiens
gagtaagctgtgcgc

SEQ ID NO: 257678 - DNA, 15 bp, Homo sapiens
agagtaagctgtgcg

SEQ ID NO: 257679 - DNA, 15 bp, Homo sapiens
gagagtaagctgtgc

SEQ ID NO: 257680 - DNA, 15 bp, Homo sapiens
tgagagtaagctgtg

SEQ ID NO: 257681 - DNA, 15 bp, Homo sapiens
ctgagagtaagctgt

SEQ ID NO: 257682 - DNA, 15 bp, Homo sapiens
tctgagagtaagctg

SEQ ID NO: 257683 - DNA, 15 bp, Homo sapiens
ttctgagagtaagct

SEQ ID NO: 257684 - DNA, 15 bp, Homo sapiens
cttctgagagtaagc

SEQ ID NO: 257685 - DNA, 15 bp, Homo sapiens
gcttctgagagtaag

SEQ ID NO: 257686 - DNA, 15 bp, Homo sapiens
tgcttctgagagtaa

SEQ ID NO: 257687 - DNA, 15 bp, Homo sapiens
ctgcttctgagagta

SEQ ID NO: 257688 - DNA, 15 bp, Homo sapiens
cctgcttctgagagt

SEQ ID NO: 257689 - DNA, 15 bp, Homo sapiens
tcctgcttctgagag

SEQ ID NO: 257690 - DNA, 15 bp, Homo sapiens
ttcctgcttctgaga

SEQ ID NO: 257691 - DNA, 15 bp, Homo sapiens
tttcctgcttctgag

SEQ ID NO: 257692 - DNA, 15 bp, Homo sapiens
ttttcctgcttctga

SEQ ID NO: 257693 - DNA, 15 bp, Homo sapiens
gttttcctgcttctg

SEQ ID NO: 257694 - DNA, 15 bp, Homo sapiens
cgttttcctgcttct

SEQ ID NO: 257695 - DNA, 15 bp, Homo sapiens
acgttttcctgcttc

SEQ ID NO: 257696 - DNA, 15 bp, Homo sapiens
cacgttttcctgctt

SEQ ID NO: 257697 - DNA, 15 bp, Homo sapiens
gcacgttttcctgct

SEQ ID NO: 257698 - DNA, 15 bp, Homo sapiens
ggcacgttttcctgc

SEQ ID NO: 257699 - DNA, 15 bp, Homo sapiens
tggcacgttttcctg

SEQ ID NO: 257700 - DNA, 15 bp, Homo sapiens
ttggcacgttttcct

SEQ ID NO: 257701 - DNA, 15 bp, Homo sapiens
attggcacgttttcc

SEQ ID NO: 257702 - DNA, 15 bp, Homo sapiens
aattggcacgttttc

SEQ ID NO: 257703 - DNA, 15 bp, Homo sapiens
taattggcacgtttt

SEQ ID NO: 257704 - DNA, 15 bp, Homo sapiens
gtaattggcacgttt

SEQ ID NO: 257705 - DNA, 15 bp, Homo sapiens
ggtaattggcacgtt

SEQ ID NO: 257706 - DNA, 15 bp, Homo sapiens
gggtaattggcacgt

SEQ ID NO: 257707 - DNA, 15 bp, Homo sapiens
tgggtaattggcacg

SEQ ID NO: 257708 - DNA, 15 bp, Homo sapiens
atgggtaattggcac

SEQ ID NO: 257709 - DNA, 15 bp, Homo sapiens
gatgggtaattggca

SEQ ID NO: 257710 - DNA, 15 bp, Homo sapiens
tgatgggtaattggc

SEQ ID NO: 257711 - DNA, 15 bp, Homo sapiens
gtgatgggtaattgg

SEQ ID NO: 257712 - DNA, 15 bp, Homo sapiens
tgtgatgggtaattg

SEQ ID NO: 257713 - DNA, 15 bp, Homo sapiens
gtgtgatgggtaatt

SEQ ID NO: 257714 - DNA, 15 bp, Homo sapiens
agtgtgatgggtaat

SEQ ID NO: 257715 - DNA, 15 bp, Homo sapiens
gagtgtgatgggtaa

SEQ ID NO: 257716 - DNA, 15 bp, Homo sapiens
tgagtgtgatgggta

SEQ ID NO: 257717 - DNA, 15 bp, Homo sapiens
gtgagtgtgatgggt

SEQ ID NO: 257718 - DNA, 15 bp, Homo sapiens
tgtgagtgtgatggg

SEQ ID NO: 257719 - DNA, 15 bp, Homo sapiens
atgtgagtgtgatgg

SEQ ID NO: 257720 - DNA, 15 bp, Homo sapiens
gatgtgagtgtgatg

SEQ ID NO: 257721 - DNA, 15 bp, Homo sapiens
cgatgtgagtgtgat

SEQ ID NO: 257722 - DNA, 15 bp, Homo sapiens
acgatgtgagtgtga

SEQ ID NO: 257723 - DNA, 15 bp, Homo sapiens
aacgatgtgagtgtg

SEQ ID NO: 257724 - DNA, 15 bp, Homo sapiens
aaacgatgtgagtgt

SEQ ID NO: 257725 - DNA, 15 bp, Homo sapiens
gaaacgatgtgagtg

SEQ ID NO: 257726 - DNA, 15 bp, Homo sapiens
agaaacgatgtgagt

SEQ ID NO: 257727 - DNA, 15 bp, Homo sapiens
tagaaacgatgtgag

SEQ ID NO: 257728 - DNA, 15 bp, Homo sapiens
ttagaaacgatgtga

SEQ ID NO: 257729 - DNA, 15 bp, Homo sapiens
tttagaaacgatgtg

SEQ ID NO: 257730 - DNA, 15 bp, Homo sapiens
ctttagaaacgatgt

SEQ ID NO: 257731 - DNA, 15 bp, Homo sapiens
actttagaaacgatg

SEQ ID NO: 257732 - DNA, 15 bp, Homo sapiens
tactttagaaacgat

SEQ ID NO: 257733 - DNA, 15 bp, Homo sapiens
ctactttagaaacga

SEQ ID NO: 257734 - DNA, 15 bp, Homo sapiens
tctactttagaaacg

SEQ ID NO: 257735 - DNA, 15 bp, Homo sapiens
atctactttagaaac

SEQ ID NO: 257736 - DNA, 15 bp, Homo sapiens
gatctactttagaaa

SEQ ID NO: 257737 - DNA, 15 bp, Homo sapiens
ggatctactttagaa

SEQ ID NO: 257738 - DNA, 15 bp, Homo sapiens
aggatctactttaga

SEQ ID NO: 257739 - DNA, 15 bp, Homo sapiens
gaggatctactttag

SEQ ID NO: 257740 - DNA, 15 bp, Homo sapiens
tgaggatctacttta

SEQ ID NO: 257741 - DNA, 15 bp, Homo sapiens
ttgaggatctacttt

SEQ ID NO: 257742 - DNA, 15 bp, Homo sapiens
attgaggatctactt

SEQ ID NO: 257743 - DNA, 15 bp, Homo sapiens
aattgaggatctact

SEQ ID NO: 257744 - DNA, 15 bp, Homo sapiens
taattgaggatctac

SEQ ID NO: 257745 - DNA, 15 bp, Homo sapiens
ctaattgaggatcta

SEQ ID NO: 257746 - DNA, 15 bp, Homo sapiens
cctaattgaggatct

SEQ ID NO: 257747 - DNA, 15 bp, Homo sapiens
gcctaattgaggatc

SEQ ID NO: 257748 - DNA, 15 bp, Homo sapiens
tgcctaattgaggat

SEQ ID NO: 257749 - DNA, 15 bp, Homo sapiens
ttgcctaattgagga

SEQ ID NO: 257750 - DNA, 15 bp, Homo sapiens
gttgcctaattgagg

SEQ ID NO: 257751 - DNA, 15 bp, Homo sapiens
tgttgcctaattgag

SEQ ID NO: 257752 - DNA, 15 bp, Homo sapiens
gtgttgcctaattga

SEQ ID NO: 257753 - DNA, 15 bp, Homo sapiens
agtgttgcctaattg

SEQ ID NO: 257754 - DNA, 15 bp, Homo sapiens
aagtgttgcctaatt

SEQ ID NO: 257755 - DNA, 15 bp, Homo sapiens
gaagtgttgcctaat

SEQ ID NO: 257756 - DNA, 15 bp, Homo sapiens
tgaagtgttgcctaa

SEQ ID NO: 257757 - DNA, 15 bp, Homo sapiens
ctgaagtgttgccta

SEQ ID NO: 257758 - DNA, 15 bp, Homo sapiens
gctgaagtgttgcct

SEQ ID NO: 257759 - DNA, 15 bp, Homo sapiens
tgctgaagtgttgcc

SEQ ID NO: 257760 - DNA, 15 bp, Homo sapiens
ctgctgaagtgttgc

SEQ ID NO: 257761 - DNA, 15 bp, Homo sapiens
gctgctgaagtgttg

SEQ ID NO: 257762 - DNA, 15 bp, Homo sapiens
agctgctgaagtgtt

SEQ ID NO: 257763 - DNA, 15 bp, Homo sapiens
cagctgctgaagtgt

SEQ ID NO: 257764 - DNA, 15 bp, Homo sapiens
gcagctgctgaagtg

SEQ ID NO: 257765 - DNA, 15 bp, Homo sapiens
cgcagctgctgaagt

SEQ ID NO: 257766 - DNA, 15 bp, Homo sapiens
ccgcagctgctgaag

SEQ ID NO: 257767 - DNA, 15 bp, Homo sapiens
tccgcagctgctgaa

SEQ ID NO: 257768 - DNA, 15 bp, Homo sapiens
ctccgcagctgctga

SEQ ID NO: 257769 - DNA, 15 bp, Homo sapiens
actccgcagctgctg

SEQ ID NO: 257770 - DNA, 15 bp, Homo sapiens
gactccgcagctgct

SEQ ID NO: 257771 - DNA, 15 bp, Homo sapiens
tgactccgcagctgc

SEQ ID NO: 257772 - DNA, 15 bp, Homo sapiens
gtgactccgcagctg

SEQ ID NO: 257773 - DNA, 15 bp, Homo sapiens
agtgactccgcagct

SEQ ID NO: 257774 - DNA, 15 bp, Homo sapiens
gagtgactccgcagc

SEQ ID NO: 257775 - DNA, 15 bp, Homo sapiens
ggagtgactccgcag

SEQ ID NO: 257776 - DNA, 15 bp, Homo sapiens
cggagtgactccgca

SEQ ID NO: 257777 - DNA, 15 bp, Homo sapiens
acggagtgactccgc

SEQ ID NO: 257778 - DNA, 15 bp, Homo sapiens
tacggagtgactccg

SEQ ID NO: 257779 - DNA, 15 bp, Homo sapiens
ctacggagtgactcc

SEQ ID NO: 257780 - DNA, 15 bp, Homo sapiens
actacggagtgactc

SEQ ID NO: 257781 - DNA, 15 bp, Homo sapiens
tactacggagtgact

SEQ ID NO: 257782 - DNA, 15 bp, Homo sapiens
ctactacggagtgac

SEQ ID NO: 257783 - DNA, 15 bp, Homo sapiens
actactacggagtga

SEQ ID NO: 257784 - DNA, 15 bp, Homo sapiens
gactactacggagtg

SEQ ID NO: 257785 - DNA, 15 bp, Homo sapiens
agactactacggagt

SEQ ID NO: 257786 - DNA, 15 bp, Homo sapiens
cagactactacggag

SEQ ID NO: 257787 - DNA, 15 bp, Homo sapiens
tcagactactacgga

SEQ ID NO: 257788 - DNA, 15 bp, Homo sapiens
ctcagactactacgg

SEQ ID NO: 257789 - DNA, 15 bp, Homo sapiens
cctcagactactacg

SEQ ID NO: 257790 - DNA, 15 bp, Homo sapiens
gcctcagactactac

SEQ ID NO: 257791 - DNA, 15 bp, Homo sapiens
tgcctcagactacta

SEQ ID NO: 257792 - DNA, 15 bp, Homo sapiens
ttgcctcagactact

SEQ ID NO: 257793 - DNA, 15 bp, Homo sapiens
gttgcctcagactac

SEQ ID NO: 257794 - DNA, 15 bp, Homo sapiens
tgttgcctcagacta

SEQ ID NO: 257795 - DNA, 15 bp, Homo sapiens
gtgttgcctcagact

SEQ ID NO: 257796 - DNA, 15 bp, Homo sapiens
tgtgttgcctcagac

SEQ ID NO: 257797 - DNA, 15 bp, Homo sapiens
ttgtgttgcctcaga

SEQ ID NO: 257798 - DNA, 15 bp, Homo sapiens
cttgtgttgcctcag

SEQ ID NO: 257799 - DNA, 15 bp, Homo sapiens
acttgtgttgcctca

SEQ ID NO: 257800 - DNA, 15 bp, Homo sapiens
cacttgtgttgcctc

SEQ ID NO: 257801 - DNA, 15 bp, Homo sapiens
gcacttgtgttgcct

SEQ ID NO: 257802 - DNA, 15 bp, Homo sapiens
tgcacttgtgttgcc

SEQ ID NO: 257803 - DNA, 15 bp, Homo sapiens
atgcacttgtgttgc

SEQ ID NO: 257804 - DNA, 15 bp, Homo sapiens
gatgcacttgtgttg

SEQ ID NO: 257805 - DNA, 15 bp, Homo sapiens
agatgcacttgtgtt

SEQ ID NO: 257806 - DNA, 15 bp, Homo sapiens
gagatgcacttgtgt

SEQ ID NO: 257807 - DNA, 15 bp, Homo sapiens
tgagatgcacttgtg

SEQ ID NO: 257808 - DNA, 15 bp, Homo sapiens
atgagatgcacttgt

SEQ ID NO: 257809 - DNA, 15 bp, Homo sapiens
gatgagatgcacttg

SEQ ID NO: 257810 - DNA, 15 bp, Homo sapiens
agatgagatgcactt

SEQ ID NO: 257811 - DNA, 15 bp, Homo sapiens
cagatgagatgcact

SEQ ID NO: 257812 - DNA, 15 bp, Homo sapiens
tcagatgagatgcac

SEQ ID NO: 257813 - DNA, 15 bp, Homo sapiens
ttcagatgagatgca

SEQ ID NO: 257814 - DNA, 15 bp, Homo sapiens
tttcagatgagatgc

SEQ ID NO: 257815 - DNA, 15 bp, Homo sapiens
atttcagatgagatg

SEQ ID NO: 257816 - DNA, 15 bp, Homo sapiens
tatttcagatgagat

SEQ ID NO: 257817 - DNA, 15 bp, Homo sapiens
atatttcagatgaga

SEQ ID NO: 257818 - DNA, 15 bp, Homo sapiens
gatatttcagatgag

SEQ ID NO: 257819 - DNA, 15 bp, Homo sapiens
ggatatttcagatga

SEQ ID NO: 257820 - DNA, 15 bp, Homo sapiens
aggatatttcagatg

SEQ ID NO: 257821 - DNA, 15 bp, Homo sapiens
gaggatatttcagat

SEQ ID NO: 257822 - DNA, 15 bp, Homo sapiens
agaggatatttcaga

SEQ ID NO: 257823 - DNA, 15 bp, Homo sapiens
tagaggatatttcag

SEQ ID NO: 257824 - DNA, 15 bp, Homo sapiens
ttagaggatatttca

SEQ ID NO: 257825 - DNA, 15 bp, Homo sapiens
attagaggatatttc

SEQ ID NO: 257826 - DNA, 15 bp, Homo sapiens
cattagaggatattt

SEQ ID NO: 257827 - DNA, 15 bp, Homo sapiens
gcattagaggatatt

SEQ ID NO: 257828 - DNA, 15 bp, Homo sapiens
tgcattagaggatat

SEQ ID NO: 257829 - DNA, 15 bp, Homo sapiens
ctgcattagaggata

SEQ ID NO: 257830 - DNA, 15 bp, Homo sapiens
cctgcattagaggat

SEQ ID NO: 257831 - DNA, 15 bp, Homo sapiens
tcctgcattagagga

SEQ ID NO: 257832 - DNA, 15 bp, Homo sapiens
atcctgcattagagg

SEQ ID NO: 257833 - DNA, 15 bp, Homo sapiens
tatcctgcattagag

SEQ ID NO: 257834 - DNA, 15 bp, Homo sapiens
atatcctgcattaga

SEQ ID NO: 257835 - DNA, 15 bp, Homo sapiens
tatatcctgcattag

SEQ ID NO: 257836 - DNA, 15 bp, Homo sapiens
gtatatcctgcatta

SEQ ID NO: 257837 - DNA, 15 bp, Homo sapiens
agtatatcctgcatt

SEQ ID NO: 257838 - DNA, 15 bp, Homo sapiens
cagtatatcctgcat

SEQ ID NO: 257839 - DNA, 15 bp, Homo sapiens
ccagtatatcctgca

SEQ ID NO: 257840 - DNA, 15 bp, Homo sapiens
tccagtatatcctgc

SEQ ID NO: 257841 - DNA, 15 bp, Homo sapiens
ctccagtatatcctg

SEQ ID NO: 257842 - DNA, 15 bp, Homo sapiens
gctccagtatatcct

SEQ ID NO: 257843 - DNA, 15 bp, Homo sapiens
agctccagtatatcc

SEQ ID NO: 257844 - DNA, 15 bp, Homo sapiens
cagctccagtatatc

SEQ ID NO: 257845 - DNA, 15 bp, Homo sapiens
acagctccagtatat

SEQ ID NO: 257846 - DNA, 15 bp, Homo sapiens
aacagctccagtata

SEQ ID NO: 257847 - DNA, 15 bp, Homo sapiens
caacagctccagtat

SEQ ID NO: 257848 - DNA, 15 bp, Homo sapiens
gcaacagctccagta

SEQ ID NO: 257849 - DNA, 15 bp, Homo sapiens
ggcaacagctccagt

SEQ ID NO: 257850 - DNA, 15 bp, Homo sapiens
aggcaacagctccag

SEQ ID NO: 257851 - DNA, 15 bp, Homo sapiens
taggcaacagctcca

SEQ ID NO: 257852 - DNA, 15 bp, Homo sapiens
ctaggcaacagctcc

SEQ ID NO: 257853 - DNA, 15 bp, Homo sapiens
cctaggcaacagctc

SEQ ID NO: 257854 - DNA, 15 bp, Homo sapiens
ccctaggcaacagct

SEQ ID NO: 257855 - DNA, 15 bp, Homo sapiens
tccctaggcaacagc

SEQ ID NO: 257856 - DNA, 15 bp, Homo sapiens
ctccctaggcaacag

SEQ ID NO: 257857 - DNA, 15 bp, Homo sapiens
tctccctaggcaaca

SEQ ID NO: 257858 - DNA, 15 bp, Homo sapiens
atctccctaggcaac

SEQ ID NO: 257859 - DNA, 15 bp, Homo sapiens
tatctccctaggcaa

SEQ ID NO: 257860 - DNA, 15 bp, Homo sapiens
gtatctccctaggca

SEQ ID NO: 257861 - DNA, 15 bp, Homo sapiens
agtatctccctaggc

SEQ ID NO: 257862 - DNA, 15 bp, Homo sapiens
cagtatctccctagg

SEQ ID NO: 257863 - DNA, 15 bp, Homo sapiens
gcagtatctccctag

SEQ ID NO: 257864 - DNA, 15 bp, Homo sapiens
agcagtatctcccta

SEQ ID NO: 257865 - DNA, 15 bp, Homo sapiens
gagcagtatctccct

SEQ ID NO: 257866 - DNA, 15 bp, Homo sapiens
tgagcagtatctccc

SEQ ID NO: 257867 - DNA, 15 bp, Homo sapiens
ttgagcagtatctcc

SEQ ID NO: 257868 - DNA, 15 bp, Homo sapiens
cttgagcagtatctc

SEQ ID NO: 257869 - DNA, 15 bp, Homo sapiens
ccttgagcagtatct

SEQ ID NO: 257870 - DNA, 15 bp, Homo sapiens
tccttgagcagtatc

SEQ ID NO: 257871 - DNA, 15 bp, Homo sapiens
ttccttgagcagtat

SEQ ID NO: 257872 - DNA, 15 bp, Homo sapiens
attccttgagcagta

SEQ ID NO: 257873 - DNA, 15 bp, Homo sapiens
tattccttgagcagt

SEQ ID NO: 257874 - DNA, 15 bp, Homo sapiens
atattccttgagcag

SEQ ID NO: 257875 - DNA, 15 bp, Homo sapiens
catattccttgagca

SEQ ID NO: 257876 - DNA, 15 bp, Homo sapiens
ccatattccttgagc

SEQ ID NO: 257877 - DNA, 15 bp, Homo sapiens
cccatattccttgag

SEQ ID NO: 257878 - DNA, 15 bp, Homo sapiens
acccatattccttga

SEQ ID NO: 257879 - DNA, 15 bp, Homo sapiens
aacccatattccttg

SEQ ID NO: 257880 - DNA, 15 bp, Homo sapiens
gaacccatattcctt

SEQ ID NO: 257881 - DNA, 15 bp, Homo sapiens
ggaacccatattcct

SEQ ID NO: 257882 - DNA, 15 bp, Homo sapiens
tggaacccatattcc

SEQ ID NO: 257883 - DNA, 15 bp, Homo sapiens
gtggaacccatattc

SEQ ID NO: 257884 - DNA, 15 bp, Homo sapiens
tgtggaacccatatt

SEQ ID NO: 257885 - DNA, 15 bp, Homo sapiens
ttgtggaacccatat

SEQ ID NO: 257886 - DNA, 15 bp, Homo sapiens
cttgtggaacccata

SEQ ID NO: 257887 - DNA, 15 bp, Homo sapiens
gcttgtggaacccat

SEQ ID NO: 257888 - DNA, 15 bp, Homo sapiens
tgcttgtggaaccca

SEQ ID NO: 257889 - DNA, 15 bp, Homo sapiens
ttgcttgtggaaccc

SEQ ID NO: 257890 - DNA, 15 bp, Homo sapiens
tttgcttgtggaacc

SEQ ID NO: 257891 - DNA, 15 bp, Homo sapiens
atttgcttgtggaac

SEQ ID NO: 257892 - DNA, 15 bp, Homo sapiens
catttgcttgtggaa

SEQ ID NO: 257893 - DNA, 15 bp, Homo sapiens
gcatttgcttgtgga

SEQ ID NO: 257894 - DNA, 15 bp, Homo sapiens
agcatttgcttgtgg

SEQ ID NO: 257895 - DNA, 15 bp, Homo sapiens
tagcatttgcttgtg

SEQ ID NO: 257896 - DNA, 15 bp, Homo sapiens
atagcatttgcttgt

SEQ ID NO: 257897 - DNA, 15 bp, Homo sapiens
catagcatttgcttg

SEQ ID NO: 257898 - DNA, 15 bp, Homo sapiens
tcatagcatttgctt

SEQ ID NO: 257899 - DNA, 15 bp, Homo sapiens
ttcatagcatttgct

SEQ ID NO: 257900 - DNA, 15 bp, Homo sapiens
cttcatagcatttgc

SEQ ID NO: 257901 - DNA, 15 bp, Homo sapiens
acttcatagcatttg

SEQ ID NO: 257902 - DNA, 15 bp, Homo sapiens
aacttcatagcattt

SEQ ID NO: 257903 - DNA, 15 bp, Homo sapiens
gaacttcatagcatt

SEQ ID NO: 257904 - DNA, 15 bp, Homo sapiens
agaacttcatagcat

SEQ ID NO: 257905 - DNA, 15 bp, Homo sapiens
tagaacttcatagca

SEQ ID NO: 257906 - DNA, 15 bp, Homo sapiens
ctagaacttcatagc

SEQ ID NO: 257907 - DNA, 15 bp, Homo sapiens
actagaacttcatag

SEQ ID NO: 257908 - DNA, 15 bp, Homo sapiens
aactagaacttcata

SEQ ID NO: 257909 - DNA, 15 bp, Homo sapiens
taactagaacttcat

SEQ ID NO: 257910 - DNA, 15 bp, Homo sapiens
ataactagaacttca

SEQ ID NO: 257911 - DNA, 15 bp, Homo sapiens
aataactagaacttc

SEQ ID NO: 257912 - DNA, 15 bp, Homo sapiens
taataactagaactt

SEQ ID NO: 257913 - DNA, 15 bp, Homo sapiens
ataataactagaact

SEQ ID NO: 257914 - DNA, 15 bp, Homo sapiens
aataataactagaac

SEQ ID NO: 257915 - DNA, 15 bp, Homo sapiens
aaataataactagaa

SEQ ID NO: 257916 - DNA, 15 bp, Homo sapiens
aaaataataactaga

SEQ ID NO: 257917 - DNA, 15 bp, Homo sapiens
caaaataataactag

SEQ ID NO: 257918 - DNA, 15 bp, Homo sapiens
tcaaaataataacta

SEQ ID NO: 257919 - DNA, 15 bp, Homo sapiens
ctcaaaataataact

SEQ ID NO: 257920 - DNA, 15 bp, Homo sapiens
gctcaaaataataac

SEQ ID NO: 257921 - DNA, 15 bp, Homo sapiens
ggctcaaaataataa

SEQ ID NO: 257922 - DNA, 15 bp, Homo sapiens
gggctcaaaataata

SEQ ID NO: 257923 - DNA, 15 bp, Homo sapiens
tgggctcaaaataat

SEQ ID NO: 257924 - DNA, 15 bp, Homo sapiens
ctgggctcaaaataa

SEQ ID NO: 257925 - DNA, 15 bp, Homo sapiens
tctgggctcaaaata

SEQ ID NO: 257926 - DNA, 15 bp, Homo sapiens
ttctgggctcaaaat

SEQ ID NO: 257927 - DNA, 15 bp, Homo sapiens
attctgggctcaaaa

SEQ ID NO: 257928 - DNA, 15 bp, Homo sapiens
cattctgggctcaaa

SEQ ID NO: 257929 - DNA, 15 bp, Homo sapiens
tcattctgggctcaa

SEQ ID NO: 257930 - DNA, 15 bp, Homo sapiens
ctcattctgggctca

SEQ ID NO: 257931 - DNA, 15 bp, Homo sapiens
actcattctgggctc

SEQ ID NO: 257932 - DNA, 15 bp, Homo sapiens
aactcattctgggct

SEQ ID NO: 257933 - DNA, 15 bp, Homo sapiens
caactcattctgggc

SEQ ID NO: 257934 - DNA, 15 bp, Homo sapiens
tcaactcattctggg

SEQ ID NO: 257935 - DNA, 15 bp, Homo sapiens
ctcaactcattctgg

SEQ ID NO: 257936 - DNA, 15 bp, Homo sapiens
cctcaactcattctg

SEQ ID NO: 257937 - DNA, 15 bp, Homo sapiens
gcctcaactcattct

SEQ ID NO: 257938 - DNA, 15 bp, Homo sapiens
ggcctcaactcattc

SEQ ID NO: 257939 - DNA, 15 bp, Homo sapiens
aggcctcaactcatt

SEQ ID NO: 257940 - DNA, 15 bp, Homo sapiens
taggcctcaactcat

SEQ ID NO: 257941 - DNA, 15 bp, Homo sapiens
ttaggcctcaactca

SEQ ID NO: 257942 - DNA, 15 bp, Homo sapiens
tttaggcctcaactc

SEQ ID NO: 257943 - DNA, 15 bp, Homo sapiens
ttttaggcctcaact

SEQ ID NO: 257944 - DNA, 15 bp, Homo sapiens
tttttaggcctcaac

SEQ ID NO: 257945 - DNA, 15 bp, Homo sapiens
atttttaggcctcaa

SEQ ID NO: 257946 - DNA, 15 bp, Homo sapiens
catttttaggcctca

SEQ ID NO: 257947 - DNA, 15 bp, Homo sapiens
acatttttaggcctc

SEQ ID NO: 257948 - DNA, 15 bp, Homo sapiens
aacatttttaggcct

SEQ ID NO: 257949 - DNA, 15 bp, Homo sapiens
caacatttttaggcc

SEQ ID NO: 257950 - DNA, 15 bp, Homo sapiens
gcaacatttttaggc

SEQ ID NO: 257951 - DNA, 15 bp, Homo sapiens
ggcaacatttttagg

SEQ ID NO: 257952 - DNA, 15 bp, Homo sapiens
tggcaacatttttag

SEQ ID NO: 257953 - DNA, 15 bp, Homo sapiens
atggcaacattttta

SEQ ID NO: 257954 - DNA, 15 bp, Homo sapiens
aatggcaacattttt

SEQ ID NO: 257955 - DNA, 15 bp, Homo sapiens
gaatggcaacatttt

SEQ ID NO: 257956 - DNA, 15 bp, Homo sapiens
ggaatggcaacattt

SEQ ID NO: 257957 - DNA, 15 bp, Homo sapiens
tggaatggcaacatt

SEQ ID NO: 257958 - DNA, 15 bp, Homo sapiens
atggaatggcaacat

SEQ ID NO: 257959 - DNA, 15 bp, Homo sapiens
aatggaatggcaaca

SEQ ID NO: 257960 - DNA, 15 bp, Homo sapiens
taatggaatggcaac

SEQ ID NO: 257961 - DNA, 15 bp, Homo sapiens
ttaatggaatggcaa

SEQ ID NO: 257962 - DNA, 15 bp, Homo sapiens
tttaatggaatggca

SEQ ID NO: 257963 - DNA, 15 bp, Homo sapiens
ttttaatggaatggc

SEQ ID NO: 257964 - DNA, 15 bp, Homo sapiens
attttaatggaatgg

SEQ ID NO: 257965 - DNA, 15 bp, Homo sapiens
cattttaatggaatg

SEQ ID NO: 257966 - DNA, 15 bp, Homo sapiens
acattttaatggaat

SEQ ID NO: 257967 - DNA, 15 bp, Homo sapiens
cacattttaatggaa

SEQ ID NO: 257968 - DNA, 15 bp, Homo sapiens
acacattttaatgga

SEQ ID NO: 257969 - DNA, 15 bp, Homo sapiens
aacacattttaatgg

SEQ ID NO: 257970 - DNA, 15 bp, Homo sapiens
taacacattttaatg

SEQ ID NO: 257971 - DNA, 15 bp, Homo sapiens
ctaacacattttaat

SEQ ID NO: 257972 - DNA, 15 bp, Homo sapiens
actaacacattttaa

SEQ ID NO: 257973 - DNA, 15 bp, Homo sapiens
aactaacacatttta

SEQ ID NO: 257974 - DNA, 15 bp, Homo sapiens
aaactaacacatttt

SEQ ID NO: 257975 - DNA, 15 bp, Homo sapiens
caaactaacacattt

SEQ ID NO: 257976 - DNA, 15 bp, Homo sapiens
tcaaactaacacatt

SEQ ID NO: 257977 - DNA, 15 bp, Homo sapiens
ttcaaactaacacat

SEQ ID NO: 257978 - DNA, 15 bp, Homo sapiens
attcaaactaacaca

SEQ ID NO: 257979 - DNA, 15 bp, Homo sapiens
aattcaaactaacac

SEQ ID NO: 257980 - DNA, 15 bp, Homo sapiens
aaattcaaactaaca

SEQ ID NO: 257981 - DNA, 15 bp, Homo sapiens
taaattcaaactaac

SEQ ID NO: 257982 - DNA, 15 bp, Homo sapiens
ctaaattcaaactaa

SEQ ID NO: 257983 - DNA, 15 bp, Homo sapiens
cctaaattcaaacta

SEQ ID NO: 257984 - DNA, 15 bp, Homo sapiens
gcctaaattcaaact

SEQ ID NO: 257985 - DNA, 15 bp, Homo sapiens
tgcctaaattcaaac

SEQ ID NO: 257986 - DNA, 15 bp, Homo sapiens
gtgcctaaattcaaa

SEQ ID NO: 257987 - DNA, 15 bp, Homo sapiens
tgtgcctaaattcaa

SEQ ID NO: 257988 - DNA, 15 bp, Homo sapiens
ttgtgcctaaattca

SEQ ID NO: 257989 - DNA, 15 bp, Homo sapiens
tttgtgcctaaattc

SEQ ID NO: 257990 - DNA, 15 bp, Homo sapiens
atttgtgcctaaatt

SEQ ID NO: 257991 - DNA, 15 bp, Homo sapiens
catttgtgcctaaat

SEQ ID NO: 257992 - DNA, 15 bp, Homo sapiens
acatttgtgcctaaa

SEQ ID NO: 257993 - DNA, 15 bp, Homo sapiens
aacatttgtgcctaa

SEQ ID NO: 257994 - DNA, 15 bp, Homo sapiens
taacatttgtgccta

SEQ ID NO: 257995 - DNA, 15 bp, Homo sapiens
ataacatttgtgcct

SEQ ID NO: 257996 - DNA, 15 bp, Homo sapiens
aataacatttgtgcc

SEQ ID NO: 257997 - DNA, 15 bp, Homo sapiens
aaataacatttgtgc

SEQ ID NO: 257998 - DNA, 15 bp, Homo sapiens
aaaataacatttgtg

SEQ ID NO: 257999 - DNA, 15 bp, Homo sapiens
aaaaataacatttgt

SEQ ID NO: 258000 - DNA, 15 bp, Homo sapiens
caaaaataacatttg

SEQ ID NO: 258001 - DNA, 15 bp, Homo sapiens
tcaaaaataacattt

SEQ ID NO: 258002 - DNA, 15 bp, Homo sapiens
ttcaaaaataacatt

SEQ ID NO: 258003 - DNA, 15 bp, Homo sapiens
attcaaaaataacat

SEQ ID NO: 258004 - DNA, 15 bp, Homo sapiens
aattcaaaaataaca

SEQ ID NO: 258005 - DNA, 15 bp, Homo sapiens
taattcaaaaataac

SEQ ID NO: 258006 - DNA, 15 bp, Homo sapiens
ataattcaaaaataa

SEQ ID NO: 258007 - DNA, 15 bp, Homo sapiens
tataattcaaaaata

SEQ ID NO: 258008 - DNA, 15 bp, Homo sapiens
ttataattcaaaaat

SEQ ID NO: 258009 - DNA, 15 bp, Homo sapiens
cttataattcaaaaa

SEQ ID NO: 258010 - DNA, 15 bp, Homo sapiens
gcttataattcaaaa

SEQ ID NO: 258011 - DNA, 15 bp, Homo sapiens
tgcttataattcaaa

SEQ ID NO: 258012 - DNA, 15 bp, Homo sapiens
atgcttataattcaa

SEQ ID NO: 258013 - DNA, 15 bp, Homo sapiens
catgcttataattca

SEQ ID NO: 258014 - DNA, 15 bp, Homo sapiens
gcatgcttataattc

SEQ ID NO: 258015 - DNA, 15 bp, Homo sapiens
cgcatgcttataatt

SEQ ID NO: 258016 - DNA, 15 bp, Homo sapiens
tcgcatgcttataat

SEQ ID NO: 258017 - DNA, 15 bp, Homo sapiens
gtcgcatgcttataa

SEQ ID NO: 258018 - DNA, 15 bp, Homo sapiens
agtcgcatgcttata

SEQ ID NO: 258019 - DNA, 15 bp, Homo sapiens
gagtcgcatgcttat

SEQ ID NO: 258020 - DNA, 15 bp, Homo sapiens
cgagtcgcatgctta

SEQ ID NO: 258021 - DNA, 15 bp, Homo sapiens
acgagtcgcatgctt

SEQ ID NO: 258022 - DNA, 15 bp, Homo sapiens
aacgagtcgcatgct

SEQ ID NO: 258023 - DNA, 15 bp, Homo sapiens
aaacgagtcgcatgc

SEQ ID NO: 258024 - DNA, 15 bp, Homo sapiens
taaacgagtcgcatg

SEQ ID NO: 258025 - DNA, 15 bp, Homo sapiens
ataaacgagtcgcat

SEQ ID NO: 258026 - DNA, 15 bp, Homo sapiens
tataaacgagtcgca

SEQ ID NO: 258027 - DNA, 15 bp, Homo sapiens
ctataaacgagtcgc

SEQ ID NO: 258028 - DNA, 15 bp, Homo sapiens
actataaacgagtcg

SEQ ID NO: 258029 - DNA, 15 bp, Homo sapiens
tactataaacgagtc

SEQ ID NO: 258030 - DNA, 15 bp, Homo sapiens
ttactataaacgagt

SEQ ID NO: 258031 - DNA, 15 bp, Homo sapiens
attactataaacgag

SEQ ID NO: 258032 - DNA, 15 bp, Homo sapiens
cattactataaacga

SEQ ID NO: 258033 - DNA, 15 bp, Homo sapiens
acattactataaacg

SEQ ID NO: 258034 - DNA, 15 bp, Homo sapiens
tacattactataaac

SEQ ID NO: 258035 - DNA, 15 bp, Homo sapiens
ctacattactataaa

SEQ ID NO: 258036 - DNA, 15 bp, Homo sapiens
gctacattactataa

SEQ ID NO: 258037 - DNA, 15 bp, Homo sapiens
agctacattactata

SEQ ID NO: 258038 - DNA, 15 bp, Homo sapiens
aagctacattactat

SEQ ID NO: 258039 - DNA, 15 bp, Homo sapiens
aaagctacattacta

SEQ ID NO: 258040 - DNA, 15 bp, Homo sapiens
caaagctacattact

SEQ ID NO: 258041 - DNA, 15 bp, Homo sapiens
tcaaagctacattac

SEQ ID NO: 258042 - DNA, 15 bp, Homo sapiens
ctcaaagctacatta

SEQ ID NO: 258043 - DNA, 15 bp, Homo sapiens
tctcaaagctacatt

SEQ ID NO: 258044 - DNA, 15 bp, Homo sapiens
ctctcaaagctacat

SEQ ID NO: 258045 - DNA, 15 bp, Homo sapiens
cctctcaaagctaca

SEQ ID NO: 258046 - DNA, 15 bp, Homo sapiens
tcctctcaaagctac

SEQ ID NO: 258047 - DNA, 15 bp, Homo sapiens
gtcctctcaaagcta

SEQ ID NO: 258048 - DNA, 15 bp, Homo sapiens
agtcctctcaaagct

SEQ ID NO: 258049 - DNA, 15 bp, Homo sapiens
aagtcctctcaaagc

SEQ ID NO: 258050 - DNA, 15 bp, Homo sapiens
aaagtcctctcaaag

SEQ ID NO: 258051 - DNA, 15 bp, Homo sapiens
caaagtcctctcaaa

SEQ ID NO: 258052 - DNA, 15 bp, Homo sapiens
ccaaagtcctctcaa

SEQ ID NO: 258053 - DNA, 15 bp, Homo sapiens
cccaaagtcctctca

SEQ ID NO: 258054 - DNA, 15 bp, Homo sapiens
acccaaagtcctctc

SEQ ID NO: 258055 - DNA, 15 bp, Homo sapiens
aacccaaagtcctct

SEQ ID NO: 258056 - DNA, 15 bp, Homo sapiens
taacccaaagtcctc

SEQ ID NO: 258057 - DNA, 15 bp, Homo sapiens
ataacccaaagtcct

SEQ ID NO: 258058 - DNA, 15 bp, Homo sapiens
aataacccaaagtcc

SEQ ID NO: 258059 - DNA, 15 bp, Homo sapiens
aaataacccaaagtc

SEQ ID NO: 258060 - DNA, 15 bp, Homo sapiens
caaataacccaaagt

SEQ ID NO: 258061 - DNA, 15 bp, Homo sapiens
gcaaataacccaaag

SEQ ID NO: 258062 - DNA, 15 bp, Homo sapiens
ggcaaataacccaaa

SEQ ID NO: 258063 - DNA, 15 bp, Homo sapiens
tggcaaataacccaa

SEQ ID NO: 258064 - DNA, 15 bp, Homo sapiens
ctggcaaataaccca

SEQ ID NO: 258065 - DNA, 15 bp, Homo sapiens
cctggcaaataaccc

SEQ ID NO: 258066 - DNA, 15 bp, Homo sapiens
gcctggcaaataacc

SEQ ID NO: 258067 - DNA, 15 bp, Homo sapiens
ggcctggcaaataac

SEQ ID NO: 258068 - DNA, 15 bp, Homo sapiens
tggcctggcaaataa

SEQ ID NO: 258069 - DNA, 15 bp, Homo sapiens
atggcctggcaaata

SEQ ID NO: 258070 - DNA, 15 bp, Homo sapiens
aatggcctggcaaat

SEQ ID NO: 258071 - DNA, 15 bp, Homo sapiens
gaatggcctggcaaa

SEQ ID NO: 258072 - DNA, 15 bp, Homo sapiens
agaatggcctggcaa

SEQ ID NO: 258073 - DNA, 15 bp, Homo sapiens
aagaatggcctggca

SEQ ID NO: 258074 - DNA, 15 bp, Homo sapiens
aaagaatggcctggc

SEQ ID NO: 258075 - DNA, 15 bp, Homo sapiens
aaaagaatggcctgg

SEQ ID NO: 258076 - DNA, 15 bp, Homo sapiens
aaaaagaatggcctg

SEQ ID NO: 258077 - DNA, 15 bp, Homo sapiens
gaaaaagaatggcct

SEQ ID NO: 258078 - DNA, 15 bp, Homo sapiens
ggaaaaagaatggcc

SEQ ID NO: 258079 - DNA, 15 bp, Homo sapiens
aggaaaaagaatggc

SEQ ID NO: 258080 - DNA, 15 bp, Homo sapiens
aaggaaaaagaatgg

SEQ ID NO: 258081 - DNA, 15 bp, Homo sapiens
aaaggaaaaagaatg

SEQ ID NO: 258082 - DNA, 15 bp, Homo sapiens
aaaaggaaaaagaat

SEQ ID NO: 258083 - DNA, 15 bp, Homo sapiens
gaaaaggaaaaagaa

SEQ ID NO: 258084 - DNA, 15 bp, Homo sapiens
agaaaaggaaaaaga

SEQ ID NO: 258085 - DNA, 15 bp, Homo sapiens
aagaaaaggaaaaag

SEQ ID NO: 258086 - DNA, 15 bp, Homo sapiens
aaagaaaaggaaaaa

SEQ ID NO: 258087 - DNA, 15 bp, Homo sapiens
aaaagaaaaggaaaa

SEQ ID NO: 258088 - DNA, 15 bp, Homo sapiens
gaaaagaaaaggaaa

SEQ ID NO: 258089 - DNA, 15 bp, Homo sapiens
agaaaagaaaaggaa

SEQ ID NO: 258090 - DNA, 15 bp, Homo sapiens
aagaaaagaaaagga

SEQ ID NO: 258091 - DNA, 15 bp, Homo sapiens
aaagaaaagaaaagg

SEQ ID NO: 258092 - DNA, 15 bp, Homo sapiens
gaaaagaaaagaaaa

SEQ ID NO: 258093 - DNA, 15 bp, Homo sapiens
aaagagaagaaaaga

SEQ ID NO: 258094 - DNA, 15 bp, Homo sapiens
aaaagagaagaaaag

SEQ ID NO: 258095 - DNA, 15 bp, Homo sapiens
gaaaagagaagaaaa

SEQ ID NO: 258096 - DNA, 15 bp, Homo sapiens
agaaaagagaagaaa

SEQ ID NO: 258097 - DNA, 15 bp, Homo sapiens
aagaaaagagaagaa

SEQ ID NO: 258098 - DNA, 15 bp, Homo sapiens
gaaagagaagaaaag

SEQ ID NO: 258099 - DNA, 15 bp, Homo sapiens
agaaagagaagaaaa

SEQ ID NO: 258100 - DNA, 15 bp, Homo sapiens
aagaaagagaagaaa

SEQ ID NO: 258101 - DNA, 15 bp, Homo sapiens
aaagaaagagaagaa

SEQ ID NO: 258102 - DNA, 15 bp, Homo sapiens
aaaagaaagagaaga

SEQ ID NO: 258103 - DNA, 15 bp, Homo sapiens
gaaaagaaagagaag

SEQ ID NO: 258104 - DNA, 15 bp, Homo sapiens
agaaaagaaagagaa

SEQ ID NO: 258105 - DNA, 15 bp, Homo sapiens
aagaaaagaaagaga

SEQ ID NO: 258106 - DNA, 15 bp, Homo sapiens
aaagaaaagaaagag

SEQ ID NO: 258107 - DNA, 15 bp, Homo sapiens
gaaagaaagaaagaa

SEQ ID NO: 258108 - DNA, 15 bp, Homo sapiens
agaaagaaagaaaga

SEQ ID NO: 258109 - DNA, 15 bp, Homo sapiens
aagaaagaaagaaag

SEQ ID NO: 258110 - DNA, 15 bp, Homo sapiens
gagaaagaaagaaag

SEQ ID NO: 258111 - DNA, 15 bp, Homo sapiens
agagaaagaaagaaa

SEQ ID NO: 258112 - DNA, 15 bp, Homo sapiens
gagagaaagaaagaa

SEQ ID NO: 258113 - DNA, 15 bp, Homo sapiens
agagagaaagaaaga

SEQ ID NO: 258114 - DNA, 15 bp, Homo sapiens
aagagagaaagaaag

SEQ ID NO: 258115 - DNA, 15 bp, Homo sapiens
aaagagagaaagaaa

SEQ ID NO: 258116 - DNA, 15 bp, Homo sapiens
gaaagagagaaagaa

SEQ ID NO: 258117 - DNA, 15 bp, Homo sapiens
agaaagagagaaaga

SEQ ID NO: 258118 - DNA, 15 bp, Homo sapiens
aagaaagagagaaag

SEQ ID NO: 258119 - DNA, 15 bp, Homo sapiens
aaagaaagagagaaa

SEQ ID NO: 258120 - DNA, 15 bp, Homo sapiens
gaaagaaagagagaa

SEQ ID NO: 258121 - DNA, 15 bp, Homo sapiens
aagaaagaaagagag

SEQ ID NO: 258122 - DNA, 15 bp, Homo sapiens
gaaaaaagaaagaaa

SEQ ID NO: 258123 - DNA, 15 bp, Homo sapiens
agaaaaaagaaagaa

SEQ ID NO: 258124 - DNA, 15 bp, Homo sapiens
aagaaaaaagaaaga

SEQ ID NO: 258125 - DNA, 15 bp, Homo sapiens
aaaaagaaaaaagaa

SEQ ID NO: 258126 - DNA, 15 bp, Homo sapiens
aaaaaagaaaaaaga

SEQ ID NO: 258127 - DNA, 15 bp, Homo sapiens
aaaaaaagaaaaaag

SEQ ID NO: 258128 - DNA, 15 bp, Homo sapiens
accaaaaaaaaaaaa

SEQ ID NO: 258129 - DNA, 15 bp, Homo sapiens
taccaaaaaaaaaaa

SEQ ID NO: 258130 - DNA, 15 bp, Homo sapiens
ctaccaaaaaaaaaa

SEQ ID NO: 258131 - DNA, 15 bp, Homo sapiens
tctaccaaaaaaaaa

SEQ ID NO: 258132 - DNA, 15 bp, Homo sapiens
gtctaccaaaaaaaa

SEQ ID NO: 258133 - DNA, 15 bp, Homo sapiens
tgtctaccaaaaaaa

SEQ ID NO: 258134 - DNA, 15 bp, Homo sapiens
atgtctaccaaaaaa

SEQ ID NO: 258135 - DNA, 15 bp, Homo sapiens
catgtctaccaaaaa

SEQ ID NO: 258136 - DNA, 15 bp, Homo sapiens
ccatgtctaccaaaa

SEQ ID NO: 258137 - DNA, 15 bp, Homo sapiens
cccatgtctaccaaa

SEQ ID NO: 258138 - DNA, 15 bp, Homo sapiens
acccatgtctaccaa

SEQ ID NO: 258139 - DNA, 15 bp, Homo sapiens
gacccatgtctacca

SEQ ID NO: 258140 - DNA, 15 bp, Homo sapiens
agacccatgtctacc

SEQ ID NO: 258141 - DNA, 15 bp, Homo sapiens
gagacccatgtctac

SEQ ID NO: 258142 - DNA, 15 bp, Homo sapiens
agagacccatgtcta

SEQ ID NO: 258143 - DNA, 15 bp, Homo sapiens
gagagacccatgtct

SEQ ID NO: 258144 - DNA, 15 bp, Homo sapiens
agagagacccatgtc

SEQ ID NO: 258145 - DNA, 15 bp, Homo sapiens
tagagagacccatgt

SEQ ID NO: 258146 - DNA, 15 bp, Homo sapiens
atagagagacccatg

SEQ ID NO: 258147 - DNA, 15 bp, Homo sapiens
catagagagacccat

SEQ ID NO: 258148 - DNA, 15 bp, Homo sapiens
acatagagagaccca

SEQ ID NO: 258149 - DNA, 15 bp, Homo sapiens
aacatagagagaccc

SEQ ID NO: 258150 - DNA, 15 bp, Homo sapiens
caacatagagagacc

SEQ ID NO: 258151 - DNA, 15 bp, Homo sapiens
gcaacatagagagac

SEQ ID NO: 258152 - DNA, 15 bp, Homo sapiens
tgcaacatagagaga

SEQ ID NO: 258153 - DNA, 15 bp, Homo sapiens
gtgcaacatagagag

SEQ ID NO: 258154 - DNA, 15 bp, Homo sapiens
tgtgcaacatagaga

SEQ ID NO: 258155 - DNA, 15 bp, Homo sapiens
ctgtgcaacatagag

SEQ ID NO: 258156 - DNA, 15 bp, Homo sapiens
cctgtgcaacataga

SEQ ID NO: 258157 - DNA, 15 bp, Homo sapiens
gcctgtgcaacatag

SEQ ID NO: 258158 - DNA, 15 bp, Homo sapiens
agcctgtgcaacata

SEQ ID NO: 258159 - DNA, 15 bp, Homo sapiens
cagcctgtgcaacat

SEQ ID NO: 258160 - DNA, 15 bp, Homo sapiens
ccagcctgtgcaaca

SEQ ID NO: 258161 - DNA, 15 bp, Homo sapiens
accagcctgtgcaac

SEQ ID NO: 258162 - DNA, 15 bp, Homo sapiens
gaccagcctgtgcaa

SEQ ID NO: 258163 - DNA, 15 bp, Homo sapiens
agaccagcctgtgca

SEQ ID NO: 258164 - DNA, 15 bp, Homo sapiens
gagaccagcctgtgc

SEQ ID NO: 258165 - DNA, 15 bp, Homo sapiens
tgagaccagcctgtg

SEQ ID NO: 258166 - DNA, 15 bp, Homo sapiens
ttgagaccagcctgt

SEQ ID NO: 258167 - DNA, 15 bp, Homo sapiens
attgaacccaggagt

SEQ ID NO: 258168 - DNA, 15 bp, Homo sapiens
gattgaacccaggag

SEQ ID NO: 258169 - DNA, 15 bp, Homo sapiens
ggattgaacccagga

SEQ ID NO: 258170 - DNA, 15 bp, Homo sapiens
aggattgaacccagg

SEQ ID NO: 258171 - DNA, 15 bp, Homo sapiens
gaggattgaacccag

SEQ ID NO: 258172 - DNA, 15 bp, Homo sapiens
ggaggattgaaccca

SEQ ID NO: 258173 - DNA, 15 bp, Homo sapiens
gggaggattgaaccc

SEQ ID NO: 258174 - DNA, 15 bp, Homo sapiens
tgggaggattgaacc

SEQ ID NO: 258175 - DNA, 15 bp, Homo sapiens
ttgggaggattgaac

SEQ ID NO: 258176 - DNA, 15 bp, Homo sapiens
tttgggaggattgaa

SEQ ID NO: 258177 - DNA, 15 bp, Homo sapiens
ctttgggaggattga

SEQ ID NO: 258178 - DNA, 15 bp, Homo sapiens
actttgggaggattg

SEQ ID NO: 258179 - DNA, 15 bp, Homo sapiens
tactttgggaggatt

SEQ ID NO: 258180 - DNA, 15 bp, Homo sapiens
gtactttgggaggat

SEQ ID NO: 258181 - DNA, 15 bp, Homo sapiens
agtactttgggagga

SEQ ID NO: 258182 - DNA, 15 bp, Homo sapiens
tccagtactttggga

SEQ ID NO: 258183 - DNA, 15 bp, Homo sapiens
gtccagtactttggg

SEQ ID NO: 258184 - DNA, 15 bp, Homo sapiens
agtccagtactttgg

SEQ ID NO: 258185 - DNA, 15 bp, Homo sapiens
aagtccagtactttg

SEQ ID NO: 258186 - DNA, 15 bp, Homo sapiens
taagtccagtacttt

SEQ ID NO: 258187 - DNA, 15 bp, Homo sapiens
gtaagtccagtactt

SEQ ID NO: 258188 - DNA, 15 bp, Homo sapiens
tgtaagtccagtact

SEQ ID NO: 258189 - DNA, 15 bp, Homo sapiens
ctgtaagtccagtac

SEQ ID NO: 258190 - DNA, 15 bp, Homo sapiens
cctgtaagtccagta

SEQ ID NO: 258191 - DNA, 15 bp, Homo sapiens
gcctgtaagtccagt

SEQ ID NO: 258192 - DNA, 15 bp, Homo sapiens
tgcctgtaagtccag

SEQ ID NO: 258193 - DNA, 15 bp, Homo sapiens
atgcctgtaagtcca

SEQ ID NO: 258194 - DNA, 15 bp, Homo sapiens
catgcctgtaagtcc

SEQ ID NO: 258195 - DNA, 15 bp, Homo sapiens
acatgcctgtaagtc

SEQ ID NO: 258196 - DNA, 15 bp, Homo sapiens
cacatgcctgtaagt

SEQ ID NO: 258197 - DNA, 15 bp, Homo sapiens
gcacatgcctgtaag

SEQ ID NO: 258198 - DNA, 15 bp, Homo sapiens
ctggcacatgcctgt

SEQ ID NO: 258199 - DNA, 15 bp, Homo sapiens
cctggcacatgcctg

SEQ ID NO: 258200 - DNA, 15 bp, Homo sapiens
gcctggcacatgcct

SEQ ID NO: 258201 - DNA, 15 bp, Homo sapiens
ggcctggcacatgcc

SEQ ID NO: 258202 - DNA, 15 bp, Homo sapiens
tggcctggcacatgc

SEQ ID NO: 258203 - DNA, 15 bp, Homo sapiens
atggcctggcacatg

SEQ ID NO: 258204 - DNA, 15 bp, Homo sapiens
aatggcctggcacat

SEQ ID NO: 258205 - DNA, 15 bp, Homo sapiens
gaatggcctggcaca

SEQ ID NO: 258206 - DNA, 15 bp, Homo sapiens
agaatggcctggcac

SEQ ID NO: 258207 - DNA, 15 bp, Homo sapiens
caagaatggcctggc

SEQ ID NO: 258208 - DNA, 15 bp, Homo sapiens
tcaagaatggcctgg

SEQ ID NO: 258209 - DNA, 15 bp, Homo sapiens
atcaagaatggcctg

SEQ ID NO: 258210 - DNA, 15 bp, Homo sapiens
tatcaagaatggcct

SEQ ID NO: 258211 - DNA, 15 bp, Homo sapiens
atatcaagaatggcc

SEQ ID NO: 258212 - DNA, 15 bp, Homo sapiens
tatatcaagaatggc

SEQ ID NO: 258213 - DNA, 15 bp, Homo sapiens
ttatatcaagaatgg

SEQ ID NO: 258214 - DNA, 15 bp, Homo sapiens
cttatatcaagaatg

SEQ ID NO: 258215 - DNA, 15 bp, Homo sapiens
gcttatatcaagaat

SEQ ID NO: 258216 - DNA, 15 bp, Homo sapiens
agcttatatcaagaa

SEQ ID NO: 258217 - DNA, 15 bp, Homo sapiens
cagcttatatcaaga

SEQ ID NO: 258218 - DNA, 15 bp, Homo sapiens
acagcttatatcaag

SEQ ID NO: 258219 - DNA, 15 bp, Homo sapiens
aacagcttatatcaa

SEQ ID NO: 258220 - DNA, 15 bp, Homo sapiens
aaacagcttatatca

SEQ ID NO: 258221 - DNA, 15 bp, Homo sapiens
gaaacagcttatatc

SEQ ID NO: 258222 - DNA, 15 bp, Homo sapiens
agaaacagcttatat

SEQ ID NO: 258223 - DNA, 15 bp, Homo sapiens
gagaaacagcttata

SEQ ID NO: 258224 - DNA, 15 bp, Homo sapiens
tgagaaacagcttat

SEQ ID NO: 258225 - DNA, 15 bp, Homo sapiens
gtgagaaacagctta

SEQ ID NO: 258226 - DNA, 15 bp, Homo sapiens
ggtgagaaacagctt

SEQ ID NO: 258227 - DNA, 15 bp, Homo sapiens
gggtgagaaacagct

SEQ ID NO: 258228 - DNA, 15 bp, Homo sapiens
tgggtgagaaacagc

SEQ ID NO: 258229 - DNA, 15 bp, Homo sapiens
atgggtgagaaacag

SEQ ID NO: 258230 - DNA, 15 bp, Homo sapiens
aatgggtgagaaaca

SEQ ID NO: 258231 - DNA, 15 bp, Homo sapiens
aaatgggtgagaaac

SEQ ID NO: 258232 - DNA, 15 bp, Homo sapiens
caaatgggtgagaaa

SEQ ID NO: 258233 - DNA, 15 bp, Homo sapiens
ccaaatgggtgagaa

SEQ ID NO: 258234 - DNA, 15 bp, Homo sapiens
accaaatgggtgaga

SEQ ID NO: 258235 - DNA, 15 bp, Homo sapiens
gaccaaatgggtgag

SEQ ID NO: 258236 - DNA, 15 bp, Homo sapiens
ggaccaaatgggtga

SEQ ID NO: 258237 - DNA, 15 bp, Homo sapiens
tggaccaaatgggtg

SEQ ID NO: 258238 - DNA, 15 bp, Homo sapiens
ttggaccaaatgggt

SEQ ID NO: 258239 - DNA, 15 bp, Homo sapiens
tttggaccaaatggg

SEQ ID NO: 258240 - DNA, 15 bp, Homo sapiens
ttttggaccaaatgg

SEQ ID NO: 258241 - DNA, 15 bp, Homo sapiens
tttttggaccaaatg

SEQ ID NO: 258242 - DNA, 15 bp, Homo sapiens
atttttggaccaaat

SEQ ID NO: 258243 - DNA, 15 bp, Homo sapiens
tatttttggaccaaa

SEQ ID NO: 258244 - DNA, 15 bp, Homo sapiens
ctatttttggaccaa

SEQ ID NO: 258245 - DNA, 15 bp, Homo sapiens
tctatttttggacca

SEQ ID NO: 258246 - DNA, 15 bp, Homo sapiens
ctctatttttggacc

SEQ ID NO: 258247 - DNA, 15 bp, Homo sapiens
cctctatttttggac

SEQ ID NO: 258248 - DNA, 15 bp, Homo sapiens
tcctctatttttgga

SEQ ID NO: 258249 - DNA, 15 bp, Homo sapiens
ctcctctatttttgg

SEQ ID NO: 258250 - DNA, 15 bp, Homo sapiens
tctcctctatttttg

SEQ ID NO: 258251 - DNA, 15 bp, Homo sapiens
gtctcctctattttt

SEQ ID NO: 258252 - DNA, 15 bp, Homo sapiens
tgtctcctctatttt

SEQ ID NO: 258253 - DNA, 15 bp, Homo sapiens
ttgtctcctctattt

SEQ ID NO: 258254 - DNA, 15 bp, Homo sapiens
attgtctcctctatt

SEQ ID NO: 258255 - DNA, 15 bp, Homo sapiens
tattgtctcctctat

SEQ ID NO: 258256 - DNA, 15 bp, Homo sapiens
ctattgtctcctcta

SEQ ID NO: 258257 - DNA, 15 bp, Homo sapiens
cctattgtctcctct

SEQ ID NO: 258258 - DNA, 15 bp, Homo sapiens
gcctattgtctcctc

SEQ ID NO: 258259 - DNA, 15 bp, Homo sapiens
ggcctattgtctcct

SEQ ID NO: 258260 - DNA, 15 bp, Homo sapiens
gggcctattgtctcc

SEQ ID NO: 258261 - DNA, 15 bp, Homo sapiens
agggcctattgtctc

SEQ ID NO: 258262 - DNA, 15 bp, Homo sapiens
gagggcctattgtct

SEQ ID NO: 258263 - DNA, 15 bp, Homo sapiens
agagggcctattgtc

SEQ ID NO: 258264 - DNA, 15 bp, Homo sapiens
cagagggcctattgt

SEQ ID NO: 258265 - DNA, 15 bp, Homo sapiens
acagagggcctattg

SEQ ID NO: 258266 - DNA, 15 bp, Homo sapiens
gacagagggcctatt

SEQ ID NO: 258267 - DNA, 15 bp, Homo sapiens
ggacagagggcctat

SEQ ID NO: 258268 - DNA, 15 bp, Homo sapiens
tggacagagggccta

SEQ ID NO: 258269 - DNA, 15 bp, Homo sapiens
ctggacagagggcct

SEQ ID NO: 258270 - DNA, 15 bp, Homo sapiens
cctggacagagggcc

SEQ ID NO: 258271 - DNA, 15 bp, Homo sapiens
ccctggacagagggc

SEQ ID NO: 258272 - DNA, 15 bp, Homo sapiens
gccctggacagaggg

SEQ ID NO: 258273 - DNA, 15 bp, Homo sapiens
tgccctggacagagg

SEQ ID NO: 258274 - DNA, 15 bp, Homo sapiens
ttgccctggacagag

SEQ ID NO: 258275 - DNA, 15 bp, Homo sapiens
attgccctggacaga

SEQ ID NO: 258276 - DNA, 15 bp, Homo sapiens
gattgccctggacag

SEQ ID NO: 258277 - DNA, 15 bp, Homo sapiens
ggattgccctggaca

SEQ ID NO: 258278 - DNA, 15 bp, Homo sapiens
tggattgccctggac

SEQ ID NO: 258279 - DNA, 15 bp, Homo sapiens
ttggattgccctgga

SEQ ID NO: 258280 - DNA, 15 bp, Homo sapiens
cttggattgccctgg

SEQ ID NO: 258281 - DNA, 15 bp, Homo sapiens
ccttggattgccctg

SEQ ID NO: 258282 - DNA, 15 bp, Homo sapiens
accttggattgccct

SEQ ID NO: 258283 - DNA, 15 bp, Homo sapiens
taccttggattgccc

SEQ ID NO: 258284 - DNA, 15 bp, Homo sapiens
ataccttggattgcc

SEQ ID NO: 258285 - DNA, 15 bp, Homo sapiens
tataccttggattgc

SEQ ID NO: 258286 - DNA, 15 bp, Homo sapiens
ctataccttggattg

SEQ ID NO: 258287 - DNA, 15 bp, Homo sapiens
cctataccttggatt

SEQ ID NO: 258288 - DNA, 15 bp, Homo sapiens
tcctataccttggat

SEQ ID NO: 258289 - DNA, 15 bp, Homo sapiens
gtcctataccttgga

SEQ ID NO: 258290 - DNA, 15 bp, Homo sapiens
agtcctataccttgg

SEQ ID NO: 258291 - DNA, 15 bp, Homo sapiens
gagtcctataccttg

SEQ ID NO: 258292 - DNA, 15 bp, Homo sapiens
tgagtcctatacctt

SEQ ID NO: 258293 - DNA, 15 bp, Homo sapiens
gtgagtcctatacct

SEQ ID NO: 258294 - DNA, 15 bp, Homo sapiens
tgtgagtcctatacc

SEQ ID NO: 258295 - DNA, 15 bp, Homo sapiens
atgtgagtcctatac

SEQ ID NO: 258296 - DNA, 15 bp, Homo sapiens
gatgtgagtcctata

SEQ ID NO: 258297 - DNA, 15 bp, Homo sapiens
ggatgtgagtcctat

SEQ ID NO: 258298 - DNA, 15 bp, Homo sapiens
aggatgtgagtccta

SEQ ID NO: 258299 - DNA, 15 bp, Homo sapiens
caggatgtgagtcct

SEQ ID NO: 258300 - DNA, 15 bp, Homo sapiens
gcaggatgtgagtcc

SEQ ID NO: 258301 - DNA, 15 bp, Homo sapiens
agcaggatgtgagtc

SEQ ID NO: 258302 - DNA, 15 bp, Homo sapiens
gagcaggatgtgagt

SEQ ID NO: 258303 - DNA, 15 bp, Homo sapiens
agagcaggatgtgag

SEQ ID NO: 258304 - DNA, 15 bp, Homo sapiens
tagagcaggatgtga

SEQ ID NO: 258305 - DNA, 15 bp, Homo sapiens
atagagcaggatgtg

SEQ ID NO: 258306 - DNA, 15 bp, Homo sapiens
catagagcaggatgt

SEQ ID NO: 258307 - DNA, 15 bp, Homo sapiens
gcatagagcaggatg

SEQ ID NO: 258308 - DNA, 15 bp, Homo sapiens
ggcatagagcaggat

SEQ ID NO: 258309 - DNA, 15 bp, Homo sapiens
tggcatagagcagga

SEQ ID NO: 258310 - DNA, 15 bp, Homo sapiens
atggcatagagcagg

SEQ ID NO: 258311 - DNA, 15 bp, Homo sapiens
gatggcatagagcag

SEQ ID NO: 258312 - DNA, 15 bp, Homo sapiens
agatggcatagagca

SEQ ID NO: 258313 - DNA, 15 bp, Homo sapiens
tagatggcatagagc

SEQ ID NO: 258314 - DNA, 15 bp, Homo sapiens
atagatggcatagag

SEQ ID NO: 258315 - DNA, 15 bp, Homo sapiens
tatagatggcataga

SEQ ID NO: 258316 - DNA, 15 bp, Homo sapiens
gtatagatggcatag

SEQ ID NO: 258317 - DNA, 15 bp, Homo sapiens
ggtatagatggcata

SEQ ID NO: 258318 - DNA, 15 bp, Homo sapiens
tggtatagatggcat

SEQ ID NO: 258319 - DNA, 15 bp, Homo sapiens
atggtatagatggca

SEQ ID NO: 258320 - DNA, 15 bp, Homo sapiens
aatggtatagatggc

SEQ ID NO: 258321 - DNA, 15 bp, Homo sapiens
caatggtatagatgg

SEQ ID NO: 258322 - DNA, 15 bp, Homo sapiens
gcaatggtatagatg

SEQ ID NO: 258323 - DNA, 15 bp, Homo sapiens
agcaatggtatagat

SEQ ID NO: 258324 - DNA, 15 bp, Homo sapiens
tagcaatggtataga

SEQ ID NO: 258325 - DNA, 15 bp, Homo sapiens
atagcaatggtatag

SEQ ID NO: 258326 - DNA, 15 bp, Homo sapiens
aatagcaatggtata

SEQ ID NO: 258327 - DNA, 15 bp, Homo sapiens
aaatagcaatggtat

SEQ ID NO: 258328 - DNA, 15 bp, Homo sapiens
caaatagcaatggta

SEQ ID NO: 258329 - DNA, 15 bp, Homo sapiens
gcaaatagcaatggt

SEQ ID NO: 258330 - DNA, 15 bp, Homo sapiens
ggcaaatagcaatgg

SEQ ID NO: 258331 - DNA, 15 bp, Homo sapiens
aggcaaatagcaatg

SEQ ID NO: 258332 - DNA, 15 bp, Homo sapiens
aaggcaaatagcaat

SEQ ID NO: 258333 - DNA, 15 bp, Homo sapiens
gaaggcaaatagcaa

SEQ ID NO: 258334 - DNA, 15 bp, Homo sapiens
agaaggcaaatagca

SEQ ID NO: 258335 - DNA, 15 bp, Homo sapiens
gagaaggcaaatagc

SEQ ID NO: 258336 - DNA, 15 bp, Homo sapiens
cgagaaggcaaatag

SEQ ID NO: 258337 - DNA, 15 bp, Homo sapiens
tcgagaaggcaaata

SEQ ID NO: 258338 - DNA, 15 bp, Homo sapiens
ttcgagaaggcaaat

SEQ ID NO: 258339 - DNA, 15 bp, Homo sapiens
attcgagaaggcaaa

SEQ ID NO: 258340 - DNA, 15 bp, Homo sapiens
cattcgagaaggcaa

SEQ ID NO: 258341 - DNA, 15 bp, Homo sapiens
ccattcgagaaggca

SEQ ID NO: 258342 - DNA, 15 bp, Homo sapiens
cccattcgagaaggc

SEQ ID NO: 258343 - DNA, 15 bp, Homo sapiens
gcccattcgagaagg

SEQ ID NO: 258344 - DNA, 15 bp, Homo sapiens
agcccattcgagaag

SEQ ID NO: 258345 - DNA, 15 bp, Homo sapiens
cagcccattcgagaa

SEQ ID NO: 258346 - DNA, 15 bp, Homo sapiens
ccagcccattcgaga

SEQ ID NO: 258347 - DNA, 15 bp, Homo sapiens
gccagcccattcgag

SEQ ID NO: 258348 - DNA, 15 bp, Homo sapiens
tgccagcccattcga

SEQ ID NO: 258349 - DNA, 15 bp, Homo sapiens
ctgccagcccattcg

SEQ ID NO: 258350 - DNA, 15 bp, Homo sapiens
tctgccagcccattc

SEQ ID NO: 258351 - DNA, 15 bp, Homo sapiens
ttctgccagcccatt

SEQ ID NO: 258352 - DNA, 15 bp, Homo sapiens
gttctgccagcccat

SEQ ID NO: 258353 - DNA, 15 bp, Homo sapiens
ggttctgccagccca

SEQ ID NO: 258354 - DNA, 15 bp, Homo sapiens
cggttctgccagccc

SEQ ID NO: 258355 - DNA, 15 bp, Homo sapiens
tcggttctgccagcc

SEQ ID NO: 258356 - DNA, 15 bp, Homo sapiens
ctcggttctgccagc

SEQ ID NO: 258357 - DNA, 15 bp, Homo sapiens
tctcggttctgccag

SEQ ID NO: 258358 - DNA, 15 bp, Homo sapiens
gtctcggttctgcca

SEQ ID NO: 258359 - DNA, 15 bp, Homo sapiens
ggtctcggttctgcc

SEQ ID NO: 258360 - DNA, 15 bp, Homo sapiens
aggtctcggttctgc

SEQ ID NO: 258361 - DNA, 15 bp, Homo sapiens
aaggtctcggttctg

SEQ ID NO: 258362 - DNA, 15 bp, Homo sapiens
gaaggtctcggttct

SEQ ID NO: 258363 - DNA, 15 bp, Homo sapiens
ggaaggtctcggttc

SEQ ID NO: 258364 - DNA, 15 bp, Homo sapiens
aggaaggtctcggtt

SEQ ID NO: 258365 - DNA, 15 bp, Homo sapiens
aaggaaggtctcggt

SEQ ID NO: 258366 - DNA, 15 bp, Homo sapiens
caaggaaggtctcgg

SEQ ID NO: 258367 - DNA, 15 bp, Homo sapiens
tcaaggaaggtctcg

SEQ ID NO: 258368 - DNA, 15 bp, Homo sapiens
gtcaaggaaggtctc

SEQ ID NO: 258369 - DNA, 15 bp, Homo sapiens
ggtcaaggaaggtct

SEQ ID NO: 258370 - DNA, 15 bp, Homo sapiens
tggtcaaggaaggtc

SEQ ID NO: 258371 - DNA, 15 bp, Homo sapiens
ctggtcaaggaaggt

SEQ ID NO: 258372 - DNA, 15 bp, Homo sapiens
tctggtcaaggaagg

SEQ ID NO: 258373 - DNA, 15 bp, Homo sapiens
atctggtcaaggaag

SEQ ID NO: 258374 - DNA, 15 bp, Homo sapiens
catctggtcaaggaa

SEQ ID NO: 258375 - DNA, 15 bp, Homo sapiens
tcatctggtcaagga

SEQ ID NO: 258376 - DNA, 15 bp, Homo sapiens
ctcatctggtcaagg

SEQ ID NO: 258377 - DNA, 15 bp, Homo sapiens
cctcatctggtcaag

SEQ ID NO: 258378 - DNA, 15 bp, Homo sapiens
gcctcatctggtcaa

SEQ ID NO: 258379 - DNA, 15 bp, Homo sapiens
ggcctcatctggtca

SEQ ID NO: 258380 - DNA, 15 bp, Homo sapiens
tggcctcatctggtc

SEQ ID NO: 258381 - DNA, 15 bp, Homo sapiens
atggcctcatctggt

SEQ ID NO: 258382 - DNA, 15 bp, Homo sapiens
aatggcctcatctgg

SEQ ID NO: 258383 - DNA, 15 bp, Homo sapiens
gaatggcctcatctg

SEQ ID NO: 258384 - DNA, 15 bp, Homo sapiens
agaatggcctcatct

SEQ ID NO: 258385 - DNA, 15 bp, Homo sapiens
ccagaatggcctcat

SEQ ID NO: 258386 - DNA, 15 bp, Homo sapiens
tccagaatggcctca

SEQ ID NO: 258387 - DNA, 15 bp, Homo sapiens
ctccagaatggcctc

SEQ ID NO: 258388 - DNA, 15 bp, Homo sapiens
gctccagaatggcct

SEQ ID NO: 258389 - DNA, 15 bp, Homo sapiens
agctccagaatggcc

SEQ ID NO: 258390 - DNA, 15 bp, Homo sapiens
gagctccagaatggc

SEQ ID NO: 258391 - DNA, 15 bp, Homo sapiens
ggagctccagaatgg

SEQ ID NO: 258392 - DNA, 15 bp, Homo sapiens
tggagctccagaatg

SEQ ID NO: 258393 - DNA, 15 bp, Homo sapiens
ttggagctccagaat

SEQ ID NO: 258394 - DNA, 15 bp, Homo sapiens
cttggagctccagaa

SEQ ID NO: 258395 - DNA, 15 bp, Homo sapiens
gcttggagctccaga

SEQ ID NO: 258396 - DNA, 15 bp, Homo sapiens
tgcttggagctccag

SEQ ID NO: 258397 - DNA, 15 bp, Homo sapiens
ctgcttggagctcca

SEQ ID NO: 258398 - DNA, 15 bp, Homo sapiens
cctgcttggagctcc

SEQ ID NO: 258399 - DNA, 15 bp, Homo sapiens
tcctgcttggagctc

SEQ ID NO: 258400 - DNA, 15 bp, Homo sapiens
ttcctgcttggagct

SEQ ID NO: 258401 - DNA, 15 bp, Homo sapiens
cttcctgcttggagc

SEQ ID NO: 258402 - DNA, 15 bp, Homo sapiens
gcttcctgcttggag

SEQ ID NO: 258403 - DNA, 15 bp, Homo sapiens
tgcttcctgcttgga

SEQ ID NO: 258404 - DNA, 15 bp, Homo sapiens
ctgcttcctgcttgg

SEQ ID NO: 258405 - DNA, 15 bp, Homo sapiens
tctgcttcctgcttg

SEQ ID NO: 258406 - DNA, 15 bp, Homo sapiens
ttctgcttcctgctt

SEQ ID NO: 258407 - DNA, 15 bp, Homo sapiens
attctgcttcctgct

SEQ ID NO: 258408 - DNA, 15 bp, Homo sapiens
cattctgcttcctgc

SEQ ID NO: 258409 - DNA, 15 bp, Homo sapiens
tcattctgcttcctg

SEQ ID NO: 258410 - DNA, 15 bp, Homo sapiens
ttcattctgcttcct

SEQ ID NO: 258411 - DNA, 15 bp, Homo sapiens
tttcattctgcttcc

SEQ ID NO: 258412 - DNA, 15 bp, Homo sapiens
ttttcattctgcttc

SEQ ID NO: 258413 - DNA, 15 bp, Homo sapiens
gttttcattctgctt

SEQ ID NO: 258414 - DNA, 15 bp, Homo sapiens
tgttttcattctgct

SEQ ID NO: 258415 - DNA, 15 bp, Homo sapiens
atgttttcattctgc

SEQ ID NO: 258416 - DNA, 15 bp, Homo sapiens
catgttttcattctg

SEQ ID NO: 258417 - DNA, 15 bp, Homo sapiens
acatgttttcattct

SEQ ID NO: 258418 - DNA, 15 bp, Homo sapiens
cacatgttttcattc

SEQ ID NO: 258419 - DNA, 15 bp, Homo sapiens
acacatgttttcatt

SEQ ID NO: 258420 - DNA, 15 bp, Homo sapiens
aacacatgttttcat

SEQ ID NO: 258421 - DNA, 15 bp, Homo sapiens
aaacacatgttttca

SEQ ID NO: 258422 - DNA, 15 bp, Homo sapiens
caaacacatgttttc

SEQ ID NO: 258423 - DNA, 15 bp, Homo sapiens
acaaacacatgtttt

SEQ ID NO: 258424 - DNA, 15 bp, Homo sapiens
aacaaacacatgttt

SEQ ID NO: 258425 - DNA, 15 bp, Homo sapiens
aaacaaacacatgtt

SEQ ID NO: 258426 - DNA, 15 bp, Homo sapiens
aaaacaaacacatgt

SEQ ID NO: 258427 - DNA, 15 bp, Homo sapiens
taaaacaaacacatg

SEQ ID NO: 258428 - DNA, 15 bp, Homo sapiens
gtaaaacaaacacat

SEQ ID NO: 258429 - DNA, 15 bp, Homo sapiens
agtaaaacaaacaca

SEQ ID NO: 258430 - DNA, 15 bp, Homo sapiens
tagtaaaacaaacac

SEQ ID NO: 258431 - DNA, 15 bp, Homo sapiens
ttagtaaaacaaaca

SEQ ID NO: 258432 - DNA, 15 bp, Homo sapiens
tttagtaaaacaaac

SEQ ID NO: 258433 - DNA, 15 bp, Homo sapiens
atttagtaaaacaaa

SEQ ID NO: 258434 - DNA, 15 bp, Homo sapiens
tatttagtaaaacaa

SEQ ID NO: 258435 - DNA, 15 bp, Homo sapiens
ctatttagtaaaaca

SEQ ID NO: 258436 - DNA, 15 bp, Homo sapiens
gctatttagtaaaac

SEQ ID NO: 258437 - DNA, 15 bp, Homo sapiens
agctatttagtaaaa

SEQ ID NO: 258438 - DNA, 15 bp, Homo sapiens
cagctatttagtaaa

SEQ ID NO: 258439 - DNA, 15 bp, Homo sapiens
acagctatttagtaa

SEQ ID NO: 258440 - DNA, 15 bp, Homo sapiens
aacagctatttagta

SEQ ID NO: 258441 - DNA, 15 bp, Homo sapiens
caacagctatttagt

SEQ ID NO: 258442 - DNA, 15 bp, Homo sapiens
gcaacagctatttag

SEQ ID NO: 258443 - DNA, 15 bp, Homo sapiens
tgcaacagctattta

SEQ ID NO: 258444 - DNA, 15 bp, Homo sapiens
atgcaacagctattt

SEQ ID NO: 258445 - DNA, 15 bp, Homo sapiens
catgcaacagctatt

SEQ ID NO: 258446 - DNA, 15 bp, Homo sapiens
acatgcaacagctat

SEQ ID NO: 258447 - DNA, 15 bp, Homo sapiens
cacatgcaacagcta

SEQ ID NO: 258448 - DNA, 15 bp, Homo sapiens
acacatgcaacagct

SEQ ID NO: 258449 - DNA, 15 bp, Homo sapiens
aacacatgcaacagc

SEQ ID NO: 258450 - DNA, 15 bp, Homo sapiens
caacacatgcaacag

SEQ ID NO: 258451 - DNA, 15 bp, Homo sapiens
ccaacacatgcaaca

SEQ ID NO: 258452 - DNA, 15 bp, Homo sapiens
tccaacacatgcaac

SEQ ID NO: 258453 - DNA, 15 bp, Homo sapiens
atccaacacatgcaa

SEQ ID NO: 258454 - DNA, 15 bp, Homo sapiens
catccaacacatgca

SEQ ID NO: 258455 - DNA, 15 bp, Homo sapiens
acatccaacacatgc

SEQ ID NO: 258456 - DNA, 15 bp, Homo sapiens
tacatccaacacatg

SEQ ID NO: 258457 - DNA, 15 bp, Homo sapiens
ttacatccaacacat

SEQ ID NO: 258458 - DNA, 15 bp, Homo sapiens
cttacatccaacaca

SEQ ID NO: 258459 - DNA, 15 bp, Homo sapiens
tcttacatccaacac

SEQ ID NO: 258460 - DNA, 15 bp, Homo sapiens
ctcttacatccaaca

SEQ ID NO: 258461 - DNA, 15 bp, Homo sapiens
actcttacatccaac

SEQ ID NO: 258462 - DNA, 15 bp, Homo sapiens
gactcttacatccaa

SEQ ID NO: 258463 - DNA, 15 bp, Homo sapiens
ggactcttacatcca

SEQ ID NO: 258464 - DNA, 15 bp, Homo sapiens
gggactcttacatcc

SEQ ID NO: 258465 - DNA, 15 bp, Homo sapiens
ggggactcttacatc

SEQ ID NO: 258466 - DNA, 15 bp, Homo sapiens
gggggactcttacat

SEQ ID NO: 258467 - DNA, 15 bp, Homo sapiens
agggggactcttaca

SEQ ID NO: 258468 - DNA, 15 bp, Homo sapiens
aagggggactcttac

SEQ ID NO: 258469 - DNA, 15 bp, Homo sapiens
caagggggactctta

SEQ ID NO: 258470 - DNA, 15 bp, Homo sapiens
gcaagggggactctt

SEQ ID NO: 258471 - DNA, 15 bp, Homo sapiens
agcaagggggactct

SEQ ID NO: 258472 - DNA, 15 bp, Homo sapiens
aagcaagggggactc

SEQ ID NO: 258473 - DNA, 15 bp, Homo sapiens
taagcaagggggact

SEQ ID NO: 258474 - DNA, 15 bp, Homo sapiens
ttaagcaagggggac

SEQ ID NO: 258475 - DNA, 15 bp, Homo sapiens
tttaagcaaggggga

SEQ ID NO: 258476 - DNA, 15 bp, Homo sapiens
ctttaagcaaggggg

SEQ ID NO: 258477 - DNA, 15 bp, Homo sapiens
tctttaagcaagggg

SEQ ID NO: 258478 - DNA, 15 bp, Homo sapiens
ctctttaagcaaggg

SEQ ID NO: 258479 - DNA, 15 bp, Homo sapiens
tctctttaagcaagg

SEQ ID NO: 258480 - DNA, 15 bp, Homo sapiens
ttctctttaagcaag

SEQ ID NO: 258481 - DNA, 15 bp, Homo sapiens
tttctctttaagcaa

SEQ ID NO: 258482 - DNA, 15 bp, Homo sapiens
ttttctctttaagca

SEQ ID NO: 258483 - DNA, 15 bp, Homo sapiens
attttctctttaagc

SEQ ID NO: 258484 - DNA, 15 bp, Homo sapiens
tattttctctttaag

SEQ ID NO: 258485 - DNA, 15 bp, Homo sapiens
ttattttctctttaa

SEQ ID NO: 258486 - DNA, 15 bp, Homo sapiens
gttattttctcttta

SEQ ID NO: 258487 - DNA, 15 bp, Homo sapiens
ggttattttctcttt

SEQ ID NO: 258488 - DNA, 15 bp, Homo sapiens
aggttattttctctt

SEQ ID NO: 258489 - DNA, 15 bp, Homo sapiens
taggttattttctct

SEQ ID NO: 258490 - DNA, 15 bp, Homo sapiens
ttaggttattttctc

SEQ ID NO: 258491 - DNA, 15 bp, Homo sapiens
cttaggttattttct

SEQ ID NO: 258492 - DNA, 15 bp, Homo sapiens
tcttaggttattttc

SEQ ID NO: 258493 - DNA, 15 bp, Homo sapiens
ttcttaggttatttt

SEQ ID NO: 258494 - DNA, 15 bp, Homo sapiens
gttcttaggttattt

SEQ ID NO: 258495 - DNA, 15 bp, Homo sapiens
agttcttaggttatt

SEQ ID NO: 258496 - DNA, 15 bp, Homo sapiens
aagttcttaggttat

SEQ ID NO: 258497 - DNA, 15 bp, Homo sapiens
caagttcttaggtta

SEQ ID NO: 258498 - DNA, 15 bp, Homo sapiens
gcaagttcttaggtt

SEQ ID NO: 258499 - DNA, 15 bp, Homo sapiens
agcaagttcttaggt

SEQ ID NO: 258500 - DNA, 15 bp, Homo sapiens
gagcaagttcttagg

SEQ ID NO: 258501 - DNA, 15 bp, Homo sapiens
agagcaagttcttag

SEQ ID NO: 258502 - DNA, 15 bp, Homo sapiens
aagagcaagttctta

SEQ ID NO: 258503 - DNA, 15 bp, Homo sapiens
gaagagcaagttctt

SEQ ID NO: 258504 - DNA, 15 bp, Homo sapiens
cgaagagcaagttct

SEQ ID NO: 258505 - DNA, 15 bp, Homo sapiens
acgaagagcaagttc

SEQ ID NO: 258506 - DNA, 15 bp, Homo sapiens
cacgaagagcaagtt

SEQ ID NO: 258507 - DNA, 15 bp, Homo sapiens
gcacgaagagcaagt

SEQ ID NO: 258508 - DNA, 15 bp, Homo sapiens
tgcacgaagagcaag

SEQ ID NO: 258509 - DNA, 15 bp, Homo sapiens
atgcacgaagagcaa

SEQ ID NO: 258510 - DNA, 15 bp, Homo sapiens
aatgcacgaagagca

SEQ ID NO: 258511 - DNA, 15 bp, Homo sapiens
aaatgcacgaagagc

SEQ ID NO: 258512 - DNA, 15 bp, Homo sapiens
gaaatgcacgaagag

SEQ ID NO: 258513 - DNA, 15 bp, Homo sapiens
tgaaatgcacgaaga

SEQ ID NO: 258514 - DNA, 15 bp, Homo sapiens
gtgaaatgcacgaag

SEQ ID NO: 258515 - DNA, 15 bp, Homo sapiens
ggtgaaatgcacgaa

SEQ ID NO: 258516 - DNA, 15 bp, Homo sapiens
aggtgaaatgcacga

SEQ ID NO: 258517 - DNA, 15 bp, Homo sapiens
aaggtgaaatgcacg

SEQ ID NO: 258518 - DNA, 15 bp, Homo sapiens
aaaggtgaaatgcac

SEQ ID NO: 258519 - DNA, 15 bp, Homo sapiens
taaaggtgaaatgca

SEQ ID NO: 258520 - DNA, 15 bp, Homo sapiens
ctaaaggtgaaatgc

SEQ ID NO: 258521 - DNA, 15 bp, Homo sapiens
tctaaaggtgaaatg

SEQ ID NO: 258522 - DNA, 15 bp, Homo sapiens
ttctaaaggtgaaat

SEQ ID NO: 258523 - DNA, 15 bp, Homo sapiens
gttctaaaggtgaaa

SEQ ID NO: 258524 - DNA, 15 bp, Homo sapiens
agttctaaaggtgaa

SEQ ID NO: 258525 - DNA, 15 bp, Homo sapiens
tagttctaaaggtga

SEQ ID NO: 258526 - DNA, 15 bp, Homo sapiens
ctagttctaaaggtg

SEQ ID NO: 258527 - DNA, 15 bp, Homo sapiens
tctagttctaaaggt

SEQ ID NO: 258528 - DNA, 15 bp, Homo sapiens
ttctagttctaaagg

SEQ ID NO: 258529 - DNA, 15 bp, Homo sapiens
tttctagttctaaag

SEQ ID NO: 258530 - DNA, 15 bp, Homo sapiens
ttttctagttctaaa

SEQ ID NO: 258531 - DNA, 15 bp, Homo sapiens
cttttctagttctaa

SEQ ID NO: 258532 - DNA, 15 bp, Homo sapiens
gcttttctagttcta

SEQ ID NO: 258533 - DNA, 15 bp, Homo sapiens
agcttttctagttct

SEQ ID NO: 258534 - DNA, 15 bp, Homo sapiens
cagcttttctagttc

SEQ ID NO: 258535 - DNA, 15 bp, Homo sapiens
acagcttttctagtt

SEQ ID NO: 258536 - DNA, 15 bp, Homo sapiens
gacagcttttctagt

SEQ ID NO: 258537 - DNA, 15 bp, Homo sapiens
agacagcttttctag

SEQ ID NO: 258538 - DNA, 15 bp, Homo sapiens
tagacagcttttcta

SEQ ID NO: 258539 - DNA, 15 bp, Homo sapiens
ttagacagcttttct

SEQ ID NO: 258540 - DNA, 15 bp, Homo sapiens
attagacagcttttc

SEQ ID NO: 258541 - DNA, 15 bp, Homo sapiens
aattagacagctttt

SEQ ID NO: 258542 - DNA, 15 bp, Homo sapiens
taattagacagcttt

SEQ ID NO: 258543 - DNA, 15 bp, Homo sapiens
ctaattagacagctt

SEQ ID NO: 258544 - DNA, 15 bp, Homo sapiens
tctaattagacagct

SEQ ID NO: 258545 - DNA, 15 bp, Homo sapiens
atctaattagacagc

SEQ ID NO: 258546 - DNA, 15 bp, Homo sapiens
aatctaattagacag

SEQ ID NO: 258547 - DNA, 15 bp, Homo sapiens
taatctaattagaca

SEQ ID NO: 258548 - DNA, 15 bp, Homo sapiens
ttaatctaattagac

SEQ ID NO: 258549 - DNA, 15 bp, Homo sapiens
gttaatctaattaga

SEQ ID NO: 258550 - DNA, 15 bp, Homo sapiens
tgttaatctaattag

SEQ ID NO: 258551 - DNA, 15 bp, Homo sapiens
gtgttaatctaatta

SEQ ID NO: 258552 - DNA, 15 bp, Homo sapiens
tgtgttaatctaatt

SEQ ID NO: 258553 - DNA, 15 bp, Homo sapiens
gtgtgttaatctaat

SEQ ID NO: 258554 - DNA, 15 bp, Homo sapiens
tgtgtgttaatctaa

SEQ ID NO: 258555 - DNA, 15 bp, Homo sapiens
ctgtgtgttaatcta

SEQ ID NO: 258556 - DNA, 15 bp, Homo sapiens
cctgtgtgttaatct

SEQ ID NO: 258557 - DNA, 15 bp, Homo sapiens
acctgtgtgttaatc

SEQ ID NO: 258558 - DNA, 15 bp, Homo sapiens
cacctgtgtgttaat

SEQ ID NO: 258559 - DNA, 15 bp, Homo sapiens
gcacctgtgtgttaa

SEQ ID NO: 258560 - DNA, 15 bp, Homo sapiens
tgcacctgtgtgtta

SEQ ID NO: 258561 - DNA, 15 bp, Homo sapiens
atgcacctgtgtgtt

SEQ ID NO: 258562 - DNA, 15 bp, Homo sapiens
catgcacctgtgtgt

SEQ ID NO: 258563 - DNA, 15 bp, Homo sapiens
acatgcacctgtgtg

SEQ ID NO: 258564 - DNA, 15 bp, Homo sapiens
tacatgcacctgtgt

SEQ ID NO: 258565 - DNA, 15 bp, Homo sapiens
atacatgcacctgtg

SEQ ID NO: 258566 - DNA, 15 bp, Homo sapiens
catacatgcacctgt

SEQ ID NO: 258567 - DNA, 15 bp, Homo sapiens
acatacatgcacctg

SEQ ID NO: 258568 - DNA, 15 bp, Homo sapiens
cacatacatgcacct

SEQ ID NO: 258569 - DNA, 15 bp, Homo sapiens
acacatacatgcacc

SEQ ID NO: 258570 - DNA, 15 bp, Homo sapiens
cacacatacatgcac

SEQ ID NO: 258571 - DNA, 15 bp, Homo sapiens
acacacatacatgca

SEQ ID NO: 258572 - DNA, 15 bp, Homo sapiens
cacacacatacatgc

SEQ ID NO: 258573 - DNA, 15 bp, Homo sapiens
acacacacatacatg

SEQ ID NO: 258574 - DNA, 15 bp, Homo sapiens
aacacacacatacat

SEQ ID NO: 258575 - DNA, 15 bp, Homo sapiens
taacacacacataca

SEQ ID NO: 258576 - DNA, 15 bp, Homo sapiens
ctaacacacacatac

SEQ ID NO: 258577 - DNA, 15 bp, Homo sapiens
tctaacacacacata

SEQ ID NO: 258578 - DNA, 15 bp, Homo sapiens
ctctaacacacacat

SEQ ID NO: 258579 - DNA, 15 bp, Homo sapiens
actctaacacacaca

SEQ ID NO: 258580 - DNA, 15 bp, Homo sapiens
tactctaacacacac

SEQ ID NO: 258581 - DNA, 15 bp, Homo sapiens
atactctaacacaca

SEQ ID NO: 258582 - DNA, 15 bp, Homo sapiens
tatactctaacacac

SEQ ID NO: 258583 - DNA, 15 bp, Homo sapiens
ctatactctaacaca

SEQ ID NO: 258584 - DNA, 15 bp, Homo sapiens
tctatactctaacac

SEQ ID NO: 258585 - DNA, 15 bp, Homo sapiens
atctatactctaaca

SEQ ID NO: 258586 - DNA, 15 bp, Homo sapiens
tatctatactctaac

SEQ ID NO: 258587 - DNA, 15 bp, Homo sapiens
gtatctatactctaa

SEQ ID NO: 258588 - DNA, 15 bp, Homo sapiens
agtatctatactcta

SEQ ID NO: 258589 - DNA, 15 bp, Homo sapiens
cagtatctatactct

SEQ ID NO: 258590 - DNA, 15 bp, Homo sapiens
gcagtatctatactc

SEQ ID NO: 258591 - DNA, 15 bp, Homo sapiens
agcagtatctatact

SEQ ID NO: 258592 - DNA, 15 bp, Homo sapiens
tagcagtatctatac

SEQ ID NO: 258593 - DNA, 15 bp, Homo sapiens
ttagcagtatctata

SEQ ID NO: 258594 - DNA, 15 bp, Homo sapiens
tttagcagtatctat

SEQ ID NO: 258595 - DNA, 15 bp, Homo sapiens
atttagcagtatcta

SEQ ID NO: 258596 - DNA, 15 bp, Homo sapiens
tatttagcagtatct

SEQ ID NO: 258597 - DNA, 15 bp, Homo sapiens
ttatttagcagtatc

SEQ ID NO: 258598 - DNA, 15 bp, Homo sapiens
cttatttagcagtat

SEQ ID NO: 258599 - DNA, 15 bp, Homo sapiens
gcttatttagcagta

SEQ ID NO: 258600 - DNA, 15 bp, Homo sapiens
ggcttatttagcagt

SEQ ID NO: 258601 - DNA, 15 bp, Homo sapiens
gggcttatttagcag

SEQ ID NO: 258602 - DNA, 15 bp, Homo sapiens
tgggcttatttagca

SEQ ID NO: 258603 - DNA, 15 bp, Homo sapiens
ctgggcttatttagc

SEQ ID NO: 258604 - DNA, 15 bp, Homo sapiens
actgggcttatttag

SEQ ID NO: 258605 - DNA, 15 bp, Homo sapiens
cactgggcttattta

SEQ ID NO: 258606 - DNA, 15 bp, Homo sapiens
acactgggcttattt

SEQ ID NO: 258607 - DNA, 15 bp, Homo sapiens
aacactgggcttatt

SEQ ID NO: 258608 - DNA, 15 bp, Homo sapiens
aaacactgggcttat

SEQ ID NO: 258609 - DNA, 15 bp, Homo sapiens
gaaacactgggctta

SEQ ID NO: 258610 - DNA, 15 bp, Homo sapiens
agaaacactgggctt

SEQ ID NO: 258611 - DNA, 15 bp, Homo sapiens
gagaaacactgggct

SEQ ID NO: 258612 - DNA, 15 bp, Homo sapiens
agagaaacactgggc

SEQ ID NO: 258613 - DNA, 15 bp, Homo sapiens
cagagaaacactggg

SEQ ID NO: 258614 - DNA, 15 bp, Homo sapiens
gcagagaaacactgg

SEQ ID NO: 258615 - DNA, 15 bp, Homo sapiens
tgcagagaaacactg

SEQ ID NO: 258616 - DNA, 15 bp, Homo sapiens
atgcagagaaacact

SEQ ID NO: 258617 - DNA, 15 bp, Homo sapiens
aatgcagagaaacac

SEQ ID NO: 258618 - DNA, 15 bp, Homo sapiens
aaatgcagagaaaca

SEQ ID NO: 258619 - DNA, 15 bp, Homo sapiens
caaatgcagagaaac

SEQ ID NO: 258620 - DNA, 15 bp, Homo sapiens
acaaatgcagagaaa

SEQ ID NO: 258621 - DNA, 15 bp, Homo sapiens
gacaaatgcagagaa

SEQ ID NO: 258622 - DNA, 15 bp, Homo sapiens
agacaaatgcagaga

SEQ ID NO: 258623 - DNA, 15 bp, Homo sapiens
cagacaaatgcagag

SEQ ID NO: 258624 - DNA, 15 bp, Homo sapiens
tcagacaaatgcaga

SEQ ID NO: 258625 - DNA, 15 bp, Homo sapiens
ttcagacaaatgcag

SEQ ID NO: 258626 - DNA, 15 bp, Homo sapiens
attcagacaaatgca

SEQ ID NO: 258627 - DNA, 15 bp, Homo sapiens
aattcagacaaatgc

SEQ ID NO: 258628 - DNA, 15 bp, Homo sapiens
aaattcagacaaatg

SEQ ID NO: 258629 - DNA, 15 bp, Homo sapiens
aaaattcagacaaat

SEQ ID NO: 258630 - DNA, 15 bp, Homo sapiens
caaaattcagacaaa

SEQ ID NO: 258631 - DNA, 15 bp, Homo sapiens
ccaaaattcagacaa

SEQ ID NO: 258632 - DNA, 15 bp, Homo sapiens
tccaaaattcagaca

SEQ ID NO: 258633 - DNA, 15 bp, Homo sapiens
ttccaaaattcagac

SEQ ID NO: 258634 - DNA, 15 bp, Homo sapiens
tttccaaaattcaga

SEQ ID NO: 258635 - DNA, 15 bp, Homo sapiens
ttttccaaaattcag

SEQ ID NO: 258636 - DNA, 15 bp, Homo sapiens
attttccaaaattca

SEQ ID NO: 258637 - DNA, 15 bp, Homo sapiens
cattttccaaaattc

SEQ ID NO: 258638 - DNA, 15 bp, Homo sapiens
ccattttccaaaatt

SEQ ID NO: 258639 - DNA, 15 bp, Homo sapiens
cccattttccaaaat

SEQ ID NO: 258640 - DNA, 15 bp, Homo sapiens
tcccattttccaaaa

SEQ ID NO: 258641 - DNA, 15 bp, Homo sapiens
atcccattttccaaa

SEQ ID NO: 258642 - DNA, 15 bp, Homo sapiens
catcccattttccaa

SEQ ID NO: 258643 - DNA, 15 bp, Homo sapiens
tcatcccattttcca

SEQ ID NO: 258644 - DNA, 15 bp, Homo sapiens
ctcatcccattttcc

SEQ ID NO: 258645 - DNA, 15 bp, Homo sapiens
cctcatcccattttc

SEQ ID NO: 258646 - DNA, 15 bp, Homo sapiens
gcctcatcccatttt

SEQ ID NO: 258647 - DNA, 15 bp, Homo sapiens
agcctcatcccattt

SEQ ID NO: 258648 - DNA, 15 bp, Homo sapiens
cagcctcatcccatt

SEQ ID NO: 258649 - DNA, 15 bp, Homo sapiens
tcagcctcatcccat

SEQ ID NO: 258650 - DNA, 15 bp, Homo sapiens
atcagcctcatccca

SEQ ID NO: 258651 - DNA, 15 bp, Homo sapiens
aatcagcctcatccc

SEQ ID NO: 258652 - DNA, 15 bp, Homo sapiens
taatcagcctcatcc

SEQ ID NO: 258653 - DNA, 15 bp, Homo sapiens
ttaatcagcctcatc

SEQ ID NO: 258654 - DNA, 15 bp, Homo sapiens
cttaatcagcctcat

SEQ ID NO: 258655 - DNA, 15 bp, Homo sapiens
acttaatcagcctca

SEQ ID NO: 258656 - DNA, 15 bp, Homo sapiens
cacttaatcagcctc

SEQ ID NO: 258657 - DNA, 15 bp, Homo sapiens
ccacttaatcagcct

SEQ ID NO: 258658 - DNA, 15 bp, Homo sapiens
gccacttaatcagcc

SEQ ID NO: 258659 - DNA, 15 bp, Homo sapiens
agccacttaatcagc

SEQ ID NO: 258660 - DNA, 15 bp, Homo sapiens
aagccacttaatcag

SEQ ID NO: 258661 - DNA, 15 bp, Homo sapiens
aaagccacttaatca

SEQ ID NO: 258662 - DNA, 15 bp, Homo sapiens
gaaagccacttaatc

SEQ ID NO: 258663 - DNA, 15 bp, Homo sapiens
tgaaagccacttaat

SEQ ID NO: 258664 - DNA, 15 bp, Homo sapiens
atgaaagccacttaa

SEQ ID NO: 258665 - DNA, 15 bp, Homo sapiens
gatgaaagccactta

SEQ ID NO: 258666 - DNA, 15 bp, Homo sapiens
agatgaaagccactt

SEQ ID NO: 258667 - DNA, 15 bp, Homo sapiens
cagatgaaagccact

SEQ ID NO: 258668 - DNA, 15 bp, Homo sapiens
tcagatgaaagccac

SEQ ID NO: 258669 - DNA, 15 bp, Homo sapiens
ctcagatgaaagcca

SEQ ID NO: 258670 - DNA, 15 bp, Homo sapiens
tctcagatgaaagcc

SEQ ID NO: 258671 - DNA, 15 bp, Homo sapiens
ctctcagatgaaagc

SEQ ID NO: 258672 - DNA, 15 bp, Homo sapiens
gctctcagatgaaag

SEQ ID NO: 258673 - DNA, 15 bp, Homo sapiens
agctctcagatgaaa

SEQ ID NO: 258674 - DNA, 15 bp, Homo sapiens
cagctctcagatgaa

SEQ ID NO: 258675 - DNA, 15 bp, Homo sapiens
acagctctcagatga

SEQ ID NO: 258676 - DNA, 15 bp, Homo sapiens
cacagctctcagatg

SEQ ID NO: 258677 - DNA, 15 bp, Homo sapiens
acacagctctcagat

SEQ ID NO: 258678 - DNA, 15 bp, Homo sapiens
tacacagctctcaga

SEQ ID NO: 258679 - DNA, 15 bp, Homo sapiens
gtacacagctctcag

SEQ ID NO: 258680 - DNA, 15 bp, Homo sapiens
agtacacagctctca

SEQ ID NO: 258681 - DNA, 15 bp, Homo sapiens
aagtacacagctctc

SEQ ID NO: 258682 - DNA, 15 bp, Homo sapiens
gaagtacacagctct

SEQ ID NO: 258683 - DNA, 15 bp, Homo sapiens
agaagtacacagctc

SEQ ID NO: 258684 - DNA, 15 bp, Homo sapiens
cagaagtacacagct

SEQ ID NO: 258685 - DNA, 15 bp, Homo sapiens
acagaagtacacagc

SEQ ID NO: 258686 - DNA, 15 bp, Homo sapiens
cacagaagtacacag

SEQ ID NO: 258687 - DNA, 15 bp, Homo sapiens
ccacagaagtacaca

SEQ ID NO: 258688 - DNA, 15 bp, Homo sapiens
accacagaagtacac

SEQ ID NO: 258689 - DNA, 15 bp, Homo sapiens
aaccacagaagtaca

SEQ ID NO: 258690 - DNA, 15 bp, Homo sapiens
gaaccacagaagtac

SEQ ID NO: 258691 - DNA, 15 bp, Homo sapiens
agaaccacagaagta

SEQ ID NO: 258692 - DNA, 15 bp, Homo sapiens
cagaaccacagaagt

SEQ ID NO: 258693 - DNA, 15 bp, Homo sapiens
acagaaccacagaag

SEQ ID NO: 258694 - DNA, 15 bp, Homo sapiens
aacagaaccacagaa

SEQ ID NO: 258695 - DNA, 15 bp, Homo sapiens
aaacagaaccacaga

SEQ ID NO: 258696 - DNA, 15 bp, Homo sapiens
aaaacagaaccacag

SEQ ID NO: 258697 - DNA, 15 bp, Homo sapiens
aaaaacagaaccaca

SEQ ID NO: 258698 - DNA, 15 bp, Homo sapiens
gaaaaacagaaccac

SEQ ID NO: 258699 - DNA, 15 bp, Homo sapiens
agaaaaacagaacca

SEQ ID NO: 258700 - DNA, 15 bp, Homo sapiens
gagaaaaacagaacc

SEQ ID NO: 258701 - DNA, 15 bp, Homo sapiens
ggagaaaaacagaac

SEQ ID NO: 258702 - DNA, 15 bp, Homo sapiens
aggagaaaaacagaa

SEQ ID NO: 258703 - DNA, 15 bp, Homo sapiens
aaggagaaaaacaga

SEQ ID NO: 258704 - DNA, 15 bp, Homo sapiens
aaaggagaaaaacag

SEQ ID NO: 258705 - DNA, 15 bp, Homo sapiens
caaaggagaaaaaca

SEQ ID NO: 258706 - DNA, 15 bp, Homo sapiens
tcaaaggagaaaaac

SEQ ID NO: 258707 - DNA, 15 bp, Homo sapiens
ttcaaaggagaaaaa

SEQ ID NO: 258708 - DNA, 15 bp, Homo sapiens
attcaaaggagaaaa

SEQ ID NO: 258709 - DNA, 15 bp, Homo sapiens
gattcaaaggagaaa

SEQ ID NO: 258710 - DNA, 15 bp, Homo sapiens
ggattcaaaggagaa

SEQ ID NO: 258711 - DNA, 15 bp, Homo sapiens
gggattcaaaggaga

SEQ ID NO: 258712 - DNA, 15 bp, Homo sapiens
agggattcaaaggag

SEQ ID NO: 258713 - DNA, 15 bp, Homo sapiens
tagggattcaaagga

SEQ ID NO: 258714 - DNA, 15 bp, Homo sapiens
atagggattcaaagg

SEQ ID NO: 258715 - DNA, 15 bp, Homo sapiens
gatagggattcaaag

SEQ ID NO: 258716 - DNA, 15 bp, Homo sapiens
ggatagggattcaaa

SEQ ID NO: 258717 - DNA, 15 bp, Homo sapiens
aggatagggattcaa

SEQ ID NO: 258718 - DNA, 15 bp, Homo sapiens
taggatagggattca

SEQ ID NO: 258719 - DNA, 15 bp, Homo sapiens
ataggatagggattc

SEQ ID NO: 258720 - DNA, 15 bp, Homo sapiens
gataggatagggatt

SEQ ID NO: 258721 - DNA, 15 bp, Homo sapiens
agataggatagggat

SEQ ID NO: 258722 - DNA, 15 bp, Homo sapiens
gagataggataggga

SEQ ID NO: 258723 - DNA, 15 bp, Homo sapiens
tgagataggataggg

SEQ ID NO: 258724 - DNA, 15 bp, Homo sapiens
atgagataggatagg

SEQ ID NO: 258725 - DNA, 15 bp, Homo sapiens
aatgagataggatag

SEQ ID NO: 258726 - DNA, 15 bp, Homo sapiens
aaatgagataggata

SEQ ID NO: 258727 - DNA, 15 bp, Homo sapiens
caaatgagataggat

SEQ ID NO: 258728 - DNA, 15 bp, Homo sapiens
ccaaatgagatagga

SEQ ID NO: 258729 - DNA, 15 bp, Homo sapiens
gccaaatgagatagg

SEQ ID NO: 258730 - DNA, 15 bp, Homo sapiens
ggccaaatgagatag

SEQ ID NO: 258731 - DNA, 15 bp, Homo sapiens
aggccaaatgagata

SEQ ID NO: 258732 - DNA, 15 bp, Homo sapiens
gaggccaaatgagat

SEQ ID NO: 258733 - DNA, 15 bp, Homo sapiens
ggaggccaaatgaga

SEQ ID NO: 258734 - DNA, 15 bp, Homo sapiens
aggaggccaaatgag

SEQ ID NO: 258735 - DNA, 15 bp, Homo sapiens
aaggaggccaaatga

SEQ ID NO: 258736 - DNA, 15 bp, Homo sapiens
caaggaggccaaatg

SEQ ID NO: 258737 - DNA, 15 bp, Homo sapiens
gcaaggaggccaaat

SEQ ID NO: 258738 - DNA, 15 bp, Homo sapiens
agcaaggaggccaaa

SEQ ID NO: 258739 - DNA, 15 bp, Homo sapiens
cagcaaggaggccaa

SEQ ID NO: 258740 - DNA, 15 bp, Homo sapiens
acagcaaggaggcca

SEQ ID NO: 258741 - DNA, 15 bp, Homo sapiens
cacagcaaggaggcc

SEQ ID NO: 258742 - DNA, 15 bp, Homo sapiens
tcacagcaaggaggc

SEQ ID NO: 258743 - DNA, 15 bp, Homo sapiens
atcacagcaaggagg

SEQ ID NO: 258744 - DNA, 15 bp, Homo sapiens
gatcacagcaaggag

SEQ ID NO: 258745 - DNA, 15 bp, Homo sapiens
ggatcacagcaagga

SEQ ID NO: 258746 - DNA, 15 bp, Homo sapiens
gggatcacagcaagg

SEQ ID NO: 258747 - DNA, 15 bp, Homo sapiens
tgggatcacagcaag

SEQ ID NO: 258748 - DNA, 15 bp, Homo sapiens
atgggatcacagcaa

SEQ ID NO: 258749 - DNA, 15 bp, Homo sapiens
catgggatcacagca

SEQ ID NO: 258750 - DNA, 15 bp, Homo sapiens
ccatgggatcacagc

SEQ ID NO: 258751 - DNA, 15 bp, Homo sapiens
tccatgggatcacag

SEQ ID NO: 258752 - DNA, 15 bp, Homo sapiens
atccatgggatcaca

SEQ ID NO: 258753 - DNA, 15 bp, Homo sapiens
catccatgggatcac

SEQ ID NO: 258754 - DNA, 15 bp, Homo sapiens
acatccatgggatca

SEQ ID NO: 258755 - DNA, 15 bp, Homo sapiens
cacatccatgggatc

SEQ ID NO: 258756 - DNA, 15 bp, Homo sapiens
acacatccatgggat

SEQ ID NO: 258757 - DNA, 15 bp, Homo sapiens
aacacatccatggga

SEQ ID NO: 258758 - DNA, 15 bp, Homo sapiens
gaacacatccatggg

SEQ ID NO: 258759 - DNA, 15 bp, Homo sapiens
tgaacacatccatgg

SEQ ID NO: 258760 - DNA, 15 bp, Homo sapiens
ttgaacacatccatg

SEQ ID NO: 258761 - DNA, 15 bp, Homo sapiens
cttgaacacatccat

SEQ ID NO: 258762 - DNA, 15 bp, Homo sapiens
acttgaacacatcca

SEQ ID NO: 258763 - DNA, 15 bp, Homo sapiens
cacttgaacacatcc

SEQ ID NO: 258764 - DNA, 15 bp, Homo sapiens
acacttgaacacatc

SEQ ID NO: 258765 - DNA, 15 bp, Homo sapiens
tacacttgaacacat

SEQ ID NO: 258766 - DNA, 15 bp, Homo sapiens
gtacacttgaacaca

SEQ ID NO: 258767 - DNA, 15 bp, Homo sapiens
agtacacttgaacac

SEQ ID NO: 258768 - DNA, 15 bp, Homo sapiens
cagtacacttgaaca

SEQ ID NO: 258769 - DNA, 15 bp, Homo sapiens
gcagtacacttgaac

SEQ ID NO: 258770 - DNA, 15 bp, Homo sapiens
agcagtacacttgaa

SEQ ID NO: 258771 - DNA, 15 bp, Homo sapiens
tagcagtacacttga

SEQ ID NO: 258772 - DNA, 15 bp, Homo sapiens
ctagcagtacacttg

SEQ ID NO: 258773 - DNA, 15 bp, Homo sapiens
actagcagtacactt

SEQ ID NO: 258774 - DNA, 15 bp, Homo sapiens
aactagcagtacact

SEQ ID NO: 258775 - DNA, 15 bp, Homo sapiens
gaactagcagtacac

SEQ ID NO: 258776 - DNA, 15 bp, Homo sapiens
ggaactagcagtaca

SEQ ID NO: 258777 - DNA, 15 bp, Homo sapiens
gggaactagcagtac

SEQ ID NO: 258778 - DNA, 15 bp, Homo sapiens
agggaactagcagta

SEQ ID NO: 258779 - DNA, 15 bp, Homo sapiens
tagggaactagcagt

SEQ ID NO: 258780 - DNA, 15 bp, Homo sapiens
gtagggaactagcag

SEQ ID NO: 258781 - DNA, 15 bp, Homo sapiens
ggtagggaactagca

SEQ ID NO: 258782 - DNA, 15 bp, Homo sapiens
tggtagggaactagc

SEQ ID NO: 258783 - DNA, 15 bp, Homo sapiens
gtggtagggaactag

SEQ ID NO: 258784 - DNA, 15 bp, Homo sapiens
agtggtagggaacta

SEQ ID NO: 258785 - DNA, 15 bp, Homo sapiens
cagtggtagggaact

SEQ ID NO: 258786 - DNA, 15 bp, Homo sapiens
gcagtggtagggaac

SEQ ID NO: 258787 - DNA, 15 bp, Homo sapiens
tgcagtggtagggaa

SEQ ID NO: 258788 - DNA, 15 bp, Homo sapiens
ttgcagtggtaggga

SEQ ID NO: 258789 - DNA, 15 bp, Homo sapiens
tttgcagtggtaggg

SEQ ID NO: 258790 - DNA, 15 bp, Homo sapiens
ttttgcagtggtagg

SEQ ID NO: 258791 - DNA, 15 bp, Homo sapiens
gttttgcagtggtag

SEQ ID NO: 258792 - DNA, 15 bp, Homo sapiens
ggttttgcagtggta

SEQ ID NO: 258793 - DNA, 15 bp, Homo sapiens
gggttttgcagtggt

SEQ ID NO: 258794 - DNA, 15 bp, Homo sapiens
agggttttgcagtgg

SEQ ID NO: 258795 - DNA, 15 bp, Homo sapiens
gagggttttgcagtg

SEQ ID NO: 258796 - DNA, 15 bp, Homo sapiens
ggagggttttgcagt

SEQ ID NO: 258797 - DNA, 15 bp, Homo sapiens
aggagggttttgcag

SEQ ID NO: 258798 - DNA, 15 bp, Homo sapiens
taggagggttttgca

SEQ ID NO: 258799 - DNA, 15 bp, Homo sapiens
ctaggagggttttgc

SEQ ID NO: 258800 - DNA, 15 bp, Homo sapiens
gctaggagggttttg

SEQ ID NO: 258801 - DNA, 15 bp, Homo sapiens
agctaggagggtttt

SEQ ID NO: 258802 - DNA, 15 bp, Homo sapiens
gagctaggagggttt

SEQ ID NO: 258803 - DNA, 15 bp, Homo sapiens
agagctaggagggtt

SEQ ID NO: 258804 - DNA, 15 bp, Homo sapiens
cagagctaggagggt

SEQ ID NO: 258805 - DNA, 15 bp, Homo sapiens
gcagagctaggaggg

SEQ ID NO: 258806 - DNA, 15 bp, Homo sapiens
ggcagagctaggagg

SEQ ID NO: 258807 - DNA, 15 bp, Homo sapiens
aggcagagctaggag

SEQ ID NO: 258808 - DNA, 15 bp, Homo sapiens
caggcagagctagga

SEQ ID NO: 258809 - DNA, 15 bp, Homo sapiens
ccaggcagagctagg

SEQ ID NO: 258810 - DNA, 15 bp, Homo sapiens
accaggcagagctag

SEQ ID NO: 258811 - DNA, 15 bp, Homo sapiens
caccaggcagagcta

SEQ ID NO: 258812 - DNA, 15 bp, Homo sapiens
tcaccaggcagagct

SEQ ID NO: 258813 - DNA, 15 bp, Homo sapiens
gtcaccaggcagagc

SEQ ID NO: 258814 - DNA, 15 bp, Homo sapiens
ggtcaccaggcagag

SEQ ID NO: 258815 - DNA, 15 bp, Homo sapiens
gggtcaccaggcaga

SEQ ID NO: 258816 - DNA, 15 bp, Homo sapiens
ggggtcaccaggcag

SEQ ID NO: 258817 - DNA, 15 bp, Homo sapiens
tggggtcaccaggca

SEQ ID NO: 258818 - DNA, 15 bp, Homo sapiens
atggggtcaccaggc

SEQ ID NO: 258819 - DNA, 15 bp, Homo sapiens
tatggggtcaccagg

SEQ ID NO: 258820 - DNA, 15 bp, Homo sapiens
ttatggggtcaccag

SEQ ID NO: 258821 - DNA, 15 bp, Homo sapiens
tttatggggtcacca

SEQ ID NO: 258822 - DNA, 15 bp, Homo sapiens
atttatggggtcacc

SEQ ID NO: 258823 - DNA, 15 bp, Homo sapiens
gatttatggggtcac

SEQ ID NO: 258824 - DNA, 15 bp, Homo sapiens
ggatttatggggtca

SEQ ID NO: 258825 - DNA, 15 bp, Homo sapiens
gggatttatggggtc

SEQ ID NO: 258826 - DNA, 15 bp, Homo sapiens
ggggatttatggggt

SEQ ID NO: 258827 - DNA, 15 bp, Homo sapiens
tggggatttatgggg

SEQ ID NO: 258828 - DNA, 15 bp, Homo sapiens
ctggggatttatggg

SEQ ID NO: 258829 - DNA, 15 bp, Homo sapiens
actggggatttatgg

SEQ ID NO: 258830 - DNA, 15 bp, Homo sapiens
cactggggatttatg

SEQ ID NO: 258831 - DNA, 15 bp, Homo sapiens
acactggggatttat

SEQ ID NO: 258832 - DNA, 15 bp, Homo sapiens
aacactggggattta

SEQ ID NO: 258833 - DNA, 15 bp, Homo sapiens
gaacactggggattt

SEQ ID NO: 258834 - DNA, 15 bp, Homo sapiens
ggaacactggggatt

SEQ ID NO: 258835 - DNA, 15 bp, Homo sapiens
tggaacactggggat

SEQ ID NO: 258836 - DNA, 15 bp, Homo sapiens
atggaacactgggga

SEQ ID NO: 258837 - DNA, 15 bp, Homo sapiens
catggaacactgggg

SEQ ID NO: 258838 - DNA, 15 bp, Homo sapiens
gcatggaacactggg

SEQ ID NO: 258839 - DNA, 15 bp, Homo sapiens
ggcatggaacactgg

SEQ ID NO: 258840 - DNA, 15 bp, Homo sapiens
aggcatggaacactg

SEQ ID NO: 258841 - DNA, 15 bp, Homo sapiens
caggcatggaacact

SEQ ID NO: 258842 - DNA, 15 bp, Homo sapiens
ccaggcatggaacac

SEQ ID NO: 258843 - DNA, 15 bp, Homo sapiens
accaggcatggaaca

SEQ ID NO: 258844 - DNA, 15 bp, Homo sapiens
caccaggcatggaac

SEQ ID NO: 258845 - DNA, 15 bp, Homo sapiens
gcaccaggcatggaa

SEQ ID NO: 258846 - DNA, 15 bp, Homo sapiens
agcaccaggcatgga

SEQ ID NO: 258847 - DNA, 15 bp, Homo sapiens
gagcaccaggcatgg

SEQ ID NO: 258848 - DNA, 15 bp, Homo sapiens
agagcaccaggcatg

SEQ ID NO: 258849 - DNA, 15 bp, Homo sapiens
cagagcaccaggcat

SEQ ID NO: 258850 - DNA, 15 bp, Homo sapiens
ccagagcaccaggca

SEQ ID NO: 258851 - DNA, 15 bp, Homo sapiens
cccagagcaccaggc

SEQ ID NO: 258852 - DNA, 15 bp, Homo sapiens
ccccagagcaccagg

SEQ ID NO: 258853 - DNA, 15 bp, Homo sapiens
tccccagagcaccag

SEQ ID NO: 258854 - DNA, 15 bp, Homo sapiens
ctccccagagcacca

SEQ ID NO: 258855 - DNA, 15 bp, Homo sapiens
cctccccagagcacc

SEQ ID NO: 258856 - DNA, 15 bp, Homo sapiens
ccctccccagagcac

SEQ ID NO: 258857 - DNA, 15 bp, Homo sapiens
tccctccccagagca

SEQ ID NO: 258858 - DNA, 15 bp, Homo sapiens
ttccctccccagagc

SEQ ID NO: 258859 - DNA, 15 bp, Homo sapiens
cttccctccccagag

SEQ ID NO: 258860 - DNA, 15 bp, Homo sapiens
gcttccctccccaga

SEQ ID NO: 258861 - DNA, 15 bp, Homo sapiens
tgcttccctccccag

SEQ ID NO: 258862 - DNA, 15 bp, Homo sapiens
ctgcttccctcccca

SEQ ID NO: 258863 - DNA, 15 bp, Homo sapiens
tctgcttccctcccc

SEQ ID NO: 258864 - DNA, 15 bp, Homo sapiens
atctgcttccctccc

SEQ ID NO: 258865 - DNA, 15 bp, Homo sapiens
catctgcttccctcc

SEQ ID NO: 258866 - DNA, 15 bp, Homo sapiens
ccatctgcttccctc

SEQ ID NO: 258867 - DNA, 15 bp, Homo sapiens
gccatctgcttccct

SEQ ID NO: 258868 - DNA, 15 bp, Homo sapiens
tgccatctgcttccc

SEQ ID NO: 258869 - DNA, 15 bp, Homo sapiens
ctgccatctgcttcc

SEQ ID NO: 258870 - DNA, 15 bp, Homo sapiens
cctgccatctgcttc

SEQ ID NO: 258871 - DNA, 15 bp, Homo sapiens
ccctgccatctgctt

SEQ ID NO: 258872 - DNA, 15 bp, Homo sapiens
gccctgccatctgct

SEQ ID NO: 258873 - DNA, 15 bp, Homo sapiens
agccctgccatctgc

SEQ ID NO: 258874 - DNA, 15 bp, Homo sapiens
cagccctgccatctg

SEQ ID NO: 258875 - DNA, 15 bp, Homo sapiens
acagccctgccatct

SEQ ID NO: 258876 - DNA, 15 bp, Homo sapiens
gacagccctgccatc

SEQ ID NO: 258877 - DNA, 15 bp, Homo sapiens
ggacagccctgccat

SEQ ID NO: 258878 - DNA, 15 bp, Homo sapiens
tggacagccctgcca

SEQ ID NO: 258879 - DNA, 15 bp, Homo sapiens
atggacagccctgcc

SEQ ID NO: 258880 - DNA, 15 bp, Homo sapiens
aatggacagccctgc

SEQ ID NO: 258881 - DNA, 15 bp, Homo sapiens
gaatggacagccctg

SEQ ID NO: 258882 - DNA, 15 bp, Homo sapiens
agaatggacagccct

SEQ ID NO: 258883 - DNA, 15 bp, Homo sapiens
cagaatggacagccc

SEQ ID NO: 258884 - DNA, 15 bp, Homo sapiens
gcagaatggacagcc

SEQ ID NO: 258885 - DNA, 15 bp, Homo sapiens
ggcagaatggacagc

SEQ ID NO: 258886 - DNA, 15 bp, Homo sapiens
tggcagaatggacag

SEQ ID NO: 258887 - DNA, 15 bp, Homo sapiens
gtggcagaatggaca

SEQ ID NO: 258888 - DNA, 15 bp, Homo sapiens
ggtggcagaatggac

SEQ ID NO: 258889 - DNA, 15 bp, Homo sapiens
gggtggcagaatgga

SEQ ID NO: 258890 - DNA, 15 bp, Homo sapiens
tgggtggcagaatgg

SEQ ID NO: 258891 - DNA, 15 bp, Homo sapiens
ctgggtggcagaatg

SEQ ID NO: 258892 - DNA, 15 bp, Homo sapiens
actgggtggcagaat

SEQ ID NO: 258893 - DNA, 15 bp, Homo sapiens
cactgggtggcagaa

SEQ ID NO: 258894 - DNA, 15 bp, Homo sapiens
tcactgggtggcaga

SEQ ID NO: 258895 - DNA, 15 bp, Homo sapiens
ctcactgggtggcag

SEQ ID NO: 258896 - DNA, 15 bp, Homo sapiens
cctcactgggtggca

SEQ ID NO: 258897 - DNA, 15 bp, Homo sapiens
gcctcactgggtggc

SEQ ID NO: 258898 - DNA, 15 bp, Homo sapiens
tgcctcactgggtgg

SEQ ID NO: 258899 - DNA, 15 bp, Homo sapiens
ctgcctcactgggtg

SEQ ID NO: 258900 - DNA, 15 bp, Homo sapiens
cctgcctcactgggt

SEQ ID NO: 258901 - DNA, 15 bp, Homo sapiens
tcctgcctcactggg

SEQ ID NO: 258902 - DNA, 15 bp, Homo sapiens
ctcctgcctcactgg

SEQ ID NO: 258903 - DNA, 15 bp, Homo sapiens
cctcctgcctcactg

SEQ ID NO: 258904 - DNA, 15 bp, Homo sapiens
acctcctgcctcact

SEQ ID NO: 258905 - DNA, 15 bp, Homo sapiens
gacctcctgcctcac

SEQ ID NO: 258906 - DNA, 15 bp, Homo sapiens
tgacctcctgcctca

SEQ ID NO: 258907 - DNA, 15 bp, Homo sapiens
ttgacctcctgcctc

SEQ ID NO: 258908 - DNA, 15 bp, Homo sapiens
gttgacctcctgcct

SEQ ID NO: 258909 - DNA, 15 bp, Homo sapiens
agttgacctcctgcc

SEQ ID NO: 258910 - DNA, 15 bp, Homo sapiens
tagttgacctcctgc

SEQ ID NO: 258911 - DNA, 15 bp, Homo sapiens
ctagttgacctcctg

SEQ ID NO: 258912 - DNA, 15 bp, Homo sapiens
cctagttgacctcct

SEQ ID NO: 258913 - DNA, 15 bp, Homo sapiens
ccctagttgacctcc

SEQ ID NO: 258914 - DNA, 15 bp, Homo sapiens
accctagttgacctc

SEQ ID NO: 258915 - DNA, 15 bp, Homo sapiens
taccctagttgacct

SEQ ID NO: 258916 - DNA, 15 bp, Homo sapiens
ttaccctagttgacc

SEQ ID NO: 258917 - DNA, 15 bp, Homo sapiens
gttaccctagttgac

SEQ ID NO: 258918 - DNA, 15 bp, Homo sapiens
tgttaccctagttga

SEQ ID NO: 258919 - DNA, 15 bp, Homo sapiens
ctgttaccctagttg

SEQ ID NO: 258920 - DNA, 15 bp, Homo sapiens
gctgttaccctagtt

SEQ ID NO: 258921 - DNA, 15 bp, Homo sapiens
tgctgttaccctagt

SEQ ID NO: 258922 - DNA, 15 bp, Homo sapiens
ctgctgttaccctag

SEQ ID NO: 258923 - DNA, 15 bp, Homo sapiens
gctgctgttacccta

SEQ ID NO: 258924 - DNA, 15 bp, Homo sapiens
tgctgctgttaccct

SEQ ID NO: 258925 - DNA, 15 bp, Homo sapiens
ctgctgctgttaccc

SEQ ID NO: 258926 - DNA, 15 bp, Homo sapiens
cctgctgctgttacc

SEQ ID NO: 258927 - DNA, 15 bp, Homo sapiens
acctgctgctgttac

SEQ ID NO: 258928 - DNA, 15 bp, Homo sapiens
cacctgctgctgtta

SEQ ID NO: 258929 - DNA, 15 bp, Homo sapiens
ccacctgctgctgtt

SEQ ID NO: 258930 - DNA, 15 bp, Homo sapiens
cccacctgctgctgt

SEQ ID NO: 258931 - DNA, 15 bp, Homo sapiens
ccccacctgctgctg

SEQ ID NO: 258932 - DNA, 15 bp, Homo sapiens
tccccacctgctgct

SEQ ID NO: 258933 - DNA, 15 bp, Homo sapiens
ctccccacctgctgc

SEQ ID NO: 258934 - DNA, 15 bp, Homo sapiens
cctccccacctgctg

SEQ ID NO: 258935 - DNA, 15 bp, Homo sapiens
acctccccacctgct

SEQ ID NO: 258936 - DNA, 15 bp, Homo sapiens
cacctccccacctgc

SEQ ID NO: 258937 - DNA, 15 bp, Homo sapiens
ccacctccccacctg

SEQ ID NO: 258938 - DNA, 15 bp, Homo sapiens
cccacctccccacct

SEQ ID NO: 258939 - DNA, 15 bp, Homo sapiens
aaccccacctcccca

SEQ ID NO: 258940 - DNA, 15 bp, Homo sapiens
aaaccccacctcccc

SEQ ID NO: 258941 - DNA, 15 bp, Homo sapiens
gaaaccccacctccc

SEQ ID NO: 258942 - DNA, 15 bp, Homo sapiens
agaaaccccacctcc

SEQ ID NO: 258943 - DNA, 15 bp, Homo sapiens
cagaaaccccacctc

SEQ ID NO: 258944 - DNA, 15 bp, Homo sapiens
ccagaaaccccacct

SEQ ID NO: 258945 - DNA, 15 bp, Homo sapiens
accagaaaccccacc

SEQ ID NO: 258946 - DNA, 15 bp, Homo sapiens
gaccagaaaccccac

SEQ ID NO: 258947 - DNA, 15 bp, Homo sapiens
agaccagaaacccca

SEQ ID NO: 258948 - DNA, 15 bp, Homo sapiens
cagaccagaaacccc

SEQ ID NO: 258949 - DNA, 15 bp, Homo sapiens
acagaccagaaaccc

SEQ ID NO: 258950 - DNA, 15 bp, Homo sapiens
cacagaccagaaacc

SEQ ID NO: 258951 - DNA, 15 bp, Homo sapiens
gcacagaccagaaac

SEQ ID NO: 258952 - DNA, 15 bp, Homo sapiens
tgcacagaccagaaa

SEQ ID NO: 258953 - DNA, 15 bp, Homo sapiens
atgcacagaccagaa

SEQ ID NO: 258954 - DNA, 15 bp, Homo sapiens
catgcacagaccaga

SEQ ID NO: 258955 - DNA, 15 bp, Homo sapiens
gcatgcacagaccag

SEQ ID NO: 258956 - DNA, 15 bp, Homo sapiens
tgcatgcacagacca

SEQ ID NO: 258957 - DNA, 15 bp, Homo sapiens
ctgcatgcacagacc

SEQ ID NO: 258958 - DNA, 15 bp, Homo sapiens
cctgcatgcacagac

SEQ ID NO: 258959 - DNA, 15 bp, Homo sapiens
ccctgcatgcacaga

SEQ ID NO: 258960 - DNA, 15 bp, Homo sapiens
cccctgcatgcacag

SEQ ID NO: 258961 - DNA, 15 bp, Homo sapiens
tcccctgcatgcaca

SEQ ID NO: 258962 - DNA, 15 bp, Homo sapiens
gtcccctgcatgcac

SEQ ID NO: 258963 - DNA, 15 bp, Homo sapiens
tgtcccctgcatgca

SEQ ID NO: 258964 - DNA, 15 bp, Homo sapiens
ttgtcccctgcatgc

SEQ ID NO: 258965 - DNA, 15 bp, Homo sapiens
gttgtcccctgcatg

SEQ ID NO: 258966 - DNA, 15 bp, Homo sapiens
tgttgtcccctgcat

SEQ ID NO: 258967 - DNA, 15 bp, Homo sapiens
ctgttgtcccctgca

SEQ ID NO: 258968 - DNA, 15 bp, Homo sapiens
tctgttgtcccctgc

SEQ ID NO: 258969 - DNA, 15 bp, Homo sapiens
atctgttgtcccctg

SEQ ID NO: 258970 - DNA, 15 bp, Homo sapiens
gatctgttgtcccct

SEQ ID NO: 258971 - DNA, 15 bp, Homo sapiens
tgatctgttgtcccc

SEQ ID NO: 258972 - DNA, 15 bp, Homo sapiens
atgatctgttgtccc

SEQ ID NO: 258973 - DNA, 15 bp, Homo sapiens
gatgatctgttgtcc

SEQ ID NO: 258974 - DNA, 15 bp, Homo sapiens
tgatgatctgttgtc

SEQ ID NO: 258975 - DNA, 15 bp, Homo sapiens
ttgatgatctgttgt

SEQ ID NO: 258976 - DNA, 15 bp, Homo sapiens
attgatgatctgttg

SEQ ID NO: 258977 - DNA, 15 bp, Homo sapiens
cattgatgatctgtt

SEQ ID NO: 258978 - DNA, 15 bp, Homo sapiens
tcattgatgatctgt

SEQ ID NO: 258979 - DNA, 15 bp, Homo sapiens
atcattgatgatctg

SEQ ID NO: 258980 - DNA, 15 bp, Homo sapiens
gatcattgatgatct

SEQ ID NO: 258981 - DNA, 15 bp, Homo sapiens
ggatcattgatgatc

SEQ ID NO: 258982 - DNA, 15 bp, Homo sapiens
tggatcattgatgat

SEQ ID NO: 258983 - DNA, 15 bp, Homo sapiens
atggatcattgatga

SEQ ID NO: 258984 - DNA, 15 bp, Homo sapiens
catggatcattgatg

SEQ ID NO: 258985 - DNA, 15 bp, Homo sapiens
ccatggatcattgat

SEQ ID NO: 258986 - DNA, 15 bp, Homo sapiens
cccatggatcattga

SEQ ID NO: 258987 - DNA, 15 bp, Homo sapiens
gcccatggatcattg

SEQ ID NO: 258988 - DNA, 15 bp, Homo sapiens
tgcccatggatcatt

SEQ ID NO: 258989 - DNA, 15 bp, Homo sapiens
ctgcccatggatcat

SEQ ID NO: 258990 - DNA, 15 bp, Homo sapiens
tctgcccatggatca

SEQ ID NO: 258991 - DNA, 15 bp, Homo sapiens
ttctgcccatggatc

SEQ ID NO: 258992 - DNA, 15 bp, Homo sapiens
gttctgcccatggat

SEQ ID NO: 258993 - DNA, 15 bp, Homo sapiens
tgttctgcccatgga

SEQ ID NO: 258994 - DNA, 15 bp, Homo sapiens
ctgttctgcccatgg

SEQ ID NO: 258995 - DNA, 15 bp, Homo sapiens
gctgttctgcccatg

SEQ ID NO: 258996 - DNA, 15 bp, Homo sapiens
ggctgttctgcccat

SEQ ID NO: 258997 - DNA, 15 bp, Homo sapiens
gggctgttctgccca

SEQ ID NO: 258998 - DNA, 15 bp, Homo sapiens
agggctgttctgccc

SEQ ID NO: 258999 - DNA, 15 bp, Homo sapiens
gagggctgttctgcc

SEQ ID NO: 259000 - DNA, 15 bp, Homo sapiens
tgagggctgttctgc

SEQ ID NO: 259001 - DNA, 15 bp, Homo sapiens
atgagggctgttctg

SEQ ID NO: 259002 - DNA, 15 bp, Homo sapiens
catgagggctgttct

SEQ ID NO: 259003 - DNA, 15 bp, Homo sapiens
ccatgagggctgttc

SEQ ID NO: 259004 - DNA, 15 bp, Homo sapiens
tccatgagggctgtt

SEQ ID NO: 259005 - DNA, 15 bp, Homo sapiens
ttccatgagggctgt

SEQ ID NO: 259006 - DNA, 15 bp, Homo sapiens
gttccatgagggctg

SEQ ID NO: 259007 - DNA, 15 bp, Homo sapiens
agttccatgagggct

SEQ ID NO: 259008 - DNA, 15 bp, Homo sapiens
tagttccatgagggc

SEQ ID NO: 259009 - DNA, 15 bp, Homo sapiens
ttagttccatgaggg

SEQ ID NO: 259010 - DNA, 15 bp, Homo sapiens
gttagttccatgagg

SEQ ID NO: 259011 - DNA, 15 bp, Homo sapiens
tgttagttccatgag

SEQ ID NO: 259012 - DNA, 15 bp, Homo sapiens
gtgttagttccatga

SEQ ID NO: 259013 - DNA, 15 bp, Homo sapiens
agtgttagttccatg

SEQ ID NO: 259014 - DNA, 15 bp, Homo sapiens
cagtgttagttccat

SEQ ID NO: 259015 - DNA, 15 bp, Homo sapiens
gcagtgttagttcca

SEQ ID NO: 259016 - DNA, 15 bp, Homo sapiens
agcagtgttagttcc

SEQ ID NO: 259017 - DNA, 15 bp, Homo sapiens
cagcagtgttagttc

SEQ ID NO: 259018 - DNA, 15 bp, Homo sapiens
ccagcagtgttagtt

SEQ ID NO: 259019 - DNA, 15 bp, Homo sapiens
gccagcagtgttagt

SEQ ID NO: 259020 - DNA, 15 bp, Homo sapiens
tgccagcagtgttag

SEQ ID NO: 259021 - DNA, 15 bp, Homo sapiens
ctgccagcagtgtta

SEQ ID NO: 259022 - DNA, 15 bp, Homo sapiens
tctgccagcagtgtt

SEQ ID NO: 259023 - DNA, 15 bp, Homo sapiens
ttctgccagcagtgt

SEQ ID NO: 259024 - DNA, 15 bp, Homo sapiens
cttctgccagcagtg

SEQ ID NO: 259025 - DNA, 15 bp, Homo sapiens
ccttctgccagcagt

SEQ ID NO: 259026 - DNA, 15 bp, Homo sapiens
accttctgccagcag

SEQ ID NO: 259027 - DNA, 15 bp, Homo sapiens
caccttctgccagca

SEQ ID NO: 259028 - DNA, 15 bp, Homo sapiens
ccaccttctgccagc

SEQ ID NO: 259029 - DNA, 15 bp, Homo sapiens
gccaccttctgccag

SEQ ID NO: 259030 - DNA, 15 bp, Homo sapiens
tgccaccttctgcca

SEQ ID NO: 259031 - DNA, 15 bp, Homo sapiens
ctgccaccttctgcc

SEQ ID NO: 259032 - DNA, 15 bp, Homo sapiens
gctgccaccttctgc

SEQ ID NO: 259033 - DNA, 15 bp, Homo sapiens
tgctgccaccttctg

SEQ ID NO: 259034 - DNA, 15 bp, Homo sapiens
ctgctgccaccttct

SEQ ID NO: 259035 - DNA, 15 bp, Homo sapiens
gctgctgccaccttc

SEQ ID NO: 259036 - DNA, 15 bp, Homo sapiens
agctgctgccacctt

SEQ ID NO: 259037 - DNA, 15 bp, Homo sapiens
cagctgctgccacct

SEQ ID NO: 259038 - DNA, 15 bp, Homo sapiens
ccagctgctgccacc

SEQ ID NO: 259039 - DNA, 15 bp, Homo sapiens
tccagctgctgccac

SEQ ID NO: 259040 - DNA, 15 bp, Homo sapiens
ctccagctgctgcca

SEQ ID NO: 259041 - DNA, 15 bp, Homo sapiens
cctccagctgctgcc

SEQ ID NO: 259042 - DNA, 15 bp, Homo sapiens
gcctccagctgctgc

SEQ ID NO: 259043 - DNA, 15 bp, Homo sapiens
agcctccagctgctg

SEQ ID NO: 259044 - DNA, 15 bp, Homo sapiens
cagcctccagctgct

SEQ ID NO: 259045 - DNA, 15 bp, Homo sapiens
gcagcctccagctgc

SEQ ID NO: 259046 - DNA, 15 bp, Homo sapiens
agcagcctccagctg

SEQ ID NO: 259047 - DNA, 15 bp, Homo sapiens
aagcagcctccagct

SEQ ID NO: 259048 - DNA, 15 bp, Homo sapiens
gaagcagcctccagc

SEQ ID NO: 259049 - DNA, 15 bp, Homo sapiens
tgaagcagcctccag

SEQ ID NO: 259050 - DNA, 15 bp, Homo sapiens
ctgaagcagcctcca

SEQ ID NO: 259051 - DNA, 15 bp, Homo sapiens
gctgaagcagcctcc

SEQ ID NO: 259052 - DNA, 15 bp, Homo sapiens
agctgaagcagcctc

SEQ ID NO: 259053 - DNA, 15 bp, Homo sapiens
gagctgaagcagcct

SEQ ID NO: 259054 - DNA, 15 bp, Homo sapiens
agagctgaagcagcc

SEQ ID NO: 259055 - DNA, 15 bp, Homo sapiens
aagagctgaagcagc

SEQ ID NO: 259056 - DNA, 15 bp, Homo sapiens
caagagctgaagcag

SEQ ID NO: 259057 - DNA, 15 bp, Homo sapiens
tcaagagctgaagca

SEQ ID NO: 259058 - DNA, 15 bp, Homo sapiens
atcaagagctgaagc

SEQ ID NO: 259059 - DNA, 15 bp, Homo sapiens
gatcaagagctgaag

SEQ ID NO: 259060 - DNA, 15 bp, Homo sapiens
tgatcaagagctgaa

SEQ ID NO: 259061 - DNA, 15 bp, Homo sapiens
ttgatcaagagctga

SEQ ID NO: 259062 - DNA, 15 bp, Homo sapiens
cttgatcaagagctg

SEQ ID NO: 259063 - DNA, 15 bp, Homo sapiens
gcttgatcaagagct

SEQ ID NO: 259064 - DNA, 15 bp, Homo sapiens
tgcttgatcaagagc

SEQ ID NO: 259065 - DNA, 15 bp, Homo sapiens
gtgcttgatcaagag

SEQ ID NO: 259066 - DNA, 15 bp, Homo sapiens
tgtgcttgatcaaga

SEQ ID NO: 259067 - DNA, 15 bp, Homo sapiens
ctgtgcttgatcaag

SEQ ID NO: 259068 - DNA, 15 bp, Homo sapiens
tctgtgcttgatcaa

SEQ ID NO: 259069 - DNA, 15 bp, Homo sapiens
ttctgtgcttgatca

SEQ ID NO: 259070 - DNA, 15 bp, Homo sapiens
attctgtgcttgatc

SEQ ID NO: 259071 - DNA, 15 bp, Homo sapiens
tattctgtgcttgat

SEQ ID NO: 259072 - DNA, 15 bp, Homo sapiens
ttattctgtgcttga

SEQ ID NO: 259073 - DNA, 15 bp, Homo sapiens
attattctgtgcttg

SEQ ID NO: 259074 - DNA, 15 bp, Homo sapiens
cattattctgtgctt

SEQ ID NO: 259075 - DNA, 15 bp, Homo sapiens
acattattctgtgct

SEQ ID NO: 259076 - DNA, 15 bp, Homo sapiens
aacattattctgtgc

SEQ ID NO: 259077 - DNA, 15 bp, Homo sapiens
caacattattctgtg

SEQ ID NO: 259078 - DNA, 15 bp, Homo sapiens
ccaacattattctgt

SEQ ID NO: 259079 - DNA, 15 bp, Homo sapiens
cccaacattattctg

SEQ ID NO: 259080 - DNA, 15 bp, Homo sapiens
acccaacattattct

SEQ ID NO: 259081 - DNA, 15 bp, Homo sapiens
cacccaacattattc

SEQ ID NO: 259082 - DNA, 15 bp, Homo sapiens
ccacccaacattatt

SEQ ID NO: 259083 - DNA, 15 bp, Homo sapiens
cccacccaacattat

SEQ ID NO: 259084 - DNA, 15 bp, Homo sapiens
acccacccaacatta

SEQ ID NO: 259085 - DNA, 15 bp, Homo sapiens
cacccacccaacatt

SEQ ID NO: 259086 - DNA, 15 bp, Homo sapiens
ccacccacccaacat

SEQ ID NO: 259087 - DNA, 15 bp, Homo sapiens
gccacccacccaaca

SEQ ID NO: 259088 - DNA, 15 bp, Homo sapiens
agccacccacccaac

SEQ ID NO: 259089 - DNA, 15 bp, Homo sapiens
cagccacccacccaa

SEQ ID NO: 259090 - DNA, 15 bp, Homo sapiens
tcagccacccaccca

SEQ ID NO: 259091 - DNA, 15 bp, Homo sapiens
ctcagccacccaccc

SEQ ID NO: 259092 - DNA, 15 bp, Homo sapiens
tctcagccacccacc

SEQ ID NO: 259093 - DNA, 15 bp, Homo sapiens
ctctcagccacccac

SEQ ID NO: 259094 - DNA, 15 bp, Homo sapiens
actctcagccaccca

SEQ ID NO: 259095 - DNA, 15 bp, Homo sapiens
aactctcagccaccc

SEQ ID NO: 259096 - DNA, 15 bp, Homo sapiens
caactctcagccacc

SEQ ID NO: 259097 - DNA, 15 bp, Homo sapiens
gcaactctcagccac

SEQ ID NO: 259098 - DNA, 15 bp, Homo sapiens
agcaactctcagcca

SEQ ID NO: 259099 - DNA, 15 bp, Homo sapiens
cagcaactctcagcc

SEQ ID NO: 259100 - DNA, 15 bp, Homo sapiens
gcagcaactctcagc

SEQ ID NO: 259101 - DNA, 15 bp, Homo sapiens
tgcagcaactctcag

SEQ ID NO: 259102 - DNA, 15 bp, Homo sapiens
atgcagcaactctca

SEQ ID NO: 259103 - DNA, 15 bp, Homo sapiens
aatgcagcaactctc

SEQ ID NO: 259104 - DNA, 15 bp, Homo sapiens
aaatgcagcaactct

SEQ ID NO: 259105 - DNA, 15 bp, Homo sapiens
taaatgcagcaactc

SEQ ID NO: 259106 - DNA, 15 bp, Homo sapiens
ataaatgcagcaact

SEQ ID NO: 259107 - DNA, 15 bp, Homo sapiens
cataaatgcagcaac

SEQ ID NO: 259108 - DNA, 15 bp, Homo sapiens
tcataaatgcagcaa

SEQ ID NO: 259109 - DNA, 15 bp, Homo sapiens
ttcataaatgcagca

SEQ ID NO: 259110 - DNA, 15 bp, Homo sapiens
attcataaatgcagc

SEQ ID NO: 259111 - DNA, 15 bp, Homo sapiens
aattcataaatgcag

SEQ ID NO: 259112 - DNA, 15 bp, Homo sapiens
caattcataaatgca

SEQ ID NO: 259113 - DNA, 15 bp, Homo sapiens
acaattcataaatgc

SEQ ID NO: 259114 - DNA, 15 bp, Homo sapiens
gacaattcataaatg

SEQ ID NO: 259115 - DNA, 15 bp, Homo sapiens
tgacaattcataaat

SEQ ID NO: 259116 - DNA, 15 bp, Homo sapiens
gtgacaattcataaa

SEQ ID NO: 259117 - DNA, 15 bp, Homo sapiens
agtgacaattcataa

SEQ ID NO: 259118 - DNA, 15 bp, Homo sapiens
gagtgacaattcata

SEQ ID NO: 259119 - DNA, 15 bp, Homo sapiens
tgagtgacaattcat

SEQ ID NO: 259120 - DNA, 15 bp, Homo sapiens
ctgagtgacaattca

SEQ ID NO: 259121 - DNA, 15 bp, Homo sapiens
actgagtgacaattc

SEQ ID NO: 259122 - DNA, 15 bp, Homo sapiens
cactgagtgacaatt

SEQ ID NO: 259123 - DNA, 15 bp, Homo sapiens
ccactgagtgacaat

SEQ ID NO: 259124 - DNA, 15 bp, Homo sapiens
gccactgagtgacaa

SEQ ID NO: 259125 - DNA, 15 bp, Homo sapiens
tgccactgagtgaca

SEQ ID NO: 259126 - DNA, 15 bp, Homo sapiens
ctgccactgagtgac

SEQ ID NO: 259127 - DNA, 15 bp, Homo sapiens
gctgccactgagtga

SEQ ID NO: 259128 - DNA, 15 bp, Homo sapiens
tgctgccactgagtg

SEQ ID NO: 259129 - DNA, 15 bp, Homo sapiens
gtgctgccactgagt

SEQ ID NO: 259130 - DNA, 15 bp, Homo sapiens
agtgctgccactgag

SEQ ID NO: 259131 - DNA, 15 bp, Homo sapiens
cagtgctgccactga

SEQ ID NO: 259132 - DNA, 15 bp, Homo sapiens
tcagtgctgccactg

SEQ ID NO: 259133 - DNA, 15 bp, Homo sapiens
ctcagtgctgccact

SEQ ID NO: 259134 - DNA, 15 bp, Homo sapiens
cctcagtgctgccac

SEQ ID NO: 259135 - DNA, 15 bp, Homo sapiens
acctcagtgctgcca

SEQ ID NO: 259136 - DNA, 15 bp, Homo sapiens
gacctcagtgctgcc

SEQ ID NO: 259137 - DNA, 15 bp, Homo sapiens
ggacctcagtgctgc

SEQ ID NO: 259138 - DNA, 15 bp, Homo sapiens
gggacctcagtgctg

SEQ ID NO: 259139 - DNA, 15 bp, Homo sapiens
ggggacctcagtgct

SEQ ID NO: 259140 - DNA, 15 bp, Homo sapiens
tggggacctcagtgc

SEQ ID NO: 259141 - DNA, 15 bp, Homo sapiens
ttggggacctcagtg

SEQ ID NO: 259142 - DNA, 15 bp, Homo sapiens
cttggggacctcagt

SEQ ID NO: 259143 - DNA, 15 bp, Homo sapiens
gcttggggacctcag

SEQ ID NO: 259144 - DNA, 15 bp, Homo sapiens
agcttggggacctca

SEQ ID NO: 259145 - DNA, 15 bp, Homo sapiens
gagcttggggacctc

SEQ ID NO: 259146 - DNA, 15 bp, Homo sapiens
agagcttggggacct

SEQ ID NO: 259147 - DNA, 15 bp, Homo sapiens
cagagcttggggacc

SEQ ID NO: 259148 - DNA, 15 bp, Homo sapiens
acagagcttggggac

SEQ ID NO: 259149 - DNA, 15 bp, Homo sapiens
aacagagcttgggga

SEQ ID NO: 259150 - DNA, 15 bp, Homo sapiens
aaacagagcttgggg

SEQ ID NO: 259151 - DNA, 15 bp, Homo sapiens
taaacagagcttggg

SEQ ID NO: 259152 - DNA, 15 bp, Homo sapiens
gtaaacagagcttgg

SEQ ID NO: 259153 - DNA, 15 bp, Homo sapiens
tgtaaacagagcttg

SEQ ID NO: 259154 - DNA, 15 bp, Homo sapiens
ttgtaaacagagctt

SEQ ID NO: 259155 - DNA, 15 bp, Homo sapiens
tttgtaaacagagct

SEQ ID NO: 259156 - DNA, 15 bp, Homo sapiens
atttgtaaacagagc

SEQ ID NO: 259157 - DNA, 15 bp, Homo sapiens
catttgtaaacagag

SEQ ID NO: 259158 - DNA, 15 bp, Homo sapiens
ccatttgtaaacaga

SEQ ID NO: 259159 - DNA, 15 bp, Homo sapiens
tccatttgtaaacag

SEQ ID NO: 259160 - DNA, 15 bp, Homo sapiens
atccatttgtaaaca

SEQ ID NO: 259161 - DNA, 15 bp, Homo sapiens
aatccatttgtaaac

SEQ ID NO: 259162 - DNA, 15 bp, Homo sapiens
aaatccatttgtaaa

SEQ ID NO: 259163 - DNA, 15 bp, Homo sapiens
aaaatccatttgtaa

SEQ ID NO: 259164 - DNA, 15 bp, Homo sapiens
aaaaatccatttgta

SEQ ID NO: 259165 - DNA, 15 bp, Homo sapiens
aaaaaatccatttgt

SEQ ID NO: 259166 - DNA, 15 bp, Homo sapiens
caaaaaatccatttg

SEQ ID NO: 259167 - DNA, 15 bp, Homo sapiens
gcaaaaaatccattt

SEQ ID NO: 259168 - DNA, 15 bp, Homo sapiens
agcaaaaaatccatt

SEQ ID NO: 259169 - DNA, 15 bp, Homo sapiens
gagcaaaaaatccat

SEQ ID NO: 259170 - DNA, 15 bp, Homo sapiens
tgagcaaaaaatcca

SEQ ID NO: 259171 - DNA, 15 bp, Homo sapiens
ttgagcaaaaaatcc

SEQ ID NO: 259172 - DNA, 15 bp, Homo sapiens
tttgagcaaaaaatc

SEQ ID NO: 259173 - DNA, 15 bp, Homo sapiens
atttgagcaaaaaat

SEQ ID NO: 259174 - DNA, 15 bp, Homo sapiens
catttgagcaaaaaa

SEQ ID NO: 259175 - DNA, 15 bp, Homo sapiens
acatttgagcaaaaa

SEQ ID NO: 259176 - DNA, 15 bp, Homo sapiens
aacatttgagcaaaa

SEQ ID NO: 259177 - DNA, 15 bp, Homo sapiens
aaacatttgagcaaa

SEQ ID NO: 259178 - DNA, 15 bp, Homo sapiens
gaaacatttgagcaa

SEQ ID NO: 259179 - DNA, 15 bp, Homo sapiens
ggaaacatttgagca

SEQ ID NO: 259180 - DNA, 15 bp, Homo sapiens
aggaaacatttgagc

SEQ ID NO: 259181 - DNA, 15 bp, Homo sapiens
aaggaaacatttgag

SEQ ID NO: 259182 - DNA, 15 bp, Homo sapiens
taaggaaacatttga

SEQ ID NO: 259183 - DNA, 15 bp, Homo sapiens
ttaaggaaacatttg

SEQ ID NO: 259184 - DNA, 15 bp, Homo sapiens
gttaaggaaacattt

SEQ ID NO: 259185 - DNA, 15 bp, Homo sapiens
agttaaggaaacatt

SEQ ID NO: 259186 - DNA, 15 bp, Homo sapiens
gagttaaggaaacat

SEQ ID NO: 259187 - DNA, 15 bp, Homo sapiens
tgagttaaggaaaca

SEQ ID NO: 259188 - DNA, 15 bp, Homo sapiens
ctgagttaaggaaac

SEQ ID NO: 259189 - DNA, 15 bp, Homo sapiens
tctgagttaaggaaa

SEQ ID NO: 259190 - DNA, 15 bp, Homo sapiens
ctctgagttaaggaa

SEQ ID NO: 259191 - DNA, 15 bp, Homo sapiens
gctctgagttaagga

SEQ ID NO: 259192 - DNA, 15 bp, Homo sapiens
tgctctgagttaagg

SEQ ID NO: 259193 - DNA, 15 bp, Homo sapiens
ttgctctgagttaag

SEQ ID NO: 259194 - DNA, 15 bp, Homo sapiens
gttgctctgagttaa

SEQ ID NO: 259195 - DNA, 15 bp, Homo sapiens
agttgctctgagtta

SEQ ID NO: 259196 - DNA, 15 bp, Homo sapiens
gagttgctctgagtt

SEQ ID NO: 259197 - DNA, 15 bp, Homo sapiens
agagttgctctgagt

SEQ ID NO: 259198 - DNA, 15 bp, Homo sapiens
gagagttgctctgag

SEQ ID NO: 259199 - DNA, 15 bp, Homo sapiens
agagagttgctctga

SEQ ID NO: 259200 - DNA, 15 bp, Homo sapiens
gagagagttgctctg

SEQ ID NO: 259201 - DNA, 15 bp, Homo sapiens
agagagagttgctct

SEQ ID NO: 259202 - DNA, 15 bp, Homo sapiens
gagagagagttgctc

SEQ ID NO: 259203 - DNA, 15 bp, Homo sapiens
ggagagagagttgct

SEQ ID NO: 259204 - DNA, 15 bp, Homo sapiens
aggagagagagttgc

SEQ ID NO: 259205 - DNA, 15 bp, Homo sapiens
aaggagagagagttg

SEQ ID NO: 259206 - DNA, 15 bp, Homo sapiens
aaaggagagagagtt

SEQ ID NO: 259207 - DNA, 15 bp, Homo sapiens
aaaaggagagagagt

SEQ ID NO: 259208 - DNA, 15 bp, Homo sapiens
aaaaaggagagagag

SEQ ID NO: 259209 - DNA, 15 bp, Homo sapiens
aaaaaaggagagaga

SEQ ID NO: 259210 - DNA, 15 bp, Homo sapiens
aaaaaaaggagagag

SEQ ID NO: 259211 - DNA, 15 bp, Homo sapiens
gaaaaaaaggagaga

SEQ ID NO: 259212 - DNA, 15 bp, Homo sapiens
ggaaaaaaaggagag

SEQ ID NO: 259213 - DNA, 15 bp, Homo sapiens
gggaaaaaaaggaga

SEQ ID NO: 259214 - DNA, 15 bp, Homo sapiens
agggaaaaaaaggag

SEQ ID NO: 259215 - DNA, 15 bp, Homo sapiens
gagggaaaaaaagga

SEQ ID NO: 259216 - DNA, 15 bp, Homo sapiens
agagggaaaaaaagg

SEQ ID NO: 259217 - DNA, 15 bp, Homo sapiens
gagagggaaaaaaag

SEQ ID NO: 259218 - DNA, 15 bp, Homo sapiens
tgagagggaaaaaaa

SEQ ID NO: 259219 - DNA, 15 bp, Homo sapiens
atgagagggaaaaaa

SEQ ID NO: 259220 - DNA, 15 bp, Homo sapiens
gatgagagggaaaaa

SEQ ID NO: 259221 - DNA, 15 bp, Homo sapiens
ggatgagagggaaaa

SEQ ID NO: 259222 - DNA, 15 bp, Homo sapiens
gggatgagagggaaa

SEQ ID NO: 259223 - DNA, 15 bp, Homo sapiens
ggggatgagagggaa

SEQ ID NO: 259224 - DNA, 15 bp, Homo sapiens
aggggatgagaggga

SEQ ID NO: 259225 - DNA, 15 bp, Homo sapiens
caggggatgagaggg

SEQ ID NO: 259226 - DNA, 15 bp, Homo sapiens
ccaggggatgagagg

SEQ ID NO: 259227 - DNA, 15 bp, Homo sapiens
gccaggggatgagag

SEQ ID NO: 259228 - DNA, 15 bp, Homo sapiens
ggccaggggatgaga

SEQ ID NO: 259229 - DNA, 15 bp, Homo sapiens
tggccaggggatgag

SEQ ID NO: 259230 - DNA, 15 bp, Homo sapiens
ttggccaggggatga

SEQ ID NO: 259231 - DNA, 15 bp, Homo sapiens
gttggccaggggatg

SEQ ID NO: 259232 - DNA, 15 bp, Homo sapiens
agttggccaggggat

SEQ ID NO: 259233 - DNA, 15 bp, Homo sapiens
gagttggccagggga

SEQ ID NO: 259234 - DNA, 15 bp, Homo sapiens
ggagttggccagggg

SEQ ID NO: 259235 - DNA, 15 bp, Homo sapiens
aggagttggccaggg

SEQ ID NO: 259236 - DNA, 15 bp, Homo sapiens
caggagttggccagg

SEQ ID NO: 259237 - DNA, 15 bp, Homo sapiens
acaggagttggccag

SEQ ID NO: 259238 - DNA, 15 bp, Homo sapiens
cacaggagttggcca

SEQ ID NO: 259239 - DNA, 15 bp, Homo sapiens
gcacaggagttggcc

SEQ ID NO: 259240 - DNA, 15 bp, Homo sapiens
tgcacaggagttggc

SEQ ID NO: 259241 - DNA, 15 bp, Homo sapiens
gtgcacaggagttgg

SEQ ID NO: 259242 - DNA, 15 bp, Homo sapiens
cgtgcacaggagttg

SEQ ID NO: 259243 - DNA, 15 bp, Homo sapiens
gcgtgcacaggagtt

SEQ ID NO: 259244 - DNA, 15 bp, Homo sapiens
agcgtgcacaggagt

SEQ ID NO: 259245 - DNA, 15 bp, Homo sapiens
aagcgtgcacaggag

SEQ ID NO: 259246 - DNA, 15 bp, Homo sapiens
aaagcgtgcacagga

SEQ ID NO: 259247 - DNA, 15 bp, Homo sapiens
taaagcgtgcacagg

SEQ ID NO: 259248 - DNA, 15 bp, Homo sapiens
ctaaagcgtgcacag

SEQ ID NO: 259249 - DNA, 15 bp, Homo sapiens
cctaaagcgtgcaca

SEQ ID NO: 259250 - DNA, 15 bp, Homo sapiens
acctaaagcgtgcac

SEQ ID NO: 259251 - DNA, 15 bp, Homo sapiens
gacctaaagcgtgca

SEQ ID NO: 259252 - DNA, 15 bp, Homo sapiens
agacctaaagcgtgc

SEQ ID NO: 259253 - DNA, 15 bp, Homo sapiens
gagacctaaagcgtg

SEQ ID NO: 259254 - DNA, 15 bp, Homo sapiens
tgagacctaaagcgt

SEQ ID NO: 259255 - DNA, 15 bp, Homo sapiens
ctgagacctaaagcg

SEQ ID NO: 259256 - DNA, 15 bp, Homo sapiens
gctgagacctaaagc

SEQ ID NO: 259257 - DNA, 15 bp, Homo sapiens
agctgagacctaaag

SEQ ID NO: 259258 - DNA, 15 bp, Homo sapiens
aagctgagacctaaa

SEQ ID NO: 259259 - DNA, 15 bp, Homo sapiens
aaagctgagacctaa

SEQ ID NO: 259260 - DNA, 15 bp, Homo sapiens
caaagctgagaccta

SEQ ID NO: 259261 - DNA, 15 bp, Homo sapiens
ccaaagctgagacct

SEQ ID NO: 259262 - DNA, 15 bp, Homo sapiens
cccaaagctgagacc

SEQ ID NO: 259263 - DNA, 15 bp, Homo sapiens
gcccaaagctgagac

SEQ ID NO: 259264 - DNA, 15 bp, Homo sapiens
ggcccaaagctgaga

SEQ ID NO: 259265 - DNA, 15 bp, Homo sapiens
gggcccaaagctgag

SEQ ID NO: 259266 - DNA, 15 bp, Homo sapiens
ggggcccaaagctga

SEQ ID NO: 259267 - DNA, 15 bp, Homo sapiens
tggggcccaaagctg

SEQ ID NO: 259268 - DNA, 15 bp, Homo sapiens
ttggggcccaaagct

SEQ ID NO: 259269 - DNA, 15 bp, Homo sapiens
tttggggcccaaagc

SEQ ID NO: 259270 - DNA, 15 bp, Homo sapiens
atttggggcccaaag

SEQ ID NO: 259271 - DNA, 15 bp, Homo sapiens
aatttggggcccaaa

SEQ ID NO: 259272 - DNA, 15 bp, Homo sapiens
gaatttggggcccaa

SEQ ID NO: 259273 - DNA, 15 bp, Homo sapiens
tgaatttggggccca

SEQ ID NO: 259274 - DNA, 15 bp, Homo sapiens
ctgaatttggggccc

SEQ ID NO: 259275 - DNA, 15 bp, Homo sapiens
cctgaatttggggcc

SEQ ID NO: 259276 - DNA, 15 bp, Homo sapiens
tcctgaatttggggc

SEQ ID NO: 259277 - DNA, 15 bp, Homo sapiens
ttcctgaatttgggg

SEQ ID NO: 259278 - DNA, 15 bp, Homo sapiens
tttcctgaatttggg

SEQ ID NO: 259279 - DNA, 15 bp, Homo sapiens
gtttcctgaatttgg

SEQ ID NO: 259280 - DNA, 15 bp, Homo sapiens
tgtttcctgaatttg

SEQ ID NO: 259281 - DNA, 15 bp, Homo sapiens
atgtttcctgaattt

SEQ ID NO: 259282 - DNA, 15 bp, Homo sapiens
catgtttcctgaatt

SEQ ID NO: 259283 - DNA, 15 bp, Homo sapiens
acatgtttcctgaat

SEQ ID NO: 259284 - DNA, 15 bp, Homo sapiens
aacatgtttcctgaa

SEQ ID NO: 259285 - DNA, 15 bp, Homo sapiens
gaacatgtttcctga

SEQ ID NO: 259286 - DNA, 15 bp, Homo sapiens
ggaacatgtttcctg

SEQ ID NO: 259287 - DNA, 15 bp, Homo sapiens
aggaacatgtttcct

SEQ ID NO: 259288 - DNA, 15 bp, Homo sapiens
gaggaacatgtttcc

SEQ ID NO: 259289 - DNA, 15 bp, Homo sapiens
ggaggaacatgtttc

SEQ ID NO: 259290 - DNA, 15 bp, Homo sapiens
aggaggaacatgttt

SEQ ID NO: 259291 - DNA, 15 bp, Homo sapiens
gaggaggaacatgtt

SEQ ID NO: 259292 - DNA, 15 bp, Homo sapiens
agaggaggaacatgt

SEQ ID NO: 259293 - DNA, 15 bp, Homo sapiens
cagaggaggaacatg

SEQ ID NO: 259294 - DNA, 15 bp, Homo sapiens
acagaggaggaacat

SEQ ID NO: 259295 - DNA, 15 bp, Homo sapiens
cacagaggaggaaca

SEQ ID NO: 259296 - DNA, 15 bp, Homo sapiens
acacagaggaggaac

SEQ ID NO: 259297 - DNA, 15 bp, Homo sapiens
aacacagaggaggaa

SEQ ID NO: 259298 - DNA, 15 bp, Homo sapiens
gaacacagaggagga

SEQ ID NO: 259299 - DNA, 15 bp, Homo sapiens
ggaacacagaggagg

SEQ ID NO: 259300 - DNA, 15 bp, Homo sapiens
gggaacacagaggag

SEQ ID NO: 259301 - DNA, 15 bp, Homo sapiens
agggaacacagagga

SEQ ID NO: 259302 - DNA, 15 bp, Homo sapiens
aagggaacacagagg

SEQ ID NO: 259303 - DNA, 15 bp, Homo sapiens
taagggaacacagag

SEQ ID NO: 259304 - DNA, 15 bp, Homo sapiens
gtaagggaacacaga

SEQ ID NO: 259305 - DNA, 15 bp, Homo sapiens
ggtaagggaacacag

SEQ ID NO: 259306 - DNA, 15 bp, Homo sapiens
gggtaagggaacaca

SEQ ID NO: 259307 - DNA, 15 bp, Homo sapiens
ggggtaagggaacac

SEQ ID NO: 259308 - DNA, 15 bp, Homo sapiens
aggggtaagggaaca

SEQ ID NO: 259309 - DNA, 15 bp, Homo sapiens
caggggtaagggaac

SEQ ID NO: 259310 - DNA, 15 bp, Homo sapiens
gcaggggtaagggaa

SEQ ID NO: 259311 - DNA, 15 bp, Homo sapiens
cgcaggggtaaggga

SEQ ID NO: 259312 - DNA, 15 bp, Homo sapiens
acgcaggggtaaggg

SEQ ID NO: 259313 - DNA, 15 bp, Homo sapiens
tacgcaggggtaagg

SEQ ID NO: 259314 - DNA, 15 bp, Homo sapiens
gtacgcaggggtaag

SEQ ID NO: 259315 - DNA, 15 bp, Homo sapiens
agtacgcaggggtaa

SEQ ID NO: 259316 - DNA, 15 bp, Homo sapiens
gagtacgcaggggta

SEQ ID NO: 259317 - DNA, 15 bp, Homo sapiens
tgagtacgcaggggt

SEQ ID NO: 259318 - DNA, 15 bp, Homo sapiens
ctgagtacgcagggg

SEQ ID NO: 259319 - DNA, 15 bp, Homo sapiens
gctgagtacgcaggg

SEQ ID NO: 259320 - DNA, 15 bp, Homo sapiens
ggctgagtacgcagg

SEQ ID NO: 259321 - DNA, 15 bp, Homo sapiens
aggctgagtacgcag

SEQ ID NO: 259322 - DNA, 15 bp, Homo sapiens
taggctgagtacgca

SEQ ID NO: 259323 - DNA, 15 bp, Homo sapiens
ataggctgagtacgc

SEQ ID NO: 259324 - DNA, 15 bp, Homo sapiens
gataggctgagtacg

SEQ ID NO: 259325 - DNA, 15 bp, Homo sapiens
cgataggctgagtac

SEQ ID NO: 259326 - DNA, 15 bp, Homo sapiens
acgataggctgagta

SEQ ID NO: 259327 - DNA, 15 bp, Homo sapiens
tacgataggctgagt

SEQ ID NO: 259328 - DNA, 15 bp, Homo sapiens
gtacgataggctgag

SEQ ID NO: 259329 - DNA, 15 bp, Homo sapiens
agtacgataggctga

SEQ ID NO: 259330 - DNA, 15 bp, Homo sapiens
cagtacgataggctg

SEQ ID NO: 259331 - DNA, 15 bp, Homo sapiens
acagtacgataggct

SEQ ID NO: 259332 - DNA, 15 bp, Homo sapiens
tacagtacgataggc

SEQ ID NO: 259333 - DNA, 15 bp, Homo sapiens
ttacagtacgatagg

SEQ ID NO: 259334 - DNA, 15 bp, Homo sapiens
tttacagtacgatag

SEQ ID NO: 259335 - DNA, 15 bp, Homo sapiens
atttacagtacgata

SEQ ID NO: 259336 - DNA, 15 bp, Homo sapiens
catttacagtacgat

SEQ ID NO: 259337 - DNA, 15 bp, Homo sapiens
gcatttacagtacga

SEQ ID NO: 259338 - DNA, 15 bp, Homo sapiens
agcatttacagtacg

SEQ ID NO: 259339 - DNA, 15 bp, Homo sapiens
tagcatttacagtac

SEQ ID NO: 259340 - DNA, 15 bp, Homo sapiens
atagcatttacagta

SEQ ID NO: 259341 - DNA, 15 bp, Homo sapiens
catagcatttacagt

SEQ ID NO: 259342 - DNA, 15 bp, Homo sapiens
acatagcatttacag

SEQ ID NO: 259343 - DNA, 15 bp, Homo sapiens
tacatagcatttaca

SEQ ID NO: 259344 - DNA, 15 bp, Homo sapiens
ttacatagcatttac

SEQ ID NO: 259345 - DNA, 15 bp, Homo sapiens
attacatagcattta

SEQ ID NO: 259346 - DNA, 15 bp, Homo sapiens
gattacatagcattt

SEQ ID NO: 259347 - DNA, 15 bp, Homo sapiens
agattacatagcatt

SEQ ID NO: 259348 - DNA, 15 bp, Homo sapiens
cagattacatagcat

SEQ ID NO: 259349 - DNA, 15 bp, Homo sapiens
acagattacatagca

SEQ ID NO: 259350 - DNA, 15 bp, Homo sapiens
gacagattacatagc

SEQ ID NO: 259351 - DNA, 15 bp, Homo sapiens
agacagattacatag

SEQ ID NO: 259352 - DNA, 15 bp, Homo sapiens
gagacagattacata

SEQ ID NO: 259353 - DNA, 15 bp, Homo sapiens
ggagacagattacat

SEQ ID NO: 259354 - DNA, 15 bp, Homo sapiens
gggagacagattaca

SEQ ID NO: 259355 - DNA, 15 bp, Homo sapiens
tgggagacagattac

SEQ ID NO: 259356 - DNA, 15 bp, Homo sapiens
gtgggagacagatta

SEQ ID NO: 259357 - DNA, 15 bp, Homo sapiens
tgtgggagacagatt

SEQ ID NO: 259358 - DNA, 15 bp, Homo sapiens
ttgtgggagacagat

SEQ ID NO: 259359 - DNA, 15 bp, Homo sapiens
attgtgggagacaga

SEQ ID NO: 259360 - DNA, 15 bp, Homo sapiens
cattgtgggagacag

SEQ ID NO: 259361 - DNA, 15 bp, Homo sapiens
ccattgtgggagaca

SEQ ID NO: 259362 - DNA, 15 bp, Homo sapiens
cccattgtgggagac

SEQ ID NO: 259363 - DNA, 15 bp, Homo sapiens
gcccattgtgggaga

SEQ ID NO: 259364 - DNA, 15 bp, Homo sapiens
agcccattgtgggag

SEQ ID NO: 259365 - DNA, 15 bp, Homo sapiens
cagcccattgtggga

SEQ ID NO: 259366 - DNA, 15 bp, Homo sapiens
acagcccattgtggg

SEQ ID NO: 259367 - DNA, 15 bp, Homo sapiens
cacagcccattgtgg

SEQ ID NO: 259368 - DNA, 15 bp, Homo sapiens
gcacagcccattgtg

SEQ ID NO: 259369 - DNA, 15 bp, Homo sapiens
ggcacagcccattgt

SEQ ID NO: 259370 - DNA, 15 bp, Homo sapiens
gggcacagcccattg

SEQ ID NO: 259371 - DNA, 15 bp, Homo sapiens
agggcacagcccatt

SEQ ID NO: 259372 - DNA, 15 bp, Homo sapiens
gagggcacagcccat

SEQ ID NO: 259373 - DNA, 15 bp, Homo sapiens
cgagggcacagccca

SEQ ID NO: 259374 - DNA, 15 bp, Homo sapiens
acgagggcacagccc

SEQ ID NO: 259375 - DNA, 15 bp, Homo sapiens
tacgagggcacagcc

SEQ ID NO: 259376 - DNA, 15 bp, Homo sapiens
ttacgagggcacagc

SEQ ID NO: 259377 - DNA, 15 bp, Homo sapiens
gttacgagggcacag

SEQ ID NO: 259378 - DNA, 15 bp, Homo sapiens
tgttacgagggcaca

SEQ ID NO: 259379 - DNA, 15 bp, Homo sapiens
ttgttacgagggcac

SEQ ID NO: 259380 - DNA, 15 bp, Homo sapiens
gttgttacgagggca

SEQ ID NO: 259381 - DNA, 15 bp, Homo sapiens
tgttgttacgagggc

SEQ ID NO: 259382 - DNA, 15 bp, Homo sapiens
ctgttgttacgaggg

SEQ ID NO: 259383 - DNA, 15 bp, Homo sapiens
cctgttgttacgagg

SEQ ID NO: 259384 - DNA, 15 bp, Homo sapiens
ccctgttgttacgag

SEQ ID NO: 259385 - DNA, 15 bp, Homo sapiens
cccctgttgttacga

SEQ ID NO: 259386 - DNA, 15 bp, Homo sapiens
acccctgttgttacg

SEQ ID NO: 259387 - DNA, 15 bp, Homo sapiens
aacccctgttgttac

SEQ ID NO: 259388 - DNA, 15 bp, Homo sapiens
caacccctgttgtta

SEQ ID NO: 259389 - DNA, 15 bp, Homo sapiens
acaacccctgttgtt

SEQ ID NO: 259390 - DNA, 15 bp, Homo sapiens
cacaacccctgttgt

SEQ ID NO: 259391 - DNA, 15 bp, Homo sapiens
acacaacccctgttg

SEQ ID NO: 259392 - DNA, 15 bp, Homo sapiens
gacacaacccctgtt

SEQ ID NO: 259393 - DNA, 15 bp, Homo sapiens
agacacaacccctgt

SEQ ID NO: 259394 - DNA, 15 bp, Homo sapiens
aagacacaacccctg

SEQ ID NO: 259395 - DNA, 15 bp, Homo sapiens
caagacacaacccct

SEQ ID NO: 259396 - DNA, 15 bp, Homo sapiens
acaagacacaacccc

SEQ ID NO: 259397 - DNA, 15 bp, Homo sapiens
aacaagacacaaccc

SEQ ID NO: 259398 - DNA, 15 bp, Homo sapiens
gaacaagacacaacc

SEQ ID NO: 259399 - DNA, 15 bp, Homo sapiens
ggaacaagacacaac

SEQ ID NO: 259400 - DNA, 15 bp, Homo sapiens
aggaacaagacacaa

SEQ ID NO: 259401 - DNA, 15 bp, Homo sapiens
gaggaacaagacaca

SEQ ID NO: 259402 - DNA, 15 bp, Homo sapiens
tgaggaacaagacac

SEQ ID NO: 259403 - DNA, 15 bp, Homo sapiens
atgaggaacaagaca

SEQ ID NO: 259404 - DNA, 15 bp, Homo sapiens
aatgaggaacaagac

SEQ ID NO: 259405 - DNA, 15 bp, Homo sapiens
caatgaggaacaaga

SEQ ID NO: 259406 - DNA, 15 bp, Homo sapiens
gcaatgaggaacaag

SEQ ID NO: 259407 - DNA, 15 bp, Homo sapiens
tgcaatgaggaacaa

SEQ ID NO: 259408 - DNA, 15 bp, Homo sapiens
atgcaatgaggaaca

SEQ ID NO: 259409 - DNA, 15 bp, Homo sapiens
aatgcaatgaggaac

SEQ ID NO: 259410 - DNA, 15 bp, Homo sapiens
aaatgcaatgaggaa

SEQ ID NO: 259411 - DNA, 15 bp, Homo sapiens
aaaatgcaatgagga

SEQ ID NO: 259412 - DNA, 15 bp, Homo sapiens
gaaaatgcaatgagg

SEQ ID NO: 259413 - DNA, 15 bp, Homo sapiens
tgaaaatgcaatgag

SEQ ID NO: 259414 - DNA, 15 bp, Homo sapiens
atgaaaatgcaatga

SEQ ID NO: 259415 - DNA, 15 bp, Homo sapiens
catgaaaatgcaatg

SEQ ID NO: 259416 - DNA, 15 bp, Homo sapiens
ccatgaaaatgcaat

SEQ ID NO: 259417 - DNA, 15 bp, Homo sapiens
gccatgaaaatgcaa

SEQ ID NO: 259418 - DNA, 15 bp, Homo sapiens
ggccatgaaaatgca

SEQ ID NO: 259419 - DNA, 15 bp, Homo sapiens
aggccatgaaaatgc

SEQ ID NO: 259420 - DNA, 15 bp, Homo sapiens
gaggccatgaaaatg

SEQ ID NO: 259421 - DNA, 15 bp, Homo sapiens
tgaggccatgaaaat

SEQ ID NO: 259422 - DNA, 15 bp, Homo sapiens
ttgaggccatgaaaa

SEQ ID NO: 259423 - DNA, 15 bp, Homo sapiens
tttgaggccatgaaa

SEQ ID NO: 259424 - DNA, 15 bp, Homo sapiens
ttttgaggccatgaa

SEQ ID NO: 259425 - DNA, 15 bp, Homo sapiens
attttgaggccatga

SEQ ID NO: 259426 - DNA, 15 bp, Homo sapiens
cattttgaggccatg

SEQ ID NO: 259427 - DNA, 15 bp, Homo sapiens
acattttgaggccat

SEQ ID NO: 259428 - DNA, 15 bp, Homo sapiens
tacattttgaggcca

SEQ ID NO: 259429 - DNA, 15 bp, Homo sapiens
atacattttgaggcc

SEQ ID NO: 259430 - DNA, 15 bp, Homo sapiens
tatacattttgaggc

SEQ ID NO: 259431 - DNA, 15 bp, Homo sapiens
atatacattttgagg

SEQ ID NO: 259432 - DNA, 15 bp, Homo sapiens
gatatacattttgag

SEQ ID NO: 259433 - DNA, 15 bp, Homo sapiens
agatatacattttga

SEQ ID NO: 259434 - DNA, 15 bp, Homo sapiens
tagatatacattttg

SEQ ID NO: 259435 - DNA, 15 bp, Homo sapiens
ctagatatacatttt

SEQ ID NO: 259436 - DNA, 15 bp, Homo sapiens
actagatatacattt

SEQ ID NO: 259437 - DNA, 15 bp, Homo sapiens
cactagatatacatt

SEQ ID NO: 259438 - DNA, 15 bp, Homo sapiens
gcactagatatacat

SEQ ID NO: 259439 - DNA, 15 bp, Homo sapiens
agcactagatataca

SEQ ID NO: 259440 - DNA, 15 bp, Homo sapiens
cagcactagatatac

SEQ ID NO: 259441 - DNA, 15 bp, Homo sapiens
acagcactagatata

SEQ ID NO: 259442 - DNA, 15 bp, Homo sapiens
gacagcactagatat

SEQ ID NO: 259443 - DNA, 15 bp, Homo sapiens
tgacagcactagata

SEQ ID NO: 259444 - DNA, 15 bp, Homo sapiens
ttgacagcactagat

SEQ ID NO: 259445 - DNA, 15 bp, Homo sapiens
attgacagcactaga

SEQ ID NO: 259446 - DNA, 15 bp, Homo sapiens
tattgacagcactag

SEQ ID NO: 259447 - DNA, 15 bp, Homo sapiens
atattgacagcacta

SEQ ID NO: 259448 - DNA, 15 bp, Homo sapiens
aatattgacagcact

SEQ ID NO: 259449 - DNA, 15 bp, Homo sapiens
aaatattgacagcac

SEQ ID NO: 259450 - DNA, 15 bp, Homo sapiens
caaatattgacagca

SEQ ID NO: 259451 - DNA, 15 bp, Homo sapiens
acaaatattgacagc

SEQ ID NO: 259452 - DNA, 15 bp, Homo sapiens
tacaaatattgacag

SEQ ID NO: 259453 - DNA, 15 bp, Homo sapiens
ctacaaatattgaca

SEQ ID NO: 259454 - DNA, 15 bp, Homo sapiens
tctacaaatattgac

SEQ ID NO: 259455 - DNA, 15 bp, Homo sapiens
gtctacaaatattga

SEQ ID NO: 259456 - DNA, 15 bp, Homo sapiens
agtctacaaatattg

SEQ ID NO: 259457 - DNA, 15 bp, Homo sapiens
aagtctacaaatatt

SEQ ID NO: 259458 - DNA, 15 bp, Homo sapiens
caagtctacaaatat

SEQ ID NO: 259459 - DNA, 15 bp, Homo sapiens
tcaagtctacaaata

SEQ ID NO: 259460 - DNA, 15 bp, Homo sapiens
ctcaagtctacaaat

SEQ ID NO: 259461 - DNA, 15 bp, Homo sapiens
actcaagtctacaaa

SEQ ID NO: 259462 - DNA, 15 bp, Homo sapiens
cactcaagtctacaa

SEQ ID NO: 259463 - DNA, 15 bp, Homo sapiens
ccactcaagtctaca

SEQ ID NO: 259464 - DNA, 15 bp, Homo sapiens
tccactcaagtctac

SEQ ID NO: 259465 - DNA, 15 bp, Homo sapiens
atccactcaagtcta

SEQ ID NO: 259466 - DNA, 15 bp, Homo sapiens
gatccactcaagtct

SEQ ID NO: 259467 - DNA, 15 bp, Homo sapiens
agatccactcaagtc

SEQ ID NO: 259468 - DNA, 15 bp, Homo sapiens
gagatccactcaagt

SEQ ID NO: 259469 - DNA, 15 bp, Homo sapiens
tgagatccactcaag

SEQ ID NO: 259470 - DNA, 15 bp, Homo sapiens
atgagatccactcaa

SEQ ID NO: 259471 - DNA, 15 bp, Homo sapiens
gatgagatccactca

SEQ ID NO: 259472 - DNA, 15 bp, Homo sapiens
agatgagatccactc

SEQ ID NO: 259473 - DNA, 15 bp, Homo sapiens
tagatgagatccact

SEQ ID NO: 259474 - DNA, 15 bp, Homo sapiens
atagatgagatccac

SEQ ID NO: 259475 - DNA, 15 bp, Homo sapiens
catagatgagatcca

SEQ ID NO: 259476 - DNA, 15 bp, Homo sapiens
acatagatgagatcc

SEQ ID NO: 259477 - DNA, 15 bp, Homo sapiens
cacatagatgagatc

SEQ ID NO: 259478 - DNA, 15 bp, Homo sapiens
gcacatagatgagat

SEQ ID NO: 259479 - DNA, 15 bp, Homo sapiens
tgcacatagatgaga

SEQ ID NO: 259480 - DNA, 15 bp, Homo sapiens
atgcacatagatgag

SEQ ID NO: 259481 - DNA, 15 bp, Homo sapiens
catgcacatagatga

SEQ ID NO: 259482 - DNA, 15 bp, Homo sapiens
ccatgcacatagatg

SEQ ID NO: 259483 - DNA, 15 bp, Homo sapiens
accatgcacatagat

SEQ ID NO: 259484 - DNA, 15 bp, Homo sapiens
gaccatgcacataga

SEQ ID NO: 259485 - DNA, 15 bp, Homo sapiens
agaccatgcacatag

SEQ ID NO: 259486 - DNA, 15 bp, Homo sapiens
tagaccatgcacata

SEQ ID NO: 259487 - DNA, 15 bp, Homo sapiens
ttagaccatgcacat

SEQ ID NO: 259488 - DNA, 15 bp, Homo sapiens
attagaccatgcaca

SEQ ID NO: 259489 - DNA, 15 bp, Homo sapiens
aattagaccatgcac

SEQ ID NO: 259490 - DNA, 15 bp, Homo sapiens
aaattagaccatgca

SEQ ID NO: 259491 - DNA, 15 bp, Homo sapiens
gaaattagaccatgc

SEQ ID NO: 259492 - DNA, 15 bp, Homo sapiens
tgaaattagaccatg

SEQ ID NO: 259493 - DNA, 15 bp, Homo sapiens
atgaaattagaccat

SEQ ID NO: 259494 - DNA, 15 bp, Homo sapiens
aatgaaattagacca

SEQ ID NO: 259495 - DNA, 15 bp, Homo sapiens
taatgaaattagacc

SEQ ID NO: 259496 - DNA, 15 bp, Homo sapiens
ttaatgaaattagac

SEQ ID NO: 259497 - DNA, 15 bp, Homo sapiens
attaatgaaattaga

SEQ ID NO: 259498 - DNA, 15 bp, Homo sapiens
aattaatgaaattag

SEQ ID NO: 259499 - DNA, 15 bp, Homo sapiens
taattaatgaaatta

SEQ ID NO: 259500 - DNA, 15 bp, Homo sapiens
ataattaatgaaatt

SEQ ID NO: 259501 - DNA, 15 bp, Homo sapiens
tataattaatgaaat

SEQ ID NO: 259502 - DNA, 15 bp, Homo sapiens
ctataattaatgaaa

SEQ ID NO: 259503 - DNA, 15 bp, Homo sapiens
tctataattaatgaa

SEQ ID NO: 259504 - DNA, 15 bp, Homo sapiens
gtctataattaatga

SEQ ID NO: 259505 - DNA, 15 bp, Homo sapiens
tgtctataattaatg

SEQ ID NO: 259506 - DNA, 15 bp, Homo sapiens
ttgtctataattaat

SEQ ID NO: 259507 - DNA, 15 bp, Homo sapiens
tttgtctataattaa

SEQ ID NO: 259508 - DNA, 15 bp, Homo sapiens
ttttgtctataatta

SEQ ID NO: 259509 - DNA, 15 bp, Homo sapiens
tttttgtctataatt

SEQ ID NO: 259510 - DNA, 15 bp, Homo sapiens
ctttttgtctataat

SEQ ID NO: 259511 - DNA, 15 bp, Homo sapiens
cctttttgtctataa

SEQ ID NO: 259512 - DNA, 15 bp, Homo sapiens
tcctttttgtctata

SEQ ID NO: 259513 - DNA, 15 bp, Homo sapiens
ttcctttttgtctat

SEQ ID NO: 259514 - DNA, 15 bp, Homo sapiens
cttcctttttgtcta

SEQ ID NO: 259515 - DNA, 15 bp, Homo sapiens
acttcctttttgtct

SEQ ID NO: 259516 - DNA, 15 bp, Homo sapiens
tacttcctttttgtc

SEQ ID NO: 259517 - DNA, 15 bp, Homo sapiens
ctacttcctttttgt

SEQ ID NO: 259518 - DNA, 15 bp, Homo sapiens
gctacttcctttttg

SEQ ID NO: 259519 - DNA, 15 bp, Homo sapiens
tgctacttccttttt

SEQ ID NO: 259520 - DNA, 15 bp, Homo sapiens
ctgctacttcctttt

SEQ ID NO: 259521 - DNA, 15 bp, Homo sapiens
gctgctacttccttt

SEQ ID NO: 259522 - DNA, 15 bp, Homo sapiens
agctgctacttcctt

SEQ ID NO: 259523 - DNA, 15 bp, Homo sapiens
aagctgctacttcct

SEQ ID NO: 259524 - DNA, 15 bp, Homo sapiens
caagctgctacttcc

SEQ ID NO: 259525 - DNA, 15 bp, Homo sapiens
ccaagctgctacttc

SEQ ID NO: 259526 - DNA, 15 bp, Homo sapiens
cccaagctgctactt

SEQ ID NO: 259527 - DNA, 15 bp, Homo sapiens
acccaagctgctact

SEQ ID NO: 259528 - DNA, 15 bp, Homo sapiens
tacccaagctgctac

SEQ ID NO: 259529 - DNA, 15 bp, Homo sapiens
ttacccaagctgcta

SEQ ID NO: 259530 - DNA, 15 bp, Homo sapiens
gttacccaagctgct

SEQ ID NO: 259531 - DNA, 15 bp, Homo sapiens
ggttacccaagctgc

SEQ ID NO: 259532 - DNA, 15 bp, Homo sapiens
tggttacccaagctg

SEQ ID NO: 259533 - DNA, 15 bp, Homo sapiens
ttggttacccaagct

SEQ ID NO: 259534 - DNA, 15 bp, Homo sapiens
tttggttacccaagc

SEQ ID NO: 259535 - DNA, 15 bp, Homo sapiens
gtttggttacccaag

SEQ ID NO: 259536 - DNA, 15 bp, Homo sapiens
tgtttggttacccaa

SEQ ID NO: 259537 - DNA, 15 bp, Homo sapiens
ttgtttggttaccca

SEQ ID NO: 259538 - DNA, 15 bp, Homo sapiens
cttgtttggttaccc

SEQ ID NO: 259539 - DNA, 15 bp, Homo sapiens
gcttgtttggttacc

SEQ ID NO: 259540 - DNA, 15 bp, Homo sapiens
tgcttgtttggttac

SEQ ID NO: 259541 - DNA, 15 bp, Homo sapiens
ctgcttgtttggtta

SEQ ID NO: 259542 - DNA, 15 bp, Homo sapiens
tctgcttgtttggtt

SEQ ID NO: 259543 - DNA, 15 bp, Homo sapiens
atctgcttgtttggt

SEQ ID NO: 259544 - DNA, 15 bp, Homo sapiens
tatctgcttgtttgg

SEQ ID NO: 259545 - DNA, 15 bp, Homo sapiens
ttatctgcttgtttg

SEQ ID NO: 259546 - DNA, 15 bp, Homo sapiens
attatctgcttgttt

SEQ ID NO: 259547 - DNA, 15 bp, Homo sapiens
gattatctgcttgtt

SEQ ID NO: 259548 - DNA, 15 bp, Homo sapiens
ggattatctgcttgt

SEQ ID NO: 259549 - DNA, 15 bp, Homo sapiens
gggattatctgcttg

SEQ ID NO: 259550 - DNA, 15 bp, Homo sapiens
ggggattatctgctt

SEQ ID NO: 259551 - DNA, 15 bp, Homo sapiens
tggggattatctgct

SEQ ID NO: 259552 - DNA, 15 bp, Homo sapiens
ttggggattatctgc

SEQ ID NO: 259553 - DNA, 15 bp, Homo sapiens
attggggattatctg

SEQ ID NO: 259554 - DNA, 15 bp, Homo sapiens
cattggggattatct

SEQ ID NO: 259555 - DNA, 15 bp, Homo sapiens
acattggggattatc

SEQ ID NO: 259556 - DNA, 15 bp, Homo sapiens
tacattggggattat

SEQ ID NO: 259557 - DNA, 15 bp, Homo sapiens
atacattggggatta

SEQ ID NO: 259558 - DNA, 15 bp, Homo sapiens
aatacattggggatt

SEQ ID NO: 259559 - DNA, 15 bp, Homo sapiens
aaatacattggggat

SEQ ID NO: 259560 - DNA, 15 bp, Homo sapiens
gaaatacattgggga

SEQ ID NO: 259561 - DNA, 15 bp, Homo sapiens
agaaatacattgggg

SEQ ID NO: 259562 - DNA, 15 bp, Homo sapiens
aagaaatacattggg

SEQ ID NO: 259563 - DNA, 15 bp, Homo sapiens
aaagaaatacattgg

SEQ ID NO: 259564 - DNA, 15 bp, Homo sapiens
taaagaaatacattg

SEQ ID NO: 259565 - DNA, 15 bp, Homo sapiens
ttaaagaaatacatt

SEQ ID NO: 259566 - DNA, 15 bp, Homo sapiens
cttaaagaaatacat

SEQ ID NO: 259567 - DNA, 15 bp, Homo sapiens
ccttaaagaaataca

SEQ ID NO: 259568 - DNA, 15 bp, Homo sapiens
gccttaaagaaatac

SEQ ID NO: 259569 - DNA, 15 bp, Homo sapiens
agccttaaagaaata

SEQ ID NO: 259570 - DNA, 15 bp, Homo sapiens
aagccttaaagaaat

SEQ ID NO: 259571 - DNA, 15 bp, Homo sapiens
aaagccttaaagaaa

SEQ ID NO: 259572 - DNA, 15 bp, Homo sapiens
caaagccttaaagaa

SEQ ID NO: 259573 - DNA, 15 bp, Homo sapiens
gcaaagccttaaaga

SEQ ID NO: 259574 - DNA, 15 bp, Homo sapiens
tgcaaagccttaaag

SEQ ID NO: 259575 - DNA, 15 bp, Homo sapiens
ctgcaaagccttaaa

SEQ ID NO: 259576 - DNA, 15 bp, Homo sapiens
actgcaaagccttaa

SEQ ID NO: 259577 - DNA, 15 bp, Homo sapiens
cactgcaaagcctta

SEQ ID NO: 259578 - DNA, 15 bp, Homo sapiens
gcactgcaaagcctt

SEQ ID NO: 259579 - DNA, 15 bp, Homo sapiens
agcactgcaaagcct

SEQ ID NO: 259580 - DNA, 15 bp, Homo sapiens
gagcactgcaaagcc

SEQ ID NO: 259581 - DNA, 15 bp, Homo sapiens
ggagcactgcaaagc

SEQ ID NO: 259582 - DNA, 15 bp, Homo sapiens
gggagcactgcaaag

SEQ ID NO: 259583 - DNA, 15 bp, Homo sapiens
ggggagcactgcaaa

SEQ ID NO: 259584 - DNA, 15 bp, Homo sapiens
tggggagcactgcaa

SEQ ID NO: 259585 - DNA, 15 bp, Homo sapiens
ctggggagcactgca

SEQ ID NO: 259586 - DNA, 15 bp, Homo sapiens
cctggggagcactgc

SEQ ID NO: 259587 - DNA, 15 bp, Homo sapiens
ccctggggagcactg

SEQ ID NO: 259588 - DNA, 15 bp, Homo sapiens
gccctggggagcact

SEQ ID NO: 259589 - DNA, 15 bp, Homo sapiens
tgccctggggagcac

SEQ ID NO: 259590 - DNA, 15 bp, Homo sapiens
ttgccctggggagca

SEQ ID NO: 259591 - DNA, 15 bp, Homo sapiens
attgccctggggagc

SEQ ID NO: 259592 - DNA, 15 bp, Homo sapiens
aattgccctggggag

SEQ ID NO: 259593 - DNA, 15 bp, Homo sapiens
aaattgccctgggga

SEQ ID NO: 259594 - DNA, 15 bp, Homo sapiens
caaattgccctgggg

SEQ ID NO: 259595 - DNA, 15 bp, Homo sapiens
ccaaattgccctggg

SEQ ID NO: 259596 - DNA, 15 bp, Homo sapiens
cccaaattgccctgg

SEQ ID NO: 259597 - DNA, 15 bp, Homo sapiens
tcccaaattgccctg

SEQ ID NO: 259598 - DNA, 15 bp, Homo sapiens
gtcccaaattgccct

SEQ ID NO: 259599 - DNA, 15 bp, Homo sapiens
tgtcccaaattgccc

SEQ ID NO: 259600 - DNA, 15 bp, Homo sapiens
ctgtcccaaattgcc

SEQ ID NO: 259601 - DNA, 15 bp, Homo sapiens
cctgtcccaaattgc

SEQ ID NO: 259602 - DNA, 15 bp, Homo sapiens
ccctgtcccaaattg

SEQ ID NO: 259603 - DNA, 15 bp, Homo sapiens
cccctgtcccaaatt

SEQ ID NO: 259604 - DNA, 15 bp, Homo sapiens
tcccctgtcccaaat

SEQ ID NO: 259605 - DNA, 15 bp, Homo sapiens
gtcccctgtcccaaa

SEQ ID NO: 259606 - DNA, 15 bp, Homo sapiens
tgtcccctgtcccaa

SEQ ID NO: 259607 - DNA, 15 bp, Homo sapiens
ctgtcccctgtccca

SEQ ID NO: 259608 - DNA, 15 bp, Homo sapiens
cctgtcccctgtccc

SEQ ID NO: 259609 - DNA, 15 bp, Homo sapiens
acctgtcccctgtcc

SEQ ID NO: 259610 - DNA, 15 bp, Homo sapiens
aacctgtcccctgtc

SEQ ID NO: 259611 - DNA, 15 bp, Homo sapiens
taacctgtcccctgt

SEQ ID NO: 259612 - DNA, 15 bp, Homo sapiens
gtaacctgtcccctg

SEQ ID NO: 259613 - DNA, 15 bp, Homo sapiens
ggtaacctgtcccct

SEQ ID NO: 259614 - DNA, 15 bp, Homo sapiens
aggtaacctgtcccc

SEQ ID NO: 259615 - DNA, 15 bp, Homo sapiens
taggtaacctgtccc

SEQ ID NO: 259616 - DNA, 15 bp, Homo sapiens
ataggtaacctgtcc

SEQ ID NO: 259617 - DNA, 15 bp, Homo sapiens
aataggtaacctgtc

SEQ ID NO: 259618 - DNA, 15 bp, Homo sapiens
aaataggtaacctgt

SEQ ID NO: 259619 - DNA, 15 bp, Homo sapiens
aaaataggtaacctg

SEQ ID NO: 259620 - DNA, 15 bp, Homo sapiens
taaaataggtaacct

SEQ ID NO: 259621 - DNA, 15 bp, Homo sapiens
ataaaataggtaacc

SEQ ID NO: 259622 - DNA, 15 bp, Homo sapiens
tataaaataggtaac

SEQ ID NO: 259623 - DNA, 15 bp, Homo sapiens
atataaaataggtaa

SEQ ID NO: 259624 - DNA, 15 bp, Homo sapiens
tatataaaataggta

SEQ ID NO: 259625 - DNA, 15 bp, Homo sapiens
atatataaaataggt

SEQ ID NO: 259626 - DNA, 15 bp, Homo sapiens
tatatataaaatagg

SEQ ID NO: 259627 - DNA, 15 bp, Homo sapiens
atatatataaaatag

SEQ ID NO: 259628 - DNA, 15 bp, Homo sapiens
tatatatataaaata

SEQ ID NO: 259629 - DNA, 15 bp, Homo sapiens
gtatatatatataaa

SEQ ID NO: 259630 - DNA, 15 bp, Homo sapiens
tgtatatatatataa

SEQ ID NO: 259631 - DNA, 15 bp, Homo sapiens
tatgtatatatatat

SEQ ID NO: 259632 - DNA, 15 bp, Homo sapiens
atatgtatatatata

SEQ ID NO: 259633 - DNA, 15 bp, Homo sapiens
aatatatgtatatat

SEQ ID NO: 259634 - DNA, 15 bp, Homo sapiens
taatatatgtatata

SEQ ID NO: 259635 - DNA, 15 bp, Homo sapiens
ctaatatatgtatat

SEQ ID NO: 259636 - DNA, 15 bp, Homo sapiens
tctaatatatgtata

SEQ ID NO: 259637 - DNA, 15 bp, Homo sapiens
ctctaatatatgtat

SEQ ID NO: 259638 - DNA, 15 bp, Homo sapiens
tctctaatatatgta

SEQ ID NO: 259639 - DNA, 15 bp, Homo sapiens
atctctaatatatgt

SEQ ID NO: 259640 - DNA, 15 bp, Homo sapiens
catctctaatatatg

SEQ ID NO: 259641 - DNA, 15 bp, Homo sapiens
tcatctctaatatat

SEQ ID NO: 259642 - DNA, 15 bp, Homo sapiens
ctcatctctaatata

SEQ ID NO: 259643 - DNA, 15 bp, Homo sapiens
cctcatctctaatat

SEQ ID NO: 259644 - DNA, 15 bp, Homo sapiens
acctcatctctaata

SEQ ID NO: 259645 - DNA, 15 bp, Homo sapiens
gacctcatctctaat

SEQ ID NO: 259646 - DNA, 15 bp, Homo sapiens
agacctcatctctaa

SEQ ID NO: 259647 - DNA, 15 bp, Homo sapiens
cagacctcatctcta

SEQ ID NO: 259648 - DNA, 15 bp, Homo sapiens
ccagacctcatctct

SEQ ID NO: 259649 - DNA, 15 bp, Homo sapiens
gccagacctcatctc

SEQ ID NO: 259650 - DNA, 15 bp, Homo sapiens
agccagacctcatct

SEQ ID NO: 259651 - DNA, 15 bp, Homo sapiens
gagccagacctcatc

SEQ ID NO: 259652 - DNA, 15 bp, Homo sapiens
agagccagacctcat

SEQ ID NO: 259653 - DNA, 15 bp, Homo sapiens
cagagccagacctca

SEQ ID NO: 259654 - DNA, 15 bp, Homo sapiens
acagagccagacctc

SEQ ID NO: 259655 - DNA, 15 bp, Homo sapiens
aacagagccagacct

SEQ ID NO: 259656 - DNA, 15 bp, Homo sapiens
caacagagccagacc

SEQ ID NO: 259657 - DNA, 15 bp, Homo sapiens
atactccagcctggg

SEQ ID NO: 259658 - DNA, 15 bp, Homo sapiens
tatactccagcctgg

SEQ ID NO: 259659 - DNA, 15 bp, Homo sapiens
ctatactccagcctg

SEQ ID NO: 259660 - DNA, 15 bp, Homo sapiens
tctatactccagcct

SEQ ID NO: 259661 - DNA, 15 bp, Homo sapiens
ctctatactccagcc

SEQ ID NO: 259662 - DNA, 15 bp, Homo sapiens
cctctatactccagc

SEQ ID NO: 259663 - DNA, 15 bp, Homo sapiens
acctctatactccag

SEQ ID NO: 259664 - DNA, 15 bp, Homo sapiens
cacctctatactcca

SEQ ID NO: 259665 - DNA, 15 bp, Homo sapiens
gcacctctatactcc

SEQ ID NO: 259666 - DNA, 15 bp, Homo sapiens
tgcacctctatactc

SEQ ID NO: 259667 - DNA, 15 bp, Homo sapiens
ttgcacctctatact

SEQ ID NO: 259668 - DNA, 15 bp, Homo sapiens
attgcacctctatac

SEQ ID NO: 259669 - DNA, 15 bp, Homo sapiens
gattgcacctctata

SEQ ID NO: 259670 - DNA, 15 bp, Homo sapiens
tgattgcacctctat

SEQ ID NO: 259671 - DNA, 15 bp, Homo sapiens
atgattgcacctcta

SEQ ID NO: 259672 - DNA, 15 bp, Homo sapiens
tatgattgcacctct

SEQ ID NO: 259673 - DNA, 15 bp, Homo sapiens
ctatgattgcacctc

SEQ ID NO: 259674 - DNA, 15 bp, Homo sapiens
gctatgattgcacct

SEQ ID NO: 259675 - DNA, 15 bp, Homo sapiens
ctgcagggagctatg

SEQ ID NO: 259676 - DNA, 15 bp, Homo sapiens
gctgcagggagctat

SEQ ID NO: 259677 - DNA, 15 bp, Homo sapiens
ggctgcagggagcta

SEQ ID NO: 259678 - DNA, 15 bp, Homo sapiens
aggctgcagggagct

SEQ ID NO: 259679 - DNA, 15 bp, Homo sapiens
gaggctgcagggagc

SEQ ID NO: 259680 - DNA, 15 bp, Homo sapiens
cgaggctgcagggag

SEQ ID NO: 259681 - DNA, 15 bp, Homo sapiens
tcgaggctgcaggga

SEQ ID NO: 259682 - DNA, 15 bp, Homo sapiens
gtcgaggctgcaggg

SEQ ID NO: 259683 - DNA, 15 bp, Homo sapiens
ggtcgaggctgcagg

SEQ ID NO: 259684 - DNA, 15 bp, Homo sapiens
aggtcgaggctgcag

SEQ ID NO: 259685 - DNA, 15 bp, Homo sapiens
gaggtcgaggctgca

SEQ ID NO: 259686 - DNA, 15 bp, Homo sapiens
ggaggtcgaggctgc

SEQ ID NO: 259687 - DNA, 15 bp, Homo sapiens
gggaggtcgaggctg

SEQ ID NO: 259688 - DNA, 15 bp, Homo sapiens
cgggaggtcgaggct

SEQ ID NO: 259689 - DNA, 15 bp, Homo sapiens
ccgggaggtcgaggc

SEQ ID NO: 259690 - DNA, 15 bp, Homo sapiens
tccgggaggtcgagg

SEQ ID NO: 259691 - DNA, 15 bp, Homo sapiens
gtccgggaggtcgag

SEQ ID NO: 259692 - DNA, 15 bp, Homo sapiens
agtccgggaggtcga

SEQ ID NO: 259693 - DNA, 15 bp, Homo sapiens
gagtccgggaggtcg

SEQ ID NO: 259694 - DNA, 15 bp, Homo sapiens
tgagtccgggaggtc

SEQ ID NO: 259695 - DNA, 15 bp, Homo sapiens
ttgagtccgggaggt

SEQ ID NO: 259696 - DNA, 15 bp, Homo sapiens
cttgagtccgggagg

SEQ ID NO: 259697 - DNA, 15 bp, Homo sapiens
ccttgagtccgggag

SEQ ID NO: 259698 - DNA, 15 bp, Homo sapiens
cccttgagtccggga

SEQ ID NO: 259699 - DNA, 15 bp, Homo sapiens
tcccttgagtccggg

SEQ ID NO: 259700 - DNA, 15 bp, Homo sapiens
atcccttgagtccgg

SEQ ID NO: 259701 - DNA, 15 bp, Homo sapiens
gatcccttgagtccg

SEQ ID NO: 259702 - DNA, 15 bp, Homo sapiens
agatcccttgagtcc

SEQ ID NO: 259703 - DNA, 15 bp, Homo sapiens
aagatcccttgagtc

SEQ ID NO: 259704 - DNA, 15 bp, Homo sapiens
gaagatcccttgagt

SEQ ID NO: 259705 - DNA, 15 bp, Homo sapiens
tgaagatcccttgag

SEQ ID NO: 259706 - DNA, 15 bp, Homo sapiens
gtgaagatcccttga

SEQ ID NO: 259707 - DNA, 15 bp, Homo sapiens
tgtgaagatcccttg

SEQ ID NO: 259708 - DNA, 15 bp, Homo sapiens
atgtgaagatccctt

SEQ ID NO: 259709 - DNA, 15 bp, Homo sapiens
gatgtgaagatccct

SEQ ID NO: 259710 - DNA, 15 bp, Homo sapiens
agatgtgaagatccc

SEQ ID NO: 259711 - DNA, 15 bp, Homo sapiens
gagatgtgaagatcc

SEQ ID NO: 259712 - DNA, 15 bp, Homo sapiens
tgagatgtgaagatc

SEQ ID NO: 259713 - DNA, 15 bp, Homo sapiens
ctgagatgtgaagat

SEQ ID NO: 259714 - DNA, 15 bp, Homo sapiens
gctgagatgtgaaga

SEQ ID NO: 259715 - DNA, 15 bp, Homo sapiens
tgctgagatgtgaag

SEQ ID NO: 259716 - DNA, 15 bp, Homo sapiens
atgctgagatgtgaa

SEQ ID NO: 259717 - DNA, 15 bp, Homo sapiens
gatgctgagatgtga

SEQ ID NO: 259718 - DNA, 15 bp, Homo sapiens
ggatgctgagatgtg

SEQ ID NO: 259719 - DNA, 15 bp, Homo sapiens
gggatgctgagatgt

SEQ ID NO: 259720 - DNA, 15 bp, Homo sapiens
tgggatgctgagatg

SEQ ID NO: 259721 - DNA, 15 bp, Homo sapiens
ttgggatgctgagat

SEQ ID NO: 259722 - DNA, 15 bp, Homo sapiens
cttgggatgctgaga

SEQ ID NO: 259723 - DNA, 15 bp, Homo sapiens
gcttgggatgctgag

SEQ ID NO: 259724 - DNA, 15 bp, Homo sapiens
tgcttgggatgctga

SEQ ID NO: 259725 - DNA, 15 bp, Homo sapiens
ctgcttgggatgctg

SEQ ID NO: 259726 - DNA, 15 bp, Homo sapiens
gctgcttgggatgct

SEQ ID NO: 259727 - DNA, 15 bp, Homo sapiens
agctgcttgggatgc

SEQ ID NO: 259728 - DNA, 15 bp, Homo sapiens
cagctgcttgggatg

SEQ ID NO: 259729 - DNA, 15 bp, Homo sapiens
ccagctgcttgggat

SEQ ID NO: 259730 - DNA, 15 bp, Homo sapiens
tccagctgcttggga

SEQ ID NO: 259731 - DNA, 15 bp, Homo sapiens
ttccagctgcttggg

SEQ ID NO: 259732 - DNA, 15 bp, Homo sapiens
gttccagctgcttgg

SEQ ID NO: 259733 - DNA, 15 bp, Homo sapiens
ggttccagctgcttg

SEQ ID NO: 259734 - DNA, 15 bp, Homo sapiens
tggttccagctgctt

SEQ ID NO: 259735 - DNA, 15 bp, Homo sapiens
gtggttccagctgct

SEQ ID NO: 259736 - DNA, 15 bp, Homo sapiens
tgtggttccagctgc

SEQ ID NO: 259737 - DNA, 15 bp, Homo sapiens
ctgtggttccagctg

SEQ ID NO: 259738 - DNA, 15 bp, Homo sapiens
cctgtggttccagct

SEQ ID NO: 259739 - DNA, 15 bp, Homo sapiens
gcctgtggttccagc

SEQ ID NO: 259740 - DNA, 15 bp, Homo sapiens
tgcctgtggttccag

SEQ ID NO: 259741 - DNA, 15 bp, Homo sapiens
atgcctgtggttcca

SEQ ID NO: 259742 - DNA, 15 bp, Homo sapiens
catgcctgtggttcc

SEQ ID NO: 259743 - DNA, 15 bp, Homo sapiens
gcatgcctgtggttc

SEQ ID NO: 259744 - DNA, 15 bp, Homo sapiens
tgcatgcctgtggtt

SEQ ID NO: 259745 - DNA, 15 bp, Homo sapiens
ggtggtgcatgcctg

SEQ ID NO: 259746 - DNA, 15 bp, Homo sapiens
atggtggtgcatgcc

SEQ ID NO: 259747 - DNA, 15 bp, Homo sapiens
tatggtggtgcatgc

SEQ ID NO: 259748 - DNA, 15 bp, Homo sapiens
gtatggtggtgcatg

SEQ ID NO: 259749 - DNA, 15 bp, Homo sapiens
ggtatggtggtgcat

SEQ ID NO: 259750 - DNA, 15 bp, Homo sapiens
gggtatggtggtgca

SEQ ID NO: 259751 - DNA, 15 bp, Homo sapiens
tgggtatggtggtgc

SEQ ID NO: 259752 - DNA, 15 bp, Homo sapiens
ctgggtatggtggtg

SEQ ID NO: 259753 - DNA, 15 bp, Homo sapiens
gctgggtatggtggt

SEQ ID NO: 259754 - DNA, 15 bp, Homo sapiens
agctgggtatggtgg

SEQ ID NO: 259755 - DNA, 15 bp, Homo sapiens
cagctgggtatggtg

SEQ ID NO: 259756 - DNA, 15 bp, Homo sapiens
tcagctgggtatggt

SEQ ID NO: 259757 - DNA, 15 bp, Homo sapiens
atcagctgggtatgg

SEQ ID NO: 259758 - DNA, 15 bp, Homo sapiens
aatcagctgggtatg

SEQ ID NO: 259759 - DNA, 15 bp, Homo sapiens
aaatcagctgggtat

SEQ ID NO: 259760 - DNA, 15 bp, Homo sapiens
aaaatcagctgggta

SEQ ID NO: 259761 - DNA, 15 bp, Homo sapiens
aaaaatcagctgggt

SEQ ID NO: 259762 - DNA, 15 bp, Homo sapiens
aaaaaatcagctggg

SEQ ID NO: 259763 - DNA, 15 bp, Homo sapiens
aaaaaaatcagctgg

SEQ ID NO: 259764 - DNA, 15 bp, Homo sapiens
aaaaaaaatcagctg

SEQ ID NO: 259765 - DNA, 15 bp, Homo sapiens
aaaaaaaaatcagct

SEQ ID NO: 259766 - DNA, 15 bp, Homo sapiens
ttaaaaaaaaaaaaa

SEQ ID NO: 259767 - DNA, 15 bp, Homo sapiens
tttaaaaaaaaaaaa

SEQ ID NO: 259768 - DNA, 15 bp, Homo sapiens
ctttaaaaaaaaaaa

SEQ ID NO: 259769 - DNA, 15 bp, Homo sapiens
cctttaaaaaaaaaa

SEQ ID NO: 259770 - DNA, 15 bp, Homo sapiens
acctttaaaaaaaaa

SEQ ID NO: 259771 - DNA, 15 bp, Homo sapiens
aacctttaaaaaaaa

SEQ ID NO: 259772 - DNA, 15 bp, Homo sapiens
aaacctttaaaaaaa

SEQ ID NO: 259773 - DNA, 15 bp, Homo sapiens
aaaacctttaaaaaa

SEQ ID NO: 259774 - DNA, 15 bp, Homo sapiens
caaaacctttaaaaa

SEQ ID NO: 259775 - DNA, 15 bp, Homo sapiens
acaaaacctttaaaa

SEQ ID NO: 259776 - DNA, 15 bp, Homo sapiens
tacaaaacctttaaa

SEQ ID NO: 259777 - DNA, 15 bp, Homo sapiens
ctacaaaacctttaa

SEQ ID NO: 259778 - DNA, 15 bp, Homo sapiens
tctacaaaaccttta

SEQ ID NO: 259779 - DNA, 15 bp, Homo sapiens
ctctacaaaaccttt

SEQ ID NO: 259780 - DNA, 15 bp, Homo sapiens
tctctacaaaacctt

SEQ ID NO: 259781 - DNA, 15 bp, Homo sapiens
gtctctacaaaacct

SEQ ID NO: 259782 - DNA, 15 bp, Homo sapiens
tgtctctacaaaacc

SEQ ID NO: 259783 - DNA, 15 bp, Homo sapiens
ctgtctctacaaaac

SEQ ID NO: 259784 - DNA, 15 bp, Homo sapiens
gcctgtctctacaaa

SEQ ID NO: 259785 - DNA, 15 bp, Homo sapiens
ggcctgtctctacaa

SEQ ID NO: 259786 - DNA, 15 bp, Homo sapiens
gggcctgtctctaca

SEQ ID NO: 259787 - DNA, 15 bp, Homo sapiens
tgggcctgtctctac

SEQ ID NO: 259788 - DNA, 15 bp, Homo sapiens
atgggcctgtctcta

SEQ ID NO: 259789 - DNA, 15 bp, Homo sapiens
catgggcctgtctct

SEQ ID NO: 259790 - DNA, 15 bp, Homo sapiens
gcatgggcctgtctc

SEQ ID NO: 259791 - DNA, 15 bp, Homo sapiens
agcatgggcctgtct

SEQ ID NO: 259792 - DNA, 15 bp, Homo sapiens
cagcatgggcctgtc

SEQ ID NO: 259793 - DNA, 15 bp, Homo sapiens
ccagcatgggcctgt

SEQ ID NO: 259794 - DNA, 15 bp, Homo sapiens
accagcatgggcctg

SEQ ID NO: 259795 - DNA, 15 bp, Homo sapiens
gaccagcatgggcct

SEQ ID NO: 259796 - DNA, 15 bp, Homo sapiens
agaccagcatgggcc

SEQ ID NO: 259797 - DNA, 15 bp, Homo sapiens
aagaccagcatgggc

SEQ ID NO: 259798 - DNA, 15 bp, Homo sapiens
caagaccagcatggg

SEQ ID NO: 259799 - DNA, 15 bp, Homo sapiens
tcaagaccagcatgg

SEQ ID NO: 259800 - DNA, 15 bp, Homo sapiens
ttcaagaccagcatg

SEQ ID NO: 259801 - DNA, 15 bp, Homo sapiens
gttcaagaccagcat

SEQ ID NO: 259802 - DNA, 15 bp, Homo sapiens
agttcaagaccagca

SEQ ID NO: 259803 - DNA, 15 bp, Homo sapiens
gcccaggagttcaag

SEQ ID NO: 259804 - DNA, 15 bp, Homo sapiens
agcccaggagttcaa

SEQ ID NO: 259805 - DNA, 15 bp, Homo sapiens
gagcccaggagttca

SEQ ID NO: 259806 - DNA, 15 bp, Homo sapiens
tgagcccaggagttc

SEQ ID NO: 259807 - DNA, 15 bp, Homo sapiens
acttgagcccaggag

SEQ ID NO: 259808 - DNA, 15 bp, Homo sapiens
agatcacttgagccc

SEQ ID NO: 259809 - DNA, 15 bp, Homo sapiens
aagatcacttgagcc

SEQ ID NO: 259810 - DNA, 15 bp, Homo sapiens
gaagatcacttgagc

SEQ ID NO: 259811 - DNA, 15 bp, Homo sapiens
ggaagatcacttgag

SEQ ID NO: 259812 - DNA, 15 bp, Homo sapiens
aggaagatcacttga

SEQ ID NO: 259813 - DNA, 15 bp, Homo sapiens
caggaagatcacttg

SEQ ID NO: 259814 - DNA, 15 bp, Homo sapiens
gcaggaagatcactt

SEQ ID NO: 259815 - DNA, 15 bp, Homo sapiens
ggcaggaagatcact

SEQ ID NO: 259816 - DNA, 15 bp, Homo sapiens
aggcaggaagatcac

SEQ ID NO: 259817 - DNA, 15 bp, Homo sapiens
aaggcaggaagatca

SEQ ID NO: 259818 - DNA, 15 bp, Homo sapiens
caaggcaggaagatc

SEQ ID NO: 259819 - DNA, 15 bp, Homo sapiens
ccaaggcaggaagat

SEQ ID NO: 259820 - DNA, 15 bp, Homo sapiens
gccaaggcaggaaga

SEQ ID NO: 259821 - DNA, 15 bp, Homo sapiens
ggccaaggcaggaag

SEQ ID NO: 259822 - DNA, 15 bp, Homo sapiens
aggccaaggcaggaa

SEQ ID NO: 259823 - DNA, 15 bp, Homo sapiens
aaggccaaggcagga

SEQ ID NO: 259824 - DNA, 15 bp, Homo sapiens
gaaggccaaggcagg

SEQ ID NO: 259825 - DNA, 15 bp, Homo sapiens
ggaaggccaaggcag

SEQ ID NO: 259826 - DNA, 15 bp, Homo sapiens
tggaaggccaaggca

SEQ ID NO: 259827 - DNA, 15 bp, Homo sapiens
ttggaaggccaaggc

SEQ ID NO: 259828 - DNA, 15 bp, Homo sapiens
tttggaaggccaagg

SEQ ID NO: 259829 - DNA, 15 bp, Homo sapiens
ctttggaaggccaag

SEQ ID NO: 259830 - DNA, 15 bp, Homo sapiens
actttggaaggccaa

SEQ ID NO: 259831 - DNA, 15 bp, Homo sapiens
aactttggaaggcca

SEQ ID NO: 259832 - DNA, 15 bp, Homo sapiens
gaactttggaaggcc

SEQ ID NO: 259833 - DNA, 15 bp, Homo sapiens
agaactttggaaggc

SEQ ID NO: 259834 - DNA, 15 bp, Homo sapiens
cagaactttggaagg

SEQ ID NO: 259835 - DNA, 15 bp, Homo sapiens
ccagaactttggaag

SEQ ID NO: 259836 - DNA, 15 bp, Homo sapiens
cccagaactttggaa

SEQ ID NO: 259837 - DNA, 15 bp, Homo sapiens
tcccagaactttgga

SEQ ID NO: 259838 - DNA, 15 bp, Homo sapiens
atcccagaactttgg

SEQ ID NO: 259839 - DNA, 15 bp, Homo sapiens
aatcccagaactttg

SEQ ID NO: 259840 - DNA, 15 bp, Homo sapiens
taatcccagaacttt

SEQ ID NO: 259841 - DNA, 15 bp, Homo sapiens
gtaatcccagaactt

SEQ ID NO: 259842 - DNA, 15 bp, Homo sapiens
tgtaatcccagaact

SEQ ID NO: 259843 - DNA, 15 bp, Homo sapiens
ctgtaatcccagaac

SEQ ID NO: 259844 - DNA, 15 bp, Homo sapiens
cctgtaatcccagaa

SEQ ID NO: 259845 - DNA, 15 bp, Homo sapiens
acctgtaatcccaga

SEQ ID NO: 259846 - DNA, 15 bp, Homo sapiens
gggccaggcacagtg

SEQ ID NO: 259847 - DNA, 15 bp, Homo sapiens
tgggccaggcacagt

SEQ ID NO: 259848 - DNA, 15 bp, Homo sapiens
atgggccaggcacag

SEQ ID NO: 259849 - DNA, 15 bp, Homo sapiens
aatgggccaggcaca

SEQ ID NO: 259850 - DNA, 15 bp, Homo sapiens
caatgggccaggcac

SEQ ID NO: 259851 - DNA, 15 bp, Homo sapiens
acaatgggccaggca

SEQ ID NO: 259852 - DNA, 15 bp, Homo sapiens
gacaatgggccaggc

SEQ ID NO: 259853 - DNA, 15 bp, Homo sapiens
tgacaatgggccagg

SEQ ID NO: 259854 - DNA, 15 bp, Homo sapiens
atgacaatgggccag

SEQ ID NO: 259855 - DNA, 15 bp, Homo sapiens
tatgacaatgggcca

SEQ ID NO: 259856 - DNA, 15 bp, Homo sapiens
atatgacaatgggcc

SEQ ID NO: 259857 - DNA, 15 bp, Homo sapiens
aatatgacaatgggc

SEQ ID NO: 259858 - DNA, 15 bp, Homo sapiens
aaatatgacaatggg

SEQ ID NO: 259859 - DNA, 15 bp, Homo sapiens
taaatatgacaatgg

SEQ ID NO: 259860 - DNA, 15 bp, Homo sapiens
ataaatatgacaatg

SEQ ID NO: 259861 - DNA, 15 bp, Homo sapiens
aataaatatgacaat

SEQ ID NO: 259862 - DNA, 15 bp, Homo sapiens
taataaatatgacaa

SEQ ID NO: 259863 - DNA, 15 bp, Homo sapiens
ttaataaatatgaca

SEQ ID NO: 259864 - DNA, 15 bp, Homo sapiens
cttaataaatatgac

SEQ ID NO: 259865 - DNA, 15 bp, Homo sapiens
acttaataaatatga

SEQ ID NO: 259866 - DNA, 15 bp, Homo sapiens
tacttaataaatatg

SEQ ID NO: 259867 - DNA, 15 bp, Homo sapiens
ttacttaataaatat

SEQ ID NO: 259868 - DNA, 15 bp, Homo sapiens
tttacttaataaata

SEQ ID NO: 259869 - DNA, 15 bp, Homo sapiens
atttacttaataaat

SEQ ID NO: 259870 - DNA, 15 bp, Homo sapiens
tatttacttaataaa

SEQ ID NO: 259871 - DNA, 15 bp, Homo sapiens
atatttacttaataa

SEQ ID NO: 259872 - DNA, 15 bp, Homo sapiens
catatttacttaata

SEQ ID NO: 259873 - DNA, 15 bp, Homo sapiens
tcatatttacttaat

SEQ ID NO: 259874 - DNA, 15 bp, Homo sapiens
ctcatatttacttaa

SEQ ID NO: 259875 - DNA, 15 bp, Homo sapiens
cctcatatttactta

SEQ ID NO: 259876 - DNA, 15 bp, Homo sapiens
tcctcatatttactt

SEQ ID NO: 259877 - DNA, 15 bp, Homo sapiens
gtcctcatatttact

SEQ ID NO: 259878 - DNA, 15 bp, Homo sapiens
agtcctcatatttac

SEQ ID NO: 259879 - DNA, 15 bp, Homo sapiens
aagtcctcatattta

SEQ ID NO: 259880 - DNA, 15 bp, Homo sapiens
taagtcctcatattt

SEQ ID NO: 259881 - DNA, 15 bp, Homo sapiens
ttaagtcctcatatt

SEQ ID NO: 259882 - DNA, 15 bp, Homo sapiens
cttaagtcctcatat

SEQ ID NO: 259883 - DNA, 15 bp, Homo sapiens
acttaagtcctcata

SEQ ID NO: 259884 - DNA, 15 bp, Homo sapiens
cacttaagtcctcat

SEQ ID NO: 259885 - DNA, 15 bp, Homo sapiens
ccacttaagtcctca

SEQ ID NO: 259886 - DNA, 15 bp, Homo sapiens
accacttaagtcctc

SEQ ID NO: 259887 - DNA, 15 bp, Homo sapiens
taccacttaagtcct

SEQ ID NO: 259888 - DNA, 15 bp, Homo sapiens
ataccacttaagtcc

SEQ ID NO: 259889 - DNA, 15 bp, Homo sapiens
aataccacttaagtc

SEQ ID NO: 259890 - DNA, 15 bp, Homo sapiens
aaataccacttaagt

SEQ ID NO: 259891 - DNA, 15 bp, Homo sapiens
caaataccacttaag

SEQ ID NO: 259892 - DNA, 15 bp, Homo sapiens
tcaaataccacttaa

SEQ ID NO: 259893 - DNA, 15 bp, Homo sapiens
ttcaaataccactta

SEQ ID NO: 259894 - DNA, 15 bp, Homo sapiens
attcaaataccactt

SEQ ID NO: 259895 - DNA, 15 bp, Homo sapiens
tattcaaataccact

SEQ ID NO: 259896 - DNA, 15 bp, Homo sapiens
atattcaaataccac

SEQ ID NO: 259897 - DNA, 15 bp, Homo sapiens
aatattcaaatacca

SEQ ID NO: 259898 - DNA, 15 bp, Homo sapiens
caatattcaaatacc

SEQ ID NO: 259899 - DNA, 15 bp, Homo sapiens
tcaatattcaaatac

SEQ ID NO: 259900 - DNA, 15 bp, Homo sapiens
atcaatattcaaata

SEQ ID NO: 259901 - DNA, 15 bp, Homo sapiens
tatcaatattcaaat

SEQ ID NO: 259902 - DNA, 15 bp, Homo sapiens
atatcaatattcaaa

SEQ ID NO: 259903 - DNA, 15 bp, Homo sapiens
aatatcaatattcaa

SEQ ID NO: 259904 - DNA, 15 bp, Homo sapiens
aaatatcaatattca

SEQ ID NO: 259905 - DNA, 15 bp, Homo sapiens
taaatatcaatattc

SEQ ID NO: 259906 - DNA, 15 bp, Homo sapiens
ataaatatcaatatt

SEQ ID NO: 259907 - DNA, 15 bp, Homo sapiens
tataaatatcaatat

SEQ ID NO: 259908 - DNA, 15 bp, Homo sapiens
ttataaatatcaata

SEQ ID NO: 259909 - DNA, 15 bp, Homo sapiens
tttataaatatcaat

SEQ ID NO: 259910 - DNA, 15 bp, Homo sapiens
ttttataaatatcaa

SEQ ID NO: 259911 - DNA, 15 bp, Homo sapiens
attttataaatatca

SEQ ID NO: 259912 - DNA, 15 bp, Homo sapiens
tattttataaatatc

SEQ ID NO: 259913 - DNA, 15 bp, Homo sapiens
gtattttataaatat

SEQ ID NO: 259914 - DNA, 15 bp, Homo sapiens
ggtattttataaata

SEQ ID NO: 259915 - DNA, 15 bp, Homo sapiens
gggtattttataaat

SEQ ID NO: 259916 - DNA, 15 bp, Homo sapiens
agggtattttataaa

SEQ ID NO: 259917 - DNA, 15 bp, Homo sapiens
gagggtattttataa

SEQ ID NO: 259918 - DNA, 15 bp, Homo sapiens
ggagggtattttata

SEQ ID NO: 259919 - DNA, 15 bp, Homo sapiens
tggagggtattttat

SEQ ID NO: 259920 - DNA, 15 bp, Homo sapiens
gtggagggtatttta

SEQ ID NO: 259921 - DNA, 15 bp, Homo sapiens
agtggagggtatttt

SEQ ID NO: 259922 - DNA, 15 bp, Homo sapiens
cagtggagggtattt

SEQ ID NO: 259923 - DNA, 15 bp, Homo sapiens
gcagtggagggtatt

SEQ ID NO: 259924 - DNA, 15 bp, Homo sapiens
ggcagtggagggtat

SEQ ID NO: 259925 - DNA, 15 bp, Homo sapiens
aggcagtggagggta

SEQ ID NO: 259926 - DNA, 15 bp, Homo sapiens
aaggcagtggagggt

SEQ ID NO: 259927 - DNA, 15 bp, Homo sapiens
gaaggcagtggaggg

SEQ ID NO: 259928 - DNA, 15 bp, Homo sapiens
ggaaggcagtggagg

SEQ ID NO: 259929 - DNA, 15 bp, Homo sapiens
aggaaggcagtggag

SEQ ID NO: 259930 - DNA, 15 bp, Homo sapiens
gaggaaggcagtgga

SEQ ID NO: 259931 - DNA, 15 bp, Homo sapiens
agaggaaggcagtgg

SEQ ID NO: 259932 - DNA, 15 bp, Homo sapiens
aagaggaaggcagtg

SEQ ID NO: 259933 - DNA, 15 bp, Homo sapiens
gaagaggaaggcagt

SEQ ID NO: 259934 - DNA, 15 bp, Homo sapiens
tgaagaggaaggcag

SEQ ID NO: 259935 - DNA, 15 bp, Homo sapiens
ctgaagaggaaggca

SEQ ID NO: 259936 - DNA, 15 bp, Homo sapiens
gctgaagaggaaggc

SEQ ID NO: 259937 - DNA, 15 bp, Homo sapiens
tgctgaagaggaagg

SEQ ID NO: 259938 - DNA, 15 bp, Homo sapiens
atgctgaagaggaag

SEQ ID NO: 259939 - DNA, 15 bp, Homo sapiens
gatgctgaagaggaa

SEQ ID NO: 259940 - DNA, 15 bp, Homo sapiens
tgatgctgaagagga

SEQ ID NO: 259941 - DNA, 15 bp, Homo sapiens
atgatgctgaagagg

SEQ ID NO: 259942 - DNA, 15 bp, Homo sapiens
aatgatgctgaagag

SEQ ID NO: 259943 - DNA, 15 bp, Homo sapiens
aaatgatgctgaaga

SEQ ID NO: 259944 - DNA, 15 bp, Homo sapiens
gaaatgatgctgaag

SEQ ID NO: 259945 - DNA, 15 bp, Homo sapiens
tgaaatgatgctgaa

SEQ ID NO: 259946 - DNA, 15 bp, Homo sapiens
atgaaatgatgctga

SEQ ID NO: 259947 - DNA, 15 bp, Homo sapiens
gatgaaatgatgctg

SEQ ID NO: 259948 - DNA, 15 bp, Homo sapiens
ggatgaaatgatgct

SEQ ID NO: 259949 - DNA, 15 bp, Homo sapiens
aggatgaaatgatgc

SEQ ID NO: 259950 - DNA, 15 bp, Homo sapiens
aaggatgaaatgatg

SEQ ID NO: 259951 - DNA, 15 bp, Homo sapiens
taaggatgaaatgat

SEQ ID NO: 259952 - DNA, 15 bp, Homo sapiens
gtaaggatgaaatga

SEQ ID NO: 259953 - DNA, 15 bp, Homo sapiens
agtaaggatgaaatg

SEQ ID NO: 259954 - DNA, 15 bp, Homo sapiens
cagtaaggatgaaat

SEQ ID NO: 259955 - DNA, 15 bp, Homo sapiens
ccagtaaggatgaaa

SEQ ID NO: 259956 - DNA, 15 bp, Homo sapiens
gccagtaaggatgaa

SEQ ID NO: 259957 - DNA, 15 bp, Homo sapiens
agccagtaaggatga

SEQ ID NO: 259958 - DNA, 15 bp, Homo sapiens
gagccagtaaggatg

SEQ ID NO: 259959 - DNA, 15 bp, Homo sapiens
agagccagtaaggat

SEQ ID NO: 259960 - DNA, 15 bp, Homo sapiens
tagagccagtaagga

SEQ ID NO: 259961 - DNA, 15 bp, Homo sapiens
gtagagccagtaagg

SEQ ID NO: 259962 - DNA, 15 bp, Homo sapiens
ggtagagccagtaag

SEQ ID NO: 259963 - DNA, 15 bp, Homo sapiens
aggtagagccagtaa

SEQ ID NO: 259964 - DNA, 15 bp, Homo sapiens
taggtagagccagta

SEQ ID NO: 259965 - DNA, 15 bp, Homo sapiens
gtaggtagagccagt

SEQ ID NO: 259966 - DNA, 15 bp, Homo sapiens
agtaggtagagccag

SEQ ID NO: 259967 - DNA, 15 bp, Homo sapiens
gagtaggtagagcca

SEQ ID NO: 259968 - DNA, 15 bp, Homo sapiens
tgagtaggtagagcc

SEQ ID NO: 259969 - DNA, 15 bp, Homo sapiens
ttgagtaggtagagc

SEQ ID NO: 259970 - DNA, 15 bp, Homo sapiens
tttgagtaggtagag

SEQ ID NO: 259971 - DNA, 15 bp, Homo sapiens
ttttgagtaggtaga

SEQ ID NO: 259972 - DNA, 15 bp, Homo sapiens
gttttgagtaggtag

SEQ ID NO: 259973 - DNA, 15 bp, Homo sapiens
tgttttgagtaggta

SEQ ID NO: 259974 - DNA, 15 bp, Homo sapiens
ctgttttgagtaggt

SEQ ID NO: 259975 - DNA, 15 bp, Homo sapiens
cctgttttgagtagg

SEQ ID NO: 259976 - DNA, 15 bp, Homo sapiens
tcctgttttgagtag

SEQ ID NO: 259977 - DNA, 15 bp, Homo sapiens
ttcctgttttgagta

SEQ ID NO: 259978 - DNA, 15 bp, Homo sapiens
attcctgttttgagt

SEQ ID NO: 259979 - DNA, 15 bp, Homo sapiens
cattcctgttttgag

SEQ ID NO: 259980 - DNA, 15 bp, Homo sapiens
ccattcctgttttga

SEQ ID NO: 259981 - DNA, 15 bp, Homo sapiens
accattcctgttttg

SEQ ID NO: 259982 - DNA, 15 bp, Homo sapiens
aaccattcctgtttt

SEQ ID NO: 259983 - DNA, 15 bp, Homo sapiens
caaccattcctgttt

SEQ ID NO: 259984 - DNA, 15 bp, Homo sapiens
acaaccattcctgtt

SEQ ID NO: 259985 - DNA, 15 bp, Homo sapiens
aacaaccattcctgt

SEQ ID NO: 259986 - DNA, 15 bp, Homo sapiens
aaacaaccattcctg

SEQ ID NO: 259987 - DNA, 15 bp, Homo sapiens
taaacaaccattcct

SEQ ID NO: 259988 - DNA, 15 bp, Homo sapiens
ataaacaaccattcc

SEQ ID NO: 259989 - DNA, 15 bp, Homo sapiens
cataaacaaccattc

SEQ ID NO: 259990 - DNA, 15 bp, Homo sapiens
ccataaacaaccatt

SEQ ID NO: 259991 - DNA, 15 bp, Homo sapiens
tccataaacaaccat

SEQ ID NO: 259992 - DNA, 15 bp, Homo sapiens
ttccataaacaacca

SEQ ID NO: 259993 - DNA, 15 bp, Homo sapiens
cttccataaacaacc

SEQ ID NO: 259994 - DNA, 15 bp, Homo sapiens
acttccataaacaac

SEQ ID NO: 259995 - DNA, 15 bp, Homo sapiens
cacttccataaacaa

SEQ ID NO: 259996 - DNA, 15 bp, Homo sapiens
ccacttccataaaca

SEQ ID NO: 259997 - DNA, 15 bp, Homo sapiens
tccacttccataaac

SEQ ID NO: 259998 - DNA, 15 bp, Homo sapiens
atccacttccataaa

SEQ ID NO: 259999 - DNA, 15 bp, Homo sapiens
tatccacttccataa

SEQ ID NO: 260000 - DNA, 15 bp, Homo sapiens
atatccacttccata

SEQ ID NO: 260001 - DNA, 15 bp, Homo sapiens
catatccacttccat

SEQ ID NO: 260002 - DNA, 15 bp, Homo sapiens
acatatccacttcca

SEQ ID NO: 260003 - DNA, 15 bp, Homo sapiens
aacatatccacttcc

SEQ ID NO: 260004 - DNA, 15 bp, Homo sapiens
aaacatatccacttc

SEQ ID NO: 260005 - DNA, 15 bp, Homo sapiens
taaacatatccactt

SEQ ID NO: 260006 - DNA, 15 bp, Homo sapiens
ttaaacatatccact

SEQ ID NO: 260007 - DNA, 15 bp, Homo sapiens
attaaacatatccac

SEQ ID NO: 260008 - DNA, 15 bp, Homo sapiens
cattaaacatatcca

SEQ ID NO: 260009 - DNA, 15 bp, Homo sapiens
ccattaaacatatcc

SEQ ID NO: 260010 - DNA, 15 bp, Homo sapiens
tccattaaacatatc

SEQ ID NO: 260011 - DNA, 15 bp, Homo sapiens
ttccattaaacatat

SEQ ID NO: 260012 - DNA, 15 bp, Homo sapiens
tttccattaaacata

SEQ ID NO: 260013 - DNA, 15 bp, Homo sapiens
atttccattaaacat

SEQ ID NO: 260014 - DNA, 15 bp, Homo sapiens
aatttccattaaaca

SEQ ID NO: 260015 - DNA, 15 bp, Homo sapiens
gaatttccattaaac

SEQ ID NO: 260016 - DNA, 15 bp, Homo sapiens
tgaatttccattaaa

SEQ ID NO: 260017 - DNA, 15 bp, Homo sapiens
atgaatttccattaa

SEQ ID NO: 260018 - DNA, 15 bp, Homo sapiens
tatgaatttccatta

SEQ ID NO: 260019 - DNA, 15 bp, Homo sapiens
atatgaatttccatt

SEQ ID NO: 260020 - DNA, 15 bp, Homo sapiens
catatgaatttccat

SEQ ID NO: 260021 - DNA, 15 bp, Homo sapiens
acatatgaatttcca

SEQ ID NO: 260022 - DNA, 15 bp, Homo sapiens
aacatatgaatttcc

SEQ ID NO: 260023 - DNA, 15 bp, Homo sapiens
aaacatatgaatttc

SEQ ID NO: 260024 - DNA, 15 bp, Homo sapiens
gaaacatatgaattt

SEQ ID NO: 260025 - DNA, 15 bp, Homo sapiens
tgaaacatatgaatt

SEQ ID NO: 260026 - DNA, 15 bp, Homo sapiens
gtgaaacatatgaat

SEQ ID NO: 260027 - DNA, 15 bp, Homo sapiens
agtgaaacatatgaa

SEQ ID NO: 260028 - DNA, 15 bp, Homo sapiens
cagtgaaacatatga

SEQ ID NO: 260029 - DNA, 15 bp, Homo sapiens
tcagtgaaacatatg

SEQ ID NO: 260030 - DNA, 15 bp, Homo sapiens
gtcagtgaaacatat

SEQ ID NO: 260031 - DNA, 15 bp, Homo sapiens
ggtcagtgaaacata

SEQ ID NO: 260032 - DNA, 15 bp, Homo sapiens
gggtcagtgaaacat

SEQ ID NO: 260033 - DNA, 15 bp, Homo sapiens
tgggtcagtgaaaca

SEQ ID NO: 260034 - DNA, 15 bp, Homo sapiens
atgggtcagtgaaac

SEQ ID NO: 260035 - DNA, 15 bp, Homo sapiens
catgggtcagtgaaa

SEQ ID NO: 260036 - DNA, 15 bp, Homo sapiens
ccatgggtcagtgaa

SEQ ID NO: 260037 - DNA, 15 bp, Homo sapiens
accatgggtcagtga

SEQ ID NO: 260038 - DNA, 15 bp, Homo sapiens
aaccatgggtcagtg

SEQ ID NO: 260039 - DNA, 15 bp, Homo sapiens
caaccatgggtcagt

SEQ ID NO: 260040 - DNA, 15 bp, Homo sapiens
gcaaccatgggtcag

SEQ ID NO: 260041 - DNA, 15 bp, Homo sapiens
ggcaaccatgggtca

SEQ ID NO: 260042 - DNA, 15 bp, Homo sapiens
tggcaaccatgggtc

SEQ ID NO: 260043 - DNA, 15 bp, Homo sapiens
atggcaaccatgggt

SEQ ID NO: 260044 - DNA, 15 bp, Homo sapiens
gatggcaaccatggg

SEQ ID NO: 260045 - DNA, 15 bp, Homo sapiens
tgatggcaaccatgg

SEQ ID NO: 260046 - DNA, 15 bp, Homo sapiens
atgatggcaaccatg

SEQ ID NO: 260047 - DNA, 15 bp, Homo sapiens
catgatggcaaccat

SEQ ID NO: 260048 - DNA, 15 bp, Homo sapiens
gcatgatggcaacca

SEQ ID NO: 260049 - DNA, 15 bp, Homo sapiens
ggcatgatggcaacc

SEQ ID NO: 260050 - DNA, 15 bp, Homo sapiens
tggcatgatggcaac

SEQ ID NO: 260051 - DNA, 15 bp, Homo sapiens
atggcatgatggcaa

SEQ ID NO: 260052 - DNA, 15 bp, Homo sapiens
tatggcatgatggca

SEQ ID NO: 260053 - DNA, 15 bp, Homo sapiens
atatggcatgatggc

SEQ ID NO: 260054 - DNA, 15 bp, Homo sapiens
tatatggcatgatgg

SEQ ID NO: 260055 - DNA, 15 bp, Homo sapiens
atatatggcatgatg

SEQ ID NO: 260056 - DNA, 15 bp, Homo sapiens
gatatatggcatgat

SEQ ID NO: 260057 - DNA, 15 bp, Homo sapiens
tgatatatggcatga

SEQ ID NO: 260058 - DNA, 15 bp, Homo sapiens
atgatatatggcatg

SEQ ID NO: 260059 - DNA, 15 bp, Homo sapiens
tatgatatatggcat

SEQ ID NO: 260060 - DNA, 15 bp, Homo sapiens
ttatgatatatggca

SEQ ID NO: 260061 - DNA, 15 bp, Homo sapiens
tttatgatatatggc

SEQ ID NO: 260062 - DNA, 15 bp, Homo sapiens
ctttatgatatatgg

SEQ ID NO: 260063 - DNA, 15 bp, Homo sapiens
gctttatgatatatg

SEQ ID NO: 260064 - DNA, 15 bp, Homo sapiens
tgctttatgatatat

SEQ ID NO: 260065 - DNA, 15 bp, Homo sapiens
gtgctttatgatata

SEQ ID NO: 260066 - DNA, 15 bp, Homo sapiens
agtgctttatgatat

SEQ ID NO: 260067 - DNA, 15 bp, Homo sapiens
aagtgctttatgata

SEQ ID NO: 260068 - DNA, 15 bp, Homo sapiens
aaagtgctttatgat

SEQ ID NO: 260069 - DNA, 15 bp, Homo sapiens
aaaagtgctttatga

SEQ ID NO: 260070 - DNA, 15 bp, Homo sapiens
caaaagtgctttatg

SEQ ID NO: 260071 - DNA, 15 bp, Homo sapiens
acaaaagtgctttat

SEQ ID NO: 260072 - DNA, 15 bp, Homo sapiens
tacaaaagtgcttta

SEQ ID NO: 260073 - DNA, 15 bp, Homo sapiens
atacaaaagtgcttt

SEQ ID NO: 260074 - DNA, 15 bp, Homo sapiens
tatacaaaagtgctt

SEQ ID NO: 260075 - DNA, 15 bp, Homo sapiens
ttatacaaaagtgct

SEQ ID NO: 260076 - DNA, 15 bp, Homo sapiens
tttatacaaaagtgc

SEQ ID NO: 260077 - DNA, 15 bp, Homo sapiens
atttatacaaaagtg

SEQ ID NO: 260078 - DNA, 15 bp, Homo sapiens
aatttatacaaaagt

SEQ ID NO: 260079 - DNA, 15 bp, Homo sapiens
taatttatacaaaag

SEQ ID NO: 260080 - DNA, 15 bp, Homo sapiens
ttaatttatacaaaa

SEQ ID NO: 260081 - DNA, 15 bp, Homo sapiens
tttaatttatacaaa

SEQ ID NO: 260082 - DNA, 15 bp, Homo sapiens
atttaatttatacaa

SEQ ID NO: 260083 - DNA, 15 bp, Homo sapiens
tatttaatttataca

SEQ ID NO: 260084 - DNA, 15 bp, Homo sapiens
atatttaatttatac

SEQ ID NO: 260085 - DNA, 15 bp, Homo sapiens
tatatttaatttata

SEQ ID NO: 260086 - DNA, 15 bp, Homo sapiens
ttatatttaatttat

SEQ ID NO: 260087 - DNA, 15 bp, Homo sapiens
cttatatttaattta

SEQ ID NO: 260088 - DNA, 15 bp, Homo sapiens
ccttatatttaattt

SEQ ID NO: 260089 - DNA, 15 bp, Homo sapiens
tccttatatttaatt

SEQ ID NO: 260090 - DNA, 15 bp, Homo sapiens
atccttatatttaat

SEQ ID NO: 260091 - DNA, 15 bp, Homo sapiens
tatccttatatttaa

SEQ ID NO: 260092 - DNA, 15 bp, Homo sapiens
ttatccttatattta

SEQ ID NO: 260093 - DNA, 15 bp, Homo sapiens
cttatccttatattt

SEQ ID NO: 260094 - DNA, 15 bp, Homo sapiens
gcttatccttatatt

SEQ ID NO: 260095 - DNA, 15 bp, Homo sapiens
tgcttatccttatat

SEQ ID NO: 260096 - DNA, 15 bp, Homo sapiens
ttgcttatccttata

SEQ ID NO: 260097 - DNA, 15 bp, Homo sapiens
cttgcttatccttat

SEQ ID NO: 260098 - DNA, 15 bp, Homo sapiens
acttgcttatcctta

SEQ ID NO: 260099 - DNA, 15 bp, Homo sapiens
aacttgcttatcctt

SEQ ID NO: 260100 - DNA, 15 bp, Homo sapiens
taacttgcttatcct

SEQ ID NO: 260101 - DNA, 15 bp, Homo sapiens
ataacttgcttatcc

SEQ ID NO: 260102 - DNA, 15 bp, Homo sapiens
aataacttgcttatc

SEQ ID NO: 260103 - DNA, 15 bp, Homo sapiens
caataacttgcttat

SEQ ID NO: 260104 - DNA, 15 bp, Homo sapiens
gcaataacttgctta

SEQ ID NO: 260105 - DNA, 15 bp, Homo sapiens
agcaataacttgctt

SEQ ID NO: 260106 - DNA, 15 bp, Homo sapiens
gagcaataacttgct

SEQ ID NO: 260107 - DNA, 15 bp, Homo sapiens
tgagcaataacttgc

SEQ ID NO: 260108 - DNA, 15 bp, Homo sapiens
ctgagcaataacttg

SEQ ID NO: 260109 - DNA, 15 bp, Homo sapiens
tctgagcaataactt

SEQ ID NO: 260110 - DNA, 15 bp, Homo sapiens
atctgagcaataact

SEQ ID NO: 260111 - DNA, 15 bp, Homo sapiens
aatctgagcaataac

SEQ ID NO: 260112 - DNA, 15 bp, Homo sapiens
taatctgagcaataa

SEQ ID NO: 260113 - DNA, 15 bp, Homo sapiens
ctaatctgagcaata

SEQ ID NO: 260114 - DNA, 15 bp, Homo sapiens
tctaatctgagcaat

SEQ ID NO: 260115 - DNA, 15 bp, Homo sapiens
atctaatctgagcaa

SEQ ID NO: 260116 - DNA, 15 bp, Homo sapiens
tatctaatctgagca

SEQ ID NO: 260117 - DNA, 15 bp, Homo sapiens
gtatctaatctgagc

SEQ ID NO: 260118 - DNA, 15 bp, Homo sapiens
agtatctaatctgag

SEQ ID NO: 260119 - DNA, 15 bp, Homo sapiens
cagtatctaatctga

SEQ ID NO: 260120 - DNA, 15 bp, Homo sapiens
acagtatctaatctg

SEQ ID NO: 260121 - DNA, 15 bp, Homo sapiens
tacagtatctaatct

SEQ ID NO: 260122 - DNA, 15 bp, Homo sapiens
atacagtatctaatc

SEQ ID NO: 260123 - DNA, 15 bp, Homo sapiens
aatacagtatctaat

SEQ ID NO: 260124 - DNA, 15 bp, Homo sapiens
gaatacagtatctaa

SEQ ID NO: 260125 - DNA, 15 bp, Homo sapiens
ggaatacagtatcta

SEQ ID NO: 260126 - DNA, 15 bp, Homo sapiens
aggaatacagtatct

SEQ ID NO: 260127 - DNA, 15 bp, Homo sapiens
gaggaatacagtatc

SEQ ID NO: 260128 - DNA, 15 bp, Homo sapiens
tgaggaatacagtat

SEQ ID NO: 260129 - DNA, 15 bp, Homo sapiens
atgaggaatacagta

SEQ ID NO: 260130 - DNA, 15 bp, Homo sapiens
catgaggaatacagt

SEQ ID NO: 260131 - DNA, 15 bp, Homo sapiens
gcatgaggaatacag

SEQ ID NO: 260132 - DNA, 15 bp, Homo sapiens
agcatgaggaataca

SEQ ID NO: 260133 - DNA, 15 bp, Homo sapiens
gagcatgaggaatac

SEQ ID NO: 260134 - DNA, 15 bp, Homo sapiens
tgagcatgaggaata

SEQ ID NO: 260135 - DNA, 15 bp, Homo sapiens
ctgagcatgaggaat

SEQ ID NO: 260136 - DNA, 15 bp, Homo sapiens
tctgagcatgaggaa

SEQ ID NO: 260137 - DNA, 15 bp, Homo sapiens
gtctgagcatgagga

SEQ ID NO: 260138 - DNA, 15 bp, Homo sapiens
ggtctgagcatgagg

SEQ ID NO: 260139 - DNA, 15 bp, Homo sapiens
aggtctgagcatgag

SEQ ID NO: 260140 - DNA, 15 bp, Homo sapiens
caggtctgagcatga

SEQ ID NO: 260141 - DNA, 15 bp, Homo sapiens
gcaggtctgagcatg

SEQ ID NO: 260142 - DNA, 15 bp, Homo sapiens
agcaggtctgagcat

SEQ ID NO: 260143 - DNA, 15 bp, Homo sapiens
cagcaggtctgagca

SEQ ID NO: 260144 - DNA, 15 bp, Homo sapiens
gcagcaggtctgagc

SEQ ID NO: 260145 - DNA, 15 bp, Homo sapiens
ggcagcaggtctgag

SEQ ID NO: 260146 - DNA, 15 bp, Homo sapiens
tggcagcaggtctga

SEQ ID NO: 260147 - DNA, 15 bp, Homo sapiens
ctggcagcaggtctg

SEQ ID NO: 260148 - DNA, 15 bp, Homo sapiens
actggcagcaggtct

SEQ ID NO: 260149 - DNA, 15 bp, Homo sapiens
cactggcagcaggtc

SEQ ID NO: 260150 - DNA, 15 bp, Homo sapiens
acactggcagcaggt

SEQ ID NO: 260151 - DNA, 15 bp, Homo sapiens
gacactggcagcagg

SEQ ID NO: 260152 - DNA, 15 bp, Homo sapiens
tgacactggcagcag

SEQ ID NO: 260153 - DNA, 15 bp, Homo sapiens
ctgacactggcagca

SEQ ID NO: 260154 - DNA, 15 bp, Homo sapiens
tctgacactggcagc

SEQ ID NO: 260155 - DNA, 15 bp, Homo sapiens
ctctgacactggcag

SEQ ID NO: 260156 - DNA, 15 bp, Homo sapiens
cctctgacactggca

SEQ ID NO: 260157 - DNA, 15 bp, Homo sapiens
gcctctgacactggc

SEQ ID NO: 260158 - DNA, 15 bp, Homo sapiens
ggcctctgacactgg

SEQ ID NO: 260159 - DNA, 15 bp, Homo sapiens
aggcctctgacactg

SEQ ID NO: 260160 - DNA, 15 bp, Homo sapiens
caggcctctgacact

SEQ ID NO: 260161 - DNA, 15 bp, Homo sapiens
tcaggcctctgacac

SEQ ID NO: 260162 - DNA, 15 bp, Homo sapiens
ctcaggcctctgaca

SEQ ID NO: 260163 - DNA, 15 bp, Homo sapiens
tctcaggcctctgac

SEQ ID NO: 260164 - DNA, 15 bp, Homo sapiens
ctctcaggcctctga

SEQ ID NO: 260165 - DNA, 15 bp, Homo sapiens
actctcaggcctctg

SEQ ID NO: 260166 - DNA, 15 bp, Homo sapiens
tactctcaggcctct

SEQ ID NO: 260167 - DNA, 15 bp, Homo sapiens
atactctcaggcctc

SEQ ID NO: 260168 - DNA, 15 bp, Homo sapiens
catactctcaggcct

SEQ ID NO: 260169 - DNA, 15 bp, Homo sapiens
gcatactctcaggcc

SEQ ID NO: 260170 - DNA, 15 bp, Homo sapiens
ggcatactctcaggc

SEQ ID NO: 260171 - DNA, 15 bp, Homo sapiens
tggcatactctcagg

SEQ ID NO: 260172 - DNA, 15 bp, Homo sapiens
ctggcatactctcag

SEQ ID NO: 260173 - DNA, 15 bp, Homo sapiens
gctggcatactctca

SEQ ID NO: 260174 - DNA, 15 bp, Homo sapiens
agctggcatactctc

SEQ ID NO: 260175 - DNA, 15 bp, Homo sapiens
cagctggcatactct

SEQ ID NO: 260176 - DNA, 15 bp, Homo sapiens
ccagctggcatactc

SEQ ID NO: 260177 - DNA, 15 bp, Homo sapiens
cccagctggcatact

SEQ ID NO: 260178 - DNA, 15 bp, Homo sapiens
ccccagctggcatac

SEQ ID NO: 260179 - DNA, 15 bp, Homo sapiens
accccagctggcata

SEQ ID NO: 260180 - DNA, 15 bp, Homo sapiens
caccccagctggcat

SEQ ID NO: 260181 - DNA, 15 bp, Homo sapiens
ccaccccagctggca

SEQ ID NO: 260182 - DNA, 15 bp, Homo sapiens
cccaccccagctggc

SEQ ID NO: 260183 - DNA, 15 bp, Homo sapiens
acccaccccagctgg

SEQ ID NO: 260184 - DNA, 15 bp, Homo sapiens
gacccaccccagctg

SEQ ID NO: 260185 - DNA, 15 bp, Homo sapiens
tgacccaccccagct

SEQ ID NO: 260186 - DNA, 15 bp, Homo sapiens
ctgacccaccccagc

SEQ ID NO: 260187 - DNA, 15 bp, Homo sapiens
cctgacccaccccag

SEQ ID NO: 260188 - DNA, 15 bp, Homo sapiens
gcctgacccacccca

SEQ ID NO: 260189 - DNA, 15 bp, Homo sapiens
ggcctgacccacccc

SEQ ID NO: 260190 - DNA, 15 bp, Homo sapiens
tggcctgacccaccc

SEQ ID NO: 260191 - DNA, 15 bp, Homo sapiens
ctggcctgacccacc

SEQ ID NO: 260192 - DNA, 15 bp, Homo sapiens
gctggcctgacccac

SEQ ID NO: 260193 - DNA, 15 bp, Homo sapiens
cgctggcctgaccca

SEQ ID NO: 260194 - DNA, 15 bp, Homo sapiens
acgctggcctgaccc

SEQ ID NO: 260195 - DNA, 15 bp, Homo sapiens
cacgctggcctgacc

SEQ ID NO: 260196 - DNA, 15 bp, Homo sapiens
ccacgctggcctgac

SEQ ID NO: 260197 - DNA, 15 bp, Homo sapiens
cccacgctggcctga

SEQ ID NO: 260198 - DNA, 15 bp, Homo sapiens
tcccacgctggcctg

SEQ ID NO: 260199 - DNA, 15 bp, Homo sapiens
atcccacgctggcct

SEQ ID NO: 260200 - DNA, 15 bp, Homo sapiens
aatcccacgctggcc

SEQ ID NO: 260201 - DNA, 15 bp, Homo sapiens
aaatcccacgctggc

SEQ ID NO: 260202 - DNA, 15 bp, Homo sapiens
taaatcccacgctgg

SEQ ID NO: 260203 - DNA, 15 bp, Homo sapiens
ttaaatcccacgctg

SEQ ID NO: 260204 - DNA, 15 bp, Homo sapiens
tttaaatcccacgct

SEQ ID NO: 260205 - DNA, 15 bp, Homo sapiens
ttttaaatcccacgc

SEQ ID NO: 260206 - DNA, 15 bp, Homo sapiens
cttttaaatcccacg

SEQ ID NO: 260207 - DNA, 15 bp, Homo sapiens
acttttaaatcccac

SEQ ID NO: 260208 - DNA, 15 bp, Homo sapiens
aacttttaaatccca

SEQ ID NO: 260209 - DNA, 15 bp, Homo sapiens
gaacttttaaatccc

SEQ ID NO: 260210 - DNA, 15 bp, Homo sapiens
agaacttttaaatcc

SEQ ID NO: 260211 - DNA, 15 bp, Homo sapiens
gagaacttttaaatc

SEQ ID NO: 260212 - DNA, 15 bp, Homo sapiens
agagaacttttaaat

SEQ ID NO: 260213 - DNA, 15 bp, Homo sapiens
tagagaacttttaaa

SEQ ID NO: 260214 - DNA, 15 bp, Homo sapiens
ctagagaacttttaa

SEQ ID NO: 260215 - DNA, 15 bp, Homo sapiens
tctagagaactttta

SEQ ID NO: 260216 - DNA, 15 bp, Homo sapiens
atctagagaactttt

SEQ ID NO: 260217 - DNA, 15 bp, Homo sapiens
tatctagagaacttt

SEQ ID NO: 260218 - DNA, 15 bp, Homo sapiens
ttatctagagaactt

SEQ ID NO: 260219 - DNA, 15 bp, Homo sapiens
cttatctagagaact

SEQ ID NO: 260220 - DNA, 15 bp, Homo sapiens
gcttatctagagaac

SEQ ID NO: 260221 - DNA, 15 bp, Homo sapiens
ggcttatctagagaa

SEQ ID NO: 260222 - DNA, 15 bp, Homo sapiens
tggcttatctagaga

SEQ ID NO: 260223 - DNA, 15 bp, Homo sapiens
gtggcttatctagag

SEQ ID NO: 260224 - DNA, 15 bp, Homo sapiens
tgtggcttatctaga

SEQ ID NO: 260225 - DNA, 15 bp, Homo sapiens
atgtggcttatctag

SEQ ID NO: 260226 - DNA, 15 bp, Homo sapiens
catgtggcttatcta

SEQ ID NO: 260227 - DNA, 15 bp, Homo sapiens
acatgtggcttatct

SEQ ID NO: 260228 - DNA, 15 bp, Homo sapiens
cacatgtggcttatc

SEQ ID NO: 260229 - DNA, 15 bp, Homo sapiens
tcacatgtggcttat

SEQ ID NO: 260230 - DNA, 15 bp, Homo sapiens
atcacatgtggctta

SEQ ID NO: 260231 - DNA, 15 bp, Homo sapiens
catcacatgtggctt

SEQ ID NO: 260232 - DNA, 15 bp, Homo sapiens
tcatcacatgtggct

SEQ ID NO: 260233 - DNA, 15 bp, Homo sapiens
atcatcacatgtggc

SEQ ID NO: 260234 - DNA, 15 bp, Homo sapiens
aatcatcacatgtgg

SEQ ID NO: 260235 - DNA, 15 bp, Homo sapiens
caatcatcacatgtg

SEQ ID NO: 260236 - DNA, 15 bp, Homo sapiens
tcaatcatcacatgt

SEQ ID NO: 260237 - DNA, 15 bp, Homo sapiens
ctcaatcatcacatg

SEQ ID NO: 260238 - DNA, 15 bp, Homo sapiens
gctcaatcatcacat

SEQ ID NO: 260239 - DNA, 15 bp, Homo sapiens
agctcaatcatcaca

SEQ ID NO: 260240 - DNA, 15 bp, Homo sapiens
gagctcaatcatcac

SEQ ID NO: 260241 - DNA, 15 bp, Homo sapiens
agagctcaatcatca

SEQ ID NO: 260242 - DNA, 15 bp, Homo sapiens
gagagctcaatcatc

SEQ ID NO: 260243 - DNA, 15 bp, Homo sapiens
agagagctcaatcat

SEQ ID NO: 260244 - DNA, 15 bp, Homo sapiens
gagagagctcaatca

SEQ ID NO: 260245 - DNA, 15 bp, Homo sapiens
agagagagctcaatc

SEQ ID NO: 260246 - DNA, 15 bp, Homo sapiens
gagagagagctcaat

SEQ ID NO: 260247 - DNA, 15 bp, Homo sapiens
agagagagagctcaa

SEQ ID NO: 260248 - DNA, 15 bp, Homo sapiens
cagagagagagctca

SEQ ID NO: 260249 - DNA, 15 bp, Homo sapiens
gcagagagagagctc

SEQ ID NO: 260250 - DNA, 15 bp, Homo sapiens
agcagagagagagct

SEQ ID NO: 260251 - DNA, 15 bp, Homo sapiens
cagcagagagagagc

SEQ ID NO: 260252 - DNA, 15 bp, Homo sapiens
acagcagagagagag

SEQ ID NO: 260253 - DNA, 15 bp, Homo sapiens
aacagcagagagaga

SEQ ID NO: 260254 - DNA, 15 bp, Homo sapiens
gaacagcagagagag

SEQ ID NO: 260255 - DNA, 15 bp, Homo sapiens
tgaacagcagagaga

SEQ ID NO: 260256 - DNA, 15 bp, Homo sapiens
ctgaacagcagagag

SEQ ID NO: 260257 - DNA, 15 bp, Homo sapiens
cctgaacagcagaga

SEQ ID NO: 260258 - DNA, 15 bp, Homo sapiens
gcctgaacagcagag

SEQ ID NO: 260259 - DNA, 15 bp, Homo sapiens
tgcctgaacagcaga

SEQ ID NO: 260260 - DNA, 15 bp, Homo sapiens
atgcctgaacagcag

SEQ ID NO: 260261 - DNA, 15 bp, Homo sapiens
catgcctgaacagca

SEQ ID NO: 260262 - DNA, 15 bp, Homo sapiens
acatgcctgaacagc

SEQ ID NO: 260263 - DNA, 15 bp, Homo sapiens
cacatgcctgaacag

SEQ ID NO: 260264 - DNA, 15 bp, Homo sapiens
ccacatgcctgaaca

SEQ ID NO: 260265 - DNA, 15 bp, Homo sapiens
gccacatgcctgaac

SEQ ID NO: 260266 - DNA, 15 bp, Homo sapiens
agccacatgcctgaa

SEQ ID NO: 260267 - DNA, 15 bp, Homo sapiens
cagccacatgcctga

SEQ ID NO: 260268 - DNA, 15 bp, Homo sapiens
ccagccacatgcctg

SEQ ID NO: 260269 - DNA, 15 bp, Homo sapiens
gccagccacatgcct

SEQ ID NO: 260270 - DNA, 15 bp, Homo sapiens
tgccagccacatgcc

SEQ ID NO: 260271 - DNA, 15 bp, Homo sapiens
ctgccagccacatgc

SEQ ID NO: 260272 - DNA, 15 bp, Homo sapiens
cctgccagccacatg

SEQ ID NO: 260273 - DNA, 15 bp, Homo sapiens
acctgccagccacat

SEQ ID NO: 260274 - DNA, 15 bp, Homo sapiens
tacctgccagccaca

SEQ ID NO: 260275 - DNA, 15 bp, Homo sapiens
gtacctgccagccac

SEQ ID NO: 260276 - DNA, 15 bp, Homo sapiens
tgtacctgccagcca

SEQ ID NO: 260277 - DNA, 15 bp, Homo sapiens
atgtacctgccagcc

SEQ ID NO: 260278 - DNA, 15 bp, Homo sapiens
catgtacctgccagc

SEQ ID NO: 260279 - DNA, 15 bp, Homo sapiens
ccatgtacctgccag

SEQ ID NO: 260280 - DNA, 15 bp, Homo sapiens
cccatgtacctgcca

SEQ ID NO: 260281 - DNA, 15 bp, Homo sapiens
ccccatgtacctgcc

SEQ ID NO: 260282 - DNA, 15 bp, Homo sapiens
cccccatgtacctgc

SEQ ID NO: 260283 - DNA, 15 bp, Homo sapiens
ccccccatgtacctg

SEQ ID NO: 260284 - DNA, 15 bp, Homo sapiens
gccccccatgtacct

SEQ ID NO: 260285 - DNA, 15 bp, Homo sapiens
tgccccccatgtacc

SEQ ID NO: 260286 - DNA, 15 bp, Homo sapiens
ctgccccccatgtac

SEQ ID NO: 260287 - DNA, 15 bp, Homo sapiens
cctgccccccatgta

SEQ ID NO: 260288 - DNA, 15 bp, Homo sapiens
ccctgccccccatgt

SEQ ID NO: 260289 - DNA, 15 bp, Homo sapiens
tccctgccccccatg

SEQ ID NO: 260290 - DNA, 15 bp, Homo sapiens
ctccctgccccccat

SEQ ID NO: 260291 - DNA, 15 bp, Homo sapiens
tctccctgcccccca

SEQ ID NO: 260292 - DNA, 15 bp, Homo sapiens
ttctccctgcccccc

SEQ ID NO: 260293 - DNA, 15 bp, Homo sapiens
tttctccctgccccc

SEQ ID NO: 260294 - DNA, 15 bp, Homo sapiens
ctttctccctgcccc

SEQ ID NO: 260295 - DNA, 15 bp, Homo sapiens
tctttctccctgccc

SEQ ID NO: 260296 - DNA, 15 bp, Homo sapiens
gtctttctccctgcc

SEQ ID NO: 260297 - DNA, 15 bp, Homo sapiens
tgtctttctccctgc

SEQ ID NO: 260298 - DNA, 15 bp, Homo sapiens
gtgtctttctccctg

SEQ ID NO: 260299 - DNA, 15 bp, Homo sapiens
agtgtctttctccct

SEQ ID NO: 260300 - DNA, 15 bp, Homo sapiens
cagtgtctttctccc

SEQ ID NO: 260301 - DNA, 15 bp, Homo sapiens
ccagtgtctttctcc

SEQ ID NO: 260302 - DNA, 15 bp, Homo sapiens
tccagtgtctttctc

SEQ ID NO: 260303 - DNA, 15 bp, Homo sapiens
gtccagtgtctttct

SEQ ID NO: 260304 - DNA, 15 bp, Homo sapiens
agtccagtgtctttc

SEQ ID NO: 260305 - DNA, 15 bp, Homo sapiens
aagtccagtgtcttt

SEQ ID NO: 260306 - DNA, 15 bp, Homo sapiens
taagtccagtgtctt

SEQ ID NO: 260307 - DNA, 15 bp, Homo sapiens
ctaagtccagtgtct

SEQ ID NO: 260308 - DNA, 15 bp, Homo sapiens
tctaagtccagtgtc

SEQ ID NO: 260309 - DNA, 15 bp, Homo sapiens
gtctaagtccagtgt

SEQ ID NO: 260310 - DNA, 15 bp, Homo sapiens
agtctaagtccagtg

SEQ ID NO: 260311 - DNA, 15 bp, Homo sapiens
cagtctaagtccagt

SEQ ID NO: 260312 - DNA, 15 bp, Homo sapiens
ccagtctaagtccag

SEQ ID NO: 260313 - DNA, 15 bp, Homo sapiens
tccagtctaagtcca

SEQ ID NO: 260314 - DNA, 15 bp, Homo sapiens
ctccagtctaagtcc

SEQ ID NO: 260315 - DNA, 15 bp, Homo sapiens
gctccagtctaagtc

SEQ ID NO: 260316 - DNA, 15 bp, Homo sapiens
ggctccagtctaagt

SEQ ID NO: 260317 - DNA, 15 bp, Homo sapiens
tggctccagtctaag

SEQ ID NO: 260318 - DNA, 15 bp, Homo sapiens
ctggctccagtctaa

SEQ ID NO: 260319 - DNA, 15 bp, Homo sapiens
actggctccagtcta

SEQ ID NO: 260320 - DNA, 15 bp, Homo sapiens
cactggctccagtct

SEQ ID NO: 260321 - DNA, 15 bp, Homo sapiens
acactggctccagtc

SEQ ID NO: 260322 - DNA, 15 bp, Homo sapiens
cacactggctccagt

SEQ ID NO: 260323 - DNA, 15 bp, Homo sapiens
acacactggctccag

SEQ ID NO: 260324 - DNA, 15 bp, Homo sapiens
aacacactggctcca

SEQ ID NO: 260325 - DNA, 15 bp, Homo sapiens
aaacacactggctcc

SEQ ID NO: 260326 - DNA, 15 bp, Homo sapiens
aaaacacactggctc

SEQ ID NO: 260327 - DNA, 15 bp, Homo sapiens
taaaacacactggct

SEQ ID NO: 260328 - DNA, 15 bp, Homo sapiens
ataaaacacactggc

SEQ ID NO: 260329 - DNA, 15 bp, Homo sapiens
cataaaacacactgg

SEQ ID NO: 260330 - DNA, 15 bp, Homo sapiens
ccataaaacacactg

SEQ ID NO: 260331 - DNA, 15 bp, Homo sapiens
gccataaaacacact

SEQ ID NO: 260332 - DNA, 15 bp, Homo sapiens
ggccataaaacacac

SEQ ID NO: 260333 - DNA, 15 bp, Homo sapiens
aggccataaaacaca

SEQ ID NO: 260334 - DNA, 15 bp, Homo sapiens
gaggccataaaacac

SEQ ID NO: 260335 - DNA, 15 bp, Homo sapiens
ggaggccataaaaca

SEQ ID NO: 260336 - DNA, 15 bp, Homo sapiens
aggaggccataaaac

SEQ ID NO: 260337 - DNA, 15 bp, Homo sapiens
aaggaggccataaaa

SEQ ID NO: 260338 - DNA, 15 bp, Homo sapiens
taaggaggccataaa

SEQ ID NO: 260339 - DNA, 15 bp, Homo sapiens
ctaaggaggccataa

SEQ ID NO: 260340 - DNA, 15 bp, Homo sapiens
actaaggaggccata

SEQ ID NO: 260341 - DNA, 15 bp, Homo sapiens
aactaaggaggccat

SEQ ID NO: 260342 - DNA, 15 bp, Homo sapiens
aaactaaggaggcca

SEQ ID NO: 260343 - DNA, 15 bp, Homo sapiens
taaactaaggaggcc

SEQ ID NO: 260344 - DNA, 15 bp, Homo sapiens
ctaaactaaggaggc

SEQ ID NO: 260345 - DNA, 15 bp, Homo sapiens
tctaaactaaggagg

SEQ ID NO: 260346 - DNA, 15 bp, Homo sapiens
atctaaactaaggag

SEQ ID NO: 260347 - DNA, 15 bp, Homo sapiens
aatctaaactaagga

SEQ ID NO: 260348 - DNA, 15 bp, Homo sapiens
gaatctaaactaagg

SEQ ID NO: 260349 - DNA, 15 bp, Homo sapiens
ggaatctaaactaag

SEQ ID NO: 260350 - DNA, 15 bp, Homo sapiens
cggaatctaaactaa

SEQ ID NO: 260351 - DNA, 15 bp, Homo sapiens
acggaatctaaacta

SEQ ID NO: 260352 - DNA, 15 bp, Homo sapiens
cacggaatctaaact

SEQ ID NO: 260353 - DNA, 15 bp, Homo sapiens
acacggaatctaaac

SEQ ID NO: 260354 - DNA, 15 bp, Homo sapiens
cacacggaatctaaa

SEQ ID NO: 260355 - DNA, 15 bp, Homo sapiens
ccacacggaatctaa

SEQ ID NO: 260356 - DNA, 15 bp, Homo sapiens
gccacacggaatcta

SEQ ID NO: 260357 - DNA, 15 bp, Homo sapiens
agccacacggaatct

SEQ ID NO: 260358 - DNA, 15 bp, Homo sapiens
gagccacacggaatc

SEQ ID NO: 260359 - DNA, 15 bp, Homo sapiens
agagccacacggaat

SEQ ID NO: 260360 - DNA, 15 bp, Homo sapiens
cagagccacacggaa

SEQ ID NO: 260361 - DNA, 15 bp, Homo sapiens
acagagccacacgga

SEQ ID NO: 260362 - DNA, 15 bp, Homo sapiens
tacagagccacacgg

SEQ ID NO: 260363 - DNA, 15 bp, Homo sapiens
gtacagagccacacg

SEQ ID NO: 260364 - DNA, 15 bp, Homo sapiens
cgtacagagccacac

SEQ ID NO: 260365 - DNA, 15 bp, Homo sapiens
acgtacagagccaca

SEQ ID NO: 260366 - DNA, 15 bp, Homo sapiens
aacgtacagagccac

SEQ ID NO: 260367 - DNA, 15 bp, Homo sapiens
caacgtacagagcca

SEQ ID NO: 260368 - DNA, 15 bp, Homo sapiens
ccaacgtacagagcc

SEQ ID NO: 260369 - DNA, 15 bp, Homo sapiens
tccaacgtacagagc

SEQ ID NO: 260370 - DNA, 15 bp, Homo sapiens
ctccaacgtacagag

SEQ ID NO: 260371 - DNA, 15 bp, Homo sapiens
tctccaacgtacaga

SEQ ID NO: 260372 - DNA, 15 bp, Homo sapiens
ctctccaacgtacag

SEQ ID NO: 260373 - DNA, 15 bp, Homo sapiens
cctctccaacgtaca

SEQ ID NO: 260374 - DNA, 15 bp, Homo sapiens
ccctctccaacgtac

SEQ ID NO: 260375 - DNA, 15 bp, Homo sapiens
tccctctccaacgta

SEQ ID NO: 260376 - DNA, 15 bp, Homo sapiens
ttccctctccaacgt

SEQ ID NO: 260377 - DNA, 15 bp, Homo sapiens
attccctctccaacg

SEQ ID NO: 260378 - DNA, 15 bp, Homo sapiens
cattccctctccaac

SEQ ID NO: 260379 - DNA, 15 bp, Homo sapiens
ccattccctctccaa

SEQ ID NO: 260380 - DNA, 15 bp, Homo sapiens
cccattccctctcca

SEQ ID NO: 260381 - DNA, 15 bp, Homo sapiens
ccccattccctctcc

SEQ ID NO: 260382 - DNA, 15 bp, Homo sapiens
gccccattccctctc

SEQ ID NO: 260383 - DNA, 15 bp, Homo sapiens
agccccattccctct

SEQ ID NO: 260384 - DNA, 15 bp, Homo sapiens
gagccccattccctc

SEQ ID NO: 260385 - DNA, 15 bp, Homo sapiens
ggagccccattccct

SEQ ID NO: 260386 - DNA, 15 bp, Homo sapiens
gggagccccattccc

SEQ ID NO: 260387 - DNA, 15 bp, Homo sapiens
ggggagccccattcc

SEQ ID NO: 260388 - DNA, 15 bp, Homo sapiens
aggggagccccattc

SEQ ID NO: 260389 - DNA, 15 bp, Homo sapiens
taggggagccccatt

SEQ ID NO: 260390 - DNA, 15 bp, Homo sapiens
ttaggggagccccat

SEQ ID NO: 260391 - DNA, 15 bp, Homo sapiens
gttaggggagcccca

SEQ ID NO: 260392 - DNA, 15 bp, Homo sapiens
ggttaggggagcccc

SEQ ID NO: 260393 - DNA, 15 bp, Homo sapiens
tggttaggggagccc

SEQ ID NO: 260394 - DNA, 15 bp, Homo sapiens
atggttaggggagcc

SEQ ID NO: 260395 - DNA, 15 bp, Homo sapiens
tatggttaggggagc

SEQ ID NO: 260396 - DNA, 15 bp, Homo sapiens
ctatggttaggggag

SEQ ID NO: 260397 - DNA, 15 bp, Homo sapiens
actatggttagggga

SEQ ID NO: 260398 - DNA, 15 bp, Homo sapiens
tactatggttagggg

SEQ ID NO: 260399 - DNA, 15 bp, Homo sapiens
ttactatggttaggg

SEQ ID NO: 260400 - DNA, 15 bp, Homo sapiens
attactatggttagg

SEQ ID NO: 260401 - DNA, 15 bp, Homo sapiens
tattactatggttag

SEQ ID NO: 260402 - DNA, 15 bp, Homo sapiens
ttattactatggtta

SEQ ID NO: 260403 - DNA, 15 bp, Homo sapiens
attattactatggtt

SEQ ID NO: 260404 - DNA, 15 bp, Homo sapiens
tattattactatggt

SEQ ID NO: 260405 - DNA, 15 bp, Homo sapiens
ttattattactatgg

SEQ ID NO: 260406 - DNA, 15 bp, Homo sapiens
gttattattactatg

SEQ ID NO: 260407 - DNA, 15 bp, Homo sapiens
tgttattattactat

SEQ ID NO: 260408 - DNA, 15 bp, Homo sapiens
ttgttattattacta

SEQ ID NO: 260409 - DNA, 15 bp, Homo sapiens
attgttattattact

SEQ ID NO: 260410 - DNA, 15 bp, Homo sapiens
tattgttattattac

SEQ ID NO: 260411 - DNA, 15 bp, Homo sapiens
ctattgttattatta

SEQ ID NO: 260412 - DNA, 15 bp, Homo sapiens
cctattgttattatt

SEQ ID NO: 260413 - DNA, 15 bp, Homo sapiens
tcctattgttattat

SEQ ID NO: 260414 - DNA, 15 bp, Homo sapiens
gtcctattgttatta

SEQ ID NO: 260415 - DNA, 15 bp, Homo sapiens
ggtcctattgttatt

SEQ ID NO: 260416 - DNA, 15 bp, Homo sapiens
gggtcctattgttat

SEQ ID NO: 260417 - DNA, 15 bp, Homo sapiens
agggtcctattgtta

SEQ ID NO: 260418 - DNA, 15 bp, Homo sapiens
gagggtcctattgtt

SEQ ID NO: 260419 - DNA, 15 bp, Homo sapiens
ggagggtcctattgt

SEQ ID NO: 260420 - DNA, 15 bp, Homo sapiens
aggagggtcctattg

SEQ ID NO: 260421 - DNA, 15 bp, Homo sapiens
taggagggtcctatt

SEQ ID NO: 260422 - DNA, 15 bp, Homo sapiens
ataggagggtcctat

SEQ ID NO: 260423 - DNA, 15 bp, Homo sapiens
aataggagggtccta

SEQ ID NO: 260424 - DNA, 15 bp, Homo sapiens
aaataggagggtcct

SEQ ID NO: 260425 - DNA, 15 bp, Homo sapiens
taaataggagggtcc

SEQ ID NO: 260426 - DNA, 15 bp, Homo sapiens
ttaaataggagggtc

SEQ ID NO: 260427 - DNA, 15 bp, Homo sapiens
attaaataggagggt

SEQ ID NO: 260428 - DNA, 15 bp, Homo sapiens
gattaaataggaggg

SEQ ID NO: 260429 - DNA, 15 bp, Homo sapiens
ggattaaataggagg

SEQ ID NO: 260430 - DNA, 15 bp, Homo sapiens
gggattaaataggag

SEQ ID NO: 260431 - DNA, 15 bp, Homo sapiens
tgggattaaatagga

SEQ ID NO: 260432 - DNA, 15 bp, Homo sapiens
atgggattaaatagg

SEQ ID NO: 260433 - DNA, 15 bp, Homo sapiens
gatgggattaaatag

SEQ ID NO: 260434 - DNA, 15 bp, Homo sapiens
agatgggattaaata

SEQ ID NO: 260435 - DNA, 15 bp, Homo sapiens
gagatgggattaaat

SEQ ID NO: 260436 - DNA, 15 bp, Homo sapiens
agagatgggattaaa

SEQ ID NO: 260437 - DNA, 15 bp, Homo sapiens
cagagatgggattaa

SEQ ID NO: 260438 - DNA, 15 bp, Homo sapiens
acagagatgggatta

SEQ ID NO: 260439 - DNA, 15 bp, Homo sapiens
cacagagatgggatt

SEQ ID NO: 260440 - DNA, 15 bp, Homo sapiens
gcacagagatgggat

SEQ ID NO: 260441 - DNA, 15 bp, Homo sapiens
ggcacagagatggga

SEQ ID NO: 260442 - DNA, 15 bp, Homo sapiens
tggcacagagatggg

SEQ ID NO: 260443 - DNA, 15 bp, Homo sapiens
ttggcacagagatgg

SEQ ID NO: 260444 - DNA, 15 bp, Homo sapiens
tttggcacagagatg

SEQ ID NO: 260445 - DNA, 15 bp, Homo sapiens
gtttggcacagagat

SEQ ID NO: 260446 - DNA, 15 bp, Homo sapiens
tgtttggcacagaga

SEQ ID NO: 260447 - DNA, 15 bp, Homo sapiens
gtgtttggcacagag

SEQ ID NO: 260448 - DNA, 15 bp, Homo sapiens
agtgtttggcacaga

SEQ ID NO: 260449 - DNA, 15 bp, Homo sapiens
aagtgtttggcacag

SEQ ID NO: 260450 - DNA, 15 bp, Homo sapiens
caagtgtttggcaca

SEQ ID NO: 260451 - DNA, 15 bp, Homo sapiens
ccaagtgtttggcac

SEQ ID NO: 260452 - DNA, 15 bp, Homo sapiens
gccaagtgtttggca

SEQ ID NO: 260453 - DNA, 15 bp, Homo sapiens
agccaagtgtttggc

SEQ ID NO: 260454 - DNA, 15 bp, Homo sapiens
gagccaagtgtttgg

SEQ ID NO: 260455 - DNA, 15 bp, Homo sapiens
tgagccaagtgtttg

SEQ ID NO: 260456 - DNA, 15 bp, Homo sapiens
ctgagccaagtgttt

SEQ ID NO: 260457 - DNA, 15 bp, Homo sapiens
actgagccaagtgtt

SEQ ID NO: 260458 - DNA, 15 bp, Homo sapiens
cactgagccaagtgt

SEQ ID NO: 260459 - DNA, 15 bp, Homo sapiens
gcactgagccaagtg

SEQ ID NO: 260460 - DNA, 15 bp, Homo sapiens
agcactgagccaagt

SEQ ID NO: 260461 - DNA, 15 bp, Homo sapiens
gagcactgagccaag

SEQ ID NO: 260462 - DNA, 15 bp, Homo sapiens
agagcactgagccaa

SEQ ID NO: 260463 - DNA, 15 bp, Homo sapiens
gagagcactgagcca

SEQ ID NO: 260464 - DNA, 15 bp, Homo sapiens
ggagagcactgagcc

SEQ ID NO: 260465 - DNA, 15 bp, Homo sapiens
gggagagcactgagc

SEQ ID NO: 260466 - DNA, 15 bp, Homo sapiens
tgggagagcactgag

SEQ ID NO: 260467 - DNA, 15 bp, Homo sapiens
gtgggagagcactga

SEQ ID NO: 260468 - DNA, 15 bp, Homo sapiens
tgtgggagagcactg

SEQ ID NO: 260469 - DNA, 15 bp, Homo sapiens
atgtgggagagcact

SEQ ID NO: 260470 - DNA, 15 bp, Homo sapiens
aatgtgggagagcac

SEQ ID NO: 260471 - DNA, 15 bp, Homo sapiens
taatgtgggagagca

SEQ ID NO: 260472 - DNA, 15 bp, Homo sapiens
ataatgtgggagagc

SEQ ID NO: 260473 - DNA, 15 bp, Homo sapiens
aataatgtgggagag

SEQ ID NO: 260474 - DNA, 15 bp, Homo sapiens
caataatgtgggaga

SEQ ID NO: 260475 - DNA, 15 bp, Homo sapiens
gcaataatgtgggag

SEQ ID NO: 260476 - DNA, 15 bp, Homo sapiens
tgcaataatgtggga

SEQ ID NO: 260477 - DNA, 15 bp, Homo sapiens
atgcaataatgtggg

SEQ ID NO: 260478 - DNA, 15 bp, Homo sapiens
catgcaataatgtgg

SEQ ID NO: 260479 - DNA, 15 bp, Homo sapiens
gcatgcaataatgtg

SEQ ID NO: 260480 - DNA, 15 bp, Homo sapiens
ggcatgcaataatgt

SEQ ID NO: 260481 - DNA, 15 bp, Homo sapiens
gggcatgcaataatg

SEQ ID NO: 260482 - DNA, 15 bp, Homo sapiens
ggggcatgcaataat

SEQ ID NO: 260483 - DNA, 15 bp, Homo sapiens
tggggcatgcaataa

SEQ ID NO: 260484 - DNA, 15 bp, Homo sapiens
ctggggcatgcaata

SEQ ID NO: 260485 - DNA, 15 bp, Homo sapiens
gctggggcatgcaat

SEQ ID NO: 260486 - DNA, 15 bp, Homo sapiens
tgctggggcatgcaa

SEQ ID NO: 260487 - DNA, 15 bp, Homo sapiens
atgctggggcatgca

SEQ ID NO: 260488 - DNA, 15 bp, Homo sapiens
gatgctggggcatgc

SEQ ID NO: 260489 - DNA, 15 bp, Homo sapiens
ggatgctggggcatg

SEQ ID NO: 260490 - DNA, 15 bp, Homo sapiens
aggatgctggggcat

SEQ ID NO: 260491 - DNA, 15 bp, Homo sapiens
caggatgctggggca

SEQ ID NO: 260492 - DNA, 15 bp, Homo sapiens
tcaggatgctggggc

SEQ ID NO: 260493 - DNA, 15 bp, Homo sapiens
ttcaggatgctgggg

SEQ ID NO: 260494 - DNA, 15 bp, Homo sapiens
attcaggatgctggg

SEQ ID NO: 260495 - DNA, 15 bp, Homo sapiens
cattcaggatgctgg

SEQ ID NO: 260496 - DNA, 15 bp, Homo sapiens
ccattcaggatgctg

SEQ ID NO: 260497 - DNA, 15 bp, Homo sapiens
tccattcaggatgct

SEQ ID NO: 260498 - DNA, 15 bp, Homo sapiens
ttccattcaggatgc

SEQ ID NO: 260499 - DNA, 15 bp, Homo sapiens
tttccattcaggatg

SEQ ID NO: 260500 - DNA, 15 bp, Homo sapiens
ttttccattcaggat

SEQ ID NO: 260501 - DNA, 15 bp, Homo sapiens
attttccattcagga

SEQ ID NO: 260502 - DNA, 15 bp, Homo sapiens
tattttccattcagg

SEQ ID NO: 260503 - DNA, 15 bp, Homo sapiens
gtattttccattcag

SEQ ID NO: 260504 - DNA, 15 bp, Homo sapiens
agtattttccattca

SEQ ID NO: 260505 - DNA, 15 bp, Homo sapiens
tagtattttccattc

SEQ ID NO: 260506 - DNA, 15 bp, Homo sapiens
atagtattttccatt

SEQ ID NO: 260507 - DNA, 15 bp, Homo sapiens
aatagtattttccat

SEQ ID NO: 260508 - DNA, 15 bp, Homo sapiens
aaatagtattttcca

SEQ ID NO: 260509 - DNA, 15 bp, Homo sapiens
aaaatagtattttcc

SEQ ID NO: 260510 - DNA, 15 bp, Homo sapiens
gaaaatagtattttc

SEQ ID NO: 260511 - DNA, 15 bp, Homo sapiens
tgaaaatagtatttt

SEQ ID NO: 260512 - DNA, 15 bp, Homo sapiens
atgaaaatagtattt

SEQ ID NO: 260513 - DNA, 15 bp, Homo sapiens
aatgaaaatagtatt

SEQ ID NO: 260514 - DNA, 15 bp, Homo sapiens
aaatgaaaatagtat

SEQ ID NO: 260515 - DNA, 15 bp, Homo sapiens
aaaatgaaaatagta

SEQ ID NO: 260516 - DNA, 15 bp, Homo sapiens
taaaatgaaaatagt

SEQ ID NO: 260517 - DNA, 15 bp, Homo sapiens
gtaaaatgaaaatag

SEQ ID NO: 260518 - DNA, 15 bp, Homo sapiens
tgtaaaatgaaaata

SEQ ID NO: 260519 - DNA, 15 bp, Homo sapiens
atgtaaaatgaaaat

SEQ ID NO: 260520 - DNA, 15 bp, Homo sapiens
catgtaaaatgaaaa

SEQ ID NO: 260521 - DNA, 15 bp, Homo sapiens
acatgtaaaatgaaa

SEQ ID NO: 260522 - DNA, 15 bp, Homo sapiens
cacatgtaaaatgaa

SEQ ID NO: 260523 - DNA, 15 bp, Homo sapiens
tcacatgtaaaatga

SEQ ID NO: 260524 - DNA, 15 bp, Homo sapiens
ctcacatgtaaaatg

SEQ ID NO: 260525 - DNA, 15 bp, Homo sapiens
cctcacatgtaaaat

SEQ ID NO: 260526 - DNA, 15 bp, Homo sapiens
tcctcacatgtaaaa

SEQ ID NO: 260527 - DNA, 15 bp, Homo sapiens
ttcctcacatgtaaa

SEQ ID NO: 260528 - DNA, 15 bp, Homo sapiens
tttcctcacatgtaa

SEQ ID NO: 260529 - DNA, 15 bp, Homo sapiens
gtttcctcacatgta

SEQ ID NO: 260530 - DNA, 15 bp, Homo sapiens
agtttcctcacatgt

SEQ ID NO: 260531 - DNA, 15 bp, Homo sapiens
cagtttcctcacatg

SEQ ID NO: 260532 - DNA, 15 bp, Homo sapiens
tcagtttcctcacat

SEQ ID NO: 260533 - DNA, 15 bp, Homo sapiens
ctcagtttcctcaca

SEQ ID NO: 260534 - DNA, 15 bp, Homo sapiens
actcagtttcctcac

SEQ ID NO: 260535 - DNA, 15 bp, Homo sapiens
gactcagtttcctca

SEQ ID NO: 260536 - DNA, 15 bp, Homo sapiens
ggactcagtttcctc

SEQ ID NO: 260537 - DNA, 15 bp, Homo sapiens
aggactcagtttcct

SEQ ID NO: 260538 - DNA, 15 bp, Homo sapiens
gaggactcagtttcc

SEQ ID NO: 260539 - DNA, 15 bp, Homo sapiens
tgaggactcagtttc

SEQ ID NO: 260540 - DNA, 15 bp, Homo sapiens
gtgaggactcagttt

SEQ ID NO: 260541 - DNA, 15 bp, Homo sapiens
tgtgaggactcagtt

SEQ ID NO: 260542 - DNA, 15 bp, Homo sapiens
ctgtgaggactcagt

SEQ ID NO: 260543 - DNA, 15 bp, Homo sapiens
cctgtgaggactcag

SEQ ID NO: 260544 - DNA, 15 bp, Homo sapiens
acctgtgaggactca

SEQ ID NO: 260545 - DNA, 15 bp, Homo sapiens
aacctgtgaggactc

SEQ ID NO: 260546 - DNA, 15 bp, Homo sapiens
taacctgtgaggact

SEQ ID NO: 260547 - DNA, 15 bp, Homo sapiens
ttaacctgtgaggac

SEQ ID NO: 260548 - DNA, 15 bp, Homo sapiens
cttaacctgtgagga

SEQ ID NO: 260549 - DNA, 15 bp, Homo sapiens
acttaacctgtgagg

SEQ ID NO: 260550 - DNA, 15 bp, Homo sapiens
cacttaacctgtgag

SEQ ID NO: 260551 - DNA, 15 bp, Homo sapiens
tcacttaacctgtga

SEQ ID NO: 260552 - DNA, 15 bp, Homo sapiens
gtcacttaacctgtg

SEQ ID NO: 260553 - DNA, 15 bp, Homo sapiens
agtcacttaacctgt

SEQ ID NO: 260554 - DNA, 15 bp, Homo sapiens
aagtcacttaacctg

SEQ ID NO: 260555 - DNA, 15 bp, Homo sapiens
aaagtcacttaacct

SEQ ID NO: 260556 - DNA, 15 bp, Homo sapiens
taaagtcacttaacc

SEQ ID NO: 260557 - DNA, 15 bp, Homo sapiens
ataaagtcacttaac

SEQ ID NO: 260558 - DNA, 15 bp, Homo sapiens
aataaagtcacttaa

SEQ ID NO: 260559 - DNA, 15 bp, Homo sapiens
caataaagtcactta

SEQ ID NO: 260560 - DNA, 15 bp, Homo sapiens
tcaataaagtcactt

SEQ ID NO: 260561 - DNA, 15 bp, Homo sapiens
ctcaataaagtcact

SEQ ID NO: 260562 - DNA, 15 bp, Homo sapiens
cctcaataaagtcac

SEQ ID NO: 260563 - DNA, 15 bp, Homo sapiens
acctcaataaagtca

SEQ ID NO: 260564 - DNA, 15 bp, Homo sapiens
gacctcaataaagtc

SEQ ID NO: 260565 - DNA, 15 bp, Homo sapiens
tgacctcaataaagt

SEQ ID NO: 260566 - DNA, 15 bp, Homo sapiens
atgacctcaataaag

SEQ ID NO: 260567 - DNA, 15 bp, Homo sapiens
tatgacctcaataaa

SEQ ID NO: 260568 - DNA, 15 bp, Homo sapiens
aagtggaaagaggag

SEQ ID NO: 260569 - DNA, 15 bp, Homo sapiens
aaagtggaaagagga

SEQ ID NO: 260570 - DNA, 15 bp, Homo sapiens
aaaagtggaaagagg

SEQ ID NO: 260571 - DNA, 15 bp, Homo sapiens
caaaagtggaaagag

SEQ ID NO: 260572 - DNA, 15 bp, Homo sapiens
ccaaaagtggaaaga

SEQ ID NO: 260573 - DNA, 15 bp, Homo sapiens
accaaaagtggaaag

SEQ ID NO: 260574 - DNA, 15 bp, Homo sapiens
gaccaaaagtggaaa

SEQ ID NO: 260575 - DNA, 15 bp, Homo sapiens
tgaccaaaagtggaa

SEQ ID NO: 260576 - DNA, 15 bp, Homo sapiens
ttgaccaaaagtgga

SEQ ID NO: 260577 - DNA, 15 bp, Homo sapiens
attgaccaaaagtgg

SEQ ID NO: 260578 - DNA, 15 bp, Homo sapiens
gattgaccaaaagtg

SEQ ID NO: 260579 - DNA, 15 bp, Homo sapiens
tgattgaccaaaagt

SEQ ID NO: 260580 - DNA, 15 bp, Homo sapiens
ctgattgaccaaaag

SEQ ID NO: 260581 - DNA, 15 bp, Homo sapiens
gctgattgaccaaaa

SEQ ID NO: 260582 - DNA, 15 bp, Homo sapiens
ggctgattgaccaaa

SEQ ID NO: 260583 - DNA, 15 bp, Homo sapiens
tggctgattgaccaa

SEQ ID NO: 260584 - DNA, 15 bp, Homo sapiens
ttggctgattgacca

SEQ ID NO: 260585 - DNA, 15 bp, Homo sapiens
tttggctgattgacc

SEQ ID NO: 260586 - DNA, 15 bp, Homo sapiens
ttttggctgattgac

SEQ ID NO: 260587 - DNA, 15 bp, Homo sapiens
attttggctgattga

SEQ ID NO: 260588 - DNA, 15 bp, Homo sapiens
aattttggctgattg

SEQ ID NO: 260589 - DNA, 15 bp, Homo sapiens
taattttggctgatt

SEQ ID NO: 260590 - DNA, 15 bp, Homo sapiens
gtaattttggctgat

SEQ ID NO: 260591 - DNA, 15 bp, Homo sapiens
tgtaattttggctga

SEQ ID NO: 260592 - DNA, 15 bp, Homo sapiens
ttgtaattttggctg

SEQ ID NO: 260593 - DNA, 15 bp, Homo sapiens
cttgtaattttggct

SEQ ID NO: 260594 - DNA, 15 bp, Homo sapiens
acttgtaattttggc

SEQ ID NO: 260595 - DNA, 15 bp, Homo sapiens
tacttgtaattttgg

SEQ ID NO: 260596 - DNA, 15 bp, Homo sapiens
gtacttgtaattttg

SEQ ID NO: 260597 - DNA, 15 bp, Homo sapiens
agtacttgtaatttt

SEQ ID NO: 260598 - DNA, 15 bp, Homo sapiens
aagtacttgtaattt

SEQ ID NO: 260599 - DNA, 15 bp, Homo sapiens
aaagtacttgtaatt

SEQ ID NO: 260600 - DNA, 15 bp, Homo sapiens
aaaagtacttgtaat

SEQ ID NO: 260601 - DNA, 15 bp, Homo sapiens
gaaaagtacttgtaa

SEQ ID NO: 260602 - DNA, 15 bp, Homo sapiens
ggaaaagtacttgta

SEQ ID NO: 260603 - DNA, 15 bp, Homo sapiens
tggaaaagtacttgt

SEQ ID NO: 260604 - DNA, 15 bp, Homo sapiens
ttggaaaagtacttg

SEQ ID NO: 260605 - DNA, 15 bp, Homo sapiens
tttggaaaagtactt

SEQ ID NO: 260606 - DNA, 15 bp, Homo sapiens
gtttggaaaagtact

SEQ ID NO: 260607 - DNA, 15 bp, Homo sapiens
ggtttggaaaagtac

SEQ ID NO: 260608 - DNA, 15 bp, Homo sapiens
aggtttggaaaagta

SEQ ID NO: 260609 - DNA, 15 bp, Homo sapiens
aaggtttggaaaagt

SEQ ID NO: 260610 - DNA, 15 bp, Homo sapiens
caaggtttggaaaag

SEQ ID NO: 260611 - DNA, 15 bp, Homo sapiens
ccaaggtttggaaaa

SEQ ID NO: 260612 - DNA, 15 bp, Homo sapiens
cccaaggtttggaaa

SEQ ID NO: 260613 - DNA, 15 bp, Homo sapiens
ccccaaggtttggaa

SEQ ID NO: 260614 - DNA, 15 bp, Homo sapiens
accccaaggtttgga

SEQ ID NO: 260615 - DNA, 15 bp, Homo sapiens
taccccaaggtttgg

SEQ ID NO: 260616 - DNA, 15 bp, Homo sapiens
ataccccaaggtttg

SEQ ID NO: 260617 - DNA, 15 bp, Homo sapiens
aataccccaaggttt

SEQ ID NO: 260618 - DNA, 15 bp, Homo sapiens
caataccccaaggtt

SEQ ID NO: 260619 - DNA, 15 bp, Homo sapiens
ccaataccccaaggt

SEQ ID NO: 260620 - DNA, 15 bp, Homo sapiens
tccaataccccaagg

SEQ ID NO: 260621 - DNA, 15 bp, Homo sapiens
ctccaataccccaag

SEQ ID NO: 260622 - DNA, 15 bp, Homo sapiens
actccaataccccaa

SEQ ID NO: 260623 - DNA, 15 bp, Homo sapiens
gactccaatacccca

SEQ ID NO: 260624 - DNA, 15 bp, Homo sapiens
ggactccaatacccc

SEQ ID NO: 260625 - DNA, 15 bp, Homo sapiens
tggactccaataccc

SEQ ID NO: 260626 - DNA, 15 bp, Homo sapiens
atggactccaatacc

SEQ ID NO: 260627 - DNA, 15 bp, Homo sapiens
catggactccaatac

SEQ ID NO: 260628 - DNA, 15 bp, Homo sapiens
ccatggactccaata

SEQ ID NO: 260629 - DNA, 15 bp, Homo sapiens
gccatggactccaat

SEQ ID NO: 260630 - DNA, 15 bp, Homo sapiens
agccatggactccaa

SEQ ID NO: 260631 - DNA, 15 bp, Homo sapiens
gagccatggactcca

SEQ ID NO: 260632 - DNA, 15 bp, Homo sapiens
ggagccatggactcc

SEQ ID NO: 260633 - DNA, 15 bp, Homo sapiens
aggagccatggactc

SEQ ID NO: 260634 - DNA, 15 bp, Homo sapiens
caggagccatggact

SEQ ID NO: 260635 - DNA, 15 bp, Homo sapiens
ccaggagccatggac

SEQ ID NO: 260636 - DNA, 15 bp, Homo sapiens
gccaggagccatgga

SEQ ID NO: 260637 - DNA, 15 bp, Homo sapiens
agccaggagccatgg

SEQ ID NO: 260638 - DNA, 15 bp, Homo sapiens
cagccaggagccatg

SEQ ID NO: 260639 - DNA, 15 bp, Homo sapiens
gcagccaggagccat

SEQ ID NO: 260640 - DNA, 15 bp, Homo sapiens
agcagccaggagcca

SEQ ID NO: 260641 - DNA, 15 bp, Homo sapiens
cagcagccaggagcc

SEQ ID NO: 260642 - DNA, 15 bp, Homo sapiens
acagcagccaggagc

SEQ ID NO: 260643 - DNA, 15 bp, Homo sapiens
cacagcagccaggag

SEQ ID NO: 260644 - DNA, 15 bp, Homo sapiens
gcacagcagccagga

SEQ ID NO: 260645 - DNA, 15 bp, Homo sapiens
tgcacagcagccagg

SEQ ID NO: 260646 - DNA, 15 bp, Homo sapiens
atgcacagcagccag

SEQ ID NO: 260647 - DNA, 15 bp, Homo sapiens
catgcacagcagcca

SEQ ID NO: 260648 - DNA, 15 bp, Homo sapiens
ccatgcacagcagcc

SEQ ID NO: 260649 - DNA, 15 bp, Homo sapiens
accatgcacagcagc

SEQ ID NO: 260650 - DNA, 15 bp, Homo sapiens
aaccatgcacagcag

SEQ ID NO: 260651 - DNA, 15 bp, Homo sapiens
aaaccatgcacagca

SEQ ID NO: 260652 - DNA, 15 bp, Homo sapiens
gaaaccatgcacagc

SEQ ID NO: 260653 - DNA, 15 bp, Homo sapiens
ggaaaccatgcacag

SEQ ID NO: 260654 - DNA, 15 bp, Homo sapiens
gggaaaccatgcaca

SEQ ID NO: 260655 - DNA, 15 bp, Homo sapiens
ggggaaaccatgcac

SEQ ID NO: 260656 - DNA, 15 bp, Homo sapiens
aggggaaaccatgca

SEQ ID NO: 260657 - DNA, 15 bp, Homo sapiens
aaggggaaaccatgc

SEQ ID NO: 260658 - DNA, 15 bp, Homo sapiens
aaaggggaaaccatg

SEQ ID NO: 260659 - DNA, 15 bp, Homo sapiens
aaaaggggaaaccat

SEQ ID NO: 260660 - DNA, 15 bp, Homo sapiens
gaaaaggggaaacca

SEQ ID NO: 260661 - DNA, 15 bp, Homo sapiens
ggaaaaggggaaacc

SEQ ID NO: 260662 - DNA, 15 bp, Homo sapiens
aggaaaaggggaaac

SEQ ID NO: 260663 - DNA, 15 bp, Homo sapiens
caggaaaaggggaaa

SEQ ID NO: 260664 - DNA, 15 bp, Homo sapiens
ccaggaaaaggggaa

SEQ ID NO: 260665 - DNA, 15 bp, Homo sapiens
cccaggaaaagggga

SEQ ID NO: 260666 - DNA, 15 bp, Homo sapiens
tcccaggaaaagggg

SEQ ID NO: 260667 - DNA, 15 bp, Homo sapiens
ttcccaggaaaaggg

SEQ ID NO: 260668 - DNA, 15 bp, Homo sapiens
cttcccaggaaaagg

SEQ ID NO: 260669 - DNA, 15 bp, Homo sapiens
gcttcccaggaaaag

SEQ ID NO: 260670 - DNA, 15 bp, Homo sapiens
agcttcccaggaaaa

SEQ ID NO: 260671 - DNA, 15 bp, Homo sapiens
aagcttcccaggaaa

SEQ ID NO: 260672 - DNA, 15 bp, Homo sapiens
gaagcttcccaggaa

SEQ ID NO: 260673 - DNA, 15 bp, Homo sapiens
agaagcttcccagga

SEQ ID NO: 260674 - DNA, 15 bp, Homo sapiens
cagaagcttcccagg

SEQ ID NO: 260675 - DNA, 15 bp, Homo sapiens
acagaagcttcccag

SEQ ID NO: 260676 - DNA, 15 bp, Homo sapiens
gacagaagcttccca

SEQ ID NO: 260677 - DNA, 15 bp, Homo sapiens
ggacagaagcttccc

SEQ ID NO: 260678 - DNA, 15 bp, Homo sapiens
gggacagaagcttcc

SEQ ID NO: 260679 - DNA, 15 bp, Homo sapiens
tgggacagaagcttc

SEQ ID NO: 260680 - DNA, 15 bp, Homo sapiens
gtgggacagaagctt

SEQ ID NO: 260681 - DNA, 15 bp, Homo sapiens
agtgggacagaagct

SEQ ID NO: 260682 - DNA, 15 bp, Homo sapiens
gagtgggacagaagc

SEQ ID NO: 260683 - DNA, 15 bp, Homo sapiens
ggagtgggacagaag

SEQ ID NO: 260684 - DNA, 15 bp, Homo sapiens
gggagtgggacagaa

SEQ ID NO: 260685 - DNA, 15 bp, Homo sapiens
agggagtgggacaga

SEQ ID NO: 260686 - DNA, 15 bp, Homo sapiens
cagggagtgggacag

SEQ ID NO: 260687 - DNA, 15 bp, Homo sapiens
gcagggagtgggaca

SEQ ID NO: 260688 - DNA, 15 bp, Homo sapiens
ggcagggagtgggac

SEQ ID NO: 260689 - DNA, 15 bp, Homo sapiens
gggcagggagtggga

SEQ ID NO: 260690 - DNA, 15 bp, Homo sapiens
ggggcagggagtggg

SEQ ID NO: 260691 - DNA, 15 bp, Homo sapiens
aggggcagggagtgg

SEQ ID NO: 260692 - DNA, 15 bp, Homo sapiens
gaggggcagggagtg

SEQ ID NO: 260693 - DNA, 15 bp, Homo sapiens
tgaggggcagggagt

SEQ ID NO: 260694 - DNA, 15 bp, Homo sapiens
gtgaggggcagggag

SEQ ID NO: 260695 - DNA, 15 bp, Homo sapiens
ggtgaggggcaggga

SEQ ID NO: 260696 - DNA, 15 bp, Homo sapiens
aggtgaggggcaggg

SEQ ID NO: 260697 - DNA, 15 bp, Homo sapiens
gaggtgaggggcagg

SEQ ID NO: 260698 - DNA, 15 bp, Homo sapiens
tgaggtgaggggcag

SEQ ID NO: 260699 - DNA, 15 bp, Homo sapiens
gtgaggtgaggggca

SEQ ID NO: 260700 - DNA, 15 bp, Homo sapiens
ggtgaggtgaggggc

SEQ ID NO: 260701 - DNA, 15 bp, Homo sapiens
gggtgaggtgagggg

SEQ ID NO: 260702 - DNA, 15 bp, Homo sapiens
agggtgaggtgaggg

SEQ ID NO: 260703 - DNA, 15 bp, Homo sapiens
tagggtgaggtgagg

SEQ ID NO: 260704 - DNA, 15 bp, Homo sapiens
ctagggtgaggtgag

SEQ ID NO: 260705 - DNA, 15 bp, Homo sapiens
gctagggtgaggtga

SEQ ID NO: 260706 - DNA, 15 bp, Homo sapiens
tgctagggtgaggtg

SEQ ID NO: 260707 - DNA, 15 bp, Homo sapiens
gtgctagggtgaggt

SEQ ID NO: 260708 - DNA, 15 bp, Homo sapiens
agtgctagggtgagg

SEQ ID NO: 260709 - DNA, 15 bp, Homo sapiens
gagtgctagggtgag

SEQ ID NO: 260710 - DNA, 15 bp, Homo sapiens
agagtgctagggtga

SEQ ID NO: 260711 - DNA, 15 bp, Homo sapiens
aagagtgctagggtg

SEQ ID NO: 260712 - DNA, 15 bp, Homo sapiens
gaagagtgctagggt

SEQ ID NO: 260713 - DNA, 15 bp, Homo sapiens
tgaagagtgctaggg

SEQ ID NO: 260714 - DNA, 15 bp, Homo sapiens
atgaagagtgctagg

SEQ ID NO: 260715 - DNA, 15 bp, Homo sapiens
tatgaagagtgctag

SEQ ID NO: 260716 - DNA, 15 bp, Homo sapiens
gtatgaagagtgcta

SEQ ID NO: 260717 - DNA, 15 bp, Homo sapiens
ggtatgaagagtgct

SEQ ID NO: 260718 - DNA, 15 bp, Homo sapiens
tggtatgaagagtgc

SEQ ID NO: 260719 - DNA, 15 bp, Homo sapiens
ttggtatgaagagtg

SEQ ID NO: 260720 - DNA, 15 bp, Homo sapiens
tttggtatgaagagt

SEQ ID NO: 260721 - DNA, 15 bp, Homo sapiens
gtttggtatgaagag

SEQ ID NO: 260722 - DNA, 15 bp, Homo sapiens
tgtttggtatgaaga

SEQ ID NO: 260723 - DNA, 15 bp, Homo sapiens
ttgtttggtatgaag

SEQ ID NO: 260724 - DNA, 15 bp, Homo sapiens
tttgtttggtatgaa

SEQ ID NO: 260725 - DNA, 15 bp, Homo sapiens
ttttgtttggtatga

SEQ ID NO: 260726 - DNA, 15 bp, Homo sapiens
attttgtttggtatg

SEQ ID NO: 260727 - DNA, 15 bp, Homo sapiens
cattttgtttggtat

SEQ ID NO: 260728 - DNA, 15 bp, Homo sapiens
tcattttgtttggta

SEQ ID NO: 260729 - DNA, 15 bp, Homo sapiens
gtcattttgtttggt

SEQ ID NO: 260730 - DNA, 15 bp, Homo sapiens
ggtcattttgtttgg

SEQ ID NO: 260731 - DNA, 15 bp, Homo sapiens
aggtcattttgtttg

SEQ ID NO: 260732 - DNA, 15 bp, Homo sapiens
aaggtcattttgttt

SEQ ID NO: 260733 - DNA, 15 bp, Homo sapiens
aaaggtcattttgtt

SEQ ID NO: 260734 - DNA, 15 bp, Homo sapiens
gaaaggtcattttgt

SEQ ID NO: 260735 - DNA, 15 bp, Homo sapiens
agaaaggtcattttg

SEQ ID NO: 260736 - DNA, 15 bp, Homo sapiens
cagaaaggtcatttt

SEQ ID NO: 260737 - DNA, 15 bp, Homo sapiens
ccagaaaggtcattt

SEQ ID NO: 260738 - DNA, 15 bp, Homo sapiens
cccagaaaggtcatt

SEQ ID NO: 260739 - DNA, 15 bp, Homo sapiens
acccagaaaggtcat

SEQ ID NO: 260740 - DNA, 15 bp, Homo sapiens
cacccagaaaggtca

SEQ ID NO: 260741 - DNA, 15 bp, Homo sapiens
acacccagaaaggtc

SEQ ID NO: 260742 - DNA, 15 bp, Homo sapiens
aacacccagaaaggt

SEQ ID NO: 260743 - DNA, 15 bp, Homo sapiens
gaacacccagaaagg

SEQ ID NO: 260744 - DNA, 15 bp, Homo sapiens
agaacacccagaaag

SEQ ID NO: 260745 - DNA, 15 bp, Homo sapiens
gagaacacccagaaa

SEQ ID NO: 260746 - DNA, 15 bp, Homo sapiens
ggagaacacccagaa

SEQ ID NO: 260747 - DNA, 15 bp, Homo sapiens
gggagaacacccaga

SEQ ID NO: 260748 - DNA, 15 bp, Homo sapiens
agggagaacacccag

SEQ ID NO: 260749 - DNA, 15 bp, Homo sapiens
cagggagaacaccca

SEQ ID NO: 260750 - DNA, 15 bp, Homo sapiens
ccagggagaacaccc

SEQ ID NO: 260751 - DNA, 15 bp, Homo sapiens
tccagggagaacacc

SEQ ID NO: 260752 - DNA, 15 bp, Homo sapiens
ctccagggagaacac

SEQ ID NO: 260753 - DNA, 15 bp, Homo sapiens
actccagggagaaca

SEQ ID NO: 260754 - DNA, 15 bp, Homo sapiens
aactccagggagaac

SEQ ID NO: 260755 - DNA, 15 bp, Homo sapiens
gaactccagggagaa

SEQ ID NO: 260756 - DNA, 15 bp, Homo sapiens
ggaactccagggaga

SEQ ID NO: 260757 - DNA, 15 bp, Homo sapiens
aggaactccagggag

SEQ ID NO: 260758 - DNA, 15 bp, Homo sapiens
aaggaactccaggga

SEQ ID NO: 260759 - DNA, 15 bp, Homo sapiens
gaaggaactccaggg

SEQ ID NO: 260760 - DNA, 15 bp, Homo sapiens
cgaaggaactccagg

SEQ ID NO: 260761 - DNA, 15 bp, Homo sapiens
gcgaaggaactccag

SEQ ID NO: 260762 - DNA, 15 bp, Homo sapiens
agcgaaggaactcca

SEQ ID NO: 260763 - DNA, 15 bp, Homo sapiens
aagcgaaggaactcc

SEQ ID NO: 260764 - DNA, 15 bp, Homo sapiens
caagcgaaggaactc

SEQ ID NO: 260765 - DNA, 15 bp, Homo sapiens
gcaagcgaaggaact

SEQ ID NO: 260766 - DNA, 15 bp, Homo sapiens
cgcaagcgaaggaac

SEQ ID NO: 260767 - DNA, 15 bp, Homo sapiens
gcgcaagcgaaggaa

SEQ ID NO: 260768 - DNA, 15 bp, Homo sapiens
tgcgcaagcgaagga

SEQ ID NO: 260769 - DNA, 15 bp, Homo sapiens
ctgcgcaagcgaagg

SEQ ID NO: 260770 - DNA, 15 bp, Homo sapiens
actgcgcaagcgaag

SEQ ID NO: 260771 - DNA, 15 bp, Homo sapiens
gactgcgcaagcgaa

SEQ ID NO: 260772 - DNA, 15 bp, Homo sapiens
tgactgcgcaagcga

SEQ ID NO: 260773 - DNA, 15 bp, Homo sapiens
atgactgcgcaagcg

SEQ ID NO: 260774 - DNA, 15 bp, Homo sapiens
tatgactgcgcaagc

SEQ ID NO: 260775 - DNA, 15 bp, Homo sapiens
ctatgactgcgcaag

SEQ ID NO: 260776 - DNA, 15 bp, Homo sapiens
gctatgactgcgcaa

SEQ ID NO: 260777 - DNA, 15 bp, Homo sapiens
tgctatgactgcgca

SEQ ID NO: 260778 - DNA, 15 bp, Homo sapiens
ctgctatgactgcgc

SEQ ID NO: 260779 - DNA, 15 bp, Homo sapiens
cctgctatgactgcg

SEQ ID NO: 260780 - DNA, 15 bp, Homo sapiens
gcctgctatgactgc

SEQ ID NO: 260781 - DNA, 15 bp, Homo sapiens
agcctgctatgactg

SEQ ID NO: 260782 - DNA, 15 bp, Homo sapiens
tagcctgctatgact

SEQ ID NO: 260783 - DNA, 15 bp, Homo sapiens
ctagcctgctatgac

SEQ ID NO: 260784 - DNA, 15 bp, Homo sapiens
gctagcctgctatga

SEQ ID NO: 260785 - DNA, 15 bp, Homo sapiens
cgctagcctgctatg

SEQ ID NO: 260786 - DNA, 15 bp, Homo sapiens
gcgctagcctgctat

SEQ ID NO: 260787 - DNA, 15 bp, Homo sapiens
ggcgctagcctgcta

SEQ ID NO: 260788 - DNA, 15 bp, Homo sapiens
aggcgctagcctgct

SEQ ID NO: 260789 - DNA, 15 bp, Homo sapiens
taggcgctagcctgc

SEQ ID NO: 260790 - DNA, 15 bp, Homo sapiens
ctaggcgctagcctg

SEQ ID NO: 260791 - DNA, 15 bp, Homo sapiens
actaggcgctagcct

SEQ ID NO: 260792 - DNA, 15 bp, Homo sapiens
cactaggcgctagcc

SEQ ID NO: 260793 - DNA, 15 bp, Homo sapiens
ccactaggcgctagc

SEQ ID NO: 260794 - DNA, 15 bp, Homo sapiens
cccactaggcgctag

SEQ ID NO: 260795 - DNA, 15 bp, Homo sapiens
gcccactaggcgcta

SEQ ID NO: 260796 - DNA, 15 bp, Homo sapiens
agcccactaggcgct

SEQ ID NO: 260797 - DNA, 15 bp, Homo sapiens
cagcccactaggcgc

SEQ ID NO: 260798 - DNA, 15 bp, Homo sapiens
acagcccactaggcg

SEQ ID NO: 260799 - DNA, 15 bp, Homo sapiens
cacagcccactaggc

SEQ ID NO: 260800 - DNA, 15 bp, Homo sapiens
acacagcccactagg

SEQ ID NO: 260801 - DNA, 15 bp, Homo sapiens
cacacagcccactag

SEQ ID NO: 260802 - DNA, 15 bp, Homo sapiens
gcacacagcccacta

SEQ ID NO: 260803 - DNA, 15 bp, Homo sapiens
tgcacacagcccact

SEQ ID NO: 260804 - DNA, 15 bp, Homo sapiens
atgcacacagcccac

SEQ ID NO: 260805 - DNA, 15 bp, Homo sapiens
gatgcacacagccca

SEQ ID NO: 260806 - DNA, 15 bp, Homo sapiens
agatgcacacagccc

SEQ ID NO: 260807 - DNA, 15 bp, Homo sapiens
cagatgcacacagcc

SEQ ID NO: 260808 - DNA, 15 bp, Homo sapiens
tcagatgcacacagc

SEQ ID NO: 260809 - DNA, 15 bp, Homo sapiens
ttcagatgcacacag

SEQ ID NO: 260810 - DNA, 15 bp, Homo sapiens
attcagatgcacaca

SEQ ID NO: 260811 - DNA, 15 bp, Homo sapiens
aattcagatgcacac

SEQ ID NO: 260812 - DNA, 15 bp, Homo sapiens
caattcagatgcaca

SEQ ID NO: 260813 - DNA, 15 bp, Homo sapiens
gcaattcagatgcac

SEQ ID NO: 260814 - DNA, 15 bp, Homo sapiens
tgcaattcagatgca

SEQ ID NO: 260815 - DNA, 15 bp, Homo sapiens
ctgcaattcagatgc

SEQ ID NO: 260816 - DNA, 15 bp, Homo sapiens
cctgcaattcagatg

SEQ ID NO: 260817 - DNA, 15 bp, Homo sapiens
acctgcaattcagat

SEQ ID NO: 260818 - DNA, 15 bp, Homo sapiens
aacctgcaattcaga

SEQ ID NO: 260819 - DNA, 15 bp, Homo sapiens
caacctgcaattcag

SEQ ID NO: 260820 - DNA, 15 bp, Homo sapiens
tcaacctgcaattca

SEQ ID NO: 260821 - DNA, 15 bp, Homo sapiens
ttcaacctgcaattc

SEQ ID NO: 260822 - DNA, 15 bp, Homo sapiens
attcaacctgcaatt

SEQ ID NO: 260823 - DNA, 15 bp, Homo sapiens
gattcaacctgcaat

SEQ ID NO: 260824 - DNA, 15 bp, Homo sapiens
ggattcaacctgcaa

SEQ ID NO: 260825 - DNA, 15 bp, Homo sapiens
tggattcaacctgca

SEQ ID NO: 260826 - DNA, 15 bp, Homo sapiens
ttggattcaacctgc

SEQ ID NO: 260827 - DNA, 15 bp, Homo sapiens
gttggattcaacctg

SEQ ID NO: 260828 - DNA, 15 bp, Homo sapiens
tgttggattcaacct

SEQ ID NO: 260829 - DNA, 15 bp, Homo sapiens
ttgttggattcaacc

SEQ ID NO: 260830 - DNA, 15 bp, Homo sapiens
gttgttggattcaac

SEQ ID NO: 260831 - DNA, 15 bp, Homo sapiens
tgttgttggattcaa

SEQ ID NO: 260832 - DNA, 15 bp, Homo sapiens
atgttgttggattca

SEQ ID NO: 260833 - DNA, 15 bp, Homo sapiens
gatgttgttggattc

SEQ ID NO: 260834 - DNA, 15 bp, Homo sapiens
tgatgttgttggatt

SEQ ID NO: 260835 - DNA, 15 bp, Homo sapiens
ctgatgttgttggat

SEQ ID NO: 260836 - DNA, 15 bp, Homo sapiens
actgatgttgttgga

SEQ ID NO: 260837 - DNA, 15 bp, Homo sapiens
cactgatgttgttgg

SEQ ID NO: 260838 - DNA, 15 bp, Homo sapiens
tcactgatgttgttg

SEQ ID NO: 260839 - DNA, 15 bp, Homo sapiens
ctcactgatgttgtt

SEQ ID NO: 260840 - DNA, 15 bp, Homo sapiens
cctcactgatgttgt

SEQ ID NO: 260841 - DNA, 15 bp, Homo sapiens
acctcactgatgttg

SEQ ID NO: 260842 - DNA, 15 bp, Homo sapiens
cacctcactgatgtt

SEQ ID NO: 260843 - DNA, 15 bp, Homo sapiens
ccacctcactgatgt

SEQ ID NO: 260844 - DNA, 15 bp, Homo sapiens
cccacctcactgatg

SEQ ID NO: 260845 - DNA, 15 bp, Homo sapiens
tcccacctcactgat

SEQ ID NO: 260846 - DNA, 15 bp, Homo sapiens
ctcccacctcactga

SEQ ID NO: 260847 - DNA, 15 bp, Homo sapiens
cctcccacctcactg

SEQ ID NO: 260848 - DNA, 15 bp, Homo sapiens
gcctcccacctcact

SEQ ID NO: 260849 - DNA, 15 bp, Homo sapiens
tgcctcccacctcac

SEQ ID NO: 260850 - DNA, 15 bp, Homo sapiens
ttgcctcccacctca

SEQ ID NO: 260851 - DNA, 15 bp, Homo sapiens
cttgcctcccacctc

SEQ ID NO: 260852 - DNA, 15 bp, Homo sapiens
acttgcctcccacct

SEQ ID NO: 260853 - DNA, 15 bp, Homo sapiens
cacttgcctcccacc

SEQ ID NO: 260854 - DNA, 15 bp, Homo sapiens
ccacttgcctcccac

SEQ ID NO: 260855 - DNA, 15 bp, Homo sapiens
gccacttgcctccca

SEQ ID NO: 260856 - DNA, 15 bp, Homo sapiens
agccacttgcctccc

SEQ ID NO: 260857 - DNA, 15 bp, Homo sapiens
cagccacttgcctcc

SEQ ID NO: 260858 - DNA, 15 bp, Homo sapiens
ccagccacttgcctc

SEQ ID NO: 260859 - DNA, 15 bp, Homo sapiens
cccagccacttgcct

SEQ ID NO: 260860 - DNA, 15 bp, Homo sapiens
acccagccacttgcc

SEQ ID NO: 260861 - DNA, 15 bp, Homo sapiens
cacccagccacttgc

SEQ ID NO: 260862 - DNA, 15 bp, Homo sapiens
gcacccagccacttg

SEQ ID NO: 260863 - DNA, 15 bp, Homo sapiens
cgcacccagccactt

SEQ ID NO: 260864 - DNA, 15 bp, Homo sapiens
ccgcacccagccact

SEQ ID NO: 260865 - DNA, 15 bp, Homo sapiens
accgcacccagccac

SEQ ID NO: 260866 - DNA, 15 bp, Homo sapiens
caccgcacccagcca

SEQ ID NO: 260867 - DNA, 15 bp, Homo sapiens
gcaccgcacccagcc

SEQ ID NO: 260868 - DNA, 15 bp, Homo sapiens
ggcaccgcacccagc

SEQ ID NO: 260869 - DNA, 15 bp, Homo sapiens
tggcaccgcacccag

SEQ ID NO: 260870 - DNA, 15 bp, Homo sapiens
atggcaccgcaccca

SEQ ID NO: 260871 - DNA, 15 bp, Homo sapiens
catggcaccgcaccc

SEQ ID NO: 260872 - DNA, 15 bp, Homo sapiens
tcatggcaccgcacc

SEQ ID NO: 260873 - DNA, 15 bp, Homo sapiens
gtcatggcaccgcac

SEQ ID NO: 260874 - DNA, 15 bp, Homo sapiens
tgtcatggcaccgca

SEQ ID NO: 260875 - DNA, 15 bp, Homo sapiens
atgtcatggcaccgc

SEQ ID NO: 260876 - DNA, 15 bp, Homo sapiens
aatgtcatggcaccg

SEQ ID NO: 260877 - DNA, 15 bp, Homo sapiens
gaatgtcatggcacc

SEQ ID NO: 260878 - DNA, 15 bp, Homo sapiens
agaatgtcatggcac

SEQ ID NO: 260879 - DNA, 15 bp, Homo sapiens
cagaatgtcatggca

SEQ ID NO: 260880 - DNA, 15 bp, Homo sapiens
ccagaatgtcatggc

SEQ ID NO: 260881 - DNA, 15 bp, Homo sapiens
gccagaatgtcatgg

SEQ ID NO: 260882 - DNA, 15 bp, Homo sapiens
agccagaatgtcatg

SEQ ID NO: 260883 - DNA, 15 bp, Homo sapiens
gagccagaatgtcat

SEQ ID NO: 260884 - DNA, 15 bp, Homo sapiens
tgagccagaatgtca

SEQ ID NO: 260885 - DNA, 15 bp, Homo sapiens
gtgagccagaatgtc

SEQ ID NO: 260886 - DNA, 15 bp, Homo sapiens
ggtgagccagaatgt

SEQ ID NO: 260887 - DNA, 15 bp, Homo sapiens
aggtgagccagaatg

SEQ ID NO: 260888 - DNA, 15 bp, Homo sapiens
caggtgagccagaat

SEQ ID NO: 260889 - DNA, 15 bp, Homo sapiens
acaggtgagccagaa

SEQ ID NO: 260890 - DNA, 15 bp, Homo sapiens
gacaggtgagccaga

SEQ ID NO: 260891 - DNA, 15 bp, Homo sapiens
tgacaggtgagccag

SEQ ID NO: 260892 - DNA, 15 bp, Homo sapiens
atgacaggtgagcca

SEQ ID NO: 260893 - DNA, 15 bp, Homo sapiens
catgacaggtgagcc

SEQ ID NO: 260894 - DNA, 15 bp, Homo sapiens
acatgacaggtgagc

SEQ ID NO: 260895 - DNA, 15 bp, Homo sapiens
aacatgacaggtgag

SEQ ID NO: 260896 - DNA, 15 bp, Homo sapiens
caacatgacaggtga

SEQ ID NO: 260897 - DNA, 15 bp, Homo sapiens
ccaacatgacaggtg

SEQ ID NO: 260898 - DNA, 15 bp, Homo sapiens
tccaacatgacaggt

SEQ ID NO: 260899 - DNA, 15 bp, Homo sapiens
atccaacatgacagg

SEQ ID NO: 260900 - DNA, 15 bp, Homo sapiens
catccaacatgacag

SEQ ID NO: 260901 - DNA, 15 bp, Homo sapiens
ccatccaacatgaca

SEQ ID NO: 260902 - DNA, 15 bp, Homo sapiens
gccatccaacatgac

SEQ ID NO: 260903 - DNA, 15 bp, Homo sapiens
agccatccaacatga

SEQ ID NO: 260904 - DNA, 15 bp, Homo sapiens
aagccatccaacatg

SEQ ID NO: 260905 - DNA, 15 bp, Homo sapiens
caagccatccaacat

SEQ ID NO: 260906 - DNA, 15 bp, Homo sapiens
acaagccatccaaca

SEQ ID NO: 260907 - DNA, 15 bp, Homo sapiens
cacaagccatccaac

SEQ ID NO: 260908 - DNA, 15 bp, Homo sapiens
acacaagccatccaa

SEQ ID NO: 260909 - DNA, 15 bp, Homo sapiens
cacacaagccatcca

SEQ ID NO: 260910 - DNA, 15 bp, Homo sapiens
tcacacaagccatcc

SEQ ID NO: 260911 - DNA, 15 bp, Homo sapiens
ctcacacaagccatc

SEQ ID NO: 260912 - DNA, 15 bp, Homo sapiens
gctcacacaagccat

SEQ ID NO: 260913 - DNA, 15 bp, Homo sapiens
ggctcacacaagcca

SEQ ID NO: 260914 - DNA, 15 bp, Homo sapiens
gggctcacacaagcc

SEQ ID NO: 260915 - DNA, 15 bp, Homo sapiens
tggggctcacacaag

SEQ ID NO: 260916 - DNA, 15 bp, Homo sapiens
ctggggctcacacaa

SEQ ID NO: 260917 - DNA, 15 bp, Homo sapiens
cctggggctcacaca

SEQ ID NO: 260918 - DNA, 15 bp, Homo sapiens
tcctggggctcacac

SEQ ID NO: 260919 - DNA, 15 bp, Homo sapiens
ttcctggggctcaca

SEQ ID NO: 260920 - DNA, 15 bp, Homo sapiens
tttcctggggctcac

SEQ ID NO: 260921 - DNA, 15 bp, Homo sapiens
gtttcctggggctca

SEQ ID NO: 260922 - DNA, 15 bp, Homo sapiens
ggtttcctggggctc

SEQ ID NO: 260923 - DNA, 15 bp, Homo sapiens
gggtttcctggggct

SEQ ID NO: 260924 - DNA, 15 bp, Homo sapiens
cgggtttcctggggc

SEQ ID NO: 260925 - DNA, 15 bp, Homo sapiens
acgggtttcctgggg

SEQ ID NO: 260926 - DNA, 15 bp, Homo sapiens
cacgggtttcctggg

SEQ ID NO: 260927 - DNA, 15 bp, Homo sapiens
gcacgggtttcctgg

SEQ ID NO: 260928 - DNA, 15 bp, Homo sapiens
tgcacgggtttcctg

SEQ ID NO: 260929 - DNA, 15 bp, Homo sapiens
gtgcacgggtttcct

SEQ ID NO: 260930 - DNA, 15 bp, Homo sapiens
ggtgcacgggtttcc

SEQ ID NO: 260931 - DNA, 15 bp, Homo sapiens
gggtgcacgggtttc

SEQ ID NO: 260932 - DNA, 15 bp, Homo sapiens
agggtgcacgggttt

SEQ ID NO: 260933 - DNA, 15 bp, Homo sapiens
aagggtgcacgggtt

SEQ ID NO: 260934 - DNA, 15 bp, Homo sapiens
taagggtgcacgggt

SEQ ID NO: 260935 - DNA, 15 bp, Homo sapiens
ctaagggtgcacggg

SEQ ID NO: 260936 - DNA, 15 bp, Homo sapiens
cctaagggtgcacgg

SEQ ID NO: 260937 - DNA, 15 bp, Homo sapiens
tcctaagggtgcacg

SEQ ID NO: 260938 - DNA, 15 bp, Homo sapiens
ttcctaagggtgcac

SEQ ID NO: 260939 - DNA, 15 bp, Homo sapiens
tttcctaagggtgca

SEQ ID NO: 260940 - DNA, 15 bp, Homo sapiens
ctttcctaagggtgc

SEQ ID NO: 260941 - DNA, 15 bp, Homo sapiens
gctttcctaagggtg

SEQ ID NO: 260942 - DNA, 15 bp, Homo sapiens
tgctttcctaagggt

SEQ ID NO: 260943 - DNA, 15 bp, Homo sapiens
atgctttcctaaggg

SEQ ID NO: 260944 - DNA, 15 bp, Homo sapiens
catgctttcctaagg

SEQ ID NO: 260945 - DNA, 15 bp, Homo sapiens
ccatgctttcctaag

SEQ ID NO: 260946 - DNA, 15 bp, Homo sapiens
cccatgctttcctaa

SEQ ID NO: 260947 - DNA, 15 bp, Homo sapiens
tcccatgctttccta

SEQ ID NO: 260948 - DNA, 15 bp, Homo sapiens
atcccatgctttcct

SEQ ID NO: 260949 - DNA, 15 bp, Homo sapiens
tatcccatgctttcc

SEQ ID NO: 260950 - DNA, 15 bp, Homo sapiens
ctatcccatgctttc

SEQ ID NO: 260951 - DNA, 15 bp, Homo sapiens
tctatcccatgcttt

SEQ ID NO: 260952 - DNA, 15 bp, Homo sapiens
atctatcccatgctt

SEQ ID NO: 260953 - DNA, 15 bp, Homo sapiens
gatctatcccatgct

SEQ ID NO: 260954 - DNA, 15 bp, Homo sapiens
agatctatcccatgc

SEQ ID NO: 260955 - DNA, 15 bp, Homo sapiens
gagatctatcccatg

SEQ ID NO: 260956 - DNA, 15 bp, Homo sapiens
ggagatctatcccat

SEQ ID NO: 260957 - DNA, 15 bp, Homo sapiens
aggagatctatccca

SEQ ID NO: 260958 - DNA, 15 bp, Homo sapiens
caggagatctatccc

SEQ ID NO: 260959 - DNA, 15 bp, Homo sapiens
tcaggagatctatcc

SEQ ID NO: 260960 - DNA, 15 bp, Homo sapiens
ctcaggagatctatc

SEQ ID NO: 260961 - DNA, 15 bp, Homo sapiens
tctcaggagatctat

SEQ ID NO: 260962 - DNA, 15 bp, Homo sapiens
atctcaggagatcta

SEQ ID NO: 260963 - DNA, 15 bp, Homo sapiens
catctcaggagatct

SEQ ID NO: 260964 - DNA, 15 bp, Homo sapiens
tcatctcaggagatc

SEQ ID NO: 260965 - DNA, 15 bp, Homo sapiens
atcatctcaggagat

SEQ ID NO: 260966 - DNA, 15 bp, Homo sapiens
aatcatctcaggaga

SEQ ID NO: 260967 - DNA, 15 bp, Homo sapiens
aaatcatctcaggag

SEQ ID NO: 260968 - DNA, 15 bp, Homo sapiens
gaaatcatctcagga

SEQ ID NO: 260969 - DNA, 15 bp, Homo sapiens
tgaaatcatctcagg

SEQ ID NO: 260970 - DNA, 15 bp, Homo sapiens
ctgaaatcatctcag

SEQ ID NO: 260971 - DNA, 15 bp, Homo sapiens
tctgaaatcatctca

SEQ ID NO: 260972 - DNA, 15 bp, Homo sapiens
ctctgaaatcatctc

SEQ ID NO: 260973 - DNA, 15 bp, Homo sapiens
tctctgaaatcatct

SEQ ID NO: 260974 - DNA, 15 bp, Homo sapiens
ttctctgaaatcatc

SEQ ID NO: 260975 - DNA, 15 bp, Homo sapiens
tttctctgaaatcat

SEQ ID NO: 260976 - DNA, 15 bp, Homo sapiens
atttctctgaaatca

SEQ ID NO: 260977 - DNA, 15 bp, Homo sapiens
catttctctgaaatc

SEQ ID NO: 260978 - DNA, 15 bp, Homo sapiens
tcatttctctgaaat

SEQ ID NO: 260979 - DNA, 15 bp, Homo sapiens
gtcatttctctgaaa

SEQ ID NO: 260980 - DNA, 15 bp, Homo sapiens
tgtcatttctctgaa

SEQ ID NO: 260981 - DNA, 15 bp, Homo sapiens
ctgtcatttctctga

SEQ ID NO: 260982 - DNA, 15 bp, Homo sapiens
gctgtcatttctctg

SEQ ID NO: 260983 - DNA, 15 bp, Homo sapiens
tgctgtcatttctct

SEQ ID NO: 260984 - DNA, 15 bp, Homo sapiens
ctgctgtcatttctc

SEQ ID NO: 260985 - DNA, 15 bp, Homo sapiens
tctgctgtcatttct

SEQ ID NO: 260986 - DNA, 15 bp, Homo sapiens
gtctgctgtcatttc

SEQ ID NO: 260987 - DNA, 15 bp, Homo sapiens
ggtctgctgtcattt

SEQ ID NO: 260988 - DNA, 15 bp, Homo sapiens
tggtctgctgtcatt

SEQ ID NO: 260989 - DNA, 15 bp, Homo sapiens
atggtctgctgtcat

SEQ ID NO: 260990 - DNA, 15 bp, Homo sapiens
aatggtctgctgtca

SEQ ID NO: 260991 - DNA, 15 bp, Homo sapiens
caatggtctgctgtc

SEQ ID NO: 260992 - DNA, 15 bp, Homo sapiens
acaatggtctgctgt

SEQ ID NO: 260993 - DNA, 15 bp, Homo sapiens
cacaatggtctgctg

SEQ ID NO: 260994 - DNA, 15 bp, Homo sapiens
tcacaatggtctgct

SEQ ID NO: 260995 - DNA, 15 bp, Homo sapiens
ctcacaatggtctgc

SEQ ID NO: 260996 - DNA, 15 bp, Homo sapiens
cctcacaatggtctg

SEQ ID NO: 260997 - DNA, 15 bp, Homo sapiens
ccctcacaatggtct

SEQ ID NO: 260998 - DNA, 15 bp, Homo sapiens
tccctcacaatggtc

SEQ ID NO: 260999 - DNA, 15 bp, Homo sapiens
ctccctcacaatggt

SEQ ID NO: 261000 - DNA, 15 bp, Homo sapiens
cctccctcacaatgg

SEQ ID NO: 261001 - DNA, 15 bp, Homo sapiens
gcctccctcacaatg

SEQ ID NO: 261002 - DNA, 15 bp, Homo sapiens
tgcctccctcacaat

SEQ ID NO: 261003 - DNA, 15 bp, Homo sapiens
ctgcctccctcacaa

SEQ ID NO: 261004 - DNA, 15 bp, Homo sapiens
gctgcctccctcaca

SEQ ID NO: 261005 - DNA, 15 bp, Homo sapiens
tgctgcctccctcac

SEQ ID NO: 261006 - DNA, 15 bp, Homo sapiens
atgctgcctccctca

SEQ ID NO: 261007 - DNA, 15 bp, Homo sapiens
catgctgcctccctc

SEQ ID NO: 261008 - DNA, 15 bp, Homo sapiens
tcatgctgcctccct

SEQ ID NO: 261009 - DNA, 15 bp, Homo sapiens
gtcatgctgcctccc

SEQ ID NO: 261010 - DNA, 15 bp, Homo sapiens
agtcatgctgcctcc

SEQ ID NO: 261011 - DNA, 15 bp, Homo sapiens
cagtcatgctgcctc

SEQ ID NO: 261012 - DNA, 15 bp, Homo sapiens
ccagtcatgctgcct

SEQ ID NO: 261013 - DNA, 15 bp, Homo sapiens
cccagtcatgctgcc

SEQ ID NO: 261014 - DNA, 15 bp, Homo sapiens
ccccagtcatgctgc

SEQ ID NO: 261015 - DNA, 15 bp, Homo sapiens
cccccagtcatgctg

SEQ ID NO: 261016 - DNA, 15 bp, Homo sapiens
tcccccagtcatgct

SEQ ID NO: 261017 - DNA, 15 bp, Homo sapiens
ttcccccagtcatgc

SEQ ID NO: 261018 - DNA, 15 bp, Homo sapiens
attcccccagtcatg

SEQ ID NO: 261019 - DNA, 15 bp, Homo sapiens
cattcccccagtcat

SEQ ID NO: 261020 - DNA, 15 bp, Homo sapiens
ccattcccccagtca

SEQ ID NO: 261021 - DNA, 15 bp, Homo sapiens
tccattcccccagtc

SEQ ID NO: 261022 - DNA, 15 bp, Homo sapiens
atccattcccccagt

SEQ ID NO: 261023 - DNA, 15 bp, Homo sapiens
tatccattcccccag

SEQ ID NO: 261024 - DNA, 15 bp, Homo sapiens
ttatccattccccca

SEQ ID NO: 261025 - DNA, 15 bp, Homo sapiens
cttatccattccccc

SEQ ID NO: 261026 - DNA, 15 bp, Homo sapiens
ccttatccattcccc

SEQ ID NO: 261027 - DNA, 15 bp, Homo sapiens
gccttatccattccc

SEQ ID NO: 261028 - DNA, 15 bp, Homo sapiens
agccttatccattcc

SEQ ID NO: 261029 - DNA, 15 bp, Homo sapiens
aagccttatccattc

SEQ ID NO: 261030 - DNA, 15 bp, Homo sapiens
taagccttatccatt

SEQ ID NO: 261031 - DNA, 15 bp, Homo sapiens
ctaagccttatccat

SEQ ID NO: 261032 - DNA, 15 bp, Homo sapiens
cctaagccttatcca

SEQ ID NO: 261033 - DNA, 15 bp, Homo sapiens
acctaagccttatcc

SEQ ID NO: 261034 - DNA, 15 bp, Homo sapiens
gacctaagccttatc

SEQ ID NO: 261035 - DNA, 15 bp, Homo sapiens
ggacctaagccttat

SEQ ID NO: 261036 - DNA, 15 bp, Homo sapiens
gggacctaagcctta

SEQ ID NO: 261037 - DNA, 15 bp, Homo sapiens
agggacctaagcctt

SEQ ID NO: 261038 - DNA, 15 bp, Homo sapiens
cagggacctaagcct

SEQ ID NO: 261039 - DNA, 15 bp, Homo sapiens
tcagggacctaagcc

SEQ ID NO: 261040 - DNA, 15 bp, Homo sapiens
ctcagggacctaagc

SEQ ID NO: 261041 - DNA, 15 bp, Homo sapiens
tctcagggacctaag

SEQ ID NO: 261042 - DNA, 15 bp, Homo sapiens
ctctcagggacctaa

SEQ ID NO: 261043 - DNA, 15 bp, Homo sapiens
cctctcagggaccta

SEQ ID NO: 261044 - DNA, 15 bp, Homo sapiens
gcctctcagggacct

SEQ ID NO: 261045 - DNA, 15 bp, Homo sapiens
tgcctctcagggacc

SEQ ID NO: 261046 - DNA, 15 bp, Homo sapiens
ctgcctctcagggac

SEQ ID NO: 261047 - DNA, 15 bp, Homo sapiens
tctgcctctcaggga

SEQ ID NO: 261048 - DNA, 15 bp, Homo sapiens
atctgcctctcaggg

SEQ ID NO: 261049 - DNA, 15 bp, Homo sapiens
gatctgcctctcagg

SEQ ID NO: 261050 - DNA, 15 bp, Homo sapiens
ggatctgcctctcag

SEQ ID NO: 261051 - DNA, 15 bp, Homo sapiens
tggatctgcctctca

SEQ ID NO: 261052 - DNA, 15 bp, Homo sapiens
gtggatctgcctctc

SEQ ID NO: 261053 - DNA, 15 bp, Homo sapiens
agtggatctgcctct

SEQ ID NO: 261054 - DNA, 15 bp, Homo sapiens
gagtggatctgcctc

SEQ ID NO: 261055 - DNA, 15 bp, Homo sapiens
ggagtggatctgcct

SEQ ID NO: 261056 - DNA, 15 bp, Homo sapiens
tggagtggatctgcc

SEQ ID NO: 261057 - DNA, 15 bp, Homo sapiens
ctggagtggatctgc

SEQ ID NO: 261058 - DNA, 15 bp, Homo sapiens
gctggagtggatctg

SEQ ID NO: 261059 - DNA, 15 bp, Homo sapiens
ggctggagtggatct

SEQ ID NO: 261060 - DNA, 15 bp, Homo sapiens
aggctggagtggatc

SEQ ID NO: 261061 - DNA, 15 bp, Homo sapiens
aaggctggagtggat

SEQ ID NO: 261062 - DNA, 15 bp, Homo sapiens
caaggctggagtgga

SEQ ID NO: 261063 - DNA, 15 bp, Homo sapiens
gcaaggctggagtgg

SEQ ID NO: 261064 - DNA, 15 bp, Homo sapiens
cgcaaggctggagtg

SEQ ID NO: 261065 - DNA, 15 bp, Homo sapiens
ccgcaaggctggagt

SEQ ID NO: 261066 - DNA, 15 bp, Homo sapiens
tccgcaaggctggag

SEQ ID NO: 261067 - DNA, 15 bp, Homo sapiens
ttccgcaaggctgga

SEQ ID NO: 261068 - DNA, 15 bp, Homo sapiens
attccgcaaggctgg

SEQ ID NO: 261069 - DNA, 15 bp, Homo sapiens
cattccgcaaggctg

SEQ ID NO: 261070 - DNA, 15 bp, Homo sapiens
acattccgcaaggct

SEQ ID NO: 261071 - DNA, 15 bp, Homo sapiens
gacattccgcaaggc

SEQ ID NO: 261072 - DNA, 15 bp, Homo sapiens
tgacattccgcaagg

SEQ ID NO: 261073 - DNA, 15 bp, Homo sapiens
atgacattccgcaag

SEQ ID NO: 261074 - DNA, 15 bp, Homo sapiens
catgacattccgcaa

SEQ ID NO: 261075 - DNA, 15 bp, Homo sapiens
gcatgacattccgca

SEQ ID NO: 261076 - DNA, 15 bp, Homo sapiens
agcatgacattccgc

SEQ ID NO: 261077 - DNA, 15 bp, Homo sapiens
gagcatgacattccg

SEQ ID NO: 261078 - DNA, 15 bp, Homo sapiens
ggagcatgacattcc

SEQ ID NO: 261079 - DNA, 15 bp, Homo sapiens
aggagcatgacattc

SEQ ID NO: 261080 - DNA, 15 bp, Homo sapiens
caggagcatgacatt

SEQ ID NO: 261081 - DNA, 15 bp, Homo sapiens
gcaggagcatgacat

SEQ ID NO: 261082 - DNA, 15 bp, Homo sapiens
tgcaggagcatgaca

SEQ ID NO: 261083 - DNA, 15 bp, Homo sapiens
ctgcaggagcatgac

SEQ ID NO: 261084 - DNA, 15 bp, Homo sapiens
tctgcaggagcatga

SEQ ID NO: 261085 - DNA, 15 bp, Homo sapiens
ctctgcaggagcatg

SEQ ID NO: 261086 - DNA, 15 bp, Homo sapiens
cctctgcaggagcat

SEQ ID NO: 261087 - DNA, 15 bp, Homo sapiens
ccctctgcaggagca

SEQ ID NO: 261088 - DNA, 15 bp, Homo sapiens
gccctctgcaggagc

SEQ ID NO: 261089 - DNA, 15 bp, Homo sapiens
agccctctgcaggag

SEQ ID NO: 261090 - DNA, 15 bp, Homo sapiens
cagccctctgcagga

SEQ ID NO: 261091 - DNA, 15 bp, Homo sapiens
gcagccctctgcagg

SEQ ID NO: 261092 - DNA, 15 bp, Homo sapiens
tgcagccctctgcag

SEQ ID NO: 261093 - DNA, 15 bp, Homo sapiens
ttgcagccctctgca

SEQ ID NO: 261094 - DNA, 15 bp, Homo sapiens
cttgcagccctctgc

SEQ ID NO: 261095 - DNA, 15 bp, Homo sapiens
tcttgcagccctctg

SEQ ID NO: 261096 - DNA, 15 bp, Homo sapiens
ttcttgcagccctct

SEQ ID NO: 261097 - DNA, 15 bp, Homo sapiens
cttcttgcagccctc

SEQ ID NO: 261098 - DNA, 15 bp, Homo sapiens
tcttcttgcagccct

SEQ ID NO: 261099 - DNA, 15 bp, Homo sapiens
ctcttcttgcagccc

SEQ ID NO: 261100 - DNA, 15 bp, Homo sapiens
cctcttcttgcagcc

SEQ ID NO: 261101 - DNA, 15 bp, Homo sapiens
acctcttcttgcagc

SEQ ID NO: 261102 - DNA, 15 bp, Homo sapiens
cacctcttcttgcag

SEQ ID NO: 261103 - DNA, 15 bp, Homo sapiens
tcacctcttcttgca

SEQ ID NO: 261104 - DNA, 15 bp, Homo sapiens
ttcacctcttcttgc

SEQ ID NO: 261105 - DNA, 15 bp, Homo sapiens
gttcacctcttcttg

SEQ ID NO: 261106 - DNA, 15 bp, Homo sapiens
ggttcacctcttctt

SEQ ID NO: 261107 - DNA, 15 bp, Homo sapiens
gggttcacctcttct

SEQ ID NO: 261108 - DNA, 15 bp, Homo sapiens
tgggttcacctcttc

SEQ ID NO: 261109 - DNA, 15 bp, Homo sapiens
atgggttcacctctt

SEQ ID NO: 261110 - DNA, 15 bp, Homo sapiens
aatgggttcacctct

SEQ ID NO: 261111 - DNA, 15 bp, Homo sapiens
gaatgggttcacctc

SEQ ID NO: 261112 - DNA, 15 bp, Homo sapiens
ggaatgggttcacct

SEQ ID NO: 261113 - DNA, 15 bp, Homo sapiens
gggaatgggttcacc

SEQ ID NO: 261114 - DNA, 15 bp, Homo sapiens
tgggaatgggttcac

SEQ ID NO: 261115 - DNA, 15 bp, Homo sapiens
ttgggaatgggttca

SEQ ID NO: 261116 - DNA, 15 bp, Homo sapiens
attgggaatgggttc

SEQ ID NO: 261117 - DNA, 15 bp, Homo sapiens
gattgggaatgggtt

SEQ ID NO: 261118 - DNA, 15 bp, Homo sapiens
tgattgggaatgggt

SEQ ID NO: 261119 - DNA, 15 bp, Homo sapiens
gtgattgggaatggg

SEQ ID NO: 261120 - DNA, 15 bp, Homo sapiens
agtgattgggaatgg

SEQ ID NO: 261121 - DNA, 15 bp, Homo sapiens
cagtgattgggaatg

SEQ ID NO: 261122 - DNA, 15 bp, Homo sapiens
ccagtgattgggaat

SEQ ID NO: 261123 - DNA, 15 bp, Homo sapiens
gccagtgattgggaa

SEQ ID NO: 261124 - DNA, 15 bp, Homo sapiens
ggccagtgattggga

SEQ ID NO: 261125 - DNA, 15 bp, Homo sapiens
tggccagtgattggg

SEQ ID NO: 261126 - DNA, 15 bp, Homo sapiens
ctggccagtgattgg

SEQ ID NO: 261127 - DNA, 15 bp, Homo sapiens
cctggccagtgattg

SEQ ID NO: 261128 - DNA, 15 bp, Homo sapiens
acctggccagtgatt

SEQ ID NO: 261129 - DNA, 15 bp, Homo sapiens
aacctggccagtgat

SEQ ID NO: 261130 - DNA, 15 bp, Homo sapiens
taacctggccagtga

SEQ ID NO: 261131 - DNA, 15 bp, Homo sapiens
ctaacctggccagtg

SEQ ID NO: 261132 - DNA, 15 bp, Homo sapiens
tctaacctggccagt

SEQ ID NO: 261133 - DNA, 15 bp, Homo sapiens
gtctaacctggccag

SEQ ID NO: 261134 - DNA, 15 bp, Homo sapiens
tgtctaacctggcca

SEQ ID NO: 261135 - DNA, 15 bp, Homo sapiens
ttgtctaacctggcc

SEQ ID NO: 261136 - DNA, 15 bp, Homo sapiens
tttgtctaacctggc

SEQ ID NO: 261137 - DNA, 15 bp, Homo sapiens
atttgtctaacctgg

SEQ ID NO: 261138 - DNA, 15 bp, Homo sapiens
gatttgtctaacctg

SEQ ID NO: 261139 - DNA, 15 bp, Homo sapiens
tgatttgtctaacct

SEQ ID NO: 261140 - DNA, 15 bp, Homo sapiens
atgatttgtctaacc

SEQ ID NO: 261141 - DNA, 15 bp, Homo sapiens
aatgatttgtctaac

SEQ ID NO: 261142 - DNA, 15 bp, Homo sapiens
caatgatttgtctaa

SEQ ID NO: 261143 - DNA, 15 bp, Homo sapiens
ccaatgatttgtcta

SEQ ID NO: 261144 - DNA, 15 bp, Homo sapiens
tccaatgatttgtct

SEQ ID NO: 261145 - DNA, 15 bp, Homo sapiens
atccaatgatttgtc

SEQ ID NO: 261146 - DNA, 15 bp, Homo sapiens
aatccaatgatttgt

SEQ ID NO: 261147 - DNA, 15 bp, Homo sapiens
gaatccaatgatttg

SEQ ID NO: 261148 - DNA, 15 bp, Homo sapiens
agaatccaatgattt

SEQ ID NO: 261149 - DNA, 15 bp, Homo sapiens
cagaatccaatgatt

SEQ ID NO: 261150 - DNA, 15 bp, Homo sapiens
ccagaatccaatgat

SEQ ID NO: 261151 - DNA, 15 bp, Homo sapiens
cccagaatccaatga

SEQ ID NO: 261152 - DNA, 15 bp, Homo sapiens
tcccagaatccaatg

SEQ ID NO: 261153 - DNA, 15 bp, Homo sapiens
gtcccagaatccaat

SEQ ID NO: 261154 - DNA, 15 bp, Homo sapiens
tgtcccagaatccaa

SEQ ID NO: 261155 - DNA, 15 bp, Homo sapiens
atgtcccagaatcca

SEQ ID NO: 261156 - DNA, 15 bp, Homo sapiens
gatgtcccagaatcc

SEQ ID NO: 261157 - DNA, 15 bp, Homo sapiens
tgatgtcccagaatc

SEQ ID NO: 261158 - DNA, 15 bp, Homo sapiens
ctgatgtcccagaat

SEQ ID NO: 261159 - DNA, 15 bp, Homo sapiens
tctgatgtcccagaa

SEQ ID NO: 261160 - DNA, 15 bp, Homo sapiens
ctctgatgtcccaga

SEQ ID NO: 261161 - DNA, 15 bp, Homo sapiens
gctctgatgtcccag

SEQ ID NO: 261162 - DNA, 15 bp, Homo sapiens
agctctgatgtccca

SEQ ID NO: 261163 - DNA, 15 bp, Homo sapiens
cagctctgatgtccc

SEQ ID NO: 261164 - DNA, 15 bp, Homo sapiens
tcagctctgatgtcc

SEQ ID NO: 261165 - DNA, 15 bp, Homo sapiens
ttcagctctgatgtc

SEQ ID NO: 261166 - DNA, 15 bp, Homo sapiens
tttcagctctgatgt

SEQ ID NO: 261167 - DNA, 15 bp, Homo sapiens
atttcagctctgatg

SEQ ID NO: 261168 - DNA, 15 bp, Homo sapiens
tatttcagctctgat

SEQ ID NO: 261169 - DNA, 15 bp, Homo sapiens
ctatttcagctctga

SEQ ID NO: 261170 - DNA, 15 bp, Homo sapiens
gctatttcagctctg

SEQ ID NO: 261171 - DNA, 15 bp, Homo sapiens
agctatttcagctct

SEQ ID NO: 261172 - DNA, 15 bp, Homo sapiens
aagctatttcagctc

SEQ ID NO: 261173 - DNA, 15 bp, Homo sapiens
aaagctatttcagct

SEQ ID NO: 261174 - DNA, 15 bp, Homo sapiens
taaagctatttcagc

SEQ ID NO: 261175 - DNA, 15 bp, Homo sapiens
ataaagctatttcag

SEQ ID NO: 261176 - DNA, 15 bp, Homo sapiens
aataaagctatttca

SEQ ID NO: 261177 - DNA, 15 bp, Homo sapiens
caataaagctatttc

SEQ ID NO: 261178 - DNA, 15 bp, Homo sapiens
ccaataaagctattt

SEQ ID NO: 261179 - DNA, 15 bp, Homo sapiens
tccaataaagctatt

SEQ ID NO: 261180 - DNA, 15 bp, Homo sapiens
atccaataaagctat

SEQ ID NO: 261181 - DNA, 15 bp, Homo sapiens
gatccaataaagcta

SEQ ID NO: 261182 - DNA, 15 bp, Homo sapiens
tgatccaataaagct

SEQ ID NO: 261183 - DNA, 15 bp, Homo sapiens
atgatccaataaagc

SEQ ID NO: 261184 - DNA, 15 bp, Homo sapiens
gatgatccaataaag

SEQ ID NO: 261185 - DNA, 15 bp, Homo sapiens
agatgatccaataaa

SEQ ID NO: 261186 - DNA, 15 bp, Homo sapiens
gagatgatccaataa

SEQ ID NO: 261187 - DNA, 15 bp, Homo sapiens
agagatgatccaata

SEQ ID NO: 261188 - DNA, 15 bp, Homo sapiens
cagagatgatccaat

SEQ ID NO: 261189 - DNA, 15 bp, Homo sapiens
ccagagatgatccaa

SEQ ID NO: 261190 - DNA, 15 bp, Homo sapiens
gccagagatgatcca

SEQ ID NO: 261191 - DNA, 15 bp, Homo sapiens
ggccagagatgatcc

SEQ ID NO: 261192 - DNA, 15 bp, Homo sapiens
gggccagagatgatc

SEQ ID NO: 261193 - DNA, 15 bp, Homo sapiens
tgggccagagatgat

SEQ ID NO: 261194 - DNA, 15 bp, Homo sapiens
ctgggccagagatga

SEQ ID NO: 261195 - DNA, 15 bp, Homo sapiens
gctgggccagagatg

SEQ ID NO: 261196 - DNA, 15 bp, Homo sapiens
agctgggccagagat

SEQ ID NO: 261197 - DNA, 15 bp, Homo sapiens
gagctgggccagaga

SEQ ID NO: 261198 - DNA, 15 bp, Homo sapiens
cgagctgggccagag

SEQ ID NO: 261199 - DNA, 15 bp, Homo sapiens
gcgagctgggccaga

SEQ ID NO: 261200 - DNA, 15 bp, Homo sapiens
agcgagctgggccag

SEQ ID NO: 261201 - DNA, 15 bp, Homo sapiens
aagcgagctgggcca

SEQ ID NO: 261202 - DNA, 15 bp, Homo sapiens
caagcgagctgggcc

SEQ ID NO: 261203 - DNA, 15 bp, Homo sapiens
gcaagcgagctgggc

SEQ ID NO: 261204 - DNA, 15 bp, Homo sapiens
agcaagcgagctggg

SEQ ID NO: 261205 - DNA, 15 bp, Homo sapiens
gagcaagcgagctgg

SEQ ID NO: 261206 - DNA, 15 bp, Homo sapiens
agagcaagcgagctg

SEQ ID NO: 261207 - DNA, 15 bp, Homo sapiens
gagagcaagcgagct

SEQ ID NO: 261208 - DNA, 15 bp, Homo sapiens
agagagcaagcgagc

SEQ ID NO: 261209 - DNA, 15 bp, Homo sapiens
gagagagcaagcgag

SEQ ID NO: 261210 - DNA, 15 bp, Homo sapiens
agagagagcaagcga

SEQ ID NO: 261211 - DNA, 15 bp, Homo sapiens
gagagagagcaagcg

SEQ ID NO: 261212 - DNA, 15 bp, Homo sapiens
agagagagagcaagc

SEQ ID NO: 261213 - DNA, 15 bp, Homo sapiens
tgagagagagagcaa

SEQ ID NO: 261214 - DNA, 15 bp, Homo sapiens
ttgagagagagagca

SEQ ID NO: 261215 - DNA, 15 bp, Homo sapiens
attgagagagagagc

SEQ ID NO: 261216 - DNA, 15 bp, Homo sapiens
gattgagagagagag

SEQ ID NO: 261217 - DNA, 15 bp, Homo sapiens
agattgagagagaga

SEQ ID NO: 261218 - DNA, 15 bp, Homo sapiens
gagattgagagagag

SEQ ID NO: 261219 - DNA, 15 bp, Homo sapiens
agagattgagagaga

SEQ ID NO: 261220 - DNA, 15 bp, Homo sapiens
aagagattgagagag

SEQ ID NO: 261221 - DNA, 15 bp, Homo sapiens
caagagattgagaga

SEQ ID NO: 261222 - DNA, 15 bp, Homo sapiens
tcaagagattgagag

SEQ ID NO: 261223 - DNA, 15 bp, Homo sapiens
atcaagagattgaga

SEQ ID NO: 261224 - DNA, 15 bp, Homo sapiens
gatcaagagattgag

SEQ ID NO: 261225 - DNA, 15 bp, Homo sapiens
agatcaagagattga

SEQ ID NO: 261226 - DNA, 15 bp, Homo sapiens
aagatcaagagattg

SEQ ID NO: 261227 - DNA, 15 bp, Homo sapiens
aaagatcaagagatt

SEQ ID NO: 261228 - DNA, 15 bp, Homo sapiens
aaaagatcaagagat

SEQ ID NO: 261229 - DNA, 15 bp, Homo sapiens
aaaaagatcaagaga

SEQ ID NO: 261230 - DNA, 15 bp, Homo sapiens
aaaaaagatcaagag

SEQ ID NO: 261231 - DNA, 15 bp, Homo sapiens
taaaaaagatcaaga

SEQ ID NO: 261232 - DNA, 15 bp, Homo sapiens
ataaaaaagatcaag

SEQ ID NO: 261233 - DNA, 15 bp, Homo sapiens
aataaaaaagatcaa

SEQ ID NO: 261234 - DNA, 15 bp, Homo sapiens
aaataaaaaagatca

SEQ ID NO: 261235 - DNA, 15 bp, Homo sapiens
taaataaaaaagatc

SEQ ID NO: 261236 - DNA, 15 bp, Homo sapiens
ataaataaaaaagat

SEQ ID NO: 261237 - DNA, 15 bp, Homo sapiens
aataaataaaaaaga

SEQ ID NO: 261238 - DNA, 15 bp, Homo sapiens
aaataaataaaaaag

SEQ ID NO: 261239 - DNA, 15 bp, Homo sapiens
taaataaataaaaaa

SEQ ID NO: 261240 - DNA, 15 bp, Homo sapiens
ataaataaataaaaa

SEQ ID NO: 261241 - DNA, 15 bp, Homo sapiens
aaaaaaataaataaa

SEQ ID NO: 261242 - DNA, 15 bp, Homo sapiens
taaaaaaataaataa

SEQ ID NO: 261243 - DNA, 15 bp, Homo sapiens
ttaaaaaaataaata

SEQ ID NO: 261244 - DNA, 15 bp, Homo sapiens
tttaaaaaaataaat

SEQ ID NO: 261245 - DNA, 15 bp, Homo sapiens
atttaaaaaaataaa

SEQ ID NO: 261246 - DNA, 15 bp, Homo sapiens
catttaaaaaaataa

SEQ ID NO: 261247 - DNA, 15 bp, Homo sapiens
tcatttaaaaaaata

SEQ ID NO: 261248 - DNA, 15 bp, Homo sapiens
atcatttaaaaaaat

SEQ ID NO: 261249 - DNA, 15 bp, Homo sapiens
tatcatttaaaaaaa

SEQ ID NO: 261250 - DNA, 15 bp, Homo sapiens
ttatcatttaaaaaa

SEQ ID NO: 261251 - DNA, 15 bp, Homo sapiens
tttatcatttaaaaa

SEQ ID NO: 261252 - DNA, 15 bp, Homo sapiens
ttttatcatttaaaa

SEQ ID NO: 261253 - DNA, 15 bp, Homo sapiens
tttttatcatttaaa

SEQ ID NO: 261254 - DNA, 15 bp, Homo sapiens
gtttttatcatttaa

SEQ ID NO: 261255 - DNA, 15 bp, Homo sapiens
tgtttttatcattta

SEQ ID NO: 261256 - DNA, 15 bp, Homo sapiens
ttgtttttatcattt

SEQ ID NO: 261257 - DNA, 15 bp, Homo sapiens
tttgtttttatcatt

SEQ ID NO: 261258 - DNA, 15 bp, Homo sapiens
ctttgtttttatcat

SEQ ID NO: 261259 - DNA, 15 bp, Homo sapiens
actttgtttttatca

SEQ ID NO: 261260 - DNA, 15 bp, Homo sapiens
aactttgtttttatc

SEQ ID NO: 261261 - DNA, 15 bp, Homo sapiens
gaactttgtttttat

SEQ ID NO: 261262 - DNA, 15 bp, Homo sapiens
tgaactttgttttta

SEQ ID NO: 261263 - DNA, 15 bp, Homo sapiens
ctgaactttgttttt

SEQ ID NO: 261264 - DNA, 15 bp, Homo sapiens
tctgaactttgtttt

SEQ ID NO: 261265 - DNA, 15 bp, Homo sapiens
ctctgaactttgttt

SEQ ID NO: 261266 - DNA, 15 bp, Homo sapiens
gctctgaactttgtt

SEQ ID NO: 261267 - DNA, 15 bp, Homo sapiens
agctctgaactttgt

SEQ ID NO: 261268 - DNA, 15 bp, Homo sapiens
cagctctgaactttg

SEQ ID NO: 261269 - DNA, 15 bp, Homo sapiens
ccagctctgaacttt

SEQ ID NO: 261270 - DNA, 15 bp, Homo sapiens
cccagctctgaactt

SEQ ID NO: 261271 - DNA, 15 bp, Homo sapiens
ccccagctctgaact

SEQ ID NO: 261272 - DNA, 15 bp, Homo sapiens
gccccagctctgaac

SEQ ID NO: 261273 - DNA, 15 bp, Homo sapiens
tgccccagctctgaa

SEQ ID NO: 261274 - DNA, 15 bp, Homo sapiens
atgccccagctctga

SEQ ID NO: 261275 - DNA, 15 bp, Homo sapiens
tatgccccagctctg

SEQ ID NO: 261276 - DNA, 15 bp, Homo sapiens
ttatgccccagctct

SEQ ID NO: 261277 - DNA, 15 bp, Homo sapiens
gttatgccccagctc

SEQ ID NO: 261278 - DNA, 15 bp, Homo sapiens
agttatgccccagct

SEQ ID NO: 261279 - DNA, 15 bp, Homo sapiens
aagttatgccccagc

SEQ ID NO: 261280 - DNA, 15 bp, Homo sapiens
caagttatgccccag

SEQ ID NO: 261281 - DNA, 15 bp, Homo sapiens
acaagttatgcccca

SEQ ID NO: 261282 - DNA, 15 bp, Homo sapiens
gacaagttatgcccc

SEQ ID NO: 261283 - DNA, 15 bp, Homo sapiens
ggacaagttatgccc

SEQ ID NO: 261284 - DNA, 15 bp, Homo sapiens
tggacaagttatgcc

SEQ ID NO: 261285 - DNA, 15 bp, Homo sapiens
ttggacaagttatgc

SEQ ID NO: 261286 - DNA, 15 bp, Homo sapiens
cttggacaagttatg

SEQ ID NO: 261287 - DNA, 15 bp, Homo sapiens
ccttggacaagttat

SEQ ID NO: 261288 - DNA, 15 bp, Homo sapiens
accttggacaagtta

SEQ ID NO: 261289 - DNA, 15 bp, Homo sapiens
gaccttggacaagtt

SEQ ID NO: 261290 - DNA, 15 bp, Homo sapiens
tgaccttggacaagt

SEQ ID NO: 261291 - DNA, 15 bp, Homo sapiens
gtgaccttggacaag

SEQ ID NO: 261292 - DNA, 15 bp, Homo sapiens
agtgaccttggacaa

SEQ ID NO: 261293 - DNA, 15 bp, Homo sapiens
cagtgaccttggaca

SEQ ID NO: 261294 - DNA, 15 bp, Homo sapiens
tcagtgaccttggac

SEQ ID NO: 261295 - DNA, 15 bp, Homo sapiens
ctcagtgaccttgga

SEQ ID NO: 261296 - DNA, 15 bp, Homo sapiens
tctcagtgaccttgg

SEQ ID NO: 261297 - DNA, 15 bp, Homo sapiens
ctctcagtgaccttg

SEQ ID NO: 261298 - DNA, 15 bp, Homo sapiens
gctctcagtgacctt

SEQ ID NO: 261299 - DNA, 15 bp, Homo sapiens
agctctcagtgacct

SEQ ID NO: 261300 - DNA, 15 bp, Homo sapiens
cagctctcagtgacc

SEQ ID NO: 261301 - DNA, 15 bp, Homo sapiens
acagctctcagtgac

SEQ ID NO: 261302 - DNA, 15 bp, Homo sapiens
tacagctctcagtga

SEQ ID NO: 261303 - DNA, 15 bp, Homo sapiens
ttacagctctcagtg

SEQ ID NO: 261304 - DNA, 15 bp, Homo sapiens
gttacagctctcagt

SEQ ID NO: 261305 - DNA, 15 bp, Homo sapiens
ggttacagctctcag

SEQ ID NO: 261306 - DNA, 15 bp, Homo sapiens
tggttacagctctca

SEQ ID NO: 261307 - DNA, 15 bp, Homo sapiens
atggttacagctctc

SEQ ID NO: 261308 - DNA, 15 bp, Homo sapiens
gatggttacagctct

SEQ ID NO: 261309 - DNA, 15 bp, Homo sapiens
tgatggttacagctc

SEQ ID NO: 261310 - DNA, 15 bp, Homo sapiens
ttgatggttacagct

SEQ ID NO: 261311 - DNA, 15 bp, Homo sapiens
gttgatggttacagc

SEQ ID NO: 261312 - DNA, 15 bp, Homo sapiens
tgttgatggttacag

SEQ ID NO: 261313 - DNA, 15 bp, Homo sapiens
atgttgatggttaca

SEQ ID NO: 261314 - DNA, 15 bp, Homo sapiens
catgttgatggttac

SEQ ID NO: 261315 - DNA, 15 bp, Homo sapiens
acatgttgatggtta

SEQ ID NO: 261316 - DNA, 15 bp, Homo sapiens
cacatgttgatggtt

SEQ ID NO: 261317 - DNA, 15 bp, Homo sapiens
ccacatgttgatggt

SEQ ID NO: 261318 - DNA, 15 bp, Homo sapiens
cccacatgttgatgg

SEQ ID NO: 261319 - DNA, 15 bp, Homo sapiens
ccccacatgttgatg

SEQ ID NO: 261320 - DNA, 15 bp, Homo sapiens
gccccacatgttgat

SEQ ID NO: 261321 - DNA, 15 bp, Homo sapiens
tgccccacatgttga

SEQ ID NO: 261322 - DNA, 15 bp, Homo sapiens
ctgccccacatgttg

SEQ ID NO: 261323 - DNA, 15 bp, Homo sapiens
gctgccccacatgtt

SEQ ID NO: 261324 - DNA, 15 bp, Homo sapiens
tgctgccccacatgt

SEQ ID NO: 261325 - DNA, 15 bp, Homo sapiens
ctgctgccccacatg

SEQ ID NO: 261326 - DNA, 15 bp, Homo sapiens
gctgctgccccacat

SEQ ID NO: 261327 - DNA, 15 bp, Homo sapiens
agctgctgccccaca

SEQ ID NO: 261328 - DNA, 15 bp, Homo sapiens
cagctgctgccccac

SEQ ID NO: 261329 - DNA, 15 bp, Homo sapiens
gcagctgctgcccca

SEQ ID NO: 261330 - DNA, 15 bp, Homo sapiens
ggcagctgctgcccc

SEQ ID NO: 261331 - DNA, 15 bp, Homo sapiens
aggcagctgctgccc

SEQ ID NO: 261332 - DNA, 15 bp, Homo sapiens
caggcagctgctgcc

SEQ ID NO: 261333 - DNA, 15 bp, Homo sapiens
ccaggcagctgctgc

SEQ ID NO: 261334 - DNA, 15 bp, Homo sapiens
cccaggcagctgctg

SEQ ID NO: 261335 - DNA, 15 bp, Homo sapiens
acccaggcagctgct

SEQ ID NO: 261336 - DNA, 15 bp, Homo sapiens
aacccaggcagctgc

SEQ ID NO: 261337 - DNA, 15 bp, Homo sapiens
aaacccaggcagctg

SEQ ID NO: 261338 - DNA, 15 bp, Homo sapiens
gaaacccaggcagct

SEQ ID NO: 261339 - DNA, 15 bp, Homo sapiens
tgaaacccaggcagc

SEQ ID NO: 261340 - DNA, 15 bp, Homo sapiens
ttgaaacccaggcag

SEQ ID NO: 261341 - DNA, 15 bp, Homo sapiens
tttgaaacccaggca

SEQ ID NO: 261342 - DNA, 15 bp, Homo sapiens
ctttgaaacccaggc

SEQ ID NO: 261343 - DNA, 15 bp, Homo sapiens
tctttgaaacccagg

SEQ ID NO: 261344 - DNA, 15 bp, Homo sapiens
ttctttgaaacccag

SEQ ID NO: 261345 - DNA, 15 bp, Homo sapiens
tttctttgaaaccca

SEQ ID NO: 261346 - DNA, 15 bp, Homo sapiens
ctttctttgaaaccc

SEQ ID NO: 261347 - DNA, 15 bp, Homo sapiens
cctttctttgaaacc

SEQ ID NO: 261348 - DNA, 15 bp, Homo sapiens
ccctttctttgaaac

SEQ ID NO: 261349 - DNA, 15 bp, Homo sapiens
cccctttctttgaaa

SEQ ID NO: 261350 - DNA, 15 bp, Homo sapiens
tcccctttctttgaa

SEQ ID NO: 261351 - DNA, 15 bp, Homo sapiens
gtcccctttctttga

SEQ ID NO: 261352 - DNA, 15 bp, Homo sapiens
agtcccctttctttg

SEQ ID NO: 261353 - DNA, 15 bp, Homo sapiens
aagtcccctttcttt

SEQ ID NO: 261354 - DNA, 15 bp, Homo sapiens
caagtcccctttctt

SEQ ID NO: 261355 - DNA, 15 bp, Homo sapiens
gcaagtcccctttct

SEQ ID NO: 261356 - DNA, 15 bp, Homo sapiens
agcaagtcccctttc

SEQ ID NO: 261357 - DNA, 15 bp, Homo sapiens
cagcaagtccccttt

SEQ ID NO: 261358 - DNA, 15 bp, Homo sapiens
gcagcaagtcccctt

SEQ ID NO: 261359 - DNA, 15 bp, Homo sapiens
ggcagcaagtcccct

SEQ ID NO: 261360 - DNA, 15 bp, Homo sapiens
tggcagcaagtcccc

SEQ ID NO: 261361 - DNA, 15 bp, Homo sapiens
atggcagcaagtccc

SEQ ID NO: 261362 - DNA, 15 bp, Homo sapiens
aatggcagcaagtcc

SEQ ID NO: 261363 - DNA, 15 bp, Homo sapiens
gaatggcagcaagtc

SEQ ID NO: 261364 - DNA, 15 bp, Homo sapiens
ggaatggcagcaagt

SEQ ID NO: 261365 - DNA, 15 bp, Homo sapiens
aggaatggcagcaag

SEQ ID NO: 261366 - DNA, 15 bp, Homo sapiens
gaggaatggcagcaa

SEQ ID NO: 261367 - DNA, 15 bp, Homo sapiens
ggaggaatggcagca

SEQ ID NO: 261368 - DNA, 15 bp, Homo sapiens
aggaggaatggcagc

SEQ ID NO: 261369 - DNA, 15 bp, Homo sapiens
gaggaggaatggcag

SEQ ID NO: 261370 - DNA, 15 bp, Homo sapiens
ggaggaggaatggca

SEQ ID NO: 261371 - DNA, 15 bp, Homo sapiens
gggaggaggaatggc

SEQ ID NO: 261372 - DNA, 15 bp, Homo sapiens
ggggaggaggaatgg

SEQ ID NO: 261373 - DNA, 15 bp, Homo sapiens
gggggaggaggaatg

SEQ ID NO: 261374 - DNA, 15 bp, Homo sapiens
agggggaggaggaat

SEQ ID NO: 261375 - DNA, 15 bp, Homo sapiens
tagggggaggaggaa

SEQ ID NO: 261376 - DNA, 15 bp, Homo sapiens
ctagggggaggagga

SEQ ID NO: 261377 - DNA, 15 bp, Homo sapiens
actagggggaggagg

SEQ ID NO: 261378 - DNA, 15 bp, Homo sapiens
aactagggggaggag

SEQ ID NO: 261379 - DNA, 15 bp, Homo sapiens
caactagggggagga

SEQ ID NO: 261380 - DNA, 15 bp, Homo sapiens
gcaactagggggagg

SEQ ID NO: 261381 - DNA, 15 bp, Homo sapiens
ggcaactagggggag

SEQ ID NO: 261382 - DNA, 15 bp, Homo sapiens
tggcaactaggggga

SEQ ID NO: 261383 - DNA, 15 bp, Homo sapiens
gtggcaactaggggg

SEQ ID NO: 261384 - DNA, 15 bp, Homo sapiens
agtggcaactagggg

SEQ ID NO: 261385 - DNA, 15 bp, Homo sapiens
cagtggcaactaggg

SEQ ID NO: 261386 - DNA, 15 bp, Homo sapiens
acagtggcaactagg

SEQ ID NO: 261387 - DNA, 15 bp, Homo sapiens
gacagtggcaactag

SEQ ID NO: 261388 - DNA, 15 bp, Homo sapiens
agacagtggcaacta

SEQ ID NO: 261389 - DNA, 15 bp, Homo sapiens
aagacagtggcaact

SEQ ID NO: 261390 - DNA, 15 bp, Homo sapiens
gaagacagtggcaac

SEQ ID NO: 261391 - DNA, 15 bp, Homo sapiens
agaagacagtggcaa

SEQ ID NO: 261392 - DNA, 15 bp, Homo sapiens
gagaagacagtggca

SEQ ID NO: 261393 - DNA, 15 bp, Homo sapiens
tgagaagacagtggc

SEQ ID NO: 261394 - DNA, 15 bp, Homo sapiens
atgagaagacagtgg

SEQ ID NO: 261395 - DNA, 15 bp, Homo sapiens
catgagaagacagtg

SEQ ID NO: 261396 - DNA, 15 bp, Homo sapiens
ccatgagaagacagt

SEQ ID NO: 261397 - DNA, 15 bp, Homo sapiens
cccatgagaagacag

SEQ ID NO: 261398 - DNA, 15 bp, Homo sapiens
acccatgagaagaca

SEQ ID NO: 261399 - DNA, 15 bp, Homo sapiens
aacccatgagaagac

SEQ ID NO: 261400 - DNA, 15 bp, Homo sapiens
aaacccatgagaaga

SEQ ID NO: 261401 - DNA, 15 bp, Homo sapiens
gaaacccatgagaag

SEQ ID NO: 261402 - DNA, 15 bp, Homo sapiens
ggaaacccatgagaa

SEQ ID NO: 261403 - DNA, 15 bp, Homo sapiens
aggaaacccatgaga

SEQ ID NO: 261404 - DNA, 15 bp, Homo sapiens
aaggaaacccatgag

SEQ ID NO: 261405 - DNA, 15 bp, Homo sapiens
caaggaaacccatga

SEQ ID NO: 261406 - DNA, 15 bp, Homo sapiens
acaaggaaacccatg

SEQ ID NO: 261407 - DNA, 15 bp, Homo sapiens
gacaaggaaacccat

SEQ ID NO: 261408 - DNA, 15 bp, Homo sapiens
ggacaaggaaaccca

SEQ ID NO: 261409 - DNA, 15 bp, Homo sapiens
aggacaaggaaaccc

SEQ ID NO: 261410 - DNA, 15 bp, Homo sapiens
aaggacaaggaaacc

SEQ ID NO: 261411 - DNA, 15 bp, Homo sapiens
gaaggacaaggaaac

SEQ ID NO: 261412 - DNA, 15 bp, Homo sapiens
ggaaggacaaggaaa

SEQ ID NO: 261413 - DNA, 15 bp, Homo sapiens
gggaaggacaaggaa

SEQ ID NO: 261414 - DNA, 15 bp, Homo sapiens
agggaaggacaagga

SEQ ID NO: 261415 - DNA, 15 bp, Homo sapiens
ccagggaaggacaag

SEQ ID NO: 261416 - DNA, 15 bp, Homo sapiens
accagggaaggacaa

SEQ ID NO: 261417 - DNA, 15 bp, Homo sapiens
caccagggaaggaca

SEQ ID NO: 261418 - DNA, 15 bp, Homo sapiens
gcaccagggaaggac

SEQ ID NO: 261419 - DNA, 15 bp, Homo sapiens
ggcaccagggaagga

SEQ ID NO: 261420 - DNA, 15 bp, Homo sapiens
cggcaccagggaagg

SEQ ID NO: 261421 - DNA, 15 bp, Homo sapiens
tcggcaccagggaag

SEQ ID NO: 261422 - DNA, 15 bp, Homo sapiens
ctcggcaccagggaa

SEQ ID NO: 261423 - DNA, 15 bp, Homo sapiens
tctcggcaccaggga

SEQ ID NO: 261424 - DNA, 15 bp, Homo sapiens
ttctcggcaccaggg

SEQ ID NO: 261425 - DNA, 15 bp, Homo sapiens
cttctcggcaccagg

SEQ ID NO: 261426 - DNA, 15 bp, Homo sapiens
gcttctcggcaccag

SEQ ID NO: 261427 - DNA, 15 bp, Homo sapiens
tgcttctcggcacca

SEQ ID NO: 261428 - DNA, 15 bp, Homo sapiens
ctgcttctcggcacc

SEQ ID NO: 261429 - DNA, 15 bp, Homo sapiens
cctgcttctcggcac

SEQ ID NO: 261430 - DNA, 15 bp, Homo sapiens
ccctgcttctcggca

SEQ ID NO: 261431 - DNA, 15 bp, Homo sapiens
tccctgcttctcggc

SEQ ID NO: 261432 - DNA, 15 bp, Homo sapiens
ctccctgcttctcgg

SEQ ID NO: 261433 - DNA, 15 bp, Homo sapiens
cctccctgcttctcg

SEQ ID NO: 261434 - DNA, 15 bp, Homo sapiens
tcctccctgcttctc

SEQ ID NO: 261435 - DNA, 15 bp, Homo sapiens
ctcctccctgcttct

SEQ ID NO: 261436 - DNA, 15 bp, Homo sapiens
cctcctccctgcttc

SEQ ID NO: 261437 - DNA, 15 bp, Homo sapiens
ccctcctccctgctt

SEQ ID NO: 261438 - DNA, 15 bp, Homo sapiens
tccctcctccctgct

SEQ ID NO: 261439 - DNA, 15 bp, Homo sapiens
ctccctcctccctgc

SEQ ID NO: 261440 - DNA, 15 bp, Homo sapiens
gctccctcctccctg

SEQ ID NO: 261441 - DNA, 15 bp, Homo sapiens
tgctccctcctccct

SEQ ID NO: 261442 - DNA, 15 bp, Homo sapiens
atgctccctcctccc

SEQ ID NO: 261443 - DNA, 15 bp, Homo sapiens
gatgctccctcctcc

SEQ ID NO: 261444 - DNA, 15 bp, Homo sapiens
agatgctccctcctc

SEQ ID NO: 261445 - DNA, 15 bp, Homo sapiens
cagatgctccctcct

SEQ ID NO: 261446 - DNA, 15 bp, Homo sapiens
acagatgctccctcc

SEQ ID NO: 261447 - DNA, 15 bp, Homo sapiens
aacagatgctccctc

SEQ ID NO: 261448 - DNA, 15 bp, Homo sapiens
caacagatgctccct

SEQ ID NO: 261449 - DNA, 15 bp, Homo sapiens
gcaacagatgctccc

SEQ ID NO: 261450 - DNA, 15 bp, Homo sapiens
ggcaacagatgctcc

SEQ ID NO: 261451 - DNA, 15 bp, Homo sapiens
tggcaacagatgctc

SEQ ID NO: 261452 - DNA, 15 bp, Homo sapiens
atggcaacagatgct

SEQ ID NO: 261453 - DNA, 15 bp, Homo sapiens
catggcaacagatgc

SEQ ID NO: 261454 - DNA, 15 bp, Homo sapiens
ccatggcaacagatg

SEQ ID NO: 261455 - DNA, 15 bp, Homo sapiens
tccatggcaacagat

SEQ ID NO: 261456 - DNA, 15 bp, Homo sapiens
ttccatggcaacaga

SEQ ID NO: 261457 - DNA, 15 bp, Homo sapiens
tttccatggcaacag

SEQ ID NO: 261458 - DNA, 15 bp, Homo sapiens
gtttccatggcaaca

SEQ ID NO: 261459 - DNA, 15 bp, Homo sapiens
tgtttccatggcaac

SEQ ID NO: 261460 - DNA, 15 bp, Homo sapiens
ttgtttccatggcaa

SEQ ID NO: 261461 - DNA, 15 bp, Homo sapiens
cttgtttccatggca

SEQ ID NO: 261462 - DNA, 15 bp, Homo sapiens
gcttgtttccatggc

SEQ ID NO: 261463 - DNA, 15 bp, Homo sapiens
ggcttgtttccatgg

SEQ ID NO: 261464 - DNA, 15 bp, Homo sapiens
aggcttgtttccatg

SEQ ID NO: 261465 - DNA, 15 bp, Homo sapiens
taggcttgtttccat

SEQ ID NO: 261466 - DNA, 15 bp, Homo sapiens
ataggcttgtttcca

SEQ ID NO: 261467 - DNA, 15 bp, Homo sapiens
tataggcttgtttcc

SEQ ID NO: 261468 - DNA, 15 bp, Homo sapiens
ctataggcttgtttc

SEQ ID NO: 261469 - DNA, 15 bp, Homo sapiens
actataggcttgttt

SEQ ID NO: 261470 - DNA, 15 bp, Homo sapiens
tactataggcttgtt

SEQ ID NO: 261471 - DNA, 15 bp, Homo sapiens
atactataggcttgt

SEQ ID NO: 261472 - DNA, 15 bp, Homo sapiens
catactataggcttg

SEQ ID NO: 261473 - DNA, 15 bp, Homo sapiens
tcatactataggctt

SEQ ID NO: 261474 - DNA, 15 bp, Homo sapiens
ctcatactataggct

SEQ ID NO: 261475 - DNA, 15 bp, Homo sapiens
actcatactataggc

SEQ ID NO: 261476 - DNA, 15 bp, Homo sapiens
aactcatactatagg

SEQ ID NO: 261477 - DNA, 15 bp, Homo sapiens
gaactcatactatag

SEQ ID NO: 261478 - DNA, 15 bp, Homo sapiens
cgaactcatactata

SEQ ID NO: 261479 - DNA, 15 bp, Homo sapiens
gcgaactcatactat

SEQ ID NO: 261480 - DNA, 15 bp, Homo sapiens
agcgaactcatacta

SEQ ID NO: 261481 - DNA, 15 bp, Homo sapiens
gagcgaactcatact

SEQ ID NO: 261482 - DNA, 15 bp, Homo sapiens
agagcgaactcatac

SEQ ID NO: 261483 - DNA, 15 bp, Homo sapiens
gagagcgaactcata

SEQ ID NO: 261484 - DNA, 15 bp, Homo sapiens
ggagagcgaactcat

SEQ ID NO: 261485 - DNA, 15 bp, Homo sapiens
gggagagcgaactca

SEQ ID NO: 261486 - DNA, 15 bp, Homo sapiens
ggggagagcgaactc

SEQ ID NO: 261487 - DNA, 15 bp, Homo sapiens
tggggagagcgaact

SEQ ID NO: 261488 - DNA, 15 bp, Homo sapiens
ttggggagagcgaac

SEQ ID NO: 261489 - DNA, 15 bp, Homo sapiens
gttggggagagcgaa

SEQ ID NO: 261490 - DNA, 15 bp, Homo sapiens
agttggggagagcga

SEQ ID NO: 261491 - DNA, 15 bp, Homo sapiens
cagttggggagagcg

SEQ ID NO: 261492 - DNA, 15 bp, Homo sapiens
ccagttggggagagc

SEQ ID NO: 261493 - DNA, 15 bp, Homo sapiens
gccagttggggagag

SEQ ID NO: 261494 - DNA, 15 bp, Homo sapiens
agccagttggggaga

SEQ ID NO: 261495 - DNA, 15 bp, Homo sapiens
cagccagttggggag

SEQ ID NO: 261496 - DNA, 15 bp, Homo sapiens
acagccagttgggga

SEQ ID NO: 261497 - DNA, 15 bp, Homo sapiens
cacagccagttgggg

SEQ ID NO: 261498 - DNA, 15 bp, Homo sapiens
ccacagccagttggg

SEQ ID NO: 261499 - DNA, 15 bp, Homo sapiens
accacagccagttgg

SEQ ID NO: 261500 - DNA, 15 bp, Homo sapiens
aaccacagccagttg

SEQ ID NO: 261501 - DNA, 15 bp, Homo sapiens
aaaccacagccagtt

SEQ ID NO: 261502 - DNA, 15 bp, Homo sapiens
gaaaccacagccagt

SEQ ID NO: 261503 - DNA, 15 bp, Homo sapiens
agaaaccacagccag

SEQ ID NO: 261504 - DNA, 15 bp, Homo sapiens
gagaaaccacagcca

SEQ ID NO: 261505 - DNA, 15 bp, Homo sapiens
agagaaaccacagcc

SEQ ID NO: 261506 - DNA, 15 bp, Homo sapiens
cagagaaaccacagc

SEQ ID NO: 261507 - DNA, 15 bp, Homo sapiens
tcagagaaaccacag

SEQ ID NO: 261508 - DNA, 15 bp, Homo sapiens
gtcagagaaaccaca

SEQ ID NO: 261509 - DNA, 15 bp, Homo sapiens
tgtcagagaaaccac

SEQ ID NO: 261510 - DNA, 15 bp, Homo sapiens
ctgtcagagaaacca

SEQ ID NO: 261511 - DNA, 15 bp, Homo sapiens
cctgtcagagaaacc

SEQ ID NO: 261512 - DNA, 15 bp, Homo sapiens
ccctgtcagagaaac

SEQ ID NO: 261513 - DNA, 15 bp, Homo sapiens
cccctgtcagagaaa

SEQ ID NO: 261514 - DNA, 15 bp, Homo sapiens
gcccctgtcagagaa

SEQ ID NO: 261515 - DNA, 15 bp, Homo sapiens
agcccctgtcagaga

SEQ ID NO: 261516 - DNA, 15 bp, Homo sapiens
cagcccctgtcagag

SEQ ID NO: 261517 - DNA, 15 bp, Homo sapiens
gcagcccctgtcaga

SEQ ID NO: 261518 - DNA, 15 bp, Homo sapiens
agcagcccctgtcag

SEQ ID NO: 261519 - DNA, 15 bp, Homo sapiens
tagcagcccctgtca

SEQ ID NO: 261520 - DNA, 15 bp, Homo sapiens
gtagcagcccctgtc

SEQ ID NO: 261521 - DNA, 15 bp, Homo sapiens
agtagcagcccctgt

SEQ ID NO: 261522 - DNA, 15 bp, Homo sapiens
cagtagcagcccctg

SEQ ID NO: 261523 - DNA, 15 bp, Homo sapiens
ccagtagcagcccct

SEQ ID NO: 261524 - DNA, 15 bp, Homo sapiens
accagtagcagcccc

SEQ ID NO: 261525 - DNA, 15 bp, Homo sapiens
gaccagtagcagccc

SEQ ID NO: 261526 - DNA, 15 bp, Homo sapiens
ggaccagtagcagcc

SEQ ID NO: 261527 - DNA, 15 bp, Homo sapiens
aggaccagtagcagc

SEQ ID NO: 261528 - DNA, 15 bp, Homo sapiens
caggaccagtagcag

SEQ ID NO: 261529 - DNA, 15 bp, Homo sapiens
gcaggaccagtagca

SEQ ID NO: 261530 - DNA, 15 bp, Homo sapiens
agcaggaccagtagc

SEQ ID NO: 261531 - DNA, 15 bp, Homo sapiens
cagcaggaccagtag

SEQ ID NO: 261532 - DNA, 15 bp, Homo sapiens
acagcaggaccagta

SEQ ID NO: 261533 - DNA, 15 bp, Homo sapiens
aacagcaggaccagt

SEQ ID NO: 261534 - DNA, 15 bp, Homo sapiens
caacagcaggaccag

SEQ ID NO: 261535 - DNA, 15 bp, Homo sapiens
ccaacagcaggacca

SEQ ID NO: 261536 - DNA, 15 bp, Homo sapiens
cccaacagcaggacc

SEQ ID NO: 261537 - DNA, 15 bp, Homo sapiens
gcccaacagcaggac

SEQ ID NO: 261538 - DNA, 15 bp, Homo sapiens
ggcccaacagcagga

SEQ ID NO: 261539 - DNA, 15 bp, Homo sapiens
gggcccaacagcagg

SEQ ID NO: 261540 - DNA, 15 bp, Homo sapiens
agggcccaacagcag

SEQ ID NO: 261541 - DNA, 15 bp, Homo sapiens
tagggcccaacagca

SEQ ID NO: 261542 - DNA, 15 bp, Homo sapiens
ttagggcccaacagc

SEQ ID NO: 261543 - DNA, 15 bp, Homo sapiens
attagggcccaacag

SEQ ID NO: 261544 - DNA, 15 bp, Homo sapiens
cattagggcccaaca

SEQ ID NO: 261545 - DNA, 15 bp, Homo sapiens
ccattagggcccaac

SEQ ID NO: 261546 - DNA, 15 bp, Homo sapiens
cccattagggcccaa

SEQ ID NO: 261547 - DNA, 15 bp, Homo sapiens
ccccattagggccca

SEQ ID NO: 261548 - DNA, 15 bp, Homo sapiens
tccccattagggccc

SEQ ID NO: 261549 - DNA, 15 bp, Homo sapiens
gtccccattagggcc

SEQ ID NO: 261550 - DNA, 15 bp, Homo sapiens
agtccccattagggc

SEQ ID NO: 261551 - DNA, 15 bp, Homo sapiens
gagtccccattaggg

SEQ ID NO: 261552 - DNA, 15 bp, Homo sapiens
tgagtccccattagg

SEQ ID NO: 261553 - DNA, 15 bp, Homo sapiens
ctgagtccccattag

SEQ ID NO: 261554 - DNA, 15 bp, Homo sapiens
cctgagtccccatta

SEQ ID NO: 261555 - DNA, 15 bp, Homo sapiens
ccctgagtccccatt

SEQ ID NO: 261556 - DNA, 15 bp, Homo sapiens
tccctgagtccccat

SEQ ID NO: 261557 - DNA, 15 bp, Homo sapiens
gtccctgagtcccca

SEQ ID NO: 261558 - DNA, 15 bp, Homo sapiens
ggtccctgagtcccc

SEQ ID NO: 261559 - DNA, 15 bp, Homo sapiens
tggtccctgagtccc

SEQ ID NO: 261560 - DNA, 15 bp, Homo sapiens
gtggtccctgagtcc

SEQ ID NO: 261561 - DNA, 15 bp, Homo sapiens
ggtggtccctgagtc

SEQ ID NO: 261562 - DNA, 15 bp, Homo sapiens
tggtggtccctgagt

SEQ ID NO: 261563 - DNA, 15 bp, Homo sapiens
gtggtggtccctgag

SEQ ID NO: 261564 - DNA, 15 bp, Homo sapiens
agtggtggtccctga

SEQ ID NO: 261565 - DNA, 15 bp, Homo sapiens
cagtggtggtccctg

SEQ ID NO: 261566 - DNA, 15 bp, Homo sapiens
acagtggtggtccct

SEQ ID NO: 261567 - DNA, 15 bp, Homo sapiens
tacagtggtggtccc

SEQ ID NO: 261568 - DNA, 15 bp, Homo sapiens
atacagtggtggtcc

SEQ ID NO: 261569 - DNA, 15 bp, Homo sapiens
aatacagtggtggtc

SEQ ID NO: 261570 - DNA, 15 bp, Homo sapiens
aaatacagtggtggt

SEQ ID NO: 261571 - DNA, 15 bp, Homo sapiens
caaatacagtggtgg

SEQ ID NO: 261572 - DNA, 15 bp, Homo sapiens
gcaaatacagtggtg

SEQ ID NO: 261573 - DNA, 15 bp, Homo sapiens
ggcaaatacagtggt

SEQ ID NO: 261574 - DNA, 15 bp, Homo sapiens
tggcaaatacagtgg

SEQ ID NO: 261575 - DNA, 15 bp, Homo sapiens
ctggcaaatacagtg

SEQ ID NO: 261576 - DNA, 15 bp, Homo sapiens
cctggcaaatacagt

SEQ ID NO: 261577 - DNA, 15 bp, Homo sapiens
ccctggcaaatacag

SEQ ID NO: 261578 - DNA, 15 bp, Homo sapiens
cccctggcaaataca

SEQ ID NO: 261579 - DNA, 15 bp, Homo sapiens
tcccctggcaaatac

SEQ ID NO: 261580 - DNA, 15 bp, Homo sapiens
ctcccctggcaaata

SEQ ID NO: 261581 - DNA, 15 bp, Homo sapiens
tctcccctggcaaat

SEQ ID NO: 261582 - DNA, 15 bp, Homo sapiens
ttctcccctggcaaa

SEQ ID NO: 261583 - DNA, 15 bp, Homo sapiens
tttctcccctggcaa

SEQ ID NO: 261584 - DNA, 15 bp, Homo sapiens
ctttctcccctggca

SEQ ID NO: 261585 - DNA, 15 bp, Homo sapiens
gctttctcccctggc

SEQ ID NO: 261586 - DNA, 15 bp, Homo sapiens
agctttctcccctgg

SEQ ID NO: 261587 - DNA, 15 bp, Homo sapiens
cagctttctcccctg

SEQ ID NO: 261588 - DNA, 15 bp, Homo sapiens
ccagctttctcccct

SEQ ID NO: 261589 - DNA, 15 bp, Homo sapiens
tccagctttctcccc

SEQ ID NO: 261590 - DNA, 15 bp, Homo sapiens
ctccagctttctccc

SEQ ID NO: 261591 - DNA, 15 bp, Homo sapiens
cctccagctttctcc

SEQ ID NO: 261592 - DNA, 15 bp, Homo sapiens
tcctccagctttctc

SEQ ID NO: 261593 - DNA, 15 bp, Homo sapiens
ctcctccagctttct

SEQ ID NO: 261594 - DNA, 15 bp, Homo sapiens
gctcctccagctttc

SEQ ID NO: 261595 - DNA, 15 bp, Homo sapiens
tgctcctccagcttt

SEQ ID NO: 261596 - DNA, 15 bp, Homo sapiens
ctgctcctccagctt

SEQ ID NO: 261597 - DNA, 15 bp, Homo sapiens
gctgctcctccagct

SEQ ID NO: 261598 - DNA, 15 bp, Homo sapiens
tgctgctcctccagc

SEQ ID NO: 261599 - DNA, 15 bp, Homo sapiens
ctgctgctcctccag

SEQ ID NO: 261600 - DNA, 15 bp, Homo sapiens
tctgctgctcctcca

SEQ ID NO: 261601 - DNA, 15 bp, Homo sapiens
gtctgctgctcctcc

SEQ ID NO: 261602 - DNA, 15 bp, Homo sapiens
tgtctgctgctcctc

SEQ ID NO: 261603 - DNA, 15 bp, Homo sapiens
atgtctgctgctcct

SEQ ID NO: 261604 - DNA, 15 bp, Homo sapiens
gatgtctgctgctcc

SEQ ID NO: 261605 - DNA, 15 bp, Homo sapiens
ggatgtctgctgctc

SEQ ID NO: 261606 - DNA, 15 bp, Homo sapiens
gggatgtctgctgct

SEQ ID NO: 261607 - DNA, 15 bp, Homo sapiens
ggggatgtctgctgc

SEQ ID NO: 261608 - DNA, 15 bp, Homo sapiens
aggggatgtctgctg

SEQ ID NO: 261609 - DNA, 15 bp, Homo sapiens
taggggatgtctgct

SEQ ID NO: 261610 - DNA, 15 bp, Homo sapiens
ttaggggatgtctgc

SEQ ID NO: 261611 - DNA, 15 bp, Homo sapiens
gttaggggatgtctg

SEQ ID NO: 261612 - DNA, 15 bp, Homo sapiens
tgttaggggatgtct

SEQ ID NO: 261613 - DNA, 15 bp, Homo sapiens
atgttaggggatgtc

SEQ ID NO: 261614 - DNA, 15 bp, Homo sapiens
catgttaggggatgt

SEQ ID NO: 261615 - DNA, 15 bp, Homo sapiens
tcatgttaggggatg

SEQ ID NO: 261616 - DNA, 15 bp, Homo sapiens
ctcatgttaggggat

SEQ ID NO: 261617 - DNA, 15 bp, Homo sapiens
actcatgttagggga

SEQ ID NO: 261618 - DNA, 15 bp, Homo sapiens
aactcatgttagggg

SEQ ID NO: 261619 - DNA, 15 bp, Homo sapiens
caactcatgttaggg

SEQ ID NO: 261620 - DNA, 15 bp, Homo sapiens
acaactcatgttagg

SEQ ID NO: 261621 - DNA, 15 bp, Homo sapiens
cacaactcatgttag

SEQ ID NO: 261622 - DNA, 15 bp, Homo sapiens
gcacaactcatgtta

SEQ ID NO: 261623 - DNA, 15 bp, Homo sapiens
tgcacaactcatgtt

SEQ ID NO: 261624 - DNA, 15 bp, Homo sapiens
ctgcacaactcatgt

SEQ ID NO: 261625 - DNA, 15 bp, Homo sapiens
cctgcacaactcatg

SEQ ID NO: 261626 - DNA, 15 bp, Homo sapiens
gcctgcacaactcat

SEQ ID NO: 261627 - DNA, 15 bp, Homo sapiens
agcctgcacaactca

SEQ ID NO: 261628 - DNA, 15 bp, Homo sapiens
aagcctgcacaactc

SEQ ID NO: 261629 - DNA, 15 bp, Homo sapiens
caagcctgcacaact

SEQ ID NO: 261630 - DNA, 15 bp, Homo sapiens
ccaagcctgcacaac

SEQ ID NO: 261631 - DNA, 15 bp, Homo sapiens
accaagcctgcacaa

SEQ ID NO: 261632 - DNA, 15 bp, Homo sapiens
taccaagcctgcaca

SEQ ID NO: 261633 - DNA, 15 bp, Homo sapiens
ttaccaagcctgcac

SEQ ID NO: 261634 - DNA, 15 bp, Homo sapiens
attaccaagcctgca

SEQ ID NO: 261635 - DNA, 15 bp, Homo sapiens
cattaccaagcctgc

SEQ ID NO: 261636 - DNA, 15 bp, Homo sapiens
acattaccaagcctg

SEQ ID NO: 261637 - DNA, 15 bp, Homo sapiens
cacattaccaagcct

SEQ ID NO: 261638 - DNA, 15 bp, Homo sapiens
ccacattaccaagcc

SEQ ID NO: 261639 - DNA, 15 bp, Homo sapiens
tccacattaccaagc

SEQ ID NO: 261640 - DNA, 15 bp, Homo sapiens
ctccacattaccaag

SEQ ID NO: 261641 - DNA, 15 bp, Homo sapiens
actccacattaccaa

SEQ ID NO: 261642 - DNA, 15 bp, Homo sapiens
cactccacattacca

SEQ ID NO: 261643 - DNA, 15 bp, Homo sapiens
ccactccacattacc

SEQ ID NO: 261644 - DNA, 15 bp, Homo sapiens
cccactccacattac

SEQ ID NO: 261645 - DNA, 15 bp, Homo sapiens
gcccactccacatta

SEQ ID NO: 261646 - DNA, 15 bp, Homo sapiens
tgcccactccacatt

SEQ ID NO: 261647 - DNA, 15 bp, Homo sapiens
atgcccactccacat

SEQ ID NO: 261648 - DNA, 15 bp, Homo sapiens
catgcccactccaca

SEQ ID NO: 261649 - DNA, 15 bp, Homo sapiens
gcatgcccactccac

SEQ ID NO: 261650 - DNA, 15 bp, Homo sapiens
tgcatgcccactcca

SEQ ID NO: 261651 - DNA, 15 bp, Homo sapiens
atgcatgcccactcc

SEQ ID NO: 261652 - DNA, 15 bp, Homo sapiens
aatgcatgcccactc

SEQ ID NO: 261653 - DNA, 15 bp, Homo sapiens
caatgcatgcccact

SEQ ID NO: 261654 - DNA, 15 bp, Homo sapiens
acaatgcatgcccac

SEQ ID NO: 261655 - DNA, 15 bp, Homo sapiens
cacaatgcatgccca

SEQ ID NO: 261656 - DNA, 15 bp, Homo sapiens
ccacaatgcatgccc

SEQ ID NO: 261657 - DNA, 15 bp, Homo sapiens
accacaatgcatgcc

SEQ ID NO: 261658 - DNA, 15 bp, Homo sapiens
caccacaatgcatgc

SEQ ID NO: 261659 - DNA, 15 bp, Homo sapiens
tcaccacaatgcatg

SEQ ID NO: 261660 - DNA, 15 bp, Homo sapiens
atcaccacaatgcat

SEQ ID NO: 261661 - DNA, 15 bp, Homo sapiens
aatcaccacaatgca

SEQ ID NO: 261662 - DNA, 15 bp, Homo sapiens
gaatcaccacaatgc

SEQ ID NO: 261663 - DNA, 15 bp, Homo sapiens
agaatcaccacaatg

SEQ ID NO: 261664 - DNA, 15 bp, Homo sapiens
aagaatcaccacaat

SEQ ID NO: 261665 - DNA, 15 bp, Homo sapiens
gaagaatcaccacaa

SEQ ID NO: 261666 - DNA, 15 bp, Homo sapiens
agaagaatcaccaca

SEQ ID NO: 261667 - DNA, 15 bp, Homo sapiens
aagaagaatcaccac

SEQ ID NO: 261668 - DNA, 15 bp, Homo sapiens
caagaagaatcacca

SEQ ID NO: 261669 - DNA, 15 bp, Homo sapiens
gcaagaagaatcacc

SEQ ID NO: 261670 - DNA, 15 bp, Homo sapiens
agcaagaagaatcac

SEQ ID NO: 261671 - DNA, 15 bp, Homo sapiens
aagcaagaagaatca

SEQ ID NO: 261672 - DNA, 15 bp, Homo sapiens
aaagcaagaagaatc

SEQ ID NO: 261673 - DNA, 15 bp, Homo sapiens
aaaagcaagaagaat

SEQ ID NO: 261674 - DNA, 15 bp, Homo sapiens
aaaaagcaagaagaa

SEQ ID NO: 261675 - DNA, 15 bp, Homo sapiens
aaaaaagcaagaaga

SEQ ID NO: 261676 - DNA, 15 bp, Homo sapiens
taaaaaagcaagaag

SEQ ID NO: 261677 - DNA, 15 bp, Homo sapiens
ttaaaaaagcaagaa

SEQ ID NO: 261678 - DNA, 15 bp, Homo sapiens
tttaaaaaagcaaga

SEQ ID NO: 261679 - DNA, 15 bp, Homo sapiens
gtttaaaaaagcaag

SEQ ID NO: 261680 - DNA, 15 bp, Homo sapiens
ggtttaaaaaagcaa

SEQ ID NO: 261681 - DNA, 15 bp, Homo sapiens
tggtttaaaaaagca

SEQ ID NO: 261682 - DNA, 15 bp, Homo sapiens
ttggtttaaaaaagc

SEQ ID NO: 261683 - DNA, 15 bp, Homo sapiens
attggtttaaaaaag

SEQ ID NO: 261684 - DNA, 15 bp, Homo sapiens
aattggtttaaaaaa

SEQ ID NO: 261685 - DNA, 15 bp, Homo sapiens
aaattggtttaaaaa

SEQ ID NO: 261686 - DNA, 15 bp, Homo sapiens
gaaattggtttaaaa

SEQ ID NO: 261687 - DNA, 15 bp, Homo sapiens
agaaattggtttaaa

SEQ ID NO: 261688 - DNA, 15 bp, Homo sapiens
gagaaattggtttaa

SEQ ID NO: 261689 - DNA, 15 bp, Homo sapiens
ggagaaattggttta

SEQ ID NO: 261690 - DNA, 15 bp, Homo sapiens
aggagaaattggttt

SEQ ID NO: 261691 - DNA, 15 bp, Homo sapiens
gaggagaaattggtt

SEQ ID NO: 261692 - DNA, 15 bp, Homo sapiens
agaggagaaattggt

SEQ ID NO: 261693 - DNA, 15 bp, Homo sapiens
cagaggagaaattgg

SEQ ID NO: 261694 - DNA, 15 bp, Homo sapiens
gcagaggagaaattg

SEQ ID NO: 261695 - DNA, 15 bp, Homo sapiens
agcagaggagaaatt

SEQ ID NO: 261696 - DNA, 15 bp, Homo sapiens
cagcagaggagaaat

SEQ ID NO: 261697 - DNA, 15 bp, Homo sapiens
ccagcagaggagaaa

SEQ ID NO: 261698 - DNA, 15 bp, Homo sapiens
tccagcagaggagaa

SEQ ID NO: 261699 - DNA, 15 bp, Homo sapiens
ctccagcagaggaga

SEQ ID NO: 261700 - DNA, 15 bp, Homo sapiens
tctccagcagaggag

SEQ ID NO: 261701 - DNA, 15 bp, Homo sapiens
gtctccagcagagga

SEQ ID NO: 261702 - DNA, 15 bp, Homo sapiens
agtctccagcagagg

SEQ ID NO: 261703 - DNA, 15 bp, Homo sapiens
gagtctccagcagag

SEQ ID NO: 261704 - DNA, 15 bp, Homo sapiens
agagtctccagcaga

SEQ ID NO: 261705 - DNA, 15 bp, Homo sapiens
aagagtctccagcag

SEQ ID NO: 261706 - DNA, 15 bp, Homo sapiens
gaagagtctccagca

SEQ ID NO: 261707 - DNA, 15 bp, Homo sapiens
tgaagagtctccagc

SEQ ID NO: 261708 - DNA, 15 bp, Homo sapiens
gtgaagagtctccag

SEQ ID NO: 261709 - DNA, 15 bp, Homo sapiens
tgtgaagagtctcca

SEQ ID NO: 261710 - DNA, 15 bp, Homo sapiens
ctgtgaagagtctcc

SEQ ID NO: 261711 - DNA, 15 bp, Homo sapiens
tctgtgaagagtctc

SEQ ID NO: 261712 - DNA, 15 bp, Homo sapiens
ttctgtgaagagtct

SEQ ID NO: 261713 - DNA, 15 bp, Homo sapiens
attctgtgaagagtc

SEQ ID NO: 261714 - DNA, 15 bp, Homo sapiens
aattctgtgaagagt

SEQ ID NO: 261715 - DNA, 15 bp, Homo sapiens
aaattctgtgaagag

SEQ ID NO: 261716 - DNA, 15 bp, Homo sapiens
taaattctgtgaaga

SEQ ID NO: 261717 - DNA, 15 bp, Homo sapiens
ttaaattctgtgaag

SEQ ID NO: 261718 - DNA, 15 bp, Homo sapiens
cttaaattctgtgaa

SEQ ID NO: 261719 - DNA, 15 bp, Homo sapiens
tcttaaattctgtga

SEQ ID NO: 261720 - DNA, 15 bp, Homo sapiens
ctcttaaattctgtg

SEQ ID NO: 261721 - DNA, 15 bp, Homo sapiens
actcttaaattctgt

SEQ ID NO: 261722 - DNA, 15 bp, Homo sapiens
gactcttaaattctg

SEQ ID NO: 261723 - DNA, 15 bp, Homo sapiens
agactcttaaattct

SEQ ID NO: 261724 - DNA, 15 bp, Homo sapiens
aagactcttaaattc

SEQ ID NO: 261725 - DNA, 15 bp, Homo sapiens
aaagactcttaaatt

SEQ ID NO: 261726 - DNA, 15 bp, Homo sapiens
gaaagactcttaaat

SEQ ID NO: 261727 - DNA, 15 bp, Homo sapiens
agaaagactcttaaa

SEQ ID NO: 261728 - DNA, 15 bp, Homo sapiens
gagaaagactcttaa

SEQ ID NO: 261729 - DNA, 15 bp, Homo sapiens
tgagaaagactctta

SEQ ID NO: 261730 - DNA, 15 bp, Homo sapiens
ctgagaaagactctt

SEQ ID NO: 261731 - DNA, 15 bp, Homo sapiens
tctgagaaagactct

SEQ ID NO: 261732 - DNA, 15 bp, Homo sapiens
ttctgagaaagactc

SEQ ID NO: 261733 - DNA, 15 bp, Homo sapiens
cttctgagaaagact

SEQ ID NO: 261734 - DNA, 15 bp, Homo sapiens
ccttctgagaaagac

SEQ ID NO: 261735 - DNA, 15 bp, Homo sapiens
accttctgagaaaga

SEQ ID NO: 261736 - DNA, 15 bp, Homo sapiens
caccttctgagaaag

SEQ ID NO: 261737 - DNA, 15 bp, Homo sapiens
tcaccttctgagaaa

SEQ ID NO: 261738 - DNA, 15 bp, Homo sapiens
atcaccttctgagaa

SEQ ID NO: 261739 - DNA, 15 bp, Homo sapiens
gatcaccttctgaga

SEQ ID NO: 261740 - DNA, 15 bp, Homo sapiens
tgatcaccttctgag

SEQ ID NO: 261741 - DNA, 15 bp, Homo sapiens
ctgatcaccttctga

SEQ ID NO: 261742 - DNA, 15 bp, Homo sapiens
gctgatcaccttctg

SEQ ID NO: 261743 - DNA, 15 bp, Homo sapiens
ggctgatcaccttct

SEQ ID NO: 261744 - DNA, 15 bp, Homo sapiens
aggctgatcaccttc

SEQ ID NO: 261745 - DNA, 15 bp, Homo sapiens
aaggctgatcacctt

SEQ ID NO: 261746 - DNA, 15 bp, Homo sapiens
caaggctgatcacct

SEQ ID NO: 261747 - DNA, 15 bp, Homo sapiens
ccaaggctgatcacc

SEQ ID NO: 261748 - DNA, 15 bp, Homo sapiens
tccaaggctgatcac

SEQ ID NO: 261749 - DNA, 15 bp, Homo sapiens
gtccaaggctgatca

SEQ ID NO: 261750 - DNA, 15 bp, Homo sapiens
tgtccaaggctgatc

SEQ ID NO: 261751 - DNA, 15 bp, Homo sapiens
ctgtccaaggctgat

SEQ ID NO: 261752 - DNA, 15 bp, Homo sapiens
tctgtccaaggctga

SEQ ID NO: 261753 - DNA, 15 bp, Homo sapiens
gtctgtccaaggctg

SEQ ID NO: 261754 - DNA, 15 bp, Homo sapiens
agtctgtccaaggct

SEQ ID NO: 261755 - DNA, 15 bp, Homo sapiens
aagtctgtccaaggc

SEQ ID NO: 261756 - DNA, 15 bp, Homo sapiens
aaagtctgtccaagg

SEQ ID NO: 261757 - DNA, 15 bp, Homo sapiens
caaagtctgtccaag

SEQ ID NO: 261758 - DNA, 15 bp, Homo sapiens
ccaaagtctgtccaa

SEQ ID NO: 261759 - DNA, 15 bp, Homo sapiens
accaaagtctgtcca

SEQ ID NO: 261760 - DNA, 15 bp, Homo sapiens
gaccaaagtctgtcc

SEQ ID NO: 261761 - DNA, 15 bp, Homo sapiens
agaccaaagtctgtc

SEQ ID NO: 261762 - DNA, 15 bp, Homo sapiens
aagaccaaagtctgt

SEQ ID NO: 261763 - DNA, 15 bp, Homo sapiens
gaagaccaaagtctg

SEQ ID NO: 261764 - DNA, 15 bp, Homo sapiens
tgaagaccaaagtct

SEQ ID NO: 261765 - DNA, 15 bp, Homo sapiens
ctgaagaccaaagtc

SEQ ID NO: 261766 - DNA, 15 bp, Homo sapiens
tctgaagaccaaagt

SEQ ID NO: 261767 - DNA, 15 bp, Homo sapiens
gtctgaagaccaaag

SEQ ID NO: 261768 - DNA, 15 bp, Homo sapiens
ggtctgaagaccaaa

SEQ ID NO: 261769 - DNA, 15 bp, Homo sapiens
gggtctgaagaccaa

SEQ ID NO: 261770 - DNA, 15 bp, Homo sapiens
ggggtctgaagacca

SEQ ID NO: 261771 - DNA, 15 bp, Homo sapiens
tggggtctgaagacc

SEQ ID NO: 261772 - DNA, 15 bp, Homo sapiens
ctggggtctgaagac

SEQ ID NO: 261773 - DNA, 15 bp, Homo sapiens
tctggggtctgaaga

SEQ ID NO: 261774 - DNA, 15 bp, Homo sapiens
ctctggggtctgaag

SEQ ID NO: 261775 - DNA, 15 bp, Homo sapiens
gctctggggtctgaa

SEQ ID NO: 261776 - DNA, 15 bp, Homo sapiens
ggctctggggtctga

SEQ ID NO: 261777 - DNA, 15 bp, Homo sapiens
tggctctggggtctg

SEQ ID NO: 261778 - DNA, 15 bp, Homo sapiens
ttggctctggggtct

SEQ ID NO: 261779 - DNA, 15 bp, Homo sapiens
tttggctctggggtc

SEQ ID NO: 261780 - DNA, 15 bp, Homo sapiens
gtttggctctggggt

SEQ ID NO: 261781 - DNA, 15 bp, Homo sapiens
agtttggctctgggg

SEQ ID NO: 261782 - DNA, 15 bp, Homo sapiens
aagtttggctctggg

SEQ ID NO: 261783 - DNA, 15 bp, Homo sapiens
aaagtttggctctgg

SEQ ID NO: 261784 - DNA, 15 bp, Homo sapiens
aaaagtttggctctg

SEQ ID NO: 261785 - DNA, 15 bp, Homo sapiens
caaaagtttggctct

SEQ ID NO: 261786 - DNA, 15 bp, Homo sapiens
tcaaaagtttggctc

SEQ ID NO: 261787 - DNA, 15 bp, Homo sapiens
ttcaaaagtttggct

SEQ ID NO: 261788 - DNA, 15 bp, Homo sapiens
gttcaaaagtttggc

SEQ ID NO: 261789 - DNA, 15 bp, Homo sapiens
agttcaaaagtttgg

SEQ ID NO: 261790 - DNA, 15 bp, Homo sapiens
cagttcaaaagtttg

SEQ ID NO: 261791 - DNA, 15 bp, Homo sapiens
tcagttcaaaagttt

SEQ ID NO: 261792 - DNA, 15 bp, Homo sapiens
gtcagttcaaaagtt

SEQ ID NO: 261793 - DNA, 15 bp, Homo sapiens
tgtcagttcaaaagt

SEQ ID NO: 261794 - DNA, 15 bp, Homo sapiens
ctgtcagttcaaaag

SEQ ID NO: 261795 - DNA, 15 bp, Homo sapiens
gctgtcagttcaaaa

SEQ ID NO: 261796 - DNA, 15 bp, Homo sapiens
tgctgtcagttcaaa

SEQ ID NO: 261797 - DNA, 15 bp, Homo sapiens
ctgctgtcagttcaa

SEQ ID NO: 261798 - DNA, 15 bp, Homo sapiens
gctgctgtcagttca

SEQ ID NO: 261799 - DNA, 15 bp, Homo sapiens
agctgctgtcagttc

SEQ ID NO: 261800 - DNA, 15 bp, Homo sapiens
cagctgctgtcagtt

SEQ ID NO: 261801 - DNA, 15 bp, Homo sapiens
acagctgctgtcagt

SEQ ID NO: 261802 - DNA, 15 bp, Homo sapiens
cacagctgctgtcag

SEQ ID NO: 261803 - DNA, 15 bp, Homo sapiens
ccacagctgctgtca

SEQ ID NO: 261804 - DNA, 15 bp, Homo sapiens
gccacagctgctgtc

SEQ ID NO: 261805 - DNA, 15 bp, Homo sapiens
ggccacagctgctgt

SEQ ID NO: 261806 - DNA, 15 bp, Homo sapiens
tggccacagctgctg

SEQ ID NO: 261807 - DNA, 15 bp, Homo sapiens
ttggccacagctgct

SEQ ID NO: 261808 - DNA, 15 bp, Homo sapiens
tttggccacagctgc

SEQ ID NO: 261809 - DNA, 15 bp, Homo sapiens
ttttggccacagctg

SEQ ID NO: 261810 - DNA, 15 bp, Homo sapiens
tttttggccacagct

SEQ ID NO: 261811 - DNA, 15 bp, Homo sapiens
atttttggccacagc

SEQ ID NO: 261812 - DNA, 15 bp, Homo sapiens
catttttggccacag

SEQ ID NO: 261813 - DNA, 15 bp, Homo sapiens
ccatttttggccaca

SEQ ID NO: 261814 - DNA, 15 bp, Homo sapiens
accatttttggccac

SEQ ID NO: 261815 - DNA, 15 bp, Homo sapiens
caccatttttggcca

SEQ ID NO: 261816 - DNA, 15 bp, Homo sapiens
acaccatttttggcc

SEQ ID NO: 261817 - DNA, 15 bp, Homo sapiens
aacaccatttttggc

SEQ ID NO: 261818 - DNA, 15 bp, Homo sapiens
aaacaccatttttgg

SEQ ID NO: 261819 - DNA, 15 bp, Homo sapiens
caaacaccatttttg

SEQ ID NO: 261820 - DNA, 15 bp, Homo sapiens
acaaacaccattttt

SEQ ID NO: 261821 - DNA, 15 bp, Homo sapiens
gacaaacaccatttt

SEQ ID NO: 261822 - DNA, 15 bp, Homo sapiens
tgacaaacaccattt

SEQ ID NO: 261823 - DNA, 15 bp, Homo sapiens
ctgacaaacaccatt

SEQ ID NO: 261824 - DNA, 15 bp, Homo sapiens
tctgacaaacaccat

SEQ ID NO: 261825 - DNA, 15 bp, Homo sapiens
gtctgacaaacacca

SEQ ID NO: 261826 - DNA, 15 bp, Homo sapiens
ggtctgacaaacacc

SEQ ID NO: 261827 - DNA, 15 bp, Homo sapiens
aggtctgacaaacac

SEQ ID NO: 261828 - DNA, 15 bp, Homo sapiens
caggtctgacaaaca

SEQ ID NO: 261829 - DNA, 15 bp, Homo sapiens
gcaggtctgacaaac

SEQ ID NO: 261830 - DNA, 15 bp, Homo sapiens
tgcaggtctgacaaa

SEQ ID NO: 261831 - DNA, 15 bp, Homo sapiens
ctgcaggtctgacaa

SEQ ID NO: 261832 - DNA, 15 bp, Homo sapiens
cctgcaggtctgaca

SEQ ID NO: 261833 - DNA, 15 bp, Homo sapiens
tcctgcaggtctgac

SEQ ID NO: 261834 - DNA, 15 bp, Homo sapiens
ttcctgcaggtctga

SEQ ID NO: 261835 - DNA, 15 bp, Homo sapiens
cttcctgcaggtctg

SEQ ID NO: 261836 - DNA, 15 bp, Homo sapiens
tcttcctgcaggtct

SEQ ID NO: 261837 - DNA, 15 bp, Homo sapiens
ttcttcctgcaggtc

SEQ ID NO: 261838 - DNA, 15 bp, Homo sapiens
tttcttcctgcaggt

SEQ ID NO: 261839 - DNA, 15 bp, Homo sapiens
ttttcttcctgcagg

SEQ ID NO: 261840 - DNA, 15 bp, Homo sapiens
attttcttcctgcag

SEQ ID NO: 261841 - DNA, 15 bp, Homo sapiens
gattttcttcctgca

SEQ ID NO: 261842 - DNA, 15 bp, Homo sapiens
agattttcttcctgc

SEQ ID NO: 261843 - DNA, 15 bp, Homo sapiens
cagattttcttcctg

SEQ ID NO: 261844 - DNA, 15 bp, Homo sapiens
gcagattttcttcct

SEQ ID NO: 261845 - DNA, 15 bp, Homo sapiens
tgcagattttcttcc

SEQ ID NO: 261846 - DNA, 15 bp, Homo sapiens
ttgcagattttcttc

SEQ ID NO: 261847 - DNA, 15 bp, Homo sapiens
attgcagattttctt

SEQ ID NO: 261848 - DNA, 15 bp, Homo sapiens
cattgcagattttct

SEQ ID NO: 261849 - DNA, 15 bp, Homo sapiens
tcattgcagattttc

SEQ ID NO: 261850 - DNA, 15 bp, Homo sapiens
ttcattgcagatttt

SEQ ID NO: 261851 - DNA, 15 bp, Homo sapiens
cttcattgcagattt

SEQ ID NO: 261852 - DNA, 15 bp, Homo sapiens
tcttcattgcagatt

SEQ ID NO: 261853 - DNA, 15 bp, Homo sapiens
ctcttcattgcagat

SEQ ID NO: 261854 - DNA, 15 bp, Homo sapiens
actcttcattgcaga

SEQ ID NO: 261855 - DNA, 15 bp, Homo sapiens
aactcttcattgcag

SEQ ID NO: 261856 - DNA, 15 bp, Homo sapiens
caactcttcattgca

SEQ ID NO: 261857 - DNA, 15 bp, Homo sapiens
ccaactcttcattgc

SEQ ID NO: 261858 - DNA, 15 bp, Homo sapiens
tccaactcttcattg

SEQ ID NO: 261859 - DNA, 15 bp, Homo sapiens
ctccaactcttcatt

SEQ ID NO: 261860 - DNA, 15 bp, Homo sapiens
actccaactcttcat

SEQ ID NO: 261861 - DNA, 15 bp, Homo sapiens
cactccaactcttca

SEQ ID NO: 261862 - DNA, 15 bp, Homo sapiens
ccactccaactcttc

SEQ ID NO: 261863 - DNA, 15 bp, Homo sapiens
accactccaactctt

SEQ ID NO: 261864 - DNA, 15 bp, Homo sapiens
taccactccaactct

SEQ ID NO: 261865 - DNA, 15 bp, Homo sapiens
ctaccactccaactc

SEQ ID NO: 261866 - DNA, 15 bp, Homo sapiens
cctaccactccaact

SEQ ID NO: 261867 - DNA, 15 bp, Homo sapiens
tcctaccactccaac

SEQ ID NO: 261868 - DNA, 15 bp, Homo sapiens
ttcctaccactccaa

SEQ ID NO: 261869 - DNA, 15 bp, Homo sapiens
tttcctaccactcca

SEQ ID NO: 261870 - DNA, 15 bp, Homo sapiens
ttttcctaccactcc

SEQ ID NO: 261871 - DNA, 15 bp, Homo sapiens
cttttcctaccactc

SEQ ID NO: 261872 - DNA, 15 bp, Homo sapiens
tcttttcctaccact

SEQ ID NO: 261873 - DNA, 15 bp, Homo sapiens
ctcttttcctaccac

SEQ ID NO: 261874 - DNA, 15 bp, Homo sapiens
cctcttttcctacca

SEQ ID NO: 261875 - DNA, 15 bp, Homo sapiens
tcctcttttcctacc

SEQ ID NO: 261876 - DNA, 15 bp, Homo sapiens
ttcctcttttcctac

SEQ ID NO: 261877 - DNA, 15 bp, Homo sapiens
tttcctcttttccta

SEQ ID NO: 261878 - DNA, 15 bp, Homo sapiens
ttttcctcttttcct

SEQ ID NO: 261879 - DNA, 15 bp, Homo sapiens
tttttcctcttttcc

SEQ ID NO: 261880 - DNA, 15 bp, Homo sapiens
ctttttcctcttttc

SEQ ID NO: 261881 - DNA, 15 bp, Homo sapiens
tctttttcctctttt

SEQ ID NO: 261882 - DNA, 15 bp, Homo sapiens
ctctttttcctcttt

SEQ ID NO: 261883 - DNA, 15 bp, Homo sapiens
cctctttttcctctt

SEQ ID NO: 261884 - DNA, 15 bp, Homo sapiens
ccctctttttcctct

SEQ ID NO: 261885 - DNA, 15 bp, Homo sapiens
tccctctttttcctc

SEQ ID NO: 261886 - DNA, 15 bp, Homo sapiens
ttccctctttttcct

SEQ ID NO: 261887 - DNA, 15 bp, Homo sapiens
gttccctctttttcc

SEQ ID NO: 261888 - DNA, 15 bp, Homo sapiens
agttccctctttttc

SEQ ID NO: 261889 - DNA, 15 bp, Homo sapiens
aagttccctcttttt

SEQ ID NO: 261890 - DNA, 15 bp, Homo sapiens
caagttccctctttt

SEQ ID NO: 261891 - DNA, 15 bp, Homo sapiens
acaagttccctcttt

SEQ ID NO: 261892 - DNA, 15 bp, Homo sapiens
aacaagttccctctt

SEQ ID NO: 261893 - DNA, 15 bp, Homo sapiens
aaacaagttccctct

SEQ ID NO: 261894 - DNA, 15 bp, Homo sapiens
aaaacaagttccctc

SEQ ID NO: 261895 - DNA, 15 bp, Homo sapiens
caaaacaagttccct

SEQ ID NO: 261896 - DNA, 15 bp, Homo sapiens
gcaaaacaagttccc

SEQ ID NO: 261897 - DNA, 15 bp, Homo sapiens
ggcaaaacaagttcc

SEQ ID NO: 261898 - DNA, 15 bp, Homo sapiens
aggcaaaacaagttc

SEQ ID NO: 261899 - DNA, 15 bp, Homo sapiens
aaggcaaaacaagtt

SEQ ID NO: 261900 - DNA, 15 bp, Homo sapiens
gaaggcaaaacaagt

SEQ ID NO: 261901 - DNA, 15 bp, Homo sapiens
tgaaggcaaaacaag

SEQ ID NO: 261902 - DNA, 15 bp, Homo sapiens
ctgaaggcaaaacaa

SEQ ID NO: 261903 - DNA, 15 bp, Homo sapiens
tctgaaggcaaaaca

SEQ ID NO: 261904 - DNA, 15 bp, Homo sapiens
gtctgaaggcaaaac

SEQ ID NO: 261905 - DNA, 15 bp, Homo sapiens
tgtctgaaggcaaaa

SEQ ID NO: 261906 - DNA, 15 bp, Homo sapiens
atgtctgaaggcaaa

SEQ ID NO: 261907 - DNA, 15 bp, Homo sapiens
tatgtctgaaggcaa

SEQ ID NO: 261908 - DNA, 15 bp, Homo sapiens
atatgtctgaaggca

SEQ ID NO: 261909 - DNA, 15 bp, Homo sapiens
aatatgtctgaaggc

SEQ ID NO: 261910 - DNA, 15 bp, Homo sapiens
aaatatgtctgaagg

SEQ ID NO: 261911 - DNA, 15 bp, Homo sapiens
taaatatgtctgaag

SEQ ID NO: 261912 - DNA, 15 bp, Homo sapiens
ttaaatatgtctgaa

SEQ ID NO: 261913 - DNA, 15 bp, Homo sapiens
cttaaatatgtctga

SEQ ID NO: 261914 - DNA, 15 bp, Homo sapiens
acttaaatatgtctg

SEQ ID NO: 261915 - DNA, 15 bp, Homo sapiens
gacttaaatatgtct

SEQ ID NO: 261916 - DNA, 15 bp, Homo sapiens
agacttaaatatgtc

SEQ ID NO: 261917 - DNA, 15 bp, Homo sapiens
gagacttaaatatgt

SEQ ID NO: 261918 - DNA, 15 bp, Homo sapiens
ggagacttaaatatg

SEQ ID NO: 261919 - DNA, 15 bp, Homo sapiens
aggagacttaaatat

SEQ ID NO: 261920 - DNA, 15 bp, Homo sapiens
taggagacttaaata

SEQ ID NO: 261921 - DNA, 15 bp, Homo sapiens
ttaggagacttaaat

SEQ ID NO: 261922 - DNA, 15 bp, Homo sapiens
cttaggagacttaaa

SEQ ID NO: 261923 - DNA, 15 bp, Homo sapiens
acttaggagacttaa

SEQ ID NO: 261924 - DNA, 15 bp, Homo sapiens
tacttaggagactta

SEQ ID NO: 261925 - DNA, 15 bp, Homo sapiens
gtacttaggagactt

SEQ ID NO: 261926 - DNA, 15 bp, Homo sapiens
agtacttaggagact

SEQ ID NO: 261927 - DNA, 15 bp, Homo sapiens
aagtacttaggagac

SEQ ID NO: 261928 - DNA, 15 bp, Homo sapiens
gaagtacttaggaga

SEQ ID NO: 261929 - DNA, 15 bp, Homo sapiens
tgaagtacttaggag

SEQ ID NO: 261930 - DNA, 15 bp, Homo sapiens
ctgaagtacttagga

SEQ ID NO: 261931 - DNA, 15 bp, Homo sapiens
cctgaagtacttagg

SEQ ID NO: 261932 - DNA, 15 bp, Homo sapiens
tcctgaagtacttag

SEQ ID NO: 261933 - DNA, 15 bp, Homo sapiens
ctcctgaagtactta

SEQ ID NO: 261934 - DNA, 15 bp, Homo sapiens
actcctgaagtactt

SEQ ID NO: 261935 - DNA, 15 bp, Homo sapiens
aactcctgaagtact

SEQ ID NO: 261936 - DNA, 15 bp, Homo sapiens
taactcctgaagtac

SEQ ID NO: 261937 - DNA, 15 bp, Homo sapiens
ttaactcctgaagta

SEQ ID NO: 261938 - DNA, 15 bp, Homo sapiens
tttaactcctgaagt

SEQ ID NO: 261939 - DNA, 15 bp, Homo sapiens
ttttaactcctgaag

SEQ ID NO: 261940 - DNA, 15 bp, Homo sapiens
attttaactcctgaa

SEQ ID NO: 261941 - DNA, 15 bp, Homo sapiens
cattttaactcctga

SEQ ID NO: 261942 - DNA, 15 bp, Homo sapiens
ccattttaactcctg

SEQ ID NO: 261943 - DNA, 15 bp, Homo sapiens
cccattttaactcct

SEQ ID NO: 261944 - DNA, 15 bp, Homo sapiens
ccccattttaactcc

SEQ ID NO: 261945 - DNA, 15 bp, Homo sapiens
gccccattttaactc

SEQ ID NO: 261946 - DNA, 15 bp, Homo sapiens
agccccattttaact

SEQ ID NO: 261947 - DNA, 15 bp, Homo sapiens
aagccccattttaac

SEQ ID NO: 261948 - DNA, 15 bp, Homo sapiens
aaagccccattttaa

SEQ ID NO: 261949 - DNA, 15 bp, Homo sapiens
caaagccccatttta

SEQ ID NO: 261950 - DNA, 15 bp, Homo sapiens
tcaaagccccatttt

SEQ ID NO: 261951 - DNA, 15 bp, Homo sapiens
ttcaaagccccattt

SEQ ID NO: 261952 - DNA, 15 bp, Homo sapiens
tttcaaagccccatt

SEQ ID NO: 261953 - DNA, 15 bp, Homo sapiens
ttttcaaagccccat

SEQ ID NO: 261954 - DNA, 15 bp, Homo sapiens
attttcaaagcccca

SEQ ID NO: 261955 - DNA, 15 bp, Homo sapiens
tattttcaaagcccc

SEQ ID NO: 261956 - DNA, 15 bp, Homo sapiens
ttattttcaaagccc

SEQ ID NO: 261957 - DNA, 15 bp, Homo sapiens
tttattttcaaagcc

SEQ ID NO: 261958 - DNA, 15 bp, Homo sapiens
atttattttcaaagc

SEQ ID NO: 261959 - DNA, 15 bp, Homo sapiens
tatttattttcaaag

SEQ ID NO: 261960 - DNA, 15 bp, Homo sapiens
ctatttattttcaaa

SEQ ID NO: 261961 - DNA, 15 bp, Homo sapiens
tctatttattttcaa

SEQ ID NO: 261962 - DNA, 15 bp, Homo sapiens
gtctatttattttca

SEQ ID NO: 261963 - DNA, 15 bp, Homo sapiens
agtctatttattttc

SEQ ID NO: 261964 - DNA, 15 bp, Homo sapiens
aagtctatttatttt

SEQ ID NO: 261965 - DNA, 15 bp, Homo sapiens
aaagtctatttattt

SEQ ID NO: 261966 - DNA, 15 bp, Homo sapiens
aaaagtctatttatt

SEQ ID NO: 261967 - DNA, 15 bp, Homo sapiens
gaaaagtctatttat

SEQ ID NO: 261968 - DNA, 15 bp, Homo sapiens
agaaaagtctattta

SEQ ID NO: 261969 - DNA, 15 bp, Homo sapiens
cagaaaagtctattt

SEQ ID NO: 261970 - DNA, 15 bp, Homo sapiens
acagaaaagtctatt

SEQ ID NO: 261971 - DNA, 15 bp, Homo sapiens
aacagaaaagtctat

SEQ ID NO: 261972 - DNA, 15 bp, Homo sapiens
gaacagaaaagtcta

SEQ ID NO: 261973 - DNA, 15 bp, Homo sapiens
tgaacagaaaagtct

SEQ ID NO: 261974 - DNA, 15 bp, Homo sapiens
atgaacagaaaagtc

SEQ ID NO: 261975 - DNA, 15 bp, Homo sapiens
catgaacagaaaagt

SEQ ID NO: 261976 - DNA, 15 bp, Homo sapiens
acatgaacagaaaag

SEQ ID NO: 261977 - DNA, 15 bp, Homo sapiens
cacatgaacagaaaa

SEQ ID NO: 261978 - DNA, 15 bp, Homo sapiens
ccacatgaacagaaa

SEQ ID NO: 261979 - DNA, 15 bp, Homo sapiens
cccacatgaacagaa

SEQ ID NO: 261980 - DNA, 15 bp, Homo sapiens
ccccacatgaacaga

SEQ ID NO: 261981 - DNA, 15 bp, Homo sapiens
gccccacatgaacag

SEQ ID NO: 261982 - DNA, 15 bp, Homo sapiens
agccccacatgaaca

SEQ ID NO: 261983 - DNA, 15 bp, Homo sapiens
cagccccacatgaac

SEQ ID NO: 261984 - DNA, 15 bp, Homo sapiens
tcagccccacatgaa

SEQ ID NO: 261985 - DNA, 15 bp, Homo sapiens
ttcagccccacatga

SEQ ID NO: 261986 - DNA, 15 bp, Homo sapiens
cttcagccccacatg

SEQ ID NO: 261987 - DNA, 15 bp, Homo sapiens
acttcagccccacat

SEQ ID NO: 261988 - DNA, 15 bp, Homo sapiens
cacttcagccccaca

SEQ ID NO: 261989 - DNA, 15 bp, Homo sapiens
acacttcagccccac

SEQ ID NO: 261990 - DNA, 15 bp, Homo sapiens
aacacttcagcccca

SEQ ID NO: 261991 - DNA, 15 bp, Homo sapiens
gaacacttcagcccc

SEQ ID NO: 261992 - DNA, 15 bp, Homo sapiens
ggaacacttcagccc

SEQ ID NO: 261993 - DNA, 15 bp, Homo sapiens
tggaacacttcagcc

SEQ ID NO: 261994 - DNA, 15 bp, Homo sapiens
ctggaacacttcagc

SEQ ID NO: 261995 - DNA, 15 bp, Homo sapiens
cctggaacacttcag

SEQ ID NO: 261996 - DNA, 15 bp, Homo sapiens
ccctggaacacttca

SEQ ID NO: 261997 - DNA, 15 bp, Homo sapiens
accctggaacacttc

SEQ ID NO: 261998 - DNA, 15 bp, Homo sapiens
aaccctggaacactt

SEQ ID NO: 261999 - DNA, 15 bp, Homo sapiens
caaccctggaacact

SEQ ID NO: 262000 - DNA, 15 bp, Homo sapiens
ccaaccctggaacac

SEQ ID NO: 262001 - DNA, 15 bp, Homo sapiens
tccaaccctggaaca

SEQ ID NO: 262002 - DNA, 15 bp, Homo sapiens
ttccaaccctggaac

SEQ ID NO: 262003 - DNA, 15 bp, Homo sapiens
tttccaaccctggaa

SEQ ID NO: 262004 - DNA, 15 bp, Homo sapiens
ctttccaaccctgga

SEQ ID NO: 262005 - DNA, 15 bp, Homo sapiens
cctttccaaccctgg

SEQ ID NO: 262006 - DNA, 15 bp, Homo sapiens
ccctttccaaccctg

SEQ ID NO: 262007 - DNA, 15 bp, Homo sapiens
accctttccaaccct

SEQ ID NO: 262008 - DNA, 15 bp, Homo sapiens
aaccctttccaaccc

SEQ ID NO: 262009 - DNA, 15 bp, Homo sapiens
aaaccctttccaacc

SEQ ID NO: 262010 - DNA, 15 bp, Homo sapiens
aaaaccctttccaac

SEQ ID NO: 262011 - DNA, 15 bp, Homo sapiens
taaaaccctttccaa

SEQ ID NO: 262012 - DNA, 15 bp, Homo sapiens
ataaaaccctttcca

SEQ ID NO: 262013 - DNA, 15 bp, Homo sapiens
aataaaaccctttcc

SEQ ID NO: 262014 - DNA, 15 bp, Homo sapiens
taataaaaccctttc

SEQ ID NO: 262015 - DNA, 15 bp, Homo sapiens
ctaataaaacccttt

SEQ ID NO: 262016 - DNA, 15 bp, Homo sapiens
cctaataaaaccctt

SEQ ID NO: 262017 - DNA, 15 bp, Homo sapiens
acctaataaaaccct

SEQ ID NO: 262018 - DNA, 15 bp, Homo sapiens
gacctaataaaaccc

SEQ ID NO: 262019 - DNA, 15 bp, Homo sapiens
tgacctaataaaacc

SEQ ID NO: 262020 - DNA, 15 bp, Homo sapiens
atgacctaataaaac

SEQ ID NO: 262021 - DNA, 15 bp, Homo sapiens
aatgacctaataaaa

SEQ ID NO: 262022 - DNA, 15 bp, Homo sapiens
aaatgacctaataaa

SEQ ID NO: 262023 - DNA, 15 bp, Homo sapiens
gaaatgacctaataa

SEQ ID NO: 262024 - DNA, 15 bp, Homo sapiens
tgaaatgacctaata

SEQ ID NO: 262025 - DNA, 15 bp, Homo sapiens
atgaaatgacctaat

SEQ ID NO: 262026 - DNA, 15 bp, Homo sapiens
gatgaaatgacctaa

SEQ ID NO: 262027 - DNA, 15 bp, Homo sapiens
agatgaaatgaccta

SEQ ID NO: 262028 - DNA, 15 bp, Homo sapiens
gagatgaaatgacct

SEQ ID NO: 262029 - DNA, 15 bp, Homo sapiens
agagatgaaatgacc

SEQ ID NO: 262030 - DNA, 15 bp, Homo sapiens
gagagatgaaatgac

SEQ ID NO: 262031 - DNA, 15 bp, Homo sapiens
ggagagatgaaatga

SEQ ID NO: 262032 - DNA, 15 bp, Homo sapiens
gggagagatgaaatg

SEQ ID NO: 262033 - DNA, 15 bp, Homo sapiens
agggagagatgaaat

SEQ ID NO: 262034 - DNA, 15 bp, Homo sapiens
gagggagagatgaaa

SEQ ID NO: 262035 - DNA, 15 bp, Homo sapiens
agagggagagatgaa

SEQ ID NO: 262036 - DNA, 15 bp, Homo sapiens
cagagggagagatga

SEQ ID NO: 262037 - DNA, 15 bp, Homo sapiens
acagagggagagatg

SEQ ID NO: 262038 - DNA, 15 bp, Homo sapiens
gacagagggagagat

SEQ ID NO: 262039 - DNA, 15 bp, Homo sapiens
agacagagggagaga

SEQ ID NO: 262040 - DNA, 15 bp, Homo sapiens
gagacagagggagag

SEQ ID NO: 262041 - DNA, 15 bp, Homo sapiens
agagacagagggaga

SEQ ID NO: 262042 - DNA, 15 bp, Homo sapiens
cagagacagagggag

SEQ ID NO: 262043 - DNA, 15 bp, Homo sapiens
ccagagacagaggga

SEQ ID NO: 262044 - DNA, 15 bp, Homo sapiens
cccagagacagaggg

SEQ ID NO: 262045 - DNA, 15 bp, Homo sapiens
gcccagagacagagg

SEQ ID NO: 262046 - DNA, 15 bp, Homo sapiens
ggcccagagacagag

SEQ ID NO: 262047 - DNA, 15 bp, Homo sapiens
aggcccagagacaga

SEQ ID NO: 262048 - DNA, 15 bp, Homo sapiens
taggcccagagacag

SEQ ID NO: 262049 - DNA, 15 bp, Homo sapiens
ataggcccagagaca

SEQ ID NO: 262050 - DNA, 15 bp, Homo sapiens
aataggcccagagac

SEQ ID NO: 262051 - DNA, 15 bp, Homo sapiens
gaataggcccagaga

SEQ ID NO: 262052 - DNA, 15 bp, Homo sapiens
agaataggcccagag

SEQ ID NO: 262053 - DNA, 15 bp, Homo sapiens
tagaataggcccaga

SEQ ID NO: 262054 - DNA, 15 bp, Homo sapiens
ttagaataggcccag

SEQ ID NO: 262055 - DNA, 15 bp, Homo sapiens
gttagaataggccca

SEQ ID NO: 262056 - DNA, 15 bp, Homo sapiens
ggttagaataggccc

SEQ ID NO: 262057 - DNA, 15 bp, Homo sapiens
gggttagaataggcc

SEQ ID NO: 262058 - DNA, 15 bp, Homo sapiens
ggggttagaataggc

SEQ ID NO: 262059 - DNA, 15 bp, Homo sapiens
aggggttagaatagg

SEQ ID NO: 262060 - DNA, 15 bp, Homo sapiens
gaggggttagaatag

SEQ ID NO: 262061 - DNA, 15 bp, Homo sapiens
agaggggttagaata

SEQ ID NO: 262062 - DNA, 15 bp, Homo sapiens
aagaggggttagaat

SEQ ID NO: 262063 - DNA, 15 bp, Homo sapiens
taagaggggttagaa

SEQ ID NO: 262064 - DNA, 15 bp, Homo sapiens
gtaagaggggttaga

SEQ ID NO: 262065 - DNA, 15 bp, Homo sapiens
agtaagaggggttag

SEQ ID NO: 262066 - DNA, 15 bp, Homo sapiens
aagtaagaggggtta

SEQ ID NO: 262067 - DNA, 15 bp, Homo sapiens
taagtaagaggggtt

SEQ ID NO: 262068 - DNA, 15 bp, Homo sapiens
ataagtaagaggggt

SEQ ID NO: 262069 - DNA, 15 bp, Homo sapiens
tataagtaagagggg

SEQ ID NO: 262070 - DNA, 15 bp, Homo sapiens
ttataagtaagaggg

SEQ ID NO: 262071 - DNA, 15 bp, Homo sapiens
tttataagtaagagg

SEQ ID NO: 262072 - DNA, 15 bp, Homo sapiens
ttttataagtaagag

SEQ ID NO: 262073 - DNA, 15 bp, Homo sapiens
tttttataagtaaga

SEQ ID NO: 262074 - DNA, 15 bp, Homo sapiens
atttttataagtaag

SEQ ID NO: 262075 - DNA, 15 bp, Homo sapiens
gatttttataagtaa

SEQ ID NO: 262076 - DNA, 15 bp, Homo sapiens
cgatttttataagta

SEQ ID NO: 262077 - DNA, 15 bp, Homo sapiens
gcgatttttataagt

SEQ ID NO: 262078 - DNA, 15 bp, Homo sapiens
tgcgatttttataag

SEQ ID NO: 262079 - DNA, 15 bp, Homo sapiens
ctgcgatttttataa

SEQ ID NO: 262080 - DNA, 15 bp, Homo sapiens
tctgcgatttttata

SEQ ID NO: 262081 - DNA, 15 bp, Homo sapiens
ttctgcgatttttat

SEQ ID NO: 262082 - DNA, 15 bp, Homo sapiens
cttctgcgattttta

SEQ ID NO: 262083 - DNA, 15 bp, Homo sapiens
tcttctgcgattttt

SEQ ID NO: 262084 - DNA, 15 bp, Homo sapiens
ctcttctgcgatttt

SEQ ID NO: 262085 - DNA, 15 bp, Homo sapiens
cctcttctgcgattt

SEQ ID NO: 262086 - DNA, 15 bp, Homo sapiens
ccctcttctgcgatt

SEQ ID NO: 262087 - DNA, 15 bp, Homo sapiens
accctcttctgcgat

SEQ ID NO: 262088 - DNA, 15 bp, Homo sapiens
caccctcttctgcga

SEQ ID NO: 262089 - DNA, 15 bp, Homo sapiens
tcaccctcttctgcg

SEQ ID NO: 262090 - DNA, 15 bp, Homo sapiens
atcaccctcttctgc

SEQ ID NO: 262091 - DNA, 15 bp, Homo sapiens
aatcaccctcttctg

SEQ ID NO: 262092 - DNA, 15 bp, Homo sapiens
aaatcaccctcttct

SEQ ID NO: 262093 - DNA, 15 bp, Homo sapiens
gaaatcaccctcttc

SEQ ID NO: 262094 - DNA, 15 bp, Homo sapiens
tgaaatcaccctctt

SEQ ID NO: 262095 - DNA, 15 bp, Homo sapiens
atgaaatcaccctct

SEQ ID NO: 262096 - DNA, 15 bp, Homo sapiens
tatgaaatcaccctc

SEQ ID NO: 262097 - DNA, 15 bp, Homo sapiens
ttatgaaatcaccct

SEQ ID NO: 262098 - DNA, 15 bp, Homo sapiens
cttatgaaatcaccc

SEQ ID NO: 262099 - DNA, 15 bp, Homo sapiens
gcttatgaaatcacc

SEQ ID NO: 262100 - DNA, 15 bp, Homo sapiens
agcttatgaaatcac

SEQ ID NO: 262101 - DNA, 15 bp, Homo sapiens
cagcttatgaaatca

SEQ ID NO: 262102 - DNA, 15 bp, Homo sapiens
gcagcttatgaaatc

SEQ ID NO: 262103 - DNA, 15 bp, Homo sapiens
ggcagcttatgaaat

SEQ ID NO: 262104 - DNA, 15 bp, Homo sapiens
tggcagcttatgaaa

SEQ ID NO: 262105 - DNA, 15 bp, Homo sapiens
gtggcagcttatgaa

SEQ ID NO: 262106 - DNA, 15 bp, Homo sapiens
cgtggcagcttatga

SEQ ID NO: 262107 - DNA, 15 bp, Homo sapiens
tcgtggcagcttatg

SEQ ID NO: 262108 - DNA, 15 bp, Homo sapiens
gtcgtggcagcttat

SEQ ID NO: 262109 - DNA, 15 bp, Homo sapiens
tgtcgtggcagctta

SEQ ID NO: 262110 - DNA, 15 bp, Homo sapiens
ttgtcgtggcagctt

SEQ ID NO: 262111 - DNA, 15 bp, Homo sapiens
gttgtcgtggcagct

SEQ ID NO: 262112 - DNA, 15 bp, Homo sapiens
agttgtcgtggcagc

SEQ ID NO: 262113 - DNA, 15 bp, Homo sapiens
aagttgtcgtggcag

SEQ ID NO: 262114 - DNA, 15 bp, Homo sapiens
caagttgtcgtggca

SEQ ID NO: 262115 - DNA, 15 bp, Homo sapiens
acaagttgtcgtggc

SEQ ID NO: 262116 - DNA, 15 bp, Homo sapiens
aacaagttgtcgtgg

SEQ ID NO: 262117 - DNA, 15 bp, Homo sapiens
gaacaagttgtcgtg

SEQ ID NO: 262118 - DNA, 15 bp, Homo sapiens
ggaacaagttgtcgt

SEQ ID NO: 262119 - DNA, 15 bp, Homo sapiens
cggaacaagttgtcg

SEQ ID NO: 262120 - DNA, 15 bp, Homo sapiens
gcggaacaagttgtc

SEQ ID NO: 262121 - DNA, 15 bp, Homo sapiens
agcggaacaagttgt

SEQ ID NO: 262122 - DNA, 15 bp, Homo sapiens
tagcggaacaagttg

SEQ ID NO: 262123 - DNA, 15 bp, Homo sapiens
ttagcggaacaagtt

SEQ ID NO: 262124 - DNA, 15 bp, Homo sapiens
gttagcggaacaagt

SEQ ID NO: 262125 - DNA, 15 bp, Homo sapiens
tgttagcggaacaag

SEQ ID NO: 262126 - DNA, 15 bp, Homo sapiens
ttgttagcggaacaa

SEQ ID NO: 262127 - DNA, 15 bp, Homo sapiens
attgttagcggaaca

SEQ ID NO: 262128 - DNA, 15 bp, Homo sapiens
aattgttagcggaac

SEQ ID NO: 262129 - DNA, 15 bp, Homo sapiens
gaattgttagcggaa

SEQ ID NO: 262130 - DNA, 15 bp, Homo sapiens
tgaattgttagcgga

SEQ ID NO: 262131 - DNA, 15 bp, Homo sapiens
atgaattgttagcgg

SEQ ID NO: 262132 - DNA, 15 bp, Homo sapiens
catgaattgttagcg

SEQ ID NO: 262133 - DNA, 15 bp, Homo sapiens
tcatgaattgttagc

SEQ ID NO: 262134 - DNA, 15 bp, Homo sapiens
atcatgaattgttag

SEQ ID NO: 262135 - DNA, 15 bp, Homo sapiens
gatcatgaattgtta

SEQ ID NO: 262136 - DNA, 15 bp, Homo sapiens
agatcatgaattgtt

SEQ ID NO: 262137 - DNA, 15 bp, Homo sapiens
aagatcatgaattgt

SEQ ID NO: 262138 - DNA, 15 bp, Homo sapiens
taagatcatgaattg

SEQ ID NO: 262139 - DNA, 15 bp, Homo sapiens
ttaagatcatgaatt

SEQ ID NO: 262140 - DNA, 15 bp, Homo sapiens
tttaagatcatgaat

SEQ ID NO: 262141 - DNA, 15 bp, Homo sapiens
ttttaagatcatgaa

SEQ ID NO: 262142 - DNA, 15 bp, Homo sapiens
gttttaagatcatga

SEQ ID NO: 262143 - DNA, 15 bp, Homo sapiens
tgttttaagatcatg

SEQ ID NO: 262144 - DNA, 15 bp, Homo sapiens
ttgttttaagatcat

SEQ ID NO: 262145 - DNA, 15 bp, Homo sapiens
attgttttaagatca

SEQ ID NO: 262146 - DNA, 15 bp, Homo sapiens
gattgttttaagatc

SEQ ID NO: 262147 - DNA, 15 bp, Homo sapiens
agattgttttaagat

SEQ ID NO: 262148 - DNA, 15 bp, Homo sapiens
gagattgttttaaga

SEQ ID NO: 262149 - DNA, 15 bp, Homo sapiens
ggagattgttttaag

SEQ ID NO: 262150 - DNA, 15 bp, Homo sapiens
tggagattgttttaa

SEQ ID NO: 262151 - DNA, 15 bp, Homo sapiens
atggagattgtttta

SEQ ID NO: 262152 - DNA, 15 bp, Homo sapiens
tatggagattgtttt

SEQ ID NO: 262153 - DNA, 15 bp, Homo sapiens
ctatggagattgttt

SEQ ID NO: 262154 - DNA, 15 bp, Homo sapiens
gctatggagattgtt

SEQ ID NO: 262155 - DNA, 15 bp, Homo sapiens
tgctatggagattgt

SEQ ID NO: 262156 - DNA, 15 bp, Homo sapiens
ctgctatggagattg

SEQ ID NO: 262157 - DNA, 15 bp, Homo sapiens
cctgctatggagatt

SEQ ID NO: 262158 - DNA, 15 bp, Homo sapiens
ccctgctatggagat

SEQ ID NO: 262159 - DNA, 15 bp, Homo sapiens
tccctgctatggaga

SEQ ID NO: 262160 - DNA, 15 bp, Homo sapiens
ctccctgctatggag

SEQ ID NO: 262161 - DNA, 15 bp, Homo sapiens
tctccctgctatgga

SEQ ID NO: 262162 - DNA, 15 bp, Homo sapiens
ttctccctgctatgg

SEQ ID NO: 262163 - DNA, 15 bp, Homo sapiens
tttctccctgctatg

SEQ ID NO: 262164 - DNA, 15 bp, Homo sapiens
atttctccctgctat

SEQ ID NO: 262165 - DNA, 15 bp, Homo sapiens
aatttctccctgcta

SEQ ID NO: 262166 - DNA, 15 bp, Homo sapiens
gaatttctccctgct

SEQ ID NO: 262167 - DNA, 15 bp, Homo sapiens
ggaatttctccctgc

SEQ ID NO: 262168 - DNA, 15 bp, Homo sapiens
aggaatttctccctg

SEQ ID NO: 262169 - DNA, 15 bp, Homo sapiens
gaggaatttctccct

SEQ ID NO: 262170 - DNA, 15 bp, Homo sapiens
ggaggaatttctccc

SEQ ID NO: 262171 - DNA, 15 bp, Homo sapiens
aggaggaatttctcc

SEQ ID NO: 262172 - DNA, 15 bp, Homo sapiens
taggaggaatttctc

SEQ ID NO: 262173 - DNA, 15 bp, Homo sapiens
ataggaggaatttct

SEQ ID NO: 262174 - DNA, 15 bp, Homo sapiens
aataggaggaatttc

SEQ ID NO: 262175 - DNA, 15 bp, Homo sapiens
aaataggaggaattt

SEQ ID NO: 262176 - DNA, 15 bp, Homo sapiens
gaaataggaggaatt

SEQ ID NO: 262177 - DNA, 15 bp, Homo sapiens
ggaaataggaggaat

SEQ ID NO: 262178 - DNA, 15 bp, Homo sapiens
aggaaataggaggaa

SEQ ID NO: 262179 - DNA, 15 bp, Homo sapiens
gaggaaataggagga

SEQ ID NO: 262180 - DNA, 15 bp, Homo sapiens
ggaggaaataggagg

SEQ ID NO: 262181 - DNA, 15 bp, Homo sapiens
tggaggaaataggag

SEQ ID NO: 262182 - DNA, 15 bp, Homo sapiens
ttggaggaaatagga

SEQ ID NO: 262183 - DNA, 15 bp, Homo sapiens
tttggaggaaatagg

SEQ ID NO: 262184 - DNA, 15 bp, Homo sapiens
ctttggaggaaatag

SEQ ID NO: 262185 - DNA, 15 bp, Homo sapiens
gctttggaggaaata

SEQ ID NO: 262186 - DNA, 15 bp, Homo sapiens
agctttggaggaaat

SEQ ID NO: 262187 - DNA, 15 bp, Homo sapiens
gagctttggaggaaa

SEQ ID NO: 262188 - DNA, 15 bp, Homo sapiens
cgagctttggaggaa

SEQ ID NO: 262189 - DNA, 15 bp, Homo sapiens
acgagctttggagga

SEQ ID NO: 262190 - DNA, 15 bp, Homo sapiens
gacgagctttggagg

SEQ ID NO: 262191 - DNA, 15 bp, Homo sapiens
agacgagctttggag

SEQ ID NO: 262192 - DNA, 15 bp, Homo sapiens
cagacgagctttgga

SEQ ID NO: 262193 - DNA, 15 bp, Homo sapiens
acagacgagctttgg

SEQ ID NO: 262194 - DNA, 15 bp, Homo sapiens
gacagacgagctttg

SEQ ID NO: 262195 - DNA, 15 bp, Homo sapiens
agacagacgagcttt

SEQ ID NO: 262196 - DNA, 15 bp, Homo sapiens
cagacagacgagctt

SEQ ID NO: 262197 - DNA, 15 bp, Homo sapiens
gcagacagacgagct

SEQ ID NO: 262198 - DNA, 15 bp, Homo sapiens
cgcagacagacgagc

SEQ ID NO: 262199 - DNA, 15 bp, Homo sapiens
ccgcagacagacgag

SEQ ID NO: 262200 - DNA, 15 bp, Homo sapiens
cccgcagacagacga

SEQ ID NO: 262201 - DNA, 15 bp, Homo sapiens
gcccgcagacagacg

SEQ ID NO: 262202 - DNA, 15 bp, Homo sapiens
ggcccgcagacagac

SEQ ID NO: 262203 - DNA, 15 bp, Homo sapiens
tggcccgcagacaga

SEQ ID NO: 262204 - DNA, 15 bp, Homo sapiens
ttggcccgcagacag

SEQ ID NO: 262205 - DNA, 15 bp, Homo sapiens
cttggcccgcagaca

SEQ ID NO: 262206 - DNA, 15 bp, Homo sapiens
ccttggcccgcagac

SEQ ID NO: 262207 - DNA, 15 bp, Homo sapiens
gccttggcccgcaga

SEQ ID NO: 262208 - DNA, 15 bp, Homo sapiens
agccttggcccgcag

SEQ ID NO: 262209 - DNA, 15 bp, Homo sapiens
cagccttggcccgca

SEQ ID NO: 262210 - DNA, 15 bp, Homo sapiens
gcagccttggcccgc

SEQ ID NO: 262211 - DNA, 15 bp, Homo sapiens
agcagccttggcccg

SEQ ID NO: 262212 - DNA, 15 bp, Homo sapiens
gagcagccttggccc

SEQ ID NO: 262213 - DNA, 15 bp, Homo sapiens
tgagcagccttggcc

SEQ ID NO: 262214 - DNA, 15 bp, Homo sapiens
ctgagcagccttggc

SEQ ID NO: 262215 - DNA, 15 bp, Homo sapiens
tctgagcagccttgg

SEQ ID NO: 262216 - DNA, 15 bp, Homo sapiens
ctctgagcagccttg

SEQ ID NO: 262217 - DNA, 15 bp, Homo sapiens
cctctgagcagcctt

SEQ ID NO: 262218 - DNA, 15 bp, Homo sapiens
gcctctgagcagcct

SEQ ID NO: 262219 - DNA, 15 bp, Homo sapiens
tgcctctgagcagcc

SEQ ID NO: 262220 - DNA, 15 bp, Homo sapiens
ctgcctctgagcagc

SEQ ID NO: 262221 - DNA, 15 bp, Homo sapiens
gctgcctctgagcag

SEQ ID NO: 262222 - DNA, 15 bp, Homo sapiens
agctgcctctgagca

SEQ ID NO: 262223 - DNA, 15 bp, Homo sapiens
cagctgcctctgagc

SEQ ID NO: 262224 - DNA, 15 bp, Homo sapiens
ccagctgcctctgag

SEQ ID NO: 262225 - DNA, 15 bp, Homo sapiens
cccagctgcctctga

SEQ ID NO: 262226 - DNA, 15 bp, Homo sapiens
ccccagctgcctctg

SEQ ID NO: 262227 - DNA, 15 bp, Homo sapiens
accccagctgcctct

SEQ ID NO: 262228 - DNA, 15 bp, Homo sapiens
aaccccagctgcctc

SEQ ID NO: 262229 - DNA, 15 bp, Homo sapiens
aaaccccagctgcct

SEQ ID NO: 262230 - DNA, 15 bp, Homo sapiens
aaaaccccagctgcc

SEQ ID NO: 262231 - DNA, 15 bp, Homo sapiens
taaaaccccagctgc

SEQ ID NO: 262232 - DNA, 15 bp, Homo sapiens
ttaaaaccccagctg

SEQ ID NO: 262233 - DNA, 15 bp, Homo sapiens
cttaaaaccccagct

SEQ ID NO: 262234 - DNA, 15 bp, Homo sapiens
tcttaaaaccccagc

SEQ ID NO: 262235 - DNA, 15 bp, Homo sapiens
ttcttaaaaccccag

SEQ ID NO: 262236 - DNA, 15 bp, Homo sapiens
cttcttaaaacccca

SEQ ID NO: 262237 - DNA, 15 bp, Homo sapiens
acttcttaaaacccc

SEQ ID NO: 262238 - DNA, 15 bp, Homo sapiens
cacttcttaaaaccc

SEQ ID NO: 262239 - DNA, 15 bp, Homo sapiens
tcacttcttaaaacc

SEQ ID NO: 262240 - DNA, 15 bp, Homo sapiens
ctcacttcttaaaac

SEQ ID NO: 262241 - DNA, 15 bp, Homo sapiens
gctcacttcttaaaa

SEQ ID NO: 262242 - DNA, 15 bp, Homo sapiens
agctcacttcttaaa

SEQ ID NO: 262243 - DNA, 15 bp, Homo sapiens
gagctcacttcttaa

SEQ ID NO: 262244 - DNA, 15 bp, Homo sapiens
agagctcacttctta

SEQ ID NO: 262245 - DNA, 15 bp, Homo sapiens
cagagctcacttctt

SEQ ID NO: 262246 - DNA, 15 bp, Homo sapiens
ccagagctcacttct

SEQ ID NO: 262247 - DNA, 15 bp, Homo sapiens
tccagagctcacttc

SEQ ID NO: 262248 - DNA, 15 bp, Homo sapiens
gtccagagctcactt

SEQ ID NO: 262249 - DNA, 15 bp, Homo sapiens
agtccagagctcact

SEQ ID NO: 262250 - DNA, 15 bp, Homo sapiens
aagtccagagctcac

SEQ ID NO: 262251 - DNA, 15 bp, Homo sapiens
caagtccagagctca

SEQ ID NO: 262252 - DNA, 15 bp, Homo sapiens
ccaagtccagagctc

SEQ ID NO: 262253 - DNA, 15 bp, Homo sapiens
tccaagtccagagct

SEQ ID NO: 262254 - DNA, 15 bp, Homo sapiens
atccaagtccagagc

SEQ ID NO: 262255 - DNA, 15 bp, Homo sapiens
aatccaagtccagag

SEQ ID NO: 262256 - DNA, 15 bp, Homo sapiens
aaatccaagtccaga

SEQ ID NO: 262257 - DNA, 15 bp, Homo sapiens
taaatccaagtccag

SEQ ID NO: 262258 - DNA, 15 bp, Homo sapiens
ttaaatccaagtcca

SEQ ID NO: 262259 - DNA, 15 bp, Homo sapiens
attaaatccaagtcc

SEQ ID NO: 262260 - DNA, 15 bp, Homo sapiens
cattaaatccaagtc

SEQ ID NO: 262261 - DNA, 15 bp, Homo sapiens
ccattaaatccaagt

SEQ ID NO: 262262 - DNA, 15 bp, Homo sapiens
accattaaatccaag

SEQ ID NO: 262263 - DNA, 15 bp, Homo sapiens
gaccattaaatccaa

SEQ ID NO: 262264 - DNA, 15 bp, Homo sapiens
agaccattaaatcca

SEQ ID NO: 262265 - DNA, 15 bp, Homo sapiens
aagaccattaaatcc

SEQ ID NO: 262266 - DNA, 15 bp, Homo sapiens
aaagaccattaaatc

SEQ ID NO: 262267 - DNA, 15 bp, Homo sapiens
caaagaccattaaat

SEQ ID NO: 262268 - DNA, 15 bp, Homo sapiens
acaaagaccattaaa

SEQ ID NO: 262269 - DNA, 15 bp, Homo sapiens
aacaaagaccattaa

SEQ ID NO: 262270 - DNA, 15 bp, Homo sapiens
gaacaaagaccatta

SEQ ID NO: 262271 - DNA, 15 bp, Homo sapiens
tgaacaaagaccatt

SEQ ID NO: 262272 - DNA, 15 bp, Homo sapiens
ttgaacaaagaccat

SEQ ID NO: 262273 - DNA, 15 bp, Homo sapiens
tttgaacaaagacca

SEQ ID NO: 262274 - DNA, 15 bp, Homo sapiens
atttgaacaaagacc

SEQ ID NO: 262275 - DNA, 15 bp, Homo sapiens
tatttgaacaaagac

SEQ ID NO: 262276 - DNA, 15 bp, Homo sapiens
gtatttgaacaaaga

SEQ ID NO: 262277 - DNA, 15 bp, Homo sapiens
agtatttgaacaaag

SEQ ID NO: 262278 - DNA, 15 bp, Homo sapiens
cagtatttgaacaaa

SEQ ID NO: 262279 - DNA, 15 bp, Homo sapiens
acagtatttgaacaa

SEQ ID NO: 262280 - DNA, 15 bp, Homo sapiens
aacagtatttgaaca

SEQ ID NO: 262281 - DNA, 15 bp, Homo sapiens
taacagtatttgaac

SEQ ID NO: 262282 - DNA, 15 bp, Homo sapiens
ataacagtatttgaa

SEQ ID NO: 262283 - DNA, 15 bp, Homo sapiens
aataacagtatttga

SEQ ID NO: 262284 - DNA, 15 bp, Homo sapiens
caataacagtatttg

SEQ ID NO: 262285 - DNA, 15 bp, Homo sapiens
gcaataacagtattt

SEQ ID NO: 262286 - DNA, 15 bp, Homo sapiens
tgcaataacagtatt

SEQ ID NO: 262287 - DNA, 15 bp, Homo sapiens
atgcaataacagtat

SEQ ID NO: 262288 - DNA, 15 bp, Homo sapiens
gatgcaataacagta

SEQ ID NO: 262289 - DNA, 15 bp, Homo sapiens
ggatgcaataacagt

SEQ ID NO: 262290 - DNA, 15 bp, Homo sapiens
aggatgcaataacag

SEQ ID NO: 262291 - DNA, 15 bp, Homo sapiens
aaggatgcaataaca

SEQ ID NO: 262292 - DNA, 15 bp, Homo sapiens
caaggatgcaataac

SEQ ID NO: 262293 - DNA, 15 bp, Homo sapiens
tcaaggatgcaataa

SEQ ID NO: 262294 - DNA, 15 bp, Homo sapiens
ttcaaggatgcaata

SEQ ID NO: 262295 - DNA, 15 bp, Homo sapiens
gttcaaggatgcaat

SEQ ID NO: 262296 - DNA, 15 bp, Homo sapiens
tgttcaaggatgcaa

SEQ ID NO: 262297 - DNA, 15 bp, Homo sapiens
ttgttcaaggatgca

SEQ ID NO: 262298 - DNA, 15 bp, Homo sapiens
cttgttcaaggatgc

SEQ ID NO: 262299 - DNA, 15 bp, Homo sapiens
acttgttcaaggatg

SEQ ID NO: 262300 - DNA, 15 bp, Homo sapiens
gacttgttcaaggat

SEQ ID NO: 262301 - DNA, 15 bp, Homo sapiens
tgacttgttcaagga

SEQ ID NO: 262302 - DNA, 15 bp, Homo sapiens
gtgacttgttcaagg

SEQ ID NO: 262303 - DNA, 15 bp, Homo sapiens
tgtgacttgttcaag

SEQ ID NO: 262304 - DNA, 15 bp, Homo sapiens
atgtgacttgttcaa

SEQ ID NO: 262305 - DNA, 15 bp, Homo sapiens
tatgtgacttgttca

SEQ ID NO: 262306 - DNA, 15 bp, Homo sapiens
ttatgtgacttgttc

SEQ ID NO: 262307 - DNA, 15 bp, Homo sapiens
gttatgtgacttgtt

SEQ ID NO: 262308 - DNA, 15 bp, Homo sapiens
agttatgtgacttgt

SEQ ID NO: 262309 - DNA, 15 bp, Homo sapiens
cagttatgtgacttg

SEQ ID NO: 262310 - DNA, 15 bp, Homo sapiens
gcagttatgtgactt

SEQ ID NO: 262311 - DNA, 15 bp, Homo sapiens
agcagttatgtgact

SEQ ID NO: 262312 - DNA, 15 bp, Homo sapiens
gagcagttatgtgac

SEQ ID NO: 262313 - DNA, 15 bp, Homo sapiens
ggagcagttatgtga

SEQ ID NO: 262314 - DNA, 15 bp, Homo sapiens
tggagcagttatgtg

SEQ ID NO: 262315 - DNA, 15 bp, Homo sapiens
ttggagcagttatgt

SEQ ID NO: 262316 - DNA, 15 bp, Homo sapiens
cttggagcagttatg

SEQ ID NO: 262317 - DNA, 15 bp, Homo sapiens
gcttggagcagttat

SEQ ID NO: 262318 - DNA, 15 bp, Homo sapiens
ggcttggagcagtta

SEQ ID NO: 262319 - DNA, 15 bp, Homo sapiens
aggcttggagcagtt

SEQ ID NO: 262320 - DNA, 15 bp, Homo sapiens
gaggcttggagcagt

SEQ ID NO: 262321 - DNA, 15 bp, Homo sapiens
tgaggcttggagcag

SEQ ID NO: 262322 - DNA, 15 bp, Homo sapiens
ctgaggcttggagca

SEQ ID NO: 262323 - DNA, 15 bp, Homo sapiens
actgaggcttggagc

SEQ ID NO: 262324 - DNA, 15 bp, Homo sapiens
aactgaggcttggag

SEQ ID NO: 262325 - DNA, 15 bp, Homo sapiens
gaactgaggcttgga

SEQ ID NO: 262326 - DNA, 15 bp, Homo sapiens
ggaactgaggcttgg

SEQ ID NO: 262327 - DNA, 15 bp, Homo sapiens
aggaactgaggcttg

SEQ ID NO: 262328 - DNA, 15 bp, Homo sapiens
aaggaactgaggctt

SEQ ID NO: 262329 - DNA, 15 bp, Homo sapiens
taaggaactgaggct

SEQ ID NO: 262330 - DNA, 15 bp, Homo sapiens
ttaaggaactgaggc

SEQ ID NO: 262331 - DNA, 15 bp, Homo sapiens
attaaggaactgagg

SEQ ID NO: 262332 - DNA, 15 bp, Homo sapiens
gattaaggaactgag

SEQ ID NO: 262333 - DNA, 15 bp, Homo sapiens
agattaaggaactga

SEQ ID NO: 262334 - DNA, 15 bp, Homo sapiens
cagattaaggaactg

SEQ ID NO: 262335 - DNA, 15 bp, Homo sapiens
tcagattaaggaact

SEQ ID NO: 262336 - DNA, 15 bp, Homo sapiens
ttcagattaaggaac

SEQ ID NO: 262337 - DNA, 15 bp, Homo sapiens
cttcagattaaggaa

SEQ ID NO: 262338 - DNA, 15 bp, Homo sapiens
tcttcagattaagga

SEQ ID NO: 262339 - DNA, 15 bp, Homo sapiens
ctcttcagattaagg

SEQ ID NO: 262340 - DNA, 15 bp, Homo sapiens
cctcttcagattaag

SEQ ID NO: 262341 - DNA, 15 bp, Homo sapiens
acctcttcagattaa

SEQ ID NO: 262342 - DNA, 15 bp, Homo sapiens
aacctcttcagatta

SEQ ID NO: 262343 - DNA, 15 bp, Homo sapiens
taacctcttcagatt

SEQ ID NO: 262344 - DNA, 15 bp, Homo sapiens
ctaacctcttcagat

SEQ ID NO: 262345 - DNA, 15 bp, Homo sapiens
actaacctcttcaga

SEQ ID NO: 262346 - DNA, 15 bp, Homo sapiens
cactaacctcttcag

SEQ ID NO: 262347 - DNA, 15 bp, Homo sapiens
acactaacctcttca

SEQ ID NO: 262348 - DNA, 15 bp, Homo sapiens
cacactaacctcttc

SEQ ID NO: 262349 - DNA, 15 bp, Homo sapiens
tcacactaacctctt

SEQ ID NO: 262350 - DNA, 15 bp, Homo sapiens
ttcacactaacctct

SEQ ID NO: 262351 - DNA, 15 bp, Homo sapiens
cttcacactaacctc

SEQ ID NO: 262352 - DNA, 15 bp, Homo sapiens
ccttcacactaacct

SEQ ID NO: 262353 - DNA, 15 bp, Homo sapiens
cccttcacactaacc

SEQ ID NO: 262354 - DNA, 15 bp, Homo sapiens
ccccttcacactaac

SEQ ID NO: 262355 - DNA, 15 bp, Homo sapiens
tccccttcacactaa

SEQ ID NO: 262356 - DNA, 15 bp, Homo sapiens
ctccccttcacacta

SEQ ID NO: 262357 - DNA, 15 bp, Homo sapiens
tctccccttcacact

SEQ ID NO: 262358 - DNA, 15 bp, Homo sapiens
ttctccccttcacac

SEQ ID NO: 262359 - DNA, 15 bp, Homo sapiens
tttctccccttcaca

SEQ ID NO: 262360 - DNA, 15 bp, Homo sapiens
ttttctccccttcac

SEQ ID NO: 262361 - DNA, 15 bp, Homo sapiens
tttttctccccttca

SEQ ID NO: 262362 - DNA, 15 bp, Homo sapiens
ctttttctccccttc

SEQ ID NO: 262363 - DNA, 15 bp, Homo sapiens
actttttctcccctt

SEQ ID NO: 262364 - DNA, 15 bp, Homo sapiens
tactttttctcccct

SEQ ID NO: 262365 - DNA, 15 bp, Homo sapiens
ttactttttctcccc

SEQ ID NO: 262366 - DNA, 15 bp, Homo sapiens
gttactttttctccc

SEQ ID NO: 262367 - DNA, 15 bp, Homo sapiens
tgttactttttctcc

SEQ ID NO: 262368 - DNA, 15 bp, Homo sapiens
atgttactttttctc

SEQ ID NO: 262369 - DNA, 15 bp, Homo sapiens
tatgttactttttct

SEQ ID NO: 262370 - DNA, 15 bp, Homo sapiens
atatgttactttttc

SEQ ID NO: 262371 - DNA, 15 bp, Homo sapiens
catatgttacttttt

SEQ ID NO: 262372 - DNA, 15 bp, Homo sapiens
acatatgttactttt

SEQ ID NO: 262373 - DNA, 15 bp, Homo sapiens
aacatatgttacttt

SEQ ID NO: 262374 - DNA, 15 bp, Homo sapiens
taacatatgttactt

SEQ ID NO: 262375 - DNA, 15 bp, Homo sapiens
ttaacatatgttact

SEQ ID NO: 262376 - DNA, 15 bp, Homo sapiens
attaacatatgttac

SEQ ID NO: 262377 - DNA, 15 bp, Homo sapiens
cattaacatatgtta

SEQ ID NO: 262378 - DNA, 15 bp, Homo sapiens
acattaacatatgtt

SEQ ID NO: 262379 - DNA, 15 bp, Homo sapiens
cacattaacatatgt

SEQ ID NO: 262380 - DNA, 15 bp, Homo sapiens
gcacattaacatatg

SEQ ID NO: 262381 - DNA, 15 bp, Homo sapiens
ggcacattaacatat

SEQ ID NO: 262382 - DNA, 15 bp, Homo sapiens
aggcacattaacata

SEQ ID NO: 262383 - DNA, 15 bp, Homo sapiens
taggcacattaacat

SEQ ID NO: 262384 - DNA, 15 bp, Homo sapiens
ttaggcacattaaca

SEQ ID NO: 262385 - DNA, 15 bp, Homo sapiens
cttaggcacattaac

SEQ ID NO: 262386 - DNA, 15 bp, Homo sapiens
tcttaggcacattaa

SEQ ID NO: 262387 - DNA, 15 bp, Homo sapiens
atcttaggcacatta

SEQ ID NO: 262388 - DNA, 15 bp, Homo sapiens
catcttaggcacatt

SEQ ID NO: 262389 - DNA, 15 bp, Homo sapiens
ccatcttaggcacat

SEQ ID NO: 262390 - DNA, 15 bp, Homo sapiens
accatcttaggcaca

SEQ ID NO: 262391 - DNA, 15 bp, Homo sapiens
taccatcttaggcac

SEQ ID NO: 262392 - DNA, 15 bp, Homo sapiens
ataccatcttaggca

SEQ ID NO: 262393 - DNA, 15 bp, Homo sapiens
gataccatcttaggc

SEQ ID NO: 262394 - DNA, 15 bp, Homo sapiens
agataccatcttagg

SEQ ID NO: 262395 - DNA, 15 bp, Homo sapiens
cagataccatcttag

SEQ ID NO: 262396 - DNA, 15 bp, Homo sapiens
ccagataccatctta

SEQ ID NO: 262397 - DNA, 15 bp, Homo sapiens
gccagataccatctt

SEQ ID NO: 262398 - DNA, 15 bp, Homo sapiens
tgccagataccatct

SEQ ID NO: 262399 - DNA, 15 bp, Homo sapiens
gtgccagataccatc

SEQ ID NO: 262400 - DNA, 15 bp, Homo sapiens
tgtgccagataccat

SEQ ID NO: 262401 - DNA, 15 bp, Homo sapiens
gtgtgccagatacca

SEQ ID NO: 262402 - DNA, 15 bp, Homo sapiens
tgtgtgccagatacc

SEQ ID NO: 262403 - DNA, 15 bp, Homo sapiens
ctgtgtgccagatac

SEQ ID NO: 262404 - DNA, 15 bp, Homo sapiens
cctgtgtgccagata

SEQ ID NO: 262405 - DNA, 15 bp, Homo sapiens
tcctgtgtgccagat

SEQ ID NO: 262406 - DNA, 15 bp, Homo sapiens
ttcctgtgtgccaga

SEQ ID NO: 262407 - DNA, 15 bp, Homo sapiens
attcctgtgtgccag

SEQ ID NO: 262408 - DNA, 15 bp, Homo sapiens
cattcctgtgtgcca

SEQ ID NO: 262409 - DNA, 15 bp, Homo sapiens
gcattcctgtgtgcc

SEQ ID NO: 262410 - DNA, 15 bp, Homo sapiens
agcattcctgtgtgc

SEQ ID NO: 262411 - DNA, 15 bp, Homo sapiens
aagcattcctgtgtg

SEQ ID NO: 262412 - DNA, 15 bp, Homo sapiens
caagcattcctgtgt

SEQ ID NO: 262413 - DNA, 15 bp, Homo sapiens
acaagcattcctgtg

SEQ ID NO: 262414 - DNA, 15 bp, Homo sapiens
aacaagcattcctgt

SEQ ID NO: 262415 - DNA, 15 bp, Homo sapiens
taacaagcattcctg

SEQ ID NO: 262416 - DNA, 15 bp, Homo sapiens
ctaacaagcattcct

SEQ ID NO: 262417 - DNA, 15 bp, Homo sapiens
tctaacaagcattcc

SEQ ID NO: 262418 - DNA, 15 bp, Homo sapiens
atctaacaagcattc

SEQ ID NO: 262419 - DNA, 15 bp, Homo sapiens
catctaacaagcatt

SEQ ID NO: 262420 - DNA, 15 bp, Homo sapiens
acatctaacaagcat

SEQ ID NO: 262421 - DNA, 15 bp, Homo sapiens
cacatctaacaagca

SEQ ID NO: 262422 - DNA, 15 bp, Homo sapiens
acacatctaacaagc

SEQ ID NO: 262423 - DNA, 15 bp, Homo sapiens
cacacatctaacaag

SEQ ID NO: 262424 - DNA, 15 bp, Homo sapiens
ccacacatctaacaa

SEQ ID NO: 262425 - DNA, 15 bp, Homo sapiens
accacacatctaaca

SEQ ID NO: 262426 - DNA, 15 bp, Homo sapiens
caccacacatctaac

SEQ ID NO: 262427 - DNA, 15 bp, Homo sapiens
acaccacacatctaa

SEQ ID NO: 262428 - DNA, 15 bp, Homo sapiens
cacaccacacatcta

SEQ ID NO: 262429 - DNA, 15 bp, Homo sapiens
ccacaccacacatct

SEQ ID NO: 262430 - DNA, 15 bp, Homo sapiens
gccacaccacacatc

SEQ ID NO: 262431 - DNA, 15 bp, Homo sapiens
agccacaccacacat

SEQ ID NO: 262432 - DNA, 15 bp, Homo sapiens
aagccacaccacaca

SEQ ID NO: 262433 - DNA, 15 bp, Homo sapiens
aaagccacaccacac

SEQ ID NO: 262434 - DNA, 15 bp, Homo sapiens
caaagccacaccaca

SEQ ID NO: 262435 - DNA, 15 bp, Homo sapiens
ccaaagccacaccac

SEQ ID NO: 262436 - DNA, 15 bp, Homo sapiens
cccaaagccacacca

SEQ ID NO: 262437 - DNA, 15 bp, Homo sapiens
gcccaaagccacacc

SEQ ID NO: 262438 - DNA, 15 bp, Homo sapiens
agcccaaagccacac

SEQ ID NO: 262439 - DNA, 15 bp, Homo sapiens
cagcccaaagccaca

SEQ ID NO: 262440 - DNA, 15 bp, Homo sapiens
tcagcccaaagccac

SEQ ID NO: 262441 - DNA, 15 bp, Homo sapiens
gtcagcccaaagcca

SEQ ID NO: 262442 - DNA, 15 bp, Homo sapiens
agtcagcccaaagcc

SEQ ID NO: 262443 - DNA, 15 bp, Homo sapiens
tagtcagcccaaagc

SEQ ID NO: 262444 - DNA, 15 bp, Homo sapiens
ctagtcagcccaaag

SEQ ID NO: 262445 - DNA, 15 bp, Homo sapiens
cctagtcagcccaaa

SEQ ID NO: 262446 - DNA, 15 bp, Homo sapiens
tcctagtcagcccaa

SEQ ID NO: 262447 - DNA, 15 bp, Homo sapiens
atcctagtcagccca

SEQ ID NO: 262448 - DNA, 15 bp, Homo sapiens
gatcctagtcagccc

SEQ ID NO: 262449 - DNA, 15 bp, Homo sapiens
tgatcctagtcagcc

SEQ ID NO: 262450 - DNA, 15 bp, Homo sapiens
gtgatcctagtcagc

SEQ ID NO: 262451 - DNA, 15 bp, Homo sapiens
ggtgatcctagtcag

SEQ ID NO: 262452 - DNA, 15 bp, Homo sapiens
tggtgatcctagtca

SEQ ID NO: 262453 - DNA, 15 bp, Homo sapiens
atggtgatcctagtc

SEQ ID NO: 262454 - DNA, 15 bp, Homo sapiens
catggtgatcctagt

SEQ ID NO: 262455 - DNA, 15 bp, Homo sapiens
ccatggtgatcctag

SEQ ID NO: 262456 - DNA, 15 bp, Homo sapiens
accatggtgatccta

SEQ ID NO: 262457 - DNA, 15 bp, Homo sapiens
taccatggtgatcct

SEQ ID NO: 262458 - DNA, 15 bp, Homo sapiens
ataccatggtgatcc

SEQ ID NO: 262459 - DNA, 15 bp, Homo sapiens
cataccatggtgatc

SEQ ID NO: 262460 - DNA, 15 bp, Homo sapiens
ccataccatggtgat

SEQ ID NO: 262461 - DNA, 15 bp, Homo sapiens
cccataccatggtga

SEQ ID NO: 262462 - DNA, 15 bp, Homo sapiens
gcccataccatggtg

SEQ ID NO: 262463 - DNA, 15 bp, Homo sapiens
tgcccataccatggt

SEQ ID NO: 262464 - DNA, 15 bp, Homo sapiens
gtgcccataccatgg

SEQ ID NO: 262465 - DNA, 15 bp, Homo sapiens
ggtgcccataccatg

SEQ ID NO: 262466 - DNA, 15 bp, Homo sapiens
aggtgcccataccat

SEQ ID NO: 262467 - DNA, 15 bp, Homo sapiens
aaggtgcccatacca

SEQ ID NO: 262468 - DNA, 15 bp, Homo sapiens
aaaggtgcccatacc

SEQ ID NO: 262469 - DNA, 15 bp, Homo sapiens
aaaaggtgcccatac

SEQ ID NO: 262470 - DNA, 15 bp, Homo sapiens
caaaaggtgcccata

SEQ ID NO: 262471 - DNA, 15 bp, Homo sapiens
ccaaaaggtgcccat

SEQ ID NO: 262472 - DNA, 15 bp, Homo sapiens
tccaaaaggtgccca

SEQ ID NO: 262473 - DNA, 15 bp, Homo sapiens
atccaaaaggtgccc

SEQ ID NO: 262474 - DNA, 15 bp, Homo sapiens
gatccaaaaggtgcc

SEQ ID NO: 262475 - DNA, 15 bp, Homo sapiens
cgatccaaaaggtgc

SEQ ID NO: 262476 - DNA, 15 bp, Homo sapiens
tcgatccaaaaggtg

SEQ ID NO: 262477 - DNA, 15 bp, Homo sapiens
ctcgatccaaaaggt

SEQ ID NO: 262478 - DNA, 15 bp, Homo sapiens
tctcgatccaaaagg

SEQ ID NO: 262479 - DNA, 15 bp, Homo sapiens
atctcgatccaaaag

SEQ ID NO: 262480 - DNA, 15 bp, Homo sapiens
gatctcgatccaaaa

SEQ ID NO: 262481 - DNA, 15 bp, Homo sapiens
agatctcgatccaaa

SEQ ID NO: 262482 - DNA, 15 bp, Homo sapiens
gagatctcgatccaa

SEQ ID NO: 262483 - DNA, 15 bp, Homo sapiens
tgagatctcgatcca

SEQ ID NO: 262484 - DNA, 15 bp, Homo sapiens
ctgagatctcgatcc

SEQ ID NO: 262485 - DNA, 15 bp, Homo sapiens
tctgagatctcgatc

SEQ ID NO: 262486 - DNA, 15 bp, Homo sapiens
ttctgagatctcgat

SEQ ID NO: 262487 - DNA, 15 bp, Homo sapiens
tttctgagatctcga

SEQ ID NO: 262488 - DNA, 15 bp, Homo sapiens
atttctgagatctcg

SEQ ID NO: 262489 - DNA, 15 bp, Homo sapiens
aatttctgagatctc

SEQ ID NO: 262490 - DNA, 15 bp, Homo sapiens
taatttctgagatct

SEQ ID NO: 262491 - DNA, 15 bp, Homo sapiens
ttaatttctgagatc

SEQ ID NO: 262492 - DNA, 15 bp, Homo sapiens
gttaatttctgagat

SEQ ID NO: 262493 - DNA, 15 bp, Homo sapiens
ggttaatttctgaga

SEQ ID NO: 262494 - DNA, 15 bp, Homo sapiens
gggttaatttctgag

SEQ ID NO: 262495 - DNA, 15 bp, Homo sapiens
agggttaatttctga

SEQ ID NO: 262496 - DNA, 15 bp, Homo sapiens
aagggttaatttctg

SEQ ID NO: 262497 - DNA, 15 bp, Homo sapiens
aaagggttaatttct

SEQ ID NO: 262498 - DNA, 15 bp, Homo sapiens
caaagggttaatttc

SEQ ID NO: 262499 - DNA, 15 bp, Homo sapiens
ccaaagggttaattt

SEQ ID NO: 262500 - DNA, 15 bp, Homo sapiens
accaaagggttaatt

SEQ ID NO: 262501 - DNA, 15 bp, Homo sapiens
aaccaaagggttaat

SEQ ID NO: 262502 - DNA, 15 bp, Homo sapiens
caaccaaagggttaa

SEQ ID NO: 262503 - DNA, 15 bp, Homo sapiens
acaaccaaagggtta

SEQ ID NO: 262504 - DNA, 15 bp, Homo sapiens
aacaaccaaagggtt

SEQ ID NO: 262505 - DNA, 15 bp, Homo sapiens
caacaaccaaagggt

SEQ ID NO: 262506 - DNA, 15 bp, Homo sapiens
ccaacaaccaaaggg

SEQ ID NO: 262507 - DNA, 15 bp, Homo sapiens
tccaacaaccaaagg

SEQ ID NO: 262508 - DNA, 15 bp, Homo sapiens
atccaacaaccaaag

SEQ ID NO: 262509 - DNA, 15 bp, Homo sapiens
gatccaacaaccaaa

SEQ ID NO: 262510 - DNA, 15 bp, Homo sapiens
tgatccaacaaccaa

SEQ ID NO: 262511 - DNA, 15 bp, Homo sapiens
atgatccaacaacca

SEQ ID NO: 262512 - DNA, 15 bp, Homo sapiens
catgatccaacaacc

SEQ ID NO: 262513 - DNA, 15 bp, Homo sapiens
ccatgatccaacaac

SEQ ID NO: 262514 - DNA, 15 bp, Homo sapiens
cccatgatccaacaa

SEQ ID NO: 262515 - DNA, 15 bp, Homo sapiens
ccccatgatccaaca

SEQ ID NO: 262516 - DNA, 15 bp, Homo sapiens
accccatgatccaac

SEQ ID NO: 262517 - DNA, 15 bp, Homo sapiens
aaccccatgatccaa

SEQ ID NO: 262518 - DNA, 15 bp, Homo sapiens
caaccccatgatcca

SEQ ID NO: 262519 - DNA, 15 bp, Homo sapiens
ccaaccccatgatcc

SEQ ID NO: 262520 - DNA, 15 bp, Homo sapiens
cccaaccccatgatc

SEQ ID NO: 262521 - DNA, 15 bp, Homo sapiens
tcccaaccccatgat

SEQ ID NO: 262522 - DNA, 15 bp, Homo sapiens
atcccaaccccatga

SEQ ID NO: 262523 - DNA, 15 bp, Homo sapiens
catcccaaccccatg

SEQ ID NO: 262524 - DNA, 15 bp, Homo sapiens
ccatcccaaccccat

SEQ ID NO: 262525 - DNA, 15 bp, Homo sapiens
cccatcccaacccca

SEQ ID NO: 262526 - DNA, 15 bp, Homo sapiens
ccccatcccaacccc

SEQ ID NO: 262527 - DNA, 15 bp, Homo sapiens
cccccatcccaaccc

SEQ ID NO: 262528 - DNA, 15 bp, Homo sapiens
tcccccatcccaacc

SEQ ID NO: 262529 - DNA, 15 bp, Homo sapiens
atcccccatcccaac

SEQ ID NO: 262530 - DNA, 15 bp, Homo sapiens
tatcccccatcccaa

SEQ ID NO: 262531 - DNA, 15 bp, Homo sapiens
ctatcccccatccca

SEQ ID NO: 262532 - DNA, 15 bp, Homo sapiens
cctatcccccatccc

SEQ ID NO: 262533 - DNA, 15 bp, Homo sapiens
gcctatcccccatcc

SEQ ID NO: 262534 - DNA, 15 bp, Homo sapiens
tgcctatcccccatc

SEQ ID NO: 262535 - DNA, 15 bp, Homo sapiens
gtgcctatcccccat

SEQ ID NO: 262536 - DNA, 15 bp, Homo sapiens
agtgcctatccccca

SEQ ID NO: 262537 - DNA, 15 bp, Homo sapiens
cagtgcctatccccc

SEQ ID NO: 262538 - DNA, 15 bp, Homo sapiens
gcagtgcctatcccc

SEQ ID NO: 262539 - DNA, 15 bp, Homo sapiens
tgcagtgcctatccc

SEQ ID NO: 262540 - DNA, 15 bp, Homo sapiens
ctgcagtgcctatcc

SEQ ID NO: 262541 - DNA, 15 bp, Homo sapiens
gctgcagtgcctatc

SEQ ID NO: 262542 - DNA, 15 bp, Homo sapiens
tgctgcagtgcctat

SEQ ID NO: 262543 - DNA, 15 bp, Homo sapiens
ctgctgcagtgccta

SEQ ID NO: 262544 - DNA, 15 bp, Homo sapiens
gctgctgcagtgcct

SEQ ID NO: 262545 - DNA, 15 bp, Homo sapiens
tgctgctgcagtgcc

SEQ ID NO: 262546 - DNA, 15 bp, Homo sapiens
ctgctgctgcagtgc

SEQ ID NO: 262547 - DNA, 15 bp, Homo sapiens
cctgctgctgcagtg

SEQ ID NO: 262548 - DNA, 15 bp, Homo sapiens
ccctgctgctgcagt

SEQ ID NO: 262549 - DNA, 15 bp, Homo sapiens
cccctgctgctgcag

SEQ ID NO: 262550 - DNA, 15 bp, Homo sapiens
gcccctgctgctgca

SEQ ID NO: 262551 - DNA, 15 bp, Homo sapiens
tgcccctgctgctgc

SEQ ID NO: 262552 - DNA, 15 bp, Homo sapiens
ctgcccctgctgctg

SEQ ID NO: 262553 - DNA, 15 bp, Homo sapiens
gctgcccctgctgct

SEQ ID NO: 262554 - DNA, 15 bp, Homo sapiens
agctgcccctgctgc

SEQ ID NO: 262555 - DNA, 15 bp, Homo sapiens
cagctgcccctgctg

SEQ ID NO: 262556 - DNA, 15 bp, Homo sapiens
tcagctgcccctgct

SEQ ID NO: 262557 - DNA, 15 bp, Homo sapiens
ctcagctgcccctgc

SEQ ID NO: 262558 - DNA, 15 bp, Homo sapiens
cctcagctgcccctg

SEQ ID NO: 262559 - DNA, 15 bp, Homo sapiens
ccctcagctgcccct

SEQ ID NO: 262560 - DNA, 15 bp, Homo sapiens
cccctcagctgcccc

SEQ ID NO: 262561 - DNA, 15 bp, Homo sapiens
ccccctcagctgccc

SEQ ID NO: 262562 - DNA, 15 bp, Homo sapiens
gccccctcagctgcc

SEQ ID NO: 262563 - DNA, 15 bp, Homo sapiens
tgccccctcagctgc

SEQ ID NO: 262564 - DNA, 15 bp, Homo sapiens
gtgccccctcagctg

SEQ ID NO: 262565 - DNA, 15 bp, Homo sapiens
agtgccccctcagct

SEQ ID NO: 262566 - DNA, 15 bp, Homo sapiens
gagtgccccctcagc

SEQ ID NO: 262567 - DNA, 15 bp, Homo sapiens
ggagtgccccctcag

SEQ ID NO: 262568 - DNA, 15 bp, Homo sapiens
aggagtgccccctca

SEQ ID NO: 262569 - DNA, 15 bp, Homo sapiens
taggagtgccccctc

SEQ ID NO: 262570 - DNA, 15 bp, Homo sapiens
ttaggagtgccccct

SEQ ID NO: 262571 - DNA, 15 bp, Homo sapiens
cttaggagtgccccc

SEQ ID NO: 262572 - DNA, 15 bp, Homo sapiens
acttaggagtgcccc

SEQ ID NO: 262573 - DNA, 15 bp, Homo sapiens
gacttaggagtgccc

SEQ ID NO: 262574 - DNA, 15 bp, Homo sapiens
tgacttaggagtgcc

SEQ ID NO: 262575 - DNA, 15 bp, Homo sapiens
ttgacttaggagtgc

SEQ ID NO: 262576 - DNA, 15 bp, Homo sapiens
cttgacttaggagtg

SEQ ID NO: 262577 - DNA, 15 bp, Homo sapiens
ccttgacttaggagt

SEQ ID NO: 262578 - DNA, 15 bp, Homo sapiens
gccttgacttaggag

SEQ ID NO: 262579 - DNA, 15 bp, Homo sapiens
ggccttgacttagga

SEQ ID NO: 262580 - DNA, 15 bp, Homo sapiens
tggccttgacttagg

SEQ ID NO: 262581 - DNA, 15 bp, Homo sapiens
atggccttgacttag

SEQ ID NO: 262582 - DNA, 15 bp, Homo sapiens
aatggccttgactta

SEQ ID NO: 262583 - DNA, 15 bp, Homo sapiens
caatggccttgactt

SEQ ID NO: 262584 - DNA, 15 bp, Homo sapiens
ccaatggccttgact

SEQ ID NO: 262585 - DNA, 15 bp, Homo sapiens
gccaatggccttgac

SEQ ID NO: 262586 - DNA, 15 bp, Homo sapiens
agccaatggccttga

SEQ ID NO: 262587 - DNA, 15 bp, Homo sapiens
cagccaatggccttg

SEQ ID NO: 262588 - DNA, 15 bp, Homo sapiens
acagccaatggcctt

SEQ ID NO: 262589 - DNA, 15 bp, Homo sapiens
aacagccaatggcct

SEQ ID NO: 262590 - DNA, 15 bp, Homo sapiens
aaacagccaatggcc

SEQ ID NO: 262591 - DNA, 15 bp, Homo sapiens
taaacagccaatggc

SEQ ID NO: 262592 - DNA, 15 bp, Homo sapiens
gtaaacagccaatgg

SEQ ID NO: 262593 - DNA, 15 bp, Homo sapiens
ggtaaacagccaatg

SEQ ID NO: 262594 - DNA, 15 bp, Homo sapiens
tggtaaacagccaat

SEQ ID NO: 262595 - DNA, 15 bp, Homo sapiens
ctggtaaacagccaa

SEQ ID NO: 262596 - DNA, 15 bp, Homo sapiens
gctggtaaacagcca

SEQ ID NO: 262597 - DNA, 15 bp, Homo sapiens
ggctggtaaacagcc

SEQ ID NO: 262598 - DNA, 15 bp, Homo sapiens
cggctggtaaacagc

SEQ ID NO: 262599 - DNA, 15 bp, Homo sapiens
ccggctggtaaacag

SEQ ID NO: 262600 - DNA, 15 bp, Homo sapiens
accggctggtaaaca

SEQ ID NO: 262601 - DNA, 15 bp, Homo sapiens
taccggctggtaaac

SEQ ID NO: 262602 - DNA, 15 bp, Homo sapiens
gtaccggctggtaaa

SEQ ID NO: 262603 - DNA, 15 bp, Homo sapiens
tgtaccggctggtaa

SEQ ID NO: 262604 - DNA, 15 bp, Homo sapiens
ttgtaccggctggta

SEQ ID NO: 262605 - DNA, 15 bp, Homo sapiens
tttgtaccggctggt

SEQ ID NO: 262606 - DNA, 15 bp, Homo sapiens
ttttgtaccggctgg

SEQ ID NO: 262607 - DNA, 15 bp, Homo sapiens
cttttgtaccggctg

SEQ ID NO: 262608 - DNA, 15 bp, Homo sapiens
ccttttgtaccggct

SEQ ID NO: 262609 - DNA, 15 bp, Homo sapiens
accttttgtaccggc

SEQ ID NO: 262610 - DNA, 15 bp, Homo sapiens
aaccttttgtaccgg

SEQ ID NO: 262611 - DNA, 15 bp, Homo sapiens
aaaccttttgtaccg

SEQ ID NO: 262612 - DNA, 15 bp, Homo sapiens
gaaaccttttgtacc

SEQ ID NO: 262613 - DNA, 15 bp, Homo sapiens
tgaaaccttttgtac

SEQ ID NO: 262614 - DNA, 15 bp, Homo sapiens
ttgaaaccttttgta

SEQ ID NO: 262615 - DNA, 15 bp, Homo sapiens
attgaaaccttttgt

SEQ ID NO: 262616 - DNA, 15 bp, Homo sapiens
tattgaaaccttttg

SEQ ID NO: 262617 - DNA, 15 bp, Homo sapiens
atattgaaacctttt

SEQ ID NO: 262618 - DNA, 15 bp, Homo sapiens
aatattgaaaccttt

SEQ ID NO: 262619 - DNA, 15 bp, Homo sapiens
aaatattgaaacctt

SEQ ID NO: 262620 - DNA, 15 bp, Homo sapiens
caaatattgaaacct

SEQ ID NO: 262621 - DNA, 15 bp, Homo sapiens
tcaaatattgaaacc

SEQ ID NO: 262622 - DNA, 15 bp, Homo sapiens
ctcaaatattgaaac

SEQ ID NO: 262623 - DNA, 15 bp, Homo sapiens
tctcaaatattgaaa

SEQ ID NO: 262624 - DNA, 15 bp, Homo sapiens
ctctcaaatattgaa

SEQ ID NO: 262625 - DNA, 15 bp, Homo sapiens
tctctcaaatattga

SEQ ID NO: 262626 - DNA, 15 bp, Homo sapiens
gtctctcaaatattg

SEQ ID NO: 262627 - DNA, 15 bp, Homo sapiens
agtctctcaaatatt

SEQ ID NO: 262628 - DNA, 15 bp, Homo sapiens
cagtctctcaaatat

SEQ ID NO: 262629 - DNA, 15 bp, Homo sapiens
ccagtctctcaaata

SEQ ID NO: 262630 - DNA, 15 bp, Homo sapiens
accagtctctcaaat

SEQ ID NO: 262631 - DNA, 15 bp, Homo sapiens
aaccagtctctcaaa

SEQ ID NO: 262632 - DNA, 15 bp, Homo sapiens
aaaccagtctctcaa

SEQ ID NO: 262633 - DNA, 15 bp, Homo sapiens
taaaccagtctctca

SEQ ID NO: 262634 - DNA, 15 bp, Homo sapiens
ctaaaccagtctctc

SEQ ID NO: 262635 - DNA, 15 bp, Homo sapiens
actaaaccagtctct

SEQ ID NO: 262636 - DNA, 15 bp, Homo sapiens
aactaaaccagtctc

SEQ ID NO: 262637 - DNA, 15 bp, Homo sapiens
caactaaaccagtct

SEQ ID NO: 262638 - DNA, 15 bp, Homo sapiens
atgttcagtagatgg

SEQ ID NO: 262639 - DNA, 15 bp, Homo sapiens
gatgttcagtagatg

SEQ ID NO: 262640 - DNA, 15 bp, Homo sapiens
tgatgttcagtagat

SEQ ID NO: 262641 - DNA, 15 bp, Homo sapiens
atgatgttcagtaga

SEQ ID NO: 262642 - DNA, 15 bp, Homo sapiens
catgatgttcagtag

SEQ ID NO: 262643 - DNA, 15 bp, Homo sapiens
ccatgatgttcagta

SEQ ID NO: 262644 - DNA, 15 bp, Homo sapiens
gccatgatgttcagt

SEQ ID NO: 262645 - DNA, 15 bp, Homo sapiens
agccatgatgttcag

SEQ ID NO: 262646 - DNA, 15 bp, Homo sapiens
aagccatgatgttca

SEQ ID NO: 262647 - DNA, 15 bp, Homo sapiens
taagccatgatgttc

SEQ ID NO: 262648 - DNA, 15 bp, Homo sapiens
ctaagccatgatgtt

SEQ ID NO: 262649 - DNA, 15 bp, Homo sapiens
gctaagccatgatgt

SEQ ID NO: 262650 - DNA, 15 bp, Homo sapiens
ggctaagccatgatg

SEQ ID NO: 262651 - DNA, 15 bp, Homo sapiens
aggctaagccatgat

SEQ ID NO: 262652 - DNA, 15 bp, Homo sapiens
taggctaagccatga

SEQ ID NO: 262653 - DNA, 15 bp, Homo sapiens
ctaggctaagccatg

SEQ ID NO: 262654 - DNA, 15 bp, Homo sapiens
gctaggctaagccat

SEQ ID NO: 262655 - DNA, 15 bp, Homo sapiens
ggctaggctaagcca

SEQ ID NO: 262656 - DNA, 15 bp, Homo sapiens
aggctaggctaagcc

SEQ ID NO: 262657 - DNA, 15 bp, Homo sapiens
aaggctaggctaagc

SEQ ID NO: 262658 - DNA, 15 bp, Homo sapiens
taaggctaggctaag

SEQ ID NO: 262659 - DNA, 15 bp, Homo sapiens
ttaaggctaggctaa

SEQ ID NO: 262660 - DNA, 15 bp, Homo sapiens
tttaaggctaggcta

SEQ ID NO: 262661 - DNA, 15 bp, Homo sapiens
gtttaaggctaggct

SEQ ID NO: 262662 - DNA, 15 bp, Homo sapiens
ggtttaaggctaggc

SEQ ID NO: 262663 - DNA, 15 bp, Homo sapiens
aggtttaaggctagg

SEQ ID NO: 262664 - DNA, 15 bp, Homo sapiens
aaggtttaaggctag

SEQ ID NO: 262665 - DNA, 15 bp, Homo sapiens
taaggtttaaggcta

SEQ ID NO: 262666 - DNA, 15 bp, Homo sapiens
ttaaggtttaaggct

SEQ ID NO: 262667 - DNA, 15 bp, Homo sapiens
tttaaggtttaaggc

SEQ ID NO: 262668 - DNA, 15 bp, Homo sapiens
atttaaggtttaagg

SEQ ID NO: 262669 - DNA, 15 bp, Homo sapiens
catttaaggtttaag

SEQ ID NO: 262670 - DNA, 15 bp, Homo sapiens
acatttaaggtttaa

SEQ ID NO: 262671 - DNA, 15 bp, Homo sapiens
cacatttaaggttta

SEQ ID NO: 262672 - DNA, 15 bp, Homo sapiens
gcacatttaaggttt

SEQ ID NO: 262673 - DNA, 15 bp, Homo sapiens
agcacatttaaggtt

SEQ ID NO: 262674 - DNA, 15 bp, Homo sapiens
gagcacatttaaggt

SEQ ID NO: 262675 - DNA, 15 bp, Homo sapiens
tgagcacatttaagg

SEQ ID NO: 262676 - DNA, 15 bp, Homo sapiens
ctgagcacatttaag

SEQ ID NO: 262677 - DNA, 15 bp, Homo sapiens
tctgagcacatttaa

SEQ ID NO: 262678 - DNA, 15 bp, Homo sapiens
ttctgagcacattta

SEQ ID NO: 262679 - DNA, 15 bp, Homo sapiens
gttctgagcacattt

SEQ ID NO: 262680 - DNA, 15 bp, Homo sapiens
tgttctgagcacatt

SEQ ID NO: 262681 - DNA, 15 bp, Homo sapiens
gtgttctgagcacat

SEQ ID NO: 262682 - DNA, 15 bp, Homo sapiens
agtgttctgagcaca

SEQ ID NO: 262683 - DNA, 15 bp, Homo sapiens
aagtgttctgagcac

SEQ ID NO: 262684 - DNA, 15 bp, Homo sapiens
taagtgttctgagca

SEQ ID NO: 262685 - DNA, 15 bp, Homo sapiens
gtaagtgttctgagc

SEQ ID NO: 262686 - DNA, 15 bp, Homo sapiens
tgtaagtgttctgag

SEQ ID NO: 262687 - DNA, 15 bp, Homo sapiens
atgtaagtgttctga

SEQ ID NO: 262688 - DNA, 15 bp, Homo sapiens
aatgtaagtgttctg

SEQ ID NO: 262689 - DNA, 15 bp, Homo sapiens
taatgtaagtgttct

SEQ ID NO: 262690 - DNA, 15 bp, Homo sapiens
ctaatgtaagtgttc

SEQ ID NO: 262691 - DNA, 15 bp, Homo sapiens
gctaatgtaagtgtt

SEQ ID NO: 262692 - DNA, 15 bp, Homo sapiens
agctaatgtaagtgt

SEQ ID NO: 262693 - DNA, 15 bp, Homo sapiens
gagctaatgtaagtg

SEQ ID NO: 262694 - DNA, 15 bp, Homo sapiens
tgagctaatgtaagt

SEQ ID NO: 262695 - DNA, 15 bp, Homo sapiens
atgagctaatgtaag

SEQ ID NO: 262696 - DNA, 15 bp, Homo sapiens
tatgagctaatgtaa

SEQ ID NO: 262697 - DNA, 15 bp, Homo sapiens
ctatgagctaatgta

SEQ ID NO: 262698 - DNA, 15 bp, Homo sapiens
actatgagctaatgt

SEQ ID NO: 262699 - DNA, 15 bp, Homo sapiens
aactatgagctaatg

SEQ ID NO: 262700 - DNA, 15 bp, Homo sapiens
caactatgagctaat

SEQ ID NO: 262701 - DNA, 15 bp, Homo sapiens
ccaactatgagctaa

SEQ ID NO: 262702 - DNA, 15 bp, Homo sapiens
cccaactatgagcta

SEQ ID NO: 262703 - DNA, 15 bp, Homo sapiens
gcccaactatgagct

SEQ ID NO: 262704 - DNA, 15 bp, Homo sapiens
tgcccaactatgagc

SEQ ID NO: 262705 - DNA, 15 bp, Homo sapiens
ttgcccaactatgag

SEQ ID NO: 262706 - DNA, 15 bp, Homo sapiens
tttgcccaactatga

SEQ ID NO: 262707 - DNA, 15 bp, Homo sapiens
ttttgcccaactatg

SEQ ID NO: 262708 - DNA, 15 bp, Homo sapiens
attttgcccaactat

SEQ ID NO: 262709 - DNA, 15 bp, Homo sapiens
aattttgcccaacta

SEQ ID NO: 262710 - DNA, 15 bp, Homo sapiens
taattttgcccaact

SEQ ID NO: 262711 - DNA, 15 bp, Homo sapiens
ataattttgcccaac

SEQ ID NO: 262712 - DNA, 15 bp, Homo sapiens
gataattttgcccaa

SEQ ID NO: 262713 - DNA, 15 bp, Homo sapiens
agataattttgccca

SEQ ID NO: 262714 - DNA, 15 bp, Homo sapiens
tagataattttgccc

SEQ ID NO: 262715 - DNA, 15 bp, Homo sapiens
ttagataattttgcc

SEQ ID NO: 262716 - DNA, 15 bp, Homo sapiens
gttagataattttgc

SEQ ID NO: 262717 - DNA, 15 bp, Homo sapiens
ggttagataattttg

SEQ ID NO: 262718 - DNA, 15 bp, Homo sapiens
gggttagataatttt

SEQ ID NO: 262719 - DNA, 15 bp, Homo sapiens
tgggttagataattt

SEQ ID NO: 262720 - DNA, 15 bp, Homo sapiens
ttgggttagataatt

SEQ ID NO: 262721 - DNA, 15 bp, Homo sapiens
gttgggttagataat

SEQ ID NO: 262722 - DNA, 15 bp, Homo sapiens
tgttgggttagataa

SEQ ID NO: 262723 - DNA, 15 bp, Homo sapiens
gtgttgggttagata

SEQ ID NO: 262724 - DNA, 15 bp, Homo sapiens
ggtgttgggttagat

SEQ ID NO: 262725 - DNA, 15 bp, Homo sapiens
aggtgttgggttaga

SEQ ID NO: 262726 - DNA, 15 bp, Homo sapiens
taggtgttgggttag

SEQ ID NO: 262727 - DNA, 15 bp, Homo sapiens
ataggtgttgggtta

SEQ ID NO: 262728 - DNA, 15 bp, Homo sapiens
aataggtgttgggtt

SEQ ID NO: 262729 - DNA, 15 bp, Homo sapiens
aaataggtgttgggt

SEQ ID NO: 262730 - DNA, 15 bp, Homo sapiens
aaaataggtgttggg

SEQ ID NO: 262731 - DNA, 15 bp, Homo sapiens
caaaataggtgttgg

SEQ ID NO: 262732 - DNA, 15 bp, Homo sapiens
acaaaataggtgttg

SEQ ID NO: 262733 - DNA, 15 bp, Homo sapiens
cacaaaataggtgtt

SEQ ID NO: 262734 - DNA, 15 bp, Homo sapiens
tcacaaaataggtgt

SEQ ID NO: 262735 - DNA, 15 bp, Homo sapiens
atcacaaaataggtg

SEQ ID NO: 262736 - DNA, 15 bp, Homo sapiens
tatcacaaaataggt

SEQ ID NO: 262737 - DNA, 15 bp, Homo sapiens
ttatcacaaaatagg

SEQ ID NO: 262738 - DNA, 15 bp, Homo sapiens
cttatcacaaaatag

SEQ ID NO: 262739 - DNA, 15 bp, Homo sapiens
gcttatcacaaaata

SEQ ID NO: 262740 - DNA, 15 bp, Homo sapiens
cgcttatcacaaaat

SEQ ID NO: 262741 - DNA, 15 bp, Homo sapiens
acgcttatcacaaaa

SEQ ID NO: 262742 - DNA, 15 bp, Homo sapiens
aacgcttatcacaaa

SEQ ID NO: 262743 - DNA, 15 bp, Homo sapiens
caacgcttatcacaa

SEQ ID NO: 262744 - DNA, 15 bp, Homo sapiens
tcaacgcttatcaca

SEQ ID NO: 262745 - DNA, 15 bp, Homo sapiens
ttcaacgcttatcac

SEQ ID NO: 262746 - DNA, 15 bp, Homo sapiens
gttcaacgcttatca

SEQ ID NO: 262747 - DNA, 15 bp, Homo sapiens
tgttcaacgcttatc

SEQ ID NO: 262748 - DNA, 15 bp, Homo sapiens
atgttcaacgcttat

SEQ ID NO: 262749 - DNA, 15 bp, Homo sapiens
aatgttcaacgctta

SEQ ID NO: 262750 - DNA, 15 bp, Homo sapiens
caatgttcaacgctt

SEQ ID NO: 262751 - DNA, 15 bp, Homo sapiens
gcaatgttcaacgct

SEQ ID NO: 262752 - DNA, 15 bp, Homo sapiens
tgcaatgttcaacgc

SEQ ID NO: 262753 - DNA, 15 bp, Homo sapiens
atgcaatgttcaacg

SEQ ID NO: 262754 - DNA, 15 bp, Homo sapiens
catgcaatgttcaac

SEQ ID NO: 262755 - DNA, 15 bp, Homo sapiens
acatgcaatgttcaa

SEQ ID NO: 262756 - DNA, 15 bp, Homo sapiens
tacatgcaatgttca

SEQ ID NO: 262757 - DNA, 15 bp, Homo sapiens
ttacatgcaatgttc

SEQ ID NO: 262758 - DNA, 15 bp, Homo sapiens
attacatgcaatgtt

SEQ ID NO: 262759 - DNA, 15 bp, Homo sapiens
aattacatgcaatgt

SEQ ID NO: 262760 - DNA, 15 bp, Homo sapiens
aaattacatgcaatg

SEQ ID NO: 262761 - DNA, 15 bp, Homo sapiens
taaattacatgcaat

SEQ ID NO: 262762 - DNA, 15 bp, Homo sapiens
ataaattacatgcaa

SEQ ID NO: 262763 - DNA, 15 bp, Homo sapiens
aataaattacatgca

SEQ ID NO: 262764 - DNA, 15 bp, Homo sapiens
caataaattacatgc

SEQ ID NO: 262765 - DNA, 15 bp, Homo sapiens
tcaataaattacatg

SEQ ID NO: 262766 - DNA, 15 bp, Homo sapiens
ttcaataaattacat

SEQ ID NO: 262767 - DNA, 15 bp, Homo sapiens
attcaataaattaca

SEQ ID NO: 262768 - DNA, 15 bp, Homo sapiens
tattcaataaattac

SEQ ID NO: 262769 - DNA, 15 bp, Homo sapiens
atattcaataaatta

SEQ ID NO: 262770 - DNA, 15 bp, Homo sapiens
aatattcaataaatt

SEQ ID NO: 262771 - DNA, 15 bp, Homo sapiens
caatattcaataaat

SEQ ID NO: 262772 - DNA, 15 bp, Homo sapiens
gcaatattcaataaa

SEQ ID NO: 262773 - DNA, 15 bp, Homo sapiens
tgcaatattcaataa

SEQ ID NO: 262774 - DNA, 15 bp, Homo sapiens
gtgcaatattcaata

SEQ ID NO: 262775 - DNA, 15 bp, Homo sapiens
agtgcaatattcaat

SEQ ID NO: 262776 - DNA, 15 bp, Homo sapiens
aagtgcaatattcaa

SEQ ID NO: 262777 - DNA, 15 bp, Homo sapiens
taagtgcaatattca

SEQ ID NO: 262778 - DNA, 15 bp, Homo sapiens
ttaagtgcaatattc

SEQ ID NO: 262779 - DNA, 15 bp, Homo sapiens
tttaagtgcaatatt

SEQ ID NO: 262780 - DNA, 15 bp, Homo sapiens
ctttaagtgcaatat

SEQ ID NO: 262781 - DNA, 15 bp, Homo sapiens
actttaagtgcaata

SEQ ID NO: 262782 - DNA, 15 bp, Homo sapiens
tactttaagtgcaat

SEQ ID NO: 262783 - DNA, 15 bp, Homo sapiens
ctactttaagtgcaa

SEQ ID NO: 262784 - DNA, 15 bp, Homo sapiens
cctactttaagtgca

SEQ ID NO: 262785 - DNA, 15 bp, Homo sapiens
tcctactttaagtgc

SEQ ID NO: 262786 - DNA, 15 bp, Homo sapiens
ttcctactttaagtg

SEQ ID NO: 262787 - DNA, 15 bp, Homo sapiens
tttcctactttaagt

SEQ ID NO: 262788 - DNA, 15 bp, Homo sapiens
gtttcctactttaag

SEQ ID NO: 262789 - DNA, 15 bp, Homo sapiens
tgtttcctactttaa

SEQ ID NO: 262790 - DNA, 15 bp, Homo sapiens
ttgtttcctacttta

SEQ ID NO: 262791 - DNA, 15 bp, Homo sapiens
tttgtttcctacttt

SEQ ID NO: 262792 - DNA, 15 bp, Homo sapiens
ttttgtttcctactt

SEQ ID NO: 262793 - DNA, 15 bp, Homo sapiens
attttgtttcctact

SEQ ID NO: 262794 - DNA, 15 bp, Homo sapiens
cattttgtttcctac

SEQ ID NO: 262795 - DNA, 15 bp, Homo sapiens
ccattttgtttccta

SEQ ID NO: 262796 - DNA, 15 bp, Homo sapiens
accattttgtttcct

SEQ ID NO: 262797 - DNA, 15 bp, Homo sapiens
gaccattttgtttcc

SEQ ID NO: 262798 - DNA, 15 bp, Homo sapiens
cgaccattttgtttc

SEQ ID NO: 262799 - DNA, 15 bp, Homo sapiens
acgaccattttgttt

SEQ ID NO: 262800 - DNA, 15 bp, Homo sapiens
tacgaccattttgtt

SEQ ID NO: 262801 - DNA, 15 bp, Homo sapiens
atacgaccattttgt

SEQ ID NO: 262802 - DNA, 15 bp, Homo sapiens
catacgaccattttg

SEQ ID NO: 262803 - DNA, 15 bp, Homo sapiens
ccatacgaccatttt

SEQ ID NO: 262804 - DNA, 15 bp, Homo sapiens
cccatacgaccattt

SEQ ID NO: 262805 - DNA, 15 bp, Homo sapiens
acccatacgaccatt

SEQ ID NO: 262806 - DNA, 15 bp, Homo sapiens
tacccatacgaccat

SEQ ID NO: 262807 - DNA, 15 bp, Homo sapiens
gtacccatacgacca

SEQ ID NO: 262808 - DNA, 15 bp, Homo sapiens
agtacccatacgacc

SEQ ID NO: 262809 - DNA, 15 bp, Homo sapiens
aagtacccatacgac

SEQ ID NO: 262810 - DNA, 15 bp, Homo sapiens
caagtacccatacga

SEQ ID NO: 262811 - DNA, 15 bp, Homo sapiens
tcaagtacccatacg

SEQ ID NO: 262812 - DNA, 15 bp, Homo sapiens
ttcaagtacccatac

SEQ ID NO: 262813 - DNA, 15 bp, Homo sapiens
cttcaagtacccata

SEQ ID NO: 262814 - DNA, 15 bp, Homo sapiens
acttcaagtacccat

SEQ ID NO: 262815 - DNA, 15 bp, Homo sapiens
tacttcaagtaccca

SEQ ID NO: 262816 - DNA, 15 bp, Homo sapiens
gtacttcaagtaccc

SEQ ID NO: 262817 - DNA, 15 bp, Homo sapiens
tgtacttcaagtacc

SEQ ID NO: 262818 - DNA, 15 bp, Homo sapiens
ctgtacttcaagtac

SEQ ID NO: 262819 - DNA, 15 bp, Homo sapiens
gctgtacttcaagta

SEQ ID NO: 262820 - DNA, 15 bp, Homo sapiens
agctgtacttcaagt

SEQ ID NO: 262821 - DNA, 15 bp, Homo sapiens
aagctgtacttcaag

SEQ ID NO: 262822 - DNA, 15 bp, Homo sapiens
gaagctgtacttcaa

SEQ ID NO: 262823 - DNA, 15 bp, Homo sapiens
agaagctgtacttca

SEQ ID NO: 262824 - DNA, 15 bp, Homo sapiens
aagaagctgtacttc

SEQ ID NO: 262825 - DNA, 15 bp, Homo sapiens
gaagaagctgtactt

SEQ ID NO: 262826 - DNA, 15 bp, Homo sapiens
agaagaagctgtact

SEQ ID NO: 262827 - DNA, 15 bp, Homo sapiens
cagaagaagctgtac

SEQ ID NO: 262828 - DNA, 15 bp, Homo sapiens
tcagaagaagctgta

SEQ ID NO: 262829 - DNA, 15 bp, Homo sapiens
ttcagaagaagctgt

SEQ ID NO: 262830 - DNA, 15 bp, Homo sapiens
attcagaagaagctg

SEQ ID NO: 262831 - DNA, 15 bp, Homo sapiens
tattcagaagaagct

SEQ ID NO: 262832 - DNA, 15 bp, Homo sapiens
gtattcagaagaagc

SEQ ID NO: 262833 - DNA, 15 bp, Homo sapiens
ggtattcagaagaag

SEQ ID NO: 262834 - DNA, 15 bp, Homo sapiens
gggtattcagaagaa

SEQ ID NO: 262835 - DNA, 15 bp, Homo sapiens
tgggtattcagaaga

SEQ ID NO: 262836 - DNA, 15 bp, Homo sapiens
atgggtattcagaag

SEQ ID NO: 262837 - DNA, 15 bp, Homo sapiens
aatgggtattcagaa

SEQ ID NO: 262838 - DNA, 15 bp, Homo sapiens
caatgggtattcaga

SEQ ID NO: 262839 - DNA, 15 bp, Homo sapiens
gcaatgggtattcag

SEQ ID NO: 262840 - DNA, 15 bp, Homo sapiens
agcaatgggtattca

SEQ ID NO: 262841 - DNA, 15 bp, Homo sapiens
aagcaatgggtattc

SEQ ID NO: 262842 - DNA, 15 bp, Homo sapiens
aaagcaatgggtatt

SEQ ID NO: 262843 - DNA, 15 bp, Homo sapiens
aaaagcaatgggtat

SEQ ID NO: 262844 - DNA, 15 bp, Homo sapiens
caaaagcaatgggta

SEQ ID NO: 262845 - DNA, 15 bp, Homo sapiens
ccaaaagcaatgggt

SEQ ID NO: 262846 - DNA, 15 bp, Homo sapiens
tccaaaagcaatggg

SEQ ID NO: 262847 - DNA, 15 bp, Homo sapiens
ctccaaaagcaatgg

SEQ ID NO: 262848 - DNA, 15 bp, Homo sapiens
actccaaaagcaatg

SEQ ID NO: 262849 - DNA, 15 bp, Homo sapiens
tactccaaaagcaat

SEQ ID NO: 262850 - DNA, 15 bp, Homo sapiens
atactccaaaagcaa

SEQ ID NO: 262851 - DNA, 15 bp, Homo sapiens
aatactccaaaagca

SEQ ID NO: 262852 - DNA, 15 bp, Homo sapiens
caatactccaaaagc

SEQ ID NO: 262853 - DNA, 15 bp, Homo sapiens
acaatactccaaaag

SEQ ID NO: 262854 - DNA, 15 bp, Homo sapiens
tacaatactccaaaa

SEQ ID NO: 262855 - DNA, 15 bp, Homo sapiens
ttacaatactccaaa

SEQ ID NO: 262856 - DNA, 15 bp, Homo sapiens
tttacaatactccaa

SEQ ID NO: 262857 - DNA, 15 bp, Homo sapiens
gtttacaatactcca

SEQ ID NO: 262858 - DNA, 15 bp, Homo sapiens
agtttacaatactcc

SEQ ID NO: 262859 - DNA, 15 bp, Homo sapiens
gagtttacaatactc

SEQ ID NO: 262860 - DNA, 15 bp, Homo sapiens
tgagtttacaatact

SEQ ID NO: 262861 - DNA, 15 bp, Homo sapiens
ttgagtttacaatac

SEQ ID NO: 262862 - DNA, 15 bp, Homo sapiens
tttgagtttacaata

SEQ ID NO: 262863 - DNA, 15 bp, Homo sapiens
ttttgagtttacaat

SEQ ID NO: 262864 - DNA, 15 bp, Homo sapiens
tttttgagtttacaa

SEQ ID NO: 262865 - DNA, 15 bp, Homo sapiens
ttttttgagtttaca

SEQ ID NO: 262866 - DNA, 15 bp, Homo sapiens
attttttgagtttac

SEQ ID NO: 262867 - DNA, 15 bp, Homo sapiens
gattttttgagttta

SEQ ID NO: 262868 - DNA, 15 bp, Homo sapiens
tgattttttgagttt

SEQ ID NO: 262869 - DNA, 15 bp, Homo sapiens
atgattttttgagtt

SEQ ID NO: 262870 - DNA, 15 bp, Homo sapiens
tatgattttttgagt

SEQ ID NO: 262871 - DNA, 15 bp, Homo sapiens
ttatgattttttgag

SEQ ID NO: 262872 - DNA, 15 bp, Homo sapiens
cttatgattttttga

SEQ ID NO: 262873 - DNA, 15 bp, Homo sapiens
acttatgattttttg

SEQ ID NO: 262874 - DNA, 15 bp, Homo sapiens
aacttatgatttttt

SEQ ID NO: 262875 - DNA, 15 bp, Homo sapiens
caacttatgattttt

SEQ ID NO: 262876 - DNA, 15 bp, Homo sapiens
tcaacttatgatttt

SEQ ID NO: 262877 - DNA, 15 bp, Homo sapiens
ctcaacttatgattt

SEQ ID NO: 262878 - DNA, 15 bp, Homo sapiens
gctcaacttatgatt

SEQ ID NO: 262879 - DNA, 15 bp, Homo sapiens
ggctcaacttatgat

SEQ ID NO: 262880 - DNA, 15 bp, Homo sapiens
tggctcaacttatga

SEQ ID NO: 262881 - DNA, 15 bp, Homo sapiens
atggctcaacttatg

SEQ ID NO: 262882 - DNA, 15 bp, Homo sapiens
aatggctcaacttat

SEQ ID NO: 262883 - DNA, 15 bp, Homo sapiens
caatggctcaactta

SEQ ID NO: 262884 - DNA, 15 bp, Homo sapiens
acaatggctcaactt

SEQ ID NO: 262885 - DNA, 15 bp, Homo sapiens
tacaatggctcaact

SEQ ID NO: 262886 - DNA, 15 bp, Homo sapiens
ttacaatggctcaac

SEQ ID NO: 262887 - DNA, 15 bp, Homo sapiens
cttacaatggctcaa

SEQ ID NO: 262888 - DNA, 15 bp, Homo sapiens
acttacaatggctca

SEQ ID NO: 262889 - DNA, 15 bp, Homo sapiens
aacttacaatggctc

SEQ ID NO: 262890 - DNA, 15 bp, Homo sapiens
caacttacaatggct

SEQ ID NO: 262891 - DNA, 15 bp, Homo sapiens
ccaacttacaatggc

SEQ ID NO: 262892 - DNA, 15 bp, Homo sapiens
cccaacttacaatgg

SEQ ID NO: 262893 - DNA, 15 bp, Homo sapiens
ccccaacttacaatg

SEQ ID NO: 262894 - DNA, 15 bp, Homo sapiens
tccccaacttacaat

SEQ ID NO: 262895 - DNA, 15 bp, Homo sapiens
gtccccaacttacaa

SEQ ID NO: 262896 - DNA, 15 bp, Homo sapiens
agtccccaacttaca

SEQ ID NO: 262897 - DNA, 15 bp, Homo sapiens
cagtccccaacttac

SEQ ID NO: 262898 - DNA, 15 bp, Homo sapiens
acagtccccaactta

SEQ ID NO: 262899 - DNA, 15 bp, Homo sapiens
cacagtccccaactt

SEQ ID NO: 262900 - DNA, 15 bp, Homo sapiens
acacagtccccaact

SEQ ID NO: 262901 - DNA, 15 bp, Homo sapiens
gacacagtccccaac

SEQ ID NO: 262902 - DNA, 15 bp, Homo sapiens
agacacagtccccaa

SEQ ID NO: 262903 - DNA, 15 bp, Homo sapiens
cagacacagtcccca

SEQ ID NO: 262904 - DNA, 15 bp, Homo sapiens
gcagacacagtcccc

SEQ ID NO: 262905 - DNA, 15 bp, Homo sapiens
tgcagacacagtccc

SEQ ID NO: 262906 - DNA, 15 bp, Homo sapiens
atgcagacacagtcc

SEQ ID NO: 262907 - DNA, 15 bp, Homo sapiens
catgcagacacagtc

SEQ ID NO: 262908 - DNA, 15 bp, Homo sapiens
acatgcagacacagt

SEQ ID NO: 262909 - DNA, 15 bp, Homo sapiens
tacatgcagacacag

SEQ ID NO: 262910 - DNA, 15 bp, Homo sapiens
gtacatgcagacaca

SEQ ID NO: 262911 - DNA, 15 bp, Homo sapiens
tgtacatgcagacac

SEQ ID NO: 262912 - DNA, 15 bp, Homo sapiens
ctgtacatgcagaca

SEQ ID NO: 262913 - DNA, 15 bp, Homo sapiens
cctgtacatgcagac

SEQ ID NO: 262914 - DNA, 15 bp, Homo sapiens
ccctgtacatgcaga

SEQ ID NO: 262915 - DNA, 15 bp, Homo sapiens
tccctgtacatgcag

SEQ ID NO: 262916 - DNA, 15 bp, Homo sapiens
atccctgtacatgca

SEQ ID NO: 262917 - DNA, 15 bp, Homo sapiens
catccctgtacatgc

SEQ ID NO: 262918 - DNA, 15 bp, Homo sapiens
tcatccctgtacatg

SEQ ID NO: 262919 - DNA, 15 bp, Homo sapiens
atcatccctgtacat

SEQ ID NO: 262920 - DNA, 15 bp, Homo sapiens
tatcatccctgtaca

SEQ ID NO: 262921 - DNA, 15 bp, Homo sapiens
atatcatccctgtac

SEQ ID NO: 262922 - DNA, 15 bp, Homo sapiens
tatatcatccctgta

SEQ ID NO: 262923 - DNA, 15 bp, Homo sapiens
ttatatcatccctgt

SEQ ID NO: 262924 - DNA, 15 bp, Homo sapiens
tttatatcatccctg

SEQ ID NO: 262925 - DNA, 15 bp, Homo sapiens
atttatatcatccct

SEQ ID NO: 262926 - DNA, 15 bp, Homo sapiens
catttatatcatccc

SEQ ID NO: 262927 - DNA, 15 bp, Homo sapiens
gcatttatatcatcc

SEQ ID NO: 262928 - DNA, 15 bp, Homo sapiens
ggcatttatatcatc

SEQ ID NO: 262929 - DNA, 15 bp, Homo sapiens
gggcatttatatcat

SEQ ID NO: 262930 - DNA, 15 bp, Homo sapiens
agggcatttatatca

SEQ ID NO: 262931 - DNA, 15 bp, Homo sapiens
aagggcatttatatc

SEQ ID NO: 262932 - DNA, 15 bp, Homo sapiens
caagggcatttatat

SEQ ID NO: 262933 - DNA, 15 bp, Homo sapiens
ccaagggcatttata

SEQ ID NO: 262934 - DNA, 15 bp, Homo sapiens
tccaagggcatttat

SEQ ID NO: 262935 - DNA, 15 bp, Homo sapiens
ctccaagggcattta

SEQ ID NO: 262936 - DNA, 15 bp, Homo sapiens
gctccaagggcattt

SEQ ID NO: 262937 - DNA, 15 bp, Homo sapiens
agctccaagggcatt

SEQ ID NO: 262938 - DNA, 15 bp, Homo sapiens
aagctccaagggcat

SEQ ID NO: 262939 - DNA, 15 bp, Homo sapiens
caagctccaagggca

SEQ ID NO: 262940 - DNA, 15 bp, Homo sapiens
ccaagctccaagggc

SEQ ID NO: 262941 - DNA, 15 bp, Homo sapiens
tccaagctccaaggg

SEQ ID NO: 262942 - DNA, 15 bp, Homo sapiens
ttccaagctccaagg

SEQ ID NO: 262943 - DNA, 15 bp, Homo sapiens
cttccaagctccaag

SEQ ID NO: 262944 - DNA, 15 bp, Homo sapiens
tcttccaagctccaa

SEQ ID NO: 262945 - DNA, 15 bp, Homo sapiens
ctcttccaagctcca

SEQ ID NO: 262946 - DNA, 15 bp, Homo sapiens
cctcttccaagctcc

SEQ ID NO: 262947 - DNA, 15 bp, Homo sapiens
ccctcttccaagctc

SEQ ID NO: 262948 - DNA, 15 bp, Homo sapiens
tccctcttccaagct

SEQ ID NO: 262949 - DNA, 15 bp, Homo sapiens
ctccctcttccaagc

SEQ ID NO: 262950 - DNA, 15 bp, Homo sapiens
tctccctcttccaag

SEQ ID NO: 262951 - DNA, 15 bp, Homo sapiens
ttctccctcttccaa

SEQ ID NO: 262952 - DNA, 15 bp, Homo sapiens
tttctccctcttcca

SEQ ID NO: 262953 - DNA, 15 bp, Homo sapiens
atttctccctcttcc

SEQ ID NO: 262954 - DNA, 15 bp, Homo sapiens
aatttctccctcttc

SEQ ID NO: 262955 - DNA, 15 bp, Homo sapiens
aaatttctccctctt

SEQ ID NO: 262956 - DNA, 15 bp, Homo sapiens
gaaatttctccctct

SEQ ID NO: 262957 - DNA, 15 bp, Homo sapiens
agaaatttctccctc

SEQ ID NO: 262958 - DNA, 15 bp, Homo sapiens
cagaaatttctccct

SEQ ID NO: 262959 - DNA, 15 bp, Homo sapiens
tcagaaatttctccc

SEQ ID NO: 262960 - DNA, 15 bp, Homo sapiens
ttcagaaatttctcc

SEQ ID NO: 262961 - DNA, 15 bp, Homo sapiens
cttcagaaatttctc

SEQ ID NO: 262962 - DNA, 15 bp, Homo sapiens
ccttcagaaatttct

SEQ ID NO: 262963 - DNA, 15 bp, Homo sapiens
gccttcagaaatttc

SEQ ID NO: 262964 - DNA, 15 bp, Homo sapiens
ggccttcagaaattt

SEQ ID NO: 262965 - DNA, 15 bp, Homo sapiens
tggccttcagaaatt

SEQ ID NO: 262966 - DNA, 15 bp, Homo sapiens
ctggccttcagaaat

SEQ ID NO: 262967 - DNA, 15 bp, Homo sapiens
tctggccttcagaaa

SEQ ID NO: 262968 - DNA, 15 bp, Homo sapiens
ttctggccttcagaa

SEQ ID NO: 262969 - DNA, 15 bp, Homo sapiens
cttctggccttcaga

SEQ ID NO: 262970 - DNA, 15 bp, Homo sapiens
tcttctggccttcag

SEQ ID NO: 262971 - DNA, 15 bp, Homo sapiens
ctcttctggccttca

SEQ ID NO: 262972 - DNA, 15 bp, Homo sapiens
tctcttctggccttc

SEQ ID NO: 262973 - DNA, 15 bp, Homo sapiens
gtctcttctggcctt

SEQ ID NO: 262974 - DNA, 15 bp, Homo sapiens
agtctcttctggcct

SEQ ID NO: 262975 - DNA, 15 bp, Homo sapiens
cagtctcttctggcc

SEQ ID NO: 262976 - DNA, 15 bp, Homo sapiens
ccagtctcttctggc

SEQ ID NO: 262977 - DNA, 15 bp, Homo sapiens
gccagtctcttctgg

SEQ ID NO: 262978 - DNA, 15 bp, Homo sapiens
agccagtctcttctg

SEQ ID NO: 262979 - DNA, 15 bp, Homo sapiens
aagccagtctcttct

SEQ ID NO: 262980 - DNA, 15 bp, Homo sapiens
aaagccagtctcttc

SEQ ID NO: 262981 - DNA, 15 bp, Homo sapiens
caaagccagtctctt

SEQ ID NO: 262982 - DNA, 15 bp, Homo sapiens
ccaaagccagtctct

SEQ ID NO: 262983 - DNA, 15 bp, Homo sapiens
tccaaagccagtctc

SEQ ID NO: 262984 - DNA, 15 bp, Homo sapiens
atccaaagccagtct

SEQ ID NO: 262985 - DNA, 15 bp, Homo sapiens
catccaaagccagtc

SEQ ID NO: 262986 - DNA, 15 bp, Homo sapiens
tcatccaaagccagt

SEQ ID NO: 262987 - DNA, 15 bp, Homo sapiens
ctcatccaaagccag

SEQ ID NO: 262988 - DNA, 15 bp, Homo sapiens
gctcatccaaagcca

SEQ ID NO: 262989 - DNA, 15 bp, Homo sapiens
agctcatccaaagcc

SEQ ID NO: 262990 - DNA, 15 bp, Homo sapiens
tagctcatccaaagc

SEQ ID NO: 262991 - DNA, 15 bp, Homo sapiens
atagctcatccaaag

SEQ ID NO: 262992 - DNA, 15 bp, Homo sapiens
catagctcatccaaa

SEQ ID NO: 262993 - DNA, 15 bp, Homo sapiens
acatagctcatccaa

SEQ ID NO: 262994 - DNA, 15 bp, Homo sapiens
tacatagctcatcca

SEQ ID NO: 262995 - DNA, 15 bp, Homo sapiens
ttacatagctcatcc

SEQ ID NO: 262996 - DNA, 15 bp, Homo sapiens
tttacatagctcatc

SEQ ID NO: 262997 - DNA, 15 bp, Homo sapiens
ttttacatagctcat

SEQ ID NO: 262998 - DNA, 15 bp, Homo sapiens
gttttacatagctca

SEQ ID NO: 262999 - DNA, 15 bp, Homo sapiens
ggttttacatagctc

SEQ ID NO: 263000 - DNA, 15 bp, Homo sapiens
tggttttacatagct

SEQ ID NO: 263001 - DNA, 15 bp, Homo sapiens
ttggttttacatagc

SEQ ID NO: 263002 - DNA, 15 bp, Homo sapiens
tttggttttacatag

SEQ ID NO: 263003 - DNA, 15 bp, Homo sapiens
ttttggttttacata

SEQ ID NO: 263004 - DNA, 15 bp, Homo sapiens
gttttggttttacat

SEQ ID NO: 263005 - DNA, 15 bp, Homo sapiens
ggttttggttttaca

SEQ ID NO: 263006 - DNA, 15 bp, Homo sapiens
gggttttggttttac

SEQ ID NO: 263007 - DNA, 15 bp, Homo sapiens
agggttttggtttta

SEQ ID NO: 263008 - DNA, 15 bp, Homo sapiens
aagggttttggtttt

SEQ ID NO: 263009 - DNA, 15 bp, Homo sapiens
caagggttttggttt

SEQ ID NO: 263010 - DNA, 15 bp, Homo sapiens
acaagggttttggtt

SEQ ID NO: 263011 - DNA, 15 bp, Homo sapiens
tacaagggttttggt

SEQ ID NO: 263012 - DNA, 15 bp, Homo sapiens
ctacaagggttttgg

SEQ ID NO: 263013 - DNA, 15 bp, Homo sapiens
gctacaagggttttg

SEQ ID NO: 263014 - DNA, 15 bp, Homo sapiens
ggctacaagggtttt

SEQ ID NO: 263015 - DNA, 15 bp, Homo sapiens
aggctacaagggttt

SEQ ID NO: 263016 - DNA, 15 bp, Homo sapiens
aaggctacaagggtt

SEQ ID NO: 263017 - DNA, 15 bp, Homo sapiens
caaggctacaagggt

SEQ ID NO: 263018 - DNA, 15 bp, Homo sapiens
acaaggctacaaggg

SEQ ID NO: 263019 - DNA, 15 bp, Homo sapiens
aacaaggctacaagg

SEQ ID NO: 263020 - DNA, 15 bp, Homo sapiens
caacaaggctacaag

SEQ ID NO: 263021 - DNA, 15 bp, Homo sapiens
ccaacaaggctacaa

SEQ ID NO: 263022 - DNA, 15 bp, Homo sapiens
cccaacaaggctaca

SEQ ID NO: 263023 - DNA, 15 bp, Homo sapiens
tcccaacaaggctac

SEQ ID NO: 263024 - DNA, 15 bp, Homo sapiens
atcccaacaaggcta

SEQ ID NO: 263025 - DNA, 15 bp, Homo sapiens
aatcccaacaaggct

SEQ ID NO: 263026 - DNA, 15 bp, Homo sapiens
gaatcccaacaaggc

SEQ ID NO: 263027 - DNA, 15 bp, Homo sapiens
tgaatcccaacaagg

SEQ ID NO: 263028 - DNA, 15 bp, Homo sapiens
ctgaatcccaacaag

SEQ ID NO: 263029 - DNA, 15 bp, Homo sapiens
cctgaatcccaacaa

SEQ ID NO: 263030 - DNA, 15 bp, Homo sapiens
ccctgaatcccaaca

SEQ ID NO: 263031 - DNA, 15 bp, Homo sapiens
tccctgaatcccaac

SEQ ID NO: 263032 - DNA, 15 bp, Homo sapiens
ctccctgaatcccaa

SEQ ID NO: 263033 - DNA, 15 bp, Homo sapiens
gctccctgaatccca

SEQ ID NO: 263034 - DNA, 15 bp, Homo sapiens
ggctccctgaatccc

SEQ ID NO: 263035 - DNA, 15 bp, Homo sapiens
tggctccctgaatcc

SEQ ID NO: 263036 - DNA, 15 bp, Homo sapiens
atggctccctgaatc

SEQ ID NO: 263037 - DNA, 15 bp, Homo sapiens
catggctccctgaat

SEQ ID NO: 263038 - DNA, 15 bp, Homo sapiens
gcatggctccctgaa

SEQ ID NO: 263039 - DNA, 15 bp, Homo sapiens
ggcatggctccctga

SEQ ID NO: 263040 - DNA, 15 bp, Homo sapiens
gggcatggctccctg

SEQ ID NO: 263041 - DNA, 15 bp, Homo sapiens
ggggcatggctccct

SEQ ID NO: 263042 - DNA, 15 bp, Homo sapiens
aggggcatggctccc

SEQ ID NO: 263043 - DNA, 15 bp, Homo sapiens
aaggggcatggctcc

SEQ ID NO: 263044 - DNA, 15 bp, Homo sapiens
gaaggggcatggctc

SEQ ID NO: 263045 - DNA, 15 bp, Homo sapiens
agaaggggcatggct

SEQ ID NO: 263046 - DNA, 15 bp, Homo sapiens
cagaaggggcatggc

SEQ ID NO: 263047 - DNA, 15 bp, Homo sapiens
gcagaaggggcatgg

SEQ ID NO: 263048 - DNA, 15 bp, Homo sapiens
agcagaaggggcatg

SEQ ID NO: 263049 - DNA, 15 bp, Homo sapiens
cagcagaaggggcat

SEQ ID NO: 263050 - DNA, 15 bp, Homo sapiens
tcagcagaaggggca

SEQ ID NO: 263051 - DNA, 15 bp, Homo sapiens
atcagcagaaggggc

SEQ ID NO: 263052 - DNA, 15 bp, Homo sapiens
gatcagcagaagggg

SEQ ID NO: 263053 - DNA, 15 bp, Homo sapiens
agatcagcagaaggg

SEQ ID NO: 263054 - DNA, 15 bp, Homo sapiens
aagatcagcagaagg

SEQ ID NO: 263055 - DNA, 15 bp, Homo sapiens
caagatcagcagaag

SEQ ID NO: 263056 - DNA, 15 bp, Homo sapiens
gcaagatcagcagaa

SEQ ID NO: 263057 - DNA, 15 bp, Homo sapiens
tgcaagatcagcaga

SEQ ID NO: 263058 - DNA, 15 bp, Homo sapiens
ttgcaagatcagcag

SEQ ID NO: 263059 - DNA, 15 bp, Homo sapiens
attgcaagatcagca

SEQ ID NO: 263060 - DNA, 15 bp, Homo sapiens
aattgcaagatcagc

SEQ ID NO: 263061 - DNA, 15 bp, Homo sapiens
caattgcaagatcag

SEQ ID NO: 263062 - DNA, 15 bp, Homo sapiens
tcaattgcaagatca

SEQ ID NO: 263063 - DNA, 15 bp, Homo sapiens
atcaattgcaagatc

SEQ ID NO: 263064 - DNA, 15 bp, Homo sapiens
catcaattgcaagat

SEQ ID NO: 263065 - DNA, 15 bp, Homo sapiens
tcatcaattgcaaga

SEQ ID NO: 263066 - DNA, 15 bp, Homo sapiens
gtcatcaattgcaag

SEQ ID NO: 263067 - DNA, 15 bp, Homo sapiens
ggtcatcaattgcaa

SEQ ID NO: 263068 - DNA, 15 bp, Homo sapiens
aggtcatcaattgca

SEQ ID NO: 263069 - DNA, 15 bp, Homo sapiens
aaggtcatcaattgc

SEQ ID NO: 263070 - DNA, 15 bp, Homo sapiens
aaaggtcatcaattg

SEQ ID NO: 263071 - DNA, 15 bp, Homo sapiens
caaaggtcatcaatt

SEQ ID NO: 263072 - DNA, 15 bp, Homo sapiens
tcaaaggtcatcaat

SEQ ID NO: 263073 - DNA, 15 bp, Homo sapiens
ttcaaaggtcatcaa

SEQ ID NO: 263074 - DNA, 15 bp, Homo sapiens
gttcaaaggtcatca

SEQ ID NO: 263075 - DNA, 15 bp, Homo sapiens
agttcaaaggtcatc

SEQ ID NO: 263076 - DNA, 15 bp, Homo sapiens
cagttcaaaggtcat

SEQ ID NO: 263077 - DNA, 15 bp, Homo sapiens
tcagttcaaaggtca

SEQ ID NO: 263078 - DNA, 15 bp, Homo sapiens
ctcagttcaaaggtc

SEQ ID NO: 263079 - DNA, 15 bp, Homo sapiens
cctcagttcaaaggt

SEQ ID NO: 263080 - DNA, 15 bp, Homo sapiens
gcctcagttcaaagg

SEQ ID NO: 263081 - DNA, 15 bp, Homo sapiens
tgcctcagttcaaag

SEQ ID NO: 263082 - DNA, 15 bp, Homo sapiens
ctgcctcagttcaaa

SEQ ID NO: 263083 - DNA, 15 bp, Homo sapiens
actgcctcagttcaa

SEQ ID NO: 263084 - DNA, 15 bp, Homo sapiens
tactgcctcagttca

SEQ ID NO: 263085 - DNA, 15 bp, Homo sapiens
ctactgcctcagttc

SEQ ID NO: 263086 - DNA, 15 bp, Homo sapiens
actactgcctcagtt

SEQ ID NO: 263087 - DNA, 15 bp, Homo sapiens
tactactgcctcagt

SEQ ID NO: 263088 - DNA, 15 bp, Homo sapiens
ctactactgcctcag

SEQ ID NO: 263089 - DNA, 15 bp, Homo sapiens
tctactactgcctca

SEQ ID NO: 263090 - DNA, 15 bp, Homo sapiens
ctctactactgcctc

SEQ ID NO: 263091 - DNA, 15 bp, Homo sapiens
gctctactactgcct

SEQ ID NO: 263092 - DNA, 15 bp, Homo sapiens
agctctactactgcc

SEQ ID NO: 263093 - DNA, 15 bp, Homo sapiens
aagctctactactgc

SEQ ID NO: 263094 - DNA, 15 bp, Homo sapiens
caagctctactactg

SEQ ID NO: 263095 - DNA, 15 bp, Homo sapiens
ccaagctctactact

SEQ ID NO: 263096 - DNA, 15 bp, Homo sapiens
cccaagctctactac

SEQ ID NO: 263097 - DNA, 15 bp, Homo sapiens
acccaagctctacta

SEQ ID NO: 263098 - DNA, 15 bp, Homo sapiens
aacccaagctctact

SEQ ID NO: 263099 - DNA, 15 bp, Homo sapiens
taacccaagctctac

SEQ ID NO: 263100 - DNA, 15 bp, Homo sapiens
ttaacccaagctcta

SEQ ID NO: 263101 - DNA, 15 bp, Homo sapiens
tttaacccaagctct

SEQ ID NO: 263102 - DNA, 15 bp, Homo sapiens
atttaacccaagctc

SEQ ID NO: 263103 - DNA, 15 bp, Homo sapiens
aatttaacccaagct

SEQ ID NO: 263104 - DNA, 15 bp, Homo sapiens
taatttaacccaagc

SEQ ID NO: 263105 - DNA, 15 bp, Homo sapiens
ttaatttaacccaag

SEQ ID NO: 263106 - DNA, 15 bp, Homo sapiens
tttaatttaacccaa

SEQ ID NO: 263107 - DNA, 15 bp, Homo sapiens
ctttaatttaaccca

SEQ ID NO: 263108 - DNA, 15 bp, Homo sapiens
cctttaatttaaccc

SEQ ID NO: 263109 - DNA, 15 bp, Homo sapiens
tcctttaatttaacc

SEQ ID NO: 263110 - DNA, 15 bp, Homo sapiens
ttcctttaatttaac

SEQ ID NO: 263111 - DNA, 15 bp, Homo sapiens
tttcctttaatttaa

SEQ ID NO: 263112 - DNA, 15 bp, Homo sapiens
ctttcctttaattta

SEQ ID NO: 263113 - DNA, 15 bp, Homo sapiens
cctttcctttaattt

SEQ ID NO: 263114 - DNA, 15 bp, Homo sapiens
ccctttcctttaatt

SEQ ID NO: 263115 - DNA, 15 bp, Homo sapiens
tccctttcctttaat

SEQ ID NO: 263116 - DNA, 15 bp, Homo sapiens
atccctttcctttaa

SEQ ID NO: 263117 - DNA, 15 bp, Homo sapiens
aatccctttccttta

SEQ ID NO: 263118 - DNA, 15 bp, Homo sapiens
gaatccctttccttt

SEQ ID NO: 263119 - DNA, 15 bp, Homo sapiens
agaatccctttcctt

SEQ ID NO: 263120 - DNA, 15 bp, Homo sapiens
tagaatccctttcct

SEQ ID NO: 263121 - DNA, 15 bp, Homo sapiens
gtagaatccctttcc

SEQ ID NO: 263122 - DNA, 15 bp, Homo sapiens
ggtagaatccctttc

SEQ ID NO: 263123 - DNA, 15 bp, Homo sapiens
aggtagaatcccttt

SEQ ID NO: 263124 - DNA, 15 bp, Homo sapiens
gaggtagaatccctt

SEQ ID NO: 263125 - DNA, 15 bp, Homo sapiens
tgaggtagaatccct

SEQ ID NO: 263126 - DNA, 15 bp, Homo sapiens
atgaggtagaatccc

SEQ ID NO: 263127 - DNA, 15 bp, Homo sapiens
catgaggtagaatcc

SEQ ID NO: 263128 - DNA, 15 bp, Homo sapiens
acatgaggtagaatc

SEQ ID NO: 263129 - DNA, 15 bp, Homo sapiens
cacatgaggtagaat

SEQ ID NO: 263130 - DNA, 15 bp, Homo sapiens
acacatgaggtagaa

SEQ ID NO: 263131 - DNA, 15 bp, Homo sapiens
aacacatgaggtaga

SEQ ID NO: 263132 - DNA, 15 bp, Homo sapiens
gaacacatgaggtag

SEQ ID NO: 263133 - DNA, 15 bp, Homo sapiens
agaacacatgaggta

SEQ ID NO: 263134 - DNA, 15 bp, Homo sapiens
aagaacacatgaggt

SEQ ID NO: 263135 - DNA, 15 bp, Homo sapiens
aaagaacacatgagg

SEQ ID NO: 263136 - DNA, 15 bp, Homo sapiens
aaaagaacacatgag

SEQ ID NO: 263137 - DNA, 15 bp, Homo sapiens
caaaagaacacatga

SEQ ID NO: 263138 - DNA, 15 bp, Homo sapiens
gcaaaagaacacatg

SEQ ID NO: 263139 - DNA, 15 bp, Homo sapiens
tgcaaaagaacacat

SEQ ID NO: 263140 - DNA, 15 bp, Homo sapiens
ttgcaaaagaacaca

SEQ ID NO: 263141 - DNA, 15 bp, Homo sapiens
cttgcaaaagaacac

SEQ ID NO: 263142 - DNA, 15 bp, Homo sapiens
acttgcaaaagaaca

SEQ ID NO: 263143 - DNA, 15 bp, Homo sapiens
aacttgcaaaagaac

SEQ ID NO: 263144 - DNA, 15 bp, Homo sapiens
caacttgcaaaagaa

SEQ ID NO: 263145 - DNA, 15 bp, Homo sapiens
tcaacttgcaaaaga

SEQ ID NO: 263146 - DNA, 15 bp, Homo sapiens
ctcaacttgcaaaag

SEQ ID NO: 263147 - DNA, 15 bp, Homo sapiens
tctcaacttgcaaaa

SEQ ID NO: 263148 - DNA, 15 bp, Homo sapiens
ctctcaacttgcaaa

SEQ ID NO: 263149 - DNA, 15 bp, Homo sapiens
actctcaacttgcaa

SEQ ID NO: 263150 - DNA, 15 bp, Homo sapiens
cactctcaacttgca

SEQ ID NO: 263151 - DNA, 15 bp, Homo sapiens
acactctcaacttgc

SEQ ID NO: 263152 - DNA, 15 bp, Homo sapiens
gacactctcaacttg

SEQ ID NO: 263153 - DNA, 15 bp, Homo sapiens
tgacactctcaactt

SEQ ID NO: 263154 - DNA, 15 bp, Homo sapiens
ttgacactctcaact

SEQ ID NO: 263155 - DNA, 15 bp, Homo sapiens
gttgacactctcaac

SEQ ID NO: 263156 - DNA, 15 bp, Homo sapiens
agttgacactctcaa

SEQ ID NO: 263157 - DNA, 15 bp, Homo sapiens
cagttgacactctca

SEQ ID NO: 263158 - DNA, 15 bp, Homo sapiens
ccagttgacactctc

SEQ ID NO: 263159 - DNA, 15 bp, Homo sapiens
accagttgacactct

SEQ ID NO: 263160 - DNA, 15 bp, Homo sapiens
gaccagttgacactc

SEQ ID NO: 263161 - DNA, 15 bp, Homo sapiens
agaccagttgacact

SEQ ID NO: 263162 - DNA, 15 bp, Homo sapiens
cagaccagttgacac

SEQ ID NO: 263163 - DNA, 15 bp, Homo sapiens
ccagaccagttgaca

SEQ ID NO: 263164 - DNA, 15 bp, Homo sapiens
cccagaccagttgac

SEQ ID NO: 263165 - DNA, 15 bp, Homo sapiens
ccccagaccagttga

SEQ ID NO: 263166 - DNA, 15 bp, Homo sapiens
tccccagaccagttg

SEQ ID NO: 263167 - DNA, 15 bp, Homo sapiens
atccccagaccagtt

SEQ ID NO: 263168 - DNA, 15 bp, Homo sapiens
catccccagaccagt

SEQ ID NO: 263169 - DNA, 15 bp, Homo sapiens
tcatccccagaccag

SEQ ID NO: 263170 - DNA, 15 bp, Homo sapiens
gtcatccccagacca

SEQ ID NO: 263171 - DNA, 15 bp, Homo sapiens
agtcatccccagacc

SEQ ID NO: 263172 - DNA, 15 bp, Homo sapiens
aagtcatccccagac

SEQ ID NO: 263173 - DNA, 15 bp, Homo sapiens
caagtcatccccaga

SEQ ID NO: 263174 - DNA, 15 bp, Homo sapiens
tcaagtcatccccag

SEQ ID NO: 263175 - DNA, 15 bp, Homo sapiens
ctcaagtcatcccca

SEQ ID NO: 263176 - DNA, 15 bp, Homo sapiens
gctcaagtcatcccc

SEQ ID NO: 263177 - DNA, 15 bp, Homo sapiens
agctcaagtcatccc

SEQ ID NO: 263178 - DNA, 15 bp, Homo sapiens
cagctcaagtcatcc

SEQ ID NO: 263179 - DNA, 15 bp, Homo sapiens
gcagctcaagtcatc

SEQ ID NO: 263180 - DNA, 15 bp, Homo sapiens
cgcagctcaagtcat

SEQ ID NO: 263181 - DNA, 15 bp, Homo sapiens
acgcagctcaagtca

SEQ ID NO: 263182 - DNA, 15 bp, Homo sapiens
cacgcagctcaagtc

SEQ ID NO: 263183 - DNA, 15 bp, Homo sapiens
acacgcagctcaagt

SEQ ID NO: 263184 - DNA, 15 bp, Homo sapiens
cacacgcagctcaag

SEQ ID NO: 263185 - DNA, 15 bp, Homo sapiens
gcacacgcagctcaa

SEQ ID NO: 263186 - DNA, 15 bp, Homo sapiens
agcacacgcagctca

SEQ ID NO: 263187 - DNA, 15 bp, Homo sapiens
tagcacacgcagctc

SEQ ID NO: 263188 - DNA, 15 bp, Homo sapiens
atagcacacgcagct

SEQ ID NO: 263189 - DNA, 15 bp, Homo sapiens
catagcacacgcagc

SEQ ID NO: 263190 - DNA, 15 bp, Homo sapiens
acatagcacacgcag

SEQ ID NO: 263191 - DNA, 15 bp, Homo sapiens
aacatagcacacgca

SEQ ID NO: 263192 - DNA, 15 bp, Homo sapiens
caacatagcacacgc

SEQ ID NO: 263193 - DNA, 15 bp, Homo sapiens
gcaacatagcacacg

SEQ ID NO: 263194 - DNA, 15 bp, Homo sapiens
tgcaacatagcacac

SEQ ID NO: 263195 - DNA, 15 bp, Homo sapiens
gtgcaacatagcaca

SEQ ID NO: 263196 - DNA, 15 bp, Homo sapiens
agtgcaacatagcac

SEQ ID NO: 263197 - DNA, 15 bp, Homo sapiens
cagtgcaacatagca

SEQ ID NO: 263198 - DNA, 15 bp, Homo sapiens
ccagtgcaacatagc

SEQ ID NO: 263199 - DNA, 15 bp, Homo sapiens
accagtgcaacatag

SEQ ID NO: 263200 - DNA, 15 bp, Homo sapiens
caccagtgcaacata

SEQ ID NO: 263201 - DNA, 15 bp, Homo sapiens
tcaccagtgcaacat

SEQ ID NO: 263202 - DNA, 15 bp, Homo sapiens
ctcaccagtgcaaca

SEQ ID NO: 263203 - DNA, 15 bp, Homo sapiens
cctcaccagtgcaac

SEQ ID NO: 263204 - DNA, 15 bp, Homo sapiens
acctcaccagtgcaa

SEQ ID NO: 263205 - DNA, 15 bp, Homo sapiens
cacctcaccagtgca

SEQ ID NO: 263206 - DNA, 15 bp, Homo sapiens
ccacctcaccagtgc

SEQ ID NO: 263207 - DNA, 15 bp, Homo sapiens
accacctcaccagtg

SEQ ID NO: 263208 - DNA, 15 bp, Homo sapiens
gaccacctcaccagt

SEQ ID NO: 263209 - DNA, 15 bp, Homo sapiens
tgaccacctcaccag

SEQ ID NO: 263210 - DNA, 15 bp, Homo sapiens
gtgaccacctcacca

SEQ ID NO: 263211 - DNA, 15 bp, Homo sapiens
agtgaccacctcacc

SEQ ID NO: 263212 - DNA, 15 bp, Homo sapiens
aagtgaccacctcac

SEQ ID NO: 263213 - DNA, 15 bp, Homo sapiens
caagtgaccacctca

SEQ ID NO: 263214 - DNA, 15 bp, Homo sapiens
tcaagtgaccacctc

SEQ ID NO: 263215 - DNA, 15 bp, Homo sapiens
gtcaagtgaccacct

SEQ ID NO: 263216 - DNA, 15 bp, Homo sapiens
ggtcaagtgaccacc

SEQ ID NO: 263217 - DNA, 15 bp, Homo sapiens
aggtcaagtgaccac

SEQ ID NO: 263218 - DNA, 15 bp, Homo sapiens
gaggtcaagtgacca

SEQ ID NO: 263219 - DNA, 15 bp, Homo sapiens
cgaggtcaagtgacc

SEQ ID NO: 263220 - DNA, 15 bp, Homo sapiens
acgaggtcaagtgac

SEQ ID NO: 263221 - DNA, 15 bp, Homo sapiens
tacgaggtcaagtga

SEQ ID NO: 263222 - DNA, 15 bp, Homo sapiens
gtacgaggtcaagtg

SEQ ID NO: 263223 - DNA, 15 bp, Homo sapiens
ggtacgaggtcaagt

SEQ ID NO: 263224 - DNA, 15 bp, Homo sapiens
tggtacgaggtcaag

SEQ ID NO: 263225 - DNA, 15 bp, Homo sapiens
ttggtacgaggtcaa

SEQ ID NO: 263226 - DNA, 15 bp, Homo sapiens
attggtacgaggtca

SEQ ID NO: 263227 - DNA, 15 bp, Homo sapiens
tattggtacgaggtc

SEQ ID NO: 263228 - DNA, 15 bp, Homo sapiens
gtattggtacgaggt

SEQ ID NO: 263229 - DNA, 15 bp, Homo sapiens
agtattggtacgagg

SEQ ID NO: 263230 - DNA, 15 bp, Homo sapiens
cagtattggtacgag

SEQ ID NO: 263231 - DNA, 15 bp, Homo sapiens
ccagtattggtacga

SEQ ID NO: 263232 - DNA, 15 bp, Homo sapiens
gccagtattggtacg

SEQ ID NO: 263233 - DNA, 15 bp, Homo sapiens
agccagtattggtac

SEQ ID NO: 263234 - DNA, 15 bp, Homo sapiens
aagccagtattggta

SEQ ID NO: 263235 - DNA, 15 bp, Homo sapiens
gaagccagtattggt

SEQ ID NO: 263236 - DNA, 15 bp, Homo sapiens
agaagccagtattgg

SEQ ID NO: 263237 - DNA, 15 bp, Homo sapiens
cagaagccagtattg

SEQ ID NO: 263238 - DNA, 15 bp, Homo sapiens
tcagaagccagtatt

SEQ ID NO: 263239 - DNA, 15 bp, Homo sapiens
ctcagaagccagtat

SEQ ID NO: 263240 - DNA, 15 bp, Homo sapiens
actcagaagccagta

SEQ ID NO: 263241 - DNA, 15 bp, Homo sapiens
cactcagaagccagt

SEQ ID NO: 263242 - DNA, 15 bp, Homo sapiens
ccactcagaagccag

SEQ ID NO: 263243 - DNA, 15 bp, Homo sapiens
gccactcagaagcca

SEQ ID NO: 263244 - DNA, 15 bp, Homo sapiens
agccactcagaagcc

SEQ ID NO: 263245 - DNA, 15 bp, Homo sapiens
aagccactcagaagc

SEQ ID NO: 263246 - DNA, 15 bp, Homo sapiens
gaagccactcagaag

SEQ ID NO: 263247 - DNA, 15 bp, Homo sapiens
ggaagccactcagaa

SEQ ID NO: 263248 - DNA, 15 bp, Homo sapiens
tggaagccactcaga

SEQ ID NO: 263249 - DNA, 15 bp, Homo sapiens
ctggaagccactcag

SEQ ID NO: 263250 - DNA, 15 bp, Homo sapiens
cctggaagccactca

SEQ ID NO: 263251 - DNA, 15 bp, Homo sapiens
acctggaagccactc

SEQ ID NO: 263252 - DNA, 15 bp, Homo sapiens
tacctggaagccact

SEQ ID NO: 263253 - DNA, 15 bp, Homo sapiens
atacctggaagccac

SEQ ID NO: 263254 - DNA, 15 bp, Homo sapiens
aatacctggaagcca

SEQ ID NO: 263255 - DNA, 15 bp, Homo sapiens
caatacctggaagcc

SEQ ID NO: 263256 - DNA, 15 bp, Homo sapiens
tcaatacctggaagc

SEQ ID NO: 263257 - DNA, 15 bp, Homo sapiens
gtcaatacctggaag

SEQ ID NO: 263258 - DNA, 15 bp, Homo sapiens
ggtcaatacctggaa

SEQ ID NO: 263259 - DNA, 15 bp, Homo sapiens
aggtcaatacctgga

SEQ ID NO: 263260 - DNA, 15 bp, Homo sapiens
aaggtcaatacctgg

SEQ ID NO: 263261 - DNA, 15 bp, Homo sapiens
caaggtcaatacctg

SEQ ID NO: 263262 - DNA, 15 bp, Homo sapiens
ccaaggtcaatacct

SEQ ID NO: 263263 - DNA, 15 bp, Homo sapiens
gccaaggtcaatacc

SEQ ID NO: 263264 - DNA, 15 bp, Homo sapiens
agccaaggtcaatac

SEQ ID NO: 263265 - DNA, 15 bp, Homo sapiens
tagccaaggtcaata

SEQ ID NO: 263266 - DNA, 15 bp, Homo sapiens
ttagccaaggtcaat

SEQ ID NO: 263267 - DNA, 15 bp, Homo sapiens
attagccaaggtcaa

SEQ ID NO: 263268 - DNA, 15 bp, Homo sapiens
ctcattagccaaggt

SEQ ID NO: 263269 - DNA, 15 bp, Homo sapiens
tctcattagccaagg

SEQ ID NO: 263270 - DNA, 15 bp, Homo sapiens
atctcattagccaag

SEQ ID NO: 263271 - DNA, 15 bp, Homo sapiens
aatctcattagccaa

SEQ ID NO: 263272 - DNA, 15 bp, Homo sapiens
caatctcattagcca

SEQ ID NO: 263273 - DNA, 15 bp, Homo sapiens
ccaatctcattagcc

SEQ ID NO: 263274 - DNA, 15 bp, Homo sapiens
tccaatctcattagc

SEQ ID NO: 263275 - DNA, 15 bp, Homo sapiens
atccaatctcattag

SEQ ID NO: 263276 - DNA, 15 bp, Homo sapiens
aatccaatctcatta

SEQ ID NO: 263277 - DNA, 15 bp, Homo sapiens
gaatccaatctcatt

SEQ ID NO: 263278 - DNA, 15 bp, Homo sapiens
tgaatccaatctcat

SEQ ID NO: 263279 - DNA, 15 bp, Homo sapiens
ttgaatccaatctca

SEQ ID NO: 263280 - DNA, 15 bp, Homo sapiens
tttgaatccaatctc

SEQ ID NO: 263281 - DNA, 15 bp, Homo sapiens
ctttgaatccaatct

SEQ ID NO: 263282 - DNA, 15 bp, Homo sapiens
gctttgaatccaatc

SEQ ID NO: 263283 - DNA, 15 bp, Homo sapiens
tgctttgaatccaat

SEQ ID NO: 263284 - DNA, 15 bp, Homo sapiens
atgctttgaatccaa

SEQ ID NO: 263285 - DNA, 15 bp, Homo sapiens
aatgctttgaatcca

SEQ ID NO: 263286 - DNA, 15 bp, Homo sapiens
aaatgctttgaatcc

SEQ ID NO: 263287 - DNA, 15 bp, Homo sapiens
caaatgctttgaatc

SEQ ID NO: 263288 - DNA, 15 bp, Homo sapiens
gcaaatgctttgaat

SEQ ID NO: 263289 - DNA, 15 bp, Homo sapiens
tgcaaatgctttgaa

SEQ ID NO: 263290 - DNA, 15 bp, Homo sapiens
ttgcaaatgctttga

SEQ ID NO: 263291 - DNA, 15 bp, Homo sapiens
cttgcaaatgctttg

SEQ ID NO: 263292 - DNA, 15 bp, Homo sapiens
acttgcaaatgcttt

SEQ ID NO: 263293 - DNA, 15 bp, Homo sapiens
cacttgcaaatgctt

SEQ ID NO: 263294 - DNA, 15 bp, Homo sapiens
gcacttgcaaatgct

SEQ ID NO: 263295 - DNA, 15 bp, Homo sapiens
ggcacttgcaaatgc

SEQ ID NO: 263296 - DNA, 15 bp, Homo sapiens
tggcacttgcaaatg

SEQ ID NO: 263297 - DNA, 15 bp, Homo sapiens
ctggcacttgcaaat

SEQ ID NO: 263298 - DNA, 15 bp, Homo sapiens
actggcacttgcaaa

SEQ ID NO: 263299 - DNA, 15 bp, Homo sapiens
tactggcacttgcaa

SEQ ID NO: 263300 - DNA, 15 bp, Homo sapiens
ctactggcacttgca

SEQ ID NO: 263301 - DNA, 15 bp, Homo sapiens
cctactggcacttgc

SEQ ID NO: 263302 - DNA, 15 bp, Homo sapiens
acctactggcacttg

SEQ ID NO: 263303 - DNA, 15 bp, Homo sapiens
gacctactggcactt

SEQ ID NO: 263304 - DNA, 15 bp, Homo sapiens
tgacctactggcact

SEQ ID NO: 263305 - DNA, 15 bp, Homo sapiens
ctgacctactggcac

SEQ ID NO: 263306 - DNA, 15 bp, Homo sapiens
actgacctactggca

SEQ ID NO: 263307 - DNA, 15 bp, Homo sapiens
cactgacctactggc

SEQ ID NO: 263308 - DNA, 15 bp, Homo sapiens
tcactgacctactgg

SEQ ID NO: 263309 - DNA, 15 bp, Homo sapiens
atcactgacctactg

SEQ ID NO: 263310 - DNA, 15 bp, Homo sapiens
gatcactgacctact

SEQ ID NO: 263311 - DNA, 15 bp, Homo sapiens
tgatcactgacctac

SEQ ID NO: 263312 - DNA, 15 bp, Homo sapiens
gtgatcactgaccta

SEQ ID NO: 263313 - DNA, 15 bp, Homo sapiens
ggtgatcactgacct

SEQ ID NO: 263314 - DNA, 15 bp, Homo sapiens
tggtgatcactgacc

SEQ ID NO: 263315 - DNA, 15 bp, Homo sapiens
atggtgatcactgac

SEQ ID NO: 263316 - DNA, 15 bp, Homo sapiens
aatggtgatcactga

SEQ ID NO: 263317 - DNA, 15 bp, Homo sapiens
taatggtgatcactg

SEQ ID NO: 263318 - DNA, 15 bp, Homo sapiens
ataatggtgatcact

SEQ ID NO: 263319 - DNA, 15 bp, Homo sapiens
gataatggtgatcac

SEQ ID NO: 263320 - DNA, 15 bp, Homo sapiens
agataatggtgatca

SEQ ID NO: 263321 - DNA, 15 bp, Homo sapiens
tagataatggtgatc

SEQ ID NO: 263322 - DNA, 15 bp, Homo sapiens
gtagataatggtgat

SEQ ID NO: 263323 - DNA, 15 bp, Homo sapiens
agtagataatggtga

SEQ ID NO: 263324 - DNA, 15 bp, Homo sapiens
cagtagataatggtg

SEQ ID NO: 263325 - DNA, 15 bp, Homo sapiens
acagtagataatggt

SEQ ID NO: 263326 - DNA, 15 bp, Homo sapiens
cacagtagataatgg

SEQ ID NO: 263327 - DNA, 15 bp, Homo sapiens
gcacagtagataatg

SEQ ID NO: 263328 - DNA, 15 bp, Homo sapiens
tgcacagtagataat

SEQ ID NO: 263329 - DNA, 15 bp, Homo sapiens
gtgcacagtagataa

SEQ ID NO: 263330 - DNA, 15 bp, Homo sapiens
ggtgcacagtagata

SEQ ID NO: 263331 - DNA, 15 bp, Homo sapiens
aggtgcacagtagat

SEQ ID NO: 263332 - DNA, 15 bp, Homo sapiens
gaggtgcacagtaga

SEQ ID NO: 263333 - DNA, 15 bp, Homo sapiens
ggaggtgcacagtag

SEQ ID NO: 263334 - DNA, 15 bp, Homo sapiens
aggaggtgcacagta

SEQ ID NO: 263335 - DNA, 15 bp, Homo sapiens
taggaggtgcacagt

SEQ ID NO: 263336 - DNA, 15 bp, Homo sapiens
ttaggaggtgcacag

SEQ ID NO: 263337 - DNA, 15 bp, Homo sapiens
tttaggaggtgcaca

SEQ ID NO: 263338 - DNA, 15 bp, Homo sapiens
atttaggaggtgcac

SEQ ID NO: 263339 - DNA, 15 bp, Homo sapiens
catttaggaggtgca

SEQ ID NO: 263340 - DNA, 15 bp, Homo sapiens
gcatttaggaggtgc

SEQ ID NO: 263341 - DNA, 15 bp, Homo sapiens
ggcatttaggaggtg

SEQ ID NO: 263342 - DNA, 15 bp, Homo sapiens
gggcatttaggaggt

SEQ ID NO: 263343 - DNA, 15 bp, Homo sapiens
agggcatttaggagg

SEQ ID NO: 263344 - DNA, 15 bp, Homo sapiens
cagggcatttaggag

SEQ ID NO: 263345 - DNA, 15 bp, Homo sapiens
gcagggcatttagga

SEQ ID NO: 263346 - DNA, 15 bp, Homo sapiens
ggcagggcatttagg

SEQ ID NO: 263347 - DNA, 15 bp, Homo sapiens
gggcagggcatttag

SEQ ID NO: 263348 - DNA, 15 bp, Homo sapiens
agggcagggcattta

SEQ ID NO: 263349 - DNA, 15 bp, Homo sapiens
aagggcagggcattt

SEQ ID NO: 263350 - DNA, 15 bp, Homo sapiens
aaagggcagggcatt

SEQ ID NO: 263351 - DNA, 15 bp, Homo sapiens
aaaagggcagggcat

SEQ ID NO: 263352 - DNA, 15 bp, Homo sapiens
aaaaagggcagggca

SEQ ID NO: 263353 - DNA, 15 bp, Homo sapiens
caaaaagggcagggc

SEQ ID NO: 263354 - DNA, 15 bp, Homo sapiens
gcaaaaagggcaggg

SEQ ID NO: 263355 - DNA, 15 bp, Homo sapiens
cgcaaaaagggcagg

SEQ ID NO: 263356 - DNA, 15 bp, Homo sapiens
acgcaaaaagggcag

SEQ ID NO: 263357 - DNA, 15 bp, Homo sapiens
tacgcaaaaagggca

SEQ ID NO: 263358 - DNA, 15 bp, Homo sapiens
ttacgcaaaaagggc

SEQ ID NO: 263359 - DNA, 15 bp, Homo sapiens
cttacgcaaaaaggg

SEQ ID NO: 263360 - DNA, 15 bp, Homo sapiens
gcttacgcaaaaagg

SEQ ID NO: 263361 - DNA, 15 bp, Homo sapiens
agcttacgcaaaaag

SEQ ID NO: 263362 - DNA, 15 bp, Homo sapiens
cagcttacgcaaaaa

SEQ ID NO: 263363 - DNA, 15 bp, Homo sapiens
ccagcttacgcaaaa

SEQ ID NO: 263364 - DNA, 15 bp, Homo sapiens
cccagcttacgcaaa

SEQ ID NO: 263365 - DNA, 15 bp, Homo sapiens
acccagcttacgcaa

SEQ ID NO: 263366 - DNA, 15 bp, Homo sapiens
gacccagcttacgca

SEQ ID NO: 263367 - DNA, 15 bp, Homo sapiens
agacccagcttacgc

SEQ ID NO: 263368 - DNA, 15 bp, Homo sapiens
cagacccagcttacg

SEQ ID NO: 263369 - DNA, 15 bp, Homo sapiens
tcagacccagcttac

SEQ ID NO: 263370 - DNA, 15 bp, Homo sapiens
gtcagacccagctta

SEQ ID NO: 263371 - DNA, 15 bp, Homo sapiens
tgtcagacccagctt

SEQ ID NO: 263372 - DNA, 15 bp, Homo sapiens
ctgtcagacccagct

SEQ ID NO: 263373 - DNA, 15 bp, Homo sapiens
gctgtcagacccagc

SEQ ID NO: 263374 - DNA, 15 bp, Homo sapiens
ggctgtcagacccag

SEQ ID NO: 263375 - DNA, 15 bp, Homo sapiens
gggctgtcagaccca

SEQ ID NO: 263376 - DNA, 15 bp, Homo sapiens
agggctgtcagaccc

SEQ ID NO: 263377 - DNA, 15 bp, Homo sapiens
tagggctgtcagacc

SEQ ID NO: 263378 - DNA, 15 bp, Homo sapiens
ttagggctgtcagac

SEQ ID NO: 263379 - DNA, 15 bp, Homo sapiens
attagggctgtcaga

SEQ ID NO: 263380 - DNA, 15 bp, Homo sapiens
gattagggctgtcag

SEQ ID NO: 263381 - DNA, 15 bp, Homo sapiens
cgattagggctgtca

SEQ ID NO: 263382 - DNA, 15 bp, Homo sapiens
ccgattagggctgtc

SEQ ID NO: 263383 - DNA, 15 bp, Homo sapiens
accgattagggctgt

SEQ ID NO: 263384 - DNA, 15 bp, Homo sapiens
gaccgattagggctg

SEQ ID NO: 263385 - DNA, 15 bp, Homo sapiens
ggaccgattagggct

SEQ ID NO: 263386 - DNA, 15 bp, Homo sapiens
aggaccgattagggc

SEQ ID NO: 263387 - DNA, 15 bp, Homo sapiens
taggaccgattaggg

SEQ ID NO: 263388 - DNA, 15 bp, Homo sapiens
gtaggaccgattagg

SEQ ID NO: 263389 - DNA, 15 bp, Homo sapiens
ggtaggaccgattag

SEQ ID NO: 263390 - DNA, 15 bp, Homo sapiens
aggtaggaccgatta

SEQ ID NO: 263391 - DNA, 15 bp, Homo sapiens
gaggtaggaccgatt

SEQ ID NO: 263392 - DNA, 15 bp, Homo sapiens
ggaggtaggaccgat

SEQ ID NO: 263393 - DNA, 15 bp, Homo sapiens
aggaggtaggaccga

SEQ ID NO: 263394 - DNA, 15 bp, Homo sapiens
taggaggtaggaccg

SEQ ID NO: 263395 - DNA, 15 bp, Homo sapiens
ctaggaggtaggacc

SEQ ID NO: 263396 - DNA, 15 bp, Homo sapiens
tctaggaggtaggac

SEQ ID NO: 263397 - DNA, 15 bp, Homo sapiens
atctaggaggtagga

SEQ ID NO: 263398 - DNA, 15 bp, Homo sapiens
tatctaggaggtagg

SEQ ID NO: 263399 - DNA, 15 bp, Homo sapiens
ctatctaggaggtag

SEQ ID NO: 263400 - DNA, 15 bp, Homo sapiens
gctatctaggaggta

SEQ ID NO: 263401 - DNA, 15 bp, Homo sapiens
tgctatctaggaggt

SEQ ID NO: 263402 - DNA, 15 bp, Homo sapiens
gtgctatctaggagg

SEQ ID NO: 263403 - DNA, 15 bp, Homo sapiens
agtgctatctaggag

SEQ ID NO: 263404 - DNA, 15 bp, Homo sapiens
cagtgctatctagga

SEQ ID NO: 263405 - DNA, 15 bp, Homo sapiens
acagtgctatctagg

SEQ ID NO: 263406 - DNA, 15 bp, Homo sapiens
cacagtgctatctag

SEQ ID NO: 263407 - DNA, 15 bp, Homo sapiens
ccacagtgctatcta

SEQ ID NO: 263408 - DNA, 15 bp, Homo sapiens
gccacagtgctatct

SEQ ID NO: 263409 - DNA, 15 bp, Homo sapiens
ggccacagtgctatc

SEQ ID NO: 263410 - DNA, 15 bp, Homo sapiens
gggccacagtgctat

SEQ ID NO: 263411 - DNA, 15 bp, Homo sapiens
tgggccacagtgcta

SEQ ID NO: 263412 - DNA, 15 bp, Homo sapiens
atgggccacagtgct

SEQ ID NO: 263413 - DNA, 15 bp, Homo sapiens
aatgggccacagtgc

SEQ ID NO: 263414 - DNA, 15 bp, Homo sapiens
aaatgggccacagtg

SEQ ID NO: 263415 - DNA, 15 bp, Homo sapiens
taaatgggccacagt

SEQ ID NO: 263416 - DNA, 15 bp, Homo sapiens
ataaatgggccacag

SEQ ID NO: 263417 - DNA, 15 bp, Homo sapiens
aataaatgggccaca

SEQ ID NO: 263418 - DNA, 15 bp, Homo sapiens
gaataaatgggccac

SEQ ID NO: 263419 - DNA, 15 bp, Homo sapiens
agaataaatgggcca

SEQ ID NO: 263420 - DNA, 15 bp, Homo sapiens
aagaataaatgggcc

SEQ ID NO: 263421 - DNA, 15 bp, Homo sapiens
taagaataaatgggc

SEQ ID NO: 263422 - DNA, 15 bp, Homo sapiens
gtaagaataaatggg

SEQ ID NO: 263423 - DNA, 15 bp, Homo sapiens
ggtaagaataaatgg

SEQ ID NO: 263424 - DNA, 15 bp, Homo sapiens
aggtaagaataaatg

SEQ ID NO: 263425 - DNA, 15 bp, Homo sapiens
taggtaagaataaat

SEQ ID NO: 263426 - DNA, 15 bp, Homo sapiens
ctaggtaagaataaa

SEQ ID NO: 263427 - DNA, 15 bp, Homo sapiens
actaggtaagaataa

SEQ ID NO: 263428 - DNA, 15 bp, Homo sapiens
aactaggtaagaata

SEQ ID NO: 263429 - DNA, 15 bp, Homo sapiens
gaactaggtaagaat

SEQ ID NO: 263430 - DNA, 15 bp, Homo sapiens
tgaactaggtaagaa

SEQ ID NO: 263431 - DNA, 15 bp, Homo sapiens
ctgaactaggtaaga

SEQ ID NO: 263432 - DNA, 15 bp, Homo sapiens
cctgaactaggtaag

SEQ ID NO: 263433 - DNA, 15 bp, Homo sapiens
gcctgaactaggtaa

SEQ ID NO: 263434 - DNA, 15 bp, Homo sapiens
ggcctgaactaggta

SEQ ID NO: 263435 - DNA, 15 bp, Homo sapiens
tggcctgaactaggt

SEQ ID NO: 263436 - DNA, 15 bp, Homo sapiens
gtggcctgaactagg

SEQ ID NO: 263437 - DNA, 15 bp, Homo sapiens
ggtggcctgaactag

SEQ ID NO: 263438 - DNA, 15 bp, Homo sapiens
tggtggcctgaacta

SEQ ID NO: 263439 - DNA, 15 bp, Homo sapiens
atggtggcctgaact

SEQ ID NO: 263440 - DNA, 15 bp, Homo sapiens
gatggtggcctgaac

SEQ ID NO: 263441 - DNA, 15 bp, Homo sapiens
tgatggtggcctgaa

SEQ ID NO: 263442 - DNA, 15 bp, Homo sapiens
gtgatggtggcctga

SEQ ID NO: 263443 - DNA, 15 bp, Homo sapiens
agtgatggtggcctg

SEQ ID NO: 263444 - DNA, 15 bp, Homo sapiens
aagtgatggtggcct

SEQ ID NO: 263445 - DNA, 15 bp, Homo sapiens
gaagtgatggtggcc

SEQ ID NO: 263446 - DNA, 15 bp, Homo sapiens
agaagtgatggtggc

SEQ ID NO: 263447 - DNA, 15 bp, Homo sapiens
aagaagtgatggtgg

SEQ ID NO: 263448 - DNA, 15 bp, Homo sapiens
caagaagtgatggtg

SEQ ID NO: 263449 - DNA, 15 bp, Homo sapiens
acaagaagtgatggt

SEQ ID NO: 263450 - DNA, 15 bp, Homo sapiens
cacaagaagtgatgg

SEQ ID NO: 263451 - DNA, 15 bp, Homo sapiens
acacaagaagtgatg

SEQ ID NO: 263452 - DNA, 15 bp, Homo sapiens
tacacaagaagtgat

SEQ ID NO: 263453 - DNA, 15 bp, Homo sapiens
ctacacaagaagtga

SEQ ID NO: 263454 - DNA, 15 bp, Homo sapiens
tctacacaagaagtg

SEQ ID NO: 263455 - DNA, 15 bp, Homo sapiens
gtctacacaagaagt

SEQ ID NO: 263456 - DNA, 15 bp, Homo sapiens
tgtctacacaagaag

SEQ ID NO: 263457 - DNA, 15 bp, Homo sapiens
ttgtctacacaagaa

SEQ ID NO: 263458 - DNA, 15 bp, Homo sapiens
gttgtctacacaaga

SEQ ID NO: 263459 - DNA, 15 bp, Homo sapiens
agttgtctacacaag

SEQ ID NO: 263460 - DNA, 15 bp, Homo sapiens
cagttgtctacacaa

SEQ ID NO: 263461 - DNA, 15 bp, Homo sapiens
gcagttgtctacaca

SEQ ID NO: 263462 - DNA, 15 bp, Homo sapiens
tgcagttgtctacac

SEQ ID NO: 263463 - DNA, 15 bp, Homo sapiens
ttgcagttgtctaca

SEQ ID NO: 263464 - DNA, 15 bp, Homo sapiens
attgcagttgtctac

SEQ ID NO: 263465 - DNA, 15 bp, Homo sapiens
tattgcagttgtcta

SEQ ID NO: 263466 - DNA, 15 bp, Homo sapiens
ctattgcagttgtct

SEQ ID NO: 263467 - DNA, 15 bp, Homo sapiens
actattgcagttgtc

SEQ ID NO: 263468 - DNA, 15 bp, Homo sapiens
cactattgcagttgt

SEQ ID NO: 263469 - DNA, 15 bp, Homo sapiens
acactattgcagttg

SEQ ID NO: 263470 - DNA, 15 bp, Homo sapiens
gacactattgcagtt

SEQ ID NO: 263471 - DNA, 15 bp, Homo sapiens
ggacactattgcagt

SEQ ID NO: 263472 - DNA, 15 bp, Homo sapiens
aggacactattgcag

SEQ ID NO: 263473 - DNA, 15 bp, Homo sapiens
taggacactattgca

SEQ ID NO: 263474 - DNA, 15 bp, Homo sapiens
gtaggacactattgc

SEQ ID NO: 263475 - DNA, 15 bp, Homo sapiens
tgtaggacactattg

SEQ ID NO: 263476 - DNA, 15 bp, Homo sapiens
ttgtaggacactatt

SEQ ID NO: 263477 - DNA, 15 bp, Homo sapiens
tttgtaggacactat

SEQ ID NO: 263478 - DNA, 15 bp, Homo sapiens
atttgtaggacacta

SEQ ID NO: 263479 - DNA, 15 bp, Homo sapiens
gatttgtaggacact

SEQ ID NO: 263480 - DNA, 15 bp, Homo sapiens
agatttgtaggacac

SEQ ID NO: 263481 - DNA, 15 bp, Homo sapiens
cagatttgtaggaca

SEQ ID NO: 263482 - DNA, 15 bp, Homo sapiens
gcagatttgtaggac

SEQ ID NO: 263483 - DNA, 15 bp, Homo sapiens
agcagatttgtagga

SEQ ID NO: 263484 - DNA, 15 bp, Homo sapiens
cagcagatttgtagg

SEQ ID NO: 263485 - DNA, 15 bp, Homo sapiens
tcagcagatttgtag

SEQ ID NO: 263486 - DNA, 15 bp, Homo sapiens
gtcagcagatttgta

SEQ ID NO: 263487 - DNA, 15 bp, Homo sapiens
tgtcagcagatttgt

SEQ ID NO: 263488 - DNA, 15 bp, Homo sapiens
atgtcagcagatttg

SEQ ID NO: 263489 - DNA, 15 bp, Homo sapiens
aatgtcagcagattt

SEQ ID NO: 263490 - DNA, 15 bp, Homo sapiens
gaatgtcagcagatt

SEQ ID NO: 263491 - DNA, 15 bp, Homo sapiens
ggaatgtcagcagat

SEQ ID NO: 263492 - DNA, 15 bp, Homo sapiens
gggaatgtcagcaga

SEQ ID NO: 263493 - DNA, 15 bp, Homo sapiens
agggaatgtcagcag

SEQ ID NO: 263494 - DNA, 15 bp, Homo sapiens
gagggaatgtcagca

SEQ ID NO: 263495 - DNA, 15 bp, Homo sapiens
ggagggaatgtcagc

SEQ ID NO: 263496 - DNA, 15 bp, Homo sapiens
aggagggaatgtcag

SEQ ID NO: 263497 - DNA, 15 bp, Homo sapiens
taggagggaatgtca

SEQ ID NO: 263498 - DNA, 15 bp, Homo sapiens
ttaggagggaatgtc

SEQ ID NO: 263499 - DNA, 15 bp, Homo sapiens
tttaggagggaatgt

SEQ ID NO: 263500 - DNA, 15 bp, Homo sapiens
gtttaggagggaatg

SEQ ID NO: 263501 - DNA, 15 bp, Homo sapiens
tgtttaggagggaat

SEQ ID NO: 263502 - DNA, 15 bp, Homo sapiens
gtgtttaggagggaa

SEQ ID NO: 263503 - DNA, 15 bp, Homo sapiens
ggtgtttaggaggga

SEQ ID NO: 263504 - DNA, 15 bp, Homo sapiens
gggtgtttaggaggg

SEQ ID NO: 263505 - DNA, 15 bp, Homo sapiens
ggggtgtttaggagg

SEQ ID NO: 263506 - DNA, 15 bp, Homo sapiens
gggggtgtttaggag

SEQ ID NO: 263507 - DNA, 15 bp, Homo sapiens
agggggtgtttagga

SEQ ID NO: 263508 - DNA, 15 bp, Homo sapiens
gagggggtgtttagg

SEQ ID NO: 263509 - DNA, 15 bp, Homo sapiens
agagggggtgtttag

SEQ ID NO: 263510 - DNA, 15 bp, Homo sapiens
gagagggggtgttta

SEQ ID NO: 263511 - DNA, 15 bp, Homo sapiens
agagagggggtgttt

SEQ ID NO: 263512 - DNA, 15 bp, Homo sapiens
cagagagggggtgtt

SEQ ID NO: 263513 - DNA, 15 bp, Homo sapiens
acagagagggggtgt

SEQ ID NO: 263514 - DNA, 15 bp, Homo sapiens
gacagagagggggtg

SEQ ID NO: 263515 - DNA, 15 bp, Homo sapiens
tgacagagagggggt

SEQ ID NO: 263516 - DNA, 15 bp, Homo sapiens
ttgacagagaggggg

SEQ ID NO: 263517 - DNA, 15 bp, Homo sapiens
tttgacagagagggg

SEQ ID NO: 263518 - DNA, 15 bp, Homo sapiens
atttgacagagaggg

SEQ ID NO: 263519 - DNA, 15 bp, Homo sapiens
gatttgacagagagg

SEQ ID NO: 263520 - DNA, 15 bp, Homo sapiens
ggatttgacagagag

SEQ ID NO: 263521 - DNA, 15 bp, Homo sapiens
tggatttgacagaga

SEQ ID NO: 263522 - DNA, 15 bp, Homo sapiens
atggatttgacagag

SEQ ID NO: 263523 - DNA, 15 bp, Homo sapiens
aatggatttgacaga

SEQ ID NO: 263524 - DNA, 15 bp, Homo sapiens
gaatggatttgacag

SEQ ID NO: 263525 - DNA, 15 bp, Homo sapiens
agaatggatttgaca

SEQ ID NO: 263526 - DNA, 15 bp, Homo sapiens
aagaatggatttgac

SEQ ID NO: 263527 - DNA, 15 bp, Homo sapiens
gaagaatggatttga

SEQ ID NO: 263528 - DNA, 15 bp, Homo sapiens
agaagaatggatttg

SEQ ID NO: 263529 - DNA, 15 bp, Homo sapiens
tagaagaatggattt

SEQ ID NO: 263530 - DNA, 15 bp, Homo sapiens
ttagaagaatggatt

SEQ ID NO: 263531 - DNA, 15 bp, Homo sapiens
gttagaagaatggat

SEQ ID NO: 263532 - DNA, 15 bp, Homo sapiens
agttagaagaatgga

SEQ ID NO: 263533 - DNA, 15 bp, Homo sapiens
cagttagaagaatgg

SEQ ID NO: 263534 - DNA, 15 bp, Homo sapiens
gcagttagaagaatg

SEQ ID NO: 263535 - DNA, 15 bp, Homo sapiens
cgcagttagaagaat

SEQ ID NO: 263536 - DNA, 15 bp, Homo sapiens
ccgcagttagaagaa

SEQ ID NO: 263537 - DNA, 15 bp, Homo sapiens
gccgcagttagaaga

SEQ ID NO: 263538 - DNA, 15 bp, Homo sapiens
agccgcagttagaag

SEQ ID NO: 263539 - DNA, 15 bp, Homo sapiens
cagccgcagttagaa

SEQ ID NO: 263540 - DNA, 15 bp, Homo sapiens
ccagccgcagttaga

SEQ ID NO: 263541 - DNA, 15 bp, Homo sapiens
accagccgcagttag

SEQ ID NO: 263542 - DNA, 15 bp, Homo sapiens
taccagccgcagtta

SEQ ID NO: 263543 - DNA, 15 bp, Homo sapiens
ctaccagccgcagtt

SEQ ID NO: 263544 - DNA, 15 bp, Homo sapiens
tctaccagccgcagt

SEQ ID NO: 263545 - DNA, 15 bp, Homo sapiens
ttctaccagccgcag

SEQ ID NO: 263546 - DNA, 15 bp, Homo sapiens
attctaccagccgca

SEQ ID NO: 263547 - DNA, 15 bp, Homo sapiens
gattctaccagccgc

SEQ ID NO: 263548 - DNA, 15 bp, Homo sapiens
agattctaccagccg

SEQ ID NO: 263549 - DNA, 15 bp, Homo sapiens
aagattctaccagcc

SEQ ID NO: 263550 - DNA, 15 bp, Homo sapiens
aaagattctaccagc

SEQ ID NO: 263551 - DNA, 15 bp, Homo sapiens
gaaagattctaccag

SEQ ID NO: 263552 - DNA, 15 bp, Homo sapiens
agaaagattctacca

SEQ ID NO: 263553 - DNA, 15 bp, Homo sapiens
tagaaagattctacc

SEQ ID NO: 263554 - DNA, 15 bp, Homo sapiens
ttagaaagattctac

SEQ ID NO: 263555 - DNA, 15 bp, Homo sapiens
cttagaaagattcta

SEQ ID NO: 263556 - DNA, 15 bp, Homo sapiens
tcttagaaagattct

SEQ ID NO: 263557 - DNA, 15 bp, Homo sapiens
atcttagaaagattc

SEQ ID NO: 263558 - DNA, 15 bp, Homo sapiens
catcttagaaagatt

SEQ ID NO: 263559 - DNA, 15 bp, Homo sapiens
ccatcttagaaagat

SEQ ID NO: 263560 - DNA, 15 bp, Homo sapiens
accatcttagaaaga

SEQ ID NO: 263561 - DNA, 15 bp, Homo sapiens
aaccatcttagaaag

SEQ ID NO: 263562 - DNA, 15 bp, Homo sapiens
aaaccatcttagaaa

SEQ ID NO: 263563 - DNA, 15 bp, Homo sapiens
aaaaccatcttagaa

SEQ ID NO: 263564 - DNA, 15 bp, Homo sapiens
gaaaaccatcttaga

SEQ ID NO: 263565 - DNA, 15 bp, Homo sapiens
agaaaaccatcttag

SEQ ID NO: 263566 - DNA, 15 bp, Homo sapiens
cagaaaaccatctta

SEQ ID NO: 263567 - DNA, 15 bp, Homo sapiens
tcagaaaaccatctt

SEQ ID NO: 263568 - DNA, 15 bp, Homo sapiens
atcagaaaaccatct

SEQ ID NO: 263569 - DNA, 15 bp, Homo sapiens
gatcagaaaaccatc

SEQ ID NO: 263570 - DNA, 15 bp, Homo sapiens
tgatcagaaaaccat

SEQ ID NO: 263571 - DNA, 15 bp, Homo sapiens
atgatcagaaaacca

SEQ ID NO: 263572 - DNA, 15 bp, Homo sapiens
catgatcagaaaacc

SEQ ID NO: 263573 - DNA, 15 bp, Homo sapiens
acatgatcagaaaac

SEQ ID NO: 263574 - DNA, 15 bp, Homo sapiens
aacatgatcagaaaa

SEQ ID NO: 263575 - DNA, 15 bp, Homo sapiens
taacatgatcagaaa

SEQ ID NO: 263576 - DNA, 15 bp, Homo sapiens
ttaacatgatcagaa

SEQ ID NO: 263577 - DNA, 15 bp, Homo sapiens
attaacatgatcaga

SEQ ID NO: 263578 - DNA, 15 bp, Homo sapiens
aattaacatgatcag

SEQ ID NO: 263579 - DNA, 15 bp, Homo sapiens
gaattaacatgatca

SEQ ID NO: 263580 - DNA, 15 bp, Homo sapiens
agaattaacatgatc

SEQ ID NO: 263581 - DNA, 15 bp, Homo sapiens
aagaattaacatgat

SEQ ID NO: 263582 - DNA, 15 bp, Homo sapiens
aaagaattaacatga

SEQ ID NO: 263583 - DNA, 15 bp, Homo sapiens
aaaagaattaacatg

SEQ ID NO: 263584 - DNA, 15 bp, Homo sapiens
gaaaagaattaacat

SEQ ID NO: 263585 - DNA, 15 bp, Homo sapiens
agaaaagaattaaca

SEQ ID NO: 263586 - DNA, 15 bp, Homo sapiens
aagaaaagaattaac

SEQ ID NO: 263587 - DNA, 15 bp, Homo sapiens
taagaaaagaattaa

SEQ ID NO: 263588 - DNA, 15 bp, Homo sapiens
ttaagaaaagaatta

SEQ ID NO: 263589 - DNA, 15 bp, Homo sapiens
tttaagaaaagaatt

SEQ ID NO: 263590 - DNA, 15 bp, Homo sapiens
ttttaagaaaagaat

SEQ ID NO: 263591 - DNA, 15 bp, Homo sapiens
gttttaagaaaagaa

SEQ ID NO: 263592 - DNA, 15 bp, Homo sapiens
agttttaagaaaaga

SEQ ID NO: 263593 - DNA, 15 bp, Homo sapiens
gagttttaagaaaag

SEQ ID NO: 263594 - DNA, 15 bp, Homo sapiens
agagttttaagaaaa

SEQ ID NO: 263595 - DNA, 15 bp, Homo sapiens
aagagttttaagaaa

SEQ ID NO: 263596 - DNA, 15 bp, Homo sapiens
gaagagttttaagaa

SEQ ID NO: 263597 - DNA, 15 bp, Homo sapiens
tgaagagttttaaga

SEQ ID NO: 263598 - DNA, 15 bp, Homo sapiens
atgaagagttttaag

SEQ ID NO: 263599 - DNA, 15 bp, Homo sapiens
aatgaagagttttaa

SEQ ID NO: 263600 - DNA, 15 bp, Homo sapiens
aaatgaagagtttta

SEQ ID NO: 263601 - DNA, 15 bp, Homo sapiens
taaatgaagagtttt

SEQ ID NO: 263602 - DNA, 15 bp, Homo sapiens
ataaatgaagagttt

SEQ ID NO: 263603 - DNA, 15 bp, Homo sapiens
aataaatgaagagtt

SEQ ID NO: 263604 - DNA, 15 bp, Homo sapiens
aaataaatgaagagt

SEQ ID NO: 263605 - DNA, 15 bp, Homo sapiens
gaaataaatgaagag

SEQ ID NO: 263606 - DNA, 15 bp, Homo sapiens
agaaataaatgaaga

SEQ ID NO: 263607 - DNA, 15 bp, Homo sapiens
tagaaataaatgaag

SEQ ID NO: 263608 - DNA, 15 bp, Homo sapiens
atagaaataaatgaa

SEQ ID NO: 263609 - DNA, 15 bp, Homo sapiens
aatagaaataaatga

SEQ ID NO: 263610 - DNA, 15 bp, Homo sapiens
caatagaaataaatg

SEQ ID NO: 263611 - DNA, 15 bp, Homo sapiens
gcaatagaaataaat

SEQ ID NO: 263612 - DNA, 15 bp, Homo sapiens
tgcaatagaaataaa

SEQ ID NO: 263613 - DNA, 15 bp, Homo sapiens
gtgcaatagaaataa

SEQ ID NO: 263614 - DNA, 15 bp, Homo sapiens
agtgcaatagaaata

SEQ ID NO: 263615 - DNA, 15 bp, Homo sapiens
aagtgcaatagaaat

SEQ ID NO: 263616 - DNA, 15 bp, Homo sapiens
caagtgcaatagaaa

SEQ ID NO: 263617 - DNA, 15 bp, Homo sapiens
ccaagtgcaatagaa

SEQ ID NO: 263618 - DNA, 15 bp, Homo sapiens
tccaagtgcaataga

SEQ ID NO: 263619 - DNA, 15 bp, Homo sapiens
ttccaagtgcaatag

SEQ ID NO: 263620 - DNA, 15 bp, Homo sapiens
cttccaagtgcaata

SEQ ID NO: 263621 - DNA, 15 bp, Homo sapiens
tcttccaagtgcaat

SEQ ID NO: 263622 - DNA, 15 bp, Homo sapiens
ttcttccaagtgcaa

SEQ ID NO: 263623 - DNA, 15 bp, Homo sapiens
tttcttccaagtgca

SEQ ID NO: 263624 - DNA, 15 bp, Homo sapiens
ttttcttccaagtgc

SEQ ID NO: 263625 - DNA, 15 bp, Homo sapiens
gttttcttccaagtg

SEQ ID NO: 263626 - DNA, 15 bp, Homo sapiens
ggttttcttccaagt

SEQ ID NO: 263627 - DNA, 15 bp, Homo sapiens
aggttttcttccaag

SEQ ID NO: 263628 - DNA, 15 bp, Homo sapiens
taggttttcttccaa

SEQ ID NO: 263629 - DNA, 15 bp, Homo sapiens
ttaggttttcttcca

SEQ ID NO: 263630 - DNA, 15 bp, Homo sapiens
attaggttttcttcc

SEQ ID NO: 263631 - DNA, 15 bp, Homo sapiens
gattaggttttcttc

SEQ ID NO: 263632 - DNA, 15 bp, Homo sapiens
agattaggttttctt

SEQ ID NO: 263633 - DNA, 15 bp, Homo sapiens
aagattaggttttct

SEQ ID NO: 263634 - DNA, 15 bp, Homo sapiens
taagattaggttttc

SEQ ID NO: 263635 - DNA, 15 bp, Homo sapiens
ataagattaggtttt

SEQ ID NO: 263636 - DNA, 15 bp, Homo sapiens
aataagattaggttt

SEQ ID NO: 263637 - DNA, 15 bp, Homo sapiens
taataagattaggtt

SEQ ID NO: 263638 - DNA, 15 bp, Homo sapiens
ataataagattaggt

SEQ ID NO: 263639 - DNA, 15 bp, Homo sapiens
tataataagattagg

SEQ ID NO: 263640 - DNA, 15 bp, Homo sapiens
atataataagattag

SEQ ID NO: 263641 - DNA, 15 bp, Homo sapiens
gatataataagatta

SEQ ID NO: 263642 - DNA, 15 bp, Homo sapiens
ggatataataagatt

SEQ ID NO: 263643 - DNA, 15 bp, Homo sapiens
aggatataataagat

SEQ ID NO: 263644 - DNA, 15 bp, Homo sapiens
taggatataataaga

SEQ ID NO: 263645 - DNA, 15 bp, Homo sapiens
ataggatataataag

SEQ ID NO: 263646 - DNA, 15 bp, Homo sapiens
tataggatataataa

SEQ ID NO: 263647 - DNA, 15 bp, Homo sapiens
atataggatataata

SEQ ID NO: 263648 - DNA, 15 bp, Homo sapiens
catataggatataat

SEQ ID NO: 263649 - DNA, 15 bp, Homo sapiens
acatataggatataa

SEQ ID NO: 263650 - DNA, 15 bp, Homo sapiens
cacatataggatata

SEQ ID NO: 263651 - DNA, 15 bp, Homo sapiens
acacatataggatat

SEQ ID NO: 263652 - DNA, 15 bp, Homo sapiens
aacacatataggata

SEQ ID NO: 263653 - DNA, 15 bp, Homo sapiens
caacacatataggat

SEQ ID NO: 263654 - DNA, 15 bp, Homo sapiens
acaacacatatagga

SEQ ID NO: 263655 - DNA, 15 bp, Homo sapiens
gacaacacatatagg

SEQ ID NO: 263656 - DNA, 15 bp, Homo sapiens
agacaacacatatag

SEQ ID NO: 263657 - DNA, 15 bp, Homo sapiens
cagacaacacatata

SEQ ID NO: 263658 - DNA, 15 bp, Homo sapiens
tcagacaacacatat

SEQ ID NO: 263659 - DNA, 15 bp, Homo sapiens
gtcagacaacacata

SEQ ID NO: 263660 - DNA, 15 bp, Homo sapiens
ggtcagacaacacat

SEQ ID NO: 263661 - DNA, 15 bp, Homo sapiens
gggtcagacaacaca

SEQ ID NO: 263662 - DNA, 15 bp, Homo sapiens
tgggtcagacaacac

SEQ ID NO: 263663 - DNA, 15 bp, Homo sapiens
ctgggtcagacaaca

SEQ ID NO: 263664 - DNA, 15 bp, Homo sapiens
tctgggtcagacaac

SEQ ID NO: 263665 - DNA, 15 bp, Homo sapiens
ttctgggtcagacaa

SEQ ID NO: 263666 - DNA, 15 bp, Homo sapiens
attctgggtcagaca

SEQ ID NO: 263667 - DNA, 15 bp, Homo sapiens
aattctgggtcagac

SEQ ID NO: 263668 - DNA, 15 bp, Homo sapiens
aaattctgggtcaga

SEQ ID NO: 263669 - DNA, 15 bp, Homo sapiens
aaaattctgggtcag

SEQ ID NO: 263670 - DNA, 15 bp, Homo sapiens
aaaaattctgggtca

SEQ ID NO: 263671 - DNA, 15 bp, Homo sapiens
caaaaattctgggtc

SEQ ID NO: 263672 - DNA, 15 bp, Homo sapiens
acaaaaattctgggt

SEQ ID NO: 263673 - DNA, 15 bp, Homo sapiens
gacaaaaattctggg

SEQ ID NO: 263674 - DNA, 15 bp, Homo sapiens
tgacaaaaattctgg

SEQ ID NO: 263675 - DNA, 15 bp, Homo sapiens
atgacaaaaattctg

SEQ ID NO: 263676 - DNA, 15 bp, Homo sapiens
aatgacaaaaattct

SEQ ID NO: 263677 - DNA, 15 bp, Homo sapiens
gaatgacaaaaattc

SEQ ID NO: 263678 - DNA, 15 bp, Homo sapiens
agaatgacaaaaatt

SEQ ID NO: 263679 - DNA, 15 bp, Homo sapiens
aagaatgacaaaaat

SEQ ID NO: 263680 - DNA, 15 bp, Homo sapiens
aaagaatgacaaaaa

SEQ ID NO: 263681 - DNA, 15 bp, Homo sapiens
taaagaatgacaaaa

SEQ ID NO: 263682 - DNA, 15 bp, Homo sapiens
ataaagaatgacaaa

SEQ ID NO: 263683 - DNA, 15 bp, Homo sapiens
aataaagaatgacaa

SEQ ID NO: 263684 - DNA, 15 bp, Homo sapiens
aaataaagaatgaca

SEQ ID NO: 263685 - DNA, 15 bp, Homo sapiens
caaataaagaatgac

SEQ ID NO: 263686 - DNA, 15 bp, Homo sapiens
tcaaataaagaatga

SEQ ID NO: 263687 - DNA, 15 bp, Homo sapiens
atcaaataaagaatg

SEQ ID NO: 263688 - DNA, 15 bp, Homo sapiens
tatcaaataaagaat

SEQ ID NO: 263689 - DNA, 15 bp, Homo sapiens
gtatcaaataaagaa

SEQ ID NO: 263690 - DNA, 15 bp, Homo sapiens
agtatcaaataaaga

SEQ ID NO: 263691 - DNA, 15 bp, Homo sapiens
gagtatcaaataaag

SEQ ID NO: 263692 - DNA, 15 bp, Homo sapiens
tgagtatcaaataaa

SEQ ID NO: 263693 - DNA, 15 bp, Homo sapiens
atgagtatcaaataa

SEQ ID NO: 263694 - DNA, 15 bp, Homo sapiens
catgagtatcaaata

SEQ ID NO: 263695 - DNA, 15 bp, Homo sapiens
acatgagtatcaaat

SEQ ID NO: 263696 - DNA, 15 bp, Homo sapiens
cacatgagtatcaaa

SEQ ID NO: 263697 - DNA, 15 bp, Homo sapiens
ccacatgagtatcaa

SEQ ID NO: 263698 - DNA, 15 bp, Homo sapiens
gccacatgagtatca

SEQ ID NO: 263699 - DNA, 15 bp, Homo sapiens
agccacatgagtatc

SEQ ID NO: 263700 - DNA, 15 bp, Homo sapiens
gagccacatgagtat

SEQ ID NO: 263701 - DNA, 15 bp, Homo sapiens
tgagccacatgagta

SEQ ID NO: 263702 - DNA, 15 bp, Homo sapiens
ttgagccacatgagt

SEQ ID NO: 263703 - DNA, 15 bp, Homo sapiens
gttgagccacatgag

SEQ ID NO: 263704 - DNA, 15 bp, Homo sapiens
agttgagccacatga

SEQ ID NO: 263705 - DNA, 15 bp, Homo sapiens
cagttgagccacatg

SEQ ID NO: 263706 - DNA, 15 bp, Homo sapiens
gcagttgagccacat

SEQ ID NO: 263707 - DNA, 15 bp, Homo sapiens
tgcagttgagccaca

SEQ ID NO: 263708 - DNA, 15 bp, Homo sapiens
ttgcagttgagccac

SEQ ID NO: 263709 - DNA, 15 bp, Homo sapiens
gttgcagttgagcca

SEQ ID NO: 263710 - DNA, 15 bp, Homo sapiens
tgttgcagttgagcc

SEQ ID NO: 263711 - DNA, 15 bp, Homo sapiens
ctgttgcagttgagc

SEQ ID NO: 263712 - DNA, 15 bp, Homo sapiens
gctgttgcagttgag

SEQ ID NO: 263713 - DNA, 15 bp, Homo sapiens
tgctgttgcagttga

SEQ ID NO: 263714 - DNA, 15 bp, Homo sapiens
ctgctgttgcagttg

SEQ ID NO: 263715 - DNA, 15 bp, Homo sapiens
gctgctgttgcagtt

SEQ ID NO: 263716 - DNA, 15 bp, Homo sapiens
tgctgctgttgcagt

SEQ ID NO: 263717 - DNA, 15 bp, Homo sapiens
ttgctgctgttgcag

SEQ ID NO: 263718 - DNA, 15 bp, Homo sapiens
tttgctgctgttgca

SEQ ID NO: 263719 - DNA, 15 bp, Homo sapiens
gtttgctgctgttgc

SEQ ID NO: 263720 - DNA, 15 bp, Homo sapiens
tgtttgctgctgttg

SEQ ID NO: 263721 - DNA, 15 bp, Homo sapiens
ctgtttgctgctgtt

SEQ ID NO: 263722 - DNA, 15 bp, Homo sapiens
gctgtttgctgctgt

SEQ ID NO: 263723 - DNA, 15 bp, Homo sapiens
agctgtttgctgctg

SEQ ID NO: 263724 - DNA, 15 bp, Homo sapiens
cagctgtttgctgct

SEQ ID NO: 263725 - DNA, 15 bp, Homo sapiens
ccagctgtttgctgc

SEQ ID NO: 263726 - DNA, 15 bp, Homo sapiens
cccagctgtttgctg

SEQ ID NO: 263727 - DNA, 15 bp, Homo sapiens
gcccagctgtttgct

SEQ ID NO: 263728 - DNA, 15 bp, Homo sapiens
agcccagctgtttgc

SEQ ID NO: 263729 - DNA, 15 bp, Homo sapiens
gagcccagctgtttg

SEQ ID NO: 263730 - DNA, 15 bp, Homo sapiens
agagcccagctgttt

SEQ ID NO: 263731 - DNA, 15 bp, Homo sapiens
tagagcccagctgtt

SEQ ID NO: 263732 - DNA, 15 bp, Homo sapiens
gtagagcccagctgt

SEQ ID NO: 263733 - DNA, 15 bp, Homo sapiens
ggtagagcccagctg

SEQ ID NO: 263734 - DNA, 15 bp, Homo sapiens
gggtagagcccagct

SEQ ID NO: 263735 - DNA, 15 bp, Homo sapiens
tgggtagagcccagc

SEQ ID NO: 263736 - DNA, 15 bp, Homo sapiens
atgggtagagcccag

SEQ ID NO: 263737 - DNA, 15 bp, Homo sapiens
catgggtagagccca

SEQ ID NO: 263738 - DNA, 15 bp, Homo sapiens
acatgggtagagccc

SEQ ID NO: 263739 - DNA, 15 bp, Homo sapiens
cacatgggtagagcc

SEQ ID NO: 263740 - DNA, 15 bp, Homo sapiens
ccacatgggtagagc

SEQ ID NO: 263741 - DNA, 15 bp, Homo sapiens
tccacatgggtagag

SEQ ID NO: 263742 - DNA, 15 bp, Homo sapiens
atccacatgggtaga

SEQ ID NO: 263743 - DNA, 15 bp, Homo sapiens
gatccacatgggtag

SEQ ID NO: 263744 - DNA, 15 bp, Homo sapiens
ggatccacatgggta

SEQ ID NO: 263745 - DNA, 15 bp, Homo sapiens
gggatccacatgggt

SEQ ID NO: 263746 - DNA, 15 bp, Homo sapiens
agggatccacatggg

SEQ ID NO: 263747 - DNA, 15 bp, Homo sapiens
gagggatccacatgg

SEQ ID NO: 263748 - DNA, 15 bp, Homo sapiens
agagggatccacatg

SEQ ID NO: 263749 - DNA, 15 bp, Homo sapiens
tagagggatccacat

SEQ ID NO: 263750 - DNA, 15 bp, Homo sapiens
gtagagggatccaca

SEQ ID NO: 263751 - DNA, 15 bp, Homo sapiens
agtagagggatccac

SEQ ID NO: 263752 - DNA, 15 bp, Homo sapiens
aagtagagggatcca

SEQ ID NO: 263753 - DNA, 15 bp, Homo sapiens
caagtagagggatcc

SEQ ID NO: 263754 - DNA, 15 bp, Homo sapiens
ccaagtagagggatc

SEQ ID NO: 263755 - DNA, 15 bp, Homo sapiens
tccaagtagagggat

SEQ ID NO: 263756 - DNA, 15 bp, Homo sapiens
ttccaagtagaggga

SEQ ID NO: 263757 - DNA, 15 bp, Homo sapiens
attccaagtagaggg

SEQ ID NO: 263758 - DNA, 15 bp, Homo sapiens
cattccaagtagagg

SEQ ID NO: 263759 - DNA, 15 bp, Homo sapiens
acattccaagtagag

SEQ ID NO: 263760 - DNA, 15 bp, Homo sapiens
gacattccaagtaga

SEQ ID NO: 263761 - DNA, 15 bp, Homo sapiens
agacattccaagtag

SEQ ID NO: 263762 - DNA, 15 bp, Homo sapiens
gagacattccaagta

SEQ ID NO: 263763 - DNA, 15 bp, Homo sapiens
agagacattccaagt

SEQ ID NO: 263764 - DNA, 15 bp, Homo sapiens
gagagacattccaag

SEQ ID NO: 263765 - DNA, 15 bp, Homo sapiens
ggagagacattccaa

SEQ ID NO: 263766 - DNA, 15 bp, Homo sapiens
aggagagacattcca

SEQ ID NO: 263767 - DNA, 15 bp, Homo sapiens
gaggagagacattcc

SEQ ID NO: 263768 - DNA, 15 bp, Homo sapiens
agaggagagacattc

SEQ ID NO: 263769 - DNA, 15 bp, Homo sapiens
aagaggagagacatt

SEQ ID NO: 263770 - DNA, 15 bp, Homo sapiens
gaagaggagagacat

SEQ ID NO: 263771 - DNA, 15 bp, Homo sapiens
agaagaggagagaca

SEQ ID NO: 263772 - DNA, 15 bp, Homo sapiens
gagaagaggagagac

SEQ ID NO: 263773 - DNA, 15 bp, Homo sapiens
ggagaagaggagaga

SEQ ID NO: 263774 - DNA, 15 bp, Homo sapiens
gggagaagaggagag

SEQ ID NO: 263775 - DNA, 15 bp, Homo sapiens
agggagaagaggaga

SEQ ID NO: 263776 - DNA, 15 bp, Homo sapiens
aagggagaagaggag

SEQ ID NO: 263777 - DNA, 15 bp, Homo sapiens
aaagggagaagagga

SEQ ID NO: 263778 - DNA, 15 bp, Homo sapiens
gaaagggagaagagg

SEQ ID NO: 263779 - DNA, 15 bp, Homo sapiens
ggaaagggagaagag

SEQ ID NO: 263780 - DNA, 15 bp, Homo sapiens
gggaaagggagaaga

SEQ ID NO: 263781 - DNA, 15 bp, Homo sapiens
ggggaaagggagaag

SEQ ID NO: 263782 - DNA, 15 bp, Homo sapiens
tggggaaagggagaa

SEQ ID NO: 263783 - DNA, 15 bp, Homo sapiens
gtggggaaagggaga

SEQ ID NO: 263784 - DNA, 15 bp, Homo sapiens
ggtggggaaagggag

SEQ ID NO: 263785 - DNA, 15 bp, Homo sapiens
aggtggggaaaggga

SEQ ID NO: 263786 - DNA, 15 bp, Homo sapiens
aaggtggggaaaggg

SEQ ID NO: 263787 - DNA, 15 bp, Homo sapiens
aaaggtggggaaagg

SEQ ID NO: 263788 - DNA, 15 bp, Homo sapiens
aaaaggtggggaaag

SEQ ID NO: 263789 - DNA, 15 bp, Homo sapiens
caaaaggtggggaaa

SEQ ID NO: 263790 - DNA, 15 bp, Homo sapiens
gcaaaaggtggggaa

SEQ ID NO: 263791 - DNA, 15 bp, Homo sapiens
agcaaaaggtgggga

SEQ ID NO: 263792 - DNA, 15 bp, Homo sapiens
aagcaaaaggtgggg

SEQ ID NO: 263793 - DNA, 15 bp, Homo sapiens
taagcaaaaggtggg

SEQ ID NO: 263794 - DNA, 15 bp, Homo sapiens
ctaagcaaaaggtgg

SEQ ID NO: 263795 - DNA, 15 bp, Homo sapiens
gctaagcaaaaggtg

SEQ ID NO: 263796 - DNA, 15 bp, Homo sapiens
ggctaagcaaaaggt

SEQ ID NO: 263797 - DNA, 15 bp, Homo sapiens
aggctaagcaaaagg

SEQ ID NO: 263798 - DNA, 15 bp, Homo sapiens
gaggctaagcaaaag

SEQ ID NO: 263799 - DNA, 15 bp, Homo sapiens
ggaggctaagcaaaa

SEQ ID NO: 263800 - DNA, 15 bp, Homo sapiens
tggaggctaagcaaa

SEQ ID NO: 263801 - DNA, 15 bp, Homo sapiens
gtggaggctaagcaa

SEQ ID NO: 263802 - DNA, 15 bp, Homo sapiens
agtggaggctaagca

SEQ ID NO: 263803 - DNA, 15 bp, Homo sapiens
aagtggaggctaagc

SEQ ID NO: 263804 - DNA, 15 bp, Homo sapiens
taagtggaggctaag

SEQ ID NO: 263805 - DNA, 15 bp, Homo sapiens
gtaagtggaggctaa

SEQ ID NO: 263806 - DNA, 15 bp, Homo sapiens
agtaagtggaggcta

SEQ ID NO: 263807 - DNA, 15 bp, Homo sapiens
gagtaagtggaggct

SEQ ID NO: 263808 - DNA, 15 bp, Homo sapiens
tgagtaagtggaggc

SEQ ID NO: 263809 - DNA, 15 bp, Homo sapiens
atgagtaagtggagg

SEQ ID NO: 263810 - DNA, 15 bp, Homo sapiens
gatgagtaagtggag

SEQ ID NO: 263811 - DNA, 15 bp, Homo sapiens
ggatgagtaagtgga

SEQ ID NO: 263812 - DNA, 15 bp, Homo sapiens
aggatgagtaagtgg

SEQ ID NO: 263813 - DNA, 15 bp, Homo sapiens
aaggatgagtaagtg

SEQ ID NO: 263814 - DNA, 15 bp, Homo sapiens
gaaggatgagtaagt

SEQ ID NO: 263815 - DNA, 15 bp, Homo sapiens
agaaggatgagtaag

SEQ ID NO: 263816 - DNA, 15 bp, Homo sapiens
aagaaggatgagtaa

SEQ ID NO: 263817 - DNA, 15 bp, Homo sapiens
caagaaggatgagta

SEQ ID NO: 263818 - DNA, 15 bp, Homo sapiens
ccaagaaggatgagt

SEQ ID NO: 263819 - DNA, 15 bp, Homo sapiens
cccaagaaggatgag

SEQ ID NO: 263820 - DNA, 15 bp, Homo sapiens
gcccaagaaggatga

SEQ ID NO: 263821 - DNA, 15 bp, Homo sapiens
tgcccaagaaggatg

SEQ ID NO: 263822 - DNA, 15 bp, Homo sapiens
atgcccaagaaggat

SEQ ID NO: 263823 - DNA, 15 bp, Homo sapiens
gatgcccaagaagga

SEQ ID NO: 263824 - DNA, 15 bp, Homo sapiens
tgatgcccaagaagg

SEQ ID NO: 263825 - DNA, 15 bp, Homo sapiens
gtgatgcccaagaag

SEQ ID NO: 263826 - DNA, 15 bp, Homo sapiens
ggtgatgcccaagaa

SEQ ID NO: 263827 - DNA, 15 bp, Homo sapiens
gggtgatgcccaaga

SEQ ID NO: 263828 - DNA, 15 bp, Homo sapiens
ggggtgatgcccaag

SEQ ID NO: 263829 - DNA, 15 bp, Homo sapiens
aggggtgatgcccaa

SEQ ID NO: 263830 - DNA, 15 bp, Homo sapiens
taggggtgatgccca

SEQ ID NO: 263831 - DNA, 15 bp, Homo sapiens
gtaggggtgatgccc

SEQ ID NO: 263832 - DNA, 15 bp, Homo sapiens
ggtaggggtgatgcc

SEQ ID NO: 263833 - DNA, 15 bp, Homo sapiens
tggtaggggtgatgc

SEQ ID NO: 263834 - DNA, 15 bp, Homo sapiens
ctggtaggggtgatg

SEQ ID NO: 263835 - DNA, 15 bp, Homo sapiens
tctggtaggggtgat

SEQ ID NO: 263836 - DNA, 15 bp, Homo sapiens
atctggtaggggtga

SEQ ID NO: 263837 - DNA, 15 bp, Homo sapiens
gatctggtaggggtg

SEQ ID NO: 263838 - DNA, 15 bp, Homo sapiens
tgatctggtaggggt

SEQ ID NO: 263839 - DNA, 15 bp, Homo sapiens
ctgatctggtagggg

SEQ ID NO: 263840 - DNA, 15 bp, Homo sapiens
cctgatctggtaggg

SEQ ID NO: 263841 - DNA, 15 bp, Homo sapiens
acctgatctggtagg

SEQ ID NO: 263842 - DNA, 15 bp, Homo sapiens
aacctgatctggtag

SEQ ID NO: 263843 - DNA, 15 bp, Homo sapiens
taacctgatctggta

SEQ ID NO: 263844 - DNA, 15 bp, Homo sapiens
ctaacctgatctggt

SEQ ID NO: 263845 - DNA, 15 bp, Homo sapiens
gctaacctgatctgg

SEQ ID NO: 263846 - DNA, 15 bp, Homo sapiens
agctaacctgatctg

SEQ ID NO: 263847 - DNA, 15 bp, Homo sapiens
cagctaacctgatct

SEQ ID NO: 263848 - DNA, 15 bp, Homo sapiens
gcagctaacctgatc

SEQ ID NO: 263849 - DNA, 15 bp, Homo sapiens
agcagctaacctgat

SEQ ID NO: 263850 - DNA, 15 bp, Homo sapiens
gagcagctaacctga

SEQ ID NO: 263851 - DNA, 15 bp, Homo sapiens
ggagcagctaacctg

SEQ ID NO: 263852 - DNA, 15 bp, Homo sapiens
aggagcagctaacct

SEQ ID NO: 263853 - DNA, 15 bp, Homo sapiens
caggagcagctaacc

SEQ ID NO: 263854 - DNA, 15 bp, Homo sapiens
acaggagcagctaac

SEQ ID NO: 263855 - DNA, 15 bp, Homo sapiens
aacaggagcagctaa

SEQ ID NO: 263856 - DNA, 15 bp, Homo sapiens
gaacaggagcagcta

SEQ ID NO: 263857 - DNA, 15 bp, Homo sapiens
ggaacaggagcagct

SEQ ID NO: 263858 - DNA, 15 bp, Homo sapiens
tggaacaggagcagc

SEQ ID NO: 263859 - DNA, 15 bp, Homo sapiens
gtggaacaggagcag

SEQ ID NO: 263860 - DNA, 15 bp, Homo sapiens
tgtggaacaggagca

SEQ ID NO: 263861 - DNA, 15 bp, Homo sapiens
ctgtggaacaggagc

SEQ ID NO: 263862 - DNA, 15 bp, Homo sapiens
gctgtggaacaggag

SEQ ID NO: 263863 - DNA, 15 bp, Homo sapiens
agctgtggaacagga

SEQ ID NO: 263864 - DNA, 15 bp, Homo sapiens
gagctgtggaacagg

SEQ ID NO: 263865 - DNA, 15 bp, Homo sapiens
tgagctgtggaacag

SEQ ID NO: 263866 - DNA, 15 bp, Homo sapiens
atgagctgtggaaca

SEQ ID NO: 263867 - DNA, 15 bp, Homo sapiens
tatgagctgtggaac

SEQ ID NO: 263868 - DNA, 15 bp, Homo sapiens
ctatgagctgtggaa

SEQ ID NO: 263869 - DNA, 15 bp, Homo sapiens
gctatgagctgtgga

SEQ ID NO: 263870 - DNA, 15 bp, Homo sapiens
agctatgagctgtgg

SEQ ID NO: 263871 - DNA, 15 bp, Homo sapiens
aagctatgagctgtg

SEQ ID NO: 263872 - DNA, 15 bp, Homo sapiens
caagctatgagctgt

SEQ ID NO: 263873 - DNA, 15 bp, Homo sapiens
gcaagctatgagctg

SEQ ID NO: 263874 - DNA, 15 bp, Homo sapiens
agcaagctatgagct

SEQ ID NO: 263875 - DNA, 15 bp, Homo sapiens
cagcaagctatgagc

SEQ ID NO: 263876 - DNA, 15 bp, Homo sapiens
acagcaagctatgag

SEQ ID NO: 263877 - DNA, 15 bp, Homo sapiens
tacagcaagctatga

SEQ ID NO: 263878 - DNA, 15 bp, Homo sapiens
gtacagcaagctatg

SEQ ID NO: 263879 - DNA, 15 bp, Homo sapiens
agtacagcaagctat

SEQ ID NO: 263880 - DNA, 15 bp, Homo sapiens
aagtacagcaagcta

SEQ ID NO: 263881 - DNA, 15 bp, Homo sapiens
aaagtacagcaagct

SEQ ID NO: 263882 - DNA, 15 bp, Homo sapiens
gaaagtacagcaagc

SEQ ID NO: 263883 - DNA, 15 bp, Homo sapiens
ggaaagtacagcaag

SEQ ID NO: 263884 - DNA, 15 bp, Homo sapiens
gggaaagtacagcaa

SEQ ID NO: 263885 - DNA, 15 bp, Homo sapiens
agggaaagtacagca

SEQ ID NO: 263886 - DNA, 15 bp, Homo sapiens
aagggaaagtacagc

SEQ ID NO: 263887 - DNA, 15 bp, Homo sapiens
aaagggaaagtacag

SEQ ID NO: 263888 - DNA, 15 bp, Homo sapiens
caaagggaaagtaca

SEQ ID NO: 263889 - DNA, 15 bp, Homo sapiens
gcaaagggaaagtac

SEQ ID NO: 263890 - DNA, 15 bp, Homo sapiens
tgcaaagggaaagta

SEQ ID NO: 263891 - DNA, 15 bp, Homo sapiens
atgcaaagggaaagt

SEQ ID NO: 263892 - DNA, 15 bp, Homo sapiens
aatgcaaagggaaag

SEQ ID NO: 263893 - DNA, 15 bp, Homo sapiens
gaatgcaaagggaaa

SEQ ID NO: 263894 - DNA, 15 bp, Homo sapiens
ggaatgcaaagggaa

SEQ ID NO: 263895 - DNA, 15 bp, Homo sapiens
gggaatgcaaaggga

SEQ ID NO: 263896 - DNA, 15 bp, Homo sapiens
agggaatgcaaaggg

SEQ ID NO: 263897 - DNA, 15 bp, Homo sapiens
tagggaatgcaaagg

SEQ ID NO: 263898 - DNA, 15 bp, Homo sapiens
ttagggaatgcaaag

SEQ ID NO: 263899 - DNA, 15 bp, Homo sapiens
attagggaatgcaaa

SEQ ID NO: 263900 - DNA, 15 bp, Homo sapiens
cattagggaatgcaa

SEQ ID NO: 263901 - DNA, 15 bp, Homo sapiens
tcattagggaatgca

SEQ ID NO: 263902 - DNA, 15 bp, Homo sapiens
ttcattagggaatgc

SEQ ID NO: 263903 - DNA, 15 bp, Homo sapiens
gttcattagggaatg

SEQ ID NO: 263904 - DNA, 15 bp, Homo sapiens
ggttcattagggaat

SEQ ID NO: 263905 - DNA, 15 bp, Homo sapiens
gggttcattagggaa

SEQ ID NO: 263906 - DNA, 15 bp, Homo sapiens
ggggttcattaggga

SEQ ID NO: 263907 - DNA, 15 bp, Homo sapiens
gggggttcattaggg

SEQ ID NO: 263908 - DNA, 15 bp, Homo sapiens
tgggggttcattagg

SEQ ID NO: 263909 - DNA, 15 bp, Homo sapiens
atgggggttcattag

SEQ ID NO: 263910 - DNA, 15 bp, Homo sapiens
catgggggttcatta

SEQ ID NO: 263911 - DNA, 15 bp, Homo sapiens
acatgggggttcatt

SEQ ID NO: 263912 - DNA, 15 bp, Homo sapiens
cacatgggggttcat

SEQ ID NO: 263913 - DNA, 15 bp, Homo sapiens
acacatgggggttca

SEQ ID NO: 263914 - DNA, 15 bp, Homo sapiens
aacacatgggggttc

SEQ ID NO: 263915 - DNA, 15 bp, Homo sapiens
taacacatgggggtt

SEQ ID NO: 263916 - DNA, 15 bp, Homo sapiens
ataacacatgggggt

SEQ ID NO: 263917 - DNA, 15 bp, Homo sapiens
gataacacatggggg

SEQ ID NO: 263918 - DNA, 15 bp, Homo sapiens
ggataacacatgggg

SEQ ID NO: 263919 - DNA, 15 bp, Homo sapiens
tggataacacatggg

SEQ ID NO: 263920 - DNA, 15 bp, Homo sapiens
atggataacacatgg

SEQ ID NO: 263921 - DNA, 15 bp, Homo sapiens
catggataacacatg

SEQ ID NO: 263922 - DNA, 15 bp, Homo sapiens
acatggataacacat

SEQ ID NO: 263923 - DNA, 15 bp, Homo sapiens
tacatggataacaca

SEQ ID NO: 263924 - DNA, 15 bp, Homo sapiens
ctacatggataacac

SEQ ID NO: 263925 - DNA, 15 bp, Homo sapiens
actacatggataaca

SEQ ID NO: 263926 - DNA, 15 bp, Homo sapiens
aactacatggataac

SEQ ID NO: 263927 - DNA, 15 bp, Homo sapiens
aaactacatggataa

SEQ ID NO: 263928 - DNA, 15 bp, Homo sapiens
aaaactacatggata

SEQ ID NO: 263929 - DNA, 15 bp, Homo sapiens
gaaaactacatggat

SEQ ID NO: 263930 - DNA, 15 bp, Homo sapiens
agaaaactacatgga

SEQ ID NO: 263931 - DNA, 15 bp, Homo sapiens
cagaaaactacatgg

SEQ ID NO: 263932 - DNA, 15 bp, Homo sapiens
acagaaaactacatg

SEQ ID NO: 263933 - DNA, 15 bp, Homo sapiens
aacagaaaactacat

SEQ ID NO: 263934 - DNA, 15 bp, Homo sapiens
aaacagaaaactaca

SEQ ID NO: 263935 - DNA, 15 bp, Homo sapiens
taaacagaaaactac

SEQ ID NO: 263936 - DNA, 15 bp, Homo sapiens
ctaaacagaaaacta

SEQ ID NO: 263937 - DNA, 15 bp, Homo sapiens
actaaacagaaaact

SEQ ID NO: 263938 - DNA, 15 bp, Homo sapiens
cactaaacagaaaac

SEQ ID NO: 263939 - DNA, 15 bp, Homo sapiens
acactaaacagaaaa

SEQ ID NO: 263940 - DNA, 15 bp, Homo sapiens
gacactaaacagaaa

SEQ ID NO: 263941 - DNA, 15 bp, Homo sapiens
agacactaaacagaa

SEQ ID NO: 263942 - DNA, 15 bp, Homo sapiens
cagacactaaacaga

SEQ ID NO: 263943 - DNA, 15 bp, Homo sapiens
acagacactaaacag

SEQ ID NO: 263944 - DNA, 15 bp, Homo sapiens
gacagacactaaaca

SEQ ID NO: 263945 - DNA, 15 bp, Homo sapiens
agacagacactaaac

SEQ ID NO: 263946 - DNA, 15 bp, Homo sapiens
gagacagacactaaa

SEQ ID NO: 263947 - DNA, 15 bp, Homo sapiens
ggagacagacactaa

SEQ ID NO: 263948 - DNA, 15 bp, Homo sapiens
aggagacagacacta

SEQ ID NO: 263949 - DNA, 15 bp, Homo sapiens
gaggagacagacact

SEQ ID NO: 263950 - DNA, 15 bp, Homo sapiens
agaggagacagacac

SEQ ID NO: 263951 - DNA, 15 bp, Homo sapiens
aagaggagacagaca

SEQ ID NO: 263952 - DNA, 15 bp, Homo sapiens
aaagaggagacagac

SEQ ID NO: 263953 - DNA, 15 bp, Homo sapiens
gaaagaggagacaga

SEQ ID NO: 263954 - DNA, 15 bp, Homo sapiens
ggaaagaggagacag

SEQ ID NO: 263955 - DNA, 15 bp, Homo sapiens
gggaaagaggagaca

SEQ ID NO: 263956 - DNA, 15 bp, Homo sapiens
agggaaagaggagac

SEQ ID NO: 263957 - DNA, 15 bp, Homo sapiens
aagggaaagaggaga

SEQ ID NO: 263958 - DNA, 15 bp, Homo sapiens
aaagggaaagaggag

SEQ ID NO: 263959 - DNA, 15 bp, Homo sapiens
gaaagggaaagagga

SEQ ID NO: 263960 - DNA, 15 bp, Homo sapiens
ctgaaagggaaagag

SEQ ID NO: 263961 - DNA, 15 bp, Homo sapiens
cctgaaagggaaaga

SEQ ID NO: 263962 - DNA, 15 bp, Homo sapiens
ccctgaaagggaaag

SEQ ID NO: 263963 - DNA, 15 bp, Homo sapiens
tccctgaaagggaaa

SEQ ID NO: 263964 - DNA, 15 bp, Homo sapiens
gtccctgaaagggaa

SEQ ID NO: 263965 - DNA, 15 bp, Homo sapiens
ggtccctgaaaggga

SEQ ID NO: 263966 - DNA, 15 bp, Homo sapiens
gggtccctgaaaggg

SEQ ID NO: 263967 - DNA, 15 bp, Homo sapiens
agggtccctgaaagg

SEQ ID NO: 263968 - DNA, 15 bp, Homo sapiens
aagggtccctgaaag

SEQ ID NO: 263969 - DNA, 15 bp, Homo sapiens
caagggtccctgaaa

SEQ ID NO: 263970 - DNA, 15 bp, Homo sapiens
gcaagggtccctgaa

SEQ ID NO: 263971 - DNA, 15 bp, Homo sapiens
tgcaagggtccctga

SEQ ID NO: 263972 - DNA, 15 bp, Homo sapiens
ttgcaagggtccctg

SEQ ID NO: 263973 - DNA, 15 bp, Homo sapiens
cttgcaagggtccct

SEQ ID NO: 263974 - DNA, 15 bp, Homo sapiens
ccttgcaagggtccc

SEQ ID NO: 263975 - DNA, 15 bp, Homo sapiens
accttgcaagggtcc

SEQ ID NO: 263976 - DNA, 15 bp, Homo sapiens
gaccttgcaagggtc

SEQ ID NO: 263977 - DNA, 15 bp, Homo sapiens
ggaccttgcaagggt

SEQ ID NO: 263978 - DNA, 15 bp, Homo sapiens
gggaccttgcaaggg

SEQ ID NO: 263979 - DNA, 15 bp, Homo sapiens
agggaccttgcaagg

SEQ ID NO: 263980 - DNA, 15 bp, Homo sapiens
cagggaccttgcaag

SEQ ID NO: 263981 - DNA, 15 bp, Homo sapiens
tcagggaccttgcaa

SEQ ID NO: 263982 - DNA, 15 bp, Homo sapiens
ctcagggaccttgca

SEQ ID NO: 263983 - DNA, 15 bp, Homo sapiens
cctcagggaccttgc

SEQ ID NO: 263984 - DNA, 15 bp, Homo sapiens
ccctcagggaccttg

SEQ ID NO: 263985 - DNA, 15 bp, Homo sapiens
gccctcagggacctt

SEQ ID NO: 263986 - DNA, 15 bp, Homo sapiens
tgccctcagggacct

SEQ ID NO: 263987 - DNA, 15 bp, Homo sapiens
ctgccctcagggacc

SEQ ID NO: 263988 - DNA, 15 bp, Homo sapiens
tctgccctcagggac

SEQ ID NO: 263989 - DNA, 15 bp, Homo sapiens
ctctgccctcaggga

SEQ ID NO: 263990 - DNA, 15 bp, Homo sapiens
tctctgccctcaggg

SEQ ID NO: 263991 - DNA, 15 bp, Homo sapiens
gtctctgccctcagg

SEQ ID NO: 263992 - DNA, 15 bp, Homo sapiens
ggtctctgccctcag

SEQ ID NO: 263993 - DNA, 15 bp, Homo sapiens
tggtctctgccctca

SEQ ID NO: 263994 - DNA, 15 bp, Homo sapiens
gtggtctctgccctc

SEQ ID NO: 263995 - DNA, 15 bp, Homo sapiens
ggtggtctctgccct

SEQ ID NO: 263996 - DNA, 15 bp, Homo sapiens
gggtggtctctgccc

SEQ ID NO: 263997 - DNA, 15 bp, Homo sapiens
ggggtggtctctgcc

SEQ ID NO: 263998 - DNA, 15 bp, Homo sapiens
gggggtggtctctgc

SEQ ID NO: 263999 - DNA, 15 bp, Homo sapiens
tgggggtggtctctg

SEQ ID NO: 264000 - DNA, 15 bp, Homo sapiens
atgggggtggtctct

SEQ ID NO: 264001 - DNA, 15 bp, Homo sapiens
aatgggggtggtctc

SEQ ID NO: 264002 - DNA, 15 bp, Homo sapiens
aaatgggggtggtct

SEQ ID NO: 264003 - DNA, 15 bp, Homo sapiens
aaaatgggggtggtc

SEQ ID NO: 264004 - DNA, 15 bp, Homo sapiens
caaaatgggggtggt

SEQ ID NO: 264005 - DNA, 15 bp, Homo sapiens
acaaaatgggggtgg

SEQ ID NO: 264006 - DNA, 15 bp, Homo sapiens
aacaaaatgggggtg

SEQ ID NO: 264007 - DNA, 15 bp, Homo sapiens
caacaaaatgggggt

SEQ ID NO: 264008 - DNA, 15 bp, Homo sapiens
ccaacaaaatggggg

SEQ ID NO: 264009 - DNA, 15 bp, Homo sapiens
gccaacaaaatgggg

SEQ ID NO: 264010 - DNA, 15 bp, Homo sapiens
agccaacaaaatggg

SEQ ID NO: 264011 - DNA, 15 bp, Homo sapiens
tagccaacaaaatgg

SEQ ID NO: 264012 - DNA, 15 bp, Homo sapiens
gtagccaacaaaatg

SEQ ID NO: 264013 - DNA, 15 bp, Homo sapiens
agtagccaacaaaat

SEQ ID NO: 264014 - DNA, 15 bp, Homo sapiens
cagtagccaacaaaa

SEQ ID NO: 264015 - DNA, 15 bp, Homo sapiens
gcagtagccaacaaa

SEQ ID NO: 264016 - DNA, 15 bp, Homo sapiens
agcagtagccaacaa

SEQ ID NO: 264017 - DNA, 15 bp, Homo sapiens
gagcagtagccaaca

SEQ ID NO: 264018 - DNA, 15 bp, Homo sapiens
tgagcagtagccaac

SEQ ID NO: 264019 - DNA, 15 bp, Homo sapiens
ttgagcagtagccaa

SEQ ID NO: 264020 - DNA, 15 bp, Homo sapiens
cttgagcagtagcca

SEQ ID NO: 264021 - DNA, 15 bp, Homo sapiens
tcttgagcagtagcc

SEQ ID NO: 264022 - DNA, 15 bp, Homo sapiens
gtcttgagcagtagc

SEQ ID NO: 264023 - DNA, 15 bp, Homo sapiens
ggtcttgagcagtag

SEQ ID NO: 264024 - DNA, 15 bp, Homo sapiens
aggtcttgagcagta

SEQ ID NO: 264025 - DNA, 15 bp, Homo sapiens
taggtcttgagcagt

SEQ ID NO: 264026 - DNA, 15 bp, Homo sapiens
ctaggtcttgagcag

SEQ ID NO: 264027 - DNA, 15 bp, Homo sapiens
gctaggtcttgagca

SEQ ID NO: 264028 - DNA, 15 bp, Homo sapiens
tgctaggtcttgagc

SEQ ID NO: 264029 - DNA, 15 bp, Homo sapiens
gtgctaggtcttgag

SEQ ID NO: 264030 - DNA, 15 bp, Homo sapiens
tgtgctaggtcttga

SEQ ID NO: 264031 - DNA, 15 bp, Homo sapiens
ctgtgctaggtcttg

SEQ ID NO: 264032 - DNA, 15 bp, Homo sapiens
tctgtgctaggtctt

SEQ ID NO: 264033 - DNA, 15 bp, Homo sapiens
ttctgtgctaggtct

SEQ ID NO: 264034 - DNA, 15 bp, Homo sapiens
cttctgtgctaggtc

SEQ ID NO: 264035 - DNA, 15 bp, Homo sapiens
gcttctgtgctaggt

SEQ ID NO: 264036 - DNA, 15 bp, Homo sapiens
ggcttctgtgctagg

SEQ ID NO: 264037 - DNA, 15 bp, Homo sapiens
aggcttctgtgctag

SEQ ID NO: 264038 - DNA, 15 bp, Homo sapiens
caggcttctgtgcta

SEQ ID NO: 264039 - DNA, 15 bp, Homo sapiens
gcaggcttctgtgct

SEQ ID NO: 264040 - DNA, 15 bp, Homo sapiens
tgcaggcttctgtgc

SEQ ID NO: 264041 - DNA, 15 bp, Homo sapiens
ctgcaggcttctgtg

SEQ ID NO: 264042 - DNA, 15 bp, Homo sapiens
gctgcaggcttctgt

SEQ ID NO: 264043 - DNA, 15 bp, Homo sapiens
agctgcaggcttctg

SEQ ID NO: 264044 - DNA, 15 bp, Homo sapiens
gagctgcaggcttct

SEQ ID NO: 264045 - DNA, 15 bp, Homo sapiens
tgagctgcaggcttc

SEQ ID NO: 264046 - DNA, 15 bp, Homo sapiens
ctgagctgcaggctt

SEQ ID NO: 264047 - DNA, 15 bp, Homo sapiens
gctgagctgcaggct

SEQ ID NO: 264048 - DNA, 15 bp, Homo sapiens
tgctgagctgcaggc

SEQ ID NO: 264049 - DNA, 15 bp, Homo sapiens
ctgctgagctgcagg

SEQ ID NO: 264050 - DNA, 15 bp, Homo sapiens
cctgctgagctgcag

SEQ ID NO: 264051 - DNA, 15 bp, Homo sapiens
gcctgctgagctgca

SEQ ID NO: 264052 - DNA, 15 bp, Homo sapiens
agcctgctgagctgc

SEQ ID NO: 264053 - DNA, 15 bp, Homo sapiens
gagcctgctgagctg

SEQ ID NO: 264054 - DNA, 15 bp, Homo sapiens
agagcctgctgagct

SEQ ID NO: 264055 - DNA, 15 bp, Homo sapiens
gagagcctgctgagc

SEQ ID NO: 264056 - DNA, 15 bp, Homo sapiens
tgagagcctgctgag

SEQ ID NO: 264057 - DNA, 15 bp, Homo sapiens
ctgagagcctgctga

SEQ ID NO: 264058 - DNA, 15 bp, Homo sapiens
cctgagagcctgctg

SEQ ID NO: 264059 - DNA, 15 bp, Homo sapiens
ccctgagagcctgct

SEQ ID NO: 264060 - DNA, 15 bp, Homo sapiens
gccctgagagcctgc

SEQ ID NO: 264061 - DNA, 15 bp, Homo sapiens
tgccctgagagcctg

SEQ ID NO: 264062 - DNA, 15 bp, Homo sapiens
atgccctgagagcct

SEQ ID NO: 264063 - DNA, 15 bp, Homo sapiens
catgccctgagagcc

SEQ ID NO: 264064 - DNA, 15 bp, Homo sapiens
acatgccctgagagc

SEQ ID NO: 264065 - DNA, 15 bp, Homo sapiens
aacatgccctgagag

SEQ ID NO: 264066 - DNA, 15 bp, Homo sapiens
aaacatgccctgaga

SEQ ID NO: 264067 - DNA, 15 bp, Homo sapiens
caaacatgccctgag

SEQ ID NO: 264068 - DNA, 15 bp, Homo sapiens
acaaacatgccctga

SEQ ID NO: 264069 - DNA, 15 bp, Homo sapiens
tacaaacatgccctg

SEQ ID NO: 264070 - DNA, 15 bp, Homo sapiens
ctacaaacatgccct

SEQ ID NO: 264071 - DNA, 15 bp, Homo sapiens
tctacaaacatgccc

SEQ ID NO: 264072 - DNA, 15 bp, Homo sapiens
ctctacaaacatgcc

SEQ ID NO: 264073 - DNA, 15 bp, Homo sapiens
cctctacaaacatgc

SEQ ID NO: 264074 - DNA, 15 bp, Homo sapiens
gcctctacaaacatg

SEQ ID NO: 264075 - DNA, 15 bp, Homo sapiens
tgcctctacaaacat

SEQ ID NO: 264076 - DNA, 15 bp, Homo sapiens
ctgcctctacaaaca

SEQ ID NO: 264077 - DNA, 15 bp, Homo sapiens
actgcctctacaaac

SEQ ID NO: 264078 - DNA, 15 bp, Homo sapiens
cactgcctctacaaa

SEQ ID NO: 264079 - DNA, 15 bp, Homo sapiens
ccactgcctctacaa

SEQ ID NO: 264080 - DNA, 15 bp, Homo sapiens
gccactgcctctaca

SEQ ID NO: 264081 - DNA, 15 bp, Homo sapiens
agccactgcctctac

SEQ ID NO: 264082 - DNA, 15 bp, Homo sapiens
cagccactgcctcta

SEQ ID NO: 264083 - DNA, 15 bp, Homo sapiens
gcagccactgcctct

SEQ ID NO: 264084 - DNA, 15 bp, Homo sapiens
agcagccactgcctc

SEQ ID NO: 264085 - DNA, 15 bp, Homo sapiens
aagcagccactgcct

SEQ ID NO: 264086 - DNA, 15 bp, Homo sapiens
aaagcagccactgcc

SEQ ID NO: 264087 - DNA, 15 bp, Homo sapiens
caaagcagccactgc

SEQ ID NO: 264088 - DNA, 15 bp, Homo sapiens
ccaaagcagccactg

SEQ ID NO: 264089 - DNA, 15 bp, Homo sapiens
cccaaagcagccact

SEQ ID NO: 264090 - DNA, 15 bp, Homo sapiens
ccccaaagcagccac

SEQ ID NO: 264091 - DNA, 15 bp, Homo sapiens
accccaaagcagcca

SEQ ID NO: 264092 - DNA, 15 bp, Homo sapiens
aaccccaaagcagcc

SEQ ID NO: 264093 - DNA, 15 bp, Homo sapiens
aaaccccaaagcagc

SEQ ID NO: 264094 - DNA, 15 bp, Homo sapiens
gaaaccccaaagcag

SEQ ID NO: 264095 - DNA, 15 bp, Homo sapiens
ggaaaccccaaagca

SEQ ID NO: 264096 - DNA, 15 bp, Homo sapiens
tggaaaccccaaagc

SEQ ID NO: 264097 - DNA, 15 bp, Homo sapiens
ctggaaaccccaaag

SEQ ID NO: 264098 - DNA, 15 bp, Homo sapiens
tctggaaaccccaaa

SEQ ID NO: 264099 - DNA, 15 bp, Homo sapiens
ctctggaaaccccaa

SEQ ID NO: 264100 - DNA, 15 bp, Homo sapiens
gctctggaaacccca

SEQ ID NO: 264101 - DNA, 15 bp, Homo sapiens
agctctggaaacccc

SEQ ID NO: 264102 - DNA, 15 bp, Homo sapiens
aagctctggaaaccc

SEQ ID NO: 264103 - DNA, 15 bp, Homo sapiens
gaagctctggaaacc

SEQ ID NO: 264104 - DNA, 15 bp, Homo sapiens
ggaagctctggaaac

SEQ ID NO: 264105 - DNA, 15 bp, Homo sapiens
aggaagctctggaaa

SEQ ID NO: 264106 - DNA, 15 bp, Homo sapiens
aaggaagctctggaa

SEQ ID NO: 264107 - DNA, 15 bp, Homo sapiens
caaggaagctctgga

SEQ ID NO: 264108 - DNA, 15 bp, Homo sapiens
ccaaggaagctctgg

SEQ ID NO: 264109 - DNA, 15 bp, Homo sapiens
cccaaggaagctctg

SEQ ID NO: 264110 - DNA, 15 bp, Homo sapiens
tcccaaggaagctct

SEQ ID NO: 264111 - DNA, 15 bp, Homo sapiens
ctcccaaggaagctc

SEQ ID NO: 264112 - DNA, 15 bp, Homo sapiens
cctcccaaggaagct

SEQ ID NO: 264113 - DNA, 15 bp, Homo sapiens
acctcccaaggaagc

SEQ ID NO: 264114 - DNA, 15 bp, Homo sapiens
aacctcccaaggaag

SEQ ID NO: 264115 - DNA, 15 bp, Homo sapiens
aaacctcccaaggaa

SEQ ID NO: 264116 - DNA, 15 bp, Homo sapiens
gaaacctcccaagga

SEQ ID NO: 264117 - DNA, 15 bp, Homo sapiens
agaaacctcccaagg

SEQ ID NO: 264118 - DNA, 15 bp, Homo sapiens
aagaaacctcccaag

SEQ ID NO: 264119 - DNA, 15 bp, Homo sapiens
gaagaaacctcccaa

SEQ ID NO: 264120 - DNA, 15 bp, Homo sapiens
agaagaaacctccca

SEQ ID NO: 264121 - DNA, 15 bp, Homo sapiens
cagaagaaacctccc

SEQ ID NO: 264122 - DNA, 15 bp, Homo sapiens
acagaagaaacctcc

SEQ ID NO: 264123 - DNA, 15 bp, Homo sapiens
cacagaagaaacctc

SEQ ID NO: 264124 - DNA, 15 bp, Homo sapiens
acacagaagaaacct

SEQ ID NO: 264125 - DNA, 15 bp, Homo sapiens
cacacagaagaaacc

SEQ ID NO: 264126 - DNA, 15 bp, Homo sapiens
acacacagaagaaac

SEQ ID NO: 264127 - DNA, 15 bp, Homo sapiens
gacacacagaagaaa

SEQ ID NO: 264128 - DNA, 15 bp, Homo sapiens
ggacacacagaagaa

SEQ ID NO: 264129 - DNA, 15 bp, Homo sapiens
gggacacacagaaga

SEQ ID NO: 264130 - DNA, 15 bp, Homo sapiens
tgggacacacagaag

SEQ ID NO: 264131 - DNA, 15 bp, Homo sapiens
atgggacacacagaa

SEQ ID NO: 264132 - DNA, 15 bp, Homo sapiens
aatgggacacacaga

SEQ ID NO: 264133 - DNA, 15 bp, Homo sapiens
caatgggacacacag

SEQ ID NO: 264134 - DNA, 15 bp, Homo sapiens
tcaatgggacacaca

SEQ ID NO: 264135 - DNA, 15 bp, Homo sapiens
gtcaatgggacacac

SEQ ID NO: 264136 - DNA, 15 bp, Homo sapiens
ggtcaatgggacaca

SEQ ID NO: 264137 - DNA, 15 bp, Homo sapiens
tggtcaatgggacac

SEQ ID NO: 264138 - DNA, 15 bp, Homo sapiens
ctggtcaatgggaca

SEQ ID NO: 264139 - DNA, 15 bp, Homo sapiens
tctggtcaatgggac

SEQ ID NO: 264140 - DNA, 15 bp, Homo sapiens
ctctggtcaatggga

SEQ ID NO: 264141 - DNA, 15 bp, Homo sapiens
gctctggtcaatggg

SEQ ID NO: 264142 - DNA, 15 bp, Homo sapiens
tgctctggtcaatgg

SEQ ID NO: 264143 - DNA, 15 bp, Homo sapiens
gtgctctggtcaatg

SEQ ID NO: 264144 - DNA, 15 bp, Homo sapiens
ggtgctctggtcaat

SEQ ID NO: 264145 - DNA, 15 bp, Homo sapiens
tggtgctctggtcaa

SEQ ID NO: 264146 - DNA, 15 bp, Homo sapiens
gtggtgctctggtca

SEQ ID NO: 264147 - DNA, 15 bp, Homo sapiens
agtggtgctctggtc

SEQ ID NO: 264148 - DNA, 15 bp, Homo sapiens
cagtggtgctctggt

SEQ ID NO: 264149 - DNA, 15 bp, Homo sapiens
ccagtggtgctctgg

SEQ ID NO: 264150 - DNA, 15 bp, Homo sapiens
cccagtggtgctctg

SEQ ID NO: 264151 - DNA, 15 bp, Homo sapiens
ccccagtggtgctct

SEQ ID NO: 264152 - DNA, 15 bp, Homo sapiens
cccccagtggtgctc

SEQ ID NO: 264153 - DNA, 15 bp, Homo sapiens
acccccagtggtgct

SEQ ID NO: 264154 - DNA, 15 bp, Homo sapiens
cacccccagtggtgc

SEQ ID NO: 264155 - DNA, 15 bp, Homo sapiens
tcacccccagtggtg

SEQ ID NO: 264156 - DNA, 15 bp, Homo sapiens
ttcacccccagtggt

SEQ ID NO: 264157 - DNA, 15 bp, Homo sapiens
cttcacccccagtgg

SEQ ID NO: 264158 - DNA, 15 bp, Homo sapiens
acttcacccccagtg

SEQ ID NO: 264159 - DNA, 15 bp, Homo sapiens
cacttcacccccagt

SEQ ID NO: 264160 - DNA, 15 bp, Homo sapiens
tcacttcacccccag

SEQ ID NO: 264161 - DNA, 15 bp, Homo sapiens
ctcacttcaccccca

SEQ ID NO: 264162 - DNA, 15 bp, Homo sapiens
gctcacttcaccccc

SEQ ID NO: 264163 - DNA, 15 bp, Homo sapiens
ggctcacttcacccc

SEQ ID NO: 264164 - DNA, 15 bp, Homo sapiens
gggctcacttcaccc

SEQ ID NO: 264165 - DNA, 15 bp, Homo sapiens
ggggctcacttcacc

SEQ ID NO: 264166 - DNA, 15 bp, Homo sapiens
tggggctcacttcac

SEQ ID NO: 264167 - DNA, 15 bp, Homo sapiens
ctggggctcacttca

SEQ ID NO: 264168 - DNA, 15 bp, Homo sapiens
tctggggctcacttc

SEQ ID NO: 264169 - DNA, 15 bp, Homo sapiens
gtctggggctcactt

SEQ ID NO: 264170 - DNA, 15 bp, Homo sapiens
tgtctggggctcact

SEQ ID NO: 264171 - DNA, 15 bp, Homo sapiens
atgtctggggctcac

SEQ ID NO: 264172 - DNA, 15 bp, Homo sapiens
gatgtctggggctca

SEQ ID NO: 264173 - DNA, 15 bp, Homo sapiens
agatgtctggggctc

SEQ ID NO: 264174 - DNA, 15 bp, Homo sapiens
aagatgtctggggct

SEQ ID NO: 264175 - DNA, 15 bp, Homo sapiens
aaagatgtctggggc

SEQ ID NO: 264176 - DNA, 15 bp, Homo sapiens
taaagatgtctgggg

SEQ ID NO: 264177 - DNA, 15 bp, Homo sapiens
ctaaagatgtctggg

SEQ ID NO: 264178 - DNA, 15 bp, Homo sapiens
cctaaagatgtctgg

SEQ ID NO: 264179 - DNA, 15 bp, Homo sapiens
acctaaagatgtctg

SEQ ID NO: 264180 - DNA, 15 bp, Homo sapiens
aacctaaagatgtct

SEQ ID NO: 264181 - DNA, 15 bp, Homo sapiens
aaacctaaagatgtc

SEQ ID NO: 264182 - DNA, 15 bp, Homo sapiens
gaaacctaaagatgt

SEQ ID NO: 264183 - DNA, 15 bp, Homo sapiens
ggaaacctaaagatg

SEQ ID NO: 264184 - DNA, 15 bp, Homo sapiens
tggaaacctaaagat

SEQ ID NO: 264185 - DNA, 15 bp, Homo sapiens
atggaaacctaaaga

SEQ ID NO: 264186 - DNA, 15 bp, Homo sapiens
gatggaaacctaaag

SEQ ID NO: 264187 - DNA, 15 bp, Homo sapiens
agatggaaacctaaa

SEQ ID NO: 264188 - DNA, 15 bp, Homo sapiens
aagatggaaacctaa

SEQ ID NO: 264189 - DNA, 15 bp, Homo sapiens
aaagatggaaaccta

SEQ ID NO: 264190 - DNA, 15 bp, Homo sapiens
taaagatggaaacct

SEQ ID NO: 264191 - DNA, 15 bp, Homo sapiens
ctaaagatggaaacc

SEQ ID NO: 264192 - DNA, 15 bp, Homo sapiens
cctaaagatggaaac

SEQ ID NO: 264193 - DNA, 15 bp, Homo sapiens
acctaaagatggaaa

SEQ ID NO: 264194 - DNA, 15 bp, Homo sapiens
cacctaaagatggaa

SEQ ID NO: 264195 - DNA, 15 bp, Homo sapiens
tcacctaaagatgga

SEQ ID NO: 264196 - DNA, 15 bp, Homo sapiens
ctcacctaaagatgg

SEQ ID NO: 264197 - DNA, 15 bp, Homo sapiens
gctcacctaaagatg

SEQ ID NO: 264198 - DNA, 15 bp, Homo sapiens
agctcacctaaagat

SEQ ID NO: 264199 - DNA, 15 bp, Homo sapiens
aagctcacctaaaga

SEQ ID NO: 264200 - DNA, 15 bp, Homo sapiens
aaagctcacctaaag

SEQ ID NO: 264201 - DNA, 15 bp, Homo sapiens
taaagctcacctaaa

SEQ ID NO: 264202 - DNA, 15 bp, Homo sapiens
ataaagctcacctaa

SEQ ID NO: 264203 - DNA, 15 bp, Homo sapiens
cataaagctcaccta

SEQ ID NO: 264204 - DNA, 15 bp, Homo sapiens
gcataaagctcacct

SEQ ID NO: 264205 - DNA, 15 bp, Homo sapiens
ggcataaagctcacc

SEQ ID NO: 264206 - DNA, 15 bp, Homo sapiens
gggcataaagctcac

SEQ ID NO: 264207 - DNA, 15 bp, Homo sapiens
tgggcataaagctca

SEQ ID NO: 264208 - DNA, 15 bp, Homo sapiens
ctgggcataaagctc

SEQ ID NO: 264209 - DNA, 15 bp, Homo sapiens
cctgggcataaagct

SEQ ID NO: 264210 - DNA, 15 bp, Homo sapiens
gcctgggcataaagc

SEQ ID NO: 264211 - DNA, 15 bp, Homo sapiens
tgcctgggcataaag

SEQ ID NO: 264212 - DNA, 15 bp, Homo sapiens
gtgcctgggcataaa

SEQ ID NO: 264213 - DNA, 15 bp, Homo sapiens
cgtgcctgggcataa

SEQ ID NO: 264214 - DNA, 15 bp, Homo sapiens
acgtgcctgggcata

SEQ ID NO: 264215 - DNA, 15 bp, Homo sapiens
tacgtgcctgggcat

SEQ ID NO: 264216 - DNA, 15 bp, Homo sapiens
ctacgtgcctgggca

SEQ ID NO: 264217 - DNA, 15 bp, Homo sapiens
gctacgtgcctgggc

SEQ ID NO: 264218 - DNA, 15 bp, Homo sapiens
tgctacgtgcctggg

SEQ ID NO: 264219 - DNA, 15 bp, Homo sapiens
ctgctacgtgcctgg

SEQ ID NO: 264220 - DNA, 15 bp, Homo sapiens
tctgctacgtgcctg

SEQ ID NO: 264221 - DNA, 15 bp, Homo sapiens
ttctgctacgtgcct

SEQ ID NO: 264222 - DNA, 15 bp, Homo sapiens
cttctgctacgtgcc

SEQ ID NO: 264223 - DNA, 15 bp, Homo sapiens
tcttctgctacgtgc

SEQ ID NO: 264224 - DNA, 15 bp, Homo sapiens
ttcttctgctacgtg

SEQ ID NO: 264225 - DNA, 15 bp, Homo sapiens
tttcttctgctacgt

SEQ ID NO: 264226 - DNA, 15 bp, Homo sapiens
gtttcttctgctacg

SEQ ID NO: 264227 - DNA, 15 bp, Homo sapiens
agtttcttctgctac

SEQ ID NO: 264228 - DNA, 15 bp, Homo sapiens
cagtttcttctgcta

SEQ ID NO: 264229 - DNA, 15 bp, Homo sapiens
acagtttcttctgct

SEQ ID NO: 264230 - DNA, 15 bp, Homo sapiens
aacagtttcttctgc

SEQ ID NO: 264231 - DNA, 15 bp, Homo sapiens
aaacagtttcttctg

SEQ ID NO: 264232 - DNA, 15 bp, Homo sapiens
gaaacagtttcttct

SEQ ID NO: 264233 - DNA, 15 bp, Homo sapiens
agaaacagtttcttc

SEQ ID NO: 264234 - DNA, 15 bp, Homo sapiens
tagaaacagtttctt

SEQ ID NO: 264235 - DNA, 15 bp, Homo sapiens
gtagaaacagtttct

SEQ ID NO: 264236 - DNA, 15 bp, Homo sapiens
agtagaaacagtttc

SEQ ID NO: 264237 - DNA, 15 bp, Homo sapiens
gagtagaaacagttt

SEQ ID NO: 264238 - DNA, 15 bp, Homo sapiens
tgagtagaaacagtt

SEQ ID NO: 264239 - DNA, 15 bp, Homo sapiens
atgagtagaaacagt

SEQ ID NO: 264240 - DNA, 15 bp, Homo sapiens
tatgagtagaaacag

SEQ ID NO: 264241 - DNA, 15 bp, Homo sapiens
ttatgagtagaaaca

SEQ ID NO: 264242 - DNA, 15 bp, Homo sapiens
tttatgagtagaaac

SEQ ID NO: 264243 - DNA, 15 bp, Homo sapiens
gtttatgagtagaaa

SEQ ID NO: 264244 - DNA, 15 bp, Homo sapiens
ggtttatgagtagaa

SEQ ID NO: 264245 - DNA, 15 bp, Homo sapiens
tggtttatgagtaga

SEQ ID NO: 264246 - DNA, 15 bp, Homo sapiens
ttggtttatgagtag

SEQ ID NO: 264247 - DNA, 15 bp, Homo sapiens
cttggtttatgagta

SEQ ID NO: 264248 - DNA, 15 bp, Homo sapiens
gcttggtttatgagt

SEQ ID NO: 264249 - DNA, 15 bp, Homo sapiens
tgcttggtttatgag

SEQ ID NO: 264250 - DNA, 15 bp, Homo sapiens
ttgcttggtttatga

SEQ ID NO: 264251 - DNA, 15 bp, Homo sapiens
tttgcttggtttatg

SEQ ID NO: 264252 - DNA, 15 bp, Homo sapiens
atttgcttggtttat

SEQ ID NO: 264253 - DNA, 15 bp, Homo sapiens
aatttgcttggttta

SEQ ID NO: 264254 - DNA, 15 bp, Homo sapiens
aaatttgcttggttt

SEQ ID NO: 264255 - DNA, 15 bp, Homo sapiens
taaatttgcttggtt

SEQ ID NO: 264256 - DNA, 15 bp, Homo sapiens
ataaatttgcttggt

SEQ ID NO: 264257 - DNA, 15 bp, Homo sapiens
tataaatttgcttgg

SEQ ID NO: 264258 - DNA, 15 bp, Homo sapiens
ctataaatttgcttg

SEQ ID NO: 264259 - DNA, 15 bp, Homo sapiens
actataaatttgctt

SEQ ID NO: 264260 - DNA, 15 bp, Homo sapiens
cactataaatttgct

SEQ ID NO: 264261 - DNA, 15 bp, Homo sapiens
ccactataaatttgc

SEQ ID NO: 264262 - DNA, 15 bp, Homo sapiens
tccactataaatttg

SEQ ID NO: 264263 - DNA, 15 bp, Homo sapiens
ttccactataaattt

SEQ ID NO: 264264 - DNA, 15 bp, Homo sapiens
tttccactataaatt

SEQ ID NO: 264265 - DNA, 15 bp, Homo sapiens
atttccactataaat

SEQ ID NO: 264266 - DNA, 15 bp, Homo sapiens
gatttccactataaa

SEQ ID NO: 264267 - DNA, 15 bp, Homo sapiens
tgatttccactataa

SEQ ID NO: 264268 - DNA, 15 bp, Homo sapiens
ctgatttccactata

SEQ ID NO: 264269 - DNA, 15 bp, Homo sapiens
actgatttccactat

SEQ ID NO: 264270 - DNA, 15 bp, Homo sapiens
cactgatttccacta

SEQ ID NO: 264271 - DNA, 15 bp, Homo sapiens
ccactgatttccact

SEQ ID NO: 264272 - DNA, 15 bp, Homo sapiens
cccactgatttccac

SEQ ID NO: 264273 - DNA, 15 bp, Homo sapiens
tcccactgatttcca

SEQ ID NO: 264274 - DNA, 15 bp, Homo sapiens
ctcccactgatttcc

SEQ ID NO: 264275 - DNA, 15 bp, Homo sapiens
tctcccactgatttc

SEQ ID NO: 264276 - DNA, 15 bp, Homo sapiens
ttctcccactgattt

SEQ ID NO: 264277 - DNA, 15 bp, Homo sapiens
tttctcccactgatt

SEQ ID NO: 264278 - DNA, 15 bp, Homo sapiens
ttttctcccactgat

SEQ ID NO: 264279 - DNA, 15 bp, Homo sapiens
attttctcccactga

SEQ ID NO: 264280 - DNA, 15 bp, Homo sapiens
tattttctcccactg

SEQ ID NO: 264281 - DNA, 15 bp, Homo sapiens
ttattttctcccact

SEQ ID NO: 264282 - DNA, 15 bp, Homo sapiens
tttattttctcccac

SEQ ID NO: 264283 - DNA, 15 bp, Homo sapiens
atttattttctccca

SEQ ID NO: 264284 - DNA, 15 bp, Homo sapiens
tatttattttctccc

SEQ ID NO: 264285 - DNA, 15 bp, Homo sapiens
atatttattttctcc

SEQ ID NO: 264286 - DNA, 15 bp, Homo sapiens
catatttattttctc

SEQ ID NO: 264287 - DNA, 15 bp, Homo sapiens
tcatatttattttct

SEQ ID NO: 264288 - DNA, 15 bp, Homo sapiens
attcatatttatttt

SEQ ID NO: 264289 - DNA, 15 bp, Homo sapiens
gattcatatttattt

SEQ ID NO: 264290 - DNA, 15 bp, Homo sapiens
ggattcatatttatt

SEQ ID NO: 264291 - DNA, 15 bp, Homo sapiens
gggattcatatttat

SEQ ID NO: 264292 - DNA, 15 bp, Homo sapiens
ggggattcatattta

SEQ ID NO: 264293 - DNA, 15 bp, Homo sapiens
tggggattcatattt

SEQ ID NO: 264294 - DNA, 15 bp, Homo sapiens
atggggattcatatt

SEQ ID NO: 264295 - DNA, 15 bp, Homo sapiens
catggggattcatat

SEQ ID NO: 264296 - DNA, 15 bp, Homo sapiens
tcatggggattcata

SEQ ID NO: 264297 - DNA, 15 bp, Homo sapiens
atcatggggattcat

SEQ ID NO: 264298 - DNA, 15 bp, Homo sapiens
catcatggggattca

SEQ ID NO: 264299 - DNA, 15 bp, Homo sapiens
acatcatggggattc

SEQ ID NO: 264300 - DNA, 15 bp, Homo sapiens
gacatcatggggatt

SEQ ID NO: 264301 - DNA, 15 bp, Homo sapiens
tgacatcatggggat

SEQ ID NO: 264302 - DNA, 15 bp, Homo sapiens
atgacatcatgggga

SEQ ID NO: 264303 - DNA, 15 bp, Homo sapiens
aatgacatcatgggg

SEQ ID NO: 264304 - DNA, 15 bp, Homo sapiens
aaatgacatcatggg

SEQ ID NO: 264305 - DNA, 15 bp, Homo sapiens
aaaatgacatcatgg

SEQ ID NO: 264306 - DNA, 15 bp, Homo sapiens
taaaatgacatcatg

SEQ ID NO: 264307 - DNA, 15 bp, Homo sapiens
ataaaatgacatcat

SEQ ID NO: 264308 - DNA, 15 bp, Homo sapiens
cataaaatgacatca

SEQ ID NO: 264309 - DNA, 15 bp, Homo sapiens
ccataaaatgacatc

SEQ ID NO: 264310 - DNA, 15 bp, Homo sapiens
cccataaaatgacat

SEQ ID NO: 264311 - DNA, 15 bp, Homo sapiens
gcccataaaatgaca

SEQ ID NO: 264312 - DNA, 15 bp, Homo sapiens
agcccataaaatgac

SEQ ID NO: 264313 - DNA, 15 bp, Homo sapiens
cagcccataaaatga

SEQ ID NO: 264314 - DNA, 15 bp, Homo sapiens
gcagcccataaaatg

SEQ ID NO: 264315 - DNA, 15 bp, Homo sapiens
agcagcccataaaat

SEQ ID NO: 264316 - DNA, 15 bp, Homo sapiens
aagcagcccataaaa

SEQ ID NO: 264317 - DNA, 15 bp, Homo sapiens
aaagcagcccataaa

SEQ ID NO: 264318 - DNA, 15 bp, Homo sapiens
taaagcagcccataa

SEQ ID NO: 264319 - DNA, 15 bp, Homo sapiens
ataaagcagcccata

SEQ ID NO: 264320 - DNA, 15 bp, Homo sapiens
tataaagcagcccat

SEQ ID NO: 264321 - DNA, 15 bp, Homo sapiens
ctataaagcagccca

SEQ ID NO: 264322 - DNA, 15 bp, Homo sapiens
tctataaagcagccc

SEQ ID NO: 264323 - DNA, 15 bp, Homo sapiens
atctataaagcagcc

SEQ ID NO: 264324 - DNA, 15 bp, Homo sapiens
aatctataaagcagc

SEQ ID NO: 264325 - DNA, 15 bp, Homo sapiens
caatctataaagcag

SEQ ID NO: 264326 - DNA, 15 bp, Homo sapiens
acaatctataaagca

SEQ ID NO: 264327 - DNA, 15 bp, Homo sapiens
tacaatctataaagc

SEQ ID NO: 264328 - DNA, 15 bp, Homo sapiens
ttacaatctataaag

SEQ ID NO: 264329 - DNA, 15 bp, Homo sapiens
attacaatctataaa

SEQ ID NO: 264330 - DNA, 15 bp, Homo sapiens
gattacaatctataa

SEQ ID NO: 264331 - DNA, 15 bp, Homo sapiens
tgattacaatctata

SEQ ID NO: 264332 - DNA, 15 bp, Homo sapiens
gtgattacaatctat

SEQ ID NO: 264333 - DNA, 15 bp, Homo sapiens
ggtgattacaatcta

SEQ ID NO: 264334 - DNA, 15 bp, Homo sapiens
gggtgattacaatct

SEQ ID NO: 264335 - DNA, 15 bp, Homo sapiens
tgggtgattacaatc

SEQ ID NO: 264336 - DNA, 15 bp, Homo sapiens
atgggtgattacaat

SEQ ID NO: 264337 - DNA, 15 bp, Homo sapiens
aatgggtgattacaa

SEQ ID NO: 264338 - DNA, 15 bp, Homo sapiens
aaatgggtgattaca

SEQ ID NO: 264339 - DNA, 15 bp, Homo sapiens
taaatgggtgattac

SEQ ID NO: 264340 - DNA, 15 bp, Homo sapiens
ctaaatgggtgatta

SEQ ID NO: 264341 - DNA, 15 bp, Homo sapiens
tctaaatgggtgatt

SEQ ID NO: 264342 - DNA, 15 bp, Homo sapiens
ctctaaatgggtgat

SEQ ID NO: 264343 - DNA, 15 bp, Homo sapiens
actctaaatgggtga

SEQ ID NO: 264344 - DNA, 15 bp, Homo sapiens
aactctaaatgggtg

SEQ ID NO: 264345 - DNA, 15 bp, Homo sapiens
aaactctaaatgggt

SEQ ID NO: 264346 - DNA, 15 bp, Homo sapiens
caaactctaaatggg

SEQ ID NO: 264347 - DNA, 15 bp, Homo sapiens
gcaaactctaaatgg

SEQ ID NO: 264348 - DNA, 15 bp, Homo sapiens
tgcaaactctaaatg

SEQ ID NO: 264349 - DNA, 15 bp, Homo sapiens
ctgcaaactctaaat

SEQ ID NO: 264350 - DNA, 15 bp, Homo sapiens
cctgcaaactctaaa

SEQ ID NO: 264351 - DNA, 15 bp, Homo sapiens
gcctgcaaactctaa

SEQ ID NO: 264352 - DNA, 15 bp, Homo sapiens
agcctgcaaactcta

SEQ ID NO: 264353 - DNA, 15 bp, Homo sapiens
tagcctgcaaactct

SEQ ID NO: 264354 - DNA, 15 bp, Homo sapiens
atagcctgcaaactc

SEQ ID NO: 264355 - DNA, 15 bp, Homo sapiens
aatagcctgcaaact

SEQ ID NO: 264356 - DNA, 15 bp, Homo sapiens
taatagcctgcaaac

SEQ ID NO: 264357 - DNA, 15 bp, Homo sapiens
ttaatagcctgcaaa

SEQ ID NO: 264358 - DNA, 15 bp, Homo sapiens
attaatagcctgcaa

SEQ ID NO: 264359 - DNA, 15 bp, Homo sapiens
aattaatagcctgca

SEQ ID NO: 264360 - DNA, 15 bp, Homo sapiens
aaattaatagcctgc

SEQ ID NO: 264361 - DNA, 15 bp, Homo sapiens
aaaattaatagcctg

SEQ ID NO: 264362 - DNA, 15 bp, Homo sapiens
caaaattaatagcct

SEQ ID NO: 264363 - DNA, 15 bp, Homo sapiens
acaaaattaatagcc

SEQ ID NO: 264364 - DNA, 15 bp, Homo sapiens
aacaaaattaatagc

SEQ ID NO: 264365 - DNA, 15 bp, Homo sapiens
aaacaaaattaatag

SEQ ID NO: 264366 - DNA, 15 bp, Homo sapiens
caaacaaaattaata

SEQ ID NO: 264367 - DNA, 15 bp, Homo sapiens
gcaaacaaaattaat

SEQ ID NO: 264368 - DNA, 15 bp, Homo sapiens
cgcaaacaaaattaa

SEQ ID NO: 264369 - DNA, 15 bp, Homo sapiens
gcgcaaacaaaatta

SEQ ID NO: 264370 - DNA, 15 bp, Homo sapiens
tgcgcaaacaaaatt

SEQ ID NO: 264371 - DNA, 15 bp, Homo sapiens
ctgcgcaaacaaaat

SEQ ID NO: 264372 - DNA, 15 bp, Homo sapiens
tctgcgcaaacaaaa

SEQ ID NO: 264373 - DNA, 15 bp, Homo sapiens
ctctgcgcaaacaaa

SEQ ID NO: 264374 - DNA, 15 bp, Homo sapiens
gctctgcgcaaacaa

SEQ ID NO: 264375 - DNA, 15 bp, Homo sapiens
ggctctgcgcaaaca

SEQ ID NO: 264376 - DNA, 15 bp, Homo sapiens
aggctctgcgcaaac

SEQ ID NO: 264377 - DNA, 15 bp, Homo sapiens
gaggctctgcgcaaa

SEQ ID NO: 264378 - DNA, 15 bp, Homo sapiens
tgaggctctgcgcaa

SEQ ID NO: 264379 - DNA, 15 bp, Homo sapiens
ctgaggctctgcgca

SEQ ID NO: 264380 - DNA, 15 bp, Homo sapiens
cctgaggctctgcgc

SEQ ID NO: 264381 - DNA, 15 bp, Homo sapiens
tcctgaggctctgcg

SEQ ID NO: 264382 - DNA, 15 bp, Homo sapiens
gtcctgaggctctgc

SEQ ID NO: 264383 - DNA, 15 bp, Homo sapiens
agtcctgaggctctg

SEQ ID NO: 264384 - DNA, 15 bp, Homo sapiens
gagtcctgaggctct

SEQ ID NO: 264385 - DNA, 15 bp, Homo sapiens
agagtcctgaggctc

SEQ ID NO: 264386 - DNA, 15 bp, Homo sapiens
aagagtcctgaggct

SEQ ID NO: 264387 - DNA, 15 bp, Homo sapiens
caagagtcctgaggc

SEQ ID NO: 264388 - DNA, 15 bp, Homo sapiens
ccaagagtcctgagg

SEQ ID NO: 264389 - DNA, 15 bp, Homo sapiens
cccaagagtcctgag

SEQ ID NO: 264390 - DNA, 15 bp, Homo sapiens
ccccaagagtcctga

SEQ ID NO: 264391 - DNA, 15 bp, Homo sapiens
tccccaagagtcctg

SEQ ID NO: 264392 - DNA, 15 bp, Homo sapiens
gtccccaagagtcct

SEQ ID NO: 264393 - DNA, 15 bp, Homo sapiens
tgtccccaagagtcc

SEQ ID NO: 264394 - DNA, 15 bp, Homo sapiens
ctgtccccaagagtc

SEQ ID NO: 264395 - DNA, 15 bp, Homo sapiens
tctgtccccaagagt

SEQ ID NO: 264396 - DNA, 15 bp, Homo sapiens
ttctgtccccaagag

SEQ ID NO: 264397 - DNA, 15 bp, Homo sapiens
attctgtccccaaga

SEQ ID NO: 264398 - DNA, 15 bp, Homo sapiens
aattctgtccccaag

SEQ ID NO: 264399 - DNA, 15 bp, Homo sapiens
aaattctgtccccaa

SEQ ID NO: 264400 - DNA, 15 bp, Homo sapiens
taaattctgtcccca

SEQ ID NO: 264401 - DNA, 15 bp, Homo sapiens
gtaaattctgtcccc

SEQ ID NO: 264402 - DNA, 15 bp, Homo sapiens
tgtaaattctgtccc

SEQ ID NO: 264403 - DNA, 15 bp, Homo sapiens
ctgtaaattctgtcc

SEQ ID NO: 264404 - DNA, 15 bp, Homo sapiens
cctgtaaattctgtc

SEQ ID NO: 264405 - DNA, 15 bp, Homo sapiens
ccctgtaaattctgt

SEQ ID NO: 264406 - DNA, 15 bp, Homo sapiens
gccctgtaaattctg

SEQ ID NO: 264407 - DNA, 15 bp, Homo sapiens
agccctgtaaattct

SEQ ID NO: 264408 - DNA, 15 bp, Homo sapiens
cagccctgtaaattc

SEQ ID NO: 264409 - DNA, 15 bp, Homo sapiens
acagccctgtaaatt

SEQ ID NO: 264410 - DNA, 15 bp, Homo sapiens
cacagccctgtaaat

SEQ ID NO: 264411 - DNA, 15 bp, Homo sapiens
ccacagccctgtaaa

SEQ ID NO: 264412 - DNA, 15 bp, Homo sapiens
accacagccctgtaa

SEQ ID NO: 264413 - DNA, 15 bp, Homo sapiens
caccacagccctgta

SEQ ID NO: 264414 - DNA, 15 bp, Homo sapiens
acaccacagccctgt

SEQ ID NO: 264415 - DNA, 15 bp, Homo sapiens
gacaccacagccctg

SEQ ID NO: 264416 - DNA, 15 bp, Homo sapiens
tgacaccacagccct

SEQ ID NO: 264417 - DNA, 15 bp, Homo sapiens
ctgacaccacagccc

SEQ ID NO: 264418 - DNA, 15 bp, Homo sapiens
tctgacaccacagcc

SEQ ID NO: 264419 - DNA, 15 bp, Homo sapiens
gtctgacaccacagc

SEQ ID NO: 264420 - DNA, 15 bp, Homo sapiens
tgtctgacaccacag

SEQ ID NO: 264421 - DNA, 15 bp, Homo sapiens
gtgtctgacaccaca

SEQ ID NO: 264422 - DNA, 15 bp, Homo sapiens
cgtgtctgacaccac

SEQ ID NO: 264423 - DNA, 15 bp, Homo sapiens
acgtgtctgacacca

SEQ ID NO: 264424 - DNA, 15 bp, Homo sapiens
cacgtgtctgacacc

SEQ ID NO: 264425 - DNA, 15 bp, Homo sapiens
ccacgtgtctgacac

SEQ ID NO: 264426 - DNA, 15 bp, Homo sapiens
accacgtgtctgaca

SEQ ID NO: 264427 - DNA, 15 bp, Homo sapiens
aaccacgtgtctgac

SEQ ID NO: 264428 - DNA, 15 bp, Homo sapiens
gaaccacgtgtctga

SEQ ID NO: 264429 - DNA, 15 bp, Homo sapiens
agaaccacgtgtctg

SEQ ID NO: 264430 - DNA, 15 bp, Homo sapiens
tagaaccacgtgtct

SEQ ID NO: 264431 - DNA, 15 bp, Homo sapiens
ctagaaccacgtgtc

SEQ ID NO: 264432 - DNA, 15 bp, Homo sapiens
cctagaaccacgtgt

SEQ ID NO: 264433 - DNA, 15 bp, Homo sapiens
acctagaaccacgtg

SEQ ID NO: 264434 - DNA, 15 bp, Homo sapiens
gacctagaaccacgt

SEQ ID NO: 264435 - DNA, 15 bp, Homo sapiens
agacctagaaccacg

SEQ ID NO: 264436 - DNA, 15 bp, Homo sapiens
aagacctagaaccac

SEQ ID NO: 264437 - DNA, 15 bp, Homo sapiens
taagacctagaacca

SEQ ID NO: 264438 - DNA, 15 bp, Homo sapiens
ttaagacctagaacc

SEQ ID NO: 264439 - DNA, 15 bp, Homo sapiens
tttaagacctagaac

SEQ ID NO: 264440 - DNA, 15 bp, Homo sapiens
gtttaagacctagaa

SEQ ID NO: 264441 - DNA, 15 bp, Homo sapiens
ggtttaagacctaga

SEQ ID NO: 264442 - DNA, 15 bp, Homo sapiens
gggtttaagacctag

SEQ ID NO: 264443 - DNA, 15 bp, Homo sapiens
ggggtttaagaccta

SEQ ID NO: 264444 - DNA, 15 bp, Homo sapiens
aggggtttaagacct

SEQ ID NO: 264445 - DNA, 15 bp, Homo sapiens
caggggtttaagacc

SEQ ID NO: 264446 - DNA, 15 bp, Homo sapiens
tcaggggtttaagac

SEQ ID NO: 264447 - DNA, 15 bp, Homo sapiens
ttcaggggtttaaga

SEQ ID NO: 264448 - DNA, 15 bp, Homo sapiens
tttcaggggtttaag

SEQ ID NO: 264449 - DNA, 15 bp, Homo sapiens
ctttcaggggtttaa

SEQ ID NO: 264450 - DNA, 15 bp, Homo sapiens
cctttcaggggttta

SEQ ID NO: 264451 - DNA, 15 bp, Homo sapiens
acctttcaggggttt

SEQ ID NO: 264452 - DNA, 15 bp, Homo sapiens
aacctttcaggggtt

SEQ ID NO: 264453 - DNA, 15 bp, Homo sapiens
aaacctttcaggggt

SEQ ID NO: 264454 - DNA, 15 bp, Homo sapiens
aaaacctttcagggg

SEQ ID NO: 264455 - DNA, 15 bp, Homo sapiens
caaaacctttcaggg

SEQ ID NO: 264456 - DNA, 15 bp, Homo sapiens
ccaaaacctttcagg

SEQ ID NO: 264457 - DNA, 15 bp, Homo sapiens
tccaaaacctttcag

SEQ ID NO: 264458 - DNA, 15 bp, Homo sapiens
ttccaaaacctttca

SEQ ID NO: 264459 - DNA, 15 bp, Homo sapiens
tttccaaaacctttc

SEQ ID NO: 264460 - DNA, 15 bp, Homo sapiens
tctttccaaaacctt

SEQ ID NO: 264461 - DNA, 15 bp, Homo sapiens
ctctttccaaaacct

SEQ ID NO: 264462 - DNA, 15 bp, Homo sapiens
tctctttccaaaacc

SEQ ID NO: 264463 - DNA, 15 bp, Homo sapiens
ttctctttccaaaac

SEQ ID NO: 264464 - DNA, 15 bp, Homo sapiens
attctctttccaaaa

SEQ ID NO: 264465 - DNA, 15 bp, Homo sapiens
cattctctttccaaa

SEQ ID NO: 264466 - DNA, 15 bp, Homo sapiens
tcattctctttccaa

SEQ ID NO: 264467 - DNA, 15 bp, Homo sapiens
gtcattctctttcca

SEQ ID NO: 264468 - DNA, 15 bp, Homo sapiens
tgtcattctctttcc

SEQ ID NO: 264469 - DNA, 15 bp, Homo sapiens
ctgtcattctctttc

SEQ ID NO: 264470 - DNA, 15 bp, Homo sapiens
cctgtcattctcttt

SEQ ID NO: 264471 - DNA, 15 bp, Homo sapiens
acctgtcattctctt

SEQ ID NO: 264472 - DNA, 15 bp, Homo sapiens
tacctgtcattctct

SEQ ID NO: 264473 - DNA, 15 bp, Homo sapiens
ctacctgtcattctc

SEQ ID NO: 264474 - DNA, 15 bp, Homo sapiens
gctacctgtcattct

SEQ ID NO: 264475 - DNA, 15 bp, Homo sapiens
ggctacctgtcattc

SEQ ID NO: 264476 - DNA, 15 bp, Homo sapiens
aggctacctgtcatt

SEQ ID NO: 264477 - DNA, 15 bp, Homo sapiens
taggctacctgtcat

SEQ ID NO: 264478 - DNA, 15 bp, Homo sapiens
ataggctacctgtca

SEQ ID NO: 264479 - DNA, 15 bp, Homo sapiens
cataggctacctgtc

SEQ ID NO: 264480 - DNA, 15 bp, Homo sapiens
ccataggctacctgt

SEQ ID NO: 264481 - DNA, 15 bp, Homo sapiens
tccataggctacctg

SEQ ID NO: 264482 - DNA, 15 bp, Homo sapiens
ctccataggctacct

SEQ ID NO: 264483 - DNA, 15 bp, Homo sapiens
gctccataggctacc

SEQ ID NO: 264484 - DNA, 15 bp, Homo sapiens
tgctccataggctac

SEQ ID NO: 264485 - DNA, 15 bp, Homo sapiens
ctgctccataggcta

SEQ ID NO: 264486 - DNA, 15 bp, Homo sapiens
gctgctccataggct

SEQ ID NO: 264487 - DNA, 15 bp, Homo sapiens
agctgctccataggc

SEQ ID NO: 264488 - DNA, 15 bp, Homo sapiens
cagctgctccatagg

SEQ ID NO: 264489 - DNA, 15 bp, Homo sapiens
ccagctgctccatag

SEQ ID NO: 264490 - DNA, 15 bp, Homo sapiens
cccagctgctccata

SEQ ID NO: 264491 - DNA, 15 bp, Homo sapiens
ccccagctgctccat

SEQ ID NO: 264492 - DNA, 15 bp, Homo sapiens
gccccagctgctcca

SEQ ID NO: 264493 - DNA, 15 bp, Homo sapiens
agccccagctgctcc

SEQ ID NO: 264494 - DNA, 15 bp, Homo sapiens
aagccccagctgctc

SEQ ID NO: 264495 - DNA, 15 bp, Homo sapiens
taagccccagctgct

SEQ ID NO: 264496 - DNA, 15 bp, Homo sapiens
ctaagccccagctgc

SEQ ID NO: 264497 - DNA, 15 bp, Homo sapiens
cctaagccccagctg

SEQ ID NO: 264498 - DNA, 15 bp, Homo sapiens
ccctaagccccagct

SEQ ID NO: 264499 - DNA, 15 bp, Homo sapiens
gccctaagccccagc

SEQ ID NO: 264500 - DNA, 15 bp, Homo sapiens
agccctaagccccag

SEQ ID NO: 264501 - DNA, 15 bp, Homo sapiens
gagccctaagcccca

SEQ ID NO: 264502 - DNA, 15 bp, Homo sapiens
agagccctaagcccc

SEQ ID NO: 264503 - DNA, 15 bp, Homo sapiens
aagagccctaagccc

SEQ ID NO: 264504 - DNA, 15 bp, Homo sapiens
aaagagccctaagcc

SEQ ID NO: 264505 - DNA, 15 bp, Homo sapiens
gaaagagccctaagc

SEQ ID NO: 264506 - DNA, 15 bp, Homo sapiens
ggaaagagccctaag

SEQ ID NO: 264507 - DNA, 15 bp, Homo sapiens
aggaaagagccctaa

SEQ ID NO: 264508 - DNA, 15 bp, Homo sapiens
gaggaaagagcccta

SEQ ID NO: 264509 - DNA, 15 bp, Homo sapiens
agaggaaagagccct

SEQ ID NO: 264510 - DNA, 15 bp, Homo sapiens
tagaggaaagagccc

SEQ ID NO: 264511 - DNA, 15 bp, Homo sapiens
ctagaggaaagagcc

SEQ ID NO: 264512 - DNA, 15 bp, Homo sapiens
gctagaggaaagagc

SEQ ID NO: 264513 - DNA, 15 bp, Homo sapiens
agctagaggaaagag

SEQ ID NO: 264514 - DNA, 15 bp, Homo sapiens
aagctagaggaaaga

SEQ ID NO: 264515 - DNA, 15 bp, Homo sapiens
aaagctagaggaaag

SEQ ID NO: 264516 - DNA, 15 bp, Homo sapiens
gaaagctagaggaaa

SEQ ID NO: 264517 - DNA, 15 bp, Homo sapiens
ggaaagctagaggaa

SEQ ID NO: 264518 - DNA, 15 bp, Homo sapiens
aggaaagctagagga

SEQ ID NO: 264519 - DNA, 15 bp, Homo sapiens
gaggaaagctagagg

SEQ ID NO: 264520 - DNA, 15 bp, Homo sapiens
ggaggaaagctagag

SEQ ID NO: 264521 - DNA, 15 bp, Homo sapiens
aggaggaaagctaga

SEQ ID NO: 264522 - DNA, 15 bp, Homo sapiens
caggaggaaagctag

SEQ ID NO: 264523 - DNA, 15 bp, Homo sapiens
ccaggaggaaagcta

SEQ ID NO: 264524 - DNA, 15 bp, Homo sapiens
tccaggaggaaagct

SEQ ID NO: 264525 - DNA, 15 bp, Homo sapiens
gtccaggaggaaagc

SEQ ID NO: 264526 - DNA, 15 bp, Homo sapiens
tgtccaggaggaaag

SEQ ID NO: 264527 - DNA, 15 bp, Homo sapiens
atgtccaggaggaaa

SEQ ID NO: 264528 - DNA, 15 bp, Homo sapiens
tatgtccaggaggaa

SEQ ID NO: 264529 - DNA, 15 bp, Homo sapiens
ctatgtccaggagga

SEQ ID NO: 264530 - DNA, 15 bp, Homo sapiens
actatgtccaggagg

SEQ ID NO: 264531 - DNA, 15 bp, Homo sapiens
aactatgtccaggag

SEQ ID NO: 264532 - DNA, 15 bp, Homo sapiens
aaactatgtccagga

SEQ ID NO: 264533 - DNA, 15 bp, Homo sapiens
aaaactatgtccagg

SEQ ID NO: 264534 - DNA, 15 bp, Homo sapiens
taaaactatgtccag

SEQ ID NO: 264535 - DNA, 15 bp, Homo sapiens
ttaaaactatgtcca

SEQ ID NO: 264536 - DNA, 15 bp, Homo sapiens
tttaaaactatgtcc

SEQ ID NO: 264537 - DNA, 15 bp, Homo sapiens
ttttaaaactatgtc

SEQ ID NO: 264538 - DNA, 15 bp, Homo sapiens
attttaaaactatgt

SEQ ID NO: 264539 - DNA, 15 bp, Homo sapiens
tattttaaaactatg

SEQ ID NO: 264540 - DNA, 15 bp, Homo sapiens
atattttaaaactat

SEQ ID NO: 264541 - DNA, 15 bp, Homo sapiens
aatattttaaaacta

SEQ ID NO: 264542 - DNA, 15 bp, Homo sapiens
aaatattttaaaact

SEQ ID NO: 264543 - DNA, 15 bp, Homo sapiens
caaatattttaaaac

SEQ ID NO: 264544 - DNA, 15 bp, Homo sapiens
acaaatattttaaaa

SEQ ID NO: 264545 - DNA, 15 bp, Homo sapiens
aacaaatattttaaa

SEQ ID NO: 264546 - DNA, 15 bp, Homo sapiens
gaacaaatattttaa

SEQ ID NO: 264547 - DNA, 15 bp, Homo sapiens
tgaacaaatatttta

SEQ ID NO: 264548 - DNA, 15 bp, Homo sapiens
gtgaacaaatatttt

SEQ ID NO: 264549 - DNA, 15 bp, Homo sapiens
agtgaacaaatattt

SEQ ID NO: 264550 - DNA, 15 bp, Homo sapiens
cagtgaacaaatatt

SEQ ID NO: 264551 - DNA, 15 bp, Homo sapiens
acagtgaacaaatat

SEQ ID NO: 264552 - DNA, 15 bp, Homo sapiens
aacagtgaacaaata

SEQ ID NO: 264553 - DNA, 15 bp, Homo sapiens
aaacagtgaacaaat

SEQ ID NO: 264554 - DNA, 15 bp, Homo sapiens
aaaacagtgaacaaa

SEQ ID NO: 264555 - DNA, 15 bp, Homo sapiens
taaaacagtgaacaa

SEQ ID NO: 264556 - DNA, 15 bp, Homo sapiens
ataaaacagtgaaca

SEQ ID NO: 264557 - DNA, 15 bp, Homo sapiens
gataaaacagtgaac

SEQ ID NO: 264558 - DNA, 15 bp, Homo sapiens
tgataaaacagtgaa

SEQ ID NO: 264559 - DNA, 15 bp, Homo sapiens
atgataaaacagtga

SEQ ID NO: 264560 - DNA, 15 bp, Homo sapiens
gatgataaaacagtg

SEQ ID NO: 264561 - DNA, 15 bp, Homo sapiens
agatgataaaacagt

SEQ ID NO: 264562 - DNA, 15 bp, Homo sapiens
aagatgataaaacag

SEQ ID NO: 264563 - DNA, 15 bp, Homo sapiens
taagatgataaaaca

SEQ ID NO: 264564 - DNA, 15 bp, Homo sapiens
ttaagatgataaaac

SEQ ID NO: 264565 - DNA, 15 bp, Homo sapiens
attaagatgataaaa

SEQ ID NO: 264566 - DNA, 15 bp, Homo sapiens
aattaagatgataaa

SEQ ID NO: 264567 - DNA, 15 bp, Homo sapiens
aaattaagatgataa

SEQ ID NO: 264568 - DNA, 15 bp, Homo sapiens
aaaattaagatgata

SEQ ID NO: 264569 - DNA, 15 bp, Homo sapiens
taaaattaagatgat

SEQ ID NO: 264570 - DNA, 15 bp, Homo sapiens
gtaaaattaagatga

SEQ ID NO: 264571 - DNA, 15 bp, Homo sapiens
ggtaaaattaagatg

SEQ ID NO: 264572 - DNA, 15 bp, Homo sapiens
gggtaaaattaagat

SEQ ID NO: 264573 - DNA, 15 bp, Homo sapiens
agggtaaaattaaga

SEQ ID NO: 264574 - DNA, 15 bp, Homo sapiens
tagggtaaaattaag

SEQ ID NO: 264575 - DNA, 15 bp, Homo sapiens
ctagggtaaaattaa

SEQ ID NO: 264576 - DNA, 15 bp, Homo sapiens
actagggtaaaatta

SEQ ID NO: 264577 - DNA, 15 bp, Homo sapiens
gactagggtaaaatt

SEQ ID NO: 264578 - DNA, 15 bp, Homo sapiens
agactagggtaaaat

SEQ ID NO: 264579 - DNA, 15 bp, Homo sapiens
aagactagggtaaaa

SEQ ID NO: 264580 - DNA, 15 bp, Homo sapiens
gaagactagggtaaa

SEQ ID NO: 264581 - DNA, 15 bp, Homo sapiens
tgaagactagggtaa

SEQ ID NO: 264582 - DNA, 15 bp, Homo sapiens
ctgaagactagggta

SEQ ID NO: 264583 - DNA, 15 bp, Homo sapiens
cctgaagactagggt

SEQ ID NO: 264584 - DNA, 15 bp, Homo sapiens
gcctgaagactaggg

SEQ ID NO: 264585 - DNA, 15 bp, Homo sapiens
ggcctgaagactagg

SEQ ID NO: 264586 - DNA, 15 bp, Homo sapiens
aggcctgaagactag

SEQ ID NO: 264587 - DNA, 15 bp, Homo sapiens
caggcctgaagacta

SEQ ID NO: 264588 - DNA, 15 bp, Homo sapiens
acaggcctgaagact

SEQ ID NO: 264589 - DNA, 15 bp, Homo sapiens
gacaggcctgaagac

SEQ ID NO: 264590 - DNA, 15 bp, Homo sapiens
ggacaggcctgaaga

SEQ ID NO: 264591 - DNA, 15 bp, Homo sapiens
aggacaggcctgaag

SEQ ID NO: 264592 - DNA, 15 bp, Homo sapiens
aaggacaggcctgaa

SEQ ID NO: 264593 - DNA, 15 bp, Homo sapiens
aaaggacaggcctga

SEQ ID NO: 264594 - DNA, 15 bp, Homo sapiens
gaaaggacaggcctg

SEQ ID NO: 264595 - DNA, 15 bp, Homo sapiens
ggaaaggacaggcct

SEQ ID NO: 264596 - DNA, 15 bp, Homo sapiens
cggaaaggacaggcc

SEQ ID NO: 264597 - DNA, 15 bp, Homo sapiens
acggaaaggacaggc

SEQ ID NO: 264598 - DNA, 15 bp, Homo sapiens
tacggaaaggacagg

SEQ ID NO: 264599 - DNA, 15 bp, Homo sapiens
ttacggaaaggacag

SEQ ID NO: 264600 - DNA, 15 bp, Homo sapiens
cttacggaaaggaca

SEQ ID NO: 264601 - DNA, 15 bp, Homo sapiens
gcttacggaaaggac

SEQ ID NO: 264602 - DNA, 15 bp, Homo sapiens
agcttacggaaagga

SEQ ID NO: 264603 - DNA, 15 bp, Homo sapiens
tagcttacggaaagg

SEQ ID NO: 264604 - DNA, 15 bp, Homo sapiens
ctagcttacggaaag

SEQ ID NO: 264605 - DNA, 15 bp, Homo sapiens
cctagcttacggaaa

SEQ ID NO: 264606 - DNA, 15 bp, Homo sapiens
acctagcttacggaa

SEQ ID NO: 264607 - DNA, 15 bp, Homo sapiens
cacctagcttacgga

SEQ ID NO: 264608 - DNA, 15 bp, Homo sapiens
tcacctagcttacgg

SEQ ID NO: 264609 - DNA, 15 bp, Homo sapiens
gtcacctagcttacg

SEQ ID NO: 264610 - DNA, 15 bp, Homo sapiens
agtcacctagcttac

SEQ ID NO: 264611 - DNA, 15 bp, Homo sapiens
tagtcacctagctta

SEQ ID NO: 264612 - DNA, 15 bp, Homo sapiens
atagtcacctagctt

SEQ ID NO: 264613 - DNA, 15 bp, Homo sapiens
catagtcacctagct

SEQ ID NO: 264614 - DNA, 15 bp, Homo sapiens
acatagtcacctagc

SEQ ID NO: 264615 - DNA, 15 bp, Homo sapiens
cacatagtcacctag

SEQ ID NO: 264616 - DNA, 15 bp, Homo sapiens
ccacatagtcaccta

SEQ ID NO: 264617 - DNA, 15 bp, Homo sapiens
cccacatagtcacct

SEQ ID NO: 264618 - DNA, 15 bp, Homo sapiens
acccacatagtcacc

SEQ ID NO: 264619 - DNA, 15 bp, Homo sapiens
gacccacatagtcac

SEQ ID NO: 264620 - DNA, 15 bp, Homo sapiens
agacccacatagtca

SEQ ID NO: 264621 - DNA, 15 bp, Homo sapiens
aagacccacatagtc

SEQ ID NO: 264622 - DNA, 15 bp, Homo sapiens
caagacccacatagt

SEQ ID NO: 264623 - DNA, 15 bp, Homo sapiens
gcaagacccacatag

SEQ ID NO: 264624 - DNA, 15 bp, Homo sapiens
tgcaagacccacata

SEQ ID NO: 264625 - DNA, 15 bp, Homo sapiens
atgcaagacccacat

SEQ ID NO: 264626 - DNA, 15 bp, Homo sapiens
aatgcaagacccaca

SEQ ID NO: 264627 - DNA, 15 bp, Homo sapiens
taatgcaagacccac

SEQ ID NO: 264628 - DNA, 15 bp, Homo sapiens
ttaatgcaagaccca

SEQ ID NO: 264629 - DNA, 15 bp, Homo sapiens
tttaatgcaagaccc

SEQ ID NO: 264630 - DNA, 15 bp, Homo sapiens
gtttaatgcaagacc

SEQ ID NO: 264631 - DNA, 15 bp, Homo sapiens
ggtttaatgcaagac

SEQ ID NO: 264632 - DNA, 15 bp, Homo sapiens
aggtttaatgcaaga

SEQ ID NO: 264633 - DNA, 15 bp, Homo sapiens
aaggtttaatgcaag

SEQ ID NO: 264634 - DNA, 15 bp, Homo sapiens
aaaggtttaatgcaa

SEQ ID NO: 264635 - DNA, 15 bp, Homo sapiens
caaaggtttaatgca

SEQ ID NO: 264636 - DNA, 15 bp, Homo sapiens
ccaaaggtttaatgc

SEQ ID NO: 264637 - DNA, 15 bp, Homo sapiens
accaaaggtttaatg

SEQ ID NO: 264638 - DNA, 15 bp, Homo sapiens
taccaaaggtttaat

SEQ ID NO: 264639 - DNA, 15 bp, Homo sapiens
ctaccaaaggtttaa

SEQ ID NO: 264640 - DNA, 15 bp, Homo sapiens
tctaccaaaggttta

SEQ ID NO: 264641 - DNA, 15 bp, Homo sapiens
ctctaccaaaggttt

SEQ ID NO: 264642 - DNA, 15 bp, Homo sapiens
tctctaccaaaggtt

SEQ ID NO: 264643 - DNA, 15 bp, Homo sapiens
ctctctaccaaaggt

SEQ ID NO: 264644 - DNA, 15 bp, Homo sapiens
tctctctaccaaagg

SEQ ID NO: 264645 - DNA, 15 bp, Homo sapiens
ctctctctaccaaag

SEQ ID NO: 264646 - DNA, 15 bp, Homo sapiens
gctctctctaccaaa

SEQ ID NO: 264647 - DNA, 15 bp, Homo sapiens
agctctctctaccaa

SEQ ID NO: 264648 - DNA, 15 bp, Homo sapiens
gagctctctctacca

SEQ ID NO: 264649 - DNA, 15 bp, Homo sapiens
ggagctctctctacc

SEQ ID NO: 264650 - DNA, 15 bp, Homo sapiens
gggagctctctctac

SEQ ID NO: 264651 - DNA, 15 bp, Homo sapiens
ggggagctctctcta

SEQ ID NO: 264652 - DNA, 15 bp, Homo sapiens
aggggagctctctct

SEQ ID NO: 264653 - DNA, 15 bp, Homo sapiens
gaggggagctctctc

SEQ ID NO: 264654 - DNA, 15 bp, Homo sapiens
agaggggagctctct

SEQ ID NO: 264655 - DNA, 15 bp, Homo sapiens
cagaggggagctctc

SEQ ID NO: 264656 - DNA, 15 bp, Homo sapiens
tcagaggggagctct

SEQ ID NO: 264657 - DNA, 15 bp, Homo sapiens
ctcagaggggagctc

SEQ ID NO: 264658 - DNA, 15 bp, Homo sapiens
ttctcagaggggagc

SEQ ID NO: 264659 - DNA, 15 bp, Homo sapiens
gttctcagaggggag

SEQ ID NO: 264660 - DNA, 15 bp, Homo sapiens
ggttctcagagggga

SEQ ID NO: 264661 - DNA, 15 bp, Homo sapiens
aggttctcagagggg

SEQ ID NO: 264662 - DNA, 15 bp, Homo sapiens
caggttctcagaggg

SEQ ID NO: 264663 - DNA, 15 bp, Homo sapiens
tcaggttctcagagg

SEQ ID NO: 264664 - DNA, 15 bp, Homo sapiens
ttcaggttctcagag

SEQ ID NO: 264665 - DNA, 15 bp, Homo sapiens
cttcaggttctcaga

SEQ ID NO: 264666 - DNA, 15 bp, Homo sapiens
tcttcaggttctcag

SEQ ID NO: 264667 - DNA, 15 bp, Homo sapiens
ctcttcaggttctca

SEQ ID NO: 264668 - DNA, 15 bp, Homo sapiens
tctcttcaggttctc

SEQ ID NO: 264669 - DNA, 15 bp, Homo sapiens
atctcttcaggttct

SEQ ID NO: 264670 - DNA, 15 bp, Homo sapiens
catctcttcaggttc

SEQ ID NO: 264671 - DNA, 15 bp, Homo sapiens
acatctcttcaggtt

SEQ ID NO: 264672 - DNA, 15 bp, Homo sapiens
tacatctcttcaggt

SEQ ID NO: 264673 - DNA, 15 bp, Homo sapiens
ttacatctcttcagg

SEQ ID NO: 264674 - DNA, 15 bp, Homo sapiens
tttacatctcttcag

SEQ ID NO: 264675 - DNA, 15 bp, Homo sapiens
ctttacatctcttca

SEQ ID NO: 264676 - DNA, 15 bp, Homo sapiens
tctttacatctcttc

SEQ ID NO: 264677 - DNA, 15 bp, Homo sapiens
ctctttacatctctt

SEQ ID NO: 264678 - DNA, 15 bp, Homo sapiens
cctctttacatctct

SEQ ID NO: 264679 - DNA, 15 bp, Homo sapiens
tcctctttacatctc

SEQ ID NO: 264680 - DNA, 15 bp, Homo sapiens
ttcctctttacatct

SEQ ID NO: 264681 - DNA, 15 bp, Homo sapiens
gttcctctttacatc

SEQ ID NO: 264682 - DNA, 15 bp, Homo sapiens
tgttcctctttacat

SEQ ID NO: 264683 - DNA, 15 bp, Homo sapiens
ctgttcctctttaca

SEQ ID NO: 264684 - DNA, 15 bp, Homo sapiens
gctgttcctctttac

SEQ ID NO: 264685 - DNA, 15 bp, Homo sapiens
tgctgttcctcttta

SEQ ID NO: 264686 - DNA, 15 bp, Homo sapiens
gtgctgttcctcttt

SEQ ID NO: 264687 - DNA, 15 bp, Homo sapiens
tgtgctgttcctctt

SEQ ID NO: 264688 - DNA, 15 bp, Homo sapiens
ttgtgctgttcctct

SEQ ID NO: 264689 - DNA, 15 bp, Homo sapiens
cttgtgctgttcctc

SEQ ID NO: 264690 - DNA, 15 bp, Homo sapiens
ccttgtgctgttcct

SEQ ID NO: 264691 - DNA, 15 bp, Homo sapiens
accttgtgctgttcc

SEQ ID NO: 264692 - DNA, 15 bp, Homo sapiens
gaccttgtgctgttc

SEQ ID NO: 264693 - DNA, 15 bp, Homo sapiens
tgaccttgtgctgtt

SEQ ID NO: 264694 - DNA, 15 bp, Homo sapiens
ctgaccttgtgctgt

SEQ ID NO: 264695 - DNA, 15 bp, Homo sapiens
tctgaccttgtgctg

SEQ ID NO: 264696 - DNA, 15 bp, Homo sapiens
ctctgaccttgtgct

SEQ ID NO: 264697 - DNA, 15 bp, Homo sapiens
tctctgaccttgtgc

SEQ ID NO: 264698 - DNA, 15 bp, Homo sapiens
ctctctgaccttgtg

SEQ ID NO: 264699 - DNA, 15 bp, Homo sapiens
tctctctgaccttgt

SEQ ID NO: 264700 - DNA, 15 bp, Homo sapiens
ttctctctgaccttg

SEQ ID NO: 264701 - DNA, 15 bp, Homo sapiens
gttctctctgacctt

SEQ ID NO: 264702 - DNA, 15 bp, Homo sapiens
agttctctctgacct

SEQ ID NO: 264703 - DNA, 15 bp, Homo sapiens
cagttctctctgacc

SEQ ID NO: 264704 - DNA, 15 bp, Homo sapiens
ccagttctctctgac

SEQ ID NO: 264705 - DNA, 15 bp, Homo sapiens
cccagttctctctga

SEQ ID NO: 264706 - DNA, 15 bp, Homo sapiens
acccagttctctctg

SEQ ID NO: 264707 - DNA, 15 bp, Homo sapiens
tacccagttctctct

SEQ ID NO: 264708 - DNA, 15 bp, Homo sapiens
ctacccagttctctc

SEQ ID NO: 264709 - DNA, 15 bp, Homo sapiens
tctacccagttctct

SEQ ID NO: 264710 - DNA, 15 bp, Homo sapiens
ttctacccagttctc

SEQ ID NO: 264711 - DNA, 15 bp, Homo sapiens
attctacccagttct

SEQ ID NO: 264712 - DNA, 15 bp, Homo sapiens
gattctacccagttc

SEQ ID NO: 264713 - DNA, 15 bp, Homo sapiens
ggattctacccagtt

SEQ ID NO: 264714 - DNA, 15 bp, Homo sapiens
tggattctacccagt

SEQ ID NO: 264715 - DNA, 15 bp, Homo sapiens
ctggattctacccag

SEQ ID NO: 264716 - DNA, 15 bp, Homo sapiens
gctggattctaccca

SEQ ID NO: 264717 - DNA, 15 bp, Homo sapiens
agctggattctaccc

SEQ ID NO: 264718 - DNA, 15 bp, Homo sapiens
gagctggattctacc

SEQ ID NO: 264719 - DNA, 15 bp, Homo sapiens
agagctggattctac

SEQ ID NO: 264720 - DNA, 15 bp, Homo sapiens
tagagctggattcta

SEQ ID NO: 264721 - DNA, 15 bp, Homo sapiens
gtagagctggattct

SEQ ID NO: 264722 - DNA, 15 bp, Homo sapiens
agtagagctggattc

SEQ ID NO: 264723 - DNA, 15 bp, Homo sapiens
gagtagagctggatt

SEQ ID NO: 264724 - DNA, 15 bp, Homo sapiens
ggagtagagctggat

SEQ ID NO: 264725 - DNA, 15 bp, Homo sapiens
aggagtagagctgga

SEQ ID NO: 264726 - DNA, 15 bp, Homo sapiens
aaggagtagagctgg

SEQ ID NO: 264727 - DNA, 15 bp, Homo sapiens
caaggagtagagctg

SEQ ID NO: 264728 - DNA, 15 bp, Homo sapiens
ccaaggagtagagct

SEQ ID NO: 264729 - DNA, 15 bp, Homo sapiens
gccaaggagtagagc

SEQ ID NO: 264730 - DNA, 15 bp, Homo sapiens
agccaaggagtagag

SEQ ID NO: 264731 - DNA, 15 bp, Homo sapiens
aagccaaggagtaga

SEQ ID NO: 264732 - DNA, 15 bp, Homo sapiens
caagccaaggagtag

SEQ ID NO: 264733 - DNA, 15 bp, Homo sapiens
acaagccaaggagta

SEQ ID NO: 264734 - DNA, 15 bp, Homo sapiens
cacaagccaaggagt

SEQ ID NO: 264735 - DNA, 15 bp, Homo sapiens
tcacaagccaaggag

SEQ ID NO: 264736 - DNA, 15 bp, Homo sapiens
atcacaagccaagga

SEQ ID NO: 264737 - DNA, 15 bp, Homo sapiens
gatcacaagccaagg

SEQ ID NO: 264738 - DNA, 15 bp, Homo sapiens
agatcacaagccaag

SEQ ID NO: 264739 - DNA, 15 bp, Homo sapiens
tagatcacaagccaa

SEQ ID NO: 264740 - DNA, 15 bp, Homo sapiens
ctagatcacaagcca

SEQ ID NO: 264741 - DNA, 15 bp, Homo sapiens
tctagatcacaagcc

SEQ ID NO: 264742 - DNA, 15 bp, Homo sapiens
ctctagatcacaagc

SEQ ID NO: 264743 - DNA, 15 bp, Homo sapiens
gctctagatcacaag

SEQ ID NO: 264744 - DNA, 15 bp, Homo sapiens
ggctctagatcacaa

SEQ ID NO: 264745 - DNA, 15 bp, Homo sapiens
tggctctagatcaca

SEQ ID NO: 264746 - DNA, 15 bp, Homo sapiens
ttggctctagatcac

SEQ ID NO: 264747 - DNA, 15 bp, Homo sapiens
attggctctagatca

SEQ ID NO: 264748 - DNA, 15 bp, Homo sapiens
aattggctctagatc

SEQ ID NO: 264749 - DNA, 15 bp, Homo sapiens
aaattggctctagat

SEQ ID NO: 264750 - DNA, 15 bp, Homo sapiens
aaaattggctctaga

SEQ ID NO: 264751 - DNA, 15 bp, Homo sapiens
gaaaattggctctag

SEQ ID NO: 264752 - DNA, 15 bp, Homo sapiens
tgaaaattggctcta

SEQ ID NO: 264753 - DNA, 15 bp, Homo sapiens
atgaaaattggctct

SEQ ID NO: 264754 - DNA, 15 bp, Homo sapiens
aatgaaaattggctc

SEQ ID NO: 264755 - DNA, 15 bp, Homo sapiens
caatgaaaattggct

SEQ ID NO: 264756 - DNA, 15 bp, Homo sapiens
acaatgaaaattggc

SEQ ID NO: 264757 - DNA, 15 bp, Homo sapiens
aacaatgaaaattgg

SEQ ID NO: 264758 - DNA, 15 bp, Homo sapiens
caacaatgaaaattg

SEQ ID NO: 264759 - DNA, 15 bp, Homo sapiens
acaacaatgaaaatt

SEQ ID NO: 264760 - DNA, 15 bp, Homo sapiens
aacaacaatgaaaat

SEQ ID NO: 264761 - DNA, 15 bp, Homo sapiens
caacaacaatgaaaa

SEQ ID NO: 264762 - DNA, 15 bp, Homo sapiens
acaacaacaatgaaa

SEQ ID NO: 264763 - DNA, 15 bp, Homo sapiens
aacaacaacaatgaa

SEQ ID NO: 264764 - DNA, 15 bp, Homo sapiens
taacaacaacaatga

SEQ ID NO: 264765 - DNA, 15 bp, Homo sapiens
gtaacaacaacaatg

SEQ ID NO: 264766 - DNA, 15 bp, Homo sapiens
agtaacaacaacaat

SEQ ID NO: 264767 - DNA, 15 bp, Homo sapiens
aagtaacaacaacaa

SEQ ID NO: 264768 - DNA, 15 bp, Homo sapiens
aaagtaacaacaaca

SEQ ID NO: 264769 - DNA, 15 bp, Homo sapiens
aaaagtaacaacaac

SEQ ID NO: 264770 - DNA, 15 bp, Homo sapiens
aaaaagtaacaacaa

SEQ ID NO: 264771 - DNA, 15 bp, Homo sapiens
aaaaaagtaacaaca

SEQ ID NO: 264772 - DNA, 15 bp, Homo sapiens
gaaaaaagtaacaac

SEQ ID NO: 264773 - DNA, 15 bp, Homo sapiens
tgaaaaaagtaacaa

SEQ ID NO: 264774 - DNA, 15 bp, Homo sapiens
ttgaaaaaagtaaca

SEQ ID NO: 264775 - DNA, 15 bp, Homo sapiens
gttgaaaaaagtaac

SEQ ID NO: 264776 - DNA, 15 bp, Homo sapiens
ggttgaaaaaagtaa

SEQ ID NO: 264777 - DNA, 15 bp, Homo sapiens
aggttgaaaaaagta

SEQ ID NO: 264778 - DNA, 15 bp, Homo sapiens
aaggttgaaaaaagt

SEQ ID NO: 264779 - DNA, 15 bp, Homo sapiens
gaaggttgaaaaaag

SEQ ID NO: 264780 - DNA, 15 bp, Homo sapiens
cgaaggttgaaaaaa

SEQ ID NO: 264781 - DNA, 15 bp, Homo sapiens
acgaaggttgaaaaa

SEQ ID NO: 264782 - DNA, 15 bp, Homo sapiens
aacgaaggttgaaaa

SEQ ID NO: 264783 - DNA, 15 bp, Homo sapiens
aaacgaaggttgaaa

SEQ ID NO: 264784 - DNA, 15 bp, Homo sapiens
gaaacgaaggttgaa

SEQ ID NO: 264785 - DNA, 15 bp, Homo sapiens
agaaacgaaggttga

SEQ ID NO: 264786 - DNA, 15 bp, Homo sapiens
aagaaacgaaggttg

SEQ ID NO: 264787 - DNA, 15 bp, Homo sapiens
aaagaaacgaaggtt

SEQ ID NO: 264788 - DNA, 15 bp, Homo sapiens
gaaagaaacgaaggt

SEQ ID NO: 264789 - DNA, 15 bp, Homo sapiens
agaaagaaacgaagg

SEQ ID NO: 264790 - DNA, 15 bp, Homo sapiens
gagaaagaaacgaag

SEQ ID NO: 264791 - DNA, 15 bp, Homo sapiens
agagaaagaaacgaa

SEQ ID NO: 264792 - DNA, 15 bp, Homo sapiens
tagagaaagaaacga

SEQ ID NO: 264793 - DNA, 15 bp, Homo sapiens
atagagaaagaaacg

SEQ ID NO: 264794 - DNA, 15 bp, Homo sapiens
tatagagaaagaaac

SEQ ID NO: 264795 - DNA, 15 bp, Homo sapiens
ttatagagaaagaaa

SEQ ID NO: 264796 - DNA, 15 bp, Homo sapiens
cttatagagaaagaa

SEQ ID NO: 264797 - DNA, 15 bp, Homo sapiens
acttatagagaaaga

SEQ ID NO: 264798 - DNA, 15 bp, Homo sapiens
aacttatagagaaag

SEQ ID NO: 264799 - DNA, 15 bp, Homo sapiens
caacttatagagaaa

SEQ ID NO: 264800 - DNA, 15 bp, Homo sapiens
tcaacttatagagaa

SEQ ID NO: 264801 - DNA, 15 bp, Homo sapiens
ctcaacttatagaga

SEQ ID NO: 264802 - DNA, 15 bp, Homo sapiens
tctcaacttatagag

SEQ ID NO: 264803 - DNA, 15 bp, Homo sapiens
gtctcaacttataga

SEQ ID NO: 264804 - DNA, 15 bp, Homo sapiens
ggtctcaacttatag

SEQ ID NO: 264805 - DNA, 15 bp, Homo sapiens
gggtctcaacttata

SEQ ID NO: 264806 - DNA, 15 bp, Homo sapiens
tgggtctcaacttat

SEQ ID NO: 264807 - DNA, 15 bp, Homo sapiens
atgggtctcaactta

SEQ ID NO: 264808 - DNA, 15 bp, Homo sapiens
catgggtctcaactt

SEQ ID NO: 264809 - DNA, 15 bp, Homo sapiens
gcatgggtctcaact

SEQ ID NO: 264810 - DNA, 15 bp, Homo sapiens
ggcatgggtctcaac

SEQ ID NO: 264811 - DNA, 15 bp, Homo sapiens
gggcatgggtctcaa

SEQ ID NO: 264812 - DNA, 15 bp, Homo sapiens
agggcatgggtctca

SEQ ID NO: 264813 - DNA, 15 bp, Homo sapiens
gagggcatgggtctc

SEQ ID NO: 264814 - DNA, 15 bp, Homo sapiens
tgagggcatgggtct

SEQ ID NO: 264815 - DNA, 15 bp, Homo sapiens
ttgagggcatgggtc

SEQ ID NO: 264816 - DNA, 15 bp, Homo sapiens
gttgagggcatgggt

SEQ ID NO: 264817 - DNA, 15 bp, Homo sapiens
ggttgagggcatggg

SEQ ID NO: 264818 - DNA, 15 bp, Homo sapiens
aggttgagggcatgg

SEQ ID NO: 264819 - DNA, 15 bp, Homo sapiens
gaggttgagggcatg

SEQ ID NO: 264820 - DNA, 15 bp, Homo sapiens
tgaggttgagggcat

SEQ ID NO: 264821 - DNA, 15 bp, Homo sapiens
ttgaggttgagggca

SEQ ID NO: 264822 - DNA, 15 bp, Homo sapiens
tttgaggttgagggc

SEQ ID NO: 264823 - DNA, 15 bp, Homo sapiens
ctttgaggttgaggg

SEQ ID NO: 264824 - DNA, 15 bp, Homo sapiens
cctttgaggttgagg

SEQ ID NO: 264825 - DNA, 15 bp, Homo sapiens
ccctttgaggttgag

SEQ ID NO: 264826 - DNA, 15 bp, Homo sapiens
accctttgaggttga

SEQ ID NO: 264827 - DNA, 15 bp, Homo sapiens
caccctttgaggttg

SEQ ID NO: 264828 - DNA, 15 bp, Homo sapiens
tcaccctttgaggtt

SEQ ID NO: 264829 - DNA, 15 bp, Homo sapiens
atcaccctttgaggt

SEQ ID NO: 264830 - DNA, 15 bp, Homo sapiens
aatcaccctttgagg

SEQ ID NO: 264831 - DNA, 15 bp, Homo sapiens
taatcaccctttgag

SEQ ID NO: 264832 - DNA, 15 bp, Homo sapiens
ataatcaccctttga

SEQ ID NO: 264833 - DNA, 15 bp, Homo sapiens
tataatcaccctttg

SEQ ID NO: 264834 - DNA, 15 bp, Homo sapiens
ttataatcacccttt

SEQ ID NO: 264835 - DNA, 15 bp, Homo sapiens
tttataatcaccctt

SEQ ID NO: 264836 - DNA, 15 bp, Homo sapiens
ctttataatcaccct

SEQ ID NO: 264837 - DNA, 15 bp, Homo sapiens
tctttataatcaccc

SEQ ID NO: 264838 - DNA, 15 bp, Homo sapiens
atctttataatcacc

SEQ ID NO: 264839 - DNA, 15 bp, Homo sapiens
tatctttataatcac

SEQ ID NO: 264840 - DNA, 15 bp, Homo sapiens
ttatctttataatca

SEQ ID NO: 264841 - DNA, 15 bp, Homo sapiens
tttatctttataatc

SEQ ID NO: 264842 - DNA, 15 bp, Homo sapiens
ctttatctttataat

SEQ ID NO: 264843 - DNA, 15 bp, Homo sapiens
tctttatctttataa

SEQ ID NO: 264844 - DNA, 15 bp, Homo sapiens
ttctttatctttata

SEQ ID NO: 264845 - DNA, 15 bp, Homo sapiens
cttctttatctttat

SEQ ID NO: 264846 - DNA, 15 bp, Homo sapiens
tcttctttatcttta

SEQ ID NO: 264847 - DNA, 15 bp, Homo sapiens
ctcttctttatcttt

SEQ ID NO: 264848 - DNA, 15 bp, Homo sapiens
cctcttctttatctt

SEQ ID NO: 264849 - DNA, 15 bp, Homo sapiens
tcctcttctttatct

SEQ ID NO: 264850 - DNA, 15 bp, Homo sapiens
ttcctcttctttatc

SEQ ID NO: 264851 - DNA, 15 bp, Homo sapiens
tttcctcttctttat

SEQ ID NO: 264852 - DNA, 15 bp, Homo sapiens
atttcctcttcttta

SEQ ID NO: 264853 - DNA, 15 bp, Homo sapiens
tatttcctcttcttt

SEQ ID NO: 264854 - DNA, 15 bp, Homo sapiens
ctatttcctcttctt

SEQ ID NO: 264855 - DNA, 15 bp, Homo sapiens
cctatttcctcttct

SEQ ID NO: 264856 - DNA, 15 bp, Homo sapiens
tcctatttcctcttc

SEQ ID NO: 264857 - DNA, 15 bp, Homo sapiens
ttcctatttcctctt

SEQ ID NO: 264858 - DNA, 15 bp, Homo sapiens
tttcctatttcctct

SEQ ID NO: 264859 - DNA, 15 bp, Homo sapiens
ttttcctatttcctc

SEQ ID NO: 264860 - DNA, 15 bp, Homo sapiens
cttttcctatttcct

SEQ ID NO: 264861 - DNA, 15 bp, Homo sapiens
gcttttcctatttcc

SEQ ID NO: 264862 - DNA, 15 bp, Homo sapiens
tgcttttcctatttc

SEQ ID NO: 264863 - DNA, 15 bp, Homo sapiens
atgcttttcctattt

SEQ ID NO: 264864 - DNA, 15 bp, Homo sapiens
aatgcttttcctatt

SEQ ID NO: 264865 - DNA, 15 bp, Homo sapiens
aaatgcttttcctat

SEQ ID NO: 264866 - DNA, 15 bp, Homo sapiens
caaatgcttttccta

SEQ ID NO: 264867 - DNA, 15 bp, Homo sapiens
ccaaatgcttttcct

SEQ ID NO: 264868 - DNA, 15 bp, Homo sapiens
accaaatgcttttcc

SEQ ID NO: 264869 - DNA, 15 bp, Homo sapiens
taccaaatgcttttc

SEQ ID NO: 264870 - DNA, 15 bp, Homo sapiens
gtaccaaatgctttt

SEQ ID NO: 264871 - DNA, 15 bp, Homo sapiens
agtaccaaatgcttt

SEQ ID NO: 264872 - DNA, 15 bp, Homo sapiens
gagtaccaaatgctt

SEQ ID NO: 264873 - DNA, 15 bp, Homo sapiens
tgagtaccaaatgct

SEQ ID NO: 264874 - DNA, 15 bp, Homo sapiens
ttgagtaccaaatgc

SEQ ID NO: 264875 - DNA, 15 bp, Homo sapiens
tttgagtaccaaatg

SEQ ID NO: 264876 - DNA, 15 bp, Homo sapiens
ttttgagtaccaaat

SEQ ID NO: 264877 - DNA, 15 bp, Homo sapiens
attttgagtaccaaa

SEQ ID NO: 264878 - DNA, 15 bp, Homo sapiens
cattttgagtaccaa

SEQ ID NO: 264879 - DNA, 15 bp, Homo sapiens
tcattttgagtacca

SEQ ID NO: 264880 - DNA, 15 bp, Homo sapiens
ctcattttgagtacc

SEQ ID NO: 264881 - DNA, 15 bp, Homo sapiens
actcattttgagtac

SEQ ID NO: 264882 - DNA, 15 bp, Homo sapiens
aactcattttgagta

SEQ ID NO: 264883 - DNA, 15 bp, Homo sapiens
taactcattttgagt

SEQ ID NO: 264884 - DNA, 15 bp, Homo sapiens
ataactcattttgag

SEQ ID NO: 264885 - DNA, 15 bp, Homo sapiens
tataactcattttga

SEQ ID NO: 264886 - DNA, 15 bp, Homo sapiens
ctataactcattttg

SEQ ID NO: 264887 - DNA, 15 bp, Homo sapiens
actataactcatttt

SEQ ID NO: 264888 - DNA, 15 bp, Homo sapiens
aactataactcattt

SEQ ID NO: 264889 - DNA, 15 bp, Homo sapiens
gaactataactcatt

SEQ ID NO: 264890 - DNA, 15 bp, Homo sapiens
tgaactataactcat

SEQ ID NO: 264891 - DNA, 15 bp, Homo sapiens
atgaactataactca

SEQ ID NO: 264892 - DNA, 15 bp, Homo sapiens
tatgaactataactc

SEQ ID NO: 264893 - DNA, 15 bp, Homo sapiens
ttatgaactataact

SEQ ID NO: 264894 - DNA, 15 bp, Homo sapiens
tttatgaactataac

SEQ ID NO: 264895 - DNA, 15 bp, Homo sapiens
ttttatgaactataa

SEQ ID NO: 264896 - DNA, 15 bp, Homo sapiens
attttatgaactata

SEQ ID NO: 264897 - DNA, 15 bp, Homo sapiens
cattttatgaactat

SEQ ID NO: 264898 - DNA, 15 bp, Homo sapiens
tcattttatgaacta

SEQ ID NO: 264899 - DNA, 15 bp, Homo sapiens
gtcattttatgaact

SEQ ID NO: 264900 - DNA, 15 bp, Homo sapiens
agtcattttatgaac

SEQ ID NO: 264901 - DNA, 15 bp, Homo sapiens
tagtcattttatgaa

SEQ ID NO: 264902 - DNA, 15 bp, Homo sapiens
atagtcattttatga

SEQ ID NO: 264903 - DNA, 15 bp, Homo sapiens
catagtcattttatg

SEQ ID NO: 264904 - DNA, 15 bp, Homo sapiens
tcatagtcattttat

SEQ ID NO: 264905 - DNA, 15 bp, Homo sapiens
gtcatagtcatttta

SEQ ID NO: 264906 - DNA, 15 bp, Homo sapiens
cgtcatagtcatttt

SEQ ID NO: 264907 - DNA, 15 bp, Homo sapiens
tcgtcatagtcattt

SEQ ID NO: 264908 - DNA, 15 bp, Homo sapiens
atcgtcatagtcatt

SEQ ID NO: 264909 - DNA, 15 bp, Homo sapiens
aatcgtcatagtcat

SEQ ID NO: 264910 - DNA, 15 bp, Homo sapiens
caatcgtcatagtca

SEQ ID NO: 264911 - DNA, 15 bp, Homo sapiens
gcaatcgtcatagtc

SEQ ID NO: 264912 - DNA, 15 bp, Homo sapiens
agcaatcgtcatagt

SEQ ID NO: 264913 - DNA, 15 bp, Homo sapiens
cagcaatcgtcatag

SEQ ID NO: 264914 - DNA, 15 bp, Homo sapiens
acagcaatcgtcata

SEQ ID NO: 264915 - DNA, 15 bp, Homo sapiens
aacagcaatcgtcat

SEQ ID NO: 264916 - DNA, 15 bp, Homo sapiens
aaacagcaatcgtca

SEQ ID NO: 264917 - DNA, 15 bp, Homo sapiens
aaaacagcaatcgtc

SEQ ID NO: 264918 - DNA, 15 bp, Homo sapiens
taaaacagcaatcgt

SEQ ID NO: 264919 - DNA, 15 bp, Homo sapiens
ttaaaacagcaatcg

SEQ ID NO: 264920 - DNA, 15 bp, Homo sapiens
cttaaaacagcaatc

SEQ ID NO: 264921 - DNA, 15 bp, Homo sapiens
ccttaaaacagcaat

SEQ ID NO: 264922 - DNA, 15 bp, Homo sapiens
accttaaaacagcaa

SEQ ID NO: 264923 - DNA, 15 bp, Homo sapiens
taccttaaaacagca

SEQ ID NO: 264924 - DNA, 15 bp, Homo sapiens
ttaccttaaaacagc

SEQ ID NO: 264925 - DNA, 15 bp, Homo sapiens
cttaccttaaaacag

SEQ ID NO: 264926 - DNA, 15 bp, Homo sapiens
gcttaccttaaaaca

SEQ ID NO: 264927 - DNA, 15 bp, Homo sapiens
agcttaccttaaaac

SEQ ID NO: 264928 - DNA, 15 bp, Homo sapiens
cagcttaccttaaaa

SEQ ID NO: 264929 - DNA, 15 bp, Homo sapiens
tcagcttaccttaaa

SEQ ID NO: 264930 - DNA, 15 bp, Homo sapiens
atcagcttaccttaa

SEQ ID NO: 264931 - DNA, 15 bp, Homo sapiens
tatcagcttacctta

SEQ ID NO: 264932 - DNA, 15 bp, Homo sapiens
ctatcagcttacctt

SEQ ID NO: 264933 - DNA, 15 bp, Homo sapiens
tctatcagcttacct

SEQ ID NO: 264934 - DNA, 15 bp, Homo sapiens
ctctatcagcttacc

SEQ ID NO: 264935 - DNA, 15 bp, Homo sapiens
actctatcagcttac

SEQ ID NO: 264936 - DNA, 15 bp, Homo sapiens
cactctatcagctta

SEQ ID NO: 264937 - DNA, 15 bp, Homo sapiens
ccactctatcagctt

SEQ ID NO: 264938 - DNA, 15 bp, Homo sapiens
cccactctatcagct

SEQ ID NO: 264939 - DNA, 15 bp, Homo sapiens
tcccactctatcagc

SEQ ID NO: 264940 - DNA, 15 bp, Homo sapiens
ttcccactctatcag

SEQ ID NO: 264941 - DNA, 15 bp, Homo sapiens
gttcccactctatca

SEQ ID NO: 264942 - DNA, 15 bp, Homo sapiens
tgttcccactctatc

SEQ ID NO: 264943 - DNA, 15 bp, Homo sapiens
gtgttcccactctat

SEQ ID NO: 264944 - DNA, 15 bp, Homo sapiens
tgtgttcccactcta

SEQ ID NO: 264945 - DNA, 15 bp, Homo sapiens
ctgtgttcccactct

SEQ ID NO: 264946 - DNA, 15 bp, Homo sapiens
actgtgttcccactc

SEQ ID NO: 264947 - DNA, 15 bp, Homo sapiens
cactgtgttcccact

SEQ ID NO: 264948 - DNA, 15 bp, Homo sapiens
ccactgtgttcccac

SEQ ID NO: 264949 - DNA, 15 bp, Homo sapiens
tccactgtgttccca

SEQ ID NO: 264950 - DNA, 15 bp, Homo sapiens
ttccactgtgttccc

SEQ ID NO: 264951 - DNA, 15 bp, Homo sapiens
tttccactgtgttcc

SEQ ID NO: 264952 - DNA, 15 bp, Homo sapiens
gtttccactgtgttc

SEQ ID NO: 264953 - DNA, 15 bp, Homo sapiens
agtttccactgtgtt

SEQ ID NO: 264954 - DNA, 15 bp, Homo sapiens
tagtttccactgtgt

SEQ ID NO: 264955 - DNA, 15 bp, Homo sapiens
ctagtttccactgtg

SEQ ID NO: 264956 - DNA, 15 bp, Homo sapiens
cctagtttccactgt

SEQ ID NO: 264957 - DNA, 15 bp, Homo sapiens
tcctagtttccactg

SEQ ID NO: 264958 - DNA, 15 bp, Homo sapiens
ctcctagtttccact

SEQ ID NO: 264959 - DNA, 15 bp, Homo sapiens
actcctagtttccac

SEQ ID NO: 264960 - DNA, 15 bp, Homo sapiens
gactcctagtttcca

SEQ ID NO: 264961 - DNA, 15 bp, Homo sapiens
tgactcctagtttcc

SEQ ID NO: 264962 - DNA, 15 bp, Homo sapiens
ctgactcctagtttc

SEQ ID NO: 264963 - DNA, 15 bp, Homo sapiens
cctgactcctagttt

SEQ ID NO: 264964 - DNA, 15 bp, Homo sapiens
ccctgactcctagtt

SEQ ID NO: 264965 - DNA, 15 bp, Homo sapiens
gccctgactcctagt

SEQ ID NO: 264966 - DNA, 15 bp, Homo sapiens
tgccctgactcctag

SEQ ID NO: 264967 - DNA, 15 bp, Homo sapiens
gtgccctgactccta

SEQ ID NO: 264968 - DNA, 15 bp, Homo sapiens
ggtgccctgactcct

SEQ ID NO: 264969 - DNA, 15 bp, Homo sapiens
aggtgccctgactcc

SEQ ID NO: 264970 - DNA, 15 bp, Homo sapiens
caggtgccctgactc

SEQ ID NO: 264971 - DNA, 15 bp, Homo sapiens
ccaggtgccctgact

SEQ ID NO: 264972 - DNA, 15 bp, Homo sapiens
accaggtgccctgac

SEQ ID NO: 264973 - DNA, 15 bp, Homo sapiens
gaccaggtgccctga

SEQ ID NO: 264974 - DNA, 15 bp, Homo sapiens
ggaccaggtgccctg

SEQ ID NO: 264975 - DNA, 15 bp, Homo sapiens
gggaccaggtgccct

SEQ ID NO: 264976 - DNA, 15 bp, Homo sapiens
tgggaccaggtgccc

SEQ ID NO: 264977 - DNA, 15 bp, Homo sapiens
ttgggaccaggtgcc

SEQ ID NO: 264978 - DNA, 15 bp, Homo sapiens
gttgggaccaggtgc

SEQ ID NO: 264979 - DNA, 15 bp, Homo sapiens
ggttgggaccaggtg

SEQ ID NO: 264980 - DNA, 15 bp, Homo sapiens
gggttgggaccaggt

SEQ ID NO: 264981 - DNA, 15 bp, Homo sapiens
agggttgggaccagg

SEQ ID NO: 264982 - DNA, 15 bp, Homo sapiens
cagggttgggaccag

SEQ ID NO: 264983 - DNA, 15 bp, Homo sapiens
acagggttgggacca

SEQ ID NO: 264984 - DNA, 15 bp, Homo sapiens
gacagggttgggacc

SEQ ID NO: 264985 - DNA, 15 bp, Homo sapiens
tgacagggttgggac

SEQ ID NO: 264986 - DNA, 15 bp, Homo sapiens
gtgacagggttggga

SEQ ID NO: 264987 - DNA, 15 bp, Homo sapiens
agtgacagggttggg

SEQ ID NO: 264988 - DNA, 15 bp, Homo sapiens
cagtgacagggttgg

SEQ ID NO: 264989 - DNA, 15 bp, Homo sapiens
tcagtgacagggttg

SEQ ID NO: 264990 - DNA, 15 bp, Homo sapiens
atcagtgacagggtt

SEQ ID NO: 264991 - DNA, 15 bp, Homo sapiens
catcagtgacagggt

SEQ ID NO: 264992 - DNA, 15 bp, Homo sapiens
acatcagtgacaggg

SEQ ID NO: 264993 - DNA, 15 bp, Homo sapiens
cacatcagtgacagg

SEQ ID NO: 264994 - DNA, 15 bp, Homo sapiens
gcacatcagtgacag

SEQ ID NO: 264995 - DNA, 15 bp, Homo sapiens
agcacatcagtgaca

SEQ ID NO: 264996 - DNA, 15 bp, Homo sapiens
cagcacatcagtgac

SEQ ID NO: 264997 - DNA, 15 bp, Homo sapiens
ccagcacatcagtga

SEQ ID NO: 264998 - DNA, 15 bp, Homo sapiens
cccagcacatcagtg

SEQ ID NO: 264999 - DNA, 15 bp, Homo sapiens
acccagcacatcagt

SEQ ID NO: 265000 - DNA, 15 bp, Homo sapiens
cacccagcacatcag

SEQ ID NO: 265001 - DNA, 15 bp, Homo sapiens
tcacccagcacatca

SEQ ID NO: 265002 - DNA, 15 bp, Homo sapiens
atcacccagcacatc

SEQ ID NO: 265003 - DNA, 15 bp, Homo sapiens
aatcacccagcacat

SEQ ID NO: 265004 - DNA, 15 bp, Homo sapiens
aaatcacccagcaca

SEQ ID NO: 265005 - DNA, 15 bp, Homo sapiens
aaaatcacccagcac

SEQ ID NO: 265006 - DNA, 15 bp, Homo sapiens
caaaatcacccagca

SEQ ID NO: 265007 - DNA, 15 bp, Homo sapiens
ccaaaatcacccagc

SEQ ID NO: 265008 - DNA, 15 bp, Homo sapiens
tccaaaatcacccag

SEQ ID NO: 265009 - DNA, 15 bp, Homo sapiens
gtccaaaatcaccca

SEQ ID NO: 265010 - DNA, 15 bp, Homo sapiens
tgtccaaaatcaccc

SEQ ID NO: 265011 - DNA, 15 bp, Homo sapiens
atgtccaaaatcacc

SEQ ID NO: 265012 - DNA, 15 bp, Homo sapiens
tatgtccaaaatcac

SEQ ID NO: 265013 - DNA, 15 bp, Homo sapiens
gtatgtccaaaatca

SEQ ID NO: 265014 - DNA, 15 bp, Homo sapiens
agtatgtccaaaatc

SEQ ID NO: 265015 - DNA, 15 bp, Homo sapiens
tagtatgtccaaaat

SEQ ID NO: 265016 - DNA, 15 bp, Homo sapiens
ctagtatgtccaaaa

SEQ ID NO: 265017 - DNA, 15 bp, Homo sapiens
actagtatgtccaaa

SEQ ID NO: 265018 - DNA, 15 bp, Homo sapiens
aactagtatgtccaa

SEQ ID NO: 265019 - DNA, 15 bp, Homo sapiens
taactagtatgtcca

SEQ ID NO: 265020 - DNA, 15 bp, Homo sapiens
ctaactagtatgtcc

SEQ ID NO: 265021 - DNA, 15 bp, Homo sapiens
gctaactagtatgtc

SEQ ID NO: 265022 - DNA, 15 bp, Homo sapiens
ggctaactagtatgt

SEQ ID NO: 265023 - DNA, 15 bp, Homo sapiens
aggctaactagtatg

SEQ ID NO: 265024 - DNA, 15 bp, Homo sapiens
gaggctaactagtat

SEQ ID NO: 265025 - DNA, 15 bp, Homo sapiens
agaggctaactagta

SEQ ID NO: 265026 - DNA, 15 bp, Homo sapiens
gagaggctaactagt

SEQ ID NO: 265027 - DNA, 15 bp, Homo sapiens
agagaggctaactag

SEQ ID NO: 265028 - DNA, 15 bp, Homo sapiens
cagagaggctaacta

SEQ ID NO: 265029 - DNA, 15 bp, Homo sapiens
ccagagaggctaact

SEQ ID NO: 265030 - DNA, 15 bp, Homo sapiens
accagagaggctaac

SEQ ID NO: 265031 - DNA, 15 bp, Homo sapiens
gaccagagaggctaa

SEQ ID NO: 265032 - DNA, 15 bp, Homo sapiens
ggaccagagaggcta

SEQ ID NO: 265033 - DNA, 15 bp, Homo sapiens
gggaccagagaggct

SEQ ID NO: 265034 - DNA, 15 bp, Homo sapiens
tgggaccagagaggc

SEQ ID NO: 265035 - DNA, 15 bp, Homo sapiens
ttgggaccagagagg

SEQ ID NO: 265036 - DNA, 15 bp, Homo sapiens
tttgggaccagagag

SEQ ID NO: 265037 - DNA, 15 bp, Homo sapiens
atttgggaccagaga

SEQ ID NO: 265038 - DNA, 15 bp, Homo sapiens
aatttgggaccagag

SEQ ID NO: 265039 - DNA, 15 bp, Homo sapiens
gaatttgggaccaga

SEQ ID NO: 265040 - DNA, 15 bp, Homo sapiens
agaatttgggaccag

SEQ ID NO: 265041 - DNA, 15 bp, Homo sapiens
aagaatttgggacca

SEQ ID NO: 265042 - DNA, 15 bp, Homo sapiens
gaagaatttgggacc

SEQ ID NO: 265043 - DNA, 15 bp, Homo sapiens
tgaagaatttgggac

SEQ ID NO: 265044 - DNA, 15 bp, Homo sapiens
atgaagaatttggga

SEQ ID NO: 265045 - DNA, 15 bp, Homo sapiens
aatgaagaatttggg

SEQ ID NO: 265046 - DNA, 15 bp, Homo sapiens
caatgaagaatttgg

SEQ ID NO: 265047 - DNA, 15 bp, Homo sapiens
ccaatgaagaatttg

SEQ ID NO: 265048 - DNA, 15 bp, Homo sapiens
accaatgaagaattt

SEQ ID NO: 265049 - DNA, 15 bp, Homo sapiens
caccaatgaagaatt

SEQ ID NO: 265050 - DNA, 15 bp, Homo sapiens
tcaccaatgaagaat

SEQ ID NO: 265051 - DNA, 15 bp, Homo sapiens
ttcaccaatgaagaa

SEQ ID NO: 265052 - DNA, 15 bp, Homo sapiens
tttcaccaatgaaga

SEQ ID NO: 265053 - DNA, 15 bp, Homo sapiens
atttcaccaatgaag

SEQ ID NO: 265054 - DNA, 15 bp, Homo sapiens
tatttcaccaatgaa

SEQ ID NO: 265055 - DNA, 15 bp, Homo sapiens
ttatttcaccaatga

SEQ ID NO: 265056 - DNA, 15 bp, Homo sapiens
tttatttcaccaatg

SEQ ID NO: 265057 - DNA, 15 bp, Homo sapiens
ttttatttcaccaat

SEQ ID NO: 265058 - DNA, 15 bp, Homo sapiens
attttatttcaccaa

SEQ ID NO: 265059 - DNA, 15 bp, Homo sapiens
cattttatttcacca

SEQ ID NO: 265060 - DNA, 15 bp, Homo sapiens
acattttatttcacc

SEQ ID NO: 265061 - DNA, 15 bp, Homo sapiens
aacattttatttcac

SEQ ID NO: 265062 - DNA, 15 bp, Homo sapiens
aaacattttatttca

SEQ ID NO: 265063 - DNA, 15 bp, Homo sapiens
caaacattttatttc

SEQ ID NO: 265064 - DNA, 15 bp, Homo sapiens
ccaaacattttattt

SEQ ID NO: 265065 - DNA, 15 bp, Homo sapiens
gccaaacattttatt

SEQ ID NO: 265066 - DNA, 15 bp, Homo sapiens
agccaaacattttat

SEQ ID NO: 265067 - DNA, 15 bp, Homo sapiens
gagccaaacatttta

SEQ ID NO: 265068 - DNA, 15 bp, Homo sapiens
tgagccaaacatttt

SEQ ID NO: 265069 - DNA, 15 bp, Homo sapiens
ttgagccaaacattt

SEQ ID NO: 265070 - DNA, 15 bp, Homo sapiens
tttgagccaaacatt

SEQ ID NO: 265071 - DNA, 15 bp, Homo sapiens
ttttgagccaaacat

SEQ ID NO: 265072 - DNA, 15 bp, Homo sapiens
cttttgagccaaaca

SEQ ID NO: 265073 - DNA, 15 bp, Homo sapiens
tcttttgagccaaac

SEQ ID NO: 265074 - DNA, 15 bp, Homo sapiens
atcttttgagccaaa

SEQ ID NO: 265075 - DNA, 15 bp, Homo sapiens
aatcttttgagccaa

SEQ ID NO: 265076 - DNA, 15 bp, Homo sapiens
aaatcttttgagcca

SEQ ID NO: 265077 - DNA, 15 bp, Homo sapiens
aaaatcttttgagcc

SEQ ID NO: 265078 - DNA, 15 bp, Homo sapiens
gaaaatcttttgagc

SEQ ID NO: 265079 - DNA, 15 bp, Homo sapiens
tgaaaatcttttgag

SEQ ID NO: 265080 - DNA, 15 bp, Homo sapiens
ctgaaaatcttttga

SEQ ID NO: 265081 - DNA, 15 bp, Homo sapiens
tctgaaaatcttttg

SEQ ID NO: 265082 - DNA, 15 bp, Homo sapiens
gtctgaaaatctttt

SEQ ID NO: 265083 - DNA, 15 bp, Homo sapiens
tgtctgaaaatcttt

SEQ ID NO: 265084 - DNA, 15 bp, Homo sapiens
atgtctgaaaatctt

SEQ ID NO: 265085 - DNA, 15 bp, Homo sapiens
catgtctgaaaatct

SEQ ID NO: 265086 - DNA, 15 bp, Homo sapiens
ccatgtctgaaaatc

SEQ ID NO: 265087 - DNA, 15 bp, Homo sapiens
accatgtctgaaaat

SEQ ID NO: 265088 - DNA, 15 bp, Homo sapiens
caccatgtctgaaaa

SEQ ID NO: 265089 - DNA, 15 bp, Homo sapiens
gcaccatgtctgaaa

SEQ ID NO: 265090 - DNA, 15 bp, Homo sapiens
agcaccatgtctgaa

SEQ ID NO: 265091 - DNA, 15 bp, Homo sapiens
aagcaccatgtctga

SEQ ID NO: 265092 - DNA, 15 bp, Homo sapiens
gaagcaccatgtctg

SEQ ID NO: 265093 - DNA, 15 bp, Homo sapiens
agaagcaccatgtct

SEQ ID NO: 265094 - DNA, 15 bp, Homo sapiens
gagaagcaccatgtc

SEQ ID NO: 265095 - DNA, 15 bp, Homo sapiens
tgagaagcaccatgt

SEQ ID NO: 265096 - DNA, 15 bp, Homo sapiens
ctgagaagcaccatg

SEQ ID NO: 265097 - DNA, 15 bp, Homo sapiens
actgagaagcaccat

SEQ ID NO: 265098 - DNA, 15 bp, Homo sapiens
cactgagaagcacca

SEQ ID NO: 265099 - DNA, 15 bp, Homo sapiens
acactgagaagcacc

SEQ ID NO: 265100 - DNA, 15 bp, Homo sapiens
cacactgagaagcac

SEQ ID NO: 265101 - DNA, 15 bp, Homo sapiens
ccacactgagaagca

SEQ ID NO: 265102 - DNA, 15 bp, Homo sapiens
accacactgagaagc

SEQ ID NO: 265103 - DNA, 15 bp, Homo sapiens
gaccacactgagaag

SEQ ID NO: 265104 - DNA, 15 bp, Homo sapiens
ggaccacactgagaa

SEQ ID NO: 265105 - DNA, 15 bp, Homo sapiens
tggaccacactgaga

SEQ ID NO: 265106 - DNA, 15 bp, Homo sapiens
atggaccacactgag

SEQ ID NO: 265107 - DNA, 15 bp, Homo sapiens
gatggaccacactga

SEQ ID NO: 265108 - DNA, 15 bp, Homo sapiens
cgatggaccacactg

SEQ ID NO: 265109 - DNA, 15 bp, Homo sapiens
tcgatggaccacact

SEQ ID NO: 265110 - DNA, 15 bp, Homo sapiens
gtcgatggaccacac

SEQ ID NO: 265111 - DNA, 15 bp, Homo sapiens
ggtcgatggaccaca

SEQ ID NO: 265112 - DNA, 15 bp, Homo sapiens
tggtcgatggaccac

SEQ ID NO: 265113 - DNA, 15 bp, Homo sapiens
gtggtcgatggacca

SEQ ID NO: 265114 - DNA, 15 bp, Homo sapiens
ggtggtcgatggacc

SEQ ID NO: 265115 - DNA, 15 bp, Homo sapiens
tggtggtcgatggac

SEQ ID NO: 265116 - DNA, 15 bp, Homo sapiens
atggtggtcgatgga

SEQ ID NO: 265117 - DNA, 15 bp, Homo sapiens
gatggtggtcgatgg

SEQ ID NO: 265118 - DNA, 15 bp, Homo sapiens
ggatggtggtcgatg

SEQ ID NO: 265119 - DNA, 15 bp, Homo sapiens
gggatggtggtcgat

SEQ ID NO: 265120 - DNA, 15 bp, Homo sapiens
ggggatggtggtcga

SEQ ID NO: 265121 - DNA, 15 bp, Homo sapiens
aggggatggtggtcg

SEQ ID NO: 265122 - DNA, 15 bp, Homo sapiens
caggggatggtggtc

SEQ ID NO: 265123 - DNA, 15 bp, Homo sapiens
ccaggggatggtggt

SEQ ID NO: 265124 - DNA, 15 bp, Homo sapiens
tccaggggatggtgg

SEQ ID NO: 265125 - DNA, 15 bp, Homo sapiens
ctccaggggatggtg

SEQ ID NO: 265126 - DNA, 15 bp, Homo sapiens
tctccaggggatggt

SEQ ID NO: 265127 - DNA, 15 bp, Homo sapiens
gtctccaggggatgg

SEQ ID NO: 265128 - DNA, 15 bp, Homo sapiens
agtctccaggggatg

SEQ ID NO: 265129 - DNA, 15 bp, Homo sapiens
aagtctccaggggat

SEQ ID NO: 265130 - DNA, 15 bp, Homo sapiens
caagtctccagggga

SEQ ID NO: 265131 - DNA, 15 bp, Homo sapiens
acaagtctccagggg

SEQ ID NO: 265132 - DNA, 15 bp, Homo sapiens
aacaagtctccaggg

SEQ ID NO: 265133 - DNA, 15 bp, Homo sapiens
taacaagtctccagg

SEQ ID NO: 265134 - DNA, 15 bp, Homo sapiens
ctaacaagtctccag

SEQ ID NO: 265135 - DNA, 15 bp, Homo sapiens
tctaacaagtctcca

SEQ ID NO: 265136 - DNA, 15 bp, Homo sapiens
ttctaacaagtctcc

SEQ ID NO: 265137 - DNA, 15 bp, Homo sapiens
tttctaacaagtctc

SEQ ID NO: 265138 - DNA, 15 bp, Homo sapiens
atttctaacaagtct

SEQ ID NO: 265139 - DNA, 15 bp, Homo sapiens
catttctaacaagtc

SEQ ID NO: 265140 - DNA, 15 bp, Homo sapiens
acatttctaacaagt

SEQ ID NO: 265141 - DNA, 15 bp, Homo sapiens
tacatttctaacaag

SEQ ID NO: 265142 - DNA, 15 bp, Homo sapiens
ctacatttctaacaa

SEQ ID NO: 265143 - DNA, 15 bp, Homo sapiens
tctacatttctaaca

SEQ ID NO: 265144 - DNA, 15 bp, Homo sapiens
atctacatttctaac

SEQ ID NO: 265145 - DNA, 15 bp, Homo sapiens
aatctacatttctaa

SEQ ID NO: 265146 - DNA, 15 bp, Homo sapiens
gaatctacatttcta

SEQ ID NO: 265147 - DNA, 15 bp, Homo sapiens
agaatctacatttct

SEQ ID NO: 265148 - DNA, 15 bp, Homo sapiens
gagaatctacatttc

SEQ ID NO: 265149 - DNA, 15 bp, Homo sapiens
tgagaatctacattt

SEQ ID NO: 265150 - DNA, 15 bp, Homo sapiens
ctgagaatctacatt

SEQ ID NO: 265151 - DNA, 15 bp, Homo sapiens
cctgagaatctacat

SEQ ID NO: 265152 - DNA, 15 bp, Homo sapiens
acctgagaatctaca

SEQ ID NO: 265153 - DNA, 15 bp, Homo sapiens
aacctgagaatctac

SEQ ID NO: 265154 - DNA, 15 bp, Homo sapiens
gaacctgagaatcta

SEQ ID NO: 265155 - DNA, 15 bp, Homo sapiens
tgaacctgagaatct

SEQ ID NO: 265156 - DNA, 15 bp, Homo sapiens
ctgaacctgagaatc

SEQ ID NO: 265157 - DNA, 15 bp, Homo sapiens
gctgaacctgagaat

SEQ ID NO: 265158 - DNA, 15 bp, Homo sapiens
ggctgaacctgagaa

SEQ ID NO: 265159 - DNA, 15 bp, Homo sapiens
gggctgaacctgaga

SEQ ID NO: 265160 - DNA, 15 bp, Homo sapiens
ggggctgaacctgag

SEQ ID NO: 265161 - DNA, 15 bp, Homo sapiens
tggggctgaacctga

SEQ ID NO: 265162 - DNA, 15 bp, Homo sapiens
ctggggctgaacctg

SEQ ID NO: 265163 - DNA, 15 bp, Homo sapiens
gctggggctgaacct

SEQ ID NO: 265164 - DNA, 15 bp, Homo sapiens
agctggggctgaacc

SEQ ID NO: 265165 - DNA, 15 bp, Homo sapiens
gagctggggctgaac

SEQ ID NO: 265166 - DNA, 15 bp, Homo sapiens
agagctggggctgaa

SEQ ID NO: 265167 - DNA, 15 bp, Homo sapiens
gagagctggggctga

SEQ ID NO: 265168 - DNA, 15 bp, Homo sapiens
agagagctggggctg

SEQ ID NO: 265169 - DNA, 15 bp, Homo sapiens
aagagagctggggct

SEQ ID NO: 265170 - DNA, 15 bp, Homo sapiens
caagagagctggggc

SEQ ID NO: 265171 - DNA, 15 bp, Homo sapiens
ccaagagagctgggg

SEQ ID NO: 265172 - DNA, 15 bp, Homo sapiens
gccaagagagctggg

SEQ ID NO: 265173 - DNA, 15 bp, Homo sapiens
ggccaagagagctgg

SEQ ID NO: 265174 - DNA, 15 bp, Homo sapiens
gggccaagagagctg

SEQ ID NO: 265175 - DNA, 15 bp, Homo sapiens
tgggccaagagagct

SEQ ID NO: 265176 - DNA, 15 bp, Homo sapiens
ctgggccaagagagc

SEQ ID NO: 265177 - DNA, 15 bp, Homo sapiens
gctgggccaagagag

SEQ ID NO: 265178 - DNA, 15 bp, Homo sapiens
tgctgggccaagaga

SEQ ID NO: 265179 - DNA, 15 bp, Homo sapiens
ctgctgggccaagag

SEQ ID NO: 265180 - DNA, 15 bp, Homo sapiens
actgctgggccaaga

SEQ ID NO: 265181 - DNA, 15 bp, Homo sapiens
gactgctgggccaag

SEQ ID NO: 265182 - DNA, 15 bp, Homo sapiens
tgactgctgggccaa

SEQ ID NO: 265183 - DNA, 15 bp, Homo sapiens
ttgactgctgggcca

SEQ ID NO: 265184 - DNA, 15 bp, Homo sapiens
tttgactgctgggcc

SEQ ID NO: 265185 - DNA, 15 bp, Homo sapiens
ttttgactgctgggc

SEQ ID NO: 265186 - DNA, 15 bp, Homo sapiens
attttgactgctggg

SEQ ID NO: 265187 - DNA, 15 bp, Homo sapiens
aattttgactgctgg

SEQ ID NO: 265188 - DNA, 15 bp, Homo sapiens
aaattttgactgctg

SEQ ID NO: 265189 - DNA, 15 bp, Homo sapiens
aaaattttgactgct

SEQ ID NO: 265190 - DNA, 15 bp, Homo sapiens
taaaattttgactgc

SEQ ID NO: 265191 - DNA, 15 bp, Homo sapiens
ttaaaattttgactg

SEQ ID NO: 265192 - DNA, 15 bp, Homo sapiens
gttaaaattttgact

SEQ ID NO: 265193 - DNA, 15 bp, Homo sapiens
tgttaaaattttgac

SEQ ID NO: 265194 - DNA, 15 bp, Homo sapiens
ttgttaaaattttga

SEQ ID NO: 265195 - DNA, 15 bp, Homo sapiens
cttgttaaaattttg

SEQ ID NO: 265196 - DNA, 15 bp, Homo sapiens
gcttgttaaaatttt

SEQ ID NO: 265197 - DNA, 15 bp, Homo sapiens
agcttgttaaaattt

SEQ ID NO: 265198 - DNA, 15 bp, Homo sapiens
gagcttgttaaaatt

SEQ ID NO: 265199 - DNA, 15 bp, Homo sapiens
agagcttgttaaaat

SEQ ID NO: 265200 - DNA, 15 bp, Homo sapiens
gagagcttgttaaaa

SEQ ID NO: 265201 - DNA, 15 bp, Homo sapiens
ggagagcttgttaaa

SEQ ID NO: 265202 - DNA, 15 bp, Homo sapiens
tggagagcttgttaa

SEQ ID NO: 265203 - DNA, 15 bp, Homo sapiens
ctggagagcttgtta

SEQ ID NO: 265204 - DNA, 15 bp, Homo sapiens
cctggagagcttgtt

SEQ ID NO: 265205 - DNA, 15 bp, Homo sapiens
acctggagagcttgt

SEQ ID NO: 265206 - DNA, 15 bp, Homo sapiens
gacctggagagcttg

SEQ ID NO: 265207 - DNA, 15 bp, Homo sapiens
agacctggagagctt

SEQ ID NO: 265208 - DNA, 15 bp, Homo sapiens
gagacctggagagct

SEQ ID NO: 265209 - DNA, 15 bp, Homo sapiens
agagacctggagagc

SEQ ID NO: 265210 - DNA, 15 bp, Homo sapiens
cagagacctggagag

SEQ ID NO: 265211 - DNA, 15 bp, Homo sapiens
ccagagacctggaga

SEQ ID NO: 265212 - DNA, 15 bp, Homo sapiens
accagagacctggag

SEQ ID NO: 265213 - DNA, 15 bp, Homo sapiens
caccagagacctgga

SEQ ID NO: 265214 - DNA, 15 bp, Homo sapiens
ccaccagagacctgg

SEQ ID NO: 265215 - DNA, 15 bp, Homo sapiens
cccaccagagacctg

SEQ ID NO: 265216 - DNA, 15 bp, Homo sapiens
gcccaccagagacct

SEQ ID NO: 265217 - DNA, 15 bp, Homo sapiens
tgcccaccagagacc

SEQ ID NO: 265218 - DNA, 15 bp, Homo sapiens
tatgcccaccagaga

SEQ ID NO: 265219 - DNA, 15 bp, Homo sapiens
ctatgcccaccagag

SEQ ID NO: 265220 - DNA, 15 bp, Homo sapiens
actatgcccaccaga

SEQ ID NO: 265221 - DNA, 15 bp, Homo sapiens
cactatgcccaccag

SEQ ID NO: 265222 - DNA, 15 bp, Homo sapiens
tcactatgcccacca

SEQ ID NO: 265223 - DNA, 15 bp, Homo sapiens
ttcactatgcccacc

SEQ ID NO: 265224 - DNA, 15 bp, Homo sapiens
cttcactatgcccac

SEQ ID NO: 265225 - DNA, 15 bp, Homo sapiens
acttcactatgccca

SEQ ID NO: 265226 - DNA, 15 bp, Homo sapiens
gacttcactatgccc

SEQ ID NO: 265227 - DNA, 15 bp, Homo sapiens
agacttcactatgcc

SEQ ID NO: 265228 - DNA, 15 bp, Homo sapiens
cagacttcactatgc

SEQ ID NO: 265229 - DNA, 15 bp, Homo sapiens
ccagacttcactatg

SEQ ID NO: 265230 - DNA, 15 bp, Homo sapiens
cccagacttcactat

SEQ ID NO: 265231 - DNA, 15 bp, Homo sapiens
tcccagacttcacta

SEQ ID NO: 265232 - DNA, 15 bp, Homo sapiens
ttcccagacttcact

SEQ ID NO: 265233 - DNA, 15 bp, Homo sapiens
cttcccagacttcac

SEQ ID NO: 265234 - DNA, 15 bp, Homo sapiens
gcttcccagacttca

SEQ ID NO: 265235 - DNA, 15 bp, Homo sapiens
tgcttcccagacttc

SEQ ID NO: 265236 - DNA, 15 bp, Homo sapiens
atgcttcccagactt

SEQ ID NO: 265237 - DNA, 15 bp, Homo sapiens
aatgcttcccagact

SEQ ID NO: 265238 - DNA, 15 bp, Homo sapiens
taatgcttcccagac

SEQ ID NO: 265239 - DNA, 15 bp, Homo sapiens
gtaatgcttcccaga

SEQ ID NO: 265240 - DNA, 15 bp, Homo sapiens
ggtaatgcttcccag

SEQ ID NO: 265241 - DNA, 15 bp, Homo sapiens
aggtaatgcttccca

SEQ ID NO: 265242 - DNA, 15 bp, Homo sapiens
aaggtaatgcttccc

SEQ ID NO: 265243 - DNA, 15 bp, Homo sapiens
caaggtaatgcttcc

SEQ ID NO: 265244 - DNA, 15 bp, Homo sapiens
ccaaggtaatgcttc

SEQ ID NO: 265245 - DNA, 15 bp, Homo sapiens
accaaggtaatgctt

SEQ ID NO: 265246 - DNA, 15 bp, Homo sapiens
aaccaaggtaatgct

SEQ ID NO: 265247 - DNA, 15 bp, Homo sapiens
gaaccaaggtaatgc

SEQ ID NO: 265248 - DNA, 15 bp, Homo sapiens
agaaccaaggtaatg

SEQ ID NO: 265249 - DNA, 15 bp, Homo sapiens
tagaaccaaggtaat

SEQ ID NO: 265250 - DNA, 15 bp, Homo sapiens
ctagaaccaaggtaa

SEQ ID NO: 265251 - DNA, 15 bp, Homo sapiens
gctagaaccaaggta

SEQ ID NO: 265252 - DNA, 15 bp, Homo sapiens
tgctagaaccaaggt

SEQ ID NO: 265253 - DNA, 15 bp, Homo sapiens
gtgctagaaccaagg

SEQ ID NO: 265254 - DNA, 15 bp, Homo sapiens
agtgctagaaccaag

SEQ ID NO: 265255 - DNA, 15 bp, Homo sapiens
gagtgctagaaccaa

SEQ ID NO: 265256 - DNA, 15 bp, Homo sapiens
tgagtgctagaacca

SEQ ID NO: 265257 - DNA, 15 bp, Homo sapiens
atgagtgctagaacc

SEQ ID NO: 265258 - DNA, 15 bp, Homo sapiens
catgagtgctagaac

SEQ ID NO: 265259 - DNA, 15 bp, Homo sapiens
acatgagtgctagaa

SEQ ID NO: 265260 - DNA, 15 bp, Homo sapiens
gacatgagtgctaga

SEQ ID NO: 265261 - DNA, 15 bp, Homo sapiens
ggacatgagtgctag

SEQ ID NO: 265262 - DNA, 15 bp, Homo sapiens
cggacatgagtgcta

SEQ ID NO: 265263 - DNA, 15 bp, Homo sapiens
tcggacatgagtgct

SEQ ID NO: 265264 - DNA, 15 bp, Homo sapiens
atcggacatgagtgc

SEQ ID NO: 265265 - DNA, 15 bp, Homo sapiens
tatcggacatgagtg

SEQ ID NO: 265266 - DNA, 15 bp, Homo sapiens
atatcggacatgagt

SEQ ID NO: 265267 - DNA, 15 bp, Homo sapiens
aatatcggacatgag

SEQ ID NO: 265268 - DNA, 15 bp, Homo sapiens
caatatcggacatga

SEQ ID NO: 265269 - DNA, 15 bp, Homo sapiens
tcaatatcggacatg

SEQ ID NO: 265270 - DNA, 15 bp, Homo sapiens
gtcaatatcggacat

SEQ ID NO: 265271 - DNA, 15 bp, Homo sapiens
agtcaatatcggaca

SEQ ID NO: 265272 - DNA, 15 bp, Homo sapiens
aagtcaatatcggac

SEQ ID NO: 265273 - DNA, 15 bp, Homo sapiens
gaagtcaatatcgga

SEQ ID NO: 265274 - DNA, 15 bp, Homo sapiens
ggaagtcaatatcgg

SEQ ID NO: 265275 - DNA, 15 bp, Homo sapiens
gggaagtcaatatcg

SEQ ID NO: 265276 - DNA, 15 bp, Homo sapiens
tgggaagtcaatatc

SEQ ID NO: 265277 - DNA, 15 bp, Homo sapiens
ttgggaagtcaatat

SEQ ID NO: 265278 - DNA, 15 bp, Homo sapiens
cttgggaagtcaata

SEQ ID NO: 265279 - DNA, 15 bp, Homo sapiens
gcttgggaagtcaat

SEQ ID NO: 265280 - DNA, 15 bp, Homo sapiens
tgcttgggaagtcaa

SEQ ID NO: 265281 - DNA, 15 bp, Homo sapiens
ctgcttgggaagtca

SEQ ID NO: 265282 - DNA, 15 bp, Homo sapiens
gctgcttgggaagtc

SEQ ID NO: 265283 - DNA, 15 bp, Homo sapiens
tgctgcttgggaagt

SEQ ID NO: 265284 - DNA, 15 bp, Homo sapiens
ctgctgcttgggaag

SEQ ID NO: 265285 - DNA, 15 bp, Homo sapiens
actgctgcttgggaa

SEQ ID NO: 265286 - DNA, 15 bp, Homo sapiens
gactgctgcttggga

SEQ ID NO: 265287 - DNA, 15 bp, Homo sapiens
tgactgctgcttggg

SEQ ID NO: 265288 - DNA, 15 bp, Homo sapiens
gtgactgctgcttgg

SEQ ID NO: 265289 - DNA, 15 bp, Homo sapiens
ggtgactgctgcttg

SEQ ID NO: 265290 - DNA, 15 bp, Homo sapiens
aggtgactgctgctt

SEQ ID NO: 265291 - DNA, 15 bp, Homo sapiens
gaggtgactgctgct

SEQ ID NO: 265292 - DNA, 15 bp, Homo sapiens
agaggtgactgctgc

SEQ ID NO: 265293 - DNA, 15 bp, Homo sapiens
cagaggtgactgctg

SEQ ID NO: 265294 - DNA, 15 bp, Homo sapiens
ccagaggtgactgct

SEQ ID NO: 265295 - DNA, 15 bp, Homo sapiens
tccagaggtgactgc

SEQ ID NO: 265296 - DNA, 15 bp, Homo sapiens
ctccagaggtgactg

SEQ ID NO: 265297 - DNA, 15 bp, Homo sapiens
gctccagaggtgact

SEQ ID NO: 265298 - DNA, 15 bp, Homo sapiens
ggctccagaggtgac

SEQ ID NO: 265299 - DNA, 15 bp, Homo sapiens
aggctccagaggtga

SEQ ID NO: 265300 - DNA, 15 bp, Homo sapiens
aaggctccagaggtg

SEQ ID NO: 265301 - DNA, 15 bp, Homo sapiens
gaaggctccagaggt

SEQ ID NO: 265302 - DNA, 15 bp, Homo sapiens
ggaaggctccagagg

SEQ ID NO: 265303 - DNA, 15 bp, Homo sapiens
aggaaggctccagag

SEQ ID NO: 265304 - DNA, 15 bp, Homo sapiens
gaggaaggctccaga

SEQ ID NO: 265305 - DNA, 15 bp, Homo sapiens
agaggaaggctccag

SEQ ID NO: 265306 - DNA, 15 bp, Homo sapiens
aagaggaaggctcca

SEQ ID NO: 265307 - DNA, 15 bp, Homo sapiens
aaagaggaaggctcc

SEQ ID NO: 265308 - DNA, 15 bp, Homo sapiens
caaagaggaaggctc

SEQ ID NO: 265309 - DNA, 15 bp, Homo sapiens
ccaaagaggaaggct

SEQ ID NO: 265310 - DNA, 15 bp, Homo sapiens
cccaaagaggaaggc

SEQ ID NO: 265311 - DNA, 15 bp, Homo sapiens
ccccaaagaggaagg

SEQ ID NO: 265312 - DNA, 15 bp, Homo sapiens
accccaaagaggaag

SEQ ID NO: 265313 - DNA, 15 bp, Homo sapiens
gaccccaaagaggaa

SEQ ID NO: 265314 - DNA, 15 bp, Homo sapiens
agaccccaaagagga

SEQ ID NO: 265315 - DNA, 15 bp, Homo sapiens
aagaccccaaagagg

SEQ ID NO: 265316 - DNA, 15 bp, Homo sapiens
caagaccccaaagag

SEQ ID NO: 265317 - DNA, 15 bp, Homo sapiens
ccaagaccccaaaga

SEQ ID NO: 265318 - DNA, 15 bp, Homo sapiens
tccaagaccccaaag

SEQ ID NO: 265319 - DNA, 15 bp, Homo sapiens
gtccaagaccccaaa

SEQ ID NO: 265320 - DNA, 15 bp, Homo sapiens
ggtccaagaccccaa

SEQ ID NO: 265321 - DNA, 15 bp, Homo sapiens
cggtccaagacccca

SEQ ID NO: 265322 - DNA, 15 bp, Homo sapiens
gcggtccaagacccc

SEQ ID NO: 265323 - DNA, 15 bp, Homo sapiens
tgcggtccaagaccc

SEQ ID NO: 265324 - DNA, 15 bp, Homo sapiens
ttgcggtccaagacc

SEQ ID NO: 265325 - DNA, 15 bp, Homo sapiens
attgcggtccaagac

SEQ ID NO: 265326 - DNA, 15 bp, Homo sapiens
cattgcggtccaaga

SEQ ID NO: 265327 - DNA, 15 bp, Homo sapiens
ccattgcggtccaag

SEQ ID NO: 265328 - DNA, 15 bp, Homo sapiens
gccattgcggtccaa

SEQ ID NO: 265329 - DNA, 15 bp, Homo sapiens
ggccattgcggtcca

SEQ ID NO: 265330 - DNA, 15 bp, Homo sapiens
aggccattgcggtcc

SEQ ID NO: 265331 - DNA, 15 bp, Homo sapiens
aaggccattgcggtc

SEQ ID NO: 265332 - DNA, 15 bp, Homo sapiens
aaaggccattgcggt

SEQ ID NO: 265333 - DNA, 15 bp, Homo sapiens
caaaggccattgcgg

SEQ ID NO: 265334 - DNA, 15 bp, Homo sapiens
ccaaaggccattgcg

SEQ ID NO: 265335 - DNA, 15 bp, Homo sapiens
gccaaaggccattgc

SEQ ID NO: 265336 - DNA, 15 bp, Homo sapiens
tgccaaaggccattg

SEQ ID NO: 265337 - DNA, 15 bp, Homo sapiens
ttgccaaaggccatt

SEQ ID NO: 265338 - DNA, 15 bp, Homo sapiens
cttgccaaaggccat

SEQ ID NO: 265339 - DNA, 15 bp, Homo sapiens
ccttgccaaaggcca

SEQ ID NO: 265340 - DNA, 15 bp, Homo sapiens
tccttgccaaaggcc

SEQ ID NO: 265341 - DNA, 15 bp, Homo sapiens
ctccttgccaaaggc

SEQ ID NO: 265342 - DNA, 15 bp, Homo sapiens
actccttgccaaagg

SEQ ID NO: 265343 - DNA, 15 bp, Homo sapiens
gactccttgccaaag

SEQ ID NO: 265344 - DNA, 15 bp, Homo sapiens
agactccttgccaaa

SEQ ID NO: 265345 - DNA, 15 bp, Homo sapiens
gagactccttgccaa

SEQ ID NO: 265346 - DNA, 15 bp, Homo sapiens
agagactccttgcca

SEQ ID NO: 265347 - DNA, 15 bp, Homo sapiens
cagagactccttgcc

SEQ ID NO: 265348 - DNA, 15 bp, Homo sapiens
gcagagactccttgc

SEQ ID NO: 265349 - DNA, 15 bp, Homo sapiens
agcagagactccttg

SEQ ID NO: 265350 - DNA, 15 bp, Homo sapiens
cagcagagactcctt

SEQ ID NO: 265351 - DNA, 15 bp, Homo sapiens
ccagcagagactcct

SEQ ID NO: 265352 - DNA, 15 bp, Homo sapiens
tccagcagagactcc

SEQ ID NO: 265353 - DNA, 15 bp, Homo sapiens
atccagcagagactc

SEQ ID NO: 265354 - DNA, 15 bp, Homo sapiens
gatccagcagagact

SEQ ID NO: 265355 - DNA, 15 bp, Homo sapiens
agatccagcagagac

SEQ ID NO: 265356 - DNA, 15 bp, Homo sapiens
gtgagttggcttcaa

SEQ ID NO: 265357 - DNA, 15 bp, Homo sapiens
agtgagttggcttca

SEQ ID NO: 265358 - DNA, 15 bp, Homo sapiens
tagtgagttggcttc

SEQ ID NO: 265359 - DNA, 15 bp, Homo sapiens
ttagtgagttggctt

SEQ ID NO: 265360 - DNA, 15 bp, Homo sapiens
attagtgagttggct

SEQ ID NO: 265361 - DNA, 15 bp, Homo sapiens
aattagtgagttggc

SEQ ID NO: 265362 - DNA, 15 bp, Homo sapiens
gaattagtgagttgg

SEQ ID NO: 265363 - DNA, 15 bp, Homo sapiens
agaattagtgagttg

SEQ ID NO: 265364 - DNA, 15 bp, Homo sapiens
gagaattagtgagtt

SEQ ID NO: 265365 - DNA, 15 bp, Homo sapiens
ggagaattagtgagt

SEQ ID NO: 265366 - DNA, 15 bp, Homo sapiens
tggagaattagtgag

SEQ ID NO: 265367 - DNA, 15 bp, Homo sapiens
ctggagaattagtga

SEQ ID NO: 265368 - DNA, 15 bp, Homo sapiens
actggagaattagtg

SEQ ID NO: 265369 - DNA, 15 bp, Homo sapiens
cactggagaattagt

SEQ ID NO: 265370 - DNA, 15 bp, Homo sapiens
gcactggagaattag

SEQ ID NO: 265371 - DNA, 15 bp, Homo sapiens
tgcactggagaatta

SEQ ID NO: 265372 - DNA, 15 bp, Homo sapiens
atgcactggagaatt

SEQ ID NO: 265373 - DNA, 15 bp, Homo sapiens
catgcactggagaat

SEQ ID NO: 265374 - DNA, 15 bp, Homo sapiens
ccatgcactggagaa

SEQ ID NO: 265375 - DNA, 15 bp, Homo sapiens
accatgcactggaga

SEQ ID NO: 265376 - DNA, 15 bp, Homo sapiens
taccatgcactggag

SEQ ID NO: 265377 - DNA, 15 bp, Homo sapiens
ctaccatgcactgga

SEQ ID NO: 265378 - DNA, 15 bp, Homo sapiens
tctaccatgcactgg

SEQ ID NO: 265379 - DNA, 15 bp, Homo sapiens
ttctaccatgcactg

SEQ ID NO: 265380 - DNA, 15 bp, Homo sapiens
attctaccatgcact

SEQ ID NO: 265381 - DNA, 15 bp, Homo sapiens
gattctaccatgcac

SEQ ID NO: 265382 - DNA, 15 bp, Homo sapiens
agattctaccatgca

SEQ ID NO: 265383 - DNA, 15 bp, Homo sapiens
aagattctaccatgc

SEQ ID NO: 265384 - DNA, 15 bp, Homo sapiens
gaagattctaccatg

SEQ ID NO: 265385 - DNA, 15 bp, Homo sapiens
cgaagattctaccat

SEQ ID NO: 265386 - DNA, 15 bp, Homo sapiens
acgaagattctacca

SEQ ID NO: 265387 - DNA, 15 bp, Homo sapiens
cacgaagattctacc

SEQ ID NO: 265388 - DNA, 15 bp, Homo sapiens
ccacgaagattctac

SEQ ID NO: 265389 - DNA, 15 bp, Homo sapiens
accacgaagattcta

SEQ ID NO: 265390 - DNA, 15 bp, Homo sapiens
aaccacgaagattct

SEQ ID NO: 265391 - DNA, 15 bp, Homo sapiens
caaccacgaagattc

SEQ ID NO: 265392 - DNA, 15 bp, Homo sapiens
ccaaccacgaagatt

SEQ ID NO: 265393 - DNA, 15 bp, Homo sapiens
accaaccacgaagat

SEQ ID NO: 265394 - DNA, 15 bp, Homo sapiens
caccaaccacgaaga

SEQ ID NO: 265395 - DNA, 15 bp, Homo sapiens
tcaccaaccacgaag

SEQ ID NO: 265396 - DNA, 15 bp, Homo sapiens
ttcaccaaccacgaa

SEQ ID NO: 265397 - DNA, 15 bp, Homo sapiens
tttcaccaaccacga

SEQ ID NO: 265398 - DNA, 15 bp, Homo sapiens
atttcaccaaccacg

SEQ ID NO: 265399 - DNA, 15 bp, Homo sapiens
catttcaccaaccac

SEQ ID NO: 265400 - DNA, 15 bp, Homo sapiens
tcatttcaccaacca

SEQ ID NO: 265401 - DNA, 15 bp, Homo sapiens
ctcatttcaccaacc

SEQ ID NO: 265402 - DNA, 15 bp, Homo sapiens
actcatttcaccaac

SEQ ID NO: 265403 - DNA, 15 bp, Homo sapiens
gactcatttcaccaa

SEQ ID NO: 265404 - DNA, 15 bp, Homo sapiens
tgactcatttcacca

SEQ ID NO: 265405 - DNA, 15 bp, Homo sapiens
atgactcatttcacc

SEQ ID NO: 265406 - DNA, 15 bp, Homo sapiens
catgactcatttcac

SEQ ID NO: 265407 - DNA, 15 bp, Homo sapiens
acatgactcatttca

SEQ ID NO: 265408 - DNA, 15 bp, Homo sapiens
cacatgactcatttc

SEQ ID NO: 265409 - DNA, 15 bp, Homo sapiens
acacatgactcattt

SEQ ID NO: 265410 - DNA, 15 bp, Homo sapiens
tacacatgactcatt

SEQ ID NO: 265411 - DNA, 15 bp, Homo sapiens
atacacatgactcat

SEQ ID NO: 265412 - DNA, 15 bp, Homo sapiens
catacacatgactca

SEQ ID NO: 265413 - DNA, 15 bp, Homo sapiens
tcatacacatgactc

SEQ ID NO: 265414 - DNA, 15 bp, Homo sapiens
atcatacacatgact

SEQ ID NO: 265415 - DNA, 15 bp, Homo sapiens
aatcatacacatgac

SEQ ID NO: 265416 - DNA, 15 bp, Homo sapiens
aaatcatacacatga

SEQ ID NO: 265417 - DNA, 15 bp, Homo sapiens
caaatcatacacatg

SEQ ID NO: 265418 - DNA, 15 bp, Homo sapiens
tcaaatcatacacat

SEQ ID NO: 265419 - DNA, 15 bp, Homo sapiens
atcaaatcatacaca

SEQ ID NO: 265420 - DNA, 15 bp, Homo sapiens
catcaaatcatacac

SEQ ID NO: 265421 - DNA, 15 bp, Homo sapiens
ccatcaaatcataca

SEQ ID NO: 265422 - DNA, 15 bp, Homo sapiens
tccatcaaatcatac

SEQ ID NO: 265423 - DNA, 15 bp, Homo sapiens
gtccatcaaatcata

SEQ ID NO: 265424 - DNA, 15 bp, Homo sapiens
agtccatcaaatcat

SEQ ID NO: 265425 - DNA, 15 bp, Homo sapiens
cagtccatcaaatca

SEQ ID NO: 265426 - DNA, 15 bp, Homo sapiens
acagtccatcaaatc

SEQ ID NO: 265427 - DNA, 15 bp, Homo sapiens
tacagtccatcaaat

SEQ ID NO: 265428 - DNA, 15 bp, Homo sapiens
atacagtccatcaaa

SEQ ID NO: 265429 - DNA, 15 bp, Homo sapiens
gatacagtccatcaa

SEQ ID NO: 265430 - DNA, 15 bp, Homo sapiens
agatacagtccatca

SEQ ID NO: 265431 - DNA, 15 bp, Homo sapiens
tagatacagtccatc

SEQ ID NO: 265432 - DNA, 15 bp, Homo sapiens
atagatacagtccat

SEQ ID NO: 265433 - DNA, 15 bp, Homo sapiens
catagatacagtcca

SEQ ID NO: 265434 - DNA, 15 bp, Homo sapiens
tcatagatacagtcc

SEQ ID NO: 265435 - DNA, 15 bp, Homo sapiens
ttcatagatacagtc

SEQ ID NO: 265436 - DNA, 15 bp, Homo sapiens
tttcatagatacagt

SEQ ID NO: 265437 - DNA, 15 bp, Homo sapiens
ctttcatagatacag

SEQ ID NO: 265438 - DNA, 15 bp, Homo sapiens
actttcatagataca

SEQ ID NO: 265439 - DNA, 15 bp, Homo sapiens
tactttcatagatac

SEQ ID NO: 265440 - DNA, 15 bp, Homo sapiens
ctactttcatagata

SEQ ID NO: 265441 - DNA, 15 bp, Homo sapiens
tctactttcatagat

SEQ ID NO: 265442 - DNA, 15 bp, Homo sapiens
ttctactttcataga

SEQ ID NO: 265443 - DNA, 15 bp, Homo sapiens
cttctactttcatag

SEQ ID NO: 265444 - DNA, 15 bp, Homo sapiens
tcttctactttcata

SEQ ID NO: 265445 - DNA, 15 bp, Homo sapiens
atcttctactttcat

SEQ ID NO: 265446 - DNA, 15 bp, Homo sapiens
catcttctactttca

SEQ ID NO: 265447 - DNA, 15 bp, Homo sapiens
ccatcttctactttc

SEQ ID NO: 265448 - DNA, 15 bp, Homo sapiens
tccatcttctacttt

SEQ ID NO: 265449 - DNA, 15 bp, Homo sapiens
ctccatcttctactt

SEQ ID NO: 265450 - DNA, 15 bp, Homo sapiens
tctccatcttctact

SEQ ID NO: 265451 - DNA, 15 bp, Homo sapiens
ctctccatcttctac

SEQ ID NO: 265452 - DNA, 15 bp, Homo sapiens
cctctccatcttcta

SEQ ID NO: 265453 - DNA, 15 bp, Homo sapiens
tcctctccatcttct

SEQ ID NO: 265454 - DNA, 15 bp, Homo sapiens
ttcctctccatcttc

SEQ ID NO: 265455 - DNA, 15 bp, Homo sapiens
tttcctctccatctt

SEQ ID NO: 265456 - DNA, 15 bp, Homo sapiens
gtttcctctccatct

SEQ ID NO: 265457 - DNA, 15 bp, Homo sapiens
tgtttcctctccatc

SEQ ID NO: 265458 - DNA, 15 bp, Homo sapiens
ttgtttcctctccat

SEQ ID NO: 265459 - DNA, 15 bp, Homo sapiens
cttgtttcctctcca

SEQ ID NO: 265460 - DNA, 15 bp, Homo sapiens
ccttgtttcctctcc

SEQ ID NO: 265461 - DNA, 15 bp, Homo sapiens
accttgtttcctctc

SEQ ID NO: 265462 - DNA, 15 bp, Homo sapiens
gaccttgtttcctct

SEQ ID NO: 265463 - DNA, 15 bp, Homo sapiens
agaccttgtttcctc

SEQ ID NO: 265464 - DNA, 15 bp, Homo sapiens
cagaccttgtttcct

SEQ ID NO: 265465 - DNA, 15 bp, Homo sapiens
gcagaccttgtttcc

SEQ ID NO: 265466 - DNA, 15 bp, Homo sapiens
ggcagaccttgtttc

SEQ ID NO: 265467 - DNA, 15 bp, Homo sapiens
tggcagaccttgttt

SEQ ID NO: 265468 - DNA, 15 bp, Homo sapiens
atggcagaccttgtt

SEQ ID NO: 265469 - DNA, 15 bp, Homo sapiens
tatggcagaccttgt

SEQ ID NO: 265470 - DNA, 15 bp, Homo sapiens
ttatggcagaccttg

SEQ ID NO: 265471 - DNA, 15 bp, Homo sapiens
tttatggcagacctt

SEQ ID NO: 265472 - DNA, 15 bp, Homo sapiens
ctttatggcagacct

SEQ ID NO: 265473 - DNA, 15 bp, Homo sapiens
tctttatggcagacc

SEQ ID NO: 265474 - DNA, 15 bp, Homo sapiens
ttctttatggcagac

SEQ ID NO: 265475 - DNA, 15 bp, Homo sapiens
tttctttatggcaga

SEQ ID NO: 265476 - DNA, 15 bp, Homo sapiens
ttttctttatggcag

SEQ ID NO: 265477 - DNA, 15 bp, Homo sapiens
cttttctttatggca

SEQ ID NO: 265478 - DNA, 15 bp, Homo sapiens
tcttttctttatggc

SEQ ID NO: 265479 - DNA, 15 bp, Homo sapiens
ctcttttctttatgg

SEQ ID NO: 265480 - DNA, 15 bp, Homo sapiens
gctcttttctttatg

SEQ ID NO: 265481 - DNA, 15 bp, Homo sapiens
agctcttttctttat

SEQ ID NO: 265482 - DNA, 15 bp, Homo sapiens
aagctcttttcttta

SEQ ID NO: 265483 - DNA, 15 bp, Homo sapiens
caagctcttttcttt

SEQ ID NO: 265484 - DNA, 15 bp, Homo sapiens
ccaagctcttttctt

SEQ ID NO: 265485 - DNA, 15 bp, Homo sapiens
accaagctcttttct

SEQ ID NO: 265486 - DNA, 15 bp, Homo sapiens
taccaagctcttttc

SEQ ID NO: 265487 - DNA, 15 bp, Homo sapiens
ataccaagctctttt

SEQ ID NO: 265488 - DNA, 15 bp, Homo sapiens
cataccaagctcttt

SEQ ID NO: 265489 - DNA, 15 bp, Homo sapiens
ccataccaagctctt

SEQ ID NO: 265490 - DNA, 15 bp, Homo sapiens
tccataccaagctct

SEQ ID NO: 265491 - DNA, 15 bp, Homo sapiens
atccataccaagctc

SEQ ID NO: 265492 - DNA, 15 bp, Homo sapiens
catccataccaagct

SEQ ID NO: 265493 - DNA, 15 bp, Homo sapiens
gcatccataccaagc

SEQ ID NO: 265494 - DNA, 15 bp, Homo sapiens
tgcatccataccaag

SEQ ID NO: 265495 - DNA, 15 bp, Homo sapiens
ttgcatccataccaa

SEQ ID NO: 265496 - DNA, 15 bp, Homo sapiens
cttgcatccatacca

SEQ ID NO: 265497 - DNA, 15 bp, Homo sapiens
tcttgcatccatacc

SEQ ID NO: 265498 - DNA, 15 bp, Homo sapiens
ctcttgcatccatac

SEQ ID NO: 265499 - DNA, 15 bp, Homo sapiens
cctcttgcatccata

SEQ ID NO: 265500 - DNA, 15 bp, Homo sapiens
tcctcttgcatccat

SEQ ID NO: 265501 - DNA, 15 bp, Homo sapiens
ttcctcttgcatcca

SEQ ID NO: 265502 - DNA, 15 bp, Homo sapiens
tttcctcttgcatcc

SEQ ID NO: 265503 - DNA, 15 bp, Homo sapiens
ttttcctcttgcatc

SEQ ID NO: 265504 - DNA, 15 bp, Homo sapiens
tttttcctcttgcat

SEQ ID NO: 265505 - DNA, 15 bp, Homo sapiens
ctttttcctcttgca

SEQ ID NO: 265506 - DNA, 15 bp, Homo sapiens
tctttttcctcttgc

SEQ ID NO: 265507 - DNA, 15 bp, Homo sapiens
ttctttttcctcttg

SEQ ID NO: 265508 - DNA, 15 bp, Homo sapiens
cttctttttcctctt

SEQ ID NO: 265509 - DNA, 15 bp, Homo sapiens
ccttctttttcctct

SEQ ID NO: 265510 - DNA, 15 bp, Homo sapiens
cccttctttttcctc

SEQ ID NO: 265511 - DNA, 15 bp, Homo sapiens
ccccttctttttcct

SEQ ID NO: 265512 - DNA, 15 bp, Homo sapiens
cccccttctttttcc

SEQ ID NO: 265513 - DNA, 15 bp, Homo sapiens
tcccccttctttttc

SEQ ID NO: 265514 - DNA, 15 bp, Homo sapiens
ttcccccttcttttt

SEQ ID NO: 265515 - DNA, 15 bp, Homo sapiens
tttcccccttctttt

SEQ ID NO: 265516 - DNA, 15 bp, Homo sapiens
atttcccccttcttt

SEQ ID NO: 265517 - DNA, 15 bp, Homo sapiens
tatttcccccttctt

SEQ ID NO: 265518 - DNA, 15 bp, Homo sapiens
atatttcccccttct

SEQ ID NO: 265519 - DNA, 15 bp, Homo sapiens
tatatttcccccttc

SEQ ID NO: 265520 - DNA, 15 bp, Homo sapiens
ttatatttccccctt

SEQ ID NO: 265521 - DNA, 15 bp, Homo sapiens
attatatttccccct

SEQ ID NO: 265522 - DNA, 15 bp, Homo sapiens
gattatatttccccc

SEQ ID NO: 265523 - DNA, 15 bp, Homo sapiens
ggattatatttcccc

SEQ ID NO: 265524 - DNA, 15 bp, Homo sapiens
aggattatatttccc

SEQ ID NO: 265525 - DNA, 15 bp, Homo sapiens
aaggattatatttcc

SEQ ID NO: 265526 - DNA, 15 bp, Homo sapiens
gaaggattatatttc

SEQ ID NO: 265527 - DNA, 15 bp, Homo sapiens
tgaaggattatattt

SEQ ID NO: 265528 - DNA, 15 bp, Homo sapiens
ttgaaggattatatt

SEQ ID NO: 265529 - DNA, 15 bp, Homo sapiens
tttgaaggattatat

SEQ ID NO: 265530 - DNA, 15 bp, Homo sapiens
ttttgaaggattata

SEQ ID NO: 265531 - DNA, 15 bp, Homo sapiens
cttttgaaggattat

SEQ ID NO: 265532 - DNA, 15 bp, Homo sapiens
acttttgaaggatta

SEQ ID NO: 265533 - DNA, 15 bp, Homo sapiens
gacttttgaaggatt

SEQ ID NO: 265534 - DNA, 15 bp, Homo sapiens
ggacttttgaaggat

SEQ ID NO: 265535 - DNA, 15 bp, Homo sapiens
tggacttttgaagga

SEQ ID NO: 265536 - DNA, 15 bp, Homo sapiens
atggacttttgaagg

SEQ ID NO: 265537 - DNA, 15 bp, Homo sapiens
gatggacttttgaag

SEQ ID NO: 265538 - DNA, 15 bp, Homo sapiens
tgatggacttttgaa

SEQ ID NO: 265539 - DNA, 15 bp, Homo sapiens
ttgatggacttttga

SEQ ID NO: 265540 - DNA, 15 bp, Homo sapiens
cttgatggacttttg

SEQ ID NO: 265541 - DNA, 15 bp, Homo sapiens
acttgatggactttt

SEQ ID NO: 265542 - DNA, 15 bp, Homo sapiens
aacttgatggacttt

SEQ ID NO: 265543 - DNA, 15 bp, Homo sapiens
aaacttgatggactt

SEQ ID NO: 265544 - DNA, 15 bp, Homo sapiens
taaacttgatggact

SEQ ID NO: 265545 - DNA, 15 bp, Homo sapiens
gtaaacttgatggac

SEQ ID NO: 265546 - DNA, 15 bp, Homo sapiens
ggtaaacttgatgga

SEQ ID NO: 265547 - DNA, 15 bp, Homo sapiens
aggtaaacttgatgg

SEQ ID NO: 265548 - DNA, 15 bp, Homo sapiens
taggtaaacttgatg

SEQ ID NO: 265549 - DNA, 15 bp, Homo sapiens
ctaggtaaacttgat

SEQ ID NO: 265550 - DNA, 15 bp, Homo sapiens
tctaggtaaacttga

SEQ ID NO: 265551 - DNA, 15 bp, Homo sapiens
ttctaggtaaacttg

SEQ ID NO: 265552 - DNA, 15 bp, Homo sapiens
tttctaggtaaactt

SEQ ID NO: 265553 - DNA, 15 bp, Homo sapiens
gtttctaggtaaact

SEQ ID NO: 265554 - DNA, 15 bp, Homo sapiens
tgtttctaggtaaac

SEQ ID NO: 265555 - DNA, 15 bp, Homo sapiens
ctgtttctaggtaaa

SEQ ID NO: 265556 - DNA, 15 bp, Homo sapiens
tctgtttctaggtaa

SEQ ID NO: 265557 - DNA, 15 bp, Homo sapiens
atctgtttctaggta

SEQ ID NO: 265558 - DNA, 15 bp, Homo sapiens
aatctgtttctaggt

SEQ ID NO: 265559 - DNA, 15 bp, Homo sapiens
aaatctgtttctagg

SEQ ID NO: 265560 - DNA, 15 bp, Homo sapiens
taaatctgtttctag

SEQ ID NO: 265561 - DNA, 15 bp, Homo sapiens
gtaaatctgtttcta

SEQ ID NO: 265562 - DNA, 15 bp, Homo sapiens
agtaaatctgtttct

SEQ ID NO: 265563 - DNA, 15 bp, Homo sapiens
aagtaaatctgtttc

SEQ ID NO: 265564 - DNA, 15 bp, Homo sapiens
taagtaaatctgttt

SEQ ID NO: 265565 - DNA, 15 bp, Homo sapiens
ttaagtaaatctgtt

SEQ ID NO: 265566 - DNA, 15 bp, Homo sapiens
tttaagtaaatctgt

SEQ ID NO: 265567 - DNA, 15 bp, Homo sapiens
ttttaagtaaatctg

SEQ ID NO: 265568 - DNA, 15 bp, Homo sapiens
cttttaagtaaatct

SEQ ID NO: 265569 - DNA, 15 bp, Homo sapiens
acttttaagtaaatc

SEQ ID NO: 265570 - DNA, 15 bp, Homo sapiens
aacttttaagtaaat

SEQ ID NO: 265571 - DNA, 15 bp, Homo sapiens
aaacttttaagtaaa

SEQ ID NO: 265572 - DNA, 15 bp, Homo sapiens
aaaacttttaagtaa

SEQ ID NO: 265573 - DNA, 15 bp, Homo sapiens
caaaacttttaagta

SEQ ID NO: 265574 - DNA, 15 bp, Homo sapiens
tcaaaacttttaagt

SEQ ID NO: 265575 - DNA, 15 bp, Homo sapiens
ctcaaaacttttaag

SEQ ID NO: 265576 - DNA, 15 bp, Homo sapiens
tctcaaaacttttaa

SEQ ID NO: 265577 - DNA, 15 bp, Homo sapiens
ttctcaaaactttta

SEQ ID NO: 265578 - DNA, 15 bp, Homo sapiens
tttctcaaaactttt

SEQ ID NO: 265579 - DNA, 15 bp, Homo sapiens
atttctcaaaacttt

SEQ ID NO: 265580 - DNA, 15 bp, Homo sapiens
aatttctcaaaactt

SEQ ID NO: 265581 - DNA, 15 bp, Homo sapiens
aaatttctcaaaact

SEQ ID NO: 265582 - DNA, 15 bp, Homo sapiens
taaatttctcaaaac

SEQ ID NO: 265583 - DNA, 15 bp, Homo sapiens
ataaatttctcaaaa

SEQ ID NO: 265584 - DNA, 15 bp, Homo sapiens
aataaatttctcaaa

SEQ ID NO: 265585 - DNA, 15 bp, Homo sapiens
aaataaatttctcaa

SEQ ID NO: 265586 - DNA, 15 bp, Homo sapiens
gaaataaatttctca

SEQ ID NO: 265587 - DNA, 15 bp, Homo sapiens
agaaataaatttctc

SEQ ID NO: 265588 - DNA, 15 bp, Homo sapiens
cagaaataaatttct

SEQ ID NO: 265589 - DNA, 15 bp, Homo sapiens
tcagaaataaatttc

SEQ ID NO: 265590 - DNA, 15 bp, Homo sapiens
atcagaaataaattt

SEQ ID NO: 265591 - DNA, 15 bp, Homo sapiens
catcagaaataaatt

SEQ ID NO: 265592 - DNA, 15 bp, Homo sapiens
tcatcagaaataaat

SEQ ID NO: 265593 - DNA, 15 bp, Homo sapiens
atcatcagaaataaa

SEQ ID NO: 265594 - DNA, 15 bp, Homo sapiens
catcatcagaaataa

SEQ ID NO: 265595 - DNA, 15 bp, Homo sapiens
tcatcatcagaaata

SEQ ID NO: 265596 - DNA, 15 bp, Homo sapiens
atcatcatcagaaat

SEQ ID NO: 265597 - DNA, 15 bp, Homo sapiens
gatcatcatcagaaa

SEQ ID NO: 265598 - DNA, 15 bp, Homo sapiens
ggatcatcatcagaa

SEQ ID NO: 265599 - DNA, 15 bp, Homo sapiens
aggatcatcatcaga

SEQ ID NO: 265600 - DNA, 15 bp, Homo sapiens
aaggatcatcatcag

SEQ ID NO: 265601 - DNA, 15 bp, Homo sapiens
taaggatcatcatca

SEQ ID NO: 265602 - DNA, 15 bp, Homo sapiens
ataaggatcatcatc

SEQ ID NO: 265603 - DNA, 15 bp, Homo sapiens
cataaggatcatcat

SEQ ID NO: 265604 - DNA, 15 bp, Homo sapiens
tcataaggatcatca

SEQ ID NO: 265605 - DNA, 15 bp, Homo sapiens
ctcataaggatcatc

SEQ ID NO: 265606 - DNA, 15 bp, Homo sapiens
actcataaggatcat

SEQ ID NO: 265607 - DNA, 15 bp, Homo sapiens
gactcataaggatca

SEQ ID NO: 265608 - DNA, 15 bp, Homo sapiens
tgactcataaggatc

SEQ ID NO: 265609 - DNA, 15 bp, Homo sapiens
gtgactcataaggat

SEQ ID NO: 265610 - DNA, 15 bp, Homo sapiens
agtgactcataagga

SEQ ID NO: 265611 - DNA, 15 bp, Homo sapiens
tagtgactcataagg

SEQ ID NO: 265612 - DNA, 15 bp, Homo sapiens
atagtgactcataag

SEQ ID NO: 265613 - DNA, 15 bp, Homo sapiens
aatagtgactcataa

SEQ ID NO: 265614 - DNA, 15 bp, Homo sapiens
aaatagtgactcata

SEQ ID NO: 265615 - DNA, 15 bp, Homo sapiens
gaaatagtgactcat

SEQ ID NO: 265616 - DNA, 15 bp, Homo sapiens
agaaatagtgactca

SEQ ID NO: 265617 - DNA, 15 bp, Homo sapiens
aagaaatagtgactc

SEQ ID NO: 265618 - DNA, 15 bp, Homo sapiens
taagaaatagtgact

SEQ ID NO: 265619 - DNA, 15 bp, Homo sapiens
ataagaaatagtgac

SEQ ID NO: 265620 - DNA, 15 bp, Homo sapiens
cataagaaatagtga

SEQ ID NO: 265621 - DNA, 15 bp, Homo sapiens
ccataagaaatagtg

SEQ ID NO: 265622 - DNA, 15 bp, Homo sapiens
tccataagaaatagt

SEQ ID NO: 265623 - DNA, 15 bp, Homo sapiens
ttccataagaaatag

SEQ ID NO: 265624 - DNA, 15 bp, Homo sapiens
attccataagaaata

SEQ ID NO: 265625 - DNA, 15 bp, Homo sapiens
gattccataagaaat

SEQ ID NO: 265626 - DNA, 15 bp, Homo sapiens
tgattccataagaaa

SEQ ID NO: 265627 - DNA, 15 bp, Homo sapiens
ttgattccataagaa

SEQ ID NO: 265628 - DNA, 15 bp, Homo sapiens
cttgattccataaga

SEQ ID NO: 265629 - DNA, 15 bp, Homo sapiens
gcttgattccataag

SEQ ID NO: 265630 - DNA, 15 bp, Homo sapiens
ggcttgattccataa

SEQ ID NO: 265631 - DNA, 15 bp, Homo sapiens
tggcttgattccata

SEQ ID NO: 265632 - DNA, 15 bp, Homo sapiens
ctggcttgattccat

SEQ ID NO: 265633 - DNA, 15 bp, Homo sapiens
gctggcttgattcca

SEQ ID NO: 265634 - DNA, 15 bp, Homo sapiens
tgctggcttgattcc

SEQ ID NO: 265635 - DNA, 15 bp, Homo sapiens
atgctggcttgattc

SEQ ID NO: 265636 - DNA, 15 bp, Homo sapiens
tatgctggcttgatt

SEQ ID NO: 265637 - DNA, 15 bp, Homo sapiens
ttatgctggcttgat

SEQ ID NO: 265638 - DNA, 15 bp, Homo sapiens
tttatgctggcttga

SEQ ID NO: 265639 - DNA, 15 bp, Homo sapiens
ttttatgctggcttg

SEQ ID NO: 265640 - DNA, 15 bp, Homo sapiens
cttttatgctggctt

SEQ ID NO: 265641 - DNA, 15 bp, Homo sapiens
acttttatgctggct

SEQ ID NO: 265642 - DNA, 15 bp, Homo sapiens
aacttttatgctggc

SEQ ID NO: 265643 - DNA, 15 bp, Homo sapiens
taacttttatgctgg

SEQ ID NO: 265644 - DNA, 15 bp, Homo sapiens
ataacttttatgctg

SEQ ID NO: 265645 - DNA, 15 bp, Homo sapiens
gataacttttatgct

SEQ ID NO: 265646 - DNA, 15 bp, Homo sapiens
agataacttttatgc

SEQ ID NO: 265647 - DNA, 15 bp, Homo sapiens
aagataacttttatg

SEQ ID NO: 265648 - DNA, 15 bp, Homo sapiens
caagataacttttat

SEQ ID NO: 265649 - DNA, 15 bp, Homo sapiens
gcaagataactttta

SEQ ID NO: 265650 - DNA, 15 bp, Homo sapiens
tgcaagataactttt

SEQ ID NO: 265651 - DNA, 15 bp, Homo sapiens
atgcaagataacttt

SEQ ID NO: 265652 - DNA, 15 bp, Homo sapiens
aatgcaagataactt

SEQ ID NO: 265653 - DNA, 15 bp, Homo sapiens
gaatgcaagataact

SEQ ID NO: 265654 - DNA, 15 bp, Homo sapiens
agaatgcaagataac

SEQ ID NO: 265655 - DNA, 15 bp, Homo sapiens
gagaatgcaagataa

SEQ ID NO: 265656 - DNA, 15 bp, Homo sapiens
tgagaatgcaagata

SEQ ID NO: 265657 - DNA, 15 bp, Homo sapiens
ctgagaatgcaagat

SEQ ID NO: 265658 - DNA, 15 bp, Homo sapiens
gctgagaatgcaaga

SEQ ID NO: 265659 - DNA, 15 bp, Homo sapiens
tgctgagaatgcaag

SEQ ID NO: 265660 - DNA, 15 bp, Homo sapiens
atgctgagaatgcaa

SEQ ID NO: 265661 - DNA, 15 bp, Homo sapiens
tatgctgagaatgca

SEQ ID NO: 265662 - DNA, 15 bp, Homo sapiens
ctatgctgagaatgc

SEQ ID NO: 265663 - DNA, 15 bp, Homo sapiens
gctatgctgagaatg

SEQ ID NO: 265664 - DNA, 15 bp, Homo sapiens
agctatgctgagaat

SEQ ID NO: 265665 - DNA, 15 bp, Homo sapiens
tagctatgctgagaa

SEQ ID NO: 265666 - DNA, 15 bp, Homo sapiens
ctagctatgctgaga

SEQ ID NO: 265667 - DNA, 15 bp, Homo sapiens
actagctatgctgag

SEQ ID NO: 265668 - DNA, 15 bp, Homo sapiens
aactagctatgctga

SEQ ID NO: 265669 - DNA, 15 bp, Homo sapiens
aaactagctatgctg

SEQ ID NO: 265670 - DNA, 15 bp, Homo sapiens
taaactagctatgct

SEQ ID NO: 265671 - DNA, 15 bp, Homo sapiens
ctaaactagctatgc

SEQ ID NO: 265672 - DNA, 15 bp, Homo sapiens
tctaaactagctatg

SEQ ID NO: 265673 - DNA, 15 bp, Homo sapiens
ctctaaactagctat

SEQ ID NO: 265674 - DNA, 15 bp, Homo sapiens
tctctaaactagcta

SEQ ID NO: 265675 - DNA, 15 bp, Homo sapiens
ttctctaaactagct

SEQ ID NO: 265676 - DNA, 15 bp, Homo sapiens
attctctaaactagc

SEQ ID NO: 265677 - DNA, 15 bp, Homo sapiens
aattctctaaactag

SEQ ID NO: 265678 - DNA, 15 bp, Homo sapiens
taattctctaaacta

SEQ ID NO: 265679 - DNA, 15 bp, Homo sapiens
ctaattctctaaact

SEQ ID NO: 265680 - DNA, 15 bp, Homo sapiens
cctaattctctaaac

SEQ ID NO: 265681 - DNA, 15 bp, Homo sapiens
acctaattctctaaa

SEQ ID NO: 265682 - DNA, 15 bp, Homo sapiens
gacctaattctctaa

SEQ ID NO: 265683 - DNA, 15 bp, Homo sapiens
tgacctaattctcta

SEQ ID NO: 265684 - DNA, 15 bp, Homo sapiens
atgacctaattctct

SEQ ID NO: 265685 - DNA, 15 bp, Homo sapiens
aatgacctaattctc

SEQ ID NO: 265686 - DNA, 15 bp, Homo sapiens
aaatgacctaattct

SEQ ID NO: 265687 - DNA, 15 bp, Homo sapiens
caaatgacctaattc

SEQ ID NO: 265688 - DNA, 15 bp, Homo sapiens
acaaatgacctaatt

SEQ ID NO: 265689 - DNA, 15 bp, Homo sapiens
tacaaatgacctaat

SEQ ID NO: 265690 - DNA, 15 bp, Homo sapiens
ttacaaatgacctaa

SEQ ID NO: 265691 - DNA, 15 bp, Homo sapiens
cttacaaatgaccta

SEQ ID NO: 265692 - DNA, 15 bp, Homo sapiens
acttacaaatgacct

SEQ ID NO: 265693 - DNA, 15 bp, Homo sapiens
gacttacaaatgacc

SEQ ID NO: 265694 - DNA, 15 bp, Homo sapiens
tgacttacaaatgac

SEQ ID NO: 265695 - DNA, 15 bp, Homo sapiens
ttgacttacaaatga

SEQ ID NO: 265696 - DNA, 15 bp, Homo sapiens
tttgacttacaaatg

SEQ ID NO: 265697 - DNA, 15 bp, Homo sapiens
ttttgacttacaaat

SEQ ID NO: 265698 - DNA, 15 bp, Homo sapiens
cttttgacttacaaa

SEQ ID NO: 265699 - DNA, 15 bp, Homo sapiens
tcttttgacttacaa

SEQ ID NO: 265700 - DNA, 15 bp, Homo sapiens
atcttttgacttaca

SEQ ID NO: 265701 - DNA, 15 bp, Homo sapiens
aatcttttgacttac

SEQ ID NO: 265702 - DNA, 15 bp, Homo sapiens
aaatcttttgactta

SEQ ID NO: 265703 - DNA, 15 bp, Homo sapiens
gaaatcttttgactt

SEQ ID NO: 265704 - DNA, 15 bp, Homo sapiens
agaaatcttttgact

SEQ ID NO: 265705 - DNA, 15 bp, Homo sapiens
tagaaatcttttgac

SEQ ID NO: 265706 - DNA, 15 bp, Homo sapiens
gtagaaatcttttga

SEQ ID NO: 265707 - DNA, 15 bp, Homo sapiens
tgtagaaatcttttg

SEQ ID NO: 265708 - DNA, 15 bp, Homo sapiens
ttgtagaaatctttt

SEQ ID NO: 265709 - DNA, 15 bp, Homo sapiens
tttgtagaaatcttt

SEQ ID NO: 265710 - DNA, 15 bp, Homo sapiens
ctttgtagaaatctt

SEQ ID NO: 265711 - DNA, 15 bp, Homo sapiens
actttgtagaaatct

SEQ ID NO: 265712 - DNA, 15 bp, Homo sapiens
aactttgtagaaatc

SEQ ID NO: 265713 - DNA, 15 bp, Homo sapiens
gaactttgtagaaat

SEQ ID NO: 265714 - DNA, 15 bp, Homo sapiens
tgaactttgtagaaa

SEQ ID NO: 265715 - DNA, 15 bp, Homo sapiens
ttgaactttgtagaa

SEQ ID NO: 265716 - DNA, 15 bp, Homo sapiens
tttgaactttgtaga

SEQ ID NO: 265717 - DNA, 15 bp, Homo sapiens
ttttgaactttgtag

SEQ ID NO: 265718 - DNA, 15 bp, Homo sapiens
attttgaactttgta

SEQ ID NO: 265719 - DNA, 15 bp, Homo sapiens
tattttgaactttgt

SEQ ID NO: 265720 - DNA, 15 bp, Homo sapiens
ttattttgaactttg

SEQ ID NO: 265721 - DNA, 15 bp, Homo sapiens
tttattttgaacttt

SEQ ID NO: 265722 - DNA, 15 bp, Homo sapiens
atttattttgaactt

SEQ ID NO: 265723 - DNA, 15 bp, Homo sapiens
tatttattttgaact

SEQ ID NO: 265724 - DNA, 15 bp, Homo sapiens
ttatttattttgaac

SEQ ID NO: 265725 - DNA, 15 bp, Homo sapiens
tttatttattttgaa

SEQ ID NO: 265726 - DNA, 15 bp, Homo sapiens
atttatttattttga

SEQ ID NO: 265727 - DNA, 15 bp, Homo sapiens
aatttatttattttg

SEQ ID NO: 265728 - DNA, 15 bp, Homo sapiens
gaatttatttatttt

SEQ ID NO: 265729 - DNA, 15 bp, Homo sapiens
ggaatttatttattt

SEQ ID NO: 265730 - DNA, 15 bp, Homo sapiens
tggaatttatttatt

SEQ ID NO: 265731 - DNA, 15 bp, Homo sapiens
ctggaatttatttat

SEQ ID NO: 265732 - DNA, 15 bp, Homo sapiens
cctggaatttattta

SEQ ID NO: 265733 - DNA, 15 bp, Homo sapiens
acctggaatttattt

SEQ ID NO: 265734 - DNA, 15 bp, Homo sapiens
tacctggaatttatt

SEQ ID NO: 265735 - DNA, 15 bp, Homo sapiens
atacctggaatttat

SEQ ID NO: 265736 - DNA, 15 bp, Homo sapiens
gatacctggaattta

SEQ ID NO: 265737 - DNA, 15 bp, Homo sapiens
agatacctggaattt

SEQ ID NO: 265738 - DNA, 15 bp, Homo sapiens
cagatacctggaatt

SEQ ID NO: 265739 - DNA, 15 bp, Homo sapiens
tcagatacctggaat

SEQ ID NO: 265740 - DNA, 15 bp, Homo sapiens
ctcagatacctggaa

SEQ ID NO: 265741 - DNA, 15 bp, Homo sapiens
gctcagatacctgga

SEQ ID NO: 265742 - DNA, 15 bp, Homo sapiens
agctcagatacctgg

SEQ ID NO: 265743 - DNA, 15 bp, Homo sapiens
aagctcagatacctg

SEQ ID NO: 265744 - DNA, 15 bp, Homo sapiens
taagctcagatacct

SEQ ID NO: 265745 - DNA, 15 bp, Homo sapiens
ttaagctcagatacc

SEQ ID NO: 265746 - DNA, 15 bp, Homo sapiens
cttaagctcagatac

SEQ ID NO: 265747 - DNA, 15 bp, Homo sapiens
tcttaagctcagata

SEQ ID NO: 265748 - DNA, 15 bp, Homo sapiens
atcttaagctcagat

SEQ ID NO: 265749 - DNA, 15 bp, Homo sapiens
catcttaagctcaga

SEQ ID NO: 265750 - DNA, 15 bp, Homo sapiens
ccatcttaagctcag

SEQ ID NO: 265751 - DNA, 15 bp, Homo sapiens
gccatcttaagctca

SEQ ID NO: 265752 - DNA, 15 bp, Homo sapiens
agccatcttaagctc

SEQ ID NO: 265753 - DNA, 15 bp, Homo sapiens
cagccatcttaagct

SEQ ID NO: 265754 - DNA, 15 bp, Homo sapiens
ccagccatcttaagc

SEQ ID NO: 265755 - DNA, 15 bp, Homo sapiens
cccagccatcttaag

SEQ ID NO: 265756 - DNA, 15 bp, Homo sapiens
tcccagccatcttaa

SEQ ID NO: 265757 - DNA, 15 bp, Homo sapiens
ttcccagccatctta

SEQ ID NO: 265758 - DNA, 15 bp, Homo sapiens
cttcccagccatctt

SEQ ID NO: 265759 - DNA, 15 bp, Homo sapiens
tcttcccagccatct

SEQ ID NO: 265760 - DNA, 15 bp, Homo sapiens
ttcttcccagccatc

SEQ ID NO: 265761 - DNA, 15 bp, Homo sapiens
cttcttcccagccat

SEQ ID NO: 265762 - DNA, 15 bp, Homo sapiens
ccttcttcccagcca

SEQ ID NO: 265763 - DNA, 15 bp, Homo sapiens
tccttcttcccagcc

SEQ ID NO: 265764 - DNA, 15 bp, Homo sapiens
gtccttcttcccagc

SEQ ID NO: 265765 - DNA, 15 bp, Homo sapiens
agtccttcttcccag

SEQ ID NO: 265766 - DNA, 15 bp, Homo sapiens
gagtccttcttccca

SEQ ID NO: 265767 - DNA, 15 bp, Homo sapiens
ggagtccttcttccc

SEQ ID NO: 265768 - DNA, 15 bp, Homo sapiens
tggagtccttcttcc

SEQ ID NO: 265769 - DNA, 15 bp, Homo sapiens
atggagtccttcttc

SEQ ID NO: 265770 - DNA, 15 bp, Homo sapiens
aatggagtccttctt

SEQ ID NO: 265771 - DNA, 15 bp, Homo sapiens
aaatggagtccttct

SEQ ID NO: 265772 - DNA, 15 bp, Homo sapiens
caaatggagtccttc

SEQ ID NO: 265773 - DNA, 15 bp, Homo sapiens
tcaaatggagtcctt

SEQ ID NO: 265774 - DNA, 15 bp, Homo sapiens
ctcaaatggagtcct

SEQ ID NO: 265775 - DNA, 15 bp, Homo sapiens
cctcaaatggagtcc

SEQ ID NO: 265776 - DNA, 15 bp, Homo sapiens
gcctcaaatggagtc

SEQ ID NO: 265777 - DNA, 15 bp, Homo sapiens
tgcctcaaatggagt

SEQ ID NO: 265778 - DNA, 15 bp, Homo sapiens
ctgcctcaaatggag

SEQ ID NO: 265779 - DNA, 15 bp, Homo sapiens
cctgcctcaaatgga

SEQ ID NO: 265780 - DNA, 15 bp, Homo sapiens
acctgcctcaaatgg

SEQ ID NO: 265781 - DNA, 15 bp, Homo sapiens
aacctgcctcaaatg

SEQ ID NO: 265782 - DNA, 15 bp, Homo sapiens
aaacctgcctcaaat

SEQ ID NO: 265783 - DNA, 15 bp, Homo sapiens
aaaacctgcctcaaa

SEQ ID NO: 265784 - DNA, 15 bp, Homo sapiens
gaaaacctgcctcaa

SEQ ID NO: 265785 - DNA, 15 bp, Homo sapiens
agaaaacctgcctca

SEQ ID NO: 265786 - DNA, 15 bp, Homo sapiens
gagaaaacctgcctc

SEQ ID NO: 265787 - DNA, 15 bp, Homo sapiens
tgagaaaacctgcct

SEQ ID NO: 265788 - DNA, 15 bp, Homo sapiens
atgagaaaacctgcc

SEQ ID NO: 265789 - DNA, 15 bp, Homo sapiens
aatgagaaaacctgc

SEQ ID NO: 265790 - DNA, 15 bp, Homo sapiens
aaatgagaaaacctg

SEQ ID NO: 265791 - DNA, 15 bp, Homo sapiens
gaaatgagaaaacct

SEQ ID NO: 265792 - DNA, 15 bp, Homo sapiens
ggaaatgagaaaacc

SEQ ID NO: 265793 - DNA, 15 bp, Homo sapiens
gggaaatgagaaaac

SEQ ID NO: 265794 - DNA, 15 bp, Homo sapiens
tgggaaatgagaaaa

SEQ ID NO: 265795 - DNA, 15 bp, Homo sapiens
ctgggaaatgagaaa

SEQ ID NO: 265796 - DNA, 15 bp, Homo sapiens
gctgggaaatgagaa

SEQ ID NO: 265797 - DNA, 15 bp, Homo sapiens
agctgggaaatgaga

SEQ ID NO: 265798 - DNA, 15 bp, Homo sapiens
aagctgggaaatgag

SEQ ID NO: 265799 - DNA, 15 bp, Homo sapiens
taagctgggaaatga

SEQ ID NO: 265800 - DNA, 15 bp, Homo sapiens
ctaagctgggaaatg

SEQ ID NO: 265801 - DNA, 15 bp, Homo sapiens
tctaagctgggaaat

SEQ ID NO: 265802 - DNA, 15 bp, Homo sapiens
ttctaagctgggaaa

SEQ ID NO: 265803 - DNA, 15 bp, Homo sapiens
attctaagctgggaa

SEQ ID NO: 265804 - DNA, 15 bp, Homo sapiens
aattctaagctggga

SEQ ID NO: 265805 - DNA, 15 bp, Homo sapiens
caattctaagctggg

SEQ ID NO: 265806 - DNA, 15 bp, Homo sapiens
gcaattctaagctgg

SEQ ID NO: 265807 - DNA, 15 bp, Homo sapiens
ggcaattctaagctg

SEQ ID NO: 265808 - DNA, 15 bp, Homo sapiens
aggcaattctaagct

SEQ ID NO: 265809 - DNA, 15 bp, Homo sapiens
aaggcaattctaagc

SEQ ID NO: 265810 - DNA, 15 bp, Homo sapiens
gaaggcaattctaag

SEQ ID NO: 265811 - DNA, 15 bp, Homo sapiens
tgaaggcaattctaa

SEQ ID NO: 265812 - DNA, 15 bp, Homo sapiens
ttgaaggcaattcta

SEQ ID NO: 265813 - DNA, 15 bp, Homo sapiens
cttgaaggcaattct

SEQ ID NO: 265814 - DNA, 15 bp, Homo sapiens
ccttgaaggcaattc

SEQ ID NO: 265815 - DNA, 15 bp, Homo sapiens
accttgaaggcaatt

SEQ ID NO: 265816 - DNA, 15 bp, Homo sapiens
gaccttgaaggcaat

SEQ ID NO: 265817 - DNA, 15 bp, Homo sapiens
agaccttgaaggcaa

SEQ ID NO: 265818 - DNA, 15 bp, Homo sapiens
aagaccttgaaggca

SEQ ID NO: 265819 - DNA, 15 bp, Homo sapiens
aaagaccttgaaggc

SEQ ID NO: 265820 - DNA, 15 bp, Homo sapiens
aaaagaccttgaagg

SEQ ID NO: 265821 - DNA, 15 bp, Homo sapiens
aaaaagaccttgaag

SEQ ID NO: 265822 - DNA, 15 bp, Homo sapiens
gaaaaagaccttgaa

SEQ ID NO: 265823 - DNA, 15 bp, Homo sapiens
agaaaaagaccttga

SEQ ID NO: 265824 - DNA, 15 bp, Homo sapiens
aagaaaaagaccttg

SEQ ID NO: 265825 - DNA, 15 bp, Homo sapiens
aaagaaaaagacctt

SEQ ID NO: 265826 - DNA, 15 bp, Homo sapiens
taaagaaaaagacct

SEQ ID NO: 265827 - DNA, 15 bp, Homo sapiens
ataaagaaaaagacc

SEQ ID NO: 265828 - DNA, 15 bp, Homo sapiens
gataaagaaaaagac

SEQ ID NO: 265829 - DNA, 15 bp, Homo sapiens
agataaagaaaaaga

SEQ ID NO: 265830 - DNA, 15 bp, Homo sapiens
gagataaagaaaaag

SEQ ID NO: 265831 - DNA, 15 bp, Homo sapiens
tgagataaagaaaaa

SEQ ID NO: 265832 - DNA, 15 bp, Homo sapiens
ctgagataaagaaaa

SEQ ID NO: 265833 - DNA, 15 bp, Homo sapiens
tctgagataaagaaa

SEQ ID NO: 265834 - DNA, 15 bp, Homo sapiens
ttctgagataaagaa

SEQ ID NO: 265835 - DNA, 15 bp, Homo sapiens
gttctgagataaaga

SEQ ID NO: 265836 - DNA, 15 bp, Homo sapiens
tgttctgagataaag

SEQ ID NO: 265837 - DNA, 15 bp, Homo sapiens
ttgttctgagataaa

SEQ ID NO: 265838 - DNA, 15 bp, Homo sapiens
gttgttctgagataa

SEQ ID NO: 265839 - DNA, 15 bp, Homo sapiens
tgttgttctgagata

SEQ ID NO: 265840 - DNA, 15 bp, Homo sapiens
ttgttgttctgagat

SEQ ID NO: 265841 - DNA, 15 bp, Homo sapiens
tttgttgttctgaga

SEQ ID NO: 265842 - DNA, 15 bp, Homo sapiens
ctttgttgttctgag

SEQ ID NO: 265843 - DNA, 15 bp, Homo sapiens
tctttgttgttctga

SEQ ID NO: 265844 - DNA, 15 bp, Homo sapiens
gtctttgttgttctg

SEQ ID NO: 265845 - DNA, 15 bp, Homo sapiens
tgtctttgttgttct

SEQ ID NO: 265846 - DNA, 15 bp, Homo sapiens
gtgtctttgttgttc

SEQ ID NO: 265847 - DNA, 15 bp, Homo sapiens
agtgtctttgttgtt

SEQ ID NO: 265848 - DNA, 15 bp, Homo sapiens
cagtgtctttgttgt

SEQ ID NO: 265849 - DNA, 15 bp, Homo sapiens
gcagtgtctttgttg

SEQ ID NO: 265850 - DNA, 15 bp, Homo sapiens
ggcagtgtctttgtt

SEQ ID NO: 265851 - DNA, 15 bp, Homo sapiens
aggcagtgtctttgt

SEQ ID NO: 265852 - DNA, 15 bp, Homo sapiens
caggcagtgtctttg

SEQ ID NO: 265853 - DNA, 15 bp, Homo sapiens
tcaggcagtgtcttt

SEQ ID NO: 265854 - DNA, 15 bp, Homo sapiens
ctcaggcagtgtctt

SEQ ID NO: 265855 - DNA, 15 bp, Homo sapiens
cctcaggcagtgtct

SEQ ID NO: 265856 - DNA, 15 bp, Homo sapiens
tcctcaggcagtgtc

SEQ ID NO: 265857 - DNA, 15 bp, Homo sapiens
ttcctcaggcagtgt

SEQ ID NO: 265858 - DNA, 15 bp, Homo sapiens
cttcctcaggcagtg

SEQ ID NO: 265859 - DNA, 15 bp, Homo sapiens
tcttcctcaggcagt

SEQ ID NO: 265860 - DNA, 15 bp, Homo sapiens
ttcttcctcaggcag

SEQ ID NO: 265861 - DNA, 15 bp, Homo sapiens
gttcttcctcaggca

SEQ ID NO: 265862 - DNA, 15 bp, Homo sapiens
ggttcttcctcaggc

SEQ ID NO: 265863 - DNA, 15 bp, Homo sapiens
aggttcttcctcagg

SEQ ID NO: 265864 - DNA, 15 bp, Homo sapiens
gaggttcttcctcag

SEQ ID NO: 265865 - DNA, 15 bp, Homo sapiens
agaggttcttcctca

SEQ ID NO: 265866 - DNA, 15 bp, Homo sapiens
cagaggttcttcctc

SEQ ID NO: 265867 - DNA, 15 bp, Homo sapiens
gcagaggttcttcct

SEQ ID NO: 265868 - DNA, 15 bp, Homo sapiens
agcagaggttcttcc

SEQ ID NO: 265869 - DNA, 15 bp, Homo sapiens
aagcagaggttcttc

SEQ ID NO: 265870 - DNA, 15 bp, Homo sapiens
aaagcagaggttctt

SEQ ID NO: 265871 - DNA, 15 bp, Homo sapiens
taaagcagaggttct

SEQ ID NO: 265872 - DNA, 15 bp, Homo sapiens
ataaagcagaggttc

SEQ ID NO: 265873 - DNA, 15 bp, Homo sapiens
aataaagcagaggtt

SEQ ID NO: 265874 - DNA, 15 bp, Homo sapiens
taataaagcagaggt

SEQ ID NO: 265875 - DNA, 15 bp, Homo sapiens
ataataaagcagagg

SEQ ID NO: 265876 - DNA, 15 bp, Homo sapiens
cataataaagcagag

SEQ ID NO: 265877 - DNA, 15 bp, Homo sapiens
ccataataaagcaga

SEQ ID NO: 265878 - DNA, 15 bp, Homo sapiens
accataataaagcag

SEQ ID NO: 265879 - DNA, 15 bp, Homo sapiens
caccataataaagca

SEQ ID NO: 265880 - DNA, 15 bp, Homo sapiens
acaccataataaagc

SEQ ID NO: 265881 - DNA, 15 bp, Homo sapiens
aacaccataataaag

SEQ ID NO: 265882 - DNA, 15 bp, Homo sapiens
gaacaccataataaa

SEQ ID NO: 265883 - DNA, 15 bp, Homo sapiens
agaacaccataataa

SEQ ID NO: 265884 - DNA, 15 bp, Homo sapiens
cagaacaccataata

SEQ ID NO: 265885 - DNA, 15 bp, Homo sapiens
gcagaacaccataat

SEQ ID NO: 265886 - DNA, 15 bp, Homo sapiens
tgcagaacaccataa

SEQ ID NO: 265887 - DNA, 15 bp, Homo sapiens
ttgcagaacaccata

SEQ ID NO: 265888 - DNA, 15 bp, Homo sapiens
gttgcagaacaccat

SEQ ID NO: 265889 - DNA, 15 bp, Homo sapiens
ggttgcagaacacca

SEQ ID NO: 265890 - DNA, 15 bp, Homo sapiens
aggttgcagaacacc

SEQ ID NO: 265891 - DNA, 15 bp, Homo sapiens
taggttgcagaacac

SEQ ID NO: 265892 - DNA, 15 bp, Homo sapiens
ttaggttgcagaaca

SEQ ID NO: 265893 - DNA, 15 bp, Homo sapiens
cttaggttgcagaac

SEQ ID NO: 265894 - DNA, 15 bp, Homo sapiens
acttaggttgcagaa

SEQ ID NO: 265895 - DNA, 15 bp, Homo sapiens
gacttaggttgcaga

SEQ ID NO: 265896 - DNA, 15 bp, Homo sapiens
tgacttaggttgcag

SEQ ID NO: 265897 - DNA, 15 bp, Homo sapiens
ctgacttaggttgca

SEQ ID NO: 265898 - DNA, 15 bp, Homo sapiens
actgacttaggttgc

SEQ ID NO: 265899 - DNA, 15 bp, Homo sapiens
cactgacttaggttg

SEQ ID NO: 265900 - DNA, 15 bp, Homo sapiens
tcactgacttaggtt

SEQ ID NO: 265901 - DNA, 15 bp, Homo sapiens
ttcactgacttaggt

SEQ ID NO: 265902 - DNA, 15 bp, Homo sapiens
cttcactgacttagg

SEQ ID NO: 265903 - DNA, 15 bp, Homo sapiens
acttcactgacttag

SEQ ID NO: 265904 - DNA, 15 bp, Homo sapiens
aacttcactgactta

SEQ ID NO: 265905 - DNA, 15 bp, Homo sapiens
aaacttcactgactt

SEQ ID NO: 265906 - DNA, 15 bp, Homo sapiens
aaaacttcactgact

SEQ ID NO: 265907 - DNA, 15 bp, Homo sapiens
caaaacttcactgac

SEQ ID NO: 265908 - DNA, 15 bp, Homo sapiens
tcaaaacttcactga

SEQ ID NO: 265909 - DNA, 15 bp, Homo sapiens
atcaaaacttcactg

SEQ ID NO: 265910 - DNA, 15 bp, Homo sapiens
aatcaaaacttcact

SEQ ID NO: 265911 - DNA, 15 bp, Homo sapiens
gaatcaaaacttcac

SEQ ID NO: 265912 - DNA, 15 bp, Homo sapiens
agaatcaaaacttca

SEQ ID NO: 265913 - DNA, 15 bp, Homo sapiens
gagaatcaaaacttc

SEQ ID NO: 265914 - DNA, 15 bp, Homo sapiens
ggagaatcaaaactt

SEQ ID NO: 265915 - DNA, 15 bp, Homo sapiens
aggagaatcaaaact

SEQ ID NO: 265916 - DNA, 15 bp, Homo sapiens
caggagaatcaaaac

SEQ ID NO: 265917 - DNA, 15 bp, Homo sapiens
ccaggagaatcaaaa

SEQ ID NO: 265918 - DNA, 15 bp, Homo sapiens
tccaggagaatcaaa

SEQ ID NO: 265919 - DNA, 15 bp, Homo sapiens
ttccaggagaatcaa

SEQ ID NO: 265920 - DNA, 15 bp, Homo sapiens
cttccaggagaatca

SEQ ID NO: 265921 - DNA, 15 bp, Homo sapiens
tcttccaggagaatc

SEQ ID NO: 265922 - DNA, 15 bp, Homo sapiens
ctcttccaggagaat

SEQ ID NO: 265923 - DNA, 15 bp, Homo sapiens
cctcttccaggagaa

SEQ ID NO: 265924 - DNA, 15 bp, Homo sapiens
gcctcttccaggaga

SEQ ID NO: 265925 - DNA, 15 bp, Homo sapiens
agcctcttccaggag

SEQ ID NO: 265926 - DNA, 15 bp, Homo sapiens
cagcctcttccagga

SEQ ID NO: 265927 - DNA, 15 bp, Homo sapiens
ccagcctcttccagg

SEQ ID NO: 265928 - DNA, 15 bp, Homo sapiens
gccagcctcttccag

SEQ ID NO: 265929 - DNA, 15 bp, Homo sapiens
ggccagcctcttcca

SEQ ID NO: 265930 - DNA, 15 bp, Homo sapiens
tggccagcctcttcc

SEQ ID NO: 265931 - DNA, 15 bp, Homo sapiens
ctggccagcctcttc

SEQ ID NO: 265932 - DNA, 15 bp, Homo sapiens
gctggccagcctctt

SEQ ID NO: 265933 - DNA, 15 bp, Homo sapiens
agctggccagcctct

SEQ ID NO: 265934 - DNA, 15 bp, Homo sapiens
tagctggccagcctc

SEQ ID NO: 265935 - DNA, 15 bp, Homo sapiens
gtagctggccagcct

SEQ ID NO: 265936 - DNA, 15 bp, Homo sapiens
agtagctggccagcc

SEQ ID NO: 265937 - DNA, 15 bp, Homo sapiens
gagtagctggccagc

SEQ ID NO: 265938 - DNA, 15 bp, Homo sapiens
tgagtagctggccag

SEQ ID NO: 265939 - DNA, 15 bp, Homo sapiens
atgagtagctggcca

SEQ ID NO: 265940 - DNA, 15 bp, Homo sapiens
aatgagtagctggcc

SEQ ID NO: 265941 - DNA, 15 bp, Homo sapiens
taatgagtagctggc

SEQ ID NO: 265942 - DNA, 15 bp, Homo sapiens
ctaatgagtagctgg

SEQ ID NO: 265943 - DNA, 15 bp, Homo sapiens
gctaatgagtagctg

SEQ ID NO: 265944 - DNA, 15 bp, Homo sapiens
agctaatgagtagct

SEQ ID NO: 265945 - DNA, 15 bp, Homo sapiens
cagctaatgagtagc

SEQ ID NO: 265946 - DNA, 15 bp, Homo sapiens
gcagctaatgagtag

SEQ ID NO: 265947 - DNA, 15 bp, Homo sapiens
tgcagctaatgagta

SEQ ID NO: 265948 - DNA, 15 bp, Homo sapiens
ctgcagctaatgagt

SEQ ID NO: 265949 - DNA, 15 bp, Homo sapiens
cctgcagctaatgag

SEQ ID NO: 265950 - DNA, 15 bp, Homo sapiens
ccctgcagctaatga

SEQ ID NO: 265951 - DNA, 15 bp, Homo sapiens
tccctgcagctaatg

SEQ ID NO: 265952 - DNA, 15 bp, Homo sapiens
atccctgcagctaat

SEQ ID NO: 265953 - DNA, 15 bp, Homo sapiens
aatccctgcagctaa

SEQ ID NO: 265954 - DNA, 15 bp, Homo sapiens
caatccctgcagcta

SEQ ID NO: 265955 - DNA, 15 bp, Homo sapiens
tcaatccctgcagct

SEQ ID NO: 265956 - DNA, 15 bp, Homo sapiens
ctcaatccctgcagc

SEQ ID NO: 265957 - DNA, 15 bp, Homo sapiens
cctcaatccctgcag

SEQ ID NO: 265958 - DNA, 15 bp, Homo sapiens
ccctcaatccctgca

SEQ ID NO: 265959 - DNA, 15 bp, Homo sapiens
cccctcaatccctgc

SEQ ID NO: 265960 - DNA, 15 bp, Homo sapiens
tcccctcaatccctg

SEQ ID NO: 265961 - DNA, 15 bp, Homo sapiens
atcccctcaatccct

SEQ ID NO: 265962 - DNA, 15 bp, Homo sapiens
aatcccctcaatccc

SEQ ID NO: 265963 - DNA, 15 bp, Homo sapiens
aaatcccctcaatcc

SEQ ID NO: 265964 - DNA, 15 bp, Homo sapiens
gaaatcccctcaatc

SEQ ID NO: 265965 - DNA, 15 bp, Homo sapiens
tgaaatcccctcaat

SEQ ID NO: 265966 - DNA, 15 bp, Homo sapiens
ctgaaatcccctcaa

SEQ ID NO: 265967 - DNA, 15 bp, Homo sapiens
cctgaaatcccctca

SEQ ID NO: 265968 - DNA, 15 bp, Homo sapiens
gcctgaaatcccctc

SEQ ID NO: 265969 - DNA, 15 bp, Homo sapiens
tgcctgaaatcccct

SEQ ID NO: 265970 - DNA, 15 bp, Homo sapiens
atgcctgaaatcccc

SEQ ID NO: 265971 - DNA, 15 bp, Homo sapiens
gatgcctgaaatccc

SEQ ID NO: 265972 - DNA, 15 bp, Homo sapiens
tgatgcctgaaatcc

SEQ ID NO: 265973 - DNA, 15 bp, Homo sapiens
ctgatgcctgaaatc

SEQ ID NO: 265974 - DNA, 15 bp, Homo sapiens
tctgatgcctgaaat

SEQ ID NO: 265975 - DNA, 15 bp, Homo sapiens
atctgatgcctgaaa

SEQ ID NO: 265976 - DNA, 15 bp, Homo sapiens
catctgatgcctgaa

SEQ ID NO: 265977 - DNA, 15 bp, Homo sapiens
ccatctgatgcctga

SEQ ID NO: 265978 - DNA, 15 bp, Homo sapiens
tccatctgatgcctg

SEQ ID NO: 265979 - DNA, 15 bp, Homo sapiens
ctccatctgatgcct

SEQ ID NO: 265980 - DNA, 15 bp, Homo sapiens
cctccatctgatgcc

SEQ ID NO: 265981 - DNA, 15 bp, Homo sapiens
acctccatctgatgc

SEQ ID NO: 265982 - DNA, 15 bp, Homo sapiens
cacctccatctgatg

SEQ ID NO: 265983 - DNA, 15 bp, Homo sapiens
ccacctccatctgat

SEQ ID NO: 265984 - DNA, 15 bp, Homo sapiens
cccacctccatctga

SEQ ID NO: 265985 - DNA, 15 bp, Homo sapiens
ccccacctccatctg

SEQ ID NO: 265986 - DNA, 15 bp, Homo sapiens
tccccacctccatct

SEQ ID NO: 265987 - DNA, 15 bp, Homo sapiens
gtccccacctccatc

SEQ ID NO: 265988 - DNA, 15 bp, Homo sapiens
tgtccccacctccat

SEQ ID NO: 265989 - DNA, 15 bp, Homo sapiens
ctgtccccacctcca

SEQ ID NO: 265990 - DNA, 15 bp, Homo sapiens
tctgtccccacctcc

SEQ ID NO: 265991 - DNA, 15 bp, Homo sapiens
gtctgtccccacctc

SEQ ID NO: 265992 - DNA, 15 bp, Homo sapiens
agtctgtccccacct

SEQ ID NO: 265993 - DNA, 15 bp, Homo sapiens
cagtctgtccccacc

SEQ ID NO: 265994 - DNA, 15 bp, Homo sapiens
ccagtctgtccccac

SEQ ID NO: 265995 - DNA, 15 bp, Homo sapiens
tccagtctgtcccca

SEQ ID NO: 265996 - DNA, 15 bp, Homo sapiens
ctccagtctgtcccc

SEQ ID NO: 265997 - DNA, 15 bp, Homo sapiens
gctccagtctgtccc

SEQ ID NO: 265998 - DNA, 15 bp, Homo sapiens
ggctccagtctgtcc

SEQ ID NO: 265999 - DNA, 15 bp, Homo sapiens
tggctccagtctgtc

SEQ ID NO: 266000 - DNA, 15 bp, Homo sapiens
ctggctccagtctgt

SEQ ID NO: 266001 - DNA, 15 bp, Homo sapiens
tctggctccagtctg

SEQ ID NO: 266002 - DNA, 15 bp, Homo sapiens
ctctggctccagtct

SEQ ID NO: 266003 - DNA, 15 bp, Homo sapiens
actctggctccagtc

SEQ ID NO: 266004 - DNA, 15 bp, Homo sapiens
aactctggctccagt

SEQ ID NO: 266005 - DNA, 15 bp, Homo sapiens
gaactctggctccag

SEQ ID NO: 266006 - DNA, 15 bp, Homo sapiens
agaactctggctcca

SEQ ID NO: 266007 - DNA, 15 bp, Homo sapiens
aagaactctggctcc

SEQ ID NO: 266008 - DNA, 15 bp, Homo sapiens
caagaactctggctc

SEQ ID NO: 266009 - DNA, 15 bp, Homo sapiens
tcaagaactctggct

SEQ ID NO: 266010 - DNA, 15 bp, Homo sapiens
atcaagaactctggc

SEQ ID NO: 266011 - DNA, 15 bp, Homo sapiens
aatcaagaactctgg

SEQ ID NO: 266012 - DNA, 15 bp, Homo sapiens
gaatcaagaactctg

SEQ ID NO: 266013 - DNA, 15 bp, Homo sapiens
ggaatcaagaactct

SEQ ID NO: 266014 - DNA, 15 bp, Homo sapiens
tggaatcaagaactc

SEQ ID NO: 266015 - DNA, 15 bp, Homo sapiens
gtggaatcaagaact

SEQ ID NO: 266016 - DNA, 15 bp, Homo sapiens
agtggaatcaagaac

SEQ ID NO: 266017 - DNA, 15 bp, Homo sapiens
cagtggaatcaagaa

SEQ ID NO: 266018 - DNA, 15 bp, Homo sapiens
gcagtggaatcaaga

SEQ ID NO: 266019 - DNA, 15 bp, Homo sapiens
tgcagtggaatcaag

SEQ ID NO: 266020 - DNA, 15 bp, Homo sapiens
atgcagtggaatcaa

SEQ ID NO: 266021 - DNA, 15 bp, Homo sapiens
catgcagtggaatca

SEQ ID NO: 266022 - DNA, 15 bp, Homo sapiens
acatgcagtggaatc

SEQ ID NO: 266023 - DNA, 15 bp, Homo sapiens
aacatgcagtggaat

SEQ ID NO: 266024 - DNA, 15 bp, Homo sapiens
taacatgcagtggaa

SEQ ID NO: 266025 - DNA, 15 bp, Homo sapiens
gtaacatgcagtgga

SEQ ID NO: 266026 - DNA, 15 bp, Homo sapiens
tgtaacatgcagtgg

SEQ ID NO: 266027 - DNA, 15 bp, Homo sapiens
ttgtaacatgcagtg

SEQ ID NO: 266028 - DNA, 15 bp, Homo sapiens
gttgtaacatgcagt

SEQ ID NO: 266029 - DNA, 15 bp, Homo sapiens
ggttgtaacatgcag

SEQ ID NO: 266030 - DNA, 15 bp, Homo sapiens
tggttgtaacatgca

SEQ ID NO: 266031 - DNA, 15 bp, Homo sapiens
atggttgtaacatgc

SEQ ID NO: 266032 - DNA, 15 bp, Homo sapiens
gatggttgtaacatg

SEQ ID NO: 266033 - DNA, 15 bp, Homo sapiens
agatggttgtaacat

SEQ ID NO: 266034 - DNA, 15 bp, Homo sapiens
cagatggttgtaaca

SEQ ID NO: 266035 - DNA, 15 bp, Homo sapiens
ccagatggttgtaac

SEQ ID NO: 266036 - DNA, 15 bp, Homo sapiens
cccagatggttgtaa

SEQ ID NO: 266037 - DNA, 15 bp, Homo sapiens
ccccagatggttgta

SEQ ID NO: 266038 - DNA, 15 bp, Homo sapiens
tccccagatggttgt

SEQ ID NO: 266039 - DNA, 15 bp, Homo sapiens
ctccccagatggttg

SEQ ID NO: 266040 - DNA, 15 bp, Homo sapiens
gctccccagatggtt

SEQ ID NO: 266041 - DNA, 15 bp, Homo sapiens
agctccccagatggt

SEQ ID NO: 266042 - DNA, 15 bp, Homo sapiens
aagctccccagatgg

SEQ ID NO: 266043 - DNA, 15 bp, Homo sapiens
aaagctccccagatg

SEQ ID NO: 266044 - DNA, 15 bp, Homo sapiens
aaaagctccccagat

SEQ ID NO: 266045 - DNA, 15 bp, Homo sapiens
taaaagctccccaga

SEQ ID NO: 266046 - DNA, 15 bp, Homo sapiens
ttaaaagctccccag

SEQ ID NO: 266047 - DNA, 15 bp, Homo sapiens
tttaaaagctcccca

SEQ ID NO: 266048 - DNA, 15 bp, Homo sapiens
ttttaaaagctcccc

SEQ ID NO: 266049 - DNA, 15 bp, Homo sapiens
tttttaaaagctccc

SEQ ID NO: 266050 - DNA, 15 bp, Homo sapiens
atttttaaaagctcc

SEQ ID NO: 266051 - DNA, 15 bp, Homo sapiens
catttttaaaagctc

SEQ ID NO: 266052 - DNA, 15 bp, Homo sapiens
gcatttttaaaagct

SEQ ID NO: 266053 - DNA, 15 bp, Homo sapiens
agcatttttaaaagc

SEQ ID NO: 266054 - DNA, 15 bp, Homo sapiens
cagcatttttaaaag

SEQ ID NO: 266055 - DNA, 15 bp, Homo sapiens
tcagcatttttaaaa

SEQ ID NO: 266056 - DNA, 15 bp, Homo sapiens
atcagcatttttaaa

SEQ ID NO: 266057 - DNA, 15 bp, Homo sapiens
catcagcatttttaa

SEQ ID NO: 266058 - DNA, 15 bp, Homo sapiens
gcatcagcattttta

SEQ ID NO: 266059 - DNA, 15 bp, Homo sapiens
ggcatcagcattttt

SEQ ID NO: 266060 - DNA, 15 bp, Homo sapiens
gggcatcagcatttt

SEQ ID NO: 266061 - DNA, 15 bp, Homo sapiens
cgggcatcagcattt

SEQ ID NO: 266062 - DNA, 15 bp, Homo sapiens
ccgggcatcagcatt

SEQ ID NO: 266063 - DNA, 15 bp, Homo sapiens
cccgggcatcagcat

SEQ ID NO: 266064 - DNA, 15 bp, Homo sapiens
gcccgggcatcagca

SEQ ID NO: 266065 - DNA, 15 bp, Homo sapiens
ggcccgggcatcagc

SEQ ID NO: 266066 - DNA, 15 bp, Homo sapiens
aggcccgggcatcag

SEQ ID NO: 266067 - DNA, 15 bp, Homo sapiens
gaggcccgggcatca

SEQ ID NO: 266068 - DNA, 15 bp, Homo sapiens
tgaggcccgggcatc

SEQ ID NO: 266069 - DNA, 15 bp, Homo sapiens
gtgaggcccgggcat

SEQ ID NO: 266070 - DNA, 15 bp, Homo sapiens
agtgaggcccgggca

SEQ ID NO: 266071 - DNA, 15 bp, Homo sapiens
aagtgaggcccgggc

SEQ ID NO: 266072 - DNA, 15 bp, Homo sapiens
gaagtgaggcccggg

SEQ ID NO: 266073 - DNA, 15 bp, Homo sapiens
ggaagtgaggcccgg

SEQ ID NO: 266074 - DNA, 15 bp, Homo sapiens
tggaagtgaggcccg

SEQ ID NO: 266075 - DNA, 15 bp, Homo sapiens
atggaagtgaggccc

SEQ ID NO: 266076 - DNA, 15 bp, Homo sapiens
aatggaagtgaggcc

SEQ ID NO: 266077 - DNA, 15 bp, Homo sapiens
taatggaagtgaggc

SEQ ID NO: 266078 - DNA, 15 bp, Homo sapiens
ttaatggaagtgagg

SEQ ID NO: 266079 - DNA, 15 bp, Homo sapiens
attaatggaagtgag

SEQ ID NO: 266080 - DNA, 15 bp, Homo sapiens
cattaatggaagtga

SEQ ID NO: 266081 - DNA, 15 bp, Homo sapiens
ccattaatggaagtg

SEQ ID NO: 266082 - DNA, 15 bp, Homo sapiens
tccattaatggaagt

SEQ ID NO: 266083 - DNA, 15 bp, Homo sapiens
ttccattaatggaag

SEQ ID NO: 266084 - DNA, 15 bp, Homo sapiens
attccattaatggaa

SEQ ID NO: 266085 - DNA, 15 bp, Homo sapiens
gattccattaatgga

SEQ ID NO: 266086 - DNA, 15 bp, Homo sapiens
tgattccattaatgg

SEQ ID NO: 266087 - DNA, 15 bp, Homo sapiens
ctgattccattaatg

SEQ ID NO: 266088 - DNA, 15 bp, Homo sapiens
tctgattccattaat

SEQ ID NO: 266089 - DNA, 15 bp, Homo sapiens
ttctgattccattaa

SEQ ID NO: 266090 - DNA, 15 bp, Homo sapiens
gttctgattccatta

SEQ ID NO: 266091 - DNA, 15 bp, Homo sapiens
ggttctgattccatt

SEQ ID NO: 266092 - DNA, 15 bp, Homo sapiens
aggttctgattccat

SEQ ID NO: 266093 - DNA, 15 bp, Homo sapiens
caggttctgattcca

SEQ ID NO: 266094 - DNA, 15 bp, Homo sapiens
acaggttctgattcc

SEQ ID NO: 266095 - DNA, 15 bp, Homo sapiens
cacaggttctgattc

SEQ ID NO: 266096 - DNA, 15 bp, Homo sapiens
ccacaggttctgatt

SEQ ID NO: 266097 - DNA, 15 bp, Homo sapiens
cccacaggttctgat

SEQ ID NO: 266098 - DNA, 15 bp, Homo sapiens
ccccacaggttctga

SEQ ID NO: 266099 - DNA, 15 bp, Homo sapiens
gccccacaggttctg

SEQ ID NO: 266100 - DNA, 15 bp, Homo sapiens
ggccccacaggttct

SEQ ID NO: 266101 - DNA, 15 bp, Homo sapiens
tggccccacaggttc

SEQ ID NO: 266102 - DNA, 15 bp, Homo sapiens
ctggccccacaggtt

SEQ ID NO: 266103 - DNA, 15 bp, Homo sapiens
gctggccccacaggt

SEQ ID NO: 266104 - DNA, 15 bp, Homo sapiens
cgctggccccacagg

SEQ ID NO: 266105 - DNA, 15 bp, Homo sapiens
tcgctggccccacag

SEQ ID NO: 266106 - DNA, 15 bp, Homo sapiens
ctcgctggccccaca

SEQ ID NO: 266107 - DNA, 15 bp, Homo sapiens
actcgctggccccac

SEQ ID NO: 266108 - DNA, 15 bp, Homo sapiens
cactcgctggcccca

SEQ ID NO: 266109 - DNA, 15 bp, Homo sapiens
gcactcgctggcccc

SEQ ID NO: 266110 - DNA, 15 bp, Homo sapiens
ggcactcgctggccc

SEQ ID NO: 266111 - DNA, 15 bp, Homo sapiens
gggcactcgctggcc

SEQ ID NO: 266112 - DNA, 15 bp, Homo sapiens
agggcactcgctggc

SEQ ID NO: 266113 - DNA, 15 bp, Homo sapiens
tagggcactcgctgg

SEQ ID NO: 266114 - DNA, 15 bp, Homo sapiens
ctagggcactcgctg

SEQ ID NO: 266115 - DNA, 15 bp, Homo sapiens
cctagggcactcgct

SEQ ID NO: 266116 - DNA, 15 bp, Homo sapiens
tcctagggcactcgc

SEQ ID NO: 266117 - DNA, 15 bp, Homo sapiens
atcctagggcactcg

SEQ ID NO: 266118 - DNA, 15 bp, Homo sapiens
aatcctagggcactc

SEQ ID NO: 266119 - DNA, 15 bp, Homo sapiens
aaatcctagggcact

SEQ ID NO: 266120 - DNA, 15 bp, Homo sapiens
gaaatcctagggcac

SEQ ID NO: 266121 - DNA, 15 bp, Homo sapiens
agaaatcctagggca

SEQ ID NO: 266122 - DNA, 15 bp, Homo sapiens
cagaaatcctagggc

SEQ ID NO: 266123 - DNA, 15 bp, Homo sapiens
acagaaatcctaggg

SEQ ID NO: 266124 - DNA, 15 bp, Homo sapiens
cacagaaatcctagg

SEQ ID NO: 266125 - DNA, 15 bp, Homo sapiens
tcacagaaatcctag

SEQ ID NO: 266126 - DNA, 15 bp, Homo sapiens
ctcacagaaatccta

SEQ ID NO: 266127 - DNA, 15 bp, Homo sapiens
gctcacagaaatcct

SEQ ID NO: 266128 - DNA, 15 bp, Homo sapiens
tgctcacagaaatcc

SEQ ID NO: 266129 - DNA, 15 bp, Homo sapiens
ctgctcacagaaatc

SEQ ID NO: 266130 - DNA, 15 bp, Homo sapiens
gctgctcacagaaat

SEQ ID NO: 266131 - DNA, 15 bp, Homo sapiens
agctgctcacagaaa

SEQ ID NO: 266132 - DNA, 15 bp, Homo sapiens
gagctgctcacagaa

SEQ ID NO: 266133 - DNA, 15 bp, Homo sapiens
cgagctgctcacaga

SEQ ID NO: 266134 - DNA, 15 bp, Homo sapiens
ccgagctgctcacag

SEQ ID NO: 266135 - DNA, 15 bp, Homo sapiens
cccgagctgctcaca

SEQ ID NO: 266136 - DNA, 15 bp, Homo sapiens
gcccgagctgctcac

SEQ ID NO: 266137 - DNA, 15 bp, Homo sapiens
agcccgagctgctca

SEQ ID NO: 266138 - DNA, 15 bp, Homo sapiens
gagcccgagctgctc

SEQ ID NO: 266139 - DNA, 15 bp, Homo sapiens
tgagcccgagctgct

SEQ ID NO: 266140 - DNA, 15 bp, Homo sapiens
ctgagcccgagctgc

SEQ ID NO: 266141 - DNA, 15 bp, Homo sapiens
tctgagcccgagctg

SEQ ID NO: 266142 - DNA, 15 bp, Homo sapiens
ttctgagcccgagct

SEQ ID NO: 266143 - DNA, 15 bp, Homo sapiens
gttctgagcccgagc

SEQ ID NO: 266144 - DNA, 15 bp, Homo sapiens
ggttctgagcccgag

SEQ ID NO: 266145 - DNA, 15 bp, Homo sapiens
tggttctgagcccga

SEQ ID NO: 266146 - DNA, 15 bp, Homo sapiens
gtggttctgagcccg

SEQ ID NO: 266147 - DNA, 15 bp, Homo sapiens
agtggttctgagccc

SEQ ID NO: 266148 - DNA, 15 bp, Homo sapiens
aagtggttctgagcc

SEQ ID NO: 266149 - DNA, 15 bp, Homo sapiens
caagtggttctgagc

SEQ ID NO: 266150 - DNA, 15 bp, Homo sapiens
acaagtggttctgag

SEQ ID NO: 266151 - DNA, 15 bp, Homo sapiens
aacaagtggttctga

SEQ ID NO: 266152 - DNA, 15 bp, Homo sapiens
caacaagtggttctg

SEQ ID NO: 266153 - DNA, 15 bp, Homo sapiens
ccaacaagtggttct

SEQ ID NO: 266154 - DNA, 15 bp, Homo sapiens
tccaacaagtggttc

SEQ ID NO: 266155 - DNA, 15 bp, Homo sapiens
atccaacaagtggtt

SEQ ID NO: 266156 - DNA, 15 bp, Homo sapiens
catccaacaagtggt

SEQ ID NO: 266157 - DNA, 15 bp, Homo sapiens
gcatccaacaagtgg

SEQ ID NO: 266158 - DNA, 15 bp, Homo sapiens
agcatccaacaagtg

SEQ ID NO: 266159 - DNA, 15 bp, Homo sapiens
gagcatccaacaagt

SEQ ID NO: 266160 - DNA, 15 bp, Homo sapiens
ggagcatccaacaag

SEQ ID NO: 266161 - DNA, 15 bp, Homo sapiens
gggagcatccaacaa

SEQ ID NO: 266162 - DNA, 15 bp, Homo sapiens
agggagcatccaaca

SEQ ID NO: 266163 - DNA, 15 bp, Homo sapiens
tagggagcatccaac

SEQ ID NO: 266164 - DNA, 15 bp, Homo sapiens
ttagggagcatccaa

SEQ ID NO: 266165 - DNA, 15 bp, Homo sapiens
cttagggagcatcca

SEQ ID NO: 266166 - DNA, 15 bp, Homo sapiens
ccttagggagcatcc

SEQ ID NO: 266167 - DNA, 15 bp, Homo sapiens
tccttagggagcatc

SEQ ID NO: 266168 - DNA, 15 bp, Homo sapiens
atccttagggagcat

SEQ ID NO: 266169 - DNA, 15 bp, Homo sapiens
gatccttagggagca

SEQ ID NO: 266170 - DNA, 15 bp, Homo sapiens
agatccttagggagc

SEQ ID NO: 266171 - DNA, 15 bp, Homo sapiens
cagatccttagggag

SEQ ID NO: 266172 - DNA, 15 bp, Homo sapiens
ccagatccttaggga

SEQ ID NO: 266173 - DNA, 15 bp, Homo sapiens
gccagatccttaggg

SEQ ID NO: 266174 - DNA, 15 bp, Homo sapiens
tgccagatccttagg

SEQ ID NO: 266175 - DNA, 15 bp, Homo sapiens
ttgccagatccttag

SEQ ID NO: 266176 - DNA, 15 bp, Homo sapiens
cttgccagatcctta

SEQ ID NO: 266177 - DNA, 15 bp, Homo sapiens
ccttgccagatcctt

SEQ ID NO: 266178 - DNA, 15 bp, Homo sapiens
tccttgccagatcct

SEQ ID NO: 266179 - DNA, 15 bp, Homo sapiens
atccttgccagatcc

SEQ ID NO: 266180 - DNA, 15 bp, Homo sapiens
aatccttgccagatc

SEQ ID NO: 266181 - DNA, 15 bp, Homo sapiens
aaatccttgccagat

SEQ ID NO: 266182 - DNA, 15 bp, Homo sapiens
aaaatccttgccaga

SEQ ID NO: 266183 - DNA, 15 bp, Homo sapiens
taaaatccttgccag

SEQ ID NO: 266184 - DNA, 15 bp, Homo sapiens
ataaaatccttgcca

SEQ ID NO: 266185 - DNA, 15 bp, Homo sapiens
cataaaatccttgcc

SEQ ID NO: 266186 - DNA, 15 bp, Homo sapiens
tcataaaatccttgc

SEQ ID NO: 266187 - DNA, 15 bp, Homo sapiens
ctcataaaatccttg

SEQ ID NO: 266188 - DNA, 15 bp, Homo sapiens
actcataaaatcctt

SEQ ID NO: 266189 - DNA, 15 bp, Homo sapiens
aactcataaaatcct

SEQ ID NO: 266190 - DNA, 15 bp, Homo sapiens
aaactcataaaatcc

SEQ ID NO: 266191 - DNA, 15 bp, Homo sapiens
taaactcataaaatc

SEQ ID NO: 266192 - DNA, 15 bp, Homo sapiens
ctaaactcataaaat

SEQ ID NO: 266193 - DNA, 15 bp, Homo sapiens
cctaaactcataaaa

SEQ ID NO: 266194 - DNA, 15 bp, Homo sapiens
acctaaactcataaa

SEQ ID NO: 266195 - DNA, 15 bp, Homo sapiens
aacctaaactcataa

SEQ ID NO: 266196 - DNA, 15 bp, Homo sapiens
aaacctaaactcata

SEQ ID NO: 266197 - DNA, 15 bp, Homo sapiens
caaacctaaactcat

SEQ ID NO: 266198 - DNA, 15 bp, Homo sapiens
tcaaacctaaactca

SEQ ID NO: 266199 - DNA, 15 bp, Homo sapiens
ctcaaacctaaactc

SEQ ID NO: 266200 - DNA, 15 bp, Homo sapiens
tctcaaacctaaact

SEQ ID NO: 266201 - DNA, 15 bp, Homo sapiens
ctctcaaacctaaac

SEQ ID NO: 266202 - DNA, 15 bp, Homo sapiens
gctctcaaacctaaa

SEQ ID NO: 266203 - DNA, 15 bp, Homo sapiens
tgctctcaaacctaa

SEQ ID NO: 266204 - DNA, 15 bp, Homo sapiens
gtgctctcaaaccta

SEQ ID NO: 266205 - DNA, 15 bp, Homo sapiens
ggtgctctcaaacct

SEQ ID NO: 266206 - DNA, 15 bp, Homo sapiens
aggtgctctcaaacc

SEQ ID NO: 266207 - DNA, 15 bp, Homo sapiens
caggtgctctcaaac

SEQ ID NO: 266208 - DNA, 15 bp, Homo sapiens
tcaggtgctctcaaa

SEQ ID NO: 266209 - DNA, 15 bp, Homo sapiens
ttcaggtgctctcaa

SEQ ID NO: 266210 - DNA, 15 bp, Homo sapiens
cttcaggtgctctca

SEQ ID NO: 266211 - DNA, 15 bp, Homo sapiens
ccttcaggtgctctc

SEQ ID NO: 266212 - DNA, 15 bp, Homo sapiens
tccttcaggtgctct

SEQ ID NO: 266213 - DNA, 15 bp, Homo sapiens
ctccttcaggtgctc

SEQ ID NO: 266214 - DNA, 15 bp, Homo sapiens
actccttcaggtgct

SEQ ID NO: 266215 - DNA, 15 bp, Homo sapiens
gactccttcaggtgc

SEQ ID NO: 266216 - DNA, 15 bp, Homo sapiens
ggactccttcaggtg

SEQ ID NO: 266217 - DNA, 15 bp, Homo sapiens
tggactccttcaggt

SEQ ID NO: 266218 - DNA, 15 bp, Homo sapiens
ctggactccttcagg

SEQ ID NO: 266219 - DNA, 15 bp, Homo sapiens
tctggactccttcag

SEQ ID NO: 266220 - DNA, 15 bp, Homo sapiens
ctctggactccttca

SEQ ID NO: 266221 - DNA, 15 bp, Homo sapiens
cctctggactccttc

SEQ ID NO: 266222 - DNA, 15 bp, Homo sapiens
ccctctggactcctt

SEQ ID NO: 266223 - DNA, 15 bp, Homo sapiens
cccctctggactcct

SEQ ID NO: 266224 - DNA, 15 bp, Homo sapiens
gcccctctggactcc

SEQ ID NO: 266225 - DNA, 15 bp, Homo sapiens
agcccctctggactc

SEQ ID NO: 266226 - DNA, 15 bp, Homo sapiens
cagcccctctggact

SEQ ID NO: 266227 - DNA, 15 bp, Homo sapiens
ccagcccctctggac

SEQ ID NO: 266228 - DNA, 15 bp, Homo sapiens
tccagcccctctgga

SEQ ID NO: 266229 - DNA, 15 bp, Homo sapiens
ctccagcccctctgg

SEQ ID NO: 266230 - DNA, 15 bp, Homo sapiens
tctccagcccctctg

SEQ ID NO: 266231 - DNA, 15 bp, Homo sapiens
ttctccagcccctct

SEQ ID NO: 266232 - DNA, 15 bp, Homo sapiens
cttctccagcccctc

SEQ ID NO: 266233 - DNA, 15 bp, Homo sapiens
tcttctccagcccct

SEQ ID NO: 266234 - DNA, 15 bp, Homo sapiens
ttcttctccagcccc

SEQ ID NO: 266235 - DNA, 15 bp, Homo sapiens
tttcttctccagccc

SEQ ID NO: 266236 - DNA, 15 bp, Homo sapiens
ctttcttctccagcc

SEQ ID NO: 266237 - DNA, 15 bp, Homo sapiens
cctttcttctccagc

SEQ ID NO: 266238 - DNA, 15 bp, Homo sapiens
tcctttcttctccag

SEQ ID NO: 266239 - DNA, 15 bp, Homo sapiens
ctcctttcttctcca

SEQ ID NO: 266240 - DNA, 15 bp, Homo sapiens
tctcctttcttctcc

SEQ ID NO: 266241 - DNA, 15 bp, Homo sapiens
atctcctttcttctc

SEQ ID NO: 266242 - DNA, 15 bp, Homo sapiens
catctcctttcttct

SEQ ID NO: 266243 - DNA, 15 bp, Homo sapiens
ccatctcctttcttc

SEQ ID NO: 266244 - DNA, 15 bp, Homo sapiens
accatctcctttctt

SEQ ID NO: 266245 - DNA, 15 bp, Homo sapiens
caccatctcctttct

SEQ ID NO: 266246 - DNA, 15 bp, Homo sapiens
ccaccatctcctttc

SEQ ID NO: 266247 - DNA, 15 bp, Homo sapiens
gccaccatctccttt

SEQ ID NO: 266248 - DNA, 15 bp, Homo sapiens
agccaccatctcctt

SEQ ID NO: 266249 - DNA, 15 bp, Homo sapiens
aagccaccatctcct

SEQ ID NO: 266250 - DNA, 15 bp, Homo sapiens
caagccaccatctcc

SEQ ID NO: 266251 - DNA, 15 bp, Homo sapiens
ccaagccaccatctc

SEQ ID NO: 266252 - DNA, 15 bp, Homo sapiens
accaagccaccatct

SEQ ID NO: 266253 - DNA, 15 bp, Homo sapiens
taccaagccaccatc

SEQ ID NO: 266254 - DNA, 15 bp, Homo sapiens
ctaccaagccaccat

SEQ ID NO: 266255 - DNA, 15 bp, Homo sapiens
cctaccaagccacca

SEQ ID NO: 266256 - DNA, 15 bp, Homo sapiens
gcctaccaagccacc

SEQ ID NO: 266257 - DNA, 15 bp, Homo sapiens
tgcctaccaagccac

SEQ ID NO: 266258 - DNA, 15 bp, Homo sapiens
gtgcctaccaagcca

SEQ ID NO: 266259 - DNA, 15 bp, Homo sapiens
ggtgcctaccaagcc

SEQ ID NO: 266260 - DNA, 15 bp, Homo sapiens
aggtgcctaccaagc

SEQ ID NO: 266261 - DNA, 15 bp, Homo sapiens
taggtgcctaccaag

SEQ ID NO: 266262 - DNA, 15 bp, Homo sapiens
gtaggtgcctaccaa

SEQ ID NO: 266263 - DNA, 15 bp, Homo sapiens
tgtaggtgcctacca

SEQ ID NO: 266264 - DNA, 15 bp, Homo sapiens
atgtaggtgcctacc

SEQ ID NO: 266265 - DNA, 15 bp, Homo sapiens
gatgtaggtgcctac

SEQ ID NO: 266266 - DNA, 15 bp, Homo sapiens
ggatgtaggtgccta

SEQ ID NO: 266267 - DNA, 15 bp, Homo sapiens
gggatgtaggtgcct

SEQ ID NO: 266268 - DNA, 15 bp, Homo sapiens
ggggatgtaggtgcc

SEQ ID NO: 266269 - DNA, 15 bp, Homo sapiens
tggggatgtaggtgc

SEQ ID NO: 266270 - DNA, 15 bp, Homo sapiens
ctggggatgtaggtg

SEQ ID NO: 266271 - DNA, 15 bp, Homo sapiens
cctggggatgtaggt

SEQ ID NO: 266272 - DNA, 15 bp, Homo sapiens
ccctggggatgtagg

SEQ ID NO: 266273 - DNA, 15 bp, Homo sapiens
cccctggggatgtag

SEQ ID NO: 266274 - DNA, 15 bp, Homo sapiens
acccctggggatgta

SEQ ID NO: 266275 - DNA, 15 bp, Homo sapiens
cacccctggggatgt

SEQ ID NO: 266276 - DNA, 15 bp, Homo sapiens
gcacccctggggatg

SEQ ID NO: 266277 - DNA, 15 bp, Homo sapiens
agcacccctggggat

SEQ ID NO: 266278 - DNA, 15 bp, Homo sapiens
cagcacccctgggga

SEQ ID NO: 266279 - DNA, 15 bp, Homo sapiens
ccagcacccctgggg

SEQ ID NO: 266280 - DNA, 15 bp, Homo sapiens
accagcacccctggg

SEQ ID NO: 266281 - DNA, 15 bp, Homo sapiens
taccagcacccctgg

SEQ ID NO: 266282 - DNA, 15 bp, Homo sapiens
ctaccagcacccctg

SEQ ID NO: 266283 - DNA, 15 bp, Homo sapiens
tctaccagcacccct

SEQ ID NO: 266284 - DNA, 15 bp, Homo sapiens
ctctaccagcacccc

SEQ ID NO: 266285 - DNA, 15 bp, Homo sapiens
tctctaccagcaccc

SEQ ID NO: 266286 - DNA, 15 bp, Homo sapiens
gtctctaccagcacc

SEQ ID NO: 266287 - DNA, 15 bp, Homo sapiens
agtctctaccagcac

SEQ ID NO: 266288 - DNA, 15 bp, Homo sapiens
tagtctctaccagca

SEQ ID NO: 266289 - DNA, 15 bp, Homo sapiens
atagtctctaccagc

SEQ ID NO: 266290 - DNA, 15 bp, Homo sapiens
catagtctctaccag

SEQ ID NO: 266291 - DNA, 15 bp, Homo sapiens
gcatagtctctacca

SEQ ID NO: 266292 - DNA, 15 bp, Homo sapiens
agcatagtctctacc

SEQ ID NO: 266293 - DNA, 15 bp, Homo sapiens
cagcatagtctctac

SEQ ID NO: 266294 - DNA, 15 bp, Homo sapiens
gcagcatagtctcta

SEQ ID NO: 266295 - DNA, 15 bp, Homo sapiens
tgcagcatagtctct

SEQ ID NO: 266296 - DNA, 15 bp, Homo sapiens
ttgcagcatagtctc

SEQ ID NO: 266297 - DNA, 15 bp, Homo sapiens
tttgcagcatagtct

SEQ ID NO: 266298 - DNA, 15 bp, Homo sapiens
ttttgcagcatagtc

SEQ ID NO: 266299 - DNA, 15 bp, Homo sapiens
attttgcagcatagt

SEQ ID NO: 266300 - DNA, 15 bp, Homo sapiens
aattttgcagcatag

SEQ ID NO: 266301 - DNA, 15 bp, Homo sapiens
taattttgcagcata

SEQ ID NO: 266302 - DNA, 15 bp, Homo sapiens
gtaattttgcagcat

SEQ ID NO: 266303 - DNA, 15 bp, Homo sapiens
ggtaattttgcagca

SEQ ID NO: 266304 - DNA, 15 bp, Homo sapiens
gggtaattttgcagc

SEQ ID NO: 266305 - DNA, 15 bp, Homo sapiens
tgggtaattttgcag

SEQ ID NO: 266306 - DNA, 15 bp, Homo sapiens
ctgggtaattttgca

SEQ ID NO: 266307 - DNA, 15 bp, Homo sapiens
cctgggtaattttgc

SEQ ID NO: 266308 - DNA, 15 bp, Homo sapiens
tcctgggtaattttg

SEQ ID NO: 266309 - DNA, 15 bp, Homo sapiens
ttcctgggtaatttt

SEQ ID NO: 266310 - DNA, 15 bp, Homo sapiens
cttcctgggtaattt

SEQ ID NO: 266311 - DNA, 15 bp, Homo sapiens
tcttcctgggtaatt

SEQ ID NO: 266312 - DNA, 15 bp, Homo sapiens
ttcttcctgggtaat

SEQ ID NO: 266313 - DNA, 15 bp, Homo sapiens
cttcttcctgggtaa

SEQ ID NO: 266314 - DNA, 15 bp, Homo sapiens
acttcttcctgggta

SEQ ID NO: 266315 - DNA, 15 bp, Homo sapiens
cacttcttcctgggt

SEQ ID NO: 266316 - DNA, 15 bp, Homo sapiens
tcacttcttcctggg

SEQ ID NO: 266317 - DNA, 15 bp, Homo sapiens
ctcacttcttcctgg

SEQ ID NO: 266318 - DNA, 15 bp, Homo sapiens
actcacttcttcctg

SEQ ID NO: 266319 - DNA, 15 bp, Homo sapiens
gactcacttcttcct

SEQ ID NO: 266320 - DNA, 15 bp, Homo sapiens
agactcacttcttcc

SEQ ID NO: 266321 - DNA, 15 bp, Homo sapiens
aagactcacttcttc

SEQ ID NO: 266322 - DNA, 15 bp, Homo sapiens
aaagactcacttctt

SEQ ID NO: 266323 - DNA, 15 bp, Homo sapiens
taaagactcacttct

SEQ ID NO: 266324 - DNA, 15 bp, Homo sapiens
ttaaagactcacttc

SEQ ID NO: 266325 - DNA, 15 bp, Homo sapiens
gttaaagactcactt

SEQ ID NO: 266326 - DNA, 15 bp, Homo sapiens
tgttaaagactcact

SEQ ID NO: 266327 - DNA, 15 bp, Homo sapiens
atgttaaagactcac

SEQ ID NO: 266328 - DNA, 15 bp, Homo sapiens
aatgttaaagactca

SEQ ID NO: 266329 - DNA, 15 bp, Homo sapiens
caatgttaaagactc

SEQ ID NO: 266330 - DNA, 15 bp, Homo sapiens
gcaatgttaaagact

SEQ ID NO: 266331 - DNA, 15 bp, Homo sapiens
tgcaatgttaaagac

SEQ ID NO: 266332 - DNA, 15 bp, Homo sapiens
ctgcaatgttaaaga

SEQ ID NO: 266333 - DNA, 15 bp, Homo sapiens
gctgcaatgttaaag

SEQ ID NO: 266334 - DNA, 15 bp, Homo sapiens
ggctgcaatgttaaa

SEQ ID NO: 266335 - DNA, 15 bp, Homo sapiens
tggctgcaatgttaa

SEQ ID NO: 266336 - DNA, 15 bp, Homo sapiens
atggctgcaatgtta

SEQ ID NO: 266337 - DNA, 15 bp, Homo sapiens
aatggctgcaatgtt

SEQ ID NO: 266338 - DNA, 15 bp, Homo sapiens
taatggctgcaatgt

SEQ ID NO: 266339 - DNA, 15 bp, Homo sapiens
gtaatggctgcaatg

SEQ ID NO: 266340 - DNA, 15 bp, Homo sapiens
agtaatggctgcaat

SEQ ID NO: 266341 - DNA, 15 bp, Homo sapiens
tagtaatggctgcaa

SEQ ID NO: 266342 - DNA, 15 bp, Homo sapiens
atagtaatggctgca

SEQ ID NO: 266343 - DNA, 15 bp, Homo sapiens
catagtaatggctgc

SEQ ID NO: 266344 - DNA, 15 bp, Homo sapiens
gcatagtaatggctg

SEQ ID NO: 266345 - DNA, 15 bp, Homo sapiens
tgcatagtaatggct

SEQ ID NO: 266346 - DNA, 15 bp, Homo sapiens
atgcatagtaatggc

SEQ ID NO: 266347 - DNA, 15 bp, Homo sapiens
catgcatagtaatgg

SEQ ID NO: 266348 - DNA, 15 bp, Homo sapiens
tcatgcatagtaatg

SEQ ID NO: 266349 - DNA, 15 bp, Homo sapiens
ttcatgcatagtaat

SEQ ID NO: 266350 - DNA, 15 bp, Homo sapiens
tttcatgcatagtaa

SEQ ID NO: 266351 - DNA, 15 bp, Homo sapiens
atttcatgcatagta

SEQ ID NO: 266352 - DNA, 15 bp, Homo sapiens
catttcatgcatagt

SEQ ID NO: 266353 - DNA, 15 bp, Homo sapiens
ccatttcatgcatag

SEQ ID NO: 266354 - DNA, 15 bp, Homo sapiens
accatttcatgcata

SEQ ID NO: 266355 - DNA, 15 bp, Homo sapiens
taccatttcatgcat

SEQ ID NO: 266356 - DNA, 15 bp, Homo sapiens
ttaccatttcatgca

SEQ ID NO: 266357 - DNA, 15 bp, Homo sapiens
attaccatttcatgc

SEQ ID NO: 266358 - DNA, 15 bp, Homo sapiens
aattaccatttcatg

SEQ ID NO: 266359 - DNA, 15 bp, Homo sapiens
taattaccatttcat

SEQ ID NO: 266360 - DNA, 15 bp, Homo sapiens
ttaattaccatttca

SEQ ID NO: 266361 - DNA, 15 bp, Homo sapiens
tttaattaccatttc

SEQ ID NO: 266362 - DNA, 15 bp, Homo sapiens
ttttaattaccattt

SEQ ID NO: 266363 - DNA, 15 bp, Homo sapiens
cttttaattaccatt

SEQ ID NO: 266364 - DNA, 15 bp, Homo sapiens
tcttttaattaccat

SEQ ID NO: 266365 - DNA, 15 bp, Homo sapiens
gtcttttaattacca

SEQ ID NO: 266366 - DNA, 15 bp, Homo sapiens
ggtcttttaattacc

SEQ ID NO: 266367 - DNA, 15 bp, Homo sapiens
tggtcttttaattac

SEQ ID NO: 266368 - DNA, 15 bp, Homo sapiens
atggtcttttaatta

SEQ ID NO: 266369 - DNA, 15 bp, Homo sapiens
tatggtcttttaatt

SEQ ID NO: 266370 - DNA, 15 bp, Homo sapiens
atatggtcttttaat

SEQ ID NO: 266371 - DNA, 15 bp, Homo sapiens
aatatggtcttttaa

SEQ ID NO: 266372 - DNA, 15 bp, Homo sapiens
aaatatggtctttta

SEQ ID NO: 266373 - DNA, 15 bp, Homo sapiens
aaaatatggtctttt

SEQ ID NO: 266374 - DNA, 15 bp, Homo sapiens
gaaaatatggtcttt

SEQ ID NO: 266375 - DNA, 15 bp, Homo sapiens
agaaaatatggtctt

SEQ ID NO: 266376 - DNA, 15 bp, Homo sapiens
aagaaaatatggtct

SEQ ID NO: 266377 - DNA, 15 bp, Homo sapiens
taagaaaatatggtc

SEQ ID NO: 266378 - DNA, 15 bp, Homo sapiens
ttaagaaaatatggt

SEQ ID NO: 266379 - DNA, 15 bp, Homo sapiens
gttaagaaaatatgg

SEQ ID NO: 266380 - DNA, 15 bp, Homo sapiens
agttaagaaaatatg

SEQ ID NO: 266381 - DNA, 15 bp, Homo sapiens
gagttaagaaaatat

SEQ ID NO: 266382 - DNA, 15 bp, Homo sapiens
tgagttaagaaaata

SEQ ID NO: 266383 - DNA, 15 bp, Homo sapiens
ttgagttaagaaaat

SEQ ID NO: 266384 - DNA, 15 bp, Homo sapiens
tttgagttaagaaaa

SEQ ID NO: 266385 - DNA, 15 bp, Homo sapiens
atttgagttaagaaa

SEQ ID NO: 266386 - DNA, 15 bp, Homo sapiens
tatttgagttaagaa

SEQ ID NO: 266387 - DNA, 15 bp, Homo sapiens
gtatttgagttaaga

SEQ ID NO: 266388 - DNA, 15 bp, Homo sapiens
cgtatttgagttaag

SEQ ID NO: 266389 - DNA, 15 bp, Homo sapiens
acgtatttgagttaa

SEQ ID NO: 266390 - DNA, 15 bp, Homo sapiens
aacgtatttgagtta

SEQ ID NO: 266391 - DNA, 15 bp, Homo sapiens
caacgtatttgagtt

SEQ ID NO: 266392 - DNA, 15 bp, Homo sapiens
tcaacgtatttgagt

SEQ ID NO: 266393 - DNA, 15 bp, Homo sapiens
atcaacgtatttgag

SEQ ID NO: 266394 - DNA, 15 bp, Homo sapiens
catcaacgtatttga

SEQ ID NO: 266395 - DNA, 15 bp, Homo sapiens
tcatcaacgtatttg

SEQ ID NO: 266396 - DNA, 15 bp, Homo sapiens
ctcatcaacgtattt

SEQ ID NO: 266397 - DNA, 15 bp, Homo sapiens
tctcatcaacgtatt

SEQ ID NO: 266398 - DNA, 15 bp, Homo sapiens
ttctcatcaacgtat

SEQ ID NO: 266399 - DNA, 15 bp, Homo sapiens
tttctcatcaacgta

SEQ ID NO: 266400 - DNA, 15 bp, Homo sapiens
ctttctcatcaacgt

SEQ ID NO: 266401 - DNA, 15 bp, Homo sapiens
tctttctcatcaacg

SEQ ID NO: 266402 - DNA, 15 bp, Homo sapiens
atctttctcatcaac

SEQ ID NO: 266403 - DNA, 15 bp, Homo sapiens
catctttctcatcaa

SEQ ID NO: 266404 - DNA, 15 bp, Homo sapiens
gcatctttctcatca

SEQ ID NO: 266405 - DNA, 15 bp, Homo sapiens
tgcatctttctcatc

SEQ ID NO: 266406 - DNA, 15 bp, Homo sapiens
gtgcatctttctcat

SEQ ID NO: 266407 - DNA, 15 bp, Homo sapiens
ggtgcatctttctca

SEQ ID NO: 266408 - DNA, 15 bp, Homo sapiens
tggtgcatctttctc

SEQ ID NO: 266409 - DNA, 15 bp, Homo sapiens
atggtgcatctttct

SEQ ID NO: 266410 - DNA, 15 bp, Homo sapiens
aatggtgcatctttc

SEQ ID NO: 266411 - DNA, 15 bp, Homo sapiens
caatggtgcatcttt

SEQ ID NO: 266412 - DNA, 15 bp, Homo sapiens
tcaatggtgcatctt

SEQ ID NO: 266413 - DNA, 15 bp, Homo sapiens
atcaatggtgcatct

SEQ ID NO: 266414 - DNA, 15 bp, Homo sapiens
aatcaatggtgcatc

SEQ ID NO: 266415 - DNA, 15 bp, Homo sapiens
aaatcaatggtgcat

SEQ ID NO: 266416 - DNA, 15 bp, Homo sapiens
taaatcaatggtgca

SEQ ID NO: 266417 - DNA, 15 bp, Homo sapiens
ttaaatcaatggtgc

SEQ ID NO: 266418 - DNA, 15 bp, Homo sapiens
attaaatcaatggtg

SEQ ID NO: 266419 - DNA, 15 bp, Homo sapiens
tattaaatcaatggt

SEQ ID NO: 266420 - DNA, 15 bp, Homo sapiens
gtattaaatcaatgg

SEQ ID NO: 266421 - DNA, 15 bp, Homo sapiens
ggtattaaatcaatg

SEQ ID NO: 266422 - DNA, 15 bp, Homo sapiens
aggtattaaatcaat

SEQ ID NO: 266423 - DNA, 15 bp, Homo sapiens
caggtattaaatcaa

SEQ ID NO: 266424 - DNA, 15 bp, Homo sapiens
gcaggtattaaatca

SEQ ID NO: 266425 - DNA, 15 bp, Homo sapiens
agcaggtattaaatc

SEQ ID NO: 266426 - DNA, 15 bp, Homo sapiens
cagcaggtattaaat

SEQ ID NO: 266427 - DNA, 15 bp, Homo sapiens
acagcaggtattaaa

SEQ ID NO: 266428 - DNA, 15 bp, Homo sapiens
aacagcaggtattaa

SEQ ID NO: 266429 - DNA, 15 bp, Homo sapiens
aaacagcaggtatta

SEQ ID NO: 266430 - DNA, 15 bp, Homo sapiens
aaaacagcaggtatt

SEQ ID NO: 266431 - DNA, 15 bp, Homo sapiens
caaaacagcaggtat

SEQ ID NO: 266432 - DNA, 15 bp, Homo sapiens
ccaaaacagcaggta

SEQ ID NO: 266433 - DNA, 15 bp, Homo sapiens
tccaaaacagcaggt

SEQ ID NO: 266434 - DNA, 15 bp, Homo sapiens
ctccaaaacagcagg

SEQ ID NO: 266435 - DNA, 15 bp, Homo sapiens
cctccaaaacagcag

SEQ ID NO: 266436 - DNA, 15 bp, Homo sapiens
tcctccaaaacagca

SEQ ID NO: 266437 - DNA, 15 bp, Homo sapiens
atcctccaaaacagc

SEQ ID NO: 266438 - DNA, 15 bp, Homo sapiens
catcctccaaaacag

SEQ ID NO: 266439 - DNA, 15 bp, Homo sapiens
gcatcctccaaaaca

SEQ ID NO: 266440 - DNA, 15 bp, Homo sapiens
cgcatcctccaaaac

SEQ ID NO: 266441 - DNA, 15 bp, Homo sapiens
ccgcatcctccaaaa

SEQ ID NO: 266442 - DNA, 15 bp, Homo sapiens
accgcatcctccaaa

SEQ ID NO: 266443 - DNA, 15 bp, Homo sapiens
caccgcatcctccaa

SEQ ID NO: 266444 - DNA, 15 bp, Homo sapiens
ccaccgcatcctcca

SEQ ID NO: 266445 - DNA, 15 bp, Homo sapiens
cccaccgcatcctcc

SEQ ID NO: 266446 - DNA, 15 bp, Homo sapiens
tcccaccgcatcctc

SEQ ID NO: 266447 - DNA, 15 bp, Homo sapiens
ctcccaccgcatcct

SEQ ID NO: 266448 - DNA, 15 bp, Homo sapiens
tctcccaccgcatcc

SEQ ID NO: 266449 - DNA, 15 bp, Homo sapiens
ttctcccaccgcatc

SEQ ID NO: 266450 - DNA, 15 bp, Homo sapiens
tttctcccaccgcat

SEQ ID NO: 266451 - DNA, 15 bp, Homo sapiens
ttttctcccaccgca

SEQ ID NO: 266452 - DNA, 15 bp, Homo sapiens
gttttctcccaccgc

SEQ ID NO: 266453 - DNA, 15 bp, Homo sapiens
agttttctcccaccg

SEQ ID NO: 266454 - DNA, 15 bp, Homo sapiens
gagttttctcccacc

SEQ ID NO: 266455 - DNA, 15 bp, Homo sapiens
agagttttctcccac

SEQ ID NO: 266456 - DNA, 15 bp, Homo sapiens
tagagttttctccca

SEQ ID NO: 266457 - DNA, 15 bp, Homo sapiens
atagagttttctccc

SEQ ID NO: 266458 - DNA, 15 bp, Homo sapiens
aatagagttttctcc

SEQ ID NO: 266459 - DNA, 15 bp, Homo sapiens
taatagagttttctc

SEQ ID NO: 266460 - DNA, 15 bp, Homo sapiens
ttaatagagttttct

SEQ ID NO: 266461 - DNA, 15 bp, Homo sapiens
cttaatagagttttc

SEQ ID NO: 266462 - DNA, 15 bp, Homo sapiens
acttaatagagtttt

SEQ ID NO: 266463 - DNA, 15 bp, Homo sapiens
tacttaatagagttt

SEQ ID NO: 266464 - DNA, 15 bp, Homo sapiens
atacttaatagagtt

SEQ ID NO: 266465 - DNA, 15 bp, Homo sapiens
catacttaatagagt

SEQ ID NO: 266466 - DNA, 15 bp, Homo sapiens
acatacttaatagag

SEQ ID NO: 266467 - DNA, 15 bp, Homo sapiens
tacatacttaataga

SEQ ID NO: 266468 - DNA, 15 bp, Homo sapiens
atacatacttaatag

SEQ ID NO: 266469 - DNA, 15 bp, Homo sapiens
aatacatacttaata

SEQ ID NO: 266470 - DNA, 15 bp, Homo sapiens
taatacatacttaat

SEQ ID NO: 266471 - DNA, 15 bp, Homo sapiens
ttaatacatacttaa

SEQ ID NO: 266472 - DNA, 15 bp, Homo sapiens
gttaatacatactta

SEQ ID NO: 266473 - DNA, 15 bp, Homo sapiens
tgttaatacatactt

SEQ ID NO: 266474 - DNA, 15 bp, Homo sapiens
atgttaatacatact

SEQ ID NO: 266475 - DNA, 15 bp, Homo sapiens
tatgttaatacatac

SEQ ID NO: 266476 - DNA, 15 bp, Homo sapiens
atatgttaatacata

SEQ ID NO: 266477 - DNA, 15 bp, Homo sapiens
catatgttaatacat

SEQ ID NO: 266478 - DNA, 15 bp, Homo sapiens
ccatatgttaataca

SEQ ID NO: 266479 - DNA, 15 bp, Homo sapiens
tccatatgttaatac

SEQ ID NO: 266480 - DNA, 15 bp, Homo sapiens
gtccatatgttaata

SEQ ID NO: 266481 - DNA, 15 bp, Homo sapiens
agtccatatgttaat

SEQ ID NO: 266482 - DNA, 15 bp, Homo sapiens
cagtccatatgttaa

SEQ ID NO: 266483 - DNA, 15 bp, Homo sapiens
tcagtccatatgtta

SEQ ID NO: 266484 - DNA, 15 bp, Homo sapiens
atcagtccatatgtt

SEQ ID NO: 266485 - DNA, 15 bp, Homo sapiens
aatcagtccatatgt

SEQ ID NO: 266486 - DNA, 15 bp, Homo sapiens
taatcagtccatatg

SEQ ID NO: 266487 - DNA, 15 bp, Homo sapiens
ataatcagtccatat

SEQ ID NO: 266488 - DNA, 15 bp, Homo sapiens
tataatcagtccata

SEQ ID NO: 266489 - DNA, 15 bp, Homo sapiens
ttataatcagtccat

SEQ ID NO: 266490 - DNA, 15 bp, Homo sapiens
cttataatcagtcca

SEQ ID NO: 266491 - DNA, 15 bp, Homo sapiens
tcttataatcagtcc

SEQ ID NO: 266492 - DNA, 15 bp, Homo sapiens
atcttataatcagtc

SEQ ID NO: 266493 - DNA, 15 bp, Homo sapiens
gatcttataatcagt

SEQ ID NO: 266494 - DNA, 15 bp, Homo sapiens
agatcttataatcag

SEQ ID NO: 266495 - DNA, 15 bp, Homo sapiens
gagatcttataatca

SEQ ID NO: 266496 - DNA, 15 bp, Homo sapiens
tgagatcttataatc

SEQ ID NO: 266497 - DNA, 15 bp, Homo sapiens
ctgagatcttataat

SEQ ID NO: 266498 - DNA, 15 bp, Homo sapiens
actgagatcttataa

SEQ ID NO: 266499 - DNA, 15 bp, Homo sapiens
aactgagatcttata

SEQ ID NO: 266500 - DNA, 15 bp, Homo sapiens
aaactgagatcttat

SEQ ID NO: 266501 - DNA, 15 bp, Homo sapiens
gaaactgagatctta

SEQ ID NO: 266502 - DNA, 15 bp, Homo sapiens
tgaaactgagatctt

SEQ ID NO: 266503 - DNA, 15 bp, Homo sapiens
gtgaaactgagatct

SEQ ID NO: 266504 - DNA, 15 bp, Homo sapiens
tgtgaaactgagatc

SEQ ID NO: 266505 - DNA, 15 bp, Homo sapiens
ttgtgaaactgagat

SEQ ID NO: 266506 - DNA, 15 bp, Homo sapiens
tttgtgaaactgaga

SEQ ID NO: 266507 - DNA, 15 bp, Homo sapiens
atttgtgaaactgag

SEQ ID NO: 266508 - DNA, 15 bp, Homo sapiens
gatttgtgaaactga

SEQ ID NO: 266509 - DNA, 15 bp, Homo sapiens
tgatttgtgaaactg

SEQ ID NO: 266510 - DNA, 15 bp, Homo sapiens
atgatttgtgaaact

SEQ ID NO: 266511 - DNA, 15 bp, Homo sapiens
aatgatttgtgaaac

SEQ ID NO: 266512 - DNA, 15 bp, Homo sapiens
aaatgatttgtgaaa

SEQ ID NO: 266513 - DNA, 15 bp, Homo sapiens
aaaatgatttgtgaa

SEQ ID NO: 266514 - DNA, 15 bp, Homo sapiens
taaaatgatttgtga

SEQ ID NO: 266515 - DNA, 15 bp, Homo sapiens
ataaaatgatttgtg

SEQ ID NO: 266516 - DNA, 15 bp, Homo sapiens
cataaaatgatttgt

SEQ ID NO: 266517 - DNA, 15 bp, Homo sapiens
acataaaatgatttg

SEQ ID NO: 266518 - DNA, 15 bp, Homo sapiens
aacataaaatgattt

SEQ ID NO: 266519 - DNA, 15 bp, Homo sapiens
caacataaaatgatt

SEQ ID NO: 266520 - DNA, 15 bp, Homo sapiens
ccaacataaaatgat

SEQ ID NO: 266521 - DNA, 15 bp, Homo sapiens
tccaacataaaatga

SEQ ID NO: 266522 - DNA, 15 bp, Homo sapiens
ttccaacataaaatg

SEQ ID NO: 266523 - DNA, 15 bp, Homo sapiens
tttccaacataaaat

SEQ ID NO: 266524 - DNA, 15 bp, Homo sapiens
ttttccaacataaaa

SEQ ID NO: 266525 - DNA, 15 bp, Homo sapiens
attttccaacataaa

SEQ ID NO: 266526 - DNA, 15 bp, Homo sapiens
cattttccaacataa

SEQ ID NO: 266527 - DNA, 15 bp, Homo sapiens
acattttccaacata

SEQ ID NO: 266528 - DNA, 15 bp, Homo sapiens
cacattttccaacat

SEQ ID NO: 266529 - DNA, 15 bp, Homo sapiens
gcacattttccaaca

SEQ ID NO: 266530 - DNA, 15 bp, Homo sapiens
agcacattttccaac

SEQ ID NO: 266531 - DNA, 15 bp, Homo sapiens
aagcacattttccaa

SEQ ID NO: 266532 - DNA, 15 bp, Homo sapiens
gaagcacattttcca

SEQ ID NO: 266533 - DNA, 15 bp, Homo sapiens
agaagcacattttcc

SEQ ID NO: 266534 - DNA, 15 bp, Homo sapiens
aagaagcacattttc

SEQ ID NO: 266535 - DNA, 15 bp, Homo sapiens
caagaagcacatttt

SEQ ID NO: 266536 - DNA, 15 bp, Homo sapiens
tcaagaagcacattt

SEQ ID NO: 266537 - DNA, 15 bp, Homo sapiens
ttcaagaagcacatt

SEQ ID NO: 266538 - DNA, 15 bp, Homo sapiens
tttcaagaagcacat

SEQ ID NO: 266539 - DNA, 15 bp, Homo sapiens
gtttcaagaagcaca

SEQ ID NO: 266540 - DNA, 15 bp, Homo sapiens
agtttcaagaagcac

SEQ ID NO: 266541 - DNA, 15 bp, Homo sapiens
cagtttcaagaagca

SEQ ID NO: 266542 - DNA, 15 bp, Homo sapiens
tcagtttcaagaagc

SEQ ID NO: 266543 - DNA, 15 bp, Homo sapiens
atcagtttcaagaag

SEQ ID NO: 266544 - DNA, 15 bp, Homo sapiens
gatcagtttcaagaa

SEQ ID NO: 266545 - DNA, 15 bp, Homo sapiens
agatcagtttcaaga

SEQ ID NO: 266546 - DNA, 15 bp, Homo sapiens
tagatcagtttcaag

SEQ ID NO: 266547 - DNA, 15 bp, Homo sapiens
ttagatcagtttcaa

SEQ ID NO: 266548 - DNA, 15 bp, Homo sapiens
gttagatcagtttca

SEQ ID NO: 266549 - DNA, 15 bp, Homo sapiens
tgttagatcagtttc

SEQ ID NO: 266550 - DNA, 15 bp, Homo sapiens
ttgttagatcagttt

SEQ ID NO: 266551 - DNA, 15 bp, Homo sapiens
gttgttagatcagtt

SEQ ID NO: 266552 - DNA, 15 bp, Homo sapiens
tgttgttagatcagt

SEQ ID NO: 266553 - DNA, 15 bp, Homo sapiens
atgttgttagatcag

SEQ ID NO: 266554 - DNA, 15 bp, Homo sapiens
tatgttgttagatca

SEQ ID NO: 266555 - DNA, 15 bp, Homo sapiens
ttatgttgttagatc

SEQ ID NO: 266556 - DNA, 15 bp, Homo sapiens
attatgttgttagat

SEQ ID NO: 266557 - DNA, 15 bp, Homo sapiens
cattatgttgttaga

SEQ ID NO: 266558 - DNA, 15 bp, Homo sapiens
tcattatgttgttag

SEQ ID NO: 266559 - DNA, 15 bp, Homo sapiens
atcattatgttgtta

SEQ ID NO: 266560 - DNA, 15 bp, Homo sapiens
tatcattatgttgtt

SEQ ID NO: 266561 - DNA, 15 bp, Homo sapiens
ctatcattatgttgt

SEQ ID NO: 266562 - DNA, 15 bp, Homo sapiens
tctatcattatgttg

SEQ ID NO: 266563 - DNA, 15 bp, Homo sapiens
ctctatcattatgtt

SEQ ID NO: 266564 - DNA, 15 bp, Homo sapiens
actctatcattatgt

SEQ ID NO: 266565 - DNA, 15 bp, Homo sapiens
cactctatcattatg

SEQ ID NO: 266566 - DNA, 15 bp, Homo sapiens
gcactctatcattat

SEQ ID NO: 266567 - DNA, 15 bp, Homo sapiens
ggcactctatcatta

SEQ ID NO: 266568 - DNA, 15 bp, Homo sapiens
aggcactctatcatt

SEQ ID NO: 266569 - DNA, 15 bp, Homo sapiens
aaggcactctatcat

SEQ ID NO: 266570 - DNA, 15 bp, Homo sapiens
taaggcactctatca

SEQ ID NO: 266571 - DNA, 15 bp, Homo sapiens
ataaggcactctatc

SEQ ID NO: 266572 - DNA, 15 bp, Homo sapiens
tataaggcactctat

SEQ ID NO: 266573 - DNA, 15 bp, Homo sapiens
atataaggcactcta

SEQ ID NO: 266574 - DNA, 15 bp, Homo sapiens
catataaggcactct

SEQ ID NO: 266575 - DNA, 15 bp, Homo sapiens
ccatataaggcactc

SEQ ID NO: 266576 - DNA, 15 bp, Homo sapiens
tccatataaggcact

SEQ ID NO: 266577 - DNA, 15 bp, Homo sapiens
atccatataaggcac

SEQ ID NO: 266578 - DNA, 15 bp, Homo sapiens
aatccatataaggca

SEQ ID NO: 266579 - DNA, 15 bp, Homo sapiens
taatccatataaggc

SEQ ID NO: 266580 - DNA, 15 bp, Homo sapiens
gtaatccatataagg

SEQ ID NO: 266581 - DNA, 15 bp, Homo sapiens
agtaatccatataag

SEQ ID NO: 266582 - DNA, 15 bp, Homo sapiens
gagtaatccatataa

SEQ ID NO: 266583 - DNA, 15 bp, Homo sapiens
agagtaatccatata

SEQ ID NO: 266584 - DNA, 15 bp, Homo sapiens
cagagtaatccatat

SEQ ID NO: 266585 - DNA, 15 bp, Homo sapiens
gcagagtaatccata

SEQ ID NO: 266586 - DNA, 15 bp, Homo sapiens
ggcagagtaatccat

SEQ ID NO: 266587 - DNA, 15 bp, Homo sapiens
aggcagagtaatcca

SEQ ID NO: 266588 - DNA, 15 bp, Homo sapiens
taggcagagtaatcc

SEQ ID NO: 266589 - DNA, 15 bp, Homo sapiens
ctaggcagagtaatc

SEQ ID NO: 266590 - DNA, 15 bp, Homo sapiens
actaggcagagtaat

SEQ ID NO: 266591 - DNA, 15 bp, Homo sapiens
gactaggcagagtaa

SEQ ID NO: 266592 - DNA, 15 bp, Homo sapiens
ggactaggcagagta

SEQ ID NO: 266593 - DNA, 15 bp, Homo sapiens
aggactaggcagagt

SEQ ID NO: 266594 - DNA, 15 bp, Homo sapiens
gaggactaggcagag

SEQ ID NO: 266595 - DNA, 15 bp, Homo sapiens
tgaggactaggcaga

SEQ ID NO: 266596 - DNA, 15 bp, Homo sapiens
gtgaggactaggcag

SEQ ID NO: 266597 - DNA, 15 bp, Homo sapiens
tgtgaggactaggca

SEQ ID NO: 266598 - DNA, 15 bp, Homo sapiens
ttgtgaggactaggc

SEQ ID NO: 266599 - DNA, 15 bp, Homo sapiens
gttgtgaggactagg

SEQ ID NO: 266600 - DNA, 15 bp, Homo sapiens
tgttgtgaggactag

SEQ ID NO: 266601 - DNA, 15 bp, Homo sapiens
ttgttgtgaggacta

SEQ ID NO: 266602 - DNA, 15 bp, Homo sapiens
gttgttgtgaggact

SEQ ID NO: 266603 - DNA, 15 bp, Homo sapiens
agttgttgtgaggac

SEQ ID NO: 266604 - DNA, 15 bp, Homo sapiens
gagttgttgtgagga

SEQ ID NO: 266605 - DNA, 15 bp, Homo sapiens
agagttgttgtgagg

SEQ ID NO: 266606 - DNA, 15 bp, Homo sapiens
tagagttgttgtgag

SEQ ID NO: 266607 - DNA, 15 bp, Homo sapiens
gtagagttgttgtga

SEQ ID NO: 266608 - DNA, 15 bp, Homo sapiens
ggtagagttgttgtg

SEQ ID NO: 266609 - DNA, 15 bp, Homo sapiens
aggtagagttgttgt

SEQ ID NO: 266610 - DNA, 15 bp, Homo sapiens
caggtagagttgttg

SEQ ID NO: 266611 - DNA, 15 bp, Homo sapiens
acaggtagagttgtt

SEQ ID NO: 266612 - DNA, 15 bp, Homo sapiens
cacaggtagagttgt

SEQ ID NO: 266613 - DNA, 15 bp, Homo sapiens
tcacaggtagagttg

SEQ ID NO: 266614 - DNA, 15 bp, Homo sapiens
ctcacaggtagagtt

SEQ ID NO: 266615 - DNA, 15 bp, Homo sapiens
tctcacaggtagagt

SEQ ID NO: 266616 - DNA, 15 bp, Homo sapiens
atctcacaggtagag

SEQ ID NO: 266617 - DNA, 15 bp, Homo sapiens
tatctcacaggtaga

SEQ ID NO: 266618 - DNA, 15 bp, Homo sapiens
ctatctcacaggtag

SEQ ID NO: 266619 - DNA, 15 bp, Homo sapiens
tctatctcacaggta

SEQ ID NO: 266620 - DNA, 15 bp, Homo sapiens
atctatctcacaggt

SEQ ID NO: 266621 - DNA, 15 bp, Homo sapiens
catctatctcacagg

SEQ ID NO: 266622 - DNA, 15 bp, Homo sapiens
gcatctatctcacag

SEQ ID NO: 266623 - DNA, 15 bp, Homo sapiens
agcatctatctcaca

SEQ ID NO: 266624 - DNA, 15 bp, Homo sapiens
tagcatctatctcac

SEQ ID NO: 266625 - DNA, 15 bp, Homo sapiens
ttagcatctatctca

SEQ ID NO: 266626 - DNA, 15 bp, Homo sapiens
gttagcatctatctc

SEQ ID NO: 266627 - DNA, 15 bp, Homo sapiens
tgttagcatctatct

SEQ ID NO: 266628 - DNA, 15 bp, Homo sapiens
atgttagcatctatc

SEQ ID NO: 266629 - DNA, 15 bp, Homo sapiens
gatgttagcatctat

SEQ ID NO: 266630 - DNA, 15 bp, Homo sapiens
ggatgttagcatcta

SEQ ID NO: 266631 - DNA, 15 bp, Homo sapiens
aggatgttagcatct

SEQ ID NO: 266632 - DNA, 15 bp, Homo sapiens
gaggatgttagcatc

SEQ ID NO: 266633 - DNA, 15 bp, Homo sapiens
ggaggatgttagcat

SEQ ID NO: 266634 - DNA, 15 bp, Homo sapiens
gggaggatgttagca

SEQ ID NO: 266635 - DNA, 15 bp, Homo sapiens
ggggaggatgttagc

SEQ ID NO: 266636 - DNA, 15 bp, Homo sapiens
tggggaggatgttag

SEQ ID NO: 266637 - DNA, 15 bp, Homo sapiens
atggggaggatgtta

SEQ ID NO: 266638 - DNA, 15 bp, Homo sapiens
aatggggaggatgtt

SEQ ID NO: 266639 - DNA, 15 bp, Homo sapiens
caatggggaggatgt

SEQ ID NO: 266640 - DNA, 15 bp, Homo sapiens
acaatggggaggatg

SEQ ID NO: 266641 - DNA, 15 bp, Homo sapiens
tacaatggggaggat

SEQ ID NO: 266642 - DNA, 15 bp, Homo sapiens
atacaatggggagga

SEQ ID NO: 266643 - DNA, 15 bp, Homo sapiens
catacaatggggagg

SEQ ID NO: 266644 - DNA, 15 bp, Homo sapiens
ccatacaatggggag

SEQ ID NO: 266645 - DNA, 15 bp, Homo sapiens
cccatacaatgggga

SEQ ID NO: 266646 - DNA, 15 bp, Homo sapiens
ccccatacaatgggg

SEQ ID NO: 266647 - DNA, 15 bp, Homo sapiens
cccccatacaatggg

SEQ ID NO: 266648 - DNA, 15 bp, Homo sapiens
tcccccatacaatgg

SEQ ID NO: 266649 - DNA, 15 bp, Homo sapiens
ctcccccatacaatg

SEQ ID NO: 266650 - DNA, 15 bp, Homo sapiens
cctcccccatacaat

SEQ ID NO: 266651 - DNA, 15 bp, Homo sapiens
ccctcccccatacaa

SEQ ID NO: 266652 - DNA, 15 bp, Homo sapiens
tccctcccccataca

SEQ ID NO: 266653 - DNA, 15 bp, Homo sapiens
ctccctcccccatac

SEQ ID NO: 266654 - DNA, 15 bp, Homo sapiens
actccctcccccata

SEQ ID NO: 266655 - DNA, 15 bp, Homo sapiens
aactccctcccccat

SEQ ID NO: 266656 - DNA, 15 bp, Homo sapiens
caactccctccccca

SEQ ID NO: 266657 - DNA, 15 bp, Homo sapiens
tcaactccctccccc

SEQ ID NO: 266658 - DNA, 15 bp, Homo sapiens
ctcaactccctcccc

SEQ ID NO: 266659 - DNA, 15 bp, Homo sapiens
cctcaactccctccc

SEQ ID NO: 266660 - DNA, 15 bp, Homo sapiens
gcctcaactccctcc

SEQ ID NO: 266661 - DNA, 15 bp, Homo sapiens
tgcctcaactccctc

SEQ ID NO: 266662 - DNA, 15 bp, Homo sapiens
gtgcctcaactccct

SEQ ID NO: 266663 - DNA, 15 bp, Homo sapiens
tgtgcctcaactccc

SEQ ID NO: 266664 - DNA, 15 bp, Homo sapiens
ctgtgcctcaactcc

SEQ ID NO: 266665 - DNA, 15 bp, Homo sapiens
tctgtgcctcaactc

SEQ ID NO: 266666 - DNA, 15 bp, Homo sapiens
atctgtgcctcaact

SEQ ID NO: 266667 - DNA, 15 bp, Homo sapiens
aatctgtgcctcaac

SEQ ID NO: 266668 - DNA, 15 bp, Homo sapiens
caatctgtgcctcaa

SEQ ID NO: 266669 - DNA, 15 bp, Homo sapiens
tcaatctgtgcctca

SEQ ID NO: 266670 - DNA, 15 bp, Homo sapiens
ttcaatctgtgcctc

SEQ ID NO: 266671 - DNA, 15 bp, Homo sapiens
attcaatctgtgcct

SEQ ID NO: 266672 - DNA, 15 bp, Homo sapiens
tattcaatctgtgcc

SEQ ID NO: 266673 - DNA, 15 bp, Homo sapiens
ctattcaatctgtgc

SEQ ID NO: 266674 - DNA, 15 bp, Homo sapiens
gctattcaatctgtg

SEQ ID NO: 266675 - DNA, 15 bp, Homo sapiens
agctattcaatctgt

SEQ ID NO: 266676 - DNA, 15 bp, Homo sapiens
aagctattcaatctg

SEQ ID NO: 266677 - DNA, 15 bp, Homo sapiens
taagctattcaatct

SEQ ID NO: 266678 - DNA, 15 bp, Homo sapiens
ataagctattcaatc

SEQ ID NO: 266679 - DNA, 15 bp, Homo sapiens
aataagctattcaat

SEQ ID NO: 266680 - DNA, 15 bp, Homo sapiens
gaataagctattcaa

SEQ ID NO: 266681 - DNA, 15 bp, Homo sapiens
tgaataagctattca

SEQ ID NO: 266682 - DNA, 15 bp, Homo sapiens
ttgaataagctattc

SEQ ID NO: 266683 - DNA, 15 bp, Homo sapiens
tttgaataagctatt

SEQ ID NO: 266684 - DNA, 15 bp, Homo sapiens
ctttgaataagctat

SEQ ID NO: 266685 - DNA, 15 bp, Homo sapiens
actttgaataagcta

SEQ ID NO: 266686 - DNA, 15 bp, Homo sapiens
gactttgaataagct

SEQ ID NO: 266687 - DNA, 15 bp, Homo sapiens
tgactttgaataagc

SEQ ID NO: 266688 - DNA, 15 bp, Homo sapiens
gtgactttgaataag

SEQ ID NO: 266689 - DNA, 15 bp, Homo sapiens
tgtgactttgaataa

SEQ ID NO: 266690 - DNA, 15 bp, Homo sapiens
ctgtgactttgaata

SEQ ID NO: 266691 - DNA, 15 bp, Homo sapiens
cctgtgactttgaat

SEQ ID NO: 266692 - DNA, 15 bp, Homo sapiens
acctgtgactttgaa

SEQ ID NO: 266693 - DNA, 15 bp, Homo sapiens
tacctgtgactttga

SEQ ID NO: 266694 - DNA, 15 bp, Homo sapiens
ctacctgtgactttg

SEQ ID NO: 266695 - DNA, 15 bp, Homo sapiens
actacctgtgacttt

SEQ ID NO: 266696 - DNA, 15 bp, Homo sapiens
gactacctgtgactt

SEQ ID NO: 266697 - DNA, 15 bp, Homo sapiens
ggactacctgtgact

SEQ ID NO: 266698 - DNA, 15 bp, Homo sapiens
tggactacctgtgac

SEQ ID NO: 266699 - DNA, 15 bp, Homo sapiens
ctggactacctgtga

SEQ ID NO: 266700 - DNA, 15 bp, Homo sapiens
tctggactacctgtg

SEQ ID NO: 266701 - DNA, 15 bp, Homo sapiens
ctctggactacctgt

SEQ ID NO: 266702 - DNA, 15 bp, Homo sapiens
gctctggactacctg

SEQ ID NO: 266703 - DNA, 15 bp, Homo sapiens
agctctggactacct

SEQ ID NO: 266704 - DNA, 15 bp, Homo sapiens
cagctctggactacc

SEQ ID NO: 266705 - DNA, 15 bp, Homo sapiens
ccagctctggactac

SEQ ID NO: 266706 - DNA, 15 bp, Homo sapiens
accagctctggacta

SEQ ID NO: 266707 - DNA, 15 bp, Homo sapiens
gaccagctctggact

SEQ ID NO: 266708 - DNA, 15 bp, Homo sapiens
tgaccagctctggac

SEQ ID NO: 266709 - DNA, 15 bp, Homo sapiens
ctgaccagctctgga

SEQ ID NO: 266710 - DNA, 15 bp, Homo sapiens
actgaccagctctgg

SEQ ID NO: 266711 - DNA, 15 bp, Homo sapiens
cactgaccagctctg

SEQ ID NO: 266712 - DNA, 15 bp, Homo sapiens
tcactgaccagctct

SEQ ID NO: 266713 - DNA, 15 bp, Homo sapiens
atcactgaccagctc

SEQ ID NO: 266714 - DNA, 15 bp, Homo sapiens
catcactgaccagct

SEQ ID NO: 266715 - DNA, 15 bp, Homo sapiens
ccatcactgaccagc

SEQ ID NO: 266716 - DNA, 15 bp, Homo sapiens
cccatcactgaccag

SEQ ID NO: 266717 - DNA, 15 bp, Homo sapiens
tcccatcactgacca

SEQ ID NO: 266718 - DNA, 15 bp, Homo sapiens
gtcccatcactgacc

SEQ ID NO: 266719 - DNA, 15 bp, Homo sapiens
agtcccatcactgac

SEQ ID NO: 266720 - DNA, 15 bp, Homo sapiens
cagtcccatcactga

SEQ ID NO: 266721 - DNA, 15 bp, Homo sapiens
ccagtcccatcactg

SEQ ID NO: 266722 - DNA, 15 bp, Homo sapiens
tccagtcccatcact

SEQ ID NO: 266723 - DNA, 15 bp, Homo sapiens
ttccagtcccatcac

SEQ ID NO: 266724 - DNA, 15 bp, Homo sapiens
attccagtcccatca

SEQ ID NO: 266725 - DNA, 15 bp, Homo sapiens
aattccagtcccatc

SEQ ID NO: 266726 - DNA, 15 bp, Homo sapiens
gaattccagtcccat

SEQ ID NO: 266727 - DNA, 15 bp, Homo sapiens
tgaattccagtccca

SEQ ID NO: 266728 - DNA, 15 bp, Homo sapiens
ttgaattccagtccc

SEQ ID NO: 266729 - DNA, 15 bp, Homo sapiens
tttgaattccagtcc

SEQ ID NO: 266730 - DNA, 15 bp, Homo sapiens
ctttgaattccagtc

SEQ ID NO: 266731 - DNA, 15 bp, Homo sapiens
actttgaattccagt

SEQ ID NO: 266732 - DNA, 15 bp, Homo sapiens
cactttgaattccag

SEQ ID NO: 266733 - DNA, 15 bp, Homo sapiens
acactttgaattcca

SEQ ID NO: 266734 - DNA, 15 bp, Homo sapiens
cacactttgaattcc

SEQ ID NO: 266735 - DNA, 15 bp, Homo sapiens
ccacactttgaattc

SEQ ID NO: 266736 - DNA, 15 bp, Homo sapiens
accacactttgaatt

SEQ ID NO: 266737 - DNA, 15 bp, Homo sapiens
aaccacactttgaat

SEQ ID NO: 266738 - DNA, 15 bp, Homo sapiens
aaaccacactttgaa

SEQ ID NO: 266739 - DNA, 15 bp, Homo sapiens
aaaaccacactttga

SEQ ID NO: 266740 - DNA, 15 bp, Homo sapiens
gaaaaccacactttg

SEQ ID NO: 266741 - DNA, 15 bp, Homo sapiens
tgaaaaccacacttt

SEQ ID NO: 266742 - DNA, 15 bp, Homo sapiens
ctgaaaaccacactt

SEQ ID NO: 266743 - DNA, 15 bp, Homo sapiens
tctgaaaaccacact

SEQ ID NO: 266744 - DNA, 15 bp, Homo sapiens
ttctgaaaaccacac

SEQ ID NO: 266745 - DNA, 15 bp, Homo sapiens
cttctgaaaaccaca

SEQ ID NO: 266746 - DNA, 15 bp, Homo sapiens
acttctgaaaaccac

SEQ ID NO: 266747 - DNA, 15 bp, Homo sapiens
tacttctgaaaacca

SEQ ID NO: 266748 - DNA, 15 bp, Homo sapiens
ctacttctgaaaacc

SEQ ID NO: 266749 - DNA, 15 bp, Homo sapiens
gctacttctgaaaac

SEQ ID NO: 266750 - DNA, 15 bp, Homo sapiens
ggctacttctgaaaa

SEQ ID NO: 266751 - DNA, 15 bp, Homo sapiens
gggctacttctgaaa

SEQ ID NO: 266752 - DNA, 15 bp, Homo sapiens
tgggctacttctgaa

SEQ ID NO: 266753 - DNA, 15 bp, Homo sapiens
gtgggctacttctga

SEQ ID NO: 266754 - DNA, 15 bp, Homo sapiens
tgtgggctacttctg

SEQ ID NO: 266755 - DNA, 15 bp, Homo sapiens
ttgtgggctacttct

SEQ ID NO: 266756 - DNA, 15 bp, Homo sapiens
tttgtgggctacttc

SEQ ID NO: 266757 - DNA, 15 bp, Homo sapiens
ttttgtgggctactt

SEQ ID NO: 266758 - DNA, 15 bp, Homo sapiens
attttgtgggctact

SEQ ID NO: 266759 - DNA, 15 bp, Homo sapiens
cattttgtgggctac

SEQ ID NO: 266760 - DNA, 15 bp, Homo sapiens
acattttgtgggcta

SEQ ID NO: 266761 - DNA, 15 bp, Homo sapiens
tacattttgtgggct

SEQ ID NO: 266762 - DNA, 15 bp, Homo sapiens
ctacattttgtgggc

SEQ ID NO: 266763 - DNA, 15 bp, Homo sapiens
actacattttgtggg

SEQ ID NO: 266764 - DNA, 15 bp, Homo sapiens
cactacattttgtgg

SEQ ID NO: 266765 - DNA, 15 bp, Homo sapiens
tcactacattttgtg

SEQ ID NO: 266766 - DNA, 15 bp, Homo sapiens
ctcactacattttgt

SEQ ID NO: 266767 - DNA, 15 bp, Homo sapiens
tctcactacattttg

SEQ ID NO: 266768 - DNA, 15 bp, Homo sapiens
atctcactacatttt

SEQ ID NO: 266769 - DNA, 15 bp, Homo sapiens
gatctcactacattt

SEQ ID NO: 266770 - DNA, 15 bp, Homo sapiens
ggatctcactacatt

SEQ ID NO: 266771 - DNA, 15 bp, Homo sapiens
tggatctcactacat

SEQ ID NO: 266772 - DNA, 15 bp, Homo sapiens
ttggatctcactaca

SEQ ID NO: 266773 - DNA, 15 bp, Homo sapiens
cttggatctcactac

SEQ ID NO: 266774 - DNA, 15 bp, Homo sapiens
ccttggatctcacta

SEQ ID NO: 266775 - DNA, 15 bp, Homo sapiens
gccttggatctcact

SEQ ID NO: 266776 - DNA, 15 bp, Homo sapiens
agccttggatctcac

SEQ ID NO: 266777 - DNA, 15 bp, Homo sapiens
cagccttggatctca

SEQ ID NO: 266778 - DNA, 15 bp, Homo sapiens
acagccttggatctc

SEQ ID NO: 266779 - DNA, 15 bp, Homo sapiens
aacagccttggatct

SEQ ID NO: 266780 - DNA, 15 bp, Homo sapiens
caacagccttggatc

SEQ ID NO: 266781 - DNA, 15 bp, Homo sapiens
gcaacagccttggat

SEQ ID NO: 266782 - DNA, 15 bp, Homo sapiens
agcaacagccttgga

SEQ ID NO: 266783 - DNA, 15 bp, Homo sapiens
aagcaacagccttgg

SEQ ID NO: 266784 - DNA, 15 bp, Homo sapiens
aaagcaacagccttg

SEQ ID NO: 266785 - DNA, 15 bp, Homo sapiens
gaaagcaacagcctt

SEQ ID NO: 266786 - DNA, 15 bp, Homo sapiens
agaaagcaacagcct

SEQ ID NO: 266787 - DNA, 15 bp, Homo sapiens
gagaaagcaacagcc

SEQ ID NO: 266788 - DNA, 15 bp, Homo sapiens
tgagaaagcaacagc

SEQ ID NO: 266789 - DNA, 15 bp, Homo sapiens
ctgagaaagcaacag

SEQ ID NO: 266790 - DNA, 15 bp, Homo sapiens
cctgagaaagcaaca

SEQ ID NO: 266791 - DNA, 15 bp, Homo sapiens
acctgagaaagcaac

SEQ ID NO: 266792 - DNA, 15 bp, Homo sapiens
gacctgagaaagcaa

SEQ ID NO: 266793 - DNA, 15 bp, Homo sapiens
agacctgagaaagca

SEQ ID NO: 266794 - DNA, 15 bp, Homo sapiens
gagacctgagaaagc

SEQ ID NO: 266795 - DNA, 15 bp, Homo sapiens
agagacctgagaaag

SEQ ID NO: 266796 - DNA, 15 bp, Homo sapiens
aagagacctgagaaa

SEQ ID NO: 266797 - DNA, 15 bp, Homo sapiens
taagagacctgagaa

SEQ ID NO: 266798 - DNA, 15 bp, Homo sapiens
gtaagagacctgaga

SEQ ID NO: 266799 - DNA, 15 bp, Homo sapiens
ggtaagagacctgag

SEQ ID NO: 266800 - DNA, 15 bp, Homo sapiens
aggtaagagacctga

SEQ ID NO: 266801 - DNA, 15 bp, Homo sapiens
aaggtaagagacctg

SEQ ID NO: 266802 - DNA, 15 bp, Homo sapiens
gaaggtaagagacct

SEQ ID NO: 266803 - DNA, 15 bp, Homo sapiens
ggaaggtaagagacc

SEQ ID NO: 266804 - DNA, 15 bp, Homo sapiens
gggaaggtaagagac

SEQ ID NO: 266805 - DNA, 15 bp, Homo sapiens
ggggaaggtaagaga

SEQ ID NO: 266806 - DNA, 15 bp, Homo sapiens
tggggaaggtaagag

SEQ ID NO: 266807 - DNA, 15 bp, Homo sapiens
ctggggaaggtaaga

SEQ ID NO: 266808 - DNA, 15 bp, Homo sapiens
tctggggaaggtaag

SEQ ID NO: 266809 - DNA, 15 bp, Homo sapiens
ctctggggaaggtaa

SEQ ID NO: 266810 - DNA, 15 bp, Homo sapiens
gctctggggaaggta

SEQ ID NO: 266811 - DNA, 15 bp, Homo sapiens
ggctctggggaaggt

SEQ ID NO: 266812 - DNA, 15 bp, Homo sapiens
tggctctggggaagg

SEQ ID NO: 266813 - DNA, 15 bp, Homo sapiens
ctggctctggggaag

SEQ ID NO: 266814 - DNA, 15 bp, Homo sapiens
cctggctctggggaa

SEQ ID NO: 266815 - DNA, 15 bp, Homo sapiens
ccctggctctgggga

SEQ ID NO: 266816 - DNA, 15 bp, Homo sapiens
tccctggctctgggg

SEQ ID NO: 266817 - DNA, 15 bp, Homo sapiens
ctccctggctctggg

SEQ ID NO: 266818 - DNA, 15 bp, Homo sapiens
cctccctggctctgg

SEQ ID NO: 266819 - DNA, 15 bp, Homo sapiens
acctccctggctctg

SEQ ID NO: 266820 - DNA, 15 bp, Homo sapiens
cacctccctggctct

SEQ ID NO: 266821 - DNA, 15 bp, Homo sapiens
ccacctccctggctc

SEQ ID NO: 266822 - DNA, 15 bp, Homo sapiens
gccacctccctggct

SEQ ID NO: 266823 - DNA, 15 bp, Homo sapiens
agccacctccctggc

SEQ ID NO: 266824 - DNA, 15 bp, Homo sapiens
aagccacctccctgg

SEQ ID NO: 266825 - DNA, 15 bp, Homo sapiens
aaagccacctccctg

SEQ ID NO: 266826 - DNA, 15 bp, Homo sapiens
gaaagccacctccct

SEQ ID NO: 266827 - DNA, 15 bp, Homo sapiens
ggaaagccacctccc

SEQ ID NO: 266828 - DNA, 15 bp, Homo sapiens
gggaaagccacctcc

SEQ ID NO: 266829 - DNA, 15 bp, Homo sapiens
agggaaagccacctc

SEQ ID NO: 266830 - DNA, 15 bp, Homo sapiens
aagggaaagccacct

SEQ ID NO: 266831 - DNA, 15 bp, Homo sapiens
taagggaaagccacc

SEQ ID NO: 266832 - DNA, 15 bp, Homo sapiens
ttaagggaaagccac

SEQ ID NO: 266833 - DNA, 15 bp, Homo sapiens
attaagggaaagcca

SEQ ID NO: 266834 - DNA, 15 bp, Homo sapiens
gattaagggaaagcc

SEQ ID NO: 266835 - DNA, 15 bp, Homo sapiens
tgattaagggaaagc

SEQ ID NO: 266836 - DNA, 15 bp, Homo sapiens
ctgattaagggaaag

SEQ ID NO: 266837 - DNA, 15 bp, Homo sapiens
cctgattaagggaaa

SEQ ID NO: 266838 - DNA, 15 bp, Homo sapiens
ccctgattaagggaa

SEQ ID NO: 266839 - DNA, 15 bp, Homo sapiens
accctgattaaggga

SEQ ID NO: 266840 - DNA, 15 bp, Homo sapiens
taccctgattaaggg

SEQ ID NO: 266841 - DNA, 15 bp, Homo sapiens
gtaccctgattaagg

SEQ ID NO: 266842 - DNA, 15 bp, Homo sapiens
ggtaccctgattaag

SEQ ID NO: 266843 - DNA, 15 bp, Homo sapiens
cggtaccctgattaa

SEQ ID NO: 266844 - DNA, 15 bp, Homo sapiens
tcggtaccctgatta

SEQ ID NO: 266845 - DNA, 15 bp, Homo sapiens
ttcggtaccctgatt

SEQ ID NO: 266846 - DNA, 15 bp, Homo sapiens
attcggtaccctgat

SEQ ID NO: 266847 - DNA, 15 bp, Homo sapiens
gattcggtaccctga

SEQ ID NO: 266848 - DNA, 15 bp, Homo sapiens
agattcggtaccctg

SEQ ID NO: 266849 - DNA, 15 bp, Homo sapiens
gagattcggtaccct

SEQ ID NO: 266850 - DNA, 15 bp, Homo sapiens
ggagattcggtaccc

SEQ ID NO: 266851 - DNA, 15 bp, Homo sapiens
gggagattcggtacc

SEQ ID NO: 266852 - DNA, 15 bp, Homo sapiens
tgggagattcggtac

SEQ ID NO: 266853 - DNA, 15 bp, Homo sapiens
ttgggagattcggta

SEQ ID NO: 266854 - DNA, 15 bp, Homo sapiens
cttgggagattcggt

SEQ ID NO: 266855 - DNA, 15 bp, Homo sapiens
acttgggagattcgg

SEQ ID NO: 266856 - DNA, 15 bp, Homo sapiens
cacttgggagattcg

SEQ ID NO: 266857 - DNA, 15 bp, Homo sapiens
gcacttgggagattc

SEQ ID NO: 266858 - DNA, 15 bp, Homo sapiens
tgcacttgggagatt

SEQ ID NO: 266859 - DNA, 15 bp, Homo sapiens
ctgcacttgggagat

SEQ ID NO: 266860 - DNA, 15 bp, Homo sapiens
cctgcacttgggaga

SEQ ID NO: 266861 - DNA, 15 bp, Homo sapiens
ccctgcacttgggag

SEQ ID NO: 266862 - DNA, 15 bp, Homo sapiens
cccctgcacttggga

SEQ ID NO: 266863 - DNA, 15 bp, Homo sapiens
gcccctgcacttggg

SEQ ID NO: 266864 - DNA, 15 bp, Homo sapiens
cgcccctgcacttgg

SEQ ID NO: 266865 - DNA, 15 bp, Homo sapiens
acgcccctgcacttg

SEQ ID NO: 266866 - DNA, 15 bp, Homo sapiens
gacgcccctgcactt

SEQ ID NO: 266867 - DNA, 15 bp, Homo sapiens
ggacgcccctgcact

SEQ ID NO: 266868 - DNA, 15 bp, Homo sapiens
aggacgcccctgcac

SEQ ID NO: 266869 - DNA, 15 bp, Homo sapiens
caggacgcccctgca

SEQ ID NO: 266870 - DNA, 15 bp, Homo sapiens
acaggacgcccctgc

SEQ ID NO: 266871 - DNA, 15 bp, Homo sapiens
gacaggacgcccctg

SEQ ID NO: 266872 - DNA, 15 bp, Homo sapiens
ggacaggacgcccct

SEQ ID NO: 266873 - DNA, 15 bp, Homo sapiens
tggacaggacgcccc

SEQ ID NO: 266874 - DNA, 15 bp, Homo sapiens
gtggacaggacgccc

SEQ ID NO: 266875 - DNA, 15 bp, Homo sapiens
agtggacaggacgcc

SEQ ID NO: 266876 - DNA, 15 bp, Homo sapiens
cagtggacaggacgc

SEQ ID NO: 266877 - DNA, 15 bp, Homo sapiens
ccagtggacaggacg

SEQ ID NO: 266878 - DNA, 15 bp, Homo sapiens
gccagtggacaggac

SEQ ID NO: 266879 - DNA, 15 bp, Homo sapiens
agccagtggacagga

SEQ ID NO: 266880 - DNA, 15 bp, Homo sapiens
gagccagtggacagg

SEQ ID NO: 266881 - DNA, 15 bp, Homo sapiens
agagccagtggacag

SEQ ID NO: 266882 - DNA, 15 bp, Homo sapiens
gagagccagtggaca

SEQ ID NO: 266883 - DNA, 15 bp, Homo sapiens
tgagagccagtggac

SEQ ID NO: 266884 - DNA, 15 bp, Homo sapiens
atgagagccagtgga

SEQ ID NO: 266885 - DNA, 15 bp, Homo sapiens
catgagagccagtgg

SEQ ID NO: 266886 - DNA, 15 bp, Homo sapiens
gcatgagagccagtg

SEQ ID NO: 266887 - DNA, 15 bp, Homo sapiens
ggcatgagagccagt

SEQ ID NO: 266888 - DNA, 15 bp, Homo sapiens
gggcatgagagccag

SEQ ID NO: 266889 - DNA, 15 bp, Homo sapiens
agggcatgagagcca

SEQ ID NO: 266890 - DNA, 15 bp, Homo sapiens
cagggcatgagagcc

SEQ ID NO: 266891 - DNA, 15 bp, Homo sapiens
gcagggcatgagagc

SEQ ID NO: 266892 - DNA, 15 bp, Homo sapiens
tgcagggcatgagag

SEQ ID NO: 266893 - DNA, 15 bp, Homo sapiens
gtgcagggcatgaga

SEQ ID NO: 266894 - DNA, 15 bp, Homo sapiens
tgtgcagggcatgag

SEQ ID NO: 266895 - DNA, 15 bp, Homo sapiens
ctgtgcagggcatga

SEQ ID NO: 266896 - DNA, 15 bp, Homo sapiens
cctgtgcagggcatg

SEQ ID NO: 266897 - DNA, 15 bp, Homo sapiens
ccctgtgcagggcat

SEQ ID NO: 266898 - DNA, 15 bp, Homo sapiens
accctgtgcagggca

SEQ ID NO: 266899 - DNA, 15 bp, Homo sapiens
taccctgtgcagggc

SEQ ID NO: 266900 - DNA, 15 bp, Homo sapiens
gtaccctgtgcaggg

SEQ ID NO: 266901 - DNA, 15 bp, Homo sapiens
ggtaccctgtgcagg

SEQ ID NO: 266902 - DNA, 15 bp, Homo sapiens
aggtaccctgtgcag

SEQ ID NO: 266903 - DNA, 15 bp, Homo sapiens
caggtaccctgtgca

SEQ ID NO: 266904 - DNA, 15 bp, Homo sapiens
ccaggtaccctgtgc

SEQ ID NO: 266905 - DNA, 15 bp, Homo sapiens
gccaggtaccctgtg

SEQ ID NO: 266906 - DNA, 15 bp, Homo sapiens
agccaggtaccctgt

SEQ ID NO: 266907 - DNA, 15 bp, Homo sapiens
aagccaggtaccctg

SEQ ID NO: 266908 - DNA, 15 bp, Homo sapiens
taagccaggtaccct

SEQ ID NO: 266909 - DNA, 15 bp, Homo sapiens
ctaagccaggtaccc

SEQ ID NO: 266910 - DNA, 15 bp, Homo sapiens
cctaagccaggtacc

SEQ ID NO: 266911 - DNA, 15 bp, Homo sapiens
tcctaagccaggtac

SEQ ID NO: 266912 - DNA, 15 bp, Homo sapiens
ttcctaagccaggta

SEQ ID NO: 266913 - DNA, 15 bp, Homo sapiens
cttcctaagccaggt

SEQ ID NO: 266914 - DNA, 15 bp, Homo sapiens
acttcctaagccagg

SEQ ID NO: 266915 - DNA, 15 bp, Homo sapiens
cacttcctaagccag

SEQ ID NO: 266916 - DNA, 15 bp, Homo sapiens
tcacttcctaagcca

SEQ ID NO: 266917 - DNA, 15 bp, Homo sapiens
ttcacttcctaagcc

SEQ ID NO: 266918 - DNA, 15 bp, Homo sapiens
attcacttcctaagc

SEQ ID NO: 266919 - DNA, 15 bp, Homo sapiens
cattcacttcctaag

SEQ ID NO: 266920 - DNA, 15 bp, Homo sapiens
ccattcacttcctaa

SEQ ID NO: 266921 - DNA, 15 bp, Homo sapiens
cccattcacttccta

SEQ ID NO: 266922 - DNA, 15 bp, Homo sapiens
tcccattcacttcct

SEQ ID NO: 266923 - DNA, 15 bp, Homo sapiens
attcccattcacttc

SEQ ID NO: 266924 - DNA, 15 bp, Homo sapiens
cattcccattcactt

SEQ ID NO: 266925 - DNA, 15 bp, Homo sapiens
tcattcccattcact

SEQ ID NO: 266926 - DNA, 15 bp, Homo sapiens
ttcattcccattcac

SEQ ID NO: 266927 - DNA, 15 bp, Homo sapiens
tttcattcccattca

SEQ ID NO: 266928 - DNA, 15 bp, Homo sapiens
atttcattcccattc

SEQ ID NO: 266929 - DNA, 15 bp, Homo sapiens
gatttcattcccatt

SEQ ID NO: 266930 - DNA, 15 bp, Homo sapiens
agatttcattcccat

SEQ ID NO: 266931 - DNA, 15 bp, Homo sapiens
cagatttcattccca

SEQ ID NO: 266932 - DNA, 15 bp, Homo sapiens
ccagatttcattccc

SEQ ID NO: 266933 - DNA, 15 bp, Homo sapiens
gccagatttcattcc

SEQ ID NO: 266934 - DNA, 15 bp, Homo sapiens
agccagatttcattc

SEQ ID NO: 266935 - DNA, 15 bp, Homo sapiens
aagccagatttcatt

SEQ ID NO: 266936 - DNA, 15 bp, Homo sapiens
caagccagatttcat

SEQ ID NO: 266937 - DNA, 15 bp, Homo sapiens
tcaagccagatttca

SEQ ID NO: 266938 - DNA, 15 bp, Homo sapiens
ttcaagccagatttc

SEQ ID NO: 266939 - DNA, 15 bp, Homo sapiens
cttcaagccagattt

SEQ ID NO: 266940 - DNA, 15 bp, Homo sapiens
acttcaagccagatt

SEQ ID NO: 266941 - DNA, 15 bp, Homo sapiens
gacttcaagccagat

SEQ ID NO: 266942 - DNA, 15 bp, Homo sapiens
ggacttcaagccaga

SEQ ID NO: 266943 - DNA, 15 bp, Homo sapiens
gggacttcaagccag

SEQ ID NO: 266944 - DNA, 15 bp, Homo sapiens
agggacttcaagcca

SEQ ID NO: 266945 - DNA, 15 bp, Homo sapiens
aagggacttcaagcc

SEQ ID NO: 266946 - DNA, 15 bp, Homo sapiens
taagggacttcaagc

SEQ ID NO: 266947 - DNA, 15 bp, Homo sapiens
ctaagggacttcaag

SEQ ID NO: 266948 - DNA, 15 bp, Homo sapiens
gctaagggacttcaa

SEQ ID NO: 266949 - DNA, 15 bp, Homo sapiens
tgctaagggacttca

SEQ ID NO: 266950 - DNA, 15 bp, Homo sapiens
ctgctaagggacttc

SEQ ID NO: 266951 - DNA, 15 bp, Homo sapiens
cctgctaagggactt

SEQ ID NO: 266952 - DNA, 15 bp, Homo sapiens
gcctgctaagggact

SEQ ID NO: 266953 - DNA, 15 bp, Homo sapiens
ggcctgctaagggac

SEQ ID NO: 266954 - DNA, 15 bp, Homo sapiens
gggcctgctaaggga

SEQ ID NO: 266955 - DNA, 15 bp, Homo sapiens
agggcctgctaaggg

SEQ ID NO: 266956 - DNA, 15 bp, Homo sapiens
cagggcctgctaagg

SEQ ID NO: 266957 - DNA, 15 bp, Homo sapiens
tcagggcctgctaag

SEQ ID NO: 266958 - DNA, 15 bp, Homo sapiens
ctcagggcctgctaa

SEQ ID NO: 266959 - DNA, 15 bp, Homo sapiens
cctcagggcctgcta

SEQ ID NO: 266960 - DNA, 15 bp, Homo sapiens
gcctcagggcctgct

SEQ ID NO: 266961 - DNA, 15 bp, Homo sapiens
ggcctcagggcctgc

SEQ ID NO: 266962 - DNA, 15 bp, Homo sapiens
tggcctcagggcctg

SEQ ID NO: 266963 - DNA, 15 bp, Homo sapiens
ttggcctcagggcct

SEQ ID NO: 266964 - DNA, 15 bp, Homo sapiens
cttggcctcagggcc

SEQ ID NO: 266965 - DNA, 15 bp, Homo sapiens
ccttggcctcagggc

SEQ ID NO: 266966 - DNA, 15 bp, Homo sapiens
cccttggcctcaggg

SEQ ID NO: 266967 - DNA, 15 bp, Homo sapiens
tcccttggcctcagg

SEQ ID NO: 266968 - DNA, 15 bp, Homo sapiens
atcccttggcctcag

SEQ ID NO: 266969 - DNA, 15 bp, Homo sapiens
aatcccttggcctca

SEQ ID NO: 266970 - DNA, 15 bp, Homo sapiens
taatcccttggcctc

SEQ ID NO: 266971 - DNA, 15 bp, Homo sapiens
ataatcccttggcct

SEQ ID NO: 266972 - DNA, 15 bp, Homo sapiens
aataatcccttggcc

SEQ ID NO: 266973 - DNA, 15 bp, Homo sapiens
aaataatcccttggc

SEQ ID NO: 266974 - DNA, 15 bp, Homo sapiens
aaaataatcccttgg

SEQ ID NO: 266975 - DNA, 15 bp, Homo sapiens
aaaaataatcccttg

SEQ ID NO: 266976 - DNA, 15 bp, Homo sapiens
aaaaaataatccctt

SEQ ID NO: 266977 - DNA, 15 bp, Homo sapiens
gaaaaaataatccct

SEQ ID NO: 266978 - DNA, 15 bp, Homo sapiens
agaaaaaataatccc

SEQ ID NO: 266979 - DNA, 15 bp, Homo sapiens
tagaaaaaataatcc

SEQ ID NO: 266980 - DNA, 15 bp, Homo sapiens
ttagaaaaaataatc

SEQ ID NO: 266981 - DNA, 15 bp, Homo sapiens
attagaaaaaataat

SEQ ID NO: 266982 - DNA, 15 bp, Homo sapiens
cattagaaaaaataa

SEQ ID NO: 266983 - DNA, 15 bp, Homo sapiens
gcattagaaaaaata

SEQ ID NO: 266984 - DNA, 15 bp, Homo sapiens
ggcattagaaaaaat

SEQ ID NO: 266985 - DNA, 15 bp, Homo sapiens
tggcattagaaaaaa

SEQ ID NO: 266986 - DNA, 15 bp, Homo sapiens
gtggcattagaaaaa

SEQ ID NO: 266987 - DNA, 15 bp, Homo sapiens
tgtggcattagaaaa

SEQ ID NO: 266988 - DNA, 15 bp, Homo sapiens
ctgtggcattagaaa

SEQ ID NO: 266989 - DNA, 15 bp, Homo sapiens
tctgtggcattagaa

SEQ ID NO: 266990 - DNA, 15 bp, Homo sapiens
ctctgtggcattaga

SEQ ID NO: 266991 - DNA, 15 bp, Homo sapiens
cctctgtggcattag

SEQ ID NO: 266992 - DNA, 15 bp, Homo sapiens
gcctctgtggcatta

SEQ ID NO: 266993 - DNA, 15 bp, Homo sapiens
agcctctgtggcatt

SEQ ID NO: 266994 - DNA, 15 bp, Homo sapiens
gagcctctgtggcat

SEQ ID NO: 266995 - DNA, 15 bp, Homo sapiens
tgagcctctgtggca

SEQ ID NO: 266996 - DNA, 15 bp, Homo sapiens
ctgagcctctgtggc

SEQ ID NO: 266997 - DNA, 15 bp, Homo sapiens
gctgagcctctgtgg

SEQ ID NO: 266998 - DNA, 15 bp, Homo sapiens
tgctgagcctctgtg

SEQ ID NO: 266999 - DNA, 15 bp, Homo sapiens
atgctgagcctctgt

SEQ ID NO: 267000 - DNA, 15 bp, Homo sapiens
catgctgagcctctg

SEQ ID NO: 267001 - DNA, 15 bp, Homo sapiens
tcatgctgagcctct

SEQ ID NO: 267002 - DNA, 15 bp, Homo sapiens
ctcatgctgagcctc

SEQ ID NO: 267003 - DNA, 15 bp, Homo sapiens
gctcatgctgagcct

SEQ ID NO: 267004 - DNA, 15 bp, Homo sapiens
agctcatgctgagcc

SEQ ID NO: 267005 - DNA, 15 bp, Homo sapiens
cagctcatgctgagc

SEQ ID NO: 267006 - DNA, 15 bp, Homo sapiens
tcagctcatgctgag

SEQ ID NO: 267007 - DNA, 15 bp, Homo sapiens
atcagctcatgctga

SEQ ID NO: 267008 - DNA, 15 bp, Homo sapiens
catcagctcatgctg

SEQ ID NO: 267009 - DNA, 15 bp, Homo sapiens
ccatcagctcatgct

SEQ ID NO: 267010 - DNA, 15 bp, Homo sapiens
tccatcagctcatgc

SEQ ID NO: 267011 - DNA, 15 bp, Homo sapiens
ctccatcagctcatg

SEQ ID NO: 267012 - DNA, 15 bp, Homo sapiens
gctccatcagctcat

SEQ ID NO: 267013 - DNA, 15 bp, Homo sapiens
ggctccatcagctca

SEQ ID NO: 267014 - DNA, 15 bp, Homo sapiens
gggctccatcagctc

SEQ ID NO: 267015 - DNA, 15 bp, Homo sapiens
tgggctccatcagct

SEQ ID NO: 267016 - DNA, 15 bp, Homo sapiens
ctgggctccatcagc

SEQ ID NO: 267017 - DNA, 15 bp, Homo sapiens
gctgggctccatcag

SEQ ID NO: 267018 - DNA, 15 bp, Homo sapiens
ggctgggctccatca

SEQ ID NO: 267019 - DNA, 15 bp, Homo sapiens
gggctgggctccatc

SEQ ID NO: 267020 - DNA, 15 bp, Homo sapiens
tgggctgggctccat

SEQ ID NO: 267021 - DNA, 15 bp, Homo sapiens
ctgggctgggctcca

SEQ ID NO: 267022 - DNA, 15 bp, Homo sapiens
cctgggctgggctcc

SEQ ID NO: 267023 - DNA, 15 bp, Homo sapiens
ccctgggctgggctc

SEQ ID NO: 267024 - DNA, 15 bp, Homo sapiens
tccctgggctgggct

SEQ ID NO: 267025 - DNA, 15 bp, Homo sapiens
ctccctgggctgggc

SEQ ID NO: 267026 - DNA, 15 bp, Homo sapiens
tctccctgggctggg

SEQ ID NO: 267027 - DNA, 15 bp, Homo sapiens
ctctccctgggctgg

SEQ ID NO: 267028 - DNA, 15 bp, Homo sapiens
tctctccctgggctg

SEQ ID NO: 267029 - DNA, 15 bp, Homo sapiens
ttctctccctgggct

SEQ ID NO: 267030 - DNA, 15 bp, Homo sapiens
cttctctccctgggc

SEQ ID NO: 267031 - DNA, 15 bp, Homo sapiens
gcttctctccctggg

SEQ ID NO: 267032 - DNA, 15 bp, Homo sapiens
ggcttctctccctgg

SEQ ID NO: 267033 - DNA, 15 bp, Homo sapiens
tggcttctctccctg

SEQ ID NO: 267034 - DNA, 15 bp, Homo sapiens
gtggcttctctccct

SEQ ID NO: 267035 - DNA, 15 bp, Homo sapiens
tgtggcttctctccc

SEQ ID NO: 267036 - DNA, 15 bp, Homo sapiens
gtgtggcttctctcc

SEQ ID NO: 267037 - DNA, 15 bp, Homo sapiens
agtgtggcttctctc

SEQ ID NO: 267038 - DNA, 15 bp, Homo sapiens
cagtgtggcttctct

SEQ ID NO: 267039 - DNA, 15 bp, Homo sapiens
tcagtgtggcttctc

SEQ ID NO: 267040 - DNA, 15 bp, Homo sapiens
gtcagtgtggcttct

SEQ ID NO: 267041 - DNA, 15 bp, Homo sapiens
agtcagtgtggcttc

SEQ ID NO: 267042 - DNA, 15 bp, Homo sapiens
cagtcagtgtggctt

SEQ ID NO: 267043 - DNA, 15 bp, Homo sapiens
ccagtcagtgtggct

SEQ ID NO: 267044 - DNA, 15 bp, Homo sapiens
cccagtcagtgtggc

SEQ ID NO: 267045 - DNA, 15 bp, Homo sapiens
gcccagtcagtgtgg

SEQ ID NO: 267046 - DNA, 15 bp, Homo sapiens
agcccagtcagtgtg

SEQ ID NO: 267047 - DNA, 15 bp, Homo sapiens
cagcccagtcagtgt

SEQ ID NO: 267048 - DNA, 15 bp, Homo sapiens
tcagcccagtcagtg

SEQ ID NO: 267049 - DNA, 15 bp, Homo sapiens
ttcagcccagtcagt

SEQ ID NO: 267050 - DNA, 15 bp, Homo sapiens
gttcagcccagtcag

SEQ ID NO: 267051 - DNA, 15 bp, Homo sapiens
tgttcagcccagtca

SEQ ID NO: 267052 - DNA, 15 bp, Homo sapiens
ctgttcagcccagtc

SEQ ID NO: 267053 - DNA, 15 bp, Homo sapiens
actgttcagcccagt

SEQ ID NO: 267054 - DNA, 15 bp, Homo sapiens
cactgttcagcccag

SEQ ID NO: 267055 - DNA, 15 bp, Homo sapiens
ccactgttcagccca

SEQ ID NO: 267056 - DNA, 15 bp, Homo sapiens
tccactgttcagccc

SEQ ID NO: 267057 - DNA, 15 bp, Homo sapiens
gtccactgttcagcc

SEQ ID NO: 267058 - DNA, 15 bp, Homo sapiens
tgtccactgttcagc

SEQ ID NO: 267059 - DNA, 15 bp, Homo sapiens
gtgtccactgttcag

SEQ ID NO: 267060 - DNA, 15 bp, Homo sapiens
tgtgtccactgttca

SEQ ID NO: 267061 - DNA, 15 bp, Homo sapiens
ctgtgtccactgttc

SEQ ID NO: 267062 - DNA, 15 bp, Homo sapiens
gctgtgtccactgtt

SEQ ID NO: 267063 - DNA, 15 bp, Homo sapiens
ggctgtgtccactgt

SEQ ID NO: 267064 - DNA, 15 bp, Homo sapiens
aggctgtgtccactg

SEQ ID NO: 267065 - DNA, 15 bp, Homo sapiens
gaggctgtgtccact

SEQ ID NO: 267066 - DNA, 15 bp, Homo sapiens
ggaggctgtgtccac

SEQ ID NO: 267067 - DNA, 15 bp, Homo sapiens
gggaggctgtgtcca

SEQ ID NO: 267068 - DNA, 15 bp, Homo sapiens
agggaggctgtgtcc

SEQ ID NO: 267069 - DNA, 15 bp, Homo sapiens
tagggaggctgtgtc

SEQ ID NO: 267070 - DNA, 15 bp, Homo sapiens
gtagggaggctgtgt

SEQ ID NO: 267071 - DNA, 15 bp, Homo sapiens
ggtagggaggctgtg

SEQ ID NO: 267072 - DNA, 15 bp, Homo sapiens
tggtagggaggctgt

SEQ ID NO: 267073 - DNA, 15 bp, Homo sapiens
gtggtagggaggctg

SEQ ID NO: 267074 - DNA, 15 bp, Homo sapiens
cgtggtagggaggct

SEQ ID NO: 267075 - DNA, 15 bp, Homo sapiens
gcgtggtagggaggc

SEQ ID NO: 267076 - DNA, 15 bp, Homo sapiens
ggcgtggtagggagg

SEQ ID NO: 267077 - DNA, 15 bp, Homo sapiens
aggcgtggtagggag

SEQ ID NO: 267078 - DNA, 15 bp, Homo sapiens
caggcgtggtaggga

SEQ ID NO: 267079 - DNA, 15 bp, Homo sapiens
ccaggcgtggtaggg

SEQ ID NO: 267080 - DNA, 15 bp, Homo sapiens
accaggcgtggtagg

SEQ ID NO: 267081 - DNA, 15 bp, Homo sapiens
caccaggcgtggtag

SEQ ID NO: 267082 - DNA, 15 bp, Homo sapiens
ccaccaggcgtggta

SEQ ID NO: 267083 - DNA, 15 bp, Homo sapiens
accaccaggcgtggt

SEQ ID NO: 267084 - DNA, 15 bp, Homo sapiens
aaccaccaggcgtgg

SEQ ID NO: 267085 - DNA, 15 bp, Homo sapiens
gaaccaccaggcgtg

SEQ ID NO: 267086 - DNA, 15 bp, Homo sapiens
agaaccaccaggcgt

SEQ ID NO: 267087 - DNA, 15 bp, Homo sapiens
aagaaccaccaggcg

SEQ ID NO: 267088 - DNA, 15 bp, Homo sapiens
aaagaaccaccaggc

SEQ ID NO: 267089 - DNA, 15 bp, Homo sapiens
gaaagaaccaccagg

SEQ ID NO: 267090 - DNA, 15 bp, Homo sapiens
tgaaagaaccaccag

SEQ ID NO: 267091 - DNA, 15 bp, Homo sapiens
gtgaaagaaccacca

SEQ ID NO: 267092 - DNA, 15 bp, Homo sapiens
ggtgaaagaaccacc

SEQ ID NO: 267093 - DNA, 15 bp, Homo sapiens
aggtgaaagaaccac

SEQ ID NO: 267094 - DNA, 15 bp, Homo sapiens
aaggtgaaagaacca

SEQ ID NO: 267095 - DNA, 15 bp, Homo sapiens
aaaggtgaaagaacc

SEQ ID NO: 267096 - DNA, 15 bp, Homo sapiens
gaaaggtgaaagaac

SEQ ID NO: 267097 - DNA, 15 bp, Homo sapiens
agaaaggtgaaagaa

SEQ ID NO: 267098 - DNA, 15 bp, Homo sapiens
cagaaaggtgaaaga

SEQ ID NO: 267099 - DNA, 15 bp, Homo sapiens
tcagaaaggtgaaag

SEQ ID NO: 267100 - DNA, 15 bp, Homo sapiens
ctcagaaaggtgaaa

SEQ ID NO: 267101 - DNA, 15 bp, Homo sapiens
gctcagaaaggtgaa

SEQ ID NO: 267102 - DNA, 15 bp, Homo sapiens
tgctcagaaaggtga

SEQ ID NO: 267103 - DNA, 15 bp, Homo sapiens
gtgctcagaaaggtg

SEQ ID NO: 267104 - DNA, 15 bp, Homo sapiens
tgtgctcagaaaggt

SEQ ID NO: 267105 - DNA, 15 bp, Homo sapiens
ctgtgctcagaaagg

SEQ ID NO: 267106 - DNA, 15 bp, Homo sapiens
gctgtgctcagaaag

SEQ ID NO: 267107 - DNA, 15 bp, Homo sapiens
tgctgtgctcagaaa

SEQ ID NO: 267108 - DNA, 15 bp, Homo sapiens
atgctgtgctcagaa

SEQ ID NO: 267109 - DNA, 15 bp, Homo sapiens
catgctgtgctcaga

SEQ ID NO: 267110 - DNA, 15 bp, Homo sapiens
acatgctgtgctcag

SEQ ID NO: 267111 - DNA, 15 bp, Homo sapiens
aacatgctgtgctca

SEQ ID NO: 267112 - DNA, 15 bp, Homo sapiens
taacatgctgtgctc

SEQ ID NO: 267113 - DNA, 15 bp, Homo sapiens
ctaacatgctgtgct

SEQ ID NO: 267114 - DNA, 15 bp, Homo sapiens
tctaacatgctgtgc

SEQ ID NO: 267115 - DNA, 15 bp, Homo sapiens
ctctaacatgctgtg

SEQ ID NO: 267116 - DNA, 15 bp, Homo sapiens
tctctaacatgctgt

SEQ ID NO: 267117 - DNA, 15 bp, Homo sapiens
ttctctaacatgctg

SEQ ID NO: 267118 - DNA, 15 bp, Homo sapiens
attctctaacatgct

SEQ ID NO: 267119 - DNA, 15 bp, Homo sapiens
gattctctaacatgc

SEQ ID NO: 267120 - DNA, 15 bp, Homo sapiens
tgattctctaacatg

SEQ ID NO: 267121 - DNA, 15 bp, Homo sapiens
gtgattctctaacat

SEQ ID NO: 267122 - DNA, 15 bp, Homo sapiens
agtgattctctaaca

SEQ ID NO: 267123 - DNA, 15 bp, Homo sapiens
gagtgattctctaac

SEQ ID NO: 267124 - DNA, 15 bp, Homo sapiens
agagtgattctctaa

SEQ ID NO: 267125 - DNA, 15 bp, Homo sapiens
tagagtgattctcta

SEQ ID NO: 267126 - DNA, 15 bp, Homo sapiens
atagagtgattctct

SEQ ID NO: 267127 - DNA, 15 bp, Homo sapiens
aatagagtgattctc

SEQ ID NO: 267128 - DNA, 15 bp, Homo sapiens
caatagagtgattct

SEQ ID NO: 267129 - DNA, 15 bp, Homo sapiens
ccaatagagtgattc

SEQ ID NO: 267130 - DNA, 15 bp, Homo sapiens
cccaatagagtgatt

SEQ ID NO: 267131 - DNA, 15 bp, Homo sapiens
acccaatagagtgat

SEQ ID NO: 267132 - DNA, 15 bp, Homo sapiens
aacccaatagagtga

SEQ ID NO: 267133 - DNA, 15 bp, Homo sapiens
aaacccaatagagtg

SEQ ID NO: 267134 - DNA, 15 bp, Homo sapiens
caaacccaatagagt

SEQ ID NO: 267135 - DNA, 15 bp, Homo sapiens
acaaacccaatagag

SEQ ID NO: 267136 - DNA, 15 bp, Homo sapiens
gacaaacccaataga

SEQ ID NO: 267137 - DNA, 15 bp, Homo sapiens
agacaaacccaatag

SEQ ID NO: 267138 - DNA, 15 bp, Homo sapiens
cagacaaacccaata

SEQ ID NO: 267139 - DNA, 15 bp, Homo sapiens
tcagacaaacccaat

SEQ ID NO: 267140 - DNA, 15 bp, Homo sapiens
atcagacaaacccaa

SEQ ID NO: 267141 - DNA, 15 bp, Homo sapiens
catcagacaaaccca

SEQ ID NO: 267142 - DNA, 15 bp, Homo sapiens
tcatcagacaaaccc

SEQ ID NO: 267143 - DNA, 15 bp, Homo sapiens
atcatcagacaaacc

SEQ ID NO: 267144 - DNA, 15 bp, Homo sapiens
tatcatcagacaaac

SEQ ID NO: 267145 - DNA, 15 bp, Homo sapiens
gtatcatcagacaaa

SEQ ID NO: 267146 - DNA, 15 bp, Homo sapiens
cgtatcatcagacaa

SEQ ID NO: 267147 - DNA, 15 bp, Homo sapiens
ccgtatcatcagaca

SEQ ID NO: 267148 - DNA, 15 bp, Homo sapiens
cccgtatcatcagac

SEQ ID NO: 267149 - DNA, 15 bp, Homo sapiens
tcccgtatcatcaga

SEQ ID NO: 267150 - DNA, 15 bp, Homo sapiens
gtcccgtatcatcag

SEQ ID NO: 267151 - DNA, 15 bp, Homo sapiens
ggtcccgtatcatca

SEQ ID NO: 267152 - DNA, 15 bp, Homo sapiens
tggtcccgtatcatc

SEQ ID NO: 267153 - DNA, 15 bp, Homo sapiens
ctggtcccgtatcat

SEQ ID NO: 267154 - DNA, 15 bp, Homo sapiens
cctggtcccgtatca

SEQ ID NO: 267155 - DNA, 15 bp, Homo sapiens
ccctggtcccgtatc

SEQ ID NO: 267156 - DNA, 15 bp, Homo sapiens
tccctggtcccgtat

SEQ ID NO: 267157 - DNA, 15 bp, Homo sapiens
ctccctggtcccgta

SEQ ID NO: 267158 - DNA, 15 bp, Homo sapiens
tctccctggtcccgt

SEQ ID NO: 267159 - DNA, 15 bp, Homo sapiens
ttctccctggtcccg

SEQ ID NO: 267160 - DNA, 15 bp, Homo sapiens
cttctccctggtccc

SEQ ID NO: 267161 - DNA, 15 bp, Homo sapiens
ccttctccctggtcc

SEQ ID NO: 267162 - DNA, 15 bp, Homo sapiens
tccttctccctggtc

SEQ ID NO: 267163 - DNA, 15 bp, Homo sapiens
ttccttctccctggt

SEQ ID NO: 267164 - DNA, 15 bp, Homo sapiens
attccttctccctgg

SEQ ID NO: 267165 - DNA, 15 bp, Homo sapiens
aattccttctccctg

SEQ ID NO: 267166 - DNA, 15 bp, Homo sapiens
caattccttctccct

SEQ ID NO: 267167 - DNA, 15 bp, Homo sapiens
ccaattccttctccc

SEQ ID NO: 267168 - DNA, 15 bp, Homo sapiens
tccaattccttctcc

SEQ ID NO: 267169 - DNA, 15 bp, Homo sapiens
ctccaattccttctc

SEQ ID NO: 267170 - DNA, 15 bp, Homo sapiens
tctccaattccttct

SEQ ID NO: 267171 - DNA, 15 bp, Homo sapiens
ctctccaattccttc

SEQ ID NO: 267172 - DNA, 15 bp, Homo sapiens
gctctccaattcctt

SEQ ID NO: 267173 - DNA, 15 bp, Homo sapiens
ggctctccaattcct

SEQ ID NO: 267174 - DNA, 15 bp, Homo sapiens
aggctctccaattcc

SEQ ID NO: 267175 - DNA, 15 bp, Homo sapiens
aaggctctccaattc

SEQ ID NO: 267176 - DNA, 15 bp, Homo sapiens
caaggctctccaatt

SEQ ID NO: 267177 - DNA, 15 bp, Homo sapiens
acaaggctctccaat

SEQ ID NO: 267178 - DNA, 15 bp, Homo sapiens
tacaaggctctccaa

SEQ ID NO: 267179 - DNA, 15 bp, Homo sapiens
ctacaaggctctcca

SEQ ID NO: 267180 - DNA, 15 bp, Homo sapiens
gctacaaggctctcc

SEQ ID NO: 267181 - DNA, 15 bp, Homo sapiens
agctacaaggctctc

SEQ ID NO: 267182 - DNA, 15 bp, Homo sapiens
gagctacaaggctct

SEQ ID NO: 267183 - DNA, 15 bp, Homo sapiens
agagctacaaggctc

SEQ ID NO: 267184 - DNA, 15 bp, Homo sapiens
cagagctacaaggct

SEQ ID NO: 267185 - DNA, 15 bp, Homo sapiens
ccagagctacaaggc

SEQ ID NO: 267186 - DNA, 15 bp, Homo sapiens
cccagagctacaagg

SEQ ID NO: 267187 - DNA, 15 bp, Homo sapiens
ccccagagctacaag

SEQ ID NO: 267188 - DNA, 15 bp, Homo sapiens
tccccagagctacaa

SEQ ID NO: 267189 - DNA, 15 bp, Homo sapiens
gtccccagagctaca

SEQ ID NO: 267190 - DNA, 15 bp, Homo sapiens
ggtccccagagctac

SEQ ID NO: 267191 - DNA, 15 bp, Homo sapiens
aggtccccagagcta

SEQ ID NO: 267192 - DNA, 15 bp, Homo sapiens
aaggtccccagagct

SEQ ID NO: 267193 - DNA, 15 bp, Homo sapiens
caaggtccccagagc

SEQ ID NO: 267194 - DNA, 15 bp, Homo sapiens
tcaaggtccccagag

SEQ ID NO: 267195 - DNA, 15 bp, Homo sapiens
atcaaggtccccaga

SEQ ID NO: 267196 - DNA, 15 bp, Homo sapiens
catcaaggtccccag

SEQ ID NO: 267197 - DNA, 15 bp, Homo sapiens
gcatcaaggtcccca

SEQ ID NO: 267198 - DNA, 15 bp, Homo sapiens
agcatcaaggtcccc

SEQ ID NO: 267199 - DNA, 15 bp, Homo sapiens
tagcatcaaggtccc

SEQ ID NO: 267200 - DNA, 15 bp, Homo sapiens
atagcatcaaggtcc

SEQ ID NO: 267201 - DNA, 15 bp, Homo sapiens
catagcatcaaggtc

SEQ ID NO: 267202 - DNA, 15 bp, Homo sapiens
gcatagcatcaaggt

SEQ ID NO: 267203 - DNA, 15 bp, Homo sapiens
ggcatagcatcaagg

SEQ ID NO: 267204 - DNA, 15 bp, Homo sapiens
aggcatagcatcaag

SEQ ID NO: 267205 - DNA, 15 bp, Homo sapiens
aaggcatagcatcaa

SEQ ID NO: 267206 - DNA, 15 bp, Homo sapiens
aaaggcatagcatca

SEQ ID NO: 267207 - DNA, 15 bp, Homo sapiens
taaaggcatagcatc

SEQ ID NO: 267208 - DNA, 15 bp, Homo sapiens
ctaaaggcatagcat

SEQ ID NO: 267209 - DNA, 15 bp, Homo sapiens
cctaaaggcatagca

SEQ ID NO: 267210 - DNA, 15 bp, Homo sapiens
tcctaaaggcatagc

SEQ ID NO: 267211 - DNA, 15 bp, Homo sapiens
gtcctaaaggcatag

SEQ ID NO: 267212 - DNA, 15 bp, Homo sapiens
tgtcctaaaggcata

SEQ ID NO: 267213 - DNA, 15 bp, Homo sapiens
ttgtcctaaaggcat

SEQ ID NO: 267214 - DNA, 15 bp, Homo sapiens
tttgtcctaaaggca

SEQ ID NO: 267215 - DNA, 15 bp, Homo sapiens
ttttgtcctaaaggc

SEQ ID NO: 267216 - DNA, 15 bp, Homo sapiens
cttttgtcctaaagg

SEQ ID NO: 267217 - DNA, 15 bp, Homo sapiens
gcttttgtcctaaag

SEQ ID NO: 267218 - DNA, 15 bp, Homo sapiens
ggcttttgtcctaaa

SEQ ID NO: 267219 - DNA, 15 bp, Homo sapiens
gggcttttgtcctaa

SEQ ID NO: 267220 - DNA, 15 bp, Homo sapiens
ggggcttttgtccta

SEQ ID NO: 267221 - DNA, 15 bp, Homo sapiens
aggggcttttgtcct

SEQ ID NO: 267222 - DNA, 15 bp, Homo sapiens
taggggcttttgtcc

SEQ ID NO: 267223 - DNA, 15 bp, Homo sapiens
gtaggggcttttgtc

SEQ ID NO: 267224 - DNA, 15 bp, Homo sapiens
agtaggggcttttgt

SEQ ID NO: 267225 - DNA, 15 bp, Homo sapiens
aagtaggggcttttg

SEQ ID NO: 267226 - DNA, 15 bp, Homo sapiens
gaagtaggggctttt

SEQ ID NO: 267227 - DNA, 15 bp, Homo sapiens
ggaagtaggggcttt

SEQ ID NO: 267228 - DNA, 15 bp, Homo sapiens
gggaagtaggggctt

SEQ ID NO: 267229 - DNA, 15 bp, Homo sapiens
tgggaagtaggggct

SEQ ID NO: 267230 - DNA, 15 bp, Homo sapiens
atgggaagtaggggc

SEQ ID NO: 267231 - DNA, 15 bp, Homo sapiens
catgggaagtagggg

SEQ ID NO: 267232 - DNA, 15 bp, Homo sapiens
gcatgggaagtaggg

SEQ ID NO: 267233 - DNA, 15 bp, Homo sapiens
ggcatgggaagtagg

SEQ ID NO: 267234 - DNA, 15 bp, Homo sapiens
tggcatgggaagtag

SEQ ID NO: 267235 - DNA, 15 bp, Homo sapiens
ctggcatgggaagta

SEQ ID NO: 267236 - DNA, 15 bp, Homo sapiens
actggcatgggaagt

SEQ ID NO: 267237 - DNA, 15 bp, Homo sapiens
aactggcatgggaag

SEQ ID NO: 267238 - DNA, 15 bp, Homo sapiens
aaactggcatgggaa

SEQ ID NO: 267239 - DNA, 15 bp, Homo sapiens
caaactggcatggga

SEQ ID NO: 267240 - DNA, 15 bp, Homo sapiens
gcaaactggcatggg

SEQ ID NO: 267241 - DNA, 15 bp, Homo sapiens
ggcaaactggcatgg

SEQ ID NO: 267242 - DNA, 15 bp, Homo sapiens
gggcaaactggcatg

SEQ ID NO: 267243 - DNA, 15 bp, Homo sapiens
ggggcaaactggcat

SEQ ID NO: 267244 - DNA, 15 bp, Homo sapiens
tggggcaaactggca

SEQ ID NO: 267245 - DNA, 15 bp, Homo sapiens
ttggggcaaactggc

SEQ ID NO: 267246 - DNA, 15 bp, Homo sapiens
gttggggcaaactgg

SEQ ID NO: 267247 - DNA, 15 bp, Homo sapiens
tgttggggcaaactg

SEQ ID NO: 267248 - DNA, 15 bp, Homo sapiens
ctgttggggcaaact

SEQ ID NO: 267249 - DNA, 15 bp, Homo sapiens
gctgttggggcaaac

SEQ ID NO: 267250 - DNA, 15 bp, Homo sapiens
tgctgttggggcaaa

SEQ ID NO: 267251 - DNA, 15 bp, Homo sapiens
atgctgttggggcaa

SEQ ID NO: 267252 - DNA, 15 bp, Homo sapiens
catgctgttggggca

SEQ ID NO: 267253 - DNA, 15 bp, Homo sapiens
ccatgctgttggggc

SEQ ID NO: 267254 - DNA, 15 bp, Homo sapiens
gccatgctgttgggg

SEQ ID NO: 267255 - DNA, 15 bp, Homo sapiens
tgccatgctgttggg

SEQ ID NO: 267256 - DNA, 15 bp, Homo sapiens
ctgccatgctgttgg

SEQ ID NO: 267257 - DNA, 15 bp, Homo sapiens
tctgccatgctgttg

SEQ ID NO: 267258 - DNA, 15 bp, Homo sapiens
ttctgccatgctgtt

SEQ ID NO: 267259 - DNA, 15 bp, Homo sapiens
tttctgccatgctgt

SEQ ID NO: 267260 - DNA, 15 bp, Homo sapiens
atttctgccatgctg

SEQ ID NO: 267261 - DNA, 15 bp, Homo sapiens
catttctgccatgct

SEQ ID NO: 267262 - DNA, 15 bp, Homo sapiens
ccatttctgccatgc

SEQ ID NO: 267263 - DNA, 15 bp, Homo sapiens
tccatttctgccatg

SEQ ID NO: 267264 - DNA, 15 bp, Homo sapiens
ttccatttctgccat

SEQ ID NO: 267265 - DNA, 15 bp, Homo sapiens
tttccatttctgcca

SEQ ID NO: 267266 - DNA, 15 bp, Homo sapiens
ttttccatttctgcc

SEQ ID NO: 267267 - DNA, 15 bp, Homo sapiens
cttttccatttctgc

SEQ ID NO: 267268 - DNA, 15 bp, Homo sapiens
ccttttccatttctg

SEQ ID NO: 267269 - DNA, 15 bp, Homo sapiens
cccttttccatttct

SEQ ID NO: 267270 - DNA, 15 bp, Homo sapiens
ccccttttccatttc

SEQ ID NO: 267271 - DNA, 15 bp, Homo sapiens
tccccttttccattt

SEQ ID NO: 267272 - DNA, 15 bp, Homo sapiens
ctccccttttccatt

SEQ ID NO: 267273 - DNA, 15 bp, Homo sapiens
actccccttttccat

SEQ ID NO: 267274 - DNA, 15 bp, Homo sapiens
cactccccttttcca

SEQ ID NO: 267275 - DNA, 15 bp, Homo sapiens
acactccccttttcc

SEQ ID NO: 267276 - DNA, 15 bp, Homo sapiens
tacactccccttttc

SEQ ID NO: 267277 - DNA, 15 bp, Homo sapiens
ctacactcccctttt

SEQ ID NO: 267278 - DNA, 15 bp, Homo sapiens
cctacactccccttt

SEQ ID NO: 267279 - DNA, 15 bp, Homo sapiens
gcctacactcccctt

SEQ ID NO: 267280 - DNA, 15 bp, Homo sapiens
agcctacactcccct

SEQ ID NO: 267281 - DNA, 15 bp, Homo sapiens
cagcctacactcccc

SEQ ID NO: 267282 - DNA, 15 bp, Homo sapiens
tcagcctacactccc

SEQ ID NO: 267283 - DNA, 15 bp, Homo sapiens
ttcagcctacactcc

SEQ ID NO: 267284 - DNA, 15 bp, Homo sapiens
gttcagcctacactc

SEQ ID NO: 267285 - DNA, 15 bp, Homo sapiens
tgttcagcctacact

SEQ ID NO: 267286 - DNA, 15 bp, Homo sapiens
ctgttcagcctacac

SEQ ID NO: 267287 - DNA, 15 bp, Homo sapiens
cctgttcagcctaca

SEQ ID NO: 267288 - DNA, 15 bp, Homo sapiens
tcctgttcagcctac

SEQ ID NO: 267289 - DNA, 15 bp, Homo sapiens
gtcctgttcagccta

SEQ ID NO: 267290 - DNA, 15 bp, Homo sapiens
ggtcctgttcagcct

SEQ ID NO: 267291 - DNA, 15 bp, Homo sapiens
aggtcctgttcagcc

SEQ ID NO: 267292 - DNA, 15 bp, Homo sapiens
aaggtcctgttcagc

SEQ ID NO: 267293 - DNA, 15 bp, Homo sapiens
aaaggtcctgttcag

SEQ ID NO: 267294 - DNA, 15 bp, Homo sapiens
caaaggtcctgttca

SEQ ID NO: 267295 - DNA, 15 bp, Homo sapiens
ccaaaggtcctgttc

SEQ ID NO: 267296 - DNA, 15 bp, Homo sapiens
tccaaaggtcctgtt

SEQ ID NO: 267297 - DNA, 15 bp, Homo sapiens
ttccaaaggtcctgt

SEQ ID NO: 267298 - DNA, 15 bp, Homo sapiens
tttccaaaggtcctg

SEQ ID NO: 267299 - DNA, 15 bp, Homo sapiens
ttttccaaaggtcct

SEQ ID NO: 267300 - DNA, 15 bp, Homo sapiens
gttttccaaaggtcc

SEQ ID NO: 267301 - DNA, 15 bp, Homo sapiens
tgttttccaaaggtc

SEQ ID NO: 267302 - DNA, 15 bp, Homo sapiens
gtgttttccaaaggt

SEQ ID NO: 267303 - DNA, 15 bp, Homo sapiens
ggtgttttccaaagg

SEQ ID NO: 267304 - DNA, 15 bp, Homo sapiens
tggtgttttccaaag

SEQ ID NO: 267305 - DNA, 15 bp, Homo sapiens
ctggtgttttccaaa

SEQ ID NO: 267306 - DNA, 15 bp, Homo sapiens
cctggtgttttccaa

SEQ ID NO: 267307 - DNA, 15 bp, Homo sapiens
acctggtgttttcca

SEQ ID NO: 267308 - DNA, 15 bp, Homo sapiens
aacctggtgttttcc

SEQ ID NO: 267309 - DNA, 15 bp, Homo sapiens
gaacctggtgttttc

SEQ ID NO: 267310 - DNA, 15 bp, Homo sapiens
agaacctggtgtttt

SEQ ID NO: 267311 - DNA, 15 bp, Homo sapiens
cagaacctggtgttt

SEQ ID NO: 267312 - DNA, 15 bp, Homo sapiens
tcagaacctggtgtt

SEQ ID NO: 267313 - DNA, 15 bp, Homo sapiens
atcagaacctggtgt

SEQ ID NO: 267314 - DNA, 15 bp, Homo sapiens
aatcagaacctggtg

SEQ ID NO: 267315 - DNA, 15 bp, Homo sapiens
aaatcagaacctggt

SEQ ID NO: 267316 - DNA, 15 bp, Homo sapiens
gaaatcagaacctgg

SEQ ID NO: 267317 - DNA, 15 bp, Homo sapiens
ggaaatcagaacctg

SEQ ID NO: 267318 - DNA, 15 bp, Homo sapiens
tggaaatcagaacct

SEQ ID NO: 267319 - DNA, 15 bp, Homo sapiens
ctggaaatcagaacc

SEQ ID NO: 267320 - DNA, 15 bp, Homo sapiens
tctggaaatcagaac

SEQ ID NO: 267321 - DNA, 15 bp, Homo sapiens
gtctggaaatcagaa

SEQ ID NO: 267322 - DNA, 15 bp, Homo sapiens
ggtctggaaatcaga

SEQ ID NO: 267323 - DNA, 15 bp, Homo sapiens
gggtctggaaatcag

SEQ ID NO: 267324 - DNA, 15 bp, Homo sapiens
agggtctggaaatca

SEQ ID NO: 267325 - DNA, 15 bp, Homo sapiens
gagggtctggaaatc

SEQ ID NO: 267326 - DNA, 15 bp, Homo sapiens
cgagggtctggaaat

SEQ ID NO: 267327 - DNA, 15 bp, Homo sapiens
ccgagggtctggaaa

SEQ ID NO: 267328 - DNA, 15 bp, Homo sapiens
accgagggtctggaa

SEQ ID NO: 267329 - DNA, 15 bp, Homo sapiens
gaccgagggtctgga

SEQ ID NO: 267330 - DNA, 15 bp, Homo sapiens
agaccgagggtctgg

SEQ ID NO: 267331 - DNA, 15 bp, Homo sapiens
aagaccgagggtctg

SEQ ID NO: 267332 - DNA, 15 bp, Homo sapiens
gaagaccgagggtct

SEQ ID NO: 267333 - DNA, 15 bp, Homo sapiens
agaagaccgagggtc

SEQ ID NO: 267334 - DNA, 15 bp, Homo sapiens
aagaagaccgagggt

SEQ ID NO: 267335 - DNA, 15 bp, Homo sapiens
caagaagaccgaggg

SEQ ID NO: 267336 - DNA, 15 bp, Homo sapiens
acaagaagaccgagg

SEQ ID NO: 267337 - DNA, 15 bp, Homo sapiens
cacaagaagaccgag

SEQ ID NO: 267338 - DNA, 15 bp, Homo sapiens
gcacaagaagaccga

SEQ ID NO: 267339 - DNA, 15 bp, Homo sapiens
tgcacaagaagaccg

SEQ ID NO: 267340 - DNA, 15 bp, Homo sapiens
ctgcacaagaagacc

SEQ ID NO: 267341 - DNA, 15 bp, Homo sapiens
cctgcacaagaagac

SEQ ID NO: 267342 - DNA, 15 bp, Homo sapiens
gcctgcacaagaaga

SEQ ID NO: 267343 - DNA, 15 bp, Homo sapiens
agcctgcacaagaag

SEQ ID NO: 267344 - DNA, 15 bp, Homo sapiens
aagcctgcacaagaa

SEQ ID NO: 267345 - DNA, 15 bp, Homo sapiens
aaagcctgcacaaga

SEQ ID NO: 267346 - DNA, 15 bp, Homo sapiens
gaaagcctgcacaag

SEQ ID NO: 267347 - DNA, 15 bp, Homo sapiens
ggaaagcctgcacaa

SEQ ID NO: 267348 - DNA, 15 bp, Homo sapiens
gggaaagcctgcaca

SEQ ID NO: 267349 - DNA, 15 bp, Homo sapiens
ggggaaagcctgcac

SEQ ID NO: 267350 - DNA, 15 bp, Homo sapiens
gggggaaagcctgca

SEQ ID NO: 267351 - DNA, 15 bp, Homo sapiens
agggggaaagcctgc

SEQ ID NO: 267352 - DNA, 15 bp, Homo sapiens
gagggggaaagcctg

SEQ ID NO: 267353 - DNA, 15 bp, Homo sapiens
agagggggaaagcct

SEQ ID NO: 267354 - DNA, 15 bp, Homo sapiens
aagagggggaaagcc

SEQ ID NO: 267355 - DNA, 15 bp, Homo sapiens
aaagagggggaaagc

SEQ ID NO: 267356 - DNA, 15 bp, Homo sapiens
caaagagggggaaag

SEQ ID NO: 267357 - DNA, 15 bp, Homo sapiens
acaaagagggggaaa

SEQ ID NO: 267358 - DNA, 15 bp, Homo sapiens
aacaaagagggggaa

SEQ ID NO: 267359 - DNA, 15 bp, Homo sapiens
aaacaaagaggggga

SEQ ID NO: 267360 - DNA, 15 bp, Homo sapiens
aaaacaaagaggggg

SEQ ID NO: 267361 - DNA, 15 bp, Homo sapiens
aaaaacaaagagggg

SEQ ID NO: 267362 - DNA, 15 bp, Homo sapiens
gaaaaacaaagaggg

SEQ ID NO: 267363 - DNA, 15 bp, Homo sapiens
ggaaaaacaaagagg

SEQ ID NO: 267364 - DNA, 15 bp, Homo sapiens
gggaaaaacaaagag

SEQ ID NO: 267365 - DNA, 15 bp, Homo sapiens
agggaaaaacaaaga

SEQ ID NO: 267366 - DNA, 15 bp, Homo sapiens
aagggaaaaacaaag

SEQ ID NO: 267367 - DNA, 15 bp, Homo sapiens
aaagggaaaaacaaa

SEQ ID NO: 267368 - DNA, 15 bp, Homo sapiens
aaaagggaaaaacaa

SEQ ID NO: 267369 - DNA, 15 bp, Homo sapiens
gaaaagggaaaaaca

SEQ ID NO: 267370 - DNA, 15 bp, Homo sapiens
agaaaagggaaaaac

SEQ ID NO: 267371 - DNA, 15 bp, Homo sapiens
gagaaaagggaaaaa

SEQ ID NO: 267372 - DNA, 15 bp, Homo sapiens
tgagaaaagggaaaa

SEQ ID NO: 267373 - DNA, 15 bp, Homo sapiens
ttgagaaaagggaaa

SEQ ID NO: 267374 - DNA, 15 bp, Homo sapiens
tttgagaaaagggaa

SEQ ID NO: 267375 - DNA, 15 bp, Homo sapiens
atttgagaaaaggga

SEQ ID NO: 267376 - DNA, 15 bp, Homo sapiens
aatttgagaaaaggg

SEQ ID NO: 267377 - DNA, 15 bp, Homo sapiens
gaatttgagaaaagg

SEQ ID NO: 267378 - DNA, 15 bp, Homo sapiens
ggaatttgagaaaag

SEQ ID NO: 267379 - DNA, 15 bp, Homo sapiens
aggaatttgagaaaa

SEQ ID NO: 267380 - DNA, 15 bp, Homo sapiens
aaggaatttgagaaa

SEQ ID NO: 267381 - DNA, 15 bp, Homo sapiens
caaggaatttgagaa

SEQ ID NO: 267382 - DNA, 15 bp, Homo sapiens
tcaaggaatttgaga

SEQ ID NO: 267383 - DNA, 15 bp, Homo sapiens
gtcaaggaatttgag

SEQ ID NO: 267384 - DNA, 15 bp, Homo sapiens
cgtcaaggaatttga

SEQ ID NO: 267385 - DNA, 15 bp, Homo sapiens
acgtcaaggaatttg

SEQ ID NO: 267386 - DNA, 15 bp, Homo sapiens
cacgtcaaggaattt

SEQ ID NO: 267387 - DNA, 15 bp, Homo sapiens
ccacgtcaaggaatt

SEQ ID NO: 267388 - DNA, 15 bp, Homo sapiens
accacgtcaaggaat

SEQ ID NO: 267389 - DNA, 15 bp, Homo sapiens
caccacgtcaaggaa

SEQ ID NO: 267390 - DNA, 15 bp, Homo sapiens
ccaccacgtcaagga

SEQ ID NO: 267391 - DNA, 15 bp, Homo sapiens
gccaccacgtcaagg

SEQ ID NO: 267392 - DNA, 15 bp, Homo sapiens
tgccaccacgtcaag

SEQ ID NO: 267393 - DNA, 15 bp, Homo sapiens
ttgccaccacgtcaa

SEQ ID NO: 267394 - DNA, 15 bp, Homo sapiens
cttgccaccacgtca

SEQ ID NO: 267395 - DNA, 15 bp, Homo sapiens
gcttgccaccacgtc

SEQ ID NO: 267396 - DNA, 15 bp, Homo sapiens
agcttgccaccacgt

SEQ ID NO: 267397 - DNA, 15 bp, Homo sapiens
cagcttgccaccacg

SEQ ID NO: 267398 - DNA, 15 bp, Homo sapiens
tcagcttgccaccac

SEQ ID NO: 267399 - DNA, 15 bp, Homo sapiens
ttcagcttgccacca

SEQ ID NO: 267400 - DNA, 15 bp, Homo sapiens
gttcagcttgccacc

SEQ ID NO: 267401 - DNA, 15 bp, Homo sapiens
ggttcagcttgccac

SEQ ID NO: 267402 - DNA, 15 bp, Homo sapiens
aggttcagcttgcca

SEQ ID NO: 267403 - DNA, 15 bp, Homo sapiens
gaggttcagcttgcc

SEQ ID NO: 267404 - DNA, 15 bp, Homo sapiens
agaggttcagcttgc

SEQ ID NO: 267405 - DNA, 15 bp, Homo sapiens
aagaggttcagcttg

SEQ ID NO: 267406 - DNA, 15 bp, Homo sapiens
taagaggttcagctt

SEQ ID NO: 267407 - DNA, 15 bp, Homo sapiens
ctaagaggttcagct

SEQ ID NO: 267408 - DNA, 15 bp, Homo sapiens
tctaagaggttcagc

SEQ ID NO: 267409 - DNA, 15 bp, Homo sapiens
ctctaagaggttcag

SEQ ID NO: 267410 - DNA, 15 bp, Homo sapiens
gctctaagaggttca

SEQ ID NO: 267411 - DNA, 15 bp, Homo sapiens
agctctaagaggttc

SEQ ID NO: 267412 - DNA, 15 bp, Homo sapiens
cagctctaagaggtt

SEQ ID NO: 267413 - DNA, 15 bp, Homo sapiens
gcagctctaagaggt

SEQ ID NO: 267414 - DNA, 15 bp, Homo sapiens
cgcagctctaagagg

SEQ ID NO: 267415 - DNA, 15 bp, Homo sapiens
acgcagctctaagag

SEQ ID NO: 267416 - DNA, 15 bp, Homo sapiens
aacgcagctctaaga

SEQ ID NO: 267417 - DNA, 15 bp, Homo sapiens
gaacgcagctctaag

SEQ ID NO: 267418 - DNA, 15 bp, Homo sapiens
ggaacgcagctctaa

SEQ ID NO: 267419 - DNA, 15 bp, Homo sapiens
tggaacgcagctcta

SEQ ID NO: 267420 - DNA, 15 bp, Homo sapiens
ctggaacgcagctct

SEQ ID NO: 267421 - DNA, 15 bp, Homo sapiens
tctggaacgcagctc

SEQ ID NO: 267422 - DNA, 15 bp, Homo sapiens
ttctggaacgcagct

SEQ ID NO: 267423 - DNA, 15 bp, Homo sapiens
gttctggaacgcagc

SEQ ID NO: 267424 - DNA, 15 bp, Homo sapiens
tgttctggaacgcag

SEQ ID NO: 267425 - DNA, 15 bp, Homo sapiens
ttgttctggaacgca

SEQ ID NO: 267426 - DNA, 15 bp, Homo sapiens
gttgttctggaacgc

SEQ ID NO: 267427 - DNA, 15 bp, Homo sapiens
ggttgttctggaacg

SEQ ID NO: 267428 - DNA, 15 bp, Homo sapiens
aggttgttctggaac

SEQ ID NO: 267429 - DNA, 15 bp, Homo sapiens
caggttgttctggaa

SEQ ID NO: 267430 - DNA, 15 bp, Homo sapiens
ccaggttgttctgga

SEQ ID NO: 267431 - DNA, 15 bp, Homo sapiens
cccaggttgttctgg

SEQ ID NO: 267432 - DNA, 15 bp, Homo sapiens
acccaggttgttctg

SEQ ID NO: 267433 - DNA, 15 bp, Homo sapiens
tacccaggttgttct

SEQ ID NO: 267434 - DNA, 15 bp, Homo sapiens
ttacccaggttgttc

SEQ ID NO: 267435 - DNA, 15 bp, Homo sapiens
attacccaggttgtt

SEQ ID NO: 267436 - DNA, 15 bp, Homo sapiens
cattacccaggttgt

SEQ ID NO: 267437 - DNA, 15 bp, Homo sapiens
ccattacccaggttg

SEQ ID NO: 267438 - DNA, 15 bp, Homo sapiens
tccattacccaggtt

SEQ ID NO: 267439 - DNA, 15 bp, Homo sapiens
ttccattacccaggt

SEQ ID NO: 267440 - DNA, 15 bp, Homo sapiens
tttccattacccagg

SEQ ID NO: 267441 - DNA, 15 bp, Homo sapiens
ctttccattacccag

SEQ ID NO: 267442 - DNA, 15 bp, Homo sapiens
actttccattaccca

SEQ ID NO: 267443 - DNA, 15 bp, Homo sapiens
tactttccattaccc

SEQ ID NO: 267444 - DNA, 15 bp, Homo sapiens
gtactttccattacc

SEQ ID NO: 267445 - DNA, 15 bp, Homo sapiens
tgtactttccattac

SEQ ID NO: 267446 - DNA, 15 bp, Homo sapiens
ttgtactttccatta

SEQ ID NO: 267447 - DNA, 15 bp, Homo sapiens
tttgtactttccatt

SEQ ID NO: 267448 - DNA, 15 bp, Homo sapiens
ttttgtactttccat

SEQ ID NO: 267449 - DNA, 15 bp, Homo sapiens
tttttgtactttcca

SEQ ID NO: 267450 - DNA, 15 bp, Homo sapiens
gtttttgtactttcc

SEQ ID NO: 267451 - DNA, 15 bp, Homo sapiens
tgtttttgtactttc

SEQ ID NO: 267452 - DNA, 15 bp, Homo sapiens
ttgtttttgtacttt

SEQ ID NO: 267453 - DNA, 15 bp, Homo sapiens
gttgtttttgtactt

SEQ ID NO: 267454 - DNA, 15 bp, Homo sapiens
agttgtttttgtact

SEQ ID NO: 267455 - DNA, 15 bp, Homo sapiens
aagttgtttttgtac

SEQ ID NO: 267456 - DNA, 15 bp, Homo sapiens
taagttgtttttgta

SEQ ID NO: 267457 - DNA, 15 bp, Homo sapiens
ttaagttgtttttgt

SEQ ID NO: 267458 - DNA, 15 bp, Homo sapiens
tttaagttgtttttg

SEQ ID NO: 267459 - DNA, 15 bp, Homo sapiens
gtttaagttgttttt

SEQ ID NO: 267460 - DNA, 15 bp, Homo sapiens
agtttaagttgtttt

SEQ ID NO: 267461 - DNA, 15 bp, Homo sapiens
aagtttaagttgttt

SEQ ID NO: 267462 - DNA, 15 bp, Homo sapiens
caagtttaagttgtt

SEQ ID NO: 267463 - DNA, 15 bp, Homo sapiens
acaagtttaagttgt

SEQ ID NO: 267464 - DNA, 15 bp, Homo sapiens
aacaagtttaagttg

SEQ ID NO: 267465 - DNA, 15 bp, Homo sapiens
aaacaagtttaagtt

SEQ ID NO: 267466 - DNA, 15 bp, Homo sapiens
gaaacaagtttaagt

SEQ ID NO: 267467 - DNA, 15 bp, Homo sapiens
ggaaacaagtttaag

SEQ ID NO: 267468 - DNA, 15 bp, Homo sapiens
tggaaacaagtttaa

SEQ ID NO: 267469 - DNA, 15 bp, Homo sapiens
ttggaaacaagttta

SEQ ID NO: 267470 - DNA, 15 bp, Homo sapiens
tttggaaacaagttt

SEQ ID NO: 267471 - DNA, 15 bp, Homo sapiens
ctttggaaacaagtt

SEQ ID NO: 267472 - DNA, 15 bp, Homo sapiens
gctttggaaacaagt

SEQ ID NO: 267473 - DNA, 15 bp, Homo sapiens
agctttggaaacaag

SEQ ID NO: 267474 - DNA, 15 bp, Homo sapiens
aagctttggaaacaa

SEQ ID NO: 267475 - DNA, 15 bp, Homo sapiens
caagctttggaaaca

SEQ ID NO: 267476 - DNA, 15 bp, Homo sapiens
tcaagctttggaaac

SEQ ID NO: 267477 - DNA, 15 bp, Homo sapiens
atcaagctttggaaa

SEQ ID NO: 267478 - DNA, 15 bp, Homo sapiens
tatcaagctttggaa

SEQ ID NO: 267479 - DNA, 15 bp, Homo sapiens
ctatcaagctttgga

SEQ ID NO: 267480 - DNA, 15 bp, Homo sapiens
cctatcaagctttgg

SEQ ID NO: 267481 - DNA, 15 bp, Homo sapiens
acctatcaagctttg

SEQ ID NO: 267482 - DNA, 15 bp, Homo sapiens
aacctatcaagcttt

SEQ ID NO: 267483 - DNA, 15 bp, Homo sapiens
taacctatcaagctt

SEQ ID NO: 267484 - DNA, 15 bp, Homo sapiens
gtaacctatcaagct

SEQ ID NO: 267485 - DNA, 15 bp, Homo sapiens
tgtaacctatcaagc

SEQ ID NO: 267486 - DNA, 15 bp, Homo sapiens
gtgtaacctatcaag

SEQ ID NO: 267487 - DNA, 15 bp, Homo sapiens
ggtgtaacctatcaa

SEQ ID NO: 267488 - DNA, 15 bp, Homo sapiens
cggtgtaacctatca

SEQ ID NO: 267489 - DNA, 15 bp, Homo sapiens
tcggtgtaacctatc

SEQ ID NO: 267490 - DNA, 15 bp, Homo sapiens
gtcggtgtaacctat

SEQ ID NO: 267491 - DNA, 15 bp, Homo sapiens
agtcggtgtaaccta

SEQ ID NO: 267492 - DNA, 15 bp, Homo sapiens
aagtcggtgtaacct

SEQ ID NO: 267493 - DNA, 15 bp, Homo sapiens
gaagtcggtgtaacc

SEQ ID NO: 267494 - DNA, 15 bp, Homo sapiens
agaagtcggtgtaac

SEQ ID NO: 267495 - DNA, 15 bp, Homo sapiens
gagaagtcggtgtaa

SEQ ID NO: 267496 - DNA, 15 bp, Homo sapiens
tgagaagtcggtgta

SEQ ID NO: 267497 - DNA, 15 bp, Homo sapiens
ctgagaagtcggtgt

SEQ ID NO: 267498 - DNA, 15 bp, Homo sapiens
tctgagaagtcggtg

SEQ ID NO: 267499 - DNA, 15 bp, Homo sapiens
ttctgagaagtcggt

SEQ ID NO: 267500 - DNA, 15 bp, Homo sapiens
tttctgagaagtcgg

SEQ ID NO: 267501 - DNA, 15 bp, Homo sapiens
ctttctgagaagtcg

SEQ ID NO: 267502 - DNA, 15 bp, Homo sapiens
actttctgagaagtc

SEQ ID NO: 267503 - DNA, 15 bp, Homo sapiens
cactttctgagaagt

SEQ ID NO: 267504 - DNA, 15 bp, Homo sapiens
acactttctgagaag

SEQ ID NO: 267505 - DNA, 15 bp, Homo sapiens
gacactttctgagaa

SEQ ID NO: 267506 - DNA, 15 bp, Homo sapiens
ggacactttctgaga

SEQ ID NO: 267507 - DNA, 15 bp, Homo sapiens
tggacactttctgag

SEQ ID NO: 267508 - DNA, 15 bp, Homo sapiens
atggacactttctga

SEQ ID NO: 267509 - DNA, 15 bp, Homo sapiens
aatggacactttctg

SEQ ID NO: 267510 - DNA, 15 bp, Homo sapiens
aaatggacactttct

SEQ ID NO: 267511 - DNA, 15 bp, Homo sapiens
caaatggacactttc

SEQ ID NO: 267512 - DNA, 15 bp, Homo sapiens
ccaaatggacacttt

SEQ ID NO: 267513 - DNA, 15 bp, Homo sapiens
tccaaatggacactt

SEQ ID NO: 267514 - DNA, 15 bp, Homo sapiens
gtccaaatggacact

SEQ ID NO: 267515 - DNA, 15 bp, Homo sapiens
ggtccaaatggacac

SEQ ID NO: 267516 - DNA, 15 bp, Homo sapiens
gggtccaaatggaca

SEQ ID NO: 267517 - DNA, 15 bp, Homo sapiens
tgggtccaaatggac

SEQ ID NO: 267518 - DNA, 15 bp, Homo sapiens
ttgggtccaaatgga

SEQ ID NO: 267519 - DNA, 15 bp, Homo sapiens
tttgggtccaaatgg

SEQ ID NO: 267520 - DNA, 15 bp, Homo sapiens
ttttgggtccaaatg

SEQ ID NO: 267521 - DNA, 15 bp, Homo sapiens
attttgggtccaaat

SEQ ID NO: 267522 - DNA, 15 bp, Homo sapiens
cattttgggtccaaa

SEQ ID NO: 267523 - DNA, 15 bp, Homo sapiens
acattttgggtccaa

SEQ ID NO: 267524 - DNA, 15 bp, Homo sapiens
cacattttgggtcca

SEQ ID NO: 267525 - DNA, 15 bp, Homo sapiens
tcacattttgggtcc

SEQ ID NO: 267526 - DNA, 15 bp, Homo sapiens
ttcacattttgggtc

SEQ ID NO: 267527 - DNA, 15 bp, Homo sapiens
tttcacattttgggt

SEQ ID NO: 267528 - DNA, 15 bp, Homo sapiens
atttcacattttggg

SEQ ID NO: 267529 - DNA, 15 bp, Homo sapiens
tatttcacattttgg

SEQ ID NO: 267530 - DNA, 15 bp, Homo sapiens
ttatttcacattttg

SEQ ID NO: 267531 - DNA, 15 bp, Homo sapiens
gttatttcacatttt

SEQ ID NO: 267532 - DNA, 15 bp, Homo sapiens
tgttatttcacattt

SEQ ID NO: 267533 - DNA, 15 bp, Homo sapiens
atgttatttcacatt

SEQ ID NO: 267534 - DNA, 15 bp, Homo sapiens
aatgttatttcacat

SEQ ID NO: 267535 - DNA, 15 bp, Homo sapiens
aaatgttatttcaca

SEQ ID NO: 267536 - DNA, 15 bp, Homo sapiens
aaaatgttatttcac

SEQ ID NO: 267537 - DNA, 15 bp, Homo sapiens
caaaatgttatttca

SEQ ID NO: 267538 - DNA, 15 bp, Homo sapiens
tcaaaatgttatttc

SEQ ID NO: 267539 - DNA, 15 bp, Homo sapiens
ctcaaaatgttattt

SEQ ID NO: 267540 - DNA, 15 bp, Homo sapiens
cctcaaaatgttatt

SEQ ID NO: 267541 - DNA, 15 bp, Homo sapiens
gcctcaaaatgttat

SEQ ID NO: 267542 - DNA, 15 bp, Homo sapiens
tgcctcaaaatgtta

SEQ ID NO: 267543 - DNA, 15 bp, Homo sapiens
gtgcctcaaaatgtt

SEQ ID NO: 267544 - DNA, 15 bp, Homo sapiens
cgtgcctcaaaatgt

SEQ ID NO: 267545 - DNA, 15 bp, Homo sapiens
acgtgcctcaaaatg

SEQ ID NO: 267546 - DNA, 15 bp, Homo sapiens
aacgtgcctcaaaat

SEQ ID NO: 267547 - DNA, 15 bp, Homo sapiens
caacgtgcctcaaaa

SEQ ID NO: 267548 - DNA, 15 bp, Homo sapiens
ccaacgtgcctcaaa

SEQ ID NO: 267549 - DNA, 15 bp, Homo sapiens
tccaacgtgcctcaa

SEQ ID NO: 267550 - DNA, 15 bp, Homo sapiens
ctccaacgtgcctca

SEQ ID NO: 267551 - DNA, 15 bp, Homo sapiens
cctccaacgtgcctc

SEQ ID NO: 267552 - DNA, 15 bp, Homo sapiens
ccctccaacgtgcct

SEQ ID NO: 267553 - DNA, 15 bp, Homo sapiens
cccctccaacgtgcc

SEQ ID NO: 267554 - DNA, 15 bp, Homo sapiens
ccccctccaacgtgc

SEQ ID NO: 267555 - DNA, 15 bp, Homo sapiens
cccccctccaacgtg

SEQ ID NO: 267556 - DNA, 15 bp, Homo sapiens
gcccccctccaacgt

SEQ ID NO: 267557 - DNA, 15 bp, Homo sapiens
ggcccccctccaacg

SEQ ID NO: 267558 - DNA, 15 bp, Homo sapiens
tggcccccctccaac

SEQ ID NO: 267559 - DNA, 15 bp, Homo sapiens
ctggcccccctccaa

SEQ ID NO: 267560 - DNA, 15 bp, Homo sapiens
tctggcccccctcca

SEQ ID NO: 267561 - DNA, 15 bp, Homo sapiens
ctctggcccccctcc

SEQ ID NO: 267562 - DNA, 15 bp, Homo sapiens
cctctggcccccctc

SEQ ID NO: 267563 - DNA, 15 bp, Homo sapiens
ccctctggcccccct

SEQ ID NO: 267564 - DNA, 15 bp, Homo sapiens
accctctggcccccc

SEQ ID NO: 267565 - DNA, 15 bp, Homo sapiens
aaccctctggccccc

SEQ ID NO: 267566 - DNA, 15 bp, Homo sapiens
taaccctctggcccc

SEQ ID NO: 267567 - DNA, 15 bp, Homo sapiens
gtaaccctctggccc

SEQ ID NO: 267568 - DNA, 15 bp, Homo sapiens
cgtaaccctctggcc

SEQ ID NO: 267569 - DNA, 15 bp, Homo sapiens
gcgtaaccctctggc

SEQ ID NO: 267570 - DNA, 15 bp, Homo sapiens
tgcgtaaccctctgg

SEQ ID NO: 267571 - DNA, 15 bp, Homo sapiens
ctgcgtaaccctctg

SEQ ID NO: 267572 - DNA, 15 bp, Homo sapiens
gctgcgtaaccctct

SEQ ID NO: 267573 - DNA, 15 bp, Homo sapiens
agctgcgtaaccctc

SEQ ID NO: 267574 - DNA, 15 bp, Homo sapiens
cagctgcgtaaccct

SEQ ID NO: 267575 - DNA, 15 bp, Homo sapiens
gcagctgcgtaaccc

SEQ ID NO: 267576 - DNA, 15 bp, Homo sapiens
tgcagctgcgtaacc

SEQ ID NO: 267577 - DNA, 15 bp, Homo sapiens
ctgcagctgcgtaac

SEQ ID NO: 267578 - DNA, 15 bp, Homo sapiens
cctgcagctgcgtaa

SEQ ID NO: 267579 - DNA, 15 bp, Homo sapiens
gcctgcagctgcgta

SEQ ID NO: 267580 - DNA, 15 bp, Homo sapiens
cgcctgcagctgcgt

SEQ ID NO: 267581 - DNA, 15 bp, Homo sapiens
acgcctgcagctgcg

SEQ ID NO: 267582 - DNA, 15 bp, Homo sapiens
cacgcctgcagctgc

SEQ ID NO: 267583 - DNA, 15 bp, Homo sapiens
ccacgcctgcagctg

SEQ ID NO: 267584 - DNA, 15 bp, Homo sapiens
cccacgcctgcagct

SEQ ID NO: 267585 - DNA, 15 bp, Homo sapiens
gcccacgcctgcagc

SEQ ID NO: 267586 - DNA, 15 bp, Homo sapiens
ggcccacgcctgcag

SEQ ID NO: 267587 - DNA, 15 bp, Homo sapiens
tggcccacgcctgca

SEQ ID NO: 267588 - DNA, 15 bp, Homo sapiens
ctggcccacgcctgc

SEQ ID NO: 267589 - DNA, 15 bp, Homo sapiens
tctggcccacgcctg

SEQ ID NO: 267590 - DNA, 15 bp, Homo sapiens
atctggcccacgcct

SEQ ID NO: 267591 - DNA, 15 bp, Homo sapiens
catctggcccacgcc

SEQ ID NO: 267592 - DNA, 15 bp, Homo sapiens
ccatctggcccacgc

SEQ ID NO: 267593 - DNA, 15 bp, Homo sapiens
cccatctggcccacg

SEQ ID NO: 267594 - DNA, 15 bp, Homo sapiens
tcccatctggcccac

SEQ ID NO: 267595 - DNA, 15 bp, Homo sapiens
ttcccatctggccca

SEQ ID NO: 267596 - DNA, 15 bp, Homo sapiens
tttcccatctggccc

SEQ ID NO: 267597 - DNA, 15 bp, Homo sapiens
atttcccatctggcc

SEQ ID NO: 267598 - DNA, 15 bp, Homo sapiens
gatttcccatctggc

SEQ ID NO: 267599 - DNA, 15 bp, Homo sapiens
ggatttcccatctgg

SEQ ID NO: 267600 - DNA, 15 bp, Homo sapiens
tggatttcccatctg

SEQ ID NO: 267601 - DNA, 15 bp, Homo sapiens
ctggatttcccatct

SEQ ID NO: 267602 - DNA, 15 bp, Homo sapiens
tctggatttcccatc

SEQ ID NO: 267603 - DNA, 15 bp, Homo sapiens
atctggatttcccat

SEQ ID NO: 267604 - DNA, 15 bp, Homo sapiens
catctggatttccca

SEQ ID NO: 267605 - DNA, 15 bp, Homo sapiens
gcatctggatttccc

SEQ ID NO: 267606 - DNA, 15 bp, Homo sapiens
agcatctggatttcc

SEQ ID NO: 267607 - DNA, 15 bp, Homo sapiens
cagcatctggatttc

SEQ ID NO: 267608 - DNA, 15 bp, Homo sapiens
ccagcatctggattt

SEQ ID NO: 267609 - DNA, 15 bp, Homo sapiens
gccagcatctggatt

SEQ ID NO: 267610 - DNA, 15 bp, Homo sapiens
ggccagcatctggat

SEQ ID NO: 267611 - DNA, 15 bp, Homo sapiens
aggccagcatctgga

SEQ ID NO: 267612 - DNA, 15 bp, Homo sapiens
taggccagcatctgg

SEQ ID NO: 267613 - DNA, 15 bp, Homo sapiens
ctaggccagcatctg

SEQ ID NO: 267614 - DNA, 15 bp, Homo sapiens
cctaggccagcatct

SEQ ID NO: 267615 - DNA, 15 bp, Homo sapiens
ccctaggccagcatc

SEQ ID NO: 267616 - DNA, 15 bp, Homo sapiens
tccctaggccagcat

SEQ ID NO: 267617 - DNA, 15 bp, Homo sapiens
ctccctaggccagca

SEQ ID NO: 267618 - DNA, 15 bp, Homo sapiens
gctccctaggccagc

SEQ ID NO: 267619 - DNA, 15 bp, Homo sapiens
tgctccctaggccag

SEQ ID NO: 267620 - DNA, 15 bp, Homo sapiens
ttgctccctaggcca

SEQ ID NO: 267621 - DNA, 15 bp, Homo sapiens
cttgctccctaggcc

SEQ ID NO: 267622 - DNA, 15 bp, Homo sapiens
ccttgctccctaggc

SEQ ID NO: 267623 - DNA, 15 bp, Homo sapiens
accttgctccctagg

SEQ ID NO: 267624 - DNA, 15 bp, Homo sapiens
gaccttgctccctag

SEQ ID NO: 267625 - DNA, 15 bp, Homo sapiens
ggaccttgctcccta

SEQ ID NO: 267626 - DNA, 15 bp, Homo sapiens
gggaccttgctccct

SEQ ID NO: 267627 - DNA, 15 bp, Homo sapiens
agggaccttgctccc

SEQ ID NO: 267628 - DNA, 15 bp, Homo sapiens
aagggaccttgctcc

SEQ ID NO: 267629 - DNA, 15 bp, Homo sapiens
gaagggaccttgctc

SEQ ID NO: 267630 - DNA, 15 bp, Homo sapiens
agaagggaccttgct

SEQ ID NO: 267631 - DNA, 15 bp, Homo sapiens
cagaagggaccttgc

SEQ ID NO: 267632 - DNA, 15 bp, Homo sapiens
gcagaagggaccttg

SEQ ID NO: 267633 - DNA, 15 bp, Homo sapiens
agcagaagggacctt

SEQ ID NO: 267634 - DNA, 15 bp, Homo sapiens
cagcagaagggacct

SEQ ID NO: 267635 - DNA, 15 bp, Homo sapiens
gcagcagaagggacc

SEQ ID NO: 267636 - DNA, 15 bp, Homo sapiens
agcagcagaagggac

SEQ ID NO: 267637 - DNA, 15 bp, Homo sapiens
gagcagcagaaggga

SEQ ID NO: 267638 - DNA, 15 bp, Homo sapiens
tgagcagcagaaggg

SEQ ID NO: 267639 - DNA, 15 bp, Homo sapiens
atgagcagcagaagg

SEQ ID NO: 267640 - DNA, 15 bp, Homo sapiens
catgagcagcagaag

SEQ ID NO: 267641 - DNA, 15 bp, Homo sapiens
gcatgagcagcagaa

SEQ ID NO: 267642 - DNA, 15 bp, Homo sapiens
tgcatgagcagcaga

SEQ ID NO: 267643 - DNA, 15 bp, Homo sapiens
ctgcatgagcagcag

SEQ ID NO: 267644 - DNA, 15 bp, Homo sapiens
cctgcatgagcagca

SEQ ID NO: 267645 - DNA, 15 bp, Homo sapiens
gcctgcatgagcagc

SEQ ID NO: 267646 - DNA, 15 bp, Homo sapiens
agcctgcatgagcag

SEQ ID NO: 267647 - DNA, 15 bp, Homo sapiens
cagcctgcatgagca

SEQ ID NO: 267648 - DNA, 15 bp, Homo sapiens
acagcctgcatgagc

SEQ ID NO: 267649 - DNA, 15 bp, Homo sapiens
gacagcctgcatgag

SEQ ID NO: 267650 - DNA, 15 bp, Homo sapiens
tgacagcctgcatga

SEQ ID NO: 267651 - DNA, 15 bp, Homo sapiens
ttgacagcctgcatg

SEQ ID NO: 267652 - DNA, 15 bp, Homo sapiens
tttgacagcctgcat

SEQ ID NO: 267653 - DNA, 15 bp, Homo sapiens
ctttgacagcctgca

SEQ ID NO: 267654 - DNA, 15 bp, Homo sapiens
gctttgacagcctgc

SEQ ID NO: 267655 - DNA, 15 bp, Homo sapiens
tgctttgacagcctg

SEQ ID NO: 267656 - DNA, 15 bp, Homo sapiens
ctgctttgacagcct

SEQ ID NO: 267657 - DNA, 15 bp, Homo sapiens
gctgctttgacagcc

SEQ ID NO: 267658 - DNA, 15 bp, Homo sapiens
tgctgctttgacagc

SEQ ID NO: 267659 - DNA, 15 bp, Homo sapiens
ctgctgctttgacag

SEQ ID NO: 267660 - DNA, 15 bp, Homo sapiens
gctgctgctttgaca

SEQ ID NO: 267661 - DNA, 15 bp, Homo sapiens
ggctgctgctttgac

SEQ ID NO: 267662 - DNA, 15 bp, Homo sapiens
aggctgctgctttga

SEQ ID NO: 267663 - DNA, 15 bp, Homo sapiens
gaggctgctgctttg

SEQ ID NO: 267664 - DNA, 15 bp, Homo sapiens
ggaggctgctgcttt

SEQ ID NO: 267665 - DNA, 15 bp, Homo sapiens
aggaggctgctgctt

SEQ ID NO: 267666 - DNA, 15 bp, Homo sapiens
aaggaggctgctgct

SEQ ID NO: 267667 - DNA, 15 bp, Homo sapiens
taaggaggctgctgc

SEQ ID NO: 267668 - DNA, 15 bp, Homo sapiens
ctaaggaggctgctg

SEQ ID NO: 267669 - DNA, 15 bp, Homo sapiens
cctaaggaggctgct

SEQ ID NO: 267670 - DNA, 15 bp, Homo sapiens
tcctaaggaggctgc

SEQ ID NO: 267671 - DNA, 15 bp, Homo sapiens
gtcctaaggaggctg

SEQ ID NO: 267672 - DNA, 15 bp, Homo sapiens
ggtcctaaggaggct

SEQ ID NO: 267673 - DNA, 15 bp, Homo sapiens
gggtcctaaggaggc

SEQ ID NO: 267674 - DNA, 15 bp, Homo sapiens
agggtcctaaggagg

SEQ ID NO: 267675 - DNA, 15 bp, Homo sapiens
gagggtcctaaggag

SEQ ID NO: 267676 - DNA, 15 bp, Homo sapiens
tgagggtcctaagga

SEQ ID NO: 267677 - DNA, 15 bp, Homo sapiens
gtgagggtcctaagg

SEQ ID NO: 267678 - DNA, 15 bp, Homo sapiens
agtgagggtcctaag

SEQ ID NO: 267679 - DNA, 15 bp, Homo sapiens
cagtgagggtcctaa

SEQ ID NO: 267680 - DNA, 15 bp, Homo sapiens
gcagtgagggtccta

SEQ ID NO: 267681 - DNA, 15 bp, Homo sapiens
tgcagtgagggtcct

SEQ ID NO: 267682 - DNA, 15 bp, Homo sapiens
ttgcagtgagggtcc

SEQ ID NO: 267683 - DNA, 15 bp, Homo sapiens
cttgcagtgagggtc

SEQ ID NO: 267684 - DNA, 15 bp, Homo sapiens
gcttgcagtgagggt

SEQ ID NO: 267685 - DNA, 15 bp, Homo sapiens
agcttgcagtgaggg

SEQ ID NO: 267686 - DNA, 15 bp, Homo sapiens
aagcttgcagtgagg

SEQ ID NO: 267687 - DNA, 15 bp, Homo sapiens
taaagcttgcagtga

SEQ ID NO: 267688 - DNA, 15 bp, Homo sapiens
ttaaagcttgcagtg

SEQ ID NO: 267689 - DNA, 15 bp, Homo sapiens
tttaaagcttgcagt

SEQ ID NO: 267690 - DNA, 15 bp, Homo sapiens
ttttaaagcttgcag

SEQ ID NO: 267691 - DNA, 15 bp, Homo sapiens
attttaaagcttgca

SEQ ID NO: 267692 - DNA, 15 bp, Homo sapiens
cattttaaagcttgc

SEQ ID NO: 267693 - DNA, 15 bp, Homo sapiens
acattttaaagcttg

SEQ ID NO: 267694 - DNA, 15 bp, Homo sapiens
aacattttaaagctt

SEQ ID NO: 267695 - DNA, 15 bp, Homo sapiens
taacattttaaagct

SEQ ID NO: 267696 - DNA, 15 bp, Homo sapiens
gtaacattttaaagc

SEQ ID NO: 267697 - DNA, 15 bp, Homo sapiens
agtaacattttaaag

SEQ ID NO: 267698 - DNA, 15 bp, Homo sapiens
gagtaacattttaaa

SEQ ID NO: 267699 - DNA, 15 bp, Homo sapiens
ggagtaacattttaa

SEQ ID NO: 267700 - DNA, 15 bp, Homo sapiens
aggagtaacatttta

SEQ ID NO: 267701 - DNA, 15 bp, Homo sapiens
aaggagtaacatttt

SEQ ID NO: 267702 - DNA, 15 bp, Homo sapiens
taaggagtaacattt

SEQ ID NO: 267703 - DNA, 15 bp, Homo sapiens
ctaaggagtaacatt

SEQ ID NO: 267704 - DNA, 15 bp, Homo sapiens
cctaaggagtaacat

SEQ ID NO: 267705 - DNA, 15 bp, Homo sapiens
ccctaaggagtaaca

SEQ ID NO: 267706 - DNA, 15 bp, Homo sapiens
tccctaaggagtaac

SEQ ID NO: 267707 - DNA, 15 bp, Homo sapiens
ctccctaaggagtaa

SEQ ID NO: 267708 - DNA, 15 bp, Homo sapiens
tctccctaaggagta

SEQ ID NO: 267709 - DNA, 15 bp, Homo sapiens
ttctccctaaggagt

SEQ ID NO: 267710 - DNA, 15 bp, Homo sapiens
attctccctaaggag

SEQ ID NO: 267711 - DNA, 15 bp, Homo sapiens
aattctccctaagga

SEQ ID NO: 267712 - DNA, 15 bp, Homo sapiens
aaattctccctaagg

SEQ ID NO: 267713 - DNA, 15 bp, Homo sapiens
gaaattctccctaag

SEQ ID NO: 267714 - DNA, 15 bp, Homo sapiens
tgaaattctccctaa

SEQ ID NO: 267715 - DNA, 15 bp, Homo sapiens
ctgaaattctcccta

SEQ ID NO: 267716 - DNA, 15 bp, Homo sapiens
tctgaaattctccct

SEQ ID NO: 267717 - DNA, 15 bp, Homo sapiens
atctgaaattctccc

SEQ ID NO: 267718 - DNA, 15 bp, Homo sapiens
catctgaaattctcc

SEQ ID NO: 267719 - DNA, 15 bp, Homo sapiens
ccatctgaaattctc

SEQ ID NO: 267720 - DNA, 15 bp, Homo sapiens
cccatctgaaattct

SEQ ID NO: 267721 - DNA, 15 bp, Homo sapiens
tcccatctgaaattc

SEQ ID NO: 267722 - DNA, 15 bp, Homo sapiens
ctcccatctgaaatt

SEQ ID NO: 267723 - DNA, 15 bp, Homo sapiens
cctcccatctgaaat

SEQ ID NO: 267724 - DNA, 15 bp, Homo sapiens
ccctcccatctgaaa

SEQ ID NO: 267725 - DNA, 15 bp, Homo sapiens
tccctcccatctgaa

SEQ ID NO: 267726 - DNA, 15 bp, Homo sapiens
ttccctcccatctga

SEQ ID NO: 267727 - DNA, 15 bp, Homo sapiens
cttccctcccatctg

SEQ ID NO: 267728 - DNA, 15 bp, Homo sapiens
ccttccctcccatct

SEQ ID NO: 267729 - DNA, 15 bp, Homo sapiens
gccttccctcccatc

SEQ ID NO: 267730 - DNA, 15 bp, Homo sapiens
agccttccctcccat

SEQ ID NO: 267731 - DNA, 15 bp, Homo sapiens
aagccttccctccca

SEQ ID NO: 267732 - DNA, 15 bp, Homo sapiens
taagccttccctccc

SEQ ID NO: 267733 - DNA, 15 bp, Homo sapiens
ttaagccttccctcc

SEQ ID NO: 267734 - DNA, 15 bp, Homo sapiens
attaagccttccctc

SEQ ID NO: 267735 - DNA, 15 bp, Homo sapiens
gattaagccttccct

SEQ ID NO: 267736 - DNA, 15 bp, Homo sapiens
tgattaagccttccc

SEQ ID NO: 267737 - DNA, 15 bp, Homo sapiens
ttgattaagccttcc

SEQ ID NO: 267738 - DNA, 15 bp, Homo sapiens
attgattaagccttc

SEQ ID NO: 267739 - DNA, 15 bp, Homo sapiens
tattgattaagcctt

SEQ ID NO: 267740 - DNA, 15 bp, Homo sapiens
gtattgattaagcct

SEQ ID NO: 267741 - DNA, 15 bp, Homo sapiens
tgtattgattaagcc

SEQ ID NO: 267742 - DNA, 15 bp, Homo sapiens
atgtattgattaagc

SEQ ID NO: 267743 - DNA, 15 bp, Homo sapiens
catgtattgattaag

SEQ ID NO: 267744 - DNA, 15 bp, Homo sapiens
gcatgtattgattaa

SEQ ID NO: 267745 - DNA, 15 bp, Homo sapiens
tgcatgtattgatta

SEQ ID NO: 267746 - DNA, 15 bp, Homo sapiens
ttgcatgtattgatt

SEQ ID NO: 267747 - DNA, 15 bp, Homo sapiens
gttgcatgtattgat

SEQ ID NO: 267748 - DNA, 15 bp, Homo sapiens
cgttgcatgtattga

SEQ ID NO: 267749 - DNA, 15 bp, Homo sapiens
acgttgcatgtattg

SEQ ID NO: 267750 - DNA, 15 bp, Homo sapiens
aacgttgcatgtatt

SEQ ID NO: 267751 - DNA, 15 bp, Homo sapiens
aaacgttgcatgtat

SEQ ID NO: 267752 - DNA, 15 bp, Homo sapiens
taaacgttgcatgta

SEQ ID NO: 267753 - DNA, 15 bp, Homo sapiens
ttaaacgttgcatgt

SEQ ID NO: 267754 - DNA, 15 bp, Homo sapiens
gttaaacgttgcatg

SEQ ID NO: 267755 - DNA, 15 bp, Homo sapiens
agttaaacgttgcat

SEQ ID NO: 267756 - DNA, 15 bp, Homo sapiens
cagttaaacgttgca

SEQ ID NO: 267757 - DNA, 15 bp, Homo sapiens
ccagttaaacgttgc

SEQ ID NO: 267758 - DNA, 15 bp, Homo sapiens
gccagttaaacgttg

SEQ ID NO: 267759 - DNA, 15 bp, Homo sapiens
tgccagttaaacgtt

SEQ ID NO: 267760 - DNA, 15 bp, Homo sapiens
atgccagttaaacgt

SEQ ID NO: 267761 - DNA, 15 bp, Homo sapiens
aatgccagttaaacg

SEQ ID NO: 267762 - DNA, 15 bp, Homo sapiens
taatgccagttaaac

SEQ ID NO: 267763 - DNA, 15 bp, Homo sapiens
ctaatgccagttaaa

SEQ ID NO: 267764 - DNA, 15 bp, Homo sapiens
tctaatgccagttaa

SEQ ID NO: 267765 - DNA, 15 bp, Homo sapiens
ttctaatgccagtta

SEQ ID NO: 267766 - DNA, 15 bp, Homo sapiens
attctaatgccagtt

SEQ ID NO: 267767 - DNA, 15 bp, Homo sapiens
cattctaatgccagt

SEQ ID NO: 267768 - DNA, 15 bp, Homo sapiens
tcattctaatgccag

SEQ ID NO: 267769 - DNA, 15 bp, Homo sapiens
atcattctaatgcca

SEQ ID NO: 267770 - DNA, 15 bp, Homo sapiens
catcattctaatgcc

SEQ ID NO: 267771 - DNA, 15 bp, Homo sapiens
acatcattctaatgc

SEQ ID NO: 267772 - DNA, 15 bp, Homo sapiens
aacatcattctaatg

SEQ ID NO: 267773 - DNA, 15 bp, Homo sapiens
aaacatcattctaat

SEQ ID NO: 267774 - DNA, 15 bp, Homo sapiens
aaaacatcattctaa

SEQ ID NO: 267775 - DNA, 15 bp, Homo sapiens
caaaacatcattcta

SEQ ID NO: 267776 - DNA, 15 bp, Homo sapiens
acaaaacatcattct

SEQ ID NO: 267777 - DNA, 15 bp, Homo sapiens
aacaaaacatcattc

SEQ ID NO: 267778 - DNA, 15 bp, Homo sapiens
aaacaaaacatcatt

SEQ ID NO: 267779 - DNA, 15 bp, Homo sapiens
aaaacaaaacatcat

SEQ ID NO: 267780 - DNA, 15 bp, Homo sapiens
caaaacaaaacatca

SEQ ID NO: 267781 - DNA, 15 bp, Homo sapiens
acaaaacaaaacatc

SEQ ID NO: 267782 - DNA, 15 bp, Homo sapiens
aacaaaacaaaacat

SEQ ID NO: 267783 - DNA, 15 bp, Homo sapiens
gaaacaaaacaaaac

SEQ ID NO: 267784 - DNA, 15 bp, Homo sapiens
agaaacaaaacaaaa

SEQ ID NO: 267785 - DNA, 15 bp, Homo sapiens
aagaaacaaaacaaa

SEQ ID NO: 267786 - DNA, 15 bp, Homo sapiens
aaagaaacaaaacaa

SEQ ID NO: 267787 - DNA, 15 bp, Homo sapiens
aaaagaaacaaaaca

SEQ ID NO: 267788 - DNA, 15 bp, Homo sapiens
taaaagaaacaaaac

SEQ ID NO: 267789 - DNA, 15 bp, Homo sapiens
ttaaaagaaacaaaa

SEQ ID NO: 267790 - DNA, 15 bp, Homo sapiens
cattaaaagaaacaa

SEQ ID NO: 267791 - DNA, 15 bp, Homo sapiens
ccattaaaagaaaca

SEQ ID NO: 267792 - DNA, 15 bp, Homo sapiens
cccattaaaagaaac

SEQ ID NO: 267793 - DNA, 15 bp, Homo sapiens
tcccattaaaagaaa

SEQ ID NO: 267794 - DNA, 15 bp, Homo sapiens
ctcccattaaaagaa

SEQ ID NO: 267795 - DNA, 15 bp, Homo sapiens
tctcccattaaaaga

SEQ ID NO: 267796 - DNA, 15 bp, Homo sapiens
atctcccattaaaag

SEQ ID NO: 267797 - DNA, 15 bp, Homo sapiens
catctcccattaaaa

SEQ ID NO: 267798 - DNA, 15 bp, Homo sapiens
tcatctcccattaaa

SEQ ID NO: 267799 - DNA, 15 bp, Homo sapiens
atcatctcccattaa

SEQ ID NO: 267800 - DNA, 15 bp, Homo sapiens
catcatctcccatta

SEQ ID NO: 267801 - DNA, 15 bp, Homo sapiens
ccatcatctcccatt

SEQ ID NO: 267802 - DNA, 15 bp, Homo sapiens
cccatcatctcccat

SEQ ID NO: 267803 - DNA, 15 bp, Homo sapiens
acccatcatctccca

SEQ ID NO: 267804 - DNA, 15 bp, Homo sapiens
cacccatcatctccc

SEQ ID NO: 267805 - DNA, 15 bp, Homo sapiens
ccacccatcatctcc

SEQ ID NO: 267806 - DNA, 15 bp, Homo sapiens
accacccatcatctc

SEQ ID NO: 267807 - DNA, 15 bp, Homo sapiens
taccacccatcatct

SEQ ID NO: 267808 - DNA, 15 bp, Homo sapiens
ctaccacccatcatc

SEQ ID NO: 267809 - DNA, 15 bp, Homo sapiens
actaccacccatcat

SEQ ID NO: 267810 - DNA, 15 bp, Homo sapiens
tactaccacccatca

SEQ ID NO: 267811 - DNA, 15 bp, Homo sapiens
ctactaccacccatc

SEQ ID NO: 267812 - DNA, 15 bp, Homo sapiens
actactaccacccat

SEQ ID NO: 267813 - DNA, 15 bp, Homo sapiens
tactactaccaccca

SEQ ID NO: 267814 - DNA, 15 bp, Homo sapiens
ttactactaccaccc

SEQ ID NO: 267815 - DNA, 15 bp, Homo sapiens
cttactactaccacc

SEQ ID NO: 267816 - DNA, 15 bp, Homo sapiens
acttactactaccac

SEQ ID NO: 267817 - DNA, 15 bp, Homo sapiens
gacttactactacca

SEQ ID NO: 267818 - DNA, 15 bp, Homo sapiens
tgacttactactacc

SEQ ID NO: 267819 - DNA, 15 bp, Homo sapiens
ctgacttactactac

SEQ ID NO: 267820 - DNA, 15 bp, Homo sapiens
cctgacttactacta

SEQ ID NO: 267821 - DNA, 15 bp, Homo sapiens
ccctgacttactact

SEQ ID NO: 267822 - DNA, 15 bp, Homo sapiens
tccctgacttactac

SEQ ID NO: 267823 - DNA, 15 bp, Homo sapiens
ctccctgacttacta

SEQ ID NO: 267824 - DNA, 15 bp, Homo sapiens
cctccctgacttact

SEQ ID NO: 267825 - DNA, 15 bp, Homo sapiens
ccctccctgacttac

SEQ ID NO: 267826 - DNA, 15 bp, Homo sapiens
gccctccctgactta

SEQ ID NO: 267827 - DNA, 15 bp, Homo sapiens
cgccctccctgactt

SEQ ID NO: 267828 - DNA, 15 bp, Homo sapiens
acgccctccctgact

SEQ ID NO: 267829 - DNA, 15 bp, Homo sapiens
aacgccctccctgac

SEQ ID NO: 267830 - DNA, 15 bp, Homo sapiens
caacgccctccctga

SEQ ID NO: 267831 - DNA, 15 bp, Homo sapiens
gcaacgccctccctg

SEQ ID NO: 267832 - DNA, 15 bp, Homo sapiens
tgcaacgccctccct

SEQ ID NO: 267833 - DNA, 15 bp, Homo sapiens
ctgcaacgccctccc

SEQ ID NO: 267834 - DNA, 15 bp, Homo sapiens
cctgcaacgccctcc

SEQ ID NO: 267835 - DNA, 15 bp, Homo sapiens
ccctgcaacgccctc

SEQ ID NO: 267836 - DNA, 15 bp, Homo sapiens
accctgcaacgccct

SEQ ID NO: 267837 - DNA, 15 bp, Homo sapiens
caccctgcaacgccc

SEQ ID NO: 267838 - DNA, 15 bp, Homo sapiens
acaccctgcaacgcc

SEQ ID NO: 267839 - DNA, 15 bp, Homo sapiens
cacaccctgcaacgc

SEQ ID NO: 267840 - DNA, 15 bp, Homo sapiens
ccacaccctgcaacg

SEQ ID NO: 267841 - DNA, 15 bp, Homo sapiens
accacaccctgcaac

SEQ ID NO: 267842 - DNA, 15 bp, Homo sapiens
gaccacaccctgcaa

SEQ ID NO: 267843 - DNA, 15 bp, Homo sapiens
agaccacaccctgca

SEQ ID NO: 267844 - DNA, 15 bp, Homo sapiens
aagaccacaccctgc

SEQ ID NO: 267845 - DNA, 15 bp, Homo sapiens
gaagaccacaccctg

SEQ ID NO: 267846 - DNA, 15 bp, Homo sapiens
tgaagaccacaccct

SEQ ID NO: 267847 - DNA, 15 bp, Homo sapiens
ttgaagaccacaccc

SEQ ID NO: 267848 - DNA, 15 bp, Homo sapiens
gttgaagaccacacc

SEQ ID NO: 267849 - DNA, 15 bp, Homo sapiens
agttgaagaccacac

SEQ ID NO: 267850 - DNA, 15 bp, Homo sapiens
aagttgaagaccaca

SEQ ID NO: 267851 - DNA, 15 bp, Homo sapiens
aaagttgaagaccac

SEQ ID NO: 267852 - DNA, 15 bp, Homo sapiens
gaaagttgaagacca

SEQ ID NO: 267853 - DNA, 15 bp, Homo sapiens
ggaaagttgaagacc

SEQ ID NO: 267854 - DNA, 15 bp, Homo sapiens
gggaaagttgaagac

SEQ ID NO: 267855 - DNA, 15 bp, Homo sapiens
ggggaaagttgaaga

SEQ ID NO: 267856 - DNA, 15 bp, Homo sapiens
tggggaaagttgaag

SEQ ID NO: 267857 - DNA, 15 bp, Homo sapiens
atggggaaagttgaa

SEQ ID NO: 267858 - DNA, 15 bp, Homo sapiens
gatggggaaagttga

SEQ ID NO: 267859 - DNA, 15 bp, Homo sapiens
agatggggaaagttg

SEQ ID NO: 267860 - DNA, 15 bp, Homo sapiens
aagatggggaaagtt

SEQ ID NO: 267861 - DNA, 15 bp, Homo sapiens
aaagatggggaaagt

SEQ ID NO: 267862 - DNA, 15 bp, Homo sapiens
taaagatggggaaag

SEQ ID NO: 267863 - DNA, 15 bp, Homo sapiens
ataaagatggggaaa

SEQ ID NO: 267864 - DNA, 15 bp, Homo sapiens
gataaagatggggaa

SEQ ID NO: 267865 - DNA, 15 bp, Homo sapiens
tgataaagatgggga

SEQ ID NO: 267866 - DNA, 15 bp, Homo sapiens
gtgataaagatgggg

SEQ ID NO: 267867 - DNA, 15 bp, Homo sapiens
tgtgataaagatggg

SEQ ID NO: 267868 - DNA, 15 bp, Homo sapiens
atgtgataaagatgg

SEQ ID NO: 267869 - DNA, 15 bp, Homo sapiens
catgtgataaagatg

SEQ ID NO: 267870 - DNA, 15 bp, Homo sapiens
gcatgtgataaagat

SEQ ID NO: 267871 - DNA, 15 bp, Homo sapiens
ggcatgtgataaaga

SEQ ID NO: 267872 - DNA, 15 bp, Homo sapiens
tggcatgtgataaag

SEQ ID NO: 267873 - DNA, 15 bp, Homo sapiens
ttggcatgtgataaa

SEQ ID NO: 267874 - DNA, 15 bp, Homo sapiens
tttggcatgtgataa

SEQ ID NO: 267875 - DNA, 15 bp, Homo sapiens
ttttggcatgtgata

SEQ ID NO: 267876 - DNA, 15 bp, Homo sapiens
cttttggcatgtgat

SEQ ID NO: 267877 - DNA, 15 bp, Homo sapiens
acttttggcatgtga

SEQ ID NO: 267878 - DNA, 15 bp, Homo sapiens
aacttttggcatgtg

SEQ ID NO: 267879 - DNA, 15 bp, Homo sapiens
caacttttggcatgt

SEQ ID NO: 267880 - DNA, 15 bp, Homo sapiens
gcaacttttggcatg

SEQ ID NO: 267881 - DNA, 15 bp, Homo sapiens
agcaacttttggcat

SEQ ID NO: 267882 - DNA, 15 bp, Homo sapiens
gagcaacttttggca

SEQ ID NO: 267883 - DNA, 15 bp, Homo sapiens
ggagcaacttttggc

SEQ ID NO: 267884 - DNA, 15 bp, Homo sapiens
tggagcaacttttgg

SEQ ID NO: 267885 - DNA, 15 bp, Homo sapiens
atggagcaacttttg

SEQ ID NO: 267886 - DNA, 15 bp, Homo sapiens
aatggagcaactttt

SEQ ID NO: 267887 - DNA, 15 bp, Homo sapiens
aaatggagcaacttt

SEQ ID NO: 267888 - DNA, 15 bp, Homo sapiens
gaaatggagcaactt

SEQ ID NO: 267889 - DNA, 15 bp, Homo sapiens
tgaaatggagcaact

SEQ ID NO: 267890 - DNA, 15 bp, Homo sapiens
ctgaaatggagcaac

SEQ ID NO: 267891 - DNA, 15 bp, Homo sapiens
gctgaaatggagcaa

SEQ ID NO: 267892 - DNA, 15 bp, Homo sapiens
tgctgaaatggagca

SEQ ID NO: 267893 - DNA, 15 bp, Homo sapiens
atgctgaaatggagc

SEQ ID NO: 267894 - DNA, 15 bp, Homo sapiens
catgctgaaatggag

SEQ ID NO: 267895 - DNA, 15 bp, Homo sapiens
gcatgctgaaatgga

SEQ ID NO: 267896 - DNA, 15 bp, Homo sapiens
tgcatgctgaaatgg

SEQ ID NO: 267897 - DNA, 15 bp, Homo sapiens
ttgcatgctgaaatg

SEQ ID NO: 267898 - DNA, 15 bp, Homo sapiens
tttgcatgctgaaat

SEQ ID NO: 267899 - DNA, 15 bp, Homo sapiens
atttgcatgctgaaa

SEQ ID NO: 267900 - DNA, 15 bp, Homo sapiens
gatttgcatgctgaa

SEQ ID NO: 267901 - DNA, 15 bp, Homo sapiens
agatttgcatgctga

SEQ ID NO: 267902 - DNA, 15 bp, Homo sapiens
tagatttgcatgctg

SEQ ID NO: 267903 - DNA, 15 bp, Homo sapiens
ttagatttgcatgct

SEQ ID NO: 267904 - DNA, 15 bp, Homo sapiens
tttagatttgcatgc

SEQ ID NO: 267905 - DNA, 15 bp, Homo sapiens
atttagatttgcatg

SEQ ID NO: 267906 - DNA, 15 bp, Homo sapiens
aatttagatttgcat

SEQ ID NO: 267907 - DNA, 15 bp, Homo sapiens
aaatttagatttgca

SEQ ID NO: 267908 - DNA, 15 bp, Homo sapiens
taaatttagatttgc

SEQ ID NO: 267909 - DNA, 15 bp, Homo sapiens
ttaaatttagatttg

SEQ ID NO: 267910 - DNA, 15 bp, Homo sapiens
tttaaatttagattt

SEQ ID NO: 267911 - DNA, 15 bp, Homo sapiens
atttaaatttagatt

SEQ ID NO: 267912 - DNA, 15 bp, Homo sapiens
tatttaaatttagat

SEQ ID NO: 267913 - DNA, 15 bp, Homo sapiens
ctatttaaatttaga

SEQ ID NO: 267914 - DNA, 15 bp, Homo sapiens
actatttaaatttag

SEQ ID NO: 267915 - DNA, 15 bp, Homo sapiens
gactatttaaattta

SEQ ID NO: 267916 - DNA, 15 bp, Homo sapiens
agactatttaaattt

SEQ ID NO: 267917 - DNA, 15 bp, Homo sapiens
aagactatttaaatt

SEQ ID NO: 267918 - DNA, 15 bp, Homo sapiens
gaagactatttaaat

SEQ ID NO: 267919 - DNA, 15 bp, Homo sapiens
agaagactatttaaa

SEQ ID NO: 267920 - DNA, 15 bp, Homo sapiens
cagaagactatttaa

SEQ ID NO: 267921 - DNA, 15 bp, Homo sapiens
ccagaagactattta

SEQ ID NO: 267922 - DNA, 15 bp, Homo sapiens
gccagaagactattt

SEQ ID NO: 267923 - DNA, 15 bp, Homo sapiens
agccagaagactatt

SEQ ID NO: 267924 - DNA, 15 bp, Homo sapiens
aagccagaagactat

SEQ ID NO: 267925 - DNA, 15 bp, Homo sapiens
aaagccagaagacta

SEQ ID NO: 267926 - DNA, 15 bp, Homo sapiens
aaaagccagaagact

SEQ ID NO: 267927 - DNA, 15 bp, Homo sapiens
taaaagccagaagac

SEQ ID NO: 267928 - DNA, 15 bp, Homo sapiens
ttaaaagccagaaga

SEQ ID NO: 267929 - DNA, 15 bp, Homo sapiens
cttaaaagccagaag

SEQ ID NO: 267930 - DNA, 15 bp, Homo sapiens
tcttaaaagccagaa

SEQ ID NO: 267931 - DNA, 15 bp, Homo sapiens
ttcttaaaagccaga

SEQ ID NO: 267932 - DNA, 15 bp, Homo sapiens
tttcttaaaagccag

SEQ ID NO: 267933 - DNA, 15 bp, Homo sapiens
ctttcttaaaagcca

SEQ ID NO: 267934 - DNA, 15 bp, Homo sapiens
gctttcttaaaagcc

SEQ ID NO: 267935 - DNA, 15 bp, Homo sapiens
ggctttcttaaaagc

SEQ ID NO: 267936 - DNA, 15 bp, Homo sapiens
gggctttcttaaaag

SEQ ID NO: 267937 - DNA, 15 bp, Homo sapiens
ggggctttcttaaaa

SEQ ID NO: 267938 - DNA, 15 bp, Homo sapiens
gggggctttcttaaa

SEQ ID NO: 267939 - DNA, 15 bp, Homo sapiens
agggggctttcttaa

SEQ ID NO: 267940 - DNA, 15 bp, Homo sapiens
tagggggctttctta

SEQ ID NO: 267941 - DNA, 15 bp, Homo sapiens
ctagggggctttctt

SEQ ID NO: 267942 - DNA, 15 bp, Homo sapiens
gctagggggctttct

SEQ ID NO: 267943 - DNA, 15 bp, Homo sapiens
agctagggggctttc

SEQ ID NO: 267944 - DNA, 15 bp, Homo sapiens
gagctagggggcttt

SEQ ID NO: 267945 - DNA, 15 bp, Homo sapiens
tgagctagggggctt

SEQ ID NO: 267946 - DNA, 15 bp, Homo sapiens
gtgagctagggggct

SEQ ID NO: 267947 - DNA, 15 bp, Homo sapiens
ggtgagctagggggc

SEQ ID NO: 267948 - DNA, 15 bp, Homo sapiens
aggtgagctaggggg

SEQ ID NO: 267949 - DNA, 15 bp, Homo sapiens
caggtgagctagggg

SEQ ID NO: 267950 - DNA, 15 bp, Homo sapiens
acaggtgagctaggg

SEQ ID NO: 267951 - DNA, 15 bp, Homo sapiens
cacaggtgagctagg

SEQ ID NO: 267952 - DNA, 15 bp, Homo sapiens
gcacaggtgagctag

SEQ ID NO: 267953 - DNA, 15 bp, Homo sapiens
tgcacaggtgagcta

SEQ ID NO: 267954 - DNA, 15 bp, Homo sapiens
ctgcacaggtgagct

SEQ ID NO: 267955 - DNA, 15 bp, Homo sapiens
actgcacaggtgagc

SEQ ID NO: 267956 - DNA, 15 bp, Homo sapiens
tactgcacaggtgag

SEQ ID NO: 267957 - DNA, 15 bp, Homo sapiens
gtactgcacaggtga

SEQ ID NO: 267958 - DNA, 15 bp, Homo sapiens
cgtactgcacaggtg

SEQ ID NO: 267959 - DNA, 15 bp, Homo sapiens
tcgtactgcacaggt

SEQ ID NO: 267960 - DNA, 15 bp, Homo sapiens
gtcgtactgcacagg

SEQ ID NO: 267961 - DNA, 15 bp, Homo sapiens
agtcgtactgcacag

SEQ ID NO: 267962 - DNA, 15 bp, Homo sapiens
cagtcgtactgcaca

SEQ ID NO: 267963 - DNA, 15 bp, Homo sapiens
tcagtcgtactgcac

SEQ ID NO: 267964 - DNA, 15 bp, Homo sapiens
ttcagtcgtactgca

SEQ ID NO: 267965 - DNA, 15 bp, Homo sapiens
gttcagtcgtactgc

SEQ ID NO: 267966 - DNA, 15 bp, Homo sapiens
agttcagtcgtactg

SEQ ID NO: 267967 - DNA, 15 bp, Homo sapiens
tagttcagtcgtact

SEQ ID NO: 267968 - DNA, 15 bp, Homo sapiens
gtagttcagtcgtac

SEQ ID NO: 267969 - DNA, 15 bp, Homo sapiens
agtagttcagtcgta

SEQ ID NO: 267970 - DNA, 15 bp, Homo sapiens
tagtagttcagtcgt

SEQ ID NO: 267971 - DNA, 15 bp, Homo sapiens
atagtagttcagtcg

SEQ ID NO: 267972 - DNA, 15 bp, Homo sapiens
catagtagttcagtc

SEQ ID NO: 267973 - DNA, 15 bp, Homo sapiens
tcatagtagttcagt

SEQ ID NO: 267974 - DNA, 15 bp, Homo sapiens
ttcatagtagttcag

SEQ ID NO: 267975 - DNA, 15 bp, Homo sapiens
tttcatagtagttca

SEQ ID NO: 267976 - DNA, 15 bp, Homo sapiens
gtttcatagtagttc

SEQ ID NO: 267977 - DNA, 15 bp, Homo sapiens
ggtttcatagtagtt

SEQ ID NO: 267978 - DNA, 15 bp, Homo sapiens
tggtttcatagtagt

SEQ ID NO: 267979 - DNA, 15 bp, Homo sapiens
ctggtttcatagtag

SEQ ID NO: 267980 - DNA, 15 bp, Homo sapiens
gctggtttcatagta

SEQ ID NO: 267981 - DNA, 15 bp, Homo sapiens
tgctggtttcatagt

SEQ ID NO: 267982 - DNA, 15 bp, Homo sapiens
gtgctggtttcatag

SEQ ID NO: 267983 - DNA, 15 bp, Homo sapiens
agtgctggtttcata

SEQ ID NO: 267984 - DNA, 15 bp, Homo sapiens
cagtgctggtttcat

SEQ ID NO: 267985 - DNA, 15 bp, Homo sapiens
ccagtgctggtttca

SEQ ID NO: 267986 - DNA, 15 bp, Homo sapiens
accagtgctggtttc

SEQ ID NO: 267987 - DNA, 15 bp, Homo sapiens
caccagtgctggttt

SEQ ID NO: 267988 - DNA, 15 bp, Homo sapiens
tcaccagtgctggtt

SEQ ID NO: 267989 - DNA, 15 bp, Homo sapiens
ttcaccagtgctggt

SEQ ID NO: 267990 - DNA, 15 bp, Homo sapiens
gttcaccagtgctgg

SEQ ID NO: 267991 - DNA, 15 bp, Homo sapiens
tgttcaccagtgctg

SEQ ID NO: 267992 - DNA, 15 bp, Homo sapiens
atgttcaccagtgct

SEQ ID NO: 267993 - DNA, 15 bp, Homo sapiens
tatgttcaccagtgc

SEQ ID NO: 267994 - DNA, 15 bp, Homo sapiens
atatgttcaccagtg

SEQ ID NO: 267995 - DNA, 15 bp, Homo sapiens
tatatgttcaccagt

SEQ ID NO: 267996 - DNA, 15 bp, Homo sapiens
atatatgttcaccag

SEQ ID NO: 267997 - DNA, 15 bp, Homo sapiens
catatatgttcacca

SEQ ID NO: 267998 - DNA, 15 bp, Homo sapiens
acatatatgttcacc

SEQ ID NO: 267999 - DNA, 15 bp, Homo sapiens
cacatatatgttcac

SEQ ID NO: 268000 - DNA, 15 bp, Homo sapiens
acacatatatgttca

SEQ ID NO: 268001 - DNA, 15 bp, Homo sapiens
cacacatatatgttc

SEQ ID NO: 268002 - DNA, 15 bp, Homo sapiens
ccacacatatatgtt

SEQ ID NO: 268003 - DNA, 15 bp, Homo sapiens
tccacacatatatgt

SEQ ID NO: 268004 - DNA, 15 bp, Homo sapiens
ttccacacatatatg

SEQ ID NO: 268005 - DNA, 15 bp, Homo sapiens
tttccacacatatat

SEQ ID NO: 268006 - DNA, 15 bp, Homo sapiens
gtttccacacatata

SEQ ID NO: 268007 - DNA, 15 bp, Homo sapiens
tgtttccacacatat

SEQ ID NO: 268008 - DNA, 15 bp, Homo sapiens
gtgtttccacacata

SEQ ID NO: 268009 - DNA, 15 bp, Homo sapiens
tgtgtttccacacat

SEQ ID NO: 268010 - DNA, 15 bp, Homo sapiens
ttgtgtttccacaca

SEQ ID NO: 268011 - DNA, 15 bp, Homo sapiens
gttgtgtttccacac

SEQ ID NO: 268012 - DNA, 15 bp, Homo sapiens
tgttgtgtttccaca

SEQ ID NO: 268013 - DNA, 15 bp, Homo sapiens
ttgttgtgtttccac

SEQ ID NO: 268014 - DNA, 15 bp, Homo sapiens
gttgttgtgtttcca

SEQ ID NO: 268015 - DNA, 15 bp, Homo sapiens
tgttgttgtgtttcc

SEQ ID NO: 268016 - DNA, 15 bp, Homo sapiens
ttgttgttgtgtttc

SEQ ID NO: 268017 - DNA, 15 bp, Homo sapiens
gttgttgttgtgttt

SEQ ID NO: 268018 - DNA, 15 bp, Homo sapiens
tgttgttgttgtgtt

SEQ ID NO: 268019 - DNA, 15 bp, Homo sapiens
ttgttgttgttgtgt

SEQ ID NO: 268020 - DNA, 15 bp, Homo sapiens
tttgttgttgttgtg

SEQ ID NO: 268021 - DNA, 15 bp, Homo sapiens
attttgttgttgttg

SEQ ID NO: 268022 - DNA, 15 bp, Homo sapiens
gattttgttgttgtt

SEQ ID NO: 268023 - DNA, 15 bp, Homo sapiens
tgattttgttgttgt

SEQ ID NO: 268024 - DNA, 15 bp, Homo sapiens
ctgattttgttgttg

SEQ ID NO: 268025 - DNA, 15 bp, Homo sapiens
actgattttgttgtt

SEQ ID NO: 268026 - DNA, 15 bp, Homo sapiens
aactgattttgttgt

SEQ ID NO: 268027 - DNA, 15 bp, Homo sapiens
caactgattttgttg

SEQ ID NO: 268028 - DNA, 15 bp, Homo sapiens
acaactgattttgtt

SEQ ID NO: 268029 - DNA, 15 bp, Homo sapiens
aacaactgattttgt

SEQ ID NO: 268030 - DNA, 15 bp, Homo sapiens
gaacaactgattttg

SEQ ID NO: 268031 - DNA, 15 bp, Homo sapiens
tgaacaactgatttt

SEQ ID NO: 268032 - DNA, 15 bp, Homo sapiens
ttgaacaactgattt

SEQ ID NO: 268033 - DNA, 15 bp, Homo sapiens
tttgaacaactgatt

SEQ ID NO: 268034 - DNA, 15 bp, Homo sapiens
ttttgaacaactgat

SEQ ID NO: 268035 - DNA, 15 bp, Homo sapiens
cttttgaacaactga

SEQ ID NO: 268036 - DNA, 15 bp, Homo sapiens
tcttttgaacaactg

SEQ ID NO: 268037 - DNA, 15 bp, Homo sapiens
gtcttttgaacaact

SEQ ID NO: 268038 - DNA, 15 bp, Homo sapiens
tgtcttttgaacaac

SEQ ID NO: 268039 - DNA, 15 bp, Homo sapiens
atgtcttttgaacaa

SEQ ID NO: 268040 - DNA, 15 bp, Homo sapiens
tatgtcttttgaaca

SEQ ID NO: 268041 - DNA, 15 bp, Homo sapiens
atatgtcttttgaac

SEQ ID NO: 268042 - DNA, 15 bp, Homo sapiens
aatatgtcttttgaa

SEQ ID NO: 268043 - DNA, 15 bp, Homo sapiens
aaatatgtcttttga

SEQ ID NO: 268044 - DNA, 15 bp, Homo sapiens
taaatatgtcttttg

SEQ ID NO: 268045 - DNA, 15 bp, Homo sapiens
ataaatatgtctttt

SEQ ID NO: 268046 - DNA, 15 bp, Homo sapiens
aataaatatgtcttt

SEQ ID NO: 268047 - DNA, 15 bp, Homo sapiens
taataaatatgtctt

SEQ ID NO: 268048 - DNA, 15 bp, Homo sapiens
ataataaatatgtct

SEQ ID NO: 268049 - DNA, 15 bp, Homo sapiens
aataataaatatgtc

SEQ ID NO: 268050 - DNA, 15 bp, Homo sapiens
gaataataaatatgt

SEQ ID NO: 268051 - DNA, 15 bp, Homo sapiens
ggaataataaatatg

SEQ ID NO: 268052 - DNA, 15 bp, Homo sapiens
aggaataataaatat

SEQ ID NO: 268053 - DNA, 15 bp, Homo sapiens
aaggaataataaata

SEQ ID NO: 268054 - DNA, 15 bp, Homo sapiens
gaaggaataataaat

SEQ ID NO: 268055 - DNA, 15 bp, Homo sapiens
tgaaggaataataaa

SEQ ID NO: 268056 - DNA, 15 bp, Homo sapiens
ctgaaggaataataa

SEQ ID NO: 268057 - DNA, 15 bp, Homo sapiens
gctgaaggaataata

SEQ ID NO: 268058 - DNA, 15 bp, Homo sapiens
tgctgaaggaataat

SEQ ID NO: 268059 - DNA, 15 bp, Homo sapiens
ctgctgaaggaataa

SEQ ID NO: 268060 - DNA, 15 bp, Homo sapiens
tctgctgaaggaata

SEQ ID NO: 268061 - DNA, 15 bp, Homo sapiens
ctctgctgaaggaat

SEQ ID NO: 268062 - DNA, 15 bp, Homo sapiens
tctctgctgaaggaa

SEQ ID NO: 268063 - DNA, 15 bp, Homo sapiens
ctctctgctgaagga

SEQ ID NO: 268064 - DNA, 15 bp, Homo sapiens
cctctctgctgaagg

SEQ ID NO: 268065 - DNA, 15 bp, Homo sapiens
gcctctctgctgaag

SEQ ID NO: 268066 - DNA, 15 bp, Homo sapiens
ggcctctctgctgaa

SEQ ID NO: 268067 - DNA, 15 bp, Homo sapiens
gggcctctctgctga

SEQ ID NO: 268068 - DNA, 15 bp, Homo sapiens
tgggcctctctgctg

SEQ ID NO: 268069 - DNA, 15 bp, Homo sapiens
atgggcctctctgct

SEQ ID NO: 268070 - DNA, 15 bp, Homo sapiens
gatgggcctctctgc

SEQ ID NO: 268071 - DNA, 15 bp, Homo sapiens
agatgggcctctctg

SEQ ID NO: 268072 - DNA, 15 bp, Homo sapiens
cagatgggcctctct

SEQ ID NO: 268073 - DNA, 15 bp, Homo sapiens
tcagatgggcctctc

SEQ ID NO: 268074 - DNA, 15 bp, Homo sapiens
atcagatgggcctct

SEQ ID NO: 268075 - DNA, 15 bp, Homo sapiens
catcagatgggcctc

SEQ ID NO: 268076 - DNA, 15 bp, Homo sapiens
gcatcagatgggcct

SEQ ID NO: 268077 - DNA, 15 bp, Homo sapiens
agcatcagatgggcc

SEQ ID NO: 268078 - DNA, 15 bp, Homo sapiens
gagcatcagatgggc

SEQ ID NO: 268079 - DNA, 15 bp, Homo sapiens
agagcatcagatggg

SEQ ID NO: 268080 - DNA, 15 bp, Homo sapiens
cagagcatcagatgg

SEQ ID NO: 268081 - DNA, 15 bp, Homo sapiens
ccagagcatcagatg

SEQ ID NO: 268082 - DNA, 15 bp, Homo sapiens
cccagagcatcagat

SEQ ID NO: 268083 - DNA, 15 bp, Homo sapiens
ccccagagcatcaga

SEQ ID NO: 268084 - DNA, 15 bp, Homo sapiens
gccccagagcatcag

SEQ ID NO: 268085 - DNA, 15 bp, Homo sapiens
cgccccagagcatca

SEQ ID NO: 268086 - DNA, 15 bp, Homo sapiens
gcgccccagagcatc

SEQ ID NO: 268087 - DNA, 15 bp, Homo sapiens
tgcgccccagagcat

SEQ ID NO: 268088 - DNA, 15 bp, Homo sapiens
ctgcgccccagagca

SEQ ID NO: 268089 - DNA, 15 bp, Homo sapiens
cctgcgccccagagc

SEQ ID NO: 268090 - DNA, 15 bp, Homo sapiens
acctgcgccccagag

SEQ ID NO: 268091 - DNA, 15 bp, Homo sapiens
gacctgcgccccaga

SEQ ID NO: 268092 - DNA, 15 bp, Homo sapiens
ggacctgcgccccag

SEQ ID NO: 268093 - DNA, 15 bp, Homo sapiens
gggacctgcgcccca

SEQ ID NO: 268094 - DNA, 15 bp, Homo sapiens
tgggacctgcgcccc

SEQ ID NO: 268095 - DNA, 15 bp, Homo sapiens
atgggacctgcgccc

SEQ ID NO: 268096 - DNA, 15 bp, Homo sapiens
catgggacctgcgcc

SEQ ID NO: 268097 - DNA, 15 bp, Homo sapiens
tcatgggacctgcgc

SEQ ID NO: 268098 - DNA, 15 bp, Homo sapiens
ttcatgggacctgcg

SEQ ID NO: 268099 - DNA, 15 bp, Homo sapiens
attcatgggacctgc

SEQ ID NO: 268100 - DNA, 15 bp, Homo sapiens
cattcatgggacctg

SEQ ID NO: 268101 - DNA, 15 bp, Homo sapiens
acattcatgggacct

SEQ ID NO: 268102 - DNA, 15 bp, Homo sapiens
aacattcatgggacc

SEQ ID NO: 268103 - DNA, 15 bp, Homo sapiens
gaacattcatgggac

SEQ ID NO: 268104 - DNA, 15 bp, Homo sapiens
tgaacattcatggga

SEQ ID NO: 268105 - DNA, 15 bp, Homo sapiens
ctgaacattcatggg

SEQ ID NO: 268106 - DNA, 15 bp, Homo sapiens
cctgaacattcatgg

SEQ ID NO: 268107 - DNA, 15 bp, Homo sapiens
ccctgaacattcatg

SEQ ID NO: 268108 - DNA, 15 bp, Homo sapiens
gccctgaacattcat

SEQ ID NO: 268109 - DNA, 15 bp, Homo sapiens
tgccctgaacattca

SEQ ID NO: 268110 - DNA, 15 bp, Homo sapiens
ctgccctgaacattc

SEQ ID NO: 268111 - DNA, 15 bp, Homo sapiens
actgccctgaacatt

SEQ ID NO: 268112 - DNA, 15 bp, Homo sapiens
gactgccctgaacat

SEQ ID NO: 268113 - DNA, 15 bp, Homo sapiens
agactgccctgaaca

SEQ ID NO: 268114 - DNA, 15 bp, Homo sapiens
gagactgccctgaac

SEQ ID NO: 268115 - DNA, 15 bp, Homo sapiens
agagactgccctgaa

SEQ ID NO: 268116 - DNA, 15 bp, Homo sapiens
cagagactgccctga

SEQ ID NO: 268117 - DNA, 15 bp, Homo sapiens
gcagagactgccctg

SEQ ID NO: 268118 - DNA, 15 bp, Homo sapiens
ggcagagactgccct

SEQ ID NO: 268119 - DNA, 15 bp, Homo sapiens
gggcagagactgccc

SEQ ID NO: 268120 - DNA, 15 bp, Homo sapiens
tgggcagagactgcc

SEQ ID NO: 268121 - DNA, 15 bp, Homo sapiens
ctgggcagagactgc

SEQ ID NO: 268122 - DNA, 15 bp, Homo sapiens
cctgggcagagactg

SEQ ID NO: 268123 - DNA, 15 bp, Homo sapiens
gcctgggcagagact

SEQ ID NO: 268124 - DNA, 15 bp, Homo sapiens
ggcctgggcagagac

SEQ ID NO: 268125 - DNA, 15 bp, Homo sapiens
tggcctgggcagaga

SEQ ID NO: 268126 - DNA, 15 bp, Homo sapiens
ctggcctgggcagag

SEQ ID NO: 268127 - DNA, 15 bp, Homo sapiens
gctggcctgggcaga

SEQ ID NO: 268128 - DNA, 15 bp, Homo sapiens
agctggcctgggcag

SEQ ID NO: 268129 - DNA, 15 bp, Homo sapiens
gagctggcctgggca

SEQ ID NO: 268130 - DNA, 15 bp, Homo sapiens
ggagctggcctgggc

SEQ ID NO: 268131 - DNA, 15 bp, Homo sapiens
aggagctggcctggg

SEQ ID NO: 268132 - DNA, 15 bp, Homo sapiens
aaggagctggcctgg

SEQ ID NO: 268133 - DNA, 15 bp, Homo sapiens
gaaggagctggcctg

SEQ ID NO: 268134 - DNA, 15 bp, Homo sapiens
ggaaggagctggcct

SEQ ID NO: 268135 - DNA, 15 bp, Homo sapiens
gggaaggagctggcc

SEQ ID NO: 268136 - DNA, 15 bp, Homo sapiens
ggggaaggagctggc

SEQ ID NO: 268137 - DNA, 15 bp, Homo sapiens
cggggaaggagctgg

SEQ ID NO: 268138 - DNA, 15 bp, Homo sapiens
tcggggaaggagctg

SEQ ID NO: 268139 - DNA, 15 bp, Homo sapiens
atcggggaaggagct

SEQ ID NO: 268140 - DNA, 15 bp, Homo sapiens
aatcggggaaggagc

SEQ ID NO: 268141 - DNA, 15 bp, Homo sapiens
caatcggggaaggag

SEQ ID NO: 268142 - DNA, 15 bp, Homo sapiens
acaatcggggaagga

SEQ ID NO: 268143 - DNA, 15 bp, Homo sapiens
gacaatcggggaagg

SEQ ID NO: 268144 - DNA, 15 bp, Homo sapiens
ggacaatcggggaag

SEQ ID NO: 268145 - DNA, 15 bp, Homo sapiens
tggacaatcggggaa

SEQ ID NO: 268146 - DNA, 15 bp, Homo sapiens
gtggacaatcgggga

SEQ ID NO: 268147 - DNA, 15 bp, Homo sapiens
tgtggacaatcgggg

SEQ ID NO: 268148 - DNA, 15 bp, Homo sapiens
ctgtggacaatcggg

SEQ ID NO: 268149 - DNA, 15 bp, Homo sapiens
actgtggacaatcgg

SEQ ID NO: 268150 - DNA, 15 bp, Homo sapiens
cactgtggacaatcg

SEQ ID NO: 268151 - DNA, 15 bp, Homo sapiens
tcactgtggacaatc

SEQ ID NO: 268152 - DNA, 15 bp, Homo sapiens
atcactgtggacaat

SEQ ID NO: 268153 - DNA, 15 bp, Homo sapiens
catcactgtggacaa

SEQ ID NO: 268154 - DNA, 15 bp, Homo sapiens
tcatcactgtggaca

SEQ ID NO: 268155 - DNA, 15 bp, Homo sapiens
atcatcactgtggac

SEQ ID NO: 268156 - DNA, 15 bp, Homo sapiens
gatcatcactgtgga

SEQ ID NO: 268157 - DNA, 15 bp, Homo sapiens
agatcatcactgtgg

SEQ ID NO: 268158 - DNA, 15 bp, Homo sapiens
gagatcatcactgtg

SEQ ID NO: 268159 - DNA, 15 bp, Homo sapiens
agagatcatcactgt

SEQ ID NO: 268160 - DNA, 15 bp, Homo sapiens
aagagatcatcactg

SEQ ID NO: 268161 - DNA, 15 bp, Homo sapiens
taagagatcatcact

SEQ ID NO: 268162 - DNA, 15 bp, Homo sapiens
gtaagagatcatcac

SEQ ID NO: 268163 - DNA, 15 bp, Homo sapiens
tgtaagagatcatca

SEQ ID NO: 268164 - DNA, 15 bp, Homo sapiens
ctgtaagagatcatc

SEQ ID NO: 268165 - DNA, 15 bp, Homo sapiens
tctgtaagagatcat

SEQ ID NO: 268166 - DNA, 15 bp, Homo sapiens
gtctgtaagagatca

SEQ ID NO: 268167 - DNA, 15 bp, Homo sapiens
agtctgtaagagatc

SEQ ID NO: 268168 - DNA, 15 bp, Homo sapiens
cagtctgtaagagat

SEQ ID NO: 268169 - DNA, 15 bp, Homo sapiens
acagtctgtaagaga

SEQ ID NO: 268170 - DNA, 15 bp, Homo sapiens
gacagtctgtaagag

SEQ ID NO: 268171 - DNA, 15 bp, Homo sapiens
ggacagtctgtaaga

SEQ ID NO: 268172 - DNA, 15 bp, Homo sapiens
aggacagtctgtaag

SEQ ID NO: 268173 - DNA, 15 bp, Homo sapiens
caggacagtctgtaa

SEQ ID NO: 268174 - DNA, 15 bp, Homo sapiens
gcaggacagtctgta

SEQ ID NO: 268175 - DNA, 15 bp, Homo sapiens
ggcaggacagtctgt

SEQ ID NO: 268176 - DNA, 15 bp, Homo sapiens
aggcaggacagtctg

SEQ ID NO: 268177 - DNA, 15 bp, Homo sapiens
caggcaggacagtct

SEQ ID NO: 268178 - DNA, 15 bp, Homo sapiens
gcaggcaggacagtc

SEQ ID NO: 268179 - DNA, 15 bp, Homo sapiens
ggcaggcaggacagt

SEQ ID NO: 268180 - DNA, 15 bp, Homo sapiens
gggcaggcaggacag

SEQ ID NO: 268181 - DNA, 15 bp, Homo sapiens
agggcaggcaggaca

SEQ ID NO: 268182 - DNA, 15 bp, Homo sapiens
cagggcaggcaggac

SEQ ID NO: 268183 - DNA, 15 bp, Homo sapiens
gcagggcaggcagga

SEQ ID NO: 268184 - DNA, 15 bp, Homo sapiens
tgcagggcaggcagg

SEQ ID NO: 268185 - DNA, 15 bp, Homo sapiens
gtgcagggcaggcag

SEQ ID NO: 268186 - DNA, 15 bp, Homo sapiens
tgtgcagggcaggca

SEQ ID NO: 268187 - DNA, 15 bp, Homo sapiens
gtgtgcagggcaggc

SEQ ID NO: 268188 - DNA, 15 bp, Homo sapiens
tgtgtgcagggcagg

SEQ ID NO: 268189 - DNA, 15 bp, Homo sapiens
ttgtgtgcagggcag

SEQ ID NO: 268190 - DNA, 15 bp, Homo sapiens
attgtgtgcagggca

SEQ ID NO: 268191 - DNA, 15 bp, Homo sapiens
cattgtgtgcagggc

SEQ ID NO: 268192 - DNA, 15 bp, Homo sapiens
ccattgtgtgcaggg

SEQ ID NO: 268193 - DNA, 15 bp, Homo sapiens
cccattgtgtgcagg

SEQ ID NO: 268194 - DNA, 15 bp, Homo sapiens
tcccattgtgtgcag

SEQ ID NO: 268195 - DNA, 15 bp, Homo sapiens
ctcccattgtgtgca

SEQ ID NO: 268196 - DNA, 15 bp, Homo sapiens
gctcccattgtgtgc

SEQ ID NO: 268197 - DNA, 15 bp, Homo sapiens
ggctcccattgtgtg

SEQ ID NO: 268198 - DNA, 15 bp, Homo sapiens
tggctcccattgtgt

SEQ ID NO: 268199 - DNA, 15 bp, Homo sapiens
ctggctcccattgtg

SEQ ID NO: 268200 - DNA, 15 bp, Homo sapiens
actggctcccattgt

SEQ ID NO: 268201 - DNA, 15 bp, Homo sapiens
gactggctcccattg

SEQ ID NO: 268202 - DNA, 15 bp, Homo sapiens
agactggctcccatt

SEQ ID NO: 268203 - DNA, 15 bp, Homo sapiens
cagactggctcccat

SEQ ID NO: 268204 - DNA, 15 bp, Homo sapiens
tccagactggctccc

SEQ ID NO: 268205 - DNA, 15 bp, Homo sapiens
ctccagactggctcc

SEQ ID NO: 268206 - DNA, 15 bp, Homo sapiens
cctccagactggctc

SEQ ID NO: 268207 - DNA, 15 bp, Homo sapiens
tcctccagactggct

SEQ ID NO: 268208 - DNA, 15 bp, Homo sapiens
ttcctccagactggc

SEQ ID NO: 268209 - DNA, 15 bp, Homo sapiens
cttcctccagactgg

SEQ ID NO: 268210 - DNA, 15 bp, Homo sapiens
ccttcctccagactg

SEQ ID NO: 268211 - DNA, 15 bp, Homo sapiens
accttcctccagact

SEQ ID NO: 268212 - DNA, 15 bp, Homo sapiens
aaccttcctccagac

SEQ ID NO: 268213 - DNA, 15 bp, Homo sapiens
aaaccttcctccaga

SEQ ID NO: 268214 - DNA, 15 bp, Homo sapiens
caaaccttcctccag

SEQ ID NO: 268215 - DNA, 15 bp, Homo sapiens
ccaaaccttcctcca

SEQ ID NO: 268216 - DNA, 15 bp, Homo sapiens
accaaaccttcctcc

SEQ ID NO: 268217 - DNA, 15 bp, Homo sapiens
caccaaaccttcctc

SEQ ID NO: 268218 - DNA, 15 bp, Homo sapiens
ccaccaaaccttcct

SEQ ID NO: 268219 - DNA, 15 bp, Homo sapiens
gccaccaaaccttcc

SEQ ID NO: 268220 - DNA, 15 bp, Homo sapiens
ggccaccaaaccttc

SEQ ID NO: 268221 - DNA, 15 bp, Homo sapiens
tggccaccaaacctt

SEQ ID NO: 268222 - DNA, 15 bp, Homo sapiens
atggccaccaaacct

SEQ ID NO: 268223 - DNA, 15 bp, Homo sapiens
gatggccaccaaacc

SEQ ID NO: 268224 - DNA, 15 bp, Homo sapiens
tgatggccaccaaac

SEQ ID NO: 268225 - DNA, 15 bp, Homo sapiens
gtgatggccaccaaa

SEQ ID NO: 268226 - DNA, 15 bp, Homo sapiens
agtgatggccaccaa

SEQ ID NO: 268227 - DNA, 15 bp, Homo sapiens
gagtgatggccacca

SEQ ID NO: 268228 - DNA, 15 bp, Homo sapiens
agagtgatggccacc

SEQ ID NO: 268229 - DNA, 15 bp, Homo sapiens
cagagtgatggccac

SEQ ID NO: 268230 - DNA, 15 bp, Homo sapiens
ccagagtgatggcca

SEQ ID NO: 268231 - DNA, 15 bp, Homo sapiens
gccagagtgatggcc

SEQ ID NO: 268232 - DNA, 15 bp, Homo sapiens
cgccagagtgatggc

SEQ ID NO: 268233 - DNA, 15 bp, Homo sapiens
ccgccagagtgatgg

SEQ ID NO: 268234 - DNA, 15 bp, Homo sapiens
cccgccagagtgatg

SEQ ID NO: 268235 - DNA, 15 bp, Homo sapiens
gcccgccagagtgat

SEQ ID NO: 268236 - DNA, 15 bp, Homo sapiens
tgcccgccagagtga

SEQ ID NO: 268237 - DNA, 15 bp, Homo sapiens
gtgcccgccagagtg

SEQ ID NO: 268238 - DNA, 15 bp, Homo sapiens
agtgcccgccagagt

SEQ ID NO: 268239 - DNA, 15 bp, Homo sapiens
cagtgcccgccagag

SEQ ID NO: 268240 - DNA, 15 bp, Homo sapiens
ccagtgcccgccaga

SEQ ID NO: 268241 - DNA, 15 bp, Homo sapiens
tccagtgcccgccag

SEQ ID NO: 268242 - DNA, 15 bp, Homo sapiens
ttccagtgcccgcca

SEQ ID NO: 268243 - DNA, 15 bp, Homo sapiens
tttccagtgcccgcc

SEQ ID NO: 268244 - DNA, 15 bp, Homo sapiens
ctttccagtgcccgc

SEQ ID NO: 268245 - DNA, 15 bp, Homo sapiens
tctttccagtgcccg

SEQ ID NO: 268246 - DNA, 15 bp, Homo sapiens
ttctttccagtgccc

SEQ ID NO: 268247 - DNA, 15 bp, Homo sapiens
gttctttccagtgcc

SEQ ID NO: 268248 - DNA, 15 bp, Homo sapiens
agttctttccagtgc

SEQ ID NO: 268249 - DNA, 15 bp, Homo sapiens
gagttctttccagtg

SEQ ID NO: 268250 - DNA, 15 bp, Homo sapiens
agagttctttccagt

SEQ ID NO: 268251 - DNA, 15 bp, Homo sapiens
cagagttctttccag

SEQ ID NO: 268252 - DNA, 15 bp, Homo sapiens
gcagagttctttcca

SEQ ID NO: 268253 - DNA, 15 bp, Homo sapiens
agcagagttctttcc

SEQ ID NO: 268254 - DNA, 15 bp, Homo sapiens
cagcagagttctttc

SEQ ID NO: 268255 - DNA, 15 bp, Homo sapiens
ccagcagagttcttt

SEQ ID NO: 268256 - DNA, 15 bp, Homo sapiens
tccagcagagttctt

SEQ ID NO: 268257 - DNA, 15 bp, Homo sapiens
atccagcagagttct

SEQ ID NO: 268258 - DNA, 15 bp, Homo sapiens
catccagcagagttc

SEQ ID NO: 268259 - DNA, 15 bp, Homo sapiens
gcatccagcagagtt

SEQ ID NO: 268260 - DNA, 15 bp, Homo sapiens
ggcatccagcagagt

SEQ ID NO: 268261 - DNA, 15 bp, Homo sapiens
cggcatccagcagag

SEQ ID NO: 268262 - DNA, 15 bp, Homo sapiens
tcggcatccagcaga

SEQ ID NO: 268263 - DNA, 15 bp, Homo sapiens
ctcggcatccagcag

SEQ ID NO: 268264 - DNA, 15 bp, Homo sapiens
cctcggcatccagca

SEQ ID NO: 268265 - DNA, 15 bp, Homo sapiens
ccctcggcatccagc

SEQ ID NO: 268266 - DNA, 15 bp, Homo sapiens
gccctcggcatccag

SEQ ID NO: 268267 - DNA, 15 bp, Homo sapiens
ggccctcggcatcca

SEQ ID NO: 268268 - DNA, 15 bp, Homo sapiens
tggccctcggcatcc

SEQ ID NO: 268269 - DNA, 15 bp, Homo sapiens
atggccctcggcatc

SEQ ID NO: 268270 - DNA, 15 bp, Homo sapiens
aatggccctcggcat

SEQ ID NO: 268271 - DNA, 15 bp, Homo sapiens
aaatggccctcggca

SEQ ID NO: 268272 - DNA, 15 bp, Homo sapiens
gaaatggccctcggc

SEQ ID NO: 268273 - DNA, 15 bp, Homo sapiens
agaaatggccctcgg

SEQ ID NO: 268274 - DNA, 15 bp, Homo sapiens
gagaaatggccctcg

SEQ ID NO: 268275 - DNA, 15 bp, Homo sapiens
agagaaatggccctc

SEQ ID NO: 268276 - DNA, 15 bp, Homo sapiens
gagagaaatggccct

SEQ ID NO: 268277 - DNA, 15 bp, Homo sapiens
agagagaaatggccc

SEQ ID NO: 268278 - DNA, 15 bp, Homo sapiens
cagagagaaatggcc

SEQ ID NO: 268279 - DNA, 15 bp, Homo sapiens
ccagagagaaatggc

SEQ ID NO: 268280 - DNA, 15 bp, Homo sapiens
tccagagagaaatgg

SEQ ID NO: 268281 - DNA, 15 bp, Homo sapiens
gtccagagagaaatg

SEQ ID NO: 268282 - DNA, 15 bp, Homo sapiens
agtccagagagaaat

SEQ ID NO: 268283 - DNA, 15 bp, Homo sapiens
aagtccagagagaaa

SEQ ID NO: 268284 - DNA, 15 bp, Homo sapiens
caagtccagagagaa

SEQ ID NO: 268285 - DNA, 15 bp, Homo sapiens
gcaagtccagagaga

SEQ ID NO: 268286 - DNA, 15 bp, Homo sapiens
agcaagtccagagag

SEQ ID NO: 268287 - DNA, 15 bp, Homo sapiens
cagcaagtccagaga

SEQ ID NO: 268288 - DNA, 15 bp, Homo sapiens
ccagcaagtccagag

SEQ ID NO: 268289 - DNA, 15 bp, Homo sapiens
accagcaagtccaga

SEQ ID NO: 268290 - DNA, 15 bp, Homo sapiens
caccagcaagtccag

SEQ ID NO: 268291 - DNA, 15 bp, Homo sapiens
acaccagcaagtcca

SEQ ID NO: 268292 - DNA, 15 bp, Homo sapiens
aacaccagcaagtcc

SEQ ID NO: 268293 - DNA, 15 bp, Homo sapiens
gaacaccagcaagtc

SEQ ID NO: 268294 - DNA, 15 bp, Homo sapiens
tgaacaccagcaagt

SEQ ID NO: 268295 - DNA, 15 bp, Homo sapiens
ctgaacaccagcaag

SEQ ID NO: 268296 - DNA, 15 bp, Homo sapiens
actgaacaccagcaa

SEQ ID NO: 268297 - DNA, 15 bp, Homo sapiens
cactgaacaccagca

SEQ ID NO: 268298 - DNA, 15 bp, Homo sapiens
acactgaacaccagc

SEQ ID NO: 268299 - DNA, 15 bp, Homo sapiens
cacactgaacaccag

SEQ ID NO: 268300 - DNA, 15 bp, Homo sapiens
ccacactgaacacca

SEQ ID NO: 268301 - DNA, 15 bp, Homo sapiens
tccacactgaacacc

SEQ ID NO: 268302 - DNA, 15 bp, Homo sapiens
ttccacactgaacac

SEQ ID NO: 268303 - DNA, 15 bp, Homo sapiens
cttccacactgaaca

SEQ ID NO: 268304 - DNA, 15 bp, Homo sapiens
acttccacactgaac

SEQ ID NO: 268305 - DNA, 15 bp, Homo sapiens
cacttccacactgaa

SEQ ID NO: 268306 - DNA, 15 bp, Homo sapiens
ccacttccacactga

SEQ ID NO: 268307 - DNA, 15 bp, Homo sapiens
cccacttccacactg

SEQ ID NO: 268308 - DNA, 15 bp, Homo sapiens
tcccacttccacact

SEQ ID NO: 268309 - DNA, 15 bp, Homo sapiens
ctcccacttccacac

SEQ ID NO: 268310 - DNA, 15 bp, Homo sapiens
cctcccacttccaca

SEQ ID NO: 268311 - DNA, 15 bp, Homo sapiens
ccctcccacttccac

SEQ ID NO: 268312 - DNA, 15 bp, Homo sapiens
tccctcccacttcca

SEQ ID NO: 268313 - DNA, 15 bp, Homo sapiens
ttccctcccacttcc

SEQ ID NO: 268314 - DNA, 15 bp, Homo sapiens
tttccctcccacttc

SEQ ID NO: 268315 - DNA, 15 bp, Homo sapiens
atttccctcccactt

SEQ ID NO: 268316 - DNA, 15 bp, Homo sapiens
gatttccctcccact

SEQ ID NO: 268317 - DNA, 15 bp, Homo sapiens
tgatttccctcccac

SEQ ID NO: 268318 - DNA, 15 bp, Homo sapiens
ttgatttccctccca

SEQ ID NO: 268319 - DNA, 15 bp, Homo sapiens
tttgatttccctccc

SEQ ID NO: 268320 - DNA, 15 bp, Homo sapiens
atttgatttccctcc

SEQ ID NO: 268321 - DNA, 15 bp, Homo sapiens
catttgatttccctc

SEQ ID NO: 268322 - DNA, 15 bp, Homo sapiens
tcatttgatttccct

SEQ ID NO: 268323 - DNA, 15 bp, Homo sapiens
ctcatttgatttccc

SEQ ID NO: 268324 - DNA, 15 bp, Homo sapiens
cctcatttgatttcc

SEQ ID NO: 268325 - DNA, 15 bp, Homo sapiens
ccctcatttgatttc

SEQ ID NO: 268326 - DNA, 15 bp, Homo sapiens
cccctcatttgattt

SEQ ID NO: 268327 - DNA, 15 bp, Homo sapiens
tcccctcatttgatt

SEQ ID NO: 268328 - DNA, 15 bp, Homo sapiens
gtcccctcatttgat

SEQ ID NO: 268329 - DNA, 15 bp, Homo sapiens
ggtcccctcatttga

SEQ ID NO: 268330 - DNA, 15 bp, Homo sapiens
aaggtcccctcattt

SEQ ID NO: 268331 - DNA, 15 bp, Homo sapiens
aaaggtcccctcatt

SEQ ID NO: 268332 - DNA, 15 bp, Homo sapiens
caaaggtcccctcat

SEQ ID NO: 268333 - DNA, 15 bp, Homo sapiens
ccaaaggtcccctca

SEQ ID NO: 268334 - DNA, 15 bp, Homo sapiens
cccaaaggtcccctc

SEQ ID NO: 268335 - DNA, 15 bp, Homo sapiens
tcccaaaggtcccct

SEQ ID NO: 268336 - DNA, 15 bp, Homo sapiens
ctcccaaaggtcccc

SEQ ID NO: 268337 - DNA, 15 bp, Homo sapiens
cctcccaaaggtccc

SEQ ID NO: 268338 - DNA, 15 bp, Homo sapiens
acctcccaaaggtcc

SEQ ID NO: 268339 - DNA, 15 bp, Homo sapiens
gacctcccaaaggtc

SEQ ID NO: 268340 - DNA, 15 bp, Homo sapiens
tgacctcccaaaggt

SEQ ID NO: 268341 - DNA, 15 bp, Homo sapiens
gtgacctcccaaagg

SEQ ID NO: 268342 - DNA, 15 bp, Homo sapiens
ggtgacctcccaaag

SEQ ID NO: 268343 - DNA, 15 bp, Homo sapiens
aggtgacctcccaaa

SEQ ID NO: 268344 - DNA, 15 bp, Homo sapiens
taggtgacctcccaa

SEQ ID NO: 268345 - DNA, 15 bp, Homo sapiens
ttaggtgacctccca

SEQ ID NO: 268346 - DNA, 15 bp, Homo sapiens
attaggtgacctccc

SEQ ID NO: 268347 - DNA, 15 bp, Homo sapiens
cattaggtgacctcc

SEQ ID NO: 268348 - DNA, 15 bp, Homo sapiens
acattaggtgacctc

SEQ ID NO: 268349 - DNA, 15 bp, Homo sapiens
cacattaggtgacct

SEQ ID NO: 268350 - DNA, 15 bp, Homo sapiens
ccacattaggtgacc

SEQ ID NO: 268351 - DNA, 15 bp, Homo sapiens
accacattaggtgac

SEQ ID NO: 268352 - DNA, 15 bp, Homo sapiens
taccacattaggtga

SEQ ID NO: 268353 - DNA, 15 bp, Homo sapiens
ctaccacattaggtg

SEQ ID NO: 268354 - DNA, 15 bp, Homo sapiens
cctaccacattaggt

SEQ ID NO: 268355 - DNA, 15 bp, Homo sapiens
tcctaccacattagg

SEQ ID NO: 268356 - DNA, 15 bp, Homo sapiens
gtcctaccacattag

SEQ ID NO: 268357 - DNA, 15 bp, Homo sapiens
ggtcctaccacatta

SEQ ID NO: 268358 - DNA, 15 bp, Homo sapiens
aggtcctaccacatt

SEQ ID NO: 268359 - DNA, 15 bp, Homo sapiens
taggtcctaccacat

SEQ ID NO: 268360 - DNA, 15 bp, Homo sapiens
ttaggtcctaccaca

SEQ ID NO: 268361 - DNA, 15 bp, Homo sapiens
tttaggtcctaccac

SEQ ID NO: 268362 - DNA, 15 bp, Homo sapiens
gtttaggtcctacca

SEQ ID NO: 268363 - DNA, 15 bp, Homo sapiens
agtttaggtcctacc

SEQ ID NO: 268364 - DNA, 15 bp, Homo sapiens
gagtttaggtcctac

SEQ ID NO: 268365 - DNA, 15 bp, Homo sapiens
tgagtttaggtccta

SEQ ID NO: 268366 - DNA, 15 bp, Homo sapiens
ctgagtttaggtcct

SEQ ID NO: 268367 - DNA, 15 bp, Homo sapiens
gctgagtttaggtcc

SEQ ID NO: 268368 - DNA, 15 bp, Homo sapiens
agctgagtttaggtc

SEQ ID NO: 268369 - DNA, 15 bp, Homo sapiens
cagctgagtttaggt

SEQ ID NO: 268370 - DNA, 15 bp, Homo sapiens
ccagctgagtttagg

SEQ ID NO: 268371 - DNA, 15 bp, Homo sapiens
cccagctgagtttag

SEQ ID NO: 268372 - DNA, 15 bp, Homo sapiens
acccagctgagttta

SEQ ID NO: 268373 - DNA, 15 bp, Homo sapiens
tacccagctgagttt

SEQ ID NO: 268374 - DNA, 15 bp, Homo sapiens
atacccagctgagtt

SEQ ID NO: 268375 - DNA, 15 bp, Homo sapiens
aatacccagctgagt

SEQ ID NO: 268376 - DNA, 15 bp, Homo sapiens
caatacccagctgag

SEQ ID NO: 268377 - DNA, 15 bp, Homo sapiens
ccaatacccagctga

SEQ ID NO: 268378 - DNA, 15 bp, Homo sapiens
tccaatacccagctg

SEQ ID NO: 268379 - DNA, 15 bp, Homo sapiens
ttccaatacccagct

SEQ ID NO: 268380 - DNA, 15 bp, Homo sapiens
attccaatacccagc

SEQ ID NO: 268381 - DNA, 15 bp, Homo sapiens
gattccaatacccag

SEQ ID NO: 268382 - DNA, 15 bp, Homo sapiens
tgattccaataccca

SEQ ID NO: 268383 - DNA, 15 bp, Homo sapiens
atgattccaataccc

SEQ ID NO: 268384 - DNA, 15 bp, Homo sapiens
gatgattccaatacc

SEQ ID NO: 268385 - DNA, 15 bp, Homo sapiens
agatgattccaatac

SEQ ID NO: 268386 - DNA, 15 bp, Homo sapiens
cagatgattccaata

SEQ ID NO: 268387 - DNA, 15 bp, Homo sapiens
ccagatgattccaat

SEQ ID NO: 268388 - DNA, 15 bp, Homo sapiens
tccagatgattccaa

SEQ ID NO: 268389 - DNA, 15 bp, Homo sapiens
ctccagatgattcca

SEQ ID NO: 268390 - DNA, 15 bp, Homo sapiens
tctccagatgattcc

SEQ ID NO: 268391 - DNA, 15 bp, Homo sapiens
atctccagatgattc

SEQ ID NO: 268392 - DNA, 15 bp, Homo sapiens
aatctccagatgatt

SEQ ID NO: 268393 - DNA, 15 bp, Homo sapiens
aaatctccagatgat

SEQ ID NO: 268394 - DNA, 15 bp, Homo sapiens
aaaatctccagatga

SEQ ID NO: 268395 - DNA, 15 bp, Homo sapiens
aaaaatctccagatg

SEQ ID NO: 268396 - DNA, 15 bp, Homo sapiens
aaaaaatctccagat

SEQ ID NO: 268397 - DNA, 15 bp, Homo sapiens
aaaaaaatctccaga

SEQ ID NO: 268398 - DNA, 15 bp, Homo sapiens
aaaaaaaatctccag

SEQ ID NO: 268399 - DNA, 15 bp, Homo sapiens
aaaaaaaaatctcca

SEQ ID NO: 268400 - DNA, 15 bp, Homo sapiens
gaaaaaaaaatctcc

SEQ ID NO: 268401 - DNA, 15 bp, Homo sapiens
tgaaaaaaaaatctc

SEQ ID NO: 268402 - DNA, 15 bp, Homo sapiens
ctgaaaaaaaaatct

SEQ ID NO: 268403 - DNA, 15 bp, Homo sapiens
actgaaaaaaaaatc

SEQ ID NO: 268404 - DNA, 15 bp, Homo sapiens
aactgaaaaaaaaat

SEQ ID NO: 268405 - DNA, 15 bp, Homo sapiens
taactgaaaaaaaaa

SEQ ID NO: 268406 - DNA, 15 bp, Homo sapiens
ctaactgaaaaaaaa

SEQ ID NO: 268407 - DNA, 15 bp, Homo sapiens
cctaactgaaaaaaa

SEQ ID NO: 268408 - DNA, 15 bp, Homo sapiens
ccctaactgaaaaaa

SEQ ID NO: 268409 - DNA, 15 bp, Homo sapiens
accctaactgaaaaa

SEQ ID NO: 268410 - DNA, 15 bp, Homo sapiens
caccctaactgaaaa

SEQ ID NO: 268411 - DNA, 15 bp, Homo sapiens
gcaccctaactgaaa

SEQ ID NO: 268412 - DNA, 15 bp, Homo sapiens
ggcaccctaactgaa

SEQ ID NO: 268413 - DNA, 15 bp, Homo sapiens
gggcaccctaactga

SEQ ID NO: 268414 - DNA, 15 bp, Homo sapiens
ggggcaccctaactg

SEQ ID NO: 268415 - DNA, 15 bp, Homo sapiens
gggggcaccctaact

SEQ ID NO: 268416 - DNA, 15 bp, Homo sapiens
agggggcaccctaac

SEQ ID NO: 268417 - DNA, 15 bp, Homo sapiens
gagggggcaccctaa

SEQ ID NO: 268418 - DNA, 15 bp, Homo sapiens
ggagggggcacccta

SEQ ID NO: 268419 - DNA, 15 bp, Homo sapiens
aggagggggcaccct

SEQ ID NO: 268420 - DNA, 15 bp, Homo sapiens
caggagggggcaccc

SEQ ID NO: 268421 - DNA, 15 bp, Homo sapiens
gcaggagggggcacc

SEQ ID NO: 268422 - DNA, 15 bp, Homo sapiens
ggcaggagggggcac

SEQ ID NO: 268423 - DNA, 15 bp, Homo sapiens
aggcaggagggggca

SEQ ID NO: 268424 - DNA, 15 bp, Homo sapiens
aaggcaggagggggc

SEQ ID NO: 268425 - DNA, 15 bp, Homo sapiens
taaggcaggaggggg

SEQ ID NO: 268426 - DNA, 15 bp, Homo sapiens
ataaggcaggagggg

SEQ ID NO: 268427 - DNA, 15 bp, Homo sapiens
gataaggcaggaggg

SEQ ID NO: 268428 - DNA, 15 bp, Homo sapiens
tgataaggcaggagg

SEQ ID NO: 268429 - DNA, 15 bp, Homo sapiens
gtgataaggcaggag

SEQ ID NO: 268430 - DNA, 15 bp, Homo sapiens
ggtgataaggcagga

SEQ ID NO: 268431 - DNA, 15 bp, Homo sapiens
tggtgataaggcagg

SEQ ID NO: 268432 - DNA, 15 bp, Homo sapiens
atggtgataaggcag

SEQ ID NO: 268433 - DNA, 15 bp, Homo sapiens
tatggtgataaggca

SEQ ID NO: 268434 - DNA, 15 bp, Homo sapiens
ctatggtgataaggc

SEQ ID NO: 268435 - DNA, 15 bp, Homo sapiens
tctatggtgataagg

SEQ ID NO: 268436 - DNA, 15 bp, Homo sapiens
atctatggtgataag

SEQ ID NO: 268437 - DNA, 15 bp, Homo sapiens
gatctatggtgataa

SEQ ID NO: 268438 - DNA, 15 bp, Homo sapiens
agatctatggtgata

SEQ ID NO: 268439 - DNA, 15 bp, Homo sapiens
cagatctatggtgat

SEQ ID NO: 268440 - DNA, 15 bp, Homo sapiens
gcagatctatggtga

SEQ ID NO: 268441 - DNA, 15 bp, Homo sapiens
tgcagatctatggtg

SEQ ID NO: 268442 - DNA, 15 bp, Homo sapiens
ctgcagatctatggt

SEQ ID NO: 268443 - DNA, 15 bp, Homo sapiens
actgcagatctatgg

SEQ ID NO: 268444 - DNA, 15 bp, Homo sapiens
cactgcagatctatg

SEQ ID NO: 268445 - DNA, 15 bp, Homo sapiens
gcactgcagatctat

SEQ ID NO: 268446 - DNA, 15 bp, Homo sapiens
tgcactgcagatcta

SEQ ID NO: 268447 - DNA, 15 bp, Homo sapiens
ctgcactgcagatct

SEQ ID NO: 268448 - DNA, 15 bp, Homo sapiens
gctgcactgcagatc

SEQ ID NO: 268449 - DNA, 15 bp, Homo sapiens
ggctgcactgcagat

SEQ ID NO: 268450 - DNA, 15 bp, Homo sapiens
gggctgcactgcaga

SEQ ID NO: 268451 - DNA, 15 bp, Homo sapiens
tgggctgcactgcag

SEQ ID NO: 268452 - DNA, 15 bp, Homo sapiens
ctgggctgcactgca

SEQ ID NO: 268453 - DNA, 15 bp, Homo sapiens
tctgggctgcactgc

SEQ ID NO: 268454 - DNA, 15 bp, Homo sapiens
gtctgggctgcactg

SEQ ID NO: 268455 - DNA, 15 bp, Homo sapiens
tgtctgggctgcact

SEQ ID NO: 268456 - DNA, 15 bp, Homo sapiens
atgtctgggctgcac

SEQ ID NO: 268457 - DNA, 15 bp, Homo sapiens
gatgtctgggctgca

SEQ ID NO: 268458 - DNA, 15 bp, Homo sapiens
ggatgtctgggctgc

SEQ ID NO: 268459 - DNA, 15 bp, Homo sapiens
tggatgtctgggctg

SEQ ID NO: 268460 - DNA, 15 bp, Homo sapiens
atggatgtctgggct

SEQ ID NO: 268461 - DNA, 15 bp, Homo sapiens
aatggatgtctgggc

SEQ ID NO: 268462 - DNA, 15 bp, Homo sapiens
aaatggatgtctggg

SEQ ID NO: 268463 - DNA, 15 bp, Homo sapiens
taaatggatgtctgg

SEQ ID NO: 268464 - DNA, 15 bp, Homo sapiens
ttaaatggatgtctg

SEQ ID NO: 268465 - DNA, 15 bp, Homo sapiens
tttaaatggatgtct

SEQ ID NO: 268466 - DNA, 15 bp, Homo sapiens
ttttaaatggatgtc

SEQ ID NO: 268467 - DNA, 15 bp, Homo sapiens
attttaaatggatgt

SEQ ID NO: 268468 - DNA, 15 bp, Homo sapiens
tattttaaatggatg

SEQ ID NO: 268469 - DNA, 15 bp, Homo sapiens
ttattttaaatggat

SEQ ID NO: 268470 - DNA, 15 bp, Homo sapiens
cttattttaaatgga

SEQ ID NO: 268471 - DNA, 15 bp, Homo sapiens
gcttattttaaatgg

SEQ ID NO: 268472 - DNA, 15 bp, Homo sapiens
agcttattttaaatg

SEQ ID NO: 268473 - DNA, 15 bp, Homo sapiens
cagcttattttaaat

SEQ ID NO: 268474 - DNA, 15 bp, Homo sapiens
gcagcttattttaaa

SEQ ID NO: 268475 - DNA, 15 bp, Homo sapiens
tgcagcttattttaa

SEQ ID NO: 268476 - DNA, 15 bp, Homo sapiens
ttgcagcttatttta

SEQ ID NO: 268477 - DNA, 15 bp, Homo sapiens
cttgcagcttatttt

SEQ ID NO: 268478 - DNA, 15 bp, Homo sapiens
acttgcagcttattt

SEQ ID NO: 268479 - DNA, 15 bp, Homo sapiens
aacttgcagcttatt

SEQ ID NO: 268480 - DNA, 15 bp, Homo sapiens
aaacttgcagcttat

SEQ ID NO: 268481 - DNA, 15 bp, Homo sapiens
caaacttgcagctta

SEQ ID NO: 268482 - DNA, 15 bp, Homo sapiens
ccaaacttgcagctt

SEQ ID NO: 268483 - DNA, 15 bp, Homo sapiens
cccaaacttgcagct

SEQ ID NO: 268484 - DNA, 15 bp, Homo sapiens
gcccaaacttgcagc

SEQ ID NO: 268485 - DNA, 15 bp, Homo sapiens
tgcccaaacttgcag

SEQ ID NO: 268486 - DNA, 15 bp, Homo sapiens
gtgcccaaacttgca

SEQ ID NO: 268487 - DNA, 15 bp, Homo sapiens
cgtgcccaaacttgc

SEQ ID NO: 268488 - DNA, 15 bp, Homo sapiens
ccgtgcccaaacttg

SEQ ID NO: 268489 - DNA, 15 bp, Homo sapiens
accgtgcccaaactt

SEQ ID NO: 268490 - DNA, 15 bp, Homo sapiens
caccgtgcccaaact

SEQ ID NO: 268491 - DNA, 15 bp, Homo sapiens
ccaccgtgcccaaac

SEQ ID NO: 268492 - DNA, 15 bp, Homo sapiens
gccaccgtgcccaaa

SEQ ID NO: 268493 - DNA, 15 bp, Homo sapiens
agccaccgtgcccaa

SEQ ID NO: 268494 - DNA, 15 bp, Homo sapiens
gagccaccgtgccca

SEQ ID NO: 268495 - DNA, 15 bp, Homo sapiens
tgagccaccgtgccc

SEQ ID NO: 268496 - DNA, 15 bp, Homo sapiens
gtgagccaccgtgcc

SEQ ID NO: 268497 - DNA, 15 bp, Homo sapiens
tgtgagccaccgtgc

SEQ ID NO: 268498 - DNA, 15 bp, Homo sapiens
gtgtgagccaccgtg

SEQ ID NO: 268499 - DNA, 15 bp, Homo sapiens
ggtgtgagccaccgt

SEQ ID NO: 268500 - DNA, 15 bp, Homo sapiens
aggtgtgagccaccg

SEQ ID NO: 268501 - DNA, 15 bp, Homo sapiens
acttggcctcccaaa

SEQ ID NO: 268502 - DNA, 15 bp, Homo sapiens
aacttggcctcccaa

SEQ ID NO: 268503 - DNA, 15 bp, Homo sapiens
caacttggcctccca

SEQ ID NO: 268504 - DNA, 15 bp, Homo sapiens
ccaacttggcctccc

SEQ ID NO: 268505 - DNA, 15 bp, Homo sapiens
cccaacttggcctcc

SEQ ID NO: 268506 - DNA, 15 bp, Homo sapiens
acccaacttggcctc

SEQ ID NO: 268507 - DNA, 15 bp, Homo sapiens
cacccaacttggcct

SEQ ID NO: 268508 - DNA, 15 bp, Homo sapiens
ccacccaacttggcc

SEQ ID NO: 268509 - DNA, 15 bp, Homo sapiens
tccacccaacttggc

SEQ ID NO: 268510 - DNA, 15 bp, Homo sapiens
atccacccaacttgg

SEQ ID NO: 268511 - DNA, 15 bp, Homo sapiens
gatccacccaacttg

SEQ ID NO: 268512 - DNA, 15 bp, Homo sapiens
tgatccacccaactt

SEQ ID NO: 268513 - DNA, 15 bp, Homo sapiens
gtgatccacccaact

SEQ ID NO: 268514 - DNA, 15 bp, Homo sapiens
ggtgatccacccaac

SEQ ID NO: 268515 - DNA, 15 bp, Homo sapiens
aggtgatccacccaa

SEQ ID NO: 268516 - DNA, 15 bp, Homo sapiens
caggtgatccaccca

SEQ ID NO: 268517 - DNA, 15 bp, Homo sapiens
tcaggtgatccaccc

SEQ ID NO: 268518 - DNA, 15 bp, Homo sapiens
cgtctcgaactcctg

SEQ ID NO: 268519 - DNA, 15 bp, Homo sapiens
tcgtctcgaactcct

SEQ ID NO: 268520 - DNA, 15 bp, Homo sapiens
ctcgtctcgaactcc

SEQ ID NO: 268521 - DNA, 15 bp, Homo sapiens
gctcgtctcgaactc

SEQ ID NO: 268522 - DNA, 15 bp, Homo sapiens
ggctcgtctcgaact

SEQ ID NO: 268523 - DNA, 15 bp, Homo sapiens
aggctcgtctcgaac

SEQ ID NO: 268524 - DNA, 15 bp, Homo sapiens
caggctcgtctcgaa

SEQ ID NO: 268525 - DNA, 15 bp, Homo sapiens
ccaggctcgtctcga

SEQ ID NO: 268526 - DNA, 15 bp, Homo sapiens
gccaggctcgtctcg

SEQ ID NO: 268527 - DNA, 15 bp, Homo sapiens
ggccaggctcgtctc

SEQ ID NO: 268528 - DNA, 15 bp, Homo sapiens
tggccaggctcgtct

SEQ ID NO: 268529 - DNA, 15 bp, Homo sapiens
ttggccaggctcgtc

SEQ ID NO: 268530 - DNA, 15 bp, Homo sapiens
gttggccaggctcgt

SEQ ID NO: 268531 - DNA, 15 bp, Homo sapiens
tgttggccaggctcg

SEQ ID NO: 268532 - DNA, 15 bp, Homo sapiens
atgttggccaggctc

SEQ ID NO: 268533 - DNA, 15 bp, Homo sapiens
tcatgttggccaggc

SEQ ID NO: 268534 - DNA, 15 bp, Homo sapiens
gtcatgttggccagg

SEQ ID NO: 268535 - DNA, 15 bp, Homo sapiens
cgtcatgttggccag

SEQ ID NO: 268536 - DNA, 15 bp, Homo sapiens
tcgtcatgttggcca

SEQ ID NO: 268537 - DNA, 15 bp, Homo sapiens
ttcgtcatgttggcc

SEQ ID NO: 268538 - DNA, 15 bp, Homo sapiens
tttcgtcatgttggc

SEQ ID NO: 268539 - DNA, 15 bp, Homo sapiens
gtttcgtcatgttgg

SEQ ID NO: 268540 - DNA, 15 bp, Homo sapiens
ggtttcgtcatgttg

SEQ ID NO: 268541 - DNA, 15 bp, Homo sapiens
gggtttcgtcatgtt

SEQ ID NO: 268542 - DNA, 15 bp, Homo sapiens
agggtttcgtcatgt

SEQ ID NO: 268543 - DNA, 15 bp, Homo sapiens
cagggtttcgtcatg

SEQ ID NO: 268544 - DNA, 15 bp, Homo sapiens
acagggtttcgtcat

SEQ ID NO: 268545 - DNA, 15 bp, Homo sapiens
gacagggtttcgtca

SEQ ID NO: 268546 - DNA, 15 bp, Homo sapiens
agacagggtttcgtc

SEQ ID NO: 268547 - DNA, 15 bp, Homo sapiens
gagacagggtttcgt

SEQ ID NO: 268548 - DNA, 15 bp, Homo sapiens
agagacagggtttcg

SEQ ID NO: 268549 - DNA, 15 bp, Homo sapiens
cagagacagggtttc

SEQ ID NO: 268550 - DNA, 15 bp, Homo sapiens
gcagagacagggttt

SEQ ID NO: 268551 - DNA, 15 bp, Homo sapiens
agcagagacagggtt

SEQ ID NO: 268552 - DNA, 15 bp, Homo sapiens
tagcagagacagggt

SEQ ID NO: 268553 - DNA, 15 bp, Homo sapiens
ttagcagagacaggg

SEQ ID NO: 268554 - DNA, 15 bp, Homo sapiens
tttagcagagacagg

SEQ ID NO: 268555 - DNA, 15 bp, Homo sapiens
ttttagcagagacag

SEQ ID NO: 268556 - DNA, 15 bp, Homo sapiens
cttttagcagagaca

SEQ ID NO: 268557 - DNA, 15 bp, Homo sapiens
acttttagcagagac

SEQ ID NO: 268558 - DNA, 15 bp, Homo sapiens
tacttttagcagaga

SEQ ID NO: 268559 - DNA, 15 bp, Homo sapiens
gtacttttagcagag

SEQ ID NO: 268560 - DNA, 15 bp, Homo sapiens
tgtacttttagcaga

SEQ ID NO: 268561 - DNA, 15 bp, Homo sapiens
ttgtacttttagcag

SEQ ID NO: 268562 - DNA, 15 bp, Homo sapiens
tttgtacttttagca

SEQ ID NO: 268563 - DNA, 15 bp, Homo sapiens
ctttgtacttttagc

SEQ ID NO: 268564 - DNA, 15 bp, Homo sapiens
tctttgtacttttag

SEQ ID NO: 268565 - DNA, 15 bp, Homo sapiens
atctttgtactttta

SEQ ID NO: 268566 - DNA, 15 bp, Homo sapiens
aatctttgtactttt

SEQ ID NO: 268567 - DNA, 15 bp, Homo sapiens
taatctttgtacttt

SEQ ID NO: 268568 - DNA, 15 bp, Homo sapiens
ctaatctttgtactt

SEQ ID NO: 268569 - DNA, 15 bp, Homo sapiens
gctaatctttgtact

SEQ ID NO: 268570 - DNA, 15 bp, Homo sapiens
agctaatctttgtac

SEQ ID NO: 268571 - DNA, 15 bp, Homo sapiens
cagctaatctttgta

SEQ ID NO: 268572 - DNA, 15 bp, Homo sapiens
tcagctaatctttgt

SEQ ID NO: 268573 - DNA, 15 bp, Homo sapiens
ctcagctaatctttg

SEQ ID NO: 268574 - DNA, 15 bp, Homo sapiens
gctcagctaatcttt

SEQ ID NO: 268575 - DNA, 15 bp, Homo sapiens
cgctcagctaatctt

SEQ ID NO: 268576 - DNA, 15 bp, Homo sapiens
acgctcagctaatct

SEQ ID NO: 268577 - DNA, 15 bp, Homo sapiens
cacgctcagctaatc

SEQ ID NO: 268578 - DNA, 15 bp, Homo sapiens
ccacgctcagctaat

SEQ ID NO: 268579 - DNA, 15 bp, Homo sapiens
accacgctcagctaa

SEQ ID NO: 268580 - DNA, 15 bp, Homo sapiens
caccacgctcagcta

SEQ ID NO: 268581 - DNA, 15 bp, Homo sapiens
ccaccacgctcagct

SEQ ID NO: 268582 - DNA, 15 bp, Homo sapiens
accaccacgctcagc

SEQ ID NO: 268583 - DNA, 15 bp, Homo sapiens
caccaccacgctcag

SEQ ID NO: 268584 - DNA, 15 bp, Homo sapiens
tcaccaccacgctca

SEQ ID NO: 268585 - DNA, 15 bp, Homo sapiens
ttcaccaccacgctc

SEQ ID NO: 268586 - DNA, 15 bp, Homo sapiens
attcaccaccacgct

SEQ ID NO: 268587 - DNA, 15 bp, Homo sapiens
cattcaccaccacgc

SEQ ID NO: 268588 - DNA, 15 bp, Homo sapiens
gcattcaccaccacg

SEQ ID NO: 268589 - DNA, 15 bp, Homo sapiens
ggcattcaccaccac

SEQ ID NO: 268590 - DNA, 15 bp, Homo sapiens
aggcattcaccacca

SEQ ID NO: 268591 - DNA, 15 bp, Homo sapiens
caggcattcaccacc

SEQ ID NO: 268592 - DNA, 15 bp, Homo sapiens
acaggcattcaccac

SEQ ID NO: 268593 - DNA, 15 bp, Homo sapiens
tacaggcattcacca

SEQ ID NO: 268594 - DNA, 15 bp, Homo sapiens
ctacaggcattcacc

SEQ ID NO: 268595 - DNA, 15 bp, Homo sapiens
gctacaggcattcac

SEQ ID NO: 268596 - DNA, 15 bp, Homo sapiens
ggctacaggcattca

SEQ ID NO: 268597 - DNA, 15 bp, Homo sapiens
gggctacaggcattc

SEQ ID NO: 268598 - DNA, 15 bp, Homo sapiens
tgggctacaggcatt

SEQ ID NO: 268599 - DNA, 15 bp, Homo sapiens
ctgggctacaggcat

SEQ ID NO: 268600 - DNA, 15 bp, Homo sapiens
gctgggctacaggca

SEQ ID NO: 268601 - DNA, 15 bp, Homo sapiens
agctgggctacaggc

SEQ ID NO: 268602 - DNA, 15 bp, Homo sapiens
tagctgggctacagg

SEQ ID NO: 268603 - DNA, 15 bp, Homo sapiens
gtagctgggctacag

SEQ ID NO: 268604 - DNA, 15 bp, Homo sapiens
agtagctgggctaca

SEQ ID NO: 268605 - DNA, 15 bp, Homo sapiens
gagtagctgggctac

SEQ ID NO: 268606 - DNA, 15 bp, Homo sapiens
cgagtagctgggcta

SEQ ID NO: 268607 - DNA, 15 bp, Homo sapiens
ccgagtagctgggct

SEQ ID NO: 268608 - DNA, 15 bp, Homo sapiens
cccgagtagctgggc

SEQ ID NO: 268609 - DNA, 15 bp, Homo sapiens
gtcccgagtagctgg

SEQ ID NO: 268610 - DNA, 15 bp, Homo sapiens
cgtcccgagtagctg

SEQ ID NO: 268611 - DNA, 15 bp, Homo sapiens
gcgtcccgagtagct

SEQ ID NO: 268612 - DNA, 15 bp, Homo sapiens
agcgtcccgagtagc

SEQ ID NO: 268613 - DNA, 15 bp, Homo sapiens
cagcgtcccgagtag

SEQ ID NO: 268614 - DNA, 15 bp, Homo sapiens
tcagcgtcccgagta

SEQ ID NO: 268615 - DNA, 15 bp, Homo sapiens
ctcagcgtcccgagt

SEQ ID NO: 268616 - DNA, 15 bp, Homo sapiens
cctcagcgtcccgag

SEQ ID NO: 268617 - DNA, 15 bp, Homo sapiens
gcctcagcgtcccga

SEQ ID NO: 268618 - DNA, 15 bp, Homo sapiens
tgcctcagcgtcccg

SEQ ID NO: 268619 - DNA, 15 bp, Homo sapiens
ctgcctcagcgtccc

SEQ ID NO: 268620 - DNA, 15 bp, Homo sapiens
cctgcctcagcgtcc

SEQ ID NO: 268621 - DNA, 15 bp, Homo sapiens
tcctgcctcagcgtc

SEQ ID NO: 268622 - DNA, 15 bp, Homo sapiens
ctcctgcctcagcgt

SEQ ID NO: 268623 - DNA, 15 bp, Homo sapiens
tctcctgcctcagcg

SEQ ID NO: 268624 - DNA, 15 bp, Homo sapiens
gggctcaagcgattc

SEQ ID NO: 268625 - DNA, 15 bp, Homo sapiens
tgggctcaagcgatt

SEQ ID NO: 268626 - DNA, 15 bp, Homo sapiens
cctcctgggctcaag

SEQ ID NO: 268627 - DNA, 15 bp, Homo sapiens
acctcctgggctcaa

SEQ ID NO: 268628 - DNA, 15 bp, Homo sapiens
cacctcctgggctca

SEQ ID NO: 268629 - DNA, 15 bp, Homo sapiens
ccacctcctgggctc

SEQ ID NO: 268630 - DNA, 15 bp, Homo sapiens
tccacctcctgggct

SEQ ID NO: 268631 - DNA, 15 bp, Homo sapiens
ctccacctcctgggc

SEQ ID NO: 268632 - DNA, 15 bp, Homo sapiens
cctccacctcctggg

SEQ ID NO: 268633 - DNA, 15 bp, Homo sapiens
acctccacctcctgg

SEQ ID NO: 268634 - DNA, 15 bp, Homo sapiens
aacctccacctcctg

SEQ ID NO: 268635 - DNA, 15 bp, Homo sapiens
caacctccacctcct

SEQ ID NO: 268636 - DNA, 15 bp, Homo sapiens
tgtgatctcggctca

SEQ ID NO: 268637 - DNA, 15 bp, Homo sapiens
gtgtgatctcggctc

SEQ ID NO: 268638 - DNA, 15 bp, Homo sapiens
ggtgtgatctcggct

SEQ ID NO: 268639 - DNA, 15 bp, Homo sapiens
tggtgtgatctcggc

SEQ ID NO: 268640 - DNA, 15 bp, Homo sapiens
gtggtgtgatctcgg

SEQ ID NO: 268641 - DNA, 15 bp, Homo sapiens
agtggtgtgatctcg

SEQ ID NO: 268642 - DNA, 15 bp, Homo sapiens
cagtggtgtgatctc

SEQ ID NO: 268643 - DNA, 15 bp, Homo sapiens
gcagtggtgtgatct

SEQ ID NO: 268644 - DNA, 15 bp, Homo sapiens
tgcagtggtgtgatc

SEQ ID NO: 268645 - DNA, 15 bp, Homo sapiens
gtgcagtggtgtgat

SEQ ID NO: 268646 - DNA, 15 bp, Homo sapiens
agtgcagtggtgtga

SEQ ID NO: 268647 - DNA, 15 bp, Homo sapiens
gagtgcagtggtgtg

SEQ ID NO: 268648 - DNA, 15 bp, Homo sapiens
ggagtgcagtggtgt

SEQ ID NO: 268649 - DNA, 15 bp, Homo sapiens
acgcccaggctggag

SEQ ID NO: 268650 - DNA, 15 bp, Homo sapiens
aacgcccaggctgga

SEQ ID NO: 268651 - DNA, 15 bp, Homo sapiens
caacgcccaggctgg

SEQ ID NO: 268652 - DNA, 15 bp, Homo sapiens
tcaacgcccaggctg

SEQ ID NO: 268653 - DNA, 15 bp, Homo sapiens
ctcaacgcccaggct

SEQ ID NO: 268654 - DNA, 15 bp, Homo sapiens
tctcaacgcccaggc

SEQ ID NO: 268655 - DNA, 15 bp, Homo sapiens
ctctcaacgcccagg

SEQ ID NO: 268656 - DNA, 15 bp, Homo sapiens
actctcaacgcccag

SEQ ID NO: 268657 - DNA, 15 bp, Homo sapiens
cactctcaacgccca

SEQ ID NO: 268658 - DNA, 15 bp, Homo sapiens
tcactctcaacgccc

SEQ ID NO: 268659 - DNA, 15 bp, Homo sapiens
ttcactctcaacgcc

SEQ ID NO: 268660 - DNA, 15 bp, Homo sapiens
gttcactctcaacgc

SEQ ID NO: 268661 - DNA, 15 bp, Homo sapiens
ggttcactctcaacg

SEQ ID NO: 268662 - DNA, 15 bp, Homo sapiens
aggttcactctcaac

SEQ ID NO: 268663 - DNA, 15 bp, Homo sapiens
gaggttcactctcaa

SEQ ID NO: 268664 - DNA, 15 bp, Homo sapiens
agaggttcactctca

SEQ ID NO: 268665 - DNA, 15 bp, Homo sapiens
cagaggttcactctc

SEQ ID NO: 268666 - DNA, 15 bp, Homo sapiens
acagaggttcactct

SEQ ID NO: 268667 - DNA, 15 bp, Homo sapiens
gacagaggttcactc

SEQ ID NO: 268668 - DNA, 15 bp, Homo sapiens
agacagaggttcact

SEQ ID NO: 268669 - DNA, 15 bp, Homo sapiens
gagacagaggttcac

SEQ ID NO: 268670 - DNA, 15 bp, Homo sapiens
tgagacagaggttca

SEQ ID NO: 268671 - DNA, 15 bp, Homo sapiens
ttgagacagaggttc

SEQ ID NO: 268672 - DNA, 15 bp, Homo sapiens
tttgagacagaggtt

SEQ ID NO: 268673 - DNA, 15 bp, Homo sapiens
ttttgagacagaggt

SEQ ID NO: 268674 - DNA, 15 bp, Homo sapiens
attttgagacagagg

SEQ ID NO: 268675 - DNA, 15 bp, Homo sapiens
atttattttgagaca

SEQ ID NO: 268676 - DNA, 15 bp, Homo sapiens
tatttattttgagac

SEQ ID NO: 268677 - DNA, 15 bp, Homo sapiens
ttatttattttgaga

SEQ ID NO: 268678 - DNA, 15 bp, Homo sapiens
tttatttattttgag

SEQ ID NO: 268679 - DNA, 15 bp, Homo sapiens
tatttatttattttg

SEQ ID NO: 268680 - DNA, 15 bp, Homo sapiens
attttatttatttat

SEQ ID NO: 268681 - DNA, 15 bp, Homo sapiens
tattttatttattta

SEQ ID NO: 268682 - DNA, 15 bp, Homo sapiens
ttattttatttattt

SEQ ID NO: 268683 - DNA, 15 bp, Homo sapiens
cttattttatttatt

SEQ ID NO: 268684 - DNA, 15 bp, Homo sapiens
gcttattttatttat

SEQ ID NO: 268685 - DNA, 15 bp, Homo sapiens
agcttattttattta

SEQ ID NO: 268686 - DNA, 15 bp, Homo sapiens
gagcttattttattt

SEQ ID NO: 268687 - DNA, 15 bp, Homo sapiens
ggagcttattttatt

SEQ ID NO: 268688 - DNA, 15 bp, Homo sapiens
gggagcttattttat

SEQ ID NO: 268689 - DNA, 15 bp, Homo sapiens
ggggagcttatttta

SEQ ID NO: 268690 - DNA, 15 bp, Homo sapiens
tggggagcttatttt

SEQ ID NO: 268691 - DNA, 15 bp, Homo sapiens
ctggggagcttattt

SEQ ID NO: 268692 - DNA, 15 bp, Homo sapiens
cctggggagcttatt

SEQ ID NO: 268693 - DNA, 15 bp, Homo sapiens
acctggggagcttat

SEQ ID NO: 268694 - DNA, 15 bp, Homo sapiens
tacctggggagctta

SEQ ID NO: 268695 - DNA, 15 bp, Homo sapiens
atacctggggagctt

SEQ ID NO: 268696 - DNA, 15 bp, Homo sapiens
aatacctggggagct

SEQ ID NO: 268697 - DNA, 15 bp, Homo sapiens
aaatacctggggagc

SEQ ID NO: 268698 - DNA, 15 bp, Homo sapiens
gaaatacctggggag

SEQ ID NO: 268699 - DNA, 15 bp, Homo sapiens
agaaatacctgggga

SEQ ID NO: 268700 - DNA, 15 bp, Homo sapiens
cagaaatacctgggg

SEQ ID NO: 268701 - DNA, 15 bp, Homo sapiens
tcagaaatacctggg

SEQ ID NO: 268702 - DNA, 15 bp, Homo sapiens
ttcagaaatacctgg

SEQ ID NO: 268703 - DNA, 15 bp, Homo sapiens
cttcagaaatacctg

SEQ ID NO: 268704 - DNA, 15 bp, Homo sapiens
ccttcagaaatacct

SEQ ID NO: 268705 - DNA, 15 bp, Homo sapiens
accttcagaaatacc

SEQ ID NO: 268706 - DNA, 15 bp, Homo sapiens
aaccttcagaaatac

SEQ ID NO: 268707 - DNA, 15 bp, Homo sapiens
gaaccttcagaaata

SEQ ID NO: 268708 - DNA, 15 bp, Homo sapiens
tgaaccttcagaaat

SEQ ID NO: 268709 - DNA, 15 bp, Homo sapiens
ctgaaccttcagaaa

SEQ ID NO: 268710 - DNA, 15 bp, Homo sapiens
cctgaaccttcagaa

SEQ ID NO: 268711 - DNA, 15 bp, Homo sapiens
acctgaaccttcaga

SEQ ID NO: 268712 - DNA, 15 bp, Homo sapiens
tacctgaaccttcag

SEQ ID NO: 268713 - DNA, 15 bp, Homo sapiens
ctacctgaaccttca

SEQ ID NO: 268714 - DNA, 15 bp, Homo sapiens
gctacctgaaccttc

SEQ ID NO: 268715 - DNA, 15 bp, Homo sapiens
ggctacctgaacctt

SEQ ID NO: 268716 - DNA, 15 bp, Homo sapiens
aggctacctgaacct

SEQ ID NO: 268717 - DNA, 15 bp, Homo sapiens
aaggctacctgaacc

SEQ ID NO: 268718 - DNA, 15 bp, Homo sapiens
aaaggctacctgaac

SEQ ID NO: 268719 - DNA, 15 bp, Homo sapiens
gaaaggctacctgaa

SEQ ID NO: 268720 - DNA, 15 bp, Homo sapiens
gagaaaggctacctg

SEQ ID NO: 268721 - DNA, 15 bp, Homo sapiens
tgagaaaggctacct

SEQ ID NO: 268722 - DNA, 15 bp, Homo sapiens
atgagaaaggctacc

SEQ ID NO: 268723 - DNA, 15 bp, Homo sapiens
aatgagaaaggctac

SEQ ID NO: 268724 - DNA, 15 bp, Homo sapiens
taatgagaaaggcta

SEQ ID NO: 268725 - DNA, 15 bp, Homo sapiens
ctaatgagaaaggct

SEQ ID NO: 268726 - DNA, 15 bp, Homo sapiens
gctaatgagaaaggc

SEQ ID NO: 268727 - DNA, 15 bp, Homo sapiens
ggctaatgagaaagg

SEQ ID NO: 268728 - DNA, 15 bp, Homo sapiens
gggctaatgagaaag

SEQ ID NO: 268729 - DNA, 15 bp, Homo sapiens
cgggctaatgagaaa

SEQ ID NO: 268730 - DNA, 15 bp, Homo sapiens
acgggctaatgagaa

SEQ ID NO: 268731 - DNA, 15 bp, Homo sapiens
aacgggctaatgaga

SEQ ID NO: 268732 - DNA, 15 bp, Homo sapiens
gaacgggctaatgag

SEQ ID NO: 268733 - DNA, 15 bp, Homo sapiens
ggaacgggctaatga

SEQ ID NO: 268734 - DNA, 15 bp, Homo sapiens
gggaacgggctaatg

SEQ ID NO: 268735 - DNA, 15 bp, Homo sapiens
ggggaacgggctaat

SEQ ID NO: 268736 - DNA, 15 bp, Homo sapiens
tggggaacgggctaa

SEQ ID NO: 268737 - DNA, 15 bp, Homo sapiens
ctggggaacgggcta

SEQ ID NO: 268738 - DNA, 15 bp, Homo sapiens
cctggggaacgggct

SEQ ID NO: 268739 - DNA, 15 bp, Homo sapiens
tcctggggaacgggc

SEQ ID NO: 268740 - DNA, 15 bp, Homo sapiens
atcctggggaacggg

SEQ ID NO: 268741 - DNA, 15 bp, Homo sapiens
aatcctggggaacgg

SEQ ID NO: 268742 - DNA, 15 bp, Homo sapiens
gaatcctggggaacg

SEQ ID NO: 268743 - DNA, 15 bp, Homo sapiens
agaatcctggggaac

SEQ ID NO: 268744 - DNA, 15 bp, Homo sapiens
aagaatcctggggaa

SEQ ID NO: 268745 - DNA, 15 bp, Homo sapiens
gaagaatcctgggga

SEQ ID NO: 268746 - DNA, 15 bp, Homo sapiens
agaagaatcctgggg

SEQ ID NO: 268747 - DNA, 15 bp, Homo sapiens
gagaagaatcctggg

SEQ ID NO: 268748 - DNA, 15 bp, Homo sapiens
agagaagaatcctgg

SEQ ID NO: 268749 - DNA, 15 bp, Homo sapiens
gagagaagaatcctg

SEQ ID NO: 268750 - DNA, 15 bp, Homo sapiens
tgagagaagaatcct

SEQ ID NO: 268751 - DNA, 15 bp, Homo sapiens
ctgagagaagaatcc

SEQ ID NO: 268752 - DNA, 15 bp, Homo sapiens
actgagagaagaatc

SEQ ID NO: 268753 - DNA, 15 bp, Homo sapiens
gactgagagaagaat

SEQ ID NO: 268754 - DNA, 15 bp, Homo sapiens
ggactgagagaagaa

SEQ ID NO: 268755 - DNA, 15 bp, Homo sapiens
aggactgagagaaga

SEQ ID NO: 268756 - DNA, 15 bp, Homo sapiens
aaggactgagagaag

SEQ ID NO: 268757 - DNA, 15 bp, Homo sapiens
aaaggactgagagaa

SEQ ID NO: 268758 - DNA, 15 bp, Homo sapiens
aaaaggactgagaga

SEQ ID NO: 268759 - DNA, 15 bp, Homo sapiens
aaaaaggactgagag

SEQ ID NO: 268760 - DNA, 15 bp, Homo sapiens
caaaaaggactgaga

SEQ ID NO: 268761 - DNA, 15 bp, Homo sapiens
acaaaaaggactgag

SEQ ID NO: 268762 - DNA, 15 bp, Homo sapiens
aacaaaaaggactga

SEQ ID NO: 268763 - DNA, 15 bp, Homo sapiens
caacaaaaaggactg

SEQ ID NO: 268764 - DNA, 15 bp, Homo sapiens
tcaacaaaaaggact

SEQ ID NO: 268765 - DNA, 15 bp, Homo sapiens
gtcaacaaaaaggac

SEQ ID NO: 268766 - DNA, 15 bp, Homo sapiens
tgtcaacaaaaagga

SEQ ID NO: 268767 - DNA, 15 bp, Homo sapiens
ttgtcaacaaaaagg

SEQ ID NO: 268768 - DNA, 15 bp, Homo sapiens
cttgtcaacaaaaag

SEQ ID NO: 268769 - DNA, 15 bp, Homo sapiens
gcttgtcaacaaaaa

SEQ ID NO: 268770 - DNA, 15 bp, Homo sapiens
agcttgtcaacaaaa

SEQ ID NO: 268771 - DNA, 15 bp, Homo sapiens
gagcttgtcaacaaa

SEQ ID NO: 268772 - DNA, 15 bp, Homo sapiens
agagcttgtcaacaa

SEQ ID NO: 268773 - DNA, 15 bp, Homo sapiens
gagagcttgtcaaca

SEQ ID NO: 268774 - DNA, 15 bp, Homo sapiens
agagagcttgtcaac

SEQ ID NO: 268775 - DNA, 15 bp, Homo sapiens
gagagagcttgtcaa

SEQ ID NO: 268776 - DNA, 15 bp, Homo sapiens
agagagagcttgtca

SEQ ID NO: 268777 - DNA, 15 bp, Homo sapiens
cagagagagcttgtc

SEQ ID NO: 268778 - DNA, 15 bp, Homo sapiens
ccagagagagcttgt

SEQ ID NO: 268779 - DNA, 15 bp, Homo sapiens
accagagagagcttg

SEQ ID NO: 268780 - DNA, 15 bp, Homo sapiens
aaccagagagagctt

SEQ ID NO: 268781 - DNA, 15 bp, Homo sapiens
aaaccagagagagct

SEQ ID NO: 268782 - DNA, 15 bp, Homo sapiens
taaaccagagagagc

SEQ ID NO: 268783 - DNA, 15 bp, Homo sapiens
ctaaaccagagagag

SEQ ID NO: 268784 - DNA, 15 bp, Homo sapiens
gctaaaccagagaga

SEQ ID NO: 268785 - DNA, 15 bp, Homo sapiens
tgctaaaccagagag

SEQ ID NO: 268786 - DNA, 15 bp, Homo sapiens
ctgctaaaccagaga

SEQ ID NO: 268787 - DNA, 15 bp, Homo sapiens
cctgctaaaccagag

SEQ ID NO: 268788 - DNA, 15 bp, Homo sapiens
ccctgctaaaccaga

SEQ ID NO: 268789 - DNA, 15 bp, Homo sapiens
cccctgctaaaccag

SEQ ID NO: 268790 - DNA, 15 bp, Homo sapiens
tcccctgctaaacca

SEQ ID NO: 268791 - DNA, 15 bp, Homo sapiens
gtcccctgctaaacc

SEQ ID NO: 268792 - DNA, 15 bp, Homo sapiens
tgtcccctgctaaac

SEQ ID NO: 268793 - DNA, 15 bp, Homo sapiens
gtgtcccctgctaaa

SEQ ID NO: 268794 - DNA, 15 bp, Homo sapiens
tgtgtcccctgctaa

SEQ ID NO: 268795 - DNA, 15 bp, Homo sapiens
ttgtgtcccctgcta

SEQ ID NO: 268796 - DNA, 15 bp, Homo sapiens
cttgtgtcccctgct

SEQ ID NO: 268797 - DNA, 15 bp, Homo sapiens
ccttgtgtcccctgc

SEQ ID NO: 268798 - DNA, 15 bp, Homo sapiens
accttgtgtcccctg

SEQ ID NO: 268799 - DNA, 15 bp, Homo sapiens
aaccttgtgtcccct

SEQ ID NO: 268800 - DNA, 15 bp, Homo sapiens
gaaccttgtgtcccc

SEQ ID NO: 268801 - DNA, 15 bp, Homo sapiens
tgaaccttgtgtccc

SEQ ID NO: 268802 - DNA, 15 bp, Homo sapiens
ttgaaccttgtgtcc

SEQ ID NO: 268803 - DNA, 15 bp, Homo sapiens
attgaaccttgtgtc

SEQ ID NO: 268804 - DNA, 15 bp, Homo sapiens
aattgaaccttgtgt

SEQ ID NO: 268805 - DNA, 15 bp, Homo sapiens
taattgaaccttgtg

SEQ ID NO: 268806 - DNA, 15 bp, Homo sapiens
ataattgaaccttgt

SEQ ID NO: 268807 - DNA, 15 bp, Homo sapiens
aataattgaaccttg

SEQ ID NO: 268808 - DNA, 15 bp, Homo sapiens
caataattgaacctt

SEQ ID NO: 268809 - DNA, 15 bp, Homo sapiens
acaataattgaacct

SEQ ID NO: 268810 - DNA, 15 bp, Homo sapiens
aacaataattgaacc

SEQ ID NO: 268811 - DNA, 15 bp, Homo sapiens
gaacaataattgaac

SEQ ID NO: 268812 - DNA, 15 bp, Homo sapiens
ggaacaataattgaa

SEQ ID NO: 268813 - DNA, 15 bp, Homo sapiens
tggaacaataattga

SEQ ID NO: 268814 - DNA, 15 bp, Homo sapiens
atggaacaataattg

SEQ ID NO: 268815 - DNA, 15 bp, Homo sapiens
aatggaacaataatt

SEQ ID NO: 268816 - DNA, 15 bp, Homo sapiens
gaatggaacaataat

SEQ ID NO: 268817 - DNA, 15 bp, Homo sapiens
agaatggaacaataa

SEQ ID NO: 268818 - DNA, 15 bp, Homo sapiens
aagaatggaacaata

SEQ ID NO: 268819 - DNA, 15 bp, Homo sapiens
taagaatggaacaat

SEQ ID NO: 268820 - DNA, 15 bp, Homo sapiens
gtaagaatggaacaa

SEQ ID NO: 268821 - DNA, 15 bp, Homo sapiens
cgtaagaatggaaca

SEQ ID NO: 268822 - DNA, 15 bp, Homo sapiens
tcgtaagaatggaac

SEQ ID NO: 268823 - DNA, 15 bp, Homo sapiens
atcgtaagaatggaa

SEQ ID NO: 268824 - DNA, 15 bp, Homo sapiens
tatcgtaagaatgga

SEQ ID NO: 268825 - DNA, 15 bp, Homo sapiens
gtatcgtaagaatgg

SEQ ID NO: 268826 - DNA, 15 bp, Homo sapiens
tgtatcgtaagaatg

SEQ ID NO: 268827 - DNA, 15 bp, Homo sapiens
ttgtatcgtaagaat

SEQ ID NO: 268828 - DNA, 15 bp, Homo sapiens
attgtatcgtaagaa

SEQ ID NO: 268829 - DNA, 15 bp, Homo sapiens
aattgtatcgtaaga

SEQ ID NO: 268830 - DNA, 15 bp, Homo sapiens
gaattgtatcgtaag

SEQ ID NO: 268831 - DNA, 15 bp, Homo sapiens
agaattgtatcgtaa

SEQ ID NO: 268832 - DNA, 15 bp, Homo sapiens
aagaattgtatcgta

SEQ ID NO: 268833 - DNA, 15 bp, Homo sapiens
caagaattgtatcgt

SEQ ID NO: 268834 - DNA, 15 bp, Homo sapiens
ccaagaattgtatcg

SEQ ID NO: 268835 - DNA, 15 bp, Homo sapiens
tccaagaattgtatc

SEQ ID NO: 268836 - DNA, 15 bp, Homo sapiens
atccaagaattgtat

SEQ ID NO: 268837 - DNA, 15 bp, Homo sapiens
gatccaagaattgta

SEQ ID NO: 268838 - DNA, 15 bp, Homo sapiens
agatccaagaattgt

SEQ ID NO: 268839 - DNA, 15 bp, Homo sapiens
cagatccaagaattg

SEQ ID NO: 268840 - DNA, 15 bp, Homo sapiens
ccagatccaagaatt

SEQ ID NO: 268841 - DNA, 15 bp, Homo sapiens
accagatccaagaat

SEQ ID NO: 268842 - DNA, 15 bp, Homo sapiens
aaccagatccaagaa

SEQ ID NO: 268843 - DNA, 15 bp, Homo sapiens
aaaccagatccaaga

SEQ ID NO: 268844 - DNA, 15 bp, Homo sapiens
caaaccagatccaag

SEQ ID NO: 268845 - DNA, 15 bp, Homo sapiens
ccaaaccagatccaa

SEQ ID NO: 268846 - DNA, 15 bp, Homo sapiens
tccaaaccagatcca

SEQ ID NO: 268847 - DNA, 15 bp, Homo sapiens
atccaaaccagatcc

SEQ ID NO: 268848 - DNA, 15 bp, Homo sapiens
tatccaaaccagatc

SEQ ID NO: 268849 - DNA, 15 bp, Homo sapiens
atatccaaaccagat

SEQ ID NO: 268850 - DNA, 15 bp, Homo sapiens
tatatccaaaccaga

SEQ ID NO: 268851 - DNA, 15 bp, Homo sapiens
ttatatccaaaccag

SEQ ID NO: 268852 - DNA, 15 bp, Homo sapiens
tttatatccaaacca

SEQ ID NO: 268853 - DNA, 15 bp, Homo sapiens
atttatatccaaacc

SEQ ID NO: 268854 - DNA, 15 bp, Homo sapiens
catttatatccaaac

SEQ ID NO: 268855 - DNA, 15 bp, Homo sapiens
acatttatatccaaa

SEQ ID NO: 268856 - DNA, 15 bp, Homo sapiens
gacatttatatccaa

SEQ ID NO: 268857 - DNA, 15 bp, Homo sapiens
agacatttatatcca

SEQ ID NO: 268858 - DNA, 15 bp, Homo sapiens
tagacatttatatcc

SEQ ID NO: 268859 - DNA, 15 bp, Homo sapiens
ctagacatttatatc

SEQ ID NO: 268860 - DNA, 15 bp, Homo sapiens
cctagacatttatat

SEQ ID NO: 268861 - DNA, 15 bp, Homo sapiens
acctagacatttata

SEQ ID NO: 268862 - DNA, 15 bp, Homo sapiens
aacctagacatttat

SEQ ID NO: 268863 - DNA, 15 bp, Homo sapiens
caacctagacattta

SEQ ID NO: 268864 - DNA, 15 bp, Homo sapiens
gcaacctagacattt

SEQ ID NO: 268865 - DNA, 15 bp, Homo sapiens
ggcaacctagacatt

SEQ ID NO: 268866 - DNA, 15 bp, Homo sapiens
tggcaacctagacat

SEQ ID NO: 268867 - DNA, 15 bp, Homo sapiens
ctggcaacctagaca

SEQ ID NO: 268868 - DNA, 15 bp, Homo sapiens
actggcaacctagac

SEQ ID NO: 268869 - DNA, 15 bp, Homo sapiens
aactggcaacctaga

SEQ ID NO: 268870 - DNA, 15 bp, Homo sapiens
aaactggcaacctag

SEQ ID NO: 268871 - DNA, 15 bp, Homo sapiens
gaaactggcaaccta

SEQ ID NO: 268872 - DNA, 15 bp, Homo sapiens
agaaactggcaacct

SEQ ID NO: 268873 - DNA, 15 bp, Homo sapiens
aagaaactggcaacc

SEQ ID NO: 268874 - DNA, 15 bp, Homo sapiens
caagaaactggcaac

SEQ ID NO: 268875 - DNA, 15 bp, Homo sapiens
tcaagaaactggcaa

SEQ ID NO: 268876 - DNA, 15 bp, Homo sapiens
gtcaagaaactggca

SEQ ID NO: 268877 - DNA, 15 bp, Homo sapiens
tgtcaagaaactggc

SEQ ID NO: 268878 - DNA, 15 bp, Homo sapiens
ttgtcaagaaactgg

SEQ ID NO: 268879 - DNA, 15 bp, Homo sapiens
gttgtcaagaaactg

SEQ ID NO: 268880 - DNA, 15 bp, Homo sapiens
agttgtcaagaaact

SEQ ID NO: 268881 - DNA, 15 bp, Homo sapiens
aagttgtcaagaaac

SEQ ID NO: 268882 - DNA, 15 bp, Homo sapiens
gaagttgtcaagaaa

SEQ ID NO: 268883 - DNA, 15 bp, Homo sapiens
tgaagttgtcaagaa

SEQ ID NO: 268884 - DNA, 15 bp, Homo sapiens
ttgaagttgtcaaga

SEQ ID NO: 268885 - DNA, 15 bp, Homo sapiens
cttgaagttgtcaag

SEQ ID NO: 268886 - DNA, 15 bp, Homo sapiens
ccttgaagttgtcaa

SEQ ID NO: 268887 - DNA, 15 bp, Homo sapiens
cccttgaagttgtca

SEQ ID NO: 268888 - DNA, 15 bp, Homo sapiens
gcccttgaagttgtc

SEQ ID NO: 268889 - DNA, 15 bp, Homo sapiens
ggcccttgaagttgt

SEQ ID NO: 268890 - DNA, 15 bp, Homo sapiens
aggcccttgaagttg

SEQ ID NO: 268891 - DNA, 15 bp, Homo sapiens
aaggcccttgaagtt

SEQ ID NO: 268892 - DNA, 15 bp, Homo sapiens
caaggcccttgaagt

SEQ ID NO: 268893 - DNA, 15 bp, Homo sapiens
tcaaggcccttgaag

SEQ ID NO: 268894 - DNA, 15 bp, Homo sapiens
ttcaaggcccttgaa

SEQ ID NO: 268895 - DNA, 15 bp, Homo sapiens
cttcaaggcccttga

SEQ ID NO: 268896 - DNA, 15 bp, Homo sapiens
acttcaaggcccttg

SEQ ID NO: 268897 - DNA, 15 bp, Homo sapiens
aacttcaaggccctt

SEQ ID NO: 268898 - DNA, 15 bp, Homo sapiens
caacttcaaggccct

SEQ ID NO: 268899 - DNA, 15 bp, Homo sapiens
tcaacttcaaggccc

SEQ ID NO: 268900 - DNA, 15 bp, Homo sapiens
gtcaacttcaaggcc

SEQ ID NO: 268901 - DNA, 15 bp, Homo sapiens
agtcaacttcaaggc

SEQ ID NO: 268902 - DNA, 15 bp, Homo sapiens
cagtcaacttcaagg

SEQ ID NO: 268903 - DNA, 15 bp, Homo sapiens
ccagtcaacttcaag

SEQ ID NO: 268904 - DNA, 15 bp, Homo sapiens
accagtcaacttcaa

SEQ ID NO: 268905 - DNA, 15 bp, Homo sapiens
caccagtcaacttca

SEQ ID NO: 268906 - DNA, 15 bp, Homo sapiens
tcaccagtcaacttc

SEQ ID NO: 268907 - DNA, 15 bp, Homo sapiens
ctcaccagtcaactt

SEQ ID NO: 268908 - DNA, 15 bp, Homo sapiens
cctcaccagtcaact

SEQ ID NO: 268909 - DNA, 15 bp, Homo sapiens
tcctcaccagtcaac

SEQ ID NO: 268910 - DNA, 15 bp, Homo sapiens
ttcctcaccagtcaa

SEQ ID NO: 268911 - DNA, 15 bp, Homo sapiens
tttcctcaccagtca

SEQ ID NO: 268912 - DNA, 15 bp, Homo sapiens
ttttcctcaccagtc

SEQ ID NO: 268913 - DNA, 15 bp, Homo sapiens
cttttcctcaccagt

SEQ ID NO: 268914 - DNA, 15 bp, Homo sapiens
ccttttcctcaccag

SEQ ID NO: 268915 - DNA, 15 bp, Homo sapiens
gccttttcctcacca

SEQ ID NO: 268916 - DNA, 15 bp, Homo sapiens
tgccttttcctcacc

SEQ ID NO: 268917 - DNA, 15 bp, Homo sapiens
ttgccttttcctcac

SEQ ID NO: 268918 - DNA, 15 bp, Homo sapiens
tttgccttttcctca

SEQ ID NO: 268919 - DNA, 15 bp, Homo sapiens
ctttgccttttcctc

SEQ ID NO: 268920 - DNA, 15 bp, Homo sapiens
actttgccttttcct

SEQ ID NO: 268921 - DNA, 15 bp, Homo sapiens
tactttgccttttcc

SEQ ID NO: 268922 - DNA, 15 bp, Homo sapiens
ttactttgccttttc

SEQ ID NO: 268923 - DNA, 15 bp, Homo sapiens
tttactttgcctttt

SEQ ID NO: 268924 - DNA, 15 bp, Homo sapiens
atttactttgccttt

SEQ ID NO: 268925 - DNA, 15 bp, Homo sapiens
catttactttgcctt

SEQ ID NO: 268926 - DNA, 15 bp, Homo sapiens
gcatttactttgcct

SEQ ID NO: 268927 - DNA, 15 bp, Homo sapiens
ggcatttactttgcc

SEQ ID NO: 268928 - DNA, 15 bp, Homo sapiens
aggcatttactttgc

SEQ ID NO: 268929 - DNA, 15 bp, Homo sapiens
caggcatttactttg

SEQ ID NO: 268930 - DNA, 15 bp, Homo sapiens
tcaggcatttacttt

SEQ ID NO: 268931 - DNA, 15 bp, Homo sapiens
ctcaggcatttactt

SEQ ID NO: 268932 - DNA, 15 bp, Homo sapiens
cctcaggcatttact

SEQ ID NO: 268933 - DNA, 15 bp, Homo sapiens
ccctcaggcatttac

SEQ ID NO: 268934 - DNA, 15 bp, Homo sapiens
tccctcaggcattta

SEQ ID NO: 268935 - DNA, 15 bp, Homo sapiens
atccctcaggcattt

SEQ ID NO: 268936 - DNA, 15 bp, Homo sapiens
catccctcaggcatt

SEQ ID NO: 268937 - DNA, 15 bp, Homo sapiens
ccatccctcaggcat

SEQ ID NO: 268938 - DNA, 15 bp, Homo sapiens
tccatccctcaggca

SEQ ID NO: 268939 - DNA, 15 bp, Homo sapiens
atccatccctcaggc

SEQ ID NO: 268940 - DNA, 15 bp, Homo sapiens
tatccatccctcagg

SEQ ID NO: 268941 - DNA, 15 bp, Homo sapiens
gtatccatccctcag

SEQ ID NO: 268942 - DNA, 15 bp, Homo sapiens
ggtatccatccctca

SEQ ID NO: 268943 - DNA, 15 bp, Homo sapiens
tggtatccatccctc

SEQ ID NO: 268944 - DNA, 15 bp, Homo sapiens
ttggtatccatccct

SEQ ID NO: 268945 - DNA, 15 bp, Homo sapiens
attggtatccatccc

SEQ ID NO: 268946 - DNA, 15 bp, Homo sapiens
aattggtatccatcc

SEQ ID NO: 268947 - DNA, 15 bp, Homo sapiens
caattggtatccatc

SEQ ID NO: 268948 - DNA, 15 bp, Homo sapiens
gcaattggtatccat

SEQ ID NO: 268949 - DNA, 15 bp, Homo sapiens
agcaattggtatcca

SEQ ID NO: 268950 - DNA, 15 bp, Homo sapiens
cagcaattggtatcc

SEQ ID NO: 268951 - DNA, 15 bp, Homo sapiens
acagcaattggtatc

SEQ ID NO: 268952 - DNA, 15 bp, Homo sapiens
gacagcaattggtat

SEQ ID NO: 268953 - DNA, 15 bp, Homo sapiens
ggacagcaattggta

SEQ ID NO: 268954 - DNA, 15 bp, Homo sapiens
gggacagcaattggt

SEQ ID NO: 268955 - DNA, 15 bp, Homo sapiens
ggggacagcaattgg

SEQ ID NO: 268956 - DNA, 15 bp, Homo sapiens
tggggacagcaattg

SEQ ID NO: 268957 - DNA, 15 bp, Homo sapiens
ctggggacagcaatt

SEQ ID NO: 268958 - DNA, 15 bp, Homo sapiens
cctggggacagcaat

SEQ ID NO: 268959 - DNA, 15 bp, Homo sapiens
acctggggacagcaa

SEQ ID NO: 268960 - DNA, 15 bp, Homo sapiens
aacctggggacagca

SEQ ID NO: 268961 - DNA, 15 bp, Homo sapiens
aaacctggggacagc

SEQ ID NO: 268962 - DNA, 15 bp, Homo sapiens
taaacctggggacag

SEQ ID NO: 268963 - DNA, 15 bp, Homo sapiens
ctaaacctggggaca

SEQ ID NO: 268964 - DNA, 15 bp, Homo sapiens
actaaacctggggac

SEQ ID NO: 268965 - DNA, 15 bp, Homo sapiens
gactaaacctgggga

SEQ ID NO: 268966 - DNA, 15 bp, Homo sapiens
tgactaaacctgggg

SEQ ID NO: 268967 - DNA, 15 bp, Homo sapiens
ctgactaaacctggg

SEQ ID NO: 268968 - DNA, 15 bp, Homo sapiens
gctgactaaacctgg

SEQ ID NO: 268969 - DNA, 15 bp, Homo sapiens
tgctgactaaacctg

SEQ ID NO: 268970 - DNA, 15 bp, Homo sapiens
ttgctgactaaacct

SEQ ID NO: 268971 - DNA, 15 bp, Homo sapiens
gttgctgactaaacc

SEQ ID NO: 268972 - DNA, 15 bp, Homo sapiens
agttgctgactaaac

SEQ ID NO: 268973 - DNA, 15 bp, Homo sapiens
aagttgctgactaaa

SEQ ID NO: 268974 - DNA, 15 bp, Homo sapiens
aaagttgctgactaa

SEQ ID NO: 268975 - DNA, 15 bp, Homo sapiens
aaaagttgctgacta

SEQ ID NO: 268976 - DNA, 15 bp, Homo sapiens
caaaagttgctgact

SEQ ID NO: 268977 - DNA, 15 bp, Homo sapiens
gcaaaagttgctgac

SEQ ID NO: 268978 - DNA, 15 bp, Homo sapiens
agcaaaagttgctga

SEQ ID NO: 268979 - DNA, 15 bp, Homo sapiens
cagcaaaagttgctg

SEQ ID NO: 268980 - DNA, 15 bp, Homo sapiens
acagcaaaagttgct

SEQ ID NO: 268981 - DNA, 15 bp, Homo sapiens
aacagcaaaagttgc

SEQ ID NO: 268982 - DNA, 15 bp, Homo sapiens
caacagcaaaagttg

SEQ ID NO: 268983 - DNA, 15 bp, Homo sapiens
gcaacagcaaaagtt

SEQ ID NO: 268984 - DNA, 15 bp, Homo sapiens
agcaacagcaaaagt

SEQ ID NO: 268985 - DNA, 15 bp, Homo sapiens
gagcaacagcaaaag

SEQ ID NO: 268986 - DNA, 15 bp, Homo sapiens
ggagcaacagcaaaa

SEQ ID NO: 268987 - DNA, 15 bp, Homo sapiens
aggagcaacagcaaa

SEQ ID NO: 268988 - DNA, 15 bp, Homo sapiens
caggagcaacagcaa

SEQ ID NO: 268989 - DNA, 15 bp, Homo sapiens
ccaggagcaacagca

SEQ ID NO: 268990 - DNA, 15 bp, Homo sapiens
cccaggagcaacagc

SEQ ID NO: 268991 - DNA, 15 bp, Homo sapiens
acccaggagcaacag

SEQ ID NO: 268992 - DNA, 15 bp, Homo sapiens
gacccaggagcaaca

SEQ ID NO: 268993 - DNA, 15 bp, Homo sapiens
agacccaggagcaac

SEQ ID NO: 268994 - DNA, 15 bp, Homo sapiens
tagacccaggagcaa

SEQ ID NO: 268995 - DNA, 15 bp, Homo sapiens
gtagacccaggagca

SEQ ID NO: 268996 - DNA, 15 bp, Homo sapiens
agtagacccaggagc

SEQ ID NO: 268997 - DNA, 15 bp, Homo sapiens
cagtagacccaggag

SEQ ID NO: 268998 - DNA, 15 bp, Homo sapiens
acagtagacccagga

SEQ ID NO: 268999 - DNA, 15 bp, Homo sapiens
cacagtagacccagg

SEQ ID NO: 269000 - DNA, 15 bp, Homo sapiens
acacagtagacccag

SEQ ID NO: 269001 - DNA, 15 bp, Homo sapiens
cacacagtagaccca

SEQ ID NO: 269002 - DNA, 15 bp, Homo sapiens
gcacacagtagaccc

SEQ ID NO: 269003 - DNA, 15 bp, Homo sapiens
tgcacacagtagacc

SEQ ID NO: 269004 - DNA, 15 bp, Homo sapiens
gtgcacacagtagac

SEQ ID NO: 269005 - DNA, 15 bp, Homo sapiens
agtgcacacagtaga

SEQ ID NO: 269006 - DNA, 15 bp, Homo sapiens
gagtgcacacagtag

SEQ ID NO: 269007 - DNA, 15 bp, Homo sapiens
ggagtgcacacagta

SEQ ID NO: 269008 - DNA, 15 bp, Homo sapiens
aggagtgcacacagt

SEQ ID NO: 269009 - DNA, 15 bp, Homo sapiens
aaggagtgcacacag

SEQ ID NO: 269010 - DNA, 15 bp, Homo sapiens
aaaggagtgcacaca

SEQ ID NO: 269011 - DNA, 15 bp, Homo sapiens
caaaggagtgcacac

SEQ ID NO: 269012 - DNA, 15 bp, Homo sapiens
tcaaaggagtgcaca

SEQ ID NO: 269013 - DNA, 15 bp, Homo sapiens
ctcaaaggagtgcac

SEQ ID NO: 269014 - DNA, 15 bp, Homo sapiens
cctcaaaggagtgca

SEQ ID NO: 269015 - DNA, 15 bp, Homo sapiens
ccctcaaaggagtgc

SEQ ID NO: 269016 - DNA, 15 bp, Homo sapiens
gccctcaaaggagtg

SEQ ID NO: 269017 - DNA, 15 bp, Homo sapiens
ggccctcaaaggagt

SEQ ID NO: 269018 - DNA, 15 bp, Homo sapiens
tggccctcaaaggag

SEQ ID NO: 269019 - DNA, 15 bp, Homo sapiens
ctggccctcaaagga

SEQ ID NO: 269020 - DNA, 15 bp, Homo sapiens
actggccctcaaagg

SEQ ID NO: 269021 - DNA, 15 bp, Homo sapiens
aactggccctcaaag

SEQ ID NO: 269022 - DNA, 15 bp, Homo sapiens
taactggccctcaaa

SEQ ID NO: 269023 - DNA, 15 bp, Homo sapiens
ataactggccctcaa

SEQ ID NO: 269024 - DNA, 15 bp, Homo sapiens
gataactggccctca

SEQ ID NO: 269025 - DNA, 15 bp, Homo sapiens
tgataactggccctc

SEQ ID NO: 269026 - DNA, 15 bp, Homo sapiens
gtgataactggccct

SEQ ID NO: 269027 - DNA, 15 bp, Homo sapiens
tgtgataactggccc

SEQ ID NO: 269028 - DNA, 15 bp, Homo sapiens
gtgtgataactggcc

SEQ ID NO: 269029 - DNA, 15 bp, Homo sapiens
tgtgtgataactggc

SEQ ID NO: 269030 - DNA, 15 bp, Homo sapiens
ctgtgtgataactgg

SEQ ID NO: 269031 - DNA, 15 bp, Homo sapiens
cctgtgtgataactg

SEQ ID NO: 269032 - DNA, 15 bp, Homo sapiens
acctgtgtgataact

SEQ ID NO: 269033 - DNA, 15 bp, Homo sapiens
gacctgtgtgataac

SEQ ID NO: 269034 - DNA, 15 bp, Homo sapiens
agacctgtgtgataa

SEQ ID NO: 269035 - DNA, 15 bp, Homo sapiens
gagacctgtgtgata

SEQ ID NO: 269036 - DNA, 15 bp, Homo sapiens
ggagacctgtgtgat

SEQ ID NO: 269037 - DNA, 15 bp, Homo sapiens
gggagacctgtgtga

SEQ ID NO: 269038 - DNA, 15 bp, Homo sapiens
agggagacctgtgtg

SEQ ID NO: 269039 - DNA, 15 bp, Homo sapiens
aagggagacctgtgt

SEQ ID NO: 269040 - DNA, 15 bp, Homo sapiens
aaagggagacctgtg

SEQ ID NO: 269041 - DNA, 15 bp, Homo sapiens
caaagggagacctgt

SEQ ID NO: 269042 - DNA, 15 bp, Homo sapiens
ccaaagggagacctg

SEQ ID NO: 269043 - DNA, 15 bp, Homo sapiens
cccaaagggagacct

SEQ ID NO: 269044 - DNA, 15 bp, Homo sapiens
acccaaagggagacc

SEQ ID NO: 269045 - DNA, 15 bp, Homo sapiens
gacccaaagggagac

SEQ ID NO: 269046 - DNA, 15 bp, Homo sapiens
agacccaaagggaga

SEQ ID NO: 269047 - DNA, 15 bp, Homo sapiens
gagacccaaagggag

SEQ ID NO: 269048 - DNA, 15 bp, Homo sapiens
ggagacccaaaggga

SEQ ID NO: 269049 - DNA, 15 bp, Homo sapiens
tggagacccaaaggg

SEQ ID NO: 269050 - DNA, 15 bp, Homo sapiens
atggagacccaaagg

SEQ ID NO: 269051 - DNA, 15 bp, Homo sapiens
gatggagacccaaag

SEQ ID NO: 269052 - DNA, 15 bp, Homo sapiens
agatggagacccaaa

SEQ ID NO: 269053 - DNA, 15 bp, Homo sapiens
aagatggagacccaa

SEQ ID NO: 269054 - DNA, 15 bp, Homo sapiens
caagatggagaccca

SEQ ID NO: 269055 - DNA, 15 bp, Homo sapiens
ccaagatggagaccc

SEQ ID NO: 269056 - DNA, 15 bp, Homo sapiens
tccaagatggagacc

SEQ ID NO: 269057 - DNA, 15 bp, Homo sapiens
ttccaagatggagac

SEQ ID NO: 269058 - DNA, 15 bp, Homo sapiens
attccaagatggaga

SEQ ID NO: 269059 - DNA, 15 bp, Homo sapiens
gattccaagatggag

SEQ ID NO: 269060 - DNA, 15 bp, Homo sapiens
ggattccaagatgga

SEQ ID NO: 269061 - DNA, 15 bp, Homo sapiens
tggattccaagatgg

SEQ ID NO: 269062 - DNA, 15 bp, Homo sapiens
ctggattccaagatg

SEQ ID NO: 269063 - DNA, 15 bp, Homo sapiens
cctggattccaagat

SEQ ID NO: 269064 - DNA, 15 bp, Homo sapiens
gcctggattccaaga

SEQ ID NO: 269065 - DNA, 15 bp, Homo sapiens
tgcctggattccaag

SEQ ID NO: 269066 - DNA, 15 bp, Homo sapiens
ctgcctggattccaa

SEQ ID NO: 269067 - DNA, 15 bp, Homo sapiens
cctgcctggattcca

SEQ ID NO: 269068 - DNA, 15 bp, Homo sapiens
tcctgcctggattcc

SEQ ID NO: 269069 - DNA, 15 bp, Homo sapiens
ctcctgcctggattc

SEQ ID NO: 269070 - DNA, 15 bp, Homo sapiens
tctcctgcctggatt

SEQ ID NO: 269071 - DNA, 15 bp, Homo sapiens
ttctcctgcctggat

SEQ ID NO: 269072 - DNA, 15 bp, Homo sapiens
tttctcctgcctgga

SEQ ID NO: 269073 - DNA, 15 bp, Homo sapiens
atttctcctgcctgg

SEQ ID NO: 269074 - DNA, 15 bp, Homo sapiens
aatttctcctgcctg

SEQ ID NO: 269075 - DNA, 15 bp, Homo sapiens
taatttctcctgcct

SEQ ID NO: 269076 - DNA, 15 bp, Homo sapiens
ttaatttctcctgcc

SEQ ID NO: 269077 - DNA, 15 bp, Homo sapiens
gttaatttctcctgc

SEQ ID NO: 269078 - DNA, 15 bp, Homo sapiens
ggttaatttctcctg

SEQ ID NO: 269079 - DNA, 15 bp, Homo sapiens
tggttaatttctcct

SEQ ID NO: 269080 - DNA, 15 bp, Homo sapiens
ctggttaatttctcc

SEQ ID NO: 269081 - DNA, 15 bp, Homo sapiens
cctggttaatttctc

SEQ ID NO: 269082 - DNA, 15 bp, Homo sapiens
tcctggttaatttct

SEQ ID NO: 269083 - DNA, 15 bp, Homo sapiens
ttcctggttaatttc

SEQ ID NO: 269084 - DNA, 15 bp, Homo sapiens
tttcctggttaattt

SEQ ID NO: 269085 - DNA, 15 bp, Homo sapiens
atttcctggttaatt

SEQ ID NO: 269086 - DNA, 15 bp, Homo sapiens
aatttcctggttaat

SEQ ID NO: 269087 - DNA, 15 bp, Homo sapiens
taatttcctggttaa

SEQ ID NO: 269088 - DNA, 15 bp, Homo sapiens
ttaatttcctggtta

SEQ ID NO: 269089 - DNA, 15 bp, Homo sapiens
tttaatttcctggtt

SEQ ID NO: 269090 - DNA, 15 bp, Homo sapiens
ctttaatttcctggt

SEQ ID NO: 269091 - DNA, 15 bp, Homo sapiens
tctttaatttcctgg

SEQ ID NO: 269092 - DNA, 15 bp, Homo sapiens
gtctttaatttcctg

SEQ ID NO: 269093 - DNA, 15 bp, Homo sapiens
tgtctttaatttcct

SEQ ID NO: 269094 - DNA, 15 bp, Homo sapiens
atgtctttaatttcc

SEQ ID NO: 269095 - DNA, 15 bp, Homo sapiens
gatgtctttaatttc

SEQ ID NO: 269096 - DNA, 15 bp, Homo sapiens
agatgtctttaattt

SEQ ID NO: 269097 - DNA, 15 bp, Homo sapiens
aagatgtctttaatt

SEQ ID NO: 269098 - DNA, 15 bp, Homo sapiens
gaagatgtctttaat

SEQ ID NO: 269099 - DNA, 15 bp, Homo sapiens
ggaagatgtctttaa

SEQ ID NO: 269100 - DNA, 15 bp, Homo sapiens
gggaagatgtcttta

SEQ ID NO: 269101 - DNA, 15 bp, Homo sapiens
agggaagatgtcttt

SEQ ID NO: 269102 - DNA, 15 bp, Homo sapiens
aagggaagatgtctt

SEQ ID NO: 269103 - DNA, 15 bp, Homo sapiens
gaagggaagatgtct

SEQ ID NO: 269104 - DNA, 15 bp, Homo sapiens
agaagggaagatgtc

SEQ ID NO: 269105 - DNA, 15 bp, Homo sapiens
gagaagggaagatgt

SEQ ID NO: 269106 - DNA, 15 bp, Homo sapiens
ggagaagggaagatg

SEQ ID NO: 269107 - DNA, 15 bp, Homo sapiens
tggagaagggaagat

SEQ ID NO: 269108 - DNA, 15 bp, Homo sapiens
gtggagaagggaaga

SEQ ID NO: 269109 - DNA, 15 bp, Homo sapiens
agtggagaagggaag

SEQ ID NO: 269110 - DNA, 15 bp, Homo sapiens
gagtggagaagggaa

SEQ ID NO: 269111 - DNA, 15 bp, Homo sapiens
ggagtggagaaggga

SEQ ID NO: 269112 - DNA, 15 bp, Homo sapiens
aggagtggagaaggg

SEQ ID NO: 269113 - DNA, 15 bp, Homo sapiens
caggagtggagaagg

SEQ ID NO: 269114 - DNA, 15 bp, Homo sapiens
acaggagtggagaag

SEQ ID NO: 269115 - DNA, 15 bp, Homo sapiens
gacaggagtggagaa

SEQ ID NO: 269116 - DNA, 15 bp, Homo sapiens
tgacaggagtggaga

SEQ ID NO: 269117 - DNA, 15 bp, Homo sapiens
atgacaggagtggag

SEQ ID NO: 269118 - DNA, 15 bp, Homo sapiens
catgacaggagtgga

SEQ ID NO: 269119 - DNA, 15 bp, Homo sapiens
acatgacaggagtgg

SEQ ID NO: 269120 - DNA, 15 bp, Homo sapiens
aacatgacaggagtg

SEQ ID NO: 269121 - DNA, 15 bp, Homo sapiens
aaacatgacaggagt

SEQ ID NO: 269122 - DNA, 15 bp, Homo sapiens
taaacatgacaggag

SEQ ID NO: 269123 - DNA, 15 bp, Homo sapiens
ctaaacatgacagga

SEQ ID NO: 269124 - DNA, 15 bp, Homo sapiens
tctaaacatgacagg

SEQ ID NO: 269125 - DNA, 15 bp, Homo sapiens
atctaaacatgacag

SEQ ID NO: 269126 - DNA, 15 bp, Homo sapiens
gatctaaacatgaca

SEQ ID NO: 269127 - DNA, 15 bp, Homo sapiens
agatctaaacatgac

SEQ ID NO: 269128 - DNA, 15 bp, Homo sapiens
aagatctaaacatga

SEQ ID NO: 269129 - DNA, 15 bp, Homo sapiens
caagatctaaacatg

SEQ ID NO: 269130 - DNA, 15 bp, Homo sapiens
ccaagatctaaacat

SEQ ID NO: 269131 - DNA, 15 bp, Homo sapiens
cccaagatctaaaca

SEQ ID NO: 269132 - DNA, 15 bp, Homo sapiens
tcccaagatctaaac

SEQ ID NO: 269133 - DNA, 15 bp, Homo sapiens
ctcccaagatctaaa

SEQ ID NO: 269134 - DNA, 15 bp, Homo sapiens
actcccaagatctaa

SEQ ID NO: 269135 - DNA, 15 bp, Homo sapiens
tactcccaagatcta

SEQ ID NO: 269136 - DNA, 15 bp, Homo sapiens
ttactcccaagatct

SEQ ID NO: 269137 - DNA, 15 bp, Homo sapiens
cttactcccaagatc

SEQ ID NO: 269138 - DNA, 15 bp, Homo sapiens
ccttactcccaagat

SEQ ID NO: 269139 - DNA, 15 bp, Homo sapiens
tccttactcccaaga

SEQ ID NO: 269140 - DNA, 15 bp, Homo sapiens
ctccttactcccaag

SEQ ID NO: 269141 - DNA, 15 bp, Homo sapiens
tctccttactcccaa

SEQ ID NO: 269142 - DNA, 15 bp, Homo sapiens
ctctccttactccca

SEQ ID NO: 269143 - DNA, 15 bp, Homo sapiens
cctctccttactccc

SEQ ID NO: 269144 - DNA, 15 bp, Homo sapiens
tcctctccttactcc

SEQ ID NO: 269145 - DNA, 15 bp, Homo sapiens
ttcctctccttactc

SEQ ID NO: 269146 - DNA, 15 bp, Homo sapiens
attcctctccttact

SEQ ID NO: 269147 - DNA, 15 bp, Homo sapiens
cattcctctccttac

SEQ ID NO: 269148 - DNA, 15 bp, Homo sapiens
ccattcctctcctta

SEQ ID NO: 269149 - DNA, 15 bp, Homo sapiens
cccattcctctcctt

SEQ ID NO: 269150 - DNA, 15 bp, Homo sapiens
tcccattcctctcct

SEQ ID NO: 269151 - DNA, 15 bp, Homo sapiens
ctcccattcctctcc

SEQ ID NO: 269152 - DNA, 15 bp, Homo sapiens
tctcccattcctctc

SEQ ID NO: 269153 - DNA, 15 bp, Homo sapiens
ctctcccattcctct

SEQ ID NO: 269154 - DNA, 15 bp, Homo sapiens
gctctcccattcctc

SEQ ID NO: 269155 - DNA, 15 bp, Homo sapiens
tgctctcccattcct

SEQ ID NO: 269156 - DNA, 15 bp, Homo sapiens
ttgctctcccattcc

SEQ ID NO: 269157 - DNA, 15 bp, Homo sapiens
tttgctctcccattc

SEQ ID NO: 269158 - DNA, 15 bp, Homo sapiens
gtttgctctcccatt

SEQ ID NO: 269159 - DNA, 15 bp, Homo sapiens
tgtttgctctcccat

SEQ ID NO: 269160 - DNA, 15 bp, Homo sapiens
atgtttgctctccca

SEQ ID NO: 269161 - DNA, 15 bp, Homo sapiens
tatgtttgctctccc

SEQ ID NO: 269162 - DNA, 15 bp, Homo sapiens
ctatgtttgctctcc

SEQ ID NO: 269163 - DNA, 15 bp, Homo sapiens
gctatgtttgctctc

SEQ ID NO: 269164 - DNA, 15 bp, Homo sapiens
agctatgtttgctct

SEQ ID NO: 269165 - DNA, 15 bp, Homo sapiens
aagctatgtttgctc

SEQ ID NO: 269166 - DNA, 15 bp, Homo sapiens
caagctatgtttgct

SEQ ID NO: 269167 - DNA, 15 bp, Homo sapiens
ccaagctatgtttgc

SEQ ID NO: 269168 - DNA, 15 bp, Homo sapiens
gccaagctatgtttg

SEQ ID NO: 269169 - DNA, 15 bp, Homo sapiens
agccaagctatgttt

SEQ ID NO: 269170 - DNA, 15 bp, Homo sapiens
cagccaagctatgtt

SEQ ID NO: 269171 - DNA, 15 bp, Homo sapiens
ccagccaagctatgt

SEQ ID NO: 269172 - DNA, 15 bp, Homo sapiens
tccagccaagctatg

SEQ ID NO: 269173 - DNA, 15 bp, Homo sapiens
ctccagccaagctat

SEQ ID NO: 269174 - DNA, 15 bp, Homo sapiens
tctccagccaagcta

SEQ ID NO: 269175 - DNA, 15 bp, Homo sapiens
ttctccagccaagct

SEQ ID NO: 269176 - DNA, 15 bp, Homo sapiens
cttctccagccaagc

SEQ ID NO: 269177 - DNA, 15 bp, Homo sapiens
ccttctccagccaag

SEQ ID NO: 269178 - DNA, 15 bp, Homo sapiens
tccttctccagccaa

SEQ ID NO: 269179 - DNA, 15 bp, Homo sapiens
ctccttctccagcca

SEQ ID NO: 269180 - DNA, 15 bp, Homo sapiens
cctccttctccagcc

SEQ ID NO: 269181 - DNA, 15 bp, Homo sapiens
acctccttctccagc

SEQ ID NO: 269182 - DNA, 15 bp, Homo sapiens
cacctccttctccag

SEQ ID NO: 269183 - DNA, 15 bp, Homo sapiens
ccacctccttctcca

SEQ ID NO: 269184 - DNA, 15 bp, Homo sapiens
accacctccttctcc

SEQ ID NO: 269185 - DNA, 15 bp, Homo sapiens
aaccacctccttctc

SEQ ID NO: 269186 - DNA, 15 bp, Homo sapiens
aaaccacctccttct

SEQ ID NO: 269187 - DNA, 15 bp, Homo sapiens
aaaaccacctccttc

SEQ ID NO: 269188 - DNA, 15 bp, Homo sapiens
caaaaccacctcctt

SEQ ID NO: 269189 - DNA, 15 bp, Homo sapiens
tcaaaaccacctcct

SEQ ID NO: 269190 - DNA, 15 bp, Homo sapiens
atcaaaaccacctcc

SEQ ID NO: 269191 - DNA, 15 bp, Homo sapiens
gatcaaaaccacctc

SEQ ID NO: 269192 - DNA, 15 bp, Homo sapiens
agatcaaaaccacct

SEQ ID NO: 269193 - DNA, 15 bp, Homo sapiens
aagatcaaaaccacc

SEQ ID NO: 269194 - DNA, 15 bp, Homo sapiens
aaagatcaaaaccac

SEQ ID NO: 269195 - DNA, 15 bp, Homo sapiens
aaaagatcaaaacca

SEQ ID NO: 269196 - DNA, 15 bp, Homo sapiens
gaaaagatcaaaacc

SEQ ID NO: 269197 - DNA, 15 bp, Homo sapiens
agaaaagatcaaaac

SEQ ID NO: 269198 - DNA, 15 bp, Homo sapiens
aagaaaagatcaaaa

SEQ ID NO: 269199 - DNA, 15 bp, Homo sapiens
gaagaaaagatcaaa

SEQ ID NO: 269200 - DNA, 15 bp, Homo sapiens
agaagaaaagatcaa

SEQ ID NO: 269201 - DNA, 15 bp, Homo sapiens
gagaagaaaagatca

SEQ ID NO: 269202 - DNA, 15 bp, Homo sapiens
ggagaagaaaagatc

SEQ ID NO: 269203 - DNA, 15 bp, Homo sapiens
gggagaagaaaagat

SEQ ID NO: 269204 - DNA, 15 bp, Homo sapiens
ggggagaagaaaaga

SEQ ID NO: 269205 - DNA, 15 bp, Homo sapiens
aggggagaagaaaag

SEQ ID NO: 269206 - DNA, 15 bp, Homo sapiens
aaggggagaagaaaa

SEQ ID NO: 269207 - DNA, 15 bp, Homo sapiens
gaaggggagaagaaa

SEQ ID NO: 269208 - DNA, 15 bp, Homo sapiens
ggaaggggagaagaa

SEQ ID NO: 269209 - DNA, 15 bp, Homo sapiens
aggaaggggagaaga

SEQ ID NO: 269210 - DNA, 15 bp, Homo sapiens
aaggaaggggagaag

SEQ ID NO: 269211 - DNA, 15 bp, Homo sapiens
aaaggaaggggagaa

SEQ ID NO: 269212 - DNA, 15 bp, Homo sapiens
gaaaggaaggggaga

SEQ ID NO: 269213 - DNA, 15 bp, Homo sapiens
tgaaaggaaggggag

SEQ ID NO: 269214 - DNA, 15 bp, Homo sapiens
atgaaaggaagggga

SEQ ID NO: 269215 - DNA, 15 bp, Homo sapiens
tatgaaaggaagggg

SEQ ID NO: 269216 - DNA, 15 bp, Homo sapiens
ctatgaaaggaaggg

SEQ ID NO: 269217 - DNA, 15 bp, Homo sapiens
cctatgaaaggaagg

SEQ ID NO: 269218 - DNA, 15 bp, Homo sapiens
acctatgaaaggaag

SEQ ID NO: 269219 - DNA, 15 bp, Homo sapiens
tacctatgaaaggaa

SEQ ID NO: 269220 - DNA, 15 bp, Homo sapiens
ctacctatgaaagga

SEQ ID NO: 269221 - DNA, 15 bp, Homo sapiens
tctacctatgaaagg

SEQ ID NO: 269222 - DNA, 15 bp, Homo sapiens
ctctacctatgaaag

SEQ ID NO: 269223 - DNA, 15 bp, Homo sapiens
cctctacctatgaaa

SEQ ID NO: 269224 - DNA, 15 bp, Homo sapiens
acctctacctatgaa

SEQ ID NO: 269225 - DNA, 15 bp, Homo sapiens
gacctctacctatga

SEQ ID NO: 269226 - DNA, 15 bp, Homo sapiens
cgacctctacctatg

SEQ ID NO: 269227 - DNA, 15 bp, Homo sapiens
acgacctctacctat

SEQ ID NO: 269228 - DNA, 15 bp, Homo sapiens
gacgacctctaccta

SEQ ID NO: 269229 - DNA, 15 bp, Homo sapiens
agacgacctctacct

SEQ ID NO: 269230 - DNA, 15 bp, Homo sapiens
gagacgacctctacc

SEQ ID NO: 269231 - DNA, 15 bp, Homo sapiens
ggagacgacctctac

SEQ ID NO: 269232 - DNA, 15 bp, Homo sapiens
aggagacgacctcta

SEQ ID NO: 269233 - DNA, 15 bp, Homo sapiens
aaggagacgacctct

SEQ ID NO: 269234 - DNA, 15 bp, Homo sapiens
aaaggagacgacctc

SEQ ID NO: 269235 - DNA, 15 bp, Homo sapiens
taaaggagacgacct

SEQ ID NO: 269236 - DNA, 15 bp, Homo sapiens
ataaaggagacgacc

SEQ ID NO: 269237 - DNA, 15 bp, Homo sapiens
tataaaggagacgac

SEQ ID NO: 269238 - DNA, 15 bp, Homo sapiens
gtataaaggagacga

SEQ ID NO: 269239 - DNA, 15 bp, Homo sapiens
ggtataaaggagacg

SEQ ID NO: 269240 - DNA, 15 bp, Homo sapiens
tggtataaaggagac

SEQ ID NO: 269241 - DNA, 15 bp, Homo sapiens
atggtataaaggaga

SEQ ID NO: 269242 - DNA, 15 bp, Homo sapiens
gatggtataaaggag

SEQ ID NO: 269243 - DNA, 15 bp, Homo sapiens
agatggtataaagga

SEQ ID NO: 269244 - DNA, 15 bp, Homo sapiens
cagatggtataaagg

SEQ ID NO: 269245 - DNA, 15 bp, Homo sapiens
acagatggtataaag

SEQ ID NO: 269246 - DNA, 15 bp, Homo sapiens
gacagatggtataaa

SEQ ID NO: 269247 - DNA, 15 bp, Homo sapiens
agacagatggtataa

SEQ ID NO: 269248 - DNA, 15 bp, Homo sapiens
aagacagatggtata

SEQ ID NO: 269249 - DNA, 15 bp, Homo sapiens
caagacagatggtat

SEQ ID NO: 269250 - DNA, 15 bp, Homo sapiens
ccaagacagatggta

SEQ ID NO: 269251 - DNA, 15 bp, Homo sapiens
cccaagacagatggt

SEQ ID NO: 269252 - DNA, 15 bp, Homo sapiens
ccccaagacagatgg

SEQ ID NO: 269253 - DNA, 15 bp, Homo sapiens
tccccaagacagatg

SEQ ID NO: 269254 - DNA, 15 bp, Homo sapiens
ctccccaagacagat

SEQ ID NO: 269255 - DNA, 15 bp, Homo sapiens
actccccaagacaga

SEQ ID NO: 269256 - DNA, 15 bp, Homo sapiens
tactccccaagacag

SEQ ID NO: 269257 - DNA, 15 bp, Homo sapiens
ctactccccaagaca

SEQ ID NO: 269258 - DNA, 15 bp, Homo sapiens
actactccccaagac

SEQ ID NO: 269259 - DNA, 15 bp, Homo sapiens
gactactccccaaga

SEQ ID NO: 269260 - DNA, 15 bp, Homo sapiens
tgactactccccaag

SEQ ID NO: 269261 - DNA, 15 bp, Homo sapiens
gtgactactccccaa

SEQ ID NO: 269262 - DNA, 15 bp, Homo sapiens
tgtgactactcccca

SEQ ID NO: 269263 - DNA, 15 bp, Homo sapiens
atgtgactactcccc

SEQ ID NO: 269264 - DNA, 15 bp, Homo sapiens
aatgtgactactccc

SEQ ID NO: 269265 - DNA, 15 bp, Homo sapiens
taatgtgactactcc

SEQ ID NO: 269266 - DNA, 15 bp, Homo sapiens
ttaatgtgactactc

SEQ ID NO: 269267 - DNA, 15 bp, Homo sapiens
attaatgtgactact

SEQ ID NO: 269268 - DNA, 15 bp, Homo sapiens
aattaatgtgactac

SEQ ID NO: 269269 - DNA, 15 bp, Homo sapiens
taattaatgtgacta

SEQ ID NO: 269270 - DNA, 15 bp, Homo sapiens
ataattaatgtgact

SEQ ID NO: 269271 - DNA, 15 bp, Homo sapiens
cataattaatgtgac

SEQ ID NO: 269272 - DNA, 15 bp, Homo sapiens
gcataattaatgtga

SEQ ID NO: 269273 - DNA, 15 bp, Homo sapiens
cgcataattaatgtg

SEQ ID NO: 269274 - DNA, 15 bp, Homo sapiens
acgcataattaatgt

SEQ ID NO: 269275 - DNA, 15 bp, Homo sapiens
cacgcataattaatg

SEQ ID NO: 269276 - DNA, 15 bp, Homo sapiens
acacgcataattaat

SEQ ID NO: 269277 - DNA, 15 bp, Homo sapiens
tacacgcataattaa

SEQ ID NO: 269278 - DNA, 15 bp, Homo sapiens
atacacgcataatta

SEQ ID NO: 269279 - DNA, 15 bp, Homo sapiens
aatacacgcataatt

SEQ ID NO: 269280 - DNA, 15 bp, Homo sapiens
aaatacacgcataat

SEQ ID NO: 269281 - DNA, 15 bp, Homo sapiens
taaatacacgcataa

SEQ ID NO: 269282 - DNA, 15 bp, Homo sapiens
ctaaatacacgcata

SEQ ID NO: 269283 - DNA, 15 bp, Homo sapiens
tctaaatacacgcat

SEQ ID NO: 269284 - DNA, 15 bp, Homo sapiens
ctctaaatacacgca

SEQ ID NO: 269285 - DNA, 15 bp, Homo sapiens
gctctaaatacacgc

SEQ ID NO: 269286 - DNA, 15 bp, Homo sapiens
agctctaaatacacg

SEQ ID NO: 269287 - DNA, 15 bp, Homo sapiens
aagctctaaatacac

SEQ ID NO: 269288 - DNA, 15 bp, Homo sapiens
aaagctctaaataca

SEQ ID NO: 269289 - DNA, 15 bp, Homo sapiens
taaagctctaaatac

SEQ ID NO: 269290 - DNA, 15 bp, Homo sapiens
gtaaagctctaaata

SEQ ID NO: 269291 - DNA, 15 bp, Homo sapiens
tgtaaagctctaaat

SEQ ID NO: 269292 - DNA, 15 bp, Homo sapiens
acatagtgctgtgtc

SEQ ID NO: 269293 - DNA, 15 bp, Homo sapiens
gacatagtgctgtgt

SEQ ID NO: 269294 - DNA, 15 bp, Homo sapiens
agacatagtgctgtg

SEQ ID NO: 269295 - DNA, 15 bp, Homo sapiens
aagacatagtgctgt

SEQ ID NO: 269296 - DNA, 15 bp, Homo sapiens
gaagacatagtgctg

SEQ ID NO: 269297 - DNA, 15 bp, Homo sapiens
agaagacatagtgct

SEQ ID NO: 269298 - DNA, 15 bp, Homo sapiens
aagaagacatagtgc

SEQ ID NO: 269299 - DNA, 15 bp, Homo sapiens
caagaagacatagtg

SEQ ID NO: 269300 - DNA, 15 bp, Homo sapiens
tcaagaagacatagt

SEQ ID NO: 269301 - DNA, 15 bp, Homo sapiens
ttcaagaagacatag

SEQ ID NO: 269302 - DNA, 15 bp, Homo sapiens
tttcaagaagacata

SEQ ID NO: 269303 - DNA, 15 bp, Homo sapiens
ttttcaagaagacat

SEQ ID NO: 269304 - DNA, 15 bp, Homo sapiens
gttttcaagaagaca

SEQ ID NO: 269305 - DNA, 15 bp, Homo sapiens
ggttttcaagaagac

SEQ ID NO: 269306 - DNA, 15 bp, Homo sapiens
aggttttcaagaaga

SEQ ID NO: 269307 - DNA, 15 bp, Homo sapiens
gaggttttcaagaag

SEQ ID NO: 269308 - DNA, 15 bp, Homo sapiens
agaggttttcaagaa

SEQ ID NO: 269309 - DNA, 15 bp, Homo sapiens
cagaggttttcaaga

SEQ ID NO: 269310 - DNA, 15 bp, Homo sapiens
tcagaggttttcaag

SEQ ID NO: 269311 - DNA, 15 bp, Homo sapiens
atcagaggttttcaa

SEQ ID NO: 269312 - DNA, 15 bp, Homo sapiens
aatcagaggttttca

SEQ ID NO: 269313 - DNA, 15 bp, Homo sapiens
aaatcagaggttttc

SEQ ID NO: 269314 - DNA, 15 bp, Homo sapiens
gaaatcagaggtttt

SEQ ID NO: 269315 - DNA, 15 bp, Homo sapiens
agaaatcagaggttt

SEQ ID NO: 269316 - DNA, 15 bp, Homo sapiens
aagaaatcagaggtt

SEQ ID NO: 269317 - DNA, 15 bp, Homo sapiens
aaagaaatcagaggt

SEQ ID NO: 269318 - DNA, 15 bp, Homo sapiens
aaaagaaatcagagg

SEQ ID NO: 269319 - DNA, 15 bp, Homo sapiens
caaaagaaatcagag

SEQ ID NO: 269320 - DNA, 15 bp, Homo sapiens
acaaaagaaatcaga

SEQ ID NO: 269321 - DNA, 15 bp, Homo sapiens
gacaaaagaaatcag

SEQ ID NO: 269322 - DNA, 15 bp, Homo sapiens
agacaaaagaaatca

SEQ ID NO: 269323 - DNA, 15 bp, Homo sapiens
cagacaaaagaaatc

SEQ ID NO: 269324 - DNA, 15 bp, Homo sapiens
acagacaaaagaaat

SEQ ID NO: 269325 - DNA, 15 bp, Homo sapiens
gacagacaaaagaaa

SEQ ID NO: 269326 - DNA, 15 bp, Homo sapiens
ggacagacaaaagaa

SEQ ID NO: 269327 - DNA, 15 bp, Homo sapiens
tggacagacaaaaga

SEQ ID NO: 269328 - DNA, 15 bp, Homo sapiens
gtggacagacaaaag

SEQ ID NO: 269329 - DNA, 15 bp, Homo sapiens
cgtggacagacaaaa

SEQ ID NO: 269330 - DNA, 15 bp, Homo sapiens
acgtggacagacaaa

SEQ ID NO: 269331 - DNA, 15 bp, Homo sapiens
aacgtggacagacaa

SEQ ID NO: 269332 - DNA, 15 bp, Homo sapiens
caacgtggacagaca

SEQ ID NO: 269333 - DNA, 15 bp, Homo sapiens
gcaacgtggacagac

SEQ ID NO: 269334 - DNA, 15 bp, Homo sapiens
agcaacgtggacaga

SEQ ID NO: 269335 - DNA, 15 bp, Homo sapiens
cagcaacgtggacag

SEQ ID NO: 269336 - DNA, 15 bp, Homo sapiens
ccagcaacgtggaca

SEQ ID NO: 269337 - DNA, 15 bp, Homo sapiens
tccagcaacgtggac

SEQ ID NO: 269338 - DNA, 15 bp, Homo sapiens
ctccagcaacgtgga

SEQ ID NO: 269339 - DNA, 15 bp, Homo sapiens
gctccagcaacgtgg

SEQ ID NO: 269340 - DNA, 15 bp, Homo sapiens
agctccagcaacgtg

SEQ ID NO: 269341 - DNA, 15 bp, Homo sapiens
tagctccagcaacgt

SEQ ID NO: 269342 - DNA, 15 bp, Homo sapiens
ctagctccagcaacg

SEQ ID NO: 269343 - DNA, 15 bp, Homo sapiens
tctagctccagcaac

SEQ ID NO: 269344 - DNA, 15 bp, Homo sapiens
gtctagctccagcaa

SEQ ID NO: 269345 - DNA, 15 bp, Homo sapiens
tgtctagctccagca

SEQ ID NO: 269346 - DNA, 15 bp, Homo sapiens
ctgtctagctccagc

SEQ ID NO: 269347 - DNA, 15 bp, Homo sapiens
actgtctagctccag

SEQ ID NO: 269348 - DNA, 15 bp, Homo sapiens
cactgtctagctcca

SEQ ID NO: 269349 - DNA, 15 bp, Homo sapiens
acactgtctagctcc

SEQ ID NO: 269350 - DNA, 15 bp, Homo sapiens
gacactgtctagctc

SEQ ID NO: 269351 - DNA, 15 bp, Homo sapiens
cgacactgtctagct

SEQ ID NO: 269352 - DNA, 15 bp, Homo sapiens
tcgacactgtctagc

SEQ ID NO: 269353 - DNA, 15 bp, Homo sapiens
ctcgacactgtctag

SEQ ID NO: 269354 - DNA, 15 bp, Homo sapiens
tctcgacactgtcta

SEQ ID NO: 269355 - DNA, 15 bp, Homo sapiens
gtctcgacactgtct

SEQ ID NO: 269356 - DNA, 15 bp, Homo sapiens
agtctcgacactgtc

SEQ ID NO: 269357 - DNA, 15 bp, Homo sapiens
aagtctcgacactgt

SEQ ID NO: 269358 - DNA, 15 bp, Homo sapiens
aaagtctcgacactg

SEQ ID NO: 269359 - DNA, 15 bp, Homo sapiens
caaagtctcgacact

SEQ ID NO: 269360 - DNA, 15 bp, Homo sapiens
tcaaagtctcgacac

SEQ ID NO: 269361 - DNA, 15 bp, Homo sapiens
atcaaagtctcgaca

SEQ ID NO: 269362 - DNA, 15 bp, Homo sapiens
aatcaaagtctcgac

SEQ ID NO: 269363 - DNA, 15 bp, Homo sapiens
aaatcaaagtctcga

SEQ ID NO: 269364 - DNA, 15 bp, Homo sapiens
caaatcaaagtctcg

SEQ ID NO: 269365 - DNA, 15 bp, Homo sapiens
tcaaatcaaagtctc

SEQ ID NO: 269366 - DNA, 15 bp, Homo sapiens
ctcaaatcaaagtct

SEQ ID NO: 269367 - DNA, 15 bp, Homo sapiens
actcaaatcaaagtc

SEQ ID NO: 269368 - DNA, 15 bp, Homo sapiens
tactcaaatcaaagt

SEQ ID NO: 269369 - DNA, 15 bp, Homo sapiens
gtactcaaatcaaag

SEQ ID NO: 269370 - DNA, 15 bp, Homo sapiens
ggtactcaaatcaaa

SEQ ID NO: 269371 - DNA, 15 bp, Homo sapiens
cggtactcaaatcaa

SEQ ID NO: 269372 - DNA, 15 bp, Homo sapiens
gcggtactcaaatca

SEQ ID NO: 269373 - DNA, 15 bp, Homo sapiens
tgcggtactcaaatc

SEQ ID NO: 269374 - DNA, 15 bp, Homo sapiens
ctgcggtactcaaat

SEQ ID NO: 269375 - DNA, 15 bp, Homo sapiens
actgcggtactcaaa

SEQ ID NO: 269376 - DNA, 15 bp, Homo sapiens
cactgcggtactcaa

SEQ ID NO: 269377 - DNA, 15 bp, Homo sapiens
ccactgcggtactca

SEQ ID NO: 269378 - DNA, 15 bp, Homo sapiens
gccactgcggtactc

SEQ ID NO: 269379 - DNA, 15 bp, Homo sapiens
cgccactgcggtact

SEQ ID NO: 269380 - DNA, 15 bp, Homo sapiens
ccgccactgcggtac

SEQ ID NO: 269381 - DNA, 15 bp, Homo sapiens
cccgccactgcggta

SEQ ID NO: 269382 - DNA, 15 bp, Homo sapiens
gcccgccactgcggt

SEQ ID NO: 269383 - DNA, 15 bp, Homo sapiens
agcccgccactgcgg

SEQ ID NO: 269384 - DNA, 15 bp, Homo sapiens
tagcccgccactgcg

SEQ ID NO: 269385 - DNA, 15 bp, Homo sapiens
atagcccgccactgc

SEQ ID NO: 269386 - DNA, 15 bp, Homo sapiens
aatagcccgccactg

SEQ ID NO: 269387 - DNA, 15 bp, Homo sapiens
gaatagcccgccact

SEQ ID NO: 269388 - DNA, 15 bp, Homo sapiens
agaatagcccgccac

SEQ ID NO: 269389 - DNA, 15 bp, Homo sapiens
cagaatagcccgcca

SEQ ID NO: 269390 - DNA, 15 bp, Homo sapiens
ccagaatagcccgcc

SEQ ID NO: 269391 - DNA, 15 bp, Homo sapiens
cccagaatagcccgc

SEQ ID NO: 269392 - DNA, 15 bp, Homo sapiens
tcccagaatagcccg

SEQ ID NO: 269393 - DNA, 15 bp, Homo sapiens
ctcccagaatagccc

SEQ ID NO: 269394 - DNA, 15 bp, Homo sapiens
cctcccagaatagcc

SEQ ID NO: 269395 - DNA, 15 bp, Homo sapiens
tcctcccagaatagc

SEQ ID NO: 269396 - DNA, 15 bp, Homo sapiens
ttcctcccagaatag

SEQ ID NO: 269397 - DNA, 15 bp, Homo sapiens
gttcctcccagaata

SEQ ID NO: 269398 - DNA, 15 bp, Homo sapiens
tgttcctcccagaat

SEQ ID NO: 269399 - DNA, 15 bp, Homo sapiens
ctgttcctcccagaa

SEQ ID NO: 269400 - DNA, 15 bp, Homo sapiens
tctgttcctcccaga

SEQ ID NO: 269401 - DNA, 15 bp, Homo sapiens
gtctgttcctcccag

SEQ ID NO: 269402 - DNA, 15 bp, Homo sapiens
ggtctgttcctccca

SEQ ID NO: 269403 - DNA, 15 bp, Homo sapiens
aggtctgttcctccc

SEQ ID NO: 269404 - DNA, 15 bp, Homo sapiens
caggtctgttcctcc

SEQ ID NO: 269405 - DNA, 15 bp, Homo sapiens
tcaggtctgttcctc

SEQ ID NO: 269406 - DNA, 15 bp, Homo sapiens
ttcaggtctgttcct

SEQ ID NO: 269407 - DNA, 15 bp, Homo sapiens
tttcaggtctgttcc

SEQ ID NO: 269408 - DNA, 15 bp, Homo sapiens
ctttcaggtctgttc

SEQ ID NO: 269409 - DNA, 15 bp, Homo sapiens
tctttcaggtctgtt

SEQ ID NO: 269410 - DNA, 15 bp, Homo sapiens
ctctttcaggtctgt

SEQ ID NO: 269411 - DNA, 15 bp, Homo sapiens
cctctttcaggtctg

SEQ ID NO: 269412 - DNA, 15 bp, Homo sapiens
gcctctttcaggtct

SEQ ID NO: 269413 - DNA, 15 bp, Homo sapiens
tgcctctttcaggtc

SEQ ID NO: 269414 - DNA, 15 bp, Homo sapiens
ctgcctctttcaggt

SEQ ID NO: 269415 - DNA, 15 bp, Homo sapiens
gctgcctctttcagg

SEQ ID NO: 269416 - DNA, 15 bp, Homo sapiens
tgctgcctctttcag

SEQ ID NO: 269417 - DNA, 15 bp, Homo sapiens
gtgctgcctctttca

SEQ ID NO: 269418 - DNA, 15 bp, Homo sapiens
tgtgctgcctctttc

SEQ ID NO: 269419 - DNA, 15 bp, Homo sapiens
atgtgctgcctcttt

SEQ ID NO: 269420 - DNA, 15 bp, Homo sapiens
aatgtgctgcctctt

SEQ ID NO: 269421 - DNA, 15 bp, Homo sapiens
aaatgtgctgcctct

SEQ ID NO: 269422 - DNA, 15 bp, Homo sapiens
taaatgtgctgcctc

SEQ ID NO: 269423 - DNA, 15 bp, Homo sapiens
ctaaatgtgctgcct

SEQ ID NO: 269424 - DNA, 15 bp, Homo sapiens
gctaaatgtgctgcc

SEQ ID NO: 269425 - DNA, 15 bp, Homo sapiens
tgctaaatgtgctgc

SEQ ID NO: 269426 - DNA, 15 bp, Homo sapiens
ctgctaaatgtgctg

SEQ ID NO: 269427 - DNA, 15 bp, Homo sapiens
tctgctaaatgtgct

SEQ ID NO: 269428 - DNA, 15 bp, Homo sapiens
ctctgctaaatgtgc

SEQ ID NO: 269429 - DNA, 15 bp, Homo sapiens
tctctgctaaatgtg

SEQ ID NO: 269430 - DNA, 15 bp, Homo sapiens
gtctctgctaaatgt

SEQ ID NO: 269431 - DNA, 15 bp, Homo sapiens
agtctctgctaaatg

SEQ ID NO: 269432 - DNA, 15 bp, Homo sapiens
cagtctctgctaaat

SEQ ID NO: 269433 - DNA, 15 bp, Homo sapiens
gcagtctctgctaaa

SEQ ID NO: 269434 - DNA, 15 bp, Homo sapiens
tgcagtctctgctaa

SEQ ID NO: 269435 - DNA, 15 bp, Homo sapiens
ctgcagtctctgcta

SEQ ID NO: 269436 - DNA, 15 bp, Homo sapiens
gctgcagtctctgct

SEQ ID NO: 269437 - DNA, 15 bp, Homo sapiens
ggctgcagtctctgc

SEQ ID NO: 269438 - DNA, 15 bp, Homo sapiens
tggctgcagtctctg

SEQ ID NO: 269439 - DNA, 15 bp, Homo sapiens
gtggctgcagtctct

SEQ ID NO: 269440 - DNA, 15 bp, Homo sapiens
tgtggctgcagtctc

SEQ ID NO: 269441 - DNA, 15 bp, Homo sapiens
gtgtggctgcagtct

SEQ ID NO: 269442 - DNA, 15 bp, Homo sapiens
ggtgtggctgcagtc

SEQ ID NO: 269443 - DNA, 15 bp, Homo sapiens
cggtgtggctgcagt

SEQ ID NO: 269444 - DNA, 15 bp, Homo sapiens
ccggtgtggctgcag

SEQ ID NO: 269445 - DNA, 15 bp, Homo sapiens
gccggtgtggctgca

SEQ ID NO: 269446 - DNA, 15 bp, Homo sapiens
agccggtgtggctgc

SEQ ID NO: 269447 - DNA, 15 bp, Homo sapiens
cagccggtgtggctg

SEQ ID NO: 269448 - DNA, 15 bp, Homo sapiens
ccagccggtgtggct

SEQ ID NO: 269449 - DNA, 15 bp, Homo sapiens
cccagccggtgtggc

SEQ ID NO: 269450 - DNA, 15 bp, Homo sapiens
ccccagccggtgtgg

SEQ ID NO: 269451 - DNA, 15 bp, Homo sapiens
gccccagccggtgtg

SEQ ID NO: 269452 - DNA, 15 bp, Homo sapiens
ggccccagccggtgt

SEQ ID NO: 269453 - DNA, 15 bp, Homo sapiens
tggccccagccggtg

SEQ ID NO: 269454 - DNA, 15 bp, Homo sapiens
ctggccccagccggt

SEQ ID NO: 269455 - DNA, 15 bp, Homo sapiens
cctggccccagccgg

SEQ ID NO: 269456 - DNA, 15 bp, Homo sapiens
ccctggccccagccg

SEQ ID NO: 269457 - DNA, 15 bp, Homo sapiens
accctggccccagcc

SEQ ID NO: 269458 - DNA, 15 bp, Homo sapiens
caccctggccccagc

SEQ ID NO: 269459 - DNA, 15 bp, Homo sapiens
gcaccctggccccag

SEQ ID NO: 269460 - DNA, 15 bp, Homo sapiens
agcaccctggcccca

SEQ ID NO: 269461 - DNA, 15 bp, Homo sapiens
aagcaccctggcccc

SEQ ID NO: 269462 - DNA, 15 bp, Homo sapiens
caagcaccctggccc

SEQ ID NO: 269463 - DNA, 15 bp, Homo sapiens
ccaagcaccctggcc

SEQ ID NO: 269464 - DNA, 15 bp, Homo sapiens
tccaagcaccctggc

SEQ ID NO: 269465 - DNA, 15 bp, Homo sapiens
atccaagcaccctgg

SEQ ID NO: 269466 - DNA, 15 bp, Homo sapiens
catccaagcaccctg

SEQ ID NO: 269467 - DNA, 15 bp, Homo sapiens
acatccaagcaccct

SEQ ID NO: 269468 - DNA, 15 bp, Homo sapiens
cacatccaagcaccc

SEQ ID NO: 269469 - DNA, 15 bp, Homo sapiens
tcacatccaagcacc

SEQ ID NO: 269470 - DNA, 15 bp, Homo sapiens
gtcacatccaagcac

SEQ ID NO: 269471 - DNA, 15 bp, Homo sapiens
tgtcacatccaagca

SEQ ID NO: 269472 - DNA, 15 bp, Homo sapiens
gtgtcacatccaagc

SEQ ID NO: 269473 - DNA, 15 bp, Homo sapiens
tgtgtcacatccaag

SEQ ID NO: 269474 - DNA, 15 bp, Homo sapiens
ctgtgtcacatccaa

SEQ ID NO: 269475 - DNA, 15 bp, Homo sapiens
gctgtgtcacatcca

SEQ ID NO: 269476 - DNA, 15 bp, Homo sapiens
agctgtgtcacatcc

SEQ ID NO: 269477 - DNA, 15 bp, Homo sapiens
tagctgtgtcacatc

SEQ ID NO: 269478 - DNA, 15 bp, Homo sapiens
atagctgtgtcacat

SEQ ID NO: 269479 - DNA, 15 bp, Homo sapiens
aatagctgtgtcaca

SEQ ID NO: 269480 - DNA, 15 bp, Homo sapiens
caatagctgtgtcac

SEQ ID NO: 269481 - DNA, 15 bp, Homo sapiens
acaatagctgtgtca

SEQ ID NO: 269482 - DNA, 15 bp, Homo sapiens
aacaatagctgtgtc

SEQ ID NO: 269483 - DNA, 15 bp, Homo sapiens
aaacaatagctgtgt

SEQ ID NO: 269484 - DNA, 15 bp, Homo sapiens
caaacaatagctgtg

SEQ ID NO: 269485 - DNA, 15 bp, Homo sapiens
acaaacaatagctgt

SEQ ID NO: 269486 - DNA, 15 bp, Homo sapiens
cacaaacaatagctg

SEQ ID NO: 269487 - DNA, 15 bp, Homo sapiens
tcacaaacaatagct

SEQ ID NO: 269488 - DNA, 15 bp, Homo sapiens
ttcacaaacaatagc

SEQ ID NO: 269489 - DNA, 15 bp, Homo sapiens
tttcacaaacaatag

SEQ ID NO: 269490 - DNA, 15 bp, Homo sapiens
ctttcacaaacaata

SEQ ID NO: 269491 - DNA, 15 bp, Homo sapiens
tctttcacaaacaat

SEQ ID NO: 269492 - DNA, 15 bp, Homo sapiens
ctctttcacaaacaa

SEQ ID NO: 269493 - DNA, 15 bp, Homo sapiens
tctctttcacaaaca

SEQ ID NO: 269494 - DNA, 15 bp, Homo sapiens
atctctttcacaaac

SEQ ID NO: 269495 - DNA, 15 bp, Homo sapiens
aatctctttcacaaa

SEQ ID NO: 269496 - DNA, 15 bp, Homo sapiens
aaatctctttcacaa

SEQ ID NO: 269497 - DNA, 15 bp, Homo sapiens
caaatctctttcaca

SEQ ID NO: 269498 - DNA, 15 bp, Homo sapiens
tcaaatctctttcac

SEQ ID NO: 269499 - DNA, 15 bp, Homo sapiens
atcaaatctctttca

SEQ ID NO: 269500 - DNA, 15 bp, Homo sapiens
catcaaatctctttc

SEQ ID NO: 269501 - DNA, 15 bp, Homo sapiens
gcatcaaatctcttt

SEQ ID NO: 269502 - DNA, 15 bp, Homo sapiens
agcatcaaatctctt

SEQ ID NO: 269503 - DNA, 15 bp, Homo sapiens
aagcatcaaatctct

SEQ ID NO: 269504 - DNA, 15 bp, Homo sapiens
gaagcatcaaatctc

SEQ ID NO: 269505 - DNA, 15 bp, Homo sapiens
tgaagcatcaaatct

SEQ ID NO: 269506 - DNA, 15 bp, Homo sapiens
atgaagcatcaaatc

SEQ ID NO: 269507 - DNA, 15 bp, Homo sapiens
aatgaagcatcaaat

SEQ ID NO: 269508 - DNA, 15 bp, Homo sapiens
taatgaagcatcaaa

SEQ ID NO: 269509 - DNA, 15 bp, Homo sapiens
ctaatgaagcatcaa

SEQ ID NO: 269510 - DNA, 15 bp, Homo sapiens
tctaatgaagcatca

SEQ ID NO: 269511 - DNA, 15 bp, Homo sapiens
ctctaatgaagcatc

SEQ ID NO: 269512 - DNA, 15 bp, Homo sapiens
tctctaatgaagcat

SEQ ID NO: 269513 - DNA, 15 bp, Homo sapiens
ttctctaatgaagca

SEQ ID NO: 269514 - DNA, 15 bp, Homo sapiens
tttctctaatgaagc

SEQ ID NO: 269515 - DNA, 15 bp, Homo sapiens
ttttctctaatgaag

SEQ ID NO: 269516 - DNA, 15 bp, Homo sapiens
tttttctctaatgaa

SEQ ID NO: 269517 - DNA, 15 bp, Homo sapiens
gtttttctctaatga

SEQ ID NO: 269518 - DNA, 15 bp, Homo sapiens
agtttttctctaatg

SEQ ID NO: 269519 - DNA, 15 bp, Homo sapiens
cagtttttctctaat

SEQ ID NO: 269520 - DNA, 15 bp, Homo sapiens
acagtttttctctaa

SEQ ID NO: 269521 - DNA, 15 bp, Homo sapiens
cacagtttttctcta

SEQ ID NO: 269522 - DNA, 15 bp, Homo sapiens
acacagtttttctct

SEQ ID NO: 269523 - DNA, 15 bp, Homo sapiens
tacacagtttttctc

SEQ ID NO: 269524 - DNA, 15 bp, Homo sapiens
gtacacagtttttct

SEQ ID NO: 269525 - DNA, 15 bp, Homo sapiens
tgtacacagtttttc

SEQ ID NO: 269526 - DNA, 15 bp, Homo sapiens
ctgtacacagttttt

SEQ ID NO: 269527 - DNA, 15 bp, Homo sapiens
tctgtacacagtttt

SEQ ID NO: 269528 - DNA, 15 bp, Homo sapiens
ttctgtacacagttt

SEQ ID NO: 269529 - DNA, 15 bp, Homo sapiens
tttctgtacacagtt

SEQ ID NO: 269530 - DNA, 15 bp, Homo sapiens
gtttctgtacacagt

SEQ ID NO: 269531 - DNA, 15 bp, Homo sapiens
ggtttctgtacacag

SEQ ID NO: 269532 - DNA, 15 bp, Homo sapiens
gggtttctgtacaca

SEQ ID NO: 269533 - DNA, 15 bp, Homo sapiens
cgggtttctgtacac

SEQ ID NO: 269534 - DNA, 15 bp, Homo sapiens
ccgggtttctgtaca

SEQ ID NO: 269535 - DNA, 15 bp, Homo sapiens
gccgggtttctgtac

SEQ ID NO: 269536 - DNA, 15 bp, Homo sapiens
tgccgggtttctgta

SEQ ID NO: 269537 - DNA, 15 bp, Homo sapiens
ctgccgggtttctgt

SEQ ID NO: 269538 - DNA, 15 bp, Homo sapiens
tctgccgggtttctg

SEQ ID NO: 269539 - DNA, 15 bp, Homo sapiens
ctctgccgggtttct

SEQ ID NO: 269540 - DNA, 15 bp, Homo sapiens
tctctgccgggtttc

SEQ ID NO: 269541 - DNA, 15 bp, Homo sapiens
atctctgccgggttt

SEQ ID NO: 269542 - DNA, 15 bp, Homo sapiens
aatctctgccgggtt

SEQ ID NO: 269543 - DNA, 15 bp, Homo sapiens
aaatctctgccgggt

SEQ ID NO: 269544 - DNA, 15 bp, Homo sapiens
gaaatctctgccggg

SEQ ID NO: 269545 - DNA, 15 bp, Homo sapiens
agaaatctctgccgg

SEQ ID NO: 269546 - DNA, 15 bp, Homo sapiens
aagaaatctctgccg

SEQ ID NO: 269547 - DNA, 15 bp, Homo sapiens
taagaaatctctgcc

SEQ ID NO: 269548 - DNA, 15 bp, Homo sapiens
ttaagaaatctctgc

SEQ ID NO: 269549 - DNA, 15 bp, Homo sapiens
attaagaaatctctg

SEQ ID NO: 269550 - DNA, 15 bp, Homo sapiens
cattaagaaatctct

SEQ ID NO: 269551 - DNA, 15 bp, Homo sapiens
ccattaagaaatctc

SEQ ID NO: 269552 - DNA, 15 bp, Homo sapiens
gccattaagaaatct

SEQ ID NO: 269553 - DNA, 15 bp, Homo sapiens
tgccattaagaaatc

SEQ ID NO: 269554 - DNA, 15 bp, Homo sapiens
atgccattaagaaat

SEQ ID NO: 269555 - DNA, 15 bp, Homo sapiens
aatgccattaagaaa

SEQ ID NO: 269556 - DNA, 15 bp, Homo sapiens
gaatgccattaagaa

SEQ ID NO: 269557 - DNA, 15 bp, Homo sapiens
agaatgccattaaga

SEQ ID NO: 269558 - DNA, 15 bp, Homo sapiens
cagaatgccattaag

SEQ ID NO: 269559 - DNA, 15 bp, Homo sapiens
tcagaatgccattaa

SEQ ID NO: 269560 - DNA, 15 bp, Homo sapiens
atcagaatgccatta

SEQ ID NO: 269561 - DNA, 15 bp, Homo sapiens
aatcagaatgccatt

SEQ ID NO: 269562 - DNA, 15 bp, Homo sapiens
taatcagaatgccat

SEQ ID NO: 269563 - DNA, 15 bp, Homo sapiens
ttaatcagaatgcca

SEQ ID NO: 269564 - DNA, 15 bp, Homo sapiens
tttaatcagaatgcc

SEQ ID NO: 269565 - DNA, 15 bp, Homo sapiens
ctttaatcagaatgc

SEQ ID NO: 269566 - DNA, 15 bp, Homo sapiens
cctttaatcagaatg

SEQ ID NO: 269567 - DNA, 15 bp, Homo sapiens
tcctttaatcagaat

SEQ ID NO: 269568 - DNA, 15 bp, Homo sapiens
ctcctttaatcagaa

SEQ ID NO: 269569 - DNA, 15 bp, Homo sapiens
gctcctttaatcaga

SEQ ID NO: 269570 - DNA, 15 bp, Homo sapiens
tgctcctttaatcag

SEQ ID NO: 269571 - DNA, 15 bp, Homo sapiens
ttgctcctttaatca

SEQ ID NO: 269572 - DNA, 15 bp, Homo sapiens
tttgctcctttaatc

SEQ ID NO: 269573 - DNA, 15 bp, Homo sapiens
gtttgctcctttaat

SEQ ID NO: 269574 - DNA, 15 bp, Homo sapiens
tgtttgctcctttaa

SEQ ID NO: 269575 - DNA, 15 bp, Homo sapiens
ttgtttgctccttta

SEQ ID NO: 269576 - DNA, 15 bp, Homo sapiens
gttgtttgctccttt

SEQ ID NO: 269577 - DNA, 15 bp, Homo sapiens
ggttgtttgctcctt

SEQ ID NO: 269578 - DNA, 15 bp, Homo sapiens
aggttgtttgctcct

SEQ ID NO: 269579 - DNA, 15 bp, Homo sapiens
taggttgtttgctcc

SEQ ID NO: 269580 - DNA, 15 bp, Homo sapiens
ttaggttgtttgctc

SEQ ID NO: 269581 - DNA, 15 bp, Homo sapiens
tttaggttgtttgct

SEQ ID NO: 269582 - DNA, 15 bp, Homo sapiens
atttaggttgtttgc

SEQ ID NO: 269583 - DNA, 15 bp, Homo sapiens
catttaggttgtttg

SEQ ID NO: 269584 - DNA, 15 bp, Homo sapiens
gcatttaggttgttt

SEQ ID NO: 269585 - DNA, 15 bp, Homo sapiens
ggcatttaggttgtt

SEQ ID NO: 269586 - DNA, 15 bp, Homo sapiens
tggcatttaggttgt

SEQ ID NO: 269587 - DNA, 15 bp, Homo sapiens
ctggcatttaggttg

SEQ ID NO: 269588 - DNA, 15 bp, Homo sapiens
tctggcatttaggtt

SEQ ID NO: 269589 - DNA, 15 bp, Homo sapiens
atctggcatttaggt

SEQ ID NO: 269590 - DNA, 15 bp, Homo sapiens
aatctggcatttagg

SEQ ID NO: 269591 - DNA, 15 bp, Homo sapiens
taatctggcatttag

SEQ ID NO: 269592 - DNA, 15 bp, Homo sapiens
ctaatctggcattta

SEQ ID NO: 269593 - DNA, 15 bp, Homo sapiens
actaatctggcattt

SEQ ID NO: 269594 - DNA, 15 bp, Homo sapiens
gactaatctggcatt

SEQ ID NO: 269595 - DNA, 15 bp, Homo sapiens
cgactaatctggcat

SEQ ID NO: 269596 - DNA, 15 bp, Homo sapiens
gcgactaatctggca

SEQ ID NO: 269597 - DNA, 15 bp, Homo sapiens
tgcgactaatctggc

SEQ ID NO: 269598 - DNA, 15 bp, Homo sapiens
atgcgactaatctgg

SEQ ID NO: 269599 - DNA, 15 bp, Homo sapiens
aatgcgactaatctg

SEQ ID NO: 269600 - DNA, 15 bp, Homo sapiens
aaatgcgactaatct

SEQ ID NO: 269601 - DNA, 15 bp, Homo sapiens
aaaatgcgactaatc

SEQ ID NO: 269602 - DNA, 15 bp, Homo sapiens
caaaatgcgactaat

SEQ ID NO: 269603 - DNA, 15 bp, Homo sapiens
ccaaaatgcgactaa

SEQ ID NO: 269604 - DNA, 15 bp, Homo sapiens
cccaaaatgcgacta

SEQ ID NO: 269605 - DNA, 15 bp, Homo sapiens
tcccaaaatgcgact

SEQ ID NO: 269606 - DNA, 15 bp, Homo sapiens
ttcccaaaatgcgac

SEQ ID NO: 269607 - DNA, 15 bp, Homo sapiens
tttcccaaaatgcga

SEQ ID NO: 269608 - DNA, 15 bp, Homo sapiens
ctttcccaaaatgcg

SEQ ID NO: 269609 - DNA, 15 bp, Homo sapiens
tctttcccaaaatgc

SEQ ID NO: 269610 - DNA, 15 bp, Homo sapiens
ttctttcccaaaatg

SEQ ID NO: 269611 - DNA, 15 bp, Homo sapiens
attctttcccaaaat

SEQ ID NO: 269612 - DNA, 15 bp, Homo sapiens
cattctttcccaaaa

SEQ ID NO: 269613 - DNA, 15 bp, Homo sapiens
gcattctttcccaaa

SEQ ID NO: 269614 - DNA, 15 bp, Homo sapiens
tgcattctttcccaa

SEQ ID NO: 269615 - DNA, 15 bp, Homo sapiens
atgcattctttccca

SEQ ID NO: 269616 - DNA, 15 bp, Homo sapiens
catgcattctttccc

SEQ ID NO: 269617 - DNA, 15 bp, Homo sapiens
tcatgcattctttcc

SEQ ID NO: 269618 - DNA, 15 bp, Homo sapiens
atcatgcattctttc

SEQ ID NO: 269619 - DNA, 15 bp, Homo sapiens
catcatgcattcttt

SEQ ID NO: 269620 - DNA, 15 bp, Homo sapiens
ccatcatgcattctt

SEQ ID NO: 269621 - DNA, 15 bp, Homo sapiens
cccatcatgcattct

SEQ ID NO: 269622 - DNA, 15 bp, Homo sapiens
ccccatcatgcattc

SEQ ID NO: 269623 - DNA, 15 bp, Homo sapiens
tccccatcatgcatt

SEQ ID NO: 269624 - DNA, 15 bp, Homo sapiens
gtccccatcatgcat

SEQ ID NO: 269625 - DNA, 15 bp, Homo sapiens
agtccccatcatgca

SEQ ID NO: 269626 - DNA, 15 bp, Homo sapiens
cagtccccatcatgc

SEQ ID NO: 269627 - DNA, 15 bp, Homo sapiens
gcagtccccatcatg

SEQ ID NO: 269628 - DNA, 15 bp, Homo sapiens
tgcagtccccatcat

SEQ ID NO: 269629 - DNA, 15 bp, Homo sapiens
atgcagtccccatca

SEQ ID NO: 269630 - DNA, 15 bp, Homo sapiens
aatgcagtccccatc

SEQ ID NO: 269631 - DNA, 15 bp, Homo sapiens
aaatgcagtccccat

SEQ ID NO: 269632 - DNA, 15 bp, Homo sapiens
gaaatgcagtcccca

SEQ ID NO: 269633 - DNA, 15 bp, Homo sapiens
agaaatgcagtcccc

SEQ ID NO: 269634 - DNA, 15 bp, Homo sapiens
tagaaatgcagtccc

SEQ ID NO: 269635 - DNA, 15 bp, Homo sapiens
atagaaatgcagtcc

SEQ ID NO: 269636 - DNA, 15 bp, Homo sapiens
aatagaaatgcagtc

SEQ ID NO: 269637 - DNA, 15 bp, Homo sapiens
aaatagaaatgcagt

SEQ ID NO: 269638 - DNA, 15 bp, Homo sapiens
gaaatagaaatgcag

SEQ ID NO: 269639 - DNA, 15 bp, Homo sapiens
ggaaatagaaatgca

SEQ ID NO: 269640 - DNA, 15 bp, Homo sapiens
aggaaatagaaatgc

SEQ ID NO: 269641 - DNA, 15 bp, Homo sapiens
aaggaaatagaaatg

SEQ ID NO: 269642 - DNA, 15 bp, Homo sapiens
gaaggaaatagaaat

SEQ ID NO: 269643 - DNA, 15 bp, Homo sapiens
agaaggaaatagaaa

SEQ ID NO: 269644 - DNA, 15 bp, Homo sapiens
aagaaggaaatagaa

SEQ ID NO: 269645 - DNA, 15 bp, Homo sapiens
aaagaaggaaataga

SEQ ID NO: 269646 - DNA, 15 bp, Homo sapiens
gaaagaaggaaatag

SEQ ID NO: 269647 - DNA, 15 bp, Homo sapiens
ggaaagaaggaaata

SEQ ID NO: 269648 - DNA, 15 bp, Homo sapiens
gggaaagaaggaaat

SEQ ID NO: 269649 - DNA, 15 bp, Homo sapiens
agggaaagaaggaaa

SEQ ID NO: 269650 - DNA, 15 bp, Homo sapiens
tgagggaaagaagga

SEQ ID NO: 269651 - DNA, 15 bp, Homo sapiens
ctgagggaaagaagg

SEQ ID NO: 269652 - DNA, 15 bp, Homo sapiens
gctgagggaaagaag

SEQ ID NO: 269653 - DNA, 15 bp, Homo sapiens
ggctgagggaaagaa

SEQ ID NO: 269654 - DNA, 15 bp, Homo sapiens
aggctgagggaaaga

SEQ ID NO: 269655 - DNA, 15 bp, Homo sapiens
aaggctgagggaaag

SEQ ID NO: 269656 - DNA, 15 bp, Homo sapiens
caaggctgagggaaa

SEQ ID NO: 269657 - DNA, 15 bp, Homo sapiens
gcaaggctgagggaa

SEQ ID NO: 269658 - DNA, 15 bp, Homo sapiens
agcaaggctgaggga

SEQ ID NO: 269659 - DNA, 15 bp, Homo sapiens
aagcaaggctgaggg

SEQ ID NO: 269660 - DNA, 15 bp, Homo sapiens
caagcaaggctgagg

SEQ ID NO: 269661 - DNA, 15 bp, Homo sapiens
ccaagcaaggctgag

SEQ ID NO: 269662 - DNA, 15 bp, Homo sapiens
gccaagcaaggctga

SEQ ID NO: 269663 - DNA, 15 bp, Homo sapiens
tgccaagcaaggctg

SEQ ID NO: 269664 - DNA, 15 bp, Homo sapiens
ctgccaagcaaggct

SEQ ID NO: 269665 - DNA, 15 bp, Homo sapiens
gctgccaagcaaggc

SEQ ID NO: 269666 - DNA, 15 bp, Homo sapiens
tgctgccaagcaagg

SEQ ID NO: 269667 - DNA, 15 bp, Homo sapiens
atgctgccaagcaag

SEQ ID NO: 269668 - DNA, 15 bp, Homo sapiens
tatgctgccaagcaa

SEQ ID NO: 269669 - DNA, 15 bp, Homo sapiens
gtatgctgccaagca

SEQ ID NO: 269670 - DNA, 15 bp, Homo sapiens
tgtatgctgccaagc

SEQ ID NO: 269671 - DNA, 15 bp, Homo sapiens
atgtatgctgccaag

SEQ ID NO: 269672 - DNA, 15 bp, Homo sapiens
aatgtatgctgccaa

SEQ ID NO: 269673 - DNA, 15 bp, Homo sapiens
aaatgtatgctgcca

SEQ ID NO: 269674 - DNA, 15 bp, Homo sapiens
caaatgtatgctgcc

SEQ ID NO: 269675 - DNA, 15 bp, Homo sapiens
acaaatgtatgctgc

SEQ ID NO: 269676 - DNA, 15 bp, Homo sapiens
gacaaatgtatgctg

SEQ ID NO: 269677 - DNA, 15 bp, Homo sapiens
tgacaaatgtatgct

SEQ ID NO: 269678 - DNA, 15 bp, Homo sapiens
gtgacaaatgtatgc

SEQ ID NO: 269679 - DNA, 15 bp, Homo sapiens
agtgacaaatgtatg

SEQ ID NO: 269680 - DNA, 15 bp, Homo sapiens
aagtgacaaatgtat

SEQ ID NO: 269681 - DNA, 15 bp, Homo sapiens
aaagtgacaaatgta

SEQ ID NO: 269682 - DNA, 15 bp, Homo sapiens
caaagtgacaaatgt

SEQ ID NO: 269683 - DNA, 15 bp, Homo sapiens
tcaaagtgacaaatg

SEQ ID NO: 269684 - DNA, 15 bp, Homo sapiens
ctcaaagtgacaaat

SEQ ID NO: 269685 - DNA, 15 bp, Homo sapiens
cctcaaagtgacaaa

SEQ ID NO: 269686 - DNA, 15 bp, Homo sapiens
tcctcaaagtgacaa

SEQ ID NO: 269687 - DNA, 15 bp, Homo sapiens
gtcctcaaagtgaca

SEQ ID NO: 269688 - DNA, 15 bp, Homo sapiens
tgtcctcaaagtgac

SEQ ID NO: 269689 - DNA, 15 bp, Homo sapiens
atgtcctcaaagtga

SEQ ID NO: 269690 - DNA, 15 bp, Homo sapiens
catgtcctcaaagtg

SEQ ID NO: 269691 - DNA, 15 bp, Homo sapiens
tcatgtcctcaaagt

SEQ ID NO: 269692 - DNA, 15 bp, Homo sapiens
ctcatgtcctcaaag

SEQ ID NO: 269693 - DNA, 15 bp, Homo sapiens
tctcatgtcctcaaa

SEQ ID NO: 269694 - DNA, 15 bp, Homo sapiens
ttctcatgtcctcaa

SEQ ID NO: 269695 - DNA, 15 bp, Homo sapiens
tttctcatgtcctca

SEQ ID NO: 269696 - DNA, 15 bp, Homo sapiens
ctttctcatgtcctc

SEQ ID NO: 269697 - DNA, 15 bp, Homo sapiens
cctttctcatgtcct

SEQ ID NO: 269698 - DNA, 15 bp, Homo sapiens
ccctttctcatgtcc

SEQ ID NO: 269699 - DNA, 15 bp, Homo sapiens
cccctttctcatgtc

SEQ ID NO: 269700 - DNA, 15 bp, Homo sapiens
gcccctttctcatgt

SEQ ID NO: 269701 - DNA, 15 bp, Homo sapiens
agcccctttctcatg

SEQ ID NO: 269702 - DNA, 15 bp, Homo sapiens
gagcccctttctcat

SEQ ID NO: 269703 - DNA, 15 bp, Homo sapiens
agagcccctttctca

SEQ ID NO: 269704 - DNA, 15 bp, Homo sapiens
gagagcccctttctc

SEQ ID NO: 269705 - DNA, 15 bp, Homo sapiens
agagagcccctttct

SEQ ID NO: 269706 - DNA, 15 bp, Homo sapiens
cagagagcccctttc

SEQ ID NO: 269707 - DNA, 15 bp, Homo sapiens
tcagagagccccttt

SEQ ID NO: 269708 - DNA, 15 bp, Homo sapiens
atcagagagcccctt

SEQ ID NO: 269709 - DNA, 15 bp, Homo sapiens
catcagagagcccct

SEQ ID NO: 269710 - DNA, 15 bp, Homo sapiens
acatcagagagcccc

SEQ ID NO: 269711 - DNA, 15 bp, Homo sapiens
tacatcagagagccc

SEQ ID NO: 269712 - DNA, 15 bp, Homo sapiens
ctacatcagagagcc

SEQ ID NO: 269713 - DNA, 15 bp, Homo sapiens
gctacatcagagagc

SEQ ID NO: 269714 - DNA, 15 bp, Homo sapiens
tgctacatcagagag

SEQ ID NO: 269715 - DNA, 15 bp, Homo sapiens
ctgctacatcagaga

SEQ ID NO: 269716 - DNA, 15 bp, Homo sapiens
tctgctacatcagag

SEQ ID NO: 269717 - DNA, 15 bp, Homo sapiens
ctctgctacatcaga

SEQ ID NO: 269718 - DNA, 15 bp, Homo sapiens
tctctgctacatcag

SEQ ID NO: 269719 - DNA, 15 bp, Homo sapiens
ttctctgctacatca

SEQ ID NO: 269720 - DNA, 15 bp, Homo sapiens
tttctctgctacatc

SEQ ID NO: 269721 - DNA, 15 bp, Homo sapiens
ctttctctgctacat

SEQ ID NO: 269722 - DNA, 15 bp, Homo sapiens
tctttctctgctaca

SEQ ID NO: 269723 - DNA, 15 bp, Homo sapiens
ctctttctctgctac

SEQ ID NO: 269724 - DNA, 15 bp, Homo sapiens
gctctttctctgcta

SEQ ID NO: 269725 - DNA, 15 bp, Homo sapiens
agctctttctctgct

SEQ ID NO: 269726 - DNA, 15 bp, Homo sapiens
cagctctttctctgc

SEQ ID NO: 269727 - DNA, 15 bp, Homo sapiens
ccagctctttctctg

SEQ ID NO: 269728 - DNA, 15 bp, Homo sapiens
tccagctctttctct

SEQ ID NO: 269729 - DNA, 15 bp, Homo sapiens
ttccagctctttctc

SEQ ID NO: 269730 - DNA, 15 bp, Homo sapiens
tttccagctctttct

SEQ ID NO: 269731 - DNA, 15 bp, Homo sapiens
ctttccagctctttc

SEQ ID NO: 269732 - DNA, 15 bp, Homo sapiens
gctttccagctcttt

SEQ ID NO: 269733 - DNA, 15 bp, Homo sapiens
tgctttccagctctt

SEQ ID NO: 269734 - DNA, 15 bp, Homo sapiens
ctgctttccagctct

SEQ ID NO: 269735 - DNA, 15 bp, Homo sapiens
tctgctttccagctc

SEQ ID NO: 269736 - DNA, 15 bp, Homo sapiens
ctctgctttccagct

SEQ ID NO: 269737 - DNA, 15 bp, Homo sapiens
cctctgctttccagc

SEQ ID NO: 269738 - DNA, 15 bp, Homo sapiens
gcctctgctttccag

SEQ ID NO: 269739 - DNA, 15 bp, Homo sapiens
tgcctctgctttcca

SEQ ID NO: 269740 - DNA, 15 bp, Homo sapiens
atgcctctgctttcc

SEQ ID NO: 269741 - DNA, 15 bp, Homo sapiens
catgcctctgctttc

SEQ ID NO: 269742 - DNA, 15 bp, Homo sapiens
ccatgcctctgcttt

SEQ ID NO: 269743 - DNA, 15 bp, Homo sapiens
tccatgcctctgctt

SEQ ID NO: 269744 - DNA, 15 bp, Homo sapiens
ttccatgcctctgct

SEQ ID NO: 269745 - DNA, 15 bp, Homo sapiens
tttccatgcctctgc

SEQ ID NO: 269746 - DNA, 15 bp, Homo sapiens
gtttccatgcctctg

SEQ ID NO: 269747 - DNA, 15 bp, Homo sapiens
agtttccatgcctct

SEQ ID NO: 269748 - DNA, 15 bp, Homo sapiens
aagtttccatgcctc

SEQ ID NO: 269749 - DNA, 15 bp, Homo sapiens
aaagtttccatgcct

SEQ ID NO: 269750 - DNA, 15 bp, Homo sapiens
gaaagtttccatgcc

SEQ ID NO: 269751 - DNA, 15 bp, Homo sapiens
tgaaagtttccatgc

SEQ ID NO: 269752 - DNA, 15 bp, Homo sapiens
ctgaaagtttccatg

SEQ ID NO: 269753 - DNA, 15 bp, Homo sapiens
gctgaaagtttccat

SEQ ID NO: 269754 - DNA, 15 bp, Homo sapiens
agctgaaagtttcca

SEQ ID NO: 269755 - DNA, 15 bp, Homo sapiens
aagctgaaagtttcc

SEQ ID NO: 269756 - DNA, 15 bp, Homo sapiens
aaagctgaaagtttc

SEQ ID NO: 269757 - DNA, 15 bp, Homo sapiens
gaaagctgaaagttt

SEQ ID NO: 269758 - DNA, 15 bp, Homo sapiens
agaaagctgaaagtt

SEQ ID NO: 269759 - DNA, 15 bp, Homo sapiens
cagaaagctgaaagt

SEQ ID NO: 269760 - DNA, 15 bp, Homo sapiens
ccagaaagctgaaag

SEQ ID NO: 269761 - DNA, 15 bp, Homo sapiens
gccagaaagctgaaa

SEQ ID NO: 269762 - DNA, 15 bp, Homo sapiens
tgccagaaagctgaa

SEQ ID NO: 269763 - DNA, 15 bp, Homo sapiens
ctgccagaaagctga

SEQ ID NO: 269764 - DNA, 15 bp, Homo sapiens
cctgccagaaagctg

SEQ ID NO: 269765 - DNA, 15 bp, Homo sapiens
gcctgccagaaagct

SEQ ID NO: 269766 - DNA, 15 bp, Homo sapiens
ggcctgccagaaagc

SEQ ID NO: 269767 - DNA, 15 bp, Homo sapiens
tggcctgccagaaag

SEQ ID NO: 269768 - DNA, 15 bp, Homo sapiens
ttggcctgccagaaa

SEQ ID NO: 269769 - DNA, 15 bp, Homo sapiens
cttggcctgccagaa

SEQ ID NO: 269770 - DNA, 15 bp, Homo sapiens
ccttggcctgccaga

SEQ ID NO: 269771 - DNA, 15 bp, Homo sapiens
cccttggcctgccag

SEQ ID NO: 269772 - DNA, 15 bp, Homo sapiens
ccccttggcctgcca

SEQ ID NO: 269773 - DNA, 15 bp, Homo sapiens
tccccttggcctgcc

SEQ ID NO: 269774 - DNA, 15 bp, Homo sapiens
ttccccttggcctgc

SEQ ID NO: 269775 - DNA, 15 bp, Homo sapiens
cttccccttggcctg

SEQ ID NO: 269776 - DNA, 15 bp, Homo sapiens
ccttccccttggcct

SEQ ID NO: 269777 - DNA, 15 bp, Homo sapiens
accttccccttggcc

SEQ ID NO: 269778 - DNA, 15 bp, Homo sapiens
aaccttccccttggc

SEQ ID NO: 269779 - DNA, 15 bp, Homo sapiens
caaccttccccttgg

SEQ ID NO: 269780 - DNA, 15 bp, Homo sapiens
ccaaccttccccttg

SEQ ID NO: 269781 - DNA, 15 bp, Homo sapiens
tccaaccttcccctt

SEQ ID NO: 269782 - DNA, 15 bp, Homo sapiens
ctccaaccttcccct

SEQ ID NO: 269783 - DNA, 15 bp, Homo sapiens
cctccaaccttcccc

SEQ ID NO: 269784 - DNA, 15 bp, Homo sapiens
acctccaaccttccc

SEQ ID NO: 269785 - DNA, 15 bp, Homo sapiens
aacctccaaccttcc

SEQ ID NO: 269786 - DNA, 15 bp, Homo sapiens
gaacctccaaccttc

SEQ ID NO: 269787 - DNA, 15 bp, Homo sapiens
agaacctccaacctt

SEQ ID NO: 269788 - DNA, 15 bp, Homo sapiens
cagaacctccaacct

SEQ ID NO: 269789 - DNA, 15 bp, Homo sapiens
tcagaacctccaacc

SEQ ID NO: 269790 - DNA, 15 bp, Homo sapiens
atcagaacctccaac

SEQ ID NO: 269791 - DNA, 15 bp, Homo sapiens
tatcagaacctccaa

SEQ ID NO: 269792 - DNA, 15 bp, Homo sapiens
gtatcagaacctcca

SEQ ID NO: 269793 - DNA, 15 bp, Homo sapiens
tgtatcagaacctcc

SEQ ID NO: 269794 - DNA, 15 bp, Homo sapiens
ctgtatcagaacctc

SEQ ID NO: 269795 - DNA, 15 bp, Homo sapiens
actgtatcagaacct

SEQ ID NO: 269796 - DNA, 15 bp, Homo sapiens
cactgtatcagaacc

SEQ ID NO: 269797 - DNA, 15 bp, Homo sapiens
acactgtatcagaac

SEQ ID NO: 269798 - DNA, 15 bp, Homo sapiens
gacactgtatcagaa

SEQ ID NO: 269799 - DNA, 15 bp, Homo sapiens
agacactgtatcaga

SEQ ID NO: 269800 - DNA, 15 bp, Homo sapiens
cagacactgtatcag

SEQ ID NO: 269801 - DNA, 15 bp, Homo sapiens
gcagacactgtatca

SEQ ID NO: 269802 - DNA, 15 bp, Homo sapiens
tgcagacactgtatc

SEQ ID NO: 269803 - DNA, 15 bp, Homo sapiens
ttgcagacactgtat

SEQ ID NO: 269804 - DNA, 15 bp, Homo sapiens
gttgcagacactgta

SEQ ID NO: 269805 - DNA, 15 bp, Homo sapiens
agttgcagacactgt

SEQ ID NO: 269806 - DNA, 15 bp, Homo sapiens
gagttgcagacactg

SEQ ID NO: 269807 - DNA, 15 bp, Homo sapiens
ggagttgcagacact

SEQ ID NO: 269808 - DNA, 15 bp, Homo sapiens
gggagttgcagacac

SEQ ID NO: 269809 - DNA, 15 bp, Homo sapiens
tgggagttgcagaca

SEQ ID NO: 269810 - DNA, 15 bp, Homo sapiens
ctgggagttgcagac

SEQ ID NO: 269811 - DNA, 15 bp, Homo sapiens
cctgggagttgcaga

SEQ ID NO: 269812 - DNA, 15 bp, Homo sapiens
ccctgggagttgcag

SEQ ID NO: 269813 - DNA, 15 bp, Homo sapiens
accctgggagttgca

SEQ ID NO: 269814 - DNA, 15 bp, Homo sapiens
gaccctgggagttgc

SEQ ID NO: 269815 - DNA, 15 bp, Homo sapiens
ggaccctgggagttg

SEQ ID NO: 269816 - DNA, 15 bp, Homo sapiens
tggaccctgggagtt

SEQ ID NO: 269817 - DNA, 15 bp, Homo sapiens
ctggaccctgggagt

SEQ ID NO: 269818 - DNA, 15 bp, Homo sapiens
tctggaccctgggag

SEQ ID NO: 269819 - DNA, 15 bp, Homo sapiens
ctctggaccctggga

SEQ ID NO: 269820 - DNA, 15 bp, Homo sapiens
tctctggaccctggg

SEQ ID NO: 269821 - DNA, 15 bp, Homo sapiens
atctctggaccctgg

SEQ ID NO: 269822 - DNA, 15 bp, Homo sapiens
tatctctggaccctg

SEQ ID NO: 269823 - DNA, 15 bp, Homo sapiens
ttatctctggaccct

SEQ ID NO: 269824 - DNA, 15 bp, Homo sapiens
tttatctctggaccc

SEQ ID NO: 269825 - DNA, 15 bp, Homo sapiens
ttttatctctggacc

SEQ ID NO: 269826 - DNA, 15 bp, Homo sapiens
cttttatctctggac

SEQ ID NO: 269827 - DNA, 15 bp, Homo sapiens
acttttatctctgga

SEQ ID NO: 269828 - DNA, 15 bp, Homo sapiens
gacttttatctctgg

SEQ ID NO: 269829 - DNA, 15 bp, Homo sapiens
agacttttatctctg

SEQ ID NO: 269830 - DNA, 15 bp, Homo sapiens
tagacttttatctct

SEQ ID NO: 269831 - DNA, 15 bp, Homo sapiens
ctagacttttatctc

SEQ ID NO: 269832 - DNA, 15 bp, Homo sapiens
tctagacttttatct

SEQ ID NO: 269833 - DNA, 15 bp, Homo sapiens
gtctagacttttatc

SEQ ID NO: 269834 - DNA, 15 bp, Homo sapiens
cgtctagacttttat

SEQ ID NO: 269835 - DNA, 15 bp, Homo sapiens
ccgtctagactttta

SEQ ID NO: 269836 - DNA, 15 bp, Homo sapiens
accgtctagactttt

SEQ ID NO: 269837 - DNA, 15 bp, Homo sapiens
gaccgtctagacttt

SEQ ID NO: 269838 - DNA, 15 bp, Homo sapiens
ggaccgtctagactt

SEQ ID NO: 269839 - DNA, 15 bp, Homo sapiens
tggaccgtctagact

SEQ ID NO: 269840 - DNA, 15 bp, Homo sapiens
ctggaccgtctagac

SEQ ID NO: 269841 - DNA, 15 bp, Homo sapiens
actggaccgtctaga

SEQ ID NO: 269842 - DNA, 15 bp, Homo sapiens
cactggaccgtctag

SEQ ID NO: 269843 - DNA, 15 bp, Homo sapiens
ccactggaccgtcta

SEQ ID NO: 269844 - DNA, 15 bp, Homo sapiens
tccactggaccgtct

SEQ ID NO: 269845 - DNA, 15 bp, Homo sapiens
atccactggaccgtc

SEQ ID NO: 269846 - DNA, 15 bp, Homo sapiens
gatccactggaccgt

SEQ ID NO: 269847 - DNA, 15 bp, Homo sapiens
tgatccactggaccg

SEQ ID NO: 269848 - DNA, 15 bp, Homo sapiens
gtgatccactggacc

SEQ ID NO: 269849 - DNA, 15 bp, Homo sapiens
ggtgatccactggac

SEQ ID NO: 269850 - DNA, 15 bp, Homo sapiens
aggtgatccactgga

SEQ ID NO: 269851 - DNA, 15 bp, Homo sapiens
aaggtgatccactgg

SEQ ID NO: 269852 - DNA, 15 bp, Homo sapiens
caaggtgatccactg

SEQ ID NO: 269853 - DNA, 15 bp, Homo sapiens
ccaaggtgatccact

SEQ ID NO: 269854 - DNA, 15 bp, Homo sapiens
tccaaggtgatccac

SEQ ID NO: 269855 - DNA, 15 bp, Homo sapiens
ttccaaggtgatcca

SEQ ID NO: 269856 - DNA, 15 bp, Homo sapiens
attccaaggtgatcc

SEQ ID NO: 269857 - DNA, 15 bp, Homo sapiens
cattccaaggtgatc

SEQ ID NO: 269858 - DNA, 15 bp, Homo sapiens
gcattccaaggtgat

SEQ ID NO: 269859 - DNA, 15 bp, Homo sapiens
tgcattccaaggtga

SEQ ID NO: 269860 - DNA, 15 bp, Homo sapiens
ttgcattccaaggtg

SEQ ID NO: 269861 - DNA, 15 bp, Homo sapiens
cttgcattccaaggt

SEQ ID NO: 269862 - DNA, 15 bp, Homo sapiens
ccttgcattccaagg

SEQ ID NO: 269863 - DNA, 15 bp, Homo sapiens
gccttgcattccaag

SEQ ID NO: 269864 - DNA, 15 bp, Homo sapiens
agccttgcattccaa

SEQ ID NO: 269865 - DNA, 15 bp, Homo sapiens
tagccttgcattcca

SEQ ID NO: 269866 - DNA, 15 bp, Homo sapiens
atagccttgcattcc

SEQ ID NO: 269867 - DNA, 15 bp, Homo sapiens
catagccttgcattc

SEQ ID NO: 269868 - DNA, 15 bp, Homo sapiens
acatagccttgcatt

SEQ ID NO: 269869 - DNA, 15 bp, Homo sapiens
cacatagccttgcat

SEQ ID NO: 269870 - DNA, 15 bp, Homo sapiens
ccacatagccttgca

SEQ ID NO: 269871 - DNA, 15 bp, Homo sapiens
tccacatagccttgc

SEQ ID NO: 269872 - DNA, 15 bp, Homo sapiens
atccacatagccttg

SEQ ID NO: 269873 - DNA, 15 bp, Homo sapiens
catccacatagcctt

SEQ ID NO: 269874 - DNA, 15 bp, Homo sapiens
acatccacatagcct

SEQ ID NO: 269875 - DNA, 15 bp, Homo sapiens
cacatccacatagcc

SEQ ID NO: 269876 - DNA, 15 bp, Homo sapiens
gcacatccacatagc

SEQ ID NO: 269877 - DNA, 15 bp, Homo sapiens
tgcacatccacatag

SEQ ID NO: 269878 - DNA, 15 bp, Homo sapiens
atgcacatccacata

SEQ ID NO: 269879 - DNA, 15 bp, Homo sapiens
gatgcacatccacat

SEQ ID NO: 269880 - DNA, 15 bp, Homo sapiens
tgatgcacatccaca

SEQ ID NO: 269881 - DNA, 15 bp, Homo sapiens
ctgatgcacatccac

SEQ ID NO: 269882 - DNA, 15 bp, Homo sapiens
actgatgcacatcca

SEQ ID NO: 269883 - DNA, 15 bp, Homo sapiens
gactgatgcacatcc

SEQ ID NO: 269884 - DNA, 15 bp, Homo sapiens
ggactgatgcacatc

SEQ ID NO: 269885 - DNA, 15 bp, Homo sapiens
aggactgatgcacat

SEQ ID NO: 269886 - DNA, 15 bp, Homo sapiens
aaggactgatgcaca

SEQ ID NO: 269887 - DNA, 15 bp, Homo sapiens
aaaggactgatgcac

SEQ ID NO: 269888 - DNA, 15 bp, Homo sapiens
gaaaggactgatgca

SEQ ID NO: 269889 - DNA, 15 bp, Homo sapiens
tgaaaggactgatgc

SEQ ID NO: 269890 - DNA, 15 bp, Homo sapiens
gtgaaaggactgatg

SEQ ID NO: 269891 - DNA, 15 bp, Homo sapiens
ggtgaaaggactgat

SEQ ID NO: 269892 - DNA, 15 bp, Homo sapiens
tggtgaaaggactga

SEQ ID NO: 269893 - DNA, 15 bp, Homo sapiens
ctggtgaaaggactg

SEQ ID NO: 269894 - DNA, 15 bp, Homo sapiens
cctggtgaaaggact

SEQ ID NO: 269895 - DNA, 15 bp, Homo sapiens
tcctggtgaaaggac

SEQ ID NO: 269896 - DNA, 15 bp, Homo sapiens
ttcctggtgaaagga

SEQ ID NO: 269897 - DNA, 15 bp, Homo sapiens
gttcctggtgaaagg

SEQ ID NO: 269898 - DNA, 15 bp, Homo sapiens
ggttcctggtgaaag

SEQ ID NO: 269899 - DNA, 15 bp, Homo sapiens
aggttcctggtgaaa

SEQ ID NO: 269900 - DNA, 15 bp, Homo sapiens
aaggttcctggtgaa

SEQ ID NO: 269901 - DNA, 15 bp, Homo sapiens
gaaggttcctggtga

SEQ ID NO: 269902 - DNA, 15 bp, Homo sapiens
ggaaggttcctggtg

SEQ ID NO: 269903 - DNA, 15 bp, Homo sapiens
tggaaggttcctggt

SEQ ID NO: 269904 - DNA, 15 bp, Homo sapiens
ctggaaggttcctgg

SEQ ID NO: 269905 - DNA, 15 bp, Homo sapiens
tctggaaggttcctg

SEQ ID NO: 269906 - DNA, 15 bp, Homo sapiens
ttctggaaggttcct

SEQ ID NO: 269907 - DNA, 15 bp, Homo sapiens
attctggaaggttcc

SEQ ID NO: 269908 - DNA, 15 bp, Homo sapiens
cattctggaaggttc

SEQ ID NO: 269909 - DNA, 15 bp, Homo sapiens
ccattctggaaggtt

SEQ ID NO: 269910 - DNA, 15 bp, Homo sapiens
accattctggaaggt

SEQ ID NO: 269911 - DNA, 15 bp, Homo sapiens
aaccattctggaagg

SEQ ID NO: 269912 - DNA, 15 bp, Homo sapiens
taaccattctggaag

SEQ ID NO: 269913 - DNA, 15 bp, Homo sapiens
ttaaccattctggaa

SEQ ID NO: 269914 - DNA, 15 bp, Homo sapiens
cttaaccattctgga

SEQ ID NO: 269915 - DNA, 15 bp, Homo sapiens
tcttaaccattctgg

SEQ ID NO: 269916 - DNA, 15 bp, Homo sapiens
ttcttaaccattctg

SEQ ID NO: 269917 - DNA, 15 bp, Homo sapiens
tttcttaaccattct

SEQ ID NO: 269918 - DNA, 15 bp, Homo sapiens
ctttcttaaccattc

SEQ ID NO: 269919 - DNA, 15 bp, Homo sapiens
cctttcttaaccatt

SEQ ID NO: 269920 - DNA, 15 bp, Homo sapiens
tcctttcttaaccat

SEQ ID NO: 269921 - DNA, 15 bp, Homo sapiens
ttcctttcttaacca

SEQ ID NO: 269922 - DNA, 15 bp, Homo sapiens
gttcctttcttaacc

SEQ ID NO: 269923 - DNA, 15 bp, Homo sapiens
ggttcctttcttaac

SEQ ID NO: 269924 - DNA, 15 bp, Homo sapiens
gggttcctttcttaa

SEQ ID NO: 269925 - DNA, 15 bp, Homo sapiens
tgggttcctttctta

SEQ ID NO: 269926 - DNA, 15 bp, Homo sapiens
gtgggttcctttctt

SEQ ID NO: 269927 - DNA, 15 bp, Homo sapiens
tgtgggttcctttct

SEQ ID NO: 269928 - DNA, 15 bp, Homo sapiens
ttgtgggttcctttc

SEQ ID NO: 269929 - DNA, 15 bp, Homo sapiens
attgtgggttccttt

SEQ ID NO: 269930 - DNA, 15 bp, Homo sapiens
cattgtgggttcctt

SEQ ID NO: 269931 - DNA, 15 bp, Homo sapiens
gcattgtgggttcct

SEQ ID NO: 269932 - DNA, 15 bp, Homo sapiens
ggcattgtgggttcc

SEQ ID NO: 269933 - DNA, 15 bp, Homo sapiens
gggcattgtgggttc

SEQ ID NO: 269934 - DNA, 15 bp, Homo sapiens
ggggcattgtgggtt

SEQ ID NO: 269935 - DNA, 15 bp, Homo sapiens
aggggcattgtgggt

SEQ ID NO: 269936 - DNA, 15 bp, Homo sapiens
aaggggcattgtggg

SEQ ID NO: 269937 - DNA, 15 bp, Homo sapiens
taaggggcattgtgg

SEQ ID NO: 269938 - DNA, 15 bp, Homo sapiens
ctaaggggcattgtg

SEQ ID NO: 269939 - DNA, 15 bp, Homo sapiens
tctaaggggcattgt

SEQ ID NO: 269940 - DNA, 15 bp, Homo sapiens
ctctaaggggcattg

SEQ ID NO: 269941 - DNA, 15 bp, Homo sapiens
actctaaggggcatt

SEQ ID NO: 269942 - DNA, 15 bp, Homo sapiens
gactctaaggggcat

SEQ ID NO: 269943 - DNA, 15 bp, Homo sapiens
tgactctaaggggca

SEQ ID NO: 269944 - DNA, 15 bp, Homo sapiens
ctgactctaaggggc

SEQ ID NO: 269945 - DNA, 15 bp, Homo sapiens
cctgactctaagggg

SEQ ID NO: 269946 - DNA, 15 bp, Homo sapiens
ccctgactctaaggg

SEQ ID NO: 269947 - DNA, 15 bp, Homo sapiens
gccctgactctaagg

SEQ ID NO: 269948 - DNA, 15 bp, Homo sapiens
agccctgactctaag

SEQ ID NO: 269949 - DNA, 15 bp, Homo sapiens
cagccctgactctaa

SEQ ID NO: 269950 - DNA, 15 bp, Homo sapiens
acagccctgactcta

SEQ ID NO: 269951 - DNA, 15 bp, Homo sapiens
gacagccctgactct

SEQ ID NO: 269952 - DNA, 15 bp, Homo sapiens
tgacagccctgactc

SEQ ID NO: 269953 - DNA, 15 bp, Homo sapiens
atgacagccctgact

SEQ ID NO: 269954 - DNA, 15 bp, Homo sapiens
catgacagccctgac

SEQ ID NO: 269955 - DNA, 15 bp, Homo sapiens
gcatgacagccctga

SEQ ID NO: 269956 - DNA, 15 bp, Homo sapiens
tgcatgacagccctg

SEQ ID NO: 269957 - DNA, 15 bp, Homo sapiens
gtgcatgacagccct

SEQ ID NO: 269958 - DNA, 15 bp, Homo sapiens
tgtgcatgacagccc

SEQ ID NO: 269959 - DNA, 15 bp, Homo sapiens
atgtgcatgacagcc

SEQ ID NO: 269960 - DNA, 15 bp, Homo sapiens
catgtgcatgacagc

SEQ ID NO: 269961 - DNA, 15 bp, Homo sapiens
tcatgtgcatgacag

SEQ ID NO: 269962 - DNA, 15 bp, Homo sapiens
ttcatgtgcatgaca

SEQ ID NO: 269963 - DNA, 15 bp, Homo sapiens
attcatgtgcatgac

SEQ ID NO: 269964 - DNA, 15 bp, Homo sapiens
cattcatgtgcatga

SEQ ID NO: 269965 - DNA, 15 bp, Homo sapiens
ccattcatgtgcatg

SEQ ID NO: 269966 - DNA, 15 bp, Homo sapiens
accattcatgtgcat

SEQ ID NO: 269967 - DNA, 15 bp, Homo sapiens
aaccattcatgtgca

SEQ ID NO: 269968 - DNA, 15 bp, Homo sapiens
taaccattcatgtgc

SEQ ID NO: 269969 - DNA, 15 bp, Homo sapiens
gtaaccattcatgtg

SEQ ID NO: 269970 - DNA, 15 bp, Homo sapiens
ggtaaccattcatgt

SEQ ID NO: 269971 - DNA, 15 bp, Homo sapiens
aggtaaccattcatg

SEQ ID NO: 269972 - DNA, 15 bp, Homo sapiens
gaggtaaccattcat

SEQ ID NO: 269973 - DNA, 15 bp, Homo sapiens
agaggtaaccattca

SEQ ID NO: 269974 - DNA, 15 bp, Homo sapiens
aagaggtaaccattc

SEQ ID NO: 269975 - DNA, 15 bp, Homo sapiens
gaagaggtaaccatt

SEQ ID NO: 269976 - DNA, 15 bp, Homo sapiens
agaagaggtaaccat

SEQ ID NO: 269977 - DNA, 15 bp, Homo sapiens
cagaagaggtaacca

SEQ ID NO: 269978 - DNA, 15 bp, Homo sapiens
acagaagaggtaacc

SEQ ID NO: 269979 - DNA, 15 bp, Homo sapiens
tacagaagaggtaac

SEQ ID NO: 269980 - DNA, 15 bp, Homo sapiens
gtacagaagaggtaa

SEQ ID NO: 269981 - DNA, 15 bp, Homo sapiens
ggtacagaagaggta

SEQ ID NO: 269982 - DNA, 15 bp, Homo sapiens
tggtacagaagaggt

SEQ ID NO: 269983 - DNA, 15 bp, Homo sapiens
atggtacagaagagg

SEQ ID NO: 269984 - DNA, 15 bp, Homo sapiens
catggtacagaagag

SEQ ID NO: 269985 - DNA, 15 bp, Homo sapiens
ccatggtacagaaga

SEQ ID NO: 269986 - DNA, 15 bp, Homo sapiens
gccatggtacagaag

SEQ ID NO: 269987 - DNA, 15 bp, Homo sapiens
ggccatggtacagaa

SEQ ID NO: 269988 - DNA, 15 bp, Homo sapiens
aggccatggtacaga

SEQ ID NO: 269989 - DNA, 15 bp, Homo sapiens
gaggccatggtacag

SEQ ID NO: 269990 - DNA, 15 bp, Homo sapiens
tgaggccatggtaca

SEQ ID NO: 269991 - DNA, 15 bp, Homo sapiens
ctgaggccatggtac

SEQ ID NO: 269992 - DNA, 15 bp, Homo sapiens
tctgaggccatggta

SEQ ID NO: 269993 - DNA, 15 bp, Homo sapiens
ttctgaggccatggt

SEQ ID NO: 269994 - DNA, 15 bp, Homo sapiens
gttctgaggccatgg

SEQ ID NO: 269995 - DNA, 15 bp, Homo sapiens
tgttctgaggccatg

SEQ ID NO: 269996 - DNA, 15 bp, Homo sapiens
atgttctgaggccat

SEQ ID NO: 269997 - DNA, 15 bp, Homo sapiens
catgttctgaggcca

SEQ ID NO: 269998 - DNA, 15 bp, Homo sapiens
ccatgttctgaggcc

SEQ ID NO: 269999 - DNA, 15 bp, Homo sapiens
accatgttctgaggc

SEQ ID NO: 270000 - DNA, 15 bp, Homo sapiens
taccatgttctgagg

SEQ ID NO: 270001 - DNA, 15 bp, Homo sapiens
ctaccatgttctgag

SEQ ID NO: 270002 - DNA, 15 bp, Homo sapiens
tctaccatgttctga

SEQ ID NO: 270003 - DNA, 15 bp, Homo sapiens
ctctaccatgttctg

SEQ ID NO: 270004 - DNA, 15 bp, Homo sapiens
gctctaccatgttct

SEQ ID NO: 270005 - DNA, 15 bp, Homo sapiens
agctctaccatgttc

SEQ ID NO: 270006 - DNA, 15 bp, Homo sapiens
cagctctaccatgtt

SEQ ID NO: 270007 - DNA, 15 bp, Homo sapiens
tcagctctaccatgt

SEQ ID NO: 270008 - DNA, 15 bp, Homo sapiens
atcagctctaccatg

SEQ ID NO: 270009 - DNA, 15 bp, Homo sapiens
tatcagctctaccat

SEQ ID NO: 270010 - DNA, 15 bp, Homo sapiens
atatcagctctacca

SEQ ID NO: 270011 - DNA, 15 bp, Homo sapiens
gatatcagctctacc

SEQ ID NO: 270012 - DNA, 15 bp, Homo sapiens
tgatatcagctctac

SEQ ID NO: 270013 - DNA, 15 bp, Homo sapiens
ttgatatcagctcta

SEQ ID NO: 270014 - DNA, 15 bp, Homo sapiens
cttgatatcagctct

SEQ ID NO: 270015 - DNA, 15 bp, Homo sapiens
ccttgatatcagctc

SEQ ID NO: 270016 - DNA, 15 bp, Homo sapiens
cccttgatatcagct

SEQ ID NO: 270017 - DNA, 15 bp, Homo sapiens
tcccttgatatcagc

SEQ ID NO: 270018 - DNA, 15 bp, Homo sapiens
ttcccttgatatcag

SEQ ID NO: 270019 - DNA, 15 bp, Homo sapiens
gttcccttgatatca

SEQ ID NO: 270020 - DNA, 15 bp, Homo sapiens
ggttcccttgatatc

SEQ ID NO: 270021 - DNA, 15 bp, Homo sapiens
tggttcccttgatat

SEQ ID NO: 270022 - DNA, 15 bp, Homo sapiens
gtggttcccttgata

SEQ ID NO: 270023 - DNA, 15 bp, Homo sapiens
ggtggttcccttgat

SEQ ID NO: 270024 - DNA, 15 bp, Homo sapiens
cggtggttcccttga

SEQ ID NO: 270025 - DNA, 15 bp, Homo sapiens
acggtggttcccttg

SEQ ID NO: 270026 - DNA, 15 bp, Homo sapiens
aacggtggttccctt

SEQ ID NO: 270027 - DNA, 15 bp, Homo sapiens
aaacggtggttccct

SEQ ID NO: 270028 - DNA, 15 bp, Homo sapiens
gaaacggtggttccc

SEQ ID NO: 270029 - DNA, 15 bp, Homo sapiens
agaaacggtggttcc

SEQ ID NO: 270030 - DNA, 15 bp, Homo sapiens
gagaaacggtggttc

SEQ ID NO: 270031 - DNA, 15 bp, Homo sapiens
ggagaaacggtggtt

SEQ ID NO: 270032 - DNA, 15 bp, Homo sapiens
gggagaaacggtggt

SEQ ID NO: 270033 - DNA, 15 bp, Homo sapiens
agggagaaacggtgg

SEQ ID NO: 270034 - DNA, 15 bp, Homo sapiens
gagggagaaacggtg

SEQ ID NO: 270035 - DNA, 15 bp, Homo sapiens
tgagggagaaacggt

SEQ ID NO: 270036 - DNA, 15 bp, Homo sapiens
ctgagggagaaacgg

SEQ ID NO: 270037 - DNA, 15 bp, Homo sapiens
tctgagggagaaacg

SEQ ID NO: 270038 - DNA, 15 bp, Homo sapiens
ttctgagggagaaac

SEQ ID NO: 270039 - DNA, 15 bp, Homo sapiens
gttctgagggagaaa

SEQ ID NO: 270040 - DNA, 15 bp, Homo sapiens
ggttctgagggagaa

SEQ ID NO: 270041 - DNA, 15 bp, Homo sapiens
tggttctgagggaga

SEQ ID NO: 270042 - DNA, 15 bp, Homo sapiens
atggttctgagggag

SEQ ID NO: 270043 - DNA, 15 bp, Homo sapiens
catggttctgaggga

SEQ ID NO: 270044 - DNA, 15 bp, Homo sapiens
gcatggttctgaggg

SEQ ID NO: 270045 - DNA, 15 bp, Homo sapiens
agcatggttctgagg

SEQ ID NO: 270046 - DNA, 15 bp, Homo sapiens
aagcatggttctgag

SEQ ID NO: 270047 - DNA, 15 bp, Homo sapiens
aaagcatggttctga

SEQ ID NO: 270048 - DNA, 15 bp, Homo sapiens
taaagcatggttctg

SEQ ID NO: 270049 - DNA, 15 bp, Homo sapiens
ctaaagcatggttct

SEQ ID NO: 270050 - DNA, 15 bp, Homo sapiens
cctaaagcatggttc

SEQ ID NO: 270051 - DNA, 15 bp, Homo sapiens
tcctaaagcatggtt

SEQ ID NO: 270052 - DNA, 15 bp, Homo sapiens
ctcctaaagcatggt

SEQ ID NO: 270053 - DNA, 15 bp, Homo sapiens
gctcctaaagcatgg

SEQ ID NO: 270054 - DNA, 15 bp, Homo sapiens
agctcctaaagcatg

SEQ ID NO: 270055 - DNA, 15 bp, Homo sapiens
tagctcctaaagcat

SEQ ID NO: 270056 - DNA, 15 bp, Homo sapiens
atagctcctaaagca

SEQ ID NO: 270057 - DNA, 15 bp, Homo sapiens
catagctcctaaagc

SEQ ID NO: 270058 - DNA, 15 bp, Homo sapiens
ccatagctcctaaag

SEQ ID NO: 270059 - DNA, 15 bp, Homo sapiens
accatagctcctaaa

SEQ ID NO: 270060 - DNA, 15 bp, Homo sapiens
aaccatagctcctaa

SEQ ID NO: 270061 - DNA, 15 bp, Homo sapiens
caaccatagctccta

SEQ ID NO: 270062 - DNA, 15 bp, Homo sapiens
acaaccatagctcct

SEQ ID NO: 270063 - DNA, 15 bp, Homo sapiens
gacaaccatagctcc

SEQ ID NO: 270064 - DNA, 15 bp, Homo sapiens
ggacaaccatagctc

SEQ ID NO: 270065 - DNA, 15 bp, Homo sapiens
gggacaaccatagct

SEQ ID NO: 270066 - DNA, 15 bp, Homo sapiens
ggggacaaccatagc

SEQ ID NO: 270067 - DNA, 15 bp, Homo sapiens
gggggacaaccatag

SEQ ID NO: 270068 - DNA, 15 bp, Homo sapiens
ggggggacaaccata

SEQ ID NO: 270069 - DNA, 15 bp, Homo sapiens
gggggggacaaccat

SEQ ID NO: 270070 - DNA, 15 bp, Homo sapiens
tgggggggacaacca

SEQ ID NO: 270071 - DNA, 15 bp, Homo sapiens
atgggggggacaacc

SEQ ID NO: 270072 - DNA, 15 bp, Homo sapiens
aatgggggggacaac

SEQ ID NO: 270073 - DNA, 15 bp, Homo sapiens
gaatgggggggacaa

SEQ ID NO: 270074 - DNA, 15 bp, Homo sapiens
agaatgggggggaca

SEQ ID NO: 270075 - DNA, 15 bp, Homo sapiens
aagaatgggggggac

SEQ ID NO: 270076 - DNA, 15 bp, Homo sapiens
caagaatggggggga

SEQ ID NO: 270077 - DNA, 15 bp, Homo sapiens
acaagaatggggggg

SEQ ID NO: 270078 - DNA, 15 bp, Homo sapiens
aacaagaatgggggg

SEQ ID NO: 270079 - DNA, 15 bp, Homo sapiens
caacaagaatggggg

SEQ ID NO: 270080 - DNA, 15 bp, Homo sapiens
acaacaagaatgggg

SEQ ID NO: 270081 - DNA, 15 bp, Homo sapiens
cacaacaagaatggg

SEQ ID NO: 270082 - DNA, 15 bp, Homo sapiens
gcacaacaagaatgg

SEQ ID NO: 270083 - DNA, 15 bp, Homo sapiens
tgcacaacaagaatg

SEQ ID NO: 270084 - DNA, 15 bp, Homo sapiens
ttgcacaacaagaat

SEQ ID NO: 270085 - DNA, 15 bp, Homo sapiens
tttgcacaacaagaa

SEQ ID NO: 270086 - DNA, 15 bp, Homo sapiens
gtttgcacaacaaga

SEQ ID NO: 270087 - DNA, 15 bp, Homo sapiens
agtttgcacaacaag

SEQ ID NO: 270088 - DNA, 15 bp, Homo sapiens
gagtttgcacaacaa

SEQ ID NO: 270089 - DNA, 15 bp, Homo sapiens
tgagtttgcacaaca

SEQ ID NO: 270090 - DNA, 15 bp, Homo sapiens
atgagtttgcacaac

SEQ ID NO: 270091 - DNA, 15 bp, Homo sapiens
aatgagtttgcacaa

SEQ ID NO: 270092 - DNA, 15 bp, Homo sapiens
taatgagtttgcaca

SEQ ID NO: 270093 - DNA, 15 bp, Homo sapiens
ctaatgagtttgcac

SEQ ID NO: 270094 - DNA, 15 bp, Homo sapiens
cctaatgagtttgca

SEQ ID NO: 270095 - DNA, 15 bp, Homo sapiens
tcctaatgagtttgc

SEQ ID NO: 270096 - DNA, 15 bp, Homo sapiens
ctcctaatgagtttg

SEQ ID NO: 270097 - DNA, 15 bp, Homo sapiens
cctcctaatgagttt

SEQ ID NO: 270098 - DNA, 15 bp, Homo sapiens
ccctcctaatgagtt

SEQ ID NO: 270099 - DNA, 15 bp, Homo sapiens
cccctcctaatgagt

SEQ ID NO: 270100 - DNA, 15 bp, Homo sapiens
acccctcctaatgag

SEQ ID NO: 270101 - DNA, 15 bp, Homo sapiens
tacccctcctaatga

SEQ ID NO: 270102 - DNA, 15 bp, Homo sapiens
ctacccctcctaatg

SEQ ID NO: 270103 - DNA, 15 bp, Homo sapiens
gctacccctcctaat

SEQ ID NO: 270104 - DNA, 15 bp, Homo sapiens
agctacccctcctaa

SEQ ID NO: 270105 - DNA, 15 bp, Homo sapiens
gagctacccctccta

SEQ ID NO: 270106 - DNA, 15 bp, Homo sapiens
agagctacccctcct

SEQ ID NO: 270107 - DNA, 15 bp, Homo sapiens
gagagctacccctcc

SEQ ID NO: 270108 - DNA, 15 bp, Homo sapiens
agagagctacccctc

SEQ ID NO: 270109 - DNA, 15 bp, Homo sapiens
gagagagctacccct

SEQ ID NO: 270110 - DNA, 15 bp, Homo sapiens
agagagagctacccc

SEQ ID NO: 270111 - DNA, 15 bp, Homo sapiens
aagagagagctaccc

SEQ ID NO: 270112 - DNA, 15 bp, Homo sapiens
taagagagagctacc

SEQ ID NO: 270113 - DNA, 15 bp, Homo sapiens
ctaagagagagctac

SEQ ID NO: 270114 - DNA, 15 bp, Homo sapiens
tctaagagagagcta

SEQ ID NO: 270115 - DNA, 15 bp, Homo sapiens
gtctaagagagagct

SEQ ID NO: 270116 - DNA, 15 bp, Homo sapiens
ggtctaagagagagc

SEQ ID NO: 270117 - DNA, 15 bp, Homo sapiens
aggtctaagagagag

SEQ ID NO: 270118 - DNA, 15 bp, Homo sapiens
aaggtctaagagaga

SEQ ID NO: 270119 - DNA, 15 bp, Homo sapiens
gaaggtctaagagag

SEQ ID NO: 270120 - DNA, 15 bp, Homo sapiens
tgaaggtctaagaga

SEQ ID NO: 270121 - DNA, 15 bp, Homo sapiens
ttgaaggtctaagag

SEQ ID NO: 270122 - DNA, 15 bp, Homo sapiens
cttgaaggtctaaga

SEQ ID NO: 270123 - DNA, 15 bp, Homo sapiens
tcttgaaggtctaag

SEQ ID NO: 270124 - DNA, 15 bp, Homo sapiens
atcttgaaggtctaa

SEQ ID NO: 270125 - DNA, 15 bp, Homo sapiens
catcttgaaggtcta

SEQ ID NO: 270126 - DNA, 15 bp, Homo sapiens
ccatcttgaaggtct

SEQ ID NO: 270127 - DNA, 15 bp, Homo sapiens
cccatcttgaaggtc

SEQ ID NO: 270128 - DNA, 15 bp, Homo sapiens
ccccatcttgaaggt

SEQ ID NO: 270129 - DNA, 15 bp, Homo sapiens
tccccatcttgaagg

SEQ ID NO: 270130 - DNA, 15 bp, Homo sapiens
atccccatcttgaag

SEQ ID NO: 270131 - DNA, 15 bp, Homo sapiens
tatccccatcttgaa

SEQ ID NO: 270132 - DNA, 15 bp, Homo sapiens
atatccccatcttga

SEQ ID NO: 270133 - DNA, 15 bp, Homo sapiens
catatccccatcttg

SEQ ID NO: 270134 - DNA, 15 bp, Homo sapiens
gcatatccccatctt

SEQ ID NO: 270135 - DNA, 15 bp, Homo sapiens
ggcatatccccatct

SEQ ID NO: 270136 - DNA, 15 bp, Homo sapiens
aggcatatccccatc

SEQ ID NO: 270137 - DNA, 15 bp, Homo sapiens
caggcatatccccat

SEQ ID NO: 270138 - DNA, 15 bp, Homo sapiens
ccaggcatatcccca

SEQ ID NO: 270139 - DNA, 15 bp, Homo sapiens
tccaggcatatcccc

SEQ ID NO: 270140 - DNA, 15 bp, Homo sapiens
gtccaggcatatccc

SEQ ID NO: 270141 - DNA, 15 bp, Homo sapiens
tgtccaggcatatcc

SEQ ID NO: 270142 - DNA, 15 bp, Homo sapiens
ctgtccaggcatatc

SEQ ID NO: 270143 - DNA, 15 bp, Homo sapiens
cctgtccaggcatat

SEQ ID NO: 270144 - DNA, 15 bp, Homo sapiens
ccctgtccaggcata

SEQ ID NO: 270145 - DNA, 15 bp, Homo sapiens
accctgtccaggcat

SEQ ID NO: 270146 - DNA, 15 bp, Homo sapiens
caccctgtccaggca

SEQ ID NO: 270147 - DNA, 15 bp, Homo sapiens
tcaccctgtccaggc

SEQ ID NO: 270148 - DNA, 15 bp, Homo sapiens
ctcaccctgtccagg

SEQ ID NO: 270149 - DNA, 15 bp, Homo sapiens
cctcaccctgtccag

SEQ ID NO: 270150 - DNA, 15 bp, Homo sapiens
gcctcaccctgtcca

SEQ ID NO: 270151 - DNA, 15 bp, Homo sapiens
tgcctcaccctgtcc

SEQ ID NO: 270152 - DNA, 15 bp, Homo sapiens
atgcctcaccctgtc

SEQ ID NO: 270153 - DNA, 15 bp, Homo sapiens
aatgcctcaccctgt

SEQ ID NO: 270154 - DNA, 15 bp, Homo sapiens
taatgcctcaccctg

SEQ ID NO: 270155 - DNA, 15 bp, Homo sapiens
ttaatgcctcaccct

SEQ ID NO: 270156 - DNA, 15 bp, Homo sapiens
cttaatgcctcaccc

SEQ ID NO: 270157 - DNA, 15 bp, Homo sapiens
ccttaatgcctcacc

SEQ ID NO: 270158 - DNA, 15 bp, Homo sapiens
cccttaatgcctcac

SEQ ID NO: 270159 - DNA, 15 bp, Homo sapiens
acccttaatgcctca

SEQ ID NO: 270160 - DNA, 15 bp, Homo sapiens
gacccttaatgcctc

SEQ ID NO: 270161 - DNA, 15 bp, Homo sapiens
agacccttaatgcct

SEQ ID NO: 270162 - DNA, 15 bp, Homo sapiens
gagacccttaatgcc

SEQ ID NO: 270163 - DNA, 15 bp, Homo sapiens
agagacccttaatgc

SEQ ID NO: 270164 - DNA, 15 bp, Homo sapiens
gagagacccttaatg

SEQ ID NO: 270165 - DNA, 15 bp, Homo sapiens
agagagacccttaat

SEQ ID NO: 270166 - DNA, 15 bp, Homo sapiens
aagagagacccttaa

SEQ ID NO: 270167 - DNA, 15 bp, Homo sapiens
aaagagagaccctta

SEQ ID NO: 270168 - DNA, 15 bp, Homo sapiens
taaagagagaccctt

SEQ ID NO: 270169 - DNA, 15 bp, Homo sapiens
ataaagagagaccct

SEQ ID NO: 270170 - DNA, 15 bp, Homo sapiens
tataaagagagaccc

SEQ ID NO: 270171 - DNA, 15 bp, Homo sapiens
ttataaagagagacc

SEQ ID NO: 270172 - DNA, 15 bp, Homo sapiens
tttataaagagagac

SEQ ID NO: 270173 - DNA, 15 bp, Homo sapiens
gtttataaagagaga

SEQ ID NO: 270174 - DNA, 15 bp, Homo sapiens
tgtttataaagagag

SEQ ID NO: 270175 - DNA, 15 bp, Homo sapiens
ttgtttataaagaga

SEQ ID NO: 270176 - DNA, 15 bp, Homo sapiens
attgtttataaagag

SEQ ID NO: 270177 - DNA, 15 bp, Homo sapiens
cattgtttataaaga

SEQ ID NO: 270178 - DNA, 15 bp, Homo sapiens
tcattgtttataaag

SEQ ID NO: 270179 - DNA, 15 bp, Homo sapiens
ctcattgtttataaa

SEQ ID NO: 270180 - DNA, 15 bp, Homo sapiens
cctcattgtttataa

SEQ ID NO: 270181 - DNA, 15 bp, Homo sapiens
tcctcattgtttata

SEQ ID NO: 270182 - DNA, 15 bp, Homo sapiens
ttcctcattgtttat

SEQ ID NO: 270183 - DNA, 15 bp, Homo sapiens
tttcctcattgttta

SEQ ID NO: 270184 - DNA, 15 bp, Homo sapiens
ttttcctcattgttt

SEQ ID NO: 270185 - DNA, 15 bp, Homo sapiens
attttcctcattgtt

SEQ ID NO: 270186 - DNA, 15 bp, Homo sapiens
aattttcctcattgt

SEQ ID NO: 270187 - DNA, 15 bp, Homo sapiens
gaattttcctcattg

SEQ ID NO: 270188 - DNA, 15 bp, Homo sapiens
ggaattttcctcatt

SEQ ID NO: 270189 - DNA, 15 bp, Homo sapiens
gggaattttcctcat

SEQ ID NO: 270190 - DNA, 15 bp, Homo sapiens
agggaattttcctca

SEQ ID NO: 270191 - DNA, 15 bp, Homo sapiens
tagggaattttcctc

SEQ ID NO: 270192 - DNA, 15 bp, Homo sapiens
atagggaattttcct

SEQ ID NO: 270193 - DNA, 15 bp, Homo sapiens
tatagggaattttcc

SEQ ID NO: 270194 - DNA, 15 bp, Homo sapiens
gtatagggaattttc

SEQ ID NO: 270195 - DNA, 15 bp, Homo sapiens
tgtatagggaatttt

SEQ ID NO: 270196 - DNA, 15 bp, Homo sapiens
atgtatagggaattt

SEQ ID NO: 270197 - DNA, 15 bp, Homo sapiens
aatgtatagggaatt

SEQ ID NO: 270198 - DNA, 15 bp, Homo sapiens
caatgtatagggaat

SEQ ID NO: 270199 - DNA, 15 bp, Homo sapiens
ccaatgtatagggaa

SEQ ID NO: 270200 - DNA, 15 bp, Homo sapiens
gccaatgtataggga

SEQ ID NO: 270201 - DNA, 15 bp, Homo sapiens
ggccaatgtataggg

SEQ ID NO: 270202 - DNA, 15 bp, Homo sapiens
tggccaatgtatagg

SEQ ID NO: 270203 - DNA, 15 bp, Homo sapiens
ttggccaatgtatag

SEQ ID NO: 270204 - DNA, 15 bp, Homo sapiens
tttggccaatgtata

SEQ ID NO: 270205 - DNA, 15 bp, Homo sapiens
ctttggccaatgtat

SEQ ID NO: 270206 - DNA, 15 bp, Homo sapiens
actttggccaatgta

SEQ ID NO: 270207 - DNA, 15 bp, Homo sapiens
cactttggccaatgt

SEQ ID NO: 270208 - DNA, 15 bp, Homo sapiens
tcactttggccaatg

SEQ ID NO: 270209 - DNA, 15 bp, Homo sapiens
atcactttggccaat

SEQ ID NO: 270210 - DNA, 15 bp, Homo sapiens
gatcactttggccaa

SEQ ID NO: 270211 - DNA, 15 bp, Homo sapiens
agatcactttggcca

SEQ ID NO: 270212 - DNA, 15 bp, Homo sapiens
aagatcactttggcc

SEQ ID NO: 270213 - DNA, 15 bp, Homo sapiens
aaagatcactttggc

SEQ ID NO: 270214 - DNA, 15 bp, Homo sapiens
aaaagatcactttgg

SEQ ID NO: 270215 - DNA, 15 bp, Homo sapiens
aaaaagatcactttg

SEQ ID NO: 270216 - DNA, 15 bp, Homo sapiens
taaaaagatcacttt

SEQ ID NO: 270217 - DNA, 15 bp, Homo sapiens
ttaaaaagatcactt

SEQ ID NO: 270218 - DNA, 15 bp, Homo sapiens
tttaaaaagatcact

SEQ ID NO: 270219 - DNA, 15 bp, Homo sapiens
atttaaaaagatcac

SEQ ID NO: 270220 - DNA, 15 bp, Homo sapiens
catttaaaaagatca

SEQ ID NO: 270221 - DNA, 15 bp, Homo sapiens
acatttaaaaagatc

SEQ ID NO: 270222 - DNA, 15 bp, Homo sapiens
tacatttaaaaagat

SEQ ID NO: 270223 - DNA, 15 bp, Homo sapiens
ttacatttaaaaaga

SEQ ID NO: 270224 - DNA, 15 bp, Homo sapiens
tttacatttaaaaag

SEQ ID NO: 270225 - DNA, 15 bp, Homo sapiens
atttacatttaaaaa

SEQ ID NO: 270226 - DNA, 15 bp, Homo sapiens
catttacatttaaaa

SEQ ID NO: 270227 - DNA, 15 bp, Homo sapiens
tcatttacatttaaa

SEQ ID NO: 270228 - DNA, 15 bp, Homo sapiens
ttcatttacatttaa

SEQ ID NO: 270229 - DNA, 15 bp, Homo sapiens
tttcatttacattta

SEQ ID NO: 270230 - DNA, 15 bp, Homo sapiens
atttcatttacattt

SEQ ID NO: 270231 - DNA, 15 bp, Homo sapiens
gatttcatttacatt

SEQ ID NO: 270232 - DNA, 15 bp, Homo sapiens
tgatttcatttacat

SEQ ID NO: 270233 - DNA, 15 bp, Homo sapiens
ttgatttcatttaca

SEQ ID NO: 270234 - DNA, 15 bp, Homo sapiens
attgatttcatttac

SEQ ID NO: 270235 - DNA, 15 bp, Homo sapiens
aattgatttcattta

SEQ ID NO: 270236 - DNA, 15 bp, Homo sapiens
caattgatttcattt

SEQ ID NO: 270237 - DNA, 15 bp, Homo sapiens
acaattgatttcatt

SEQ ID NO: 270238 - DNA, 15 bp, Homo sapiens
tacaattgatttcat

SEQ ID NO: 270239 - DNA, 15 bp, Homo sapiens
ttacaattgatttca

SEQ ID NO: 270240 - DNA, 15 bp, Homo sapiens
cttacaattgatttc

SEQ ID NO: 270241 - DNA, 15 bp, Homo sapiens
acttacaattgattt

SEQ ID NO: 270242 - DNA, 15 bp, Homo sapiens
aacttacaattgatt

SEQ ID NO: 270243 - DNA, 15 bp, Homo sapiens
gaacttacaattgat

SEQ ID NO: 270244 - DNA, 15 bp, Homo sapiens
ggaacttacaattga

SEQ ID NO: 270245 - DNA, 15 bp, Homo sapiens
tggaacttacaattg

SEQ ID NO: 270246 - DNA, 15 bp, Homo sapiens
ttggaacttacaatt

SEQ ID NO: 270247 - DNA, 15 bp, Homo sapiens
tttggaacttacaat

SEQ ID NO: 270248 - DNA, 15 bp, Homo sapiens
gtttggaacttacaa

SEQ ID NO: 270249 - DNA, 15 bp, Homo sapiens
agtttggaacttaca

SEQ ID NO: 270250 - DNA, 15 bp, Homo sapiens
gagtttggaacttac

SEQ ID NO: 270251 - DNA, 15 bp, Homo sapiens
ggagtttggaactta

SEQ ID NO: 270252 - DNA, 15 bp, Homo sapiens
aggagtttggaactt

SEQ ID NO: 270253 - DNA, 15 bp, Homo sapiens
aaggagtttggaact

SEQ ID NO: 270254 - DNA, 15 bp, Homo sapiens
gaaggagtttggaac

SEQ ID NO: 270255 - DNA, 15 bp, Homo sapiens
ggaaggagtttggaa

SEQ ID NO: 270256 - DNA, 15 bp, Homo sapiens
gggaaggagtttgga

SEQ ID NO: 270257 - DNA, 15 bp, Homo sapiens
tgggaaggagtttgg

SEQ ID NO: 270258 - DNA, 15 bp, Homo sapiens
atgggaaggagtttg

SEQ ID NO: 270259 - DNA, 15 bp, Homo sapiens
catgggaaggagttt

SEQ ID NO: 270260 - DNA, 15 bp, Homo sapiens
ccatgggaaggagtt

SEQ ID NO: 270261 - DNA, 15 bp, Homo sapiens
gccatgggaaggagt

SEQ ID NO: 270262 - DNA, 15 bp, Homo sapiens
tgccatgggaaggag

SEQ ID NO: 270263 - DNA, 15 bp, Homo sapiens
atgccatgggaagga

SEQ ID NO: 270264 - DNA, 15 bp, Homo sapiens
aatgccatgggaagg

SEQ ID NO: 270265 - DNA, 15 bp, Homo sapiens
caatgccatgggaag

SEQ ID NO: 270266 - DNA, 15 bp, Homo sapiens
ccaatgccatgggaa

SEQ ID NO: 270267 - DNA, 15 bp, Homo sapiens
gccaatgccatggga

SEQ ID NO: 270268 - DNA, 15 bp, Homo sapiens
ggccaatgccatggg

SEQ ID NO: 270269 - DNA, 15 bp, Homo sapiens
gggccaatgccatgg

SEQ ID NO: 270270 - DNA, 15 bp, Homo sapiens
ggggccaatgccatg

SEQ ID NO: 270271 - DNA, 15 bp, Homo sapiens
aggggccaatgccat

SEQ ID NO: 270272 - DNA, 15 bp, Homo sapiens
caggggccaatgcca

SEQ ID NO: 270273 - DNA, 15 bp, Homo sapiens
tcaggggccaatgcc

SEQ ID NO: 270274 - DNA, 15 bp, Homo sapiens
gtcaggggccaatgc

SEQ ID NO: 270275 - DNA, 15 bp, Homo sapiens
tgtcaggggccaatg

SEQ ID NO: 270276 - DNA, 15 bp, Homo sapiens
gtgtcaggggccaat

SEQ ID NO: 270277 - DNA, 15 bp, Homo sapiens
tgtgtcaggggccaa

SEQ ID NO: 270278 - DNA, 15 bp, Homo sapiens
atgtgtcaggggcca

SEQ ID NO: 270279 - DNA, 15 bp, Homo sapiens
gatgtgtcaggggcc

SEQ ID NO: 270280 - DNA, 15 bp, Homo sapiens
ggatgtgtcaggggc

SEQ ID NO: 270281 - DNA, 15 bp, Homo sapiens
gggatgtgtcagggg

SEQ ID NO: 270282 - DNA, 15 bp, Homo sapiens
ggggatgtgtcaggg

SEQ ID NO: 270283 - DNA, 15 bp, Homo sapiens
gggggatgtgtcagg

SEQ ID NO: 270284 - DNA, 15 bp, Homo sapiens
tgggggatgtgtcag

SEQ ID NO: 270285 - DNA, 15 bp, Homo sapiens
atgggggatgtgtca

SEQ ID NO: 270286 - DNA, 15 bp, Homo sapiens
aatgggggatgtgtc

SEQ ID NO: 270287 - DNA, 15 bp, Homo sapiens
caatgggggatgtgt

SEQ ID NO: 270288 - DNA, 15 bp, Homo sapiens
gcaatgggggatgtg

SEQ ID NO: 270289 - DNA, 15 bp, Homo sapiens
agcaatgggggatgt

SEQ ID NO: 270290 - DNA, 15 bp, Homo sapiens
gagcaatgggggatg

SEQ ID NO: 270291 - DNA, 15 bp, Homo sapiens
tgagcaatgggggat

SEQ ID NO: 270292 - DNA, 15 bp, Homo sapiens
ctgagcaatggggga

SEQ ID NO: 270293 - DNA, 15 bp, Homo sapiens
tctgagcaatggggg

SEQ ID NO: 270294 - DNA, 15 bp, Homo sapiens
atctgagcaatgggg

SEQ ID NO: 270295 - DNA, 15 bp, Homo sapiens
catctgagcaatggg

SEQ ID NO: 270296 - DNA, 15 bp, Homo sapiens
gcatctgagcaatgg

SEQ ID NO: 270297 - DNA, 15 bp, Homo sapiens
tgcatctgagcaatg

SEQ ID NO: 270298 - DNA, 15 bp, Homo sapiens
atgcatctgagcaat

SEQ ID NO: 270299 - DNA, 15 bp, Homo sapiens
aatgcatctgagcaa

SEQ ID NO: 270300 - DNA, 15 bp, Homo sapiens
caatgcatctgagca

SEQ ID NO: 270301 - DNA, 15 bp, Homo sapiens
ccaatgcatctgagc

SEQ ID NO: 270302 - DNA, 15 bp, Homo sapiens
gccaatgcatctgag

SEQ ID NO: 270303 - DNA, 15 bp, Homo sapiens
ggccaatgcatctga

SEQ ID NO: 270304 - DNA, 15 bp, Homo sapiens
tggccaatgcatctg

SEQ ID NO: 270305 - DNA, 15 bp, Homo sapiens
gtggccaatgcatct

SEQ ID NO: 270306 - DNA, 15 bp, Homo sapiens
tgtggccaatgcatc

SEQ ID NO: 270307 - DNA, 15 bp, Homo sapiens
atgtggccaatgcat

SEQ ID NO: 270308 - DNA, 15 bp, Homo sapiens
aatgtggccaatgca

SEQ ID NO: 270309 - DNA, 15 bp, Homo sapiens
caatgtggccaatgc

SEQ ID NO: 270310 - DNA, 15 bp, Homo sapiens
ccaatgtggccaatg

SEQ ID NO: 270311 - DNA, 15 bp, Homo sapiens
gccaatgtggccaat

SEQ ID NO: 270312 - DNA, 15 bp, Homo sapiens
agccaatgtggccaa

SEQ ID NO: 270313 - DNA, 15 bp, Homo sapiens
aagccaatgtggcca

SEQ ID NO: 270314 - DNA, 15 bp, Homo sapiens
gaagccaatgtggcc

SEQ ID NO: 270315 - DNA, 15 bp, Homo sapiens
agaagccaatgtggc

SEQ ID NO: 270316 - DNA, 15 bp, Homo sapiens
cagaagccaatgtgg

SEQ ID NO: 270317 - DNA, 15 bp, Homo sapiens
ccagaagccaatgtg

SEQ ID NO: 270318 - DNA, 15 bp, Homo sapiens
tccagaagccaatgt

SEQ ID NO: 270319 - DNA, 15 bp, Homo sapiens
ctccagaagccaatg

SEQ ID NO: 270320 - DNA, 15 bp, Homo sapiens
cctccagaagccaat

SEQ ID NO: 270321 - DNA, 15 bp, Homo sapiens
gcctccagaagccaa

SEQ ID NO: 270322 - DNA, 15 bp, Homo sapiens
agcctccagaagcca

SEQ ID NO: 270323 - DNA, 15 bp, Homo sapiens
gagcctccagaagcc

SEQ ID NO: 270324 - DNA, 15 bp, Homo sapiens
agagcctccagaagc

SEQ ID NO: 270325 - DNA, 15 bp, Homo sapiens
aagagcctccagaag

SEQ ID NO: 270326 - DNA, 15 bp, Homo sapiens
caagagcctccagaa

SEQ ID NO: 270327 - DNA, 15 bp, Homo sapiens
tcaagagcctccaga

SEQ ID NO: 270328 - DNA, 15 bp, Homo sapiens
ttcaagagcctccag

SEQ ID NO: 270329 - DNA, 15 bp, Homo sapiens
cttcaagagcctcca

SEQ ID NO: 270330 - DNA, 15 bp, Homo sapiens
gcttcaagagcctcc

SEQ ID NO: 270331 - DNA, 15 bp, Homo sapiens
tgcttcaagagcctc

SEQ ID NO: 270332 - DNA, 15 bp, Homo sapiens
gtgcttcaagagcct

SEQ ID NO: 270333 - DNA, 15 bp, Homo sapiens
tgtgcttcaagagcc

SEQ ID NO: 270334 - DNA, 15 bp, Homo sapiens
gtgtgcttcaagagc

SEQ ID NO: 270335 - DNA, 15 bp, Homo sapiens
ggtgtgcttcaagag

SEQ ID NO: 270336 - DNA, 15 bp, Homo sapiens
tggtgtgcttcaaga

SEQ ID NO: 270337 - DNA, 15 bp, Homo sapiens
ttggtgtgcttcaag

SEQ ID NO: 270338 - DNA, 15 bp, Homo sapiens
cttggtgtgcttcaa

SEQ ID NO: 270339 - DNA, 15 bp, Homo sapiens
gcttggtgtgcttca

SEQ ID NO: 270340 - DNA, 15 bp, Homo sapiens
agcttggtgtgcttc

SEQ ID NO: 270341 - DNA, 15 bp, Homo sapiens
tagcttggtgtgctt

SEQ ID NO: 270342 - DNA, 15 bp, Homo sapiens
ctagcttggtgtgct

SEQ ID NO: 270343 - DNA, 15 bp, Homo sapiens
actagcttggtgtgc

SEQ ID NO: 270344 - DNA, 15 bp, Homo sapiens
aactagcttggtgtg

SEQ ID NO: 270345 - DNA, 15 bp, Homo sapiens
gaactagcttggtgt

SEQ ID NO: 270346 - DNA, 15 bp, Homo sapiens
agaactagcttggtg

SEQ ID NO: 270347 - DNA, 15 bp, Homo sapiens
aagaactagcttggt

SEQ ID NO: 270348 - DNA, 15 bp, Homo sapiens
gaagaactagcttgg

SEQ ID NO: 270349 - DNA, 15 bp, Homo sapiens
ggaagaactagcttg

SEQ ID NO: 270350 - DNA, 15 bp, Homo sapiens
aggaagaactagctt

SEQ ID NO: 270351 - DNA, 15 bp, Homo sapiens
caggaagaactagct

SEQ ID NO: 270352 - DNA, 15 bp, Homo sapiens
ccaggaagaactagc

SEQ ID NO: 270353 - DNA, 15 bp, Homo sapiens
cccaggaagaactag

SEQ ID NO: 270354 - DNA, 15 bp, Homo sapiens
tcccaggaagaacta

SEQ ID NO: 270355 - DNA, 15 bp, Homo sapiens
gtctcccaggaagaa

SEQ ID NO: 270356 - DNA, 15 bp, Homo sapiens
ggtctcccaggaaga

SEQ ID NO: 270357 - DNA, 15 bp, Homo sapiens
aggtctcccaggaag

SEQ ID NO: 270358 - DNA, 15 bp, Homo sapiens
aaggtctcccaggaa

SEQ ID NO: 270359 - DNA, 15 bp, Homo sapiens
aaaggtctcccagga

SEQ ID NO: 270360 - DNA, 15 bp, Homo sapiens
caaaggtctcccagg

SEQ ID NO: 270361 - DNA, 15 bp, Homo sapiens
tcaaaggtctcccag

SEQ ID NO: 270362 - DNA, 15 bp, Homo sapiens
gtcaaaggtctccca

SEQ ID NO: 270363 - DNA, 15 bp, Homo sapiens
ggtcaaaggtctccc

SEQ ID NO: 270364 - DNA, 15 bp, Homo sapiens
aggtcaaaggtctcc

SEQ ID NO: 270365 - DNA, 15 bp, Homo sapiens
taggtcaaaggtctc

SEQ ID NO: 270366 - DNA, 15 bp, Homo sapiens
gtaggtcaaaggtct

SEQ ID NO: 270367 - DNA, 15 bp, Homo sapiens
agtaggtcaaaggtc

SEQ ID NO: 270368 - DNA, 15 bp, Homo sapiens
cagtaggtcaaaggt

SEQ ID NO: 270369 - DNA, 15 bp, Homo sapiens
acagtaggtcaaagg

SEQ ID NO: 270370 - DNA, 15 bp, Homo sapiens
aacagtaggtcaaag

SEQ ID NO: 270371 - DNA, 15 bp, Homo sapiens
gaacagtaggtcaaa

SEQ ID NO: 270372 - DNA, 15 bp, Homo sapiens
ggaacagtaggtcaa

SEQ ID NO: 270373 - DNA, 15 bp, Homo sapiens
gggaacagtaggtca

SEQ ID NO: 270374 - DNA, 15 bp, Homo sapiens
agggaacagtaggtc

SEQ ID NO: 270375 - DNA, 15 bp, Homo sapiens
gagggaacagtaggt

SEQ ID NO: 270376 - DNA, 15 bp, Homo sapiens
agagggaacagtagg

SEQ ID NO: 270377 - DNA, 15 bp, Homo sapiens
cagagggaacagtag

SEQ ID NO: 270378 - DNA, 15 bp, Homo sapiens
gcagagggaacagta

SEQ ID NO: 270379 - DNA, 15 bp, Homo sapiens
ggcagagggaacagt

SEQ ID NO: 270380 - DNA, 15 bp, Homo sapiens
aggcagagggaacag

SEQ ID NO: 270381 - DNA, 15 bp, Homo sapiens
caggcagagggaaca

SEQ ID NO: 270382 - DNA, 15 bp, Homo sapiens
gcaggcagagggaac

SEQ ID NO: 270383 - DNA, 15 bp, Homo sapiens
ggcaggcagagggaa

SEQ ID NO: 270384 - DNA, 15 bp, Homo sapiens
tggcaggcagaggga

SEQ ID NO: 270385 - DNA, 15 bp, Homo sapiens
atggcaggcagaggg

SEQ ID NO: 270386 - DNA, 15 bp, Homo sapiens
catggcaggcagagg

SEQ ID NO: 270387 - DNA, 15 bp, Homo sapiens
gcatggcaggcagag

SEQ ID NO: 270388 - DNA, 15 bp, Homo sapiens
agcatggcaggcaga

SEQ ID NO: 270389 - DNA, 15 bp, Homo sapiens
gagcatggcaggcag

SEQ ID NO: 270390 - DNA, 15 bp, Homo sapiens
agagcatggcaggca

SEQ ID NO: 270391 - DNA, 15 bp, Homo sapiens
aagagcatggcaggc

SEQ ID NO: 270392 - DNA, 15 bp, Homo sapiens
gaagagcatggcagg

SEQ ID NO: 270393 - DNA, 15 bp, Homo sapiens
agaagagcatggcag

SEQ ID NO: 270394 - DNA, 15 bp, Homo sapiens
gagaagagcatggca

SEQ ID NO: 270395 - DNA, 15 bp, Homo sapiens
ggagaagagcatggc

SEQ ID NO: 270396 - DNA, 15 bp, Homo sapiens
aggagaagagcatgg

SEQ ID NO: 270397 - DNA, 15 bp, Homo sapiens
caggagaagagcatg

SEQ ID NO: 270398 - DNA, 15 bp, Homo sapiens
ccaggagaagagcat

SEQ ID NO: 270399 - DNA, 15 bp, Homo sapiens
gccaggagaagagca

SEQ ID NO: 270400 - DNA, 15 bp, Homo sapiens
ggccaggagaagagc

SEQ ID NO: 270401 - DNA, 15 bp, Homo sapiens
aggccaggagaagag

SEQ ID NO: 270402 - DNA, 15 bp, Homo sapiens
aaggccaggagaaga

SEQ ID NO: 270403 - DNA, 15 bp, Homo sapiens
aaaggccaggagaag

SEQ ID NO: 270404 - DNA, 15 bp, Homo sapiens
gaaaggccaggagaa

SEQ ID NO: 270405 - DNA, 15 bp, Homo sapiens
tgaaaggccaggaga

SEQ ID NO: 270406 - DNA, 15 bp, Homo sapiens
ttgaaaggccaggag

SEQ ID NO: 270407 - DNA, 15 bp, Homo sapiens
tttgaaaggccagga

SEQ ID NO: 270408 - DNA, 15 bp, Homo sapiens
ctttgaaaggccagg

SEQ ID NO: 270409 - DNA, 15 bp, Homo sapiens
cctttgaaaggccag

SEQ ID NO: 270410 - DNA, 15 bp, Homo sapiens
acctttgaaaggcca

SEQ ID NO: 270411 - DNA, 15 bp, Homo sapiens
tacctttgaaaggcc

SEQ ID NO: 270412 - DNA, 15 bp, Homo sapiens
ctacctttgaaaggc

SEQ ID NO: 270413 - DNA, 15 bp, Homo sapiens
tctacctttgaaagg

SEQ ID NO: 270414 - DNA, 15 bp, Homo sapiens
atctacctttgaaag

SEQ ID NO: 270415 - DNA, 15 bp, Homo sapiens
gatctacctttgaaa

SEQ ID NO: 270416 - DNA, 15 bp, Homo sapiens
ggatctacctttgaa

SEQ ID NO: 270417 - DNA, 15 bp, Homo sapiens
tggatctacctttga

SEQ ID NO: 270418 - DNA, 15 bp, Homo sapiens
atggatctacctttg

SEQ ID NO: 270419 - DNA, 15 bp, Homo sapiens
aatggatctaccttt

SEQ ID NO: 270420 - DNA, 15 bp, Homo sapiens
caatggatctacctt

SEQ ID NO: 270421 - DNA, 15 bp, Homo sapiens
gcaatggatctacct

SEQ ID NO: 270422 - DNA, 15 bp, Homo sapiens
cgcaatggatctacc

SEQ ID NO: 270423 - DNA, 15 bp, Homo sapiens
acgcaatggatctac

SEQ ID NO: 270424 - DNA, 15 bp, Homo sapiens
aacgcaatggatcta

SEQ ID NO: 270425 - DNA, 15 bp, Homo sapiens
gaacgcaatggatct

SEQ ID NO: 270426 - DNA, 15 bp, Homo sapiens
agaacgcaatggatc

SEQ ID NO: 270427 - DNA, 15 bp, Homo sapiens
aagaacgcaatggat

SEQ ID NO: 270428 - DNA, 15 bp, Homo sapiens
gaagaacgcaatgga

SEQ ID NO: 270429 - DNA, 15 bp, Homo sapiens
tgaagaacgcaatgg

SEQ ID NO: 270430 - DNA, 15 bp, Homo sapiens
ctgaagaacgcaatg

SEQ ID NO: 270431 - DNA, 15 bp, Homo sapiens
tctgaagaacgcaat

SEQ ID NO: 270432 - DNA, 15 bp, Homo sapiens
atctgaagaacgcaa

SEQ ID NO: 270433 - DNA, 15 bp, Homo sapiens
gatctgaagaacgca

SEQ ID NO: 270434 - DNA, 15 bp, Homo sapiens
agatctgaagaacgc

SEQ ID NO: 270435 - DNA, 15 bp, Homo sapiens
gagatctgaagaacg

SEQ ID NO: 270436 - DNA, 15 bp, Homo sapiens
tgagatctgaagaac

SEQ ID NO: 270437 - DNA, 15 bp, Homo sapiens
ctgagatctgaagaa

SEQ ID NO: 270438 - DNA, 15 bp, Homo sapiens
gctgagatctgaaga

SEQ ID NO: 270439 - DNA, 15 bp, Homo sapiens
tgctgagatctgaag

SEQ ID NO: 270440 - DNA, 15 bp, Homo sapiens
ctgctgagatctgaa

SEQ ID NO: 270441 - DNA, 15 bp, Homo sapiens
tctgctgagatctga

SEQ ID NO: 270442 - DNA, 15 bp, Homo sapiens
ctctgctgagatctg

SEQ ID NO: 270443 - DNA, 15 bp, Homo sapiens
tctctgctgagatct

SEQ ID NO: 270444 - DNA, 15 bp, Homo sapiens
atctctgctgagatc

SEQ ID NO: 270445 - DNA, 15 bp, Homo sapiens
tatctctgctgagat

SEQ ID NO: 270446 - DNA, 15 bp, Homo sapiens
atatctctgctgaga

SEQ ID NO: 270447 - DNA, 15 bp, Homo sapiens
gatatctctgctgag

SEQ ID NO: 270448 - DNA, 15 bp, Homo sapiens
ggatatctctgctga

SEQ ID NO: 270449 - DNA, 15 bp, Homo sapiens
gggatatctctgctg

SEQ ID NO: 270450 - DNA, 15 bp, Homo sapiens
ggggatatctctgct

SEQ ID NO: 270451 - DNA, 15 bp, Homo sapiens
aggggatatctctgc

SEQ ID NO: 270452 - DNA, 15 bp, Homo sapiens
aaggggatatctctg

SEQ ID NO: 270453 - DNA, 15 bp, Homo sapiens
taaggggatatctct

SEQ ID NO: 270454 - DNA, 15 bp, Homo sapiens
gtaaggggatatctc

SEQ ID NO: 270455 - DNA, 15 bp, Homo sapiens
ggtaaggggatatct

SEQ ID NO: 270456 - DNA, 15 bp, Homo sapiens
tggtaaggggatatc

SEQ ID NO: 270457 - DNA, 15 bp, Homo sapiens
ctggtaaggggatat

SEQ ID NO: 270458 - DNA, 15 bp, Homo sapiens
gctggtaaggggata

SEQ ID NO: 270459 - DNA, 15 bp, Homo sapiens
agctggtaaggggat

SEQ ID NO: 270460 - DNA, 15 bp, Homo sapiens
cagctggtaagggga

SEQ ID NO: 270461 - DNA, 15 bp, Homo sapiens
tcagctggtaagggg

SEQ ID NO: 270462 - DNA, 15 bp, Homo sapiens
atcagctggtaaggg

SEQ ID NO: 270463 - DNA, 15 bp, Homo sapiens
tatcagctggtaagg

SEQ ID NO: 270464 - DNA, 15 bp, Homo sapiens
atatcagctggtaag

SEQ ID NO: 270465 - DNA, 15 bp, Homo sapiens
tatatcagctggtaa

SEQ ID NO: 270466 - DNA, 15 bp, Homo sapiens
ctatatcagctggta

SEQ ID NO: 270467 - DNA, 15 bp, Homo sapiens
gctatatcagctggt

SEQ ID NO: 270468 - DNA, 15 bp, Homo sapiens
agctatatcagctgg

SEQ ID NO: 270469 - DNA, 15 bp, Homo sapiens
gagctatatcagctg

SEQ ID NO: 270470 - DNA, 15 bp, Homo sapiens
agagctatatcagct

SEQ ID NO: 270471 - DNA, 15 bp, Homo sapiens
gagagctatatcagc

SEQ ID NO: 270472 - DNA, 15 bp, Homo sapiens
ggagagctatatcag

SEQ ID NO: 270473 - DNA, 15 bp, Homo sapiens
tggagagctatatca

SEQ ID NO: 270474 - DNA, 15 bp, Homo sapiens
atggagagctatatc

SEQ ID NO: 270475 - DNA, 15 bp, Homo sapiens
gatggagagctatat

SEQ ID NO: 270476 - DNA, 15 bp, Homo sapiens
ggatggagagctata

SEQ ID NO: 270477 - DNA, 15 bp, Homo sapiens
gggatggagagctat

SEQ ID NO: 270478 - DNA, 15 bp, Homo sapiens
ggggatggagagcta

SEQ ID NO: 270479 - DNA, 15 bp, Homo sapiens
tggggatggagagct

SEQ ID NO: 270480 - DNA, 15 bp, Homo sapiens
ttggggatggagagc

SEQ ID NO: 270481 - DNA, 15 bp, Homo sapiens
tttggggatggagag

SEQ ID NO: 270482 - DNA, 15 bp, Homo sapiens
atttggggatggaga

SEQ ID NO: 270483 - DNA, 15 bp, Homo sapiens
gatttggggatggag

SEQ ID NO: 270484 - DNA, 15 bp, Homo sapiens
ggatttggggatgga

SEQ ID NO: 270485 - DNA, 15 bp, Homo sapiens
aggatttggggatgg

SEQ ID NO: 270486 - DNA, 15 bp, Homo sapiens
caggatttggggatg

SEQ ID NO: 270487 - DNA, 15 bp, Homo sapiens
gcaggatttggggat

SEQ ID NO: 270488 - DNA, 15 bp, Homo sapiens
ggcaggatttgggga

SEQ ID NO: 270489 - DNA, 15 bp, Homo sapiens
tggcaggatttgggg

SEQ ID NO: 270490 - DNA, 15 bp, Homo sapiens
gtggcaggatttggg

SEQ ID NO: 270491 - DNA, 15 bp, Homo sapiens
ggtggcaggatttgg

SEQ ID NO: 270492 - DNA, 15 bp, Homo sapiens
aggtggcaggatttg

SEQ ID NO: 270493 - DNA, 15 bp, Homo sapiens
gaggtggcaggattt

SEQ ID NO: 270494 - DNA, 15 bp, Homo sapiens
cgaggtggcaggatt

SEQ ID NO: 270495 - DNA, 15 bp, Homo sapiens
tcgaggtggcaggat

SEQ ID NO: 270496 - DNA, 15 bp, Homo sapiens
atcgaggtggcagga

SEQ ID NO: 270497 - DNA, 15 bp, Homo sapiens
catcgaggtggcagg

SEQ ID NO: 270498 - DNA, 15 bp, Homo sapiens
gcatcgaggtggcag

SEQ ID NO: 270499 - DNA, 15 bp, Homo sapiens
agcatcgaggtggca

SEQ ID NO: 270500 - DNA, 15 bp, Homo sapiens
tagcatcgaggtggc

SEQ ID NO: 270501 - DNA, 15 bp, Homo sapiens
ttagcatcgaggtgg

SEQ ID NO: 270502 - DNA, 15 bp, Homo sapiens
attagcatcgaggtg

SEQ ID NO: 270503 - DNA, 15 bp, Homo sapiens
aattagcatcgaggt

SEQ ID NO: 270504 - DNA, 15 bp, Homo sapiens
aaattagcatcgagg

SEQ ID NO: 270505 - DNA, 15 bp, Homo sapiens
gaaattagcatcgag

SEQ ID NO: 270506 - DNA, 15 bp, Homo sapiens
ggaaattagcatcga

SEQ ID NO: 270507 - DNA, 15 bp, Homo sapiens
aggaaattagcatcg

SEQ ID NO: 270508 - DNA, 15 bp, Homo sapiens
aaggaaattagcatc

SEQ ID NO: 270509 - DNA, 15 bp, Homo sapiens
gaaggaaattagcat

SEQ ID NO: 270510 - DNA, 15 bp, Homo sapiens
tgaaggaaattagca

SEQ ID NO: 270511 - DNA, 15 bp, Homo sapiens
atgaaggaaattagc

SEQ ID NO: 270512 - DNA, 15 bp, Homo sapiens
tatgaaggaaattag

SEQ ID NO: 270513 - DNA, 15 bp, Homo sapiens
ttatgaaggaaatta

SEQ ID NO: 270514 - DNA, 15 bp, Homo sapiens
attatgaaggaaatt

SEQ ID NO: 270515 - DNA, 15 bp, Homo sapiens
gattatgaaggaaat

SEQ ID NO: 270516 - DNA, 15 bp, Homo sapiens
ggattatgaaggaaa

SEQ ID NO: 270517 - DNA, 15 bp, Homo sapiens
aggattatgaaggaa

SEQ ID NO: 270518 - DNA, 15 bp, Homo sapiens
taggattatgaagga

SEQ ID NO: 270519 - DNA, 15 bp, Homo sapiens
ttaggattatgaagg

SEQ ID NO: 270520 - DNA, 15 bp, Homo sapiens
gttaggattatgaag

SEQ ID NO: 270521 - DNA, 15 bp, Homo sapiens
tgttaggattatgaa

SEQ ID NO: 270522 - DNA, 15 bp, Homo sapiens
atgttaggattatga

SEQ ID NO: 270523 - DNA, 15 bp, Homo sapiens
catgttaggattatg

SEQ ID NO: 270524 - DNA, 15 bp, Homo sapiens
tcatgttaggattat

SEQ ID NO: 270525 - DNA, 15 bp, Homo sapiens
atcatgttaggatta

SEQ ID NO: 270526 - DNA, 15 bp, Homo sapiens
gatcatgttaggatt

SEQ ID NO: 270527 - DNA, 15 bp, Homo sapiens
tgatcatgttaggat

SEQ ID NO: 270528 - DNA, 15 bp, Homo sapiens
ctgatcatgttagga

SEQ ID NO: 270529 - DNA, 15 bp, Homo sapiens
cctgatcatgttagg

SEQ ID NO: 270530 - DNA, 15 bp, Homo sapiens
tcctgatcatgttag

SEQ ID NO: 270531 - DNA, 15 bp, Homo sapiens
ttcctgatcatgtta

SEQ ID NO: 270532 - DNA, 15 bp, Homo sapiens
gttcctgatcatgtt

SEQ ID NO: 270533 - DNA, 15 bp, Homo sapiens
agttcctgatcatgt

SEQ ID NO: 270534 - DNA, 15 bp, Homo sapiens
cagttcctgatcatg

SEQ ID NO: 270535 - DNA, 15 bp, Homo sapiens
acagttcctgatcat

SEQ ID NO: 270536 - DNA, 15 bp, Homo sapiens
aacagttcctgatca

SEQ ID NO: 270537 - DNA, 15 bp, Homo sapiens
gaacagttcctgatc

SEQ ID NO: 270538 - DNA, 15 bp, Homo sapiens
agaacagttcctgat

SEQ ID NO: 270539 - DNA, 15 bp, Homo sapiens
aagaacagttcctga

SEQ ID NO: 270540 - DNA, 15 bp, Homo sapiens
taagaacagttcctg

SEQ ID NO: 270541 - DNA, 15 bp, Homo sapiens
ataagaacagttcct

SEQ ID NO: 270542 - DNA, 15 bp, Homo sapiens
aataagaacagttcc

SEQ ID NO: 270543 - DNA, 15 bp, Homo sapiens
gaataagaacagttc

SEQ ID NO: 270544 - DNA, 15 bp, Homo sapiens
tgaataagaacagtt

SEQ ID NO: 270545 - DNA, 15 bp, Homo sapiens
atgaataagaacagt

SEQ ID NO: 270546 - DNA, 15 bp, Homo sapiens
catgaataagaacag

SEQ ID NO: 270547 - DNA, 15 bp, Homo sapiens
acatgaataagaaca

SEQ ID NO: 270548 - DNA, 15 bp, Homo sapiens
tacatgaataagaac

SEQ ID NO: 270549 - DNA, 15 bp, Homo sapiens
atacatgaataagaa

SEQ ID NO: 270550 - DNA, 15 bp, Homo sapiens
aatacatgaataaga

SEQ ID NO: 270551 - DNA, 15 bp, Homo sapiens
aaatacatgaataag

SEQ ID NO: 270552 - DNA, 15 bp, Homo sapiens
caaatacatgaataa

SEQ ID NO: 270553 - DNA, 15 bp, Homo sapiens
tcaaatacatgaata

SEQ ID NO: 270554 - DNA, 15 bp, Homo sapiens
ttcaaatacatgaat

SEQ ID NO: 270555 - DNA, 15 bp, Homo sapiens
attcaaatacatgaa

SEQ ID NO: 270556 - DNA, 15 bp, Homo sapiens
cattcaaatacatga

SEQ ID NO: 270557 - DNA, 15 bp, Homo sapiens
gcattcaaatacatg

SEQ ID NO: 270558 - DNA, 15 bp, Homo sapiens
agcattcaaatacat

SEQ ID NO: 270559 - DNA, 15 bp, Homo sapiens
aagcattcaaataca

SEQ ID NO: 270560 - DNA, 15 bp, Homo sapiens
taagcattcaaatac

SEQ ID NO: 270561 - DNA, 15 bp, Homo sapiens
gtaagcattcaaata

SEQ ID NO: 270562 - DNA, 15 bp, Homo sapiens
agtaagcattcaaat

SEQ ID NO: 270563 - DNA, 15 bp, Homo sapiens
aagtaagcattcaaa

SEQ ID NO: 270564 - DNA, 15 bp, Homo sapiens
caagtaagcattcaa

SEQ ID NO: 270565 - DNA, 15 bp, Homo sapiens
gcaagtaagcattca

SEQ ID NO: 270566 - DNA, 15 bp, Homo sapiens
agcaagtaagcattc

SEQ ID NO: 270567 - DNA, 15 bp, Homo sapiens
aagcaagtaagcatt

SEQ ID NO: 270568 - DNA, 15 bp, Homo sapiens
taagcaagtaagcat

SEQ ID NO: 270569 - DNA, 15 bp, Homo sapiens
ataagcaagtaagca

SEQ ID NO: 270570 - DNA, 15 bp, Homo sapiens
aataagcaagtaagc

SEQ ID NO: 270571 - DNA, 15 bp, Homo sapiens
caataagcaagtaag

SEQ ID NO: 270572 - DNA, 15 bp, Homo sapiens
acaataagcaagtaa

SEQ ID NO: 270573 - DNA, 15 bp, Homo sapiens
tacaataagcaagta

SEQ ID NO: 270574 - DNA, 15 bp, Homo sapiens
atacaataagcaagt

SEQ ID NO: 270575 - DNA, 15 bp, Homo sapiens
aatacaataagcaag

SEQ ID NO: 270576 - DNA, 15 bp, Homo sapiens
gaatacaataagcaa

SEQ ID NO: 270577 - DNA, 15 bp, Homo sapiens
ggaatacaataagca

SEQ ID NO: 270578 - DNA, 15 bp, Homo sapiens
aggaatacaataagc

SEQ ID NO: 270579 - DNA, 15 bp, Homo sapiens
caggaatacaataag

SEQ ID NO: 270580 - DNA, 15 bp, Homo sapiens
gcaggaatacaataa

SEQ ID NO: 270581 - DNA, 15 bp, Homo sapiens
ggcaggaatacaata

SEQ ID NO: 270582 - DNA, 15 bp, Homo sapiens
gggcaggaatacaat

SEQ ID NO: 270583 - DNA, 15 bp, Homo sapiens
tgggcaggaatacaa

SEQ ID NO: 270584 - DNA, 15 bp, Homo sapiens
gtgggcaggaataca

SEQ ID NO: 270585 - DNA, 15 bp, Homo sapiens
agtgggcaggaatac

SEQ ID NO: 270586 - DNA, 15 bp, Homo sapiens
cagtgggcaggaata

SEQ ID NO: 270587 - DNA, 15 bp, Homo sapiens
ccagtgggcaggaat

SEQ ID NO: 270588 - DNA, 15 bp, Homo sapiens
tccagtgggcaggaa

SEQ ID NO: 270589 - DNA, 15 bp, Homo sapiens
ttccagtgggcagga

SEQ ID NO: 270590 - DNA, 15 bp, Homo sapiens
attccagtgggcagg

SEQ ID NO: 270591 - DNA, 15 bp, Homo sapiens
cattccagtgggcag

SEQ ID NO: 270592 - DNA, 15 bp, Homo sapiens
acattccagtgggca

SEQ ID NO: 270593 - DNA, 15 bp, Homo sapiens
tacattccagtgggc

SEQ ID NO: 270594 - DNA, 15 bp, Homo sapiens
ttacattccagtggg

SEQ ID NO: 270595 - DNA, 15 bp, Homo sapiens
cttacattccagtgg

SEQ ID NO: 270596 - DNA, 15 bp, Homo sapiens
acttacattccagtg

SEQ ID NO: 270597 - DNA, 15 bp, Homo sapiens
aacttacattccagt

SEQ ID NO: 270598 - DNA, 15 bp, Homo sapiens
gaacttacattccag

SEQ ID NO: 270599 - DNA, 15 bp, Homo sapiens
agaacttacattcca

SEQ ID NO: 270600 - DNA, 15 bp, Homo sapiens
tagaacttacattcc

SEQ ID NO: 270601 - DNA, 15 bp, Homo sapiens
ttagaacttacattc

SEQ ID NO: 270602 - DNA, 15 bp, Homo sapiens
cttagaacttacatt

SEQ ID NO: 270603 - DNA, 15 bp, Homo sapiens
tcttagaacttacat

SEQ ID NO: 270604 - DNA, 15 bp, Homo sapiens
ctcttagaacttaca

SEQ ID NO: 270605 - DNA, 15 bp, Homo sapiens
cctcttagaacttac

SEQ ID NO: 270606 - DNA, 15 bp, Homo sapiens
ccctcttagaactta

SEQ ID NO: 270607 - DNA, 15 bp, Homo sapiens
gccctcttagaactt

SEQ ID NO: 270608 - DNA, 15 bp, Homo sapiens
tgccctcttagaact

SEQ ID NO: 270609 - DNA, 15 bp, Homo sapiens
ctgccctcttagaac

SEQ ID NO: 270610 - DNA, 15 bp, Homo sapiens
cctgccctcttagaa

SEQ ID NO: 270611 - DNA, 15 bp, Homo sapiens
ccctgccctcttaga

SEQ ID NO: 270612 - DNA, 15 bp, Homo sapiens
tccctgccctcttag

SEQ ID NO: 270613 - DNA, 15 bp, Homo sapiens
atccctgccctctta

SEQ ID NO: 270614 - DNA, 15 bp, Homo sapiens
gatccctgccctctt

SEQ ID NO: 270615 - DNA, 15 bp, Homo sapiens
agatccctgccctct

SEQ ID NO: 270616 - DNA, 15 bp, Homo sapiens
cagatccctgccctc

SEQ ID NO: 270617 - DNA, 15 bp, Homo sapiens
ccagatccctgccct

SEQ ID NO: 270618 - DNA, 15 bp, Homo sapiens
accagatccctgccc

SEQ ID NO: 270619 - DNA, 15 bp, Homo sapiens
aaccagatccctgcc

SEQ ID NO: 270620 - DNA, 15 bp, Homo sapiens
taaccagatccctgc

SEQ ID NO: 270621 - DNA, 15 bp, Homo sapiens
ctaaccagatccctg

SEQ ID NO: 270622 - DNA, 15 bp, Homo sapiens
actaaccagatccct

SEQ ID NO: 270623 - DNA, 15 bp, Homo sapiens
gactaaccagatccc

SEQ ID NO: 270624 - DNA, 15 bp, Homo sapiens
tgactaaccagatcc

SEQ ID NO: 270625 - DNA, 15 bp, Homo sapiens
ctgactaaccagatc

SEQ ID NO: 270626 - DNA, 15 bp, Homo sapiens
tctgactaaccagat

SEQ ID NO: 270627 - DNA, 15 bp, Homo sapiens
atctgactaaccaga

SEQ ID NO: 270628 - DNA, 15 bp, Homo sapiens
aatctgactaaccag

SEQ ID NO: 270629 - DNA, 15 bp, Homo sapiens
gaatctgactaacca

SEQ ID NO: 270630 - DNA, 15 bp, Homo sapiens
tgaatctgactaacc

SEQ ID NO: 270631 - DNA, 15 bp, Homo sapiens
ttgaatctgactaac

SEQ ID NO: 270632 - DNA, 15 bp, Homo sapiens
attgaatctgactaa

SEQ ID NO: 270633 - DNA, 15 bp, Homo sapiens
cattgaatctgacta

SEQ ID NO: 270634 - DNA, 15 bp, Homo sapiens
gcattgaatctgact

SEQ ID NO: 270635 - DNA, 15 bp, Homo sapiens
agcattgaatctgac

SEQ ID NO: 270636 - DNA, 15 bp, Homo sapiens
aagcattgaatctga

SEQ ID NO: 270637 - DNA, 15 bp, Homo sapiens
caagcattgaatctg

SEQ ID NO: 270638 - DNA, 15 bp, Homo sapiens
acaagcattgaatct

SEQ ID NO: 270639 - DNA, 15 bp, Homo sapiens
tacaagcattgaatc

SEQ ID NO: 270640 - DNA, 15 bp, Homo sapiens
ctacaagcattgaat

SEQ ID NO: 270641 - DNA, 15 bp, Homo sapiens
tctacaagcattgaa

SEQ ID NO: 270642 - DNA, 15 bp, Homo sapiens
ctctacaagcattga

SEQ ID NO: 270643 - DNA, 15 bp, Homo sapiens
cctctacaagcattg

SEQ ID NO: 270644 - DNA, 15 bp, Homo sapiens
acctctacaagcatt

SEQ ID NO: 270645 - DNA, 15 bp, Homo sapiens
gacctctacaagcat

SEQ ID NO: 270646 - DNA, 15 bp, Homo sapiens
tgacctctacaagca

SEQ ID NO: 270647 - DNA, 15 bp, Homo sapiens
ctgacctctacaagc

SEQ ID NO: 270648 - DNA, 15 bp, Homo sapiens
tctgacctctacaag

SEQ ID NO: 270649 - DNA, 15 bp, Homo sapiens
ttctgacctctacaa

SEQ ID NO: 270650 - DNA, 15 bp, Homo sapiens
gttctgacctctaca

SEQ ID NO: 270651 - DNA, 15 bp, Homo sapiens
ggttctgacctctac

SEQ ID NO: 270652 - DNA, 15 bp, Homo sapiens
gggttctgacctcta

SEQ ID NO: 270653 - DNA, 15 bp, Homo sapiens
tgggttctgacctct

SEQ ID NO: 270654 - DNA, 15 bp, Homo sapiens
ctgggttctgacctc

SEQ ID NO: 270655 - DNA, 15 bp, Homo sapiens
gctgggttctgacct

SEQ ID NO: 270656 - DNA, 15 bp, Homo sapiens
ggctgggttctgacc

SEQ ID NO: 270657 - DNA, 15 bp, Homo sapiens
tggctgggttctgac

SEQ ID NO: 270658 - DNA, 15 bp, Homo sapiens
ctggctgggttctga

SEQ ID NO: 270659 - DNA, 15 bp, Homo sapiens
cctggctgggttctg

SEQ ID NO: 270660 - DNA, 15 bp, Homo sapiens
tcctggctgggttct

SEQ ID NO: 270661 - DNA, 15 bp, Homo sapiens
ttcctggctgggttc

SEQ ID NO: 270662 - DNA, 15 bp, Homo sapiens
tttcctggctgggtt

SEQ ID NO: 270663 - DNA, 15 bp, Homo sapiens
ttttcctggctgggt

SEQ ID NO: 270664 - DNA, 15 bp, Homo sapiens
gttttcctggctggg

SEQ ID NO: 270665 - DNA, 15 bp, Homo sapiens
tgttttcctggctgg

SEQ ID NO: 270666 - DNA, 15 bp, Homo sapiens
ttgttttcctggctg

SEQ ID NO: 270667 - DNA, 15 bp, Homo sapiens
tttgttttcctggct

SEQ ID NO: 270668 - DNA, 15 bp, Homo sapiens
ctttgttttcctggc

SEQ ID NO: 270669 - DNA, 15 bp, Homo sapiens
actttgttttcctgg

SEQ ID NO: 270670 - DNA, 15 bp, Homo sapiens
cactttgttttcctg

SEQ ID NO: 270671 - DNA, 15 bp, Homo sapiens
ccactttgttttcct

SEQ ID NO: 270672 - DNA, 15 bp, Homo sapiens
gccactttgttttcc

SEQ ID NO: 270673 - DNA, 15 bp, Homo sapiens
agccactttgttttc

SEQ ID NO: 270674 - DNA, 15 bp, Homo sapiens
gagccactttgtttt

SEQ ID NO: 270675 - DNA, 15 bp, Homo sapiens
tgagccactttgttt

SEQ ID NO: 270676 - DNA, 15 bp, Homo sapiens
ttgagccactttgtt

SEQ ID NO: 270677 - DNA, 15 bp, Homo sapiens
cttgagccactttgt

SEQ ID NO: 270678 - DNA, 15 bp, Homo sapiens
tcttgagccactttg

SEQ ID NO: 270679 - DNA, 15 bp, Homo sapiens
ctcttgagccacttt

SEQ ID NO: 270680 - DNA, 15 bp, Homo sapiens
tctcttgagccactt

SEQ ID NO: 270681 - DNA, 15 bp, Homo sapiens
ctctcttgagccact

SEQ ID NO: 270682 - DNA, 15 bp, Homo sapiens
actctcttgagccac

SEQ ID NO: 270683 - DNA, 15 bp, Homo sapiens
tactctcttgagcca

SEQ ID NO: 270684 - DNA, 15 bp, Homo sapiens
atactctcttgagcc

SEQ ID NO: 270685 - DNA, 15 bp, Homo sapiens
tatactctcttgagc

SEQ ID NO: 270686 - DNA, 15 bp, Homo sapiens
atatactctcttgag

SEQ ID NO: 270687 - DNA, 15 bp, Homo sapiens
aatatactctcttga

SEQ ID NO: 270688 - DNA, 15 bp, Homo sapiens
aaatatactctcttg

SEQ ID NO: 270689 - DNA, 15 bp, Homo sapiens
taaatatactctctt

SEQ ID NO: 270690 - DNA, 15 bp, Homo sapiens
ttaaatatactctct

SEQ ID NO: 270691 - DNA, 15 bp, Homo sapiens
attaaatatactctc

SEQ ID NO: 270692 - DNA, 15 bp, Homo sapiens
cattaaatatactct

SEQ ID NO: 270693 - DNA, 15 bp, Homo sapiens
acattaaatatactc

SEQ ID NO: 270694 - DNA, 15 bp, Homo sapiens
tacattaaatatact

SEQ ID NO: 270695 - DNA, 15 bp, Homo sapiens
ctacattaaatatac

SEQ ID NO: 270696 - DNA, 15 bp, Homo sapiens
cctacattaaatata

SEQ ID NO: 270697 - DNA, 15 bp, Homo sapiens
ccctacattaaatat

SEQ ID NO: 270698 - DNA, 15 bp, Homo sapiens
tccctacattaaata

SEQ ID NO: 270699 - DNA, 15 bp, Homo sapiens
ttccctacattaaat

SEQ ID NO: 270700 - DNA, 15 bp, Homo sapiens
gttccctacattaaa

SEQ ID NO: 270701 - DNA, 15 bp, Homo sapiens
agttccctacattaa

SEQ ID NO: 270702 - DNA, 15 bp, Homo sapiens
tagttccctacatta

SEQ ID NO: 270703 - DNA, 15 bp, Homo sapiens
atagttccctacatt

SEQ ID NO: 270704 - DNA, 15 bp, Homo sapiens
aatagttccctacat

SEQ ID NO: 270705 - DNA, 15 bp, Homo sapiens
taatagttccctaca

SEQ ID NO: 270706 - DNA, 15 bp, Homo sapiens
gtaatagttccctac

SEQ ID NO: 270707 - DNA, 15 bp, Homo sapiens
ggtaatagttcccta

SEQ ID NO: 270708 - DNA, 15 bp, Homo sapiens
gggtaatagttccct

SEQ ID NO: 270709 - DNA, 15 bp, Homo sapiens
agggtaatagttccc

SEQ ID NO: 270710 - DNA, 15 bp, Homo sapiens
tagggtaatagttcc

SEQ ID NO: 270711 - DNA, 15 bp, Homo sapiens
ctagggtaatagttc

SEQ ID NO: 270712 - DNA, 15 bp, Homo sapiens
gctagggtaatagtt

SEQ ID NO: 270713 - DNA, 15 bp, Homo sapiens
tgctagggtaatagt

SEQ ID NO: 270714 - DNA, 15 bp, Homo sapiens
atgctagggtaatag

SEQ ID NO: 270715 - DNA, 15 bp, Homo sapiens
gatgctagggtaata

SEQ ID NO: 270716 - DNA, 15 bp, Homo sapiens
tgatgctagggtaat

SEQ ID NO: 270717 - DNA, 15 bp, Homo sapiens
ctgatgctagggtaa

SEQ ID NO: 270718 - DNA, 15 bp, Homo sapiens
tctgatgctagggta

SEQ ID NO: 270719 - DNA, 15 bp, Homo sapiens
ttctgatgctagggt

SEQ ID NO: 270720 - DNA, 15 bp, Homo sapiens
cttctgatgctaggg

SEQ ID NO: 270721 - DNA, 15 bp, Homo sapiens
tcttctgatgctagg

SEQ ID NO: 270722 - DNA, 15 bp, Homo sapiens
ctcttctgatgctag

SEQ ID NO: 270723 - DNA, 15 bp, Homo sapiens
actcttctgatgcta

SEQ ID NO: 270724 - DNA, 15 bp, Homo sapiens
cactcttctgatgct

SEQ ID NO: 270725 - DNA, 15 bp, Homo sapiens
ccactcttctgatgc

SEQ ID NO: 270726 - DNA, 15 bp, Homo sapiens
tccactcttctgatg

SEQ ID NO: 270727 - DNA, 15 bp, Homo sapiens
ttccactcttctgat

SEQ ID NO: 270728 - DNA, 15 bp, Homo sapiens
attccactcttctga

SEQ ID NO: 270729 - DNA, 15 bp, Homo sapiens
cattccactcttctg

SEQ ID NO: 270730 - DNA, 15 bp, Homo sapiens
ccattccactcttct

SEQ ID NO: 270731 - DNA, 15 bp, Homo sapiens
gccattccactcttc

SEQ ID NO: 270732 - DNA, 15 bp, Homo sapiens
agccattccactctt

SEQ ID NO: 270733 - DNA, 15 bp, Homo sapiens
tagccattccactct

SEQ ID NO: 270734 - DNA, 15 bp, Homo sapiens
ttagccattccactc

SEQ ID NO: 270735 - DNA, 15 bp, Homo sapiens
cttagccattccact

SEQ ID NO: 270736 - DNA, 15 bp, Homo sapiens
acttagccattccac

SEQ ID NO: 270737 - DNA, 15 bp, Homo sapiens
tacttagccattcca

SEQ ID NO: 270738 - DNA, 15 bp, Homo sapiens
ctacttagccattcc

SEQ ID NO: 270739 - DNA, 15 bp, Homo sapiens
cctacttagccattc

SEQ ID NO: 270740 - DNA, 15 bp, Homo sapiens
acctacttagccatt

SEQ ID NO: 270741 - DNA, 15 bp, Homo sapiens
gacctacttagccat

SEQ ID NO: 270742 - DNA, 15 bp, Homo sapiens
tgacctacttagcca

SEQ ID NO: 270743 - DNA, 15 bp, Homo sapiens
gtgacctacttagcc

SEQ ID NO: 270744 - DNA, 15 bp, Homo sapiens
agtgacctacttagc

SEQ ID NO: 270745 - DNA, 15 bp, Homo sapiens
cagtgacctacttag

SEQ ID NO: 270746 - DNA, 15 bp, Homo sapiens
acagtgacctactta

SEQ ID NO: 270747 - DNA, 15 bp, Homo sapiens
tacagtgacctactt

SEQ ID NO: 270748 - DNA, 15 bp, Homo sapiens
ctacagtgacctact

SEQ ID NO: 270749 - DNA, 15 bp, Homo sapiens
cctacagtgacctac

SEQ ID NO: 270750 - DNA, 15 bp, Homo sapiens
ccctacagtgaccta

SEQ ID NO: 270751 - DNA, 15 bp, Homo sapiens
gccctacagtgacct

SEQ ID NO: 270752 - DNA, 15 bp, Homo sapiens
tgccctacagtgacc

SEQ ID NO: 270753 - DNA, 15 bp, Homo sapiens
ttgccctacagtgac

SEQ ID NO: 270754 - DNA, 15 bp, Homo sapiens
gttgccctacagtga

SEQ ID NO: 270755 - DNA, 15 bp, Homo sapiens
ggttgccctacagtg

SEQ ID NO: 270756 - DNA, 15 bp, Homo sapiens
gggttgccctacagt

SEQ ID NO: 270757 - DNA, 15 bp, Homo sapiens
cgggttgccctacag

SEQ ID NO: 270758 - DNA, 15 bp, Homo sapiens
ccgggttgccctaca

SEQ ID NO: 270759 - DNA, 15 bp, Homo sapiens
tccgggttgccctac

SEQ ID NO: 270760 - DNA, 15 bp, Homo sapiens
ctccgggttgcccta

SEQ ID NO: 270761 - DNA, 15 bp, Homo sapiens
cctccgggttgccct

SEQ ID NO: 270762 - DNA, 15 bp, Homo sapiens
acctccgggttgccc

SEQ ID NO: 270763 - DNA, 15 bp, Homo sapiens
aacctccgggttgcc

SEQ ID NO: 270764 - DNA, 15 bp, Homo sapiens
caacctccgggttgc

SEQ ID NO: 270765 - DNA, 15 bp, Homo sapiens
tcaacctccgggttg

SEQ ID NO: 270766 - DNA, 15 bp, Homo sapiens
gtcaacctccgggtt

SEQ ID NO: 270767 - DNA, 15 bp, Homo sapiens
tgtcaacctccgggt

SEQ ID NO: 270768 - DNA, 15 bp, Homo sapiens
ttgtcaacctccggg

SEQ ID NO: 270769 - DNA, 15 bp, Homo sapiens
cttgtcaacctccgg

SEQ ID NO: 270770 - DNA, 15 bp, Homo sapiens
tcttgtcaacctccg

SEQ ID NO: 270771 - DNA, 15 bp, Homo sapiens
ctcttgtcaacctcc

SEQ ID NO: 270772 - DNA, 15 bp, Homo sapiens
tctcttgtcaacctc

SEQ ID NO: 270773 - DNA, 15 bp, Homo sapiens
ttctcttgtcaacct

SEQ ID NO: 270774 - DNA, 15 bp, Homo sapiens
tttctcttgtcaacc

SEQ ID NO: 270775 - DNA, 15 bp, Homo sapiens
ctttctcttgtcaac

SEQ ID NO: 270776 - DNA, 15 bp, Homo sapiens
cctttctcttgtcaa

SEQ ID NO: 270777 - DNA, 15 bp, Homo sapiens
tcctttctcttgtca

SEQ ID NO: 270778 - DNA, 15 bp, Homo sapiens
ctcctttctcttgtc

SEQ ID NO: 270779 - DNA, 15 bp, Homo sapiens
gctcctttctcttgt

SEQ ID NO: 270780 - DNA, 15 bp, Homo sapiens
agctcctttctcttg

SEQ ID NO: 270781 - DNA, 15 bp, Homo sapiens
cagctcctttctctt

SEQ ID NO: 270782 - DNA, 15 bp, Homo sapiens
ccagctcctttctct

SEQ ID NO: 270783 - DNA, 15 bp, Homo sapiens
cccagctcctttctc

SEQ ID NO: 270784 - DNA, 15 bp, Homo sapiens
ccccagctcctttct

SEQ ID NO: 270785 - DNA, 15 bp, Homo sapiens
gccccagctcctttc

SEQ ID NO: 270786 - DNA, 15 bp, Homo sapiens
ggccccagctccttt

SEQ ID NO: 270787 - DNA, 15 bp, Homo sapiens
aggccccagctcctt

SEQ ID NO: 270788 - DNA, 15 bp, Homo sapiens
caggccccagctcct

SEQ ID NO: 270789 - DNA, 15 bp, Homo sapiens
ccaggccccagctcc

SEQ ID NO: 270790 - DNA, 15 bp, Homo sapiens
tccaggccccagctc

SEQ ID NO: 270791 - DNA, 15 bp, Homo sapiens
ttccaggccccagct

SEQ ID NO: 270792 - DNA, 15 bp, Homo sapiens
cttccaggccccagc

SEQ ID NO: 270793 - DNA, 15 bp, Homo sapiens
ccttccaggccccag

SEQ ID NO: 270794 - DNA, 15 bp, Homo sapiens
tccttccaggcccca

SEQ ID NO: 270795 - DNA, 15 bp, Homo sapiens
gtccttccaggcccc

SEQ ID NO: 270796 - DNA, 15 bp, Homo sapiens
tgtccttccaggccc

SEQ ID NO: 270797 - DNA, 15 bp, Homo sapiens
ttgtccttccaggcc

SEQ ID NO: 270798 - DNA, 15 bp, Homo sapiens
tttgtccttccaggc

SEQ ID NO: 270799 - DNA, 15 bp, Homo sapiens
ttttgtccttccagg

SEQ ID NO: 270800 - DNA, 15 bp, Homo sapiens
tttttgtccttccag

SEQ ID NO: 270801 - DNA, 15 bp, Homo sapiens
ctttttgtccttcca

SEQ ID NO: 270802 - DNA, 15 bp, Homo sapiens
tctttttgtccttcc

SEQ ID NO: 270803 - DNA, 15 bp, Homo sapiens
ctctttttgtccttc

SEQ ID NO: 270804 - DNA, 15 bp, Homo sapiens
cctctttttgtcctt

SEQ ID NO: 270805 - DNA, 15 bp, Homo sapiens
tcctctttttgtcct

SEQ ID NO: 270806 - DNA, 15 bp, Homo sapiens
ctcctctttttgtcc

SEQ ID NO: 270807 - DNA, 15 bp, Homo sapiens
cctcctctttttgtc

SEQ ID NO: 270808 - DNA, 15 bp, Homo sapiens
acctcctctttttgt

SEQ ID NO: 270809 - DNA, 15 bp, Homo sapiens
cacctcctctttttg

SEQ ID NO: 270810 - DNA, 15 bp, Homo sapiens
ccacctcctcttttt

SEQ ID NO: 270811 - DNA, 15 bp, Homo sapiens
accacctcctctttt

SEQ ID NO: 270812 - DNA, 15 bp, Homo sapiens
taccacctcctcttt

SEQ ID NO: 270813 - DNA, 15 bp, Homo sapiens
ataccacctcctctt

SEQ ID NO: 270814 - DNA, 15 bp, Homo sapiens
gataccacctcctct

SEQ ID NO: 270815 - DNA, 15 bp, Homo sapiens
tgataccacctcctc

SEQ ID NO: 270816 - DNA, 15 bp, Homo sapiens
atgataccacctcct

SEQ ID NO: 270817 - DNA, 15 bp, Homo sapiens
catgataccacctcc

SEQ ID NO: 270818 - DNA, 15 bp, Homo sapiens
ccatgataccacctc

SEQ ID NO: 270819 - DNA, 15 bp, Homo sapiens
tccatgataccacct

SEQ ID NO: 270820 - DNA, 15 bp, Homo sapiens
ctccatgataccacc

SEQ ID NO: 270821 - DNA, 15 bp, Homo sapiens
cctccatgataccac

SEQ ID NO: 270822 - DNA, 15 bp, Homo sapiens
tcctccatgatacca

SEQ ID NO: 270823 - DNA, 15 bp, Homo sapiens
ctcctccatgatacc

SEQ ID NO: 270824 - DNA, 15 bp, Homo sapiens
tctcctccatgatac

SEQ ID NO: 270825 - DNA, 15 bp, Homo sapiens
gtctcctccatgata

SEQ ID NO: 270826 - DNA, 15 bp, Homo sapiens
ggtctcctccatgat

SEQ ID NO: 270827 - DNA, 15 bp, Homo sapiens
aggtctcctccatga

SEQ ID NO: 270828 - DNA, 15 bp, Homo sapiens
taggtctcctccatg

SEQ ID NO: 270829 - DNA, 15 bp, Homo sapiens
ttaggtctcctccat

SEQ ID NO: 270830 - DNA, 15 bp, Homo sapiens
attaggtctcctcca

SEQ ID NO: 270831 - DNA, 15 bp, Homo sapiens
gattaggtctcctcc

SEQ ID NO: 270832 - DNA, 15 bp, Homo sapiens
tgattaggtctcctc

SEQ ID NO: 270833 - DNA, 15 bp, Homo sapiens
atgattaggtctcct

SEQ ID NO: 270834 - DNA, 15 bp, Homo sapiens
catgattaggtctcc

SEQ ID NO: 270835 - DNA, 15 bp, Homo sapiens
ccatgattaggtctc

SEQ ID NO: 270836 - DNA, 15 bp, Homo sapiens
gccatgattaggtct

SEQ ID NO: 270837 - DNA, 15 bp, Homo sapiens
agccatgattaggtc

SEQ ID NO: 270838 - DNA, 15 bp, Homo sapiens
cagccatgattaggt

SEQ ID NO: 270839 - DNA, 15 bp, Homo sapiens
tcagccatgattagg

SEQ ID NO: 270840 - DNA, 15 bp, Homo sapiens
ttcagccatgattag

SEQ ID NO: 270841 - DNA, 15 bp, Homo sapiens
cttcagccatgatta

SEQ ID NO: 270842 - DNA, 15 bp, Homo sapiens
tcttcagccatgatt

SEQ ID NO: 270843 - DNA, 15 bp, Homo sapiens
ttcttcagccatgat

SEQ ID NO: 270844 - DNA, 15 bp, Homo sapiens
gttcttcagccatga

SEQ ID NO: 270845 - DNA, 15 bp, Homo sapiens
tgttcttcagccatg

SEQ ID NO: 270846 - DNA, 15 bp, Homo sapiens
ctgttcttcagccat

SEQ ID NO: 270847 - DNA, 15 bp, Homo sapiens
tctgttcttcagcca

SEQ ID NO: 270848 - DNA, 15 bp, Homo sapiens
gtctgttcttcagcc

SEQ ID NO: 270849 - DNA, 15 bp, Homo sapiens
tgtctgttcttcagc

SEQ ID NO: 270850 - DNA, 15 bp, Homo sapiens
ctgtctgttcttcag

SEQ ID NO: 270851 - DNA, 15 bp, Homo sapiens
cctgtctgttcttca

SEQ ID NO: 270852 - DNA, 15 bp, Homo sapiens
tcctgtctgttcttc

SEQ ID NO: 270853 - DNA, 15 bp, Homo sapiens
ctcctgtctgttctt

SEQ ID NO: 270854 - DNA, 15 bp, Homo sapiens
tctcctgtctgttct

SEQ ID NO: 270855 - DNA, 15 bp, Homo sapiens
ctctcctgtctgttc

SEQ ID NO: 270856 - DNA, 15 bp, Homo sapiens
cctctcctgtctgtt

SEQ ID NO: 270857 - DNA, 15 bp, Homo sapiens
ccctctcctgtctgt

SEQ ID NO: 270858 - DNA, 15 bp, Homo sapiens
tccctctcctgtctg

SEQ ID NO: 270859 - DNA, 15 bp, Homo sapiens
gtccctctcctgtct

SEQ ID NO: 270860 - DNA, 15 bp, Homo sapiens
tgtccctctcctgtc

SEQ ID NO: 270861 - DNA, 15 bp, Homo sapiens
ctgtccctctcctgt

SEQ ID NO: 270862 - DNA, 15 bp, Homo sapiens
cctgtccctctcctg

SEQ ID NO: 270863 - DNA, 15 bp, Homo sapiens
acctgtccctctcct

SEQ ID NO: 270864 - DNA, 15 bp, Homo sapiens
aacctgtccctctcc

SEQ ID NO: 270865 - DNA, 15 bp, Homo sapiens
gaacctgtccctctc

SEQ ID NO: 270866 - DNA, 15 bp, Homo sapiens
ggaacctgtccctct

SEQ ID NO: 270867 - DNA, 15 bp, Homo sapiens
tggaacctgtccctc

SEQ ID NO: 270868 - DNA, 15 bp, Homo sapiens
ttggaacctgtccct

SEQ ID NO: 270869 - DNA, 15 bp, Homo sapiens
gttggaacctgtccc

SEQ ID NO: 270870 - DNA, 15 bp, Homo sapiens
agttggaacctgtcc

SEQ ID NO: 270871 - DNA, 15 bp, Homo sapiens
aagttggaacctgtc

SEQ ID NO: 270872 - DNA, 15 bp, Homo sapiens
gaagttggaacctgt

SEQ ID NO: 270873 - DNA, 15 bp, Homo sapiens
agaagttggaacctg

SEQ ID NO: 270874 - DNA, 15 bp, Homo sapiens
gagaagttggaacct

SEQ ID NO: 270875 - DNA, 15 bp, Homo sapiens
ggagaagttggaacc

SEQ ID NO: 270876 - DNA, 15 bp, Homo sapiens
gggagaagttggaac

SEQ ID NO: 270877 - DNA, 15 bp, Homo sapiens
agggagaagttggaa

SEQ ID NO: 270878 - DNA, 15 bp, Homo sapiens
aagggagaagttgga

SEQ ID NO: 270879 - DNA, 15 bp, Homo sapiens
gaagggagaagttgg

SEQ ID NO: 270880 - DNA, 15 bp, Homo sapiens
ggaagggagaagttg

SEQ ID NO: 270881 - DNA, 15 bp, Homo sapiens
aggaagggagaagtt

SEQ ID NO: 270882 - DNA, 15 bp, Homo sapiens
aaggaagggagaagt

SEQ ID NO: 270883 - DNA, 15 bp, Homo sapiens
gaaggaagggagaag

SEQ ID NO: 270884 - DNA, 15 bp, Homo sapiens
ggaaggaagggagaa

SEQ ID NO: 270885 - DNA, 15 bp, Homo sapiens
cggaaggaagggaga

SEQ ID NO: 270886 - DNA, 15 bp, Homo sapiens
gcggaaggaagggag

SEQ ID NO: 270887 - DNA, 15 bp, Homo sapiens
ggcggaaggaaggga

SEQ ID NO: 270888 - DNA, 15 bp, Homo sapiens
gggcggaaggaaggg

SEQ ID NO: 270889 - DNA, 15 bp, Homo sapiens
agggcggaaggaagg

SEQ ID NO: 270890 - DNA, 15 bp, Homo sapiens
gagggcggaaggaag

SEQ ID NO: 270891 - DNA, 15 bp, Homo sapiens
agagggcggaaggaa

SEQ ID NO: 270892 - DNA, 15 bp, Homo sapiens
cagagggcggaagga

SEQ ID NO: 270893 - DNA, 15 bp, Homo sapiens
ccagagggcggaagg

SEQ ID NO: 270894 - DNA, 15 bp, Homo sapiens
cccagagggcggaag

SEQ ID NO: 270895 - DNA, 15 bp, Homo sapiens
gcccagagggcggaa

SEQ ID NO: 270896 - DNA, 15 bp, Homo sapiens
agcccagagggcgga

SEQ ID NO: 270897 - DNA, 15 bp, Homo sapiens
aagcccagagggcgg

SEQ ID NO: 270898 - DNA, 15 bp, Homo sapiens
aaagcccagagggcg

SEQ ID NO: 270899 - DNA, 15 bp, Homo sapiens
caaagcccagagggc

SEQ ID NO: 270900 - DNA, 15 bp, Homo sapiens
gcaaagcccagaggg

SEQ ID NO: 270901 - DNA, 15 bp, Homo sapiens
ggcaaagcccagagg

SEQ ID NO: 270902 - DNA, 15 bp, Homo sapiens
gggcaaagcccagag

SEQ ID NO: 270903 - DNA, 15 bp, Homo sapiens
tgggcaaagcccaga

SEQ ID NO: 270904 - DNA, 15 bp, Homo sapiens
ctgggcaaagcccag

SEQ ID NO: 270905 - DNA, 15 bp, Homo sapiens
actgggcaaagccca

SEQ ID NO: 270906 - DNA, 15 bp, Homo sapiens
cactgggcaaagccc

SEQ ID NO: 270907 - DNA, 15 bp, Homo sapiens
gcactgggcaaagcc

SEQ ID NO: 270908 - DNA, 15 bp, Homo sapiens
agcactgggcaaagc

SEQ ID NO: 270909 - DNA, 15 bp, Homo sapiens
aagcactgggcaaag

SEQ ID NO: 270910 - DNA, 15 bp, Homo sapiens
gaagcactgggcaaa

SEQ ID NO: 270911 - DNA, 15 bp, Homo sapiens
ggaagcactgggcaa

SEQ ID NO: 270912 - DNA, 15 bp, Homo sapiens
tggaagcactgggca

SEQ ID NO: 270913 - DNA, 15 bp, Homo sapiens
gtggaagcactgggc

SEQ ID NO: 270914 - DNA, 15 bp, Homo sapiens
agtggaagcactggg

SEQ ID NO: 270915 - DNA, 15 bp, Homo sapiens
cagtggaagcactgg

SEQ ID NO: 270916 - DNA, 15 bp, Homo sapiens
ccagtggaagcactg

SEQ ID NO: 270917 - DNA, 15 bp, Homo sapiens
gccagtggaagcact

SEQ ID NO: 270918 - DNA, 15 bp, Homo sapiens
ggccagtggaagcac

SEQ ID NO: 270919 - DNA, 15 bp, Homo sapiens
tggccagtggaagca

SEQ ID NO: 270920 - DNA, 15 bp, Homo sapiens
ttggccagtggaagc

SEQ ID NO: 270921 - DNA, 15 bp, Homo sapiens
tttggccagtggaag

SEQ ID NO: 270922 - DNA, 15 bp, Homo sapiens
atttggccagtggaa

SEQ ID NO: 270923 - DNA, 15 bp, Homo sapiens
gatttggccagtgga

SEQ ID NO: 270924 - DNA, 15 bp, Homo sapiens
ggatttggccagtgg

SEQ ID NO: 270925 - DNA, 15 bp, Homo sapiens
tggatttggccagtg

SEQ ID NO: 270926 - DNA, 15 bp, Homo sapiens
ctggatttggccagt

SEQ ID NO: 270927 - DNA, 15 bp, Homo sapiens
actggatttggccag

SEQ ID NO: 270928 - DNA, 15 bp, Homo sapiens
tactggatttggcca

SEQ ID NO: 270929 - DNA, 15 bp, Homo sapiens
atactggatttggcc

SEQ ID NO: 270930 - DNA, 15 bp, Homo sapiens
catactggatttggc

SEQ ID NO: 270931 - DNA, 15 bp, Homo sapiens
tcatactggatttgg

SEQ ID NO: 270932 - DNA, 15 bp, Homo sapiens
atcatactggatttg

SEQ ID NO: 270933 - DNA, 15 bp, Homo sapiens
gatcatactggattt

SEQ ID NO: 270934 - DNA, 15 bp, Homo sapiens
ggatcatactggatt

SEQ ID NO: 270935 - DNA, 15 bp, Homo sapiens
tggatcatactggat

SEQ ID NO: 270936 - DNA, 15 bp, Homo sapiens
ctggatcatactgga

SEQ ID NO: 270937 - DNA, 15 bp, Homo sapiens
actggatcatactgg

SEQ ID NO: 270938 - DNA, 15 bp, Homo sapiens
aactggatcatactg

SEQ ID NO: 270939 - DNA, 15 bp, Homo sapiens
caactggatcatact

SEQ ID NO: 270940 - DNA, 15 bp, Homo sapiens
ccaactggatcatac

SEQ ID NO: 270941 - DNA, 15 bp, Homo sapiens
gccaactggatcata

SEQ ID NO: 270942 - DNA, 15 bp, Homo sapiens
tgccaactggatcat

SEQ ID NO: 270943 - DNA, 15 bp, Homo sapiens
ttgccaactggatca

SEQ ID NO: 270944 - DNA, 15 bp, Homo sapiens
gttgccaactggatc

SEQ ID NO: 270945 - DNA, 15 bp, Homo sapiens
tgttgccaactggat

SEQ ID NO: 270946 - DNA, 15 bp, Homo sapiens
ctgttgccaactgga

SEQ ID NO: 270947 - DNA, 15 bp, Homo sapiens
actgttgccaactgg

SEQ ID NO: 270948 - DNA, 15 bp, Homo sapiens
cactgttgccaactg

SEQ ID NO: 270949 - DNA, 15 bp, Homo sapiens
gcactgttgccaact

SEQ ID NO: 270950 - DNA, 15 bp, Homo sapiens
ggcactgttgccaac

SEQ ID NO: 270951 - DNA, 15 bp, Homo sapiens
tggcactgttgccaa

SEQ ID NO: 270952 - DNA, 15 bp, Homo sapiens
ctggcactgttgcca

SEQ ID NO: 270953 - DNA, 15 bp, Homo sapiens
tctggcactgttgcc

SEQ ID NO: 270954 - DNA, 15 bp, Homo sapiens
ttctggcactgttgc

SEQ ID NO: 270955 - DNA, 15 bp, Homo sapiens
tttctggcactgttg

SEQ ID NO: 270956 - DNA, 15 bp, Homo sapiens
ttttctggcactgtt

SEQ ID NO: 270957 - DNA, 15 bp, Homo sapiens
gttttctggcactgt

SEQ ID NO: 270958 - DNA, 15 bp, Homo sapiens
tgttttctggcactg

SEQ ID NO: 270959 - DNA, 15 bp, Homo sapiens
atgttttctggcact

SEQ ID NO: 270960 - DNA, 15 bp, Homo sapiens
tatgttttctggcac

SEQ ID NO: 270961 - DNA, 15 bp, Homo sapiens
ctatgttttctggca

SEQ ID NO: 270962 - DNA, 15 bp, Homo sapiens
actatgttttctggc

SEQ ID NO: 270963 - DNA, 15 bp, Homo sapiens
cactatgttttctgg

SEQ ID NO: 270964 - DNA, 15 bp, Homo sapiens
ccactatgttttctg

SEQ ID NO: 270965 - DNA, 15 bp, Homo sapiens
cccactatgttttct

SEQ ID NO: 270966 - DNA, 15 bp, Homo sapiens
ccccactatgttttc

SEQ ID NO: 270967 - DNA, 15 bp, Homo sapiens
cccccactatgtttt

SEQ ID NO: 270968 - DNA, 15 bp, Homo sapiens
gcccccactatgttt

SEQ ID NO: 270969 - DNA, 15 bp, Homo sapiens
ggcccccactatgtt

SEQ ID NO: 270970 - DNA, 15 bp, Homo sapiens
cggcccccactatgt

SEQ ID NO: 270971 - DNA, 15 bp, Homo sapiens
gcggcccccactatg

SEQ ID NO: 270972 - DNA, 15 bp, Homo sapiens
ggcggcccccactat

SEQ ID NO: 270973 - DNA, 15 bp, Homo sapiens
gggcggcccccacta

SEQ ID NO: 270974 - DNA, 15 bp, Homo sapiens
ggggcggcccccact

SEQ ID NO: 270975 - DNA, 15 bp, Homo sapiens
aggggcggcccccac

SEQ ID NO: 270976 - DNA, 15 bp, Homo sapiens
caggggcggccccca

SEQ ID NO: 270977 - DNA, 15 bp, Homo sapiens
acaggggcggccccc

SEQ ID NO: 270978 - DNA, 15 bp, Homo sapiens
cacaggggcggcccc

SEQ ID NO: 270979 - DNA, 15 bp, Homo sapiens
tcacaggggcggccc

SEQ ID NO: 270980 - DNA, 15 bp, Homo sapiens
atcacaggggcggcc

SEQ ID NO: 270981 - DNA, 15 bp, Homo sapiens
aatcacaggggcggc

SEQ ID NO: 270982 - DNA, 15 bp, Homo sapiens
taatcacaggggcgg

SEQ ID NO: 270983 - DNA, 15 bp, Homo sapiens
ttaatcacaggggcg

SEQ ID NO: 270984 - DNA, 15 bp, Homo sapiens
cttaatcacaggggc

SEQ ID NO: 270985 - DNA, 15 bp, Homo sapiens
tcttaatcacagggg

SEQ ID NO: 270986 - DNA, 15 bp, Homo sapiens
ttcttaatcacaggg

SEQ ID NO: 270987 - DNA, 15 bp, Homo sapiens
attcttaatcacagg

SEQ ID NO: 270988 - DNA, 15 bp, Homo sapiens
tattcttaatcacag

SEQ ID NO: 270989 - DNA, 15 bp, Homo sapiens
ctattcttaatcaca

SEQ ID NO: 270990 - DNA, 15 bp, Homo sapiens
tctattcttaatcac

SEQ ID NO: 270991 - DNA, 15 bp, Homo sapiens
ctctattcttaatca

SEQ ID NO: 270992 - DNA, 15 bp, Homo sapiens
gctctattcttaatc

SEQ ID NO: 270993 - DNA, 15 bp, Homo sapiens
tgctctattcttaat

SEQ ID NO: 270994 - DNA, 15 bp, Homo sapiens
ctgctctattcttaa

SEQ ID NO: 270995 - DNA, 15 bp, Homo sapiens
cctgctctattctta

SEQ ID NO: 270996 - DNA, 15 bp, Homo sapiens
gcctgctctattctt

SEQ ID NO: 270997 - DNA, 15 bp, Homo sapiens
tgcctgctctattct

SEQ ID NO: 270998 - DNA, 15 bp, Homo sapiens
ttgcctgctctattc

SEQ ID NO: 270999 - DNA, 15 bp, Homo sapiens
attgcctgctctatt

SEQ ID NO: 271000 - DNA, 15 bp, Homo sapiens
tattgcctgctctat

SEQ ID NO: 271001 - DNA, 15 bp, Homo sapiens
ctattgcctgctcta

SEQ ID NO: 271002 - DNA, 15 bp, Homo sapiens
cctattgcctgctct

SEQ ID NO: 271003 - DNA, 15 bp, Homo sapiens
acctattgcctgctc

SEQ ID NO: 271004 - DNA, 15 bp, Homo sapiens
cacctattgcctgct

SEQ ID NO: 271005 - DNA, 15 bp, Homo sapiens
ccacctattgcctgc

SEQ ID NO: 271006 - DNA, 15 bp, Homo sapiens
cccacctattgcctg

SEQ ID NO: 271007 - DNA, 15 bp, Homo sapiens
ccccacctattgcct

SEQ ID NO: 271008 - DNA, 15 bp, Homo sapiens
tccccacctattgcc

SEQ ID NO: 271009 - DNA, 15 bp, Homo sapiens
ttccccacctattgc

SEQ ID NO: 271010 - DNA, 15 bp, Homo sapiens
attccccacctattg

SEQ ID NO: 271011 - DNA, 15 bp, Homo sapiens
aattccccacctatt

SEQ ID NO: 271012 - DNA, 15 bp, Homo sapiens
gaattccccacctat

SEQ ID NO: 271013 - DNA, 15 bp, Homo sapiens
tgaattccccaccta

SEQ ID NO: 271014 - DNA, 15 bp, Homo sapiens
atgaattccccacct

SEQ ID NO: 271015 - DNA, 15 bp, Homo sapiens
gatgaattccccacc

SEQ ID NO: 271016 - DNA, 15 bp, Homo sapiens
agatgaattccccac

SEQ ID NO: 271017 - DNA, 15 bp, Homo sapiens
cagatgaattcccca

SEQ ID NO: 271018 - DNA, 15 bp, Homo sapiens
tcagatgaattcccc

SEQ ID NO: 271019 - DNA, 15 bp, Homo sapiens
ttcagatgaattccc

SEQ ID NO: 271020 - DNA, 15 bp, Homo sapiens
tttcagatgaattcc

SEQ ID NO: 271021 - DNA, 15 bp, Homo sapiens
ttttcagatgaattc

SEQ ID NO: 271022 - DNA, 15 bp, Homo sapiens
gttttcagatgaatt

SEQ ID NO: 271023 - DNA, 15 bp, Homo sapiens
tgttttcagatgaat

SEQ ID NO: 271024 - DNA, 15 bp, Homo sapiens
gtgttttcagatgaa

SEQ ID NO: 271025 - DNA, 15 bp, Homo sapiens
agtgttttcagatga

SEQ ID NO: 271026 - DNA, 15 bp, Homo sapiens
cagtgttttcagatg

SEQ ID NO: 271027 - DNA, 15 bp, Homo sapiens
tcagtgttttcagat

SEQ ID NO: 271028 - DNA, 15 bp, Homo sapiens
ttcagtgttttcaga

SEQ ID NO: 271029 - DNA, 15 bp, Homo sapiens
tttcagtgttttcag

SEQ ID NO: 271030 - DNA, 15 bp, Homo sapiens
atttcagtgttttca

SEQ ID NO: 271031 - DNA, 15 bp, Homo sapiens
catttcagtgttttc

SEQ ID NO: 271032 - DNA, 15 bp, Homo sapiens
tcatttcagtgtttt

SEQ ID NO: 271033 - DNA, 15 bp, Homo sapiens
gtcatttcagtgttt

SEQ ID NO: 271034 - DNA, 15 bp, Homo sapiens
agtcatttcagtgtt

SEQ ID NO: 271035 - DNA, 15 bp, Homo sapiens
cagtcatttcagtgt

SEQ ID NO: 271036 - DNA, 15 bp, Homo sapiens
ccagtcatttcagtg

SEQ ID NO: 271037 - DNA, 15 bp, Homo sapiens
accagtcatttcagt

SEQ ID NO: 271038 - DNA, 15 bp, Homo sapiens
caccagtcatttcag

SEQ ID NO: 271039 - DNA, 15 bp, Homo sapiens
gcaccagtcatttca

SEQ ID NO: 271040 - DNA, 15 bp, Homo sapiens
ggcaccagtcatttc

SEQ ID NO: 271041 - DNA, 15 bp, Homo sapiens
aggcaccagtcattt

SEQ ID NO: 271042 - DNA, 15 bp, Homo sapiens
aaggcaccagtcatt

SEQ ID NO: 271043 - DNA, 15 bp, Homo sapiens
caaggcaccagtcat

SEQ ID NO: 271044 - DNA, 15 bp, Homo sapiens
gcaaggcaccagtca

SEQ ID NO: 271045 - DNA, 15 bp, Homo sapiens
agcaaggcaccagtc

SEQ ID NO: 271046 - DNA, 15 bp, Homo sapiens
gagcaaggcaccagt

SEQ ID NO: 271047 - DNA, 15 bp, Homo sapiens
agagcaaggcaccag

SEQ ID NO: 271048 - DNA, 15 bp, Homo sapiens
tagagcaaggcacca

SEQ ID NO: 271049 - DNA, 15 bp, Homo sapiens
atagagcaaggcacc

SEQ ID NO: 271050 - DNA, 15 bp, Homo sapiens
gatagagcaaggcac

SEQ ID NO: 271051 - DNA, 15 bp, Homo sapiens
agatagagcaaggca

SEQ ID NO: 271052 - DNA, 15 bp, Homo sapiens
gagatagagcaaggc

SEQ ID NO: 271053 - DNA, 15 bp, Homo sapiens
ggagatagagcaagg

SEQ ID NO: 271054 - DNA, 15 bp, Homo sapiens
tggagatagagcaag

SEQ ID NO: 271055 - DNA, 15 bp, Homo sapiens
ctggagatagagcaa

SEQ ID NO: 271056 - DNA, 15 bp, Homo sapiens
gctggagatagagca

SEQ ID NO: 271057 - DNA, 15 bp, Homo sapiens
agctggagatagagc

SEQ ID NO: 271058 - DNA, 15 bp, Homo sapiens
cagctggagatagag

SEQ ID NO: 271059 - DNA, 15 bp, Homo sapiens
acagctggagataga

SEQ ID NO: 271060 - DNA, 15 bp, Homo sapiens
gacagctggagatag

SEQ ID NO: 271061 - DNA, 15 bp, Homo sapiens
agacagctggagata

SEQ ID NO: 271062 - DNA, 15 bp, Homo sapiens
aagacagctggagat

SEQ ID NO: 271063 - DNA, 15 bp, Homo sapiens
caagacagctggaga

SEQ ID NO: 271064 - DNA, 15 bp, Homo sapiens
tcaagacagctggag

SEQ ID NO: 271065 - DNA, 15 bp, Homo sapiens
gtcaagacagctgga

SEQ ID NO: 271066 - DNA, 15 bp, Homo sapiens
tgtcaagacagctgg

SEQ ID NO: 271067 - DNA, 15 bp, Homo sapiens
gtgtcaagacagctg

SEQ ID NO: 271068 - DNA, 15 bp, Homo sapiens
tgtgtcaagacagct

SEQ ID NO: 271069 - DNA, 15 bp, Homo sapiens
atgtgtcaagacagc

SEQ ID NO: 271070 - DNA, 15 bp, Homo sapiens
tatgtgtcaagacag

SEQ ID NO: 271071 - DNA, 15 bp, Homo sapiens
gtatgtgtcaagaca

SEQ ID NO: 271072 - DNA, 15 bp, Homo sapiens
agtatgtgtcaagac

SEQ ID NO: 271073 - DNA, 15 bp, Homo sapiens
tagtatgtgtcaaga

SEQ ID NO: 271074 - DNA, 15 bp, Homo sapiens
ctagtatgtgtcaag

SEQ ID NO: 271075 - DNA, 15 bp, Homo sapiens
cctagtatgtgtcaa

SEQ ID NO: 271076 - DNA, 15 bp, Homo sapiens
acctagtatgtgtca

SEQ ID NO: 271077 - DNA, 15 bp, Homo sapiens
gacctagtatgtgtc

SEQ ID NO: 271078 - DNA, 15 bp, Homo sapiens
ggacctagtatgtgt

SEQ ID NO: 271079 - DNA, 15 bp, Homo sapiens
aggacctagtatgtg

SEQ ID NO: 271080 - DNA, 15 bp, Homo sapiens
gaggacctagtatgt

SEQ ID NO: 271081 - DNA, 15 bp, Homo sapiens
tgaggacctagtatg

SEQ ID NO: 271082 - DNA, 15 bp, Homo sapiens
ctgaggacctagtat

SEQ ID NO: 271083 - DNA, 15 bp, Homo sapiens
gctgaggacctagta

SEQ ID NO: 271084 - DNA, 15 bp, Homo sapiens
tgctgaggacctagt

SEQ ID NO: 271085 - DNA, 15 bp, Homo sapiens
ttgctgaggacctag

SEQ ID NO: 271086 - DNA, 15 bp, Homo sapiens
cttgctgaggaccta

SEQ ID NO: 271087 - DNA, 15 bp, Homo sapiens
gcttgctgaggacct

SEQ ID NO: 271088 - DNA, 15 bp, Homo sapiens
tgcttgctgaggacc

SEQ ID NO: 271089 - DNA, 15 bp, Homo sapiens
ttgcttgctgaggac

SEQ ID NO: 271090 - DNA, 15 bp, Homo sapiens
attgcttgctgagga

SEQ ID NO: 271091 - DNA, 15 bp, Homo sapiens
aattgcttgctgagg

SEQ ID NO: 271092 - DNA, 15 bp, Homo sapiens
caattgcttgctgag

SEQ ID NO: 271093 - DNA, 15 bp, Homo sapiens
acaattgcttgctga

SEQ ID NO: 271094 - DNA, 15 bp, Homo sapiens
aacaattgcttgctg

SEQ ID NO: 271095 - DNA, 15 bp, Homo sapiens
caacaattgcttgct

SEQ ID NO: 271096 - DNA, 15 bp, Homo sapiens
ccaacaattgcttgc

SEQ ID NO: 271097 - DNA, 15 bp, Homo sapiens
tccaacaattgcttg

SEQ ID NO: 271098 - DNA, 15 bp, Homo sapiens
atccaacaattgctt

SEQ ID NO: 271099 - DNA, 15 bp, Homo sapiens
catccaacaattgct

SEQ ID NO: 271100 - DNA, 15 bp, Homo sapiens
ccatccaacaattgc

SEQ ID NO: 271101 - DNA, 15 bp, Homo sapiens
tccatccaacaattg

SEQ ID NO: 271102 - DNA, 15 bp, Homo sapiens
atccatccaacaatt

SEQ ID NO: 271103 - DNA, 15 bp, Homo sapiens
catccatccaacaat

SEQ ID NO: 271104 - DNA, 15 bp, Homo sapiens
tcatccatccaacaa

SEQ ID NO: 271105 - DNA, 15 bp, Homo sapiens
ttcatccatccaaca

SEQ ID NO: 271106 - DNA, 15 bp, Homo sapiens
attcatccatccaac

SEQ ID NO: 271107 - DNA, 15 bp, Homo sapiens
aattcatccatccaa

SEQ ID NO: 271108 - DNA, 15 bp, Homo sapiens
taattcatccatcca

SEQ ID NO: 271109 - DNA, 15 bp, Homo sapiens
ttaattcatccatcc

SEQ ID NO: 271110 - DNA, 15 bp, Homo sapiens
attaattcatccatc

SEQ ID NO: 271111 - DNA, 15 bp, Homo sapiens
cattaattcatccat

SEQ ID NO: 271112 - DNA, 15 bp, Homo sapiens
ccattaattcatcca

SEQ ID NO: 271113 - DNA, 15 bp, Homo sapiens
tccattaattcatcc

SEQ ID NO: 271114 - DNA, 15 bp, Homo sapiens
ttccattaattcatc

SEQ ID NO: 271115 - DNA, 15 bp, Homo sapiens
gttccattaattcat

SEQ ID NO: 271116 - DNA, 15 bp, Homo sapiens
cgttccattaattca

SEQ ID NO: 271117 - DNA, 15 bp, Homo sapiens
gcgttccattaattc

SEQ ID NO: 271118 - DNA, 15 bp, Homo sapiens
tgcgttccattaatt

SEQ ID NO: 271119 - DNA, 15 bp, Homo sapiens
gtgcgttccattaat

SEQ ID NO: 271120 - DNA, 15 bp, Homo sapiens
ggtgcgttccattaa

SEQ ID NO: 271121 - DNA, 15 bp, Homo sapiens
tggtgcgttccatta

SEQ ID NO: 271122 - DNA, 15 bp, Homo sapiens
gtggtgcgttccatt

SEQ ID NO: 271123 - DNA, 15 bp, Homo sapiens
agtggtgcgttccat

SEQ ID NO: 271124 - DNA, 15 bp, Homo sapiens
gagtggtgcgttcca

SEQ ID NO: 271125 - DNA, 15 bp, Homo sapiens
ggagtggtgcgttcc

SEQ ID NO: 271126 - DNA, 15 bp, Homo sapiens
tggagtggtgcgttc

SEQ ID NO: 271127 - DNA, 15 bp, Homo sapiens
ttggagtggtgcgtt

SEQ ID NO: 271128 - DNA, 15 bp, Homo sapiens
tttggagtggtgcgt

SEQ ID NO: 271129 - DNA, 15 bp, Homo sapiens
ctttggagtggtgcg

SEQ ID NO: 271130 - DNA, 15 bp, Homo sapiens
cctttggagtggtgc

SEQ ID NO: 271131 - DNA, 15 bp, Homo sapiens
tcctttggagtggtg

SEQ ID NO: 271132 - DNA, 15 bp, Homo sapiens
ctcctttggagtggt

SEQ ID NO: 271133 - DNA, 15 bp, Homo sapiens
actcctttggagtgg

SEQ ID NO: 271134 - DNA, 15 bp, Homo sapiens
gactcctttggagtg

SEQ ID NO: 271135 - DNA, 15 bp, Homo sapiens
tgactcctttggagt

SEQ ID NO: 271136 - DNA, 15 bp, Homo sapiens
ctgactcctttggag

SEQ ID NO: 271137 - DNA, 15 bp, Homo sapiens
gctgactcctttgga

SEQ ID NO: 271138 - DNA, 15 bp, Homo sapiens
agctgactcctttgg

SEQ ID NO: 271139 - DNA, 15 bp, Homo sapiens
aagctgactcctttg

SEQ ID NO: 271140 - DNA, 15 bp, Homo sapiens
aaagctgactccttt

SEQ ID NO: 271141 - DNA, 15 bp, Homo sapiens
gaaagctgactcctt

SEQ ID NO: 271142 - DNA, 15 bp, Homo sapiens
tgaaagctgactcct

SEQ ID NO: 271143 - DNA, 15 bp, Homo sapiens
ctgaaagctgactcc

SEQ ID NO: 271144 - DNA, 15 bp, Homo sapiens
cctgaaagctgactc

SEQ ID NO: 271145 - DNA, 15 bp, Homo sapiens
acctgaaagctgact

SEQ ID NO: 271146 - DNA, 15 bp, Homo sapiens
gacctgaaagctgac

SEQ ID NO: 271147 - DNA, 15 bp, Homo sapiens
tgacctgaaagctga

SEQ ID NO: 271148 - DNA, 15 bp, Homo sapiens
ttgacctgaaagctg

SEQ ID NO: 271149 - DNA, 15 bp, Homo sapiens
gttgacctgaaagct

SEQ ID NO: 271150 - DNA, 15 bp, Homo sapiens
agttgacctgaaagc

SEQ ID NO: 271151 - DNA, 15 bp, Homo sapiens
gagttgacctgaaag

SEQ ID NO: 271152 - DNA, 15 bp, Homo sapiens
agagttgacctgaaa

SEQ ID NO: 271153 - DNA, 15 bp, Homo sapiens
tagagttgacctgaa

SEQ ID NO: 271154 - DNA, 15 bp, Homo sapiens
ttagagttgacctga

SEQ ID NO: 271155 - DNA, 15 bp, Homo sapiens
attagagttgacctg

SEQ ID NO: 271156 - DNA, 15 bp, Homo sapiens
cattagagttgacct

SEQ ID NO: 271157 - DNA, 15 bp, Homo sapiens
ccattagagttgacc

SEQ ID NO: 271158 - DNA, 15 bp, Homo sapiens
tccattagagttgac

SEQ ID NO: 271159 - DNA, 15 bp, Homo sapiens
ctccattagagttga

SEQ ID NO: 271160 - DNA, 15 bp, Homo sapiens
actccattagagttg

SEQ ID NO: 271161 - DNA, 15 bp, Homo sapiens
cactccattagagtt

SEQ ID NO: 271162 - DNA, 15 bp, Homo sapiens
ccactccattagagt

SEQ ID NO: 271163 - DNA, 15 bp, Homo sapiens
tccactccattagag

SEQ ID NO: 271164 - DNA, 15 bp, Homo sapiens
atccactccattaga

SEQ ID NO: 271165 - DNA, 15 bp, Homo sapiens
gatccactccattag

SEQ ID NO: 271166 - DNA, 15 bp, Homo sapiens
ggatccactccatta

SEQ ID NO: 271167 - DNA, 15 bp, Homo sapiens
gggatccactccatt

SEQ ID NO: 271168 - DNA, 15 bp, Homo sapiens
agggatccactccat

SEQ ID NO: 271169 - DNA, 15 bp, Homo sapiens
tagggatccactcca

SEQ ID NO: 271170 - DNA, 15 bp, Homo sapiens
ttagggatccactcc

SEQ ID NO: 271171 - DNA, 15 bp, Homo sapiens
cttagggatccactc

SEQ ID NO: 271172 - DNA, 15 bp, Homo sapiens
tcttagggatccact

SEQ ID NO: 271173 - DNA, 15 bp, Homo sapiens
ctcttagggatccac

SEQ ID NO: 271174 - DNA, 15 bp, Homo sapiens
cctcttagggatcca

SEQ ID NO: 271175 - DNA, 15 bp, Homo sapiens
ccctcttagggatcc

SEQ ID NO: 271176 - DNA, 15 bp, Homo sapiens
tccctcttagggatc

SEQ ID NO: 271177 - DNA, 15 bp, Homo sapiens
ttccctcttagggat

SEQ ID NO: 271178 - DNA, 15 bp, Homo sapiens
cttccctcttaggga

SEQ ID NO: 271179 - DNA, 15 bp, Homo sapiens
ccttccctcttaggg

SEQ ID NO: 271180 - DNA, 15 bp, Homo sapiens
cccttccctcttagg

SEQ ID NO: 271181 - DNA, 15 bp, Homo sapiens
gcccttccctcttag

SEQ ID NO: 271182 - DNA, 15 bp, Homo sapiens
agcccttccctctta

SEQ ID NO: 271183 - DNA, 15 bp, Homo sapiens
aagcccttccctctt

SEQ ID NO: 271184 - DNA, 15 bp, Homo sapiens
aaagcccttccctct

SEQ ID NO: 271185 - DNA, 15 bp, Homo sapiens
caaagcccttccctc

SEQ ID NO: 271186 - DNA, 15 bp, Homo sapiens
gcaaagcccttccct

SEQ ID NO: 271187 - DNA, 15 bp, Homo sapiens
tgcaaagcccttccc

SEQ ID NO: 271188 - DNA, 15 bp, Homo sapiens
ctgcaaagcccttcc

SEQ ID NO: 271189 - DNA, 15 bp, Homo sapiens
cctgcaaagcccttc

SEQ ID NO: 271190 - DNA, 15 bp, Homo sapiens
gcctgcaaagccctt

SEQ ID NO: 271191 - DNA, 15 bp, Homo sapiens
agcctgcaaagccct

SEQ ID NO: 271192 - DNA, 15 bp, Homo sapiens
cagcctgcaaagccc

SEQ ID NO: 271193 - DNA, 15 bp, Homo sapiens
ccagcctgcaaagcc

SEQ ID NO: 271194 - DNA, 15 bp, Homo sapiens
cccagcctgcaaagc

SEQ ID NO: 271195 - DNA, 15 bp, Homo sapiens
acccagcctgcaaag

SEQ ID NO: 271196 - DNA, 15 bp, Homo sapiens
aacccagcctgcaaa

SEQ ID NO: 271197 - DNA, 15 bp, Homo sapiens
aaacccagcctgcaa

SEQ ID NO: 271198 - DNA, 15 bp, Homo sapiens
taaacccagcctgca

SEQ ID NO: 271199 - DNA, 15 bp, Homo sapiens
ttaaacccagcctgc

SEQ ID NO: 271200 - DNA, 15 bp, Homo sapiens
gttaaacccagcctg

SEQ ID NO: 271201 - DNA, 15 bp, Homo sapiens
tgttaaacccagcct

SEQ ID NO: 271202 - DNA, 15 bp, Homo sapiens
ctgttaaacccagcc

SEQ ID NO: 271203 - DNA, 15 bp, Homo sapiens
actgttaaacccagc

SEQ ID NO: 271204 - DNA, 15 bp, Homo sapiens
cactgttaaacccag

SEQ ID NO: 271205 - DNA, 15 bp, Homo sapiens
ccactgttaaaccca

SEQ ID NO: 271206 - DNA, 15 bp, Homo sapiens
tccactgttaaaccc

SEQ ID NO: 271207 - DNA, 15 bp, Homo sapiens
ctccactgttaaacc

SEQ ID NO: 271208 - DNA, 15 bp, Homo sapiens
tctccactgttaaac

SEQ ID NO: 271209 - DNA, 15 bp, Homo sapiens
gtctccactgttaaa

SEQ ID NO: 271210 - DNA, 15 bp, Homo sapiens
agtctccactgttaa

SEQ ID NO: 271211 - DNA, 15 bp, Homo sapiens
aagtctccactgtta

SEQ ID NO: 271212 - DNA, 15 bp, Homo sapiens
gaagtctccactgtt

SEQ ID NO: 271213 - DNA, 15 bp, Homo sapiens
ggaagtctccactgt

SEQ ID NO: 271214 - DNA, 15 bp, Homo sapiens
aggaagtctccactg

SEQ ID NO: 271215 - DNA, 15 bp, Homo sapiens
caggaagtctccact

SEQ ID NO: 271216 - DNA, 15 bp, Homo sapiens
tcaggaagtctccac

SEQ ID NO: 271217 - DNA, 15 bp, Homo sapiens
ctcaggaagtctcca

SEQ ID NO: 271218 - DNA, 15 bp, Homo sapiens
cctcaggaagtctcc

SEQ ID NO: 271219 - DNA, 15 bp, Homo sapiens
gcctcaggaagtctc

SEQ ID NO: 271220 - DNA, 15 bp, Homo sapiens
ggcctcaggaagtct

SEQ ID NO: 271221 - DNA, 15 bp, Homo sapiens
gggcctcaggaagtc

SEQ ID NO: 271222 - DNA, 15 bp, Homo sapiens
cgggcctcaggaagt

SEQ ID NO: 271223 - DNA, 15 bp, Homo sapiens
ccgggcctcaggaag

SEQ ID NO: 271224 - DNA, 15 bp, Homo sapiens
gccgggcctcaggaa

SEQ ID NO: 271225 - DNA, 15 bp, Homo sapiens
cgccgggcctcagga

SEQ ID NO: 271226 - DNA, 15 bp, Homo sapiens
ccgccgggcctcagg

SEQ ID NO: 271227 - DNA, 15 bp, Homo sapiens
cccgccgggcctcag

SEQ ID NO: 271228 - DNA, 15 bp, Homo sapiens
ccccgccgggcctca

SEQ ID NO: 271229 - DNA, 15 bp, Homo sapiens
accccgccgggcctc

SEQ ID NO: 271230 - DNA, 15 bp, Homo sapiens
gaccccgccgggcct

SEQ ID NO: 271231 - DNA, 15 bp, Homo sapiens
agaccccgccgggcc

SEQ ID NO: 271232 - DNA, 15 bp, Homo sapiens
gagaccccgccgggc

SEQ ID NO: 271233 - DNA, 15 bp, Homo sapiens
tgagaccccgccggg

SEQ ID NO: 271234 - DNA, 15 bp, Homo sapiens
ctgagaccccgccgg

SEQ ID NO: 271235 - DNA, 15 bp, Homo sapiens
gctgagaccccgccg

SEQ ID NO: 271236 - DNA, 15 bp, Homo sapiens
ggctgagaccccgcc

SEQ ID NO: 271237 - DNA, 15 bp, Homo sapiens
cggctgagaccccgc

SEQ ID NO: 271238 - DNA, 15 bp, Homo sapiens
ccggctgagaccccg

SEQ ID NO: 271239 - DNA, 15 bp, Homo sapiens
gccggctgagacccc

SEQ ID NO: 271240 - DNA, 15 bp, Homo sapiens
agccggctgagaccc

SEQ ID NO: 271241 - DNA, 15 bp, Homo sapiens
cagccggctgagacc

SEQ ID NO: 271242 - DNA, 15 bp, Homo sapiens
acagccggctgagac

SEQ ID NO: 271243 - DNA, 15 bp, Homo sapiens
cacagccggctgaga

SEQ ID NO: 271244 - DNA, 15 bp, Homo sapiens
gcacagccggctgag

SEQ ID NO: 271245 - DNA, 15 bp, Homo sapiens
ggcacagccggctga

SEQ ID NO: 271246 - DNA, 15 bp, Homo sapiens
aggcacagccggctg

SEQ ID NO: 271247 - DNA, 15 bp, Homo sapiens
aaggcacagccggct

SEQ ID NO: 271248 - DNA, 15 bp, Homo sapiens
gaaggcacagccggc

SEQ ID NO: 271249 - DNA, 15 bp, Homo sapiens
agaaggcacagccgg

SEQ ID NO: 271250 - DNA, 15 bp, Homo sapiens
tagaaggcacagccg

SEQ ID NO: 271251 - DNA, 15 bp, Homo sapiens
atagaaggcacagcc

SEQ ID NO: 271252 - DNA, 15 bp, Homo sapiens
gatagaaggcacagc

SEQ ID NO: 271253 - DNA, 15 bp, Homo sapiens
agatagaaggcacag

SEQ ID NO: 271254 - DNA, 15 bp, Homo sapiens
gagatagaaggcaca

SEQ ID NO: 271255 - DNA, 15 bp, Homo sapiens
agagatagaaggcac

SEQ ID NO: 271256 - DNA, 15 bp, Homo sapiens
cagagatagaaggca

SEQ ID NO: 271257 - DNA, 15 bp, Homo sapiens
gcagagatagaaggc

SEQ ID NO: 271258 - DNA, 15 bp, Homo sapiens
agcagagatagaagg

SEQ ID NO: 271259 - DNA, 15 bp, Homo sapiens
cagcagagatagaag

SEQ ID NO: 271260 - DNA, 15 bp, Homo sapiens
gcagcagagatagaa

SEQ ID NO: 271261 - DNA, 15 bp, Homo sapiens
ggcagcagagataga

SEQ ID NO: 271262 - DNA, 15 bp, Homo sapiens
gggcagcagagatag

SEQ ID NO: 271263 - DNA, 15 bp, Homo sapiens
agggcagcagagata

SEQ ID NO: 271264 - DNA, 15 bp, Homo sapiens
cagggcagcagagat

SEQ ID NO: 271265 - DNA, 15 bp, Homo sapiens
gcagggcagcagaga

SEQ ID NO: 271266 - DNA, 15 bp, Homo sapiens
ggcagggcagcagag

SEQ ID NO: 271267 - DNA, 15 bp, Homo sapiens
gggcagggcagcaga

SEQ ID NO: 271268 - DNA, 15 bp, Homo sapiens
tgggcagggcagcag

SEQ ID NO: 271269 - DNA, 15 bp, Homo sapiens
ctgggcagggcagca

SEQ ID NO: 271270 - DNA, 15 bp, Homo sapiens
tctgggcagggcagc

SEQ ID NO: 271271 - DNA, 15 bp, Homo sapiens
ctctgggcagggcag

SEQ ID NO: 271272 - DNA, 15 bp, Homo sapiens
cctctgggcagggca

SEQ ID NO: 271273 - DNA, 15 bp, Homo sapiens
tcctctgggcagggc

SEQ ID NO: 271274 - DNA, 15 bp, Homo sapiens
ctcctctgggcaggg

SEQ ID NO: 271275 - DNA, 15 bp, Homo sapiens
cctcctctgggcagg

SEQ ID NO: 271276 - DNA, 15 bp, Homo sapiens
tcctcctctgggcag

SEQ ID NO: 271277 - DNA, 15 bp, Homo sapiens
atcctcctctgggca

SEQ ID NO: 271278 - DNA, 15 bp, Homo sapiens
catcctcctctgggc

SEQ ID NO: 271279 - DNA, 15 bp, Homo sapiens
tcatcctcctctggg

SEQ ID NO: 271280 - DNA, 15 bp, Homo sapiens
ttcatcctcctctgg

SEQ ID NO: 271281 - DNA, 15 bp, Homo sapiens
cttcatcctcctctg

SEQ ID NO: 271282 - DNA, 15 bp, Homo sapiens
ccttcatcctcctct

SEQ ID NO: 271283 - DNA, 15 bp, Homo sapiens
tccttcatcctcctc

SEQ ID NO: 271284 - DNA, 15 bp, Homo sapiens
atccttcatcctcct

SEQ ID NO: 271285 - DNA, 15 bp, Homo sapiens
aatccttcatcctcc

SEQ ID NO: 271286 - DNA, 15 bp, Homo sapiens
gaatccttcatcctc

SEQ ID NO: 271287 - DNA, 15 bp, Homo sapiens
agaatccttcatcct

SEQ ID NO: 271288 - DNA, 15 bp, Homo sapiens
aagaatccttcatcc

SEQ ID NO: 271289 - DNA, 15 bp, Homo sapiens
taagaatccttcatc

SEQ ID NO: 271290 - DNA, 15 bp, Homo sapiens
ataagaatccttcat

SEQ ID NO: 271291 - DNA, 15 bp, Homo sapiens
gataagaatccttca

SEQ ID NO: 271292 - DNA, 15 bp, Homo sapiens
agataagaatccttc

SEQ ID NO: 271293 - DNA, 15 bp, Homo sapiens
gagataagaatcctt

SEQ ID NO: 271294 - DNA, 15 bp, Homo sapiens
agagataagaatcct

SEQ ID NO: 271295 - DNA, 15 bp, Homo sapiens
cagagataagaatcc

SEQ ID NO: 271296 - DNA, 15 bp, Homo sapiens
ccagagataagaatc

SEQ ID NO: 271297 - DNA, 15 bp, Homo sapiens
tccagagataagaat

SEQ ID NO: 271298 - DNA, 15 bp, Homo sapiens
ttccagagataagaa

SEQ ID NO: 271299 - DNA, 15 bp, Homo sapiens
tttccagagataaga

SEQ ID NO: 271300 - DNA, 15 bp, Homo sapiens
ttatttccagagata

SEQ ID NO: 271301 - DNA, 15 bp, Homo sapiens
gttatttccagagat

SEQ ID NO: 271302 - DNA, 15 bp, Homo sapiens
ggttatttccagaga

SEQ ID NO: 271303 - DNA, 15 bp, Homo sapiens
gggttatttccagag

SEQ ID NO: 271304 - DNA, 15 bp, Homo sapiens
agggttatttccaga

SEQ ID NO: 271305 - DNA, 15 bp, Homo sapiens
gagggttatttccag

SEQ ID NO: 271306 - DNA, 15 bp, Homo sapiens
agagggttatttcca

SEQ ID NO: 271307 - DNA, 15 bp, Homo sapiens
aagagggttatttcc

SEQ ID NO: 271308 - DNA, 15 bp, Homo sapiens
aaagagggttatttc

SEQ ID NO: 271309 - DNA, 15 bp, Homo sapiens
gaaagagggttattt

SEQ ID NO: 271310 - DNA, 15 bp, Homo sapiens
tgaaagagggttatt

SEQ ID NO: 271311 - DNA, 15 bp, Homo sapiens
atgaaagagggttat

SEQ ID NO: 271312 - DNA, 15 bp, Homo sapiens
catgaaagagggtta

SEQ ID NO: 271313 - DNA, 15 bp, Homo sapiens
tcatgaaagagggtt

SEQ ID NO: 271314 - DNA, 15 bp, Homo sapiens
ctcatgaaagagggt

SEQ ID NO: 271315 - DNA, 15 bp, Homo sapiens
gctcatgaaagaggg

SEQ ID NO: 271316 - DNA, 15 bp, Homo sapiens
ggctcatgaaagagg

SEQ ID NO: 271317 - DNA, 15 bp, Homo sapiens
gggctcatgaaagag

SEQ ID NO: 271318 - DNA, 15 bp, Homo sapiens
agggctcatgaaaga

SEQ ID NO: 271319 - DNA, 15 bp, Homo sapiens
aagggctcatgaaag

SEQ ID NO: 271320 - DNA, 15 bp, Homo sapiens
aaagggctcatgaaa

SEQ ID NO: 271321 - DNA, 15 bp, Homo sapiens
taaagggctcatgaa

SEQ ID NO: 271322 - DNA, 15 bp, Homo sapiens
ttaaagggctcatga

SEQ ID NO: 271323 - DNA, 15 bp, Homo sapiens
attaaagggctcatg

SEQ ID NO: 271324 - DNA, 15 bp, Homo sapiens
gattaaagggctcat

SEQ ID NO: 271325 - DNA, 15 bp, Homo sapiens
agattaaagggctca

SEQ ID NO: 271326 - DNA, 15 bp, Homo sapiens
cagattaaagggctc

SEQ ID NO: 271327 - DNA, 15 bp, Homo sapiens
tcagattaaagggct

SEQ ID NO: 271328 - DNA, 15 bp, Homo sapiens
ctcagattaaagggc

SEQ ID NO: 271329 - DNA, 15 bp, Homo sapiens
gctcagattaaaggg

SEQ ID NO: 271330 - DNA, 15 bp, Homo sapiens
ggctcagattaaagg

SEQ ID NO: 271331 - DNA, 15 bp, Homo sapiens
aggctcagattaaag

SEQ ID NO: 271332 - DNA, 15 bp, Homo sapiens
caggctcagattaaa

SEQ ID NO: 271333 - DNA, 15 bp, Homo sapiens
gcaggctcagattaa

SEQ ID NO: 271334 - DNA, 15 bp, Homo sapiens
agcaggctcagatta

SEQ ID NO: 271335 - DNA, 15 bp, Homo sapiens
cagcaggctcagatt

SEQ ID NO: 271336 - DNA, 15 bp, Homo sapiens
tcagcaggctcagat

SEQ ID NO: 271337 - DNA, 15 bp, Homo sapiens
gtcagcaggctcaga

SEQ ID NO: 271338 - DNA, 15 bp, Homo sapiens
tgtcagcaggctcag

SEQ ID NO: 271339 - DNA, 15 bp, Homo sapiens
gtgtcagcaggctca

SEQ ID NO: 271340 - DNA, 15 bp, Homo sapiens
agtgtcagcaggctc

SEQ ID NO: 271341 - DNA, 15 bp, Homo sapiens
aagtgtcagcaggct

SEQ ID NO: 271342 - DNA, 15 bp, Homo sapiens
aaagtgtcagcaggc

SEQ ID NO: 271343 - DNA, 15 bp, Homo sapiens
aaaagtgtcagcagg

SEQ ID NO: 271344 - DNA, 15 bp, Homo sapiens
taaaagtgtcagcag

SEQ ID NO: 271345 - DNA, 15 bp, Homo sapiens
ataaaagtgtcagca

SEQ ID NO: 271346 - DNA, 15 bp, Homo sapiens
tataaaagtgtcagc

SEQ ID NO: 271347 - DNA, 15 bp, Homo sapiens
atataaaagtgtcag

SEQ ID NO: 271348 - DNA, 15 bp, Homo sapiens
catataaaagtgtca

SEQ ID NO: 271349 - DNA, 15 bp, Homo sapiens
acatataaaagtgtc

SEQ ID NO: 271350 - DNA, 15 bp, Homo sapiens
cacatataaaagtgt

SEQ ID NO: 271351 - DNA, 15 bp, Homo sapiens
gcacatataaaagtg

SEQ ID NO: 271352 - DNA, 15 bp, Homo sapiens
tgcacatataaaagt

SEQ ID NO: 271353 - DNA, 15 bp, Homo sapiens
ctgcacatataaaag

SEQ ID NO: 271354 - DNA, 15 bp, Homo sapiens
cctgcacatataaaa

SEQ ID NO: 271355 - DNA, 15 bp, Homo sapiens
ccctgcacatataaa

SEQ ID NO: 271356 - DNA, 15 bp, Homo sapiens
accctgcacatataa

SEQ ID NO: 271357 - DNA, 15 bp, Homo sapiens
aaccctgcacatata

SEQ ID NO: 271358 - DNA, 15 bp, Homo sapiens
taaccctgcacatat

SEQ ID NO: 271359 - DNA, 15 bp, Homo sapiens
ataaccctgcacata

SEQ ID NO: 271360 - DNA, 15 bp, Homo sapiens
cataaccctgcacat

SEQ ID NO: 271361 - DNA, 15 bp, Homo sapiens
acataaccctgcaca

SEQ ID NO: 271362 - DNA, 15 bp, Homo sapiens
aacataaccctgcac

SEQ ID NO: 271363 - DNA, 15 bp, Homo sapiens
taacataaccctgca

SEQ ID NO: 271364 - DNA, 15 bp, Homo sapiens
gtaacataaccctgc

SEQ ID NO: 271365 - DNA, 15 bp, Homo sapiens
agtaacataaccctg

SEQ ID NO: 271366 - DNA, 15 bp, Homo sapiens
aagtaacataaccct

SEQ ID NO: 271367 - DNA, 15 bp, Homo sapiens
caagtaacataaccc

SEQ ID NO: 271368 - DNA, 15 bp, Homo sapiens
tcaagtaacataacc

SEQ ID NO: 271369 - DNA, 15 bp, Homo sapiens
ctcaagtaacataac

SEQ ID NO: 271370 - DNA, 15 bp, Homo sapiens
cctcaagtaacataa

SEQ ID NO: 271371 - DNA, 15 bp, Homo sapiens
tcctcaagtaacata

SEQ ID NO: 271372 - DNA, 15 bp, Homo sapiens
ttcctcaagtaacat

SEQ ID NO: 271373 - DNA, 15 bp, Homo sapiens
attcctcaagtaaca

SEQ ID NO: 271374 - DNA, 15 bp, Homo sapiens
aattcctcaagtaac

SEQ ID NO: 271375 - DNA, 15 bp, Homo sapiens
gaattcctcaagtaa

SEQ ID NO: 271376 - DNA, 15 bp, Homo sapiens
ggaattcctcaagta

SEQ ID NO: 271377 - DNA, 15 bp, Homo sapiens
aggaattcctcaagt

SEQ ID NO: 271378 - DNA, 15 bp, Homo sapiens
aaggaattcctcaag

SEQ ID NO: 271379 - DNA, 15 bp, Homo sapiens
aaaggaattcctcaa

SEQ ID NO: 271380 - DNA, 15 bp, Homo sapiens
caaaggaattcctca

SEQ ID NO: 271381 - DNA, 15 bp, Homo sapiens
tcaaaggaattcctc

SEQ ID NO: 271382 - DNA, 15 bp, Homo sapiens
ttcaaaggaattcct

SEQ ID NO: 271383 - DNA, 15 bp, Homo sapiens
cttcaaaggaattcc

SEQ ID NO: 271384 - DNA, 15 bp, Homo sapiens
tcttcaaaggaattc

SEQ ID NO: 271385 - DNA, 15 bp, Homo sapiens
gtcttcaaaggaatt

SEQ ID NO: 271386 - DNA, 15 bp, Homo sapiens
tgtcttcaaaggaat

SEQ ID NO: 271387 - DNA, 15 bp, Homo sapiens
ttgtcttcaaaggaa

SEQ ID NO: 271388 - DNA, 15 bp, Homo sapiens
attgtcttcaaagga

SEQ ID NO: 271389 - DNA, 15 bp, Homo sapiens
aattgtcttcaaagg

SEQ ID NO: 271390 - DNA, 15 bp, Homo sapiens
aaattgtcttcaaag

SEQ ID NO: 271391 - DNA, 15 bp, Homo sapiens
aaaattgtcttcaaa

SEQ ID NO: 271392 - DNA, 15 bp, Homo sapiens
taaaattgtcttcaa

SEQ ID NO: 271393 - DNA, 15 bp, Homo sapiens
ttaaaattgtcttca

SEQ ID NO: 271394 - DNA, 15 bp, Homo sapiens
tttaaaattgtcttc

SEQ ID NO: 271395 - DNA, 15 bp, Homo sapiens
gtttaaaattgtctt

SEQ ID NO: 271396 - DNA, 15 bp, Homo sapiens
agtttaaaattgtct

SEQ ID NO: 271397 - DNA, 15 bp, Homo sapiens
aagtttaaaattgtc

SEQ ID NO: 271398 - DNA, 15 bp, Homo sapiens
aaagtttaaaattgt

SEQ ID NO: 271399 - DNA, 15 bp, Homo sapiens
gaaagtttaaaattg

SEQ ID NO: 271400 - DNA, 15 bp, Homo sapiens
tgaaagtttaaaatt

SEQ ID NO: 271401 - DNA, 15 bp, Homo sapiens
atgaaagtttaaaat

SEQ ID NO: 271402 - DNA, 15 bp, Homo sapiens
gatgaaagtttaaaa

SEQ ID NO: 271403 - DNA, 15 bp, Homo sapiens
ggatgaaagtttaaa

SEQ ID NO: 271404 - DNA, 15 bp, Homo sapiens
gggatgaaagtttaa

SEQ ID NO: 271405 - DNA, 15 bp, Homo sapiens
agggatgaaagttta

SEQ ID NO: 271406 - DNA, 15 bp, Homo sapiens
aagggatgaaagttt

SEQ ID NO: 271407 - DNA, 15 bp, Homo sapiens
taagggatgaaagtt

SEQ ID NO: 271408 - DNA, 15 bp, Homo sapiens
ctaagggatgaaagt

SEQ ID NO: 271409 - DNA, 15 bp, Homo sapiens
actaagggatgaaag

SEQ ID NO: 271410 - DNA, 15 bp, Homo sapiens
aactaagggatgaaa

SEQ ID NO: 271411 - DNA, 15 bp, Homo sapiens
gaactaagggatgaa

SEQ ID NO: 271412 - DNA, 15 bp, Homo sapiens
tgaactaagggatga

SEQ ID NO: 271413 - DNA, 15 bp, Homo sapiens
ttgaactaagggatg

SEQ ID NO: 271414 - DNA, 15 bp, Homo sapiens
attgaactaagggat

SEQ ID NO: 271415 - DNA, 15 bp, Homo sapiens
aattgaactaaggga

SEQ ID NO: 271416 - DNA, 15 bp, Homo sapiens
aaattgaactaaggg

SEQ ID NO: 271417 - DNA, 15 bp, Homo sapiens
aaaattgaactaagg

SEQ ID NO: 271418 - DNA, 15 bp, Homo sapiens
taaaattgaactaag

SEQ ID NO: 271419 - DNA, 15 bp, Homo sapiens
ttaaaattgaactaa

SEQ ID NO: 271420 - DNA, 15 bp, Homo sapiens
tttaaaattgaacta

SEQ ID NO: 271421 - DNA, 15 bp, Homo sapiens
ctttaaaattgaact

SEQ ID NO: 271422 - DNA, 15 bp, Homo sapiens
actttaaaattgaac

SEQ ID NO: 271423 - DNA, 15 bp, Homo sapiens
aactttaaaattgaa

SEQ ID NO: 271424 - DNA, 15 bp, Homo sapiens
aaactttaaaattga

SEQ ID NO: 271425 - DNA, 15 bp, Homo sapiens
caaactttaaaattg

SEQ ID NO: 271426 - DNA, 15 bp, Homo sapiens
acaaactttaaaatt

SEQ ID NO: 271427 - DNA, 15 bp, Homo sapiens
tacaaactttaaaat

SEQ ID NO: 271428 - DNA, 15 bp, Homo sapiens
ttacaaactttaaaa

SEQ ID NO: 271429 - DNA, 15 bp, Homo sapiens
gttacaaactttaaa

SEQ ID NO: 271430 - DNA, 15 bp, Homo sapiens
tgttacaaactttaa

SEQ ID NO: 271431 - DNA, 15 bp, Homo sapiens
atgttacaaacttta

SEQ ID NO: 271432 - DNA, 15 bp, Homo sapiens
aatgttacaaacttt

SEQ ID NO: 271433 - DNA, 15 bp, Homo sapiens
aaatgttacaaactt

SEQ ID NO: 271434 - DNA, 15 bp, Homo sapiens
caaatgttacaaact

SEQ ID NO: 271435 - DNA, 15 bp, Homo sapiens
ccaaatgttacaaac

SEQ ID NO: 271436 - DNA, 15 bp, Homo sapiens
cccaaatgttacaaa

SEQ ID NO: 271437 - DNA, 15 bp, Homo sapiens
tcccaaatgttacaa

SEQ ID NO: 271438 - DNA, 15 bp, Homo sapiens
gtcccaaatgttaca

SEQ ID NO: 271439 - DNA, 15 bp, Homo sapiens
ggtcccaaatgttac

SEQ ID NO: 271440 - DNA, 15 bp, Homo sapiens
gggtcccaaatgtta

SEQ ID NO: 271441 - DNA, 15 bp, Homo sapiens
agggtcccaaatgtt

SEQ ID NO: 271442 - DNA, 15 bp, Homo sapiens
aagggtcccaaatgt

SEQ ID NO: 271443 - DNA, 15 bp, Homo sapiens
gaagggtcccaaatg

SEQ ID NO: 271444 - DNA, 15 bp, Homo sapiens
agaagggtcccaaat

SEQ ID NO: 271445 - DNA, 15 bp, Homo sapiens
gagaagggtcccaaa

SEQ ID NO: 271446 - DNA, 15 bp, Homo sapiens
tgagaagggtcccaa

SEQ ID NO: 271447 - DNA, 15 bp, Homo sapiens
ctgagaagggtccca

SEQ ID NO: 271448 - DNA, 15 bp, Homo sapiens
tctgagaagggtccc

SEQ ID NO: 271449 - DNA, 15 bp, Homo sapiens
ctctgagaagggtcc

SEQ ID NO: 271450 - DNA, 15 bp, Homo sapiens
gctctgagaagggtc

SEQ ID NO: 271451 - DNA, 15 bp, Homo sapiens
ggctctgagaagggt

SEQ ID NO: 271452 - DNA, 15 bp, Homo sapiens
gggctctgagaaggg

SEQ ID NO: 271453 - DNA, 15 bp, Homo sapiens
agggctctgagaagg

SEQ ID NO: 271454 - DNA, 15 bp, Homo sapiens
cagggctctgagaag

SEQ ID NO: 271455 - DNA, 15 bp, Homo sapiens
tcagggctctgagaa

SEQ ID NO: 271456 - DNA, 15 bp, Homo sapiens
ttcagggctctgaga

SEQ ID NO: 271457 - DNA, 15 bp, Homo sapiens
attcagggctctgag

SEQ ID NO: 271458 - DNA, 15 bp, Homo sapiens
aattcagggctctga

SEQ ID NO: 271459 - DNA, 15 bp, Homo sapiens
aaattcagggctctg

SEQ ID NO: 271460 - DNA, 15 bp, Homo sapiens
taaattcagggctct

SEQ ID NO: 271461 - DNA, 15 bp, Homo sapiens
gtaaattcagggctc

SEQ ID NO: 271462 - DNA, 15 bp, Homo sapiens
agtaaattcagggct

SEQ ID NO: 271463 - DNA, 15 bp, Homo sapiens
gagtaaattcagggc

SEQ ID NO: 271464 - DNA, 15 bp, Homo sapiens
ggagtaaattcaggg

SEQ ID NO: 271465 - DNA, 15 bp, Homo sapiens
aggagtaaattcagg

SEQ ID NO: 271466 - DNA, 15 bp, Homo sapiens
caggagtaaattcag

SEQ ID NO: 271467 - DNA, 15 bp, Homo sapiens
ccaggagtaaattca

SEQ ID NO: 271468 - DNA, 15 bp, Homo sapiens
gccaggagtaaattc

SEQ ID NO: 271469 - DNA, 15 bp, Homo sapiens
tgccaggagtaaatt

SEQ ID NO: 271470 - DNA, 15 bp, Homo sapiens
atgccaggagtaaat

SEQ ID NO: 271471 - DNA, 15 bp, Homo sapiens
gatgccaggagtaaa

SEQ ID NO: 271472 - DNA, 15 bp, Homo sapiens
tgatgccaggagtaa

SEQ ID NO: 271473 - DNA, 15 bp, Homo sapiens
ttgatgccaggagta

SEQ ID NO: 271474 - DNA, 15 bp, Homo sapiens
cttgatgccaggagt

SEQ ID NO: 271475 - DNA, 15 bp, Homo sapiens
tcttgatgccaggag

SEQ ID NO: 271476 - DNA, 15 bp, Homo sapiens
atcttgatgccagga

SEQ ID NO: 271477 - DNA, 15 bp, Homo sapiens
catcttgatgccagg

SEQ ID NO: 271478 - DNA, 15 bp, Homo sapiens
acatcttgatgccag

SEQ ID NO: 271479 - DNA, 15 bp, Homo sapiens
aacatcttgatgcca

SEQ ID NO: 271480 - DNA, 15 bp, Homo sapiens
gaacatcttgatgcc

SEQ ID NO: 271481 - DNA, 15 bp, Homo sapiens
tgaacatcttgatgc

SEQ ID NO: 271482 - DNA, 15 bp, Homo sapiens
ctgaacatcttgatg

SEQ ID NO: 271483 - DNA, 15 bp, Homo sapiens
cctgaacatcttgat

SEQ ID NO: 271484 - DNA, 15 bp, Homo sapiens
ccctgaacatcttga

SEQ ID NO: 271485 - DNA, 15 bp, Homo sapiens
gccctgaacatcttg

SEQ ID NO: 271486 - DNA, 15 bp, Homo sapiens
tgccctgaacatctt

SEQ ID NO: 271487 - DNA, 15 bp, Homo sapiens
ctgccctgaacatct

SEQ ID NO: 271488 - DNA, 15 bp, Homo sapiens
tctgccctgaacatc

SEQ ID NO: 271489 - DNA, 15 bp, Homo sapiens
ctctgccctgaacat

SEQ ID NO: 271490 - DNA, 15 bp, Homo sapiens
gctctgccctgaaca

SEQ ID NO: 271491 - DNA, 15 bp, Homo sapiens
agctctgccctgaac

SEQ ID NO: 271492 - DNA, 15 bp, Homo sapiens
cagctctgccctgaa

SEQ ID NO: 271493 - DNA, 15 bp, Homo sapiens
tcagctctgccctga

SEQ ID NO: 271494 - DNA, 15 bp, Homo sapiens
ctcagctctgccctg

SEQ ID NO: 271495 - DNA, 15 bp, Homo sapiens
gctcagctctgccct

SEQ ID NO: 271496 - DNA, 15 bp, Homo sapiens
agctcagctctgccc

SEQ ID NO: 271497 - DNA, 15 bp, Homo sapiens
cagctcagctctgcc

SEQ ID NO: 271498 - DNA, 15 bp, Homo sapiens
ccagctcagctctgc

SEQ ID NO: 271499 - DNA, 15 bp, Homo sapiens
tccagctcagctctg

SEQ ID NO: 271500 - DNA, 15 bp, Homo sapiens
ctccagctcagctct

SEQ ID NO: 271501 - DNA, 15 bp, Homo sapiens
cctccagctcagctc

SEQ ID NO: 271502 - DNA, 15 bp, Homo sapiens
ccctccagctcagct

SEQ ID NO: 271503 - DNA, 15 bp, Homo sapiens
cccctccagctcagc

SEQ ID NO: 271504 - DNA, 15 bp, Homo sapiens
tcccctccagctcag

SEQ ID NO: 271505 - DNA, 15 bp, Homo sapiens
ttcccctccagctca

SEQ ID NO: 271506 - DNA, 15 bp, Homo sapiens
attcccctccagctc

SEQ ID NO: 271507 - DNA, 15 bp, Homo sapiens
aattcccctccagct

SEQ ID NO: 271508 - DNA, 15 bp, Homo sapiens
gaattcccctccagc

SEQ ID NO: 271509 - DNA, 15 bp, Homo sapiens
ggaattcccctccag

SEQ ID NO: 271510 - DNA, 15 bp, Homo sapiens
cggaattcccctcca

SEQ ID NO: 271511 - DNA, 15 bp, Homo sapiens
gcggaattcccctcc

SEQ ID NO: 271512 - DNA, 15 bp, Homo sapiens
tgcggaattcccctc

SEQ ID NO: 271513 - DNA, 15 bp, Homo sapiens
atgcggaattcccct

SEQ ID NO: 271514 - DNA, 15 bp, Homo sapiens
aatgcggaattcccc

SEQ ID NO: 271515 - DNA, 15 bp, Homo sapiens
gaatgcggaattccc

SEQ ID NO: 271516 - DNA, 15 bp, Homo sapiens
ggaatgcggaattcc

SEQ ID NO: 271517 - DNA, 15 bp, Homo sapiens
aggaatgcggaattc

SEQ ID NO: 271518 - DNA, 15 bp, Homo sapiens
taggaatgcggaatt

SEQ ID NO: 271519 - DNA, 15 bp, Homo sapiens
ctaggaatgcggaat

SEQ ID NO: 271520 - DNA, 15 bp, Homo sapiens
actaggaatgcggaa

SEQ ID NO: 271521 - DNA, 15 bp, Homo sapiens
cactaggaatgcgga

SEQ ID NO: 271522 - DNA, 15 bp, Homo sapiens
tcactaggaatgcgg

SEQ ID NO: 271523 - DNA, 15 bp, Homo sapiens
atcactaggaatgcg

SEQ ID NO: 271524 - DNA, 15 bp, Homo sapiens
gatcactaggaatgc

SEQ ID NO: 271525 - DNA, 15 bp, Homo sapiens
ggatcactaggaatg

SEQ ID NO: 271526 - DNA, 15 bp, Homo sapiens
aggatcactaggaat

SEQ ID NO: 271527 - DNA, 15 bp, Homo sapiens
aaggatcactaggaa

SEQ ID NO: 271528 - DNA, 15 bp, Homo sapiens
taaggatcactagga

SEQ ID NO: 271529 - DNA, 15 bp, Homo sapiens
ttaaggatcactagg

SEQ ID NO: 271530 - DNA, 15 bp, Homo sapiens
gttaaggatcactag

SEQ ID NO: 271531 - DNA, 15 bp, Homo sapiens
agttaaggatcacta

SEQ ID NO: 271532 - DNA, 15 bp, Homo sapiens
cagttaaggatcact

SEQ ID NO: 271533 - DNA, 15 bp, Homo sapiens
ccagttaaggatcac

SEQ ID NO: 271534 - DNA, 15 bp, Homo sapiens
accagttaaggatca

SEQ ID NO: 271535 - DNA, 15 bp, Homo sapiens
caccagttaaggatc

SEQ ID NO: 271536 - DNA, 15 bp, Homo sapiens
gcaccagttaaggat

SEQ ID NO: 271537 - DNA, 15 bp, Homo sapiens
ggcaccagttaagga

SEQ ID NO: 271538 - DNA, 15 bp, Homo sapiens
gggcaccagttaagg

SEQ ID NO: 271539 - DNA, 15 bp, Homo sapiens
ggggcaccagttaag

SEQ ID NO: 271540 - DNA, 15 bp, Homo sapiens
aggggcaccagttaa

SEQ ID NO: 271541 - DNA, 15 bp, Homo sapiens
caggggcaccagtta

SEQ ID NO: 271542 - DNA, 15 bp, Homo sapiens
ccaggggcaccagtt

SEQ ID NO: 271543 - DNA, 15 bp, Homo sapiens
ccccaggggcaccag

SEQ ID NO: 271544 - DNA, 15 bp, Homo sapiens
tccccaggggcacca

SEQ ID NO: 271545 - DNA, 15 bp, Homo sapiens
ttccccaggggcacc

SEQ ID NO: 271546 - DNA, 15 bp, Homo sapiens
attccccaggggcac

SEQ ID NO: 271547 - DNA, 15 bp, Homo sapiens
aattccccaggggca

SEQ ID NO: 271548 - DNA, 15 bp, Homo sapiens
aaattccccaggggc

SEQ ID NO: 271549 - DNA, 15 bp, Homo sapiens
taaattccccagggg

SEQ ID NO: 271550 - DNA, 15 bp, Homo sapiens
ataaattccccaggg

SEQ ID NO: 271551 - DNA, 15 bp, Homo sapiens
gataaattccccagg

SEQ ID NO: 271552 - DNA, 15 bp, Homo sapiens
agataaattccccag

SEQ ID NO: 271553 - DNA, 15 bp, Homo sapiens
tagataaattcccca

SEQ ID NO: 271554 - DNA, 15 bp, Homo sapiens
ttagataaattcccc

SEQ ID NO: 271555 - DNA, 15 bp, Homo sapiens
gttagataaattccc

SEQ ID NO: 271556 - DNA, 15 bp, Homo sapiens
tgttagataaattcc

SEQ ID NO: 271557 - DNA, 15 bp, Homo sapiens
atgttagataaattc

SEQ ID NO: 271558 - DNA, 15 bp, Homo sapiens
tatgttagataaatt

SEQ ID NO: 271559 - DNA, 15 bp, Homo sapiens
gtatgttagataaat

SEQ ID NO: 271560 - DNA, 15 bp, Homo sapiens
agtatgttagataaa

SEQ ID NO: 271561 - DNA, 15 bp, Homo sapiens
cagtatgttagataa

SEQ ID NO: 271562 - DNA, 15 bp, Homo sapiens
ccagtatgttagata

SEQ ID NO: 271563 - DNA, 15 bp, Homo sapiens
tccagtatgttagat

SEQ ID NO: 271564 - DNA, 15 bp, Homo sapiens
ctccagtatgttaga

SEQ ID NO: 271565 - DNA, 15 bp, Homo sapiens
gctccagtatgttag

SEQ ID NO: 271566 - DNA, 15 bp, Homo sapiens
ggctccagtatgtta

SEQ ID NO: 271567 - DNA, 15 bp, Homo sapiens
aggctccagtatgtt

SEQ ID NO: 271568 - DNA, 15 bp, Homo sapiens
gaggctccagtatgt

SEQ ID NO: 271569 - DNA, 15 bp, Homo sapiens
ggaggctccagtatg

SEQ ID NO: 271570 - DNA, 15 bp, Homo sapiens
tggaggctccagtat

SEQ ID NO: 271571 - DNA, 15 bp, Homo sapiens
gtggaggctccagta

SEQ ID NO: 271572 - DNA, 15 bp, Homo sapiens
agtggaggctccagt

SEQ ID NO: 271573 - DNA, 15 bp, Homo sapiens
cagtggaggctccag

SEQ ID NO: 271574 - DNA, 15 bp, Homo sapiens
ccagtggaggctcca

SEQ ID NO: 271575 - DNA, 15 bp, Homo sapiens
accagtggaggctcc

SEQ ID NO: 271576 - DNA, 15 bp, Homo sapiens
gaccagtggaggctc

SEQ ID NO: 271577 - DNA, 15 bp, Homo sapiens
agaccagtggaggct

SEQ ID NO: 271578 - DNA, 15 bp, Homo sapiens
cagaccagtggaggc

SEQ ID NO: 271579 - DNA, 15 bp, Homo sapiens
acagaccagtggagg

SEQ ID NO: 271580 - DNA, 15 bp, Homo sapiens
tacagaccagtggag

SEQ ID NO: 271581 - DNA, 15 bp, Homo sapiens
ttacagaccagtgga

SEQ ID NO: 271582 - DNA, 15 bp, Homo sapiens
cttacagaccagtgg

SEQ ID NO: 271583 - DNA, 15 bp, Homo sapiens
ccttacagaccagtg

SEQ ID NO: 271584 - DNA, 15 bp, Homo sapiens
gccttacagaccagt

SEQ ID NO: 271585 - DNA, 15 bp, Homo sapiens
tgccttacagaccag

SEQ ID NO: 271586 - DNA, 15 bp, Homo sapiens
ctgccttacagacca

SEQ ID NO: 271587 - DNA, 15 bp, Homo sapiens
tctgccttacagacc

SEQ ID NO: 271588 - DNA, 15 bp, Homo sapiens
ttctgccttacagac

SEQ ID NO: 271589 - DNA, 15 bp, Homo sapiens
attctgccttacaga

SEQ ID NO: 271590 - DNA, 15 bp, Homo sapiens
aattctgccttacag

SEQ ID NO: 271591 - DNA, 15 bp, Homo sapiens
taattctgccttaca

SEQ ID NO: 271592 - DNA, 15 bp, Homo sapiens
ttaattctgccttac

SEQ ID NO: 271593 - DNA, 15 bp, Homo sapiens
cttaattctgcctta

SEQ ID NO: 271594 - DNA, 15 bp, Homo sapiens
tcttaattctgcctt

SEQ ID NO: 271595 - DNA, 15 bp, Homo sapiens
ttcttaattctgcct

SEQ ID NO: 271596 - DNA, 15 bp, Homo sapiens
gttcttaattctgcc

SEQ ID NO: 271597 - DNA, 15 bp, Homo sapiens
tgttcttaattctgc

SEQ ID NO: 271598 - DNA, 15 bp, Homo sapiens
gtgttcttaattctg

SEQ ID NO: 271599 - DNA, 15 bp, Homo sapiens
ggtgttcttaattct

SEQ ID NO: 271600 - DNA, 15 bp, Homo sapiens
aggtgttcttaattc

SEQ ID NO: 271601 - DNA, 15 bp, Homo sapiens
aaggtgttcttaatt

SEQ ID NO: 271602 - DNA, 15 bp, Homo sapiens
caaggtgttcttaat

SEQ ID NO: 271603 - DNA, 15 bp, Homo sapiens
tcaaggtgttcttaa

SEQ ID NO: 271604 - DNA, 15 bp, Homo sapiens
ttcaaggtgttctta

SEQ ID NO: 271605 - DNA, 15 bp, Homo sapiens
tttcaaggtgttctt

SEQ ID NO: 271606 - DNA, 15 bp, Homo sapiens
ctttcaaggtgttct

SEQ ID NO: 271607 - DNA, 15 bp, Homo sapiens
tctttcaaggtgttc

SEQ ID NO: 271608 - DNA, 15 bp, Homo sapiens
ttctttcaaggtgtt

SEQ ID NO: 271609 - DNA, 15 bp, Homo sapiens
gttctttcaaggtgt

SEQ ID NO: 271610 - DNA, 15 bp, Homo sapiens
tgttctttcaaggtg

SEQ ID NO: 271611 - DNA, 15 bp, Homo sapiens
atgttctttcaaggt

SEQ ID NO: 271612 - DNA, 15 bp, Homo sapiens
catgttctttcaagg

SEQ ID NO: 271613 - DNA, 15 bp, Homo sapiens
tcatgttctttcaag

SEQ ID NO: 271614 - DNA, 15 bp, Homo sapiens
ttcatgttctttcaa

SEQ ID NO: 271615 - DNA, 15 bp, Homo sapiens
tttcatgttctttca

SEQ ID NO: 271616 - DNA, 15 bp, Homo sapiens
ttttcatgttctttc

SEQ ID NO: 271617 - DNA, 15 bp, Homo sapiens
tttttcatgttcttt

SEQ ID NO: 271618 - DNA, 15 bp, Homo sapiens
ttttttcatgttctt

SEQ ID NO: 271619 - DNA, 15 bp, Homo sapiens
attttttcatgttct

SEQ ID NO: 271620 - DNA, 15 bp, Homo sapiens
cattttttcatgttc

SEQ ID NO: 271621 - DNA, 15 bp, Homo sapiens
tcattttttcatgtt

SEQ ID NO: 271622 - DNA, 15 bp, Homo sapiens
ttcattttttcatgt

SEQ ID NO: 271623 - DNA, 15 bp, Homo sapiens
tttcattttttcatg

SEQ ID NO: 271624 - DNA, 15 bp, Homo sapiens
atttcattttttcat

SEQ ID NO: 271625 - DNA, 15 bp, Homo sapiens
tatttcattttttca

SEQ ID NO: 271626 - DNA, 15 bp, Homo sapiens
ttatttcattttttc

SEQ ID NO: 271627 - DNA, 15 bp, Homo sapiens
tttatttcatttttt

SEQ ID NO: 271628 - DNA, 15 bp, Homo sapiens
gtttatttcattttt

SEQ ID NO: 271629 - DNA, 15 bp, Homo sapiens
tgtttatttcatttt

SEQ ID NO: 271630 - DNA, 15 bp, Homo sapiens
ctgtttatttcattt

SEQ ID NO: 271631 - DNA, 15 bp, Homo sapiens
gctgtttatttcatt

SEQ ID NO: 271632 - DNA, 15 bp, Homo sapiens
ggctgtttatttcat

SEQ ID NO: 271633 - DNA, 15 bp, Homo sapiens
gggctgtttatttca

SEQ ID NO: 271634 - DNA, 15 bp, Homo sapiens
tgggctgtttatttc

SEQ ID NO: 271635 - DNA, 15 bp, Homo sapiens
ttgggctgtttattt

SEQ ID NO: 271636 - DNA, 15 bp, Homo sapiens
cttgggctgtttatt

SEQ ID NO: 271637 - DNA, 15 bp, Homo sapiens
acttgggctgtttat

SEQ ID NO: 271638 - DNA, 15 bp, Homo sapiens
tacttgggctgttta

SEQ ID NO: 271639 - DNA, 15 bp, Homo sapiens
ttacttgggctgttt

SEQ ID NO: 271640 - DNA, 15 bp, Homo sapiens
tttacttgggctgtt

SEQ ID NO: 271641 - DNA, 15 bp, Homo sapiens
ctttacttgggctgt

SEQ ID NO: 271642 - DNA, 15 bp, Homo sapiens
gctttacttgggctg

SEQ ID NO: 271643 - DNA, 15 bp, Homo sapiens
tgctttacttgggct

SEQ ID NO: 271644 - DNA, 15 bp, Homo sapiens
gtgctttacttgggc

SEQ ID NO: 271645 - DNA, 15 bp, Homo sapiens
ggtgctttacttggg

SEQ ID NO: 271646 - DNA, 15 bp, Homo sapiens
tggtgctttacttgg

SEQ ID NO: 271647 - DNA, 15 bp, Homo sapiens
ctggtgctttacttg

SEQ ID NO: 271648 - DNA, 15 bp, Homo sapiens
gctggtgctttactt

SEQ ID NO: 271649 - DNA, 15 bp, Homo sapiens
tgctggtgctttact

SEQ ID NO: 271650 - DNA, 15 bp, Homo sapiens
gtgctggtgctttac

SEQ ID NO: 271651 - DNA, 15 bp, Homo sapiens
tgtgctggtgcttta

SEQ ID NO: 271652 - DNA, 15 bp, Homo sapiens
atgtgctggtgcttt

SEQ ID NO: 271653 - DNA, 15 bp, Homo sapiens
tatgtgctggtgctt

SEQ ID NO: 271654 - DNA, 15 bp, Homo sapiens
atatgtgctggtgct

SEQ ID NO: 271655 - DNA, 15 bp, Homo sapiens
catatgtgctggtgc

SEQ ID NO: 271656 - DNA, 15 bp, Homo sapiens
tcatatgtgctggtg

SEQ ID NO: 271657 - DNA, 15 bp, Homo sapiens
ctcatatgtgctggt

SEQ ID NO: 271658 - DNA, 15 bp, Homo sapiens
cctcatatgtgctgg

SEQ ID NO: 271659 - DNA, 15 bp, Homo sapiens
gcctcatatgtgctg

SEQ ID NO: 271660 - DNA, 15 bp, Homo sapiens
tgcctcatatgtgct

SEQ ID NO: 271661 - DNA, 15 bp, Homo sapiens
gtgcctcatatgtgc

SEQ ID NO: 271662 - DNA, 15 bp, Homo sapiens
agtgcctcatatgtg

SEQ ID NO: 271663 - DNA, 15 bp, Homo sapiens
aagtgcctcatatgt

SEQ ID NO: 271664 - DNA, 15 bp, Homo sapiens
caagtgcctcatatg

SEQ ID NO: 271665 - DNA, 15 bp, Homo sapiens
tcaagtgcctcatat

SEQ ID NO: 271666 - DNA, 15 bp, Homo sapiens
ttcaagtgcctcata

SEQ ID NO: 271667 - DNA, 15 bp, Homo sapiens
tttcaagtgcctcat

SEQ ID NO: 271668 - DNA, 15 bp, Homo sapiens
ttttcaagtgcctca

SEQ ID NO: 271669 - DNA, 15 bp, Homo sapiens
attttcaagtgcctc

SEQ ID NO: 271670 - DNA, 15 bp, Homo sapiens
cattttcaagtgcct

SEQ ID NO: 271671 - DNA, 15 bp, Homo sapiens
acattttcaagtgcc

SEQ ID NO: 271672 - DNA, 15 bp, Homo sapiens
aacattttcaagtgc

SEQ ID NO: 271673 - DNA, 15 bp, Homo sapiens
gaacattttcaagtg

SEQ ID NO: 271674 - DNA, 15 bp, Homo sapiens
tgaacattttcaagt

SEQ ID NO: 271675 - DNA, 15 bp, Homo sapiens
gtgaacattttcaag

SEQ ID NO: 271676 - DNA, 15 bp, Homo sapiens
agtgaacattttcaa

SEQ ID NO: 271677 - DNA, 15 bp, Homo sapiens
gagtgaacattttca

SEQ ID NO: 271678 - DNA, 15 bp, Homo sapiens
ggagtgaacattttc

SEQ ID NO: 271679 - DNA, 15 bp, Homo sapiens
aggagtgaacatttt

SEQ ID NO: 271680 - DNA, 15 bp, Homo sapiens
aaggagtgaacattt

SEQ ID NO: 271681 - DNA, 15 bp, Homo sapiens
aaaggagtgaacatt

SEQ ID NO: 271682 - DNA, 15 bp, Homo sapiens
aaaaggagtgaacat

SEQ ID NO: 271683 - DNA, 15 bp, Homo sapiens
gaaaaggagtgaaca

SEQ ID NO: 271684 - DNA, 15 bp, Homo sapiens
ggaaaaggagtgaac

SEQ ID NO: 271685 - DNA, 15 bp, Homo sapiens
gggaaaaggagtgaa

SEQ ID NO: 271686 - DNA, 15 bp, Homo sapiens
ggggaaaaggagtga

SEQ ID NO: 271687 - DNA, 15 bp, Homo sapiens
gggggaaaaggagtg

SEQ ID NO: 271688 - DNA, 15 bp, Homo sapiens
tgggggaaaaggagt

SEQ ID NO: 271689 - DNA, 15 bp, Homo sapiens
ctgggggaaaaggag

SEQ ID NO: 271690 - DNA, 15 bp, Homo sapiens
tctgggggaaaagga

SEQ ID NO: 271691 - DNA, 15 bp, Homo sapiens
gtctgggggaaaagg

SEQ ID NO: 271692 - DNA, 15 bp, Homo sapiens
cgtctgggggaaaag

SEQ ID NO: 271693 - DNA, 15 bp, Homo sapiens
gcgtctgggggaaaa

SEQ ID NO: 271694 - DNA, 15 bp, Homo sapiens
agcgtctgggggaaa

SEQ ID NO: 271695 - DNA, 15 bp, Homo sapiens
cagcgtctgggggaa

SEQ ID NO: 271696 - DNA, 15 bp, Homo sapiens
ccagcgtctggggga

SEQ ID NO: 271697 - DNA, 15 bp, Homo sapiens
cccagcgtctggggg

SEQ ID NO: 271698 - DNA, 15 bp, Homo sapiens
tcccagcgtctgggg

SEQ ID NO: 271699 - DNA, 15 bp, Homo sapiens
ttcccagcgtctggg

SEQ ID NO: 271700 - DNA, 15 bp, Homo sapiens
tttcccagcgtctgg

SEQ ID NO: 271701 - DNA, 15 bp, Homo sapiens
atttcccagcgtctg

SEQ ID NO: 271702 - DNA, 15 bp, Homo sapiens
tatttcccagcgtct

SEQ ID NO: 271703 - DNA, 15 bp, Homo sapiens
ctatttcccagcgtc

SEQ ID NO: 271704 - DNA, 15 bp, Homo sapiens
actatttcccagcgt

SEQ ID NO: 271705 - DNA, 15 bp, Homo sapiens
aactatttcccagcg

SEQ ID NO: 271706 - DNA, 15 bp, Homo sapiens
gaactatttcccagc

SEQ ID NO: 271707 - DNA, 15 bp, Homo sapiens
tgaactatttcccag

SEQ ID NO: 271708 - DNA, 15 bp, Homo sapiens
ctgaactatttccca

SEQ ID NO: 271709 - DNA, 15 bp, Homo sapiens
tctgaactatttccc

SEQ ID NO: 271710 - DNA, 15 bp, Homo sapiens
atctgaactatttcc

SEQ ID NO: 271711 - DNA, 15 bp, Homo sapiens
catctgaactatttc

SEQ ID NO: 271712 - DNA, 15 bp, Homo sapiens
gcatctgaactattt

SEQ ID NO: 271713 - DNA, 15 bp, Homo sapiens
ggcatctgaactatt

SEQ ID NO: 271714 - DNA, 15 bp, Homo sapiens
gggcatctgaactat

SEQ ID NO: 271715 - DNA, 15 bp, Homo sapiens
ggggcatctgaacta

SEQ ID NO: 271716 - DNA, 15 bp, Homo sapiens
gggggcatctgaact

SEQ ID NO: 271717 - DNA, 15 bp, Homo sapiens
agggggcatctgaac

SEQ ID NO: 271718 - DNA, 15 bp, Homo sapiens
tagggggcatctgaa

SEQ ID NO: 271719 - DNA, 15 bp, Homo sapiens
atagggggcatctga

SEQ ID NO: 271720 - DNA, 15 bp, Homo sapiens
gatagggggcatctg

SEQ ID NO: 271721 - DNA, 15 bp, Homo sapiens
ggatagggggcatct

SEQ ID NO: 271722 - DNA, 15 bp, Homo sapiens
gggatagggggcatc

SEQ ID NO: 271723 - DNA, 15 bp, Homo sapiens
tgggatagggggcat

SEQ ID NO: 271724 - DNA, 15 bp, Homo sapiens
ctgggatagggggca

SEQ ID NO: 271725 - DNA, 15 bp, Homo sapiens
cctgggatagggggc

SEQ ID NO: 271726 - DNA, 15 bp, Homo sapiens
tcctgggataggggg

SEQ ID NO: 271727 - DNA, 15 bp, Homo sapiens
gtcctgggatagggg

SEQ ID NO: 271728 - DNA, 15 bp, Homo sapiens
ggtcctgggataggg

SEQ ID NO: 271729 - DNA, 15 bp, Homo sapiens
gggtcctgggatagg

SEQ ID NO: 271730 - DNA, 15 bp, Homo sapiens
tgggtcctgggatag

SEQ ID NO: 271731 - DNA, 15 bp, Homo sapiens
atgggtcctgggata

SEQ ID NO: 271732 - DNA, 15 bp, Homo sapiens
catgggtcctgggat

SEQ ID NO: 271733 - DNA, 15 bp, Homo sapiens
tcatgggtcctggga

SEQ ID NO: 271734 - DNA, 15 bp, Homo sapiens
ttcatgggtcctggg

SEQ ID NO: 271735 - DNA, 15 bp, Homo sapiens
cttcatgggtcctgg

SEQ ID NO: 271736 - DNA, 15 bp, Homo sapiens
gcttcatgggtcctg

SEQ ID NO: 271737 - DNA, 15 bp, Homo sapiens
tgcttcatgggtcct

SEQ ID NO: 271738 - DNA, 15 bp, Homo sapiens
ctgcttcatgggtcc

SEQ ID NO: 271739 - DNA, 15 bp, Homo sapiens
gctgcttcatgggtc

SEQ ID NO: 271740 - DNA, 15 bp, Homo sapiens
agctgcttcatgggt

SEQ ID NO: 271741 - DNA, 15 bp, Homo sapiens
gagctgcttcatggg

SEQ ID NO: 271742 - DNA, 15 bp, Homo sapiens
tgagctgcttcatgg

SEQ ID NO: 271743 - DNA, 15 bp, Homo sapiens
gtgagctgcttcatg

SEQ ID NO: 271744 - DNA, 15 bp, Homo sapiens
ggtgagctgcttcat

SEQ ID NO: 271745 - DNA, 15 bp, Homo sapiens
cggtgagctgcttca

SEQ ID NO: 271746 - DNA, 15 bp, Homo sapiens
gcggtgagctgcttc

SEQ ID NO: 271747 - DNA, 15 bp, Homo sapiens
tgcggtgagctgctt

SEQ ID NO: 271748 - DNA, 15 bp, Homo sapiens
ctgcggtgagctgct

SEQ ID NO: 271749 - DNA, 15 bp, Homo sapiens
gctgcggtgagctgc

SEQ ID NO: 271750 - DNA, 15 bp, Homo sapiens
ggctgcggtgagctg

SEQ ID NO: 271751 - DNA, 15 bp, Homo sapiens
aggctgcggtgagct

SEQ ID NO: 271752 - DNA, 15 bp, Homo sapiens
gaggctgcggtgagc

SEQ ID NO: 271753 - DNA, 15 bp, Homo sapiens
agaggctgcggtgag

SEQ ID NO: 271754 - DNA, 15 bp, Homo sapiens
gagaggctgcggtga

SEQ ID NO: 271755 - DNA, 15 bp, Homo sapiens
agagaggctgcggtg

SEQ ID NO: 271756 - DNA, 15 bp, Homo sapiens
tagagaggctgcggt

SEQ ID NO: 271757 - DNA, 15 bp, Homo sapiens
atagagaggctgcgg

SEQ ID NO: 271758 - DNA, 15 bp, Homo sapiens
catagagaggctgcg

SEQ ID NO: 271759 - DNA, 15 bp, Homo sapiens
acatagagaggctgc

SEQ ID NO: 271760 - DNA, 15 bp, Homo sapiens
aacatagagaggctg

SEQ ID NO: 271761 - DNA, 15 bp, Homo sapiens
caacatagagaggct

SEQ ID NO: 271762 - DNA, 15 bp, Homo sapiens
tcaacatagagaggc

SEQ ID NO: 271763 - DNA, 15 bp, Homo sapiens
atcaacatagagagg

SEQ ID NO: 271764 - DNA, 15 bp, Homo sapiens
aatcaacatagagag

SEQ ID NO: 271765 - DNA, 15 bp, Homo sapiens
aaatcaacatagaga

SEQ ID NO: 271766 - DNA, 15 bp, Homo sapiens
aaaatcaacatagag

SEQ ID NO: 271767 - DNA, 15 bp, Homo sapiens
aaaaatcaacataga

SEQ ID NO: 271768 - DNA, 15 bp, Homo sapiens
taaaaatcaacatag

SEQ ID NO: 271769 - DNA, 15 bp, Homo sapiens
ctaaaaatcaacata

SEQ ID NO: 271770 - DNA, 15 bp, Homo sapiens
tctaaaaatcaacat

SEQ ID NO: 271771 - DNA, 15 bp, Homo sapiens
atctaaaaatcaaca

SEQ ID NO: 271772 - DNA, 15 bp, Homo sapiens
aatctaaaaatcaac

SEQ ID NO: 271773 - DNA, 15 bp, Homo sapiens
aaatctaaaaatcaa

SEQ ID NO: 271774 - DNA, 15 bp, Homo sapiens
gaaatctaaaaatca

SEQ ID NO: 271775 - DNA, 15 bp, Homo sapiens
ggaaatctaaaaatc

SEQ ID NO: 271776 - DNA, 15 bp, Homo sapiens
aggaaatctaaaaat

SEQ ID NO: 271777 - DNA, 15 bp, Homo sapiens
aaggaaatctaaaaa

SEQ ID NO: 271778 - DNA, 15 bp, Homo sapiens
gaaggaaatctaaaa

SEQ ID NO: 271779 - DNA, 15 bp, Homo sapiens
agaaggaaatctaaa

SEQ ID NO: 271780 - DNA, 15 bp, Homo sapiens
cagaaggaaatctaa

SEQ ID NO: 271781 - DNA, 15 bp, Homo sapiens
acagaaggaaatcta

SEQ ID NO: 271782 - DNA, 15 bp, Homo sapiens
aacagaaggaaatct

SEQ ID NO: 271783 - DNA, 15 bp, Homo sapiens
caacagaaggaaatc

SEQ ID NO: 271784 - DNA, 15 bp, Homo sapiens
tcaacagaaggaaat

SEQ ID NO: 271785 - DNA, 15 bp, Homo sapiens
atcaacagaaggaaa

SEQ ID NO: 271786 - DNA, 15 bp, Homo sapiens
aatcaacagaaggaa

SEQ ID NO: 271787 - DNA, 15 bp, Homo sapiens
taatcaacagaagga

SEQ ID NO: 271788 - DNA, 15 bp, Homo sapiens
ataatcaacagaagg

SEQ ID NO: 271789 - DNA, 15 bp, Homo sapiens
aataatcaacagaag

SEQ ID NO: 271790 - DNA, 15 bp, Homo sapiens
gaataatcaacagaa

SEQ ID NO: 271791 - DNA, 15 bp, Homo sapiens
agaataatcaacaga

SEQ ID NO: 271792 - DNA, 15 bp, Homo sapiens
gagaataatcaacag

SEQ ID NO: 271793 - DNA, 15 bp, Homo sapiens
ggagaataatcaaca

SEQ ID NO: 271794 - DNA, 15 bp, Homo sapiens
tggagaataatcaac

SEQ ID NO: 271795 - DNA, 15 bp, Homo sapiens
gtggagaataatcaa

SEQ ID NO: 271796 - DNA, 15 bp, Homo sapiens
cgtggagaataatca

SEQ ID NO: 271797 - DNA, 15 bp, Homo sapiens
ccgtggagaataatc

SEQ ID NO: 271798 - DNA, 15 bp, Homo sapiens
tccgtggagaataat

SEQ ID NO: 271799 - DNA, 15 bp, Homo sapiens
ttccgtggagaataa

SEQ ID NO: 271800 - DNA, 15 bp, Homo sapiens
cttccgtggagaata

SEQ ID NO: 271801 - DNA, 15 bp, Homo sapiens
ccttccgtggagaat

SEQ ID NO: 271802 - DNA, 15 bp, Homo sapiens
gccttccgtggagaa

SEQ ID NO: 271803 - DNA, 15 bp, Homo sapiens
cgccttccgtggaga

SEQ ID NO: 271804 - DNA, 15 bp, Homo sapiens
tcgccttccgtggag

SEQ ID NO: 271805 - DNA, 15 bp, Homo sapiens
gtcgccttccgtgga

SEQ ID NO: 271806 - DNA, 15 bp, Homo sapiens
agtcgccttccgtgg

SEQ ID NO: 271807 - DNA, 15 bp, Homo sapiens
cagtcgccttccgtg

SEQ ID NO: 271808 - DNA, 15 bp, Homo sapiens
ccagtcgccttccgt

SEQ ID NO: 271809 - DNA, 15 bp, Homo sapiens
tccagtcgccttccg

SEQ ID NO: 271810 - DNA, 15 bp, Homo sapiens
ctccagtcgccttcc

SEQ ID NO: 271811 - DNA, 15 bp, Homo sapiens
gctccagtcgccttc

SEQ ID NO: 271812 - DNA, 15 bp, Homo sapiens
tgctccagtcgcctt

SEQ ID NO: 271813 - DNA, 15 bp, Homo sapiens
ttgctccagtcgcct

SEQ ID NO: 271814 - DNA, 15 bp, Homo sapiens
tttgctccagtcgcc

SEQ ID NO: 271815 - DNA, 15 bp, Homo sapiens
ttttgctccagtcgc

SEQ ID NO: 271816 - DNA, 15 bp, Homo sapiens
cttttgctccagtcg

SEQ ID NO: 271817 - DNA, 15 bp, Homo sapiens
tcttttgctccagtc

SEQ ID NO: 271818 - DNA, 15 bp, Homo sapiens
ctcttttgctccagt

SEQ ID NO: 271819 - DNA, 15 bp, Homo sapiens
cctcttttgctccag

SEQ ID NO: 271820 - DNA, 15 bp, Homo sapiens
acctcttttgctcca

SEQ ID NO: 271821 - DNA, 15 bp, Homo sapiens
cacctcttttgctcc

SEQ ID NO: 271822 - DNA, 15 bp, Homo sapiens
ccacctcttttgctc

SEQ ID NO: 271823 - DNA, 15 bp, Homo sapiens
accacctcttttgct

SEQ ID NO: 271824 - DNA, 15 bp, Homo sapiens
aaccacctcttttgc

SEQ ID NO: 271825 - DNA, 15 bp, Homo sapiens
caaccacctcttttg

SEQ ID NO: 271826 - DNA, 15 bp, Homo sapiens
ccaaccacctctttt

SEQ ID NO: 271827 - DNA, 15 bp, Homo sapiens
gccaaccacctcttt

SEQ ID NO: 271828 - DNA, 15 bp, Homo sapiens
ggccaaccacctctt

SEQ ID NO: 271829 - DNA, 15 bp, Homo sapiens
tggccaaccacctct

SEQ ID NO: 271830 - DNA, 15 bp, Homo sapiens
gtggccaaccacctc

SEQ ID NO: 271831 - DNA, 15 bp, Homo sapiens
ggtggccaaccacct

SEQ ID NO: 271832 - DNA, 15 bp, Homo sapiens
gggtggccaaccacc

SEQ ID NO: 271833 - DNA, 15 bp, Homo sapiens
tgggtggccaaccac

SEQ ID NO: 271834 - DNA, 15 bp, Homo sapiens
atgggtggccaacca

SEQ ID NO: 271835 - DNA, 15 bp, Homo sapiens
aatgggtggccaacc

SEQ ID NO: 271836 - DNA, 15 bp, Homo sapiens
taatgggtggccaac

SEQ ID NO: 271837 - DNA, 15 bp, Homo sapiens
ttaatgggtggccaa

SEQ ID NO: 271838 - DNA, 15 bp, Homo sapiens
attaatgggtggcca

SEQ ID NO: 271839 - DNA, 15 bp, Homo sapiens
tattaatgggtggcc

SEQ ID NO: 271840 - DNA, 15 bp, Homo sapiens
gtattaatgggtggc

SEQ ID NO: 271841 - DNA, 15 bp, Homo sapiens
tgtattaatgggtgg

SEQ ID NO: 271842 - DNA, 15 bp, Homo sapiens
atgtattaatgggtg

SEQ ID NO: 271843 - DNA, 15 bp, Homo sapiens
gatgtattaatgggt

SEQ ID NO: 271844 - DNA, 15 bp, Homo sapiens
agatgtattaatggg

SEQ ID NO: 271845 - DNA, 15 bp, Homo sapiens
gagatgtattaatgg

SEQ ID NO: 271846 - DNA, 15 bp, Homo sapiens
ggagatgtattaatg

SEQ ID NO: 271847 - DNA, 15 bp, Homo sapiens
aggagatgtattaat

SEQ ID NO: 271848 - DNA, 15 bp, Homo sapiens
aaggagatgtattaa

SEQ ID NO: 271849 - DNA, 15 bp, Homo sapiens
gaaggagatgtatta

SEQ ID NO: 271850 - DNA, 15 bp, Homo sapiens
agaaggagatgtatt

SEQ ID NO: 271851 - DNA, 15 bp, Homo sapiens
aagaaggagatgtat

SEQ ID NO: 271852 - DNA, 15 bp, Homo sapiens
taagaaggagatgta

SEQ ID NO: 271853 - DNA, 15 bp, Homo sapiens
ataagaaggagatgt

SEQ ID NO: 271854 - DNA, 15 bp, Homo sapiens
aataagaaggagatg

SEQ ID NO: 271855 - DNA, 15 bp, Homo sapiens
caataagaaggagat

SEQ ID NO: 271856 - DNA, 15 bp, Homo sapiens
ccaataagaaggaga

SEQ ID NO: 271857 - DNA, 15 bp, Homo sapiens
cccaataagaaggag

SEQ ID NO: 271858 - DNA, 15 bp, Homo sapiens
tcccaataagaagga

SEQ ID NO: 271859 - DNA, 15 bp, Homo sapiens
gtcccaataagaagg

SEQ ID NO: 271860 - DNA, 15 bp, Homo sapiens
tgtcccaataagaag

SEQ ID NO: 271861 - DNA, 15 bp, Homo sapiens
atgtcccaataagaa

SEQ ID NO: 271862 - DNA, 15 bp, Homo sapiens
aatgtcccaataaga

SEQ ID NO: 271863 - DNA, 15 bp, Homo sapiens
aaatgtcccaataag

SEQ ID NO: 271864 - DNA, 15 bp, Homo sapiens
gaaatgtcccaataa

SEQ ID NO: 271865 - DNA, 15 bp, Homo sapiens
cgaaatgtcccaata

SEQ ID NO: 271866 - DNA, 15 bp, Homo sapiens
gcgaaatgtcccaat

SEQ ID NO: 271867 - DNA, 15 bp, Homo sapiens
ggcgaaatgtcccaa

SEQ ID NO: 271868 - DNA, 15 bp, Homo sapiens
gggcgaaatgtccca

SEQ ID NO: 271869 - DNA, 15 bp, Homo sapiens
agggcgaaatgtccc

SEQ ID NO: 271870 - DNA, 15 bp, Homo sapiens
cagggcgaaatgtcc

SEQ ID NO: 271871 - DNA, 15 bp, Homo sapiens
gcagggcgaaatgtc

SEQ ID NO: 271872 - DNA, 15 bp, Homo sapiens
agcagggcgaaatgt

SEQ ID NO: 271873 - DNA, 15 bp, Homo sapiens
tagcagggcgaaatg

SEQ ID NO: 271874 - DNA, 15 bp, Homo sapiens
ttagcagggcgaaat

SEQ ID NO: 271875 - DNA, 15 bp, Homo sapiens
tttagcagggcgaaa

SEQ ID NO: 271876 - DNA, 15 bp, Homo sapiens
ctttagcagggcgaa

SEQ ID NO: 271877 - DNA, 15 bp, Homo sapiens
cctttagcagggcga

SEQ ID NO: 271878 - DNA, 15 bp, Homo sapiens
tcctttagcagggcg

SEQ ID NO: 271879 - DNA, 15 bp, Homo sapiens
ctcctttagcagggc

SEQ ID NO: 271880 - DNA, 15 bp, Homo sapiens
actcctttagcaggg

SEQ ID NO: 271881 - DNA, 15 bp, Homo sapiens
tactcctttagcagg

SEQ ID NO: 271882 - DNA, 15 bp, Homo sapiens
ttactcctttagcag

SEQ ID NO: 271883 - DNA, 15 bp, Homo sapiens
attactcctttagca

SEQ ID NO: 271884 - DNA, 15 bp, Homo sapiens
gattactcctttagc

SEQ ID NO: 271885 - DNA, 15 bp, Homo sapiens
tgattactcctttag

SEQ ID NO: 271886 - DNA, 15 bp, Homo sapiens
atgattactccttta

SEQ ID NO: 271887 - DNA, 15 bp, Homo sapiens
catgattactccttt

SEQ ID NO: 271888 - DNA, 15 bp, Homo sapiens
ccatgattactcctt

SEQ ID NO: 271889 - DNA, 15 bp, Homo sapiens
tccatgattactcct

SEQ ID NO: 271890 - DNA, 15 bp, Homo sapiens
atccatgattactcc

SEQ ID NO: 271891 - DNA, 15 bp, Homo sapiens
aatccatgattactc

SEQ ID NO: 271892 - DNA, 15 bp, Homo sapiens
aaatccatgattact

SEQ ID NO: 271893 - DNA, 15 bp, Homo sapiens
aaaatccatgattac

SEQ ID NO: 271894 - DNA, 15 bp, Homo sapiens
gaaaatccatgatta

SEQ ID NO: 271895 - DNA, 15 bp, Homo sapiens
agaaaatccatgatt

SEQ ID NO: 271896 - DNA, 15 bp, Homo sapiens
cagaaaatccatgat

SEQ ID NO: 271897 - DNA, 15 bp, Homo sapiens
acagaaaatccatga

SEQ ID NO: 271898 - DNA, 15 bp, Homo sapiens
cacagaaaatccatg

SEQ ID NO: 271899 - DNA, 15 bp, Homo sapiens
tcacagaaaatccat

SEQ ID NO: 271900 - DNA, 15 bp, Homo sapiens
ttcacagaaaatcca

SEQ ID NO: 271901 - DNA, 15 bp, Homo sapiens
attcacagaaaatcc

SEQ ID NO: 271902 - DNA, 15 bp, Homo sapiens
aattcacagaaaatc

SEQ ID NO: 271903 - DNA, 15 bp, Homo sapiens
aaattcacagaaaat

SEQ ID NO: 271904 - DNA, 15 bp, Homo sapiens
aaaattcacagaaaa

SEQ ID NO: 271905 - DNA, 15 bp, Homo sapiens
gaaaattcacagaaa

SEQ ID NO: 271906 - DNA, 15 bp, Homo sapiens
ggaaaattcacagaa

SEQ ID NO: 271907 - DNA, 15 bp, Homo sapiens
aggaaaattcacaga

SEQ ID NO: 271908 - DNA, 15 bp, Homo sapiens
aaggaaaattcacag

SEQ ID NO: 271909 - DNA, 15 bp, Homo sapiens
aaaggaaaattcaca

SEQ ID NO: 271910 - DNA, 15 bp, Homo sapiens
taaaggaaaattcac

SEQ ID NO: 271911 - DNA, 15 bp, Homo sapiens
ttaaaggaaaattca

SEQ ID NO: 271912 - DNA, 15 bp, Homo sapiens
cttaaaggaaaattc

SEQ ID NO: 271913 - DNA, 15 bp, Homo sapiens
gcttaaaggaaaatt

SEQ ID NO: 271914 - DNA, 15 bp, Homo sapiens
cgcttaaaggaaaat

SEQ ID NO: 271915 - DNA, 15 bp, Homo sapiens
acgcttaaaggaaaa

SEQ ID NO: 271916 - DNA, 15 bp, Homo sapiens
aacgcttaaaggaaa

SEQ ID NO: 271917 - DNA, 15 bp, Homo sapiens
aaacgcttaaaggaa

SEQ ID NO: 271918 - DNA, 15 bp, Homo sapiens
aaaacgcttaaagga

SEQ ID NO: 271919 - DNA, 15 bp, Homo sapiens
gaaaacgcttaaagg

SEQ ID NO: 271920 - DNA, 15 bp, Homo sapiens
agaaaacgcttaaag

SEQ ID NO: 271921 - DNA, 15 bp, Homo sapiens
cagaaaacgcttaaa

SEQ ID NO: 271922 - DNA, 15 bp, Homo sapiens
acagaaaacgcttaa

SEQ ID NO: 271923 - DNA, 15 bp, Homo sapiens
cacagaaaacgctta

SEQ ID NO: 271924 - DNA, 15 bp, Homo sapiens
acacagaaaacgctt

SEQ ID NO: 271925 - DNA, 15 bp, Homo sapiens
aacacagaaaacgct

SEQ ID NO: 271926 - DNA, 15 bp, Homo sapiens
taacacagaaaacgc

SEQ ID NO: 271927 - DNA, 15 bp, Homo sapiens
ttaacacagaaaacg

SEQ ID NO: 271928 - DNA, 15 bp, Homo sapiens
tttaacacagaaaac

SEQ ID NO: 271929 - DNA, 15 bp, Homo sapiens
ttttaacacagaaaa

SEQ ID NO: 271930 - DNA, 15 bp, Homo sapiens
tttttaacacagaaa

SEQ ID NO: 271931 - DNA, 15 bp, Homo sapiens
ttttttaacacagaa

SEQ ID NO: 271932 - DNA, 15 bp, Homo sapiens
tttttttaacacaga

SEQ ID NO: 271933 - DNA, 15 bp, Homo sapiens
ttttttttaacacag

SEQ ID NO: 271934 - DNA, 15 bp, Homo sapiens
attttttttaacaca

SEQ ID NO: 271935 - DNA, 15 bp, Homo sapiens
aattttttttaacac

SEQ ID NO: 271936 - DNA, 15 bp, Homo sapiens
caattttttttaaca

SEQ ID NO: 271937 - DNA, 15 bp, Homo sapiens
acaattttttttaac

SEQ ID NO: 271938 - DNA, 15 bp, Homo sapiens
tacaattttttttaa

SEQ ID NO: 271939 - DNA, 15 bp, Homo sapiens
ctacaatttttttta

SEQ ID NO: 271940 - DNA, 15 bp, Homo sapiens
actacaatttttttt

SEQ ID NO: 271941 - DNA, 15 bp, Homo sapiens
gactacaattttttt

SEQ ID NO: 271942 - DNA, 15 bp, Homo sapiens
agactacaatttttt

SEQ ID NO: 271943 - DNA, 15 bp, Homo sapiens
cagactacaattttt

SEQ ID NO: 271944 - DNA, 15 bp, Homo sapiens
gcagactacaatttt

SEQ ID NO: 271945 - DNA, 15 bp, Homo sapiens
ggcagactacaattt

SEQ ID NO: 271946 - DNA, 15 bp, Homo sapiens
aggcagactacaatt

SEQ ID NO: 271947 - DNA, 15 bp, Homo sapiens
taggcagactacaat

SEQ ID NO: 271948 - DNA, 15 bp, Homo sapiens
ttaggcagactacaa

SEQ ID NO: 271949 - DNA, 15 bp, Homo sapiens
tttaggcagactaca

SEQ ID NO: 271950 - DNA, 15 bp, Homo sapiens
gtttaggcagactac

SEQ ID NO: 271951 - DNA, 15 bp, Homo sapiens
agtttaggcagacta

SEQ ID NO: 271952 - DNA, 15 bp, Homo sapiens
cagtttaggcagact

SEQ ID NO: 271953 - DNA, 15 bp, Homo sapiens
tcagtttaggcagac

SEQ ID NO: 271954 - DNA, 15 bp, Homo sapiens
atcagtttaggcaga

SEQ ID NO: 271955 - DNA, 15 bp, Homo sapiens
aatcagtttaggcag

SEQ ID NO: 271956 - DNA, 15 bp, Homo sapiens
aaatcagtttaggca

SEQ ID NO: 271957 - DNA, 15 bp, Homo sapiens
taaatcagtttaggc

SEQ ID NO: 271958 - DNA, 15 bp, Homo sapiens
ataaatcagtttagg

SEQ ID NO: 271959 - DNA, 15 bp, Homo sapiens
cataaatcagtttag

SEQ ID NO: 271960 - DNA, 15 bp, Homo sapiens
acataaatcagttta

SEQ ID NO: 271961 - DNA, 15 bp, Homo sapiens
cacataaatcagttt

SEQ ID NO: 271962 - DNA, 15 bp, Homo sapiens
ccacataaatcagtt

SEQ ID NO: 271963 - DNA, 15 bp, Homo sapiens
cccacataaatcagt

SEQ ID NO: 271964 - DNA, 15 bp, Homo sapiens
acccacataaatcag

SEQ ID NO: 271965 - DNA, 15 bp, Homo sapiens
tacccacataaatca

SEQ ID NO: 271966 - DNA, 15 bp, Homo sapiens
ttacccacataaatc

SEQ ID NO: 271967 - DNA, 15 bp, Homo sapiens
attacccacataaat

SEQ ID NO: 271968 - DNA, 15 bp, Homo sapiens
aattacccacataaa

SEQ ID NO: 271969 - DNA, 15 bp, Homo sapiens
aaattacccacataa

SEQ ID NO: 271970 - DNA, 15 bp, Homo sapiens
taaattacccacata

SEQ ID NO: 271971 - DNA, 15 bp, Homo sapiens
ataaattacccacat

SEQ ID NO: 271972 - DNA, 15 bp, Homo sapiens
cataaattacccaca

SEQ ID NO: 271973 - DNA, 15 bp, Homo sapiens
ccataaattacccac

SEQ ID NO: 271974 - DNA, 15 bp, Homo sapiens
tccataaattaccca

SEQ ID NO: 271975 - DNA, 15 bp, Homo sapiens
ctccataaattaccc

SEQ ID NO: 271976 - DNA, 15 bp, Homo sapiens
actccataaattacc

SEQ ID NO: 271977 - DNA, 15 bp, Homo sapiens
tactccataaattac

SEQ ID NO: 271978 - DNA, 15 bp, Homo sapiens
gtactccataaatta

SEQ ID NO: 271979 - DNA, 15 bp, Homo sapiens
ggtactccataaatt

SEQ ID NO: 271980 - DNA, 15 bp, Homo sapiens
aggtactccataaat

SEQ ID NO: 271981 - DNA, 15 bp, Homo sapiens
caggtactccataaa

SEQ ID NO: 271982 - DNA, 15 bp, Homo sapiens
acaggtactccataa

SEQ ID NO: 271983 - DNA, 15 bp, Homo sapiens
aacaggtactccata

SEQ ID NO: 271984 - DNA, 15 bp, Homo sapiens
aaacaggtactccat

SEQ ID NO: 271985 - DNA, 15 bp, Homo sapiens
aaaacaggtactcca

SEQ ID NO: 271986 - DNA, 15 bp, Homo sapiens
aaaaacaggtactcc

SEQ ID NO: 271987 - DNA, 15 bp, Homo sapiens
gaaaaacaggtactc

SEQ ID NO: 271988 - DNA, 15 bp, Homo sapiens
agaaaaacaggtact

SEQ ID NO: 271989 - DNA, 15 bp, Homo sapiens
aagaaaaacaggtac

SEQ ID NO: 271990 - DNA, 15 bp, Homo sapiens
aaagaaaaacaggta

SEQ ID NO: 271991 - DNA, 15 bp, Homo sapiens
aaaagaaaaacaggt

SEQ ID NO: 271992 - DNA, 15 bp, Homo sapiens
aaaaagaaaaacagg

SEQ ID NO: 271993 - DNA, 15 bp, Homo sapiens
aaaaaagaaaaacag

SEQ ID NO: 271994 - DNA, 15 bp, Homo sapiens
gaaaaaagaaaaaca

SEQ ID NO: 271995 - DNA, 15 bp, Homo sapiens
agaaaaaagaaaaac

SEQ ID NO: 271996 - DNA, 15 bp, Homo sapiens
gagaaaaaagaaaaa

SEQ ID NO: 271997 - DNA, 15 bp, Homo sapiens
agagaaaaaagaaaa

SEQ ID NO: 271998 - DNA, 15 bp, Homo sapiens
gagagaaaaaagaaa

SEQ ID NO: 271999 - DNA, 15 bp, Homo sapiens
agagagaaaaaagaa

SEQ ID NO: 272000 - DNA, 15 bp, Homo sapiens
aagagagaaaaaaga

SEQ ID NO: 272001 - DNA, 15 bp, Homo sapiens
gaagagagaaaaaag

SEQ ID NO: 272002 - DNA, 15 bp, Homo sapiens
ggaagagagaaaaaa

SEQ ID NO: 272003 - DNA, 15 bp, Homo sapiens
aggaagagagaaaaa

SEQ ID NO: 272004 - DNA, 15 bp, Homo sapiens
aaggaagagagaaaa

SEQ ID NO: 272005 - DNA, 15 bp, Homo sapiens
aaaggaagagagaaa

SEQ ID NO: 272006 - DNA, 15 bp, Homo sapiens
aaaaggaagagagaa

SEQ ID NO: 272007 - DNA, 15 bp, Homo sapiens
aaaaaggaagagaga

SEQ ID NO: 272008 - DNA, 15 bp, Homo sapiens
gaaaaaggaagagag

SEQ ID NO: 272009 - DNA, 15 bp, Homo sapiens
agaaaaaggaagaga

SEQ ID NO: 272010 - DNA, 15 bp, Homo sapiens
aagaaaaaggaagag

SEQ ID NO: 272011 - DNA, 15 bp, Homo sapiens
gaagaaaaaggaaga

SEQ ID NO: 272012 - DNA, 15 bp, Homo sapiens
agaagaaaaaggaag

SEQ ID NO: 272013 - DNA, 15 bp, Homo sapiens
aagaagaaaaaggaa

SEQ ID NO: 272014 - DNA, 15 bp, Homo sapiens
caagaagaaaaagga

SEQ ID NO: 272015 - DNA, 15 bp, Homo sapiens
gcaagaagaaaaagg

SEQ ID NO: 272016 - DNA, 15 bp, Homo sapiens
agcaagaagaaaaag

SEQ ID NO: 272017 - DNA, 15 bp, Homo sapiens
cagcaagaagaaaaa

SEQ ID NO: 272018 - DNA, 15 bp, Homo sapiens
tcagcaagaagaaaa

SEQ ID NO: 272019 - DNA, 15 bp, Homo sapiens
ctcagcaagaagaaa

SEQ ID NO: 272020 - DNA, 15 bp, Homo sapiens
cctcagcaagaagaa

SEQ ID NO: 272021 - DNA, 15 bp, Homo sapiens
acctcagcaagaaga

SEQ ID NO: 272022 - DNA, 15 bp, Homo sapiens
cacctcagcaagaag

SEQ ID NO: 272023 - DNA, 15 bp, Homo sapiens
ccacctcagcaagaa

SEQ ID NO: 272024 - DNA, 15 bp, Homo sapiens
accacctcagcaaga

SEQ ID NO: 272025 - DNA, 15 bp, Homo sapiens
taccacctcagcaag

SEQ ID NO: 272026 - DNA, 15 bp, Homo sapiens
gtaccacctcagcaa

SEQ ID NO: 272027 - DNA, 15 bp, Homo sapiens
ggtaccacctcagca

SEQ ID NO: 272028 - DNA, 15 bp, Homo sapiens
aggtaccacctcagc

SEQ ID NO: 272029 - DNA, 15 bp, Homo sapiens
aaggtaccacctcag

SEQ ID NO: 272030 - DNA, 15 bp, Homo sapiens
aaaggtaccacctca

SEQ ID NO: 272031 - DNA, 15 bp, Homo sapiens
caaaggtaccacctc

SEQ ID NO: 272032 - DNA, 15 bp, Homo sapiens
gcaaaggtaccacct

SEQ ID NO: 272033 - DNA, 15 bp, Homo sapiens
agcaaaggtaccacc

SEQ ID NO: 272034 - DNA, 15 bp, Homo sapiens
cagcaaaggtaccac

SEQ ID NO: 272035 - DNA, 15 bp, Homo sapiens
gcagcaaaggtacca

SEQ ID NO: 272036 - DNA, 15 bp, Homo sapiens
ggcagcaaaggtacc

SEQ ID NO: 272037 - DNA, 15 bp, Homo sapiens
aggcagcaaaggtac

SEQ ID NO: 272038 - DNA, 15 bp, Homo sapiens
gaggcagcaaaggta

SEQ ID NO: 272039 - DNA, 15 bp, Homo sapiens
tgaggcagcaaaggt

SEQ ID NO: 272040 - DNA, 15 bp, Homo sapiens
atgaggcagcaaagg

SEQ ID NO: 272041 - DNA, 15 bp, Homo sapiens
gatgaggcagcaaag

SEQ ID NO: 272042 - DNA, 15 bp, Homo sapiens
ggatgaggcagcaaa

SEQ ID NO: 272043 - DNA, 15 bp, Homo sapiens
gggatgaggcagcaa

SEQ ID NO: 272044 - DNA, 15 bp, Homo sapiens
agggatgaggcagca

SEQ ID NO: 272045 - DNA, 15 bp, Homo sapiens
cagggatgaggcagc

SEQ ID NO: 272046 - DNA, 15 bp, Homo sapiens
ccagggatgaggcag

SEQ ID NO: 272047 - DNA, 15 bp, Homo sapiens
tccagggatgaggca

SEQ ID NO: 272048 - DNA, 15 bp, Homo sapiens
ctccagggatgaggc

SEQ ID NO: 272049 - DNA, 15 bp, Homo sapiens
actccagggatgagg

SEQ ID NO: 272050 - DNA, 15 bp, Homo sapiens
aactccagggatgag

SEQ ID NO: 272051 - DNA, 15 bp, Homo sapiens
aaactccagggatga

SEQ ID NO: 272052 - DNA, 15 bp, Homo sapiens
aaaactccagggatg

SEQ ID NO: 272053 - DNA, 15 bp, Homo sapiens
caaaactccagggat

SEQ ID NO: 272054 - DNA, 15 bp, Homo sapiens
gcaaaactccaggga

SEQ ID NO: 272055 - DNA, 15 bp, Homo sapiens
tgcaaaactccaggg

SEQ ID NO: 272056 - DNA, 15 bp, Homo sapiens
atgcaaaactccagg

SEQ ID NO: 272057 - DNA, 15 bp, Homo sapiens
catgcaaaactccag

SEQ ID NO: 272058 - DNA, 15 bp, Homo sapiens
tcatgcaaaactcca

SEQ ID NO: 272059 - DNA, 15 bp, Homo sapiens
ctcatgcaaaactcc

SEQ ID NO: 272060 - DNA, 15 bp, Homo sapiens
tctcatgcaaaactc

SEQ ID NO: 272061 - DNA, 15 bp, Homo sapiens
ctctcatgcaaaact

SEQ ID NO: 272062 - DNA, 15 bp, Homo sapiens
actctcatgcaaaac

SEQ ID NO: 272063 - DNA, 15 bp, Homo sapiens
aactctcatgcaaaa

SEQ ID NO: 272064 - DNA, 15 bp, Homo sapiens
caactctcatgcaaa

SEQ ID NO: 272065 - DNA, 15 bp, Homo sapiens
tcaactctcatgcaa

SEQ ID NO: 272066 - DNA, 15 bp, Homo sapiens
ttcaactctcatgca

SEQ ID NO: 272067 - DNA, 15 bp, Homo sapiens
attcaactctcatgc

SEQ ID NO: 272068 - DNA, 15 bp, Homo sapiens
aattcaactctcatg

SEQ ID NO: 272069 - DNA, 15 bp, Homo sapiens
aaattcaactctcat

SEQ ID NO: 272070 - DNA, 15 bp, Homo sapiens
aaaattcaactctca

SEQ ID NO: 272071 - DNA, 15 bp, Homo sapiens
caaaattcaactctc

SEQ ID NO: 272072 - DNA, 15 bp, Homo sapiens
tcaaaattcaactct

SEQ ID NO: 272073 - DNA, 15 bp, Homo sapiens
ctcaaaattcaactc

SEQ ID NO: 272074 - DNA, 15 bp, Homo sapiens
gctcaaaattcaact

SEQ ID NO: 272075 - DNA, 15 bp, Homo sapiens
agctcaaaattcaac

SEQ ID NO: 272076 - DNA, 15 bp, Homo sapiens
cagctcaaaattcaa

SEQ ID NO: 272077 - DNA, 15 bp, Homo sapiens
gcagctcaaaattca

SEQ ID NO: 272078 - DNA, 15 bp, Homo sapiens
tgcagctcaaaattc

SEQ ID NO: 272079 - DNA, 15 bp, Homo sapiens
ttgcagctcaaaatt

SEQ ID NO: 272080 - DNA, 15 bp, Homo sapiens
gttgcagctcaaaat

SEQ ID NO: 272081 - DNA, 15 bp, Homo sapiens
tgttgcagctcaaaa

SEQ ID NO: 272082 - DNA, 15 bp, Homo sapiens
ctgttgcagctcaaa

SEQ ID NO: 272083 - DNA, 15 bp, Homo sapiens
actgttgcagctcaa

SEQ ID NO: 272084 - DNA, 15 bp, Homo sapiens
aactgttgcagctca

SEQ ID NO: 272085 - DNA, 15 bp, Homo sapiens
aaactgttgcagctc

SEQ ID NO: 272086 - DNA, 15 bp, Homo sapiens
aaaactgttgcagct

SEQ ID NO: 272087 - DNA, 15 bp, Homo sapiens
aaaaactgttgcagc

SEQ ID NO: 272088 - DNA, 15 bp, Homo sapiens
gaaaaactgttgcag

SEQ ID NO: 272089 - DNA, 15 bp, Homo sapiens
ggaaaaactgttgca

SEQ ID NO: 272090 - DNA, 15 bp, Homo sapiens
gggaaaaactgttgc

SEQ ID NO: 272091 - DNA, 15 bp, Homo sapiens
tgggaaaaactgttg

SEQ ID NO: 272092 - DNA, 15 bp, Homo sapiens
atgggaaaaactgtt

SEQ ID NO: 272093 - DNA, 15 bp, Homo sapiens
aatgggaaaaactgt

SEQ ID NO: 272094 - DNA, 15 bp, Homo sapiens
aaatgggaaaaactg

SEQ ID NO: 272095 - DNA, 15 bp, Homo sapiens
taaatgggaaaaact

SEQ ID NO: 272096 - DNA, 15 bp, Homo sapiens
ttaaatgggaaaaac

SEQ ID NO: 272097 - DNA, 15 bp, Homo sapiens
cttaaatgggaaaaa

SEQ ID NO: 272098 - DNA, 15 bp, Homo sapiens
acttaaatgggaaaa

SEQ ID NO: 272099 - DNA, 15 bp, Homo sapiens
cacttaaatgggaaa

SEQ ID NO: 272100 - DNA, 15 bp, Homo sapiens
acacttaaatgggaa

SEQ ID NO: 272101 - DNA, 15 bp, Homo sapiens
aacacttaaatggga

SEQ ID NO: 272102 - DNA, 15 bp, Homo sapiens
taacacttaaatggg

SEQ ID NO: 272103 - DNA, 15 bp, Homo sapiens
ctaacacttaaatgg

SEQ ID NO: 272104 - DNA, 15 bp, Homo sapiens
tctaacacttaaatg

SEQ ID NO: 272105 - DNA, 15 bp, Homo sapiens
ctctaacacttaaat

SEQ ID NO: 272106 - DNA, 15 bp, Homo sapiens
actctaacacttaaa

SEQ ID NO: 272107 - DNA, 15 bp, Homo sapiens
aactctaacacttaa

SEQ ID NO: 272108 - DNA, 15 bp, Homo sapiens
caactctaacactta

SEQ ID NO: 272109 - DNA, 15 bp, Homo sapiens
tcaactctaacactt

SEQ ID NO: 272110 - DNA, 15 bp, Homo sapiens
gtcaactctaacact

SEQ ID NO: 272111 - DNA, 15 bp, Homo sapiens
agtcaactctaacac

SEQ ID NO: 272112 - DNA, 15 bp, Homo sapiens
cagtcaactctaaca

SEQ ID NO: 272113 - DNA, 15 bp, Homo sapiens
ccagtcaactctaac

SEQ ID NO: 272114 - DNA, 15 bp, Homo sapiens
accagtcaactctaa

SEQ ID NO: 272115 - DNA, 15 bp, Homo sapiens
taccagtcaactcta

SEQ ID NO: 272116 - DNA, 15 bp, Homo sapiens
gtaccagtcaactct

SEQ ID NO: 272117 - DNA, 15 bp, Homo sapiens
agtaccagtcaactc

SEQ ID NO: 272118 - DNA, 15 bp, Homo sapiens
aagtaccagtcaact

SEQ ID NO: 272119 - DNA, 15 bp, Homo sapiens
aaagtaccagtcaac

SEQ ID NO: 272120 - DNA, 15 bp, Homo sapiens
taaagtaccagtcaa

SEQ ID NO: 272121 - DNA, 15 bp, Homo sapiens
ataaagtaccagtca

SEQ ID NO: 272122 - DNA, 15 bp, Homo sapiens
gataaagtaccagtc

SEQ ID NO: 272123 - DNA, 15 bp, Homo sapiens
tgataaagtaccagt

SEQ ID NO: 272124 - DNA, 15 bp, Homo sapiens
ttgataaagtaccag

SEQ ID NO: 272125 - DNA, 15 bp, Homo sapiens
tttgataaagtacca

SEQ ID NO: 272126 - DNA, 15 bp, Homo sapiens
ctttgataaagtacc

SEQ ID NO: 272127 - DNA, 15 bp, Homo sapiens
actttgataaagtac

SEQ ID NO: 272128 - DNA, 15 bp, Homo sapiens
aactttgataaagta

SEQ ID NO: 272129 - DNA, 15 bp, Homo sapiens
gaactttgataaagt

SEQ ID NO: 272130 - DNA, 15 bp, Homo sapiens
ggaactttgataaag

SEQ ID NO: 272131 - DNA, 15 bp, Homo sapiens
cggaactttgataaa

SEQ ID NO: 272132 - DNA, 15 bp, Homo sapiens
acggaactttgataa

SEQ ID NO: 272133 - DNA, 15 bp, Homo sapiens
tacggaactttgata

SEQ ID NO: 272134 - DNA, 15 bp, Homo sapiens
ttacggaactttgat

SEQ ID NO: 272135 - DNA, 15 bp, Homo sapiens
cttacggaactttga

SEQ ID NO: 272136 - DNA, 15 bp, Homo sapiens
acttacggaactttg

SEQ ID NO: 272137 - DNA, 15 bp, Homo sapiens
tacttacggaacttt

SEQ ID NO: 272138 - DNA, 15 bp, Homo sapiens
gtacttacggaactt

SEQ ID NO: 272139 - DNA, 15 bp, Homo sapiens
tgtacttacggaact

SEQ ID NO: 272140 - DNA, 15 bp, Homo sapiens
atgtacttacggaac

SEQ ID NO: 272141 - DNA, 15 bp, Homo sapiens
aatgtacttacggaa

SEQ ID NO: 272142 - DNA, 15 bp, Homo sapiens
aaatgtacttacgga

SEQ ID NO: 272143 - DNA, 15 bp, Homo sapiens
gaaatgtacttacgg

SEQ ID NO: 272144 - DNA, 15 bp, Homo sapiens
tgaaatgtacttacg

SEQ ID NO: 272145 - DNA, 15 bp, Homo sapiens
atgaaatgtacttac

SEQ ID NO: 272146 - DNA, 15 bp, Homo sapiens
tatgaaatgtactta

SEQ ID NO: 272147 - DNA, 15 bp, Homo sapiens
gtatgaaatgtactt

SEQ ID NO: 272148 - DNA, 15 bp, Homo sapiens
tgtatgaaatgtact

SEQ ID NO: 272149 - DNA, 15 bp, Homo sapiens
ttgtatgaaatgtac

SEQ ID NO: 272150 - DNA, 15 bp, Homo sapiens
cttgtatgaaatgta

SEQ ID NO: 272151 - DNA, 15 bp, Homo sapiens
tcttgtatgaaatgt

SEQ ID NO: 272152 - DNA, 15 bp, Homo sapiens
ttcttgtatgaaatg

SEQ ID NO: 272153 - DNA, 15 bp, Homo sapiens
tttcttgtatgaaat

SEQ ID NO: 272154 - DNA, 15 bp, Homo sapiens
atttcttgtatgaaa

SEQ ID NO: 272155 - DNA, 15 bp, Homo sapiens
gatttcttgtatgaa

SEQ ID NO: 272156 - DNA, 15 bp, Homo sapiens
agatttcttgtatga

SEQ ID NO: 272157 - DNA, 15 bp, Homo sapiens
gagatttcttgtatg

SEQ ID NO: 272158 - DNA, 15 bp, Homo sapiens
tgagatttcttgtat

SEQ ID NO: 272159 - DNA, 15 bp, Homo sapiens
ctgagatttcttgta

SEQ ID NO: 272160 - DNA, 15 bp, Homo sapiens
gctgagatttcttgt

SEQ ID NO: 272161 - DNA, 15 bp, Homo sapiens
tgctgagatttcttg

SEQ ID NO: 272162 - DNA, 15 bp, Homo sapiens
ctgctgagatttctt

SEQ ID NO: 272163 - DNA, 15 bp, Homo sapiens
cctgctgagatttct

SEQ ID NO: 272164 - DNA, 15 bp, Homo sapiens
acctgctgagatttc

SEQ ID NO: 272165 - DNA, 15 bp, Homo sapiens
aacctgctgagattt

SEQ ID NO: 272166 - DNA, 15 bp, Homo sapiens
taacctgctgagatt

SEQ ID NO: 272167 - DNA, 15 bp, Homo sapiens
ctaacctgctgagat

SEQ ID NO: 272168 - DNA, 15 bp, Homo sapiens
tctaacctgctgaga

SEQ ID NO: 272169 - DNA, 15 bp, Homo sapiens
ttctaacctgctgag

SEQ ID NO: 272170 - DNA, 15 bp, Homo sapiens
attctaacctgctga

SEQ ID NO: 272171 - DNA, 15 bp, Homo sapiens
gattctaacctgctg

SEQ ID NO: 272172 - DNA, 15 bp, Homo sapiens
ggattctaacctgct

SEQ ID NO: 272173 - DNA, 15 bp, Homo sapiens
cggattctaacctgc

SEQ ID NO: 272174 - DNA, 15 bp, Homo sapiens
ccggattctaacctg

SEQ ID NO: 272175 - DNA, 15 bp, Homo sapiens
cccggattctaacct

SEQ ID NO: 272176 - DNA, 15 bp, Homo sapiens
ccccggattctaacc

SEQ ID NO: 272177 - DNA, 15 bp, Homo sapiens
tccccggattctaac

SEQ ID NO: 272178 - DNA, 15 bp, Homo sapiens
gtccccggattctaa

SEQ ID NO: 272179 - DNA, 15 bp, Homo sapiens
agtccccggattcta

SEQ ID NO: 272180 - DNA, 15 bp, Homo sapiens
aagtccccggattct

SEQ ID NO: 272181 - DNA, 15 bp, Homo sapiens
aaagtccccggattc

SEQ ID NO: 272182 - DNA, 15 bp, Homo sapiens
aaaagtccccggatt

SEQ ID NO: 272183 - DNA, 15 bp, Homo sapiens
aaaaagtccccggat

SEQ ID NO: 272184 - DNA, 15 bp, Homo sapiens
taaaaagtccccgga

SEQ ID NO: 272185 - DNA, 15 bp, Homo sapiens
ataaaaagtccccgg

SEQ ID NO: 272186 - DNA, 15 bp, Homo sapiens
aataaaaagtccccg

SEQ ID NO: 272187 - DNA, 15 bp, Homo sapiens
aaataaaaagtcccc

SEQ ID NO: 272188 - DNA, 15 bp, Homo sapiens
taaataaaaagtccc

SEQ ID NO: 272189 - DNA, 15 bp, Homo sapiens
ttaaataaaaagtcc

SEQ ID NO: 272190 - DNA, 15 bp, Homo sapiens
tttaaataaaaagtc

SEQ ID NO: 272191 - DNA, 15 bp, Homo sapiens
gtttaaataaaaagt

SEQ ID NO: 272192 - DNA, 15 bp, Homo sapiens
ggtttaaataaaaag

SEQ ID NO: 272193 - DNA, 15 bp, Homo sapiens
aggtttaaataaaaa

SEQ ID NO: 272194 - DNA, 15 bp, Homo sapiens
gaggtttaaataaaa

SEQ ID NO: 272195 - DNA, 15 bp, Homo sapiens
agaggtttaaataaa

SEQ ID NO: 272196 - DNA, 15 bp, Homo sapiens
tagaggtttaaataa

SEQ ID NO: 272197 - DNA, 15 bp, Homo sapiens
ttagaggtttaaata

SEQ ID NO: 272198 - DNA, 15 bp, Homo sapiens
attagaggtttaaat

SEQ ID NO: 272199 - DNA, 15 bp, Homo sapiens
cattagaggtttaaa

SEQ ID NO: 272200 - DNA, 15 bp, Homo sapiens
tcattagaggtttaa

SEQ ID NO: 272201 - DNA, 15 bp, Homo sapiens
gtcattagaggttta

SEQ ID NO: 272202 - DNA, 15 bp, Homo sapiens
tgtcattagaggttt

SEQ ID NO: 272203 - DNA, 15 bp, Homo sapiens
ctgtcattagaggtt

SEQ ID NO: 272204 - DNA, 15 bp, Homo sapiens
actgtcattagaggt

SEQ ID NO: 272205 - DNA, 15 bp, Homo sapiens
cactgtcattagagg

SEQ ID NO: 272206 - DNA, 15 bp, Homo sapiens
tcactgtcattagag

SEQ ID NO: 272207 - DNA, 15 bp, Homo sapiens
atcactgtcattaga

SEQ ID NO: 272208 - DNA, 15 bp, Homo sapiens
tatcactgtcattag

SEQ ID NO: 272209 - DNA, 15 bp, Homo sapiens
gtatcactgtcatta

SEQ ID NO: 272210 - DNA, 15 bp, Homo sapiens
agtatcactgtcatt

SEQ ID NO: 272211 - DNA, 15 bp, Homo sapiens
cagtatcactgtcat

SEQ ID NO: 272212 - DNA, 15 bp, Homo sapiens
ccagtatcactgtca

SEQ ID NO: 272213 - DNA, 15 bp, Homo sapiens
gccagtatcactgtc

SEQ ID NO: 272214 - DNA, 15 bp, Homo sapiens
ggccagtatcactgt

SEQ ID NO: 272215 - DNA, 15 bp, Homo sapiens
aggccagtatcactg

SEQ ID NO: 272216 - DNA, 15 bp, Homo sapiens
caggccagtatcact

SEQ ID NO: 272217 - DNA, 15 bp, Homo sapiens
acaggccagtatcac

SEQ ID NO: 272218 - DNA, 15 bp, Homo sapiens
tacaggccagtatca

SEQ ID NO: 272219 - DNA, 15 bp, Homo sapiens
ttacaggccagtatc

SEQ ID NO: 272220 - DNA, 15 bp, Homo sapiens
attacaggccagtat

SEQ ID NO: 272221 - DNA, 15 bp, Homo sapiens
aattacaggccagta

SEQ ID NO: 272222 - DNA, 15 bp, Homo sapiens
taattacaggccagt

SEQ ID NO: 272223 - DNA, 15 bp, Homo sapiens
ttaattacaggccag

SEQ ID NO: 272224 - DNA, 15 bp, Homo sapiens
cttaattacaggcca

SEQ ID NO: 272225 - DNA, 15 bp, Homo sapiens
ccttaattacaggcc

SEQ ID NO: 272226 - DNA, 15 bp, Homo sapiens
gccttaattacaggc

SEQ ID NO: 272227 - DNA, 15 bp, Homo sapiens
tgccttaattacagg

SEQ ID NO: 272228 - DNA, 15 bp, Homo sapiens
atgccttaattacag

SEQ ID NO: 272229 - DNA, 15 bp, Homo sapiens
aatgccttaattaca

SEQ ID NO: 272230 - DNA, 15 bp, Homo sapiens
aaatgccttaattac

SEQ ID NO: 272231 - DNA, 15 bp, Homo sapiens
gaaatgccttaatta

SEQ ID NO: 272232 - DNA, 15 bp, Homo sapiens
agaaatgccttaatt

SEQ ID NO: 272233 - DNA, 15 bp, Homo sapiens
cagaaatgccttaat

SEQ ID NO: 272234 - DNA, 15 bp, Homo sapiens
ccagaaatgccttaa

SEQ ID NO: 272235 - DNA, 15 bp, Homo sapiens
tccagaaatgcctta

SEQ ID NO: 272236 - DNA, 15 bp, Homo sapiens
ttccagaaatgcctt

SEQ ID NO: 272237 - DNA, 15 bp, Homo sapiens
cttccagaaatgcct

SEQ ID NO: 272238 - DNA, 15 bp, Homo sapiens
acttccagaaatgcc

SEQ ID NO: 272239 - DNA, 15 bp, Homo sapiens
aacttccagaaatgc

SEQ ID NO: 272240 - DNA, 15 bp, Homo sapiens
taacttccagaaatg

SEQ ID NO: 272241 - DNA, 15 bp, Homo sapiens
gtaacttccagaaat

SEQ ID NO: 272242 - DNA, 15 bp, Homo sapiens
agtaacttccagaaa

SEQ ID NO: 272243 - DNA, 15 bp, Homo sapiens
aagtaacttccagaa

SEQ ID NO: 272244 - DNA, 15 bp, Homo sapiens
gaagtaacttccaga

SEQ ID NO: 272245 - DNA, 15 bp, Homo sapiens
tgaagtaacttccag

SEQ ID NO: 272246 - DNA, 15 bp, Homo sapiens
ttgaagtaacttcca

SEQ ID NO: 272247 - DNA, 15 bp, Homo sapiens
attgaagtaacttcc

SEQ ID NO: 272248 - DNA, 15 bp, Homo sapiens
aattgaagtaacttc

SEQ ID NO: 272249 - DNA, 15 bp, Homo sapiens
caattgaagtaactt

SEQ ID NO: 272250 - DNA, 15 bp, Homo sapiens
tcaattgaagtaact

SEQ ID NO: 272251 - DNA, 15 bp, Homo sapiens
gtcaattgaagtaac

SEQ ID NO: 272252 - DNA, 15 bp, Homo sapiens
agtcaattgaagtaa

SEQ ID NO: 272253 - DNA, 15 bp, Homo sapiens
aagtcaattgaagta

SEQ ID NO: 272254 - DNA, 15 bp, Homo sapiens
caagtcaattgaagt

SEQ ID NO: 272255 - DNA, 15 bp, Homo sapiens
gcaagtcaattgaag

SEQ ID NO: 272256 - DNA, 15 bp, Homo sapiens
tgcaagtcaattgaa

SEQ ID NO: 272257 - DNA, 15 bp, Homo sapiens
ctgcaagtcaattga

SEQ ID NO: 272258 - DNA, 15 bp, Homo sapiens
tctgcaagtcaattg

SEQ ID NO: 272259 - DNA, 15 bp, Homo sapiens
ttctgcaagtcaatt

SEQ ID NO: 272260 - DNA, 15 bp, Homo sapiens
tttctgcaagtcaat

SEQ ID NO: 272261 - DNA, 15 bp, Homo sapiens
ctttctgcaagtcaa

SEQ ID NO: 272262 - DNA, 15 bp, Homo sapiens
cctttctgcaagtca

SEQ ID NO: 272263 - DNA, 15 bp, Homo sapiens
tcctttctgcaagtc

SEQ ID NO: 272264 - DNA, 15 bp, Homo sapiens
ttcctttctgcaagt

SEQ ID NO: 272265 - DNA, 15 bp, Homo sapiens
cttcctttctgcaag

SEQ ID NO: 272266 - DNA, 15 bp, Homo sapiens
ccttcctttctgcaa

SEQ ID NO: 272267 - DNA, 15 bp, Homo sapiens
gccttcctttctgca

SEQ ID NO: 272268 - DNA, 15 bp, Homo sapiens
tgccttcctttctgc

SEQ ID NO: 272269 - DNA, 15 bp, Homo sapiens
ctgccttcctttctg

SEQ ID NO: 272270 - DNA, 15 bp, Homo sapiens
tctgccttcctttct

SEQ ID NO: 272271 - DNA, 15 bp, Homo sapiens
ttctgccttcctttc

SEQ ID NO: 272272 - DNA, 15 bp, Homo sapiens
tttctgccttccttt

SEQ ID NO: 272273 - DNA, 15 bp, Homo sapiens
gtttctgccttcctt

SEQ ID NO: 272274 - DNA, 15 bp, Homo sapiens
ggtttctgccttcct

SEQ ID NO: 272275 - DNA, 15 bp, Homo sapiens
gggtttctgccttcc

SEQ ID NO: 272276 - DNA, 15 bp, Homo sapiens
agggtttctgccttc

SEQ ID NO: 272277 - DNA, 15 bp, Homo sapiens
aagggtttctgcctt

SEQ ID NO: 272278 - DNA, 15 bp, Homo sapiens
caagggtttctgcct

SEQ ID NO: 272279 - DNA, 15 bp, Homo sapiens
ccaagggtttctgcc

SEQ ID NO: 272280 - DNA, 15 bp, Homo sapiens
tccaagggtttctgc

SEQ ID NO: 272281 - DNA, 15 bp, Homo sapiens
ctccaagggtttctg

SEQ ID NO: 272282 - DNA, 15 bp, Homo sapiens
cctccaagggtttct

SEQ ID NO: 272283 - DNA, 15 bp, Homo sapiens
gcctccaagggtttc

SEQ ID NO: 272284 - DNA, 15 bp, Homo sapiens
agcctccaagggttt

SEQ ID NO: 272285 - DNA, 15 bp, Homo sapiens
cagcctccaagggtt

SEQ ID NO: 272286 - DNA, 15 bp, Homo sapiens
ccagcctccaagggt

SEQ ID NO: 272287 - DNA, 15 bp, Homo sapiens
accagcctccaaggg

SEQ ID NO: 272288 - DNA, 15 bp, Homo sapiens
taccagcctccaagg

SEQ ID NO: 272289 - DNA, 15 bp, Homo sapiens
gtaccagcctccaag

SEQ ID NO: 272290 - DNA, 15 bp, Homo sapiens
agtaccagcctccaa

SEQ ID NO: 272291 - DNA, 15 bp, Homo sapiens
tagtaccagcctcca

SEQ ID NO: 272292 - DNA, 15 bp, Homo sapiens
ttagtaccagcctcc

SEQ ID NO: 272293 - DNA, 15 bp, Homo sapiens
tttagtaccagcctc

SEQ ID NO: 272294 - DNA, 15 bp, Homo sapiens
atttagtaccagcct

SEQ ID NO: 272295 - DNA, 15 bp, Homo sapiens
aatttagtaccagcc

SEQ ID NO: 272296 - DNA, 15 bp, Homo sapiens
gaatttagtaccagc

SEQ ID NO: 272297 - DNA, 15 bp, Homo sapiens
tgaatttagtaccag

SEQ ID NO: 272298 - DNA, 15 bp, Homo sapiens
atgaatttagtacca

SEQ ID NO: 272299 - DNA, 15 bp, Homo sapiens
catgaatttagtacc

SEQ ID NO: 272300 - DNA, 15 bp, Homo sapiens
ccatgaatttagtac

SEQ ID NO: 272301 - DNA, 15 bp, Homo sapiens
cccatgaatttagta

SEQ ID NO: 272302 - DNA, 15 bp, Homo sapiens
ccccatgaatttagt

SEQ ID NO: 272303 - DNA, 15 bp, Homo sapiens
tccccatgaatttag

SEQ ID NO: 272304 - DNA, 15 bp, Homo sapiens
ttccccatgaattta

SEQ ID NO: 272305 - DNA, 15 bp, Homo sapiens
cttccccatgaattt

SEQ ID NO: 272306 - DNA, 15 bp, Homo sapiens
tcttccccatgaatt

SEQ ID NO: 272307 - DNA, 15 bp, Homo sapiens
gcctctcttccccat

SEQ ID NO: 272308 - DNA, 15 bp, Homo sapiens
tgcctctcttcccca

SEQ ID NO: 272309 - DNA, 15 bp, Homo sapiens
gtgcctctcttcccc

SEQ ID NO: 272310 - DNA, 15 bp, Homo sapiens
cgtgcctctcttccc

SEQ ID NO: 272311 - DNA, 15 bp, Homo sapiens
ccgtgcctctcttcc

SEQ ID NO: 272312 - DNA, 15 bp, Homo sapiens
cccgtgcctctcttc

SEQ ID NO: 272313 - DNA, 15 bp, Homo sapiens
tcccgtgcctctctt

SEQ ID NO: 272314 - DNA, 15 bp, Homo sapiens
ttcccgtgcctctct

SEQ ID NO: 272315 - DNA, 15 bp, Homo sapiens
cttcccgtgcctctc

SEQ ID NO: 272316 - DNA, 15 bp, Homo sapiens
gcttcccgtgcctct

SEQ ID NO: 272317 - DNA, 15 bp, Homo sapiens
agcttcccgtgcctc

SEQ ID NO: 272318 - DNA, 15 bp, Homo sapiens
cagcttcccgtgcct

SEQ ID NO: 272319 - DNA, 15 bp, Homo sapiens
acagcttcccgtgcc

SEQ ID NO: 272320 - DNA, 15 bp, Homo sapiens
cacagcttcccgtgc

SEQ ID NO: 272321 - DNA, 15 bp, Homo sapiens
ccacagcttcccgtg

SEQ ID NO: 272322 - DNA, 15 bp, Homo sapiens
accacagcttcccgt

SEQ ID NO: 272323 - DNA, 15 bp, Homo sapiens
aaccacagcttcccg

SEQ ID NO: 272324 - DNA, 15 bp, Homo sapiens
aaaccacagcttccc

SEQ ID NO: 272325 - DNA, 15 bp, Homo sapiens
caaaccacagcttcc

SEQ ID NO: 272326 - DNA, 15 bp, Homo sapiens
ccaaaccacagcttc

SEQ ID NO: 272327 - DNA, 15 bp, Homo sapiens
cccaaaccacagctt

SEQ ID NO: 272328 - DNA, 15 bp, Homo sapiens
tcccaaaccacagct

SEQ ID NO: 272329 - DNA, 15 bp, Homo sapiens
ctcccaaaccacagc

SEQ ID NO: 272330 - DNA, 15 bp, Homo sapiens
cctcccaaaccacag

SEQ ID NO: 272331 - DNA, 15 bp, Homo sapiens
tcctcccaaaccaca

SEQ ID NO: 272332 - DNA, 15 bp, Homo sapiens
ctcctcccaaaccac

SEQ ID NO: 272333 - DNA, 15 bp, Homo sapiens
cctcctcccaaacca

SEQ ID NO: 272334 - DNA, 15 bp, Homo sapiens
ccctcctcccaaacc

SEQ ID NO: 272335 - DNA, 15 bp, Homo sapiens
gccctcctcccaaac

SEQ ID NO: 272336 - DNA, 15 bp, Homo sapiens
agccctcctcccaaa

SEQ ID NO: 272337 - DNA, 15 bp, Homo sapiens
gagccctcctcccaa

SEQ ID NO: 272338 - DNA, 15 bp, Homo sapiens
tgagccctcctccca

SEQ ID NO: 272339 - DNA, 15 bp, Homo sapiens
atgagccctcctccc

SEQ ID NO: 272340 - DNA, 15 bp, Homo sapiens
catgagccctcctcc

SEQ ID NO: 272341 - DNA, 15 bp, Homo sapiens
acatgagccctcctc

SEQ ID NO: 272342 - DNA, 15 bp, Homo sapiens
cacatgagccctcct

SEQ ID NO: 272343 - DNA, 15 bp, Homo sapiens
acacatgagccctcc

SEQ ID NO: 272344 - DNA, 15 bp, Homo sapiens
tacacatgagccctc

SEQ ID NO: 272345 - DNA, 15 bp, Homo sapiens
ctacacatgagccct

SEQ ID NO: 272346 - DNA, 15 bp, Homo sapiens
gctacacatgagccc

SEQ ID NO: 272347 - DNA, 15 bp, Homo sapiens
cgctacacatgagcc

SEQ ID NO: 272348 - DNA, 15 bp, Homo sapiens
acgctacacatgagc

SEQ ID NO: 272349 - DNA, 15 bp, Homo sapiens
cacgctacacatgag

SEQ ID NO: 272350 - DNA, 15 bp, Homo sapiens
ccacgctacacatga

SEQ ID NO: 272351 - DNA, 15 bp, Homo sapiens
cccacgctacacatg

SEQ ID NO: 272352 - DNA, 15 bp, Homo sapiens
ccccacgctacacat

SEQ ID NO: 272353 - DNA, 15 bp, Homo sapiens
gccccacgctacaca

SEQ ID NO: 272354 - DNA, 15 bp, Homo sapiens
tgccccacgctacac

SEQ ID NO: 272355 - DNA, 15 bp, Homo sapiens
atgccccacgctaca

SEQ ID NO: 272356 - DNA, 15 bp, Homo sapiens
tatgccccacgctac

SEQ ID NO: 272357 - DNA, 15 bp, Homo sapiens
atatgccccacgcta

SEQ ID NO: 272358 - DNA, 15 bp, Homo sapiens
catatgccccacgct

SEQ ID NO: 272359 - DNA, 15 bp, Homo sapiens
acatatgccccacgc

SEQ ID NO: 272360 - DNA, 15 bp, Homo sapiens
cacatatgccccacg

SEQ ID NO: 272361 - DNA, 15 bp, Homo sapiens
acacatatgccccac

SEQ ID NO: 272362 - DNA, 15 bp, Homo sapiens
cacacatatgcccca

SEQ ID NO: 272363 - DNA, 15 bp, Homo sapiens
acacacatatgcccc

SEQ ID NO: 272364 - DNA, 15 bp, Homo sapiens
cacacacatatgccc

SEQ ID NO: 272365 - DNA, 15 bp, Homo sapiens
ttagcacacacatat

SEQ ID NO: 272366 - DNA, 15 bp, Homo sapiens
gttagcacacacata

SEQ ID NO: 272367 - DNA, 15 bp, Homo sapiens
agttagcacacacat

SEQ ID NO: 272368 - DNA, 15 bp, Homo sapiens
aagttagcacacaca

SEQ ID NO: 272369 - DNA, 15 bp, Homo sapiens
aaagttagcacacac

SEQ ID NO: 272370 - DNA, 15 bp, Homo sapiens
gaaagttagcacaca

SEQ ID NO: 272371 - DNA, 15 bp, Homo sapiens
ggaaagttagcacac

SEQ ID NO: 272372 - DNA, 15 bp, Homo sapiens
aggaaagttagcaca

SEQ ID NO: 272373 - DNA, 15 bp, Homo sapiens
caggaaagttagcac

SEQ ID NO: 272374 - DNA, 15 bp, Homo sapiens
ccaggaaagttagca

SEQ ID NO: 272375 - DNA, 15 bp, Homo sapiens
cccaggaaagttagc

SEQ ID NO: 272376 - DNA, 15 bp, Homo sapiens
acccaggaaagttag

SEQ ID NO: 272377 - DNA, 15 bp, Homo sapiens
aacccaggaaagtta

SEQ ID NO: 272378 - DNA, 15 bp, Homo sapiens
aaacccaggaaagtt

SEQ ID NO: 272379 - DNA, 15 bp, Homo sapiens
gaaacccaggaaagt

SEQ ID NO: 272380 - DNA, 15 bp, Homo sapiens
agaaacccaggaaag

SEQ ID NO: 272381 - DNA, 15 bp, Homo sapiens
cagaaacccaggaaa

SEQ ID NO: 272382 - DNA, 15 bp, Homo sapiens
acagaaacccaggaa

SEQ ID NO: 272383 - DNA, 15 bp, Homo sapiens
gacagaaacccagga

SEQ ID NO: 272384 - DNA, 15 bp, Homo sapiens
agacagaaacccagg

SEQ ID NO: 272385 - DNA, 15 bp, Homo sapiens
cagacagaaacccag

SEQ ID NO: 272386 - DNA, 15 bp, Homo sapiens
tcagacagaaaccca

SEQ ID NO: 272387 - DNA, 15 bp, Homo sapiens
ttcagacagaaaccc

SEQ ID NO: 272388 - DNA, 15 bp, Homo sapiens
attcagacagaaacc

SEQ ID NO: 272389 - DNA, 15 bp, Homo sapiens
aattcagacagaaac

SEQ ID NO: 272390 - DNA, 15 bp, Homo sapiens
caattcagacagaaa

SEQ ID NO: 272391 - DNA, 15 bp, Homo sapiens
gcaattcagacagaa

SEQ ID NO: 272392 - DNA, 15 bp, Homo sapiens
agcaattcagacaga

SEQ ID NO: 272393 - DNA, 15 bp, Homo sapiens
tagcaattcagacag

SEQ ID NO: 272394 - DNA, 15 bp, Homo sapiens
ttagcaattcagaca

SEQ ID NO: 272395 - DNA, 15 bp, Homo sapiens
attagcaattcagac

SEQ ID NO: 272396 - DNA, 15 bp, Homo sapiens
tattagcaattcaga

SEQ ID NO: 272397 - DNA, 15 bp, Homo sapiens
atattagcaattcag

SEQ ID NO: 272398 - DNA, 15 bp, Homo sapiens
catattagcaattca

SEQ ID NO: 272399 - DNA, 15 bp, Homo sapiens
tcatattagcaattc

SEQ ID NO: 272400 - DNA, 15 bp, Homo sapiens
gtcatattagcaatt

SEQ ID NO: 272401 - DNA, 15 bp, Homo sapiens
tgtcatattagcaat

SEQ ID NO: 272402 - DNA, 15 bp, Homo sapiens
atgtcatattagcaa

SEQ ID NO: 272403 - DNA, 15 bp, Homo sapiens
aatgtcatattagca

SEQ ID NO: 272404 - DNA, 15 bp, Homo sapiens
taatgtcatattagc

SEQ ID NO: 272405 - DNA, 15 bp, Homo sapiens
ctaatgtcatattag

SEQ ID NO: 272406 - DNA, 15 bp, Homo sapiens
cctaatgtcatatta

SEQ ID NO: 272407 - DNA, 15 bp, Homo sapiens
acctaatgtcatatt

SEQ ID NO: 272408 - DNA, 15 bp, Homo sapiens
cacctaatgtcatat

SEQ ID NO: 272409 - DNA, 15 bp, Homo sapiens
tcacctaatgtcata

SEQ ID NO: 272410 - DNA, 15 bp, Homo sapiens
ttcacctaatgtcat

SEQ ID NO: 272411 - DNA, 15 bp, Homo sapiens
tttcacctaatgtca

SEQ ID NO: 272412 - DNA, 15 bp, Homo sapiens
ctttcacctaatgtc

SEQ ID NO: 272413 - DNA, 15 bp, Homo sapiens
cctttcacctaatgt

SEQ ID NO: 272414 - DNA, 15 bp, Homo sapiens
gcctttcacctaatg

SEQ ID NO: 272415 - DNA, 15 bp, Homo sapiens
tgcctttcacctaat

SEQ ID NO: 272416 - DNA, 15 bp, Homo sapiens
atgcctttcacctaa

SEQ ID NO: 272417 - DNA, 15 bp, Homo sapiens
gatgcctttcaccta

SEQ ID NO: 272418 - DNA, 15 bp, Homo sapiens
agatgcctttcacct

SEQ ID NO: 272419 - DNA, 15 bp, Homo sapiens
aagatgcctttcacc

SEQ ID NO: 272420 - DNA, 15 bp, Homo sapiens
caagatgcctttcac

SEQ ID NO: 272421 - DNA, 15 bp, Homo sapiens
acaagatgcctttca

SEQ ID NO: 272422 - DNA, 15 bp, Homo sapiens
gacaagatgcctttc

SEQ ID NO: 272423 - DNA, 15 bp, Homo sapiens
tgacaagatgccttt

SEQ ID NO: 272424 - DNA, 15 bp, Homo sapiens
ttgacaagatgcctt

SEQ ID NO: 272425 - DNA, 15 bp, Homo sapiens
cttgacaagatgcct

SEQ ID NO: 272426 - DNA, 15 bp, Homo sapiens
tcttgacaagatgcc

SEQ ID NO: 272427 - DNA, 15 bp, Homo sapiens
ttcttgacaagatgc

SEQ ID NO: 272428 - DNA, 15 bp, Homo sapiens
attcttgacaagatg

SEQ ID NO: 272429 - DNA, 15 bp, Homo sapiens
cattcttgacaagat

SEQ ID NO: 272430 - DNA, 15 bp, Homo sapiens
gcattcttgacaaga

SEQ ID NO: 272431 - DNA, 15 bp, Homo sapiens
agcattcttgacaag

SEQ ID NO: 272432 - DNA, 15 bp, Homo sapiens
cagcattcttgacaa

SEQ ID NO: 272433 - DNA, 15 bp, Homo sapiens
gcagcattcttgaca

SEQ ID NO: 272434 - DNA, 15 bp, Homo sapiens
tgcagcattcttgac

SEQ ID NO: 272435 - DNA, 15 bp, Homo sapiens
atgcagcattcttga

SEQ ID NO: 272436 - DNA, 15 bp, Homo sapiens
catgcagcattcttg

SEQ ID NO: 272437 - DNA, 15 bp, Homo sapiens
acatgcagcattctt

SEQ ID NO: 272438 - DNA, 15 bp, Homo sapiens
gacatgcagcattct

SEQ ID NO: 272439 - DNA, 15 bp, Homo sapiens
agacatgcagcattc

SEQ ID NO: 272440 - DNA, 15 bp, Homo sapiens
cagacatgcagcatt

SEQ ID NO: 272441 - DNA, 15 bp, Homo sapiens
ccagacatgcagcat

SEQ ID NO: 272442 - DNA, 15 bp, Homo sapiens
accagacatgcagca

SEQ ID NO: 272443 - DNA, 15 bp, Homo sapiens
caccagacatgcagc

SEQ ID NO: 272444 - DNA, 15 bp, Homo sapiens
ccaccagacatgcag

SEQ ID NO: 272445 - DNA, 15 bp, Homo sapiens
tccaccagacatgca

SEQ ID NO: 272446 - DNA, 15 bp, Homo sapiens
gtccaccagacatgc

SEQ ID NO: 272447 - DNA, 15 bp, Homo sapiens
agtccaccagacatg

SEQ ID NO: 272448 - DNA, 15 bp, Homo sapiens
aagtccaccagacat

SEQ ID NO: 272449 - DNA, 15 bp, Homo sapiens
gaagtccaccagaca

SEQ ID NO: 272450 - DNA, 15 bp, Homo sapiens
ggaagtccaccagac

SEQ ID NO: 272451 - DNA, 15 bp, Homo sapiens
aggaagtccaccaga

SEQ ID NO: 272452 - DNA, 15 bp, Homo sapiens
caggaagtccaccag

SEQ ID NO: 272453 - DNA, 15 bp, Homo sapiens
tcaggaagtccacca

SEQ ID NO: 272454 - DNA, 15 bp, Homo sapiens
ttcaggaagtccacc

SEQ ID NO: 272455 - DNA, 15 bp, Homo sapiens
attcaggaagtccac

SEQ ID NO: 272456 - DNA, 15 bp, Homo sapiens
tattcaggaagtcca

SEQ ID NO: 272457 - DNA, 15 bp, Homo sapiens
atattcaggaagtcc

SEQ ID NO: 272458 - DNA, 15 bp, Homo sapiens
gatattcaggaagtc

SEQ ID NO: 272459 - DNA, 15 bp, Homo sapiens
tgatattcaggaagt

SEQ ID NO: 272460 - DNA, 15 bp, Homo sapiens
ttgatattcaggaag

SEQ ID NO: 272461 - DNA, 15 bp, Homo sapiens
tttgatattcaggaa

SEQ ID NO: 272462 - DNA, 15 bp, Homo sapiens
atttgatattcagga

SEQ ID NO: 272463 - DNA, 15 bp, Homo sapiens
gatttgatattcagg

SEQ ID NO: 272464 - DNA, 15 bp, Homo sapiens
agatttgatattcag

SEQ ID NO: 272465 - DNA, 15 bp, Homo sapiens
gagatttgatattca

SEQ ID NO: 272466 - DNA, 15 bp, Homo sapiens
ggagatttgatattc

SEQ ID NO: 272467 - DNA, 15 bp, Homo sapiens
cggagatttgatatt

SEQ ID NO: 272468 - DNA, 15 bp, Homo sapiens
tcggagatttgatat

SEQ ID NO: 272469 - DNA, 15 bp, Homo sapiens
ctcggagatttgata

SEQ ID NO: 272470 - DNA, 15 bp, Homo sapiens
gctcggagatttgat

SEQ ID NO: 272471 - DNA, 15 bp, Homo sapiens
ggctcggagatttga

SEQ ID NO: 272472 - DNA, 15 bp, Homo sapiens
aggctcggagatttg

SEQ ID NO: 272473 - DNA, 15 bp, Homo sapiens
aaggctcggagattt

SEQ ID NO: 272474 - DNA, 15 bp, Homo sapiens
gaaggctcggagatt

SEQ ID NO: 272475 - DNA, 15 bp, Homo sapiens
agaaggctcggagat

SEQ ID NO: 272476 - DNA, 15 bp, Homo sapiens
aagaaggctcggaga

SEQ ID NO: 272477 - DNA, 15 bp, Homo sapiens
aaagaaggctcggag

SEQ ID NO: 272478 - DNA, 15 bp, Homo sapiens
gaaagaaggctcgga

SEQ ID NO: 272479 - DNA, 15 bp, Homo sapiens
ggaaagaaggctcgg

SEQ ID NO: 272480 - DNA, 15 bp, Homo sapiens
tggaaagaaggctcg

SEQ ID NO: 272481 - DNA, 15 bp, Homo sapiens
ttggaaagaaggctc

SEQ ID NO: 272482 - DNA, 15 bp, Homo sapiens
gttggaaagaaggct

SEQ ID NO: 272483 - DNA, 15 bp, Homo sapiens
agttggaaagaaggc

SEQ ID NO: 272484 - DNA, 15 bp, Homo sapiens
cagttggaaagaagg

SEQ ID NO: 272485 - DNA, 15 bp, Homo sapiens
gcagttggaaagaag

SEQ ID NO: 272486 - DNA, 15 bp, Homo sapiens
ggcagttggaaagaa

SEQ ID NO: 272487 - DNA, 15 bp, Homo sapiens
gggcagttggaaaga

SEQ ID NO: 272488 - DNA, 15 bp, Homo sapiens
ggggcagttggaaag

SEQ ID NO: 272489 - DNA, 15 bp, Homo sapiens
aggggcagttggaaa

SEQ ID NO: 272490 - DNA, 15 bp, Homo sapiens
gaggggcagttggaa

SEQ ID NO: 272491 - DNA, 15 bp, Homo sapiens
ggaggggcagttgga

SEQ ID NO: 272492 - DNA, 15 bp, Homo sapiens
aggaggggcagttgg

SEQ ID NO: 272493 - DNA, 15 bp, Homo sapiens
caggaggggcagttg

SEQ ID NO: 272494 - DNA, 15 bp, Homo sapiens
ccaggaggggcagtt

SEQ ID NO: 272495 - DNA, 15 bp, Homo sapiens
gccaggaggggcagt

SEQ ID NO: 272496 - DNA, 15 bp, Homo sapiens
ggccaggaggggcag

SEQ ID NO: 272497 - DNA, 15 bp, Homo sapiens
tggccaggaggggca

SEQ ID NO: 272498 - DNA, 15 bp, Homo sapiens
ctggccaggaggggc

SEQ ID NO: 272499 - DNA, 15 bp, Homo sapiens
gctggccaggagggg

SEQ ID NO: 272500 - DNA, 15 bp, Homo sapiens
ggctggccaggaggg

SEQ ID NO: 272501 - DNA, 15 bp, Homo sapiens
aggctggccaggagg

SEQ ID NO: 272502 - DNA, 15 bp, Homo sapiens
gaggctggccaggag

SEQ ID NO: 272503 - DNA, 15 bp, Homo sapiens
tgaggctggccagga

SEQ ID NO: 272504 - DNA, 15 bp, Homo sapiens
atgaggctggccagg

SEQ ID NO: 272505 - DNA, 15 bp, Homo sapiens
catgaggctggccag

SEQ ID NO: 272506 - DNA, 15 bp, Homo sapiens
tcatgaggctggcca

SEQ ID NO: 272507 - DNA, 15 bp, Homo sapiens
ctcatgaggctggcc

SEQ ID NO: 272508 - DNA, 15 bp, Homo sapiens
tctcatgaggctggc

SEQ ID NO: 272509 - DNA, 15 bp, Homo sapiens
gtctcatgaggctgg

SEQ ID NO: 272510 - DNA, 15 bp, Homo sapiens
tgtctcatgaggctg

SEQ ID NO: 272511 - DNA, 15 bp, Homo sapiens
gtgtctcatgaggct

SEQ ID NO: 272512 - DNA, 15 bp, Homo sapiens
agtgtctcatgaggc

SEQ ID NO: 272513 - DNA, 15 bp, Homo sapiens
cagtgtctcatgagg

SEQ ID NO: 272514 - DNA, 15 bp, Homo sapiens
tcagtgtctcatgag

SEQ ID NO: 272515 - DNA, 15 bp, Homo sapiens
atcagtgtctcatga

SEQ ID NO: 272516 - DNA, 15 bp, Homo sapiens
catcagtgtctcatg

SEQ ID NO: 272517 - DNA, 15 bp, Homo sapiens
tcatcagtgtctcat

SEQ ID NO: 272518 - DNA, 15 bp, Homo sapiens
ctcatcagtgtctca

SEQ ID NO: 272519 - DNA, 15 bp, Homo sapiens
tctcatcagtgtctc

SEQ ID NO: 272520 - DNA, 15 bp, Homo sapiens
ttctcatcagtgtct

SEQ ID NO: 272521 - DNA, 15 bp, Homo sapiens
tttctcatcagtgtc

SEQ ID NO: 272522 - DNA, 15 bp, Homo sapiens
ttttctcatcagtgt

SEQ ID NO: 272523 - DNA, 15 bp, Homo sapiens
tttttctcatcagtg

SEQ ID NO: 272524 - DNA, 15 bp, Homo sapiens
atttttctcatcagt

SEQ ID NO: 272525 - DNA, 15 bp, Homo sapiens
catttttctcatcag

SEQ ID NO: 272526 - DNA, 15 bp, Homo sapiens
gcatttttctcatca

SEQ ID NO: 272527 - DNA, 15 bp, Homo sapiens
ggcatttttctcatc

SEQ ID NO: 272528 - DNA, 15 bp, Homo sapiens
tggcatttttctcat

SEQ ID NO: 272529 - DNA, 15 bp, Homo sapiens
gtggcatttttctca

SEQ ID NO: 272530 - DNA, 15 bp, Homo sapiens
tgtggcatttttctc

SEQ ID NO: 272531 - DNA, 15 bp, Homo sapiens
ctgtggcatttttct

SEQ ID NO: 272532 - DNA, 15 bp, Homo sapiens
gctgtggcatttttc

SEQ ID NO: 272533 - DNA, 15 bp, Homo sapiens
agctgtggcattttt

SEQ ID NO: 272534 - DNA, 15 bp, Homo sapiens
aagctgtggcatttt

SEQ ID NO: 272535 - DNA, 15 bp, Homo sapiens
aaagctgtggcattt

SEQ ID NO: 272536 - DNA, 15 bp, Homo sapiens
gaaagctgtggcatt

SEQ ID NO: 272537 - DNA, 15 bp, Homo sapiens
tgaaagctgtggcat

SEQ ID NO: 272538 - DNA, 15 bp, Homo sapiens
ttgaaagctgtggca

SEQ ID NO: 272539 - DNA, 15 bp, Homo sapiens
tttgaaagctgtggc

SEQ ID NO: 272540 - DNA, 15 bp, Homo sapiens
ttttgaaagctgtgg

SEQ ID NO: 272541 - DNA, 15 bp, Homo sapiens
gttttgaaagctgtg

SEQ ID NO: 272542 - DNA, 15 bp, Homo sapiens
tgttttgaaagctgt

SEQ ID NO: 272543 - DNA, 15 bp, Homo sapiens
ctgttttgaaagctg

SEQ ID NO: 272544 - DNA, 15 bp, Homo sapiens
actgttttgaaagct

SEQ ID NO: 272545 - DNA, 15 bp, Homo sapiens
aactgttttgaaagc

SEQ ID NO: 272546 - DNA, 15 bp, Homo sapiens
taactgttttgaaag

SEQ ID NO: 272547 - DNA, 15 bp, Homo sapiens
ttaactgttttgaaa

SEQ ID NO: 272548 - DNA, 15 bp, Homo sapiens
gttaactgttttgaa

SEQ ID NO: 272549 - DNA, 15 bp, Homo sapiens
ggttaactgttttga

SEQ ID NO: 272550 - DNA, 15 bp, Homo sapiens
aggttaactgttttg

SEQ ID NO: 272551 - DNA, 15 bp, Homo sapiens
gaggttaactgtttt

SEQ ID NO: 272552 - DNA, 15 bp, Homo sapiens
agaggttaactgttt

SEQ ID NO: 272553 - DNA, 15 bp, Homo sapiens
gagaggttaactgtt

SEQ ID NO: 272554 - DNA, 15 bp, Homo sapiens
ggagaggttaactgt

SEQ ID NO: 272555 - DNA, 15 bp, Homo sapiens
aggagaggttaactg

SEQ ID NO: 272556 - DNA, 15 bp, Homo sapiens
aaggagaggttaact

SEQ ID NO: 272557 - DNA, 15 bp, Homo sapiens
aaaggagaggttaac

SEQ ID NO: 272558 - DNA, 15 bp, Homo sapiens
caaaggagaggttaa

SEQ ID NO: 272559 - DNA, 15 bp, Homo sapiens
ccaaaggagaggtta

SEQ ID NO: 272560 - DNA, 15 bp, Homo sapiens
gccaaaggagaggtt

SEQ ID NO: 272561 - DNA, 15 bp, Homo sapiens
tgccaaaggagaggt

SEQ ID NO: 272562 - DNA, 15 bp, Homo sapiens
ttgccaaaggagagg

SEQ ID NO: 272563 - DNA, 15 bp, Homo sapiens
attgccaaaggagag

SEQ ID NO: 272564 - DNA, 15 bp, Homo sapiens
aattgccaaaggaga

SEQ ID NO: 272565 - DNA, 15 bp, Homo sapiens
gaattgccaaaggag

SEQ ID NO: 272566 - DNA, 15 bp, Homo sapiens
tgaattgccaaagga

SEQ ID NO: 272567 - DNA, 15 bp, Homo sapiens
gtgaattgccaaagg

SEQ ID NO: 272568 - DNA, 15 bp, Homo sapiens
tgtgaattgccaaag

SEQ ID NO: 272569 - DNA, 15 bp, Homo sapiens
ctgtgaattgccaaa

SEQ ID NO: 272570 - DNA, 15 bp, Homo sapiens
gctgtgaattgccaa

SEQ ID NO: 272571 - DNA, 15 bp, Homo sapiens
tgctgtgaattgcca

SEQ ID NO: 272572 - DNA, 15 bp, Homo sapiens
gtgctgtgaattgcc

SEQ ID NO: 272573 - DNA, 15 bp, Homo sapiens
agtgctgtgaattgc

SEQ ID NO: 272574 - DNA, 15 bp, Homo sapiens
cagtgctgtgaattg

SEQ ID NO: 272575 - DNA, 15 bp, Homo sapiens
ccagtgctgtgaatt

SEQ ID NO: 272576 - DNA, 15 bp, Homo sapiens
cccagtgctgtgaat

SEQ ID NO: 272577 - DNA, 15 bp, Homo sapiens
acccagtgctgtgaa

SEQ ID NO: 272578 - DNA, 15 bp, Homo sapiens
aacccagtgctgtga

SEQ ID NO: 272579 - DNA, 15 bp, Homo sapiens
aaacccagtgctgtg

SEQ ID NO: 272580 - DNA, 15 bp, Homo sapiens
taaacccagtgctgt

SEQ ID NO: 272581 - DNA, 15 bp, Homo sapiens
ataaacccagtgctg

SEQ ID NO: 272582 - DNA, 15 bp, Homo sapiens
aataaacccagtgct

SEQ ID NO: 272583 - DNA, 15 bp, Homo sapiens
gaataaacccagtgc

SEQ ID NO: 272584 - DNA, 15 bp, Homo sapiens
tgaataaacccagtg

SEQ ID NO: 272585 - DNA, 15 bp, Homo sapiens
ttgaataaacccagt

SEQ ID NO: 272586 - DNA, 15 bp, Homo sapiens
cttgaataaacccag

SEQ ID NO: 272587 - DNA, 15 bp, Homo sapiens
gcttgaataaaccca

SEQ ID NO: 272588 - DNA, 15 bp, Homo sapiens
agcttgaataaaccc

SEQ ID NO: 272589 - DNA, 15 bp, Homo sapiens
aagcttgaataaacc

SEQ ID NO: 272590 - DNA, 15 bp, Homo sapiens
taagcttgaataaac

SEQ ID NO: 272591 - DNA, 15 bp, Homo sapiens
gtaagcttgaataaa

SEQ ID NO: 272592 - DNA, 15 bp, Homo sapiens
cgtaagcttgaataa

SEQ ID NO: 272593 - DNA, 15 bp, Homo sapiens
tcgtaagcttgaata

SEQ ID NO: 272594 - DNA, 15 bp, Homo sapiens
atcgtaagcttgaat

SEQ ID NO: 272595 - DNA, 15 bp, Homo sapiens
catcgtaagcttgaa

SEQ ID NO: 272596 - DNA, 15 bp, Homo sapiens
tcatcgtaagcttga

SEQ ID NO: 272597 - DNA, 15 bp, Homo sapiens
gtcatcgtaagcttg

SEQ ID NO: 272598 - DNA, 15 bp, Homo sapiens
tgtcatcgtaagctt

SEQ ID NO: 272599 - DNA, 15 bp, Homo sapiens
gtgtcatcgtaagct

SEQ ID NO: 272600 - DNA, 15 bp, Homo sapiens
tgtgtcatcgtaagc

SEQ ID NO: 272601 - DNA, 15 bp, Homo sapiens
ctgtgtcatcgtaag

SEQ ID NO: 272602 - DNA, 15 bp, Homo sapiens
tctgtgtcatcgtaa

SEQ ID NO: 272603 - DNA, 15 bp, Homo sapiens
ttctgtgtcatcgta

SEQ ID NO: 272604 - DNA, 15 bp, Homo sapiens
attctgtgtcatcgt

SEQ ID NO: 272605 - DNA, 15 bp, Homo sapiens
aattctgtgtcatcg

SEQ ID NO: 272606 - DNA, 15 bp, Homo sapiens
aaattctgtgtcatc

SEQ ID NO: 272607 - DNA, 15 bp, Homo sapiens
aaaattctgtgtcat

SEQ ID NO: 272608 - DNA, 15 bp, Homo sapiens
gaaaattctgtgtca

SEQ ID NO: 272609 - DNA, 15 bp, Homo sapiens
ggaaaattctgtgtc

SEQ ID NO: 272610 - DNA, 15 bp, Homo sapiens
aggaaaattctgtgt

SEQ ID NO: 272611 - DNA, 15 bp, Homo sapiens
gaggaaaattctgtg

SEQ ID NO: 272612 - DNA, 15 bp, Homo sapiens
ggaggaaaattctgt

SEQ ID NO: 272613 - DNA, 15 bp, Homo sapiens
gggaggaaaattctg

SEQ ID NO: 272614 - DNA, 15 bp, Homo sapiens
agggaggaaaattct

SEQ ID NO: 272615 - DNA, 15 bp, Homo sapiens
aagggaggaaaattc

SEQ ID NO: 272616 - DNA, 15 bp, Homo sapiens
aaagggaggaaaatt

SEQ ID NO: 272617 - DNA, 15 bp, Homo sapiens
caaagggaggaaaat

SEQ ID NO: 272618 - DNA, 15 bp, Homo sapiens
tcaaagggaggaaaa

SEQ ID NO: 272619 - DNA, 15 bp, Homo sapiens
ttcaaagggaggaaa

SEQ ID NO: 272620 - DNA, 15 bp, Homo sapiens
tttcaaagggaggaa

SEQ ID NO: 272621 - DNA, 15 bp, Homo sapiens
ttttcaaagggagga

SEQ ID NO: 272622 - DNA, 15 bp, Homo sapiens
cttttcaaagggagg

SEQ ID NO: 272623 - DNA, 15 bp, Homo sapiens
acttttcaaagggag

SEQ ID NO: 272624 - DNA, 15 bp, Homo sapiens
tacttttcaaaggga

SEQ ID NO: 272625 - DNA, 15 bp, Homo sapiens
gtacttttcaaaggg

SEQ ID NO: 272626 - DNA, 15 bp, Homo sapiens
agtacttttcaaagg

SEQ ID NO: 272627 - DNA, 15 bp, Homo sapiens
cagtacttttcaaag

SEQ ID NO: 272628 - DNA, 15 bp, Homo sapiens
ccagtacttttcaaa

SEQ ID NO: 272629 - DNA, 15 bp, Homo sapiens
accagtacttttcaa

SEQ ID NO: 272630 - DNA, 15 bp, Homo sapiens
aaccagtacttttca

SEQ ID NO: 272631 - DNA, 15 bp, Homo sapiens
taaccagtacttttc

SEQ ID NO: 272632 - DNA, 15 bp, Homo sapiens
ttaaccagtactttt

SEQ ID NO: 272633 - DNA, 15 bp, Homo sapiens
cttaaccagtacttt

SEQ ID NO: 272634 - DNA, 15 bp, Homo sapiens
acttaaccagtactt

SEQ ID NO: 272635 - DNA, 15 bp, Homo sapiens
gacttaaccagtact

SEQ ID NO: 272636 - DNA, 15 bp, Homo sapiens
agacttaaccagtac

SEQ ID NO: 272637 - DNA, 15 bp, Homo sapiens
aagacttaaccagta

SEQ ID NO: 272638 - DNA, 15 bp, Homo sapiens
aaagacttaaccagt

SEQ ID NO: 272639 - DNA, 15 bp, Homo sapiens
gaaagacttaaccag

SEQ ID NO: 272640 - DNA, 15 bp, Homo sapiens
agaaagacttaacca

SEQ ID NO: 272641 - DNA, 15 bp, Homo sapiens
cagaaagacttaacc

SEQ ID NO: 272642 - DNA, 15 bp, Homo sapiens
acagaaagacttaac

SEQ ID NO: 272643 - DNA, 15 bp, Homo sapiens
gacagaaagacttaa

SEQ ID NO: 272644 - DNA, 15 bp, Homo sapiens
agacagaaagactta

SEQ ID NO: 272645 - DNA, 15 bp, Homo sapiens
gagacagaaagactt

SEQ ID NO: 272646 - DNA, 15 bp, Homo sapiens
ggagacagaaagact

SEQ ID NO: 272647 - DNA, 15 bp, Homo sapiens
aggagacagaaagac

SEQ ID NO: 272648 - DNA, 15 bp, Homo sapiens
caggagacagaaaga

SEQ ID NO: 272649 - DNA, 15 bp, Homo sapiens
gcaggagacagaaag

SEQ ID NO: 272650 - DNA, 15 bp, Homo sapiens
ggcaggagacagaaa

SEQ ID NO: 272651 - DNA, 15 bp, Homo sapiens
gggcaggagacagaa

SEQ ID NO: 272652 - DNA, 15 bp, Homo sapiens
agggcaggagacaga

SEQ ID NO: 272653 - DNA, 15 bp, Homo sapiens
aagggcaggagacag

SEQ ID NO: 272654 - DNA, 15 bp, Homo sapiens
gaagggcaggagaca

SEQ ID NO: 272655 - DNA, 15 bp, Homo sapiens
tgaagggcaggagac

SEQ ID NO: 272656 - DNA, 15 bp, Homo sapiens
ttgaagggcaggaga

SEQ ID NO: 272657 - DNA, 15 bp, Homo sapiens
tttgaagggcaggag

SEQ ID NO: 272658 - DNA, 15 bp, Homo sapiens
ttttgaagggcagga

SEQ ID NO: 272659 - DNA, 15 bp, Homo sapiens
cttttgaagggcagg

SEQ ID NO: 272660 - DNA, 15 bp, Homo sapiens
gcttttgaagggcag

SEQ ID NO: 272661 - DNA, 15 bp, Homo sapiens
tgcttttgaagggca

SEQ ID NO: 272662 - DNA, 15 bp, Homo sapiens
ctgcttttgaagggc

SEQ ID NO: 272663 - DNA, 15 bp, Homo sapiens
actgcttttgaaggg

SEQ ID NO: 272664 - DNA, 15 bp, Homo sapiens
gactgcttttgaagg

SEQ ID NO: 272665 - DNA, 15 bp, Homo sapiens
tgactgcttttgaag

SEQ ID NO: 272666 - DNA, 15 bp, Homo sapiens
atgactgcttttgaa

SEQ ID NO: 272667 - DNA, 15 bp, Homo sapiens
aatgactgcttttga

SEQ ID NO: 272668 - DNA, 15 bp, Homo sapiens
caatgactgcttttg

SEQ ID NO: 272669 - DNA, 15 bp, Homo sapiens
acaatgactgctttt

SEQ ID NO: 272670 - DNA, 15 bp, Homo sapiens
cacaatgactgcttt

SEQ ID NO: 272671 - DNA, 15 bp, Homo sapiens
acacaatgactgctt

SEQ ID NO: 272672 - DNA, 15 bp, Homo sapiens
aacacaatgactgct

SEQ ID NO: 272673 - DNA, 15 bp, Homo sapiens
aaacacaatgactgc

SEQ ID NO: 272674 - DNA, 15 bp, Homo sapiens
caaacacaatgactg

SEQ ID NO: 272675 - DNA, 15 bp, Homo sapiens
acaaacacaatgact

SEQ ID NO: 272676 - DNA, 15 bp, Homo sapiens
aacaaacacaatgac

SEQ ID NO: 272677 - DNA, 15 bp, Homo sapiens
aaacaaacacaatga

SEQ ID NO: 272678 - DNA, 15 bp, Homo sapiens
aaaacaaacacaatg

SEQ ID NO: 272679 - DNA, 15 bp, Homo sapiens
aaaaacaaacacaat

SEQ ID NO: 272680 - DNA, 15 bp, Homo sapiens
aaaaaacaaacacaa

SEQ ID NO: 272681 - DNA, 15 bp, Homo sapiens
aaaaaaacaaacaca

SEQ ID NO: 272682 - DNA, 15 bp, Homo sapiens
gaaaaaaacaaacac

SEQ ID NO: 272683 - DNA, 15 bp, Homo sapiens
tgaaaaaaacaaaca

SEQ ID NO: 272684 - DNA, 15 bp, Homo sapiens
ctgaaaaaaacaaac

SEQ ID NO: 272685 - DNA, 15 bp, Homo sapiens
tctgaaaaaaacaaa

SEQ ID NO: 272686 - DNA, 15 bp, Homo sapiens
ctctgaaaaaaacaa

SEQ ID NO: 272687 - DNA, 15 bp, Homo sapiens
cctctgaaaaaaaca

SEQ ID NO: 272688 - DNA, 15 bp, Homo sapiens
acctctgaaaaaaac

SEQ ID NO: 272689 - DNA, 15 bp, Homo sapiens
tacctctgaaaaaaa

SEQ ID NO: 272690 - DNA, 15 bp, Homo sapiens
gtacctctgaaaaaa

SEQ ID NO: 272691 - DNA, 15 bp, Homo sapiens
ggtacctctgaaaaa

SEQ ID NO: 272692 - DNA, 15 bp, Homo sapiens
tggtacctctgaaaa

SEQ ID NO: 272693 - DNA, 15 bp, Homo sapiens
atggtacctctgaaa

SEQ ID NO: 272694 - DNA, 15 bp, Homo sapiens
gatggtacctctgaa

SEQ ID NO: 272695 - DNA, 15 bp, Homo sapiens
tgatggtacctctga

SEQ ID NO: 272696 - DNA, 15 bp, Homo sapiens
ctgatggtacctctg

SEQ ID NO: 272697 - DNA, 15 bp, Homo sapiens
cctgatggtacctct

SEQ ID NO: 272698 - DNA, 15 bp, Homo sapiens
ccctgatggtacctc

SEQ ID NO: 272699 - DNA, 15 bp, Homo sapiens
accctgatggtacct

SEQ ID NO: 272700 - DNA, 15 bp, Homo sapiens
aaccctgatggtacc

SEQ ID NO: 272701 - DNA, 15 bp, Homo sapiens
caaccctgatggtac

SEQ ID NO: 272702 - DNA, 15 bp, Homo sapiens
acaaccctgatggta

SEQ ID NO: 272703 - DNA, 15 bp, Homo sapiens
gacaaccctgatggt

SEQ ID NO: 272704 - DNA, 15 bp, Homo sapiens
tgacaaccctgatgg

SEQ ID NO: 272705 - DNA, 15 bp, Homo sapiens
ctgacaaccctgatg

SEQ ID NO: 272706 - DNA, 15 bp, Homo sapiens
tctgacaaccctgat

SEQ ID NO: 272707 - DNA, 15 bp, Homo sapiens
ttctgacaaccctga

SEQ ID NO: 272708 - DNA, 15 bp, Homo sapiens
tttctgacaaccctg

SEQ ID NO: 272709 - DNA, 15 bp, Homo sapiens
ctttctgacaaccct

SEQ ID NO: 272710 - DNA, 15 bp, Homo sapiens
actttctgacaaccc

SEQ ID NO: 272711 - DNA, 15 bp, Homo sapiens
cactttctgacaacc

SEQ ID NO: 272712 - DNA, 15 bp, Homo sapiens
ccactttctgacaac

SEQ ID NO: 272713 - DNA, 15 bp, Homo sapiens
tccactttctgacaa

SEQ ID NO: 272714 - DNA, 15 bp, Homo sapiens
ttccactttctgaca

SEQ ID NO: 272715 - DNA, 15 bp, Homo sapiens
attccactttctgac

SEQ ID NO: 272716 - DNA, 15 bp, Homo sapiens
aattccactttctga

SEQ ID NO: 272717 - DNA, 15 bp, Homo sapiens
aaattccactttctg

SEQ ID NO: 272718 - DNA, 15 bp, Homo sapiens
gaaattccactttct

SEQ ID NO: 272719 - DNA, 15 bp, Homo sapiens
ggaaattccactttc

SEQ ID NO: 272720 - DNA, 15 bp, Homo sapiens
gggaaattccacttt

SEQ ID NO: 272721 - DNA, 15 bp, Homo sapiens
cgggaaattccactt

SEQ ID NO: 272722 - DNA, 15 bp, Homo sapiens
gcgggaaattccact

SEQ ID NO: 272723 - DNA, 15 bp, Homo sapiens
ggcgggaaattccac

SEQ ID NO: 272724 - DNA, 15 bp, Homo sapiens
tggcgggaaattcca

SEQ ID NO: 272725 - DNA, 15 bp, Homo sapiens
ctggcgggaaattcc

SEQ ID NO: 272726 - DNA, 15 bp, Homo sapiens
tctggcgggaaattc

SEQ ID NO: 272727 - DNA, 15 bp, Homo sapiens
atctggcgggaaatt

SEQ ID NO: 272728 - DNA, 15 bp, Homo sapiens
gatctggcgggaaat

SEQ ID NO: 272729 - DNA, 15 bp, Homo sapiens
tgatctggcgggaaa

SEQ ID NO: 272730 - DNA, 15 bp, Homo sapiens
ctgatctggcgggaa

SEQ ID NO: 272731 - DNA, 15 bp, Homo sapiens
tctgatctggcggga

SEQ ID NO: 272732 - DNA, 15 bp, Homo sapiens
ttctgatctggcggg

SEQ ID NO: 272733 - DNA, 15 bp, Homo sapiens
attctgatctggcgg

SEQ ID NO: 272734 - DNA, 15 bp, Homo sapiens
aattctgatctggcg

SEQ ID NO: 272735 - DNA, 15 bp, Homo sapiens
aaattctgatctggc

SEQ ID NO: 272736 - DNA, 15 bp, Homo sapiens
gaaattctgatctgg

SEQ ID NO: 272737 - DNA, 15 bp, Homo sapiens
agaaattctgatctg

SEQ ID NO: 272738 - DNA, 15 bp, Homo sapiens
aagaaattctgatct

SEQ ID NO: 272739 - DNA, 15 bp, Homo sapiens
gaagaaattctgatc

SEQ ID NO: 272740 - DNA, 15 bp, Homo sapiens
tgaagaaattctgat

SEQ ID NO: 272741 - DNA, 15 bp, Homo sapiens
ctgaagaaattctga

SEQ ID NO: 272742 - DNA, 15 bp, Homo sapiens
gctgaagaaattctg

SEQ ID NO: 272743 - DNA, 15 bp, Homo sapiens
ggctgaagaaattct

SEQ ID NO: 272744 - DNA, 15 bp, Homo sapiens
aggctgaagaaattc

SEQ ID NO: 272745 - DNA, 15 bp, Homo sapiens
aaggctgaagaaatt

SEQ ID NO: 272746 - DNA, 15 bp, Homo sapiens
gaaggctgaagaaat

SEQ ID NO: 272747 - DNA, 15 bp, Homo sapiens
tgaaggctgaagaaa

SEQ ID NO: 272748 - DNA, 15 bp, Homo sapiens
atgaaggctgaagaa

SEQ ID NO: 272749 - DNA, 15 bp, Homo sapiens
aatgaaggctgaaga

SEQ ID NO: 272750 - DNA, 15 bp, Homo sapiens
gaatgaaggctgaag

SEQ ID NO: 272751 - DNA, 15 bp, Homo sapiens
tgaatgaaggctgaa

SEQ ID NO: 272752 - DNA, 15 bp, Homo sapiens
atgaatgaaggctga

SEQ ID NO: 272753 - DNA, 15 bp, Homo sapiens
catgaatgaaggctg

SEQ ID NO: 272754 - DNA, 15 bp, Homo sapiens
tcatgaatgaaggct

SEQ ID NO: 272755 - DNA, 15 bp, Homo sapiens
gtcatgaatgaaggc

SEQ ID NO: 272756 - DNA, 15 bp, Homo sapiens
ggtcatgaatgaagg

SEQ ID NO: 272757 - DNA, 15 bp, Homo sapiens
aggtcatgaatgaag

SEQ ID NO: 272758 - DNA, 15 bp, Homo sapiens
caggtcatgaatgaa

SEQ ID NO: 272759 - DNA, 15 bp, Homo sapiens
tcaggtcatgaatga

SEQ ID NO: 272760 - DNA, 15 bp, Homo sapiens
ctcaggtcatgaatg

SEQ ID NO: 272761 - DNA, 15 bp, Homo sapiens
actcaggtcatgaat

SEQ ID NO: 272762 - DNA, 15 bp, Homo sapiens
tactcaggtcatgaa

SEQ ID NO: 272763 - DNA, 15 bp, Homo sapiens
gtactcaggtcatga

SEQ ID NO: 272764 - DNA, 15 bp, Homo sapiens
agtactcaggtcatg

SEQ ID NO: 272765 - DNA, 15 bp, Homo sapiens
aagtactcaggtcat

SEQ ID NO: 272766 - DNA, 15 bp, Homo sapiens
aaagtactcaggtca

SEQ ID NO: 272767 - DNA, 15 bp, Homo sapiens
aaaagtactcaggtc

SEQ ID NO: 272768 - DNA, 15 bp, Homo sapiens
caaaagtactcaggt

SEQ ID NO: 272769 - DNA, 15 bp, Homo sapiens
ccaaaagtactcagg

SEQ ID NO: 272770 - DNA, 15 bp, Homo sapiens
accaaaagtactcag

SEQ ID NO: 272771 - DNA, 15 bp, Homo sapiens
aaccaaaagtactca

SEQ ID NO: 272772 - DNA, 15 bp, Homo sapiens
aaaccaaaagtactc

SEQ ID NO: 272773 - DNA, 15 bp, Homo sapiens
aaaaccaaaagtact

SEQ ID NO: 272774 - DNA, 15 bp, Homo sapiens
caaaaccaaaagtac

SEQ ID NO: 272775 - DNA, 15 bp, Homo sapiens
tcaaaaccaaaagta

SEQ ID NO: 272776 - DNA, 15 bp, Homo sapiens
ctcaaaaccaaaagt

SEQ ID NO: 272777 - DNA, 15 bp, Homo sapiens
cctcaaaaccaaaag

SEQ ID NO: 272778 - DNA, 15 bp, Homo sapiens
ccctcaaaaccaaaa

SEQ ID NO: 272779 - DNA, 15 bp, Homo sapiens
tccctcaaaaccaaa

SEQ ID NO: 272780 - DNA, 15 bp, Homo sapiens
gtccctcaaaaccaa

SEQ ID NO: 272781 - DNA, 15 bp, Homo sapiens
tgtccctcaaaacca

SEQ ID NO: 272782 - DNA, 15 bp, Homo sapiens
ttgtccctcaaaacc

SEQ ID NO: 272783 - DNA, 15 bp, Homo sapiens
tttgtccctcaaaac

SEQ ID NO: 272784 - DNA, 15 bp, Homo sapiens
gtttgtccctcaaaa

SEQ ID NO: 272785 - DNA, 15 bp, Homo sapiens
agtttgtccctcaaa

SEQ ID NO: 272786 - DNA, 15 bp, Homo sapiens
aagtttgtccctcaa

SEQ ID NO: 272787 - DNA, 15 bp, Homo sapiens
caagtttgtccctca

SEQ ID NO: 272788 - DNA, 15 bp, Homo sapiens
gcaagtttgtccctc

SEQ ID NO: 272789 - DNA, 15 bp, Homo sapiens
agcaagtttgtccct

SEQ ID NO: 272790 - DNA, 15 bp, Homo sapiens
gagcaagtttgtccc

SEQ ID NO: 272791 - DNA, 15 bp, Homo sapiens
agagcaagtttgtcc

SEQ ID NO: 272792 - DNA, 15 bp, Homo sapiens
tagagcaagtttgtc

SEQ ID NO: 272793 - DNA, 15 bp, Homo sapiens
atagagcaagtttgt

SEQ ID NO: 272794 - DNA, 15 bp, Homo sapiens
aatagagcaagtttg

SEQ ID NO: 272795 - DNA, 15 bp, Homo sapiens
aaatagagcaagttt

SEQ ID NO: 272796 - DNA, 15 bp, Homo sapiens
aaaatagagcaagtt

SEQ ID NO: 272797 - DNA, 15 bp, Homo sapiens
caaaatagagcaagt

SEQ ID NO: 272798 - DNA, 15 bp, Homo sapiens
tcaaaatagagcaag

SEQ ID NO: 272799 - DNA, 15 bp, Homo sapiens
ctcaaaatagagcaa

SEQ ID NO: 272800 - DNA, 15 bp, Homo sapiens
gctcaaaatagagca

SEQ ID NO: 272801 - DNA, 15 bp, Homo sapiens
tgctcaaaatagagc

SEQ ID NO: 272802 - DNA, 15 bp, Homo sapiens
gtgctcaaaatagag

SEQ ID NO: 272803 - DNA, 15 bp, Homo sapiens
agtgctcaaaataga

SEQ ID NO: 272804 - DNA, 15 bp, Homo sapiens
cagtgctcaaaatag

SEQ ID NO: 272805 - DNA, 15 bp, Homo sapiens
tcagtgctcaaaata

SEQ ID NO: 272806 - DNA, 15 bp, Homo sapiens
ttcagtgctcaaaat

SEQ ID NO: 272807 - DNA, 15 bp, Homo sapiens
cttcagtgctcaaaa

SEQ ID NO: 272808 - DNA, 15 bp, Homo sapiens
ccttcagtgctcaaa

SEQ ID NO: 272809 - DNA, 15 bp, Homo sapiens
tccttcagtgctcaa

SEQ ID NO: 272810 - DNA, 15 bp, Homo sapiens
ttccttcagtgctca

SEQ ID NO: 272811 - DNA, 15 bp, Homo sapiens
tttccttcagtgctc

SEQ ID NO: 272812 - DNA, 15 bp, Homo sapiens
ttttccttcagtgct

SEQ ID NO: 272813 - DNA, 15 bp, Homo sapiens
gttttccttcagtgc

SEQ ID NO: 272814 - DNA, 15 bp, Homo sapiens
tgttttccttcagtg

SEQ ID NO: 272815 - DNA, 15 bp, Homo sapiens
atgttttccttcagt

SEQ ID NO: 272816 - DNA, 15 bp, Homo sapiens
gatgttttccttcag

SEQ ID NO: 272817 - DNA, 15 bp, Homo sapiens
agatgttttccttca

SEQ ID NO: 272818 - DNA, 15 bp, Homo sapiens
tagatgttttccttc

SEQ ID NO: 272819 - DNA, 15 bp, Homo sapiens
ttagatgttttcctt

SEQ ID NO: 272820 - DNA, 15 bp, Homo sapiens
gttagatgttttcct

SEQ ID NO: 272821 - DNA, 15 bp, Homo sapiens
agttagatgttttcc

SEQ ID NO: 272822 - DNA, 15 bp, Homo sapiens
gagttagatgttttc

SEQ ID NO: 272823 - DNA, 15 bp, Homo sapiens
ggagttagatgtttt

SEQ ID NO: 272824 - DNA, 15 bp, Homo sapiens
gggagttagatgttt

SEQ ID NO: 272825 - DNA, 15 bp, Homo sapiens
tgggagttagatgtt

SEQ ID NO: 272826 - DNA, 15 bp, Homo sapiens
ttgggagttagatgt

SEQ ID NO: 272827 - DNA, 15 bp, Homo sapiens
attgggagttagatg

SEQ ID NO: 272828 - DNA, 15 bp, Homo sapiens
aattgggagttagat

SEQ ID NO: 272829 - DNA, 15 bp, Homo sapiens
taattgggagttaga

SEQ ID NO: 272830 - DNA, 15 bp, Homo sapiens
ataattgggagttag

SEQ ID NO: 272831 - DNA, 15 bp, Homo sapiens
cataattgggagtta

SEQ ID NO: 272832 - DNA, 15 bp, Homo sapiens
ccataattgggagtt

SEQ ID NO: 272833 - DNA, 15 bp, Homo sapiens
cccataattgggagt

SEQ ID NO: 272834 - DNA, 15 bp, Homo sapiens
acccataattgggag

SEQ ID NO: 272835 - DNA, 15 bp, Homo sapiens
gacccataattggga

SEQ ID NO: 272836 - DNA, 15 bp, Homo sapiens
agacccataattggg

SEQ ID NO: 272837 - DNA, 15 bp, Homo sapiens
cagacccataattgg

SEQ ID NO: 272838 - DNA, 15 bp, Homo sapiens
acagacccataattg

SEQ ID NO: 272839 - DNA, 15 bp, Homo sapiens
cacagacccataatt

SEQ ID NO: 272840 - DNA, 15 bp, Homo sapiens
gcacagacccataat

SEQ ID NO: 272841 - DNA, 15 bp, Homo sapiens
tgcacagacccataa

SEQ ID NO: 272842 - DNA, 15 bp, Homo sapiens
gtgcacagacccata

SEQ ID NO: 272843 - DNA, 15 bp, Homo sapiens
cgtgcacagacccat

SEQ ID NO: 272844 - DNA, 15 bp, Homo sapiens
acgtgcacagaccca

SEQ ID NO: 272845 - DNA, 15 bp, Homo sapiens
cacgtgcacagaccc

SEQ ID NO: 272846 - DNA, 15 bp, Homo sapiens
tcacgtgcacagacc

SEQ ID NO: 272847 - DNA, 15 bp, Homo sapiens
ttcacgtgcacagac

SEQ ID NO: 272848 - DNA, 15 bp, Homo sapiens
attcacgtgcacaga

SEQ ID NO: 272849 - DNA, 15 bp, Homo sapiens
tattcacgtgcacag

SEQ ID NO: 272850 - DNA, 15 bp, Homo sapiens
ttattcacgtgcaca

SEQ ID NO: 272851 - DNA, 15 bp, Homo sapiens
attattcacgtgcac

SEQ ID NO: 272852 - DNA, 15 bp, Homo sapiens
aattattcacgtgca

SEQ ID NO: 272853 - DNA, 15 bp, Homo sapiens
caattattcacgtgc

SEQ ID NO: 272854 - DNA, 15 bp, Homo sapiens
ccaattattcacgtg

SEQ ID NO: 272855 - DNA, 15 bp, Homo sapiens
cccaattattcacgt

SEQ ID NO: 272856 - DNA, 15 bp, Homo sapiens
acccaattattcacg

SEQ ID NO: 272857 - DNA, 15 bp, Homo sapiens
tacccaattattcac

SEQ ID NO: 272858 - DNA, 15 bp, Homo sapiens
ttacccaattattca

SEQ ID NO: 272859 - DNA, 15 bp, Homo sapiens
attacccaattattc

SEQ ID NO: 272860 - DNA, 15 bp, Homo sapiens
cattacccaattatt

SEQ ID NO: 272861 - DNA, 15 bp, Homo sapiens
ccattacccaattat

SEQ ID NO: 272862 - DNA, 15 bp, Homo sapiens
cccattacccaatta

SEQ ID NO: 272863 - DNA, 15 bp, Homo sapiens
tcccattacccaatt

SEQ ID NO: 272864 - DNA, 15 bp, Homo sapiens
atcccattacccaat

SEQ ID NO: 272865 - DNA, 15 bp, Homo sapiens
aatcccattacccaa

SEQ ID NO: 272866 - DNA, 15 bp, Homo sapiens
taatcccattaccca

SEQ ID NO: 272867 - DNA, 15 bp, Homo sapiens
ttaatcccattaccc

SEQ ID NO: 272868 - DNA, 15 bp, Homo sapiens
tttaatcccattacc

SEQ ID NO: 272869 - DNA, 15 bp, Homo sapiens
ctttaatcccattac

SEQ ID NO: 272870 - DNA, 15 bp, Homo sapiens
actttaatcccatta

SEQ ID NO: 272871 - DNA, 15 bp, Homo sapiens
cactttaatcccatt

SEQ ID NO: 272872 - DNA, 15 bp, Homo sapiens
gcactttaatcccat

SEQ ID NO: 272873 - DNA, 15 bp, Homo sapiens
agcactttaatccca

SEQ ID NO: 272874 - DNA, 15 bp, Homo sapiens
aagcactttaatccc

SEQ ID NO: 272875 - DNA, 15 bp, Homo sapiens
caagcactttaatcc

SEQ ID NO: 272876 - DNA, 15 bp, Homo sapiens
tcaagcactttaatc

SEQ ID NO: 272877 - DNA, 15 bp, Homo sapiens
ttcaagcactttaat

SEQ ID NO: 272878 - DNA, 15 bp, Homo sapiens
cttcaagcactttaa

SEQ ID NO: 272879 - DNA, 15 bp, Homo sapiens
tcttcaagcacttta

SEQ ID NO: 272880 - DNA, 15 bp, Homo sapiens
atcttcaagcacttt

SEQ ID NO: 272881 - DNA, 15 bp, Homo sapiens
tatcttcaagcactt

SEQ ID NO: 272882 - DNA, 15 bp, Homo sapiens
gtatcttcaagcact

SEQ ID NO: 272883 - DNA, 15 bp, Homo sapiens
tgtatcttcaagcac

SEQ ID NO: 272884 - DNA, 15 bp, Homo sapiens
ttgtatcttcaagca

SEQ ID NO: 272885 - DNA, 15 bp, Homo sapiens
gttgtatcttcaagc

SEQ ID NO: 272886 - DNA, 15 bp, Homo sapiens
ggttgtatcttcaag

SEQ ID NO: 272887 - DNA, 15 bp, Homo sapiens
gggttgtatcttcaa

SEQ ID NO: 272888 - DNA, 15 bp, Homo sapiens
agggttgtatcttca

SEQ ID NO: 272889 - DNA, 15 bp, Homo sapiens
aagggttgtatcttc

SEQ ID NO: 272890 - DNA, 15 bp, Homo sapiens
gaagggttgtatctt

SEQ ID NO: 272891 - DNA, 15 bp, Homo sapiens
ggaagggttgtatct

SEQ ID NO: 272892 - DNA, 15 bp, Homo sapiens
aggaagggttgtatc

SEQ ID NO: 272893 - DNA, 15 bp, Homo sapiens
gaggaagggttgtat

SEQ ID NO: 272894 - DNA, 15 bp, Homo sapiens
tgaggaagggttgta

SEQ ID NO: 272895 - DNA, 15 bp, Homo sapiens
ctgaggaagggttgt

SEQ ID NO: 272896 - DNA, 15 bp, Homo sapiens
cctgaggaagggttg

SEQ ID NO: 272897 - DNA, 15 bp, Homo sapiens
acctgaggaagggtt

SEQ ID NO: 272898 - DNA, 15 bp, Homo sapiens
cacctgaggaagggt

SEQ ID NO: 272899 - DNA, 15 bp, Homo sapiens
gcacctgaggaaggg

SEQ ID NO: 272900 - DNA, 15 bp, Homo sapiens
ggcacctgaggaagg

SEQ ID NO: 272901 - DNA, 15 bp, Homo sapiens
gggcacctgaggaag

SEQ ID NO: 272902 - DNA, 15 bp, Homo sapiens
ggggcacctgaggaa

SEQ ID NO: 272903 - DNA, 15 bp, Homo sapiens
aggggcacctgagga

SEQ ID NO: 272904 - DNA, 15 bp, Homo sapiens
aaggggcacctgagg

SEQ ID NO: 272905 - DNA, 15 bp, Homo sapiens
aaaggggcacctgag

SEQ ID NO: 272906 - DNA, 15 bp, Homo sapiens
aaaaggggcacctga

SEQ ID NO: 272907 - DNA, 15 bp, Homo sapiens
gaaaaggggcacctg

SEQ ID NO: 272908 - DNA, 15 bp, Homo sapiens
tgaaaaggggcacct

SEQ ID NO: 272909 - DNA, 15 bp, Homo sapiens
gtgaaaaggggcacc

SEQ ID NO: 272910 - DNA, 15 bp, Homo sapiens
tgtgaaaaggggcac

SEQ ID NO: 272911 - DNA, 15 bp, Homo sapiens
gtgtgaaaaggggca

SEQ ID NO: 272912 - DNA, 15 bp, Homo sapiens
tgtgtgaaaaggggc

SEQ ID NO: 272913 - DNA, 15 bp, Homo sapiens
atgtgtgaaaagggg

SEQ ID NO: 272914 - DNA, 15 bp, Homo sapiens
tatgtgtgaaaaggg

SEQ ID NO: 272915 - DNA, 15 bp, Homo sapiens
ttatgtgtgaaaagg

SEQ ID NO: 272916 - DNA, 15 bp, Homo sapiens
cttatgtgtgaaaag

SEQ ID NO: 272917 - DNA, 15 bp, Homo sapiens
ccttatgtgtgaaaa

SEQ ID NO: 272918 - DNA, 15 bp, Homo sapiens
tccttatgtgtgaaa

SEQ ID NO: 272919 - DNA, 15 bp, Homo sapiens
ttccttatgtgtgaa

SEQ ID NO: 272920 - DNA, 15 bp, Homo sapiens
tttccttatgtgtga

SEQ ID NO: 272921 - DNA, 15 bp, Homo sapiens
ctttccttatgtgtg

SEQ ID NO: 272922 - DNA, 15 bp, Homo sapiens
actttccttatgtgt

SEQ ID NO: 272923 - DNA, 15 bp, Homo sapiens
cactttccttatgtg

SEQ ID NO: 272924 - DNA, 15 bp, Homo sapiens
ccactttccttatgt

SEQ ID NO: 272925 - DNA, 15 bp, Homo sapiens
tccactttccttatg

SEQ ID NO: 272926 - DNA, 15 bp, Homo sapiens
ctccactttccttat

SEQ ID NO: 272927 - DNA, 15 bp, Homo sapiens
actccactttcctta

SEQ ID NO: 272928 - DNA, 15 bp, Homo sapiens
tactccactttcctt

SEQ ID NO: 272929 - DNA, 15 bp, Homo sapiens
gtactccactttcct

SEQ ID NO: 272930 - DNA, 15 bp, Homo sapiens
cgtactccactttcc

SEQ ID NO: 272931 - DNA, 15 bp, Homo sapiens
tcgtactccactttc

SEQ ID NO: 272932 - DNA, 15 bp, Homo sapiens
ttcgtactccacttt

SEQ ID NO: 272933 - DNA, 15 bp, Homo sapiens
cttcgtactccactt

SEQ ID NO: 272934 - DNA, 15 bp, Homo sapiens
ccttcgtactccact

SEQ ID NO: 272935 - DNA, 15 bp, Homo sapiens
cccttcgtactccac

SEQ ID NO: 272936 - DNA, 15 bp, Homo sapiens
gcccttcgtactcca

SEQ ID NO: 272937 - DNA, 15 bp, Homo sapiens
tgcccttcgtactcc

SEQ ID NO: 272938 - DNA, 15 bp, Homo sapiens
gtgcccttcgtactc

SEQ ID NO: 272939 - DNA, 15 bp, Homo sapiens
agtgcccttcgtact

SEQ ID NO: 272940 - DNA, 15 bp, Homo sapiens
cagtgcccttcgtac

SEQ ID NO: 272941 - DNA, 15 bp, Homo sapiens
ccagtgcccttcgta

SEQ ID NO: 272942 - DNA, 15 bp, Homo sapiens
gccagtgcccttcgt

SEQ ID NO: 272943 - DNA, 15 bp, Homo sapiens
agccagtgcccttcg

SEQ ID NO: 272944 - DNA, 15 bp, Homo sapiens
gagccagtgcccttc

SEQ ID NO: 272945 - DNA, 15 bp, Homo sapiens
tgagccagtgccctt

SEQ ID NO: 272946 - DNA, 15 bp, Homo sapiens
gtgagccagtgccct

SEQ ID NO: 272947 - DNA, 15 bp, Homo sapiens
cgtgagccagtgccc

SEQ ID NO: 272948 - DNA, 15 bp, Homo sapiens
ccgtgagccagtgcc

SEQ ID NO: 272949 - DNA, 15 bp, Homo sapiens
cccgtgagccagtgc

SEQ ID NO: 272950 - DNA, 15 bp, Homo sapiens
tcccgtgagccagtg

SEQ ID NO: 272951 - DNA, 15 bp, Homo sapiens
ttcccgtgagccagt

SEQ ID NO: 272952 - DNA, 15 bp, Homo sapiens
cttcccgtgagccag

SEQ ID NO: 272953 - DNA, 15 bp, Homo sapiens
ccttcccgtgagcca

SEQ ID NO: 272954 - DNA, 15 bp, Homo sapiens
tccttcccgtgagcc

SEQ ID NO: 272955 - DNA, 15 bp, Homo sapiens
ctccttcccgtgagc

SEQ ID NO: 272956 - DNA, 15 bp, Homo sapiens
actccttcccgtgag

SEQ ID NO: 272957 - DNA, 15 bp, Homo sapiens
cactccttcccgtga

SEQ ID NO: 272958 - DNA, 15 bp, Homo sapiens
ccactccttcccgtg

SEQ ID NO: 272959 - DNA, 15 bp, Homo sapiens
accactccttcccgt

SEQ ID NO: 272960 - DNA, 15 bp, Homo sapiens
caccactccttcccg

SEQ ID NO: 272961 - DNA, 15 bp, Homo sapiens
ccaccactccttccc

SEQ ID NO: 272962 - DNA, 15 bp, Homo sapiens
cccaccactccttcc

SEQ ID NO: 272963 - DNA, 15 bp, Homo sapiens
ccccaccactccttc

SEQ ID NO: 272964 - DNA, 15 bp, Homo sapiens
tccccaccactcctt

SEQ ID NO: 272965 - DNA, 15 bp, Homo sapiens
gtccccaccactcct

SEQ ID NO: 272966 - DNA, 15 bp, Homo sapiens
ggtccccaccactcc

SEQ ID NO: 272967 - DNA, 15 bp, Homo sapiens
gggtccccaccactc

SEQ ID NO: 272968 - DNA, 15 bp, Homo sapiens
ggggtccccaccact

SEQ ID NO: 272969 - DNA, 15 bp, Homo sapiens
tggggtccccaccac

SEQ ID NO: 272970 - DNA, 15 bp, Homo sapiens
ctggggtccccacca

SEQ ID NO: 272971 - DNA, 15 bp, Homo sapiens
cctggggtccccacc

SEQ ID NO: 272972 - DNA, 15 bp, Homo sapiens
gcctggggtccccac

SEQ ID NO: 272973 - DNA, 15 bp, Homo sapiens
ggcctggggtcccca

SEQ ID NO: 272974 - DNA, 15 bp, Homo sapiens
aggcctggggtcccc

SEQ ID NO: 272975 - DNA, 15 bp, Homo sapiens
aaggcctggggtccc

SEQ ID NO: 272976 - DNA, 15 bp, Homo sapiens
gaaggcctggggtcc

SEQ ID NO: 272977 - DNA, 15 bp, Homo sapiens
tgaaggcctggggtc

SEQ ID NO: 272978 - DNA, 15 bp, Homo sapiens
ctgaaggcctggggt

SEQ ID NO: 272979 - DNA, 15 bp, Homo sapiens
actgaaggcctgggg

SEQ ID NO: 272980 - DNA, 15 bp, Homo sapiens
gactgaaggcctggg

SEQ ID NO: 272981 - DNA, 15 bp, Homo sapiens
ggactgaaggcctgg

SEQ ID NO: 272982 - DNA, 15 bp, Homo sapiens
gggactgaaggcctg

SEQ ID NO: 272983 - DNA, 15 bp, Homo sapiens
agggactgaaggcct

SEQ ID NO: 272984 - DNA, 15 bp, Homo sapiens
gagggactgaaggcc

SEQ ID NO: 272985 - DNA, 15 bp, Homo sapiens
tgagggactgaaggc

SEQ ID NO: 272986 - DNA, 15 bp, Homo sapiens
atgagggactgaagg

SEQ ID NO: 272987 - DNA, 15 bp, Homo sapiens
aatgagggactgaag

SEQ ID NO: 272988 - DNA, 15 bp, Homo sapiens
aaatgagggactgaa

SEQ ID NO: 272989 - DNA, 15 bp, Homo sapiens
taaatgagggactga

SEQ ID NO: 272990 - DNA, 15 bp, Homo sapiens
ttaaatgagggactg

SEQ ID NO: 272991 - DNA, 15 bp, Homo sapiens
gttaaatgagggact

SEQ ID NO: 272992 - DNA, 15 bp, Homo sapiens
tgttaaatgagggac

SEQ ID NO: 272993 - DNA, 15 bp, Homo sapiens
ttgttaaatgaggga

SEQ ID NO: 272994 - DNA, 15 bp, Homo sapiens
cttgttaaatgaggg

SEQ ID NO: 272995 - DNA, 15 bp, Homo sapiens
ccttgttaaatgagg

SEQ ID NO: 272996 - DNA, 15 bp, Homo sapiens
accttgttaaatgag

SEQ ID NO: 272997 - DNA, 15 bp, Homo sapiens
aaccttgttaaatga

SEQ ID NO: 272998 - DNA, 15 bp, Homo sapiens
caaccttgttaaatg

SEQ ID NO: 272999 - DNA, 15 bp, Homo sapiens
acaaccttgttaaat

SEQ ID NO: 273000 - DNA, 15 bp, Homo sapiens
tacaaccttgttaaa

SEQ ID NO: 273001 - DNA, 15 bp, Homo sapiens
ttacaaccttgttaa

SEQ ID NO: 273002 - DNA, 15 bp, Homo sapiens
tttacaaccttgtta

SEQ ID NO: 273003 - DNA, 15 bp, Homo sapiens
ctttacaaccttgtt

SEQ ID NO: 273004 - DNA, 15 bp, Homo sapiens
actttacaaccttgt

SEQ ID NO: 273005 - DNA, 15 bp, Homo sapiens
gactttacaaccttg

SEQ ID NO: 273006 - DNA, 15 bp, Homo sapiens
agactttacaacctt

SEQ ID NO: 273007 - DNA, 15 bp, Homo sapiens
cagactttacaacct

SEQ ID NO: 273008 - DNA, 15 bp, Homo sapiens
tcagactttacaacc

SEQ ID NO: 273009 - DNA, 15 bp, Homo sapiens
atcagactttacaac

SEQ ID NO: 273010 - DNA, 15 bp, Homo sapiens
gatcagactttacaa

SEQ ID NO: 273011 - DNA, 15 bp, Homo sapiens
agatcagactttaca

SEQ ID NO: 273012 - DNA, 15 bp, Homo sapiens
cagatcagactttac

SEQ ID NO: 273013 - DNA, 15 bp, Homo sapiens
tcagatcagacttta

SEQ ID NO: 273014 - DNA, 15 bp, Homo sapiens
gtcagatcagacttt

SEQ ID NO: 273015 - DNA, 15 bp, Homo sapiens
agtcagatcagactt

SEQ ID NO: 273016 - DNA, 15 bp, Homo sapiens
aagtcagatcagact

SEQ ID NO: 273017 - DNA, 15 bp, Homo sapiens
gaagtcagatcagac

SEQ ID NO: 273018 - DNA, 15 bp, Homo sapiens
agaagtcagatcaga

SEQ ID NO: 273019 - DNA, 15 bp, Homo sapiens
aagaagtcagatcag

SEQ ID NO: 273020 - DNA, 15 bp, Homo sapiens
taagaagtcagatca

SEQ ID NO: 273021 - DNA, 15 bp, Homo sapiens
gtaagaagtcagatc

SEQ ID NO: 273022 - DNA, 15 bp, Homo sapiens
agtaagaagtcagat

SEQ ID NO: 273023 - DNA, 15 bp, Homo sapiens
cagtaagaagtcaga

SEQ ID NO: 273024 - DNA, 15 bp, Homo sapiens
gcagtaagaagtcag

SEQ ID NO: 273025 - DNA, 15 bp, Homo sapiens
tgcagtaagaagtca

SEQ ID NO: 273026 - DNA, 15 bp, Homo sapiens
ttgcagtaagaagtc

SEQ ID NO: 273027 - DNA, 15 bp, Homo sapiens
cttgcagtaagaagt

SEQ ID NO: 273028 - DNA, 15 bp, Homo sapiens
gcttgcagtaagaag

SEQ ID NO: 273029 - DNA, 15 bp, Homo sapiens
tgcttgcagtaagaa

SEQ ID NO: 273030 - DNA, 15 bp, Homo sapiens
gtgcttgcagtaaga

SEQ ID NO: 273031 - DNA, 15 bp, Homo sapiens
ggtgcttgcagtaag

SEQ ID NO: 273032 - DNA, 15 bp, Homo sapiens
cggtgcttgcagtaa

SEQ ID NO: 273033 - DNA, 15 bp, Homo sapiens
gcggtgcttgcagta

SEQ ID NO: 273034 - DNA, 15 bp, Homo sapiens
agcggtgcttgcagt

SEQ ID NO: 273035 - DNA, 15 bp, Homo sapiens
tagcggtgcttgcag

SEQ ID NO: 273036 - DNA, 15 bp, Homo sapiens
gtagcggtgcttgca

SEQ ID NO: 273037 - DNA, 15 bp, Homo sapiens
agtagcggtgcttgc

SEQ ID NO: 273038 - DNA, 15 bp, Homo sapiens
aagtagcggtgcttg

SEQ ID NO: 273039 - DNA, 15 bp, Homo sapiens
gaagtagcggtgctt

SEQ ID NO: 273040 - DNA, 15 bp, Homo sapiens
agaagtagcggtgct

SEQ ID NO: 273041 - DNA, 15 bp, Homo sapiens
tagaagtagcggtgc

SEQ ID NO: 273042 - DNA, 15 bp, Homo sapiens
atagaagtagcggtg

SEQ ID NO: 273043 - DNA, 15 bp, Homo sapiens
catagaagtagcggt

SEQ ID NO: 273044 - DNA, 15 bp, Homo sapiens
tcatagaagtagcgg

SEQ ID NO: 273045 - DNA, 15 bp, Homo sapiens
gtcatagaagtagcg

SEQ ID NO: 273046 - DNA, 15 bp, Homo sapiens
tgtcatagaagtagc

SEQ ID NO: 273047 - DNA, 15 bp, Homo sapiens
atgtcatagaagtag

SEQ ID NO: 273048 - DNA, 15 bp, Homo sapiens
gatgtcatagaagta

SEQ ID NO: 273049 - DNA, 15 bp, Homo sapiens
ggatgtcatagaagt

SEQ ID NO: 273050 - DNA, 15 bp, Homo sapiens
aggatgtcatagaag

SEQ ID NO: 273051 - DNA, 15 bp, Homo sapiens
gaggatgtcatagaa

SEQ ID NO: 273052 - DNA, 15 bp, Homo sapiens
ggaggatgtcataga

SEQ ID NO: 273053 - DNA, 15 bp, Homo sapiens
tggaggatgtcatag

SEQ ID NO: 273054 - DNA, 15 bp, Homo sapiens
atggaggatgtcata

SEQ ID NO: 273055 - DNA, 15 bp, Homo sapiens
catggaggatgtcat

SEQ ID NO: 273056 - DNA, 15 bp, Homo sapiens
gcatggaggatgtca

SEQ ID NO: 273057 - DNA, 15 bp, Homo sapiens
ggcatggaggatgtc

SEQ ID NO: 273058 - DNA, 15 bp, Homo sapiens
gggcatggaggatgt

SEQ ID NO: 273059 - DNA, 15 bp, Homo sapiens
agggcatggaggatg

SEQ ID NO: 273060 - DNA, 15 bp, Homo sapiens
aagggcatggaggat

SEQ ID NO: 273061 - DNA, 15 bp, Homo sapiens
aaagggcatggagga

SEQ ID NO: 273062 - DNA, 15 bp, Homo sapiens
aaaagggcatggagg

SEQ ID NO: 273063 - DNA, 15 bp, Homo sapiens
aaaaagggcatggag

SEQ ID NO: 273064 - DNA, 15 bp, Homo sapiens
taaaaagggcatgga

SEQ ID NO: 273065 - DNA, 15 bp, Homo sapiens
ataaaaagggcatgg

SEQ ID NO: 273066 - DNA, 15 bp, Homo sapiens
aataaaaagggcatg

SEQ ID NO: 273067 - DNA, 15 bp, Homo sapiens
aaataaaaagggcat

SEQ ID NO: 273068 - DNA, 15 bp, Homo sapiens
gaaataaaaagggca

SEQ ID NO: 273069 - DNA, 15 bp, Homo sapiens
tgaaataaaaagggc

SEQ ID NO: 273070 - DNA, 15 bp, Homo sapiens
ttgaaataaaaaggg

SEQ ID NO: 273071 - DNA, 15 bp, Homo sapiens
tttgaaataaaaagg

SEQ ID NO: 273072 - DNA, 15 bp, Homo sapiens
ttttgaaataaaaag

SEQ ID NO: 273073 - DNA, 15 bp, Homo sapiens
cttttgaaataaaaa

SEQ ID NO: 273074 - DNA, 15 bp, Homo sapiens
gcttttgaaataaaa

SEQ ID NO: 273075 - DNA, 15 bp, Homo sapiens
tgcttttgaaataaa

SEQ ID NO: 273076 - DNA, 15 bp, Homo sapiens
ctgcttttgaaataa

SEQ ID NO: 273077 - DNA, 15 bp, Homo sapiens
actgcttttgaaata

SEQ ID NO: 273078 - DNA, 15 bp, Homo sapiens
aactgcttttgaaat

SEQ ID NO: 273079 - DNA, 15 bp, Homo sapiens
aaactgcttttgaaa

SEQ ID NO: 273080 - DNA, 15 bp, Homo sapiens
taaactgcttttgaa

SEQ ID NO: 273081 - DNA, 15 bp, Homo sapiens
ttaaactgcttttga

SEQ ID NO: 273082 - DNA, 15 bp, Homo sapiens
attaaactgcttttg

SEQ ID NO: 273083 - DNA, 15 bp, Homo sapiens
tattaaactgctttt

SEQ ID NO: 273084 - DNA, 15 bp, Homo sapiens
atattaaactgcttt

SEQ ID NO: 273085 - DNA, 15 bp, Homo sapiens
catattaaactgctt

SEQ ID NO: 273086 - DNA, 15 bp, Homo sapiens
acatattaaactgct

SEQ ID NO: 273087 - DNA, 15 bp, Homo sapiens
aacatattaaactgc

SEQ ID NO: 273088 - DNA, 15 bp, Homo sapiens
taacatattaaactg

SEQ ID NO: 273089 - DNA, 15 bp, Homo sapiens
ataacatattaaact

SEQ ID NO: 273090 - DNA, 15 bp, Homo sapiens
aataacatattaaac

SEQ ID NO: 273091 - DNA, 15 bp, Homo sapiens
aaataacatattaaa

SEQ ID NO: 273092 - DNA, 15 bp, Homo sapiens
gaaataacatattaa

SEQ ID NO: 273093 - DNA, 15 bp, Homo sapiens
tgaaataacatatta

SEQ ID NO: 273094 - DNA, 15 bp, Homo sapiens
atgaaataacatatt

SEQ ID NO: 273095 - DNA, 15 bp, Homo sapiens
aatgaaataacatat

SEQ ID NO: 273096 - DNA, 15 bp, Homo sapiens
aaatgaaataacata

SEQ ID NO: 273097 - DNA, 15 bp, Homo sapiens
taaatgaaataacat

SEQ ID NO: 273098 - DNA, 15 bp, Homo sapiens
ttaaatgaaataaca

SEQ ID NO: 273099 - DNA, 15 bp, Homo sapiens
attaaatgaaataac

SEQ ID NO: 273100 - DNA, 15 bp, Homo sapiens
gattaaatgaaataa

SEQ ID NO: 273101 - DNA, 15 bp, Homo sapiens
agattaaatgaaata

SEQ ID NO: 273102 - DNA, 15 bp, Homo sapiens
gagattaaatgaaat

SEQ ID NO: 273103 - DNA, 15 bp, Homo sapiens
ggagattaaatgaaa

SEQ ID NO: 273104 - DNA, 15 bp, Homo sapiens
tggagattaaatgaa

SEQ ID NO: 273105 - DNA, 15 bp, Homo sapiens
gtggagattaaatga

SEQ ID NO: 273106 - DNA, 15 bp, Homo sapiens
agtggagattaaatg

SEQ ID NO: 273107 - DNA, 15 bp, Homo sapiens
cagtggagattaaat

SEQ ID NO: 273108 - DNA, 15 bp, Homo sapiens
gcagtggagattaaa

SEQ ID NO: 273109 - DNA, 15 bp, Homo sapiens
tgcagtggagattaa

SEQ ID NO: 273110 - DNA, 15 bp, Homo sapiens
ttgcagtggagatta

SEQ ID NO: 273111 - DNA, 15 bp, Homo sapiens
gttgcagtggagatt

SEQ ID NO: 273112 - DNA, 15 bp, Homo sapiens
agttgcagtggagat

SEQ ID NO: 273113 - DNA, 15 bp, Homo sapiens
tagttgcagtggaga

SEQ ID NO: 273114 - DNA, 15 bp, Homo sapiens
atagttgcagtggag

SEQ ID NO: 273115 - DNA, 15 bp, Homo sapiens
aatagttgcagtgga

SEQ ID NO: 273116 - DNA, 15 bp, Homo sapiens
aaatagttgcagtgg

SEQ ID NO: 273117 - DNA, 15 bp, Homo sapiens
gaaatagttgcagtg

SEQ ID NO: 273118 - DNA, 15 bp, Homo sapiens
ggaaatagttgcagt

SEQ ID NO: 273119 - DNA, 15 bp, Homo sapiens
tggaaatagttgcag

SEQ ID NO: 273120 - DNA, 15 bp, Homo sapiens
atggaaatagttgca

SEQ ID NO: 273121 - DNA, 15 bp, Homo sapiens
aatggaaatagttgc

SEQ ID NO: 273122 - DNA, 15 bp, Homo sapiens
aaatggaaatagttg

SEQ ID NO: 273123 - DNA, 15 bp, Homo sapiens
taaatggaaatagtt

SEQ ID NO: 273124 - DNA, 15 bp, Homo sapiens
ttaaatggaaatagt

SEQ ID NO: 273125 - DNA, 15 bp, Homo sapiens
tttaaatggaaatag

SEQ ID NO: 273126 - DNA, 15 bp, Homo sapiens
ttttaaatggaaata

SEQ ID NO: 273127 - DNA, 15 bp, Homo sapiens
attttaaatggaaat

SEQ ID NO: 273128 - DNA, 15 bp, Homo sapiens
aattttaaatggaaa

SEQ ID NO: 273129 - DNA, 15 bp, Homo sapiens
aaattttaaatggaa

SEQ ID NO: 273130 - DNA, 15 bp, Homo sapiens
aaaattttaaatgga

SEQ ID NO: 273131 - DNA, 15 bp, Homo sapiens
caaaattttaaatgg

SEQ ID NO: 273132 - DNA, 15 bp, Homo sapiens
acaaaattttaaatg

SEQ ID NO: 273133 - DNA, 15 bp, Homo sapiens
aacaaaattttaaat

SEQ ID NO: 273134 - DNA, 15 bp, Homo sapiens
taacaaaattttaaa

SEQ ID NO: 273135 - DNA, 15 bp, Homo sapiens
ctaacaaaattttaa

SEQ ID NO: 273136 - DNA, 15 bp, Homo sapiens
tctaacaaaatttta

SEQ ID NO: 273137 - DNA, 15 bp, Homo sapiens
atctaacaaaatttt

SEQ ID NO: 273138 - DNA, 15 bp, Homo sapiens
tatctaacaaaattt

SEQ ID NO: 273139 - DNA, 15 bp, Homo sapiens
ttatctaacaaaatt

SEQ ID NO: 273140 - DNA, 15 bp, Homo sapiens
attatctaacaaaat

SEQ ID NO: 273141 - DNA, 15 bp, Homo sapiens
gattatctaacaaaa

SEQ ID NO: 273142 - DNA, 15 bp, Homo sapiens
tgattatctaacaaa

SEQ ID NO: 273143 - DNA, 15 bp, Homo sapiens
ttgattatctaacaa

SEQ ID NO: 273144 - DNA, 15 bp, Homo sapiens
attgattatctaaca

SEQ ID NO: 273145 - DNA, 15 bp, Homo sapiens
tattgattatctaac

SEQ ID NO: 273146 - DNA, 15 bp, Homo sapiens
ctattgattatctaa

SEQ ID NO: 273147 - DNA, 15 bp, Homo sapiens
actattgattatcta

SEQ ID NO: 273148 - DNA, 15 bp, Homo sapiens
cactattgattatct

SEQ ID NO: 273149 - DNA, 15 bp, Homo sapiens
gcactattgattatc

SEQ ID NO: 273150 - DNA, 15 bp, Homo sapiens
agcactattgattat

SEQ ID NO: 273151 - DNA, 15 bp, Homo sapiens
gagcactattgatta

SEQ ID NO: 273152 - DNA, 15 bp, Homo sapiens
agagcactattgatt

SEQ ID NO: 273153 - DNA, 15 bp, Homo sapiens
tagagcactattgat

SEQ ID NO: 273154 - DNA, 15 bp, Homo sapiens
ttagagcactattga

SEQ ID NO: 273155 - DNA, 15 bp, Homo sapiens
tttagagcactattg

SEQ ID NO: 273156 - DNA, 15 bp, Homo sapiens
atttagagcactatt

SEQ ID NO: 273157 - DNA, 15 bp, Homo sapiens
tatttagagcactat

SEQ ID NO: 273158 - DNA, 15 bp, Homo sapiens
atatttagagcacta

SEQ ID NO: 273159 - DNA, 15 bp, Homo sapiens
catatttagagcact

SEQ ID NO: 273160 - DNA, 15 bp, Homo sapiens
tcatatttagagcac

SEQ ID NO: 273161 - DNA, 15 bp, Homo sapiens
ttcatatttagagca

SEQ ID NO: 273162 - DNA, 15 bp, Homo sapiens
gttcatatttagagc

SEQ ID NO: 273163 - DNA, 15 bp, Homo sapiens
ggttcatatttagag

SEQ ID NO: 273164 - DNA, 15 bp, Homo sapiens
tggttcatatttaga

SEQ ID NO: 273165 - DNA, 15 bp, Homo sapiens
ttggttcatatttag

SEQ ID NO: 273166 - DNA, 15 bp, Homo sapiens
attggttcatattta

SEQ ID NO: 273167 - DNA, 15 bp, Homo sapiens
aattggttcatattt

SEQ ID NO: 273168 - DNA, 15 bp, Homo sapiens
aaattggttcatatt

SEQ ID NO: 273169 - DNA, 15 bp, Homo sapiens
caaattggttcatat

SEQ ID NO: 273170 - DNA, 15 bp, Homo sapiens
ccaaattggttcata

SEQ ID NO: 273171 - DNA, 15 bp, Homo sapiens
tccaaattggttcat

SEQ ID NO: 273172 - DNA, 15 bp, Homo sapiens
ttccaaattggttca

SEQ ID NO: 273173 - DNA, 15 bp, Homo sapiens
cttccaaattggttc

SEQ ID NO: 273174 - DNA, 15 bp, Homo sapiens
tcttccaaattggtt

SEQ ID NO: 273175 - DNA, 15 bp, Homo sapiens
ttcttccaaattggt

SEQ ID NO: 273176 - DNA, 15 bp, Homo sapiens
tttcttccaaattgg

SEQ ID NO: 273177 - DNA, 15 bp, Homo sapiens
atttcttccaaattg

SEQ ID NO: 273178 - DNA, 15 bp, Homo sapiens
tatttcttccaaatt

SEQ ID NO: 273179 - DNA, 15 bp, Homo sapiens
atatttcttccaaat

SEQ ID NO: 273180 - DNA, 15 bp, Homo sapiens
catatttcttccaaa

SEQ ID NO: 273181 - DNA, 15 bp, Homo sapiens
tcatatttcttccaa

SEQ ID NO: 273182 - DNA, 15 bp, Homo sapiens
ttcatatttcttcca

SEQ ID NO: 273183 - DNA, 15 bp, Homo sapiens
cttcatatttcttcc

SEQ ID NO: 273184 - DNA, 15 bp, Homo sapiens
tcttcatatttcttc

SEQ ID NO: 273185 - DNA, 15 bp, Homo sapiens
ttcttcatatttctt

SEQ ID NO: 273186 - DNA, 15 bp, Homo sapiens
tttcttcatatttct

SEQ ID NO: 273187 - DNA, 15 bp, Homo sapiens
ttttcttcatatttc

SEQ ID NO: 273188 - DNA, 15 bp, Homo sapiens
cttttcttcatattt

SEQ ID NO: 273189 - DNA, 15 bp, Homo sapiens
acttttcttcatatt

SEQ ID NO: 273190 - DNA, 15 bp, Homo sapiens
gacttttcttcatat

SEQ ID NO: 273191 - DNA, 15 bp, Homo sapiens
tgacttttcttcata

SEQ ID NO: 273192 - DNA, 15 bp, Homo sapiens
atgacttttcttcat

SEQ ID NO: 273193 - DNA, 15 bp, Homo sapiens
gatgacttttcttca

SEQ ID NO: 273194 - DNA, 15 bp, Homo sapiens
agatgacttttcttc

SEQ ID NO: 273195 - DNA, 15 bp, Homo sapiens
aagatgacttttctt

SEQ ID NO: 273196 - DNA, 15 bp, Homo sapiens
aaagatgacttttct

SEQ ID NO: 273197 - DNA, 15 bp, Homo sapiens
aaaagatgacttttc

SEQ ID NO: 273198 - DNA, 15 bp, Homo sapiens
taaaagatgactttt

SEQ ID NO: 273199 - DNA, 15 bp, Homo sapiens
ctaaaagatgacttt

SEQ ID NO: 273200 - DNA, 15 bp, Homo sapiens
tctaaaagatgactt

SEQ ID NO: 273201 - DNA, 15 bp, Homo sapiens
ctctaaaagatgact

SEQ ID NO: 273202 - DNA, 15 bp, Homo sapiens
tctctaaaagatgac

SEQ ID NO: 273203 - DNA, 15 bp, Homo sapiens
gtctctaaaagatga

SEQ ID NO: 273204 - DNA, 15 bp, Homo sapiens
tgtctctaaaagatg

SEQ ID NO: 273205 - DNA, 15 bp, Homo sapiens
ttgtctctaaaagat

SEQ ID NO: 273206 - DNA, 15 bp, Homo sapiens
gttgtctctaaaaga

SEQ ID NO: 273207 - DNA, 15 bp, Homo sapiens
ggttgtctctaaaag

SEQ ID NO: 273208 - DNA, 15 bp, Homo sapiens
gggttgtctctaaaa

SEQ ID NO: 273209 - DNA, 15 bp, Homo sapiens
tgggttgtctctaaa

SEQ ID NO: 273210 - DNA, 15 bp, Homo sapiens
ttgggttgtctctaa

SEQ ID NO: 273211 - DNA, 15 bp, Homo sapiens
attgggttgtctcta

SEQ ID NO: 273212 - DNA, 15 bp, Homo sapiens
aattgggttgtctct

SEQ ID NO: 273213 - DNA, 15 bp, Homo sapiens
gaattgggttgtctc

SEQ ID NO: 273214 - DNA, 15 bp, Homo sapiens
tgaattgggttgtct

SEQ ID NO: 273215 - DNA, 15 bp, Homo sapiens
atgaattgggttgtc

SEQ ID NO: 273216 - DNA, 15 bp, Homo sapiens
catgaattgggttgt

SEQ ID NO: 273217 - DNA, 15 bp, Homo sapiens
ccatgaattgggttg

SEQ ID NO: 273218 - DNA, 15 bp, Homo sapiens
cccatgaattgggtt

SEQ ID NO: 273219 - DNA, 15 bp, Homo sapiens
gcccatgaattgggt

SEQ ID NO: 273220 - DNA, 15 bp, Homo sapiens
ggcccatgaattggg

SEQ ID NO: 273221 - DNA, 15 bp, Homo sapiens
aggcccatgaattgg

SEQ ID NO: 273222 - DNA, 15 bp, Homo sapiens
aaggcccatgaattg

SEQ ID NO: 273223 - DNA, 15 bp, Homo sapiens
caaggcccatgaatt

SEQ ID NO: 273224 - DNA, 15 bp, Homo sapiens
acaaggcccatgaat

SEQ ID NO: 273225 - DNA, 15 bp, Homo sapiens
tacaaggcccatgaa

SEQ ID NO: 273226 - DNA, 15 bp, Homo sapiens
ttacaaggcccatga

SEQ ID NO: 273227 - DNA, 15 bp, Homo sapiens
tttacaaggcccatg

SEQ ID NO: 273228 - DNA, 15 bp, Homo sapiens
gtttacaaggcccat

SEQ ID NO: 273229 - DNA, 15 bp, Homo sapiens
tgtttacaaggccca

SEQ ID NO: 273230 - DNA, 15 bp, Homo sapiens
atgtttacaaggccc

SEQ ID NO: 273231 - DNA, 15 bp, Homo sapiens
aatgtttacaaggcc

SEQ ID NO: 273232 - DNA, 15 bp, Homo sapiens
aaatgtttacaaggc

SEQ ID NO: 273233 - DNA, 15 bp, Homo sapiens
aaaatgtttacaagg

SEQ ID NO: 273234 - DNA, 15 bp, Homo sapiens
aaaaatgtttacaag

SEQ ID NO: 273235 - DNA, 15 bp, Homo sapiens
taaaaatgtttacaa

SEQ ID NO: 273236 - DNA, 15 bp, Homo sapiens
ataaaaatgtttaca

SEQ ID NO: 273237 - DNA, 15 bp, Homo sapiens
aataaaaatgtttac

SEQ ID NO: 273238 - DNA, 15 bp, Homo sapiens
aaataaaaatgttta

SEQ ID NO: 273239 - DNA, 15 bp, Homo sapiens
aaaataaaaatgttt

SEQ ID NO: 273240 - DNA, 15 bp, Homo sapiens
aaaaataaaaatgtt

SEQ ID NO: 273241 - DNA, 15 bp, Homo sapiens
aaaaaataaaaatgt

SEQ ID NO: 273242 - DNA, 15 bp, Homo sapiens
taaaaaataaaaatg

SEQ ID NO: 273243 - DNA, 15 bp, Homo sapiens
ctaaaaaataaaaat

SEQ ID NO: 273244 - DNA, 15 bp, Homo sapiens
cctaaaaaataaaaa

SEQ ID NO: 273245 - DNA, 15 bp, Homo sapiens
acctaaaaaataaaa

SEQ ID NO: 273246 - DNA, 15 bp, Homo sapiens
tacctaaaaaataaa

SEQ ID NO: 273247 - DNA, 15 bp, Homo sapiens
ttacctaaaaaataa

SEQ ID NO: 273248 - DNA, 15 bp, Homo sapiens
attacctaaaaaata

SEQ ID NO: 273249 - DNA, 15 bp, Homo sapiens
gattacctaaaaaat

SEQ ID NO: 273250 - DNA, 15 bp, Homo sapiens
tgattacctaaaaaa

SEQ ID NO: 273251 - DNA, 15 bp, Homo sapiens
atgattacctaaaaa

SEQ ID NO: 273252 - DNA, 15 bp, Homo sapiens
tatgattacctaaaa

SEQ ID NO: 273253 - DNA, 15 bp, Homo sapiens
ttatgattacctaaa

SEQ ID NO: 273254 - DNA, 15 bp, Homo sapiens
tttatgattacctaa

SEQ ID NO: 273255 - DNA, 15 bp, Homo sapiens
ttttatgattaccta

SEQ ID NO: 273256 - DNA, 15 bp, Homo sapiens
attttatgattacct

SEQ ID NO: 273257 - DNA, 15 bp, Homo sapiens
tattttatgattacc

SEQ ID NO: 273258 - DNA, 15 bp, Homo sapiens
ttattttatgattac

SEQ ID NO: 273259 - DNA, 15 bp, Homo sapiens
tttattttatgatta

SEQ ID NO: 273260 - DNA, 15 bp, Homo sapiens
ttttattttatgatt

SEQ ID NO: 273261 - DNA, 15 bp, Homo sapiens
attttattttatgat

SEQ ID NO: 273262 - DNA, 15 bp, Homo sapiens
aattttattttatga

SEQ ID NO: 273263 - DNA, 15 bp, Homo sapiens
caattttattttatg

SEQ ID NO: 273264 - DNA, 15 bp, Homo sapiens
tcaattttattttat

SEQ ID NO: 273265 - DNA, 15 bp, Homo sapiens
gtcaattttatttta

SEQ ID NO: 273266 - DNA, 15 bp, Homo sapiens
agtcaattttatttt

SEQ ID NO: 273267 - DNA, 15 bp, Homo sapiens
aagtcaattttattt

SEQ ID NO: 273268 - DNA, 15 bp, Homo sapiens
aaagtcaattttatt

SEQ ID NO: 273269 - DNA, 15 bp, Homo sapiens
aaaagtcaattttat

SEQ ID NO: 273270 - DNA, 15 bp, Homo sapiens
aaaaagtcaatttta

SEQ ID NO: 273271 - DNA, 15 bp, Homo sapiens
taaaaagtcaatttt

SEQ ID NO: 273272 - DNA, 15 bp, Homo sapiens
ttaaaaagtcaattt

SEQ ID NO: 273273 - DNA, 15 bp, Homo sapiens
tttaaaaagtcaatt

SEQ ID NO: 273274 - DNA, 15 bp, Homo sapiens
ttttaaaaagtcaat

SEQ ID NO: 273275 - DNA, 15 bp, Homo sapiens
tttttaaaaagtcaa

SEQ ID NO: 273276 - DNA, 15 bp, Homo sapiens
ttttttaaaaagtca

SEQ ID NO: 273277 - DNA, 15 bp, Homo sapiens
tttttttaaaaagtc

SEQ ID NO: 273278 - DNA, 15 bp, Homo sapiens
aatttttttaaaaag

SEQ ID NO: 273279 - DNA, 15 bp, Homo sapiens
aaatttttttaaaaa

SEQ ID NO: 273280 - DNA, 15 bp, Homo sapiens
caaatttttttaaaa

SEQ ID NO: 273281 - DNA, 15 bp, Homo sapiens
ccaaatttttttaaa

SEQ ID NO: 273282 - DNA, 15 bp, Homo sapiens
accaaatttttttaa

SEQ ID NO: 273283 - DNA, 15 bp, Homo sapiens
caccaaattttttta

SEQ ID NO: 273284 - DNA, 15 bp, Homo sapiens
acaccaaattttttt

SEQ ID NO: 273285 - DNA, 15 bp, Homo sapiens
cacaccaaatttttt

SEQ ID NO: 273286 - DNA, 15 bp, Homo sapiens
acacaccaaattttt

SEQ ID NO: 273287 - DNA, 15 bp, Homo sapiens
tacacaccaaatttt

SEQ ID NO: 273288 - DNA, 15 bp, Homo sapiens
ctacacaccaaattt

SEQ ID NO: 273289 - DNA, 15 bp, Homo sapiens
cctacacaccaaatt

SEQ ID NO: 273290 - DNA, 15 bp, Homo sapiens
acctacacaccaaat

SEQ ID NO: 273291 - DNA, 15 bp, Homo sapiens
gacctacacaccaaa

SEQ ID NO: 273292 - DNA, 15 bp, Homo sapiens
agacctacacaccaa

SEQ ID NO: 273293 - DNA, 15 bp, Homo sapiens
tagacctacacacca

SEQ ID NO: 273294 - DNA, 15 bp, Homo sapiens
atagacctacacacc

SEQ ID NO: 273295 - DNA, 15 bp, Homo sapiens
catagacctacacac

SEQ ID NO: 273296 - DNA, 15 bp, Homo sapiens
tcatagacctacaca

SEQ ID NO: 273297 - DNA, 15 bp, Homo sapiens
ttcatagacctacac

SEQ ID NO: 273298 - DNA, 15 bp, Homo sapiens
attcatagacctaca

SEQ ID NO: 273299 - DNA, 15 bp, Homo sapiens
aattcatagacctac

SEQ ID NO: 273300 - DNA, 15 bp, Homo sapiens
aaattcatagaccta

SEQ ID NO: 273301 - DNA, 15 bp, Homo sapiens
aaaattcatagacct

SEQ ID NO: 273302 - DNA, 15 bp, Homo sapiens
gaaaattcatagacc

SEQ ID NO: 273303 - DNA, 15 bp, Homo sapiens
tgaaaattcatagac

SEQ ID NO: 273304 - DNA, 15 bp, Homo sapiens
gtgaaaattcataga

SEQ ID NO: 273305 - DNA, 15 bp, Homo sapiens
tgtgaaaattcatag

SEQ ID NO: 273306 - DNA, 15 bp, Homo sapiens
ttgtgaaaattcata

SEQ ID NO: 273307 - DNA, 15 bp, Homo sapiens
tttgtgaaaattcat

SEQ ID NO: 273308 - DNA, 15 bp, Homo sapiens
atttgtgaaaattca

SEQ ID NO: 273309 - DNA, 15 bp, Homo sapiens
catttgtgaaaattc

SEQ ID NO: 273310 - DNA, 15 bp, Homo sapiens
acatttgtgaaaatt

SEQ ID NO: 273311 - DNA, 15 bp, Homo sapiens
tacatttgtgaaaat

SEQ ID NO: 273312 - DNA, 15 bp, Homo sapiens
atacatttgtgaaaa

SEQ ID NO: 273313 - DNA, 15 bp, Homo sapiens
catacatttgtgaaa

SEQ ID NO: 273314 - DNA, 15 bp, Homo sapiens
ccatacatttgtgaa

SEQ ID NO: 273315 - DNA, 15 bp, Homo sapiens
tccatacatttgtga

SEQ ID NO: 273316 - DNA, 15 bp, Homo sapiens
ctccatacatttgtg

SEQ ID NO: 273317 - DNA, 15 bp, Homo sapiens
cctccatacatttgt

SEQ ID NO: 273318 - DNA, 15 bp, Homo sapiens
tcattatctcctatt

SEQ ID NO: 273319 - DNA, 15 bp, Homo sapiens
gtcattatctcctat

SEQ ID NO: 273320 - DNA, 15 bp, Homo sapiens
agtcattatctccta

SEQ ID NO: 273321 - DNA, 15 bp, Homo sapiens
tagtcattatctcct

SEQ ID NO: 273322 - DNA, 15 bp, Homo sapiens
gtagtcattatctcc

SEQ ID NO: 273323 - DNA, 15 bp, Homo sapiens
agtagtcattatctc

SEQ ID NO: 273324 - DNA, 15 bp, Homo sapiens
aagtagtcattatct

SEQ ID NO: 273325 - DNA, 15 bp, Homo sapiens
aaagtagtcattatc

SEQ ID NO: 273326 - DNA, 15 bp, Homo sapiens
caaagtagtcattat

SEQ ID NO: 273327 - DNA, 15 bp, Homo sapiens
tcaaagtagtcatta

SEQ ID NO: 273328 - DNA, 15 bp, Homo sapiens
atcaaagtagtcatt

SEQ ID NO: 273329 - DNA, 15 bp, Homo sapiens
aatcaaagtagtcat

SEQ ID NO: 273330 - DNA, 15 bp, Homo sapiens
taatcaaagtagtca

SEQ ID NO: 273331 - DNA, 15 bp, Homo sapiens
gtaatcaaagtagtc

SEQ ID NO: 273332 - DNA, 15 bp, Homo sapiens
tgtaatcaaagtagt

SEQ ID NO: 273333 - DNA, 15 bp, Homo sapiens
gtgtaatcaaagtag

SEQ ID NO: 273334 - DNA, 15 bp, Homo sapiens
tgtgtaatcaaagta

SEQ ID NO: 273335 - DNA, 15 bp, Homo sapiens
ctgtgtaatcaaagt

SEQ ID NO: 273336 - DNA, 15 bp, Homo sapiens
cctgtgtaatcaaag

SEQ ID NO: 273337 - DNA, 15 bp, Homo sapiens
ccctgtgtaatcaaa

SEQ ID NO: 273338 - DNA, 15 bp, Homo sapiens
tccctgtgtaatcaa

SEQ ID NO: 273339 - DNA, 15 bp, Homo sapiens
ctccctgtgtaatca

SEQ ID NO: 273340 - DNA, 15 bp, Homo sapiens
cctccctgtgtaatc

SEQ ID NO: 273341 - DNA, 15 bp, Homo sapiens
gcctccctgtgtaat

SEQ ID NO: 273342 - DNA, 15 bp, Homo sapiens
tgcctccctgtgtaa

SEQ ID NO: 273343 - DNA, 15 bp, Homo sapiens
ctgcctccctgtgta

SEQ ID NO: 273344 - DNA, 15 bp, Homo sapiens
actgcctccctgtgt

SEQ ID NO: 273345 - DNA, 15 bp, Homo sapiens
tactgcctccctgtg

SEQ ID NO: 273346 - DNA, 15 bp, Homo sapiens
ttactgcctccctgt

SEQ ID NO: 273347 - DNA, 15 bp, Homo sapiens
cttactgcctccctg

SEQ ID NO: 273348 - DNA, 15 bp, Homo sapiens
ccttactgcctccct

SEQ ID NO: 273349 - DNA, 15 bp, Homo sapiens
tccttactgcctccc

SEQ ID NO: 273350 - DNA, 15 bp, Homo sapiens
gtccttactgcctcc

SEQ ID NO: 273351 - DNA, 15 bp, Homo sapiens
agtccttactgcctc

SEQ ID NO: 273352 - DNA, 15 bp, Homo sapiens
cagtccttactgcct

SEQ ID NO: 273353 - DNA, 15 bp, Homo sapiens
ccagtccttactgcc

SEQ ID NO: 273354 - DNA, 15 bp, Homo sapiens
accagtccttactgc

SEQ ID NO: 273355 - DNA, 15 bp, Homo sapiens
aaccagtccttactg

SEQ ID NO: 273356 - DNA, 15 bp, Homo sapiens
gaaccagtccttact

SEQ ID NO: 273357 - DNA, 15 bp, Homo sapiens
ggaaccagtccttac

SEQ ID NO: 273358 - DNA, 15 bp, Homo sapiens
aggaaccagtcctta

SEQ ID NO: 273359 - DNA, 15 bp, Homo sapiens
gaggaaccagtcctt

SEQ ID NO: 273360 - DNA, 15 bp, Homo sapiens
ggaggaaccagtcct

SEQ ID NO: 273361 - DNA, 15 bp, Homo sapiens
aggaggaaccagtcc

SEQ ID NO: 273362 - DNA, 15 bp, Homo sapiens
aaggaggaaccagtc

SEQ ID NO: 273363 - DNA, 15 bp, Homo sapiens
gaaggaggaaccagt

SEQ ID NO: 273364 - DNA, 15 bp, Homo sapiens
tgaaggaggaaccag

SEQ ID NO: 273365 - DNA, 15 bp, Homo sapiens
atgaaggaggaacca

SEQ ID NO: 273366 - DNA, 15 bp, Homo sapiens
gatgaaggaggaacc

SEQ ID NO: 273367 - DNA, 15 bp, Homo sapiens
agatgaaggaggaac

SEQ ID NO: 273368 - DNA, 15 bp, Homo sapiens
aagatgaaggaggaa

SEQ ID NO: 273369 - DNA, 15 bp, Homo sapiens
caagatgaaggagga

SEQ ID NO: 273370 - DNA, 15 bp, Homo sapiens
acaagatgaaggagg

SEQ ID NO: 273371 - DNA, 15 bp, Homo sapiens
tacaagatgaaggag

SEQ ID NO: 273372 - DNA, 15 bp, Homo sapiens
ttacaagatgaagga

SEQ ID NO: 273373 - DNA, 15 bp, Homo sapiens
tttacaagatgaagg

SEQ ID NO: 273374 - DNA, 15 bp, Homo sapiens
gtttacaagatgaag

SEQ ID NO: 273375 - DNA, 15 bp, Homo sapiens
tgtttacaagatgaa

SEQ ID NO: 273376 - DNA, 15 bp, Homo sapiens
atgtttacaagatga

SEQ ID NO: 273377 - DNA, 15 bp, Homo sapiens
catgtttacaagatg

SEQ ID NO: 273378 - DNA, 15 bp, Homo sapiens
ccatgtttacaagat

SEQ ID NO: 273379 - DNA, 15 bp, Homo sapiens
gccatgtttacaaga

SEQ ID NO: 273380 - DNA, 15 bp, Homo sapiens
ggccatgtttacaag

SEQ ID NO: 273381 - DNA, 15 bp, Homo sapiens
tggccatgtttacaa

SEQ ID NO: 273382 - DNA, 15 bp, Homo sapiens
gtggccatgtttaca

SEQ ID NO: 273383 - DNA, 15 bp, Homo sapiens
agtggccatgtttac

SEQ ID NO: 273384 - DNA, 15 bp, Homo sapiens
cagtggccatgttta

SEQ ID NO: 273385 - DNA, 15 bp, Homo sapiens
acagtggccatgttt

SEQ ID NO: 273386 - DNA, 15 bp, Homo sapiens
aacagtggccatgtt

SEQ ID NO: 273387 - DNA, 15 bp, Homo sapiens
aaacagtggccatgt

SEQ ID NO: 273388 - DNA, 15 bp, Homo sapiens
gaaacagtggccatg

SEQ ID NO: 273389 - DNA, 15 bp, Homo sapiens
ggaaacagtggccat

SEQ ID NO: 273390 - DNA, 15 bp, Homo sapiens
tggaaacagtggcca

SEQ ID NO: 273391 - DNA, 15 bp, Homo sapiens
gtggaaacagtggcc

SEQ ID NO: 273392 - DNA, 15 bp, Homo sapiens
ggtggaaacagtggc

SEQ ID NO: 273393 - DNA, 15 bp, Homo sapiens
tggtggaaacagtgg

SEQ ID NO: 273394 - DNA, 15 bp, Homo sapiens
ctggtggaaacagtg

SEQ ID NO: 273395 - DNA, 15 bp, Homo sapiens
cctggtggaaacagt

SEQ ID NO: 273396 - DNA, 15 bp, Homo sapiens
ccctggtggaaacag

SEQ ID NO: 273397 - DNA, 15 bp, Homo sapiens
cccctggtggaaaca

SEQ ID NO: 273398 - DNA, 15 bp, Homo sapiens
tcccctggtggaaac

SEQ ID NO: 273399 - DNA, 15 bp, Homo sapiens
ttcccctggtggaaa

SEQ ID NO: 273400 - DNA, 15 bp, Homo sapiens
attcccctggtggaa

SEQ ID NO: 273401 - DNA, 15 bp, Homo sapiens
tattcccctggtgga

SEQ ID NO: 273402 - DNA, 15 bp, Homo sapiens
gtattcccctggtgg

SEQ ID NO: 273403 - DNA, 15 bp, Homo sapiens
agtattcccctggtg

SEQ ID NO: 273404 - DNA, 15 bp, Homo sapiens
cagtattcccctggt

SEQ ID NO: 273405 - DNA, 15 bp, Homo sapiens
tcagtattcccctgg

SEQ ID NO: 273406 - DNA, 15 bp, Homo sapiens
atcagtattcccctg

SEQ ID NO: 273407 - DNA, 15 bp, Homo sapiens
gatcagtattcccct

SEQ ID NO: 273408 - DNA, 15 bp, Homo sapiens
cgatcagtattcccc

SEQ ID NO: 273409 - DNA, 15 bp, Homo sapiens
gcgatcagtattccc

SEQ ID NO: 273410 - DNA, 15 bp, Homo sapiens
agcgatcagtattcc

SEQ ID NO: 273411 - DNA, 15 bp, Homo sapiens
cagcgatcagtattc

SEQ ID NO: 273412 - DNA, 15 bp, Homo sapiens
acagcgatcagtatt

SEQ ID NO: 273413 - DNA, 15 bp, Homo sapiens
gacagcgatcagtat

SEQ ID NO: 273414 - DNA, 15 bp, Homo sapiens
ggacagcgatcagta

SEQ ID NO: 273415 - DNA, 15 bp, Homo sapiens
aggacagcgatcagt

SEQ ID NO: 273416 - DNA, 15 bp, Homo sapiens
aaggacagcgatcag

SEQ ID NO: 273417 - DNA, 15 bp, Homo sapiens
aaaggacagcgatca

SEQ ID NO: 273418 - DNA, 15 bp, Homo sapiens
taaaggacagcgatc

SEQ ID NO: 273419 - DNA, 15 bp, Homo sapiens
gtaaaggacagcgat

SEQ ID NO: 273420 - DNA, 15 bp, Homo sapiens
tgtaaaggacagcga

SEQ ID NO: 273421 - DNA, 15 bp, Homo sapiens
ctgtaaaggacagcg

SEQ ID NO: 273422 - DNA, 15 bp, Homo sapiens
tctgtaaaggacagc

SEQ ID NO: 273423 - DNA, 15 bp, Homo sapiens
ctctgtaaaggacag

SEQ ID NO: 273424 - DNA, 15 bp, Homo sapiens
cctctgtaaaggaca

SEQ ID NO: 273425 - DNA, 15 bp, Homo sapiens
gcctctgtaaaggac

SEQ ID NO: 273426 - DNA, 15 bp, Homo sapiens
tgcctctgtaaagga

SEQ ID NO: 273427 - DNA, 15 bp, Homo sapiens
gtgcctctgtaaagg

SEQ ID NO: 273428 - DNA, 15 bp, Homo sapiens
agtgcctctgtaaag

SEQ ID NO: 273429 - DNA, 15 bp, Homo sapiens
cagtgcctctgtaaa

SEQ ID NO: 273430 - DNA, 15 bp, Homo sapiens
acagtgcctctgtaa

SEQ ID NO: 273431 - DNA, 15 bp, Homo sapiens
cacagtgcctctgta

SEQ ID NO: 273432 - DNA, 15 bp, Homo sapiens
gcacagtgcctctgt

SEQ ID NO: 273433 - DNA, 15 bp, Homo sapiens
agcacagtgcctctg

SEQ ID NO: 273434 - DNA, 15 bp, Homo sapiens
tagcacagtgcctct

SEQ ID NO: 273435 - DNA, 15 bp, Homo sapiens
ttagcacagtgcctc

SEQ ID NO: 273436 - DNA, 15 bp, Homo sapiens
cttagcacagtgcct

SEQ ID NO: 273437 - DNA, 15 bp, Homo sapiens
tacttagcacagtgc

SEQ ID NO: 273438 - DNA, 15 bp, Homo sapiens
ttacttagcacagtg

SEQ ID NO: 273439 - DNA, 15 bp, Homo sapiens
cttacttagcacagt

SEQ ID NO: 273440 - DNA, 15 bp, Homo sapiens
acttacttagcacag

SEQ ID NO: 273441 - DNA, 15 bp, Homo sapiens
tacttacttagcaca

SEQ ID NO: 273442 - DNA, 15 bp, Homo sapiens
gtacttacttagcac

SEQ ID NO: 273443 - DNA, 15 bp, Homo sapiens
agtacttacttagca

SEQ ID NO: 273444 - DNA, 15 bp, Homo sapiens
aagtacttacttagc

SEQ ID NO: 273445 - DNA, 15 bp, Homo sapiens
aaagtacttacttag

SEQ ID NO: 273446 - DNA, 15 bp, Homo sapiens
aaaagtacttactta

SEQ ID NO: 273447 - DNA, 15 bp, Homo sapiens
gaaaagtacttactt

SEQ ID NO: 273448 - DNA, 15 bp, Homo sapiens
tgaaaagtacttact

SEQ ID NO: 273449 - DNA, 15 bp, Homo sapiens
gtgaaaagtacttac

SEQ ID NO: 273450 - DNA, 15 bp, Homo sapiens
tgtgaaaagtactta

SEQ ID NO: 273451 - DNA, 15 bp, Homo sapiens
gtgtgaaaagtactt

SEQ ID NO: 273452 - DNA, 15 bp, Homo sapiens
tgtgtgaaaagtact

SEQ ID NO: 273453 - DNA, 15 bp, Homo sapiens
atgtgtgaaaagtac

SEQ ID NO: 273454 - DNA, 15 bp, Homo sapiens
gatgtgtgaaaagta

SEQ ID NO: 273455 - DNA, 15 bp, Homo sapiens
agatgtgtgaaaagt

SEQ ID NO: 273456 - DNA, 15 bp, Homo sapiens
gagatgtgtgaaaag

SEQ ID NO: 273457 - DNA, 15 bp, Homo sapiens
tgagatgtgtgaaaa

SEQ ID NO: 273458 - DNA, 15 bp, Homo sapiens
atgagatgtgtgaaa

SEQ ID NO: 273459 - DNA, 15 bp, Homo sapiens
gatgagatgtgtgaa

SEQ ID NO: 273460 - DNA, 15 bp, Homo sapiens
agatgagatgtgtga

SEQ ID NO: 273461 - DNA, 15 bp, Homo sapiens
tagatgagatgtgtg

SEQ ID NO: 273462 - DNA, 15 bp, Homo sapiens
ttagatgagatgtgt

SEQ ID NO: 273463 - DNA, 15 bp, Homo sapiens
attagatgagatgtg

SEQ ID NO: 273464 - DNA, 15 bp, Homo sapiens
gattagatgagatgt

SEQ ID NO: 273465 - DNA, 15 bp, Homo sapiens
tgattagatgagatg

SEQ ID NO: 273466 - DNA, 15 bp, Homo sapiens
atgattagatgagat

SEQ ID NO: 273467 - DNA, 15 bp, Homo sapiens
gatgattagatgaga

SEQ ID NO: 273468 - DNA, 15 bp, Homo sapiens
agatgattagatgag

SEQ ID NO: 273469 - DNA, 15 bp, Homo sapiens
cagatgattagatga

SEQ ID NO: 273470 - DNA, 15 bp, Homo sapiens
tcagatgattagatg

SEQ ID NO: 273471 - DNA, 15 bp, Homo sapiens
ttcagatgattagat

SEQ ID NO: 273472 - DNA, 15 bp, Homo sapiens
gttcagatgattaga

SEQ ID NO: 273473 - DNA, 15 bp, Homo sapiens
tgttcagatgattag

SEQ ID NO: 273474 - DNA, 15 bp, Homo sapiens
ttgttcagatgatta

SEQ ID NO: 273475 - DNA, 15 bp, Homo sapiens
gttgttcagatgatt

SEQ ID NO: 273476 - DNA, 15 bp, Homo sapiens
ggttgttcagatgat

SEQ ID NO: 273477 - DNA, 15 bp, Homo sapiens
gggttgttcagatga

SEQ ID NO: 273478 - DNA, 15 bp, Homo sapiens
tgggttgttcagatg

SEQ ID NO: 273479 - DNA, 15 bp, Homo sapiens
atgggttgttcagat

SEQ ID NO: 273480 - DNA, 15 bp, Homo sapiens
catgggttgttcaga

SEQ ID NO: 273481 - DNA, 15 bp, Homo sapiens
tcatgggttgttcag

SEQ ID NO: 273482 - DNA, 15 bp, Homo sapiens
ctcatgggttgttca

SEQ ID NO: 273483 - DNA, 15 bp, Homo sapiens
cctcatgggttgttc

SEQ ID NO: 273484 - DNA, 15 bp, Homo sapiens
acctcatgggttgtt

SEQ ID NO: 273485 - DNA, 15 bp, Homo sapiens
tacctcatgggttgt

SEQ ID NO: 273486 - DNA, 15 bp, Homo sapiens
atacctcatgggttg

SEQ ID NO: 273487 - DNA, 15 bp, Homo sapiens
catacctcatgggtt

SEQ ID NO: 273488 - DNA, 15 bp, Homo sapiens
gcatacctcatgggt

SEQ ID NO: 273489 - DNA, 15 bp, Homo sapiens
tgcatacctcatggg

SEQ ID NO: 273490 - DNA, 15 bp, Homo sapiens
atgcatacctcatgg

SEQ ID NO: 273491 - DNA, 15 bp, Homo sapiens
tatgcatacctcatg

SEQ ID NO: 273492 - DNA, 15 bp, Homo sapiens
ttatgcatacctcat

SEQ ID NO: 273493 - DNA, 15 bp, Homo sapiens
attatgcatacctca

SEQ ID NO: 273494 - DNA, 15 bp, Homo sapiens
tattatgcatacctc

SEQ ID NO: 273495 - DNA, 15 bp, Homo sapiens
ttattatgcatacct

SEQ ID NO: 273496 - DNA, 15 bp, Homo sapiens
gttattatgcatacc

SEQ ID NO: 273497 - DNA, 15 bp, Homo sapiens
tgttattatgcatac

SEQ ID NO: 273498 - DNA, 15 bp, Homo sapiens
ttgttattatgcata

SEQ ID NO: 273499 - DNA, 15 bp, Homo sapiens
tttgttattatgcat

SEQ ID NO: 273500 - DNA, 15 bp, Homo sapiens
gtttgttattatgca

SEQ ID NO: 273501 - DNA, 15 bp, Homo sapiens
ggtttgttattatgc

SEQ ID NO: 273502 - DNA, 15 bp, Homo sapiens
aggtttgttattatg

SEQ ID NO: 273503 - DNA, 15 bp, Homo sapiens
gaggtttgttattat

SEQ ID NO: 273504 - DNA, 15 bp, Homo sapiens
agaggtttgttatta

SEQ ID NO: 273505 - DNA, 15 bp, Homo sapiens
aagaggtttgttatt

SEQ ID NO: 273506 - DNA, 15 bp, Homo sapiens
gaagaggtttgttat

SEQ ID NO: 273507 - DNA, 15 bp, Homo sapiens
ggaagaggtttgtta

SEQ ID NO: 273508 - DNA, 15 bp, Homo sapiens
aggaagaggtttgtt

SEQ ID NO: 273509 - DNA, 15 bp, Homo sapiens
aaggaagaggtttgt

SEQ ID NO: 273510 - DNA, 15 bp, Homo sapiens
aaaggaagaggtttg

SEQ ID NO: 273511 - DNA, 15 bp, Homo sapiens
taaaggaagaggttt

SEQ ID NO: 273512 - DNA, 15 bp, Homo sapiens
ttaaaggaagaggtt

SEQ ID NO: 273513 - DNA, 15 bp, Homo sapiens
tttaaaggaagaggt

SEQ ID NO: 273514 - DNA, 15 bp, Homo sapiens
ctttaaaggaagagg

SEQ ID NO: 273515 - DNA, 15 bp, Homo sapiens
tctttaaaggaagag

SEQ ID NO: 273516 - DNA, 15 bp, Homo sapiens
atctttaaaggaaga

SEQ ID NO: 273517 - DNA, 15 bp, Homo sapiens
catctttaaaggaag

SEQ ID NO: 273518 - DNA, 15 bp, Homo sapiens
tcatctttaaaggaa

SEQ ID NO: 273519 - DNA, 15 bp, Homo sapiens
ctcatctttaaagga

SEQ ID NO: 273520 - DNA, 15 bp, Homo sapiens
cctcatctttaaagg

SEQ ID NO: 273521 - DNA, 15 bp, Homo sapiens
tcctcatctttaaag

SEQ ID NO: 273522 - DNA, 15 bp, Homo sapiens
ttcctcatctttaaa

SEQ ID NO: 273523 - DNA, 15 bp, Homo sapiens
cttcctcatctttaa

SEQ ID NO: 273524 - DNA, 15 bp, Homo sapiens
gcttcctcatcttta

SEQ ID NO: 273525 - DNA, 15 bp, Homo sapiens
agcttcctcatcttt

SEQ ID NO: 273526 - DNA, 15 bp, Homo sapiens
cagcttcctcatctt

SEQ ID NO: 273527 - DNA, 15 bp, Homo sapiens
ccagcttcctcatct

SEQ ID NO: 273528 - DNA, 15 bp, Homo sapiens
tccagcttcctcatc

SEQ ID NO: 273529 - DNA, 15 bp, Homo sapiens
ttccagcttcctcat

SEQ ID NO: 273530 - DNA, 15 bp, Homo sapiens
gttccagcttcctca

SEQ ID NO: 273531 - DNA, 15 bp, Homo sapiens
agttccagcttcctc

SEQ ID NO: 273532 - DNA, 15 bp, Homo sapiens
aagttccagcttcct

SEQ ID NO: 273533 - DNA, 15 bp, Homo sapiens
taagttccagcttcc

SEQ ID NO: 273534 - DNA, 15 bp, Homo sapiens
ctaagttccagcttc

SEQ ID NO: 273535 - DNA, 15 bp, Homo sapiens
tctaagttccagctt

SEQ ID NO: 273536 - DNA, 15 bp, Homo sapiens
ctctaagttccagct

SEQ ID NO: 273537 - DNA, 15 bp, Homo sapiens
tctctaagttccagc

SEQ ID NO: 273538 - DNA, 15 bp, Homo sapiens
atctctaagttccag

SEQ ID NO: 273539 - DNA, 15 bp, Homo sapiens
tatctctaagttcca

SEQ ID NO: 273540 - DNA, 15 bp, Homo sapiens
ctatctctaagttcc

SEQ ID NO: 273541 - DNA, 15 bp, Homo sapiens
actatctctaagttc

SEQ ID NO: 273542 - DNA, 15 bp, Homo sapiens
tactatctctaagtt

SEQ ID NO: 273543 - DNA, 15 bp, Homo sapiens
ttactatctctaagt

SEQ ID NO: 273544 - DNA, 15 bp, Homo sapiens
gttactatctctaag

SEQ ID NO: 273545 - DNA, 15 bp, Homo sapiens
agttactatctctaa

SEQ ID NO: 273546 - DNA, 15 bp, Homo sapiens
cagttactatctcta

SEQ ID NO: 273547 - DNA, 15 bp, Homo sapiens
ccagttactatctct

SEQ ID NO: 273548 - DNA, 15 bp, Homo sapiens
gccagttactatctc

SEQ ID NO: 273549 - DNA, 15 bp, Homo sapiens
agccagttactatct

SEQ ID NO: 273550 - DNA, 15 bp, Homo sapiens
aagccagttactatc

SEQ ID NO: 273551 - DNA, 15 bp, Homo sapiens
aaagccagttactat

SEQ ID NO: 273552 - DNA, 15 bp, Homo sapiens
aaaagccagttacta

SEQ ID NO: 273553 - DNA, 15 bp, Homo sapiens
gaaaagccagttact

SEQ ID NO: 273554 - DNA, 15 bp, Homo sapiens
ggaaaagccagttac

SEQ ID NO: 273555 - DNA, 15 bp, Homo sapiens
tggaaaagccagtta

SEQ ID NO: 273556 - DNA, 15 bp, Homo sapiens
ttggaaaagccagtt

SEQ ID NO: 273557 - DNA, 15 bp, Homo sapiens
tttggaaaagccagt

SEQ ID NO: 273558 - DNA, 15 bp, Homo sapiens
ttttggaaaagccag

SEQ ID NO: 273559 - DNA, 15 bp, Homo sapiens
tttttggaaaagcca

SEQ ID NO: 273560 - DNA, 15 bp, Homo sapiens
atttttggaaaagcc

SEQ ID NO: 273561 - DNA, 15 bp, Homo sapiens
tatttttggaaaagc

SEQ ID NO: 273562 - DNA, 15 bp, Homo sapiens
gtatttttggaaaag

SEQ ID NO: 273563 - DNA, 15 bp, Homo sapiens
tgtatttttggaaaa

SEQ ID NO: 273564 - DNA, 15 bp, Homo sapiens
atgtatttttggaaa

SEQ ID NO: 273565 - DNA, 15 bp, Homo sapiens
catgtatttttggaa

SEQ ID NO: 273566 - DNA, 15 bp, Homo sapiens
ccatgtatttttgga

SEQ ID NO: 273567 - DNA, 15 bp, Homo sapiens
gccatgtatttttgg

SEQ ID NO: 273568 - DNA, 15 bp, Homo sapiens
ggccatgtatttttg

SEQ ID NO: 273569 - DNA, 15 bp, Homo sapiens
tggccatgtattttt

SEQ ID NO: 273570 - DNA, 15 bp, Homo sapiens
ctggccatgtatttt

SEQ ID NO: 273571 - DNA, 15 bp, Homo sapiens
actggccatgtattt

SEQ ID NO: 273572 - DNA, 15 bp, Homo sapiens
tactggccatgtatt

SEQ ID NO: 273573 - DNA, 15 bp, Homo sapiens
ttactggccatgtat

SEQ ID NO: 273574 - DNA, 15 bp, Homo sapiens
cttactggccatgta

SEQ ID NO: 273575 - DNA, 15 bp, Homo sapiens
ccttactggccatgt

SEQ ID NO: 273576 - DNA, 15 bp, Homo sapiens
cccttactggccatg

SEQ ID NO: 273577 - DNA, 15 bp, Homo sapiens
ccccttactggccat

SEQ ID NO: 273578 - DNA, 15 bp, Homo sapiens
gccccttactggcca

SEQ ID NO: 273579 - DNA, 15 bp, Homo sapiens
tgccccttactggcc

SEQ ID NO: 273580 - DNA, 15 bp, Homo sapiens
ctgccccttactggc

SEQ ID NO: 273581 - DNA, 15 bp, Homo sapiens
tctgccccttactgg

SEQ ID NO: 273582 - DNA, 15 bp, Homo sapiens
ctctgccccttactg

SEQ ID NO: 273583 - DNA, 15 bp, Homo sapiens
cctctgccccttact

SEQ ID NO: 273584 - DNA, 15 bp, Homo sapiens
gcctctgccccttac

SEQ ID NO: 273585 - DNA, 15 bp, Homo sapiens
tgcctctgcccctta

SEQ ID NO: 273586 - DNA, 15 bp, Homo sapiens
ctgcctctgcccctt

SEQ ID NO: 273587 - DNA, 15 bp, Homo sapiens
gctgcctctgcccct

SEQ ID NO: 273588 - DNA, 15 bp, Homo sapiens
tgctgcctctgcccc

SEQ ID NO: 273589 - DNA, 15 bp, Homo sapiens
atgctgcctctgccc

SEQ ID NO: 273590 - DNA, 15 bp, Homo sapiens
aatgctgcctctgcc

SEQ ID NO: 273591 - DNA, 15 bp, Homo sapiens
aaatgctgcctctgc

SEQ ID NO: 273592 - DNA, 15 bp, Homo sapiens
caaatgctgcctctg

SEQ ID NO: 273593 - DNA, 15 bp, Homo sapiens
tcaaatgctgcctct

SEQ ID NO: 273594 - DNA, 15 bp, Homo sapiens
ctcaaatgctgcctc

SEQ ID NO: 273595 - DNA, 15 bp, Homo sapiens
gctcaaatgctgcct

SEQ ID NO: 273596 - DNA, 15 bp, Homo sapiens
tgctcaaatgctgcc

SEQ ID NO: 273597 - DNA, 15 bp, Homo sapiens
gtgctcaaatgctgc

SEQ ID NO: 273598 - DNA, 15 bp, Homo sapiens
tgtgctcaaatgctg

SEQ ID NO: 273599 - DNA, 15 bp, Homo sapiens
ctgtgctcaaatgct

SEQ ID NO: 273600 - DNA, 15 bp, Homo sapiens
cctgtgctcaaatgc

SEQ ID NO: 273601 - DNA, 15 bp, Homo sapiens
gcctgtgctcaaatg

SEQ ID NO: 273602 - DNA, 15 bp, Homo sapiens
tgcctgtgctcaaat

SEQ ID NO: 273603 - DNA, 15 bp, Homo sapiens
ttgcctgtgctcaaa

SEQ ID NO: 273604 - DNA, 15 bp, Homo sapiens
attgcctgtgctcaa

SEQ ID NO: 273605 - DNA, 15 bp, Homo sapiens
aattgcctgtgctca

SEQ ID NO: 273606 - DNA, 15 bp, Homo sapiens
aaattgcctgtgctc

SEQ ID NO: 273607 - DNA, 15 bp, Homo sapiens
caaattgcctgtgct

SEQ ID NO: 273608 - DNA, 15 bp, Homo sapiens
tcaaattgcctgtgc

SEQ ID NO: 273609 - DNA, 15 bp, Homo sapiens
gtcaaattgcctgtg

SEQ ID NO: 273610 - DNA, 15 bp, Homo sapiens
agtcaaattgcctgt

SEQ ID NO: 273611 - DNA, 15 bp, Homo sapiens
gagtcaaattgcctg

SEQ ID NO: 273612 - DNA, 15 bp, Homo sapiens
ggagtcaaattgcct

SEQ ID NO: 273613 - DNA, 15 bp, Homo sapiens
tggagtcaaattgcc

SEQ ID NO: 273614 - DNA, 15 bp, Homo sapiens
ctggagtcaaattgc

SEQ ID NO: 273615 - DNA, 15 bp, Homo sapiens
tctggagtcaaattg

SEQ ID NO: 273616 - DNA, 15 bp, Homo sapiens
ctctggagtcaaatt

SEQ ID NO: 273617 - DNA, 15 bp, Homo sapiens
gctctggagtcaaat

SEQ ID NO: 273618 - DNA, 15 bp, Homo sapiens
ggctctggagtcaaa

SEQ ID NO: 273619 - DNA, 15 bp, Homo sapiens
aggctctggagtcaa

SEQ ID NO: 273620 - DNA, 15 bp, Homo sapiens
caggctctggagtca

SEQ ID NO: 273621 - DNA, 15 bp, Homo sapiens
ccaggctctggagtc

SEQ ID NO: 273622 - DNA, 15 bp, Homo sapiens
gccaggctctggagt

SEQ ID NO: 273623 - DNA, 15 bp, Homo sapiens
tgccaggctctggag

SEQ ID NO: 273624 - DNA, 15 bp, Homo sapiens
gtgccaggctctgga

SEQ ID NO: 273625 - DNA, 15 bp, Homo sapiens
ggtgccaggctctgg

SEQ ID NO: 273626 - DNA, 15 bp, Homo sapiens
aggtgccaggctctg

SEQ ID NO: 273627 - DNA, 15 bp, Homo sapiens
gaggtgccaggctct

SEQ ID NO: 273628 - DNA, 15 bp, Homo sapiens
tgaggtgccaggctc

SEQ ID NO: 273629 - DNA, 15 bp, Homo sapiens
gtgaggtgccaggct

SEQ ID NO: 273630 - DNA, 15 bp, Homo sapiens
ggtgaggtgccaggc

SEQ ID NO: 273631 - DNA, 15 bp, Homo sapiens
gggtgaggtgccagg

SEQ ID NO: 273632 - DNA, 15 bp, Homo sapiens
ggggtgaggtgccag

SEQ ID NO: 273633 - DNA, 15 bp, Homo sapiens
aggggtgaggtgcca

SEQ ID NO: 273634 - DNA, 15 bp, Homo sapiens
taggggtgaggtgcc

SEQ ID NO: 273635 - DNA, 15 bp, Homo sapiens
ataggggtgaggtgc

SEQ ID NO: 273636 - DNA, 15 bp, Homo sapiens
cataggggtgaggtg

SEQ ID NO: 273637 - DNA, 15 bp, Homo sapiens
gcataggggtgaggt

SEQ ID NO: 273638 - DNA, 15 bp, Homo sapiens
ggcataggggtgagg

SEQ ID NO: 273639 - DNA, 15 bp, Homo sapiens
tggcataggggtgag

SEQ ID NO: 273640 - DNA, 15 bp, Homo sapiens
atggcataggggtga

SEQ ID NO: 273641 - DNA, 15 bp, Homo sapiens
catggcataggggtg

SEQ ID NO: 273642 - DNA, 15 bp, Homo sapiens
acatggcataggggt

SEQ ID NO: 273643 - DNA, 15 bp, Homo sapiens
cacatggcatagggg

SEQ ID NO: 273644 - DNA, 15 bp, Homo sapiens
ccacatggcataggg

SEQ ID NO: 273645 - DNA, 15 bp, Homo sapiens
accacatggcatagg

SEQ ID NO: 273646 - DNA, 15 bp, Homo sapiens
taccacatggcatag

SEQ ID NO: 273647 - DNA, 15 bp, Homo sapiens
ttaccacatggcata

SEQ ID NO: 273648 - DNA, 15 bp, Homo sapiens
gttaccacatggcat

SEQ ID NO: 273649 - DNA, 15 bp, Homo sapiens
tgttaccacatggca

SEQ ID NO: 273650 - DNA, 15 bp, Homo sapiens
gtgttaccacatggc

SEQ ID NO: 273651 - DNA, 15 bp, Homo sapiens
ggtgttaccacatgg

SEQ ID NO: 273652 - DNA, 15 bp, Homo sapiens
gggtgttaccacatg

SEQ ID NO: 273653 - DNA, 15 bp, Homo sapiens
tgggtgttaccacat

SEQ ID NO: 273654 - DNA, 15 bp, Homo sapiens
ctgggtgttaccaca

SEQ ID NO: 273655 - DNA, 15 bp, Homo sapiens
actgggtgttaccac

SEQ ID NO: 273656 - DNA, 15 bp, Homo sapiens
tactgggtgttacca

SEQ ID NO: 273657 - DNA, 15 bp, Homo sapiens
ttactgggtgttacc

SEQ ID NO: 273658 - DNA, 15 bp, Homo sapiens
gttactgggtgttac

SEQ ID NO: 273659 - DNA, 15 bp, Homo sapiens
tgttactgggtgtta

SEQ ID NO: 273660 - DNA, 15 bp, Homo sapiens
ctgttactgggtgtt

SEQ ID NO: 273661 - DNA, 15 bp, Homo sapiens
gctgttactgggtgt

SEQ ID NO: 273662 - DNA, 15 bp, Homo sapiens
ggctgttactgggtg

SEQ ID NO: 273663 - DNA, 15 bp, Homo sapiens
gggctgttactgggt

SEQ ID NO: 273664 - DNA, 15 bp, Homo sapiens
ggggctgttactggg

SEQ ID NO: 273665 - DNA, 15 bp, Homo sapiens
tggggctgttactgg

SEQ ID NO: 273666 - DNA, 15 bp, Homo sapiens
ctggggctgttactg

SEQ ID NO: 273667 - DNA, 15 bp, Homo sapiens
tctggggctgttact

SEQ ID NO: 273668 - DNA, 15 bp, Homo sapiens
ctctggggctgttac

SEQ ID NO: 273669 - DNA, 15 bp, Homo sapiens
tctctggggctgtta

SEQ ID NO: 273670 - DNA, 15 bp, Homo sapiens
ttctctggggctgtt

SEQ ID NO: 273671 - DNA, 15 bp, Homo sapiens
tttctctggggctgt

SEQ ID NO: 273672 - DNA, 15 bp, Homo sapiens
atttctctggggctg

SEQ ID NO: 273673 - DNA, 15 bp, Homo sapiens
gatttctctggggct

SEQ ID NO: 273674 - DNA, 15 bp, Homo sapiens
agatttctctggggc

SEQ ID NO: 273675 - DNA, 15 bp, Homo sapiens
tagatttctctgggg

SEQ ID NO: 273676 - DNA, 15 bp, Homo sapiens
ttagatttctctggg

SEQ ID NO: 273677 - DNA, 15 bp, Homo sapiens
attagatttctctgg

SEQ ID NO: 273678 - DNA, 15 bp, Homo sapiens
gattagatttctctg

SEQ ID NO: 273679 - DNA, 15 bp, Homo sapiens
tgattagatttctct

SEQ ID NO: 273680 - DNA, 15 bp, Homo sapiens
ctgattagatttctc

SEQ ID NO: 273681 - DNA, 15 bp, Homo sapiens
tctgattagatttct

SEQ ID NO: 273682 - DNA, 15 bp, Homo sapiens
ctctgattagatttc

SEQ ID NO: 273683 - DNA, 15 bp, Homo sapiens
tctctgattagattt

SEQ ID NO: 273684 - DNA, 15 bp, Homo sapiens
ttctctgattagatt

SEQ ID NO: 273685 - DNA, 15 bp, Homo sapiens
tttctctgattagat

SEQ ID NO: 273686 - DNA, 15 bp, Homo sapiens
ttttctctgattaga

SEQ ID NO: 273687 - DNA, 15 bp, Homo sapiens
attttctctgattag

SEQ ID NO: 273688 - DNA, 15 bp, Homo sapiens
aattttctctgatta

SEQ ID NO: 273689 - DNA, 15 bp, Homo sapiens
gaattttctctgatt

SEQ ID NO: 273690 - DNA, 15 bp, Homo sapiens
ggaattttctctgat

SEQ ID NO: 273691 - DNA, 15 bp, Homo sapiens
tggaattttctctga

SEQ ID NO: 273692 - DNA, 15 bp, Homo sapiens
ctggaattttctctg

SEQ ID NO: 273693 - DNA, 15 bp, Homo sapiens
actggaattttctct

SEQ ID NO: 273694 - DNA, 15 bp, Homo sapiens
gactggaattttctc

SEQ ID NO: 273695 - DNA, 15 bp, Homo sapiens
tgactggaattttct

SEQ ID NO: 273696 - DNA, 15 bp, Homo sapiens
atgactggaattttc

SEQ ID NO: 273697 - DNA, 15 bp, Homo sapiens
aatgactggaatttt

SEQ ID NO: 273698 - DNA, 15 bp, Homo sapiens
aaatgactggaattt

SEQ ID NO: 273699 - DNA, 15 bp, Homo sapiens
gaaatgactggaatt

SEQ ID NO: 273700 - DNA, 15 bp, Homo sapiens
tgaaatgactggaat

SEQ ID NO: 273701 - DNA, 15 bp, Homo sapiens
ctgaaatgactggaa

SEQ ID NO: 273702 - DNA, 15 bp, Homo sapiens
actgaaatgactgga

SEQ ID NO: 273703 - DNA, 15 bp, Homo sapiens
aactgaaatgactgg

SEQ ID NO: 273704 - DNA, 15 bp, Homo sapiens
aaactgaaatgactg

SEQ ID NO: 273705 - DNA, 15 bp, Homo sapiens
taaactgaaatgact

SEQ ID NO: 273706 - DNA, 15 bp, Homo sapiens
gtaaactgaaatgac

SEQ ID NO: 273707 - DNA, 15 bp, Homo sapiens
agtaaactgaaatga

SEQ ID NO: 273708 - DNA, 15 bp, Homo sapiens
tagtaaactgaaatg

SEQ ID NO: 273709 - DNA, 15 bp, Homo sapiens
gtagtaaactgaaat

SEQ ID NO: 273710 - DNA, 15 bp, Homo sapiens
ggtagtaaactgaaa

SEQ ID NO: 273711 - DNA, 15 bp, Homo sapiens
aggtagtaaactgaa

SEQ ID NO: 273712 - DNA, 15 bp, Homo sapiens
caggtagtaaactga

SEQ ID NO: 273713 - DNA, 15 bp, Homo sapiens
ccaggtagtaaactg

SEQ ID NO: 273714 - DNA, 15 bp, Homo sapiens
cccaggtagtaaact

SEQ ID NO: 273715 - DNA, 15 bp, Homo sapiens
ccccaggtagtaaac

SEQ ID NO: 273716 - DNA, 15 bp, Homo sapiens
gccccaggtagtaaa

SEQ ID NO: 273717 - DNA, 15 bp, Homo sapiens
tgccccaggtagtaa

SEQ ID NO: 273718 - DNA, 15 bp, Homo sapiens
ttgccccaggtagta

SEQ ID NO: 273719 - DNA, 15 bp, Homo sapiens
tttgccccaggtagt

SEQ ID NO: 273720 - DNA, 15 bp, Homo sapiens
atttgccccaggtag

SEQ ID NO: 273721 - DNA, 15 bp, Homo sapiens
aatttgccccaggta

SEQ ID NO: 273722 - DNA, 15 bp, Homo sapiens
caatttgccccaggt

SEQ ID NO: 273723 - DNA, 15 bp, Homo sapiens
tcaatttgccccagg

SEQ ID NO: 273724 - DNA, 15 bp, Homo sapiens
ctcaatttgccccag

SEQ ID NO: 273725 - DNA, 15 bp, Homo sapiens
actcaatttgcccca

SEQ ID NO: 273726 - DNA, 15 bp, Homo sapiens
aactcaatttgcccc

SEQ ID NO: 273727 - DNA, 15 bp, Homo sapiens
aaactcaatttgccc

SEQ ID NO: 273728 - DNA, 15 bp, Homo sapiens
taaactcaatttgcc

SEQ ID NO: 273729 - DNA, 15 bp, Homo sapiens
ataaactcaatttgc

SEQ ID NO: 273730 - DNA, 15 bp, Homo sapiens
cataaactcaatttg

SEQ ID NO: 273731 - DNA, 15 bp, Homo sapiens
ccataaactcaattt

SEQ ID NO: 273732 - DNA, 15 bp, Homo sapiens
accataaactcaatt

SEQ ID NO: 273733 - DNA, 15 bp, Homo sapiens
caccataaactcaat

SEQ ID NO: 273734 - DNA, 15 bp, Homo sapiens
ccaccataaactcaa

SEQ ID NO: 273735 - DNA, 15 bp, Homo sapiens
cccaccataaactca

SEQ ID NO: 273736 - DNA, 15 bp, Homo sapiens
ccccaccataaactc

SEQ ID NO: 273737 - DNA, 15 bp, Homo sapiens
cccccaccataaact

SEQ ID NO: 273738 - DNA, 15 bp, Homo sapiens
tcccccaccataaac

SEQ ID NO: 273739 - DNA, 15 bp, Homo sapiens
ttcccccaccataaa

SEQ ID NO: 273740 - DNA, 15 bp, Homo sapiens
tttcccccaccataa

SEQ ID NO: 273741 - DNA, 15 bp, Homo sapiens
ttttcccccaccata

SEQ ID NO: 273742 - DNA, 15 bp, Homo sapiens
cttttcccccaccat

SEQ ID NO: 273743 - DNA, 15 bp, Homo sapiens
tcttttcccccacca

SEQ ID NO: 273744 - DNA, 15 bp, Homo sapiens
ttcttttcccccacc

SEQ ID NO: 273745 - DNA, 15 bp, Homo sapiens
tttcttttcccccac

SEQ ID NO: 273746 - DNA, 15 bp, Homo sapiens
ttttcttttccccca

SEQ ID NO: 273747 - DNA, 15 bp, Homo sapiens
tttttcttttccccc

SEQ ID NO: 273748 - DNA, 15 bp, Homo sapiens
gtttttcttttcccc

SEQ ID NO: 273749 - DNA, 15 bp, Homo sapiens
tgtttttcttttccc

SEQ ID NO: 273750 - DNA, 15 bp, Homo sapiens
gtgtttttcttttcc

SEQ ID NO: 273751 - DNA, 15 bp, Homo sapiens
tgtgtttttcttttc

SEQ ID NO: 273752 - DNA, 15 bp, Homo sapiens
atgtgtttttctttt

SEQ ID NO: 273753 - DNA, 15 bp, Homo sapiens
aatgtgtttttcttt

SEQ ID NO: 273754 - DNA, 15 bp, Homo sapiens
aaatgtgtttttctt

SEQ ID NO: 273755 - DNA, 15 bp, Homo sapiens
aaaatgtgtttttct

SEQ ID NO: 273756 - DNA, 15 bp, Homo sapiens
taaaatgtgtttttc

SEQ ID NO: 273757 - DNA, 15 bp, Homo sapiens
ttaaaatgtgttttt

SEQ ID NO: 273758 - DNA, 15 bp, Homo sapiens
tttaaaatgtgtttt

SEQ ID NO: 273759 - DNA, 15 bp, Homo sapiens
ctttaaaatgtgttt

SEQ ID NO: 273760 - DNA, 15 bp, Homo sapiens
tctttaaaatgtgtt

SEQ ID NO: 273761 - DNA, 15 bp, Homo sapiens
ttctttaaaatgtgt

SEQ ID NO: 273762 - DNA, 15 bp, Homo sapiens
cttctttaaaatgtg

SEQ ID NO: 273763 - DNA, 15 bp, Homo sapiens
ccttctttaaaatgt

SEQ ID NO: 273764 - DNA, 15 bp, Homo sapiens
cccttctttaaaatg

SEQ ID NO: 273765 - DNA, 15 bp, Homo sapiens
gcccttctttaaaat

SEQ ID NO: 273766 - DNA, 15 bp, Homo sapiens
tgcccttctttaaaa

SEQ ID NO: 273767 - DNA, 15 bp, Homo sapiens
ttgcccttctttaaa

SEQ ID NO: 273768 - DNA, 15 bp, Homo sapiens
tttgcccttctttaa

SEQ ID NO: 273769 - DNA, 15 bp, Homo sapiens
ttttgcccttcttta

SEQ ID NO: 273770 - DNA, 15 bp, Homo sapiens
gttttgcccttcttt

SEQ ID NO: 273771 - DNA, 15 bp, Homo sapiens
tgttttgcccttctt

SEQ ID NO: 273772 - DNA, 15 bp, Homo sapiens
gtgttttgcccttct

SEQ ID NO: 273773 - DNA, 15 bp, Homo sapiens
ggtgttttgcccttc

SEQ ID NO: 273774 - DNA, 15 bp, Homo sapiens
tggtgttttgccctt

SEQ ID NO: 273775 - DNA, 15 bp, Homo sapiens
atggtgttttgccct

SEQ ID NO: 273776 - DNA, 15 bp, Homo sapiens
gatggtgttttgccc

SEQ ID NO: 273777 - DNA, 15 bp, Homo sapiens
ggatggtgttttgcc

SEQ ID NO: 273778 - DNA, 15 bp, Homo sapiens
aggatggtgttttgc

SEQ ID NO: 273779 - DNA, 15 bp, Homo sapiens
taggatggtgttttg

SEQ ID NO: 273780 - DNA, 15 bp, Homo sapiens
ttaggatggtgtttt

SEQ ID NO: 273781 - DNA, 15 bp, Homo sapiens
tttaggatggtgttt

SEQ ID NO: 273782 - DNA, 15 bp, Homo sapiens
gtttaggatggtgtt

SEQ ID NO: 273783 - DNA, 15 bp, Homo sapiens
agtttaggatggtgt

SEQ ID NO: 273784 - DNA, 15 bp, Homo sapiens
aagtttaggatggtg

SEQ ID NO: 273785 - DNA, 15 bp, Homo sapiens
taagtttaggatggt

SEQ ID NO: 273786 - DNA, 15 bp, Homo sapiens
ttaagtttaggatgg

SEQ ID NO: 273787 - DNA, 15 bp, Homo sapiens
attaagtttaggatg

SEQ ID NO: 273788 - DNA, 15 bp, Homo sapiens
cattaagtttaggat

SEQ ID NO: 273789 - DNA, 15 bp, Homo sapiens
tcattaagtttagga

SEQ ID NO: 273790 - DNA, 15 bp, Homo sapiens
ctcattaagtttagg

SEQ ID NO: 273791 - DNA, 15 bp, Homo sapiens
actcattaagtttag

SEQ ID NO: 273792 - DNA, 15 bp, Homo sapiens
gactcattaagttta

SEQ ID NO: 273793 - DNA, 15 bp, Homo sapiens
ggactcattaagttt

SEQ ID NO: 273794 - DNA, 15 bp, Homo sapiens
gggactcattaagtt

SEQ ID NO: 273795 - DNA, 15 bp, Homo sapiens
tgggactcattaagt

SEQ ID NO: 273796 - DNA, 15 bp, Homo sapiens
atgggactcattaag

SEQ ID NO: 273797 - DNA, 15 bp, Homo sapiens
tatgggactcattaa

SEQ ID NO: 273798 - DNA, 15 bp, Homo sapiens
atatgggactcatta

SEQ ID NO: 273799 - DNA, 15 bp, Homo sapiens
catatgggactcatt

SEQ ID NO: 273800 - DNA, 15 bp, Homo sapiens
gcatatgggactcat

SEQ ID NO: 273801 - DNA, 15 bp, Homo sapiens
ggcatatgggactca

SEQ ID NO: 273802 - DNA, 15 bp, Homo sapiens
tggcatatgggactc

SEQ ID NO: 273803 - DNA, 15 bp, Homo sapiens
atggcatatgggact

SEQ ID NO: 273804 - DNA, 15 bp, Homo sapiens
gatggcatatgggac

SEQ ID NO: 273805 - DNA, 15 bp, Homo sapiens
ggatggcatatggga

SEQ ID NO: 273806 - DNA, 15 bp, Homo sapiens
gggatggcatatggg

SEQ ID NO: 273807 - DNA, 15 bp, Homo sapiens
agggatggcatatgg

SEQ ID NO: 273808 - DNA, 15 bp, Homo sapiens
tagggatggcatatg

SEQ ID NO: 273809 - DNA, 15 bp, Homo sapiens
atagggatggcatat

SEQ ID NO: 273810 - DNA, 15 bp, Homo sapiens
catagggatggcata

SEQ ID NO: 273811 - DNA, 15 bp, Homo sapiens
acatagggatggcat

SEQ ID NO: 273812 - DNA, 15 bp, Homo sapiens
tacatagggatggca

SEQ ID NO: 273813 - DNA, 15 bp, Homo sapiens
ttacatagggatggc

SEQ ID NO: 273814 - DNA, 15 bp, Homo sapiens
gttacatagggatgg

SEQ ID NO: 273815 - DNA, 15 bp, Homo sapiens
tgttacatagggatg

SEQ ID NO: 273816 - DNA, 15 bp, Homo sapiens
atgttacatagggat

SEQ ID NO: 273817 - DNA, 15 bp, Homo sapiens
gatgttacataggga

SEQ ID NO: 273818 - DNA, 15 bp, Homo sapiens
agatgttacataggg

SEQ ID NO: 273819 - DNA, 15 bp, Homo sapiens
aagatgttacatagg

SEQ ID NO: 273820 - DNA, 15 bp, Homo sapiens
taagatgttacatag

SEQ ID NO: 273821 - DNA, 15 bp, Homo sapiens
ttaagatgttacata

SEQ ID NO: 273822 - DNA, 15 bp, Homo sapiens
attaagatgttacat

SEQ ID NO: 273823 - DNA, 15 bp, Homo sapiens
aattaagatgttaca

SEQ ID NO: 273824 - DNA, 15 bp, Homo sapiens
aaattaagatgttac

SEQ ID NO: 273825 - DNA, 15 bp, Homo sapiens
aaaattaagatgtta

SEQ ID NO: 273826 - DNA, 15 bp, Homo sapiens
gaaaattaagatgtt

SEQ ID NO: 273827 - DNA, 15 bp, Homo sapiens
tgaaaattaagatgt

SEQ ID NO: 273828 - DNA, 15 bp, Homo sapiens
gtgaaaattaagatg

SEQ ID NO: 273829 - DNA, 15 bp, Homo sapiens
ggtgaaaattaagat

SEQ ID NO: 273830 - DNA, 15 bp, Homo sapiens
aggtgaaaattaaga

SEQ ID NO: 273831 - DNA, 15 bp, Homo sapiens
caggtgaaaattaag

SEQ ID NO: 273832 - DNA, 15 bp, Homo sapiens
acaggtgaaaattaa

SEQ ID NO: 273833 - DNA, 15 bp, Homo sapiens
aacaggtgaaaatta

SEQ ID NO: 273834 - DNA, 15 bp, Homo sapiens
aaacaggtgaaaatt

SEQ ID NO: 273835 - DNA, 15 bp, Homo sapiens
gaaacaggtgaaaat

SEQ ID NO: 273836 - DNA, 15 bp, Homo sapiens
tgaaacaggtgaaaa

SEQ ID NO: 273837 - DNA, 15 bp, Homo sapiens
ctgaaacaggtgaaa

SEQ ID NO: 273838 - DNA, 15 bp, Homo sapiens
actgaaacaggtgaa

SEQ ID NO: 273839 - DNA, 15 bp, Homo sapiens
cactgaaacaggtga

SEQ ID NO: 273840 - DNA, 15 bp, Homo sapiens
acactgaaacaggtg

SEQ ID NO: 273841 - DNA, 15 bp, Homo sapiens
gacactgaaacaggt

SEQ ID NO: 273842 - DNA, 15 bp, Homo sapiens
agacactgaaacagg

SEQ ID NO: 273843 - DNA, 15 bp, Homo sapiens
cagacactgaaacag

SEQ ID NO: 273844 - DNA, 15 bp, Homo sapiens
acagacactgaaaca

SEQ ID NO: 273845 - DNA, 15 bp, Homo sapiens
aacagacactgaaac

SEQ ID NO: 273846 - DNA, 15 bp, Homo sapiens
gaacagacactgaaa

SEQ ID NO: 273847 - DNA, 15 bp, Homo sapiens
agaacagacactgaa

SEQ ID NO: 273848 - DNA, 15 bp, Homo sapiens
tagaacagacactga

SEQ ID NO: 273849 - DNA, 15 bp, Homo sapiens
atagaacagacactg

SEQ ID NO: 273850 - DNA, 15 bp, Homo sapiens
aatagaacagacact

SEQ ID NO: 273851 - DNA, 15 bp, Homo sapiens
aaatagaacagacac

SEQ ID NO: 273852 - DNA, 15 bp, Homo sapiens
gaaatagaacagaca

SEQ ID NO: 273853 - DNA, 15 bp, Homo sapiens
agaaatagaacagac

SEQ ID NO: 273854 - DNA, 15 bp, Homo sapiens
gagaaatagaacaga

SEQ ID NO: 273855 - DNA, 15 bp, Homo sapiens
agagaaatagaacag

SEQ ID NO: 273856 - DNA, 15 bp, Homo sapiens
gagagaaatagaaca

SEQ ID NO: 273857 - DNA, 15 bp, Homo sapiens
tgagagaaatagaac

SEQ ID NO: 273858 - DNA, 15 bp, Homo sapiens
atgagagaaatagaa

SEQ ID NO: 273859 - DNA, 15 bp, Homo sapiens
tatgagagaaataga

SEQ ID NO: 273860 - DNA, 15 bp, Homo sapiens
gtatgagagaaatag

SEQ ID NO: 273861 - DNA, 15 bp, Homo sapiens
ggtatgagagaaata

SEQ ID NO: 273862 - DNA, 15 bp, Homo sapiens
tggtatgagagaaat

SEQ ID NO: 273863 - DNA, 15 bp, Homo sapiens
gtggtatgagagaaa

SEQ ID NO: 273864 - DNA, 15 bp, Homo sapiens
agtggtatgagagaa

SEQ ID NO: 273865 - DNA, 15 bp, Homo sapiens
cagtggtatgagaga

SEQ ID NO: 273866 - DNA, 15 bp, Homo sapiens
gcagtggtatgagag

SEQ ID NO: 273867 - DNA, 15 bp, Homo sapiens
ggcagtggtatgaga

SEQ ID NO: 273868 - DNA, 15 bp, Homo sapiens
aggcagtggtatgag

SEQ ID NO: 273869 - DNA, 15 bp, Homo sapiens
caggcagtggtatga

SEQ ID NO: 273870 - DNA, 15 bp, Homo sapiens
acaggcagtggtatg

SEQ ID NO: 273871 - DNA, 15 bp, Homo sapiens
tacaggcagtggtat

SEQ ID NO: 273872 - DNA, 15 bp, Homo sapiens
ctacaggcagtggta

SEQ ID NO: 273873 - DNA, 15 bp, Homo sapiens
tctacaggcagtggt

SEQ ID NO: 273874 - DNA, 15 bp, Homo sapiens
ttctacaggcagtgg

SEQ ID NO: 273875 - DNA, 15 bp, Homo sapiens
tttctacaggcagtg

SEQ ID NO: 273876 - DNA, 15 bp, Homo sapiens
ttttctacaggcagt

SEQ ID NO: 273877 - DNA, 15 bp, Homo sapiens
attttctacaggcag

SEQ ID NO: 273878 - DNA, 15 bp, Homo sapiens
tattttctacaggca

SEQ ID NO: 273879 - DNA, 15 bp, Homo sapiens
ctattttctacaggc

SEQ ID NO: 273880 - DNA, 15 bp, Homo sapiens
tctattttctacagg

SEQ ID NO: 273881 - DNA, 15 bp, Homo sapiens
atctattttctacag

SEQ ID NO: 273882 - DNA, 15 bp, Homo sapiens
catctattttctaca

SEQ ID NO: 273883 - DNA, 15 bp, Homo sapiens
gcatctattttctac

SEQ ID NO: 273884 - DNA, 15 bp, Homo sapiens
tgcatctattttcta

SEQ ID NO: 273885 - DNA, 15 bp, Homo sapiens
atgcatctattttct

SEQ ID NO: 273886 - DNA, 15 bp, Homo sapiens
catgcatctattttc

SEQ ID NO: 273887 - DNA, 15 bp, Homo sapiens
acatgcatctatttt

SEQ ID NO: 273888 - DNA, 15 bp, Homo sapiens
aacatgcatctattt

SEQ ID NO: 273889 - DNA, 15 bp, Homo sapiens
gaacatgcatctatt

SEQ ID NO: 273890 - DNA, 15 bp, Homo sapiens
agaacatgcatctat

SEQ ID NO: 273891 - DNA, 15 bp, Homo sapiens
aagaacatgcatcta

SEQ ID NO: 273892 - DNA, 15 bp, Homo sapiens
caagaacatgcatct

SEQ ID NO: 273893 - DNA, 15 bp, Homo sapiens
tcaagaacatgcatc

SEQ ID NO: 273894 - DNA, 15 bp, Homo sapiens
ttcaagaacatgcat

SEQ ID NO: 273895 - DNA, 15 bp, Homo sapiens
tttcaagaacatgca

SEQ ID NO: 273896 - DNA, 15 bp, Homo sapiens
atttcaagaacatgc

SEQ ID NO: 273897 - DNA, 15 bp, Homo sapiens
aatttcaagaacatg

SEQ ID NO: 273898 - DNA, 15 bp, Homo sapiens
gaatttcaagaacat

SEQ ID NO: 273899 - DNA, 15 bp, Homo sapiens
ggaatttcaagaaca

SEQ ID NO: 273900 - DNA, 15 bp, Homo sapiens
aggaatttcaagaac

SEQ ID NO: 273901 - DNA, 15 bp, Homo sapiens
taggaatttcaagaa

SEQ ID NO: 273902 - DNA, 15 bp, Homo sapiens
gtaggaatttcaaga

SEQ ID NO: 273903 - DNA, 15 bp, Homo sapiens
agtaggaatttcaag

SEQ ID NO: 273904 - DNA, 15 bp, Homo sapiens
aagtaggaatttcaa

SEQ ID NO: 273905 - DNA, 15 bp, Homo sapiens
aaagtaggaatttca

SEQ ID NO: 273906 - DNA, 15 bp, Homo sapiens
aaaagtaggaatttc

SEQ ID NO: 273907 - DNA, 15 bp, Homo sapiens
aaaaagtaggaattt

SEQ ID NO: 273908 - DNA, 15 bp, Homo sapiens
gaaaaagtaggaatt

SEQ ID NO: 273909 - DNA, 15 bp, Homo sapiens
agaaaaagtaggaat

SEQ ID NO: 273910 - DNA, 15 bp, Homo sapiens
gagaaaaagtaggaa

SEQ ID NO: 273911 - DNA, 15 bp, Homo sapiens
tgagaaaaagtagga

SEQ ID NO: 273912 - DNA, 15 bp, Homo sapiens
atgagaaaaagtagg

SEQ ID NO: 273913 - DNA, 15 bp, Homo sapiens
aatgagaaaaagtag

SEQ ID NO: 273914 - DNA, 15 bp, Homo sapiens
taatgagaaaaagta

SEQ ID NO: 273915 - DNA, 15 bp, Homo sapiens
ttaatgagaaaaagt

SEQ ID NO: 273916 - DNA, 15 bp, Homo sapiens
tttaatgagaaaaag

SEQ ID NO: 273917 - DNA, 15 bp, Homo sapiens
ctttaatgagaaaaa

SEQ ID NO: 273918 - DNA, 15 bp, Homo sapiens
cctttaatgagaaaa

SEQ ID NO: 273919 - DNA, 15 bp, Homo sapiens
acctttaatgagaaa

SEQ ID NO: 273920 - DNA, 15 bp, Homo sapiens
aacctttaatgagaa

SEQ ID NO: 273921 - DNA, 15 bp, Homo sapiens
taacctttaatgaga

SEQ ID NO: 273922 - DNA, 15 bp, Homo sapiens
ctaacctttaatgag

SEQ ID NO: 273923 - DNA, 15 bp, Homo sapiens
tctaacctttaatga

SEQ ID NO: 273924 - DNA, 15 bp, Homo sapiens
atctaacctttaatg

SEQ ID NO: 273925 - DNA, 15 bp, Homo sapiens
aatctaacctttaat

SEQ ID NO: 273926 - DNA, 15 bp, Homo sapiens
aaatctaacctttaa

SEQ ID NO: 273927 - DNA, 15 bp, Homo sapiens
aaaatctaaccttta

SEQ ID NO: 273928 - DNA, 15 bp, Homo sapiens
taaaatctaaccttt

SEQ ID NO: 273929 - DNA, 15 bp, Homo sapiens
ataaaatctaacctt

SEQ ID NO: 273930 - DNA, 15 bp, Homo sapiens
aataaaatctaacct

SEQ ID NO: 273931 - DNA, 15 bp, Homo sapiens
taataaaatctaacc

SEQ ID NO: 273932 - DNA, 15 bp, Homo sapiens
ataataaaatctaac

SEQ ID NO: 273933 - DNA, 15 bp, Homo sapiens
aataataaaatctaa

SEQ ID NO: 273934 - DNA, 15 bp, Homo sapiens
gaataataaaatcta

SEQ ID NO: 273935 - DNA, 15 bp, Homo sapiens
agaataataaaatct

SEQ ID NO: 273936 - DNA, 15 bp, Homo sapiens
aagaataataaaatc

SEQ ID NO: 273937 - DNA, 15 bp, Homo sapiens
aaagaataataaaat

SEQ ID NO: 273938 - DNA, 15 bp, Homo sapiens
gaaagaataataaaa

SEQ ID NO: 273939 - DNA, 15 bp, Homo sapiens
agaaagaataataaa

SEQ ID NO: 273940 - DNA, 15 bp, Homo sapiens
gagaaagaataataa

SEQ ID NO: 273941 - DNA, 15 bp, Homo sapiens
agagaaagaataata

SEQ ID NO: 273942 - DNA, 15 bp, Homo sapiens
gagagaaagaataat

SEQ ID NO: 273943 - DNA, 15 bp, Homo sapiens
tgagagaaagaataa

SEQ ID NO: 273944 - DNA, 15 bp, Homo sapiens
ttgagagaaagaata

SEQ ID NO: 273945 - DNA, 15 bp, Homo sapiens
tttgagagaaagaat

SEQ ID NO: 273946 - DNA, 15 bp, Homo sapiens
ctttgagagaaagaa

SEQ ID NO: 273947 - DNA, 15 bp, Homo sapiens
actttgagagaaaga

SEQ ID NO: 273948 - DNA, 15 bp, Homo sapiens
aactttgagagaaag

SEQ ID NO: 273949 - DNA, 15 bp, Homo sapiens
aaactttgagagaaa

SEQ ID NO: 273950 - DNA, 15 bp, Homo sapiens
caaactttgagagaa

SEQ ID NO: 273951 - DNA, 15 bp, Homo sapiens
ccaaactttgagaga

SEQ ID NO: 273952 - DNA, 15 bp, Homo sapiens
tccaaactttgagag

SEQ ID NO: 273953 - DNA, 15 bp, Homo sapiens
atccaaactttgaga

SEQ ID NO: 273954 - DNA, 15 bp, Homo sapiens
aatccaaactttgag

SEQ ID NO: 273955 - DNA, 15 bp, Homo sapiens
caatccaaactttga

SEQ ID NO: 273956 - DNA, 15 bp, Homo sapiens
gcaatccaaactttg

SEQ ID NO: 273957 - DNA, 15 bp, Homo sapiens
ggcaatccaaacttt

SEQ ID NO: 273958 - DNA, 15 bp, Homo sapiens
tggcaatccaaactt

SEQ ID NO: 273959 - DNA, 15 bp, Homo sapiens
ttggcaatccaaact

SEQ ID NO: 273960 - DNA, 15 bp, Homo sapiens
tttggcaatccaaac

SEQ ID NO: 273961 - DNA, 15 bp, Homo sapiens
ctttggcaatccaaa

SEQ ID NO: 273962 - DNA, 15 bp, Homo sapiens
gctttggcaatccaa

SEQ ID NO: 273963 - DNA, 15 bp, Homo sapiens
agctttggcaatcca

SEQ ID NO: 273964 - DNA, 15 bp, Homo sapiens
aagctttggcaatcc

SEQ ID NO: 273965 - DNA, 15 bp, Homo sapiens
aaagctttggcaatc

SEQ ID NO: 273966 - DNA, 15 bp, Homo sapiens
aaaagctttggcaat

SEQ ID NO: 273967 - DNA, 15 bp, Homo sapiens
caaaagctttggcaa

SEQ ID NO: 273968 - DNA, 15 bp, Homo sapiens
ccaaaagctttggca

SEQ ID NO: 273969 - DNA, 15 bp, Homo sapiens
tccaaaagctttggc

SEQ ID NO: 273970 - DNA, 15 bp, Homo sapiens
atccaaaagctttgg

SEQ ID NO: 273971 - DNA, 15 bp, Homo sapiens
aatccaaaagctttg

SEQ ID NO: 273972 - DNA, 15 bp, Homo sapiens
aaatccaaaagcttt

SEQ ID NO: 273973 - DNA, 15 bp, Homo sapiens
caaatccaaaagctt

SEQ ID NO: 273974 - DNA, 15 bp, Homo sapiens
ccaaatccaaaagct

SEQ ID NO: 273975 - DNA, 15 bp, Homo sapiens
tccaaatccaaaagc

SEQ ID NO: 273976 - DNA, 15 bp, Homo sapiens
ttccaaatccaaaag

SEQ ID NO: 273977 - DNA, 15 bp, Homo sapiens
attccaaatccaaaa

SEQ ID NO: 273978 - DNA, 15 bp, Homo sapiens
tattccaaatccaaa

SEQ ID NO: 273979 - DNA, 15 bp, Homo sapiens
atattccaaatccaa

SEQ ID NO: 273980 - DNA, 15 bp, Homo sapiens
tatattccaaatcca

SEQ ID NO: 273981 - DNA, 15 bp, Homo sapiens
atatattccaaatcc

SEQ ID NO: 273982 - DNA, 15 bp, Homo sapiens
aatatattccaaatc

SEQ ID NO: 273983 - DNA, 15 bp, Homo sapiens
aaatatattccaaat

SEQ ID NO: 273984 - DNA, 15 bp, Homo sapiens
caaatatattccaaa

SEQ ID NO: 273985 - DNA, 15 bp, Homo sapiens
ccaaatatattccaa

SEQ ID NO: 273986 - DNA, 15 bp, Homo sapiens
gccaaatatattcca

SEQ ID NO: 273987 - DNA, 15 bp, Homo sapiens
agccaaatatattcc

SEQ ID NO: 273988 - DNA, 15 bp, Homo sapiens
aagccaaatatattc

SEQ ID NO: 273989 - DNA, 15 bp, Homo sapiens
caagccaaatatatt

SEQ ID NO: 273990 - DNA, 15 bp, Homo sapiens
gcaagccaaatatat

SEQ ID NO: 273991 - DNA, 15 bp, Homo sapiens
tgcaagccaaatata

SEQ ID NO: 273992 - DNA, 15 bp, Homo sapiens
atgcaagccaaatat

SEQ ID NO: 273993 - DNA, 15 bp, Homo sapiens
tatgcaagccaaata

SEQ ID NO: 273994 - DNA, 15 bp, Homo sapiens
ctatgcaagccaaat

SEQ ID NO: 273995 - DNA, 15 bp, Homo sapiens
tctatgcaagccaaa

SEQ ID NO: 273996 - DNA, 15 bp, Homo sapiens
atctatgcaagccaa

SEQ ID NO: 273997 - DNA, 15 bp, Homo sapiens
catctatgcaagcca

SEQ ID NO: 273998 - DNA, 15 bp, Homo sapiens
gcatctatgcaagcc

SEQ ID NO: 273999 - DNA, 15 bp, Homo sapiens
ggcatctatgcaagc

SEQ ID NO: 274000 - DNA, 15 bp, Homo sapiens
tggcatctatgcaag

SEQ ID NO: 274001 - DNA, 15 bp, Homo sapiens
ttggcatctatgcaa

SEQ ID NO: 274002 - DNA, 15 bp, Homo sapiens
attggcatctatgca

SEQ ID NO: 274003 - DNA, 15 bp, Homo sapiens
tattggcatctatgc

SEQ ID NO: 274004 - DNA, 15 bp, Homo sapiens
atattggcatctatg

SEQ ID NO: 274005 - DNA, 15 bp, Homo sapiens
aatattggcatctat

SEQ ID NO: 274006 - DNA, 15 bp, Homo sapiens
aaatattggcatcta

SEQ ID NO: 274007 - DNA, 15 bp, Homo sapiens
taaatattggcatct

SEQ ID NO: 274008 - DNA, 15 bp, Homo sapiens
ataaatattggcatc

SEQ ID NO: 274009 - DNA, 15 bp, Homo sapiens
tataaatattggcat

SEQ ID NO: 274010 - DNA, 15 bp, Homo sapiens
gtataaatattggca

SEQ ID NO: 274011 - DNA, 15 bp, Homo sapiens
tgtataaatattggc

SEQ ID NO: 274012 - DNA, 15 bp, Homo sapiens
atgtataaatattgg

SEQ ID NO: 274013 - DNA, 15 bp, Homo sapiens
aatgtataaatattg

SEQ ID NO: 274014 - DNA, 15 bp, Homo sapiens
caatgtataaatatt

SEQ ID NO: 274015 - DNA, 15 bp, Homo sapiens
tcaatgtataaatat

SEQ ID NO: 274016 - DNA, 15 bp, Homo sapiens
atcaatgtataaata

SEQ ID NO: 274017 - DNA, 15 bp, Homo sapiens
tatcaatgtataaat

SEQ ID NO: 274018 - DNA, 15 bp, Homo sapiens
gtatcaatgtataaa

SEQ ID NO: 274019 - DNA, 15 bp, Homo sapiens
cgtatcaatgtataa

SEQ ID NO: 274020 - DNA, 15 bp, Homo sapiens
tcgtatcaatgtata

SEQ ID NO: 274021 - DNA, 15 bp, Homo sapiens
ttcgtatcaatgtat

SEQ ID NO: 274022 - DNA, 15 bp, Homo sapiens
cttcgtatcaatgta

SEQ ID NO: 274023 - DNA, 15 bp, Homo sapiens
tcttcgtatcaatgt

SEQ ID NO: 274024 - DNA, 15 bp, Homo sapiens
atcttcgtatcaatg

SEQ ID NO: 274025 - DNA, 15 bp, Homo sapiens
aatcttcgtatcaat

SEQ ID NO: 274026 - DNA, 15 bp, Homo sapiens
taatcttcgtatcaa

SEQ ID NO: 274027 - DNA, 15 bp, Homo sapiens
ttaatcttcgtatca

SEQ ID NO: 274028 - DNA, 15 bp, Homo sapiens
tttaatcttcgtatc

SEQ ID NO: 274029 - DNA, 15 bp, Homo sapiens
ttttaatcttcgtat

SEQ ID NO: 274030 - DNA, 15 bp, Homo sapiens
tttttaatcttcgta

SEQ ID NO: 274031 - DNA, 15 bp, Homo sapiens
ttttttaatcttcgt

SEQ ID NO: 274032 - DNA, 15 bp, Homo sapiens
tttttttaatcttcg

SEQ ID NO: 274033 - DNA, 15 bp, Homo sapiens
ttttttttaatcttc

SEQ ID NO: 274034 - DNA, 15 bp, Homo sapiens
tttttttttaatctt

SEQ ID NO: 274035 - DNA, 15 bp, Homo sapiens
ttttttttttaatct

SEQ ID NO: 274036 - DNA, 15 bp, Homo sapiens
gttttttttttaatc

SEQ ID NO: 274037 - DNA, 15 bp, Homo sapiens
agttttttttttaat

SEQ ID NO: 274038 - DNA, 15 bp, Homo sapiens
aagttttttttttaa

SEQ ID NO: 274039 - DNA, 15 bp, Homo sapiens
aaagtttttttttta

SEQ ID NO: 274040 - DNA, 15 bp, Homo sapiens
taaagtttttttttt

SEQ ID NO: 274041 - DNA, 15 bp, Homo sapiens
ctaaagttttttttt

SEQ ID NO: 274042 - DNA, 15 bp, Homo sapiens
tctaaagtttttttt

SEQ ID NO: 274043 - DNA, 15 bp, Homo sapiens
ctctaaagttttttt

SEQ ID NO: 274044 - DNA, 15 bp, Homo sapiens
cctctaaagtttttt

SEQ ID NO: 274045 - DNA, 15 bp, Homo sapiens
tcctctaaagttttt

SEQ ID NO: 274046 - DNA, 15 bp, Homo sapiens
ctcctctaaagtttt

SEQ ID NO: 274047 - DNA, 15 bp, Homo sapiens
tctcctctaaagttt

SEQ ID NO: 274048 - DNA, 15 bp, Homo sapiens
ctctcctctaaagtt

SEQ ID NO: 274049 - DNA, 15 bp, Homo sapiens
tctctcctctaaagt

SEQ ID NO: 274050 - DNA, 15 bp, Homo sapiens
atctctcctctaaag

SEQ ID NO: 274051 - DNA, 15 bp, Homo sapiens
gatctctcctctaaa

SEQ ID NO: 274052 - DNA, 15 bp, Homo sapiens
ggatctctcctctaa

SEQ ID NO: 274053 - DNA, 15 bp, Homo sapiens
aggatctctcctcta

SEQ ID NO: 274054 - DNA, 15 bp, Homo sapiens
aaggatctctcctct

SEQ ID NO: 274055 - DNA, 15 bp, Homo sapiens
aaaggatctctcctc

SEQ ID NO: 274056 - DNA, 15 bp, Homo sapiens
aaaaggatctctcct

SEQ ID NO: 274057 - DNA, 15 bp, Homo sapiens
taaaaggatctctcc

SEQ ID NO: 274058 - DNA, 15 bp, Homo sapiens
gtaaaaggatctctc

SEQ ID NO: 274059 - DNA, 15 bp, Homo sapiens
tgtaaaaggatctct

SEQ ID NO: 274060 - DNA, 15 bp, Homo sapiens
ttgtaaaaggatctc

SEQ ID NO: 274061 - DNA, 15 bp, Homo sapiens
gttgtaaaaggatct

SEQ ID NO: 274062 - DNA, 15 bp, Homo sapiens
agttgtaaaaggatc

SEQ ID NO: 274063 - DNA, 15 bp, Homo sapiens
tagttgtaaaaggat

SEQ ID NO: 274064 - DNA, 15 bp, Homo sapiens
ctagttgtaaaagga

SEQ ID NO: 274065 - DNA, 15 bp, Homo sapiens
tctagttgtaaaagg

SEQ ID NO: 274066 - DNA, 15 bp, Homo sapiens
gtctagttgtaaaag

SEQ ID NO: 274067 - DNA, 15 bp, Homo sapiens
agtctagttgtaaaa

SEQ ID NO: 274068 - DNA, 15 bp, Homo sapiens
aagtctagttgtaaa

SEQ ID NO: 274069 - DNA, 15 bp, Homo sapiens
caagtctagttgtaa

SEQ ID NO: 274070 - DNA, 15 bp, Homo sapiens
tcaagtctagttgta

SEQ ID NO: 274071 - DNA, 15 bp, Homo sapiens
atcaagtctagttgt

SEQ ID NO: 274072 - DNA, 15 bp, Homo sapiens
aatcaagtctagttg

SEQ ID NO: 274073 - DNA, 15 bp, Homo sapiens
aaatcaagtctagtt

SEQ ID NO: 274074 - DNA, 15 bp, Homo sapiens
taaatcaagtctagt

SEQ ID NO: 274075 - DNA, 15 bp, Homo sapiens
ctaaatcaagtctag

SEQ ID NO: 274076 - DNA, 15 bp, Homo sapiens
tctaaatcaagtcta

SEQ ID NO: 274077 - DNA, 15 bp, Homo sapiens
ctctaaatcaagtct

SEQ ID NO: 274078 - DNA, 15 bp, Homo sapiens
actctaaatcaagtc

SEQ ID NO: 274079 - DNA, 15 bp, Homo sapiens
gactctaaatcaagt

SEQ ID NO: 274080 - DNA, 15 bp, Homo sapiens
agactctaaatcaag

SEQ ID NO: 274081 - DNA, 15 bp, Homo sapiens
tagactctaaatcaa

SEQ ID NO: 274082 - DNA, 15 bp, Homo sapiens
atagactctaaatca

SEQ ID NO: 274083 - DNA, 15 bp, Homo sapiens
gatagactctaaatc

SEQ ID NO: 274084 - DNA, 15 bp, Homo sapiens
tgatagactctaaat

SEQ ID NO: 274085 - DNA, 15 bp, Homo sapiens
ctgatagactctaaa

SEQ ID NO: 274086 - DNA, 15 bp, Homo sapiens
tctgatagactctaa

SEQ ID NO: 274087 - DNA, 15 bp, Homo sapiens
ttctgatagactcta

SEQ ID NO: 274088 - DNA, 15 bp, Homo sapiens
tttctgatagactct

SEQ ID NO: 274089 - DNA, 15 bp, Homo sapiens
atttctgatagactc

SEQ ID NO: 274090 - DNA, 15 bp, Homo sapiens
aatttctgatagact

SEQ ID NO: 274091 - DNA, 15 bp, Homo sapiens
aaatttctgatagac

SEQ ID NO: 274092 - DNA, 15 bp, Homo sapiens
aaaatttctgataga

SEQ ID NO: 274093 - DNA, 15 bp, Homo sapiens
gaaaatttctgatag

SEQ ID NO: 274094 - DNA, 15 bp, Homo sapiens
agaaaatttctgata

SEQ ID NO: 274095 - DNA, 15 bp, Homo sapiens
aagaaaatttctgat

SEQ ID NO: 274096 - DNA, 15 bp, Homo sapiens
taagaaaatttctga

SEQ ID NO: 274097 - DNA, 15 bp, Homo sapiens
gtaagaaaatttctg

SEQ ID NO: 274098 - DNA, 15 bp, Homo sapiens
tgtaagaaaatttct

SEQ ID NO: 274099 - DNA, 15 bp, Homo sapiens
atgtaagaaaatttc

SEQ ID NO: 274100 - DNA, 15 bp, Homo sapiens
tatgtaagaaaattt

SEQ ID NO: 274101 - DNA, 15 bp, Homo sapiens
atatgtaagaaaatt

SEQ ID NO: 274102 - DNA, 15 bp, Homo sapiens
aatatgtaagaaaat

SEQ ID NO: 274103 - DNA, 15 bp, Homo sapiens
aaatatgtaagaaaa

SEQ ID NO: 274104 - DNA, 15 bp, Homo sapiens
taaatatgtaagaaa

SEQ ID NO: 274105 - DNA, 15 bp, Homo sapiens
ctaaatatgtaagaa

SEQ ID NO: 274106 - DNA, 15 bp, Homo sapiens
gctaaatatgtaaga

SEQ ID NO: 274107 - DNA, 15 bp, Homo sapiens
tgctaaatatgtaag

SEQ ID NO: 274108 - DNA, 15 bp, Homo sapiens
atgctaaatatgtaa

SEQ ID NO: 274109 - DNA, 15 bp, Homo sapiens
tatgctaaatatgta

SEQ ID NO: 274110 - DNA, 15 bp, Homo sapiens
ttatgctaaatatgt

SEQ ID NO: 274111 - DNA, 15 bp, Homo sapiens
cttatgctaaatatg

SEQ ID NO: 274112 - DNA, 15 bp, Homo sapiens
acttatgctaaatat

SEQ ID NO: 274113 - DNA, 15 bp, Homo sapiens
tacttatgctaaata

SEQ ID NO: 274114 - DNA, 15 bp, Homo sapiens
atacttatgctaaat

SEQ ID NO: 274115 - DNA, 15 bp, Homo sapiens
aatacttatgctaaa

SEQ ID NO: 274116 - DNA, 15 bp, Homo sapiens
caatacttatgctaa

SEQ ID NO: 274117 - DNA, 15 bp, Homo sapiens
acaatacttatgcta

SEQ ID NO: 274118 - DNA, 15 bp, Homo sapiens
cacaatacttatgct

SEQ ID NO: 274119 - DNA, 15 bp, Homo sapiens
tcacaatacttatgc

SEQ ID NO: 274120 - DNA, 15 bp, Homo sapiens
ctcacaatacttatg

SEQ ID NO: 274121 - DNA, 15 bp, Homo sapiens
tctcacaatacttat

SEQ ID NO: 274122 - DNA, 15 bp, Homo sapiens
atctcacaatactta

SEQ ID NO: 274123 - DNA, 15 bp, Homo sapiens
tatctcacaatactt

SEQ ID NO: 274124 - DNA, 15 bp, Homo sapiens
ttatctcacaatact

SEQ ID NO: 274125 - DNA, 15 bp, Homo sapiens
attatctcacaatac

SEQ ID NO: 274126 - DNA, 15 bp, Homo sapiens
cattatctcacaata

SEQ ID NO: 274127 - DNA, 15 bp, Homo sapiens
acattatctcacaat

SEQ ID NO: 274128 - DNA, 15 bp, Homo sapiens
tacattatctcacaa

SEQ ID NO: 274129 - DNA, 15 bp, Homo sapiens
atacattatctcaca

SEQ ID NO: 274130 - DNA, 15 bp, Homo sapiens
catacattatctcac

SEQ ID NO: 274131 - DNA, 15 bp, Homo sapiens
gcatacattatctca

SEQ ID NO: 274132 - DNA, 15 bp, Homo sapiens
agcatacattatctc

SEQ ID NO: 274133 - DNA, 15 bp, Homo sapiens
aagcatacattatct

SEQ ID NO: 274134 - DNA, 15 bp, Homo sapiens
aaagcatacattatc

SEQ ID NO: 274135 - DNA, 15 bp, Homo sapiens
gaaagcatacattat

SEQ ID NO: 274136 - DNA, 15 bp, Homo sapiens
agaaagcatacatta

SEQ ID NO: 274137 - DNA, 15 bp, Homo sapiens
tagaaagcatacatt

SEQ ID NO: 274138 - DNA, 15 bp, Homo sapiens
ttagaaagcatacat

SEQ ID NO: 274139 - DNA, 15 bp, Homo sapiens
tttagaaagcataca

SEQ ID NO: 274140 - DNA, 15 bp, Homo sapiens
ttttagaaagcatac

SEQ ID NO: 274141 - DNA, 15 bp, Homo sapiens
tttttagaaagcata

SEQ ID NO: 274142 - DNA, 15 bp, Homo sapiens
atttttagaaagcat

SEQ ID NO: 274143 - DNA, 15 bp, Homo sapiens
tatttttagaaagca

SEQ ID NO: 274144 - DNA, 15 bp, Homo sapiens
atatttttagaaagc

SEQ ID NO: 274145 - DNA, 15 bp, Homo sapiens
tatatttttagaaag

SEQ ID NO: 274146 - DNA, 15 bp, Homo sapiens
gtatatttttagaaa

SEQ ID NO: 274147 - DNA, 15 bp, Homo sapiens
tgtatatttttagaa

SEQ ID NO: 274148 - DNA, 15 bp, Homo sapiens
atgtatatttttaga

SEQ ID NO: 274149 - DNA, 15 bp, Homo sapiens
catgtatatttttag

SEQ ID NO: 274150 - DNA, 15 bp, Homo sapiens
tcatgtatattttta

SEQ ID NO: 274151 - DNA, 15 bp, Homo sapiens
atcatgtatattttt

SEQ ID NO: 274152 - DNA, 15 bp, Homo sapiens
catcatgtatatttt

SEQ ID NO: 274153 - DNA, 15 bp, Homo sapiens
acatcatgtatattt

SEQ ID NO: 274154 - DNA, 15 bp, Homo sapiens
aacatcatgtatatt

SEQ ID NO: 274155 - DNA, 15 bp, Homo sapiens
gaacatcatgtatat

SEQ ID NO: 274156 - DNA, 15 bp, Homo sapiens
agaacatcatgtata

SEQ ID NO: 274157 - DNA, 15 bp, Homo sapiens
cagaacatcatgtat

SEQ ID NO: 274158 - DNA, 15 bp, Homo sapiens
gcagaacatcatgta

SEQ ID NO: 274159 - DNA, 15 bp, Homo sapiens
agcagaacatcatgt

SEQ ID NO: 274160 - DNA, 15 bp, Homo sapiens
gagcagaacatcatg

SEQ ID NO: 274161 - DNA, 15 bp, Homo sapiens
tgagcagaacatcat

SEQ ID NO: 274162 - DNA, 15 bp, Homo sapiens
ctgagcagaacatca

SEQ ID NO: 274163 - DNA, 15 bp, Homo sapiens
actgagcagaacatc

SEQ ID NO: 274164 - DNA, 15 bp, Homo sapiens
gactgagcagaacat

SEQ ID NO: 274165 - DNA, 15 bp, Homo sapiens
cgactgagcagaaca

SEQ ID NO: 274166 - DNA, 15 bp, Homo sapiens
tcgactgagcagaac

SEQ ID NO: 274167 - DNA, 15 bp, Homo sapiens
ttcgactgagcagaa

SEQ ID NO: 274168 - DNA, 15 bp, Homo sapiens
attcgactgagcaga

SEQ ID NO: 274169 - DNA, 15 bp, Homo sapiens
cattcgactgagcag

SEQ ID NO: 274170 - DNA, 15 bp, Homo sapiens
gcattcgactgagca

SEQ ID NO: 274171 - DNA, 15 bp, Homo sapiens
tgcattcgactgagc

SEQ ID NO: 274172 - DNA, 15 bp, Homo sapiens
atgcattcgactgag

SEQ ID NO: 274173 - DNA, 15 bp, Homo sapiens
aatgcattcgactga

SEQ ID NO: 274174 - DNA, 15 bp, Homo sapiens
aaatgcattcgactg

SEQ ID NO: 274175 - DNA, 15 bp, Homo sapiens
taaatgcattcgact

SEQ ID NO: 274176 - DNA, 15 bp, Homo sapiens
ataaatgcattcgac

SEQ ID NO: 274177 - DNA, 15 bp, Homo sapiens
aataaatgcattcga

SEQ ID NO: 274178 - DNA, 15 bp, Homo sapiens
aaataaatgcattcg

SEQ ID NO: 274179 - DNA, 15 bp, Homo sapiens
gaaataaatgcattc

SEQ ID NO: 274180 - DNA, 15 bp, Homo sapiens
agaaataaatgcatt

SEQ ID NO: 274181 - DNA, 15 bp, Homo sapiens
aagaaataaatgcat

SEQ ID NO: 274182 - DNA, 15 bp, Homo sapiens
aaagaaataaatgca

SEQ ID NO: 274183 - DNA, 15 bp, Homo sapiens
gaaagaaataaatgc

SEQ ID NO: 274184 - DNA, 15 bp, Homo sapiens
agaaagaaataaatg

SEQ ID NO: 274185 - DNA, 15 bp, Homo sapiens
aagaaagaaataaat

SEQ ID NO: 274186 - DNA, 15 bp, Homo sapiens
aaagaaagaaataaa

SEQ ID NO: 274187 - DNA, 15 bp, Homo sapiens
taaagaaagaaataa

SEQ ID NO: 274188 - DNA, 15 bp, Homo sapiens
ttaaagaaagaaata

SEQ ID NO: 274189 - DNA, 15 bp, Homo sapiens
tttaaagaaagaaat

SEQ ID NO: 274190 - DNA, 15 bp, Homo sapiens
ctttaaagaaagaaa

SEQ ID NO: 274191 - DNA, 15 bp, Homo sapiens
actttaaagaaagaa

SEQ ID NO: 274192 - DNA, 15 bp, Homo sapiens
aactttaaagaaaga

SEQ ID NO: 274193 - DNA, 15 bp, Homo sapiens
aaactttaaagaaag

SEQ ID NO: 274194 - DNA, 15 bp, Homo sapiens
aaaactttaaagaaa

SEQ ID NO: 274195 - DNA, 15 bp, Homo sapiens
gaaaactttaaagaa

SEQ ID NO: 274196 - DNA, 15 bp, Homo sapiens
agaaaactttaaaga

SEQ ID NO: 274197 - DNA, 15 bp, Homo sapiens
cagaaaactttaaag

SEQ ID NO: 274198 - DNA, 15 bp, Homo sapiens
ccagaaaactttaaa

SEQ ID NO: 274199 - DNA, 15 bp, Homo sapiens
cccagaaaactttaa

SEQ ID NO: 274200 - DNA, 15 bp, Homo sapiens
acccagaaaacttta

SEQ ID NO: 274201 - DNA, 15 bp, Homo sapiens
tacccagaaaacttt

SEQ ID NO: 274202 - DNA, 15 bp, Homo sapiens
ttacccagaaaactt

SEQ ID NO: 274203 - DNA, 15 bp, Homo sapiens
tttacccagaaaact

SEQ ID NO: 274204 - DNA, 15 bp, Homo sapiens
atttacccagaaaac

SEQ ID NO: 274205 - DNA, 15 bp, Homo sapiens
aatttacccagaaaa

SEQ ID NO: 274206 - DNA, 15 bp, Homo sapiens
aaatttacccagaaa

SEQ ID NO: 274207 - DNA, 15 bp, Homo sapiens
gaaatttacccagaa

SEQ ID NO: 274208 - DNA, 15 bp, Homo sapiens
tgaaatttacccaga

SEQ ID NO: 274209 - DNA, 15 bp, Homo sapiens
ttgaaatttacccag

SEQ ID NO: 274210 - DNA, 15 bp, Homo sapiens
cttgaaatttaccca

SEQ ID NO: 274211 - DNA, 15 bp, Homo sapiens
tcttgaaatttaccc

SEQ ID NO: 274212 - DNA, 15 bp, Homo sapiens
ctcttgaaatttacc

SEQ ID NO: 274213 - DNA, 15 bp, Homo sapiens
gctcttgaaatttac

SEQ ID NO: 274214 - DNA, 15 bp, Homo sapiens
tgctcttgaaattta

SEQ ID NO: 274215 - DNA, 15 bp, Homo sapiens
atgctcttgaaattt

SEQ ID NO: 274216 - DNA, 15 bp, Homo sapiens
gatgctcttgaaatt

SEQ ID NO: 274217 - DNA, 15 bp, Homo sapiens
cgatgctcttgaaat

SEQ ID NO: 274218 - DNA, 15 bp, Homo sapiens
ccgatgctcttgaaa

SEQ ID NO: 274219 - DNA, 15 bp, Homo sapiens
cccgatgctcttgaa

SEQ ID NO: 274220 - DNA, 15 bp, Homo sapiens
tcccgatgctcttga

SEQ ID NO: 274221 - DNA, 15 bp, Homo sapiens
atcccgatgctcttg

SEQ ID NO: 274222 - DNA, 15 bp, Homo sapiens
tatcccgatgctctt

SEQ ID NO: 274223 - DNA, 15 bp, Homo sapiens
atatcccgatgctct

SEQ ID NO: 274224 - DNA, 15 bp, Homo sapiens
aatatcccgatgctc

SEQ ID NO: 274225 - DNA, 15 bp, Homo sapiens
taatatcccgatgct

SEQ ID NO: 274226 - DNA, 15 bp, Homo sapiens
gtaatatcccgatgc

SEQ ID NO: 274227 - DNA, 15 bp, Homo sapiens
agtaatatcccgatg

SEQ ID NO: 274228 - DNA, 15 bp, Homo sapiens
aagtaatatcccgat

SEQ ID NO: 274229 - DNA, 15 bp, Homo sapiens
taagtaatatcccga

SEQ ID NO: 274230 - DNA, 15 bp, Homo sapiens
ttaagtaatatcccg

SEQ ID NO: 274231 - DNA, 15 bp, Homo sapiens
gttaagtaatatccc

SEQ ID NO: 274232 - DNA, 15 bp, Homo sapiens
agttaagtaatatcc

SEQ ID NO: 274233 - DNA, 15 bp, Homo sapiens
aagttaagtaatatc

SEQ ID NO: 274234 - DNA, 15 bp, Homo sapiens
caagttaagtaatat

SEQ ID NO: 274235 - DNA, 15 bp, Homo sapiens
ccaagttaagtaata

SEQ ID NO: 274236 - DNA, 15 bp, Homo sapiens
accaagttaagtaat

SEQ ID NO: 274237 - DNA, 15 bp, Homo sapiens
taccaagttaagtaa

SEQ ID NO: 274238 - DNA, 15 bp, Homo sapiens
ctaccaagttaagta

SEQ ID NO: 274239 - DNA, 15 bp, Homo sapiens
tctaccaagttaagt

SEQ ID NO: 274240 - DNA, 15 bp, Homo sapiens
atctaccaagttaag

SEQ ID NO: 274241 - DNA, 15 bp, Homo sapiens
aatctaccaagttaa

SEQ ID NO: 274242 - DNA, 15 bp, Homo sapiens
aaatctaccaagtta

SEQ ID NO: 274243 - DNA, 15 bp, Homo sapiens
aaaatctaccaagtt

SEQ ID NO: 274244 - DNA, 15 bp, Homo sapiens
taaaatctaccaagt

SEQ ID NO: 274245 - DNA, 15 bp, Homo sapiens
ataaaatctaccaag

SEQ ID NO: 274246 - DNA, 15 bp, Homo sapiens
aataaaatctaccaa

SEQ ID NO: 274247 - DNA, 15 bp, Homo sapiens
taataaaatctacca

SEQ ID NO: 274248 - DNA, 15 bp, Homo sapiens
ttaataaaatctacc

SEQ ID NO: 274249 - DNA, 15 bp, Homo sapiens
tttaataaaatctac

SEQ ID NO: 274250 - DNA, 15 bp, Homo sapiens
gtttaataaaatcta

SEQ ID NO: 274251 - DNA, 15 bp, Homo sapiens
ggtttaataaaatct

SEQ ID NO: 274252 - DNA, 15 bp, Homo sapiens
aggtttaataaaatc

SEQ ID NO: 274253 - DNA, 15 bp, Homo sapiens
gaggtttaataaaat

SEQ ID NO: 274254 - DNA, 15 bp, Homo sapiens
ggaggtttaataaaa

SEQ ID NO: 274255 - DNA, 15 bp, Homo sapiens
tggaggtttaataaa

SEQ ID NO: 274256 - DNA, 15 bp, Homo sapiens
ttggaggtttaataa

SEQ ID NO: 274257 - DNA, 15 bp, Homo sapiens
tttggaggtttaata

SEQ ID NO: 274258 - DNA, 15 bp, Homo sapiens
ctttggaggtttaat

SEQ ID NO: 274259 - DNA, 15 bp, Homo sapiens
tctttggaggtttaa

SEQ ID NO: 274260 - DNA, 15 bp, Homo sapiens
ttctttggaggttta

SEQ ID NO: 274261 - DNA, 15 bp, Homo sapiens
gttctttggaggttt

SEQ ID NO: 274262 - DNA, 15 bp, Homo sapiens
tgttctttggaggtt

SEQ ID NO: 274263 - DNA, 15 bp, Homo sapiens
atgttctttggaggt

SEQ ID NO: 274264 - DNA, 15 bp, Homo sapiens
tatgttctttggagg

SEQ ID NO: 274265 - DNA, 15 bp, Homo sapiens
ttatgttctttggag

SEQ ID NO: 274266 - DNA, 15 bp, Homo sapiens
attatgttctttgga

SEQ ID NO: 274267 - DNA, 15 bp, Homo sapiens
aattatgttctttgg

SEQ ID NO: 274268 - DNA, 15 bp, Homo sapiens
taattatgttctttg

SEQ ID NO: 274269 - DNA, 15 bp, Homo sapiens
ttaattatgttcttt

SEQ ID NO: 274270 - DNA, 15 bp, Homo sapiens
gttaattatgttctt

SEQ ID NO: 274271 - DNA, 15 bp, Homo sapiens
agttaattatgttct

SEQ ID NO: 274272 - DNA, 15 bp, Homo sapiens
gagttaattatgttc

SEQ ID NO: 274273 - DNA, 15 bp, Homo sapiens
tgagttaattatgtt

SEQ ID NO: 274274 - DNA, 15 bp, Homo sapiens
atgagttaattatgt

SEQ ID NO: 274275 - DNA, 15 bp, Homo sapiens
aatgagttaattatg

SEQ ID NO: 274276 - DNA, 15 bp, Homo sapiens
aaatgagttaattat

SEQ ID NO: 274277 - DNA, 15 bp, Homo sapiens
aaaatgagttaatta

SEQ ID NO: 274278 - DNA, 15 bp, Homo sapiens
taaaatgagttaatt

SEQ ID NO: 274279 - DNA, 15 bp, Homo sapiens
gtaaaatgagttaat

SEQ ID NO: 274280 - DNA, 15 bp, Homo sapiens
tgtaaaatgagttaa

SEQ ID NO: 274281 - DNA, 15 bp, Homo sapiens
ttgtaaaatgagtta

SEQ ID NO: 274282 - DNA, 15 bp, Homo sapiens
tttgtaaaatgagtt

SEQ ID NO: 274283 - DNA, 15 bp, Homo sapiens
gtttgtaaaatgagt

SEQ ID NO: 274284 - DNA, 15 bp, Homo sapiens
agtttgtaaaatgag

SEQ ID NO: 274285 - DNA, 15 bp, Homo sapiens
cagtttgtaaaatga

SEQ ID NO: 274286 - DNA, 15 bp, Homo sapiens
acagtttgtaaaatg

SEQ ID NO: 274287 - DNA, 15 bp, Homo sapiens
aacagtttgtaaaat

SEQ ID NO: 274288 - DNA, 15 bp, Homo sapiens
taacagtttgtaaaa

SEQ ID NO: 274289 - DNA, 15 bp, Homo sapiens
ttaacagtttgtaaa

SEQ ID NO: 274290 - DNA, 15 bp, Homo sapiens
attaacagtttgtaa

SEQ ID NO: 274291 - DNA, 15 bp, Homo sapiens
cattaacagtttgta

SEQ ID NO: 274292 - DNA, 15 bp, Homo sapiens
gcattaacagtttgt

SEQ ID NO: 274293 - DNA, 15 bp, Homo sapiens
agcattaacagtttg

SEQ ID NO: 274294 - DNA, 15 bp, Homo sapiens
aagcattaacagttt

SEQ ID NO: 274295 - DNA, 15 bp, Homo sapiens
taagcattaacagtt

SEQ ID NO: 274296 - DNA, 15 bp, Homo sapiens
gtaagcattaacagt

SEQ ID NO: 274297 - DNA, 15 bp, Homo sapiens
tgtaagcattaacag

SEQ ID NO: 274298 - DNA, 15 bp, Homo sapiens
ctgtaagcattaaca

SEQ ID NO: 274299 - DNA, 15 bp, Homo sapiens
tctgtaagcattaac

SEQ ID NO: 274300 - DNA, 15 bp, Homo sapiens
ttctgtaagcattaa

SEQ ID NO: 274301 - DNA, 15 bp, Homo sapiens
tttctgtaagcatta

SEQ ID NO: 274302 - DNA, 15 bp, Homo sapiens
atttctgtaagcatt

SEQ ID NO: 274303 - DNA, 15 bp, Homo sapiens
aatttctgtaagcat

SEQ ID NO: 274304 - DNA, 15 bp, Homo sapiens
gaatttctgtaagca

SEQ ID NO: 274305 - DNA, 15 bp, Homo sapiens
tgaatttctgtaagc

SEQ ID NO: 274306 - DNA, 15 bp, Homo sapiens
atgaatttctgtaag

SEQ ID NO: 274307 - DNA, 15 bp, Homo sapiens
catgaatttctgtaa

SEQ ID NO: 274308 - DNA, 15 bp, Homo sapiens
tcatgaatttctgta

SEQ ID NO: 274309 - DNA, 15 bp, Homo sapiens
atcatgaatttctgt

SEQ ID NO: 274310 - DNA, 15 bp, Homo sapiens
tatcatgaatttctg

SEQ ID NO: 274311 - DNA, 15 bp, Homo sapiens
ttatcatgaatttct

SEQ ID NO: 274312 - DNA, 15 bp, Homo sapiens
tttatcatgaatttc

SEQ ID NO: 274313 - DNA, 15 bp, Homo sapiens
atttatcatgaattt

SEQ ID NO: 274314 - DNA, 15 bp, Homo sapiens
catttatcatgaatt

SEQ ID NO: 274315 - DNA, 15 bp, Homo sapiens
tcatttatcatgaat

SEQ ID NO: 274316 - DNA, 15 bp, Homo sapiens
ctcatttatcatgaa

SEQ ID NO: 274317 - DNA, 15 bp, Homo sapiens
tctcatttatcatga

SEQ ID NO: 274318 - DNA, 15 bp, Homo sapiens
atctcatttatcatg

SEQ ID NO: 274319 - DNA, 15 bp, Homo sapiens
gatctcatttatcat

SEQ ID NO: 274320 - DNA, 15 bp, Homo sapiens
tgatctcatttatca

SEQ ID NO: 274321 - DNA, 15 bp, Homo sapiens
gtgatctcatttatc

SEQ ID NO: 274322 - DNA, 15 bp, Homo sapiens
agtgatctcatttat

SEQ ID NO: 274323 - DNA, 15 bp, Homo sapiens
aagtgatctcattta

SEQ ID NO: 274324 - DNA, 15 bp, Homo sapiens
taagtgatctcattt

SEQ ID NO: 274325 - DNA, 15 bp, Homo sapiens
ttaagtgatctcatt

SEQ ID NO: 274326 - DNA, 15 bp, Homo sapiens
cttaagtgatctcat

SEQ ID NO: 274327 - DNA, 15 bp, Homo sapiens
tcttaagtgatctca

SEQ ID NO: 274328 - DNA, 15 bp, Homo sapiens
gtcttaagtgatctc

SEQ ID NO: 274329 - DNA, 15 bp, Homo sapiens
agtcttaagtgatct

SEQ ID NO: 274330 - DNA, 15 bp, Homo sapiens
cagtcttaagtgatc

SEQ ID NO: 274331 - DNA, 15 bp, Homo sapiens
acagtcttaagtgat

SEQ ID NO: 274332 - DNA, 15 bp, Homo sapiens
aacagtcttaagtga

SEQ ID NO: 274333 - DNA, 15 bp, Homo sapiens
aaacagtcttaagtg

SEQ ID NO: 274334 - DNA, 15 bp, Homo sapiens
gaaacagtcttaagt

SEQ ID NO: 274335 - DNA, 15 bp, Homo sapiens
cgaaacagtcttaag

SEQ ID NO: 274336 - DNA, 15 bp, Homo sapiens
ccgaaacagtcttaa

SEQ ID NO: 274337 - DNA, 15 bp, Homo sapiens
cccgaaacagtctta

SEQ ID NO: 274338 - DNA, 15 bp, Homo sapiens
tcccgaaacagtctt

SEQ ID NO: 274339 - DNA, 15 bp, Homo sapiens
ctcccgaaacagtct

SEQ ID NO: 274340 - DNA, 15 bp, Homo sapiens
tctcccgaaacagtc

SEQ ID NO: 274341 - DNA, 15 bp, Homo sapiens
ttctcccgaaacagt

SEQ ID NO: 274342 - DNA, 15 bp, Homo sapiens
gttctcccgaaacag

SEQ ID NO: 274343 - DNA, 15 bp, Homo sapiens
tgttctcccgaaaca

SEQ ID NO: 274344 - DNA, 15 bp, Homo sapiens
ctgttctcccgaaac

SEQ ID NO: 274345 - DNA, 15 bp, Homo sapiens
cctgttctcccgaaa

SEQ ID NO: 274346 - DNA, 15 bp, Homo sapiens
tcctgttctcccgaa

SEQ ID NO: 274347 - DNA, 15 bp, Homo sapiens
ttcctgttctcccga

SEQ ID NO: 274348 - DNA, 15 bp, Homo sapiens
tttcctgttctcccg

SEQ ID NO: 274349 - DNA, 15 bp, Homo sapiens
ttttcctgttctccc

SEQ ID NO: 274350 - DNA, 15 bp, Homo sapiens
cttttcctgttctcc

SEQ ID NO: 274351 - DNA, 15 bp, Homo sapiens
gcttttcctgttctc

SEQ ID NO: 274352 - DNA, 15 bp, Homo sapiens
ggcttttcctgttct

SEQ ID NO: 274353 - DNA, 15 bp, Homo sapiens
tggcttttcctgttc

SEQ ID NO: 274354 - DNA, 15 bp, Homo sapiens
ctggcttttcctgtt

SEQ ID NO: 274355 - DNA, 15 bp, Homo sapiens
actggcttttcctgt

SEQ ID NO: 274356 - DNA, 15 bp, Homo sapiens
aactggcttttcctg

SEQ ID NO: 274357 - DNA, 15 bp, Homo sapiens
aaactggcttttcct

SEQ ID NO: 274358 - DNA, 15 bp, Homo sapiens
caaactggcttttcc

SEQ ID NO: 274359 - DNA, 15 bp, Homo sapiens
acaaactggcttttc

SEQ ID NO: 274360 - DNA, 15 bp, Homo sapiens
aacaaactggctttt

SEQ ID NO: 274361 - DNA, 15 bp, Homo sapiens
taacaaactggcttt

SEQ ID NO: 274362 - DNA, 15 bp, Homo sapiens
ttaacaaactggctt

SEQ ID NO: 274363 - DNA, 15 bp, Homo sapiens
attaacaaactggct

SEQ ID NO: 274364 - DNA, 15 bp, Homo sapiens
cattaacaaactggc

SEQ ID NO: 274365 - DNA, 15 bp, Homo sapiens
gcattaacaaactgg

SEQ ID NO: 274366 - DNA, 15 bp, Homo sapiens
agcattaacaaactg

SEQ ID NO: 274367 - DNA, 15 bp, Homo sapiens
cagcattaacaaact

SEQ ID NO: 274368 - DNA, 15 bp, Homo sapiens
ccagcattaacaaac

SEQ ID NO: 274369 - DNA, 15 bp, Homo sapiens
accagcattaacaaa

SEQ ID NO: 274370 - DNA, 15 bp, Homo sapiens
gaccagcattaacaa

SEQ ID NO: 274371 - DNA, 15 bp, Homo sapiens
ggaccagcattaaca

SEQ ID NO: 274372 - DNA, 15 bp, Homo sapiens
aggaccagcattaac

SEQ ID NO: 274373 - DNA, 15 bp, Homo sapiens
gaggaccagcattaa

SEQ ID NO: 274374 - DNA, 15 bp, Homo sapiens
agaggaccagcatta

SEQ ID NO: 274375 - DNA, 15 bp, Homo sapiens
aagaggaccagcatt

SEQ ID NO: 274376 - DNA, 15 bp, Homo sapiens
gaagaggaccagcat

SEQ ID NO: 274377 - DNA, 15 bp, Homo sapiens
agaagaggaccagca

SEQ ID NO: 274378 - DNA, 15 bp, Homo sapiens
gagaagaggaccagc

SEQ ID NO: 274379 - DNA, 15 bp, Homo sapiens
agagaagaggaccag

SEQ ID NO: 274380 - DNA, 15 bp, Homo sapiens
tagagaagaggacca

SEQ ID NO: 274381 - DNA, 15 bp, Homo sapiens
atagagaagaggacc

SEQ ID NO: 274382 - DNA, 15 bp, Homo sapiens
aatagagaagaggac

SEQ ID NO: 274383 - DNA, 15 bp, Homo sapiens
taatagagaagagga

SEQ ID NO: 274384 - DNA, 15 bp, Homo sapiens
ataatagagaagagg

SEQ ID NO: 274385 - DNA, 15 bp, Homo sapiens
tataatagagaagag

SEQ ID NO: 274386 - DNA, 15 bp, Homo sapiens
ttataatagagaaga

SEQ ID NO: 274387 - DNA, 15 bp, Homo sapiens
attataatagagaag

SEQ ID NO: 274388 - DNA, 15 bp, Homo sapiens
tattataatagagaa

SEQ ID NO: 274389 - DNA, 15 bp, Homo sapiens
atattataatagaga

SEQ ID NO: 274390 - DNA, 15 bp, Homo sapiens
aatattataatagag

SEQ ID NO: 274391 - DNA, 15 bp, Homo sapiens
caatattataataga

SEQ ID NO: 274392 - DNA, 15 bp, Homo sapiens
acaatattataatag

SEQ ID NO: 274393 - DNA, 15 bp, Homo sapiens
cacaatattataata

SEQ ID NO: 274394 - DNA, 15 bp, Homo sapiens
tcacaatattataat

SEQ ID NO: 274395 - DNA, 15 bp, Homo sapiens
ctcacaatattataa

SEQ ID NO: 274396 - DNA, 15 bp, Homo sapiens
tctcacaatattata

SEQ ID NO: 274397 - DNA, 15 bp, Homo sapiens
ttctcacaatattat

SEQ ID NO: 274398 - DNA, 15 bp, Homo sapiens
tttctcacaatatta

SEQ ID NO: 274399 - DNA, 15 bp, Homo sapiens
atttctcacaatatt

SEQ ID NO: 274400 - DNA, 15 bp, Homo sapiens
catttctcacaatat

SEQ ID NO: 274401 - DNA, 15 bp, Homo sapiens
tcatttctcacaata

SEQ ID NO: 274402 - DNA, 15 bp, Homo sapiens
ttcatttctcacaat

SEQ ID NO: 274403 - DNA, 15 bp, Homo sapiens
cttcatttctcacaa

SEQ ID NO: 274404 - DNA, 15 bp, Homo sapiens
ccttcatttctcaca

SEQ ID NO: 274405 - DNA, 15 bp, Homo sapiens
tccttcatttctcac

SEQ ID NO: 274406 - DNA, 15 bp, Homo sapiens
ttccttcatttctca

SEQ ID NO: 274407 - DNA, 15 bp, Homo sapiens
attccttcatttctc

SEQ ID NO: 274408 - DNA, 15 bp, Homo sapiens
cattccttcatttct

SEQ ID NO: 274409 - DNA, 15 bp, Homo sapiens
acattccttcatttc

SEQ ID NO: 274410 - DNA, 15 bp, Homo sapiens
aacattccttcattt

SEQ ID NO: 274411 - DNA, 15 bp, Homo sapiens
aaacattccttcatt

SEQ ID NO: 274412 - DNA, 15 bp, Homo sapiens
taaacattccttcat

SEQ ID NO: 274413 - DNA, 15 bp, Homo sapiens
ataaacattccttca

SEQ ID NO: 274414 - DNA, 15 bp, Homo sapiens
gataaacattccttc

SEQ ID NO: 274415 - DNA, 15 bp, Homo sapiens
tgataaacattcctt

SEQ ID NO: 274416 - DNA, 15 bp, Homo sapiens
gtgataaacattcct

SEQ ID NO: 274417 - DNA, 15 bp, Homo sapiens
agtgataaacattcc

SEQ ID NO: 274418 - DNA, 15 bp, Homo sapiens
tagtgataaacattc

SEQ ID NO: 274419 - DNA, 15 bp, Homo sapiens
ctagtgataaacatt

SEQ ID NO: 274420 - DNA, 15 bp, Homo sapiens
gctagtgataaacat

SEQ ID NO: 274421 - DNA, 15 bp, Homo sapiens
agctagtgataaaca

SEQ ID NO: 274422 - DNA, 15 bp, Homo sapiens
cagctagtgataaac

SEQ ID NO: 274423 - DNA, 15 bp, Homo sapiens
acagctagtgataaa

SEQ ID NO: 274424 - DNA, 15 bp, Homo sapiens
aacagctagtgataa

SEQ ID NO: 274425 - DNA, 15 bp, Homo sapiens
taacagctagtgata

SEQ ID NO: 274426 - DNA, 15 bp, Homo sapiens
ataacagctagtgat

SEQ ID NO: 274427 - DNA, 15 bp, Homo sapiens
tataacagctagtga

SEQ ID NO: 274428 - DNA, 15 bp, Homo sapiens
ttataacagctagtg

SEQ ID NO: 274429 - DNA, 15 bp, Homo sapiens
gttataacagctagt

SEQ ID NO: 274430 - DNA, 15 bp, Homo sapiens
ggttataacagctag

SEQ ID NO: 274431 - DNA, 15 bp, Homo sapiens
aggttataacagcta

SEQ ID NO: 274432 - DNA, 15 bp, Homo sapiens
aaggttataacagct

SEQ ID NO: 274433 - DNA, 15 bp, Homo sapiens
taaggttataacagc

SEQ ID NO: 274434 - DNA, 15 bp, Homo sapiens
ttaaggttataacag

SEQ ID NO: 274435 - DNA, 15 bp, Homo sapiens
attaaggttataaca

SEQ ID NO: 274436 - DNA, 15 bp, Homo sapiens
aattaaggttataac

SEQ ID NO: 274437 - DNA, 15 bp, Homo sapiens
aaattaaggttataa

SEQ ID NO: 274438 - DNA, 15 bp, Homo sapiens
caaattaaggttata

SEQ ID NO: 274439 - DNA, 15 bp, Homo sapiens
tcaaattaaggttat

SEQ ID NO: 274440 - DNA, 15 bp, Homo sapiens
ctcaaattaaggtta

SEQ ID NO: 274441 - DNA, 15 bp, Homo sapiens
tctcaaattaaggtt

SEQ ID NO: 274442 - DNA, 15 bp, Homo sapiens
ctctcaaattaaggt

SEQ ID NO: 274443 - DNA, 15 bp, Homo sapiens
actctcaaattaagg

SEQ ID NO: 274444 - DNA, 15 bp, Homo sapiens
aactctcaaattaag

SEQ ID NO: 274445 - DNA, 15 bp, Homo sapiens
gaactctcaaattaa

SEQ ID NO: 274446 - DNA, 15 bp, Homo sapiens
agaactctcaaatta

SEQ ID NO: 274447 - DNA, 15 bp, Homo sapiens
aagaactctcaaatt

SEQ ID NO: 274448 - DNA, 15 bp, Homo sapiens
aaagaactctcaaat

SEQ ID NO: 274449 - DNA, 15 bp, Homo sapiens
taaagaactctcaaa

SEQ ID NO: 274450 - DNA, 15 bp, Homo sapiens
ttaaagaactctcaa

SEQ ID NO: 274451 - DNA, 15 bp, Homo sapiens
tttaaagaactctca

SEQ ID NO: 274452 - DNA, 15 bp, Homo sapiens
atttaaagaactctc

SEQ ID NO: 274453 - DNA, 15 bp, Homo sapiens
catttaaagaactct

SEQ ID NO: 274454 - DNA, 15 bp, Homo sapiens
ccatttaaagaactc

SEQ ID NO: 274455 - DNA, 15 bp, Homo sapiens
gccatttaaagaact

SEQ ID NO: 274456 - DNA, 15 bp, Homo sapiens
tgccatttaaagaac

SEQ ID NO: 274457 - DNA, 15 bp, Homo sapiens
ttgccatttaaagaa

SEQ ID NO: 274458 - DNA, 15 bp, Homo sapiens
attgccatttaaaga

SEQ ID NO: 274459 - DNA, 15 bp, Homo sapiens
aattgccatttaaag

SEQ ID NO: 274460 - DNA, 15 bp, Homo sapiens
taattgccatttaaa

SEQ ID NO: 274461 - DNA, 15 bp, Homo sapiens
gtaattgccatttaa

SEQ ID NO: 274462 - DNA, 15 bp, Homo sapiens
tgtaattgccattta

SEQ ID NO: 274463 - DNA, 15 bp, Homo sapiens
atgtaattgccattt

SEQ ID NO: 274464 - DNA, 15 bp, Homo sapiens
tatgtaattgccatt

SEQ ID NO: 274465 - DNA, 15 bp, Homo sapiens
atatgtaattgccat

SEQ ID NO: 274466 - DNA, 15 bp, Homo sapiens
tatatgtaattgcca

SEQ ID NO: 274467 - DNA, 15 bp, Homo sapiens
atatatgtaattgcc

SEQ ID NO: 274468 - DNA, 15 bp, Homo sapiens
aatatatgtaattgc

SEQ ID NO: 274469 - DNA, 15 bp, Homo sapiens
aaatatatgtaattg

SEQ ID NO: 274470 - DNA, 15 bp, Homo sapiens
taaatatatgtaatt

SEQ ID NO: 274471 - DNA, 15 bp, Homo sapiens
gtaaatatatgtaat

SEQ ID NO: 274472 - DNA, 15 bp, Homo sapiens
tgtaaatatatgtaa

SEQ ID NO: 274473 - DNA, 15 bp, Homo sapiens
ctgtaaatatatgta

SEQ ID NO: 274474 - DNA, 15 bp, Homo sapiens
tctgtaaatatatgt

SEQ ID NO: 274475 - DNA, 15 bp, Homo sapiens
ttctgtaaatatatg

SEQ ID NO: 274476 - DNA, 15 bp, Homo sapiens
cttctgtaaatatat

SEQ ID NO: 274477 - DNA, 15 bp, Homo sapiens
tcttctgtaaatata

SEQ ID NO: 274478 - DNA, 15 bp, Homo sapiens
ttcttctgtaaatat

SEQ ID NO: 274479 - DNA, 15 bp, Homo sapiens
attcttctgtaaata

SEQ ID NO: 274480 - DNA, 15 bp, Homo sapiens
cattcttctgtaaat

SEQ ID NO: 274481 - DNA, 15 bp, Homo sapiens
tcattcttctgtaaa

SEQ ID NO: 274482 - DNA, 15 bp, Homo sapiens
gtcattcttctgtaa

SEQ ID NO: 274483 - DNA, 15 bp, Homo sapiens
tgtcattcttctgta

SEQ ID NO: 274484 - DNA, 15 bp, Homo sapiens
gtgtcattcttctgt

SEQ ID NO: 274485 - DNA, 15 bp, Homo sapiens
agtgtcattcttctg

SEQ ID NO: 274486 - DNA, 15 bp, Homo sapiens
cagtgtcattcttct

SEQ ID NO: 274487 - DNA, 15 bp, Homo sapiens
ccagtgtcattcttc

SEQ ID NO: 274488 - DNA, 15 bp, Homo sapiens
gccagtgtcattctt

SEQ ID NO: 274489 - DNA, 15 bp, Homo sapiens
tgccagtgtcattct

SEQ ID NO: 274490 - DNA, 15 bp, Homo sapiens
atgccagtgtcattc

SEQ ID NO: 274491 - DNA, 15 bp, Homo sapiens
aatgccagtgtcatt

SEQ ID NO: 274492 - DNA, 15 bp, Homo sapiens
aaatgccagtgtcat

SEQ ID NO: 274493 - DNA, 15 bp, Homo sapiens
taaatgccagtgtca

SEQ ID NO: 274494 - DNA, 15 bp, Homo sapiens
ctaaatgccagtgtc

SEQ ID NO: 274495 - DNA, 15 bp, Homo sapiens
gctaaatgccagtgt

SEQ ID NO: 274496 - DNA, 15 bp, Homo sapiens
agctaaatgccagtg

SEQ ID NO: 274497 - DNA, 15 bp, Homo sapiens
gagctaaatgccagt

SEQ ID NO: 274498 - DNA, 15 bp, Homo sapiens
tgagctaaatgccag

SEQ ID NO: 274499 - DNA, 15 bp, Homo sapiens
ttgagctaaatgcca

SEQ ID NO: 274500 - DNA, 15 bp, Homo sapiens
attgagctaaatgcc

SEQ ID NO: 274501 - DNA, 15 bp, Homo sapiens
tattgagctaaatgc

SEQ ID NO: 274502 - DNA, 15 bp, Homo sapiens
atattgagctaaatg

SEQ ID NO: 274503 - DNA, 15 bp, Homo sapiens
aatattgagctaaat

SEQ ID NO: 274504 - DNA, 15 bp, Homo sapiens
aaatattgagctaaa

SEQ ID NO: 274505 - DNA, 15 bp, Homo sapiens
aaaatattgagctaa

SEQ ID NO: 274506 - DNA, 15 bp, Homo sapiens
gaaaatattgagcta

SEQ ID NO: 274507 - DNA, 15 bp, Homo sapiens
tgaaaatattgagct

SEQ ID NO: 274508 - DNA, 15 bp, Homo sapiens
ctgaaaatattgagc

SEQ ID NO: 274509 - DNA, 15 bp, Homo sapiens
gctgaaaatattgag

SEQ ID NO: 274510 - DNA, 15 bp, Homo sapiens
agctgaaaatattga

SEQ ID NO: 274511 - DNA, 15 bp, Homo sapiens
aagctgaaaatattg

SEQ ID NO: 274512 - DNA, 15 bp, Homo sapiens
taagctgaaaatatt

SEQ ID NO: 274513 - DNA, 15 bp, Homo sapiens
ttaagctgaaaatat

SEQ ID NO: 274514 - DNA, 15 bp, Homo sapiens
gttaagctgaaaata

SEQ ID NO: 274515 - DNA, 15 bp, Homo sapiens
tgttaagctgaaaat

SEQ ID NO: 274516 - DNA, 15 bp, Homo sapiens
ctgttaagctgaaaa

SEQ ID NO: 274517 - DNA, 15 bp, Homo sapiens
tctgttaagctgaaa

SEQ ID NO: 274518 - DNA, 15 bp, Homo sapiens
ctctgttaagctgaa

SEQ ID NO: 274519 - DNA, 15 bp, Homo sapiens
actctgttaagctga

SEQ ID NO: 274520 - DNA, 15 bp, Homo sapiens
gactctgttaagctg

SEQ ID NO: 274521 - DNA, 15 bp, Homo sapiens
agactctgttaagct

SEQ ID NO: 274522 - DNA, 15 bp, Homo sapiens
gagactctgttaagc

SEQ ID NO: 274523 - DNA, 15 bp, Homo sapiens
cgagactctgttaag

SEQ ID NO: 274524 - DNA, 15 bp, Homo sapiens
acgagactctgttaa

SEQ ID NO: 274525 - DNA, 15 bp, Homo sapiens
aacgagactctgtta

SEQ ID NO: 274526 - DNA, 15 bp, Homo sapiens
caacgagactctgtt

SEQ ID NO: 274527 - DNA, 15 bp, Homo sapiens
ccaacgagactctgt

SEQ ID NO: 274528 - DNA, 15 bp, Homo sapiens
cccaacgagactctg

SEQ ID NO: 274529 - DNA, 15 bp, Homo sapiens
gcccaacgagactct

SEQ ID NO: 274530 - DNA, 15 bp, Homo sapiens
cgcccaacgagactc

SEQ ID NO: 274531 - DNA, 15 bp, Homo sapiens
gcgcccaacgagact

SEQ ID NO: 274532 - DNA, 15 bp, Homo sapiens
cgcgcccaacgagac

SEQ ID NO: 274533 - DNA, 15 bp, Homo sapiens
ccgcgcccaacgaga

SEQ ID NO: 274534 - DNA, 15 bp, Homo sapiens
accgcgcccaacgag

SEQ ID NO: 274535 - DNA, 15 bp, Homo sapiens
caccgcgcccaacga

SEQ ID NO: 274536 - DNA, 15 bp, Homo sapiens
ccaccgcgcccaacg

SEQ ID NO: 274537 - DNA, 15 bp, Homo sapiens
accaccgcgcccaac

SEQ ID NO: 274538 - DNA, 15 bp, Homo sapiens
aaccaccgcgcccaa

SEQ ID NO: 274539 - DNA, 15 bp, Homo sapiens
gaaccaccgcgccca

SEQ ID NO: 274540 - DNA, 15 bp, Homo sapiens
tgaaccaccgcgccc

SEQ ID NO: 274541 - DNA, 15 bp, Homo sapiens
gtgaaccaccgcgcc

SEQ ID NO: 274542 - DNA, 15 bp, Homo sapiens
tgtgaaccaccgcgc

SEQ ID NO: 274543 - DNA, 15 bp, Homo sapiens
gtgtgaaccaccgcg

SEQ ID NO: 274544 - DNA, 15 bp, Homo sapiens
ggtgtgaaccaccgc

SEQ ID NO: 274545 - DNA, 15 bp, Homo sapiens
aggtgtgaaccaccg

SEQ ID NO: 274546 - DNA, 15 bp, Homo sapiens
caggtgtgaaccacc

SEQ ID NO: 274547 - DNA, 15 bp, Homo sapiens
acaggtgtgaaccac

SEQ ID NO: 274548 - DNA, 15 bp, Homo sapiens
tacaggtgtgaacca

SEQ ID NO: 274549 - DNA, 15 bp, Homo sapiens
ttacaggtgtgaacc

SEQ ID NO: 274550 - DNA, 15 bp, Homo sapiens
attacaggtgtgaac

SEQ ID NO: 274551 - DNA, 15 bp, Homo sapiens
gattacaggtgtgaa

SEQ ID NO: 274552 - DNA, 15 bp, Homo sapiens
tcccaccttggcctc

SEQ ID NO: 274553 - DNA, 15 bp, Homo sapiens
ctcccaccttggcct

SEQ ID NO: 274554 - DNA, 15 bp, Homo sapiens
cctcccaccttggcc

SEQ ID NO: 274555 - DNA, 15 bp, Homo sapiens
tcctcccaccttggc

SEQ ID NO: 274556 - DNA, 15 bp, Homo sapiens
atcctcccaccttgg

SEQ ID NO: 274557 - DNA, 15 bp, Homo sapiens
gatcctcccaccttg

SEQ ID NO: 274558 - DNA, 15 bp, Homo sapiens
tgatcctcccacctt

SEQ ID NO: 274559 - DNA, 15 bp, Homo sapiens
ggtgatcctcccacc

SEQ ID NO: 274560 - DNA, 15 bp, Homo sapiens
aggtgatcctcccac

SEQ ID NO: 274561 - DNA, 15 bp, Homo sapiens
caggtgatcctccca

SEQ ID NO: 274562 - DNA, 15 bp, Homo sapiens
tcaggtgatcctccc

SEQ ID NO: 274563 - DNA, 15 bp, Homo sapiens
ctcaggtgatcctcc

SEQ ID NO: 274564 - DNA, 15 bp, Homo sapiens
cctcaggtgatcctc

SEQ ID NO: 274565 - DNA, 15 bp, Homo sapiens
acctcaggtgatcct

SEQ ID NO: 274566 - DNA, 15 bp, Homo sapiens
gtgaactcctgacct

SEQ ID NO: 274567 - DNA, 15 bp, Homo sapiens
cgtgaactcctgacc

SEQ ID NO: 274568 - DNA, 15 bp, Homo sapiens
tcgtgaactcctgac

SEQ ID NO: 274569 - DNA, 15 bp, Homo sapiens
gtcgtgaactcctga

SEQ ID NO: 274570 - DNA, 15 bp, Homo sapiens
ggtcgtgaactcctg

SEQ ID NO: 274571 - DNA, 15 bp, Homo sapiens
tggtcgtgaactcct

SEQ ID NO: 274572 - DNA, 15 bp, Homo sapiens
ctggtcgtgaactcc

SEQ ID NO: 274573 - DNA, 15 bp, Homo sapiens
gctggtcgtgaactc

SEQ ID NO: 274574 - DNA, 15 bp, Homo sapiens
ggctggtcgtgaact

SEQ ID NO: 274575 - DNA, 15 bp, Homo sapiens
aggctggtcgtgaac

SEQ ID NO: 274576 - DNA, 15 bp, Homo sapiens
caggctggtcgtgaa

SEQ ID NO: 274577 - DNA, 15 bp, Homo sapiens
ccaggctggtcgtga

SEQ ID NO: 274578 - DNA, 15 bp, Homo sapiens
gccaggctggtcgtg

SEQ ID NO: 274579 - DNA, 15 bp, Homo sapiens
ggccaggctggtcgt

SEQ ID NO: 274580 - DNA, 15 bp, Homo sapiens
tggccaggctggtcg

SEQ ID NO: 274581 - DNA, 15 bp, Homo sapiens
cattggccaggctgg

SEQ ID NO: 274582 - DNA, 15 bp, Homo sapiens
acattggccaggctg

SEQ ID NO: 274583 - DNA, 15 bp, Homo sapiens
cacattggccaggct

SEQ ID NO: 274584 - DNA, 15 bp, Homo sapiens
ccacattggccaggc

SEQ ID NO: 274585 - DNA, 15 bp, Homo sapiens
accacattggccagg

SEQ ID NO: 274586 - DNA, 15 bp, Homo sapiens
caccacattggccag

SEQ ID NO: 274587 - DNA, 15 bp, Homo sapiens
tcaccacattggcca

SEQ ID NO: 274588 - DNA, 15 bp, Homo sapiens
ttcaccacattggcc

SEQ ID NO: 274589 - DNA, 15 bp, Homo sapiens
tttcaccacattggc

SEQ ID NO: 274590 - DNA, 15 bp, Homo sapiens
gtttcaccacattgg

SEQ ID NO: 274591 - DNA, 15 bp, Homo sapiens
ggggtttcaccacat

SEQ ID NO: 274592 - DNA, 15 bp, Homo sapiens
tggggtttcaccaca

SEQ ID NO: 274593 - DNA, 15 bp, Homo sapiens
atggggtttcaccac

SEQ ID NO: 274594 - DNA, 15 bp, Homo sapiens
tcacacccagctaat

SEQ ID NO: 274595 - DNA, 15 bp, Homo sapiens
atcacacccagctaa

SEQ ID NO: 274596 - DNA, 15 bp, Homo sapiens
catcacacccagcta

SEQ ID NO: 274597 - DNA, 15 bp, Homo sapiens
gcatcacacccagct

SEQ ID NO: 274598 - DNA, 15 bp, Homo sapiens
ggcatcacacccagc

SEQ ID NO: 274599 - DNA, 15 bp, Homo sapiens
tggcatcacacccag

SEQ ID NO: 274600 - DNA, 15 bp, Homo sapiens
atggcatcacaccca

SEQ ID NO: 274601 - DNA, 15 bp, Homo sapiens
catggcatcacaccc

SEQ ID NO: 274602 - DNA, 15 bp, Homo sapiens
acatggcatcacacc

SEQ ID NO: 274603 - DNA, 15 bp, Homo sapiens
cacatggcatcacac

SEQ ID NO: 274604 - DNA, 15 bp, Homo sapiens
gcacatggcatcaca

SEQ ID NO: 274605 - DNA, 15 bp, Homo sapiens
ggcacatggcatcac

SEQ ID NO: 274606 - DNA, 15 bp, Homo sapiens
aggcacatggcatca

SEQ ID NO: 274607 - DNA, 15 bp, Homo sapiens
caggcacatggcatc

SEQ ID NO: 274608 - DNA, 15 bp, Homo sapiens
acaggcacatggcat

SEQ ID NO: 274609 - DNA, 15 bp, Homo sapiens
tacaggcacatggca

SEQ ID NO: 274610 - DNA, 15 bp, Homo sapiens
ttacaggcacatggc

SEQ ID NO: 274611 - DNA, 15 bp, Homo sapiens
attacaggcacatgg

SEQ ID NO: 274612 - DNA, 15 bp, Homo sapiens
gattacaggcacatg

SEQ ID NO: 274613 - DNA, 15 bp, Homo sapiens
ggattacaggcacat

SEQ ID NO: 274614 - DNA, 15 bp, Homo sapiens
gggattacaggcaca

SEQ ID NO: 274615 - DNA, 15 bp, Homo sapiens
cgggattacaggcac

SEQ ID NO: 274616 - DNA, 15 bp, Homo sapiens
ccgggattacaggca

SEQ ID NO: 274617 - DNA, 15 bp, Homo sapiens
gccgggattacaggc

SEQ ID NO: 274618 - DNA, 15 bp, Homo sapiens
agccgggattacagg

SEQ ID NO: 274619 - DNA, 15 bp, Homo sapiens
tagccgggattacag

SEQ ID NO: 274620 - DNA, 15 bp, Homo sapiens
gtagccgggattaca

SEQ ID NO: 274621 - DNA, 15 bp, Homo sapiens
agtagccgggattac

SEQ ID NO: 274622 - DNA, 15 bp, Homo sapiens
aagtagccgggatta

SEQ ID NO: 274623 - DNA, 15 bp, Homo sapiens
caagtagccgggatt

SEQ ID NO: 274624 - DNA, 15 bp, Homo sapiens
ccaagtagccgggat

SEQ ID NO: 274625 - DNA, 15 bp, Homo sapiens
cccaagtagccggga

SEQ ID NO: 274626 - DNA, 15 bp, Homo sapiens
tcccaagtagccggg

SEQ ID NO: 274627 - DNA, 15 bp, Homo sapiens
ctcccaagtagccgg

SEQ ID NO: 274628 - DNA, 15 bp, Homo sapiens
cctcccaagtagccg

SEQ ID NO: 274629 - DNA, 15 bp, Homo sapiens
acctcccaagtagcc

SEQ ID NO: 274630 - DNA, 15 bp, Homo sapiens
aacctcccaagtagc

SEQ ID NO: 274631 - DNA, 15 bp, Homo sapiens
caacctcccaagtag

SEQ ID NO: 274632 - DNA, 15 bp, Homo sapiens
tcaacctcccaagta

SEQ ID NO: 274633 - DNA, 15 bp, Homo sapiens
ctcaacctcccaagt

SEQ ID NO: 274634 - DNA, 15 bp, Homo sapiens
cctcaacctcccaag

SEQ ID NO: 274635 - DNA, 15 bp, Homo sapiens
gcctcaacctcccaa

SEQ ID NO: 274636 - DNA, 15 bp, Homo sapiens
tgcctcaacctccca

SEQ ID NO: 274637 - DNA, 15 bp, Homo sapiens
ttgcctcaacctccc

SEQ ID NO: 274638 - DNA, 15 bp, Homo sapiens
cttgcctcaacctcc

SEQ ID NO: 274639 - DNA, 15 bp, Homo sapiens
tcttgcctcaacctc

SEQ ID NO: 274640 - DNA, 15 bp, Homo sapiens
ctcttgcctcaacct

SEQ ID NO: 274641 - DNA, 15 bp, Homo sapiens
tctcttgcctcaacc

SEQ ID NO: 274642 - DNA, 15 bp, Homo sapiens
ttctcttgcctcaac

SEQ ID NO: 274643 - DNA, 15 bp, Homo sapiens
attctcttgcctcaa

SEQ ID NO: 274644 - DNA, 15 bp, Homo sapiens
gattctcttgcctca

SEQ ID NO: 274645 - DNA, 15 bp, Homo sapiens
cgattctcttgcctc

SEQ ID NO: 274646 - DNA, 15 bp, Homo sapiens
gcgattctcttgcct

SEQ ID NO: 274647 - DNA, 15 bp, Homo sapiens
agcgattctcttgcc

SEQ ID NO: 274648 - DNA, 15 bp, Homo sapiens
aagcgattctcttgc

SEQ ID NO: 274649 - DNA, 15 bp, Homo sapiens
caagcgattctcttg

SEQ ID NO: 274650 - DNA, 15 bp, Homo sapiens
tcaagcgattctctt

SEQ ID NO: 274651 - DNA, 15 bp, Homo sapiens
ttcaagcgattctct

SEQ ID NO: 274652 - DNA, 15 bp, Homo sapiens
acctcccaggttcaa

SEQ ID NO: 274653 - DNA, 15 bp, Homo sapiens
actcactgcaacctc

SEQ ID NO: 274654 - DNA, 15 bp, Homo sapiens
gactcactgcaacct

SEQ ID NO: 274655 - DNA, 15 bp, Homo sapiens
cgactcactgcaacc

SEQ ID NO: 274656 - DNA, 15 bp, Homo sapiens
tcgactcactgcaac

SEQ ID NO: 274657 - DNA, 15 bp, Homo sapiens
ctcgactcactgcaa

SEQ ID NO: 274658 - DNA, 15 bp, Homo sapiens
tctcgactcactgca

SEQ ID NO: 274659 - DNA, 15 bp, Homo sapiens
atctcgactcactgc

SEQ ID NO: 274660 - DNA, 15 bp, Homo sapiens
gatctcgactcactg

SEQ ID NO: 274661 - DNA, 15 bp, Homo sapiens
cgatctcgactcact

SEQ ID NO: 274662 - DNA, 15 bp, Homo sapiens
acgatctcgactcac

SEQ ID NO: 274663 - DNA, 15 bp, Homo sapiens
cacgatctcgactca

SEQ ID NO: 274664 - DNA, 15 bp, Homo sapiens
gcacgatctcgactc

SEQ ID NO: 274665 - DNA, 15 bp, Homo sapiens
ggcacgatctcgact

SEQ ID NO: 274666 - DNA, 15 bp, Homo sapiens
tggcacgatctcgac

SEQ ID NO: 274667 - DNA, 15 bp, Homo sapiens
gtggcacgatctcga

SEQ ID NO: 274668 - DNA, 15 bp, Homo sapiens
agtggcacgatctcg

SEQ ID NO: 274669 - DNA, 15 bp, Homo sapiens
tatgttgcccaggct

SEQ ID NO: 274670 - DNA, 15 bp, Homo sapiens
ctatgttgcccaggc

SEQ ID NO: 274671 - DNA, 15 bp, Homo sapiens
tctatgttgcccagg

SEQ ID NO: 274672 - DNA, 15 bp, Homo sapiens
ctctatgttgcccag

SEQ ID NO: 274673 - DNA, 15 bp, Homo sapiens
tctctatgttgccca

SEQ ID NO: 274674 - DNA, 15 bp, Homo sapiens
ctctctatgttgccc

SEQ ID NO: 274675 - DNA, 15 bp, Homo sapiens
tctctctatgttgcc

SEQ ID NO: 274676 - DNA, 15 bp, Homo sapiens
gtctctctatgttgc

SEQ ID NO: 274677 - DNA, 15 bp, Homo sapiens
tgtctctctatgttg

SEQ ID NO: 274678 - DNA, 15 bp, Homo sapiens
gtgtctctctatgtt

SEQ ID NO: 274679 - DNA, 15 bp, Homo sapiens
ggtgtctctctatgt

SEQ ID NO: 274680 - DNA, 15 bp, Homo sapiens
tggtgtctctctatg

SEQ ID NO: 274681 - DNA, 15 bp, Homo sapiens
atggtgtctctctat

SEQ ID NO: 274682 - DNA, 15 bp, Homo sapiens
gatggtgtctctcta

SEQ ID NO: 274683 - DNA, 15 bp, Homo sapiens
agatggtgtctctct

SEQ ID NO: 274684 - DNA, 15 bp, Homo sapiens
aagatggtgtctctc

SEQ ID NO: 274685 - DNA, 15 bp, Homo sapiens
caagatggtgtctct

SEQ ID NO: 274686 - DNA, 15 bp, Homo sapiens
tcaagatggtgtctc

SEQ ID NO: 274687 - DNA, 15 bp, Homo sapiens
ctcaagatggtgtct

SEQ ID NO: 274688 - DNA, 15 bp, Homo sapiens
gctcaagatggtgtc

SEQ ID NO: 274689 - DNA, 15 bp, Homo sapiens
tgctcaagatggtgt

SEQ ID NO: 274690 - DNA, 15 bp, Homo sapiens
ttgctcaagatggtg

SEQ ID NO: 274691 - DNA, 15 bp, Homo sapiens
attgctcaagatggt

SEQ ID NO: 274692 - DNA, 15 bp, Homo sapiens
tattgctcaagatgg

SEQ ID NO: 274693 - DNA, 15 bp, Homo sapiens
ttattgctcaagatg

SEQ ID NO: 274694 - DNA, 15 bp, Homo sapiens
attattgctcaagat

SEQ ID NO: 274695 - DNA, 15 bp, Homo sapiens
tattattgctcaaga

SEQ ID NO: 274696 - DNA, 15 bp, Homo sapiens
ttattattgctcaag

SEQ ID NO: 274697 - DNA, 15 bp, Homo sapiens
attattattgctcaa

SEQ ID NO: 274698 - DNA, 15 bp, Homo sapiens
tattattattgctca

SEQ ID NO: 274699 - DNA, 15 bp, Homo sapiens
ttattattattgctc

SEQ ID NO: 274700 - DNA, 15 bp, Homo sapiens
attattattattgct

SEQ ID NO: 274701 - DNA, 15 bp, Homo sapiens
tattattattattgc

SEQ ID NO: 274702 - DNA, 15 bp, Homo sapiens
ttattattattattg

SEQ ID NO: 274703 - DNA, 15 bp, Homo sapiens
attattattattatt

SEQ ID NO: 274704 - DNA, 15 bp, Homo sapiens
tattattattattat

SEQ ID NO: 274705 - DNA, 15 bp, Homo sapiens
ttattattattatta

SEQ ID NO: 274706 - DNA, 15 bp, Homo sapiens
gttattattattatt

SEQ ID NO: 274707 - DNA, 15 bp, Homo sapiens
tgttattattattat

SEQ ID NO: 274708 - DNA, 15 bp, Homo sapiens
ttgttattattatta

SEQ ID NO: 274709 - DNA, 15 bp, Homo sapiens
gttgttattattatt

SEQ ID NO: 274710 - DNA, 15 bp, Homo sapiens
tgttgttattattat

SEQ ID NO: 274711 - DNA, 15 bp, Homo sapiens
ttgttgttattatta

SEQ ID NO: 274712 - DNA, 15 bp, Homo sapiens
gttgttgttattatt

SEQ ID NO: 274713 - DNA, 15 bp, Homo sapiens
tgttgttgttattat

SEQ ID NO: 274714 - DNA, 15 bp, Homo sapiens
ctgttgttgttatta

SEQ ID NO: 274715 - DNA, 15 bp, Homo sapiens
tctgttgttgttatt

SEQ ID NO: 274716 - DNA, 15 bp, Homo sapiens
ctctgttgttgttat

SEQ ID NO: 274717 - DNA, 15 bp, Homo sapiens
actctgttgttgtta

SEQ ID NO: 274718 - DNA, 15 bp, Homo sapiens
gactctgttgttgtt

SEQ ID NO: 274719 - DNA, 15 bp, Homo sapiens
agactctgttgttgt

SEQ ID NO: 274720 - DNA, 15 bp, Homo sapiens
gagactctgttgttg

SEQ ID NO: 274721 - DNA, 15 bp, Homo sapiens
ggagactctgttgtt

SEQ ID NO: 274722 - DNA, 15 bp, Homo sapiens
gggagactctgttgt

SEQ ID NO: 274723 - DNA, 15 bp, Homo sapiens
ggggagactctgttg

SEQ ID NO: 274724 - DNA, 15 bp, Homo sapiens
aggggagactctgtt

SEQ ID NO: 274725 - DNA, 15 bp, Homo sapiens
caggggagactctgt

SEQ ID NO: 274726 - DNA, 15 bp, Homo sapiens
tcaggggagactctg

SEQ ID NO: 274727 - DNA, 15 bp, Homo sapiens
ttcaggggagactct

SEQ ID NO: 274728 - DNA, 15 bp, Homo sapiens
tttcaggggagactc

SEQ ID NO: 274729 - DNA, 15 bp, Homo sapiens
ctttcaggggagact

SEQ ID NO: 274730 - DNA, 15 bp, Homo sapiens
tctttcaggggagac

SEQ ID NO: 274731 - DNA, 15 bp, Homo sapiens
ctctttcaggggaga

SEQ ID NO: 274732 - DNA, 15 bp, Homo sapiens
cctctttcaggggag

SEQ ID NO: 274733 - DNA, 15 bp, Homo sapiens
ccctctttcagggga

SEQ ID NO: 274734 - DNA, 15 bp, Homo sapiens
tccctctttcagggg

SEQ ID NO: 274735 - DNA, 15 bp, Homo sapiens
atccctctttcaggg

SEQ ID NO: 274736 - DNA, 15 bp, Homo sapiens
aatccctctttcagg

SEQ ID NO: 274737 - DNA, 15 bp, Homo sapiens
taatccctctttcag

SEQ ID NO: 274738 - DNA, 15 bp, Homo sapiens
ataatccctctttca

SEQ ID NO: 274739 - DNA, 15 bp, Homo sapiens
tataatccctctttc

SEQ ID NO: 274740 - DNA, 15 bp, Homo sapiens
ttataatccctcttt

SEQ ID NO: 274741 - DNA, 15 bp, Homo sapiens
tttataatccctctt

SEQ ID NO: 274742 - DNA, 15 bp, Homo sapiens
ttttataatccctct

SEQ ID NO: 274743 - DNA, 15 bp, Homo sapiens
gttttataatccctc

SEQ ID NO: 274744 - DNA, 15 bp, Homo sapiens
ggttttataatccct

SEQ ID NO: 274745 - DNA, 15 bp, Homo sapiens
tggttttataatccc

SEQ ID NO: 274746 - DNA, 15 bp, Homo sapiens
ctggttttataatcc

SEQ ID NO: 274747 - DNA, 15 bp, Homo sapiens
cctggttttataatc

SEQ ID NO: 274748 - DNA, 15 bp, Homo sapiens
ccctggttttataat

SEQ ID NO: 274749 - DNA, 15 bp, Homo sapiens
gccctggttttataa

SEQ ID NO: 274750 - DNA, 15 bp, Homo sapiens
tgccctggttttata

SEQ ID NO: 274751 - DNA, 15 bp, Homo sapiens
ttgccctggttttat

SEQ ID NO: 274752 - DNA, 15 bp, Homo sapiens
cttgccctggtttta

SEQ ID NO: 274753 - DNA, 15 bp, Homo sapiens
gcttgccctggtttt

SEQ ID NO: 274754 - DNA, 15 bp, Homo sapiens
ggcttgccctggttt

SEQ ID NO: 274755 - DNA, 15 bp, Homo sapiens
aggcttgccctggtt

SEQ ID NO: 274756 - DNA, 15 bp, Homo sapiens
caggcttgccctggt

SEQ ID NO: 274757 - DNA, 15 bp, Homo sapiens
acaggcttgccctgg

SEQ ID NO: 274758 - DNA, 15 bp, Homo sapiens
gacaggcttgccctg

SEQ ID NO: 274759 - DNA, 15 bp, Homo sapiens
tgacaggcttgccct

SEQ ID NO: 274760 - DNA, 15 bp, Homo sapiens
ttgacaggcttgccc

SEQ ID NO: 274761 - DNA, 15 bp, Homo sapiens
tttgacaggcttgcc

SEQ ID NO: 274762 - DNA, 15 bp, Homo sapiens
ctttgacaggcttgc

SEQ ID NO: 274763 - DNA, 15 bp, Homo sapiens
tctttgacaggcttg

SEQ ID NO: 274764 - DNA, 15 bp, Homo sapiens
ctctttgacaggctt

SEQ ID NO: 274765 - DNA, 15 bp, Homo sapiens
tctctttgacaggct

SEQ ID NO: 274766 - DNA, 15 bp, Homo sapiens
ttctctttgacaggc

SEQ ID NO: 274767 - DNA, 15 bp, Homo sapiens
tttctctttgacagg

SEQ ID NO: 274768 - DNA, 15 bp, Homo sapiens
atttctctttgacag

SEQ ID NO: 274769 - DNA, 15 bp, Homo sapiens
aatttctctttgaca

SEQ ID NO: 274770 - DNA, 15 bp, Homo sapiens
aaatttctctttgac

SEQ ID NO: 274771 - DNA, 15 bp, Homo sapiens
caaatttctctttga

SEQ ID NO: 274772 - DNA, 15 bp, Homo sapiens
tcaaatttctctttg

SEQ ID NO: 274773 - DNA, 15 bp, Homo sapiens
atcaaatttctcttt

SEQ ID NO: 274774 - DNA, 15 bp, Homo sapiens
aatcaaatttctctt

SEQ ID NO: 274775 - DNA, 15 bp, Homo sapiens
aaatcaaatttctct

SEQ ID NO: 274776 - DNA, 15 bp, Homo sapiens
caaatcaaatttctc

SEQ ID NO: 274777 - DNA, 15 bp, Homo sapiens
ccaaatcaaatttct

SEQ ID NO: 274778 - DNA, 15 bp, Homo sapiens
accaaatcaaatttc

SEQ ID NO: 274779 - DNA, 15 bp, Homo sapiens
aaccaaatcaaattt

SEQ ID NO: 274780 - DNA, 15 bp, Homo sapiens
gaaccaaatcaaatt

SEQ ID NO: 274781 - DNA, 15 bp, Homo sapiens
agaaccaaatcaaat

SEQ ID NO: 274782 - DNA, 15 bp, Homo sapiens
cagaaccaaatcaaa

SEQ ID NO: 274783 - DNA, 15 bp, Homo sapiens
gcagaaccaaatcaa

SEQ ID NO: 274784 - DNA, 15 bp, Homo sapiens
agcagaaccaaatca

SEQ ID NO: 274785 - DNA, 15 bp, Homo sapiens
cagcagaaccaaatc

SEQ ID NO: 274786 - DNA, 15 bp, Homo sapiens
acagcagaaccaaat

SEQ ID NO: 274787 - DNA, 15 bp, Homo sapiens
aacagcagaaccaaa

SEQ ID NO: 274788 - DNA, 15 bp, Homo sapiens
aaacagcagaaccaa

SEQ ID NO: 274789 - DNA, 15 bp, Homo sapiens
aaaacagcagaacca

SEQ ID NO: 274790 - DNA, 15 bp, Homo sapiens
taaaacagcagaacc

SEQ ID NO: 274791 - DNA, 15 bp, Homo sapiens
gtaaaacagcagaac

SEQ ID NO: 274792 - DNA, 15 bp, Homo sapiens
tgtaaaacagcagaa

SEQ ID NO: 274793 - DNA, 15 bp, Homo sapiens
atgtaaaacagcaga

SEQ ID NO: 274794 - DNA, 15 bp, Homo sapiens
aatgtaaaacagcag

SEQ ID NO: 274795 - DNA, 15 bp, Homo sapiens
aaatgtaaaacagca

SEQ ID NO: 274796 - DNA, 15 bp, Homo sapiens
aaaatgtaaaacagc

SEQ ID NO: 274797 - DNA, 15 bp, Homo sapiens
taaaatgtaaaacag

SEQ ID NO: 274798 - DNA, 15 bp, Homo sapiens
ttaaaatgtaaaaca

SEQ ID NO: 274799 - DNA, 15 bp, Homo sapiens
attaaaatgtaaaac

SEQ ID NO: 274800 - DNA, 15 bp, Homo sapiens
tattaaaatgtaaaa

SEQ ID NO: 274801 - DNA, 15 bp, Homo sapiens
atattaaaatgtaaa

SEQ ID NO: 274802 - DNA, 15 bp, Homo sapiens
catattaaaatgtaa

SEQ ID NO: 274803 - DNA, 15 bp, Homo sapiens
gcatattaaaatgta

SEQ ID NO: 274804 - DNA, 15 bp, Homo sapiens
ggcatattaaaatgt

SEQ ID NO: 274805 - DNA, 15 bp, Homo sapiens
aggcatattaaaatg

SEQ ID NO: 274806 - DNA, 15 bp, Homo sapiens
caggcatattaaaat

SEQ ID NO: 274807 - DNA, 15 bp, Homo sapiens
acaggcatattaaaa

SEQ ID NO: 274808 - DNA, 15 bp, Homo sapiens
tacaggcatattaaa

SEQ ID NO: 274809 - DNA, 15 bp, Homo sapiens
atacaggcatattaa

SEQ ID NO: 274810 - DNA, 15 bp, Homo sapiens
catacaggcatatta

SEQ ID NO: 274811 - DNA, 15 bp, Homo sapiens
tcatacaggcatatt

SEQ ID NO: 274812 - DNA, 15 bp, Homo sapiens
atcatacaggcatat

SEQ ID NO: 274813 - DNA, 15 bp, Homo sapiens
catcatacaggcata

SEQ ID NO: 274814 - DNA, 15 bp, Homo sapiens
tcatcatacaggcat

SEQ ID NO: 274815 - DNA, 15 bp, Homo sapiens
gtcatcatacaggca

SEQ ID NO: 274816 - DNA, 15 bp, Homo sapiens
ggtcatcatacaggc

SEQ ID NO: 274817 - DNA, 15 bp, Homo sapiens
aggtcatcatacagg

SEQ ID NO: 274818 - DNA, 15 bp, Homo sapiens
taggtcatcatacag

SEQ ID NO: 274819 - DNA, 15 bp, Homo sapiens
ctaggtcatcataca

SEQ ID NO: 274820 - DNA, 15 bp, Homo sapiens
gctaggtcatcatac

SEQ ID NO: 274821 - DNA, 15 bp, Homo sapiens
ggctaggtcatcata

SEQ ID NO: 274822 - DNA, 15 bp, Homo sapiens
gggctaggtcatcat

SEQ ID NO: 274823 - DNA, 15 bp, Homo sapiens
tgggctaggtcatca

SEQ ID NO: 274824 - DNA, 15 bp, Homo sapiens
atgggctaggtcatc

SEQ ID NO: 274825 - DNA, 15 bp, Homo sapiens
aatgggctaggtcat

SEQ ID NO: 274826 - DNA, 15 bp, Homo sapiens
taatgggctaggtca

SEQ ID NO: 274827 - DNA, 15 bp, Homo sapiens
ttaatgggctaggtc

SEQ ID NO: 274828 - DNA, 15 bp, Homo sapiens
tttaatgggctaggt

SEQ ID NO: 274829 - DNA, 15 bp, Homo sapiens
atttaatgggctagg

SEQ ID NO: 274830 - DNA, 15 bp, Homo sapiens
aatttaatgggctag

SEQ ID NO: 274831 - DNA, 15 bp, Homo sapiens
aaatttaatgggcta

SEQ ID NO: 274832 - DNA, 15 bp, Homo sapiens
aaaatttaatgggct

SEQ ID NO: 274833 - DNA, 15 bp, Homo sapiens
aaaaatttaatgggc

SEQ ID NO: 274834 - DNA, 15 bp, Homo sapiens
aaaaaatttaatggg

SEQ ID NO: 274835 - DNA, 15 bp, Homo sapiens
aaaaaaatttaatgg

SEQ ID NO: 274836 - DNA, 15 bp, Homo sapiens
aaaaaaaatttaatg

SEQ ID NO: 274837 - DNA, 15 bp, Homo sapiens
gaaaaaaaatttaat

SEQ ID NO: 274838 - DNA, 15 bp, Homo sapiens
agaaaaaaaatttaa

SEQ ID NO: 274839 - DNA, 15 bp, Homo sapiens
aagaaaaaaaattta

SEQ ID NO: 274840 - DNA, 15 bp, Homo sapiens
aaagaaaaaaaattt

SEQ ID NO: 274841 - DNA, 15 bp, Homo sapiens
taaagaaaaaaaatt

SEQ ID NO: 274842 - DNA, 15 bp, Homo sapiens
ttaaagaaaaaaaat

SEQ ID NO: 274843 - DNA, 15 bp, Homo sapiens
tttaaagaaaaaaaa

SEQ ID NO: 274844 - DNA, 15 bp, Homo sapiens
atttaaagaaaaaaa

SEQ ID NO: 274845 - DNA, 15 bp, Homo sapiens
aatttaaagaaaaaa

SEQ ID NO: 274846 - DNA, 15 bp, Homo sapiens
taatttaaagaaaaa

SEQ ID NO: 274847 - DNA, 15 bp, Homo sapiens
ataatttaaagaaaa

SEQ ID NO: 274848 - DNA, 15 bp, Homo sapiens
gataatttaaagaaa

SEQ ID NO: 274849 - DNA, 15 bp, Homo sapiens
tgataatttaaagaa

SEQ ID NO: 274850 - DNA, 15 bp, Homo sapiens
ttgataatttaaaga

SEQ ID NO: 274851 - DNA, 15 bp, Homo sapiens
attgataatttaaag

SEQ ID NO: 274852 - DNA, 15 bp, Homo sapiens
tattgataatttaaa

SEQ ID NO: 274853 - DNA, 15 bp, Homo sapiens
ctattgataatttaa

SEQ ID NO: 274854 - DNA, 15 bp, Homo sapiens
cctattgataattta

SEQ ID NO: 274855 - DNA, 15 bp, Homo sapiens
gcctattgataattt

SEQ ID NO: 274856 - DNA, 15 bp, Homo sapiens
agcctattgataatt

SEQ ID NO: 274857 - DNA, 15 bp, Homo sapiens
cagcctattgataat

SEQ ID NO: 274858 - DNA, 15 bp, Homo sapiens
acagcctattgataa

SEQ ID NO: 274859 - DNA, 15 bp, Homo sapiens
gacagcctattgata

SEQ ID NO: 274860 - DNA, 15 bp, Homo sapiens
agacagcctattgat

SEQ ID NO: 274861 - DNA, 15 bp, Homo sapiens
gagacagcctattga

SEQ ID NO: 274862 - DNA, 15 bp, Homo sapiens
tgagacagcctattg

SEQ ID NO: 274863 - DNA, 15 bp, Homo sapiens
ttgagacagcctatt

SEQ ID NO: 274864 - DNA, 15 bp, Homo sapiens
gttgagacagcctat

SEQ ID NO: 274865 - DNA, 15 bp, Homo sapiens
ggttgagacagccta

SEQ ID NO: 274866 - DNA, 15 bp, Homo sapiens
aggttgagacagcct

SEQ ID NO: 274867 - DNA, 15 bp, Homo sapiens
gaggttgagacagcc

SEQ ID NO: 274868 - DNA, 15 bp, Homo sapiens
agaggttgagacagc

SEQ ID NO: 274869 - DNA, 15 bp, Homo sapiens
cagaggttgagacag

SEQ ID NO: 274870 - DNA, 15 bp, Homo sapiens
acagaggttgagaca

SEQ ID NO: 274871 - DNA, 15 bp, Homo sapiens
aacagaggttgagac

SEQ ID NO: 274872 - DNA, 15 bp, Homo sapiens
gaacagaggttgaga

SEQ ID NO: 274873 - DNA, 15 bp, Homo sapiens
tgaacagaggttgag

SEQ ID NO: 274874 - DNA, 15 bp, Homo sapiens
ttgaacagaggttga

SEQ ID NO: 274875 - DNA, 15 bp, Homo sapiens
attgaacagaggttg

SEQ ID NO: 274876 - DNA, 15 bp, Homo sapiens
aattgaacagaggtt

SEQ ID NO: 274877 - DNA, 15 bp, Homo sapiens
caattgaacagaggt

SEQ ID NO: 274878 - DNA, 15 bp, Homo sapiens
tcaattgaacagagg

SEQ ID NO: 274879 - DNA, 15 bp, Homo sapiens
ttcaattgaacagag

SEQ ID NO: 274880 - DNA, 15 bp, Homo sapiens
attcaattgaacaga

SEQ ID NO: 274881 - DNA, 15 bp, Homo sapiens
aattcaattgaacag

SEQ ID NO: 274882 - DNA, 15 bp, Homo sapiens
aaattcaattgaaca

SEQ ID NO: 274883 - DNA, 15 bp, Homo sapiens
aaaattcaattgaac

SEQ ID NO: 274884 - DNA, 15 bp, Homo sapiens
taaaattcaattgaa

SEQ ID NO: 274885 - DNA, 15 bp, Homo sapiens
gtaaaattcaattga

SEQ ID NO: 274886 - DNA, 15 bp, Homo sapiens
agtaaaattcaattg

SEQ ID NO: 274887 - DNA, 15 bp, Homo sapiens
gagtaaaattcaatt

SEQ ID NO: 274888 - DNA, 15 bp, Homo sapiens
agagtaaaattcaat

SEQ ID NO: 274889 - DNA, 15 bp, Homo sapiens
tagagtaaaattcaa

SEQ ID NO: 274890 - DNA, 15 bp, Homo sapiens
gtagagtaaaattca

SEQ ID NO: 274891 - DNA, 15 bp, Homo sapiens
agtagagtaaaattc

SEQ ID NO: 274892 - DNA, 15 bp, Homo sapiens
gagtagagtaaaatt

SEQ ID NO: 274893 - DNA, 15 bp, Homo sapiens
agagtagagtaaaat

SEQ ID NO: 274894 - DNA, 15 bp, Homo sapiens
gagagtagagtaaaa

SEQ ID NO: 274895 - DNA, 15 bp, Homo sapiens
ggagagtagagtaaa

SEQ ID NO: 274896 - DNA, 15 bp, Homo sapiens
gggagagtagagtaa

SEQ ID NO: 274897 - DNA, 15 bp, Homo sapiens
tgggagagtagagta

SEQ ID NO: 274898 - DNA, 15 bp, Homo sapiens
ctgggagagtagagt

SEQ ID NO: 274899 - DNA, 15 bp, Homo sapiens
cctgggagagtagag

SEQ ID NO: 274900 - DNA, 15 bp, Homo sapiens
ccctgggagagtaga

SEQ ID NO: 274901 - DNA, 15 bp, Homo sapiens
tccctgggagagtag

SEQ ID NO: 274902 - DNA, 15 bp, Homo sapiens
ttccctgggagagta

SEQ ID NO: 274903 - DNA, 15 bp, Homo sapiens
gttccctgggagagt

SEQ ID NO: 274904 - DNA, 15 bp, Homo sapiens
tgttccctgggagag

SEQ ID NO: 274905 - DNA, 15 bp, Homo sapiens
ttgttccctgggaga

SEQ ID NO: 274906 - DNA, 15 bp, Homo sapiens
tttgttccctgggag

SEQ ID NO: 274907 - DNA, 15 bp, Homo sapiens
ttttgttccctggga

SEQ ID NO: 274908 - DNA, 15 bp, Homo sapiens
attttgttccctggg

SEQ ID NO: 274909 - DNA, 15 bp, Homo sapiens
cattttgttccctgg

SEQ ID NO: 274910 - DNA, 15 bp, Homo sapiens
tcattttgttccctg

SEQ ID NO: 274911 - DNA, 15 bp, Homo sapiens
gtcattttgttccct

SEQ ID NO: 274912 - DNA, 15 bp, Homo sapiens
tgtcattttgttccc

SEQ ID NO: 274913 - DNA, 15 bp, Homo sapiens
ctgtcattttgttcc

SEQ ID NO: 274914 - DNA, 15 bp, Homo sapiens
tctgtcattttgttc

SEQ ID NO: 274915 - DNA, 15 bp, Homo sapiens
ctctgtcattttgtt

SEQ ID NO: 274916 - DNA, 15 bp, Homo sapiens
gctctgtcattttgt

SEQ ID NO: 274917 - DNA, 15 bp, Homo sapiens
tgctctgtcattttg

SEQ ID NO: 274918 - DNA, 15 bp, Homo sapiens
atgctctgtcatttt

SEQ ID NO: 274919 - DNA, 15 bp, Homo sapiens
aatgctctgtcattt

SEQ ID NO: 274920 - DNA, 15 bp, Homo sapiens
aaatgctctgtcatt

SEQ ID NO: 274921 - DNA, 15 bp, Homo sapiens
aaaatgctctgtcat

SEQ ID NO: 274922 - DNA, 15 bp, Homo sapiens
caaaatgctctgtca

SEQ ID NO: 274923 - DNA, 15 bp, Homo sapiens
acaaaatgctctgtc

SEQ ID NO: 274924 - DNA, 15 bp, Homo sapiens
aacaaaatgctctgt

SEQ ID NO: 274925 - DNA, 15 bp, Homo sapiens
gaacaaaatgctctg

SEQ ID NO: 274926 - DNA, 15 bp, Homo sapiens
agaacaaaatgctct

SEQ ID NO: 274927 - DNA, 15 bp, Homo sapiens
tagaacaaaatgctc

SEQ ID NO: 274928 - DNA, 15 bp, Homo sapiens
ctagaacaaaatgct

SEQ ID NO: 274929 - DNA, 15 bp, Homo sapiens
cctagaacaaaatgc

SEQ ID NO: 274930 - DNA, 15 bp, Homo sapiens
acctagaacaaaatg

SEQ ID NO: 274931 - DNA, 15 bp, Homo sapiens
tacctagaacaaaat

SEQ ID NO: 274932 - DNA, 15 bp, Homo sapiens
gtacctagaacaaaa

SEQ ID NO: 274933 - DNA, 15 bp, Homo sapiens
ggtacctagaacaaa

SEQ ID NO: 274934 - DNA, 15 bp, Homo sapiens
aggtacctagaacaa

SEQ ID NO: 274935 - DNA, 15 bp, Homo sapiens
aaggtacctagaaca

SEQ ID NO: 274936 - DNA, 15 bp, Homo sapiens
taaggtacctagaac

SEQ ID NO: 274937 - DNA, 15 bp, Homo sapiens
ctaaggtacctagaa

SEQ ID NO: 274938 - DNA, 15 bp, Homo sapiens
actaaggtacctaga

SEQ ID NO: 274939 - DNA, 15 bp, Homo sapiens
aactaaggtacctag

SEQ ID NO: 274940 - DNA, 15 bp, Homo sapiens
gaactaaggtaccta

SEQ ID NO: 274941 - DNA, 15 bp, Homo sapiens
agaactaaggtacct

SEQ ID NO: 274942 - DNA, 15 bp, Homo sapiens
aagaactaaggtacc

SEQ ID NO: 274943 - DNA, 15 bp, Homo sapiens
caagaactaaggtac

SEQ ID NO: 274944 - DNA, 15 bp, Homo sapiens
acaagaactaaggta

SEQ ID NO: 274945 - DNA, 15 bp, Homo sapiens
aacaagaactaaggt

SEQ ID NO: 274946 - DNA, 15 bp, Homo sapiens
caacaagaactaagg

SEQ ID NO: 274947 - DNA, 15 bp, Homo sapiens
gcaacaagaactaag

SEQ ID NO: 274948 - DNA, 15 bp, Homo sapiens
ggcaacaagaactaa

SEQ ID NO: 274949 - DNA, 15 bp, Homo sapiens
aggcaacaagaacta

SEQ ID NO: 274950 - DNA, 15 bp, Homo sapiens
taggcaacaagaact

SEQ ID NO: 274951 - DNA, 15 bp, Homo sapiens
ataggcaacaagaac

SEQ ID NO: 274952 - DNA, 15 bp, Homo sapiens
aataggcaacaagaa

SEQ ID NO: 274953 - DNA, 15 bp, Homo sapiens
caataggcaacaaga

SEQ ID NO: 274954 - DNA, 15 bp, Homo sapiens
acaataggcaacaag

SEQ ID NO: 274955 - DNA, 15 bp, Homo sapiens
cacaataggcaacaa

SEQ ID NO: 274956 - DNA, 15 bp, Homo sapiens
ccacaataggcaaca

SEQ ID NO: 274957 - DNA, 15 bp, Homo sapiens
gccacaataggcaac

SEQ ID NO: 274958 - DNA, 15 bp, Homo sapiens
tgccacaataggcaa

SEQ ID NO: 274959 - DNA, 15 bp, Homo sapiens
ctgccacaataggca

SEQ ID NO: 274960 - DNA, 15 bp, Homo sapiens
gctgccacaataggc

SEQ ID NO: 274961 - DNA, 15 bp, Homo sapiens
agctgccacaatagg

SEQ ID NO: 274962 - DNA, 15 bp, Homo sapiens
gagctgccacaatag

SEQ ID NO: 274963 - DNA, 15 bp, Homo sapiens
agagctgccacaata

SEQ ID NO: 274964 - DNA, 15 bp, Homo sapiens
tagagctgccacaat

SEQ ID NO: 274965 - DNA, 15 bp, Homo sapiens
atagagctgccacaa

SEQ ID NO: 274966 - DNA, 15 bp, Homo sapiens
aatagagctgccaca

SEQ ID NO: 274967 - DNA, 15 bp, Homo sapiens
aaatagagctgccac

SEQ ID NO: 274968 - DNA, 15 bp, Homo sapiens
gaaatagagctgcca

SEQ ID NO: 274969 - DNA, 15 bp, Homo sapiens
ggaaatagagctgcc

SEQ ID NO: 274970 - DNA, 15 bp, Homo sapiens
tggaaatagagctgc

SEQ ID NO: 274971 - DNA, 15 bp, Homo sapiens
ctggaaatagagctg

SEQ ID NO: 274972 - DNA, 15 bp, Homo sapiens
actggaaatagagct

SEQ ID NO: 274973 - DNA, 15 bp, Homo sapiens
tactggaaatagagc

SEQ ID NO: 274974 - DNA, 15 bp, Homo sapiens
gtactggaaatagag

SEQ ID NO: 274975 - DNA, 15 bp, Homo sapiens
tgtactggaaataga

SEQ ID NO: 274976 - DNA, 15 bp, Homo sapiens
ctgtactggaaatag

SEQ ID NO: 274977 - DNA, 15 bp, Homo sapiens
tctgtactggaaata

SEQ ID NO: 274978 - DNA, 15 bp, Homo sapiens
ctctgtactggaaat

SEQ ID NO: 274979 - DNA, 15 bp, Homo sapiens
actctgtactggaaa

SEQ ID NO: 274980 - DNA, 15 bp, Homo sapiens
aactctgtactggaa

SEQ ID NO: 274981 - DNA, 15 bp, Homo sapiens
aaactctgtactgga

SEQ ID NO: 274982 - DNA, 15 bp, Homo sapiens
gaaactctgtactgg

SEQ ID NO: 274983 - DNA, 15 bp, Homo sapiens
tgaaactctgtactg

SEQ ID NO: 274984 - DNA, 15 bp, Homo sapiens
atgaaactctgtact

SEQ ID NO: 274985 - DNA, 15 bp, Homo sapiens
tatgaaactctgtac

SEQ ID NO: 274986 - DNA, 15 bp, Homo sapiens
ctatgaaactctgta

SEQ ID NO: 274987 - DNA, 15 bp, Homo sapiens
cctatgaaactctgt

SEQ ID NO: 274988 - DNA, 15 bp, Homo sapiens
tcctatgaaactctg

SEQ ID NO: 274989 - DNA, 15 bp, Homo sapiens
ttcctatgaaactct

SEQ ID NO: 274990 - DNA, 15 bp, Homo sapiens
tttcctatgaaactc

SEQ ID NO: 274991 - DNA, 15 bp, Homo sapiens
gtttcctatgaaact

SEQ ID NO: 274992 - DNA, 15 bp, Homo sapiens
ggtttcctatgaaac

SEQ ID NO: 274993 - DNA, 15 bp, Homo sapiens
aggtttcctatgaaa

SEQ ID NO: 274994 - DNA, 15 bp, Homo sapiens
gaggtttcctatgaa

SEQ ID NO: 274995 - DNA, 15 bp, Homo sapiens
agaggtttcctatga

SEQ ID NO: 274996 - DNA, 15 bp, Homo sapiens
gagaggtttcctatg

SEQ ID NO: 274997 - DNA, 15 bp, Homo sapiens
agagaggtttcctat

SEQ ID NO: 274998 - DNA, 15 bp, Homo sapiens
aagagaggtttccta

SEQ ID NO: 274999 - DNA, 15 bp, Homo sapiens
gaagagaggtttcct

SEQ ID NO: 275000 - DNA, 15 bp, Homo sapiens
agaagagaggtttcc

SEQ ID NO: 275001 - DNA, 15 bp, Homo sapiens
aagaagagaggtttc

SEQ ID NO: 275002 - DNA, 15 bp, Homo sapiens
gaagaagagaggttt

SEQ ID NO: 275003 - DNA, 15 bp, Homo sapiens
agaagaagagaggtt

SEQ ID NO: 275004 - DNA, 15 bp, Homo sapiens
cagaagaagagaggt

SEQ ID NO: 275005 - DNA, 15 bp, Homo sapiens
ccagaagaagagagg

SEQ ID NO: 275006 - DNA, 15 bp, Homo sapiens
accagaagaagagag

SEQ ID NO: 275007 - DNA, 15 bp, Homo sapiens
gaccagaagaagaga

SEQ ID NO: 275008 - DNA, 15 bp, Homo sapiens
tgaccagaagaagag

SEQ ID NO: 275009 - DNA, 15 bp, Homo sapiens
atgaccagaagaaga

SEQ ID NO: 275010 - DNA, 15 bp, Homo sapiens
catgaccagaagaag

SEQ ID NO: 275011 - DNA, 15 bp, Homo sapiens
gcatgaccagaagaa

SEQ ID NO: 275012 - DNA, 15 bp, Homo sapiens
ggcatgaccagaaga

SEQ ID NO: 275013 - DNA, 15 bp, Homo sapiens
aggcatgaccagaag

SEQ ID NO: 275014 - DNA, 15 bp, Homo sapiens
taggcatgaccagaa

SEQ ID NO: 275015 - DNA, 15 bp, Homo sapiens
ataggcatgaccaga

SEQ ID NO: 275016 - DNA, 15 bp, Homo sapiens
gataggcatgaccag

SEQ ID NO: 275017 - DNA, 15 bp, Homo sapiens
tgataggcatgacca

SEQ ID NO: 275018 - DNA, 15 bp, Homo sapiens
gtgataggcatgacc

SEQ ID NO: 275019 - DNA, 15 bp, Homo sapiens
ggtgataggcatgac

SEQ ID NO: 275020 - DNA, 15 bp, Homo sapiens
gggtgataggcatga

SEQ ID NO: 275021 - DNA, 15 bp, Homo sapiens
tgggtgataggcatg

SEQ ID NO: 275022 - DNA, 15 bp, Homo sapiens
ctgggtgataggcat

SEQ ID NO: 275023 - DNA, 15 bp, Homo sapiens
actgggtgataggca

SEQ ID NO: 275024 - DNA, 15 bp, Homo sapiens
gactgggtgataggc

SEQ ID NO: 275025 - DNA, 15 bp, Homo sapiens
tgactgggtgatagg

SEQ ID NO: 275026 - DNA, 15 bp, Homo sapiens
gtgactgggtgatag

SEQ ID NO: 275027 - DNA, 15 bp, Homo sapiens
ggtgactgggtgata

SEQ ID NO: 275028 - DNA, 15 bp, Homo sapiens
aggtgactgggtgat

SEQ ID NO: 275029 - DNA, 15 bp, Homo sapiens
aaggtgactgggtga

SEQ ID NO: 275030 - DNA, 15 bp, Homo sapiens
aaaggtgactgggtg

SEQ ID NO: 275031 - DNA, 15 bp, Homo sapiens
gaaaggtgactgggt

SEQ ID NO: 275032 - DNA, 15 bp, Homo sapiens
ggaaaggtgactggg

SEQ ID NO: 275033 - DNA, 15 bp, Homo sapiens
aggaaaggtgactgg

SEQ ID NO: 275034 - DNA, 15 bp, Homo sapiens
caggaaaggtgactg

SEQ ID NO: 275035 - DNA, 15 bp, Homo sapiens
tcaggaaaggtgact

SEQ ID NO: 275036 - DNA, 15 bp, Homo sapiens
ttcaggaaaggtgac

SEQ ID NO: 275037 - DNA, 15 bp, Homo sapiens
gttcaggaaaggtga

SEQ ID NO: 275038 - DNA, 15 bp, Homo sapiens
tgttcaggaaaggtg

SEQ ID NO: 275039 - DNA, 15 bp, Homo sapiens
ttgttcaggaaaggt

SEQ ID NO: 275040 - DNA, 15 bp, Homo sapiens
attgttcaggaaagg

SEQ ID NO: 275041 - DNA, 15 bp, Homo sapiens
aattgttcaggaaag

SEQ ID NO: 275042 - DNA, 15 bp, Homo sapiens
taattgttcaggaaa

SEQ ID NO: 275043 - DNA, 15 bp, Homo sapiens
ctaattgttcaggaa

SEQ ID NO: 275044 - DNA, 15 bp, Homo sapiens
cctaattgttcagga

SEQ ID NO: 275045 - DNA, 15 bp, Homo sapiens
tcctaattgttcagg

SEQ ID NO: 275046 - DNA, 15 bp, Homo sapiens
ttcctaattgttcag

SEQ ID NO: 275047 - DNA, 15 bp, Homo sapiens
attcctaattgttca

SEQ ID NO: 275048 - DNA, 15 bp, Homo sapiens
aattcctaattgttc

SEQ ID NO: 275049 - DNA, 15 bp, Homo sapiens
caattcctaattgtt

SEQ ID NO: 275050 - DNA, 15 bp, Homo sapiens
tcaattcctaattgt

SEQ ID NO: 275051 - DNA, 15 bp, Homo sapiens
gtcaattcctaattg

SEQ ID NO: 275052 - DNA, 15 bp, Homo sapiens
agtcaattcctaatt

SEQ ID NO: 275053 - DNA, 15 bp, Homo sapiens
aagtcaattcctaat

SEQ ID NO: 275054 - DNA, 15 bp, Homo sapiens
aaagtcaattcctaa

SEQ ID NO: 275055 - DNA, 15 bp, Homo sapiens
gaaagtcaattccta

SEQ ID NO: 275056 - DNA, 15 bp, Homo sapiens
agaaagtcaattcct

SEQ ID NO: 275057 - DNA, 15 bp, Homo sapiens
gagaaagtcaattcc

SEQ ID NO: 275058 - DNA, 15 bp, Homo sapiens
agagaaagtcaattc

SEQ ID NO: 275059 - DNA, 15 bp, Homo sapiens
aagagaaagtcaatt

SEQ ID NO: 275060 - DNA, 15 bp, Homo sapiens
gaagagaaagtcaat

SEQ ID NO: 275061 - DNA, 15 bp, Homo sapiens
ggaagagaaagtcaa

SEQ ID NO: 275062 - DNA, 15 bp, Homo sapiens
gggaagagaaagtca

SEQ ID NO: 275063 - DNA, 15 bp, Homo sapiens
ggggaagagaaagtc

SEQ ID NO: 275064 - DNA, 15 bp, Homo sapiens
tggggaagagaaagt

SEQ ID NO: 275065 - DNA, 15 bp, Homo sapiens
ttggggaagagaaag

SEQ ID NO: 275066 - DNA, 15 bp, Homo sapiens
attggggaagagaaa

SEQ ID NO: 275067 - DNA, 15 bp, Homo sapiens
cattggggaagagaa

SEQ ID NO: 275068 - DNA, 15 bp, Homo sapiens
gcattggggaagaga

SEQ ID NO: 275069 - DNA, 15 bp, Homo sapiens
agcattggggaagag

SEQ ID NO: 275070 - DNA, 15 bp, Homo sapiens
cagcattggggaaga

SEQ ID NO: 275071 - DNA, 15 bp, Homo sapiens
gcagcattggggaag

SEQ ID NO: 275072 - DNA, 15 bp, Homo sapiens
tgcagcattggggaa

SEQ ID NO: 275073 - DNA, 15 bp, Homo sapiens
atgcagcattgggga

SEQ ID NO: 275074 - DNA, 15 bp, Homo sapiens
aatgcagcattgggg

SEQ ID NO: 275075 - DNA, 15 bp, Homo sapiens
aaatgcagcattggg

SEQ ID NO: 275076 - DNA, 15 bp, Homo sapiens
gaaatgcagcattgg

SEQ ID NO: 275077 - DNA, 15 bp, Homo sapiens
tgaaatgcagcattg

SEQ ID NO: 275078 - DNA, 15 bp, Homo sapiens
gtgaaatgcagcatt

SEQ ID NO: 275079 - DNA, 15 bp, Homo sapiens
agtgaaatgcagcat

SEQ ID NO: 275080 - DNA, 15 bp, Homo sapiens
gagtgaaatgcagca

SEQ ID NO: 275081 - DNA, 15 bp, Homo sapiens
agagtgaaatgcagc

SEQ ID NO: 275082 - DNA, 15 bp, Homo sapiens
gagagtgaaatgcag

SEQ ID NO: 275083 - DNA, 15 bp, Homo sapiens
tgagagtgaaatgca

SEQ ID NO: 275084 - DNA, 15 bp, Homo sapiens
gtgagagtgaaatgc

SEQ ID NO: 275085 - DNA, 15 bp, Homo sapiens
ggtgagagtgaaatg

SEQ ID NO: 275086 - DNA, 15 bp, Homo sapiens
gggtgagagtgaaat

SEQ ID NO: 275087 - DNA, 15 bp, Homo sapiens
agggtgagagtgaaa

SEQ ID NO: 275088 - DNA, 15 bp, Homo sapiens
gagggtgagagtgaa

SEQ ID NO: 275089 - DNA, 15 bp, Homo sapiens
tgagggtgagagtga

SEQ ID NO: 275090 - DNA, 15 bp, Homo sapiens
ctgagggtgagagtg

SEQ ID NO: 275091 - DNA, 15 bp, Homo sapiens
actgagggtgagagt

SEQ ID NO: 275092 - DNA, 15 bp, Homo sapiens
cactgagggtgagag

SEQ ID NO: 275093 - DNA, 15 bp, Homo sapiens
acactgagggtgaga

SEQ ID NO: 275094 - DNA, 15 bp, Homo sapiens
gacactgagggtgag

SEQ ID NO: 275095 - DNA, 15 bp, Homo sapiens
ggacactgagggtga

SEQ ID NO: 275096 - DNA, 15 bp, Homo sapiens
tggacactgagggtg

SEQ ID NO: 275097 - DNA, 15 bp, Homo sapiens
ctggacactgagggt

SEQ ID NO: 275098 - DNA, 15 bp, Homo sapiens
gctggacactgaggg

SEQ ID NO: 275099 - DNA, 15 bp, Homo sapiens
ggctggacactgagg

SEQ ID NO: 275100 - DNA, 15 bp, Homo sapiens
gggctggacactgag

SEQ ID NO: 275101 - DNA, 15 bp, Homo sapiens
agggctggacactga

SEQ ID NO: 275102 - DNA, 15 bp, Homo sapiens
cagggctggacactg

SEQ ID NO: 275103 - DNA, 15 bp, Homo sapiens
ccagggctggacact

SEQ ID NO: 275104 - DNA, 15 bp, Homo sapiens
accagggctggacac

SEQ ID NO: 275105 - DNA, 15 bp, Homo sapiens
gaccagggctggaca

SEQ ID NO: 275106 - DNA, 15 bp, Homo sapiens
tgaccagggctggac

SEQ ID NO: 275107 - DNA, 15 bp, Homo sapiens
atgaccagggctgga

SEQ ID NO: 275108 - DNA, 15 bp, Homo sapiens
tatgaccagggctgg

SEQ ID NO: 275109 - DNA, 15 bp, Homo sapiens
atatgaccagggctg

SEQ ID NO: 275110 - DNA, 15 bp, Homo sapiens
aatatgaccagggct

SEQ ID NO: 275111 - DNA, 15 bp, Homo sapiens
caatatgaccagggc

SEQ ID NO: 275112 - DNA, 15 bp, Homo sapiens
acaatatgaccaggg

SEQ ID NO: 275113 - DNA, 15 bp, Homo sapiens
gacaatatgaccagg

SEQ ID NO: 275114 - DNA, 15 bp, Homo sapiens
agacaatatgaccag

SEQ ID NO: 275115 - DNA, 15 bp, Homo sapiens
aagacaatatgacca

SEQ ID NO: 275116 - DNA, 15 bp, Homo sapiens
aaagacaatatgacc

SEQ ID NO: 275117 - DNA, 15 bp, Homo sapiens
taaagacaatatgac

SEQ ID NO: 275118 - DNA, 15 bp, Homo sapiens
ctaaagacaatatga

SEQ ID NO: 275119 - DNA, 15 bp, Homo sapiens
gctaaagacaatatg

SEQ ID NO: 275120 - DNA, 15 bp, Homo sapiens
ggctaaagacaatat

SEQ ID NO: 275121 - DNA, 15 bp, Homo sapiens
gggctaaagacaata

SEQ ID NO: 275122 - DNA, 15 bp, Homo sapiens
tgggctaaagacaat

SEQ ID NO: 275123 - DNA, 15 bp, Homo sapiens
ttgggctaaagacaa

SEQ ID NO: 275124 - DNA, 15 bp, Homo sapiens
attgggctaaagaca

SEQ ID NO: 275125 - DNA, 15 bp, Homo sapiens
aattgggctaaagac

SEQ ID NO: 275126 - DNA, 15 bp, Homo sapiens
aaattgggctaaaga

SEQ ID NO: 275127 - DNA, 15 bp, Homo sapiens
aaaattgggctaaag

SEQ ID NO: 275128 - DNA, 15 bp, Homo sapiens
aaaaattgggctaaa

SEQ ID NO: 275129 - DNA, 15 bp, Homo sapiens
gaaaaattgggctaa

SEQ ID NO: 275130 - DNA, 15 bp, Homo sapiens
tgaaaaattgggcta

SEQ ID NO: 275131 - DNA, 15 bp, Homo sapiens
gtgaaaaattgggct

SEQ ID NO: 275132 - DNA, 15 bp, Homo sapiens
ggtgaaaaattgggc

SEQ ID NO: 275133 - DNA, 15 bp, Homo sapiens
tggtgaaaaattggg

SEQ ID NO: 275134 - DNA, 15 bp, Homo sapiens
gtggtgaaaaattgg

SEQ ID NO: 275135 - DNA, 15 bp, Homo sapiens
cgtggtgaaaaattg

SEQ ID NO: 275136 - DNA, 15 bp, Homo sapiens
gcgtggtgaaaaatt

SEQ ID NO: 275137 - DNA, 15 bp, Homo sapiens
ggcgtggtgaaaaat

SEQ ID NO: 275138 - DNA, 15 bp, Homo sapiens
tggcgtggtgaaaaa

SEQ ID NO: 275139 - DNA, 15 bp, Homo sapiens
atggcgtggtgaaaa

SEQ ID NO: 275140 - DNA, 15 bp, Homo sapiens
tatggcgtggtgaaa

SEQ ID NO: 275141 - DNA, 15 bp, Homo sapiens
ctatggcgtggtgaa

SEQ ID NO: 275142 - DNA, 15 bp, Homo sapiens
actatggcgtggtga

SEQ ID NO: 275143 - DNA, 15 bp, Homo sapiens
gactatggcgtggtg

SEQ ID NO: 275144 - DNA, 15 bp, Homo sapiens
agactatggcgtggt

SEQ ID NO: 275145 - DNA, 15 bp, Homo sapiens
aagactatggcgtgg

SEQ ID NO: 275146 - DNA, 15 bp, Homo sapiens
aaagactatggcgtg

SEQ ID NO: 275147 - DNA, 15 bp, Homo sapiens
gaaagactatggcgt

SEQ ID NO: 275148 - DNA, 15 bp, Homo sapiens
agaaagactatggcg

SEQ ID NO: 275149 - DNA, 15 bp, Homo sapiens
aagaaagactatggc

SEQ ID NO: 275150 - DNA, 15 bp, Homo sapiens
caagaaagactatgg

SEQ ID NO: 275151 - DNA, 15 bp, Homo sapiens
gcaagaaagactatg

SEQ ID NO: 275152 - DNA, 15 bp, Homo sapiens
ggcaagaaagactat

SEQ ID NO: 275153 - DNA, 15 bp, Homo sapiens
tggcaagaaagacta

SEQ ID NO: 275154 - DNA, 15 bp, Homo sapiens
gtggcaagaaagact

SEQ ID NO: 275155 - DNA, 15 bp, Homo sapiens
agtggcaagaaagac

SEQ ID NO: 275156 - DNA, 15 bp, Homo sapiens
cagtggcaagaaaga

SEQ ID NO: 275157 - DNA, 15 bp, Homo sapiens
ccagtggcaagaaag

SEQ ID NO: 275158 - DNA, 15 bp, Homo sapiens
cccagtggcaagaaa

SEQ ID NO: 275159 - DNA, 15 bp, Homo sapiens
gcccagtggcaagaa

SEQ ID NO: 275160 - DNA, 15 bp, Homo sapiens
agcccagtggcaaga

SEQ ID NO: 275161 - DNA, 15 bp, Homo sapiens
aagcccagtggcaag

SEQ ID NO: 275162 - DNA, 15 bp, Homo sapiens
aaagcccagtggcaa

SEQ ID NO: 275163 - DNA, 15 bp, Homo sapiens
caaagcccagtggca

SEQ ID NO: 275164 - DNA, 15 bp, Homo sapiens
gcaaagcccagtggc

SEQ ID NO: 275165 - DNA, 15 bp, Homo sapiens
tgcaaagcccagtgg

SEQ ID NO: 275166 - DNA, 15 bp, Homo sapiens
atgcaaagcccagtg

SEQ ID NO: 275167 - DNA, 15 bp, Homo sapiens
catgcaaagcccagt

SEQ ID NO: 275168 - DNA, 15 bp, Homo sapiens
acatgcaaagcccag

SEQ ID NO: 275169 - DNA, 15 bp, Homo sapiens
cacatgcaaagccca

SEQ ID NO: 275170 - DNA, 15 bp, Homo sapiens
gcacatgcaaagccc

SEQ ID NO: 275171 - DNA, 15 bp, Homo sapiens
agcacatgcaaagcc

SEQ ID NO: 275172 - DNA, 15 bp, Homo sapiens
cagcacatgcaaagc

SEQ ID NO: 275173 - DNA, 15 bp, Homo sapiens
acagcacatgcaaag

SEQ ID NO: 275174 - DNA, 15 bp, Homo sapiens
aacagcacatgcaaa

SEQ ID NO: 275175 - DNA, 15 bp, Homo sapiens
gaacagcacatgcaa

SEQ ID NO: 275176 - DNA, 15 bp, Homo sapiens
ggaacagcacatgca

SEQ ID NO: 275177 - DNA, 15 bp, Homo sapiens
gggaacagcacatgc

SEQ ID NO: 275178 - DNA, 15 bp, Homo sapiens
agggaacagcacatg

SEQ ID NO: 275179 - DNA, 15 bp, Homo sapiens
gagggaacagcacat

SEQ ID NO: 275180 - DNA, 15 bp, Homo sapiens
agagggaacagcaca

SEQ ID NO: 275181 - DNA, 15 bp, Homo sapiens
cagagggaacagcac

SEQ ID NO: 275182 - DNA, 15 bp, Homo sapiens
acagagggaacagca

SEQ ID NO: 275183 - DNA, 15 bp, Homo sapiens
aacagagggaacagc

SEQ ID NO: 275184 - DNA, 15 bp, Homo sapiens
aaacagagggaacag

SEQ ID NO: 275185 - DNA, 15 bp, Homo sapiens
caaacagagggaaca

SEQ ID NO: 275186 - DNA, 15 bp, Homo sapiens
gcaaacagagggaac

SEQ ID NO: 275187 - DNA, 15 bp, Homo sapiens
tgcaaacagagggaa

SEQ ID NO: 275188 - DNA, 15 bp, Homo sapiens
gtgcaaacagaggga

SEQ ID NO: 275189 - DNA, 15 bp, Homo sapiens
tgtgcaaacagaggg

SEQ ID NO: 275190 - DNA, 15 bp, Homo sapiens
atgtgcaaacagagg

SEQ ID NO: 275191 - DNA, 15 bp, Homo sapiens
catgtgcaaacagag

SEQ ID NO: 275192 - DNA, 15 bp, Homo sapiens
gcatgtgcaaacaga

SEQ ID NO: 275193 - DNA, 15 bp, Homo sapiens
agcatgtgcaaacag

SEQ ID NO: 275194 - DNA, 15 bp, Homo sapiens
cagcatgtgcaaaca

SEQ ID NO: 275195 - DNA, 15 bp, Homo sapiens
acagcatgtgcaaac

SEQ ID NO: 275196 - DNA, 15 bp, Homo sapiens
gaacagcatgtgcaa

SEQ ID NO: 275197 - DNA, 15 bp, Homo sapiens
agaacagcatgtgca

SEQ ID NO: 275198 - DNA, 15 bp, Homo sapiens
gagaacagcatgtgc

SEQ ID NO: 275199 - DNA, 15 bp, Homo sapiens
agagaacagcatgtg

SEQ ID NO: 275200 - DNA, 15 bp, Homo sapiens
gagagaacagcatgt

SEQ ID NO: 275201 - DNA, 15 bp, Homo sapiens
agagagaacagcatg

SEQ ID NO: 275202 - DNA, 15 bp, Homo sapiens
aagagagaacagcat

SEQ ID NO: 275203 - DNA, 15 bp, Homo sapiens
aaagagagaacagca

SEQ ID NO: 275204 - DNA, 15 bp, Homo sapiens
gaaagagagaacagc

SEQ ID NO: 275205 - DNA, 15 bp, Homo sapiens
agaaagagagaacag

SEQ ID NO: 275206 - DNA, 15 bp, Homo sapiens
gagaaagagagaaca

SEQ ID NO: 275207 - DNA, 15 bp, Homo sapiens
ggagaaagagagaac

SEQ ID NO: 275208 - DNA, 15 bp, Homo sapiens
aggagaaagagagaa

SEQ ID NO: 275209 - DNA, 15 bp, Homo sapiens
gaggagaaagagaga

SEQ ID NO: 275210 - DNA, 15 bp, Homo sapiens
agaggagaaagagag

SEQ ID NO: 275211 - DNA, 15 bp, Homo sapiens
aagaggagaaagaga

SEQ ID NO: 275212 - DNA, 15 bp, Homo sapiens
gaagaggagaaagag

SEQ ID NO: 275213 - DNA, 15 bp, Homo sapiens
agaagaggagaaaga

SEQ ID NO: 275214 - DNA, 15 bp, Homo sapiens
aagaagaggagaaag

SEQ ID NO: 275215 - DNA, 15 bp, Homo sapiens
gaagaagaggagaaa

SEQ ID NO: 275216 - DNA, 15 bp, Homo sapiens
ggaagaagaggagaa

SEQ ID NO: 275217 - DNA, 15 bp, Homo sapiens
gggaagaagaggaga

SEQ ID NO: 275218 - DNA, 15 bp, Homo sapiens
tgggaagaagaggag

SEQ ID NO: 275219 - DNA, 15 bp, Homo sapiens
atgggaagaagagga

SEQ ID NO: 275220 - DNA, 15 bp, Homo sapiens
gatgggaagaagagg

SEQ ID NO: 275221 - DNA, 15 bp, Homo sapiens
ggatgggaagaagag

SEQ ID NO: 275222 - DNA, 15 bp, Homo sapiens
gggatgggaagaaga

SEQ ID NO: 275223 - DNA, 15 bp, Homo sapiens
agggatgggaagaag

SEQ ID NO: 275224 - DNA, 15 bp, Homo sapiens
aagggatgggaagaa

SEQ ID NO: 275225 - DNA, 15 bp, Homo sapiens
aaagggatgggaaga

SEQ ID NO: 275226 - DNA, 15 bp, Homo sapiens
gaaagggatgggaag

SEQ ID NO: 275227 - DNA, 15 bp, Homo sapiens
ggaaagggatgggaa

SEQ ID NO: 275228 - DNA, 15 bp, Homo sapiens
gggaaagggatggga

SEQ ID NO: 275229 - DNA, 15 bp, Homo sapiens
tgggaaagggatggg

SEQ ID NO: 275230 - DNA, 15 bp, Homo sapiens
gtgggaaagggatgg

SEQ ID NO: 275231 - DNA, 15 bp, Homo sapiens
tgtgggaaagggatg

SEQ ID NO: 275232 - DNA, 15 bp, Homo sapiens
ctgtgggaaagggat

SEQ ID NO: 275233 - DNA, 15 bp, Homo sapiens
gctgtgggaaaggga

SEQ ID NO: 275234 - DNA, 15 bp, Homo sapiens
tgctgtgggaaaggg

SEQ ID NO: 275235 - DNA, 15 bp, Homo sapiens
gtgctgtgggaaagg

SEQ ID NO: 275236 - DNA, 15 bp, Homo sapiens
tgtgctgtgggaaag

SEQ ID NO: 275237 - DNA, 15 bp, Homo sapiens
gtgtgctgtgggaaa

SEQ ID NO: 275238 - DNA, 15 bp, Homo sapiens
cgtgtgctgtgggaa

SEQ ID NO: 275239 - DNA, 15 bp, Homo sapiens
gcgtgtgctgtggga

SEQ ID NO: 275240 - DNA, 15 bp, Homo sapiens
ggcgtgtgctgtggg

SEQ ID NO: 275241 - DNA, 15 bp, Homo sapiens
aggcgtgtgctgtgg

SEQ ID NO: 275242 - DNA, 15 bp, Homo sapiens
aaggcgtgtgctgtg

SEQ ID NO: 275243 - DNA, 15 bp, Homo sapiens
aaaggcgtgtgctgt

SEQ ID NO: 275244 - DNA, 15 bp, Homo sapiens
gaaaggcgtgtgctg

SEQ ID NO: 275245 - DNA, 15 bp, Homo sapiens
tgaaaggcgtgtgct

SEQ ID NO: 275246 - DNA, 15 bp, Homo sapiens
gtgaaaggcgtgtgc

SEQ ID NO: 275247 - DNA, 15 bp, Homo sapiens
ggtgaaaggcgtgtg

SEQ ID NO: 275248 - DNA, 15 bp, Homo sapiens
gggtgaaaggcgtgt

SEQ ID NO: 275249 - DNA, 15 bp, Homo sapiens
tgggtgaaaggcgtg

SEQ ID NO: 275250 - DNA, 15 bp, Homo sapiens
ttgggtgaaaggcgt

SEQ ID NO: 275251 - DNA, 15 bp, Homo sapiens
tttgggtgaaaggcg

SEQ ID NO: 275252 - DNA, 15 bp, Homo sapiens
atttgggtgaaaggc

SEQ ID NO: 275253 - DNA, 15 bp, Homo sapiens
tatttgggtgaaagg

SEQ ID NO: 275254 - DNA, 15 bp, Homo sapiens
ctatttgggtgaaag

SEQ ID NO: 275255 - DNA, 15 bp, Homo sapiens
gctatttgggtgaaa

SEQ ID NO: 275256 - DNA, 15 bp, Homo sapiens
tgctatttgggtgaa

SEQ ID NO: 275257 - DNA, 15 bp, Homo sapiens
gtgctatttgggtga

SEQ ID NO: 275258 - DNA, 15 bp, Homo sapiens
ggtgctatttgggtg

SEQ ID NO: 275259 - DNA, 15 bp, Homo sapiens
aggtgctatttgggt

SEQ ID NO: 275260 - DNA, 15 bp, Homo sapiens
taggtgctatttggg

SEQ ID NO: 275261 - DNA, 15 bp, Homo sapiens
gtaggtgctatttgg

SEQ ID NO: 275262 - DNA, 15 bp, Homo sapiens
agtaggtgctatttg

SEQ ID NO: 275263 - DNA, 15 bp, Homo sapiens
gagtaggtgctattt

SEQ ID NO: 275264 - DNA, 15 bp, Homo sapiens
tgagtaggtgctatt

SEQ ID NO: 275265 - DNA, 15 bp, Homo sapiens
atgagtaggtgctat

SEQ ID NO: 275266 - DNA, 15 bp, Homo sapiens
aatgagtaggtgcta

SEQ ID NO: 275267 - DNA, 15 bp, Homo sapiens
gaatgagtaggtgct

SEQ ID NO: 275268 - DNA, 15 bp, Homo sapiens
agaatgagtaggtgc

SEQ ID NO: 275269 - DNA, 15 bp, Homo sapiens
aagaatgagtaggtg

SEQ ID NO: 275270 - DNA, 15 bp, Homo sapiens
gaagaatgagtaggt

SEQ ID NO: 275271 - DNA, 15 bp, Homo sapiens
tgaagaatgagtagg

SEQ ID NO: 275272 - DNA, 15 bp, Homo sapiens
ctgaagaatgagtag

SEQ ID NO: 275273 - DNA, 15 bp, Homo sapiens
tctgaagaatgagta

SEQ ID NO: 275274 - DNA, 15 bp, Homo sapiens
atctgaagaatgagt

SEQ ID NO: 275275 - DNA, 15 bp, Homo sapiens
catctgaagaatgag

SEQ ID NO: 275276 - DNA, 15 bp, Homo sapiens
gcatctgaagaatga

SEQ ID NO: 275277 - DNA, 15 bp, Homo sapiens
ggcatctgaagaatg

SEQ ID NO: 275278 - DNA, 15 bp, Homo sapiens
tggcatctgaagaat

SEQ ID NO: 275279 - DNA, 15 bp, Homo sapiens
ctggcatctgaagaa

SEQ ID NO: 275280 - DNA, 15 bp, Homo sapiens
gctggcatctgaaga

SEQ ID NO: 275281 - DNA, 15 bp, Homo sapiens
agctggcatctgaag

SEQ ID NO: 275282 - DNA, 15 bp, Homo sapiens
gagctggcatctgaa

SEQ ID NO: 275283 - DNA, 15 bp, Homo sapiens
ggagctggcatctga

SEQ ID NO: 275284 - DNA, 15 bp, Homo sapiens
tggagctggcatctg

SEQ ID NO: 275285 - DNA, 15 bp, Homo sapiens
ctggagctggcatct

SEQ ID NO: 275286 - DNA, 15 bp, Homo sapiens
actggagctggcatc

SEQ ID NO: 275287 - DNA, 15 bp, Homo sapiens
cactggagctggcat

SEQ ID NO: 275288 - DNA, 15 bp, Homo sapiens
gcactggagctggca

SEQ ID NO: 275289 - DNA, 15 bp, Homo sapiens
cgcactggagctggc

SEQ ID NO: 275290 - DNA, 15 bp, Homo sapiens
tcgcactggagctgg

SEQ ID NO: 275291 - DNA, 15 bp, Homo sapiens
gtcgcactggagctg

SEQ ID NO: 275292 - DNA, 15 bp, Homo sapiens
agtcgcactggagct

SEQ ID NO: 275293 - DNA, 15 bp, Homo sapiens
aagtcgcactggagc

SEQ ID NO: 275294 - DNA, 15 bp, Homo sapiens
aaagtcgcactggag

SEQ ID NO: 275295 - DNA, 15 bp, Homo sapiens
gaaagtcgcactgga

SEQ ID NO: 275296 - DNA, 15 bp, Homo sapiens
agaaagtcgcactgg

SEQ ID NO: 275297 - DNA, 15 bp, Homo sapiens
aagaaagtcgcactg

SEQ ID NO: 275298 - DNA, 15 bp, Homo sapiens
caagaaagtcgcact

SEQ ID NO: 275299 - DNA, 15 bp, Homo sapiens
tcaagaaagtcgcac

SEQ ID NO: 275300 - DNA, 15 bp, Homo sapiens
ctcaagaaagtcgca

SEQ ID NO: 275301 - DNA, 15 bp, Homo sapiens
tctcaagaaagtcgc

SEQ ID NO: 275302 - DNA, 15 bp, Homo sapiens
ttctcaagaaagtcg

SEQ ID NO: 275303 - DNA, 15 bp, Homo sapiens
tttctcaagaaagtc

SEQ ID NO: 275304 - DNA, 15 bp, Homo sapiens
gtttctcaagaaagt

SEQ ID NO: 275305 - DNA, 15 bp, Homo sapiens
agtttctcaagaaag

SEQ ID NO: 275306 - DNA, 15 bp, Homo sapiens
aagtttctcaagaaa

SEQ ID NO: 275307 - DNA, 15 bp, Homo sapiens
gaagtttctcaagaa

SEQ ID NO: 275308 - DNA, 15 bp, Homo sapiens
agaagtttctcaaga

SEQ ID NO: 275309 - DNA, 15 bp, Homo sapiens
aagaagtttctcaag

SEQ ID NO: 275310 - DNA, 15 bp, Homo sapiens
aaagaagtttctcaa

SEQ ID NO: 275311 - DNA, 15 bp, Homo sapiens
aaaagaagtttctca

SEQ ID NO: 275312 - DNA, 15 bp, Homo sapiens
gaaaagaagtttctc

SEQ ID NO: 275313 - DNA, 15 bp, Homo sapiens
tgaaaagaagtttct

SEQ ID NO: 275314 - DNA, 15 bp, Homo sapiens
gtgaaaagaagtttc

SEQ ID NO: 275315 - DNA, 15 bp, Homo sapiens
ggtgaaaagaagttt

SEQ ID NO: 275316 - DNA, 15 bp, Homo sapiens
aggtgaaaagaagtt

SEQ ID NO: 275317 - DNA, 15 bp, Homo sapiens
aaggtgaaaagaagt

SEQ ID NO: 275318 - DNA, 15 bp, Homo sapiens
caaggtgaaaagaag

SEQ ID NO: 275319 - DNA, 15 bp, Homo sapiens
tcaaggtgaaaagaa

SEQ ID NO: 275320 - DNA, 15 bp, Homo sapiens
atcaaggtgaaaaga

SEQ ID NO: 275321 - DNA, 15 bp, Homo sapiens
gatcaaggtgaaaag

SEQ ID NO: 275322 - DNA, 15 bp, Homo sapiens
agatcaaggtgaaaa

SEQ ID NO: 275323 - DNA, 15 bp, Homo sapiens
aagatcaaggtgaaa

SEQ ID NO: 275324 - DNA, 15 bp, Homo sapiens
aaagatcaaggtgaa

SEQ ID NO: 275325 - DNA, 15 bp, Homo sapiens
aaaagatcaaggtga

SEQ ID NO: 275326 - DNA, 15 bp, Homo sapiens
caaaagatcaaggtg

SEQ ID NO: 275327 - DNA, 15 bp, Homo sapiens
acaaaagatcaaggt

SEQ ID NO: 275328 - DNA, 15 bp, Homo sapiens
cacaaaagatcaagg

SEQ ID NO: 275329 - DNA, 15 bp, Homo sapiens
tcacaaaagatcaag

SEQ ID NO: 275330 - DNA, 15 bp, Homo sapiens
ctcacaaaagatcaa

SEQ ID NO: 275331 - DNA, 15 bp, Homo sapiens
gctcacaaaagatca

SEQ ID NO: 275332 - DNA, 15 bp, Homo sapiens
tgctcacaaaagatc

SEQ ID NO: 275333 - DNA, 15 bp, Homo sapiens
ctgctcacaaaagat

SEQ ID NO: 275334 - DNA, 15 bp, Homo sapiens
gctgctcacaaaaga

SEQ ID NO: 275335 - DNA, 15 bp, Homo sapiens
agctgctcacaaaag

SEQ ID NO: 275336 - DNA, 15 bp, Homo sapiens
gagctgctcacaaaa

SEQ ID NO: 275337 - DNA, 15 bp, Homo sapiens
agagctgctcacaaa

SEQ ID NO: 275338 - DNA, 15 bp, Homo sapiens
aagagctgctcacaa

SEQ ID NO: 275339 - DNA, 15 bp, Homo sapiens
gaagagctgctcaca

SEQ ID NO: 275340 - DNA, 15 bp, Homo sapiens
agaagagctgctcac

SEQ ID NO: 275341 - DNA, 15 bp, Homo sapiens
tagaagagctgctca

SEQ ID NO: 275342 - DNA, 15 bp, Homo sapiens
ctagaagagctgctc

SEQ ID NO: 275343 - DNA, 15 bp, Homo sapiens
tctagaagagctgct

SEQ ID NO: 275344 - DNA, 15 bp, Homo sapiens
ttctagaagagctgc

SEQ ID NO: 275345 - DNA, 15 bp, Homo sapiens
attctagaagagctg

SEQ ID NO: 275346 - DNA, 15 bp, Homo sapiens
aattctagaagagct

SEQ ID NO: 275347 - DNA, 15 bp, Homo sapiens
caattctagaagagc

SEQ ID NO: 275348 - DNA, 15 bp, Homo sapiens
acaattctagaagag

SEQ ID NO: 275349 - DNA, 15 bp, Homo sapiens
cacaattctagaaga

SEQ ID NO: 275350 - DNA, 15 bp, Homo sapiens
acacaattctagaag

SEQ ID NO: 275351 - DNA, 15 bp, Homo sapiens
aacacaattctagaa

SEQ ID NO: 275352 - DNA, 15 bp, Homo sapiens
taacacaattctaga

SEQ ID NO: 275353 - DNA, 15 bp, Homo sapiens
ataacacaattctag

SEQ ID NO: 275354 - DNA, 15 bp, Homo sapiens
cataacacaattcta

SEQ ID NO: 275355 - DNA, 15 bp, Homo sapiens
acataacacaattct

SEQ ID NO: 275356 - DNA, 15 bp, Homo sapiens
aacataacacaattc

SEQ ID NO: 275357 - DNA, 15 bp, Homo sapiens
gaacataacacaatt

SEQ ID NO: 275358 - DNA, 15 bp, Homo sapiens
agaacataacacaat

SEQ ID NO: 275359 - DNA, 15 bp, Homo sapiens
aagaacataacacaa

SEQ ID NO: 275360 - DNA, 15 bp, Homo sapiens
gaagaacataacaca

SEQ ID NO: 275361 - DNA, 15 bp, Homo sapiens
ggaagaacataacac

SEQ ID NO: 275362 - DNA, 15 bp, Homo sapiens
tggaagaacataaca

SEQ ID NO: 275363 - DNA, 15 bp, Homo sapiens
atggaagaacataac

SEQ ID NO: 275364 - DNA, 15 bp, Homo sapiens
catggaagaacataa

SEQ ID NO: 275365 - DNA, 15 bp, Homo sapiens
gcatggaagaacata

SEQ ID NO: 275366 - DNA, 15 bp, Homo sapiens
ggcatggaagaacat

SEQ ID NO: 275367 - DNA, 15 bp, Homo sapiens
gggcatggaagaaca

SEQ ID NO: 275368 - DNA, 15 bp, Homo sapiens
agggcatggaagaac

SEQ ID NO: 275369 - DNA, 15 bp, Homo sapiens
aagggcatggaagaa

SEQ ID NO: 275370 - DNA, 15 bp, Homo sapiens
taagggcatggaaga

SEQ ID NO: 275371 - DNA, 15 bp, Homo sapiens
ataagggcatggaag

SEQ ID NO: 275372 - DNA, 15 bp, Homo sapiens
aataagggcatggaa

SEQ ID NO: 275373 - DNA, 15 bp, Homo sapiens
aaataagggcatgga

SEQ ID NO: 275374 - DNA, 15 bp, Homo sapiens
gaaataagggcatgg

SEQ ID NO: 275375 - DNA, 15 bp, Homo sapiens
tgaaataagggcatg

SEQ ID NO: 275376 - DNA, 15 bp, Homo sapiens
atgaaataagggcat

SEQ ID NO: 275377 - DNA, 15 bp, Homo sapiens
aatgaaataagggca

SEQ ID NO: 275378 - DNA, 15 bp, Homo sapiens
aaatgaaataagggc

SEQ ID NO: 275379 - DNA, 15 bp, Homo sapiens
aaaatgaaataaggg

SEQ ID NO: 275380 - DNA, 15 bp, Homo sapiens
caaaatgaaataagg

SEQ ID NO: 275381 - DNA, 15 bp, Homo sapiens
ccaaaatgaaataag

SEQ ID NO: 275382 - DNA, 15 bp, Homo sapiens
cccaaaatgaaataa

SEQ ID NO: 275383 - DNA, 15 bp, Homo sapiens
acccaaaatgaaata

SEQ ID NO: 275384 - DNA, 15 bp, Homo sapiens
aacccaaaatgaaat

SEQ ID NO: 275385 - DNA, 15 bp, Homo sapiens
gaacccaaaatgaaa

SEQ ID NO: 275386 - DNA, 15 bp, Homo sapiens
tgaacccaaaatgaa

SEQ ID NO: 275387 - DNA, 15 bp, Homo sapiens
gtgaacccaaaatga

SEQ ID NO: 275388 - DNA, 15 bp, Homo sapiens
tgtgaacccaaaatg

SEQ ID NO: 275389 - DNA, 15 bp, Homo sapiens
atgtgaacccaaaat

SEQ ID NO: 275390 - DNA, 15 bp, Homo sapiens
aatgtgaacccaaaa

SEQ ID NO: 275391 - DNA, 15 bp, Homo sapiens
gaatgtgaacccaaa

SEQ ID NO: 275392 - DNA, 15 bp, Homo sapiens
tgaatgtgaacccaa

SEQ ID NO: 275393 - DNA, 15 bp, Homo sapiens
atgaatgtgaaccca

SEQ ID NO: 275394 - DNA, 15 bp, Homo sapiens
aatgaatgtgaaccc

SEQ ID NO: 275395 - DNA, 15 bp, Homo sapiens
caatgaatgtgaacc

SEQ ID NO: 275396 - DNA, 15 bp, Homo sapiens
ccaatgaatgtgaac

SEQ ID NO: 275397 - DNA, 15 bp, Homo sapiens
cccaatgaatgtgaa

SEQ ID NO: 275398 - DNA, 15 bp, Homo sapiens
ccccaatgaatgtga

SEQ ID NO: 275399 - DNA, 15 bp, Homo sapiens
tccccaatgaatgtg

SEQ ID NO: 275400 - DNA, 15 bp, Homo sapiens
atccccaatgaatgt

SEQ ID NO: 275401 - DNA, 15 bp, Homo sapiens
catccccaatgaatg

SEQ ID NO: 275402 - DNA, 15 bp, Homo sapiens
tcatccccaatgaat

SEQ ID NO: 275403 - DNA, 15 bp, Homo sapiens
atcatccccaatgaa

SEQ ID NO: 275404 - DNA, 15 bp, Homo sapiens
aatcatccccaatga

SEQ ID NO: 275405 - DNA, 15 bp, Homo sapiens
taatcatccccaatg

SEQ ID NO: 275406 - DNA, 15 bp, Homo sapiens
ataatcatccccaat

SEQ ID NO: 275407 - DNA, 15 bp, Homo sapiens
cataatcatccccaa

SEQ ID NO: 275408 - DNA, 15 bp, Homo sapiens
tcataatcatcccca

SEQ ID NO: 275409 - DNA, 15 bp, Homo sapiens
ttcataatcatcccc

SEQ ID NO: 275410 - DNA, 15 bp, Homo sapiens
attcataatcatccc

SEQ ID NO: 275411 - DNA, 15 bp, Homo sapiens
cattcataatcatcc

SEQ ID NO: 275412 - DNA, 15 bp, Homo sapiens
ccattcataatcatc

SEQ ID NO: 275413 - DNA, 15 bp, Homo sapiens
tccattcataatcat

SEQ ID NO: 275414 - DNA, 15 bp, Homo sapiens
atccattcataatca

SEQ ID NO: 275415 - DNA, 15 bp, Homo sapiens
tatccattcataatc

SEQ ID NO: 275416 - DNA, 15 bp, Homo sapiens
gtatccattcataat

SEQ ID NO: 275417 - DNA, 15 bp, Homo sapiens
ggtatccattcataa

SEQ ID NO: 275418 - DNA, 15 bp, Homo sapiens
aggtatccattcata

SEQ ID NO: 275419 - DNA, 15 bp, Homo sapiens
caggtatccattcat

SEQ ID NO: 275420 - DNA, 15 bp, Homo sapiens
acaggtatccattca

SEQ ID NO: 275421 - DNA, 15 bp, Homo sapiens
gacaggtatccattc

SEQ ID NO: 275422 - DNA, 15 bp, Homo sapiens
agacaggtatccatt

SEQ ID NO: 275423 - DNA, 15 bp, Homo sapiens
gagacaggtatccat

SEQ ID NO: 275424 - DNA, 15 bp, Homo sapiens
ggagacaggtatcca

SEQ ID NO: 275425 - DNA, 15 bp, Homo sapiens
gggagacaggtatcc

SEQ ID NO: 275426 - DNA, 15 bp, Homo sapiens
ggggagacaggtatc

SEQ ID NO: 275427 - DNA, 15 bp, Homo sapiens
gggggagacaggtat

SEQ ID NO: 275428 - DNA, 15 bp, Homo sapiens
tgggggagacaggta

SEQ ID NO: 275429 - DNA, 15 bp, Homo sapiens
atgggggagacaggt

SEQ ID NO: 275430 - DNA, 15 bp, Homo sapiens
aatgggggagacagg

SEQ ID NO: 275431 - DNA, 15 bp, Homo sapiens
taatgggggagacag

SEQ ID NO: 275432 - DNA, 15 bp, Homo sapiens
ttaatgggggagaca

SEQ ID NO: 275433 - DNA, 15 bp, Homo sapiens
gttaatgggggagac

SEQ ID NO: 275434 - DNA, 15 bp, Homo sapiens
agttaatgggggaga

SEQ ID NO: 275435 - DNA, 15 bp, Homo sapiens
cagttaatgggggag

SEQ ID NO: 275436 - DNA, 15 bp, Homo sapiens
tcagttaatggggga

SEQ ID NO: 275437 - DNA, 15 bp, Homo sapiens
gtcagttaatggggg

SEQ ID NO: 275438 - DNA, 15 bp, Homo sapiens
tgtcagttaatgggg

SEQ ID NO: 275439 - DNA, 15 bp, Homo sapiens
atgtcagttaatggg

SEQ ID NO: 275440 - DNA, 15 bp, Homo sapiens
aatgtcagttaatgg

SEQ ID NO: 275441 - DNA, 15 bp, Homo sapiens
caatgtcagttaatg

SEQ ID NO: 275442 - DNA, 15 bp, Homo sapiens
acaatgtcagttaat

SEQ ID NO: 275443 - DNA, 15 bp, Homo sapiens
aacaatgtcagttaa

SEQ ID NO: 275444 - DNA, 15 bp, Homo sapiens
taacaatgtcagtta

SEQ ID NO: 275445 - DNA, 15 bp, Homo sapiens
ttaacaatgtcagtt

SEQ ID NO: 275446 - DNA, 15 bp, Homo sapiens
cttaacaatgtcagt

SEQ ID NO: 275447 - DNA, 15 bp, Homo sapiens
acttaacaatgtcag

SEQ ID NO: 275448 - DNA, 15 bp, Homo sapiens
aacttaacaatgtca

SEQ ID NO: 275449 - DNA, 15 bp, Homo sapiens
gaacttaacaatgtc

SEQ ID NO: 275450 - DNA, 15 bp, Homo sapiens
ggaacttaacaatgt

SEQ ID NO: 275451 - DNA, 15 bp, Homo sapiens
gggaacttaacaatg

SEQ ID NO: 275452 - DNA, 15 bp, Homo sapiens
agggaacttaacaat

SEQ ID NO: 275453 - DNA, 15 bp, Homo sapiens
cagggaacttaacaa

SEQ ID NO: 275454 - DNA, 15 bp, Homo sapiens
tcagggaacttaaca

SEQ ID NO: 275455 - DNA, 15 bp, Homo sapiens
ttcagggaacttaac

SEQ ID NO: 275456 - DNA, 15 bp, Homo sapiens
tttcagggaacttaa

SEQ ID NO: 275457 - DNA, 15 bp, Homo sapiens
ctttcagggaactta

SEQ ID NO: 275458 - DNA, 15 bp, Homo sapiens
gctttcagggaactt

SEQ ID NO: 275459 - DNA, 15 bp, Homo sapiens
tgctttcagggaact

SEQ ID NO: 275460 - DNA, 15 bp, Homo sapiens
ctgctttcagggaac

SEQ ID NO: 275461 - DNA, 15 bp, Homo sapiens
gctgctttcagggaa

SEQ ID NO: 275462 - DNA, 15 bp, Homo sapiens
agctgctttcaggga

SEQ ID NO: 275463 - DNA, 15 bp, Homo sapiens
tagctgctttcaggg

SEQ ID NO: 275464 - DNA, 15 bp, Homo sapiens
gtagctgctttcagg

SEQ ID NO: 275465 - DNA, 15 bp, Homo sapiens
agtagctgctttcag

SEQ ID NO: 275466 - DNA, 15 bp, Homo sapiens
tagtagctgctttca

SEQ ID NO: 275467 - DNA, 15 bp, Homo sapiens
atagtagctgctttc

SEQ ID NO: 275468 - DNA, 15 bp, Homo sapiens
gatagtagctgcttt

SEQ ID NO: 275469 - DNA, 15 bp, Homo sapiens
agatagtagctgctt

SEQ ID NO: 275470 - DNA, 15 bp, Homo sapiens
cagatagtagctgct

SEQ ID NO: 275471 - DNA, 15 bp, Homo sapiens
acagatagtagctgc

SEQ ID NO: 275472 - DNA, 15 bp, Homo sapiens
aacagatagtagctg

SEQ ID NO: 275473 - DNA, 15 bp, Homo sapiens
aaacagatagtagct

SEQ ID NO: 275474 - DNA, 15 bp, Homo sapiens
aaaacagatagtagc

SEQ ID NO: 275475 - DNA, 15 bp, Homo sapiens
aaaaacagatagtag

SEQ ID NO: 275476 - DNA, 15 bp, Homo sapiens
aaaaaacagatagta

SEQ ID NO: 275477 - DNA, 15 bp, Homo sapiens
caaaaaacagatagt

SEQ ID NO: 275478 - DNA, 15 bp, Homo sapiens
acaaaaaacagatag

SEQ ID NO: 275479 - DNA, 15 bp, Homo sapiens
gacaaaaaacagata

SEQ ID NO: 275480 - DNA, 15 bp, Homo sapiens
agacaaaaaacagat

SEQ ID NO: 275481 - DNA, 15 bp, Homo sapiens
gagacaaaaaacaga

SEQ ID NO: 275482 - DNA, 15 bp, Homo sapiens
tgagacaaaaaacag

SEQ ID NO: 275483 - DNA, 15 bp, Homo sapiens
ctgagacaaaaaaca

SEQ ID NO: 275484 - DNA, 15 bp, Homo sapiens
actgagacaaaaaac

SEQ ID NO: 275485 - DNA, 15 bp, Homo sapiens
aactgagacaaaaaa

SEQ ID NO: 275486 - DNA, 15 bp, Homo sapiens
gaactgagacaaaaa

SEQ ID NO: 275487 - DNA, 15 bp, Homo sapiens
agaactgagacaaaa

SEQ ID NO: 275488 - DNA, 15 bp, Homo sapiens
tagaactgagacaaa

SEQ ID NO: 275489 - DNA, 15 bp, Homo sapiens
atagaactgagacaa

SEQ ID NO: 275490 - DNA, 15 bp, Homo sapiens
gatagaactgagaca

SEQ ID NO: 275491 - DNA, 15 bp, Homo sapiens
ggatagaactgagac

SEQ ID NO: 275492 - DNA, 15 bp, Homo sapiens
gggatagaactgaga

SEQ ID NO: 275493 - DNA, 15 bp, Homo sapiens
tgggatagaactgag

SEQ ID NO: 275494 - DNA, 15 bp, Homo sapiens
ctgggatagaactga

SEQ ID NO: 275495 - DNA, 15 bp, Homo sapiens
gctgggatagaactg

SEQ ID NO: 275496 - DNA, 15 bp, Homo sapiens
tgctgggatagaact

SEQ ID NO: 275497 - DNA, 15 bp, Homo sapiens
gtgctgggatagaac

SEQ ID NO: 275498 - DNA, 15 bp, Homo sapiens
tgtgctgggatagaa

SEQ ID NO: 275499 - DNA, 15 bp, Homo sapiens
ctgtgctgggataga

SEQ ID NO: 275500 - DNA, 15 bp, Homo sapiens
cctgtgctgggatag

SEQ ID NO: 275501 - DNA, 15 bp, Homo sapiens
tcctgtgctgggata

SEQ ID NO: 275502 - DNA, 15 bp, Homo sapiens
atcctgtgctgggat

SEQ ID NO: 275503 - DNA, 15 bp, Homo sapiens
catcctgtgctggga

SEQ ID NO: 275504 - DNA, 15 bp, Homo sapiens
tcatcctgtgctggg

SEQ ID NO: 275505 - DNA, 15 bp, Homo sapiens
ctcatcctgtgctgg

SEQ ID NO: 275506 - DNA, 15 bp, Homo sapiens
gctcatcctgtgctg

SEQ ID NO: 275507 - DNA, 15 bp, Homo sapiens
tgctcatcctgtgct

SEQ ID NO: 275508 - DNA, 15 bp, Homo sapiens
gtgctcatcctgtgc

SEQ ID NO: 275509 - DNA, 15 bp, Homo sapiens
agtgctcatcctgtg

SEQ ID NO: 275510 - DNA, 15 bp, Homo sapiens
gagtgctcatcctgt

SEQ ID NO: 275511 - DNA, 15 bp, Homo sapiens
ggagtgctcatcctg

SEQ ID NO: 275512 - DNA, 15 bp, Homo sapiens
tggagtgctcatcct

SEQ ID NO: 275513 - DNA, 15 bp, Homo sapiens
atggagtgctcatcc

SEQ ID NO: 275514 - DNA, 15 bp, Homo sapiens
aatggagtgctcatc

SEQ ID NO: 275515 - DNA, 15 bp, Homo sapiens
taatggagtgctcat

SEQ ID NO: 275516 - DNA, 15 bp, Homo sapiens
ttaatggagtgctca

SEQ ID NO: 275517 - DNA, 15 bp, Homo sapiens
cttaatggagtgctc

SEQ ID NO: 275518 - DNA, 15 bp, Homo sapiens
acttaatggagtgct

SEQ ID NO: 275519 - DNA, 15 bp, Homo sapiens
tacttaatggagtgc

SEQ ID NO: 275520 - DNA, 15 bp, Homo sapiens
atacttaatggagtg

SEQ ID NO: 275521 - DNA, 15 bp, Homo sapiens
gatacttaatggagt

SEQ ID NO: 275522 - DNA, 15 bp, Homo sapiens
agatacttaatggag

SEQ ID NO: 275523 - DNA, 15 bp, Homo sapiens
cagatacttaatgga

SEQ ID NO: 275524 - DNA, 15 bp, Homo sapiens
gcagatacttaatgg

SEQ ID NO: 275525 - DNA, 15 bp, Homo sapiens
tgcagatacttaatg

SEQ ID NO: 275526 - DNA, 15 bp, Homo sapiens
ctgcagatacttaat

SEQ ID NO: 275527 - DNA, 15 bp, Homo sapiens
actgcagatacttaa

SEQ ID NO: 275528 - DNA, 15 bp, Homo sapiens
tactgcagatactta

SEQ ID NO: 275529 - DNA, 15 bp, Homo sapiens
atactgcagatactt

SEQ ID NO: 275530 - DNA, 15 bp, Homo sapiens
tatactgcagatact

SEQ ID NO: 275531 - DNA, 15 bp, Homo sapiens
gtatactgcagatac

SEQ ID NO: 275532 - DNA, 15 bp, Homo sapiens
tgtatactgcagata

SEQ ID NO: 275533 - DNA, 15 bp, Homo sapiens
atgtatactgcagat

SEQ ID NO: 275534 - DNA, 15 bp, Homo sapiens
tatgtatactgcaga

SEQ ID NO: 275535 - DNA, 15 bp, Homo sapiens
ttatgtatactgcag

SEQ ID NO: 275536 - DNA, 15 bp, Homo sapiens
cttatgtatactgca

SEQ ID NO: 275537 - DNA, 15 bp, Homo sapiens
acttatgtatactgc

SEQ ID NO: 275538 - DNA, 15 bp, Homo sapiens
cacttatgtatactg

SEQ ID NO: 275539 - DNA, 15 bp, Homo sapiens
ccacttatgtatact

SEQ ID NO: 275540 - DNA, 15 bp, Homo sapiens
tccacttatgtatac

SEQ ID NO: 275541 - DNA, 15 bp, Homo sapiens
gtccacttatgtata

SEQ ID NO: 275542 - DNA, 15 bp, Homo sapiens
tgtccacttatgtat

SEQ ID NO: 275543 - DNA, 15 bp, Homo sapiens
ctgtccacttatgta

SEQ ID NO: 275544 - DNA, 15 bp, Homo sapiens
tctgtccacttatgt

SEQ ID NO: 275545 - DNA, 15 bp, Homo sapiens
ttctgtccacttatg

SEQ ID NO: 275546 - DNA, 15 bp, Homo sapiens
cttctgtccacttat

SEQ ID NO: 275547 - DNA, 15 bp, Homo sapiens
acttctgtccactta

SEQ ID NO: 275548 - DNA, 15 bp, Homo sapiens
cacttctgtccactt

SEQ ID NO: 275549 - DNA, 15 bp, Homo sapiens
acacttctgtccact

SEQ ID NO: 275550 - DNA, 15 bp, Homo sapiens
aacacttctgtccac

SEQ ID NO: 275551 - DNA, 15 bp, Homo sapiens
aaacacttctgtcca

SEQ ID NO: 275552 - DNA, 15 bp, Homo sapiens
caaacacttctgtcc

SEQ ID NO: 275553 - DNA, 15 bp, Homo sapiens
acaaacacttctgtc

SEQ ID NO: 275554 - DNA, 15 bp, Homo sapiens
tacaaacacttctgt

SEQ ID NO: 275555 - DNA, 15 bp, Homo sapiens
ttacaaacacttctg

SEQ ID NO: 275556 - DNA, 15 bp, Homo sapiens
tttacaaacacttct

SEQ ID NO: 275557 - DNA, 15 bp, Homo sapiens
gtttacaaacacttc

SEQ ID NO: 275558 - DNA, 15 bp, Homo sapiens
tgtttacaaacactt

SEQ ID NO: 275559 - DNA, 15 bp, Homo sapiens
gtgtttacaaacact

SEQ ID NO: 275560 - DNA, 15 bp, Homo sapiens
ggtgtttacaaacac

SEQ ID NO: 275561 - DNA, 15 bp, Homo sapiens
gggtgtttacaaaca

SEQ ID NO: 275562 - DNA, 15 bp, Homo sapiens
tgggtgtttacaaac

SEQ ID NO: 275563 - DNA, 15 bp, Homo sapiens
gtgggtgtttacaaa

SEQ ID NO: 275564 - DNA, 15 bp, Homo sapiens
cgtgggtgtttacaa

SEQ ID NO: 275565 - DNA, 15 bp, Homo sapiens
acgtgggtgtttaca

SEQ ID NO: 275566 - DNA, 15 bp, Homo sapiens
aacgtgggtgtttac

SEQ ID NO: 275567 - DNA, 15 bp, Homo sapiens
gaacgtgggtgttta

SEQ ID NO: 275568 - DNA, 15 bp, Homo sapiens
agaacgtgggtgttt

SEQ ID NO: 275569 - DNA, 15 bp, Homo sapiens
cagaacgtgggtgtt

SEQ ID NO: 275570 - DNA, 15 bp, Homo sapiens
gcagaacgtgggtgt

SEQ ID NO: 275571 - DNA, 15 bp, Homo sapiens
ggcagaacgtgggtg

SEQ ID NO: 275572 - DNA, 15 bp, Homo sapiens
tggcagaacgtgggt

SEQ ID NO: 275573 - DNA, 15 bp, Homo sapiens
atggcagaacgtggg

SEQ ID NO: 275574 - DNA, 15 bp, Homo sapiens
aatggcagaacgtgg

SEQ ID NO: 275575 - DNA, 15 bp, Homo sapiens
gaatggcagaacgtg

SEQ ID NO: 275576 - DNA, 15 bp, Homo sapiens
agaatggcagaacgt

SEQ ID NO: 275577 - DNA, 15 bp, Homo sapiens
aagaatggcagaacg

SEQ ID NO: 275578 - DNA, 15 bp, Homo sapiens
gaagaatggcagaac

SEQ ID NO: 275579 - DNA, 15 bp, Homo sapiens
ggaagaatggcagaa

SEQ ID NO: 275580 - DNA, 15 bp, Homo sapiens
gggaagaatggcaga

SEQ ID NO: 275581 - DNA, 15 bp, Homo sapiens
agggaagaatggcag

SEQ ID NO: 275582 - DNA, 15 bp, Homo sapiens
gagggaagaatggca

SEQ ID NO: 275583 - DNA, 15 bp, Homo sapiens
tgagggaagaatggc

SEQ ID NO: 275584 - DNA, 15 bp, Homo sapiens
ttgagggaagaatgg

SEQ ID NO: 275585 - DNA, 15 bp, Homo sapiens
attgagggaagaatg

SEQ ID NO: 275586 - DNA, 15 bp, Homo sapiens
cattgagggaagaat

SEQ ID NO: 275587 - DNA, 15 bp, Homo sapiens
gcattgagggaagaa

SEQ ID NO: 275588 - DNA, 15 bp, Homo sapiens
ggcattgagggaaga

SEQ ID NO: 275589 - DNA, 15 bp, Homo sapiens
tggcattgagggaag

SEQ ID NO: 275590 - DNA, 15 bp, Homo sapiens
ttggcattgagggaa

SEQ ID NO: 275591 - DNA, 15 bp, Homo sapiens
tttggcattgaggga

SEQ ID NO: 275592 - DNA, 15 bp, Homo sapiens
ctttggcattgaggg

SEQ ID NO: 275593 - DNA, 15 bp, Homo sapiens
cctttggcattgagg

SEQ ID NO: 275594 - DNA, 15 bp, Homo sapiens
tcctttggcattgag

SEQ ID NO: 275595 - DNA, 15 bp, Homo sapiens
atcctttggcattga

SEQ ID NO: 275596 - DNA, 15 bp, Homo sapiens
gatcctttggcattg

SEQ ID NO: 275597 - DNA, 15 bp, Homo sapiens
ggatcctttggcatt

SEQ ID NO: 275598 - DNA, 15 bp, Homo sapiens
tggatcctttggcat

SEQ ID NO: 275599 - DNA, 15 bp, Homo sapiens
ttggatcctttggca

SEQ ID NO: 275600 - DNA, 15 bp, Homo sapiens
gttggatcctttggc

SEQ ID NO: 275601 - DNA, 15 bp, Homo sapiens
agttggatcctttgg

SEQ ID NO: 275602 - DNA, 15 bp, Homo sapiens
gagttggatcctttg

SEQ ID NO: 275603 - DNA, 15 bp, Homo sapiens
agagttggatccttt

SEQ ID NO: 275604 - DNA, 15 bp, Homo sapiens
tagagttggatcctt

SEQ ID NO: 275605 - DNA, 15 bp, Homo sapiens
gtagagttggatcct

SEQ ID NO: 275606 - DNA, 15 bp, Homo sapiens
ggtagagttggatcc

SEQ ID NO: 275607 - DNA, 15 bp, Homo sapiens
tggtagagttggatc

SEQ ID NO: 275608 - DNA, 15 bp, Homo sapiens
gtggtagagttggat

SEQ ID NO: 275609 - DNA, 15 bp, Homo sapiens
ggtggtagagttgga

SEQ ID NO: 275610 - DNA, 15 bp, Homo sapiens
aggtggtagagttgg

SEQ ID NO: 275611 - DNA, 15 bp, Homo sapiens
gaggtggtagagttg

SEQ ID NO: 275612 - DNA, 15 bp, Homo sapiens
tgaggtggtagagtt

SEQ ID NO: 275613 - DNA, 15 bp, Homo sapiens
atgaggtggtagagt

SEQ ID NO: 275614 - DNA, 15 bp, Homo sapiens
gatgaggtggtagag

SEQ ID NO: 275615 - DNA, 15 bp, Homo sapiens
tgatgaggtggtaga

SEQ ID NO: 275616 - DNA, 15 bp, Homo sapiens
ttgatgaggtggtag

SEQ ID NO: 275617 - DNA, 15 bp, Homo sapiens
tttgatgaggtggta

SEQ ID NO: 275618 - DNA, 15 bp, Homo sapiens
atttgatgaggtggt

SEQ ID NO: 275619 - DNA, 15 bp, Homo sapiens
aatttgatgaggtgg

SEQ ID NO: 275620 - DNA, 15 bp, Homo sapiens
gaatttgatgaggtg

SEQ ID NO: 275621 - DNA, 15 bp, Homo sapiens
tgaatttgatgaggt

SEQ ID NO: 275622 - DNA, 15 bp, Homo sapiens
ctgaatttgatgagg

SEQ ID NO: 275623 - DNA, 15 bp, Homo sapiens
tctgaatttgatgag

SEQ ID NO: 275624 - DNA, 15 bp, Homo sapiens
ctctgaatttgatga

SEQ ID NO: 275625 - DNA, 15 bp, Homo sapiens
tctctgaatttgatg

SEQ ID NO: 275626 - DNA, 15 bp, Homo sapiens
gtctctgaatttgat

SEQ ID NO: 275627 - DNA, 15 bp, Homo sapiens
tgtctctgaatttga

SEQ ID NO: 275628 - DNA, 15 bp, Homo sapiens
ctgtctctgaatttg

SEQ ID NO: 275629 - DNA, 15 bp, Homo sapiens
gctgtctctgaattt

SEQ ID NO: 275630 - DNA, 15 bp, Homo sapiens
agctgtctctgaatt

SEQ ID NO: 275631 - DNA, 15 bp, Homo sapiens
aagctgtctctgaat

SEQ ID NO: 275632 - DNA, 15 bp, Homo sapiens
gaagctgtctctgaa

SEQ ID NO: 275633 - DNA, 15 bp, Homo sapiens
agaagctgtctctga

SEQ ID NO: 275634 - DNA, 15 bp, Homo sapiens
cagaagctgtctctg

SEQ ID NO: 275635 - DNA, 15 bp, Homo sapiens
tcagaagctgtctct

SEQ ID NO: 275636 - DNA, 15 bp, Homo sapiens
atcagaagctgtctc

SEQ ID NO: 275637 - DNA, 15 bp, Homo sapiens
aatcagaagctgtct

SEQ ID NO: 275638 - DNA, 15 bp, Homo sapiens
aaatcagaagctgtc

SEQ ID NO: 275639 - DNA, 15 bp, Homo sapiens
aaaatcagaagctgt

SEQ ID NO: 275640 - DNA, 15 bp, Homo sapiens
caaaatcagaagctg

SEQ ID NO: 275641 - DNA, 15 bp, Homo sapiens
tcaaaatcagaagct

SEQ ID NO: 275642 - DNA, 15 bp, Homo sapiens
ctcaaaatcagaagc

SEQ ID NO: 275643 - DNA, 15 bp, Homo sapiens
gctcaaaatcagaag

SEQ ID NO: 275644 - DNA, 15 bp, Homo sapiens
ggctcaaaatcagaa

SEQ ID NO: 275645 - DNA, 15 bp, Homo sapiens
tggctcaaaatcaga

SEQ ID NO: 275646 - DNA, 15 bp, Homo sapiens
atggctcaaaatcag

SEQ ID NO: 275647 - DNA, 15 bp, Homo sapiens
tatggctcaaaatca

SEQ ID NO: 275648 - DNA, 15 bp, Homo sapiens
ctatggctcaaaatc

SEQ ID NO: 275649 - DNA, 15 bp, Homo sapiens
cctatggctcaaaat

SEQ ID NO: 275650 - DNA, 15 bp, Homo sapiens
ccctatggctcaaaa

SEQ ID NO: 275651 - DNA, 15 bp, Homo sapiens
cccctatggctcaaa

SEQ ID NO: 275652 - DNA, 15 bp, Homo sapiens
acccctatggctcaa

SEQ ID NO: 275653 - DNA, 15 bp, Homo sapiens
cacccctatggctca

SEQ ID NO: 275654 - DNA, 15 bp, Homo sapiens
acacccctatggctc

SEQ ID NO: 275655 - DNA, 15 bp, Homo sapiens
gacacccctatggct

SEQ ID NO: 275656 - DNA, 15 bp, Homo sapiens
tgacacccctatggc

SEQ ID NO: 275657 - DNA, 15 bp, Homo sapiens
ttgacacccctatgg

SEQ ID NO: 275658 - DNA, 15 bp, Homo sapiens
gttgacacccctatg

SEQ ID NO: 275659 - DNA, 15 bp, Homo sapiens
tgttgacacccctat

SEQ ID NO: 275660 - DNA, 15 bp, Homo sapiens
ctgttgacaccccta

SEQ ID NO: 275661 - DNA, 15 bp, Homo sapiens
gctgttgacacccct

SEQ ID NO: 275662 - DNA, 15 bp, Homo sapiens
tgctgttgacacccc

SEQ ID NO: 275663 - DNA, 15 bp, Homo sapiens
gtgctgttgacaccc

SEQ ID NO: 275664 - DNA, 15 bp, Homo sapiens
tgtgctgttgacacc

SEQ ID NO: 275665 - DNA, 15 bp, Homo sapiens
ttgtgctgttgacac

SEQ ID NO: 275666 - DNA, 15 bp, Homo sapiens
cttgtgctgttgaca

SEQ ID NO: 275667 - DNA, 15 bp, Homo sapiens
acttgtgctgttgac

SEQ ID NO: 275668 - DNA, 15 bp, Homo sapiens
cacttgtgctgttga

SEQ ID NO: 275669 - DNA, 15 bp, Homo sapiens
gcacttgtgctgttg

SEQ ID NO: 275670 - DNA, 15 bp, Homo sapiens
ggcacttgtgctgtt

SEQ ID NO: 275671 - DNA, 15 bp, Homo sapiens
aggcacttgtgctgt

SEQ ID NO: 275672 - DNA, 15 bp, Homo sapiens
caggcacttgtgctg

SEQ ID NO: 275673 - DNA, 15 bp, Homo sapiens
tcaggcacttgtgct

SEQ ID NO: 275674 - DNA, 15 bp, Homo sapiens
ttcaggcacttgtgc

SEQ ID NO: 275675 - DNA, 15 bp, Homo sapiens
cttcaggcacttgtg

SEQ ID NO: 275676 - DNA, 15 bp, Homo sapiens
ccttcaggcacttgt

SEQ ID NO: 275677 - DNA, 15 bp, Homo sapiens
cccttcaggcacttg

SEQ ID NO: 275678 - DNA, 15 bp, Homo sapiens
gcccttcaggcactt

SEQ ID NO: 275679 - DNA, 15 bp, Homo sapiens
ggcccttcaggcact

SEQ ID NO: 275680 - DNA, 15 bp, Homo sapiens
gggcccttcaggcac

SEQ ID NO: 275681 - DNA, 15 bp, Homo sapiens
tgggcccttcaggca

SEQ ID NO: 275682 - DNA, 15 bp, Homo sapiens
gtgggcccttcaggc

SEQ ID NO: 275683 - DNA, 15 bp, Homo sapiens
tgtgggcccttcagg

SEQ ID NO: 275684 - DNA, 15 bp, Homo sapiens
ctgtgggcccttcag

SEQ ID NO: 275685 - DNA, 15 bp, Homo sapiens
tctgtgggcccttca

SEQ ID NO: 275686 - DNA, 15 bp, Homo sapiens
ttctgtgggcccttc

SEQ ID NO: 275687 - DNA, 15 bp, Homo sapiens
attctgtgggccctt

SEQ ID NO: 275688 - DNA, 15 bp, Homo sapiens
aattctgtgggccct

SEQ ID NO: 275689 - DNA, 15 bp, Homo sapiens
gaattctgtgggccc

SEQ ID NO: 275690 - DNA, 15 bp, Homo sapiens
ggaattctgtgggcc

SEQ ID NO: 275691 - DNA, 15 bp, Homo sapiens
aggaattctgtgggc

SEQ ID NO: 275692 - DNA, 15 bp, Homo sapiens
caggaattctgtggg

SEQ ID NO: 275693 - DNA, 15 bp, Homo sapiens
ccaggaattctgtgg

SEQ ID NO: 275694 - DNA, 15 bp, Homo sapiens
gccaggaattctgtg

SEQ ID NO: 275695 - DNA, 15 bp, Homo sapiens
tgccaggaattctgt

SEQ ID NO: 275696 - DNA, 15 bp, Homo sapiens
atgccaggaattctg

SEQ ID NO: 275697 - DNA, 15 bp, Homo sapiens
catgccaggaattct

SEQ ID NO: 275698 - DNA, 15 bp, Homo sapiens
acatgccaggaattc

SEQ ID NO: 275699 - DNA, 15 bp, Homo sapiens
cacatgccaggaatt

SEQ ID NO: 275700 - DNA, 15 bp, Homo sapiens
gcacatgccaggaat

SEQ ID NO: 275701 - DNA, 15 bp, Homo sapiens
agcacatgccaggaa

SEQ ID NO: 275702 - DNA, 15 bp, Homo sapiens
cagcacatgccagga

SEQ ID NO: 275703 - DNA, 15 bp, Homo sapiens
acagcacatgccagg

SEQ ID NO: 275704 - DNA, 15 bp, Homo sapiens
tacagcacatgccag

SEQ ID NO: 275705 - DNA, 15 bp, Homo sapiens
gtacagcacatgcca

SEQ ID NO: 275706 - DNA, 15 bp, Homo sapiens
agtacagcacatgcc

SEQ ID NO: 275707 - DNA, 15 bp, Homo sapiens
aagtacagcacatgc

SEQ ID NO: 275708 - DNA, 15 bp, Homo sapiens
aaagtacagcacatg

SEQ ID NO: 275709 - DNA, 15 bp, Homo sapiens
taaagtacagcacat

SEQ ID NO: 275710 - DNA, 15 bp, Homo sapiens
ataaagtacagcaca

SEQ ID NO: 275711 - DNA, 15 bp, Homo sapiens
gataaagtacagcac

SEQ ID NO: 275712 - DNA, 15 bp, Homo sapiens
tgataaagtacagca

SEQ ID NO: 275713 - DNA, 15 bp, Homo sapiens
ttgataaagtacagc

SEQ ID NO: 275714 - DNA, 15 bp, Homo sapiens
cttgataaagtacag

SEQ ID NO: 275715 - DNA, 15 bp, Homo sapiens
tcttgataaagtaca

SEQ ID NO: 275716 - DNA, 15 bp, Homo sapiens
ttcttgataaagtac

SEQ ID NO: 275717 - DNA, 15 bp, Homo sapiens
attcttgataaagta

SEQ ID NO: 275718 - DNA, 15 bp, Homo sapiens
gattcttgataaagt

SEQ ID NO: 275719 - DNA, 15 bp, Homo sapiens
agattcttgataaag

SEQ ID NO: 275720 - DNA, 15 bp, Homo sapiens
cagattcttgataaa

SEQ ID NO: 275721 - DNA, 15 bp, Homo sapiens
tcagattcttgataa

SEQ ID NO: 275722 - DNA, 15 bp, Homo sapiens
gtcagattcttgata

SEQ ID NO: 275723 - DNA, 15 bp, Homo sapiens
tgtcagattcttgat

SEQ ID NO: 275724 - DNA, 15 bp, Homo sapiens
ctgtcagattcttga

SEQ ID NO: 275725 - DNA, 15 bp, Homo sapiens
cctgtcagattcttg

SEQ ID NO: 275726 - DNA, 15 bp, Homo sapiens
ccctgtcagattctt

SEQ ID NO: 275727 - DNA, 15 bp, Homo sapiens
tccctgtcagattct

SEQ ID NO: 275728 - DNA, 15 bp, Homo sapiens
ttccctgtcagattc

SEQ ID NO: 275729 - DNA, 15 bp, Homo sapiens
attccctgtcagatt

SEQ ID NO: 275730 - DNA, 15 bp, Homo sapiens
cattccctgtcagat

SEQ ID NO: 275731 - DNA, 15 bp, Homo sapiens
gcattccctgtcaga

SEQ ID NO: 275732 - DNA, 15 bp, Homo sapiens
cgcattccctgtcag

SEQ ID NO: 275733 - DNA, 15 bp, Homo sapiens
ccgcattccctgtca

SEQ ID NO: 275734 - DNA, 15 bp, Homo sapiens
gccgcattccctgtc

SEQ ID NO: 275735 - DNA, 15 bp, Homo sapiens
agccgcattccctgt

SEQ ID NO: 275736 - DNA, 15 bp, Homo sapiens
cagccgcattccctg

SEQ ID NO: 275737 - DNA, 15 bp, Homo sapiens
acagccgcattccct

SEQ ID NO: 275738 - DNA, 15 bp, Homo sapiens
gacagccgcattccc

SEQ ID NO: 275739 - DNA, 15 bp, Homo sapiens
ggacagccgcattcc

SEQ ID NO: 275740 - DNA, 15 bp, Homo sapiens
gggacagccgcattc

SEQ ID NO: 275741 - DNA, 15 bp, Homo sapiens
agggacagccgcatt

SEQ ID NO: 275742 - DNA, 15 bp, Homo sapiens
tagggacagccgcat

SEQ ID NO: 275743 - DNA, 15 bp, Homo sapiens
atagggacagccgca

SEQ ID NO: 275744 - DNA, 15 bp, Homo sapiens
gatagggacagccgc

SEQ ID NO: 275745 - DNA, 15 bp, Homo sapiens
tgatagggacagccg

SEQ ID NO: 275746 - DNA, 15 bp, Homo sapiens
ttgatagggacagcc

SEQ ID NO: 275747 - DNA, 15 bp, Homo sapiens
cttgatagggacagc

SEQ ID NO: 275748 - DNA, 15 bp, Homo sapiens
gcttgatagggacag

SEQ ID NO: 275749 - DNA, 15 bp, Homo sapiens
agcttgatagggaca

SEQ ID NO: 275750 - DNA, 15 bp, Homo sapiens
cagcttgatagggac

SEQ ID NO: 275751 - DNA, 15 bp, Homo sapiens
acagcttgataggga

SEQ ID NO: 275752 - DNA, 15 bp, Homo sapiens
aacagcttgataggg

SEQ ID NO: 275753 - DNA, 15 bp, Homo sapiens
caacagcttgatagg

SEQ ID NO: 275754 - DNA, 15 bp, Homo sapiens
acaacagcttgatag

SEQ ID NO: 275755 - DNA, 15 bp, Homo sapiens
cacaacagcttgata

SEQ ID NO: 275756 - DNA, 15 bp, Homo sapiens
gcacaacagcttgat

SEQ ID NO: 275757 - DNA, 15 bp, Homo sapiens
ggcacaacagcttga

SEQ ID NO: 275758 - DNA, 15 bp, Homo sapiens
aggcacaacagcttg

SEQ ID NO: 275759 - DNA, 15 bp, Homo sapiens
caggcacaacagctt

SEQ ID NO: 275760 - DNA, 15 bp, Homo sapiens
tcaggcacaacagct

SEQ ID NO: 275761 - DNA, 15 bp, Homo sapiens
gtcaggcacaacagc

SEQ ID NO: 275762 - DNA, 15 bp, Homo sapiens
tgtcaggcacaacag

SEQ ID NO: 275763 - DNA, 15 bp, Homo sapiens
ctgtcaggcacaaca

SEQ ID NO: 275764 - DNA, 15 bp, Homo sapiens
cctgtcaggcacaac

SEQ ID NO: 275765 - DNA, 15 bp, Homo sapiens
gcctgtcaggcacaa

SEQ ID NO: 275766 - DNA, 15 bp, Homo sapiens
tgcctgtcaggcaca

SEQ ID NO: 275767 - DNA, 15 bp, Homo sapiens
gtgcctgtcaggcac

SEQ ID NO: 275768 - DNA, 15 bp, Homo sapiens
ggtgcctgtcaggca

SEQ ID NO: 275769 - DNA, 15 bp, Homo sapiens
tggtgcctgtcaggc

SEQ ID NO: 275770 - DNA, 15 bp, Homo sapiens
atggtgcctgtcagg

SEQ ID NO: 275771 - DNA, 15 bp, Homo sapiens
gatggtgcctgtcag

SEQ ID NO: 275772 - DNA, 15 bp, Homo sapiens
agatggtgcctgtca

SEQ ID NO: 275773 - DNA, 15 bp, Homo sapiens
aagatggtgcctgtc

SEQ ID NO: 275774 - DNA, 15 bp, Homo sapiens
caagatggtgcctgt

SEQ ID NO: 275775 - DNA, 15 bp, Homo sapiens
ccaagatggtgcctg

SEQ ID NO: 275776 - DNA, 15 bp, Homo sapiens
accaagatggtgcct

SEQ ID NO: 275777 - DNA, 15 bp, Homo sapiens
aaccaagatggtgcc

SEQ ID NO: 275778 - DNA, 15 bp, Homo sapiens
taaccaagatggtgc

SEQ ID NO: 275779 - DNA, 15 bp, Homo sapiens
ctaaccaagatggtg

SEQ ID NO: 275780 - DNA, 15 bp, Homo sapiens
gctaaccaagatggt

SEQ ID NO: 275781 - DNA, 15 bp, Homo sapiens
agctaaccaagatgg

SEQ ID NO: 275782 - DNA, 15 bp, Homo sapiens
cagctaaccaagatg

SEQ ID NO: 275783 - DNA, 15 bp, Homo sapiens
acagctaaccaagat

SEQ ID NO: 275784 - DNA, 15 bp, Homo sapiens
cacagctaaccaaga

SEQ ID NO: 275785 - DNA, 15 bp, Homo sapiens
ccacagctaaccaag

SEQ ID NO: 275786 - DNA, 15 bp, Homo sapiens
cccacagctaaccaa

SEQ ID NO: 275787 - DNA, 15 bp, Homo sapiens
tcccacagctaacca

SEQ ID NO: 275788 - DNA, 15 bp, Homo sapiens
gtcccacagctaacc

SEQ ID NO: 275789 - DNA, 15 bp, Homo sapiens
ggtcccacagctaac

SEQ ID NO: 275790 - DNA, 15 bp, Homo sapiens
tggtcccacagctaa

SEQ ID NO: 275791 - DNA, 15 bp, Homo sapiens
gtggtcccacagcta

SEQ ID NO: 275792 - DNA, 15 bp, Homo sapiens
agtggtcccacagct

SEQ ID NO: 275793 - DNA, 15 bp, Homo sapiens
cagtggtcccacagc

SEQ ID NO: 275794 - DNA, 15 bp, Homo sapiens
ccagtggtcccacag

SEQ ID NO: 275795 - DNA, 15 bp, Homo sapiens
accagtggtcccaca

SEQ ID NO: 275796 - DNA, 15 bp, Homo sapiens
caccagtggtcccac

SEQ ID NO: 275797 - DNA, 15 bp, Homo sapiens
acaccagtggtccca

SEQ ID NO: 275798 - DNA, 15 bp, Homo sapiens
aacaccagtggtccc

SEQ ID NO: 275799 - DNA, 15 bp, Homo sapiens
aaacaccagtggtcc

SEQ ID NO: 275800 - DNA, 15 bp, Homo sapiens
gaaacaccagtggtc

SEQ ID NO: 275801 - DNA, 15 bp, Homo sapiens
agaaacaccagtggt

SEQ ID NO: 275802 - DNA, 15 bp, Homo sapiens
gagaaacaccagtgg

SEQ ID NO: 275803 - DNA, 15 bp, Homo sapiens
ggagaaacaccagtg

SEQ ID NO: 275804 - DNA, 15 bp, Homo sapiens
aggagaaacaccagt

SEQ ID NO: 275805 - DNA, 15 bp, Homo sapiens
caggagaaacaccag

SEQ ID NO: 275806 - DNA, 15 bp, Homo sapiens
tcaggagaaacacca

SEQ ID NO: 275807 - DNA, 15 bp, Homo sapiens
ttcaggagaaacacc

SEQ ID NO: 275808 - DNA, 15 bp, Homo sapiens
cttcaggagaaacac

SEQ ID NO: 275809 - DNA, 15 bp, Homo sapiens
gcttcaggagaaaca

SEQ ID NO: 275810 - DNA, 15 bp, Homo sapiens
agcttcaggagaaac

SEQ ID NO: 275811 - DNA, 15 bp, Homo sapiens
cagcttcaggagaaa

SEQ ID NO: 275812 - DNA, 15 bp, Homo sapiens
gcagcttcaggagaa

SEQ ID NO: 275813 - DNA, 15 bp, Homo sapiens
tgcagcttcaggaga

SEQ ID NO: 275814 - DNA, 15 bp, Homo sapiens
ctgcagcttcaggag

SEQ ID NO: 275815 - DNA, 15 bp, Homo sapiens
cctgcagcttcagga

SEQ ID NO: 275816 - DNA, 15 bp, Homo sapiens
tcctgcagcttcagg

SEQ ID NO: 275817 - DNA, 15 bp, Homo sapiens
gtcctgcagcttcag

SEQ ID NO: 275818 - DNA, 15 bp, Homo sapiens
tgtcctgcagcttca

SEQ ID NO: 275819 - DNA, 15 bp, Homo sapiens
ctgtcctgcagcttc

SEQ ID NO: 275820 - DNA, 15 bp, Homo sapiens
gctgtcctgcagctt

SEQ ID NO: 275821 - DNA, 15 bp, Homo sapiens
ggctgtcctgcagct

SEQ ID NO: 275822 - DNA, 15 bp, Homo sapiens
tggctgtcctgcagc

SEQ ID NO: 275823 - DNA, 15 bp, Homo sapiens
ctggctgtcctgcag

SEQ ID NO: 275824 - DNA, 15 bp, Homo sapiens
gctggctgtcctgca

SEQ ID NO: 275825 - DNA, 15 bp, Homo sapiens
agctggctgtcctgc

SEQ ID NO: 275826 - DNA, 15 bp, Homo sapiens
cagctggctgtcctg

SEQ ID NO: 275827 - DNA, 15 bp, Homo sapiens
gcagctggctgtcct

SEQ ID NO: 275828 - DNA, 15 bp, Homo sapiens
tgcagctggctgtcc

SEQ ID NO: 275829 - DNA, 15 bp, Homo sapiens
ttgcagctggctgtc

SEQ ID NO: 275830 - DNA, 15 bp, Homo sapiens
attgcagctggctgt

SEQ ID NO: 275831 - DNA, 15 bp, Homo sapiens
cattgcagctggctg

SEQ ID NO: 275832 - DNA, 15 bp, Homo sapiens
ccattgcagctggct

SEQ ID NO: 275833 - DNA, 15 bp, Homo sapiens
cccattgcagctggc

SEQ ID NO: 275834 - DNA, 15 bp, Homo sapiens
gcccattgcagctgg

SEQ ID NO: 275835 - DNA, 15 bp, Homo sapiens
agcccattgcagctg

SEQ ID NO: 275836 - DNA, 15 bp, Homo sapiens
cagcccattgcagct

SEQ ID NO: 275837 - DNA, 15 bp, Homo sapiens
tcagcccattgcagc

SEQ ID NO: 275838 - DNA, 15 bp, Homo sapiens
gtcagcccattgcag

SEQ ID NO: 275839 - DNA, 15 bp, Homo sapiens
agtcagcccattgca

SEQ ID NO: 275840 - DNA, 15 bp, Homo sapiens
cagtcagcccattgc

SEQ ID NO: 275841 - DNA, 15 bp, Homo sapiens
tcagtcagcccattg

SEQ ID NO: 275842 - DNA, 15 bp, Homo sapiens
atcagtcagcccatt

SEQ ID NO: 275843 - DNA, 15 bp, Homo sapiens
gatcagtcagcccat

SEQ ID NO: 275844 - DNA, 15 bp, Homo sapiens
agatcagtcagccca

SEQ ID NO: 275845 - DNA, 15 bp, Homo sapiens
aagatcagtcagccc

SEQ ID NO: 275846 - DNA, 15 bp, Homo sapiens
caagatcagtcagcc

SEQ ID NO: 275847 - DNA, 15 bp, Homo sapiens
tcaagatcagtcagc

SEQ ID NO: 275848 - DNA, 15 bp, Homo sapiens
ttcaagatcagtcag

SEQ ID NO: 275849 - DNA, 15 bp, Homo sapiens
tttcaagatcagtca

SEQ ID NO: 275850 - DNA, 15 bp, Homo sapiens
atttcaagatcagtc

SEQ ID NO: 275851 - DNA, 15 bp, Homo sapiens
catttcaagatcagt

SEQ ID NO: 275852 - DNA, 15 bp, Homo sapiens
tcatttcaagatcag

SEQ ID NO: 275853 - DNA, 15 bp, Homo sapiens
ttcatttcaagatca

SEQ ID NO: 275854 - DNA, 15 bp, Homo sapiens
tttcatttcaagatc

SEQ ID NO: 275855 - DNA, 15 bp, Homo sapiens
gtttcatttcaagat

SEQ ID NO: 275856 - DNA, 15 bp, Homo sapiens
ggtttcatttcaaga

SEQ ID NO: 275857 - DNA, 15 bp, Homo sapiens
gggtttcatttcaag

SEQ ID NO: 275858 - DNA, 15 bp, Homo sapiens
agggtttcatttcaa

SEQ ID NO: 275859 - DNA, 15 bp, Homo sapiens
cagggtttcatttca

SEQ ID NO: 275860 - DNA, 15 bp, Homo sapiens
gcagggtttcatttc

SEQ ID NO: 275861 - DNA, 15 bp, Homo sapiens
ggcagggtttcattt

SEQ ID NO: 275862 - DNA, 15 bp, Homo sapiens
aggcagggtttcatt

SEQ ID NO: 275863 - DNA, 15 bp, Homo sapiens
gaggcagggtttcat

SEQ ID NO: 275864 - DNA, 15 bp, Homo sapiens
ggaggcagggtttca

SEQ ID NO: 275865 - DNA, 15 bp, Homo sapiens
aggaggcagggtttc

SEQ ID NO: 275866 - DNA, 15 bp, Homo sapiens
aaggaggcagggttt

SEQ ID NO: 275867 - DNA, 15 bp, Homo sapiens
gaaggaggcagggtt

SEQ ID NO: 275868 - DNA, 15 bp, Homo sapiens
agaaggaggcagggt

SEQ ID NO: 275869 - DNA, 15 bp, Homo sapiens
gagaaggaggcaggg

SEQ ID NO: 275870 - DNA, 15 bp, Homo sapiens
ggagaaggaggcagg

SEQ ID NO: 275871 - DNA, 15 bp, Homo sapiens
gggagaaggaggcag

SEQ ID NO: 275872 - DNA, 15 bp, Homo sapiens
agggagaaggaggca

SEQ ID NO: 275873 - DNA, 15 bp, Homo sapiens
gagggagaaggaggc

SEQ ID NO: 275874 - DNA, 15 bp, Homo sapiens
ggagggagaaggagg

SEQ ID NO: 275875 - DNA, 15 bp, Homo sapiens
aggagggagaaggag

SEQ ID NO: 275876 - DNA, 15 bp, Homo sapiens
gaggagggagaagga

SEQ ID NO: 275877 - DNA, 15 bp, Homo sapiens
ggaggagggagaagg

SEQ ID NO: 275878 - DNA, 15 bp, Homo sapiens
aggaggagggagaag

SEQ ID NO: 275879 - DNA, 15 bp, Homo sapiens
gaggaggagggagaa

SEQ ID NO: 275880 - DNA, 15 bp, Homo sapiens
cgaggaggagggaga

SEQ ID NO: 275881 - DNA, 15 bp, Homo sapiens
tcgaggaggagggag

SEQ ID NO: 275882 - DNA, 15 bp, Homo sapiens
ctcgaggaggaggga

SEQ ID NO: 275883 - DNA, 15 bp, Homo sapiens
gctcgaggaggaggg

SEQ ID NO: 275884 - DNA, 15 bp, Homo sapiens
ggctcgaggaggagg

SEQ ID NO: 275885 - DNA, 15 bp, Homo sapiens
tggctcgaggaggag

SEQ ID NO: 275886 - DNA, 15 bp, Homo sapiens
ctggctcgaggagga

SEQ ID NO: 275887 - DNA, 15 bp, Homo sapiens
tctggctcgaggagg

SEQ ID NO: 275888 - DNA, 15 bp, Homo sapiens
ctctggctcgaggag

SEQ ID NO: 275889 - DNA, 15 bp, Homo sapiens
actctggctcgagga

SEQ ID NO: 275890 - DNA, 15 bp, Homo sapiens
cactctggctcgagg

SEQ ID NO: 275891 - DNA, 15 bp, Homo sapiens
tcactctggctcgag

SEQ ID NO: 275892 - DNA, 15 bp, Homo sapiens
ctcactctggctcga

SEQ ID NO: 275893 - DNA, 15 bp, Homo sapiens
cctcactctggctcg

SEQ ID NO: 275894 - DNA, 15 bp, Homo sapiens
acctcactctggctc

SEQ ID NO: 275895 - DNA, 15 bp, Homo sapiens
cacctcactctggct

SEQ ID NO: 275896 - DNA, 15 bp, Homo sapiens
ccacctcactctggc

SEQ ID NO: 275897 - DNA, 15 bp, Homo sapiens
accacctcactctgg

SEQ ID NO: 275898 - DNA, 15 bp, Homo sapiens
aaccacctcactctg

SEQ ID NO: 275899 - DNA, 15 bp, Homo sapiens
aaaccacctcactct

SEQ ID NO: 275900 - DNA, 15 bp, Homo sapiens
aaaaccacctcactc

SEQ ID NO: 275901 - DNA, 15 bp, Homo sapiens
taaaaccacctcact

SEQ ID NO: 275902 - DNA, 15 bp, Homo sapiens
ttaaaaccacctcac

SEQ ID NO: 275903 - DNA, 15 bp, Homo sapiens
gttaaaaccacctca

SEQ ID NO: 275904 - DNA, 15 bp, Homo sapiens
agttaaaaccacctc

SEQ ID NO: 275905 - DNA, 15 bp, Homo sapiens
aagttaaaaccacct

SEQ ID NO: 275906 - DNA, 15 bp, Homo sapiens
gaagttaaaaccacc

SEQ ID NO: 275907 - DNA, 15 bp, Homo sapiens
agaagttaaaaccac

SEQ ID NO: 275908 - DNA, 15 bp, Homo sapiens
tagaagttaaaacca

SEQ ID NO: 275909 - DNA, 15 bp, Homo sapiens
atagaagttaaaacc

SEQ ID NO: 275910 - DNA, 15 bp, Homo sapiens
gatagaagttaaaac

SEQ ID NO: 275911 - DNA, 15 bp, Homo sapiens
agatagaagttaaaa

SEQ ID NO: 275912 - DNA, 15 bp, Homo sapiens
tagatagaagttaaa

SEQ ID NO: 275913 - DNA, 15 bp, Homo sapiens
ctagatagaagttaa

SEQ ID NO: 275914 - DNA, 15 bp, Homo sapiens
tctagatagaagtta

SEQ ID NO: 275915 - DNA, 15 bp, Homo sapiens
gtctagatagaagtt

SEQ ID NO: 275916 - DNA, 15 bp, Homo sapiens
tgtctagatagaagt

SEQ ID NO: 275917 - DNA, 15 bp, Homo sapiens
ctgtctagatagaag

SEQ ID NO: 275918 - DNA, 15 bp, Homo sapiens
actgtctagatagaa

SEQ ID NO: 275919 - DNA, 15 bp, Homo sapiens
aactgtctagataga

SEQ ID NO: 275920 - DNA, 15 bp, Homo sapiens
gaactgtctagatag

SEQ ID NO: 275921 - DNA, 15 bp, Homo sapiens
agaactgtctagata

SEQ ID NO: 275922 - DNA, 15 bp, Homo sapiens
cagaactgtctagat

SEQ ID NO: 275923 - DNA, 15 bp, Homo sapiens
tcagaactgtctaga

SEQ ID NO: 275924 - DNA, 15 bp, Homo sapiens
ctcagaactgtctag

SEQ ID NO: 275925 - DNA, 15 bp, Homo sapiens
tctcagaactgtcta

SEQ ID NO: 275926 - DNA, 15 bp, Homo sapiens
atctcagaactgtct

SEQ ID NO: 275927 - DNA, 15 bp, Homo sapiens
aatctcagaactgtc

SEQ ID NO: 275928 - DNA, 15 bp, Homo sapiens
caatctcagaactgt

SEQ ID NO: 275929 - DNA, 15 bp, Homo sapiens
ccaatctcagaactg

SEQ ID NO: 275930 - DNA, 15 bp, Homo sapiens
accaatctcagaact

SEQ ID NO: 275931 - DNA, 15 bp, Homo sapiens
taccaatctcagaac

SEQ ID NO: 275932 - DNA, 15 bp, Homo sapiens
ctaccaatctcagaa

SEQ ID NO: 275933 - DNA, 15 bp, Homo sapiens
tctaccaatctcaga

SEQ ID NO: 275934 - DNA, 15 bp, Homo sapiens
ctctaccaatctcag

SEQ ID NO: 275935 - DNA, 15 bp, Homo sapiens
cctctaccaatctca

SEQ ID NO: 275936 - DNA, 15 bp, Homo sapiens
tcctctaccaatctc

SEQ ID NO: 275937 - DNA, 15 bp, Homo sapiens
ctcctctaccaatct

SEQ ID NO: 275938 - DNA, 15 bp, Homo sapiens
tctcctctaccaatc

SEQ ID NO: 275939 - DNA, 15 bp, Homo sapiens
ttctcctctaccaat

SEQ ID NO: 275940 - DNA, 15 bp, Homo sapiens
tttctcctctaccaa

SEQ ID NO: 275941 - DNA, 15 bp, Homo sapiens
ttttctcctctacca

SEQ ID NO: 275942 - DNA, 15 bp, Homo sapiens
attttctcctctacc

SEQ ID NO: 275943 - DNA, 15 bp, Homo sapiens
tattttctcctctac

SEQ ID NO: 275944 - DNA, 15 bp, Homo sapiens
ctattttctcctcta

SEQ ID NO: 275945 - DNA, 15 bp, Homo sapiens
tctattttctcctct

SEQ ID NO: 275946 - DNA, 15 bp, Homo sapiens
ttctattttctcctc

SEQ ID NO: 275947 - DNA, 15 bp, Homo sapiens
tttctattttctcct

SEQ ID NO: 275948 - DNA, 15 bp, Homo sapiens
ctttctattttctcc

SEQ ID NO: 275949 - DNA, 15 bp, Homo sapiens
actttctattttctc

SEQ ID NO: 275950 - DNA, 15 bp, Homo sapiens
aactttctattttct

SEQ ID NO: 275951 - DNA, 15 bp, Homo sapiens
gaactttctattttc

SEQ ID NO: 275952 - DNA, 15 bp, Homo sapiens
agaactttctatttt

SEQ ID NO: 275953 - DNA, 15 bp, Homo sapiens
aagaactttctattt

SEQ ID NO: 275954 - DNA, 15 bp, Homo sapiens
taagaactttctatt

SEQ ID NO: 275955 - DNA, 15 bp, Homo sapiens
gtaagaactttctat

SEQ ID NO: 275956 - DNA, 15 bp, Homo sapiens
agtaagaactttcta

SEQ ID NO: 275957 - DNA, 15 bp, Homo sapiens
aagtaagaactttct

SEQ ID NO: 275958 - DNA, 15 bp, Homo sapiens
taagtaagaactttc

SEQ ID NO: 275959 - DNA, 15 bp, Homo sapiens
ttaagtaagaacttt

SEQ ID NO: 275960 - DNA, 15 bp, Homo sapiens
tttaagtaagaactt

SEQ ID NO: 275961 - DNA, 15 bp, Homo sapiens
atttaagtaagaact

SEQ ID NO: 275962 - DNA, 15 bp, Homo sapiens
aatttaagtaagaac

SEQ ID NO: 275963 - DNA, 15 bp, Homo sapiens
taatttaagtaagaa

SEQ ID NO: 275964 - DNA, 15 bp, Homo sapiens
ataatttaagtaaga

SEQ ID NO: 275965 - DNA, 15 bp, Homo sapiens
aataatttaagtaag

SEQ ID NO: 275966 - DNA, 15 bp, Homo sapiens
caataatttaagtaa

SEQ ID NO: 275967 - DNA, 15 bp, Homo sapiens
ccaataatttaagta

SEQ ID NO: 275968 - DNA, 15 bp, Homo sapiens
accaataatttaagt

SEQ ID NO: 275969 - DNA, 15 bp, Homo sapiens
caccaataatttaag

SEQ ID NO: 275970 - DNA, 15 bp, Homo sapiens
gcaccaataatttaa

SEQ ID NO: 275971 - DNA, 15 bp, Homo sapiens
tgcaccaataattta

SEQ ID NO: 275972 - DNA, 15 bp, Homo sapiens
ctgcaccaataattt

SEQ ID NO: 275973 - DNA, 15 bp, Homo sapiens
tctgcaccaataatt

SEQ ID NO: 275974 - DNA, 15 bp, Homo sapiens
ttctgcaccaataat

SEQ ID NO: 275975 - DNA, 15 bp, Homo sapiens
tttctgcaccaataa

SEQ ID NO: 275976 - DNA, 15 bp, Homo sapiens
ctttctgcaccaata

SEQ ID NO: 275977 - DNA, 15 bp, Homo sapiens
tctttctgcaccaat

SEQ ID NO: 275978 - DNA, 15 bp, Homo sapiens
ttctttctgcaccaa

SEQ ID NO: 275979 - DNA, 15 bp, Homo sapiens
cttctttctgcacca

SEQ ID NO: 275980 - DNA, 15 bp, Homo sapiens
tcttctttctgcacc

SEQ ID NO: 275981 - DNA, 15 bp, Homo sapiens
ttcttctttctgcac

SEQ ID NO: 275982 - DNA, 15 bp, Homo sapiens
cttcttctttctgca

SEQ ID NO: 275983 - DNA, 15 bp, Homo sapiens
ccttcttctttctgc

SEQ ID NO: 275984 - DNA, 15 bp, Homo sapiens
accttcttctttctg

SEQ ID NO: 275985 - DNA, 15 bp, Homo sapiens
caccttcttctttct

SEQ ID NO: 275986 - DNA, 15 bp, Homo sapiens
acaccttcttctttc

SEQ ID NO: 275987 - DNA, 15 bp, Homo sapiens
tacaccttcttcttt

SEQ ID NO: 275988 - DNA, 15 bp, Homo sapiens
atacaccttcttctt

SEQ ID NO: 275989 - DNA, 15 bp, Homo sapiens
catacaccttcttct

SEQ ID NO: 275990 - DNA, 15 bp, Homo sapiens
acatacaccttcttc

SEQ ID NO: 275991 - DNA, 15 bp, Homo sapiens
cacatacaccttctt

SEQ ID NO: 275992 - DNA, 15 bp, Homo sapiens
tcacatacaccttct

SEQ ID NO: 275993 - DNA, 15 bp, Homo sapiens
ttcacatacaccttc

SEQ ID NO: 275994 - DNA, 15 bp, Homo sapiens
cttcacatacacctt

SEQ ID NO: 275995 - DNA, 15 bp, Homo sapiens
tcttcacatacacct

SEQ ID NO: 275996 - DNA, 15 bp, Homo sapiens
ttcttcacatacacc

SEQ ID NO: 275997 - DNA, 15 bp, Homo sapiens
tttcttcacatacac

SEQ ID NO: 275998 - DNA, 15 bp, Homo sapiens
ctttcttcacataca

SEQ ID NO: 275999 - DNA, 15 bp, Homo sapiens
tctttcttcacatac

SEQ ID NO: 276000 - DNA, 15 bp, Homo sapiens
ttctttcttcacata

SEQ ID NO: 276001 - DNA, 15 bp, Homo sapiens
tttctttcttcacat

SEQ ID NO: 276002 - DNA, 15 bp, Homo sapiens
ttttctttcttcaca

SEQ ID NO: 276003 - DNA, 15 bp, Homo sapiens
attttctttcttcac

SEQ ID NO: 276004 - DNA, 15 bp, Homo sapiens
cattttctttcttca

SEQ ID NO: 276005 - DNA, 15 bp, Homo sapiens
ccattttctttcttc

SEQ ID NO: 276006 - DNA, 15 bp, Homo sapiens
tccattttctttctt

SEQ ID NO: 276007 - DNA, 15 bp, Homo sapiens
gtccattttctttct

SEQ ID NO: 276008 - DNA, 15 bp, Homo sapiens
tgtccattttctttc

SEQ ID NO: 276009 - DNA, 15 bp, Homo sapiens
atgtccattttcttt

SEQ ID NO: 276010 - DNA, 15 bp, Homo sapiens
aatgtccattttctt

SEQ ID NO: 276011 - DNA, 15 bp, Homo sapiens
aaatgtccattttct

SEQ ID NO: 276012 - DNA, 15 bp, Homo sapiens
taaatgtccattttc

SEQ ID NO: 276013 - DNA, 15 bp, Homo sapiens
gtaaatgtccatttt

SEQ ID NO: 276014 - DNA, 15 bp, Homo sapiens
agtaaatgtccattt

SEQ ID NO: 276015 - DNA, 15 bp, Homo sapiens
cagtaaatgtccatt

SEQ ID NO: 276016 - DNA, 15 bp, Homo sapiens
tcagtaaatgtccat

SEQ ID NO: 276017 - DNA, 15 bp, Homo sapiens
gtcagtaaatgtcca

SEQ ID NO: 276018 - DNA, 15 bp, Homo sapiens
agtcagtaaatgtcc

SEQ ID NO: 276019 - DNA, 15 bp, Homo sapiens
tagtcagtaaatgtc

SEQ ID NO: 276020 - DNA, 15 bp, Homo sapiens
atagtcagtaaatgt

SEQ ID NO: 276021 - DNA, 15 bp, Homo sapiens
aatagtcagtaaatg

SEQ ID NO: 276022 - DNA, 15 bp, Homo sapiens
gaatagtcagtaaat

SEQ ID NO: 276023 - DNA, 15 bp, Homo sapiens
agaatagtcagtaaa

SEQ ID NO: 276024 - DNA, 15 bp, Homo sapiens
cagaatagtcagtaa

SEQ ID NO: 276025 - DNA, 15 bp, Homo sapiens
gcagaatagtcagta

SEQ ID NO: 276026 - DNA, 15 bp, Homo sapiens
tgcagaatagtcagt

SEQ ID NO: 276027 - DNA, 15 bp, Homo sapiens
ttgcagaatagtcag

SEQ ID NO: 276028 - DNA, 15 bp, Homo sapiens
gttgcagaatagtca

SEQ ID NO: 276029 - DNA, 15 bp, Homo sapiens
tgttgcagaatagtc

SEQ ID NO: 276030 - DNA, 15 bp, Homo sapiens
gtgttgcagaatagt

SEQ ID NO: 276031 - DNA, 15 bp, Homo sapiens
tgtgttgcagaatag

SEQ ID NO: 276032 - DNA, 15 bp, Homo sapiens
ctgtgttgcagaata

SEQ ID NO: 276033 - DNA, 15 bp, Homo sapiens
gctgtgttgcagaat

SEQ ID NO: 276034 - DNA, 15 bp, Homo sapiens
ggctgtgttgcagaa

SEQ ID NO: 276035 - DNA, 15 bp, Homo sapiens
aggctgtgttgcaga

SEQ ID NO: 276036 - DNA, 15 bp, Homo sapiens
caggctgtgttgcag

SEQ ID NO: 276037 - DNA, 15 bp, Homo sapiens
acaggctgtgttgca

SEQ ID NO: 276038 - DNA, 15 bp, Homo sapiens
cacaggctgtgttgc

SEQ ID NO: 276039 - DNA, 15 bp, Homo sapiens
gcacaggctgtgttg

SEQ ID NO: 276040 - DNA, 15 bp, Homo sapiens
tgcacaggctgtgtt

SEQ ID NO: 276041 - DNA, 15 bp, Homo sapiens
ctgcacaggctgtgt

SEQ ID NO: 276042 - DNA, 15 bp, Homo sapiens
actgcacaggctgtg

SEQ ID NO: 276043 - DNA, 15 bp, Homo sapiens
cactgcacaggctgt

SEQ ID NO: 276044 - DNA, 15 bp, Homo sapiens
acactgcacaggctg

SEQ ID NO: 276045 - DNA, 15 bp, Homo sapiens
cacactgcacaggct

SEQ ID NO: 276046 - DNA, 15 bp, Homo sapiens
acacactgcacaggc

SEQ ID NO: 276047 - DNA, 15 bp, Homo sapiens
aacacactgcacagg

SEQ ID NO: 276048 - DNA, 15 bp, Homo sapiens
taacacactgcacag

SEQ ID NO: 276049 - DNA, 15 bp, Homo sapiens
ctaacacactgcaca

SEQ ID NO: 276050 - DNA, 15 bp, Homo sapiens
cctaacacactgcac

SEQ ID NO: 276051 - DNA, 15 bp, Homo sapiens
tcctaacacactgca

SEQ ID NO: 276052 - DNA, 15 bp, Homo sapiens
atcctaacacactgc

SEQ ID NO: 276053 - DNA, 15 bp, Homo sapiens
tatcctaacacactg

SEQ ID NO: 276054 - DNA, 15 bp, Homo sapiens
gtatcctaacacact

SEQ ID NO: 276055 - DNA, 15 bp, Homo sapiens
tgtatcctaacacac

SEQ ID NO: 276056 - DNA, 15 bp, Homo sapiens
gtgtatcctaacaca

SEQ ID NO: 276057 - DNA, 15 bp, Homo sapiens
tgtgtatcctaacac

SEQ ID NO: 276058 - DNA, 15 bp, Homo sapiens
gtgtgtatcctaaca

SEQ ID NO: 276059 - DNA, 15 bp, Homo sapiens
ggtgtgtatcctaac

SEQ ID NO: 276060 - DNA, 15 bp, Homo sapiens
gggtgtgtatcctaa

SEQ ID NO: 276061 - DNA, 15 bp, Homo sapiens
tgggtgtgtatccta

SEQ ID NO: 276062 - DNA, 15 bp, Homo sapiens
ttgggtgtgtatcct

SEQ ID NO: 276063 - DNA, 15 bp, Homo sapiens
gttgggtgtgtatcc

SEQ ID NO: 276064 - DNA, 15 bp, Homo sapiens
tgttgggtgtgtatc

SEQ ID NO: 276065 - DNA, 15 bp, Homo sapiens
atgttgggtgtgtat

SEQ ID NO: 276066 - DNA, 15 bp, Homo sapiens
gatgttgggtgtgta

SEQ ID NO: 276067 - DNA, 15 bp, Homo sapiens
agatgttgggtgtgt

SEQ ID NO: 276068 - DNA, 15 bp, Homo sapiens
gagatgttgggtgtg

SEQ ID NO: 276069 - DNA, 15 bp, Homo sapiens
ggagatgttgggtgt

SEQ ID NO: 276070 - DNA, 15 bp, Homo sapiens
aggagatgttgggtg

SEQ ID NO: 276071 - DNA, 15 bp, Homo sapiens
aaggagatgttgggt

SEQ ID NO: 276072 - DNA, 15 bp, Homo sapiens
aaaggagatgttggg

SEQ ID NO: 276073 - DNA, 15 bp, Homo sapiens
taaaggagatgttgg

SEQ ID NO: 276074 - DNA, 15 bp, Homo sapiens
ttaaaggagatgttg

SEQ ID NO: 276075 - DNA, 15 bp, Homo sapiens
gttaaaggagatgtt

SEQ ID NO: 276076 - DNA, 15 bp, Homo sapiens
agttaaaggagatgt

SEQ ID NO: 276077 - DNA, 15 bp, Homo sapiens
gagttaaaggagatg

SEQ ID NO: 276078 - DNA, 15 bp, Homo sapiens
tgagttaaaggagat

SEQ ID NO: 276079 - DNA, 15 bp, Homo sapiens
atgagttaaaggaga

SEQ ID NO: 276080 - DNA, 15 bp, Homo sapiens
gatgagttaaaggag

SEQ ID NO: 276081 - DNA, 15 bp, Homo sapiens
agatgagttaaagga

SEQ ID NO: 276082 - DNA, 15 bp, Homo sapiens
cagatgagttaaagg

SEQ ID NO: 276083 - DNA, 15 bp, Homo sapiens
acagatgagttaaag

SEQ ID NO: 276084 - DNA, 15 bp, Homo sapiens
aacagatgagttaaa

SEQ ID NO: 276085 - DNA, 15 bp, Homo sapiens
caacagatgagttaa

SEQ ID NO: 276086 - DNA, 15 bp, Homo sapiens
gcaacagatgagtta

SEQ ID NO: 276087 - DNA, 15 bp, Homo sapiens
ggcaacagatgagtt

SEQ ID NO: 276088 - DNA, 15 bp, Homo sapiens
cggcaacagatgagt

SEQ ID NO: 276089 - DNA, 15 bp, Homo sapiens
gcggcaacagatgag

SEQ ID NO: 276090 - DNA, 15 bp, Homo sapiens
tgcggcaacagatga

SEQ ID NO: 276091 - DNA, 15 bp, Homo sapiens
ctgcggcaacagatg

SEQ ID NO: 276092 - DNA, 15 bp, Homo sapiens
tctgcggcaacagat

SEQ ID NO: 276093 - DNA, 15 bp, Homo sapiens
gtctgcggcaacaga

SEQ ID NO: 276094 - DNA, 15 bp, Homo sapiens
agtctgcggcaacag

SEQ ID NO: 276095 - DNA, 15 bp, Homo sapiens
tagtctgcggcaaca

SEQ ID NO: 276096 - DNA, 15 bp, Homo sapiens
ctagtctgcggcaac

SEQ ID NO: 276097 - DNA, 15 bp, Homo sapiens
actagtctgcggcaa

SEQ ID NO: 276098 - DNA, 15 bp, Homo sapiens
gactagtctgcggca

SEQ ID NO: 276099 - DNA, 15 bp, Homo sapiens
tgactagtctgcggc

SEQ ID NO: 276100 - DNA, 15 bp, Homo sapiens
ttgactagtctgcgg

SEQ ID NO: 276101 - DNA, 15 bp, Homo sapiens
attgactagtctgcg

SEQ ID NO: 276102 - DNA, 15 bp, Homo sapiens
cattgactagtctgc

SEQ ID NO: 276103 - DNA, 15 bp, Homo sapiens
ccattgactagtctg

SEQ ID NO: 276104 - DNA, 15 bp, Homo sapiens
cccattgactagtct

SEQ ID NO: 276105 - DNA, 15 bp, Homo sapiens
tcccattgactagtc

SEQ ID NO: 276106 - DNA, 15 bp, Homo sapiens
ctcccattgactagt

SEQ ID NO: 276107 - DNA, 15 bp, Homo sapiens
gctcccattgactag

SEQ ID NO: 276108 - DNA, 15 bp, Homo sapiens
tgctcccattgacta

SEQ ID NO: 276109 - DNA, 15 bp, Homo sapiens
gtgctcccattgact

SEQ ID NO: 276110 - DNA, 15 bp, Homo sapiens
ggtgctcccattgac

SEQ ID NO: 276111 - DNA, 15 bp, Homo sapiens
tggtgctcccattga

SEQ ID NO: 276112 - DNA, 15 bp, Homo sapiens
ttggtgctcccattg

SEQ ID NO: 276113 - DNA, 15 bp, Homo sapiens
tttggtgctcccatt

SEQ ID NO: 276114 - DNA, 15 bp, Homo sapiens
ttttggtgctcccat

SEQ ID NO: 276115 - DNA, 15 bp, Homo sapiens
tttttggtgctccca

SEQ ID NO: 276116 - DNA, 15 bp, Homo sapiens
gtttttggtgctccc

SEQ ID NO: 276117 - DNA, 15 bp, Homo sapiens
agtttttggtgctcc

SEQ ID NO: 276118 - DNA, 15 bp, Homo sapiens
tagtttttggtgctc

SEQ ID NO: 276119 - DNA, 15 bp, Homo sapiens
ctagtttttggtgct

SEQ ID NO: 276120 - DNA, 15 bp, Homo sapiens
cctagtttttggtgc

SEQ ID NO: 276121 - DNA, 15 bp, Homo sapiens
acctagtttttggtg

SEQ ID NO: 276122 - DNA, 15 bp, Homo sapiens
tacctagtttttggt

SEQ ID NO: 276123 - DNA, 15 bp, Homo sapiens
ttacctagtttttgg

SEQ ID NO: 276124 - DNA, 15 bp, Homo sapiens
tttacctagtttttg

SEQ ID NO: 276125 - DNA, 15 bp, Homo sapiens
ctttacctagttttt

SEQ ID NO: 276126 - DNA, 15 bp, Homo sapiens
cctttacctagtttt

SEQ ID NO: 276127 - DNA, 15 bp, Homo sapiens
gcctttacctagttt

SEQ ID NO: 276128 - DNA, 15 bp, Homo sapiens
agcctttacctagtt

SEQ ID NO: 276129 - DNA, 15 bp, Homo sapiens
cagcctttacctagt

SEQ ID NO: 276130 - DNA, 15 bp, Homo sapiens
ccagcctttacctag

SEQ ID NO: 276131 - DNA, 15 bp, Homo sapiens
accagcctttaccta

SEQ ID NO: 276132 - DNA, 15 bp, Homo sapiens
taccagcctttacct

SEQ ID NO: 276133 - DNA, 15 bp, Homo sapiens
ctaccagcctttacc

SEQ ID NO: 276134 - DNA, 15 bp, Homo sapiens
actaccagcctttac

SEQ ID NO: 276135 - DNA, 15 bp, Homo sapiens
aactaccagccttta

SEQ ID NO: 276136 - DNA, 15 bp, Homo sapiens
caactaccagccttt

SEQ ID NO: 276137 - DNA, 15 bp, Homo sapiens
tcaactaccagcctt

SEQ ID NO: 276138 - DNA, 15 bp, Homo sapiens
ttcaactaccagcct

SEQ ID NO: 276139 - DNA, 15 bp, Homo sapiens
gttcaactaccagcc

SEQ ID NO: 276140 - DNA, 15 bp, Homo sapiens
agttcaactaccagc

SEQ ID NO: 276141 - DNA, 15 bp, Homo sapiens
tagttcaactaccag

SEQ ID NO: 276142 - DNA, 15 bp, Homo sapiens
ttagttcaactacca

SEQ ID NO: 276143 - DNA, 15 bp, Homo sapiens
cttagttcaactacc

SEQ ID NO: 276144 - DNA, 15 bp, Homo sapiens
acttagttcaactac

SEQ ID NO: 276145 - DNA, 15 bp, Homo sapiens
gacttagttcaacta

SEQ ID NO: 276146 - DNA, 15 bp, Homo sapiens
agacttagttcaact

SEQ ID NO: 276147 - DNA, 15 bp, Homo sapiens
cagacttagttcaac

SEQ ID NO: 276148 - DNA, 15 bp, Homo sapiens
acagacttagttcaa

SEQ ID NO: 276149 - DNA, 15 bp, Homo sapiens
aacagacttagttca

SEQ ID NO: 276150 - DNA, 15 bp, Homo sapiens
aaacagacttagttc

SEQ ID NO: 276151 - DNA, 15 bp, Homo sapiens
caaacagacttagtt

SEQ ID NO: 276152 - DNA, 15 bp, Homo sapiens
ccaaacagacttagt

SEQ ID NO: 276153 - DNA, 15 bp, Homo sapiens
gccaaacagacttag

SEQ ID NO: 276154 - DNA, 15 bp, Homo sapiens
agccaaacagactta

SEQ ID NO: 276155 - DNA, 15 bp, Homo sapiens
gagccaaacagactt

SEQ ID NO: 276156 - DNA, 15 bp, Homo sapiens
ggagccaaacagact

SEQ ID NO: 276157 - DNA, 15 bp, Homo sapiens
tggagccaaacagac

SEQ ID NO: 276158 - DNA, 15 bp, Homo sapiens
ttggagccaaacaga

SEQ ID NO: 276159 - DNA, 15 bp, Homo sapiens
tttggagccaaacag

SEQ ID NO: 276160 - DNA, 15 bp, Homo sapiens
ctttggagccaaaca

SEQ ID NO: 276161 - DNA, 15 bp, Homo sapiens
gctttggagccaaac

SEQ ID NO: 276162 - DNA, 15 bp, Homo sapiens
agctttggagccaaa

SEQ ID NO: 276163 - DNA, 15 bp, Homo sapiens
aagctttggagccaa

SEQ ID NO: 276164 - DNA, 15 bp, Homo sapiens
taagctttggagcca

SEQ ID NO: 276165 - DNA, 15 bp, Homo sapiens
ataagctttggagcc

SEQ ID NO: 276166 - DNA, 15 bp, Homo sapiens
cataagctttggagc

SEQ ID NO: 276167 - DNA, 15 bp, Homo sapiens
acataagctttggag

SEQ ID NO: 276168 - DNA, 15 bp, Homo sapiens
aacataagctttgga

SEQ ID NO: 276169 - DNA, 15 bp, Homo sapiens
caacataagctttgg

SEQ ID NO: 276170 - DNA, 15 bp, Homo sapiens
ccaacataagctttg

SEQ ID NO: 276171 - DNA, 15 bp, Homo sapiens
gccaacataagcttt

SEQ ID NO: 276172 - DNA, 15 bp, Homo sapiens
tgccaacataagctt

SEQ ID NO: 276173 - DNA, 15 bp, Homo sapiens
gtgccaacataagct

SEQ ID NO: 276174 - DNA, 15 bp, Homo sapiens
ggtgccaacataagc

SEQ ID NO: 276175 - DNA, 15 bp, Homo sapiens
tggtgccaacataag

SEQ ID NO: 276176 - DNA, 15 bp, Homo sapiens
gtggtgccaacataa

SEQ ID NO: 276177 - DNA, 15 bp, Homo sapiens
tgtggtgccaacata

SEQ ID NO: 276178 - DNA, 15 bp, Homo sapiens
ttgtggtgccaacat

SEQ ID NO: 276179 - DNA, 15 bp, Homo sapiens
gttgtggtgccaaca

SEQ ID NO: 276180 - DNA, 15 bp, Homo sapiens
agttgtggtgccaac

SEQ ID NO: 276181 - DNA, 15 bp, Homo sapiens
aagttgtggtgccaa

SEQ ID NO: 276182 - DNA, 15 bp, Homo sapiens
gaagttgtggtgcca

SEQ ID NO: 276183 - DNA, 15 bp, Homo sapiens
agaagttgtggtgcc

SEQ ID NO: 276184 - DNA, 15 bp, Homo sapiens
aagaagttgtggtgc

SEQ ID NO: 276185 - DNA, 15 bp, Homo sapiens
gaagaagttgtggtg

SEQ ID NO: 276186 - DNA, 15 bp, Homo sapiens
ggaagaagttgtggt

SEQ ID NO: 276187 - DNA, 15 bp, Homo sapiens
aggaagaagttgtgg

SEQ ID NO: 276188 - DNA, 15 bp, Homo sapiens
taggaagaagttgtg

SEQ ID NO: 276189 - DNA, 15 bp, Homo sapiens
ttaggaagaagttgt

SEQ ID NO: 276190 - DNA, 15 bp, Homo sapiens
cttaggaagaagttg

SEQ ID NO: 276191 - DNA, 15 bp, Homo sapiens
tcttaggaagaagtt

SEQ ID NO: 276192 - DNA, 15 bp, Homo sapiens
gtcttaggaagaagt

SEQ ID NO: 276193 - DNA, 15 bp, Homo sapiens
cgtcttaggaagaag

SEQ ID NO: 276194 - DNA, 15 bp, Homo sapiens
tcgtcttaggaagaa

SEQ ID NO: 276195 - DNA, 15 bp, Homo sapiens
ttcgtcttaggaaga

SEQ ID NO: 276196 - DNA, 15 bp, Homo sapiens
cttcgtcttaggaag

SEQ ID NO: 276197 - DNA, 15 bp, Homo sapiens
ccttcgtcttaggaa

SEQ ID NO: 276198 - DNA, 15 bp, Homo sapiens
accttcgtcttagga

SEQ ID NO: 276199 - DNA, 15 bp, Homo sapiens
aaccttcgtcttagg

SEQ ID NO: 276200 - DNA, 15 bp, Homo sapiens
caaccttcgtcttag

SEQ ID NO: 276201 - DNA, 15 bp, Homo sapiens
ccaaccttcgtctta

SEQ ID NO: 276202 - DNA, 15 bp, Homo sapiens
gccaaccttcgtctt

SEQ ID NO: 276203 - DNA, 15 bp, Homo sapiens
ggccaaccttcgtct

SEQ ID NO: 276204 - DNA, 15 bp, Homo sapiens
aggccaaccttcgtc

SEQ ID NO: 276205 - DNA, 15 bp, Homo sapiens
aaggccaaccttcgt

SEQ ID NO: 276206 - DNA, 15 bp, Homo sapiens
gaaggccaaccttcg

SEQ ID NO: 276207 - DNA, 15 bp, Homo sapiens
tgaaggccaaccttc

SEQ ID NO: 276208 - DNA, 15 bp, Homo sapiens
gtgaaggccaacctt

SEQ ID NO: 276209 - DNA, 15 bp, Homo sapiens
agtgaaggccaacct

SEQ ID NO: 276210 - DNA, 15 bp, Homo sapiens
cagtgaaggccaacc

SEQ ID NO: 276211 - DNA, 15 bp, Homo sapiens
ccagtgaaggccaac

SEQ ID NO: 276212 - DNA, 15 bp, Homo sapiens
accagtgaaggccaa

SEQ ID NO: 276213 - DNA, 15 bp, Homo sapiens
gaccagtgaaggcca

SEQ ID NO: 276214 - DNA, 15 bp, Homo sapiens
agaccagtgaaggcc

SEQ ID NO: 276215 - DNA, 15 bp, Homo sapiens
cagaccagtgaaggc

SEQ ID NO: 276216 - DNA, 15 bp, Homo sapiens
tcagaccagtgaagg

SEQ ID NO: 276217 - DNA, 15 bp, Homo sapiens
gtcagaccagtgaag

SEQ ID NO: 276218 - DNA, 15 bp, Homo sapiens
agtcagaccagtgaa

SEQ ID NO: 276219 - DNA, 15 bp, Homo sapiens
gagtcagaccagtga

SEQ ID NO: 276220 - DNA, 15 bp, Homo sapiens
tgagtcagaccagtg

SEQ ID NO: 276221 - DNA, 15 bp, Homo sapiens
ttgagtcagaccagt

SEQ ID NO: 276222 - DNA, 15 bp, Homo sapiens
tttgagtcagaccag

SEQ ID NO: 276223 - DNA, 15 bp, Homo sapiens
ttttgagtcagacca

SEQ ID NO: 276224 - DNA, 15 bp, Homo sapiens
cttttgagtcagacc

SEQ ID NO: 276225 - DNA, 15 bp, Homo sapiens
acttttgagtcagac

SEQ ID NO: 276226 - DNA, 15 bp, Homo sapiens
tacttttgagtcaga

SEQ ID NO: 276227 - DNA, 15 bp, Homo sapiens
ctacttttgagtcag

SEQ ID NO: 276228 - DNA, 15 bp, Homo sapiens
tctacttttgagtca

SEQ ID NO: 276229 - DNA, 15 bp, Homo sapiens
ctctacttttgagtc

SEQ ID NO: 276230 - DNA, 15 bp, Homo sapiens
tctctacttttgagt

SEQ ID NO: 276231 - DNA, 15 bp, Homo sapiens
ttctctacttttgag

SEQ ID NO: 276232 - DNA, 15 bp, Homo sapiens
gttctctacttttga

SEQ ID NO: 276233 - DNA, 15 bp, Homo sapiens
tgttctctacttttg

SEQ ID NO: 276234 - DNA, 15 bp, Homo sapiens
atgttctctactttt

SEQ ID NO: 276235 - DNA, 15 bp, Homo sapiens
aatgttctctacttt

SEQ ID NO: 276236 - DNA, 15 bp, Homo sapiens
aaatgttctctactt

SEQ ID NO: 276237 - DNA, 15 bp, Homo sapiens
taaatgttctctact

SEQ ID NO: 276238 - DNA, 15 bp, Homo sapiens
gtaaatgttctctac

SEQ ID NO: 276239 - DNA, 15 bp, Homo sapiens
agtaaatgttctcta

SEQ ID NO: 276240 - DNA, 15 bp, Homo sapiens
gagtaaatgttctct

SEQ ID NO: 276241 - DNA, 15 bp, Homo sapiens
agagtaaatgttctc

SEQ ID NO: 276242 - DNA, 15 bp, Homo sapiens
cagagtaaatgttct

SEQ ID NO: 276243 - DNA, 15 bp, Homo sapiens
gcagagtaaatgttc

SEQ ID NO: 276244 - DNA, 15 bp, Homo sapiens
ggcagagtaaatgtt

SEQ ID NO: 276245 - DNA, 15 bp, Homo sapiens
tggcagagtaaatgt

SEQ ID NO: 276246 - DNA, 15 bp, Homo sapiens
ctggcagagtaaatg

SEQ ID NO: 276247 - DNA, 15 bp, Homo sapiens
tctggcagagtaaat

SEQ ID NO: 276248 - DNA, 15 bp, Homo sapiens
ctctggcagagtaaa

SEQ ID NO: 276249 - DNA, 15 bp, Homo sapiens
cctctggcagagtaa

SEQ ID NO: 276250 - DNA, 15 bp, Homo sapiens
gcctctggcagagta

SEQ ID NO: 276251 - DNA, 15 bp, Homo sapiens
tgcctctggcagagt

SEQ ID NO: 276252 - DNA, 15 bp, Homo sapiens
ctgcctctggcagag

SEQ ID NO: 276253 - DNA, 15 bp, Homo sapiens
cctgcctctggcaga

SEQ ID NO: 276254 - DNA, 15 bp, Homo sapiens
tcctgcctctggcag

SEQ ID NO: 276255 - DNA, 15 bp, Homo sapiens
ttcctgcctctggca

SEQ ID NO: 276256 - DNA, 15 bp, Homo sapiens
gttcctgcctctggc

SEQ ID NO: 276257 - DNA, 15 bp, Homo sapiens
tgttcctgcctctgg

SEQ ID NO: 276258 - DNA, 15 bp, Homo sapiens
atgttcctgcctctg

SEQ ID NO: 276259 - DNA, 15 bp, Homo sapiens
tatgttcctgcctct

SEQ ID NO: 276260 - DNA, 15 bp, Homo sapiens
atatgttcctgcctc

SEQ ID NO: 276261 - DNA, 15 bp, Homo sapiens
aatatgttcctgcct

SEQ ID NO: 276262 - DNA, 15 bp, Homo sapiens
gaatatgttcctgcc

SEQ ID NO: 276263 - DNA, 15 bp, Homo sapiens
tgaatatgttcctgc

SEQ ID NO: 276264 - DNA, 15 bp, Homo sapiens
ctgaatatgttcctg

SEQ ID NO: 276265 - DNA, 15 bp, Homo sapiens
gctgaatatgttcct

SEQ ID NO: 276266 - DNA, 15 bp, Homo sapiens
agctgaatatgttcc

SEQ ID NO: 276267 - DNA, 15 bp, Homo sapiens
tagctgaatatgttc

SEQ ID NO: 276268 - DNA, 15 bp, Homo sapiens
ctagctgaatatgtt

SEQ ID NO: 276269 - DNA, 15 bp, Homo sapiens
gctagctgaatatgt

SEQ ID NO: 276270 - DNA, 15 bp, Homo sapiens
agctagctgaatatg

SEQ ID NO: 276271 - DNA, 15 bp, Homo sapiens
aagctagctgaatat

SEQ ID NO: 276272 - DNA, 15 bp, Homo sapiens
gaagctagctgaata

SEQ ID NO: 276273 - DNA, 15 bp, Homo sapiens
tgaagctagctgaat

SEQ ID NO: 276274 - DNA, 15 bp, Homo sapiens
ctgaagctagctgaa

SEQ ID NO: 276275 - DNA, 15 bp, Homo sapiens
cctgaagctagctga

SEQ ID NO: 276276 - DNA, 15 bp, Homo sapiens
ccctgaagctagctg

SEQ ID NO: 276277 - DNA, 15 bp, Homo sapiens
cccctgaagctagct

SEQ ID NO: 276278 - DNA, 15 bp, Homo sapiens
acccctgaagctagc

SEQ ID NO: 276279 - DNA, 15 bp, Homo sapiens
gacccctgaagctag

SEQ ID NO: 276280 - DNA, 15 bp, Homo sapiens
ggacccctgaagcta

SEQ ID NO: 276281 - DNA, 15 bp, Homo sapiens
aggacccctgaagct

SEQ ID NO: 276282 - DNA, 15 bp, Homo sapiens
caggacccctgaagc

SEQ ID NO: 276283 - DNA, 15 bp, Homo sapiens
ccaggacccctgaag

SEQ ID NO: 276284 - DNA, 15 bp, Homo sapiens
accaggacccctgaa

SEQ ID NO: 276285 - DNA, 15 bp, Homo sapiens
caccaggacccctga

SEQ ID NO: 276286 - DNA, 15 bp, Homo sapiens
gcaccaggacccctg

SEQ ID NO: 276287 - DNA, 15 bp, Homo sapiens
agcaccaggacccct

SEQ ID NO: 276288 - DNA, 15 bp, Homo sapiens
tagcaccaggacccc

SEQ ID NO: 276289 - DNA, 15 bp, Homo sapiens
gtagcaccaggaccc

SEQ ID NO: 276290 - DNA, 15 bp, Homo sapiens
tgtagcaccaggacc

SEQ ID NO: 276291 - DNA, 15 bp, Homo sapiens
ttgtagcaccaggac

SEQ ID NO: 276292 - DNA, 15 bp, Homo sapiens
attgtagcaccagga

SEQ ID NO: 276293 - DNA, 15 bp, Homo sapiens
gattgtagcaccagg

SEQ ID NO: 276294 - DNA, 15 bp, Homo sapiens
tgattgtagcaccag

SEQ ID NO: 276295 - DNA, 15 bp, Homo sapiens
gtgattgtagcacca

SEQ ID NO: 276296 - DNA, 15 bp, Homo sapiens
agtgattgtagcacc

SEQ ID NO: 276297 - DNA, 15 bp, Homo sapiens
aagtgattgtagcac

SEQ ID NO: 276298 - DNA, 15 bp, Homo sapiens
caagtgattgtagca

SEQ ID NO: 276299 - DNA, 15 bp, Homo sapiens
acaagtgattgtagc

SEQ ID NO: 276300 - DNA, 15 bp, Homo sapiens
cacaagtgattgtag

SEQ ID NO: 276301 - DNA, 15 bp, Homo sapiens
acacaagtgattgta

SEQ ID NO: 276302 - DNA, 15 bp, Homo sapiens
aacacaagtgattgt

SEQ ID NO: 276303 - DNA, 15 bp, Homo sapiens
aaacacaagtgattg

SEQ ID NO: 276304 - DNA, 15 bp, Homo sapiens
gaaacacaagtgatt

SEQ ID NO: 276305 - DNA, 15 bp, Homo sapiens
agaaacacaagtgat

SEQ ID NO: 276306 - DNA, 15 bp, Homo sapiens
aagaaacacaagtga

SEQ ID NO: 276307 - DNA, 15 bp, Homo sapiens
aaagaaacacaagtg

SEQ ID NO: 276308 - DNA, 15 bp, Homo sapiens
gaaagaaacacaagt

SEQ ID NO: 276309 - DNA, 15 bp, Homo sapiens
agaaagaaacacaag

SEQ ID NO: 276310 - DNA, 15 bp, Homo sapiens
aagaaagaaacacaa

SEQ ID NO: 276311 - DNA, 15 bp, Homo sapiens
aaagaaagaaacaca

SEQ ID NO: 276312 - DNA, 15 bp, Homo sapiens
aaaagaaagaaacac

SEQ ID NO: 276313 - DNA, 15 bp, Homo sapiens
caaaagaaagaaaca

SEQ ID NO: 276314 - DNA, 15 bp, Homo sapiens
acaaaagaaagaaac

SEQ ID NO: 276315 - DNA, 15 bp, Homo sapiens
aacaaaagaaagaaa

SEQ ID NO: 276316 - DNA, 15 bp, Homo sapiens
aaacaaaagaaagaa

SEQ ID NO: 276317 - DNA, 15 bp, Homo sapiens
aaaacaaaagaaaga

SEQ ID NO: 276318 - DNA, 15 bp, Homo sapiens
aaaaacaaaagaaag

SEQ ID NO: 276319 - DNA, 15 bp, Homo sapiens
aaaaaacaaaagaaa

SEQ ID NO: 276320 - DNA, 15 bp, Homo sapiens
aaaaaaacaaaagaa

SEQ ID NO: 276321 - DNA, 15 bp, Homo sapiens
taaaaaaacaaaaga

SEQ ID NO: 276322 - DNA, 15 bp, Homo sapiens
ataaaaaaacaaaag

SEQ ID NO: 276323 - DNA, 15 bp, Homo sapiens
cataaaaaaacaaaa

SEQ ID NO: 276324 - DNA, 15 bp, Homo sapiens
acataaaaaaacaaa

SEQ ID NO: 276325 - DNA, 15 bp, Homo sapiens
gacataaaaaaacaa

SEQ ID NO: 276326 - DNA, 15 bp, Homo sapiens
tgacataaaaaaaca

SEQ ID NO: 276327 - DNA, 15 bp, Homo sapiens
ttgacataaaaaaac

SEQ ID NO: 276328 - DNA, 15 bp, Homo sapiens
tttgacataaaaaaa

SEQ ID NO: 276329 - DNA, 15 bp, Homo sapiens
ttttgacataaaaaa

SEQ ID NO: 276330 - DNA, 15 bp, Homo sapiens
cttttgacataaaaa

SEQ ID NO: 276331 - DNA, 15 bp, Homo sapiens
acttttgacataaaa

SEQ ID NO: 276332 - DNA, 15 bp, Homo sapiens
tacttttgacataaa

SEQ ID NO: 276333 - DNA, 15 bp, Homo sapiens
ttacttttgacataa

SEQ ID NO: 276334 - DNA, 15 bp, Homo sapiens
attacttttgacata

SEQ ID NO: 276335 - DNA, 15 bp, Homo sapiens
aattacttttgacat

SEQ ID NO: 276336 - DNA, 15 bp, Homo sapiens
taattacttttgaca

SEQ ID NO: 276337 - DNA, 15 bp, Homo sapiens
ctaattacttttgac

SEQ ID NO: 276338 - DNA, 15 bp, Homo sapiens
gctaattacttttga

SEQ ID NO: 276339 - DNA, 15 bp, Homo sapiens
tgctaattacttttg

SEQ ID NO: 276340 - DNA, 15 bp, Homo sapiens
ttgctaattactttt

SEQ ID NO: 276341 - DNA, 15 bp, Homo sapiens
tttgctaattacttt

SEQ ID NO: 276342 - DNA, 15 bp, Homo sapiens
ctttgctaattactt

SEQ ID NO: 276343 - DNA, 15 bp, Homo sapiens
tctttgctaattact

SEQ ID NO: 276344 - DNA, 15 bp, Homo sapiens
ttctttgctaattac

SEQ ID NO: 276345 - DNA, 15 bp, Homo sapiens
tttctttgctaatta

SEQ ID NO: 276346 - DNA, 15 bp, Homo sapiens
atttctttgctaatt

SEQ ID NO: 276347 - DNA, 15 bp, Homo sapiens
aatttctttgctaat

SEQ ID NO: 276348 - DNA, 15 bp, Homo sapiens
gaatttctttgctaa

SEQ ID NO: 276349 - DNA, 15 bp, Homo sapiens
agaatttctttgcta

SEQ ID NO: 276350 - DNA, 15 bp, Homo sapiens
cagaatttctttgct

SEQ ID NO: 276351 - DNA, 15 bp, Homo sapiens
acagaatttctttgc

SEQ ID NO: 276352 - DNA, 15 bp, Homo sapiens
aacagaatttctttg

SEQ ID NO: 276353 - DNA, 15 bp, Homo sapiens
aaacagaatttcttt

SEQ ID NO: 276354 - DNA, 15 bp, Homo sapiens
aaaacagaatttctt

SEQ ID NO: 276355 - DNA, 15 bp, Homo sapiens
caaaacagaatttct

SEQ ID NO: 276356 - DNA, 15 bp, Homo sapiens
tcaaaacagaatttc

SEQ ID NO: 276357 - DNA, 15 bp, Homo sapiens
atcaaaacagaattt

SEQ ID NO: 276358 - DNA, 15 bp, Homo sapiens
aatcaaaacagaatt

SEQ ID NO: 276359 - DNA, 15 bp, Homo sapiens
caatcaaaacagaat

SEQ ID NO: 276360 - DNA, 15 bp, Homo sapiens
acaatcaaaacagaa

SEQ ID NO: 276361 - DNA, 15 bp, Homo sapiens
aacaatcaaaacaga

SEQ ID NO: 276362 - DNA, 15 bp, Homo sapiens
aaacaatcaaaacag

SEQ ID NO: 276363 - DNA, 15 bp, Homo sapiens
caaacaatcaaaaca

SEQ ID NO: 276364 - DNA, 15 bp, Homo sapiens
acaaacaatcaaaac

SEQ ID NO: 276365 - DNA, 15 bp, Homo sapiens
aacaaacaatcaaaa

SEQ ID NO: 276366 - DNA, 15 bp, Homo sapiens
aaacaaacaatcaaa

SEQ ID NO: 276367 - DNA, 15 bp, Homo sapiens
aaaacaaacaatcaa

SEQ ID NO: 276368 - DNA, 15 bp, Homo sapiens
taaaacaaacaatca

SEQ ID NO: 276369 - DNA, 15 bp, Homo sapiens
ctaaaacaaacaatc

SEQ ID NO: 276370 - DNA, 15 bp, Homo sapiens
tctaaaacaaacaat

SEQ ID NO: 276371 - DNA, 15 bp, Homo sapiens
ctctaaaacaaacaa

SEQ ID NO: 276372 - DNA, 15 bp, Homo sapiens
tctctaaaacaaaca

SEQ ID NO: 276373 - DNA, 15 bp, Homo sapiens
atctctaaaacaaac

SEQ ID NO: 276374 - DNA, 15 bp, Homo sapiens
catctctaaaacaaa

SEQ ID NO: 276375 - DNA, 15 bp, Homo sapiens
ccatctctaaaacaa

SEQ ID NO: 276376 - DNA, 15 bp, Homo sapiens
cccatctctaaaaca

SEQ ID NO: 276377 - DNA, 15 bp, Homo sapiens
ccccatctctaaaac

SEQ ID NO: 276378 - DNA, 15 bp, Homo sapiens
gaccccatctctaaa

SEQ ID NO: 276379 - DNA, 15 bp, Homo sapiens
agaccccatctctaa

SEQ ID NO: 276380 - DNA, 15 bp, Homo sapiens
gcaagaccccatctc

SEQ ID NO: 276381 - DNA, 15 bp, Homo sapiens
agcaagaccccatct

SEQ ID NO: 276382 - DNA, 15 bp, Homo sapiens
tagcaagaccccatc

SEQ ID NO: 276383 - DNA, 15 bp, Homo sapiens
atagcaagaccccat

SEQ ID NO: 276384 - DNA, 15 bp, Homo sapiens
catagcaagacccca

SEQ ID NO: 276385 - DNA, 15 bp, Homo sapiens
acatagcaagacccc

SEQ ID NO: 276386 - DNA, 15 bp, Homo sapiens
aacatagcaagaccc

SEQ ID NO: 276387 - DNA, 15 bp, Homo sapiens
caacatagcaagacc

SEQ ID NO: 276388 - DNA, 15 bp, Homo sapiens
gcaacatagcaagac

SEQ ID NO: 276389 - DNA, 15 bp, Homo sapiens
ggcaacatagcaaga

SEQ ID NO: 276390 - DNA, 15 bp, Homo sapiens
gggcaacatagcaag

SEQ ID NO: 276391 - DNA, 15 bp, Homo sapiens
ggggcaacatagcaa

SEQ ID NO: 276392 - DNA, 15 bp, Homo sapiens
cggggcaacatagca

SEQ ID NO: 276393 - DNA, 15 bp, Homo sapiens
ccggggcaacatagc

SEQ ID NO: 276394 - DNA, 15 bp, Homo sapiens
gccggggcaacatag

SEQ ID NO: 276395 - DNA, 15 bp, Homo sapiens
agccggggcaacata

SEQ ID NO: 276396 - DNA, 15 bp, Homo sapiens
cagccggggcaacat

SEQ ID NO: 276397 - DNA, 15 bp, Homo sapiens
tcagccggggcaaca

SEQ ID NO: 276398 - DNA, 15 bp, Homo sapiens
ttcagccggggcaac

SEQ ID NO: 276399 - DNA, 15 bp, Homo sapiens
attcagccggggcaa

SEQ ID NO: 276400 - DNA, 15 bp, Homo sapiens
aattcagccggggca

SEQ ID NO: 276401 - DNA, 15 bp, Homo sapiens
aaattcagccggggc

SEQ ID NO: 276402 - DNA, 15 bp, Homo sapiens
caaattcagccgggg

SEQ ID NO: 276403 - DNA, 15 bp, Homo sapiens
tcaaattcagccggg

SEQ ID NO: 276404 - DNA, 15 bp, Homo sapiens
ttcaaattcagccgg

SEQ ID NO: 276405 - DNA, 15 bp, Homo sapiens
gttcaaattcagccg

SEQ ID NO: 276406 - DNA, 15 bp, Homo sapiens
agttcaaattcagcc

SEQ ID NO: 276407 - DNA, 15 bp, Homo sapiens
gagttcaaattcagc

SEQ ID NO: 276408 - DNA, 15 bp, Homo sapiens
ggagttcaaattcag

SEQ ID NO: 276409 - DNA, 15 bp, Homo sapiens
aggagttcaaattca

SEQ ID NO: 276410 - DNA, 15 bp, Homo sapiens
caggagttcaaattc

SEQ ID NO: 276411 - DNA, 15 bp, Homo sapiens
ccaggagttcaaatt

SEQ ID NO: 276412 - DNA, 15 bp, Homo sapiens
cccaggagttcaaat

SEQ ID NO: 276413 - DNA, 15 bp, Homo sapiens
gcccaggagttcaaa

SEQ ID NO: 276414 - DNA, 15 bp, Homo sapiens
ccttgagcccaggag

SEQ ID NO: 276415 - DNA, 15 bp, Homo sapiens
cccttgagcccagga

SEQ ID NO: 276416 - DNA, 15 bp, Homo sapiens
ccccttgagcccagg

SEQ ID NO: 276417 - DNA, 15 bp, Homo sapiens
tccccttgagcccag

SEQ ID NO: 276418 - DNA, 15 bp, Homo sapiens
atccccttgagccca

SEQ ID NO: 276419 - DNA, 15 bp, Homo sapiens
gatccccttgagccc

SEQ ID NO: 276420 - DNA, 15 bp, Homo sapiens
ggatccccttgagcc

SEQ ID NO: 276421 - DNA, 15 bp, Homo sapiens
aggatccccttgagc

SEQ ID NO: 276422 - DNA, 15 bp, Homo sapiens
aaggatccccttgag

SEQ ID NO: 276423 - DNA, 15 bp, Homo sapiens
caaggatccccttga

SEQ ID NO: 276424 - DNA, 15 bp, Homo sapiens
acaaggatccccttg

SEQ ID NO: 276425 - DNA, 15 bp, Homo sapiens
cacaaggatcccctt

SEQ ID NO: 276426 - DNA, 15 bp, Homo sapiens
tcacaaggatcccct

SEQ ID NO: 276427 - DNA, 15 bp, Homo sapiens
ctcacaaggatcccc

SEQ ID NO: 276428 - DNA, 15 bp, Homo sapiens
actcacaaggatccc

SEQ ID NO: 276429 - DNA, 15 bp, Homo sapiens
tactcacaaggatcc

SEQ ID NO: 276430 - DNA, 15 bp, Homo sapiens
ctactcacaaggatc

SEQ ID NO: 276431 - DNA, 15 bp, Homo sapiens
gctactcacaaggat

SEQ ID NO: 276432 - DNA, 15 bp, Homo sapiens
agctactcacaagga

SEQ ID NO: 276433 - DNA, 15 bp, Homo sapiens
cagctactcacaagg

SEQ ID NO: 276434 - DNA, 15 bp, Homo sapiens
ccagctactcacaag

SEQ ID NO: 276435 - DNA, 15 bp, Homo sapiens
cccagctactcacaa

SEQ ID NO: 276436 - DNA, 15 bp, Homo sapiens
tcccagctactcaca

SEQ ID NO: 276437 - DNA, 15 bp, Homo sapiens
gtcccagctactcac

SEQ ID NO: 276438 - DNA, 15 bp, Homo sapiens
tctgtagtcccagct

SEQ ID NO: 276439 - DNA, 15 bp, Homo sapiens
ctctgtagtcccagc

SEQ ID NO: 276440 - DNA, 15 bp, Homo sapiens
gctctgtagtcccag

SEQ ID NO: 276441 - DNA, 15 bp, Homo sapiens
tgctctgtagtccca

SEQ ID NO: 276442 - DNA, 15 bp, Homo sapiens
gtgctctgtagtccc

SEQ ID NO: 276443 - DNA, 15 bp, Homo sapiens
tgtgctctgtagtcc

SEQ ID NO: 276444 - DNA, 15 bp, Homo sapiens
gtgtgctctgtagtc

SEQ ID NO: 276445 - DNA, 15 bp, Homo sapiens
ggtgtgctctgtagt

SEQ ID NO: 276446 - DNA, 15 bp, Homo sapiens
tggtgtgctctgtag

SEQ ID NO: 276447 - DNA, 15 bp, Homo sapiens
gtggtgtgctctgta

SEQ ID NO: 276448 - DNA, 15 bp, Homo sapiens
ggtggtgtgctctgt

SEQ ID NO: 276449 - DNA, 15 bp, Homo sapiens
gggtggtgtgctctg

SEQ ID NO: 276450 - DNA, 15 bp, Homo sapiens
cgggtggtgtgctct

SEQ ID NO: 276451 - DNA, 15 bp, Homo sapiens
gcgggtggtgtgctc

SEQ ID NO: 276452 - DNA, 15 bp, Homo sapiens
ggcgggtggtgtgct

SEQ ID NO: 276453 - DNA, 15 bp, Homo sapiens
gggcgggtggtgtgc

SEQ ID NO: 276454 - DNA, 15 bp, Homo sapiens
tgggcgggtggtgtg

SEQ ID NO: 276455 - DNA, 15 bp, Homo sapiens
ctgggcgggtggtgt

SEQ ID NO: 276456 - DNA, 15 bp, Homo sapiens
gctgggcgggtggtg

SEQ ID NO: 276457 - DNA, 15 bp, Homo sapiens
ggctgggcgggtggt

SEQ ID NO: 276458 - DNA, 15 bp, Homo sapiens
tggctgggcgggtgg

SEQ ID NO: 276459 - DNA, 15 bp, Homo sapiens
gtggctgggcgggtg

SEQ ID NO: 276460 - DNA, 15 bp, Homo sapiens
ggtggctgggcgggt

SEQ ID NO: 276461 - DNA, 15 bp, Homo sapiens
aggtggctgggcggg

SEQ ID NO: 276462 - DNA, 15 bp, Homo sapiens
caggtggctgggcgg

SEQ ID NO: 276463 - DNA, 15 bp, Homo sapiens
acaggtggctgggcg

SEQ ID NO: 276464 - DNA, 15 bp, Homo sapiens
cacaggtggctgggc

SEQ ID NO: 276465 - DNA, 15 bp, Homo sapiens
acacaggtggctggg

SEQ ID NO: 276466 - DNA, 15 bp, Homo sapiens
aacacaggtggctgg

SEQ ID NO: 276467 - DNA, 15 bp, Homo sapiens
aaacacaggtggctg

SEQ ID NO: 276468 - DNA, 15 bp, Homo sapiens
gaaacacaggtggct

SEQ ID NO: 276469 - DNA, 15 bp, Homo sapiens
agaaacacaggtggc

SEQ ID NO: 276470 - DNA, 15 bp, Homo sapiens
aagaaacacaggtgg

SEQ ID NO: 276471 - DNA, 15 bp, Homo sapiens
taagaaacacaggtg

SEQ ID NO: 276472 - DNA, 15 bp, Homo sapiens
ataagaaacacaggt

SEQ ID NO: 276473 - DNA, 15 bp, Homo sapiens
gataagaaacacagg

SEQ ID NO: 276474 - DNA, 15 bp, Homo sapiens
tgataagaaacacag

SEQ ID NO: 276475 - DNA, 15 bp, Homo sapiens
ctgataagaaacaca

SEQ ID NO: 276476 - DNA, 15 bp, Homo sapiens
tctgataagaaacac

SEQ ID NO: 276477 - DNA, 15 bp, Homo sapiens
ctctgataagaaaca

SEQ ID NO: 276478 - DNA, 15 bp, Homo sapiens
gctctgataagaaac

SEQ ID NO: 276479 - DNA, 15 bp, Homo sapiens
agctctgataagaaa

SEQ ID NO: 276480 - DNA, 15 bp, Homo sapiens
aagctctgataagaa

SEQ ID NO: 276481 - DNA, 15 bp, Homo sapiens
gaagctctgataaga

SEQ ID NO: 276482 - DNA, 15 bp, Homo sapiens
agaagctctgataag

SEQ ID NO: 276483 - DNA, 15 bp, Homo sapiens
tagaagctctgataa

SEQ ID NO: 276484 - DNA, 15 bp, Homo sapiens
atagaagctctgata

SEQ ID NO: 276485 - DNA, 15 bp, Homo sapiens
gatagaagctctgat

SEQ ID NO: 276486 - DNA, 15 bp, Homo sapiens
agatagaagctctga

SEQ ID NO: 276487 - DNA, 15 bp, Homo sapiens
gagatagaagctctg

SEQ ID NO: 276488 - DNA, 15 bp, Homo sapiens
agagatagaagctct

SEQ ID NO: 276489 - DNA, 15 bp, Homo sapiens
aagagatagaagctc

SEQ ID NO: 276490 - DNA, 15 bp, Homo sapiens
aaagagatagaagct

SEQ ID NO: 276491 - DNA, 15 bp, Homo sapiens
caaagagatagaagc

SEQ ID NO: 276492 - DNA, 15 bp, Homo sapiens
acaaagagatagaag

SEQ ID NO: 276493 - DNA, 15 bp, Homo sapiens
aacaaagagatagaa

SEQ ID NO: 276494 - DNA, 15 bp, Homo sapiens
caacaaagagataga

SEQ ID NO: 276495 - DNA, 15 bp, Homo sapiens
acaacaaagagatag

SEQ ID NO: 276496 - DNA, 15 bp, Homo sapiens
aacaacaaagagata

SEQ ID NO: 276497 - DNA, 15 bp, Homo sapiens
caacaacaaagagat

SEQ ID NO: 276498 - DNA, 15 bp, Homo sapiens
gcaacaacaaagaga

SEQ ID NO: 276499 - DNA, 15 bp, Homo sapiens
tgcaacaacaaagag

SEQ ID NO: 276500 - DNA, 15 bp, Homo sapiens
ctgcaacaacaaaga

SEQ ID NO: 276501 - DNA, 15 bp, Homo sapiens
tctgcaacaacaaag

SEQ ID NO: 276502 - DNA, 15 bp, Homo sapiens
atctgcaacaacaaa

SEQ ID NO: 276503 - DNA, 15 bp, Homo sapiens
aatctgcaacaacaa

SEQ ID NO: 276504 - DNA, 15 bp, Homo sapiens
caatctgcaacaaca

SEQ ID NO: 276505 - DNA, 15 bp, Homo sapiens
ccaatctgcaacaac

SEQ ID NO: 276506 - DNA, 15 bp, Homo sapiens
tccaatctgcaacaa

SEQ ID NO: 276507 - DNA, 15 bp, Homo sapiens
ctccaatctgcaaca

SEQ ID NO: 276508 - DNA, 15 bp, Homo sapiens
gctccaatctgcaac

SEQ ID NO: 276509 - DNA, 15 bp, Homo sapiens
ggctccaatctgcaa

SEQ ID NO: 276510 - DNA, 15 bp, Homo sapiens
aggctccaatctgca

SEQ ID NO: 276511 - DNA, 15 bp, Homo sapiens
caggctccaatctgc

SEQ ID NO: 276512 - DNA, 15 bp, Homo sapiens
ccaggctccaatctg

SEQ ID NO: 276513 - DNA, 15 bp, Homo sapiens
cccaggctccaatct

SEQ ID NO: 276514 - DNA, 15 bp, Homo sapiens
tcccaggctccaatc

SEQ ID NO: 276515 - DNA, 15 bp, Homo sapiens
ctcccaggctccaat

SEQ ID NO: 276516 - DNA, 15 bp, Homo sapiens
cctcccaggctccaa

SEQ ID NO: 276517 - DNA, 15 bp, Homo sapiens
gcctcccaggctcca

SEQ ID NO: 276518 - DNA, 15 bp, Homo sapiens
agcctcccaggctcc

SEQ ID NO: 276519 - DNA, 15 bp, Homo sapiens
cagcctcccaggctc

SEQ ID NO: 276520 - DNA, 15 bp, Homo sapiens
ccagcctcccaggct

SEQ ID NO: 276521 - DNA, 15 bp, Homo sapiens
cccagcctcccaggc

SEQ ID NO: 276522 - DNA, 15 bp, Homo sapiens
ccccagcctcccagg

SEQ ID NO: 276523 - DNA, 15 bp, Homo sapiens
cccccagcctcccag

SEQ ID NO: 276524 - DNA, 15 bp, Homo sapiens
gcccccagcctccca

SEQ ID NO: 276525 - DNA, 15 bp, Homo sapiens
agcccccagcctccc

SEQ ID NO: 276526 - DNA, 15 bp, Homo sapiens
cagcccccagcctcc

SEQ ID NO: 276527 - DNA, 15 bp, Homo sapiens
ccagcccccagcctc

SEQ ID NO: 276528 - DNA, 15 bp, Homo sapiens
cccagcccccagcct

SEQ ID NO: 276529 - DNA, 15 bp, Homo sapiens
ccccagcccccagcc

SEQ ID NO: 276530 - DNA, 15 bp, Homo sapiens
tccccagcccccagc

SEQ ID NO: 276531 - DNA, 15 bp, Homo sapiens
ctccccagcccccag

SEQ ID NO: 276532 - DNA, 15 bp, Homo sapiens
tctccccagccccca

SEQ ID NO: 276533 - DNA, 15 bp, Homo sapiens
atctccccagccccc

SEQ ID NO: 276534 - DNA, 15 bp, Homo sapiens
tatctccccagcccc

SEQ ID NO: 276535 - DNA, 15 bp, Homo sapiens
ctatctccccagccc

SEQ ID NO: 276536 - DNA, 15 bp, Homo sapiens
actatctccccagcc

SEQ ID NO: 276537 - DNA, 15 bp, Homo sapiens
gactatctccccagc

SEQ ID NO: 276538 - DNA, 15 bp, Homo sapiens
tgactatctccccag

SEQ ID NO: 276539 - DNA, 15 bp, Homo sapiens
ctgactatctcccca

SEQ ID NO: 276540 - DNA, 15 bp, Homo sapiens
cctgactatctcccc

SEQ ID NO: 276541 - DNA, 15 bp, Homo sapiens
tcctgactatctccc

SEQ ID NO: 276542 - DNA, 15 bp, Homo sapiens
gtcctgactatctcc

SEQ ID NO: 276543 - DNA, 15 bp, Homo sapiens
ggtcctgactatctc

SEQ ID NO: 276544 - DNA, 15 bp, Homo sapiens
gggtcctgactatct

SEQ ID NO: 276545 - DNA, 15 bp, Homo sapiens
ggggtcctgactatc

SEQ ID NO: 276546 - DNA, 15 bp, Homo sapiens
aggggtcctgactat

SEQ ID NO: 276547 - DNA, 15 bp, Homo sapiens
taggggtcctgacta

SEQ ID NO: 276548 - DNA, 15 bp, Homo sapiens
ctaggggtcctgact

SEQ ID NO: 276549 - DNA, 15 bp, Homo sapiens
tctaggggtcctgac

SEQ ID NO: 276550 - DNA, 15 bp, Homo sapiens
ttctaggggtcctga

SEQ ID NO: 276551 - DNA, 15 bp, Homo sapiens
cttctaggggtcctg

SEQ ID NO: 276552 - DNA, 15 bp, Homo sapiens
ccttctaggggtcct

SEQ ID NO: 276553 - DNA, 15 bp, Homo sapiens
cccttctaggggtcc

SEQ ID NO: 276554 - DNA, 15 bp, Homo sapiens
gcccttctaggggtc

SEQ ID NO: 276555 - DNA, 15 bp, Homo sapiens
tgcccttctaggggt

SEQ ID NO: 276556 - DNA, 15 bp, Homo sapiens
ctgcccttctagggg

SEQ ID NO: 276557 - DNA, 15 bp, Homo sapiens
cctgcccttctaggg

SEQ ID NO: 276558 - DNA, 15 bp, Homo sapiens
tcctgcccttctagg

SEQ ID NO: 276559 - DNA, 15 bp, Homo sapiens
ttcctgcccttctag

SEQ ID NO: 276560 - DNA, 15 bp, Homo sapiens
cttcctgcccttcta

SEQ ID NO: 276561 - DNA, 15 bp, Homo sapiens
ccttcctgcccttct

SEQ ID NO: 276562 - DNA, 15 bp, Homo sapiens
tccttcctgcccttc

SEQ ID NO: 276563 - DNA, 15 bp, Homo sapiens
atccttcctgccctt

SEQ ID NO: 276564 - DNA, 15 bp, Homo sapiens
catccttcctgccct

SEQ ID NO: 276565 - DNA, 15 bp, Homo sapiens
gcatccttcctgccc

SEQ ID NO: 276566 - DNA, 15 bp, Homo sapiens
tgcatccttcctgcc

SEQ ID NO: 276567 - DNA, 15 bp, Homo sapiens
gtgcatccttcctgc

SEQ ID NO: 276568 - DNA, 15 bp, Homo sapiens
tgtgcatccttcctg

SEQ ID NO: 276569 - DNA, 15 bp, Homo sapiens
ttgtgcatccttcct

SEQ ID NO: 276570 - DNA, 15 bp, Homo sapiens
attgtgcatccttcc

SEQ ID NO: 276571 - DNA, 15 bp, Homo sapiens
aattgtgcatccttc

SEQ ID NO: 276572 - DNA, 15 bp, Homo sapiens
taattgtgcatcctt

SEQ ID NO: 276573 - DNA, 15 bp, Homo sapiens
ataattgtgcatcct

SEQ ID NO: 276574 - DNA, 15 bp, Homo sapiens
aataattgtgcatcc

SEQ ID NO: 276575 - DNA, 15 bp, Homo sapiens
gaataattgtgcatc

SEQ ID NO: 276576 - DNA, 15 bp, Homo sapiens
ggaataattgtgcat

SEQ ID NO: 276577 - DNA, 15 bp, Homo sapiens
tggaataattgtgca

SEQ ID NO: 276578 - DNA, 15 bp, Homo sapiens
gtggaataattgtgc

SEQ ID NO: 276579 - DNA, 15 bp, Homo sapiens
tgtggaataattgtg

SEQ ID NO: 276580 - DNA, 15 bp, Homo sapiens
ctgtggaataattgt

SEQ ID NO: 276581 - DNA, 15 bp, Homo sapiens
tctgtggaataattg

SEQ ID NO: 276582 - DNA, 15 bp, Homo sapiens
ttctgtggaataatt

SEQ ID NO: 276583 - DNA, 15 bp, Homo sapiens
cttctgtggaataat

SEQ ID NO: 276584 - DNA, 15 bp, Homo sapiens
tcttctgtggaataa

SEQ ID NO: 276585 - DNA, 15 bp, Homo sapiens
ttcttctgtggaata

SEQ ID NO: 276586 - DNA, 15 bp, Homo sapiens
cttcttctgtggaat

SEQ ID NO: 276587 - DNA, 15 bp, Homo sapiens
gcttcttctgtggaa

SEQ ID NO: 276588 - DNA, 15 bp, Homo sapiens
ggcttcttctgtgga

SEQ ID NO: 276589 - DNA, 15 bp, Homo sapiens
aggcttcttctgtgg

SEQ ID NO: 276590 - DNA, 15 bp, Homo sapiens
caggcttcttctgtg

SEQ ID NO: 276591 - DNA, 15 bp, Homo sapiens
gcaggcttcttctgt

SEQ ID NO: 276592 - DNA, 15 bp, Homo sapiens
ggcaggcttcttctg

SEQ ID NO: 276593 - DNA, 15 bp, Homo sapiens
aggcaggcttcttct

SEQ ID NO: 276594 - DNA, 15 bp, Homo sapiens
gaggcaggcttcttc

SEQ ID NO: 276595 - DNA, 15 bp, Homo sapiens
agaggcaggcttctt

SEQ ID NO: 276596 - DNA, 15 bp, Homo sapiens
cagaggcaggcttct

SEQ ID NO: 276597 - DNA, 15 bp, Homo sapiens
acagaggcaggcttc

SEQ ID NO: 276598 - DNA, 15 bp, Homo sapiens
aacagaggcaggctt

SEQ ID NO: 276599 - DNA, 15 bp, Homo sapiens
aaacagaggcaggct

SEQ ID NO: 276600 - DNA, 15 bp, Homo sapiens
gaaacagaggcaggc

SEQ ID NO: 276601 - DNA, 15 bp, Homo sapiens
ggaaacagaggcagg

SEQ ID NO: 276602 - DNA, 15 bp, Homo sapiens
gggaaacagaggcag

SEQ ID NO: 276603 - DNA, 15 bp, Homo sapiens
agggaaacagaggca

SEQ ID NO: 276604 - DNA, 15 bp, Homo sapiens
aagggaaacagaggc

SEQ ID NO: 276605 - DNA, 15 bp, Homo sapiens
caagggaaacagagg

SEQ ID NO: 276606 - DNA, 15 bp, Homo sapiens
tcaagggaaacagag

SEQ ID NO: 276607 - DNA, 15 bp, Homo sapiens
atcaagggaaacaga

SEQ ID NO: 276608 - DNA, 15 bp, Homo sapiens
catcaagggaaacag

SEQ ID NO: 276609 - DNA, 15 bp, Homo sapiens
acatcaagggaaaca

SEQ ID NO: 276610 - DNA, 15 bp, Homo sapiens
gacatcaagggaaac

SEQ ID NO: 276611 - DNA, 15 bp, Homo sapiens
tgacatcaagggaaa

SEQ ID NO: 276612 - DNA, 15 bp, Homo sapiens
gtgacatcaagggaa

SEQ ID NO: 276613 - DNA, 15 bp, Homo sapiens
ggtgacatcaaggga

SEQ ID NO: 276614 - DNA, 15 bp, Homo sapiens
aggtgacatcaaggg

SEQ ID NO: 276615 - DNA, 15 bp, Homo sapiens
taggtgacatcaagg

SEQ ID NO: 276616 - DNA, 15 bp, Homo sapiens
ctaggtgacatcaag

SEQ ID NO: 276617 - DNA, 15 bp, Homo sapiens
actaggtgacatcaa

SEQ ID NO: 276618 - DNA, 15 bp, Homo sapiens
gactaggtgacatca

SEQ ID NO: 276619 - DNA, 15 bp, Homo sapiens
tgactaggtgacatc

SEQ ID NO: 276620 - DNA, 15 bp, Homo sapiens
ttgactaggtgacat

SEQ ID NO: 276621 - DNA, 15 bp, Homo sapiens
gttgactaggtgaca

SEQ ID NO: 276622 - DNA, 15 bp, Homo sapiens
tgttgactaggtgac

SEQ ID NO: 276623 - DNA, 15 bp, Homo sapiens
ttgttgactaggtga

SEQ ID NO: 276624 - DNA, 15 bp, Homo sapiens
tttgttgactaggtg

SEQ ID NO: 276625 - DNA, 15 bp, Homo sapiens
ctttgttgactaggt

SEQ ID NO: 276626 - DNA, 15 bp, Homo sapiens
actttgttgactagg

SEQ ID NO: 276627 - DNA, 15 bp, Homo sapiens
gactttgttgactag

SEQ ID NO: 276628 - DNA, 15 bp, Homo sapiens
ggactttgttgacta

SEQ ID NO: 276629 - DNA, 15 bp, Homo sapiens
gggactttgttgact

SEQ ID NO: 276630 - DNA, 15 bp, Homo sapiens
tgggactttgttgac

SEQ ID NO: 276631 - DNA, 15 bp, Homo sapiens
gtgggactttgttga

SEQ ID NO: 276632 - DNA, 15 bp, Homo sapiens
tgtgggactttgttg

SEQ ID NO: 276633 - DNA, 15 bp, Homo sapiens
ctgtgggactttgtt

SEQ ID NO: 276634 - DNA, 15 bp, Homo sapiens
actgtgggactttgt

SEQ ID NO: 276635 - DNA, 15 bp, Homo sapiens
aactgtgggactttg

SEQ ID NO: 276636 - DNA, 15 bp, Homo sapiens
aaactgtgggacttt

SEQ ID NO: 276637 - DNA, 15 bp, Homo sapiens
taaactgtgggactt

SEQ ID NO: 276638 - DNA, 15 bp, Homo sapiens
ataaactgtgggact

SEQ ID NO: 276639 - DNA, 15 bp, Homo sapiens
cataaactgtgggac

SEQ ID NO: 276640 - DNA, 15 bp, Homo sapiens
tcataaactgtggga

SEQ ID NO: 276641 - DNA, 15 bp, Homo sapiens
ctcataaactgtggg

SEQ ID NO: 276642 - DNA, 15 bp, Homo sapiens
actcataaactgtgg

SEQ ID NO: 276643 - DNA, 15 bp, Homo sapiens
aactcataaactgtg

SEQ ID NO: 276644 - DNA, 15 bp, Homo sapiens
aaactcataaactgt

SEQ ID NO: 276645 - DNA, 15 bp, Homo sapiens
taaactcataaactg

SEQ ID NO: 276646 - DNA, 15 bp, Homo sapiens
ttaaactcataaact

SEQ ID NO: 276647 - DNA, 15 bp, Homo sapiens
gttaaactcataaac

SEQ ID NO: 276648 - DNA, 15 bp, Homo sapiens
ggttaaactcataaa

SEQ ID NO: 276649 - DNA, 15 bp, Homo sapiens
aggttaaactcataa

SEQ ID NO: 276650 - DNA, 15 bp, Homo sapiens
taggttaaactcata

SEQ ID NO: 276651 - DNA, 15 bp, Homo sapiens
gtaggttaaactcat

SEQ ID NO: 276652 - DNA, 15 bp, Homo sapiens
tgtaggttaaactca

SEQ ID NO: 276653 - DNA, 15 bp, Homo sapiens
ctgtaggttaaactc

SEQ ID NO: 276654 - DNA, 15 bp, Homo sapiens
tctgtaggttaaact

SEQ ID NO: 276655 - DNA, 15 bp, Homo sapiens
ttctgtaggttaaac

SEQ ID NO: 276656 - DNA, 15 bp, Homo sapiens
tttctgtaggttaaa

SEQ ID NO: 276657 - DNA, 15 bp, Homo sapiens
atttctgtaggttaa

SEQ ID NO: 276658 - DNA, 15 bp, Homo sapiens
aatttctgtaggtta

SEQ ID NO: 276659 - DNA, 15 bp, Homo sapiens
gaatttctgtaggtt

SEQ ID NO: 276660 - DNA, 15 bp, Homo sapiens
agaatttctgtaggt

SEQ ID NO: 276661 - DNA, 15 bp, Homo sapiens
tagaatttctgtagg

SEQ ID NO: 276662 - DNA, 15 bp, Homo sapiens
ttagaatttctgtag

SEQ ID NO: 276663 - DNA, 15 bp, Homo sapiens
attagaatttctgta

SEQ ID NO: 276664 - DNA, 15 bp, Homo sapiens
tattagaatttctgt

SEQ ID NO: 276665 - DNA, 15 bp, Homo sapiens
atattagaatttctg

SEQ ID NO: 276666 - DNA, 15 bp, Homo sapiens
tatattagaatttct

SEQ ID NO: 276667 - DNA, 15 bp, Homo sapiens
gtatattagaatttc

SEQ ID NO: 276668 - DNA, 15 bp, Homo sapiens
ggtatattagaattt

SEQ ID NO: 276669 - DNA, 15 bp, Homo sapiens
aggtatattagaatt

SEQ ID NO: 276670 - DNA, 15 bp, Homo sapiens
caggtatattagaat

SEQ ID NO: 276671 - DNA, 15 bp, Homo sapiens
gcaggtatattagaa

SEQ ID NO: 276672 - DNA, 15 bp, Homo sapiens
ggcaggtatattaga

SEQ ID NO: 276673 - DNA, 15 bp, Homo sapiens
gggcaggtatattag

SEQ ID NO: 276674 - DNA, 15 bp, Homo sapiens
agggcaggtatatta

SEQ ID NO: 276675 - DNA, 15 bp, Homo sapiens
cagggcaggtatatt

SEQ ID NO: 276676 - DNA, 15 bp, Homo sapiens
gcagggcaggtatat

SEQ ID NO: 276677 - DNA, 15 bp, Homo sapiens
tgcagggcaggtata

SEQ ID NO: 276678 - DNA, 15 bp, Homo sapiens
gtgcagggcaggtat

SEQ ID NO: 276679 - DNA, 15 bp, Homo sapiens
tgtgcagggcaggta

SEQ ID NO: 276680 - DNA, 15 bp, Homo sapiens
gtgtgcagggcaggt

SEQ ID NO: 276681 - DNA, 15 bp, Homo sapiens
atgtgtgcagggcag

SEQ ID NO: 276682 - DNA, 15 bp, Homo sapiens
aatgtgtgcagggca

SEQ ID NO: 276683 - DNA, 15 bp, Homo sapiens
gaatgtgtgcagggc

SEQ ID NO: 276684 - DNA, 15 bp, Homo sapiens
agaatgtgtgcaggg

SEQ ID NO: 276685 - DNA, 15 bp, Homo sapiens
cagaatgtgtgcagg

SEQ ID NO: 276686 - DNA, 15 bp, Homo sapiens
gcagaatgtgtgcag

SEQ ID NO: 276687 - DNA, 15 bp, Homo sapiens
agcagaatgtgtgca

SEQ ID NO: 276688 - DNA, 15 bp, Homo sapiens
tagcagaatgtgtgc

SEQ ID NO: 276689 - DNA, 15 bp, Homo sapiens
atagcagaatgtgtg

SEQ ID NO: 276690 - DNA, 15 bp, Homo sapiens
catagcagaatgtgt

SEQ ID NO: 276691 - DNA, 15 bp, Homo sapiens
tcatagcagaatgtg

SEQ ID NO: 276692 - DNA, 15 bp, Homo sapiens
ctcatagcagaatgt

SEQ ID NO: 276693 - DNA, 15 bp, Homo sapiens
tctcatagcagaatg

SEQ ID NO: 276694 - DNA, 15 bp, Homo sapiens
ctctcatagcagaat

SEQ ID NO: 276695 - DNA, 15 bp, Homo sapiens
gctctcatagcagaa

SEQ ID NO: 276696 - DNA, 15 bp, Homo sapiens
ggctctcatagcaga

SEQ ID NO: 276697 - DNA, 15 bp, Homo sapiens
tggctctcatagcag

SEQ ID NO: 276698 - DNA, 15 bp, Homo sapiens
ttggctctcatagca

SEQ ID NO: 276699 - DNA, 15 bp, Homo sapiens
cttggctctcatagc

SEQ ID NO: 276700 - DNA, 15 bp, Homo sapiens
ccttggctctcatag

SEQ ID NO: 276701 - DNA, 15 bp, Homo sapiens
cccttggctctcata

SEQ ID NO: 276702 - DNA, 15 bp, Homo sapiens
tcccttggctctcat

SEQ ID NO: 276703 - DNA, 15 bp, Homo sapiens
atcccttggctctca

SEQ ID NO: 276704 - DNA, 15 bp, Homo sapiens
aatcccttggctctc

SEQ ID NO: 276705 - DNA, 15 bp, Homo sapiens
taatcccttggctct

SEQ ID NO: 276706 - DNA, 15 bp, Homo sapiens
ttaatcccttggctc

SEQ ID NO: 276707 - DNA, 15 bp, Homo sapiens
tttaatcccttggct

SEQ ID NO: 276708 - DNA, 15 bp, Homo sapiens
ctttaatcccttggc

SEQ ID NO: 276709 - DNA, 15 bp, Homo sapiens
tctttaatcccttgg

SEQ ID NO: 276710 - DNA, 15 bp, Homo sapiens
atctttaatcccttg

SEQ ID NO: 276711 - DNA, 15 bp, Homo sapiens
gatctttaatccctt

SEQ ID NO: 276712 - DNA, 15 bp, Homo sapiens
tgatctttaatccct

SEQ ID NO: 276713 - DNA, 15 bp, Homo sapiens
ttgatctttaatccc

SEQ ID NO: 276714 - DNA, 15 bp, Homo sapiens
gttgatctttaatcc

SEQ ID NO: 276715 - DNA, 15 bp, Homo sapiens
tgttgatctttaatc

SEQ ID NO: 276716 - DNA, 15 bp, Homo sapiens
ttgttgatctttaat

SEQ ID NO: 276717 - DNA, 15 bp, Homo sapiens
tttgttgatctttaa

SEQ ID NO: 276718 - DNA, 15 bp, Homo sapiens
ctttgttgatcttta

SEQ ID NO: 276719 - DNA, 15 bp, Homo sapiens
cctttgttgatcttt

SEQ ID NO: 276720 - DNA, 15 bp, Homo sapiens
gcctttgttgatctt

SEQ ID NO: 276721 - DNA, 15 bp, Homo sapiens
agcctttgttgatct

SEQ ID NO: 276722 - DNA, 15 bp, Homo sapiens
aagcctttgttgatc

SEQ ID NO: 276723 - DNA, 15 bp, Homo sapiens
gaagcctttgttgat

SEQ ID NO: 276724 - DNA, 15 bp, Homo sapiens
ggaagcctttgttga

SEQ ID NO: 276725 - DNA, 15 bp, Homo sapiens
cggaagcctttgttg

SEQ ID NO: 276726 - DNA, 15 bp, Homo sapiens
tcggaagcctttgtt

SEQ ID NO: 276727 - DNA, 15 bp, Homo sapiens
ctcggaagcctttgt

SEQ ID NO: 276728 - DNA, 15 bp, Homo sapiens
tctcggaagcctttg

SEQ ID NO: 276729 - DNA, 15 bp, Homo sapiens
ttctcggaagccttt

SEQ ID NO: 276730 - DNA, 15 bp, Homo sapiens
cttctcggaagcctt

SEQ ID NO: 276731 - DNA, 15 bp, Homo sapiens
tcttctcggaagcct

SEQ ID NO: 276732 - DNA, 15 bp, Homo sapiens
ttcttctcggaagcc

SEQ ID NO: 276733 - DNA, 15 bp, Homo sapiens
attcttctcggaagc

SEQ ID NO: 276734 - DNA, 15 bp, Homo sapiens
cattcttctcggaag

SEQ ID NO: 276735 - DNA, 15 bp, Homo sapiens
gcattcttctcggaa

SEQ ID NO: 276736 - DNA, 15 bp, Homo sapiens
agcattcttctcgga

SEQ ID NO: 276737 - DNA, 15 bp, Homo sapiens
aagcattcttctcgg

SEQ ID NO: 276738 - DNA, 15 bp, Homo sapiens
caagcattcttctcg

SEQ ID NO: 276739 - DNA, 15 bp, Homo sapiens
ccaagcattcttctc

SEQ ID NO: 276740 - DNA, 15 bp, Homo sapiens
gccaagcattcttct

SEQ ID NO: 276741 - DNA, 15 bp, Homo sapiens
agccaagcattcttc

SEQ ID NO: 276742 - DNA, 15 bp, Homo sapiens
aagccaagcattctt

SEQ ID NO: 276743 - DNA, 15 bp, Homo sapiens
caagccaagcattct

SEQ ID NO: 276744 - DNA, 15 bp, Homo sapiens
tcaagccaagcattc

SEQ ID NO: 276745 - DNA, 15 bp, Homo sapiens
ctcaagccaagcatt

SEQ ID NO: 276746 - DNA, 15 bp, Homo sapiens
tctcaagccaagcat

SEQ ID NO: 276747 - DNA, 15 bp, Homo sapiens
atctcaagccaagca

SEQ ID NO: 276748 - DNA, 15 bp, Homo sapiens
aatctcaagccaagc

SEQ ID NO: 276749 - DNA, 15 bp, Homo sapiens
taatctcaagccaag

SEQ ID NO: 276750 - DNA, 15 bp, Homo sapiens
ctaatctcaagccaa

SEQ ID NO: 276751 - DNA, 15 bp, Homo sapiens
cctaatctcaagcca

SEQ ID NO: 276752 - DNA, 15 bp, Homo sapiens
tcctaatctcaagcc

SEQ ID NO: 276753 - DNA, 15 bp, Homo sapiens
ctcctaatctcaagc

SEQ ID NO: 276754 - DNA, 15 bp, Homo sapiens
cctcctaatctcaag

SEQ ID NO: 276755 - DNA, 15 bp, Homo sapiens
tcctcctaatctcaa

SEQ ID NO: 276756 - DNA, 15 bp, Homo sapiens
ttcctcctaatctca

SEQ ID NO: 276757 - DNA, 15 bp, Homo sapiens
cttcctcctaatctc

SEQ ID NO: 276758 - DNA, 15 bp, Homo sapiens
tcttcctcctaatct

SEQ ID NO: 276759 - DNA, 15 bp, Homo sapiens
ttcttcctcctaatc

SEQ ID NO: 276760 - DNA, 15 bp, Homo sapiens
attcttcctcctaat

SEQ ID NO: 276761 - DNA, 15 bp, Homo sapiens
tattcttcctcctaa

SEQ ID NO: 276762 - DNA, 15 bp, Homo sapiens
ttattcttcctccta

SEQ ID NO: 276763 - DNA, 15 bp, Homo sapiens
cttattcttcctcct

SEQ ID NO: 276764 - DNA, 15 bp, Homo sapiens
tcttattcttcctcc

SEQ ID NO: 276765 - DNA, 15 bp, Homo sapiens
ctcttattcttcctc

SEQ ID NO: 276766 - DNA, 15 bp, Homo sapiens
actcttattcttcct

SEQ ID NO: 276767 - DNA, 15 bp, Homo sapiens
gactcttattcttcc

SEQ ID NO: 276768 - DNA, 15 bp, Homo sapiens
tgactcttattcttc

SEQ ID NO: 276769 - DNA, 15 bp, Homo sapiens
atgactcttattctt

SEQ ID NO: 276770 - DNA, 15 bp, Homo sapiens
gatgactcttattct

SEQ ID NO: 276771 - DNA, 15 bp, Homo sapiens
ggatgactcttattc

SEQ ID NO: 276772 - DNA, 15 bp, Homo sapiens
aggatgactcttatt

SEQ ID NO: 276773 - DNA, 15 bp, Homo sapiens
aaggatgactcttat

SEQ ID NO: 276774 - DNA, 15 bp, Homo sapiens
gaaggatgactctta

SEQ ID NO: 276775 - DNA, 15 bp, Homo sapiens
tgaaggatgactctt

SEQ ID NO: 276776 - DNA, 15 bp, Homo sapiens
atgaaggatgactct

SEQ ID NO: 276777 - DNA, 15 bp, Homo sapiens
gatgaaggatgactc

SEQ ID NO: 276778 - DNA, 15 bp, Homo sapiens
ggatgaaggatgact

SEQ ID NO: 276779 - DNA, 15 bp, Homo sapiens
tggatgaaggatgac

SEQ ID NO: 276780 - DNA, 15 bp, Homo sapiens
atggatgaaggatga

SEQ ID NO: 276781 - DNA, 15 bp, Homo sapiens
catggatgaaggatg

SEQ ID NO: 276782 - DNA, 15 bp, Homo sapiens
tcatggatgaaggat

SEQ ID NO: 276783 - DNA, 15 bp, Homo sapiens
atcatggatgaagga

SEQ ID NO: 276784 - DNA, 15 bp, Homo sapiens
catcatggatgaagg

SEQ ID NO: 276785 - DNA, 15 bp, Homo sapiens
tcatcatggatgaag

SEQ ID NO: 276786 - DNA, 15 bp, Homo sapiens
ttcatcatggatgaa

SEQ ID NO: 276787 - DNA, 15 bp, Homo sapiens
tttcatcatggatga

SEQ ID NO: 276788 - DNA, 15 bp, Homo sapiens
ctttcatcatggatg

SEQ ID NO: 276789 - DNA, 15 bp, Homo sapiens
tctttcatcatggat

SEQ ID NO: 276790 - DNA, 15 bp, Homo sapiens
ttctttcatcatgga

SEQ ID NO: 276791 - DNA, 15 bp, Homo sapiens
cttctttcatcatgg

SEQ ID NO: 276792 - DNA, 15 bp, Homo sapiens
tcttctttcatcatg

SEQ ID NO: 276793 - DNA, 15 bp, Homo sapiens
gtcttctttcatcat

SEQ ID NO: 276794 - DNA, 15 bp, Homo sapiens
agtcttctttcatca

SEQ ID NO: 276795 - DNA, 15 bp, Homo sapiens
cagtcttctttcatc

SEQ ID NO: 276796 - DNA, 15 bp, Homo sapiens
ccagtcttctttcat

SEQ ID NO: 276797 - DNA, 15 bp, Homo sapiens
accagtcttctttca

SEQ ID NO: 276798 - DNA, 15 bp, Homo sapiens
caccagtcttctttc

SEQ ID NO: 276799 - DNA, 15 bp, Homo sapiens
ccaccagtcttcttt

SEQ ID NO: 276800 - DNA, 15 bp, Homo sapiens
cccaccagtcttctt

SEQ ID NO: 276801 - DNA, 15 bp, Homo sapiens
tcccaccagtcttct

SEQ ID NO: 276802 - DNA, 15 bp, Homo sapiens
ctcccaccagtcttc

SEQ ID NO: 276803 - DNA, 15 bp, Homo sapiens
cctcccaccagtctt

SEQ ID NO: 276804 - DNA, 15 bp, Homo sapiens
tcctcccaccagtct

SEQ ID NO: 276805 - DNA, 15 bp, Homo sapiens
ctcctcccaccagtc

SEQ ID NO: 276806 - DNA, 15 bp, Homo sapiens
tctcctcccaccagt

SEQ ID NO: 276807 - DNA, 15 bp, Homo sapiens
ttctcctcccaccag

SEQ ID NO: 276808 - DNA, 15 bp, Homo sapiens
attctcctcccacca

SEQ ID NO: 276809 - DNA, 15 bp, Homo sapiens
cattctcctcccacc

SEQ ID NO: 276810 - DNA, 15 bp, Homo sapiens
ccattctcctcccac

SEQ ID NO: 276811 - DNA, 15 bp, Homo sapiens
cccattctcctccca

SEQ ID NO: 276812 - DNA, 15 bp, Homo sapiens
tcccattctcctccc

SEQ ID NO: 276813 - DNA, 15 bp, Homo sapiens
ctcccattctcctcc

SEQ ID NO: 276814 - DNA, 15 bp, Homo sapiens
tctcccattctcctc

SEQ ID NO: 276815 - DNA, 15 bp, Homo sapiens
ctctcccattctcct

SEQ ID NO: 276816 - DNA, 15 bp, Homo sapiens
tctctcccattctcc

SEQ ID NO: 276817 - DNA, 15 bp, Homo sapiens
ttctctcccattctc

SEQ ID NO: 276818 - DNA, 15 bp, Homo sapiens
attctctcccattct

SEQ ID NO: 276819 - DNA, 15 bp, Homo sapiens
cattctctcccattc

SEQ ID NO: 276820 - DNA, 15 bp, Homo sapiens
acattctctcccatt

SEQ ID NO: 276821 - DNA, 15 bp, Homo sapiens
aacattctctcccat

SEQ ID NO: 276822 - DNA, 15 bp, Homo sapiens
caacattctctccca

SEQ ID NO: 276823 - DNA, 15 bp, Homo sapiens
gcaacattctctccc

SEQ ID NO: 276824 - DNA, 15 bp, Homo sapiens
tgcaacattctctcc

SEQ ID NO: 276825 - DNA, 15 bp, Homo sapiens
ctgcaacattctctc

SEQ ID NO: 276826 - DNA, 15 bp, Homo sapiens
tctgcaacattctct

SEQ ID NO: 276827 - DNA, 15 bp, Homo sapiens
atctgcaacattctc

SEQ ID NO: 276828 - DNA, 15 bp, Homo sapiens
tatctgcaacattct

SEQ ID NO: 276829 - DNA, 15 bp, Homo sapiens
ctatctgcaacattc

SEQ ID NO: 276830 - DNA, 15 bp, Homo sapiens
cctatctgcaacatt

SEQ ID NO: 276831 - DNA, 15 bp, Homo sapiens
tcctatctgcaacat

SEQ ID NO: 276832 - DNA, 15 bp, Homo sapiens
ctcctatctgcaaca

SEQ ID NO: 276833 - DNA, 15 bp, Homo sapiens
tctcctatctgcaac

SEQ ID NO: 276834 - DNA, 15 bp, Homo sapiens
ttctcctatctgcaa

SEQ ID NO: 276835 - DNA, 15 bp, Homo sapiens
tttctcctatctgca

SEQ ID NO: 276836 - DNA, 15 bp, Homo sapiens
gtttctcctatctgc

SEQ ID NO: 276837 - DNA, 15 bp, Homo sapiens
tgtttctcctatctg

SEQ ID NO: 276838 - DNA, 15 bp, Homo sapiens
ctgtttctcctatct

SEQ ID NO: 276839 - DNA, 15 bp, Homo sapiens
tctgtttctcctatc

SEQ ID NO: 276840 - DNA, 15 bp, Homo sapiens
ttctgtttctcctat

SEQ ID NO: 276841 - DNA, 15 bp, Homo sapiens
attctgtttctccta

SEQ ID NO: 276842 - DNA, 15 bp, Homo sapiens
aattctgtttctcct

SEQ ID NO: 276843 - DNA, 15 bp, Homo sapiens
aaattctgtttctcc

SEQ ID NO: 276844 - DNA, 15 bp, Homo sapiens
caaattctgtttctc

SEQ ID NO: 276845 - DNA, 15 bp, Homo sapiens
gcaaattctgtttct

SEQ ID NO: 276846 - DNA, 15 bp, Homo sapiens
tgcaaattctgtttc

SEQ ID NO: 276847 - DNA, 15 bp, Homo sapiens
ttgcaaattctgttt

SEQ ID NO: 276848 - DNA, 15 bp, Homo sapiens
tttgcaaattctgtt

SEQ ID NO: 276849 - DNA, 15 bp, Homo sapiens
ctttgcaaattctgt

SEQ ID NO: 276850 - DNA, 15 bp, Homo sapiens
actttgcaaattctg

SEQ ID NO: 276851 - DNA, 15 bp, Homo sapiens
gactttgcaaattct

SEQ ID NO: 276852 - DNA, 15 bp, Homo sapiens
ggactttgcaaattc

SEQ ID NO: 276853 - DNA, 15 bp, Homo sapiens
tggactttgcaaatt

SEQ ID NO: 276854 - DNA, 15 bp, Homo sapiens
gtggactttgcaaat

SEQ ID NO: 276855 - DNA, 15 bp, Homo sapiens
cgtggactttgcaaa

SEQ ID NO: 276856 - DNA, 15 bp, Homo sapiens
acgtggactttgcaa

SEQ ID NO: 276857 - DNA, 15 bp, Homo sapiens
cacgtggactttgca

SEQ ID NO: 276858 - DNA, 15 bp, Homo sapiens
ccacgtggactttgc

SEQ ID NO: 276859 - DNA, 15 bp, Homo sapiens
accacgtggactttg

SEQ ID NO: 276860 - DNA, 15 bp, Homo sapiens
caccacgtggacttt

SEQ ID NO: 276861 - DNA, 15 bp, Homo sapiens
ccaccacgtggactt

SEQ ID NO: 276862 - DNA, 15 bp, Homo sapiens
gccaccacgtggact

SEQ ID NO: 276863 - DNA, 15 bp, Homo sapiens
tgccaccacgtggac

SEQ ID NO: 276864 - DNA, 15 bp, Homo sapiens
gtgccaccacgtgga

SEQ ID NO: 276865 - DNA, 15 bp, Homo sapiens
tgtgccaccacgtgg

SEQ ID NO: 276866 - DNA, 15 bp, Homo sapiens
ctgtgccaccacgtg

SEQ ID NO: 276867 - DNA, 15 bp, Homo sapiens
tctgtgccaccacgt

SEQ ID NO: 276868 - DNA, 15 bp, Homo sapiens
ctctgtgccaccacg

SEQ ID NO: 276869 - DNA, 15 bp, Homo sapiens
cctctgtgccaccac

SEQ ID NO: 276870 - DNA, 15 bp, Homo sapiens
tcctctgtgccacca

SEQ ID NO: 276871 - DNA, 15 bp, Homo sapiens
ttcctctgtgccacc

SEQ ID NO: 276872 - DNA, 15 bp, Homo sapiens
cttcctctgtgccac

SEQ ID NO: 276873 - DNA, 15 bp, Homo sapiens
ccttcctctgtgcca

SEQ ID NO: 276874 - DNA, 15 bp, Homo sapiens
accttcctctgtgcc

SEQ ID NO: 276875 - DNA, 15 bp, Homo sapiens
aaccttcctctgtgc

SEQ ID NO: 276876 - DNA, 15 bp, Homo sapiens
gaaccttcctctgtg

SEQ ID NO: 276877 - DNA, 15 bp, Homo sapiens
tgaaccttcctctgt

SEQ ID NO: 276878 - DNA, 15 bp, Homo sapiens
gtgaaccttcctctg

SEQ ID NO: 276879 - DNA, 15 bp, Homo sapiens
ggtgaaccttcctct

SEQ ID NO: 276880 - DNA, 15 bp, Homo sapiens
aggtgaaccttcctc

SEQ ID NO: 276881 - DNA, 15 bp, Homo sapiens
caggtgaaccttcct

SEQ ID NO: 276882 - DNA, 15 bp, Homo sapiens
tcaggtgaaccttcc

SEQ ID NO: 276883 - DNA, 15 bp, Homo sapiens
ctcaggtgaaccttc

SEQ ID NO: 276884 - DNA, 15 bp, Homo sapiens
actcaggtgaacctt

SEQ ID NO: 276885 - DNA, 15 bp, Homo sapiens
gactcaggtgaacct

SEQ ID NO: 276886 - DNA, 15 bp, Homo sapiens
tgactcaggtgaacc

SEQ ID NO: 276887 - DNA, 15 bp, Homo sapiens
atgactcaggtgaac

SEQ ID NO: 276888 - DNA, 15 bp, Homo sapiens
catgactcaggtgaa

SEQ ID NO: 276889 - DNA, 15 bp, Homo sapiens
ccatgactcaggtga

SEQ ID NO: 276890 - DNA, 15 bp, Homo sapiens
tccatgactcaggtg

SEQ ID NO: 276891 - DNA, 15 bp, Homo sapiens
ctccatgactcaggt

SEQ ID NO: 276892 - DNA, 15 bp, Homo sapiens
cctccatgactcagg

SEQ ID NO: 276893 - DNA, 15 bp, Homo sapiens
tcctccatgactcag

SEQ ID NO: 276894 - DNA, 15 bp, Homo sapiens
ttcctccatgactca

SEQ ID NO: 276895 - DNA, 15 bp, Homo sapiens
tttcctccatgactc

SEQ ID NO: 276896 - DNA, 15 bp, Homo sapiens
ctttcctccatgact

SEQ ID NO: 276897 - DNA, 15 bp, Homo sapiens
actttcctccatgac

SEQ ID NO: 276898 - DNA, 15 bp, Homo sapiens
cactttcctccatga

SEQ ID NO: 276899 - DNA, 15 bp, Homo sapiens
gcactttcctccatg

SEQ ID NO: 276900 - DNA, 15 bp, Homo sapiens
tgcactttcctccat

SEQ ID NO: 276901 - DNA, 15 bp, Homo sapiens
ctgcactttcctcca

SEQ ID NO: 276902 - DNA, 15 bp, Homo sapiens
gctgcactttcctcc

SEQ ID NO: 276903 - DNA, 15 bp, Homo sapiens
ggctgcactttcctc

SEQ ID NO: 276904 - DNA, 15 bp, Homo sapiens
aggctgcactttcct

SEQ ID NO: 276905 - DNA, 15 bp, Homo sapiens
caggctgcactttcc

SEQ ID NO: 276906 - DNA, 15 bp, Homo sapiens
ccaggctgcactttc

SEQ ID NO: 276907 - DNA, 15 bp, Homo sapiens
gccaggctgcacttt

SEQ ID NO: 276908 - DNA, 15 bp, Homo sapiens
agccaggctgcactt

SEQ ID NO: 276909 - DNA, 15 bp, Homo sapiens
cagccaggctgcact

SEQ ID NO: 276910 - DNA, 15 bp, Homo sapiens
ccagccaggctgcac

SEQ ID NO: 276911 - DNA, 15 bp, Homo sapiens
cccagccaggctgca

SEQ ID NO: 276912 - DNA, 15 bp, Homo sapiens
ccccagccaggctgc

SEQ ID NO: 276913 - DNA, 15 bp, Homo sapiens
accccagccaggctg

SEQ ID NO: 276914 - DNA, 15 bp, Homo sapiens
caccccagccaggct

SEQ ID NO: 276915 - DNA, 15 bp, Homo sapiens
acaccccagccaggc

SEQ ID NO: 276916 - DNA, 15 bp, Homo sapiens
aacaccccagccagg

SEQ ID NO: 276917 - DNA, 15 bp, Homo sapiens
aaacaccccagccag

SEQ ID NO: 276918 - DNA, 15 bp, Homo sapiens
taaacaccccagcca

SEQ ID NO: 276919 - DNA, 15 bp, Homo sapiens
ctaaacaccccagcc

SEQ ID NO: 276920 - DNA, 15 bp, Homo sapiens
cctaaacaccccagc

SEQ ID NO: 276921 - DNA, 15 bp, Homo sapiens
ccctaaacaccccag

SEQ ID NO: 276922 - DNA, 15 bp, Homo sapiens
tccctaaacacccca

SEQ ID NO: 276923 - DNA, 15 bp, Homo sapiens
ctccctaaacacccc

SEQ ID NO: 276924 - DNA, 15 bp, Homo sapiens
tctccctaaacaccc

SEQ ID NO: 276925 - DNA, 15 bp, Homo sapiens
ctctccctaaacacc

SEQ ID NO: 276926 - DNA, 15 bp, Homo sapiens
cctctccctaaacac

SEQ ID NO: 276927 - DNA, 15 bp, Homo sapiens
tcctctccctaaaca

SEQ ID NO: 276928 - DNA, 15 bp, Homo sapiens
ttcctctccctaaac

SEQ ID NO: 276929 - DNA, 15 bp, Homo sapiens
cttcctctccctaaa

SEQ ID NO: 276930 - DNA, 15 bp, Homo sapiens
gcttcctctccctaa

SEQ ID NO: 276931 - DNA, 15 bp, Homo sapiens
ggcttcctctcccta

SEQ ID NO: 276932 - DNA, 15 bp, Homo sapiens
aggcttcctctccct

SEQ ID NO: 276933 - DNA, 15 bp, Homo sapiens
caggcttcctctccc

SEQ ID NO: 276934 - DNA, 15 bp, Homo sapiens
tcaggcttcctctcc

SEQ ID NO: 276935 - DNA, 15 bp, Homo sapiens
atcaggcttcctctc

SEQ ID NO: 276936 - DNA, 15 bp, Homo sapiens
catcaggcttcctct

SEQ ID NO: 276937 - DNA, 15 bp, Homo sapiens
gcatcaggcttcctc

SEQ ID NO: 276938 - DNA, 15 bp, Homo sapiens
ggcatcaggcttcct

SEQ ID NO: 276939 - DNA, 15 bp, Homo sapiens
tggcatcaggcttcc

SEQ ID NO: 276940 - DNA, 15 bp, Homo sapiens
ctggcatcaggcttc

SEQ ID NO: 276941 - DNA, 15 bp, Homo sapiens
tctggcatcaggctt

SEQ ID NO: 276942 - DNA, 15 bp, Homo sapiens
ctctggcatcaggct

SEQ ID NO: 276943 - DNA, 15 bp, Homo sapiens
cctctggcatcaggc

SEQ ID NO: 276944 - DNA, 15 bp, Homo sapiens
acctctggcatcagg

SEQ ID NO: 276945 - DNA, 15 bp, Homo sapiens
gacctctggcatcag

SEQ ID NO: 276946 - DNA, 15 bp, Homo sapiens
tgacctctggcatca

SEQ ID NO: 276947 - DNA, 15 bp, Homo sapiens
ttgacctctggcatc

SEQ ID NO: 276948 - DNA, 15 bp, Homo sapiens
cttgacctctggcat

SEQ ID NO: 276949 - DNA, 15 bp, Homo sapiens
ccttgacctctggca

SEQ ID NO: 276950 - DNA, 15 bp, Homo sapiens
gccttgacctctggc

SEQ ID NO: 276951 - DNA, 15 bp, Homo sapiens
ggccttgacctctgg

SEQ ID NO: 276952 - DNA, 15 bp, Homo sapiens
tggccttgacctctg

SEQ ID NO: 276953 - DNA, 15 bp, Homo sapiens
atggccttgacctct

SEQ ID NO: 276954 - DNA, 15 bp, Homo sapiens
catggccttgacctc

SEQ ID NO: 276955 - DNA, 15 bp, Homo sapiens
tcatggccttgacct

SEQ ID NO: 276956 - DNA, 15 bp, Homo sapiens
gtcatggccttgacc

SEQ ID NO: 276957 - DNA, 15 bp, Homo sapiens
tgtcatggccttgac

SEQ ID NO: 276958 - DNA, 15 bp, Homo sapiens
ctgtcatggccttga

SEQ ID NO: 276959 - DNA, 15 bp, Homo sapiens
cctgtcatggccttg

SEQ ID NO: 276960 - DNA, 15 bp, Homo sapiens
acctgtcatggcctt

SEQ ID NO: 276961 - DNA, 15 bp, Homo sapiens
tacctgtcatggcct

SEQ ID NO: 276962 - DNA, 15 bp, Homo sapiens
gtacctgtcatggcc

SEQ ID NO: 276963 - DNA, 15 bp, Homo sapiens
ggtacctgtcatggc

SEQ ID NO: 276964 - DNA, 15 bp, Homo sapiens
tggtacctgtcatgg

SEQ ID NO: 276965 - DNA, 15 bp, Homo sapiens
ttggtacctgtcatg

SEQ ID NO: 276966 - DNA, 15 bp, Homo sapiens
tttggtacctgtcat

SEQ ID NO: 276967 - DNA, 15 bp, Homo sapiens
atttggtacctgtca

SEQ ID NO: 276968 - DNA, 15 bp, Homo sapiens
gatttggtacctgtc

SEQ ID NO: 276969 - DNA, 15 bp, Homo sapiens
agatttggtacctgt

SEQ ID NO: 276970 - DNA, 15 bp, Homo sapiens
cagatttggtacctg

SEQ ID NO: 276971 - DNA, 15 bp, Homo sapiens
gcagatttggtacct

SEQ ID NO: 276972 - DNA, 15 bp, Homo sapiens
ggcagatttggtacc

SEQ ID NO: 276973 - DNA, 15 bp, Homo sapiens
gggcagatttggtac

SEQ ID NO: 276974 - DNA, 15 bp, Homo sapiens
ggggcagatttggta

SEQ ID NO: 276975 - DNA, 15 bp, Homo sapiens
gggggcagatttggt

SEQ ID NO: 276976 - DNA, 15 bp, Homo sapiens
tgggggcagatttgg

SEQ ID NO: 276977 - DNA, 15 bp, Homo sapiens
gtgggggcagatttg

SEQ ID NO: 276978 - DNA, 15 bp, Homo sapiens
tgtgggggcagattt

SEQ ID NO: 276979 - DNA, 15 bp, Homo sapiens
gtgtgggggcagatt

SEQ ID NO: 276980 - DNA, 15 bp, Homo sapiens
tgtgtgggggcagat

SEQ ID NO: 276981 - DNA, 15 bp, Homo sapiens
atgtgtgggggcaga

SEQ ID NO: 276982 - DNA, 15 bp, Homo sapiens
aatgtgtgggggcag

SEQ ID NO: 276983 - DNA, 15 bp, Homo sapiens
caatgtgtgggggca

SEQ ID NO: 276984 - DNA, 15 bp, Homo sapiens
acaatgtgtgggggc

SEQ ID NO: 276985 - DNA, 15 bp, Homo sapiens
aacaatgtgtggggg

SEQ ID NO: 276986 - DNA, 15 bp, Homo sapiens
gaacaatgtgtgggg

SEQ ID NO: 276987 - DNA, 15 bp, Homo sapiens
agaacaatgtgtggg

SEQ ID NO: 276988 - DNA, 15 bp, Homo sapiens
gagaacaatgtgtgg

SEQ ID NO: 276989 - DNA, 15 bp, Homo sapiens
agagaacaatgtgtg

SEQ ID NO: 276990 - DNA, 15 bp, Homo sapiens
aagagaacaatgtgt

SEQ ID NO: 276991 - DNA, 15 bp, Homo sapiens
aaagagaacaatgtg

SEQ ID NO: 276992 - DNA, 15 bp, Homo sapiens
gaaagagaacaatgt

SEQ ID NO: 276993 - DNA, 15 bp, Homo sapiens
ggaaagagaacaatg

SEQ ID NO: 276994 - DNA, 15 bp, Homo sapiens
tggaaagagaacaat

SEQ ID NO: 276995 - DNA, 15 bp, Homo sapiens
atggaaagagaacaa

SEQ ID NO: 276996 - DNA, 15 bp, Homo sapiens
gatggaaagagaaca

SEQ ID NO: 276997 - DNA, 15 bp, Homo sapiens
ggatggaaagagaac

SEQ ID NO: 276998 - DNA, 15 bp, Homo sapiens
aggatggaaagagaa

SEQ ID NO: 276999 - DNA, 15 bp, Homo sapiens
caggatggaaagaga

SEQ ID NO: 277000 - DNA, 15 bp, Homo sapiens
acaggatggaaagag

SEQ ID NO: 277001 - DNA, 15 bp, Homo sapiens
aacaggatggaaaga

SEQ ID NO: 277002 - DNA, 15 bp, Homo sapiens
caacaggatggaaag

SEQ ID NO: 277003 - DNA, 15 bp, Homo sapiens
ccaacaggatggaaa

SEQ ID NO: 277004 - DNA, 15 bp, Homo sapiens
cccaacaggatggaa

SEQ ID NO: 277005 - DNA, 15 bp, Homo sapiens
acccaacaggatgga

SEQ ID NO: 277006 - DNA, 15 bp, Homo sapiens
tacccaacaggatgg

SEQ ID NO: 277007 - DNA, 15 bp, Homo sapiens
ttacccaacaggatg

SEQ ID NO: 277008 - DNA, 15 bp, Homo sapiens
tttacccaacaggat

SEQ ID NO: 277009 - DNA, 15 bp, Homo sapiens
ttttacccaacagga

SEQ ID NO: 277010 - DNA, 15 bp, Homo sapiens
gttttacccaacagg

SEQ ID NO: 277011 - DNA, 15 bp, Homo sapiens
tgttttacccaacag

SEQ ID NO: 277012 - DNA, 15 bp, Homo sapiens
atgttttacccaaca

SEQ ID NO: 277013 - DNA, 15 bp, Homo sapiens
tatgttttacccaac

SEQ ID NO: 277014 - DNA, 15 bp, Homo sapiens
gtatgttttacccaa

SEQ ID NO: 277015 - DNA, 15 bp, Homo sapiens
tgtatgttttaccca

SEQ ID NO: 277016 - DNA, 15 bp, Homo sapiens
ctgtatgttttaccc

SEQ ID NO: 277017 - DNA, 15 bp, Homo sapiens
tctgtatgttttacc

SEQ ID NO: 277018 - DNA, 15 bp, Homo sapiens
atctgtatgttttac

SEQ ID NO: 277019 - DNA, 15 bp, Homo sapiens
catctgtatgtttta

SEQ ID NO: 277020 - DNA, 15 bp, Homo sapiens
acatctgtatgtttt

SEQ ID NO: 277021 - DNA, 15 bp, Homo sapiens
cacatctgtatgttt

SEQ ID NO: 277022 - DNA, 15 bp, Homo sapiens
tcacatctgtatgtt

SEQ ID NO: 277023 - DNA, 15 bp, Homo sapiens
ctcacatctgtatgt

SEQ ID NO: 277024 - DNA, 15 bp, Homo sapiens
tctcacatctgtatg

SEQ ID NO: 277025 - DNA, 15 bp, Homo sapiens
ctctcacatctgtat

SEQ ID NO: 277026 - DNA, 15 bp, Homo sapiens
tctctcacatctgta

SEQ ID NO: 277027 - DNA, 15 bp, Homo sapiens
atctctcacatctgt

SEQ ID NO: 277028 - DNA, 15 bp, Homo sapiens
catctctcacatctg

SEQ ID NO: 277029 - DNA, 15 bp, Homo sapiens
ccatctctcacatct

SEQ ID NO: 277030 - DNA, 15 bp, Homo sapiens
cccatctctcacatc

SEQ ID NO: 277031 - DNA, 15 bp, Homo sapiens
tcccatctctcacat

SEQ ID NO: 277032 - DNA, 15 bp, Homo sapiens
atcccatctctcaca

SEQ ID NO: 277033 - DNA, 15 bp, Homo sapiens
gatcccatctctcac

SEQ ID NO: 277034 - DNA, 15 bp, Homo sapiens
agatcccatctctca

SEQ ID NO: 277035 - DNA, 15 bp, Homo sapiens
tagatcccatctctc

SEQ ID NO: 277036 - DNA, 15 bp, Homo sapiens
ttagatcccatctct

SEQ ID NO: 277037 - DNA, 15 bp, Homo sapiens
cttagatcccatctc

SEQ ID NO: 277038 - DNA, 15 bp, Homo sapiens
ccttagatcccatct

SEQ ID NO: 277039 - DNA, 15 bp, Homo sapiens
cccttagatcccatc

SEQ ID NO: 277040 - DNA, 15 bp, Homo sapiens
tcccttagatcccat

SEQ ID NO: 277041 - DNA, 15 bp, Homo sapiens
atcccttagatccca

SEQ ID NO: 277042 - DNA, 15 bp, Homo sapiens
catcccttagatccc

SEQ ID NO: 277043 - DNA, 15 bp, Homo sapiens
ccatcccttagatcc

SEQ ID NO: 277044 - DNA, 15 bp, Homo sapiens
cccatcccttagatc

SEQ ID NO: 277045 - DNA, 15 bp, Homo sapiens
tcccatcccttagat

SEQ ID NO: 277046 - DNA, 15 bp, Homo sapiens
ctcccatcccttaga

SEQ ID NO: 277047 - DNA, 15 bp, Homo sapiens
cctcccatcccttag

SEQ ID NO: 277048 - DNA, 15 bp, Homo sapiens
tcctcccatccctta

SEQ ID NO: 277049 - DNA, 15 bp, Homo sapiens
ttcctcccatccctt

SEQ ID NO: 277050 - DNA, 15 bp, Homo sapiens
tttcctcccatccct

SEQ ID NO: 277051 - DNA, 15 bp, Homo sapiens
ctttcctcccatccc

SEQ ID NO: 277052 - DNA, 15 bp, Homo sapiens
actttcctcccatcc

SEQ ID NO: 277053 - DNA, 15 bp, Homo sapiens
cactttcctcccatc

SEQ ID NO: 277054 - DNA, 15 bp, Homo sapiens
ccactttcctcccat

SEQ ID NO: 277055 - DNA, 15 bp, Homo sapiens
cccactttcctccca

SEQ ID NO: 277056 - DNA, 15 bp, Homo sapiens
tcccactttcctccc

SEQ ID NO: 277057 - DNA, 15 bp, Homo sapiens
ttcccactttcctcc

SEQ ID NO: 277058 - DNA, 15 bp, Homo sapiens
tttcccactttcctc

SEQ ID NO: 277059 - DNA, 15 bp, Homo sapiens
ttttcccactttcct

SEQ ID NO: 277060 - DNA, 15 bp, Homo sapiens
tttttcccactttcc

SEQ ID NO: 277061 - DNA, 15 bp, Homo sapiens
ctttttcccactttc

SEQ ID NO: 277062 - DNA, 15 bp, Homo sapiens
gctttttcccacttt

SEQ ID NO: 277063 - DNA, 15 bp, Homo sapiens
agctttttcccactt

SEQ ID NO: 277064 - DNA, 15 bp, Homo sapiens
cagctttttcccact

SEQ ID NO: 277065 - DNA, 15 bp, Homo sapiens
ccagctttttcccac

SEQ ID NO: 277066 - DNA, 15 bp, Homo sapiens
cccagctttttccca

SEQ ID NO: 277067 - DNA, 15 bp, Homo sapiens
ccccagctttttccc

SEQ ID NO: 277068 - DNA, 15 bp, Homo sapiens
tccccagctttttcc

SEQ ID NO: 277069 - DNA, 15 bp, Homo sapiens
ctccccagctttttc

SEQ ID NO: 277070 - DNA, 15 bp, Homo sapiens
tctccccagcttttt

SEQ ID NO: 277071 - DNA, 15 bp, Homo sapiens
ttctccccagctttt

SEQ ID NO: 277072 - DNA, 15 bp, Homo sapiens
tttctccccagcttt

SEQ ID NO: 277073 - DNA, 15 bp, Homo sapiens
ctttctccccagctt

SEQ ID NO: 277074 - DNA, 15 bp, Homo sapiens
tctttctccccagct

SEQ ID NO: 277075 - DNA, 15 bp, Homo sapiens
gtctttctccccagc

SEQ ID NO: 277076 - DNA, 15 bp, Homo sapiens
agtctttctccccag

SEQ ID NO: 277077 - DNA, 15 bp, Homo sapiens
tagtctttctcccca

SEQ ID NO: 277078 - DNA, 15 bp, Homo sapiens
ttagtctttctcccc

SEQ ID NO: 277079 - DNA, 15 bp, Homo sapiens
cttagtctttctccc

SEQ ID NO: 277080 - DNA, 15 bp, Homo sapiens
acttagtctttctcc

SEQ ID NO: 277081 - DNA, 15 bp, Homo sapiens
cacttagtctttctc

SEQ ID NO: 277082 - DNA, 15 bp, Homo sapiens
tcacttagtctttct

SEQ ID NO: 277083 - DNA, 15 bp, Homo sapiens
atcacttagtctttc

SEQ ID NO: 277084 - DNA, 15 bp, Homo sapiens
tatcacttagtcttt

SEQ ID NO: 277085 - DNA, 15 bp, Homo sapiens
ctatcacttagtctt

SEQ ID NO: 277086 - DNA, 15 bp, Homo sapiens
actatcacttagtct

SEQ ID NO: 277087 - DNA, 15 bp, Homo sapiens
aactatcacttagtc

SEQ ID NO: 277088 - DNA, 15 bp, Homo sapiens
taactatcacttagt

SEQ ID NO: 277089 - DNA, 15 bp, Homo sapiens
gtaactatcacttag

SEQ ID NO: 277090 - DNA, 15 bp, Homo sapiens
agtaactatcactta

SEQ ID NO: 277091 - DNA, 15 bp, Homo sapiens
tagtaactatcactt

SEQ ID NO: 277092 - DNA, 15 bp, Homo sapiens
ttagtaactatcact

SEQ ID NO: 277093 - DNA, 15 bp, Homo sapiens
tttagtaactatcac

SEQ ID NO: 277094 - DNA, 15 bp, Homo sapiens
ttttagtaactatca

SEQ ID NO: 277095 - DNA, 15 bp, Homo sapiens
tttttagtaactatc

SEQ ID NO: 277096 - DNA, 15 bp, Homo sapiens
atttttagtaactat

SEQ ID NO: 277097 - DNA, 15 bp, Homo sapiens
tatttttagtaacta

SEQ ID NO: 277098 - DNA, 15 bp, Homo sapiens
ttatttttagtaact

SEQ ID NO: 277099 - DNA, 15 bp, Homo sapiens
tttatttttagtaac

SEQ ID NO: 277100 - DNA, 15 bp, Homo sapiens
ttttatttttagtaa

SEQ ID NO: 277101 - DNA, 15 bp, Homo sapiens
attttatttttagta

SEQ ID NO: 277102 - DNA, 15 bp, Homo sapiens
aattttatttttagt

SEQ ID NO: 277103 - DNA, 15 bp, Homo sapiens
aaattttatttttag

SEQ ID NO: 277104 - DNA, 15 bp, Homo sapiens
caaattttattttta

SEQ ID NO: 277105 - DNA, 15 bp, Homo sapiens
gcaaattttattttt

SEQ ID NO: 277106 - DNA, 15 bp, Homo sapiens
agcaaattttatttt

SEQ ID NO: 277107 - DNA, 15 bp, Homo sapiens
tagcaaattttattt

SEQ ID NO: 277108 - DNA, 15 bp, Homo sapiens
ttagcaaattttatt

SEQ ID NO: 277109 - DNA, 15 bp, Homo sapiens
cttagcaaattttat

SEQ ID NO: 277110 - DNA, 15 bp, Homo sapiens
tcttagcaaatttta

SEQ ID NO: 277111 - DNA, 15 bp, Homo sapiens
ctcttagcaaatttt

SEQ ID NO: 277112 - DNA, 15 bp, Homo sapiens
gctcttagcaaattt

SEQ ID NO: 277113 - DNA, 15 bp, Homo sapiens
tgctcttagcaaatt

SEQ ID NO: 277114 - DNA, 15 bp, Homo sapiens
atgctcttagcaaat

SEQ ID NO: 277115 - DNA, 15 bp, Homo sapiens
catgctcttagcaaa

SEQ ID NO: 277116 - DNA, 15 bp, Homo sapiens
acatgctcttagcaa

SEQ ID NO: 277117 - DNA, 15 bp, Homo sapiens
aacatgctcttagca

SEQ ID NO: 277118 - DNA, 15 bp, Homo sapiens
aaacatgctcttagc

SEQ ID NO: 277119 - DNA, 15 bp, Homo sapiens
aaaacatgctcttag

SEQ ID NO: 277120 - DNA, 15 bp, Homo sapiens
taaaacatgctctta

SEQ ID NO: 277121 - DNA, 15 bp, Homo sapiens
ttaaaacatgctctt

SEQ ID NO: 277122 - DNA, 15 bp, Homo sapiens
cttaaaacatgctct

SEQ ID NO: 277123 - DNA, 15 bp, Homo sapiens
ccttaaaacatgctc

SEQ ID NO: 277124 - DNA, 15 bp, Homo sapiens
tccttaaaacatgct

SEQ ID NO: 277125 - DNA, 15 bp, Homo sapiens
atccttaaaacatgc

SEQ ID NO: 277126 - DNA, 15 bp, Homo sapiens
gatccttaaaacatg

SEQ ID NO: 277127 - DNA, 15 bp, Homo sapiens
cgatccttaaaacat

SEQ ID NO: 277128 - DNA, 15 bp, Homo sapiens
acgatccttaaaaca

SEQ ID NO: 277129 - DNA, 15 bp, Homo sapiens
cacgatccttaaaac

SEQ ID NO: 277130 - DNA, 15 bp, Homo sapiens
ccacgatccttaaaa

SEQ ID NO: 277131 - DNA, 15 bp, Homo sapiens
gccacgatccttaaa

SEQ ID NO: 277132 - DNA, 15 bp, Homo sapiens
tgccacgatccttaa

SEQ ID NO: 277133 - DNA, 15 bp, Homo sapiens
ctgccacgatcctta

SEQ ID NO: 277134 - DNA, 15 bp, Homo sapiens
tctgccacgatcctt

SEQ ID NO: 277135 - DNA, 15 bp, Homo sapiens
ttctgccacgatcct

SEQ ID NO: 277136 - DNA, 15 bp, Homo sapiens
gttctgccacgatcc

SEQ ID NO: 277137 - DNA, 15 bp, Homo sapiens
ggttctgccacgatc

SEQ ID NO: 277138 - DNA, 15 bp, Homo sapiens
tggttctgccacgat

SEQ ID NO: 277139 - DNA, 15 bp, Homo sapiens
ctggttctgccacga

SEQ ID NO: 277140 - DNA, 15 bp, Homo sapiens
actggttctgccacg

SEQ ID NO: 277141 - DNA, 15 bp, Homo sapiens
gactggttctgccac

SEQ ID NO: 277142 - DNA, 15 bp, Homo sapiens
tgactggttctgcca

SEQ ID NO: 277143 - DNA, 15 bp, Homo sapiens
ctgactggttctgcc

SEQ ID NO: 277144 - DNA, 15 bp, Homo sapiens
actgactggttctgc

SEQ ID NO: 277145 - DNA, 15 bp, Homo sapiens
tactgactggttctg

SEQ ID NO: 277146 - DNA, 15 bp, Homo sapiens
ttactgactggttct

SEQ ID NO: 277147 - DNA, 15 bp, Homo sapiens
attactgactggttc

SEQ ID NO: 277148 - DNA, 15 bp, Homo sapiens
tattactgactggtt

SEQ ID NO: 277149 - DNA, 15 bp, Homo sapiens
ttattactgactggt

SEQ ID NO: 277150 - DNA, 15 bp, Homo sapiens
cttattactgactgg

SEQ ID NO: 277151 - DNA, 15 bp, Homo sapiens
ccttattactgactg

SEQ ID NO: 277152 - DNA, 15 bp, Homo sapiens
cccttattactgact

SEQ ID NO: 277153 - DNA, 15 bp, Homo sapiens
acccttattactgac

SEQ ID NO: 277154 - DNA, 15 bp, Homo sapiens
aacccttattactga

SEQ ID NO: 277155 - DNA, 15 bp, Homo sapiens
caacccttattactg

SEQ ID NO: 277156 - DNA, 15 bp, Homo sapiens
tcaacccttattact

SEQ ID NO: 277157 - DNA, 15 bp, Homo sapiens
ttcaacccttattac

SEQ ID NO: 277158 - DNA, 15 bp, Homo sapiens
tttcaacccttatta

SEQ ID NO: 277159 - DNA, 15 bp, Homo sapiens
ttttcaacccttatt

SEQ ID NO: 277160 - DNA, 15 bp, Homo sapiens
tttttcaacccttat

SEQ ID NO: 277161 - DNA, 15 bp, Homo sapiens
gtttttcaaccctta

SEQ ID NO: 277162 - DNA, 15 bp, Homo sapiens
tgtttttcaaccctt

SEQ ID NO: 277163 - DNA, 15 bp, Homo sapiens
ttgtttttcaaccct

SEQ ID NO: 277164 - DNA, 15 bp, Homo sapiens
tttgtttttcaaccc

SEQ ID NO: 277165 - DNA, 15 bp, Homo sapiens
ctttgtttttcaacc

SEQ ID NO: 277166 - DNA, 15 bp, Homo sapiens
gctttgtttttcaac

SEQ ID NO: 277167 - DNA, 15 bp, Homo sapiens
tgctttgtttttcaa

SEQ ID NO: 277168 - DNA, 15 bp, Homo sapiens
atgctttgtttttca

SEQ ID NO: 277169 - DNA, 15 bp, Homo sapiens
catgctttgtttttc

SEQ ID NO: 277170 - DNA, 15 bp, Homo sapiens
tcatgctttgttttt

SEQ ID NO: 277171 - DNA, 15 bp, Homo sapiens
ttcatgctttgtttt

SEQ ID NO: 277172 - DNA, 15 bp, Homo sapiens
tttcatgctttgttt

SEQ ID NO: 277173 - DNA, 15 bp, Homo sapiens
ttttcatgctttgtt

SEQ ID NO: 277174 - DNA, 15 bp, Homo sapiens
attttcatgctttgt

SEQ ID NO: 277175 - DNA, 15 bp, Homo sapiens
cattttcatgctttg

SEQ ID NO: 277176 - DNA, 15 bp, Homo sapiens
tcattttcatgcttt

SEQ ID NO: 277177 - DNA, 15 bp, Homo sapiens
ctcattttcatgctt

SEQ ID NO: 277178 - DNA, 15 bp, Homo sapiens
cctcattttcatgct

SEQ ID NO: 277179 - DNA, 15 bp, Homo sapiens
acctcattttcatgc

SEQ ID NO: 277180 - DNA, 15 bp, Homo sapiens
aacctcattttcatg

SEQ ID NO: 277181 - DNA, 15 bp, Homo sapiens
taacctcattttcat

SEQ ID NO: 277182 - DNA, 15 bp, Homo sapiens
ttaacctcattttca

SEQ ID NO: 277183 - DNA, 15 bp, Homo sapiens
gttaacctcattttc

SEQ ID NO: 277184 - DNA, 15 bp, Homo sapiens
ggttaacctcatttt

SEQ ID NO: 277185 - DNA, 15 bp, Homo sapiens
aggttaacctcattt

SEQ ID NO: 277186 - DNA, 15 bp, Homo sapiens
gaggttaacctcatt

SEQ ID NO: 277187 - DNA, 15 bp, Homo sapiens
ggaggttaacctcat

SEQ ID NO: 277188 - DNA, 15 bp, Homo sapiens
gggaggttaacctca

SEQ ID NO: 277189 - DNA, 15 bp, Homo sapiens
agggaggttaacctc

SEQ ID NO: 277190 - DNA, 15 bp, Homo sapiens
cagggaggttaacct

SEQ ID NO: 277191 - DNA, 15 bp, Homo sapiens
acagggaggttaacc

SEQ ID NO: 277192 - DNA, 15 bp, Homo sapiens
aacagggaggttaac

SEQ ID NO: 277193 - DNA, 15 bp, Homo sapiens
taacagggaggttaa

SEQ ID NO: 277194 - DNA, 15 bp, Homo sapiens
ttaacagggaggtta

SEQ ID NO: 277195 - DNA, 15 bp, Homo sapiens
gttaacagggaggtt

SEQ ID NO: 277196 - DNA, 15 bp, Homo sapiens
ggttaacagggaggt

SEQ ID NO: 277197 - DNA, 15 bp, Homo sapiens
gggttaacagggagg

SEQ ID NO: 277198 - DNA, 15 bp, Homo sapiens
tgggttaacagggag

SEQ ID NO: 277199 - DNA, 15 bp, Homo sapiens
ttgggttaacaggga

SEQ ID NO: 277200 - DNA, 15 bp, Homo sapiens
tttgggttaacaggg

SEQ ID NO: 277201 - DNA, 15 bp, Homo sapiens
gtttgggttaacagg

SEQ ID NO: 277202 - DNA, 15 bp, Homo sapiens
agtttgggttaacag

SEQ ID NO: 277203 - DNA, 15 bp, Homo sapiens
cagtttgggttaaca

SEQ ID NO: 277204 - DNA, 15 bp, Homo sapiens
tcagtttgggttaac

SEQ ID NO: 277205 - DNA, 15 bp, Homo sapiens
ctcagtttgggttaa

SEQ ID NO: 277206 - DNA, 15 bp, Homo sapiens
cctcagtttgggtta

SEQ ID NO: 277207 - DNA, 15 bp, Homo sapiens
acctcagtttgggtt

SEQ ID NO: 277208 - DNA, 15 bp, Homo sapiens
gacctcagtttgggt

SEQ ID NO: 277209 - DNA, 15 bp, Homo sapiens
agacctcagtttggg

SEQ ID NO: 277210 - DNA, 15 bp, Homo sapiens
gagacctcagtttgg

SEQ ID NO: 277211 - DNA, 15 bp, Homo sapiens
ggagacctcagtttg

SEQ ID NO: 277212 - DNA, 15 bp, Homo sapiens
gggagacctcagttt

SEQ ID NO: 277213 - DNA, 15 bp, Homo sapiens
agggagacctcagtt

SEQ ID NO: 277214 - DNA, 15 bp, Homo sapiens
cagggagacctcagt

SEQ ID NO: 277215 - DNA, 15 bp, Homo sapiens
ccagggagacctcag

SEQ ID NO: 277216 - DNA, 15 bp, Homo sapiens
gccagggagacctca

SEQ ID NO: 277217 - DNA, 15 bp, Homo sapiens
agccagggagacctc

SEQ ID NO: 277218 - DNA, 15 bp, Homo sapiens
aagccagggagacct

SEQ ID NO: 277219 - DNA, 15 bp, Homo sapiens
aaagccagggagacc

SEQ ID NO: 277220 - DNA, 15 bp, Homo sapiens
aaaagccagggagac

SEQ ID NO: 277221 - DNA, 15 bp, Homo sapiens
taaaagccagggaga

SEQ ID NO: 277222 - DNA, 15 bp, Homo sapiens
ataaaagccagggag

SEQ ID NO: 277223 - DNA, 15 bp, Homo sapiens
aataaaagccaggga

SEQ ID NO: 277224 - DNA, 15 bp, Homo sapiens
taataaaagccaggg

SEQ ID NO: 277225 - DNA, 15 bp, Homo sapiens
ataataaaagccagg

SEQ ID NO: 277226 - DNA, 15 bp, Homo sapiens
gataataaaagccag

SEQ ID NO: 277227 - DNA, 15 bp, Homo sapiens
tgataataaaagcca

SEQ ID NO: 277228 - DNA, 15 bp, Homo sapiens
atgataataaaagcc

SEQ ID NO: 277229 - DNA, 15 bp, Homo sapiens
catgataataaaagc

SEQ ID NO: 277230 - DNA, 15 bp, Homo sapiens
ccatgataataaaag

SEQ ID NO: 277231 - DNA, 15 bp, Homo sapiens
accatgataataaaa

SEQ ID NO: 277232 - DNA, 15 bp, Homo sapiens
aaccatgataataaa

SEQ ID NO: 277233 - DNA, 15 bp, Homo sapiens
taaccatgataataa

SEQ ID NO: 277234 - DNA, 15 bp, Homo sapiens
ataaccatgataata

SEQ ID NO: 277235 - DNA, 15 bp, Homo sapiens
gataaccatgataat

SEQ ID NO: 277236 - DNA, 15 bp, Homo sapiens
cgataaccatgataa

SEQ ID NO: 277237 - DNA, 15 bp, Homo sapiens
acgataaccatgata

SEQ ID NO: 277238 - DNA, 15 bp, Homo sapiens
tacgataaccatgat

SEQ ID NO: 277239 - DNA, 15 bp, Homo sapiens
ttacgataaccatga

SEQ ID NO: 277240 - DNA, 15 bp, Homo sapiens
gttacgataaccatg

SEQ ID NO: 277241 - DNA, 15 bp, Homo sapiens
tgttacgataaccat

SEQ ID NO: 277242 - DNA, 15 bp, Homo sapiens
gtgttacgataacca

SEQ ID NO: 277243 - DNA, 15 bp, Homo sapiens
ggtgttacgataacc

SEQ ID NO: 277244 - DNA, 15 bp, Homo sapiens
gggtgttacgataac

SEQ ID NO: 277245 - DNA, 15 bp, Homo sapiens
tgggtgttacgataa

SEQ ID NO: 277246 - DNA, 15 bp, Homo sapiens
ctgggtgttacgata

SEQ ID NO: 277247 - DNA, 15 bp, Homo sapiens
tctgggtgttacgat

SEQ ID NO: 277248 - DNA, 15 bp, Homo sapiens
gtctgggtgttacga

SEQ ID NO: 277249 - DNA, 15 bp, Homo sapiens
tgtctgggtgttacg

SEQ ID NO: 277250 - DNA, 15 bp, Homo sapiens
gtgtctgggtgttac

SEQ ID NO: 277251 - DNA, 15 bp, Homo sapiens
tgtgtctgggtgtta

SEQ ID NO: 277252 - DNA, 15 bp, Homo sapiens
atgtgtctgggtgtt

SEQ ID NO: 277253 - DNA, 15 bp, Homo sapiens
catgtgtctgggtgt

SEQ ID NO: 277254 - DNA, 15 bp, Homo sapiens
ccatgtgtctgggtg

SEQ ID NO: 277255 - DNA, 15 bp, Homo sapiens
tccatgtgtctgggt

SEQ ID NO: 277256 - DNA, 15 bp, Homo sapiens
atccatgtgtctggg

SEQ ID NO: 277257 - DNA, 15 bp, Homo sapiens
aatccatgtgtctgg

SEQ ID NO: 277258 - DNA, 15 bp, Homo sapiens
caatccatgtgtctg

SEQ ID NO: 277259 - DNA, 15 bp, Homo sapiens
ccaatccatgtgtct

SEQ ID NO: 277260 - DNA, 15 bp, Homo sapiens
tccaatccatgtgtc

SEQ ID NO: 277261 - DNA, 15 bp, Homo sapiens
ctccaatccatgtgt

SEQ ID NO: 277262 - DNA, 15 bp, Homo sapiens
actccaatccatgtg

SEQ ID NO: 277263 - DNA, 15 bp, Homo sapiens
cactccaatccatgt

SEQ ID NO: 277264 - DNA, 15 bp, Homo sapiens
acactccaatccatg

SEQ ID NO: 277265 - DNA, 15 bp, Homo sapiens
gacactccaatccat

SEQ ID NO: 277266 - DNA, 15 bp, Homo sapiens
agacactccaatcca

SEQ ID NO: 277267 - DNA, 15 bp, Homo sapiens
cagacactccaatcc

SEQ ID NO: 277268 - DNA, 15 bp, Homo sapiens
ccagacactccaatc

SEQ ID NO: 277269 - DNA, 15 bp, Homo sapiens
cccagacactccaat

SEQ ID NO: 277270 - DNA, 15 bp, Homo sapiens
ccccagacactccaa

SEQ ID NO: 277271 - DNA, 15 bp, Homo sapiens
tccccagacactcca

SEQ ID NO: 277272 - DNA, 15 bp, Homo sapiens
ttccccagacactcc

SEQ ID NO: 277273 - DNA, 15 bp, Homo sapiens
tttccccagacactc

SEQ ID NO: 277274 - DNA, 15 bp, Homo sapiens
atttccccagacact

SEQ ID NO: 277275 - DNA, 15 bp, Homo sapiens
gatttccccagacac

SEQ ID NO: 277276 - DNA, 15 bp, Homo sapiens
ggatttccccagaca

SEQ ID NO: 277277 - DNA, 15 bp, Homo sapiens
gggatttccccagac

SEQ ID NO: 277278 - DNA, 15 bp, Homo sapiens
agggatttccccaga

SEQ ID NO: 277279 - DNA, 15 bp, Homo sapiens
aagggatttccccag

SEQ ID NO: 277280 - DNA, 15 bp, Homo sapiens
gaagggatttcccca

SEQ ID NO: 277281 - DNA, 15 bp, Homo sapiens
tgaagggatttcccc

SEQ ID NO: 277282 - DNA, 15 bp, Homo sapiens
ctgaagggatttccc

SEQ ID NO: 277283 - DNA, 15 bp, Homo sapiens
actgaagggatttcc

SEQ ID NO: 277284 - DNA, 15 bp, Homo sapiens
gactgaagggatttc

SEQ ID NO: 277285 - DNA, 15 bp, Homo sapiens
ggactgaagggattt

SEQ ID NO: 277286 - DNA, 15 bp, Homo sapiens
cggactgaagggatt

SEQ ID NO: 277287 - DNA, 15 bp, Homo sapiens
gcggactgaagggat

SEQ ID NO: 277288 - DNA, 15 bp, Homo sapiens
agcggactgaaggga

SEQ ID NO: 277289 - DNA, 15 bp, Homo sapiens
gagcggactgaaggg

SEQ ID NO: 277290 - DNA, 15 bp, Homo sapiens
ggagcggactgaagg

SEQ ID NO: 277291 - DNA, 15 bp, Homo sapiens
gggagcggactgaag

SEQ ID NO: 277292 - DNA, 15 bp, Homo sapiens
ggggagcggactgaa

SEQ ID NO: 277293 - DNA, 15 bp, Homo sapiens
tggggagcggactga

SEQ ID NO: 277294 - DNA, 15 bp, Homo sapiens
ttggggagcggactg

SEQ ID NO: 277295 - DNA, 15 bp, Homo sapiens
gttggggagcggact

SEQ ID NO: 277296 - DNA, 15 bp, Homo sapiens
ggttggggagcggac

SEQ ID NO: 277297 - DNA, 15 bp, Homo sapiens
tggttggggagcgga

SEQ ID NO: 277298 - DNA, 15 bp, Homo sapiens
gtggttggggagcgg

SEQ ID NO: 277299 - DNA, 15 bp, Homo sapiens
ggtggttggggagcg

SEQ ID NO: 277300 - DNA, 15 bp, Homo sapiens
cggtggttggggagc

SEQ ID NO: 277301 - DNA, 15 bp, Homo sapiens
gcggtggttggggag

SEQ ID NO: 277302 - DNA, 15 bp, Homo sapiens
tgcggtggttgggga

SEQ ID NO: 277303 - DNA, 15 bp, Homo sapiens
ctgcggtggttgggg

SEQ ID NO: 277304 - DNA, 15 bp, Homo sapiens
gctgcggtggttggg

SEQ ID NO: 277305 - DNA, 15 bp, Homo sapiens
agctgcggtggttgg

SEQ ID NO: 277306 - DNA, 15 bp, Homo sapiens
cagctgcggtggttg

SEQ ID NO: 277307 - DNA, 15 bp, Homo sapiens
acagctgcggtggtt

SEQ ID NO: 277308 - DNA, 15 bp, Homo sapiens
tacagctgcggtggt

SEQ ID NO: 277309 - DNA, 15 bp, Homo sapiens
ctacagctgcggtgg

SEQ ID NO: 277310 - DNA, 15 bp, Homo sapiens
cctacagctgcggtg

SEQ ID NO: 277311 - DNA, 15 bp, Homo sapiens
tcctacagctgcggt

SEQ ID NO: 277312 - DNA, 15 bp, Homo sapiens
ttcctacagctgcgg

SEQ ID NO: 277313 - DNA, 15 bp, Homo sapiens
tttcctacagctgcg

SEQ ID NO: 277314 - DNA, 15 bp, Homo sapiens
gtttcctacagctgc

SEQ ID NO: 277315 - DNA, 15 bp, Homo sapiens
ggtttcctacagctg

SEQ ID NO: 277316 - DNA, 15 bp, Homo sapiens
tggtttcctacagct

SEQ ID NO: 277317 - DNA, 15 bp, Homo sapiens
gtggtttcctacagc

SEQ ID NO: 277318 - DNA, 15 bp, Homo sapiens
agtggtttcctacag

SEQ ID NO: 277319 - DNA, 15 bp, Homo sapiens
tagtggtttcctaca

SEQ ID NO: 277320 - DNA, 15 bp, Homo sapiens
ttagtggtttcctac

SEQ ID NO: 277321 - DNA, 15 bp, Homo sapiens
attagtggtttccta

SEQ ID NO: 277322 - DNA, 15 bp, Homo sapiens
gattagtggtttcct

SEQ ID NO: 277323 - DNA, 15 bp, Homo sapiens
agattagtggtttcc

SEQ ID NO: 277324 - DNA, 15 bp, Homo sapiens
tagattagtggtttc

SEQ ID NO: 277325 - DNA, 15 bp, Homo sapiens
gtagattagtggttt

SEQ ID NO: 277326 - DNA, 15 bp, Homo sapiens
agtagattagtggtt

SEQ ID NO: 277327 - DNA, 15 bp, Homo sapiens
aagtagattagtggt

SEQ ID NO: 277328 - DNA, 15 bp, Homo sapiens
aaagtagattagtgg

SEQ ID NO: 277329 - DNA, 15 bp, Homo sapiens
caaagtagattagtg

SEQ ID NO: 277330 - DNA, 15 bp, Homo sapiens
acaaagtagattagt

SEQ ID NO: 277331 - DNA, 15 bp, Homo sapiens
cacaaagtagattag

SEQ ID NO: 277332 - DNA, 15 bp, Homo sapiens
acacaaagtagatta

SEQ ID NO: 277333 - DNA, 15 bp, Homo sapiens
cacacaaagtagatt

SEQ ID NO: 277334 - DNA, 15 bp, Homo sapiens
tcacacaaagtagat

SEQ ID NO: 277335 - DNA, 15 bp, Homo sapiens
ttcacacaaagtaga

SEQ ID NO: 277336 - DNA, 15 bp, Homo sapiens
gttcacacaaagtag

SEQ ID NO: 277337 - DNA, 15 bp, Homo sapiens
ggttcacacaaagta

SEQ ID NO: 277338 - DNA, 15 bp, Homo sapiens
aggttcacacaaagt

SEQ ID NO: 277339 - DNA, 15 bp, Homo sapiens
taggttcacacaaag

SEQ ID NO: 277340 - DNA, 15 bp, Homo sapiens
ataggttcacacaaa

SEQ ID NO: 277341 - DNA, 15 bp, Homo sapiens
aataggttcacacaa

SEQ ID NO: 277342 - DNA, 15 bp, Homo sapiens
caattatcttgcctc

SEQ ID NO: 277343 - DNA, 15 bp, Homo sapiens
gcaattatcttgcct

SEQ ID NO: 277344 - DNA, 15 bp, Homo sapiens
agcaattatcttgcc

SEQ ID NO: 277345 - DNA, 15 bp, Homo sapiens
aagcaattatcttgc

SEQ ID NO: 277346 - DNA, 15 bp, Homo sapiens
caagcaattatcttg

SEQ ID NO: 277347 - DNA, 15 bp, Homo sapiens
tcaagcaattatctt

SEQ ID NO: 277348 - DNA, 15 bp, Homo sapiens
ttcaagcaattatct

SEQ ID NO: 277349 - DNA, 15 bp, Homo sapiens
ttcactgcaacctct

SEQ ID NO: 277350 - DNA, 15 bp, Homo sapiens
agttcactgcaacct

SEQ ID NO: 277351 - DNA, 15 bp, Homo sapiens
cagttcactgcaacc

SEQ ID NO: 277352 - DNA, 15 bp, Homo sapiens
tcagttcactgcaac

SEQ ID NO: 277353 - DNA, 15 bp, Homo sapiens
ctcagttcactgcaa

SEQ ID NO: 277354 - DNA, 15 bp, Homo sapiens
tctcagttcactgca

SEQ ID NO: 277355 - DNA, 15 bp, Homo sapiens
atctcagttcactgc

SEQ ID NO: 277356 - DNA, 15 bp, Homo sapiens
gatctcagttcactg

SEQ ID NO: 277357 - DNA, 15 bp, Homo sapiens
cgatctcagttcact

SEQ ID NO: 277358 - DNA, 15 bp, Homo sapiens
gcgatctcagttcac

SEQ ID NO: 277359 - DNA, 15 bp, Homo sapiens
cgcgatctcagttca

SEQ ID NO: 277360 - DNA, 15 bp, Homo sapiens
gcgcgatctcagttc

SEQ ID NO: 277361 - DNA, 15 bp, Homo sapiens
ggcgcgatctcagtt

SEQ ID NO: 277362 - DNA, 15 bp, Homo sapiens
tggcgcgatctcagt

SEQ ID NO: 277363 - DNA, 15 bp, Homo sapiens
gtggcgcgatctcag

SEQ ID NO: 277364 - DNA, 15 bp, Homo sapiens
agtggcgcgatctca

SEQ ID NO: 277365 - DNA, 15 bp, Homo sapiens
gttctgtcgcccagg

SEQ ID NO: 277366 - DNA, 15 bp, Homo sapiens
cgttctgtcgcccag

SEQ ID NO: 277367 - DNA, 15 bp, Homo sapiens
tcgttctgtcgccca

SEQ ID NO: 277368 - DNA, 15 bp, Homo sapiens
ctcgttctgtcgccc

SEQ ID NO: 277369 - DNA, 15 bp, Homo sapiens
cctcgttctgtcgcc

SEQ ID NO: 277370 - DNA, 15 bp, Homo sapiens
tcctcgttctgtcgc

SEQ ID NO: 277371 - DNA, 15 bp, Homo sapiens
atcctcgttctgtcg

SEQ ID NO: 277372 - DNA, 15 bp, Homo sapiens
gatcctcgttctgtc

SEQ ID NO: 277373 - DNA, 15 bp, Homo sapiens
agatcctcgttctgt

SEQ ID NO: 277374 - DNA, 15 bp, Homo sapiens
cagatcctcgttctg

SEQ ID NO: 277375 - DNA, 15 bp, Homo sapiens
acagatcctcgttct

SEQ ID NO: 277376 - DNA, 15 bp, Homo sapiens
gacagatcctcgttc

SEQ ID NO: 277377 - DNA, 15 bp, Homo sapiens
agacagatcctcgtt

SEQ ID NO: 277378 - DNA, 15 bp, Homo sapiens
tagacagatcctcgt

SEQ ID NO: 277379 - DNA, 15 bp, Homo sapiens
ttagacagatcctcg

SEQ ID NO: 277380 - DNA, 15 bp, Homo sapiens
tttagacagatcctc

SEQ ID NO: 277381 - DNA, 15 bp, Homo sapiens
ttttagacagatcct

SEQ ID NO: 277382 - DNA, 15 bp, Homo sapiens
tttttagacagatcc

SEQ ID NO: 277383 - DNA, 15 bp, Homo sapiens
ttttttagacagatc

SEQ ID NO: 277384 - DNA, 15 bp, Homo sapiens
tttttttagacagat

SEQ ID NO: 277385 - DNA, 15 bp, Homo sapiens
ttttttttagacaga

SEQ ID NO: 277386 - DNA, 15 bp, Homo sapiens
tttttttttagacag

SEQ ID NO: 277387 - DNA, 15 bp, Homo sapiens
ttttttttttagaca

SEQ ID NO: 277388 - DNA, 15 bp, Homo sapiens
tttttttttttttag

SEQ ID NO: 277389 - DNA, 15 bp, Homo sapiens
tttttttttttttta

SEQ ID NO: 277390 - DNA, 15 bp, Homo sapiens
tatactctttttttt

SEQ ID NO: 277391 - DNA, 15 bp, Homo sapiens
atatactcttttttt

SEQ ID NO: 277392 - DNA, 15 bp, Homo sapiens
gaaatatactctttt

SEQ ID NO: 277393 - DNA, 15 bp, Homo sapiens
tgaaatatactcttt

SEQ ID NO: 277394 - DNA, 15 bp, Homo sapiens
atgaaatatactctt

SEQ ID NO: 277395 - DNA, 15 bp, Homo sapiens
catgaaatatactct

SEQ ID NO: 277396 - DNA, 15 bp, Homo sapiens
tcatgaaatatactc

SEQ ID NO: 277397 - DNA, 15 bp, Homo sapiens
gtcatgaaatatact

SEQ ID NO: 277398 - DNA, 15 bp, Homo sapiens
agtcatgaaatatac

SEQ ID NO: 277399 - DNA, 15 bp, Homo sapiens
gagtcatgaaatata

SEQ ID NO: 277400 - DNA, 15 bp, Homo sapiens
ggagtcatgaaatat

SEQ ID NO: 277401 - DNA, 15 bp, Homo sapiens
tggagtcatgaaata

SEQ ID NO: 277402 - DNA, 15 bp, Homo sapiens
ttggagtcatgaaat

SEQ ID NO: 277403 - DNA, 15 bp, Homo sapiens
cttggagtcatgaaa

SEQ ID NO: 277404 - DNA, 15 bp, Homo sapiens
acttggagtcatgaa

SEQ ID NO: 277405 - DNA, 15 bp, Homo sapiens
cacttggagtcatga

SEQ ID NO: 277406 - DNA, 15 bp, Homo sapiens
ccacttggagtcatg

SEQ ID NO: 277407 - DNA, 15 bp, Homo sapiens
gccacttggagtcat

SEQ ID NO: 277408 - DNA, 15 bp, Homo sapiens
ggccacttggagtca

SEQ ID NO: 277409 - DNA, 15 bp, Homo sapiens
aggccacttggagtc

SEQ ID NO: 277410 - DNA, 15 bp, Homo sapiens
gaggccacttggagt

SEQ ID NO: 277411 - DNA, 15 bp, Homo sapiens
ggaggccacttggag

SEQ ID NO: 277412 - DNA, 15 bp, Homo sapiens
gggaggccacttgga

SEQ ID NO: 277413 - DNA, 15 bp, Homo sapiens
tgggaggccacttgg

SEQ ID NO: 277414 - DNA, 15 bp, Homo sapiens
atgggaggccacttg

SEQ ID NO: 277415 - DNA, 15 bp, Homo sapiens
gatgggaggccactt

SEQ ID NO: 277416 - DNA, 15 bp, Homo sapiens
agatgggaggccact

SEQ ID NO: 277417 - DNA, 15 bp, Homo sapiens
aagatgggaggccac

SEQ ID NO: 277418 - DNA, 15 bp, Homo sapiens
gaagatgggaggcca

SEQ ID NO: 277419 - DNA, 15 bp, Homo sapiens
agaagatgggaggcc

SEQ ID NO: 277420 - DNA, 15 bp, Homo sapiens
cagaagatgggaggc

SEQ ID NO: 277421 - DNA, 15 bp, Homo sapiens
acagaagatgggagg

SEQ ID NO: 277422 - DNA, 15 bp, Homo sapiens
aacagaagatgggag

SEQ ID NO: 277423 - DNA, 15 bp, Homo sapiens
aaacagaagatggga

SEQ ID NO: 277424 - DNA, 15 bp, Homo sapiens
aaaacagaagatggg

SEQ ID NO: 277425 - DNA, 15 bp, Homo sapiens
aaaaacagaagatgg

SEQ ID NO: 277426 - DNA, 15 bp, Homo sapiens
gaaaaacagaagatg

SEQ ID NO: 277427 - DNA, 15 bp, Homo sapiens
agaaaaacagaagat

SEQ ID NO: 277428 - DNA, 15 bp, Homo sapiens
aagaaaaacagaaga

SEQ ID NO: 277429 - DNA, 15 bp, Homo sapiens
caagaaaaacagaag

SEQ ID NO: 277430 - DNA, 15 bp, Homo sapiens
ccaagaaaaacagaa

SEQ ID NO: 277431 - DNA, 15 bp, Homo sapiens
cccaagaaaaacaga

SEQ ID NO: 277432 - DNA, 15 bp, Homo sapiens
gcccaagaaaaacag

SEQ ID NO: 277433 - DNA, 15 bp, Homo sapiens
ggcccaagaaaaaca

SEQ ID NO: 277434 - DNA, 15 bp, Homo sapiens
aggcccaagaaaaac

SEQ ID NO: 277435 - DNA, 15 bp, Homo sapiens
aaggcccaagaaaaa

SEQ ID NO: 277436 - DNA, 15 bp, Homo sapiens
taaggcccaagaaaa

SEQ ID NO: 277437 - DNA, 15 bp, Homo sapiens
ataaggcccaagaaa

SEQ ID NO: 277438 - DNA, 15 bp, Homo sapiens
cataaggcccaagaa

SEQ ID NO: 277439 - DNA, 15 bp, Homo sapiens
acataaggcccaaga

SEQ ID NO: 277440 - DNA, 15 bp, Homo sapiens
tacataaggcccaag

SEQ ID NO: 277441 - DNA, 15 bp, Homo sapiens
atacataaggcccaa

SEQ ID NO: 277442 - DNA, 15 bp, Homo sapiens
tatacataaggccca

SEQ ID NO: 277443 - DNA, 15 bp, Homo sapiens
ctatacataaggccc

SEQ ID NO: 277444 - DNA, 15 bp, Homo sapiens
cctatacataaggcc

SEQ ID NO: 277445 - DNA, 15 bp, Homo sapiens
tcctatacataaggc

SEQ ID NO: 277446 - DNA, 15 bp, Homo sapiens
atcctatacataagg

SEQ ID NO: 277447 - DNA, 15 bp, Homo sapiens
tatcctatacataag

SEQ ID NO: 277448 - DNA, 15 bp, Homo sapiens
atatcctatacataa

SEQ ID NO: 277449 - DNA, 15 bp, Homo sapiens
catatcctatacata

SEQ ID NO: 277450 - DNA, 15 bp, Homo sapiens
acatatcctatacat

SEQ ID NO: 277451 - DNA, 15 bp, Homo sapiens
aacatatcctataca

SEQ ID NO: 277452 - DNA, 15 bp, Homo sapiens
taacatatcctatac

SEQ ID NO: 277453 - DNA, 15 bp, Homo sapiens
ttaacatatcctata

SEQ ID NO: 277454 - DNA, 15 bp, Homo sapiens
tttaacatatcctat

SEQ ID NO: 277455 - DNA, 15 bp, Homo sapiens
atttaacatatccta

SEQ ID NO: 277456 - DNA, 15 bp, Homo sapiens
tatttaacatatcct

SEQ ID NO: 277457 - DNA, 15 bp, Homo sapiens
gtatttaacatatcc

SEQ ID NO: 277458 - DNA, 15 bp, Homo sapiens
agtatttaacatatc

SEQ ID NO: 277459 - DNA, 15 bp, Homo sapiens
aagtatttaacatat

SEQ ID NO: 277460 - DNA, 15 bp, Homo sapiens
taagtatttaacata

SEQ ID NO: 277461 - DNA, 15 bp, Homo sapiens
ctaagtatttaacat

SEQ ID NO: 277462 - DNA, 15 bp, Homo sapiens
cctaagtatttaaca

SEQ ID NO: 277463 - DNA, 15 bp, Homo sapiens
acctaagtatttaac

SEQ ID NO: 277464 - DNA, 15 bp, Homo sapiens
cacctaagtatttaa

SEQ ID NO: 277465 - DNA, 15 bp, Homo sapiens
tcacctaagtattta

SEQ ID NO: 277466 - DNA, 15 bp, Homo sapiens
gtcacctaagtattt

SEQ ID NO: 277467 - DNA, 15 bp, Homo sapiens
agtcacctaagtatt

SEQ ID NO: 277468 - DNA, 15 bp, Homo sapiens
tagtcacctaagtat

SEQ ID NO: 277469 - DNA, 15 bp, Homo sapiens
atagtcacctaagta

SEQ ID NO: 277470 - DNA, 15 bp, Homo sapiens
aatagtcacctaagt

SEQ ID NO: 277471 - DNA, 15 bp, Homo sapiens
aaatagtcacctaag

SEQ ID NO: 277472 - DNA, 15 bp, Homo sapiens
caaatagtcacctaa

SEQ ID NO: 277473 - DNA, 15 bp, Homo sapiens
ccaaatagtcaccta

SEQ ID NO: 277474 - DNA, 15 bp, Homo sapiens
cccaaatagtcacct

SEQ ID NO: 277475 - DNA, 15 bp, Homo sapiens
ccccaaatagtcacc

SEQ ID NO: 277476 - DNA, 15 bp, Homo sapiens
accccaaatagtcac

SEQ ID NO: 277477 - DNA, 15 bp, Homo sapiens
caccccaaatagtca

SEQ ID NO: 277478 - DNA, 15 bp, Homo sapiens
gcaccccaaatagtc

SEQ ID NO: 277479 - DNA, 15 bp, Homo sapiens
agcaccccaaatagt

SEQ ID NO: 277480 - DNA, 15 bp, Homo sapiens
gagcaccccaaatag

SEQ ID NO: 277481 - DNA, 15 bp, Homo sapiens
agagcaccccaaata

SEQ ID NO: 277482 - DNA, 15 bp, Homo sapiens
tagagcaccccaaat

SEQ ID NO: 277483 - DNA, 15 bp, Homo sapiens
atagagcaccccaaa

SEQ ID NO: 277484 - DNA, 15 bp, Homo sapiens
tatagagcaccccaa

SEQ ID NO: 277485 - DNA, 15 bp, Homo sapiens
ttatagagcacccca

SEQ ID NO: 277486 - DNA, 15 bp, Homo sapiens
attatagagcacccc

SEQ ID NO: 277487 - DNA, 15 bp, Homo sapiens
tattatagagcaccc

SEQ ID NO: 277488 - DNA, 15 bp, Homo sapiens
ttattatagagcacc

SEQ ID NO: 277489 - DNA, 15 bp, Homo sapiens
attattatagagcac

SEQ ID NO: 277490 - DNA, 15 bp, Homo sapiens
tattattatagagca

SEQ ID NO: 277491 - DNA, 15 bp, Homo sapiens
gtattattatagagc

SEQ ID NO: 277492 - DNA, 15 bp, Homo sapiens
ggtattattatagag

SEQ ID NO: 277493 - DNA, 15 bp, Homo sapiens
tggtattattataga

SEQ ID NO: 277494 - DNA, 15 bp, Homo sapiens
atggtattattatag

SEQ ID NO: 277495 - DNA, 15 bp, Homo sapiens
aatggtattattata

SEQ ID NO: 277496 - DNA, 15 bp, Homo sapiens
taatggtattattat

SEQ ID NO: 277497 - DNA, 15 bp, Homo sapiens
gtaatggtattatta

SEQ ID NO: 277498 - DNA, 15 bp, Homo sapiens
ggtaatggtattatt

SEQ ID NO: 277499 - DNA, 15 bp, Homo sapiens
tggtaatggtattat

SEQ ID NO: 277500 - DNA, 15 bp, Homo sapiens
atggtaatggtatta

SEQ ID NO: 277501 - DNA, 15 bp, Homo sapiens
catggtaatggtatt

SEQ ID NO: 277502 - DNA, 15 bp, Homo sapiens
gcatggtaatggtat

SEQ ID NO: 277503 - DNA, 15 bp, Homo sapiens
tgcatggtaatggta

SEQ ID NO: 277504 - DNA, 15 bp, Homo sapiens
ctgcatggtaatggt

SEQ ID NO: 277505 - DNA, 15 bp, Homo sapiens
tctgcatggtaatgg

SEQ ID NO: 277506 - DNA, 15 bp, Homo sapiens
gtctgcatggtaatg

SEQ ID NO: 277507 - DNA, 15 bp, Homo sapiens
agtctgcatggtaat

SEQ ID NO: 277508 - DNA, 15 bp, Homo sapiens
tagtctgcatggtaa

SEQ ID NO: 277509 - DNA, 15 bp, Homo sapiens
ttagtctgcatggta

SEQ ID NO: 277510 - DNA, 15 bp, Homo sapiens
tttagtctgcatggt

SEQ ID NO: 277511 - DNA, 15 bp, Homo sapiens
ttttagtctgcatgg

SEQ ID NO: 277512 - DNA, 15 bp, Homo sapiens
attttagtctgcatg

SEQ ID NO: 277513 - DNA, 15 bp, Homo sapiens
cattttagtctgcat

SEQ ID NO: 277514 - DNA, 15 bp, Homo sapiens
acattttagtctgca

SEQ ID NO: 277515 - DNA, 15 bp, Homo sapiens
tacattttagtctgc

SEQ ID NO: 277516 - DNA, 15 bp, Homo sapiens
ttacattttagtctg

SEQ ID NO: 277517 - DNA, 15 bp, Homo sapiens
attacattttagtct

SEQ ID NO: 277518 - DNA, 15 bp, Homo sapiens
gattacattttagtc

SEQ ID NO: 277519 - DNA, 15 bp, Homo sapiens
tgattacattttagt

SEQ ID NO: 277520 - DNA, 15 bp, Homo sapiens
atgattacattttag

SEQ ID NO: 277521 - DNA, 15 bp, Homo sapiens
aatgattacatttta

SEQ ID NO: 277522 - DNA, 15 bp, Homo sapiens
aaatgattacatttt

SEQ ID NO: 277523 - DNA, 15 bp, Homo sapiens
aaaatgattacattt

SEQ ID NO: 277524 - DNA, 15 bp, Homo sapiens
caaaatgattacatt

SEQ ID NO: 277525 - DNA, 15 bp, Homo sapiens
acaaaatgattacat

SEQ ID NO: 277526 - DNA, 15 bp, Homo sapiens
cacaaaatgattaca

SEQ ID NO: 277527 - DNA, 15 bp, Homo sapiens
acacaaaatgattac

SEQ ID NO: 277528 - DNA, 15 bp, Homo sapiens
aacacaaaatgatta

SEQ ID NO: 277529 - DNA, 15 bp, Homo sapiens
aaacacaaaatgatt

SEQ ID NO: 277530 - DNA, 15 bp, Homo sapiens
aaaacacaaaatgat

SEQ ID NO: 277531 - DNA, 15 bp, Homo sapiens
gaaaacacaaaatga

SEQ ID NO: 277532 - DNA, 15 bp, Homo sapiens
tgaaaacacaaaatg

SEQ ID NO: 277533 - DNA, 15 bp, Homo sapiens
ttgaaaacacaaaat

SEQ ID NO: 277534 - DNA, 15 bp, Homo sapiens
tttgaaaacacaaaa

SEQ ID NO: 277535 - DNA, 15 bp, Homo sapiens
gtttgaaaacacaaa

SEQ ID NO: 277536 - DNA, 15 bp, Homo sapiens
agtttgaaaacacaa

SEQ ID NO: 277537 - DNA, 15 bp, Homo sapiens
aagtttgaaaacaca

SEQ ID NO: 277538 - DNA, 15 bp, Homo sapiens
taagtttgaaaacac

SEQ ID NO: 277539 - DNA, 15 bp, Homo sapiens
ctaagtttgaaaaca

SEQ ID NO: 277540 - DNA, 15 bp, Homo sapiens
tctaagtttgaaaac

SEQ ID NO: 277541 - DNA, 15 bp, Homo sapiens
ctctaagtttgaaaa

SEQ ID NO: 277542 - DNA, 15 bp, Homo sapiens
actctaagtttgaaa

SEQ ID NO: 277543 - DNA, 15 bp, Homo sapiens
aactctaagtttgaa

SEQ ID NO: 277544 - DNA, 15 bp, Homo sapiens
gaactctaagtttga

SEQ ID NO: 277545 - DNA, 15 bp, Homo sapiens
agaactctaagtttg

SEQ ID NO: 277546 - DNA, 15 bp, Homo sapiens
gagaactctaagttt

SEQ ID NO: 277547 - DNA, 15 bp, Homo sapiens
tgagaactctaagtt

SEQ ID NO: 277548 - DNA, 15 bp, Homo sapiens
ctgagaactctaagt

SEQ ID NO: 277549 - DNA, 15 bp, Homo sapiens
tctgagaactctaag

SEQ ID NO: 277550 - DNA, 15 bp, Homo sapiens
gtctgagaactctaa

SEQ ID NO: 277551 - DNA, 15 bp, Homo sapiens
tgtctgagaactcta

SEQ ID NO: 277552 - DNA, 15 bp, Homo sapiens
ttgtctgagaactct

SEQ ID NO: 277553 - DNA, 15 bp, Homo sapiens
attgtctgagaactc

SEQ ID NO: 277554 - DNA, 15 bp, Homo sapiens
cattgtctgagaact

SEQ ID NO: 277555 - DNA, 15 bp, Homo sapiens
ccattgtctgagaac

SEQ ID NO: 277556 - DNA, 15 bp, Homo sapiens
cccattgtctgagaa

SEQ ID NO: 277557 - DNA, 15 bp, Homo sapiens
ccccattgtctgaga

SEQ ID NO: 277558 - DNA, 15 bp, Homo sapiens
tccccattgtctgag

SEQ ID NO: 277559 - DNA, 15 bp, Homo sapiens
atccccattgtctga

SEQ ID NO: 277560 - DNA, 15 bp, Homo sapiens
aatccccattgtctg

SEQ ID NO: 277561 - DNA, 15 bp, Homo sapiens
aaatccccattgtct

SEQ ID NO: 277562 - DNA, 15 bp, Homo sapiens
caaatccccattgtc

SEQ ID NO: 277563 - DNA, 15 bp, Homo sapiens
acaaatccccattgt

SEQ ID NO: 277564 - DNA, 15 bp, Homo sapiens
aacaaatccccattg

SEQ ID NO: 277565 - DNA, 15 bp, Homo sapiens
taacaaatccccatt

SEQ ID NO: 277566 - DNA, 15 bp, Homo sapiens
ctaacaaatccccat

SEQ ID NO: 277567 - DNA, 15 bp, Homo sapiens
tctaacaaatcccca

SEQ ID NO: 277568 - DNA, 15 bp, Homo sapiens
ctctaacaaatcccc

SEQ ID NO: 277569 - DNA, 15 bp, Homo sapiens
tctctaacaaatccc

SEQ ID NO: 277570 - DNA, 15 bp, Homo sapiens
ctctctaacaaatcc

SEQ ID NO: 277571 - DNA, 15 bp, Homo sapiens
tctctctaacaaatc

SEQ ID NO: 277572 - DNA, 15 bp, Homo sapiens
atctctctaacaaat

SEQ ID NO: 277573 - DNA, 15 bp, Homo sapiens
tatctctctaacaaa

SEQ ID NO: 277574 - DNA, 15 bp, Homo sapiens
ctatctctctaacaa

SEQ ID NO: 277575 - DNA, 15 bp, Homo sapiens
tctatctctctaaca

SEQ ID NO: 277576 - DNA, 15 bp, Homo sapiens
ctctatctctctaac

SEQ ID NO: 277577 - DNA, 15 bp, Homo sapiens
tctctatctctctaa

SEQ ID NO: 277578 - DNA, 15 bp, Homo sapiens
ttctctatctctcta

SEQ ID NO: 277579 - DNA, 15 bp, Homo sapiens
tttctctatctctct

SEQ ID NO: 277580 - DNA, 15 bp, Homo sapiens
ctttctctatctctc

SEQ ID NO: 277581 - DNA, 15 bp, Homo sapiens
tctttctctatctct

SEQ ID NO: 277582 - DNA, 15 bp, Homo sapiens
ctctttctctatctc

SEQ ID NO: 277583 - DNA, 15 bp, Homo sapiens
tctctttctctatct

SEQ ID NO: 277584 - DNA, 15 bp, Homo sapiens
ctctctttctctatc

SEQ ID NO: 277585 - DNA, 15 bp, Homo sapiens
tctctctttctctat

SEQ ID NO: 277586 - DNA, 15 bp, Homo sapiens
ctctctctttctcta

SEQ ID NO: 277587 - DNA, 15 bp, Homo sapiens
gtctctctctttctc

SEQ ID NO: 277588 - DNA, 15 bp, Homo sapiens
agtctctctctttct

SEQ ID NO: 277589 - DNA, 15 bp, Homo sapiens
tagtctctctctttc

SEQ ID NO: 277590 - DNA, 15 bp, Homo sapiens
ttagtctctctcttt

SEQ ID NO: 277591 - DNA, 15 bp, Homo sapiens
tttagtctctctctt

SEQ ID NO: 277592 - DNA, 15 bp, Homo sapiens
gtttagtctctctct

SEQ ID NO: 277593 - DNA, 15 bp, Homo sapiens
agtttagtctctctc

SEQ ID NO: 277594 - DNA, 15 bp, Homo sapiens
cagtttagtctctct

SEQ ID NO: 277595 - DNA, 15 bp, Homo sapiens
tcagtttagtctctc

SEQ ID NO: 277596 - DNA, 15 bp, Homo sapiens
gtcagtttagtctct

SEQ ID NO: 277597 - DNA, 15 bp, Homo sapiens
tgtcagtttagtctc

SEQ ID NO: 277598 - DNA, 15 bp, Homo sapiens
gtgtcagtttagtct

SEQ ID NO: 277599 - DNA, 15 bp, Homo sapiens
agtgtcagtttagtc

SEQ ID NO: 277600 - DNA, 15 bp, Homo sapiens
aagtgtcagtttagt

SEQ ID NO: 277601 - DNA, 15 bp, Homo sapiens
gaagtgtcagtttag

SEQ ID NO: 277602 - DNA, 15 bp, Homo sapiens
agaagtgtcagttta

SEQ ID NO: 277603 - DNA, 15 bp, Homo sapiens
tagaagtgtcagttt

SEQ ID NO: 277604 - DNA, 15 bp, Homo sapiens
ttagaagtgtcagtt

SEQ ID NO: 277605 - DNA, 15 bp, Homo sapiens
cttagaagtgtcagt

SEQ ID NO: 277606 - DNA, 15 bp, Homo sapiens
ccttagaagtgtcag

SEQ ID NO: 277607 - DNA, 15 bp, Homo sapiens
accttagaagtgtca

SEQ ID NO: 277608 - DNA, 15 bp, Homo sapiens
caccttagaagtgtc

SEQ ID NO: 277609 - DNA, 15 bp, Homo sapiens
ccaccttagaagtgt

SEQ ID NO: 277610 - DNA, 15 bp, Homo sapiens
gccaccttagaagtg

SEQ ID NO: 277611 - DNA, 15 bp, Homo sapiens
agccaccttagaagt

SEQ ID NO: 277612 - DNA, 15 bp, Homo sapiens
aagccaccttagaag

SEQ ID NO: 277613 - DNA, 15 bp, Homo sapiens
aaagccaccttagaa

SEQ ID NO: 277614 - DNA, 15 bp, Homo sapiens
caaagccaccttaga

SEQ ID NO: 277615 - DNA, 15 bp, Homo sapiens
gcaaagccaccttag

SEQ ID NO: 277616 - DNA, 15 bp, Homo sapiens
agcaaagccacctta

SEQ ID NO: 277617 - DNA, 15 bp, Homo sapiens
tagcaaagccacctt

SEQ ID NO: 277618 - DNA, 15 bp, Homo sapiens
ctagcaaagccacct

SEQ ID NO: 277619 - DNA, 15 bp, Homo sapiens
cctagcaaagccacc

SEQ ID NO: 277620 - DNA, 15 bp, Homo sapiens
ccctagcaaagccac

SEQ ID NO: 277621 - DNA, 15 bp, Homo sapiens
cccctagcaaagcca

SEQ ID NO: 277622 - DNA, 15 bp, Homo sapiens
gcccctagcaaagcc

SEQ ID NO: 277623 - DNA, 15 bp, Homo sapiens
ggcccctagcaaagc

SEQ ID NO: 277624 - DNA, 15 bp, Homo sapiens
aggcccctagcaaag

SEQ ID NO: 277625 - DNA, 15 bp, Homo sapiens
taggcccctagcaaa

SEQ ID NO: 277626 - DNA, 15 bp, Homo sapiens
ctaggcccctagcaa

SEQ ID NO: 277627 - DNA, 15 bp, Homo sapiens
tctaggcccctagca

SEQ ID NO: 277628 - DNA, 15 bp, Homo sapiens
ctctaggcccctagc

SEQ ID NO: 277629 - DNA, 15 bp, Homo sapiens
tctctaggcccctag

SEQ ID NO: 277630 - DNA, 15 bp, Homo sapiens
ttctctaggccccta

SEQ ID NO: 277631 - DNA, 15 bp, Homo sapiens
cttctctaggcccct

SEQ ID NO: 277632 - DNA, 15 bp, Homo sapiens
tcttctctaggcccc

SEQ ID NO: 277633 - DNA, 15 bp, Homo sapiens
gtcttctctaggccc

SEQ ID NO: 277634 - DNA, 15 bp, Homo sapiens
tgtcttctctaggcc

SEQ ID NO: 277635 - DNA, 15 bp, Homo sapiens
ttgtcttctctaggc

SEQ ID NO: 277636 - DNA, 15 bp, Homo sapiens
cttgtcttctctagg

SEQ ID NO: 277637 - DNA, 15 bp, Homo sapiens
acttgtcttctctag

SEQ ID NO: 277638 - DNA, 15 bp, Homo sapiens
gacttgtcttctcta

SEQ ID NO: 277639 - DNA, 15 bp, Homo sapiens
agacttgtcttctct

SEQ ID NO: 277640 - DNA, 15 bp, Homo sapiens
gagacttgtcttctc

SEQ ID NO: 277641 - DNA, 15 bp, Homo sapiens
agagacttgtcttct

SEQ ID NO: 277642 - DNA, 15 bp, Homo sapiens
cagagacttgtcttc

SEQ ID NO: 277643 - DNA, 15 bp, Homo sapiens
tcagagacttgtctt

SEQ ID NO: 277644 - DNA, 15 bp, Homo sapiens
atcagagacttgtct

SEQ ID NO: 277645 - DNA, 15 bp, Homo sapiens
catcagagacttgtc

SEQ ID NO: 277646 - DNA, 15 bp, Homo sapiens
ccatcagagacttgt

SEQ ID NO: 277647 - DNA, 15 bp, Homo sapiens
cccatcagagacttg

SEQ ID NO: 277648 - DNA, 15 bp, Homo sapiens
ccccatcagagactt

SEQ ID NO: 277649 - DNA, 15 bp, Homo sapiens
tccccatcagagact

SEQ ID NO: 277650 - DNA, 15 bp, Homo sapiens
atccccatcagagac

SEQ ID NO: 277651 - DNA, 15 bp, Homo sapiens
aatccccatcagaga

SEQ ID NO: 277652 - DNA, 15 bp, Homo sapiens
gaatccccatcagag

SEQ ID NO: 277653 - DNA, 15 bp, Homo sapiens
agaatccccatcaga

SEQ ID NO: 277654 - DNA, 15 bp, Homo sapiens
tagaatccccatcag

SEQ ID NO: 277655 - DNA, 15 bp, Homo sapiens
atagaatccccatca

SEQ ID NO: 277656 - DNA, 15 bp, Homo sapiens
aatagaatccccatc

SEQ ID NO: 277657 - DNA, 15 bp, Homo sapiens
aaatagaatccccat

SEQ ID NO: 277658 - DNA, 15 bp, Homo sapiens
aaaatagaatcccca

SEQ ID NO: 277659 - DNA, 15 bp, Homo sapiens
gaaaatagaatcccc

SEQ ID NO: 277660 - DNA, 15 bp, Homo sapiens
tgaaaatagaatccc

SEQ ID NO: 277661 - DNA, 15 bp, Homo sapiens
atgaaaatagaatcc

SEQ ID NO: 277662 - DNA, 15 bp, Homo sapiens
catgaaaatagaatc

SEQ ID NO: 277663 - DNA, 15 bp, Homo sapiens
ccatgaaaatagaat

SEQ ID NO: 277664 - DNA, 15 bp, Homo sapiens
gccatgaaaatagaa

SEQ ID NO: 277665 - DNA, 15 bp, Homo sapiens
ggccatgaaaataga

SEQ ID NO: 277666 - DNA, 15 bp, Homo sapiens
tggccatgaaaatag

SEQ ID NO: 277667 - DNA, 15 bp, Homo sapiens
gtggccatgaaaata

SEQ ID NO: 277668 - DNA, 15 bp, Homo sapiens
tgtggccatgaaaat

SEQ ID NO: 277669 - DNA, 15 bp, Homo sapiens
atgtggccatgaaaa

SEQ ID NO: 277670 - DNA, 15 bp, Homo sapiens
gatgtggccatgaaa

SEQ ID NO: 277671 - DNA, 15 bp, Homo sapiens
ggatgtggccatgaa

SEQ ID NO: 277672 - DNA, 15 bp, Homo sapiens
tggatgtggccatga

SEQ ID NO: 277673 - DNA, 15 bp, Homo sapiens
ttggatgtggccatg

SEQ ID NO: 277674 - DNA, 15 bp, Homo sapiens
tttggatgtggccat

SEQ ID NO: 277675 - DNA, 15 bp, Homo sapiens
ctttggatgtggcca

SEQ ID NO: 277676 - DNA, 15 bp, Homo sapiens
actttggatgtggcc

SEQ ID NO: 277677 - DNA, 15 bp, Homo sapiens
tactttggatgtggc

SEQ ID NO: 277678 - DNA, 15 bp, Homo sapiens
atactttggatgtgg

SEQ ID NO: 277679 - DNA, 15 bp, Homo sapiens
aatactttggatgtg

SEQ ID NO: 277680 - DNA, 15 bp, Homo sapiens
caatactttggatgt

SEQ ID NO: 277681 - DNA, 15 bp, Homo sapiens
tcaatactttggatg

SEQ ID NO: 277682 - DNA, 15 bp, Homo sapiens
atcaatactttggat

SEQ ID NO: 277683 - DNA, 15 bp, Homo sapiens
catcaatactttgga

SEQ ID NO: 277684 - DNA, 15 bp, Homo sapiens
acatcaatactttgg

SEQ ID NO: 277685 - DNA, 15 bp, Homo sapiens
cacatcaatactttg

SEQ ID NO: 277686 - DNA, 15 bp, Homo sapiens
acacatcaatacttt

SEQ ID NO: 277687 - DNA, 15 bp, Homo sapiens
aacacatcaatactt

SEQ ID NO: 277688 - DNA, 15 bp, Homo sapiens
aaacacatcaatact

SEQ ID NO: 277689 - DNA, 15 bp, Homo sapiens
aaaacacatcaatac

SEQ ID NO: 277690 - DNA, 15 bp, Homo sapiens
gaaaacacatcaata

SEQ ID NO: 277691 - DNA, 15 bp, Homo sapiens
agaaaacacatcaat

SEQ ID NO: 277692 - DNA, 15 bp, Homo sapiens
cagaaaacacatcaa

SEQ ID NO: 277693 - DNA, 15 bp, Homo sapiens
gcagaaaacacatca

SEQ ID NO: 277694 - DNA, 15 bp, Homo sapiens
tgcagaaaacacatc

SEQ ID NO: 277695 - DNA, 15 bp, Homo sapiens
ctgcagaaaacacat

SEQ ID NO: 277696 - DNA, 15 bp, Homo sapiens
gctgcagaaaacaca

SEQ ID NO: 277697 - DNA, 15 bp, Homo sapiens
tgctgcagaaaacac

SEQ ID NO: 277698 - DNA, 15 bp, Homo sapiens
gtgctgcagaaaaca

SEQ ID NO: 277699 - DNA, 15 bp, Homo sapiens
ggtgctgcagaaaac

SEQ ID NO: 277700 - DNA, 15 bp, Homo sapiens
aggtgctgcagaaaa

SEQ ID NO: 277701 - DNA, 15 bp, Homo sapiens
caggtgctgcagaaa

SEQ ID NO: 277702 - DNA, 15 bp, Homo sapiens
ccaggtgctgcagaa

SEQ ID NO: 277703 - DNA, 15 bp, Homo sapiens
tccaggtgctgcaga

SEQ ID NO: 277704 - DNA, 15 bp, Homo sapiens
atccaggtgctgcag

SEQ ID NO: 277705 - DNA, 15 bp, Homo sapiens
gatccaggtgctgca

SEQ ID NO: 277706 - DNA, 15 bp, Homo sapiens
agatccaggtgctgc

SEQ ID NO: 277707 - DNA, 15 bp, Homo sapiens
cagatccaggtgctg

SEQ ID NO: 277708 - DNA, 15 bp, Homo sapiens
ccagatccaggtgct

SEQ ID NO: 277709 - DNA, 15 bp, Homo sapiens
cccagatccaggtgc

SEQ ID NO: 277710 - DNA, 15 bp, Homo sapiens
gcccagatccaggtg

SEQ ID NO: 277711 - DNA, 15 bp, Homo sapiens
agcccagatccaggt

SEQ ID NO: 277712 - DNA, 15 bp, Homo sapiens
cagcccagatccagg

SEQ ID NO: 277713 - DNA, 15 bp, Homo sapiens
tcagcccagatccag

SEQ ID NO: 277714 - DNA, 15 bp, Homo sapiens
gtcagcccagatcca

SEQ ID NO: 277715 - DNA, 15 bp, Homo sapiens
tgtcagcccagatcc

SEQ ID NO: 277716 - DNA, 15 bp, Homo sapiens
ttgtcagcccagatc

SEQ ID NO: 277717 - DNA, 15 bp, Homo sapiens
attgtcagcccagat

SEQ ID NO: 277718 - DNA, 15 bp, Homo sapiens
cattgtcagcccaga

SEQ ID NO: 277719 - DNA, 15 bp, Homo sapiens
acattgtcagcccag

SEQ ID NO: 277720 - DNA, 15 bp, Homo sapiens
cacattgtcagccca

SEQ ID NO: 277721 - DNA, 15 bp, Homo sapiens
tcacattgtcagccc

SEQ ID NO: 277722 - DNA, 15 bp, Homo sapiens
atcacattgtcagcc

SEQ ID NO: 277723 - DNA, 15 bp, Homo sapiens
gatcacattgtcagc

SEQ ID NO: 277724 - DNA, 15 bp, Homo sapiens
tgatcacattgtcag

SEQ ID NO: 277725 - DNA, 15 bp, Homo sapiens
ttgatcacattgtca

SEQ ID NO: 277726 - DNA, 15 bp, Homo sapiens
cttgatcacattgtc

SEQ ID NO: 277727 - DNA, 15 bp, Homo sapiens
gcttgatcacattgt

SEQ ID NO: 277728 - DNA, 15 bp, Homo sapiens
ggcttgatcacattg

SEQ ID NO: 277729 - DNA, 15 bp, Homo sapiens
aggcttgatcacatt

SEQ ID NO: 277730 - DNA, 15 bp, Homo sapiens
caggcttgatcacat

SEQ ID NO: 277731 - DNA, 15 bp, Homo sapiens
tcaggcttgatcaca

SEQ ID NO: 277732 - DNA, 15 bp, Homo sapiens
gtcaggcttgatcac

SEQ ID NO: 277733 - DNA, 15 bp, Homo sapiens
tgtcaggcttgatca

SEQ ID NO: 277734 - DNA, 15 bp, Homo sapiens
gtgtcaggcttgatc

SEQ ID NO: 277735 - DNA, 15 bp, Homo sapiens
cgtgtcaggcttgat

SEQ ID NO: 277736 - DNA, 15 bp, Homo sapiens
tcgtgtcaggcttga

SEQ ID NO: 277737 - DNA, 15 bp, Homo sapiens
atcgtgtcaggcttg

SEQ ID NO: 277738 - DNA, 15 bp, Homo sapiens
tatcgtgtcaggctt

SEQ ID NO: 277739 - DNA, 15 bp, Homo sapiens
ttatcgtgtcaggct

SEQ ID NO: 277740 - DNA, 15 bp, Homo sapiens
tttatcgtgtcaggc

SEQ ID NO: 277741 - DNA, 15 bp, Homo sapiens
ctttatcgtgtcagg

SEQ ID NO: 277742 - DNA, 15 bp, Homo sapiens
tctttatcgtgtcag

SEQ ID NO: 277743 - DNA, 15 bp, Homo sapiens
ctctttatcgtgtca

SEQ ID NO: 277744 - DNA, 15 bp, Homo sapiens
cctctttatcgtgtc

SEQ ID NO: 277745 - DNA, 15 bp, Homo sapiens
gcctctttatcgtgt

SEQ ID NO: 277746 - DNA, 15 bp, Homo sapiens
tgcctctttatcgtg

SEQ ID NO: 277747 - DNA, 15 bp, Homo sapiens
atgcctctttatcgt

SEQ ID NO: 277748 - DNA, 15 bp, Homo sapiens
aatgcctctttatcg

SEQ ID NO: 277749 - DNA, 15 bp, Homo sapiens
aaatgcctctttatc

SEQ ID NO: 277750 - DNA, 15 bp, Homo sapiens
taaatgcctctttat

SEQ ID NO: 277751 - DNA, 15 bp, Homo sapiens
ctaaatgcctcttta

SEQ ID NO: 277752 - DNA, 15 bp, Homo sapiens
gctaaatgcctcttt

SEQ ID NO: 277753 - DNA, 15 bp, Homo sapiens
tgctaaatgcctctt

SEQ ID NO: 277754 - DNA, 15 bp, Homo sapiens
ttgctaaatgcctct

SEQ ID NO: 277755 - DNA, 15 bp, Homo sapiens
cttgctaaatgcctc

SEQ ID NO: 277756 - DNA, 15 bp, Homo sapiens
acttgctaaatgcct

SEQ ID NO: 277757 - DNA, 15 bp, Homo sapiens
aacttgctaaatgcc

SEQ ID NO: 277758 - DNA, 15 bp, Homo sapiens
aaacttgctaaatgc

SEQ ID NO: 277759 - DNA, 15 bp, Homo sapiens
gaaacttgctaaatg

SEQ ID NO: 277760 - DNA, 15 bp, Homo sapiens
tgaaacttgctaaat

SEQ ID NO: 277761 - DNA, 15 bp, Homo sapiens
ttgaaacttgctaaa

SEQ ID NO: 277762 - DNA, 15 bp, Homo sapiens
cttgaaacttgctaa

SEQ ID NO: 277763 - DNA, 15 bp, Homo sapiens
tcttgaaacttgcta

SEQ ID NO: 277764 - DNA, 15 bp, Homo sapiens
gtcttgaaacttgct

SEQ ID NO: 277765 - DNA, 15 bp, Homo sapiens
agtcttgaaacttgc

SEQ ID NO: 277766 - DNA, 15 bp, Homo sapiens
tagtcttgaaacttg

SEQ ID NO: 277767 - DNA, 15 bp, Homo sapiens
gtagtcttgaaactt

SEQ ID NO: 277768 - DNA, 15 bp, Homo sapiens
cgtagtcttgaaact

SEQ ID NO: 277769 - DNA, 15 bp, Homo sapiens
acgtagtcttgaaac

SEQ ID NO: 277770 - DNA, 15 bp, Homo sapiens
cacgtagtcttgaaa

SEQ ID NO: 277771 - DNA, 15 bp, Homo sapiens
gcacgtagtcttgaa

SEQ ID NO: 277772 - DNA, 15 bp, Homo sapiens
tgcacgtagtcttga

SEQ ID NO: 277773 - DNA, 15 bp, Homo sapiens
gtgcacgtagtcttg

SEQ ID NO: 277774 - DNA, 15 bp, Homo sapiens
tgtgcacgtagtctt

SEQ ID NO: 277775 - DNA, 15 bp, Homo sapiens
ctgtgcacgtagtct

SEQ ID NO: 277776 - DNA, 15 bp, Homo sapiens
actgtgcacgtagtc

SEQ ID NO: 277777 - DNA, 15 bp, Homo sapiens
aactgtgcacgtagt

SEQ ID NO: 277778 - DNA, 15 bp, Homo sapiens
taactgtgcacgtag

SEQ ID NO: 277779 - DNA, 15 bp, Homo sapiens
gtaactgtgcacgta

SEQ ID NO: 277780 - DNA, 15 bp, Homo sapiens
ggtaactgtgcacgt

SEQ ID NO: 277781 - DNA, 15 bp, Homo sapiens
aggtaactgtgcacg

SEQ ID NO: 277782 - DNA, 15 bp, Homo sapiens
aaggtaactgtgcac

SEQ ID NO: 277783 - DNA, 15 bp, Homo sapiens
taaggtaactgtgca

SEQ ID NO: 277784 - DNA, 15 bp, Homo sapiens
ttaaggtaactgtgc

SEQ ID NO: 277785 - DNA, 15 bp, Homo sapiens
attaaggtaactgtg

SEQ ID NO: 277786 - DNA, 15 bp, Homo sapiens
tattaaggtaactgt

SEQ ID NO: 277787 - DNA, 15 bp, Homo sapiens
gtattaaggtaactg

SEQ ID NO: 277788 - DNA, 15 bp, Homo sapiens
agtattaaggtaact

SEQ ID NO: 277789 - DNA, 15 bp, Homo sapiens
cagtattaaggtaac

SEQ ID NO: 277790 - DNA, 15 bp, Homo sapiens
tcagtattaaggtaa

SEQ ID NO: 277791 - DNA, 15 bp, Homo sapiens
ctcagtattaaggta

SEQ ID NO: 277792 - DNA, 15 bp, Homo sapiens
tctcagtattaaggt

SEQ ID NO: 277793 - DNA, 15 bp, Homo sapiens
ctctcagtattaagg

SEQ ID NO: 277794 - DNA, 15 bp, Homo sapiens
cctctcagtattaag

SEQ ID NO: 277795 - DNA, 15 bp, Homo sapiens
gcctctcagtattaa

SEQ ID NO: 277796 - DNA, 15 bp, Homo sapiens
tgcctctcagtatta

SEQ ID NO: 277797 - DNA, 15 bp, Homo sapiens
ctgcctctcagtatt

SEQ ID NO: 277798 - DNA, 15 bp, Homo sapiens
tctgcctctcagtat

SEQ ID NO: 277799 - DNA, 15 bp, Homo sapiens
atctgcctctcagta

SEQ ID NO: 277800 - DNA, 15 bp, Homo sapiens
gatctgcctctcagt

SEQ ID NO: 277801 - DNA, 15 bp, Homo sapiens
tgatctgcctctcag

SEQ ID NO: 277802 - DNA, 15 bp, Homo sapiens
atgatctgcctctca

SEQ ID NO: 277803 - DNA, 15 bp, Homo sapiens
gatgatctgcctctc

SEQ ID NO: 277804 - DNA, 15 bp, Homo sapiens
agatgatctgcctct

SEQ ID NO: 277805 - DNA, 15 bp, Homo sapiens
gagatgatctgcctc

SEQ ID NO: 277806 - DNA, 15 bp, Homo sapiens
ggagatgatctgcct

SEQ ID NO: 277807 - DNA, 15 bp, Homo sapiens
gggagatgatctgcc

SEQ ID NO: 277808 - DNA, 15 bp, Homo sapiens
ggggagatgatctgc

SEQ ID NO: 277809 - DNA, 15 bp, Homo sapiens
tggggagatgatctg

SEQ ID NO: 277810 - DNA, 15 bp, Homo sapiens
ctggggagatgatct

SEQ ID NO: 277811 - DNA, 15 bp, Homo sapiens
cctggggagatgatc

SEQ ID NO: 277812 - DNA, 15 bp, Homo sapiens
ccctggggagatgat

SEQ ID NO: 277813 - DNA, 15 bp, Homo sapiens
tccctggggagatga

SEQ ID NO: 277814 - DNA, 15 bp, Homo sapiens
ctccctggggagatg

SEQ ID NO: 277815 - DNA, 15 bp, Homo sapiens
gctccctggggagat

SEQ ID NO: 277816 - DNA, 15 bp, Homo sapiens
tgctccctggggaga

SEQ ID NO: 277817 - DNA, 15 bp, Homo sapiens
atgctccctggggag

SEQ ID NO: 277818 - DNA, 15 bp, Homo sapiens
aatgctccctgggga

SEQ ID NO: 277819 - DNA, 15 bp, Homo sapiens
aaatgctccctgggg

SEQ ID NO: 277820 - DNA, 15 bp, Homo sapiens
gaaatgctccctggg

SEQ ID NO: 277821 - DNA, 15 bp, Homo sapiens
tgaaatgctccctgg

SEQ ID NO: 277822 - DNA, 15 bp, Homo sapiens
atgaaatgctccctg

SEQ ID NO: 277823 - DNA, 15 bp, Homo sapiens
gatgaaatgctccct

SEQ ID NO: 277824 - DNA, 15 bp, Homo sapiens
cgatgaaatgctccc

SEQ ID NO: 277825 - DNA, 15 bp, Homo sapiens
acgatgaaatgctcc

SEQ ID NO: 277826 - DNA, 15 bp, Homo sapiens
tacgatgaaatgctc

SEQ ID NO: 277827 - DNA, 15 bp, Homo sapiens
gtacgatgaaatgct

SEQ ID NO: 277828 - DNA, 15 bp, Homo sapiens
tgtacgatgaaatgc

SEQ ID NO: 277829 - DNA, 15 bp, Homo sapiens
atgtacgatgaaatg

SEQ ID NO: 277830 - DNA, 15 bp, Homo sapiens
gatgtacgatgaaat

SEQ ID NO: 277831 - DNA, 15 bp, Homo sapiens
tgatgtacgatgaaa

SEQ ID NO: 277832 - DNA, 15 bp, Homo sapiens
atgatgtacgatgaa

SEQ ID NO: 277833 - DNA, 15 bp, Homo sapiens
catgatgtacgatga

SEQ ID NO: 277834 - DNA, 15 bp, Homo sapiens
ccatgatgtacgatg

SEQ ID NO: 277835 - DNA, 15 bp, Homo sapiens
cccatgatgtacgat

SEQ ID NO: 277836 - DNA, 15 bp, Homo sapiens
ccccatgatgtacga

SEQ ID NO: 277837 - DNA, 15 bp, Homo sapiens
gccccatgatgtacg

SEQ ID NO: 277838 - DNA, 15 bp, Homo sapiens
tgccccatgatgtac

SEQ ID NO: 277839 - DNA, 15 bp, Homo sapiens
ctgccccatgatgta

SEQ ID NO: 277840 - DNA, 15 bp, Homo sapiens
actgccccatgatgt

SEQ ID NO: 277841 - DNA, 15 bp, Homo sapiens
aactgccccatgatg

SEQ ID NO: 277842 - DNA, 15 bp, Homo sapiens
aaactgccccatgat

SEQ ID NO: 277843 - DNA, 15 bp, Homo sapiens
caaactgccccatga

SEQ ID NO: 277844 - DNA, 15 bp, Homo sapiens
gcaaactgccccatg

SEQ ID NO: 277845 - DNA, 15 bp, Homo sapiens
ggcaaactgccccat

SEQ ID NO: 277846 - DNA, 15 bp, Homo sapiens
aggcaaactgcccca

SEQ ID NO: 277847 - DNA, 15 bp, Homo sapiens
taggcaaactgcccc

SEQ ID NO: 277848 - DNA, 15 bp, Homo sapiens
ataggcaaactgccc

SEQ ID NO: 277849 - DNA, 15 bp, Homo sapiens
gataggcaaactgcc

SEQ ID NO: 277850 - DNA, 15 bp, Homo sapiens
ggataggcaaactgc

SEQ ID NO: 277851 - DNA, 15 bp, Homo sapiens
aggataggcaaactg

SEQ ID NO: 277852 - DNA, 15 bp, Homo sapiens
caggataggcaaact

SEQ ID NO: 277853 - DNA, 15 bp, Homo sapiens
acaggataggcaaac

SEQ ID NO: 277854 - DNA, 15 bp, Homo sapiens
tacaggataggcaaa

SEQ ID NO: 277855 - DNA, 15 bp, Homo sapiens
atacaggataggcaa

SEQ ID NO: 277856 - DNA, 15 bp, Homo sapiens
gatacaggataggca

SEQ ID NO: 277857 - DNA, 15 bp, Homo sapiens
agatacaggataggc

SEQ ID NO: 277858 - DNA, 15 bp, Homo sapiens
gagatacaggatagg

SEQ ID NO: 277859 - DNA, 15 bp, Homo sapiens
tgagatacaggatag

SEQ ID NO: 277860 - DNA, 15 bp, Homo sapiens
atgagatacaggata

SEQ ID NO: 277861 - DNA, 15 bp, Homo sapiens
aatgagatacaggat

SEQ ID NO: 277862 - DNA, 15 bp, Homo sapiens
caatgagatacagga

SEQ ID NO: 277863 - DNA, 15 bp, Homo sapiens
tcaatgagatacagg

SEQ ID NO: 277864 - DNA, 15 bp, Homo sapiens
ctcaatgagatacag

SEQ ID NO: 277865 - DNA, 15 bp, Homo sapiens
tctcaatgagataca

SEQ ID NO: 277866 - DNA, 15 bp, Homo sapiens
ctctcaatgagatac

SEQ ID NO: 277867 - DNA, 15 bp, Homo sapiens
cctctcaatgagata

SEQ ID NO: 277868 - DNA, 15 bp, Homo sapiens
tcctctcaatgagat

SEQ ID NO: 277869 - DNA, 15 bp, Homo sapiens
ctcctctcaatgaga

SEQ ID NO: 277870 - DNA, 15 bp, Homo sapiens
cctcctctcaatgag

SEQ ID NO: 277871 - DNA, 15 bp, Homo sapiens
gcctcctctcaatga

SEQ ID NO: 277872 - DNA, 15 bp, Homo sapiens
ggcctcctctcaatg

SEQ ID NO: 277873 - DNA, 15 bp, Homo sapiens
aggcctcctctcaat

SEQ ID NO: 277874 - DNA, 15 bp, Homo sapiens
aaggcctcctctcaa

SEQ ID NO: 277875 - DNA, 15 bp, Homo sapiens
gaaggcctcctctca

SEQ ID NO: 277876 - DNA, 15 bp, Homo sapiens
ggaaggcctcctctc

SEQ ID NO: 277877 - DNA, 15 bp, Homo sapiens
tggaaggcctcctct

SEQ ID NO: 277878 - DNA, 15 bp, Homo sapiens
ctggaaggcctcctc

SEQ ID NO: 277879 - DNA, 15 bp, Homo sapiens
gctggaaggcctcct

SEQ ID NO: 277880 - DNA, 15 bp, Homo sapiens
agctggaaggcctcc

SEQ ID NO: 277881 - DNA, 15 bp, Homo sapiens
cagctggaaggcctc

SEQ ID NO: 277882 - DNA, 15 bp, Homo sapiens
tcagctggaaggcct

SEQ ID NO: 277883 - DNA, 15 bp, Homo sapiens
ttcagctggaaggcc

SEQ ID NO: 277884 - DNA, 15 bp, Homo sapiens
attcagctggaaggc

SEQ ID NO: 277885 - DNA, 15 bp, Homo sapiens
tattcagctggaagg

SEQ ID NO: 277886 - DNA, 15 bp, Homo sapiens
gtattcagctggaag

SEQ ID NO: 277887 - DNA, 15 bp, Homo sapiens
cgtattcagctggaa

SEQ ID NO: 277888 - DNA, 15 bp, Homo sapiens
acgtattcagctgga

SEQ ID NO: 277889 - DNA, 15 bp, Homo sapiens
cacgtattcagctgg

SEQ ID NO: 277890 - DNA, 15 bp, Homo sapiens
ccacgtattcagctg

SEQ ID NO: 277891 - DNA, 15 bp, Homo sapiens
tccacgtattcagct

SEQ ID NO: 277892 - DNA, 15 bp, Homo sapiens
gtccacgtattcagc

SEQ ID NO: 277893 - DNA, 15 bp, Homo sapiens
ggtccacgtattcag

SEQ ID NO: 277894 - DNA, 15 bp, Homo sapiens
gggtccacgtattca

SEQ ID NO: 277895 - DNA, 15 bp, Homo sapiens
tgggtccacgtattc

SEQ ID NO: 277896 - DNA, 15 bp, Homo sapiens
ttgggtccacgtatt

SEQ ID NO: 277897 - DNA, 15 bp, Homo sapiens
tttgggtccacgtat

SEQ ID NO: 277898 - DNA, 15 bp, Homo sapiens
atttgggtccacgta

SEQ ID NO: 277899 - DNA, 15 bp, Homo sapiens
catttgggtccacgt

SEQ ID NO: 277900 - DNA, 15 bp, Homo sapiens
gcatttgggtccacg

SEQ ID NO: 277901 - DNA, 15 bp, Homo sapiens
tgcatttgggtccac

SEQ ID NO: 277902 - DNA, 15 bp, Homo sapiens
atgcatttgggtcca

SEQ ID NO: 277903 - DNA, 15 bp, Homo sapiens
catgcatttgggtcc

SEQ ID NO: 277904 - DNA, 15 bp, Homo sapiens
acatgcatttgggtc

SEQ ID NO: 277905 - DNA, 15 bp, Homo sapiens
gacatgcatttgggt

SEQ ID NO: 277906 - DNA, 15 bp, Homo sapiens
ggacatgcatttggg

SEQ ID NO: 277907 - DNA, 15 bp, Homo sapiens
tggacatgcatttgg

SEQ ID NO: 277908 - DNA, 15 bp, Homo sapiens
atggacatgcatttg

SEQ ID NO: 277909 - DNA, 15 bp, Homo sapiens
aatggacatgcattt

SEQ ID NO: 277910 - DNA, 15 bp, Homo sapiens
gaatggacatgcatt

SEQ ID NO: 277911 - DNA, 15 bp, Homo sapiens
tgaatggacatgcat

SEQ ID NO: 277912 - DNA, 15 bp, Homo sapiens
ttgaatggacatgca

SEQ ID NO: 277913 - DNA, 15 bp, Homo sapiens
gttgaatggacatgc

SEQ ID NO: 277914 - DNA, 15 bp, Homo sapiens
tgttgaatggacatg

SEQ ID NO: 277915 - DNA, 15 bp, Homo sapiens
ctgttgaatggacat

SEQ ID NO: 277916 - DNA, 15 bp, Homo sapiens
tctgttgaatggaca

SEQ ID NO: 277917 - DNA, 15 bp, Homo sapiens
ctctgttgaatggac

SEQ ID NO: 277918 - DNA, 15 bp, Homo sapiens
actctgttgaatgga

SEQ ID NO: 277919 - DNA, 15 bp, Homo sapiens
gactctgttgaatgg

SEQ ID NO: 277920 - DNA, 15 bp, Homo sapiens
agactctgttgaatg

SEQ ID NO: 277921 - DNA, 15 bp, Homo sapiens
aagactctgttgaat

SEQ ID NO: 277922 - DNA, 15 bp, Homo sapiens
gaagactctgttgaa

SEQ ID NO: 277923 - DNA, 15 bp, Homo sapiens
tgaagactctgttga

SEQ ID NO: 277924 - DNA, 15 bp, Homo sapiens
ctgaagactctgttg

SEQ ID NO: 277925 - DNA, 15 bp, Homo sapiens
ccctgaagactctgt

SEQ ID NO: 277926 - DNA, 15 bp, Homo sapiens
gccctgaagactctg

SEQ ID NO: 277927 - DNA, 15 bp, Homo sapiens
ggccctgaagactct

SEQ ID NO: 277928 - DNA, 15 bp, Homo sapiens
tggccctgaagactc

SEQ ID NO: 277929 - DNA, 15 bp, Homo sapiens
ctggccctgaagact

SEQ ID NO: 277930 - DNA, 15 bp, Homo sapiens
cctggccctgaagac

SEQ ID NO: 277931 - DNA, 15 bp, Homo sapiens
ccctggccctgaaga

SEQ ID NO: 277932 - DNA, 15 bp, Homo sapiens
tccctggccctgaag

SEQ ID NO: 277933 - DNA, 15 bp, Homo sapiens
ctccctggccctgaa

SEQ ID NO: 277934 - DNA, 15 bp, Homo sapiens
gctccctggccctga

SEQ ID NO: 277935 - DNA, 15 bp, Homo sapiens
agctccctggccctg

SEQ ID NO: 277936 - DNA, 15 bp, Homo sapiens
cagctccctggccct

SEQ ID NO: 277937 - DNA, 15 bp, Homo sapiens
acagctccctggccc

SEQ ID NO: 277938 - DNA, 15 bp, Homo sapiens
cacagctccctggcc

SEQ ID NO: 277939 - DNA, 15 bp, Homo sapiens
ccacagctccctggc

SEQ ID NO: 277940 - DNA, 15 bp, Homo sapiens
tccacagctccctgg

SEQ ID NO: 277941 - DNA, 15 bp, Homo sapiens
ctccacagctccctg

SEQ ID NO: 277942 - DNA, 15 bp, Homo sapiens
cctccacagctccct

SEQ ID NO: 277943 - DNA, 15 bp, Homo sapiens
acctccacagctccc

SEQ ID NO: 277944 - DNA, 15 bp, Homo sapiens
aacctccacagctcc

SEQ ID NO: 277945 - DNA, 15 bp, Homo sapiens
taacctccacagctc

SEQ ID NO: 277946 - DNA, 15 bp, Homo sapiens
ataacctccacagct

SEQ ID NO: 277947 - DNA, 15 bp, Homo sapiens
aataacctccacagc

SEQ ID NO: 277948 - DNA, 15 bp, Homo sapiens
aaataacctccacag

SEQ ID NO: 277949 - DNA, 15 bp, Homo sapiens
gaaataacctccaca

SEQ ID NO: 277950 - DNA, 15 bp, Homo sapiens
ggaaataacctccac

SEQ ID NO: 277951 - DNA, 15 bp, Homo sapiens
gggaaataacctcca

SEQ ID NO: 277952 - DNA, 15 bp, Homo sapiens
agggaaataacctcc

SEQ ID NO: 277953 - DNA, 15 bp, Homo sapiens
gagggaaataacctc

SEQ ID NO: 277954 - DNA, 15 bp, Homo sapiens
ggagggaaataacct

SEQ ID NO: 277955 - DNA, 15 bp, Homo sapiens
aggagggaaataacc

SEQ ID NO: 277956 - DNA, 15 bp, Homo sapiens
caggagggaaataac

SEQ ID NO: 277957 - DNA, 15 bp, Homo sapiens
ccaggagggaaataa

SEQ ID NO: 277958 - DNA, 15 bp, Homo sapiens
tccaggagggaaata

SEQ ID NO: 277959 - DNA, 15 bp, Homo sapiens
atccaggagggaaat

SEQ ID NO: 277960 - DNA, 15 bp, Homo sapiens
aatccaggagggaaa

SEQ ID NO: 277961 - DNA, 15 bp, Homo sapiens
aaatccaggagggaa

SEQ ID NO: 277962 - DNA, 15 bp, Homo sapiens
gaaatccaggaggga

SEQ ID NO: 277963 - DNA, 15 bp, Homo sapiens
agaaatccaggaggg

SEQ ID NO: 277964 - DNA, 15 bp, Homo sapiens
aagaaatccaggagg

SEQ ID NO: 277965 - DNA, 15 bp, Homo sapiens
gaagaaatccaggag

SEQ ID NO: 277966 - DNA, 15 bp, Homo sapiens
ggaagaaatccagga

SEQ ID NO: 277967 - DNA, 15 bp, Homo sapiens
gggaagaaatccagg

SEQ ID NO: 277968 - DNA, 15 bp, Homo sapiens
agggaagaaatccag

SEQ ID NO: 277969 - DNA, 15 bp, Homo sapiens
gagggaagaaatcca

SEQ ID NO: 277970 - DNA, 15 bp, Homo sapiens
agagggaagaaatcc

SEQ ID NO: 277971 - DNA, 15 bp, Homo sapiens
gagagggaagaaatc

SEQ ID NO: 277972 - DNA, 15 bp, Homo sapiens
agagagggaagaaat

SEQ ID NO: 277973 - DNA, 15 bp, Homo sapiens
aagagagggaagaaa

SEQ ID NO: 277974 - DNA, 15 bp, Homo sapiens
taagagagggaagaa

SEQ ID NO: 277975 - DNA, 15 bp, Homo sapiens
gtaagagagggaaga

SEQ ID NO: 277976 - DNA, 15 bp, Homo sapiens
ggtaagagagggaag

SEQ ID NO: 277977 - DNA, 15 bp, Homo sapiens
gggtaagagagggaa

SEQ ID NO: 277978 - DNA, 15 bp, Homo sapiens
agggtaagagaggga

SEQ ID NO: 277979 - DNA, 15 bp, Homo sapiens
tagggtaagagaggg

SEQ ID NO: 277980 - DNA, 15 bp, Homo sapiens
atagggtaagagagg

SEQ ID NO: 277981 - DNA, 15 bp, Homo sapiens
gatagggtaagagag

SEQ ID NO: 277982 - DNA, 15 bp, Homo sapiens
tgatagggtaagaga

SEQ ID NO: 277983 - DNA, 15 bp, Homo sapiens
ctgatagggtaagag

SEQ ID NO: 277984 - DNA, 15 bp, Homo sapiens
tctgatagggtaaga

SEQ ID NO: 277985 - DNA, 15 bp, Homo sapiens
ctctgatagggtaag

SEQ ID NO: 277986 - DNA, 15 bp, Homo sapiens
tctctgatagggtaa

SEQ ID NO: 277987 - DNA, 15 bp, Homo sapiens
ctctctgatagggta

SEQ ID NO: 277988 - DNA, 15 bp, Homo sapiens
tctctctgatagggt

SEQ ID NO: 277989 - DNA, 15 bp, Homo sapiens
atctctctgataggg

SEQ ID NO: 277990 - DNA, 15 bp, Homo sapiens
catctctctgatagg

SEQ ID NO: 277991 - DNA, 15 bp, Homo sapiens
gcatctctctgatag

SEQ ID NO: 277992 - DNA, 15 bp, Homo sapiens
agcatctctctgata

SEQ ID NO: 277993 - DNA, 15 bp, Homo sapiens
cagcatctctctgat

SEQ ID NO: 277994 - DNA, 15 bp, Homo sapiens
tcagcatctctctga

SEQ ID NO: 277995 - DNA, 15 bp, Homo sapiens
atcagcatctctctg

SEQ ID NO: 277996 - DNA, 15 bp, Homo sapiens
tatcagcatctctct

SEQ ID NO: 277997 - DNA, 15 bp, Homo sapiens
atatcagcatctctc

SEQ ID NO: 277998 - DNA, 15 bp, Homo sapiens
aatatcagcatctct

SEQ ID NO: 277999 - DNA, 15 bp, Homo sapiens
aaatatcagcatctc

SEQ ID NO: 278000 - DNA, 15 bp, Homo sapiens
caaatatcagcatct

SEQ ID NO: 278001 - DNA, 15 bp, Homo sapiens
tcaaatatcagcatc

SEQ ID NO: 278002 - DNA, 15 bp, Homo sapiens
ctcaaatatcagcat

SEQ ID NO: 278003 - DNA, 15 bp, Homo sapiens
actcaaatatcagca

SEQ ID NO: 278004 - DNA, 15 bp, Homo sapiens
aactcaaatatcagc

SEQ ID NO: 278005 - DNA, 15 bp, Homo sapiens
aaactcaaatatcag

SEQ ID NO: 278006 - DNA, 15 bp, Homo sapiens
aaaactcaaatatca

SEQ ID NO: 278007 - DNA, 15 bp, Homo sapiens
gaaaactcaaatatc

SEQ ID NO: 278008 - DNA, 15 bp, Homo sapiens
tgaaaactcaaatat

SEQ ID NO: 278009 - DNA, 15 bp, Homo sapiens
atgaaaactcaaata

SEQ ID NO: 278010 - DNA, 15 bp, Homo sapiens
gatgaaaactcaaat

SEQ ID NO: 278011 - DNA, 15 bp, Homo sapiens
agatgaaaactcaaa

SEQ ID NO: 278012 - DNA, 15 bp, Homo sapiens
aagatgaaaactcaa

SEQ ID NO: 278013 - DNA, 15 bp, Homo sapiens
gaagatgaaaactca

SEQ ID NO: 278014 - DNA, 15 bp, Homo sapiens
tgaagatgaaaactc

SEQ ID NO: 278015 - DNA, 15 bp, Homo sapiens
ctgaagatgaaaact

SEQ ID NO: 278016 - DNA, 15 bp, Homo sapiens
tctgaagatgaaaac

SEQ ID NO: 278017 - DNA, 15 bp, Homo sapiens
ctctgaagatgaaaa

SEQ ID NO: 278018 - DNA, 15 bp, Homo sapiens
cctctgaagatgaaa

SEQ ID NO: 278019 - DNA, 15 bp, Homo sapiens
ccctctgaagatgaa

SEQ ID NO: 278020 - DNA, 15 bp, Homo sapiens
accctctgaagatga

SEQ ID NO: 278021 - DNA, 15 bp, Homo sapiens
taccctctgaagatg

SEQ ID NO: 278022 - DNA, 15 bp, Homo sapiens
ctaccctctgaagat

SEQ ID NO: 278023 - DNA, 15 bp, Homo sapiens
gctaccctctgaaga

SEQ ID NO: 278024 - DNA, 15 bp, Homo sapiens
tgctaccctctgaag

SEQ ID NO: 278025 - DNA, 15 bp, Homo sapiens
ctgctaccctctgaa

SEQ ID NO: 278026 - DNA, 15 bp, Homo sapiens
cctgctaccctctga

SEQ ID NO: 278027 - DNA, 15 bp, Homo sapiens
tcctgctaccctctg

SEQ ID NO: 278028 - DNA, 15 bp, Homo sapiens
atcctgctaccctct

SEQ ID NO: 278029 - DNA, 15 bp, Homo sapiens
aatcctgctaccctc

SEQ ID NO: 278030 - DNA, 15 bp, Homo sapiens
gaatcctgctaccct

SEQ ID NO: 278031 - DNA, 15 bp, Homo sapiens
ggaatcctgctaccc

SEQ ID NO: 278032 - DNA, 15 bp, Homo sapiens
aggaatcctgctacc

SEQ ID NO: 278033 - DNA, 15 bp, Homo sapiens
caggaatcctgctac

SEQ ID NO: 278034 - DNA, 15 bp, Homo sapiens
ccaggaatcctgcta

SEQ ID NO: 278035 - DNA, 15 bp, Homo sapiens
gccaggaatcctgct

SEQ ID NO: 278036 - DNA, 15 bp, Homo sapiens
ggccaggaatcctgc

SEQ ID NO: 278037 - DNA, 15 bp, Homo sapiens
aggccaggaatcctg

SEQ ID NO: 278038 - DNA, 15 bp, Homo sapiens
gaggccaggaatcct

SEQ ID NO: 278039 - DNA, 15 bp, Homo sapiens
ggaggccaggaatcc

SEQ ID NO: 278040 - DNA, 15 bp, Homo sapiens
aggaggccaggaatc

SEQ ID NO: 278041 - DNA, 15 bp, Homo sapiens
gaggaggccaggaat

SEQ ID NO: 278042 - DNA, 15 bp, Homo sapiens
aggaggaggccagga

SEQ ID NO: 278043 - DNA, 15 bp, Homo sapiens
caggaggaggccagg

SEQ ID NO: 278044 - DNA, 15 bp, Homo sapiens
acaggaggaggccag

SEQ ID NO: 278045 - DNA, 15 bp, Homo sapiens
gacaggaggaggcca

SEQ ID NO: 278046 - DNA, 15 bp, Homo sapiens
tgacaggaggaggcc

SEQ ID NO: 278047 - DNA, 15 bp, Homo sapiens
gtgacaggaggaggc

SEQ ID NO: 278048 - DNA, 15 bp, Homo sapiens
agtgacaggaggagg

SEQ ID NO: 278049 - DNA, 15 bp, Homo sapiens
cagtgacaggaggag

SEQ ID NO: 278050 - DNA, 15 bp, Homo sapiens
ccagtgacaggagga

SEQ ID NO: 278051 - DNA, 15 bp, Homo sapiens
gccagtgacaggagg

SEQ ID NO: 278052 - DNA, 15 bp, Homo sapiens
agccagtgacaggag

SEQ ID NO: 278053 - DNA, 15 bp, Homo sapiens
cagccagtgacagga

SEQ ID NO: 278054 - DNA, 15 bp, Homo sapiens
tcagccagtgacagg

SEQ ID NO: 278055 - DNA, 15 bp, Homo sapiens
atcagccagtgacag

SEQ ID NO: 278056 - DNA, 15 bp, Homo sapiens
aatcagccagtgaca

SEQ ID NO: 278057 - DNA, 15 bp, Homo sapiens
aaatcagccagtgac

SEQ ID NO: 278058 - DNA, 15 bp, Homo sapiens
caaatcagccagtga

SEQ ID NO: 278059 - DNA, 15 bp, Homo sapiens
gcaaatcagccagtg

SEQ ID NO: 278060 - DNA, 15 bp, Homo sapiens
agcaaatcagccagt

SEQ ID NO: 278061 - DNA, 15 bp, Homo sapiens
aagcaaatcagccag

SEQ ID NO: 278062 - DNA, 15 bp, Homo sapiens
taagcaaatcagcca

SEQ ID NO: 278063 - DNA, 15 bp, Homo sapiens
ttaagcaaatcagcc

SEQ ID NO: 278064 - DNA, 15 bp, Homo sapiens
tttaagcaaatcagc

SEQ ID NO: 278065 - DNA, 15 bp, Homo sapiens
atttaagcaaatcag

SEQ ID NO: 278066 - DNA, 15 bp, Homo sapiens
tatttaagcaaatca

SEQ ID NO: 278067 - DNA, 15 bp, Homo sapiens
ttatttaagcaaatc

SEQ ID NO: 278068 - DNA, 15 bp, Homo sapiens
cttatttaagcaaat

SEQ ID NO: 278069 - DNA, 15 bp, Homo sapiens
ccttatttaagcaaa

SEQ ID NO: 278070 - DNA, 15 bp, Homo sapiens
tccttatttaagcaa

SEQ ID NO: 278071 - DNA, 15 bp, Homo sapiens
ttccttatttaagca

SEQ ID NO: 278072 - DNA, 15 bp, Homo sapiens
attccttatttaagc

SEQ ID NO: 278073 - DNA, 15 bp, Homo sapiens
cattccttatttaag

SEQ ID NO: 278074 - DNA, 15 bp, Homo sapiens
gcattccttatttaa

SEQ ID NO: 278075 - DNA, 15 bp, Homo sapiens
tgcattccttattta

SEQ ID NO: 278076 - DNA, 15 bp, Homo sapiens
atgcattccttattt

SEQ ID NO: 278077 - DNA, 15 bp, Homo sapiens
aatgcattccttatt

SEQ ID NO: 278078 - DNA, 15 bp, Homo sapiens
taatgcattccttat

SEQ ID NO: 278079 - DNA, 15 bp, Homo sapiens
ctaatgcattcctta

SEQ ID NO: 278080 - DNA, 15 bp, Homo sapiens
actaatgcattcctt

SEQ ID NO: 278081 - DNA, 15 bp, Homo sapiens
gactaatgcattcct

SEQ ID NO: 278082 - DNA, 15 bp, Homo sapiens
ggactaatgcattcc

SEQ ID NO: 278083 - DNA, 15 bp, Homo sapiens
gggactaatgcattc

SEQ ID NO: 278084 - DNA, 15 bp, Homo sapiens
ggggactaatgcatt

SEQ ID NO: 278085 - DNA, 15 bp, Homo sapiens
tggggactaatgcat

SEQ ID NO: 278086 - DNA, 15 bp, Homo sapiens
atggggactaatgca

SEQ ID NO: 278087 - DNA, 15 bp, Homo sapiens
gatggggactaatgc

SEQ ID NO: 278088 - DNA, 15 bp, Homo sapiens
tgatggggactaatg

SEQ ID NO: 278089 - DNA, 15 bp, Homo sapiens
gtgatggggactaat

SEQ ID NO: 278090 - DNA, 15 bp, Homo sapiens
agtgatggggactaa

SEQ ID NO: 278091 - DNA, 15 bp, Homo sapiens
cagtgatggggacta

SEQ ID NO: 278092 - DNA, 15 bp, Homo sapiens
tcagtgatggggact

SEQ ID NO: 278093 - DNA, 15 bp, Homo sapiens
gtcagtgatggggac

SEQ ID NO: 278094 - DNA, 15 bp, Homo sapiens
agtcagtgatgggga

SEQ ID NO: 278095 - DNA, 15 bp, Homo sapiens
gagtcagtgatgggg

SEQ ID NO: 278096 - DNA, 15 bp, Homo sapiens
ggagtcagtgatggg

SEQ ID NO: 278097 - DNA, 15 bp, Homo sapiens
tggagtcagtgatgg

SEQ ID NO: 278098 - DNA, 15 bp, Homo sapiens
ttggagtcagtgatg

SEQ ID NO: 278099 - DNA, 15 bp, Homo sapiens
cttggagtcagtgat

SEQ ID NO: 278100 - DNA, 15 bp, Homo sapiens
acttggagtcagtga

SEQ ID NO: 278101 - DNA, 15 bp, Homo sapiens
cacttggagtcagtg

SEQ ID NO: 278102 - DNA, 15 bp, Homo sapiens
ccacttggagtcagt

SEQ ID NO: 278103 - DNA, 15 bp, Homo sapiens
tccacttggagtcag

SEQ ID NO: 278104 - DNA, 15 bp, Homo sapiens
ctccacttggagtca

SEQ ID NO: 278105 - DNA, 15 bp, Homo sapiens
cctccacttggagtc

SEQ ID NO: 278106 - DNA, 15 bp, Homo sapiens
gcctccacttggagt

SEQ ID NO: 278107 - DNA, 15 bp, Homo sapiens
tgcctccacttggag

SEQ ID NO: 278108 - DNA, 15 bp, Homo sapiens
ctgcctccacttgga

SEQ ID NO: 278109 - DNA, 15 bp, Homo sapiens
gctgcctccacttgg

SEQ ID NO: 278110 - DNA, 15 bp, Homo sapiens
agctgcctccacttg

SEQ ID NO: 278111 - DNA, 15 bp, Homo sapiens
cagctgcctccactt

SEQ ID NO: 278112 - DNA, 15 bp, Homo sapiens
ccagctgcctccact

SEQ ID NO: 278113 - DNA, 15 bp, Homo sapiens
tccagctgcctccac

SEQ ID NO: 278114 - DNA, 15 bp, Homo sapiens
ctccagctgcctcca

SEQ ID NO: 278115 - DNA, 15 bp, Homo sapiens
gctccagctgcctcc

SEQ ID NO: 278116 - DNA, 15 bp, Homo sapiens
tgctccagctgcctc

SEQ ID NO: 278117 - DNA, 15 bp, Homo sapiens
ttgctccagctgcct

SEQ ID NO: 278118 - DNA, 15 bp, Homo sapiens
tttgctccagctgcc

SEQ ID NO: 278119 - DNA, 15 bp, Homo sapiens
atttgctccagctgc

SEQ ID NO: 278120 - DNA, 15 bp, Homo sapiens
aatttgctccagctg

SEQ ID NO: 278121 - DNA, 15 bp, Homo sapiens
taatttgctccagct

SEQ ID NO: 278122 - DNA, 15 bp, Homo sapiens
ctaatttgctccagc

SEQ ID NO: 278123 - DNA, 15 bp, Homo sapiens
cctaatttgctccag

SEQ ID NO: 278124 - DNA, 15 bp, Homo sapiens
tcctaatttgctcca

SEQ ID NO: 278125 - DNA, 15 bp, Homo sapiens
atcctaatttgctcc

SEQ ID NO: 278126 - DNA, 15 bp, Homo sapiens
gatcctaatttgctc

SEQ ID NO: 278127 - DNA, 15 bp, Homo sapiens
tgatcctaatttgct

SEQ ID NO: 278128 - DNA, 15 bp, Homo sapiens
ctgatcctaatttgc

SEQ ID NO: 278129 - DNA, 15 bp, Homo sapiens
gctgatcctaatttg

SEQ ID NO: 278130 - DNA, 15 bp, Homo sapiens
agctgatcctaattt

SEQ ID NO: 278131 - DNA, 15 bp, Homo sapiens
tagctgatcctaatt

SEQ ID NO: 278132 - DNA, 15 bp, Homo sapiens
gtagctgatcctaat

SEQ ID NO: 278133 - DNA, 15 bp, Homo sapiens
tgtagctgatcctaa

SEQ ID NO: 278134 - DNA, 15 bp, Homo sapiens
atgtagctgatccta

SEQ ID NO: 278135 - DNA, 15 bp, Homo sapiens
aatgtagctgatcct

SEQ ID NO: 278136 - DNA, 15 bp, Homo sapiens
caatgtagctgatcc

SEQ ID NO: 278137 - DNA, 15 bp, Homo sapiens
ccaatgtagctgatc

SEQ ID NO: 278138 - DNA, 15 bp, Homo sapiens
gccaatgtagctgat

SEQ ID NO: 278139 - DNA, 15 bp, Homo sapiens
ggccaatgtagctga

SEQ ID NO: 278140 - DNA, 15 bp, Homo sapiens
tggccaatgtagctg

SEQ ID NO: 278141 - DNA, 15 bp, Homo sapiens
atggccaatgtagct

SEQ ID NO: 278142 - DNA, 15 bp, Homo sapiens
gatggccaatgtagc

SEQ ID NO: 278143 - DNA, 15 bp, Homo sapiens
agatggccaatgtag

SEQ ID NO: 278144 - DNA, 15 bp, Homo sapiens
cagatggccaatgta

SEQ ID NO: 278145 - DNA, 15 bp, Homo sapiens
ccagatggccaatgt

SEQ ID NO: 278146 - DNA, 15 bp, Homo sapiens
tccagatggccaatg

SEQ ID NO: 278147 - DNA, 15 bp, Homo sapiens
atccagatggccaat

SEQ ID NO: 278148 - DNA, 15 bp, Homo sapiens
catccagatggccaa

SEQ ID NO: 278149 - DNA, 15 bp, Homo sapiens
gcatccagatggcca

SEQ ID NO: 278150 - DNA, 15 bp, Homo sapiens
agcatccagatggcc

SEQ ID NO: 278151 - DNA, 15 bp, Homo sapiens
cagcatccagatggc

SEQ ID NO: 278152 - DNA, 15 bp, Homo sapiens
gcagcatccagatgg

SEQ ID NO: 278153 - DNA, 15 bp, Homo sapiens
cgcagcatccagatg

SEQ ID NO: 278154 - DNA, 15 bp, Homo sapiens
tcgcagcatccagat

SEQ ID NO: 278155 - DNA, 15 bp, Homo sapiens
ttcgcagcatccaga

SEQ ID NO: 278156 - DNA, 15 bp, Homo sapiens
tttcgcagcatccag

SEQ ID NO: 278157 - DNA, 15 bp, Homo sapiens
atttcgcagcatcca

SEQ ID NO: 278158 - DNA, 15 bp, Homo sapiens
gatttcgcagcatcc

SEQ ID NO: 278159 - DNA, 15 bp, Homo sapiens
tgatttcgcagcatc

SEQ ID NO: 278160 - DNA, 15 bp, Homo sapiens
atgatttcgcagcat

SEQ ID NO: 278161 - DNA, 15 bp, Homo sapiens
aatgatttcgcagca

SEQ ID NO: 278162 - DNA, 15 bp, Homo sapiens
caatgatttcgcagc

SEQ ID NO: 278163 - DNA, 15 bp, Homo sapiens
gcaatgatttcgcag

SEQ ID NO: 278164 - DNA, 15 bp, Homo sapiens
ggcaatgatttcgca

SEQ ID NO: 278165 - DNA, 15 bp, Homo sapiens
tggcaatgatttcgc

SEQ ID NO: 278166 - DNA, 15 bp, Homo sapiens
atggcaatgatttcg

SEQ ID NO: 278167 - DNA, 15 bp, Homo sapiens
aatggcaatgatttc

SEQ ID NO: 278168 - DNA, 15 bp, Homo sapiens
caatggcaatgattt

SEQ ID NO: 278169 - DNA, 15 bp, Homo sapiens
gcaatggcaatgatt

SEQ ID NO: 278170 - DNA, 15 bp, Homo sapiens
tgcaatggcaatgat

SEQ ID NO: 278171 - DNA, 15 bp, Homo sapiens
ctgcaatggcaatga

SEQ ID NO: 278172 - DNA, 15 bp, Homo sapiens
cctgcaatggcaatg

SEQ ID NO: 278173 - DNA, 15 bp, Homo sapiens
ccctgcaatggcaat

SEQ ID NO: 278174 - DNA, 15 bp, Homo sapiens
cccctgcaatggcaa

SEQ ID NO: 278175 - DNA, 15 bp, Homo sapiens
acccctgcaatggca

SEQ ID NO: 278176 - DNA, 15 bp, Homo sapiens
gacccctgcaatggc

SEQ ID NO: 278177 - DNA, 15 bp, Homo sapiens
agacccctgcaatgg

SEQ ID NO: 278178 - DNA, 15 bp, Homo sapiens
aagacccctgcaatg

SEQ ID NO: 278179 - DNA, 15 bp, Homo sapiens
taagacccctgcaat

SEQ ID NO: 278180 - DNA, 15 bp, Homo sapiens
ctaagacccctgcaa

SEQ ID NO: 278181 - DNA, 15 bp, Homo sapiens
tctaagacccctgca

SEQ ID NO: 278182 - DNA, 15 bp, Homo sapiens
atctaagacccctgc

SEQ ID NO: 278183 - DNA, 15 bp, Homo sapiens
aatctaagacccctg

SEQ ID NO: 278184 - DNA, 15 bp, Homo sapiens
aaatctaagacccct

SEQ ID NO: 278185 - DNA, 15 bp, Homo sapiens
aaaatctaagacccc

SEQ ID NO: 278186 - DNA, 15 bp, Homo sapiens
caaaatctaagaccc

SEQ ID NO: 278187 - DNA, 15 bp, Homo sapiens
tcaaaatctaagacc

SEQ ID NO: 278188 - DNA, 15 bp, Homo sapiens
ctcaaaatctaagac

SEQ ID NO: 278189 - DNA, 15 bp, Homo sapiens
actcaaaatctaaga

SEQ ID NO: 278190 - DNA, 15 bp, Homo sapiens
aactcaaaatctaag

SEQ ID NO: 278191 - DNA, 15 bp, Homo sapiens
gaactcaaaatctaa

SEQ ID NO: 278192 - DNA, 15 bp, Homo sapiens
ggaactcaaaatcta

SEQ ID NO: 278193 - DNA, 15 bp, Homo sapiens
aggaactcaaaatct

SEQ ID NO: 278194 - DNA, 15 bp, Homo sapiens
aaggaactcaaaatc

SEQ ID NO: 278195 - DNA, 15 bp, Homo sapiens
taaggaactcaaaat

SEQ ID NO: 278196 - DNA, 15 bp, Homo sapiens
gtaaggaactcaaaa

SEQ ID NO: 278197 - DNA, 15 bp, Homo sapiens
tgtaaggaactcaaa

SEQ ID NO: 278198 - DNA, 15 bp, Homo sapiens
ctgtaaggaactcaa

SEQ ID NO: 278199 - DNA, 15 bp, Homo sapiens
tctgtaaggaactca

SEQ ID NO: 278200 - DNA, 15 bp, Homo sapiens
ttctgtaaggaactc

SEQ ID NO: 278201 - DNA, 15 bp, Homo sapiens
attctgtaaggaact

SEQ ID NO: 278202 - DNA, 15 bp, Homo sapiens
cattctgtaaggaac

SEQ ID NO: 278203 - DNA, 15 bp, Homo sapiens
tcattctgtaaggaa

SEQ ID NO: 278204 - DNA, 15 bp, Homo sapiens
atcattctgtaagga

SEQ ID NO: 278205 - DNA, 15 bp, Homo sapiens
catcattctgtaagg

SEQ ID NO: 278206 - DNA, 15 bp, Homo sapiens
acatcattctgtaag

SEQ ID NO: 278207 - DNA, 15 bp, Homo sapiens
tacatcattctgtaa

SEQ ID NO: 278208 - DNA, 15 bp, Homo sapiens
ctacatcattctgta

SEQ ID NO: 278209 - DNA, 15 bp, Homo sapiens
tctacatcattctgt

SEQ ID NO: 278210 - DNA, 15 bp, Homo sapiens
atctacatcattctg

SEQ ID NO: 278211 - DNA, 15 bp, Homo sapiens
catctacatcattct

SEQ ID NO: 278212 - DNA, 15 bp, Homo sapiens
gcatctacatcattc

SEQ ID NO: 278213 - DNA, 15 bp, Homo sapiens
ggcatctacatcatt

SEQ ID NO: 278214 - DNA, 15 bp, Homo sapiens
tggcatctacatcat

SEQ ID NO: 278215 - DNA, 15 bp, Homo sapiens
atggcatctacatca

SEQ ID NO: 278216 - DNA, 15 bp, Homo sapiens
aatggcatctacatc

SEQ ID NO: 278217 - DNA, 15 bp, Homo sapiens
aaatggcatctacat

SEQ ID NO: 278218 - DNA, 15 bp, Homo sapiens
caaatggcatctaca

SEQ ID NO: 278219 - DNA, 15 bp, Homo sapiens
gcaaatggcatctac

SEQ ID NO: 278220 - DNA, 15 bp, Homo sapiens
tgcaaatggcatcta

SEQ ID NO: 278221 - DNA, 15 bp, Homo sapiens
ttgcaaatggcatct

SEQ ID NO: 278222 - DNA, 15 bp, Homo sapiens
cttgcaaatggcatc

SEQ ID NO: 278223 - DNA, 15 bp, Homo sapiens
ccttgcaaatggcat

SEQ ID NO: 278224 - DNA, 15 bp, Homo sapiens
cccttgcaaatggca

SEQ ID NO: 278225 - DNA, 15 bp, Homo sapiens
gcccttgcaaatggc

SEQ ID NO: 278226 - DNA, 15 bp, Homo sapiens
agcccttgcaaatgg

SEQ ID NO: 278227 - DNA, 15 bp, Homo sapiens
aagcccttgcaaatg

SEQ ID NO: 278228 - DNA, 15 bp, Homo sapiens
gaagcccttgcaaat

SEQ ID NO: 278229 - DNA, 15 bp, Homo sapiens
agaagcccttgcaaa

SEQ ID NO: 278230 - DNA, 15 bp, Homo sapiens
aagaagcccttgcaa

SEQ ID NO: 278231 - DNA, 15 bp, Homo sapiens
aaagaagcccttgca

SEQ ID NO: 278232 - DNA, 15 bp, Homo sapiens
gaaagaagcccttgc

SEQ ID NO: 278233 - DNA, 15 bp, Homo sapiens
ggaaagaagcccttg

SEQ ID NO: 278234 - DNA, 15 bp, Homo sapiens
tggaaagaagccctt

SEQ ID NO: 278235 - DNA, 15 bp, Homo sapiens
ctggaaagaagccct

SEQ ID NO: 278236 - DNA, 15 bp, Homo sapiens
actggaaagaagccc

SEQ ID NO: 278237 - DNA, 15 bp, Homo sapiens
gactggaaagaagcc

SEQ ID NO: 278238 - DNA, 15 bp, Homo sapiens
ggactggaaagaagc

SEQ ID NO: 278239 - DNA, 15 bp, Homo sapiens
aggactggaaagaag

SEQ ID NO: 278240 - DNA, 15 bp, Homo sapiens
aaggactggaaagaa

SEQ ID NO: 278241 - DNA, 15 bp, Homo sapiens
aaaggactggaaaga

SEQ ID NO: 278242 - DNA, 15 bp, Homo sapiens
aaaaggactggaaag

SEQ ID NO: 278243 - DNA, 15 bp, Homo sapiens
gaaaaggactggaaa

SEQ ID NO: 278244 - DNA, 15 bp, Homo sapiens
agaaaaggactggaa

SEQ ID NO: 278245 - DNA, 15 bp, Homo sapiens
cagaaaaggactgga

SEQ ID NO: 278246 - DNA, 15 bp, Homo sapiens
gcagaaaaggactgg

SEQ ID NO: 278247 - DNA, 15 bp, Homo sapiens
tgcagaaaaggactg

SEQ ID NO: 278248 - DNA, 15 bp, Homo sapiens
ttgcagaaaaggact

SEQ ID NO: 278249 - DNA, 15 bp, Homo sapiens
gttgcagaaaaggac

SEQ ID NO: 278250 - DNA, 15 bp, Homo sapiens
tgttgcagaaaagga

SEQ ID NO: 278251 - DNA, 15 bp, Homo sapiens
ctgttgcagaaaagg

SEQ ID NO: 278252 - DNA, 15 bp, Homo sapiens
actgttgcagaaaag

SEQ ID NO: 278253 - DNA, 15 bp, Homo sapiens
cactgttgcagaaaa

SEQ ID NO: 278254 - DNA, 15 bp, Homo sapiens
ccactgttgcagaaa

SEQ ID NO: 278255 - DNA, 15 bp, Homo sapiens
gccactgttgcagaa

SEQ ID NO: 278256 - DNA, 15 bp, Homo sapiens
agccactgttgcaga

SEQ ID NO: 278257 - DNA, 15 bp, Homo sapiens
aagccactgttgcag

SEQ ID NO: 278258 - DNA, 15 bp, Homo sapiens
aaagccactgttgca

SEQ ID NO: 278259 - DNA, 15 bp, Homo sapiens
caaagccactgttgc

SEQ ID NO: 278260 - DNA, 15 bp, Homo sapiens
ccaaagccactgttg

SEQ ID NO: 278261 - DNA, 15 bp, Homo sapiens
cccaaagccactgtt

SEQ ID NO: 278262 - DNA, 15 bp, Homo sapiens
acccaaagccactgt

SEQ ID NO: 278263 - DNA, 15 bp, Homo sapiens
cacccaaagccactg

SEQ ID NO: 278264 - DNA, 15 bp, Homo sapiens
ccacccaaagccact

SEQ ID NO: 278265 - DNA, 15 bp, Homo sapiens
gccacccaaagccac

SEQ ID NO: 278266 - DNA, 15 bp, Homo sapiens
tgccacccaaagcca

SEQ ID NO: 278267 - DNA, 15 bp, Homo sapiens
atgccacccaaagcc

SEQ ID NO: 278268 - DNA, 15 bp, Homo sapiens
tatgccacccaaagc

SEQ ID NO: 278269 - DNA, 15 bp, Homo sapiens
ctatgccacccaaag

SEQ ID NO: 278270 - DNA, 15 bp, Homo sapiens
cctatgccacccaaa

SEQ ID NO: 278271 - DNA, 15 bp, Homo sapiens
gcctatgccacccaa

SEQ ID NO: 278272 - DNA, 15 bp, Homo sapiens
ggcctatgccaccca

SEQ ID NO: 278273 - DNA, 15 bp, Homo sapiens
aggcctatgccaccc

SEQ ID NO: 278274 - DNA, 15 bp, Homo sapiens
taggcctatgccacc

SEQ ID NO: 278275 - DNA, 15 bp, Homo sapiens
ataggcctatgccac

SEQ ID NO: 278276 - DNA, 15 bp, Homo sapiens
tataggcctatgcca

SEQ ID NO: 278277 - DNA, 15 bp, Homo sapiens
atataggcctatgcc

SEQ ID NO: 278278 - DNA, 15 bp, Homo sapiens
tatataggcctatgc

SEQ ID NO: 278279 - DNA, 15 bp, Homo sapiens
ctatataggcctatg

SEQ ID NO: 278280 - DNA, 15 bp, Homo sapiens
gctatataggcctat

SEQ ID NO: 278281 - DNA, 15 bp, Homo sapiens
ggctatataggccta

SEQ ID NO: 278282 - DNA, 15 bp, Homo sapiens
tggctatataggcct

SEQ ID NO: 278283 - DNA, 15 bp, Homo sapiens
ctggctatataggcc

SEQ ID NO: 278284 - DNA, 15 bp, Homo sapiens
gctggctatataggc

SEQ ID NO: 278285 - DNA, 15 bp, Homo sapiens
agctggctatatagg

SEQ ID NO: 278286 - DNA, 15 bp, Homo sapiens
gagctggctatatag

SEQ ID NO: 278287 - DNA, 15 bp, Homo sapiens
agagctggctatata

SEQ ID NO: 278288 - DNA, 15 bp, Homo sapiens
cagagctggctatat

SEQ ID NO: 278289 - DNA, 15 bp, Homo sapiens
tcagagctggctata

SEQ ID NO: 278290 - DNA, 15 bp, Homo sapiens
gtcagagctggctat

SEQ ID NO: 278291 - DNA, 15 bp, Homo sapiens
tgtcagagctggcta

SEQ ID NO: 278292 - DNA, 15 bp, Homo sapiens
ctgtcagagctggct

SEQ ID NO: 278293 - DNA, 15 bp, Homo sapiens
tctgtcagagctggc

SEQ ID NO: 278294 - DNA, 15 bp, Homo sapiens
atctgtcagagctgg

SEQ ID NO: 278295 - DNA, 15 bp, Homo sapiens
catctgtcagagctg

SEQ ID NO: 278296 - DNA, 15 bp, Homo sapiens
gcatctgtcagagct

SEQ ID NO: 278297 - DNA, 15 bp, Homo sapiens
agcatctgtcagagc

SEQ ID NO: 278298 - DNA, 15 bp, Homo sapiens
gagcatctgtcagag

SEQ ID NO: 278299 - DNA, 15 bp, Homo sapiens
tgagcatctgtcaga

SEQ ID NO: 278300 - DNA, 15 bp, Homo sapiens
ctgagcatctgtcag

SEQ ID NO: 278301 - DNA, 15 bp, Homo sapiens
gctgagcatctgtca

SEQ ID NO: 278302 - DNA, 15 bp, Homo sapiens
tgctgagcatctgtc

SEQ ID NO: 278303 - DNA, 15 bp, Homo sapiens
atgctgagcatctgt

SEQ ID NO: 278304 - DNA, 15 bp, Homo sapiens
aatgctgagcatctg

SEQ ID NO: 278305 - DNA, 15 bp, Homo sapiens
gaatgctgagcatct

SEQ ID NO: 278306 - DNA, 15 bp, Homo sapiens
tgaatgctgagcatc

SEQ ID NO: 278307 - DNA, 15 bp, Homo sapiens
gtgaatgctgagcat

SEQ ID NO: 278308 - DNA, 15 bp, Homo sapiens
tgtgaatgctgagca

SEQ ID NO: 278309 - DNA, 15 bp, Homo sapiens
ctgtgaatgctgagc

SEQ ID NO: 278310 - DNA, 15 bp, Homo sapiens
tctgtgaatgctgag

SEQ ID NO: 278311 - DNA, 15 bp, Homo sapiens
atctgtgaatgctga

SEQ ID NO: 278312 - DNA, 15 bp, Homo sapiens
tatctgtgaatgctg

SEQ ID NO: 278313 - DNA, 15 bp, Homo sapiens
gtatctgtgaatgct

SEQ ID NO: 278314 - DNA, 15 bp, Homo sapiens
tgtatctgtgaatgc

SEQ ID NO: 278315 - DNA, 15 bp, Homo sapiens
gtgtatctgtgaatg

SEQ ID NO: 278316 - DNA, 15 bp, Homo sapiens
tgtgtatctgtgaat

SEQ ID NO: 278317 - DNA, 15 bp, Homo sapiens
gtgtgtatctgtgaa

SEQ ID NO: 278318 - DNA, 15 bp, Homo sapiens
tgtgtgtatctgtga

SEQ ID NO: 278319 - DNA, 15 bp, Homo sapiens
gtgtgtgtatctgtg

SEQ ID NO: 278320 - DNA, 15 bp, Homo sapiens
tgtgtgtgtatctgt

SEQ ID NO: 278321 - DNA, 15 bp, Homo sapiens
ctgtgtgtgtatctg

SEQ ID NO: 278322 - DNA, 15 bp, Homo sapiens
cctgtgtgtgtatct

SEQ ID NO: 278323 - DNA, 15 bp, Homo sapiens
ccctgtgtgtgtatc

SEQ ID NO: 278324 - DNA, 15 bp, Homo sapiens
tccctgtgtgtgtat

SEQ ID NO: 278325 - DNA, 15 bp, Homo sapiens
ctccctgtgtgtgta

SEQ ID NO: 278326 - DNA, 15 bp, Homo sapiens
gctccctgtgtgtgt

SEQ ID NO: 278327 - DNA, 15 bp, Homo sapiens
ggctccctgtgtgtg

SEQ ID NO: 278328 - DNA, 15 bp, Homo sapiens
tggctccctgtgtgt

SEQ ID NO: 278329 - DNA, 15 bp, Homo sapiens
ttggctccctgtgtg

SEQ ID NO: 278330 - DNA, 15 bp, Homo sapiens
tttggctccctgtgt

SEQ ID NO: 278331 - DNA, 15 bp, Homo sapiens
atttggctccctgtg

SEQ ID NO: 278332 - DNA, 15 bp, Homo sapiens
catttggctccctgt

SEQ ID NO: 278333 - DNA, 15 bp, Homo sapiens
ccatttggctccctg

SEQ ID NO: 278334 - DNA, 15 bp, Homo sapiens
tccatttggctccct

SEQ ID NO: 278335 - DNA, 15 bp, Homo sapiens
gtccatttggctccc

SEQ ID NO: 278336 - DNA, 15 bp, Homo sapiens
tgtccatttggctcc

SEQ ID NO: 278337 - DNA, 15 bp, Homo sapiens
ctgtccatttggctc

SEQ ID NO: 278338 - DNA, 15 bp, Homo sapiens
cctgtccatttggct

SEQ ID NO: 278339 - DNA, 15 bp, Homo sapiens
ccctgtccatttggc

SEQ ID NO: 278340 - DNA, 15 bp, Homo sapiens
tccctgtccatttgg

SEQ ID NO: 278341 - DNA, 15 bp, Homo sapiens
atccctgtccatttg

SEQ ID NO: 278342 - DNA, 15 bp, Homo sapiens
aatccctgtccattt

SEQ ID NO: 278343 - DNA, 15 bp, Homo sapiens
taatccctgtccatt

SEQ ID NO: 278344 - DNA, 15 bp, Homo sapiens
ctaatccctgtccat

SEQ ID NO: 278345 - DNA, 15 bp, Homo sapiens
actaatccctgtcca

SEQ ID NO: 278346 - DNA, 15 bp, Homo sapiens
gactaatccctgtcc

SEQ ID NO: 278347 - DNA, 15 bp, Homo sapiens
agactaatccctgtc

SEQ ID NO: 278348 - DNA, 15 bp, Homo sapiens
aagactaatccctgt

SEQ ID NO: 278349 - DNA, 15 bp, Homo sapiens
taagactaatccctg

SEQ ID NO: 278350 - DNA, 15 bp, Homo sapiens
ttaagactaatccct

SEQ ID NO: 278351 - DNA, 15 bp, Homo sapiens
tttaagactaatccc

SEQ ID NO: 278352 - DNA, 15 bp, Homo sapiens
atttaagactaatcc

SEQ ID NO: 278353 - DNA, 15 bp, Homo sapiens
gatttaagactaatc

SEQ ID NO: 278354 - DNA, 15 bp, Homo sapiens
tgatttaagactaat

SEQ ID NO: 278355 - DNA, 15 bp, Homo sapiens
ctgatttaagactaa

SEQ ID NO: 278356 - DNA, 15 bp, Homo sapiens
gctgatttaagacta

SEQ ID NO: 278357 - DNA, 15 bp, Homo sapiens
agctgatttaagact

SEQ ID NO: 278358 - DNA, 15 bp, Homo sapiens
cagctgatttaagac

SEQ ID NO: 278359 - DNA, 15 bp, Homo sapiens
acagctgatttaaga

SEQ ID NO: 278360 - DNA, 15 bp, Homo sapiens
aacagctgatttaag

SEQ ID NO: 278361 - DNA, 15 bp, Homo sapiens
aaacagctgatttaa

SEQ ID NO: 278362 - DNA, 15 bp, Homo sapiens
taaacagctgattta

SEQ ID NO: 278363 - DNA, 15 bp, Homo sapiens
ataaacagctgattt

SEQ ID NO: 278364 - DNA, 15 bp, Homo sapiens
cataaacagctgatt

SEQ ID NO: 278365 - DNA, 15 bp, Homo sapiens
tcataaacagctgat

SEQ ID NO: 278366 - DNA, 15 bp, Homo sapiens
ttcataaacagctga

SEQ ID NO: 278367 - DNA, 15 bp, Homo sapiens
attcataaacagctg

SEQ ID NO: 278368 - DNA, 15 bp, Homo sapiens
cattcataaacagct

SEQ ID NO: 278369 - DNA, 15 bp, Homo sapiens
ccattcataaacagc

SEQ ID NO: 278370 - DNA, 15 bp, Homo sapiens
tccattcataaacag

SEQ ID NO: 278371 - DNA, 15 bp, Homo sapiens
ctccattcataaaca

SEQ ID NO: 278372 - DNA, 15 bp, Homo sapiens
tctccattcataaac

SEQ ID NO: 278373 - DNA, 15 bp, Homo sapiens
ttctccattcataaa

SEQ ID NO: 278374 - DNA, 15 bp, Homo sapiens
cttctccattcataa

SEQ ID NO: 278375 - DNA, 15 bp, Homo sapiens
tcttctccattcata

SEQ ID NO: 278376 - DNA, 15 bp, Homo sapiens
ctcttctccattcat

SEQ ID NO: 278377 - DNA, 15 bp, Homo sapiens
cctcttctccattca

SEQ ID NO: 278378 - DNA, 15 bp, Homo sapiens
gcctcttctccattc

SEQ ID NO: 278379 - DNA, 15 bp, Homo sapiens
ggcctcttctccatt

SEQ ID NO: 278380 - DNA, 15 bp, Homo sapiens
gggcctcttctccat

SEQ ID NO: 278381 - DNA, 15 bp, Homo sapiens
agggcctcttctcca

SEQ ID NO: 278382 - DNA, 15 bp, Homo sapiens
aagggcctcttctcc

SEQ ID NO: 278383 - DNA, 15 bp, Homo sapiens
gaagggcctcttctc

SEQ ID NO: 278384 - DNA, 15 bp, Homo sapiens
agaagggcctcttct

SEQ ID NO: 278385 - DNA, 15 bp, Homo sapiens
gagaagggcctcttc

SEQ ID NO: 278386 - DNA, 15 bp, Homo sapiens
ggagaagggcctctt

SEQ ID NO: 278387 - DNA, 15 bp, Homo sapiens
aggagaagggcctct

SEQ ID NO: 278388 - DNA, 15 bp, Homo sapiens
caggagaagggcctc

SEQ ID NO: 278389 - DNA, 15 bp, Homo sapiens
ccaggagaagggcct

SEQ ID NO: 278390 - DNA, 15 bp, Homo sapiens
cccaggagaagggcc

SEQ ID NO: 278391 - DNA, 15 bp, Homo sapiens
acccaggagaagggc

SEQ ID NO: 278392 - DNA, 15 bp, Homo sapiens
aacccaggagaaggg

SEQ ID NO: 278393 - DNA, 15 bp, Homo sapiens
gaacccaggagaagg

SEQ ID NO: 278394 - DNA, 15 bp, Homo sapiens
agaacccaggagaag

SEQ ID NO: 278395 - DNA, 15 bp, Homo sapiens
cagaacccaggagaa

SEQ ID NO: 278396 - DNA, 15 bp, Homo sapiens
ccagaacccaggaga

SEQ ID NO: 278397 - DNA, 15 bp, Homo sapiens
gccagaacccaggag

SEQ ID NO: 278398 - DNA, 15 bp, Homo sapiens
ggccagaacccagga

SEQ ID NO: 278399 - DNA, 15 bp, Homo sapiens
tggccagaacccagg

SEQ ID NO: 278400 - DNA, 15 bp, Homo sapiens
gtggccagaacccag

SEQ ID NO: 278401 - DNA, 15 bp, Homo sapiens
tgtggccagaaccca

SEQ ID NO: 278402 - DNA, 15 bp, Homo sapiens
gtgtggccagaaccc

SEQ ID NO: 278403 - DNA, 15 bp, Homo sapiens
ggtgtggccagaacc

SEQ ID NO: 278404 - DNA, 15 bp, Homo sapiens
gggtgtggccagaac

SEQ ID NO: 278405 - DNA, 15 bp, Homo sapiens
ggggtgtggccagaa

SEQ ID NO: 278406 - DNA, 15 bp, Homo sapiens
aggggtgtggccaga

SEQ ID NO: 278407 - DNA, 15 bp, Homo sapiens
aaggggtgtggccag

SEQ ID NO: 278408 - DNA, 15 bp, Homo sapiens
gaaggggtgtggcca

SEQ ID NO: 278409 - DNA, 15 bp, Homo sapiens
agaaggggtgtggcc

SEQ ID NO: 278410 - DNA, 15 bp, Homo sapiens
gagaaggggtgtggc

SEQ ID NO: 278411 - DNA, 15 bp, Homo sapiens
agagaaggggtgtgg

SEQ ID NO: 278412 - DNA, 15 bp, Homo sapiens
aagagaaggggtgtg

SEQ ID NO: 278413 - DNA, 15 bp, Homo sapiens
aaagagaaggggtgt

SEQ ID NO: 278414 - DNA, 15 bp, Homo sapiens
caaagagaaggggtg

SEQ ID NO: 278415 - DNA, 15 bp, Homo sapiens
gcaaagagaaggggt

SEQ ID NO: 278416 - DNA, 15 bp, Homo sapiens
tgcaaagagaagggg

SEQ ID NO: 278417 - DNA, 15 bp, Homo sapiens
ctgcaaagagaaggg

SEQ ID NO: 278418 - DNA, 15 bp, Homo sapiens
gctgcaaagagaagg

SEQ ID NO: 278419 - DNA, 15 bp, Homo sapiens
agctgcaaagagaag

SEQ ID NO: 278420 - DNA, 15 bp, Homo sapiens
aagctgcaaagagaa

SEQ ID NO: 278421 - DNA, 15 bp, Homo sapiens
aaagctgcaaagaga

SEQ ID NO: 278422 - DNA, 15 bp, Homo sapiens
aaaagctgcaaagag

SEQ ID NO: 278423 - DNA, 15 bp, Homo sapiens
aaaaagctgcaaaga

SEQ ID NO: 278424 - DNA, 15 bp, Homo sapiens
caaaaagctgcaaag

SEQ ID NO: 278425 - DNA, 15 bp, Homo sapiens
tcaaaaagctgcaaa

SEQ ID NO: 278426 - DNA, 15 bp, Homo sapiens
ctcaaaaagctgcaa

SEQ ID NO: 278427 - DNA, 15 bp, Homo sapiens
tctcaaaaagctgca

SEQ ID NO: 278428 - DNA, 15 bp, Homo sapiens
ttctcaaaaagctgc

SEQ ID NO: 278429 - DNA, 15 bp, Homo sapiens
attctcaaaaagctg

SEQ ID NO: 278430 - DNA, 15 bp, Homo sapiens
cattctcaaaaagct

SEQ ID NO: 278431 - DNA, 15 bp, Homo sapiens
tcattctcaaaaagc

SEQ ID NO: 278432 - DNA, 15 bp, Homo sapiens
ctcattctcaaaaag

SEQ ID NO: 278433 - DNA, 15 bp, Homo sapiens
cctcattctcaaaaa

SEQ ID NO: 278434 - DNA, 15 bp, Homo sapiens
acctcattctcaaaa

SEQ ID NO: 278435 - DNA, 15 bp, Homo sapiens
gacctcattctcaaa

SEQ ID NO: 278436 - DNA, 15 bp, Homo sapiens
tgacctcattctcaa

SEQ ID NO: 278437 - DNA, 15 bp, Homo sapiens
ctgacctcattctca

SEQ ID NO: 278438 - DNA, 15 bp, Homo sapiens
cctgacctcattctc

SEQ ID NO: 278439 - DNA, 15 bp, Homo sapiens
ccctgacctcattct

SEQ ID NO: 278440 - DNA, 15 bp, Homo sapiens
gccctgacctcattc

SEQ ID NO: 278441 - DNA, 15 bp, Homo sapiens
ggccctgacctcatt

SEQ ID NO: 278442 - DNA, 15 bp, Homo sapiens
tggccctgacctcat

SEQ ID NO: 278443 - DNA, 15 bp, Homo sapiens
ctggccctgacctca

SEQ ID NO: 278444 - DNA, 15 bp, Homo sapiens
cctggccctgacctc

SEQ ID NO: 278445 - DNA, 15 bp, Homo sapiens
tcctggccctgacct

SEQ ID NO: 278446 - DNA, 15 bp, Homo sapiens
atcctggccctgacc

SEQ ID NO: 278447 - DNA, 15 bp, Homo sapiens
gatcctggccctgac

SEQ ID NO: 278448 - DNA, 15 bp, Homo sapiens
agatcctggccctga

SEQ ID NO: 278449 - DNA, 15 bp, Homo sapiens
tagatcctggccctg

SEQ ID NO: 278450 - DNA, 15 bp, Homo sapiens
ttagatcctggccct

SEQ ID NO: 278451 - DNA, 15 bp, Homo sapiens
gttagatcctggccc

SEQ ID NO: 278452 - DNA, 15 bp, Homo sapiens
agttagatcctggcc

SEQ ID NO: 278453 - DNA, 15 bp, Homo sapiens
cagttagatcctggc

SEQ ID NO: 278454 - DNA, 15 bp, Homo sapiens
gcagttagatcctgg

SEQ ID NO: 278455 - DNA, 15 bp, Homo sapiens
agcagttagatcctg

SEQ ID NO: 278456 - DNA, 15 bp, Homo sapiens
aagcagttagatcct

SEQ ID NO: 278457 - DNA, 15 bp, Homo sapiens
taagcagttagatcc

SEQ ID NO: 278458 - DNA, 15 bp, Homo sapiens
ataagcagttagatc

SEQ ID NO: 278459 - DNA, 15 bp, Homo sapiens
cataagcagttagat

SEQ ID NO: 278460 - DNA, 15 bp, Homo sapiens
gcataagcagttaga

SEQ ID NO: 278461 - DNA, 15 bp, Homo sapiens
ggcataagcagttag

SEQ ID NO: 278462 - DNA, 15 bp, Homo sapiens
aggcataagcagtta

SEQ ID NO: 278463 - DNA, 15 bp, Homo sapiens
gaggcataagcagtt

SEQ ID NO: 278464 - DNA, 15 bp, Homo sapiens
tgaggcataagcagt

SEQ ID NO: 278465 - DNA, 15 bp, Homo sapiens
ctgaggcataagcag

SEQ ID NO: 278466 - DNA, 15 bp, Homo sapiens
tctgaggcataagca

SEQ ID NO: 278467 - DNA, 15 bp, Homo sapiens
ttctgaggcataagc

SEQ ID NO: 278468 - DNA, 15 bp, Homo sapiens
tttctgaggcataag

SEQ ID NO: 278469 - DNA, 15 bp, Homo sapiens
atttctgaggcataa

SEQ ID NO: 278470 - DNA, 15 bp, Homo sapiens
tatttctgaggcata

SEQ ID NO: 278471 - DNA, 15 bp, Homo sapiens
ctatttctgaggcat

SEQ ID NO: 278472 - DNA, 15 bp, Homo sapiens
gctatttctgaggca

SEQ ID NO: 278473 - DNA, 15 bp, Homo sapiens
tgctatttctgaggc

SEQ ID NO: 278474 - DNA, 15 bp, Homo sapiens
ctgctatttctgagg

SEQ ID NO: 278475 - DNA, 15 bp, Homo sapiens
gctgctatttctgag

SEQ ID NO: 278476 - DNA, 15 bp, Homo sapiens
tgctgctatttctga

SEQ ID NO: 278477 - DNA, 15 bp, Homo sapiens
gtgctgctatttctg

SEQ ID NO: 278478 - DNA, 15 bp, Homo sapiens
tgtgctgctatttct

SEQ ID NO: 278479 - DNA, 15 bp, Homo sapiens
ctgtgctgctatttc

SEQ ID NO: 278480 - DNA, 15 bp, Homo sapiens
tctgtgctgctattt

SEQ ID NO: 278481 - DNA, 15 bp, Homo sapiens
atctgtgctgctatt

SEQ ID NO: 278482 - DNA, 15 bp, Homo sapiens
gatctgtgctgctat

SEQ ID NO: 278483 - DNA, 15 bp, Homo sapiens
tgatctgtgctgcta

SEQ ID NO: 278484 - DNA, 15 bp, Homo sapiens
ttgatctgtgctgct

SEQ ID NO: 278485 - DNA, 15 bp, Homo sapiens
tttgatctgtgctgc

SEQ ID NO: 278486 - DNA, 15 bp, Homo sapiens
ttttgatctgtgctg

SEQ ID NO: 278487 - DNA, 15 bp, Homo sapiens
attttgatctgtgct

SEQ ID NO: 278488 - DNA, 15 bp, Homo sapiens
aattttgatctgtgc

SEQ ID NO: 278489 - DNA, 15 bp, Homo sapiens
taattttgatctgtg

SEQ ID NO: 278490 - DNA, 15 bp, Homo sapiens
ttaattttgatctgt

SEQ ID NO: 278491 - DNA, 15 bp, Homo sapiens
attaattttgatctg

SEQ ID NO: 278492 - DNA, 15 bp, Homo sapiens
gattaattttgatct

SEQ ID NO: 278493 - DNA, 15 bp, Homo sapiens
agattaattttgatc

SEQ ID NO: 278494 - DNA, 15 bp, Homo sapiens
aagattaattttgat

SEQ ID NO: 278495 - DNA, 15 bp, Homo sapiens
taagattaattttga

SEQ ID NO: 278496 - DNA, 15 bp, Homo sapiens
ttaagattaattttg

SEQ ID NO: 278497 - DNA, 15 bp, Homo sapiens
cttaagattaatttt

SEQ ID NO: 278498 - DNA, 15 bp, Homo sapiens
gcttaagattaattt

SEQ ID NO: 278499 - DNA, 15 bp, Homo sapiens
agcttaagattaatt

SEQ ID NO: 278500 - DNA, 15 bp, Homo sapiens
aagcttaagattaat

SEQ ID NO: 278501 - DNA, 15 bp, Homo sapiens
aaagcttaagattaa

SEQ ID NO: 278502 - DNA, 15 bp, Homo sapiens
aaaagcttaagatta

SEQ ID NO: 278503 - DNA, 15 bp, Homo sapiens
aaaaagcttaagatt

SEQ ID NO: 278504 - DNA, 15 bp, Homo sapiens
caaaaagcttaagat

SEQ ID NO: 278505 - DNA, 15 bp, Homo sapiens
acaaaaagcttaaga

SEQ ID NO: 278506 - DNA, 15 bp, Homo sapiens
aacaaaaagcttaag

SEQ ID NO: 278507 - DNA, 15 bp, Homo sapiens
aaacaaaaagcttaa

SEQ ID NO: 278508 - DNA, 15 bp, Homo sapiens
aaaacaaaaagctta

SEQ ID NO: 278509 - DNA, 15 bp, Homo sapiens
caaaacaaaaagctt

SEQ ID NO: 278510 - DNA, 15 bp, Homo sapiens
gcaaaacaaaaagct

SEQ ID NO: 278511 - DNA, 15 bp, Homo sapiens
agcaaaacaaaaagc

SEQ ID NO: 278512 - DNA, 15 bp, Homo sapiens
cagcaaaacaaaaag

SEQ ID NO: 278513 - DNA, 15 bp, Homo sapiens
gcagcaaaacaaaaa

SEQ ID NO: 278514 - DNA, 15 bp, Homo sapiens
ggcagcaaaacaaaa

SEQ ID NO: 278515 - DNA, 15 bp, Homo sapiens
aggcagcaaaacaaa

SEQ ID NO: 278516 - DNA, 15 bp, Homo sapiens
gaggcagcaaaacaa

SEQ ID NO: 278517 - DNA, 15 bp, Homo sapiens
ggaggcagcaaaaca

SEQ ID NO: 278518 - DNA, 15 bp, Homo sapiens
aggaggcagcaaaac

SEQ ID NO: 278519 - DNA, 15 bp, Homo sapiens
aaggaggcagcaaaa

SEQ ID NO: 278520 - DNA, 15 bp, Homo sapiens
aaaggaggcagcaaa

SEQ ID NO: 278521 - DNA, 15 bp, Homo sapiens
taaaggaggcagcaa

SEQ ID NO: 278522 - DNA, 15 bp, Homo sapiens
ctaaaggaggcagca

SEQ ID NO: 278523 - DNA, 15 bp, Homo sapiens
tctaaaggaggcagc

SEQ ID NO: 278524 - DNA, 15 bp, Homo sapiens
atctaaaggaggcag

SEQ ID NO: 278525 - DNA, 15 bp, Homo sapiens
tatctaaaggaggca

SEQ ID NO: 278526 - DNA, 15 bp, Homo sapiens
ttatctaaaggaggc

SEQ ID NO: 278527 - DNA, 15 bp, Homo sapiens
attatctaaaggagg

SEQ ID NO: 278528 - DNA, 15 bp, Homo sapiens
tattatctaaaggag

SEQ ID NO: 278529 - DNA, 15 bp, Homo sapiens
ctattatctaaagga

SEQ ID NO: 278530 - DNA, 15 bp, Homo sapiens
tctattatctaaagg

SEQ ID NO: 278531 - DNA, 15 bp, Homo sapiens
ctctattatctaaag

SEQ ID NO: 278532 - DNA, 15 bp, Homo sapiens
cctctattatctaaa

SEQ ID NO: 278533 - DNA, 15 bp, Homo sapiens
tcctctattatctaa

SEQ ID NO: 278534 - DNA, 15 bp, Homo sapiens
ttcctctattatcta

SEQ ID NO: 278535 - DNA, 15 bp, Homo sapiens
tttcctctattatct

SEQ ID NO: 278536 - DNA, 15 bp, Homo sapiens
ttttcctctattatc

SEQ ID NO: 278537 - DNA, 15 bp, Homo sapiens
tttttcctctattat

SEQ ID NO: 278538 - DNA, 15 bp, Homo sapiens
ctttttcctctatta

SEQ ID NO: 278539 - DNA, 15 bp, Homo sapiens
gctttttcctctatt

SEQ ID NO: 278540 - DNA, 15 bp, Homo sapiens
cgctttttcctctat

SEQ ID NO: 278541 - DNA, 15 bp, Homo sapiens
tcgctttttcctcta

SEQ ID NO: 278542 - DNA, 15 bp, Homo sapiens
ttcgctttttcctct

SEQ ID NO: 278543 - DNA, 15 bp, Homo sapiens
cttcgctttttcctc

SEQ ID NO: 278544 - DNA, 15 bp, Homo sapiens
ccttcgctttttcct

SEQ ID NO: 278545 - DNA, 15 bp, Homo sapiens
gccttcgctttttcc

SEQ ID NO: 278546 - DNA, 15 bp, Homo sapiens
ggccttcgctttttc

SEQ ID NO: 278547 - DNA, 15 bp, Homo sapiens
aggccttcgcttttt

SEQ ID NO: 278548 - DNA, 15 bp, Homo sapiens
caggccttcgctttt

SEQ ID NO: 278549 - DNA, 15 bp, Homo sapiens
gcaggccttcgcttt

SEQ ID NO: 278550 - DNA, 15 bp, Homo sapiens
agcaggccttcgctt

SEQ ID NO: 278551 - DNA, 15 bp, Homo sapiens
gagcaggccttcgct

SEQ ID NO: 278552 - DNA, 15 bp, Homo sapiens
tgagcaggccttcgc

SEQ ID NO: 278553 - DNA, 15 bp, Homo sapiens
atgagcaggccttcg

SEQ ID NO: 278554 - DNA, 15 bp, Homo sapiens
catgagcaggccttc

SEQ ID NO: 278555 - DNA, 15 bp, Homo sapiens
acatgagcaggcctt

SEQ ID NO: 278556 - DNA, 15 bp, Homo sapiens
aacatgagcaggcct

SEQ ID NO: 278557 - DNA, 15 bp, Homo sapiens
aaacatgagcaggcc

SEQ ID NO: 278558 - DNA, 15 bp, Homo sapiens
aaaacatgagcaggc

SEQ ID NO: 278559 - DNA, 15 bp, Homo sapiens
aaaaacatgagcagg

SEQ ID NO: 278560 - DNA, 15 bp, Homo sapiens
caaaaacatgagcag

SEQ ID NO: 278561 - DNA, 15 bp, Homo sapiens
acaaaaacatgagca

SEQ ID NO: 278562 - DNA, 15 bp, Homo sapiens
aacaaaaacatgagc

SEQ ID NO: 278563 - DNA, 15 bp, Homo sapiens
aaacaaaaacatgag

SEQ ID NO: 278564 - DNA, 15 bp, Homo sapiens
caaacaaaaacatga

SEQ ID NO: 278565 - DNA, 15 bp, Homo sapiens
gcaaacaaaaacatg

SEQ ID NO: 278566 - DNA, 15 bp, Homo sapiens
agcaaacaaaaacat

SEQ ID NO: 278567 - DNA, 15 bp, Homo sapiens
aagcaaacaaaaaca

SEQ ID NO: 278568 - DNA, 15 bp, Homo sapiens
caagcaaacaaaaac

SEQ ID NO: 278569 - DNA, 15 bp, Homo sapiens
acaagcaaacaaaaa

SEQ ID NO: 278570 - DNA, 15 bp, Homo sapiens
aacaagcaaacaaaa

SEQ ID NO: 278571 - DNA, 15 bp, Homo sapiens
aaacaagcaaacaaa

SEQ ID NO: 278572 - DNA, 15 bp, Homo sapiens
aaaacaagcaaacaa

SEQ ID NO: 278573 - DNA, 15 bp, Homo sapiens
aaaaacaagcaaaca

SEQ ID NO: 278574 - DNA, 15 bp, Homo sapiens
caaaaacaagcaaac

SEQ ID NO: 278575 - DNA, 15 bp, Homo sapiens
acaaaaacaagcaaa

SEQ ID NO: 278576 - DNA, 15 bp, Homo sapiens
cacaaaaacaagcaa

SEQ ID NO: 278577 - DNA, 15 bp, Homo sapiens
acacaaaaacaagca

SEQ ID NO: 278578 - DNA, 15 bp, Homo sapiens
cacacaaaaacaagc

SEQ ID NO: 278579 - DNA, 15 bp, Homo sapiens
acacacaaaaacaag

SEQ ID NO: 278580 - DNA, 15 bp, Homo sapiens
tacacacaaaaacaa

SEQ ID NO: 278581 - DNA, 15 bp, Homo sapiens
gtacacacaaaaaca

SEQ ID NO: 278582 - DNA, 15 bp, Homo sapiens
ggtacacacaaaaac

SEQ ID NO: 278583 - DNA, 15 bp, Homo sapiens
aggtacacacaaaaa

SEQ ID NO: 278584 - DNA, 15 bp, Homo sapiens
aaggtacacacaaaa

SEQ ID NO: 278585 - DNA, 15 bp, Homo sapiens
aaaggtacacacaaa

SEQ ID NO: 278586 - DNA, 15 bp, Homo sapiens
caaaggtacacacaa

SEQ ID NO: 278587 - DNA, 15 bp, Homo sapiens
tcaaaggtacacaca

SEQ ID NO: 278588 - DNA, 15 bp, Homo sapiens
ttcaaaggtacacac

SEQ ID NO: 278589 - DNA, 15 bp, Homo sapiens
tttcaaaggtacaca

SEQ ID NO: 278590 - DNA, 15 bp, Homo sapiens
ctttcaaaggtacac

SEQ ID NO: 278591 - DNA, 15 bp, Homo sapiens
cctttcaaaggtaca

SEQ ID NO: 278592 - DNA, 15 bp, Homo sapiens
tcctttcaaaggtac

SEQ ID NO: 278593 - DNA, 15 bp, Homo sapiens
ttcctttcaaaggta

SEQ ID NO: 278594 - DNA, 15 bp, Homo sapiens
gttcctttcaaaggt

SEQ ID NO: 278595 - DNA, 15 bp, Homo sapiens
tgttcctttcaaagg

SEQ ID NO: 278596 - DNA, 15 bp, Homo sapiens
atgttcctttcaaag

SEQ ID NO: 278597 - DNA, 15 bp, Homo sapiens
tatgttcctttcaaa

SEQ ID NO: 278598 - DNA, 15 bp, Homo sapiens
atatgttcctttcaa

SEQ ID NO: 278599 - DNA, 15 bp, Homo sapiens
catatgttcctttca

SEQ ID NO: 278600 - DNA, 15 bp, Homo sapiens
tcatatgttcctttc

SEQ ID NO: 278601 - DNA, 15 bp, Homo sapiens
ttcatatgttccttt

SEQ ID NO: 278602 - DNA, 15 bp, Homo sapiens
attcatatgttcctt

SEQ ID NO: 278603 - DNA, 15 bp, Homo sapiens
cattcatatgttcct

SEQ ID NO: 278604 - DNA, 15 bp, Homo sapiens
tcattcatatgttcc

SEQ ID NO: 278605 - DNA, 15 bp, Homo sapiens
ttcattcatatgttc

SEQ ID NO: 278606 - DNA, 15 bp, Homo sapiens
attcattcatatgtt

SEQ ID NO: 278607 - DNA, 15 bp, Homo sapiens
tattcattcatatgt

SEQ ID NO: 278608 - DNA, 15 bp, Homo sapiens
atattcattcatatg

SEQ ID NO: 278609 - DNA, 15 bp, Homo sapiens
catattcattcatat

SEQ ID NO: 278610 - DNA, 15 bp, Homo sapiens
acatattcattcata

SEQ ID NO: 278611 - DNA, 15 bp, Homo sapiens
cacatattcattcat

SEQ ID NO: 278612 - DNA, 15 bp, Homo sapiens
acacatattcattca

SEQ ID NO: 278613 - DNA, 15 bp, Homo sapiens
cacacatattcattc

SEQ ID NO: 278614 - DNA, 15 bp, Homo sapiens
tcacacatattcatt

SEQ ID NO: 278615 - DNA, 15 bp, Homo sapiens
atcacacatattcat

SEQ ID NO: 278616 - DNA, 15 bp, Homo sapiens
catcacacatattca

SEQ ID NO: 278617 - DNA, 15 bp, Homo sapiens
ccatcacacatattc

SEQ ID NO: 278618 - DNA, 15 bp, Homo sapiens
cccatcacacatatt

SEQ ID NO: 278619 - DNA, 15 bp, Homo sapiens
tcccatcacacatat

SEQ ID NO: 278620 - DNA, 15 bp, Homo sapiens
ctcccatcacacata

SEQ ID NO: 278621 - DNA, 15 bp, Homo sapiens
cctcccatcacacat

SEQ ID NO: 278622 - DNA, 15 bp, Homo sapiens
ccctcccatcacaca

SEQ ID NO: 278623 - DNA, 15 bp, Homo sapiens
cccctcccatcacac

SEQ ID NO: 278624 - DNA, 15 bp, Homo sapiens
acccctcccatcaca

SEQ ID NO: 278625 - DNA, 15 bp, Homo sapiens
aacccctcccatcac

SEQ ID NO: 278626 - DNA, 15 bp, Homo sapiens
caacccctcccatca

SEQ ID NO: 278627 - DNA, 15 bp, Homo sapiens
tcaacccctcccatc

SEQ ID NO: 278628 - DNA, 15 bp, Homo sapiens
ctcaacccctcccat

SEQ ID NO: 278629 - DNA, 15 bp, Homo sapiens
cctcaacccctccca

SEQ ID NO: 278630 - DNA, 15 bp, Homo sapiens
acctcaacccctccc

SEQ ID NO: 278631 - DNA, 15 bp, Homo sapiens
cacctcaacccctcc

SEQ ID NO: 278632 - DNA, 15 bp, Homo sapiens
tcacctcaacccctc

SEQ ID NO: 278633 - DNA, 15 bp, Homo sapiens
ctcacctcaacccct

SEQ ID NO: 278634 - DNA, 15 bp, Homo sapiens
cctcacctcaacccc

SEQ ID NO: 278635 - DNA, 15 bp, Homo sapiens
gcctcacctcaaccc

SEQ ID NO: 278636 - DNA, 15 bp, Homo sapiens
tgcctcacctcaacc

SEQ ID NO: 278637 - DNA, 15 bp, Homo sapiens
ctgcctcacctcaac

SEQ ID NO: 278638 - DNA, 15 bp, Homo sapiens
gctgcctcacctcaa

SEQ ID NO: 278639 - DNA, 15 bp, Homo sapiens
agctgcctcacctca

SEQ ID NO: 278640 - DNA, 15 bp, Homo sapiens
tagctgcctcacctc

SEQ ID NO: 278641 - DNA, 15 bp, Homo sapiens
ttagctgcctcacct

SEQ ID NO: 278642 - DNA, 15 bp, Homo sapiens
cttagctgcctcacc

SEQ ID NO: 278643 - DNA, 15 bp, Homo sapiens
tcttagctgcctcac

SEQ ID NO: 278644 - DNA, 15 bp, Homo sapiens
ctcttagctgcctca

SEQ ID NO: 278645 - DNA, 15 bp, Homo sapiens
cctcttagctgcctc

SEQ ID NO: 278646 - DNA, 15 bp, Homo sapiens
ccctcttagctgcct

SEQ ID NO: 278647 - DNA, 15 bp, Homo sapiens
tccctcttagctgcc

SEQ ID NO: 278648 - DNA, 15 bp, Homo sapiens
atccctcttagctgc

SEQ ID NO: 278649 - DNA, 15 bp, Homo sapiens
aatccctcttagctg

SEQ ID NO: 278650 - DNA, 15 bp, Homo sapiens
taatccctcttagct

SEQ ID NO: 278651 - DNA, 15 bp, Homo sapiens
ctaatccctcttagc

SEQ ID NO: 278652 - DNA, 15 bp, Homo sapiens
actaatccctcttag

SEQ ID NO: 278653 - DNA, 15 bp, Homo sapiens
cactaatccctctta

SEQ ID NO: 278654 - DNA, 15 bp, Homo sapiens
gcactaatccctctt

SEQ ID NO: 278655 - DNA, 15 bp, Homo sapiens
agcactaatccctct

SEQ ID NO: 278656 - DNA, 15 bp, Homo sapiens
cagcactaatccctc

SEQ ID NO: 278657 - DNA, 15 bp, Homo sapiens
ccagcactaatccct

SEQ ID NO: 278658 - DNA, 15 bp, Homo sapiens
cccagcactaatccc

SEQ ID NO: 278659 - DNA, 15 bp, Homo sapiens
gcccagcactaatcc

SEQ ID NO: 278660 - DNA, 15 bp, Homo sapiens
cgcccagcactaatc

SEQ ID NO: 278661 - DNA, 15 bp, Homo sapiens
ccgcccagcactaat

SEQ ID NO: 278662 - DNA, 15 bp, Homo sapiens
cccgcccagcactaa

SEQ ID NO: 278663 - DNA, 15 bp, Homo sapiens
acccgcccagcacta

SEQ ID NO: 278664 - DNA, 15 bp, Homo sapiens
cacccgcccagcact

SEQ ID NO: 278665 - DNA, 15 bp, Homo sapiens
tcacccgcccagcac

SEQ ID NO: 278666 - DNA, 15 bp, Homo sapiens
atcacccgcccagca

SEQ ID NO: 278667 - DNA, 15 bp, Homo sapiens
tatcacccgcccagc

SEQ ID NO: 278668 - DNA, 15 bp, Homo sapiens
ttatcacccgcccag

SEQ ID NO: 278669 - DNA, 15 bp, Homo sapiens
attatcacccgccca

SEQ ID NO: 278670 - DNA, 15 bp, Homo sapiens
aattatcacccgccc

SEQ ID NO: 278671 - DNA, 15 bp, Homo sapiens
taattatcacccgcc

SEQ ID NO: 278672 - DNA, 15 bp, Homo sapiens
gtaattatcacccgc

SEQ ID NO: 278673 - DNA, 15 bp, Homo sapiens
agtaattatcacccg

SEQ ID NO: 278674 - DNA, 15 bp, Homo sapiens
cagtaattatcaccc

SEQ ID NO: 278675 - DNA, 15 bp, Homo sapiens
tcagtaattatcacc

SEQ ID NO: 278676 - DNA, 15 bp, Homo sapiens
atcagtaattatcac

SEQ ID NO: 278677 - DNA, 15 bp, Homo sapiens
tatcagtaattatca

SEQ ID NO: 278678 - DNA, 15 bp, Homo sapiens
ctatcagtaattatc

SEQ ID NO: 278679 - DNA, 15 bp, Homo sapiens
tctatcagtaattat

SEQ ID NO: 278680 - DNA, 15 bp, Homo sapiens
gtctatcagtaatta

SEQ ID NO: 278681 - DNA, 15 bp, Homo sapiens
agtctatcagtaatt

SEQ ID NO: 278682 - DNA, 15 bp, Homo sapiens
cagtctatcagtaat

SEQ ID NO: 278683 - DNA, 15 bp, Homo sapiens
gcagtctatcagtaa

SEQ ID NO: 278684 - DNA, 15 bp, Homo sapiens
tgcagtctatcagta

SEQ ID NO: 278685 - DNA, 15 bp, Homo sapiens
ctgcagtctatcagt

SEQ ID NO: 278686 - DNA, 15 bp, Homo sapiens
gctgcagtctatcag

SEQ ID NO: 278687 - DNA, 15 bp, Homo sapiens
tgctgcagtctatca

SEQ ID NO: 278688 - DNA, 15 bp, Homo sapiens
atgctgcagtctatc

SEQ ID NO: 278689 - DNA, 15 bp, Homo sapiens
aatgctgcagtctat

SEQ ID NO: 278690 - DNA, 15 bp, Homo sapiens
gaatgctgcagtcta

SEQ ID NO: 278691 - DNA, 15 bp, Homo sapiens
tgaatgctgcagtct

SEQ ID NO: 278692 - DNA, 15 bp, Homo sapiens
ttgaatgctgcagtc

SEQ ID NO: 278693 - DNA, 15 bp, Homo sapiens
attgaatgctgcagt

SEQ ID NO: 278694 - DNA, 15 bp, Homo sapiens
aattgaatgctgcag

SEQ ID NO: 278695 - DNA, 15 bp, Homo sapiens
caattgaatgctgca

SEQ ID NO: 278696 - DNA, 15 bp, Homo sapiens
ccaattgaatgctgc

SEQ ID NO: 278697 - DNA, 15 bp, Homo sapiens
tccaattgaatgctg

SEQ ID NO: 278698 - DNA, 15 bp, Homo sapiens
ctccaattgaatgct

SEQ ID NO: 278699 - DNA, 15 bp, Homo sapiens
gctccaattgaatgc

SEQ ID NO: 278700 - DNA, 15 bp, Homo sapiens
tgctccaattgaatg

SEQ ID NO: 278701 - DNA, 15 bp, Homo sapiens
atgctccaattgaat

SEQ ID NO: 278702 - DNA, 15 bp, Homo sapiens
catgctccaattgaa

SEQ ID NO: 278703 - DNA, 15 bp, Homo sapiens
acatgctccaattga

SEQ ID NO: 278704 - DNA, 15 bp, Homo sapiens
aacatgctccaattg

SEQ ID NO: 278705 - DNA, 15 bp, Homo sapiens
aaacatgctccaatt

SEQ ID NO: 278706 - DNA, 15 bp, Homo sapiens
aaaacatgctccaat

SEQ ID NO: 278707 - DNA, 15 bp, Homo sapiens
taaaacatgctccaa

SEQ ID NO: 278708 - DNA, 15 bp, Homo sapiens
ctaaaacatgctcca

SEQ ID NO: 278709 - DNA, 15 bp, Homo sapiens
actaaaacatgctcc

SEQ ID NO: 278710 - DNA, 15 bp, Homo sapiens
aactaaaacatgctc

SEQ ID NO: 278711 - DNA, 15 bp, Homo sapiens
caactaaaacatgct

SEQ ID NO: 278712 - DNA, 15 bp, Homo sapiens
acaactaaaacatgc

SEQ ID NO: 278713 - DNA, 15 bp, Homo sapiens
aacaactaaaacatg

SEQ ID NO: 278714 - DNA, 15 bp, Homo sapiens
aaacaactaaaacat

SEQ ID NO: 278715 - DNA, 15 bp, Homo sapiens
aaaacaactaaaaca

SEQ ID NO: 278716 - DNA, 15 bp, Homo sapiens
aaaaacaactaaaac

SEQ ID NO: 278717 - DNA, 15 bp, Homo sapiens
aaaaaacaactaaaa

SEQ ID NO: 278718 - DNA, 15 bp, Homo sapiens
aaaaaaacaactaaa

SEQ ID NO: 278719 - DNA, 15 bp, Homo sapiens
aaaaaaaacaactaa

SEQ ID NO: 278720 - DNA, 15 bp, Homo sapiens
aaaaaaaaacaacta

SEQ ID NO: 278721 - DNA, 15 bp, Homo sapiens
aaaaaaaaaacaact

SEQ ID NO: 278722 - DNA, 15 bp, Homo sapiens
aaaaaaaaaaacaac

SEQ ID NO: 278723 - DNA, 15 bp, Homo sapiens
taaaaaaaaaaacaa

SEQ ID NO: 278724 - DNA, 15 bp, Homo sapiens
ttaaaaaaaaaaaca

SEQ ID NO: 278725 - DNA, 15 bp, Homo sapiens
tttaaaaaaaaaaac

SEQ ID NO: 278726 - DNA, 15 bp, Homo sapiens
atttaaaaaaaaaaa

SEQ ID NO: 278727 - DNA, 15 bp, Homo sapiens
catttaaaaaaaaaa

SEQ ID NO: 278728 - DNA, 15 bp, Homo sapiens
ccatttaaaaaaaaa

SEQ ID NO: 278729 - DNA, 15 bp, Homo sapiens
gccatttaaaaaaaa

SEQ ID NO: 278730 - DNA, 15 bp, Homo sapiens
tgccatttaaaaaaa

SEQ ID NO: 278731 - DNA, 15 bp, Homo sapiens
ctgccatttaaaaaa

SEQ ID NO: 278732 - DNA, 15 bp, Homo sapiens
tctgccatttaaaaa

SEQ ID NO: 278733 - DNA, 15 bp, Homo sapiens
ttctgccatttaaaa

SEQ ID NO: 278734 - DNA, 15 bp, Homo sapiens
attctgccatttaaa

SEQ ID NO: 278735 - DNA, 15 bp, Homo sapiens
cattctgccatttaa

SEQ ID NO: 278736 - DNA, 15 bp, Homo sapiens
tcattctgccattta

SEQ ID NO: 278737 - DNA, 15 bp, Homo sapiens
ttcattctgccattt

SEQ ID NO: 278738 - DNA, 15 bp, Homo sapiens
tttcattctgccatt

SEQ ID NO: 278739 - DNA, 15 bp, Homo sapiens
atttcattctgccat

SEQ ID NO: 278740 - DNA, 15 bp, Homo sapiens
tatttcattctgcca

SEQ ID NO: 278741 - DNA, 15 bp, Homo sapiens
ttatttcattctgcc

SEQ ID NO: 278742 - DNA, 15 bp, Homo sapiens
tttatttcattctgc

SEQ ID NO: 278743 - DNA, 15 bp, Homo sapiens
gtttatttcattctg

SEQ ID NO: 278744 - DNA, 15 bp, Homo sapiens
ggtttatttcattct

SEQ ID NO: 278745 - DNA, 15 bp, Homo sapiens
aggtttatttcattc

SEQ ID NO: 278746 - DNA, 15 bp, Homo sapiens
gaggtttatttcatt

SEQ ID NO: 278747 - DNA, 15 bp, Homo sapiens
tgaggtttatttcat

SEQ ID NO: 278748 - DNA, 15 bp, Homo sapiens
ctgaggtttatttca

SEQ ID NO: 278749 - DNA, 15 bp, Homo sapiens
actgaggtttatttc

SEQ ID NO: 278750 - DNA, 15 bp, Homo sapiens
cactgaggtttattt

SEQ ID NO: 278751 - DNA, 15 bp, Homo sapiens
ccactgaggtttatt

SEQ ID NO: 278752 - DNA, 15 bp, Homo sapiens
accactgaggtttat

SEQ ID NO: 278753 - DNA, 15 bp, Homo sapiens
caccactgaggttta

SEQ ID NO: 278754 - DNA, 15 bp, Homo sapiens
acaccactgaggttt

SEQ ID NO: 278755 - DNA, 15 bp, Homo sapiens
tacaccactgaggtt

SEQ ID NO: 278756 - DNA, 15 bp, Homo sapiens
atacaccactgaggt

SEQ ID NO: 278757 - DNA, 15 bp, Homo sapiens
aatacaccactgagg

SEQ ID NO: 278758 - DNA, 15 bp, Homo sapiens
caatacaccactgag

SEQ ID NO: 278759 - DNA, 15 bp, Homo sapiens
acaatacaccactga

SEQ ID NO: 278760 - DNA, 15 bp, Homo sapiens
aacaatacaccactg

SEQ ID NO: 278761 - DNA, 15 bp, Homo sapiens
aaacaatacaccact

SEQ ID NO: 278762 - DNA, 15 bp, Homo sapiens
aaaacaatacaccac

SEQ ID NO: 278763 - DNA, 15 bp, Homo sapiens
taaaacaatacacca

SEQ ID NO: 278764 - DNA, 15 bp, Homo sapiens
ctaaaacaatacacc

SEQ ID NO: 278765 - DNA, 15 bp, Homo sapiens
gctaaaacaatacac

SEQ ID NO: 278766 - DNA, 15 bp, Homo sapiens
tgctaaaacaataca

SEQ ID NO: 278767 - DNA, 15 bp, Homo sapiens
gtgctaaaacaatac

SEQ ID NO: 278768 - DNA, 15 bp, Homo sapiens
ggtgctaaaacaata

SEQ ID NO: 278769 - DNA, 15 bp, Homo sapiens
aggtgctaaaacaat

SEQ ID NO: 278770 - DNA, 15 bp, Homo sapiens
gaggtgctaaaacaa

SEQ ID NO: 278771 - DNA, 15 bp, Homo sapiens
ggaggtgctaaaaca

SEQ ID NO: 278772 - DNA, 15 bp, Homo sapiens
gggaggtgctaaaac

SEQ ID NO: 278773 - DNA, 15 bp, Homo sapiens
agggaggtgctaaaa

SEQ ID NO: 278774 - DNA, 15 bp, Homo sapiens
aagggaggtgctaaa

SEQ ID NO: 278775 - DNA, 15 bp, Homo sapiens
aaagggaggtgctaa

SEQ ID NO: 278776 - DNA, 15 bp, Homo sapiens
taaagggaggtgcta

SEQ ID NO: 278777 - DNA, 15 bp, Homo sapiens
ataaagggaggtgct

SEQ ID NO: 278778 - DNA, 15 bp, Homo sapiens
tataaagggaggtgc

SEQ ID NO: 278779 - DNA, 15 bp, Homo sapiens
atataaagggaggtg

SEQ ID NO: 278780 - DNA, 15 bp, Homo sapiens
catataaagggaggt

SEQ ID NO: 278781 - DNA, 15 bp, Homo sapiens
ccatataaagggagg

SEQ ID NO: 278782 - DNA, 15 bp, Homo sapiens
tccatataaagggag

SEQ ID NO: 278783 - DNA, 15 bp, Homo sapiens
ctccatataaaggga

SEQ ID NO: 278784 - DNA, 15 bp, Homo sapiens
tctccatataaaggg

SEQ ID NO: 278785 - DNA, 15 bp, Homo sapiens
atctccatataaagg

SEQ ID NO: 278786 - DNA, 15 bp, Homo sapiens
aatctccatataaag

SEQ ID NO: 278787 - DNA, 15 bp, Homo sapiens
aaatctccatataaa

SEQ ID NO: 278788 - DNA, 15 bp, Homo sapiens
aaaatctccatataa

SEQ ID NO: 278789 - DNA, 15 bp, Homo sapiens
taaaatctccatata

SEQ ID NO: 278790 - DNA, 15 bp, Homo sapiens
ataaaatctccatat

SEQ ID NO: 278791 - DNA, 15 bp, Homo sapiens
gataaaatctccata

SEQ ID NO: 278792 - DNA, 15 bp, Homo sapiens
tgataaaatctccat

SEQ ID NO: 278793 - DNA, 15 bp, Homo sapiens
ctgataaaatctcca

SEQ ID NO: 278794 - DNA, 15 bp, Homo sapiens
actgataaaatctcc

SEQ ID NO: 278795 - DNA, 15 bp, Homo sapiens
aactgataaaatctc

SEQ ID NO: 278796 - DNA, 15 bp, Homo sapiens
caactgataaaatct

SEQ ID NO: 278797 - DNA, 15 bp, Homo sapiens
gcaactgataaaatc

SEQ ID NO: 278798 - DNA, 15 bp, Homo sapiens
agcaactgataaaat

SEQ ID NO: 278799 - DNA, 15 bp, Homo sapiens
tagcaactgataaaa

SEQ ID NO: 278800 - DNA, 15 bp, Homo sapiens
atagcaactgataaa

SEQ ID NO: 278801 - DNA, 15 bp, Homo sapiens
catagcaactgataa

SEQ ID NO: 278802 - DNA, 15 bp, Homo sapiens
tcatagcaactgata

SEQ ID NO: 278803 - DNA, 15 bp, Homo sapiens
ttcatagcaactgat

SEQ ID NO: 278804 - DNA, 15 bp, Homo sapiens
tttcatagcaactga

SEQ ID NO: 278805 - DNA, 15 bp, Homo sapiens
gtttcatagcaactg

SEQ ID NO: 278806 - DNA, 15 bp, Homo sapiens
agtttcatagcaact

SEQ ID NO: 278807 - DNA, 15 bp, Homo sapiens
cagtttcatagcaac

SEQ ID NO: 278808 - DNA, 15 bp, Homo sapiens
gcagtttcatagcaa

SEQ ID NO: 278809 - DNA, 15 bp, Homo sapiens
tgcagtttcatagca

SEQ ID NO: 278810 - DNA, 15 bp, Homo sapiens
atgcagtttcatagc

SEQ ID NO: 278811 - DNA, 15 bp, Homo sapiens
tatgcagtttcatag

SEQ ID NO: 278812 - DNA, 15 bp, Homo sapiens
atatgcagtttcata

SEQ ID NO: 278813 - DNA, 15 bp, Homo sapiens
aatatgcagtttcat

SEQ ID NO: 278814 - DNA, 15 bp, Homo sapiens
gaatatgcagtttca

SEQ ID NO: 278815 - DNA, 15 bp, Homo sapiens
ggaatatgcagtttc

SEQ ID NO: 278816 - DNA, 15 bp, Homo sapiens
aggaatatgcagttt

SEQ ID NO: 278817 - DNA, 15 bp, Homo sapiens
aaggaatatgcagtt

SEQ ID NO: 278818 - DNA, 15 bp, Homo sapiens
aaaggaatatgcagt

SEQ ID NO: 278819 - DNA, 15 bp, Homo sapiens
aaaaggaatatgcag

SEQ ID NO: 278820 - DNA, 15 bp, Homo sapiens
taaaaggaatatgca

SEQ ID NO: 278821 - DNA, 15 bp, Homo sapiens
gtaaaaggaatatgc

SEQ ID NO: 278822 - DNA, 15 bp, Homo sapiens
tgtaaaaggaatatg

SEQ ID NO: 278823 - DNA, 15 bp, Homo sapiens
ctgtaaaaggaatat

SEQ ID NO: 278824 - DNA, 15 bp, Homo sapiens
actgtaaaaggaata

SEQ ID NO: 278825 - DNA, 15 bp, Homo sapiens
cactgtaaaaggaat

SEQ ID NO: 278826 - DNA, 15 bp, Homo sapiens
acactgtaaaaggaa

SEQ ID NO: 278827 - DNA, 15 bp, Homo sapiens
gacactgtaaaagga

SEQ ID NO: 278828 - DNA, 15 bp, Homo sapiens
ggacactgtaaaagg

SEQ ID NO: 278829 - DNA, 15 bp, Homo sapiens
tggacactgtaaaag

SEQ ID NO: 278830 - DNA, 15 bp, Homo sapiens
ttggacactgtaaaa

SEQ ID NO: 278831 - DNA, 15 bp, Homo sapiens
attggacactgtaaa

SEQ ID NO: 278832 - DNA, 15 bp, Homo sapiens
aattggacactgtaa

SEQ ID NO: 278833 - DNA, 15 bp, Homo sapiens
caattggacactgta

SEQ ID NO: 278834 - DNA, 15 bp, Homo sapiens
acaattggacactgt

SEQ ID NO: 278835 - DNA, 15 bp, Homo sapiens
aacaattggacactg

SEQ ID NO: 278836 - DNA, 15 bp, Homo sapiens
aaacaattggacact

SEQ ID NO: 278837 - DNA, 15 bp, Homo sapiens
aaaacaattggacac

SEQ ID NO: 278838 - DNA, 15 bp, Homo sapiens
aaaaacaattggaca

SEQ ID NO: 278839 - DNA, 15 bp, Homo sapiens
taaaaacaattggac

SEQ ID NO: 278840 - DNA, 15 bp, Homo sapiens
ttaaaaacaattgga

SEQ ID NO: 278841 - DNA, 15 bp, Homo sapiens
attaaaaacaattgg

SEQ ID NO: 278842 - DNA, 15 bp, Homo sapiens
cattaaaaacaattg

SEQ ID NO: 278843 - DNA, 15 bp, Homo sapiens
ccattaaaaacaatt

SEQ ID NO: 278844 - DNA, 15 bp, Homo sapiens
accattaaaaacaat

SEQ ID NO: 278845 - DNA, 15 bp, Homo sapiens
gaccattaaaaacaa

SEQ ID NO: 278846 - DNA, 15 bp, Homo sapiens
tgaccattaaaaaca

SEQ ID NO: 278847 - DNA, 15 bp, Homo sapiens
atgaccattaaaaac

SEQ ID NO: 278848 - DNA, 15 bp, Homo sapiens
aatgaccattaaaaa

SEQ ID NO: 278849 - DNA, 15 bp, Homo sapiens
aaatgaccattaaaa

SEQ ID NO: 278850 - DNA, 15 bp, Homo sapiens
aaaatgaccattaaa

SEQ ID NO: 278851 - DNA, 15 bp, Homo sapiens
gaaaatgaccattaa

SEQ ID NO: 278852 - DNA, 15 bp, Homo sapiens
agaaaatgaccatta

SEQ ID NO: 278853 - DNA, 15 bp, Homo sapiens
cagaaaatgaccatt

SEQ ID NO: 278854 - DNA, 15 bp, Homo sapiens
ccagaaaatgaccat

SEQ ID NO: 278855 - DNA, 15 bp, Homo sapiens
cccagaaaatgacca

SEQ ID NO: 278856 - DNA, 15 bp, Homo sapiens
gcccagaaaatgacc

SEQ ID NO: 278857 - DNA, 15 bp, Homo sapiens
agcccagaaaatgac

SEQ ID NO: 278858 - DNA, 15 bp, Homo sapiens
cagcccagaaaatga

SEQ ID NO: 278859 - DNA, 15 bp, Homo sapiens
acagcccagaaaatg

SEQ ID NO: 278860 - DNA, 15 bp, Homo sapiens
cacagcccagaaaat

SEQ ID NO: 278861 - DNA, 15 bp, Homo sapiens
gcacagcccagaaaa

SEQ ID NO: 278862 - DNA, 15 bp, Homo sapiens
tgcacagcccagaaa

SEQ ID NO: 278863 - DNA, 15 bp, Homo sapiens
ttgcacagcccagaa

SEQ ID NO: 278864 - DNA, 15 bp, Homo sapiens
cttgcacagcccaga

SEQ ID NO: 278865 - DNA, 15 bp, Homo sapiens
gcttgcacagcccag

SEQ ID NO: 278866 - DNA, 15 bp, Homo sapiens
ggcttgcacagccca

SEQ ID NO: 278867 - DNA, 15 bp, Homo sapiens
tggcttgcacagccc

SEQ ID NO: 278868 - DNA, 15 bp, Homo sapiens
gtggcttgcacagcc

SEQ ID NO: 278869 - DNA, 15 bp, Homo sapiens
ggtggcttgcacagc

SEQ ID NO: 278870 - DNA, 15 bp, Homo sapiens
tggtggcttgcacag

SEQ ID NO: 278871 - DNA, 15 bp, Homo sapiens
atggtggcttgcaca

SEQ ID NO: 278872 - DNA, 15 bp, Homo sapiens
aatggtggcttgcac

SEQ ID NO: 278873 - DNA, 15 bp, Homo sapiens
gaatggtggcttgca

SEQ ID NO: 278874 - DNA, 15 bp, Homo sapiens
agaatggtggcttgc

SEQ ID NO: 278875 - DNA, 15 bp, Homo sapiens
cagaatggtggcttg

SEQ ID NO: 278876 - DNA, 15 bp, Homo sapiens
gcagaatggtggctt

SEQ ID NO: 278877 - DNA, 15 bp, Homo sapiens
ggcagaatggtggct

SEQ ID NO: 278878 - DNA, 15 bp, Homo sapiens
gggcagaatggtggc

SEQ ID NO: 278879 - DNA, 15 bp, Homo sapiens
ggggcagaatggtgg

SEQ ID NO: 278880 - DNA, 15 bp, Homo sapiens
tggggcagaatggtg

SEQ ID NO: 278881 - DNA, 15 bp, Homo sapiens
ctggggcagaatggt

SEQ ID NO: 278882 - DNA, 15 bp, Homo sapiens
cctggggcagaatgg

SEQ ID NO: 278883 - DNA, 15 bp, Homo sapiens
tcctggggcagaatg

SEQ ID NO: 278884 - DNA, 15 bp, Homo sapiens
ctcctggggcagaat

SEQ ID NO: 278885 - DNA, 15 bp, Homo sapiens
gctcctggggcagaa

SEQ ID NO: 278886 - DNA, 15 bp, Homo sapiens
agctcctggggcaga

SEQ ID NO: 278887 - DNA, 15 bp, Homo sapiens
gagctcctggggcag

SEQ ID NO: 278888 - DNA, 15 bp, Homo sapiens
ggagctcctggggca

SEQ ID NO: 278889 - DNA, 15 bp, Homo sapiens
tggagctcctggggc

SEQ ID NO: 278890 - DNA, 15 bp, Homo sapiens
atggagctcctgggg

SEQ ID NO: 278891 - DNA, 15 bp, Homo sapiens
catggagctcctggg

SEQ ID NO: 278892 - DNA, 15 bp, Homo sapiens
gcatggagctcctgg

SEQ ID NO: 278893 - DNA, 15 bp, Homo sapiens
tgcatggagctcctg

SEQ ID NO: 278894 - DNA, 15 bp, Homo sapiens
ctgcatggagctcct

SEQ ID NO: 278895 - DNA, 15 bp, Homo sapiens
actgcatggagctcc

SEQ ID NO: 278896 - DNA, 15 bp, Homo sapiens
aactgcatggagctc

SEQ ID NO: 278897 - DNA, 15 bp, Homo sapiens
aaactgcatggagct

SEQ ID NO: 278898 - DNA, 15 bp, Homo sapiens
aaaactgcatggagc

SEQ ID NO: 278899 - DNA, 15 bp, Homo sapiens
caaaactgcatggag

SEQ ID NO: 278900 - DNA, 15 bp, Homo sapiens
gcaaaactgcatgga

SEQ ID NO: 278901 - DNA, 15 bp, Homo sapiens
tgcaaaactgcatgg

SEQ ID NO: 278902 - DNA, 15 bp, Homo sapiens
ttgcaaaactgcatg

SEQ ID NO: 278903 - DNA, 15 bp, Homo sapiens
attgcaaaactgcat

SEQ ID NO: 278904 - DNA, 15 bp, Homo sapiens
cattgcaaaactgca

SEQ ID NO: 278905 - DNA, 15 bp, Homo sapiens
gcattgcaaaactgc

SEQ ID NO: 278906 - DNA, 15 bp, Homo sapiens
agcattgcaaaactg

SEQ ID NO: 278907 - DNA, 15 bp, Homo sapiens
aagcattgcaaaact

SEQ ID NO: 278908 - DNA, 15 bp, Homo sapiens
aaagcattgcaaaac

SEQ ID NO: 278909 - DNA, 15 bp, Homo sapiens
taaagcattgcaaaa

SEQ ID NO: 278910 - DNA, 15 bp, Homo sapiens
ttaaagcattgcaaa

SEQ ID NO: 278911 - DNA, 15 bp, Homo sapiens
tttaaagcattgcaa

SEQ ID NO: 278912 - DNA, 15 bp, Homo sapiens
atttaaagcattgca

SEQ ID NO: 278913 - DNA, 15 bp, Homo sapiens
catttaaagcattgc

SEQ ID NO: 278914 - DNA, 15 bp, Homo sapiens
tcatttaaagcattg

SEQ ID NO: 278915 - DNA, 15 bp, Homo sapiens
ctcatttaaagcatt

SEQ ID NO: 278916 - DNA, 15 bp, Homo sapiens
actcatttaaagcat

SEQ ID NO: 278917 - DNA, 15 bp, Homo sapiens
tactcatttaaagca

SEQ ID NO: 278918 - DNA, 15 bp, Homo sapiens
atactcatttaaagc

SEQ ID NO: 278919 - DNA, 15 bp, Homo sapiens
gatactcatttaaag

SEQ ID NO: 278920 - DNA, 15 bp, Homo sapiens
agatactcatttaaa

SEQ ID NO: 278921 - DNA, 15 bp, Homo sapiens
gagatactcatttaa

SEQ ID NO: 278922 - DNA, 15 bp, Homo sapiens
tgagatactcattta

SEQ ID NO: 278923 - DNA, 15 bp, Homo sapiens
atgagatactcattt

SEQ ID NO: 278924 - DNA, 15 bp, Homo sapiens
catgagatactcatt

SEQ ID NO: 278925 - DNA, 15 bp, Homo sapiens
gcatgagatactcat

SEQ ID NO: 278926 - DNA, 15 bp, Homo sapiens
tgcatgagatactca

SEQ ID NO: 278927 - DNA, 15 bp, Homo sapiens
ctgcatgagatactc

SEQ ID NO: 278928 - DNA, 15 bp, Homo sapiens
tctgcatgagatact

SEQ ID NO: 278929 - DNA, 15 bp, Homo sapiens
atctgcatgagatac

SEQ ID NO: 278930 - DNA, 15 bp, Homo sapiens
aatctgcatgagata

SEQ ID NO: 278931 - DNA, 15 bp, Homo sapiens
aaatctgcatgagat

SEQ ID NO: 278932 - DNA, 15 bp, Homo sapiens
gaaatctgcatgaga

SEQ ID NO: 278933 - DNA, 15 bp, Homo sapiens
tgaaatctgcatgag

SEQ ID NO: 278934 - DNA, 15 bp, Homo sapiens
atgaaatctgcatga

SEQ ID NO: 278935 - DNA, 15 bp, Homo sapiens
aatgaaatctgcatg

SEQ ID NO: 278936 - DNA, 15 bp, Homo sapiens
aaatgaaatctgcat

SEQ ID NO: 278937 - DNA, 15 bp, Homo sapiens
aaaatgaaatctgca

SEQ ID NO: 278938 - DNA, 15 bp, Homo sapiens
gaaaatgaaatctgc

SEQ ID NO: 278939 - DNA, 15 bp, Homo sapiens
agaaaatgaaatctg

SEQ ID NO: 278940 - DNA, 15 bp, Homo sapiens
cagaaaatgaaatct

SEQ ID NO: 278941 - DNA, 15 bp, Homo sapiens
acagaaaatgaaatc

SEQ ID NO: 278942 - DNA, 15 bp, Homo sapiens
gacagaaaatgaaat

SEQ ID NO: 278943 - DNA, 15 bp, Homo sapiens
tgacagaaaatgaaa

SEQ ID NO: 278944 - DNA, 15 bp, Homo sapiens
ctgacagaaaatgaa

SEQ ID NO: 278945 - DNA, 15 bp, Homo sapiens
gctgacagaaaatga

SEQ ID NO: 278946 - DNA, 15 bp, Homo sapiens
ggctgacagaaaatg

SEQ ID NO: 278947 - DNA, 15 bp, Homo sapiens
tggctgacagaaaat

SEQ ID NO: 278948 - DNA, 15 bp, Homo sapiens
gtggctgacagaaaa

SEQ ID NO: 278949 - DNA, 15 bp, Homo sapiens
agtggctgacagaaa

SEQ ID NO: 278950 - DNA, 15 bp, Homo sapiens
aagtggctgacagaa

SEQ ID NO: 278951 - DNA, 15 bp, Homo sapiens
aaagtggctgacaga

SEQ ID NO: 278952 - DNA, 15 bp, Homo sapiens
caaagtggctgacag

SEQ ID NO: 278953 - DNA, 15 bp, Homo sapiens
ccaaagtggctgaca

SEQ ID NO: 278954 - DNA, 15 bp, Homo sapiens
gccaaagtggctgac

SEQ ID NO: 278955 - DNA, 15 bp, Homo sapiens
tgccaaagtggctga

SEQ ID NO: 278956 - DNA, 15 bp, Homo sapiens
gtgccaaagtggctg

SEQ ID NO: 278957 - DNA, 15 bp, Homo sapiens
tgtgccaaagtggct

SEQ ID NO: 278958 - DNA, 15 bp, Homo sapiens
gtgtgccaaagtggc

SEQ ID NO: 278959 - DNA, 15 bp, Homo sapiens
tgtgtgccaaagtgg

SEQ ID NO: 278960 - DNA, 15 bp, Homo sapiens
atgtgtgccaaagtg

SEQ ID NO: 278961 - DNA, 15 bp, Homo sapiens
tatgtgtgccaaagt

SEQ ID NO: 278962 - DNA, 15 bp, Homo sapiens
ttatgtgtgccaaag

SEQ ID NO: 278963 - DNA, 15 bp, Homo sapiens
tttatgtgtgccaaa

SEQ ID NO: 278964 - DNA, 15 bp, Homo sapiens
ttttatgtgtgccaa

SEQ ID NO: 278965 - DNA, 15 bp, Homo sapiens
tttttatgtgtgcca

SEQ ID NO: 278966 - DNA, 15 bp, Homo sapiens
ttttttatgtgtgcc

SEQ ID NO: 278967 - DNA, 15 bp, Homo sapiens
attttttatgtgtgc

SEQ ID NO: 278968 - DNA, 15 bp, Homo sapiens
tattttttatgtgtg

SEQ ID NO: 278969 - DNA, 15 bp, Homo sapiens
gtattttttatgtgt

SEQ ID NO: 278970 - DNA, 15 bp, Homo sapiens
tgtattttttatgtg

SEQ ID NO: 278971 - DNA, 15 bp, Homo sapiens
ctgtattttttatgt

SEQ ID NO: 278972 - DNA, 15 bp, Homo sapiens
cctgtattttttatg

SEQ ID NO: 278973 - DNA, 15 bp, Homo sapiens
tcctgtattttttat

SEQ ID NO: 278974 - DNA, 15 bp, Homo sapiens
ctcctgtatttttta

SEQ ID NO: 278975 - DNA, 15 bp, Homo sapiens
actcctgtatttttt

SEQ ID NO: 278976 - DNA, 15 bp, Homo sapiens
cactcctgtattttt

SEQ ID NO: 278977 - DNA, 15 bp, Homo sapiens
acactcctgtatttt

SEQ ID NO: 278978 - DNA, 15 bp, Homo sapiens
cacactcctgtattt

SEQ ID NO: 278979 - DNA, 15 bp, Homo sapiens
acacactcctgtatt

SEQ ID NO: 278980 - DNA, 15 bp, Homo sapiens
cacacactcctgtat

SEQ ID NO: 278981 - DNA, 15 bp, Homo sapiens
acacacactcctgta

SEQ ID NO: 278982 - DNA, 15 bp, Homo sapiens
cacacacactcctgt

SEQ ID NO: 278983 - DNA, 15 bp, Homo sapiens
acacacacactcctg

SEQ ID NO: 278984 - DNA, 15 bp, Homo sapiens
acccacacacacaca

SEQ ID NO: 278985 - DNA, 15 bp, Homo sapiens
cacccacacacacac

SEQ ID NO: 278986 - DNA, 15 bp, Homo sapiens
ccacccacacacaca

SEQ ID NO: 278987 - DNA, 15 bp, Homo sapiens
cccacccacacacac

SEQ ID NO: 278988 - DNA, 15 bp, Homo sapiens
acccacccacacaca

SEQ ID NO: 278989 - DNA, 15 bp, Homo sapiens
cacccacccacacac

SEQ ID NO: 278990 - DNA, 15 bp, Homo sapiens
acacccacccacaca

SEQ ID NO: 278991 - DNA, 15 bp, Homo sapiens
tacacccacccacac

SEQ ID NO: 278992 - DNA, 15 bp, Homo sapiens
ttacacccacccaca

SEQ ID NO: 278993 - DNA, 15 bp, Homo sapiens
tttacacccacccac

SEQ ID NO: 278994 - DNA, 15 bp, Homo sapiens
ttttacacccaccca

SEQ ID NO: 278995 - DNA, 15 bp, Homo sapiens
cttttacacccaccc

SEQ ID NO: 278996 - DNA, 15 bp, Homo sapiens
tcttttacacccacc

SEQ ID NO: 278997 - DNA, 15 bp, Homo sapiens
ctcttttacacccac

SEQ ID NO: 278998 - DNA, 15 bp, Homo sapiens
tctcttttacaccca

SEQ ID NO: 278999 - DNA, 15 bp, Homo sapiens
ctctcttttacaccc

SEQ ID NO: 279000 - DNA, 15 bp, Homo sapiens
tctctcttttacacc

SEQ ID NO: 279001 - DNA, 15 bp, Homo sapiens
ctctctcttttacac

SEQ ID NO: 279002 - DNA, 15 bp, Homo sapiens
tctctctcttttaca

SEQ ID NO: 279003 - DNA, 15 bp, Homo sapiens
atctctctcttttac

SEQ ID NO: 279004 - DNA, 15 bp, Homo sapiens
aatctctctctttta

SEQ ID NO: 279005 - DNA, 15 bp, Homo sapiens
gaatctctctctttt

SEQ ID NO: 279006 - DNA, 15 bp, Homo sapiens
agaatctctctcttt

SEQ ID NO: 279007 - DNA, 15 bp, Homo sapiens
cagaatctctctctt

SEQ ID NO: 279008 - DNA, 15 bp, Homo sapiens
acagaatctctctct

SEQ ID NO: 279009 - DNA, 15 bp, Homo sapiens
gacagaatctctctc

SEQ ID NO: 279010 - DNA, 15 bp, Homo sapiens
agacagaatctctct

SEQ ID NO: 279011 - DNA, 15 bp, Homo sapiens
gagacagaatctctc

SEQ ID NO: 279012 - DNA, 15 bp, Homo sapiens
agagacagaatctct

SEQ ID NO: 279013 - DNA, 15 bp, Homo sapiens
gagagacagaatctc

SEQ ID NO: 279014 - DNA, 15 bp, Homo sapiens
tgagagacagaatct

SEQ ID NO: 279015 - DNA, 15 bp, Homo sapiens
atgagagacagaatc

SEQ ID NO: 279016 - DNA, 15 bp, Homo sapiens
tatgagagacagaat

SEQ ID NO: 279017 - DNA, 15 bp, Homo sapiens
gtatgagagacagaa

SEQ ID NO: 279018 - DNA, 15 bp, Homo sapiens
tgtatgagagacaga

SEQ ID NO: 279019 - DNA, 15 bp, Homo sapiens
atgtatgagagacag

SEQ ID NO: 279020 - DNA, 15 bp, Homo sapiens
tatgtatgagagaca

SEQ ID NO: 279021 - DNA, 15 bp, Homo sapiens
gtatgtatgagagac

SEQ ID NO: 279022 - DNA, 15 bp, Homo sapiens
tgtatgtatgagaga

SEQ ID NO: 279023 - DNA, 15 bp, Homo sapiens
gtgtatgtatgagag

SEQ ID NO: 279024 - DNA, 15 bp, Homo sapiens
tgtgtatgtatgaga

SEQ ID NO: 279025 - DNA, 15 bp, Homo sapiens
ctgtgtatgtatgag

SEQ ID NO: 279026 - DNA, 15 bp, Homo sapiens
cctgtgtatgtatga

SEQ ID NO: 279027 - DNA, 15 bp, Homo sapiens
gcctgtgtatgtatg

SEQ ID NO: 279028 - DNA, 15 bp, Homo sapiens
tgcctgtgtatgtat

SEQ ID NO: 279029 - DNA, 15 bp, Homo sapiens
gtgcctgtgtatgta

SEQ ID NO: 279030 - DNA, 15 bp, Homo sapiens
tgtgcctgtgtatgt

SEQ ID NO: 279031 - DNA, 15 bp, Homo sapiens
gtgtgcctgtgtatg

SEQ ID NO: 279032 - DNA, 15 bp, Homo sapiens
cgtgtgcctgtgtat

SEQ ID NO: 279033 - DNA, 15 bp, Homo sapiens
acgtgtgcctgtgta

SEQ ID NO: 279034 - DNA, 15 bp, Homo sapiens
cacgtgtgcctgtgt

SEQ ID NO: 279035 - DNA, 15 bp, Homo sapiens
gcacgtgtgcctgtg

SEQ ID NO: 279036 - DNA, 15 bp, Homo sapiens
ggcacgtgtgcctgt

SEQ ID NO: 279037 - DNA, 15 bp, Homo sapiens
gggcacgtgtgcctg

SEQ ID NO: 279038 - DNA, 15 bp, Homo sapiens
cgggcacgtgtgcct

SEQ ID NO: 279039 - DNA, 15 bp, Homo sapiens
gcgggcacgtgtgcc

SEQ ID NO: 279040 - DNA, 15 bp, Homo sapiens
tgcgggcacgtgtgc

SEQ ID NO: 279041 - DNA, 15 bp, Homo sapiens
gtgcgggcacgtgtg

SEQ ID NO: 279042 - DNA, 15 bp, Homo sapiens
tgtgcgggcacgtgt

SEQ ID NO: 279043 - DNA, 15 bp, Homo sapiens
gtgtgcgggcacgtg

SEQ ID NO: 279044 - DNA, 15 bp, Homo sapiens
tgtgtgcgggcacgt

SEQ ID NO: 279045 - DNA, 15 bp, Homo sapiens
gtgtgtgcgggcacg

SEQ ID NO: 279046 - DNA, 15 bp, Homo sapiens
tgtgtgtgcgggcac

SEQ ID NO: 279047 - DNA, 15 bp, Homo sapiens
gtgtgtgtgcgggca

SEQ ID NO: 279048 - DNA, 15 bp, Homo sapiens
tgtgtgtgtgcgggc

SEQ ID NO: 279049 - DNA, 15 bp, Homo sapiens
ttgtgtgtgtgtgtg

SEQ ID NO: 279050 - DNA, 15 bp, Homo sapiens
ctttgtgtgtgtgtg

SEQ ID NO: 279051 - DNA, 15 bp, Homo sapiens
gctttgtgtgtgtgt

SEQ ID NO: 279052 - DNA, 15 bp, Homo sapiens
agctttgtgtgtgtg

SEQ ID NO: 279053 - DNA, 15 bp, Homo sapiens
aagctttgtgtgtgt

SEQ ID NO: 279054 - DNA, 15 bp, Homo sapiens
caagctttgtgtgtg

SEQ ID NO: 279055 - DNA, 15 bp, Homo sapiens
tcaagctttgtgtgt

SEQ ID NO: 279056 - DNA, 15 bp, Homo sapiens
atcaagctttgtgtg

SEQ ID NO: 279057 - DNA, 15 bp, Homo sapiens
gatcaagctttgtgt

SEQ ID NO: 279058 - DNA, 15 bp, Homo sapiens
tgatcaagctttgtg

SEQ ID NO: 279059 - DNA, 15 bp, Homo sapiens
atgatcaagctttgt

SEQ ID NO: 279060 - DNA, 15 bp, Homo sapiens
catgatcaagctttg

SEQ ID NO: 279061 - DNA, 15 bp, Homo sapiens
gcatgatcaagcttt

SEQ ID NO: 279062 - DNA, 15 bp, Homo sapiens
agcatgatcaagctt

SEQ ID NO: 279063 - DNA, 15 bp, Homo sapiens
aagcatgatcaagct

SEQ ID NO: 279064 - DNA, 15 bp, Homo sapiens
taagcatgatcaagc

SEQ ID NO: 279065 - DNA, 15 bp, Homo sapiens
ctaagcatgatcaag

SEQ ID NO: 279066 - DNA, 15 bp, Homo sapiens
actaagcatgatcaa

SEQ ID NO: 279067 - DNA, 15 bp, Homo sapiens
gactaagcatgatca

SEQ ID NO: 279068 - DNA, 15 bp, Homo sapiens
agactaagcatgatc

SEQ ID NO: 279069 - DNA, 15 bp, Homo sapiens
aagactaagcatgat

SEQ ID NO: 279070 - DNA, 15 bp, Homo sapiens
aaagactaagcatga

SEQ ID NO: 279071 - DNA, 15 bp, Homo sapiens
taaagactaagcatg

SEQ ID NO: 279072 - DNA, 15 bp, Homo sapiens
gtaaagactaagcat

SEQ ID NO: 279073 - DNA, 15 bp, Homo sapiens
tgtaaagactaagca

SEQ ID NO: 279074 - DNA, 15 bp, Homo sapiens
atgtaaagactaagc

SEQ ID NO: 279075 - DNA, 15 bp, Homo sapiens
tatgtaaagactaag

SEQ ID NO: 279076 - DNA, 15 bp, Homo sapiens
ttatgtaaagactaa

SEQ ID NO: 279077 - DNA, 15 bp, Homo sapiens
tttatgtaaagacta

SEQ ID NO: 279078 - DNA, 15 bp, Homo sapiens
atttatgtaaagact

SEQ ID NO: 279079 - DNA, 15 bp, Homo sapiens
aatttatgtaaagac

SEQ ID NO: 279080 - DNA, 15 bp, Homo sapiens
caatttatgtaaaga

SEQ ID NO: 279081 - DNA, 15 bp, Homo sapiens
ccaatttatgtaaag

SEQ ID NO: 279082 - DNA, 15 bp, Homo sapiens
cccaatttatgtaaa

SEQ ID NO: 279083 - DNA, 15 bp, Homo sapiens
tcccaatttatgtaa

SEQ ID NO: 279084 - DNA, 15 bp, Homo sapiens
atcccaatttatgta

SEQ ID NO: 279085 - DNA, 15 bp, Homo sapiens
aatcccaatttatgt

SEQ ID NO: 279086 - DNA, 15 bp, Homo sapiens
gaatcccaatttatg

SEQ ID NO: 279087 - DNA, 15 bp, Homo sapiens
ggaatcccaatttat

SEQ ID NO: 279088 - DNA, 15 bp, Homo sapiens
aggaatcccaattta

SEQ ID NO: 279089 - DNA, 15 bp, Homo sapiens
gaggaatcccaattt

SEQ ID NO: 279090 - DNA, 15 bp, Homo sapiens
agaggaatcccaatt

SEQ ID NO: 279091 - DNA, 15 bp, Homo sapiens
gagaggaatcccaat

SEQ ID NO: 279092 - DNA, 15 bp, Homo sapiens
agagaggaatcccaa

SEQ ID NO: 279093 - DNA, 15 bp, Homo sapiens
tagagaggaatccca

SEQ ID NO: 279094 - DNA, 15 bp, Homo sapiens
gtagagaggaatccc

SEQ ID NO: 279095 - DNA, 15 bp, Homo sapiens
ggtagagaggaatcc

SEQ ID NO: 279096 - DNA, 15 bp, Homo sapiens
gggtagagaggaatc

SEQ ID NO: 279097 - DNA, 15 bp, Homo sapiens
tgggtagagaggaat

SEQ ID NO: 279098 - DNA, 15 bp, Homo sapiens
gtgggtagagaggaa

SEQ ID NO: 279099 - DNA, 15 bp, Homo sapiens
ggtgggtagagagga

SEQ ID NO: 279100 - DNA, 15 bp, Homo sapiens
tggtgggtagagagg

SEQ ID NO: 279101 - DNA, 15 bp, Homo sapiens
ctggtgggtagagag

SEQ ID NO: 279102 - DNA, 15 bp, Homo sapiens
gctggtgggtagaga

SEQ ID NO: 279103 - DNA, 15 bp, Homo sapiens
ggctggtgggtagag

SEQ ID NO: 279104 - DNA, 15 bp, Homo sapiens
tggctggtgggtaga

SEQ ID NO: 279105 - DNA, 15 bp, Homo sapiens
ttggctggtgggtag

SEQ ID NO: 279106 - DNA, 15 bp, Homo sapiens
cttggctggtgggta

SEQ ID NO: 279107 - DNA, 15 bp, Homo sapiens
ccttggctggtgggt

SEQ ID NO: 279108 - DNA, 15 bp, Homo sapiens
gccttggctggtggg

SEQ ID NO: 279109 - DNA, 15 bp, Homo sapiens
ggccttggctggtgg

SEQ ID NO: 279110 - DNA, 15 bp, Homo sapiens
aggccttggctggtg

SEQ ID NO: 279111 - DNA, 15 bp, Homo sapiens
caggccttggctggt

SEQ ID NO: 279112 - DNA, 15 bp, Homo sapiens
tcaggccttggctgg

SEQ ID NO: 279113 - DNA, 15 bp, Homo sapiens
ctcaggccttggctg

SEQ ID NO: 279114 - DNA, 15 bp, Homo sapiens
tctcaggccttggct

SEQ ID NO: 279115 - DNA, 15 bp, Homo sapiens
ctctcaggccttggc

SEQ ID NO: 279116 - DNA, 15 bp, Homo sapiens
tctctcaggccttgg

SEQ ID NO: 279117 - DNA, 15 bp, Homo sapiens
atctctcaggccttg

SEQ ID NO: 279118 - DNA, 15 bp, Homo sapiens
catctctcaggcctt

SEQ ID NO: 279119 - DNA, 15 bp, Homo sapiens
acatctctcaggcct

SEQ ID NO: 279120 - DNA, 15 bp, Homo sapiens
gacatctctcaggcc

SEQ ID NO: 279121 - DNA, 15 bp, Homo sapiens
tgacatctctcaggc

SEQ ID NO: 279122 - DNA, 15 bp, Homo sapiens
ttgacatctctcagg

SEQ ID NO: 279123 - DNA, 15 bp, Homo sapiens
attgacatctctcag

SEQ ID NO: 279124 - DNA, 15 bp, Homo sapiens
tattgacatctctca

SEQ ID NO: 279125 - DNA, 15 bp, Homo sapiens
ctattgacatctctc

SEQ ID NO: 279126 - DNA, 15 bp, Homo sapiens
tctattgacatctct

SEQ ID NO: 279127 - DNA, 15 bp, Homo sapiens
atctattgacatctc

SEQ ID NO: 279128 - DNA, 15 bp, Homo sapiens
catctattgacatct

SEQ ID NO: 279129 - DNA, 15 bp, Homo sapiens
ccatctattgacatc

SEQ ID NO: 279130 - DNA, 15 bp, Homo sapiens
tccatctattgacat

SEQ ID NO: 279131 - DNA, 15 bp, Homo sapiens
gtccatctattgaca

SEQ ID NO: 279132 - DNA, 15 bp, Homo sapiens
tgtccatctattgac

SEQ ID NO: 279133 - DNA, 15 bp, Homo sapiens
gtgtccatctattga

SEQ ID NO: 279134 - DNA, 15 bp, Homo sapiens
agtgtccatctattg

SEQ ID NO: 279135 - DNA, 15 bp, Homo sapiens
cagtgtccatctatt

SEQ ID NO: 279136 - DNA, 15 bp, Homo sapiens
tcagtgtccatctat

SEQ ID NO: 279137 - DNA, 15 bp, Homo sapiens
ctcagtgtccatcta

SEQ ID NO: 279138 - DNA, 15 bp, Homo sapiens
cctcagtgtccatct

SEQ ID NO: 279139 - DNA, 15 bp, Homo sapiens
tcctcagtgtccatc

SEQ ID NO: 279140 - DNA, 15 bp, Homo sapiens
ctcctcagtgtccat

SEQ ID NO: 279141 - DNA, 15 bp, Homo sapiens
tctcctcagtgtcca

SEQ ID NO: 279142 - DNA, 15 bp, Homo sapiens
gtctcctcagtgtcc

SEQ ID NO: 279143 - DNA, 15 bp, Homo sapiens
agtctcctcagtgtc

SEQ ID NO: 279144 - DNA, 15 bp, Homo sapiens
cagtctcctcagtgt

SEQ ID NO: 279145 - DNA, 15 bp, Homo sapiens
tcagtctcctcagtg

SEQ ID NO: 279146 - DNA, 15 bp, Homo sapiens
gtcagtctcctcagt

SEQ ID NO: 279147 - DNA, 15 bp, Homo sapiens
agtcagtctcctcag

SEQ ID NO: 279148 - DNA, 15 bp, Homo sapiens
aagtcagtctcctca

SEQ ID NO: 279149 - DNA, 15 bp, Homo sapiens
gaagtcagtctcctc

SEQ ID NO: 279150 - DNA, 15 bp, Homo sapiens
ggaagtcagtctcct

SEQ ID NO: 279151 - DNA, 15 bp, Homo sapiens
tggaagtcagtctcc

SEQ ID NO: 279152 - DNA, 15 bp, Homo sapiens
ttggaagtcagtctc

SEQ ID NO: 279153 - DNA, 15 bp, Homo sapiens
attggaagtcagtct

SEQ ID NO: 279154 - DNA, 15 bp, Homo sapiens
cattggaagtcagtc

SEQ ID NO: 279155 - DNA, 15 bp, Homo sapiens
gcattggaagtcagt

SEQ ID NO: 279156 - DNA, 15 bp, Homo sapiens
ggcattggaagtcag

SEQ ID NO: 279157 - DNA, 15 bp, Homo sapiens
gggcattggaagtca

SEQ ID NO: 279158 - DNA, 15 bp, Homo sapiens
agggcattggaagtc

SEQ ID NO: 279159 - DNA, 15 bp, Homo sapiens
aagggcattggaagt

SEQ ID NO: 279160 - DNA, 15 bp, Homo sapiens
gaagggcattggaag

SEQ ID NO: 279161 - DNA, 15 bp, Homo sapiens
tgaagggcattggaa

SEQ ID NO: 279162 - DNA, 15 bp, Homo sapiens
ctgaagggcattgga

SEQ ID NO: 279163 - DNA, 15 bp, Homo sapiens
gctgaagggcattgg

SEQ ID NO: 279164 - DNA, 15 bp, Homo sapiens
ggctgaagggcattg

SEQ ID NO: 279165 - DNA, 15 bp, Homo sapiens
aggctgaagggcatt

SEQ ID NO: 279166 - DNA, 15 bp, Homo sapiens
caggctgaagggcat

SEQ ID NO: 279167 - DNA, 15 bp, Homo sapiens
gcaggctgaagggca

SEQ ID NO: 279168 - DNA, 15 bp, Homo sapiens
tgcaggctgaagggc

SEQ ID NO: 279169 - DNA, 15 bp, Homo sapiens
ctgcaggctgaaggg

SEQ ID NO: 279170 - DNA, 15 bp, Homo sapiens
actgcaggctgaagg

SEQ ID NO: 279171 - DNA, 15 bp, Homo sapiens
gactgcaggctgaag

SEQ ID NO: 279172 - DNA, 15 bp, Homo sapiens
agactgcaggctgaa

SEQ ID NO: 279173 - DNA, 15 bp, Homo sapiens
gagactgcaggctga

SEQ ID NO: 279174 - DNA, 15 bp, Homo sapiens
agagactgcaggctg

SEQ ID NO: 279175 - DNA, 15 bp, Homo sapiens
aagagactgcaggct

SEQ ID NO: 279176 - DNA, 15 bp, Homo sapiens
gaagagactgcaggc

SEQ ID NO: 279177 - DNA, 15 bp, Homo sapiens
tgaagagactgcagg

SEQ ID NO: 279178 - DNA, 15 bp, Homo sapiens
ctgaagagactgcag

SEQ ID NO: 279179 - DNA, 15 bp, Homo sapiens
cctgaagagactgca

SEQ ID NO: 279180 - DNA, 15 bp, Homo sapiens
ccctgaagagactgc

SEQ ID NO: 279181 - DNA, 15 bp, Homo sapiens
accctgaagagactg

SEQ ID NO: 279182 - DNA, 15 bp, Homo sapiens
taccctgaagagact

SEQ ID NO: 279183 - DNA, 15 bp, Homo sapiens
ataccctgaagagac

SEQ ID NO: 279184 - DNA, 15 bp, Homo sapiens
aataccctgaagaga

SEQ ID NO: 279185 - DNA, 15 bp, Homo sapiens
taataccctgaagag

SEQ ID NO: 279186 - DNA, 15 bp, Homo sapiens
ctaataccctgaaga

SEQ ID NO: 279187 - DNA, 15 bp, Homo sapiens
gctaataccctgaag

SEQ ID NO: 279188 - DNA, 15 bp, Homo sapiens
tgctaataccctgaa

SEQ ID NO: 279189 - DNA, 15 bp, Homo sapiens
atgctaataccctga

SEQ ID NO: 279190 - DNA, 15 bp, Homo sapiens
tatgctaataccctg

SEQ ID NO: 279191 - DNA, 15 bp, Homo sapiens
gtatgctaataccct

SEQ ID NO: 279192 - DNA, 15 bp, Homo sapiens
ggtatgctaataccc

SEQ ID NO: 279193 - DNA, 15 bp, Homo sapiens
aggtatgctaatacc

SEQ ID NO: 279194 - DNA, 15 bp, Homo sapiens
caggtatgctaatac

SEQ ID NO: 279195 - DNA, 15 bp, Homo sapiens
ccaggtatgctaata

SEQ ID NO: 279196 - DNA, 15 bp, Homo sapiens
tccaggtatgctaat

SEQ ID NO: 279197 - DNA, 15 bp, Homo sapiens
ttccaggtatgctaa

SEQ ID NO: 279198 - DNA, 15 bp, Homo sapiens
tttccaggtatgcta

SEQ ID NO: 279199 - DNA, 15 bp, Homo sapiens
ctttccaggtatgct

SEQ ID NO: 279200 - DNA, 15 bp, Homo sapiens
cctttccaggtatgc

SEQ ID NO: 279201 - DNA, 15 bp, Homo sapiens
acctttccaggtatg

SEQ ID NO: 279202 - DNA, 15 bp, Homo sapiens
aacctttccaggtat

SEQ ID NO: 279203 - DNA, 15 bp, Homo sapiens
caacctttccaggta

SEQ ID NO: 279204 - DNA, 15 bp, Homo sapiens
tcaacctttccaggt

SEQ ID NO: 279205 - DNA, 15 bp, Homo sapiens
gtcaacctttccagg

SEQ ID NO: 279206 - DNA, 15 bp, Homo sapiens
ggtcaacctttccag

SEQ ID NO: 279207 - DNA, 15 bp, Homo sapiens
aggtcaacctttcca

SEQ ID NO: 279208 - DNA, 15 bp, Homo sapiens
taggtcaacctttcc

SEQ ID NO: 279209 - DNA, 15 bp, Homo sapiens
ctaggtcaacctttc

SEQ ID NO: 279210 - DNA, 15 bp, Homo sapiens
gctaggtcaaccttt

SEQ ID NO: 279211 - DNA, 15 bp, Homo sapiens
tgctaggtcaacctt

SEQ ID NO: 279212 - DNA, 15 bp, Homo sapiens
ctgctaggtcaacct

SEQ ID NO: 279213 - DNA, 15 bp, Homo sapiens
gctgctaggtcaacc

SEQ ID NO: 279214 - DNA, 15 bp, Homo sapiens
ggctgctaggtcaac

SEQ ID NO: 279215 - DNA, 15 bp, Homo sapiens
tggctgctaggtcaa

SEQ ID NO: 279216 - DNA, 15 bp, Homo sapiens
ctggctgctaggtca

SEQ ID NO: 279217 - DNA, 15 bp, Homo sapiens
cctggctgctaggtc

SEQ ID NO: 279218 - DNA, 15 bp, Homo sapiens
gcctggctgctaggt

SEQ ID NO: 279219 - DNA, 15 bp, Homo sapiens
tgcctggctgctagg

SEQ ID NO: 279220 - DNA, 15 bp, Homo sapiens
atgcctggctgctag

SEQ ID NO: 279221 - DNA, 15 bp, Homo sapiens
aatgcctggctgcta

SEQ ID NO: 279222 - DNA, 15 bp, Homo sapiens
caatgcctggctgct

SEQ ID NO: 279223 - DNA, 15 bp, Homo sapiens
acaatgcctggctgc

SEQ ID NO: 279224 - DNA, 15 bp, Homo sapiens
cacaatgcctggctg

SEQ ID NO: 279225 - DNA, 15 bp, Homo sapiens
acacaatgcctggct

SEQ ID NO: 279226 - DNA, 15 bp, Homo sapiens
cacacaatgcctggc

SEQ ID NO: 279227 - DNA, 15 bp, Homo sapiens
acacacaatgcctgg

SEQ ID NO: 279228 - DNA, 15 bp, Homo sapiens
tacacacaatgcctg

SEQ ID NO: 279229 - DNA, 15 bp, Homo sapiens
ttacacacaatgcct

SEQ ID NO: 279230 - DNA, 15 bp, Homo sapiens
attacacacaatgcc

SEQ ID NO: 279231 - DNA, 15 bp, Homo sapiens
cattacacacaatgc

SEQ ID NO: 279232 - DNA, 15 bp, Homo sapiens
ccattacacacaatg

SEQ ID NO: 279233 - DNA, 15 bp, Homo sapiens
accattacacacaat

SEQ ID NO: 279234 - DNA, 15 bp, Homo sapiens
caccattacacacaa

SEQ ID NO: 279235 - DNA, 15 bp, Homo sapiens
ccaccattacacaca

SEQ ID NO: 279236 - DNA, 15 bp, Homo sapiens
accaccattacacac

SEQ ID NO: 279237 - DNA, 15 bp, Homo sapiens
caccaccattacaca

SEQ ID NO: 279238 - DNA, 15 bp, Homo sapiens
gcaccaccattacac

SEQ ID NO: 279239 - DNA, 15 bp, Homo sapiens
agcaccaccattaca

SEQ ID NO: 279240 - DNA, 15 bp, Homo sapiens
aagcaccaccattac

SEQ ID NO: 279241 - DNA, 15 bp, Homo sapiens
taagcaccaccatta

SEQ ID NO: 279242 - DNA, 15 bp, Homo sapiens
gtaagcaccaccatt

SEQ ID NO: 279243 - DNA, 15 bp, Homo sapiens
agtaagcaccaccat

SEQ ID NO: 279244 - DNA, 15 bp, Homo sapiens
aagtaagcaccacca

SEQ ID NO: 279245 - DNA, 15 bp, Homo sapiens
aaagtaagcaccacc

SEQ ID NO: 279246 - DNA, 15 bp, Homo sapiens
aaaagtaagcaccac

SEQ ID NO: 279247 - DNA, 15 bp, Homo sapiens
aaaaagtaagcacca

SEQ ID NO: 279248 - DNA, 15 bp, Homo sapiens
taaaaagtaagcacc

SEQ ID NO: 279249 - DNA, 15 bp, Homo sapiens
ataaaaagtaagcac

SEQ ID NO: 279250 - DNA, 15 bp, Homo sapiens
aataaaaagtaagca

SEQ ID NO: 279251 - DNA, 15 bp, Homo sapiens
gaataaaaagtaagc

SEQ ID NO: 279252 - DNA, 15 bp, Homo sapiens
agaataaaaagtaag

SEQ ID NO: 279253 - DNA, 15 bp, Homo sapiens
gagaataaaaagtaa

SEQ ID NO: 279254 - DNA, 15 bp, Homo sapiens
tgagaataaaaagta

SEQ ID NO: 279255 - DNA, 15 bp, Homo sapiens
ctgagaataaaaagt

SEQ ID NO: 279256 - DNA, 15 bp, Homo sapiens
cctgagaataaaaag

SEQ ID NO: 279257 - DNA, 15 bp, Homo sapiens
gcctgagaataaaaa

SEQ ID NO: 279258 - DNA, 15 bp, Homo sapiens
agcctgagaataaaa

SEQ ID NO: 279259 - DNA, 15 bp, Homo sapiens
aagcctgagaataaa

SEQ ID NO: 279260 - DNA, 15 bp, Homo sapiens
taagcctgagaataa

SEQ ID NO: 279261 - DNA, 15 bp, Homo sapiens
ttaagcctgagaata

SEQ ID NO: 279262 - DNA, 15 bp, Homo sapiens
attaagcctgagaat

SEQ ID NO: 279263 - DNA, 15 bp, Homo sapiens
aattaagcctgagaa

SEQ ID NO: 279264 - DNA, 15 bp, Homo sapiens
caattaagcctgaga

SEQ ID NO: 279265 - DNA, 15 bp, Homo sapiens
acaattaagcctgag

SEQ ID NO: 279266 - DNA, 15 bp, Homo sapiens
aacaattaagcctga

SEQ ID NO: 279267 - DNA, 15 bp, Homo sapiens
caacaattaagcctg

SEQ ID NO: 279268 - DNA, 15 bp, Homo sapiens
ccaacaattaagcct

SEQ ID NO: 279269 - DNA, 15 bp, Homo sapiens
gccaacaattaagcc

SEQ ID NO: 279270 - DNA, 15 bp, Homo sapiens
agccaacaattaagc

SEQ ID NO: 279271 - DNA, 15 bp, Homo sapiens
cagccaacaattaag

SEQ ID NO: 279272 - DNA, 15 bp, Homo sapiens
tcagccaacaattaa

SEQ ID NO: 279273 - DNA, 15 bp, Homo sapiens
ttcagccaacaatta

SEQ ID NO: 279274 - DNA, 15 bp, Homo sapiens
tttcagccaacaatt

SEQ ID NO: 279275 - DNA, 15 bp, Homo sapiens
ctttcagccaacaat

SEQ ID NO: 279276 - DNA, 15 bp, Homo sapiens
gctttcagccaacaa

SEQ ID NO: 279277 - DNA, 15 bp, Homo sapiens
tgctttcagccaaca

SEQ ID NO: 279278 - DNA, 15 bp, Homo sapiens
atgctttcagccaac

SEQ ID NO: 279279 - DNA, 15 bp, Homo sapiens
gatgctttcagccaa

SEQ ID NO: 279280 - DNA, 15 bp, Homo sapiens
agatgctttcagcca

SEQ ID NO: 279281 - DNA, 15 bp, Homo sapiens
aagatgctttcagcc

SEQ ID NO: 279282 - DNA, 15 bp, Homo sapiens
gaagatgctttcagc

SEQ ID NO: 279283 - DNA, 15 bp, Homo sapiens
agaagatgctttcag

SEQ ID NO: 279284 - DNA, 15 bp, Homo sapiens
aagaagatgctttca

SEQ ID NO: 279285 - DNA, 15 bp, Homo sapiens
aaagaagatgctttc

SEQ ID NO: 279286 - DNA, 15 bp, Homo sapiens
taaagaagatgcttt

SEQ ID NO: 279287 - DNA, 15 bp, Homo sapiens
ataaagaagatgctt

SEQ ID NO: 279288 - DNA, 15 bp, Homo sapiens
aataaagaagatgct

SEQ ID NO: 279289 - DNA, 15 bp, Homo sapiens
aaataaagaagatgc

SEQ ID NO: 279290 - DNA, 15 bp, Homo sapiens
gaaataaagaagatg

SEQ ID NO: 279291 - DNA, 15 bp, Homo sapiens
agaaataaagaagat

SEQ ID NO: 279292 - DNA, 15 bp, Homo sapiens
cagaaataaagaaga

SEQ ID NO: 279293 - DNA, 15 bp, Homo sapiens
tcagaaataaagaag

SEQ ID NO: 279294 - DNA, 15 bp, Homo sapiens
gtcagaaataaagaa

SEQ ID NO: 279295 - DNA, 15 bp, Homo sapiens
agtcagaaataaaga

SEQ ID NO: 279296 - DNA, 15 bp, Homo sapiens
tagtcagaaataaag

SEQ ID NO: 279297 - DNA, 15 bp, Homo sapiens
atagtcagaaataaa

SEQ ID NO: 279298 - DNA, 15 bp, Homo sapiens
gatagtcagaaataa

SEQ ID NO: 279299 - DNA, 15 bp, Homo sapiens
ggatagtcagaaata

SEQ ID NO: 279300 - DNA, 15 bp, Homo sapiens
aggatagtcagaaat

SEQ ID NO: 279301 - DNA, 15 bp, Homo sapiens
aaggatagtcagaaa

SEQ ID NO: 279302 - DNA, 15 bp, Homo sapiens
aaaggatagtcagaa

SEQ ID NO: 279303 - DNA, 15 bp, Homo sapiens
taaaggatagtcaga

SEQ ID NO: 279304 - DNA, 15 bp, Homo sapiens
ataaaggatagtcag

SEQ ID NO: 279305 - DNA, 15 bp, Homo sapiens
aataaaggatagtca

SEQ ID NO: 279306 - DNA, 15 bp, Homo sapiens
aaataaaggatagtc

SEQ ID NO: 279307 - DNA, 15 bp, Homo sapiens
caaataaaggatagt

SEQ ID NO: 279308 - DNA, 15 bp, Homo sapiens
gcaaataaaggatag

SEQ ID NO: 279309 - DNA, 15 bp, Homo sapiens
tgcaaataaaggata

SEQ ID NO: 279310 - DNA, 15 bp, Homo sapiens
atgcaaataaaggat

SEQ ID NO: 279311 - DNA, 15 bp, Homo sapiens
aatgcaaataaagga

SEQ ID NO: 279312 - DNA, 15 bp, Homo sapiens
taatgcaaataaagg

SEQ ID NO: 279313 - DNA, 15 bp, Homo sapiens
ttaatgcaaataaag

SEQ ID NO: 279314 - DNA, 15 bp, Homo sapiens
attaatgcaaataaa

SEQ ID NO: 279315 - DNA, 15 bp, Homo sapiens
tattaatgcaaataa

SEQ ID NO: 279316 - DNA, 15 bp, Homo sapiens
ctattaatgcaaata

SEQ ID NO: 279317 - DNA, 15 bp, Homo sapiens
actattaatgcaaat

SEQ ID NO: 279318 - DNA, 15 bp, Homo sapiens
gactattaatgcaaa

SEQ ID NO: 279319 - DNA, 15 bp, Homo sapiens
agactattaatgcaa

SEQ ID NO: 279320 - DNA, 15 bp, Homo sapiens
gagactattaatgca

SEQ ID NO: 279321 - DNA, 15 bp, Homo sapiens
ggagactattaatgc

SEQ ID NO: 279322 - DNA, 15 bp, Homo sapiens
aggagactattaatg

SEQ ID NO: 279323 - DNA, 15 bp, Homo sapiens
gaggagactattaat

SEQ ID NO: 279324 - DNA, 15 bp, Homo sapiens
agaggagactattaa

SEQ ID NO: 279325 - DNA, 15 bp, Homo sapiens
cagaggagactatta

SEQ ID NO: 279326 - DNA, 15 bp, Homo sapiens
acagaggagactatt

SEQ ID NO: 279327 - DNA, 15 bp, Homo sapiens
cacagaggagactat

SEQ ID NO: 279328 - DNA, 15 bp, Homo sapiens
tcacagaggagacta

SEQ ID NO: 279329 - DNA, 15 bp, Homo sapiens
ttcacagaggagact

SEQ ID NO: 279330 - DNA, 15 bp, Homo sapiens
tttcacagaggagac

SEQ ID NO: 279331 - DNA, 15 bp, Homo sapiens
ctttcacagaggaga

SEQ ID NO: 279332 - DNA, 15 bp, Homo sapiens
tctttcacagaggag

SEQ ID NO: 279333 - DNA, 15 bp, Homo sapiens
atctttcacagagga

SEQ ID NO: 279334 - DNA, 15 bp, Homo sapiens
aatctttcacagagg

SEQ ID NO: 279335 - DNA, 15 bp, Homo sapiens
taatctttcacagag

SEQ ID NO: 279336 - DNA, 15 bp, Homo sapiens
ttaatctttcacaga

SEQ ID NO: 279337 - DNA, 15 bp, Homo sapiens
tttaatctttcacag

SEQ ID NO: 279338 - DNA, 15 bp, Homo sapiens
ctttaatctttcaca

SEQ ID NO: 279339 - DNA, 15 bp, Homo sapiens
tctttaatctttcac

SEQ ID NO: 279340 - DNA, 15 bp, Homo sapiens
ttctttaatctttca

SEQ ID NO: 279341 - DNA, 15 bp, Homo sapiens
tttctttaatctttc

SEQ ID NO: 279342 - DNA, 15 bp, Homo sapiens
ctttctttaatcttt

SEQ ID NO: 279343 - DNA, 15 bp, Homo sapiens
actttctttaatctt

SEQ ID NO: 279344 - DNA, 15 bp, Homo sapiens
tactttctttaatct

SEQ ID NO: 279345 - DNA, 15 bp, Homo sapiens
ctactttctttaatc

SEQ ID NO: 279346 - DNA, 15 bp, Homo sapiens
tctactttctttaat

SEQ ID NO: 279347 - DNA, 15 bp, Homo sapiens
ttctactttctttaa

SEQ ID NO: 279348 - DNA, 15 bp, Homo sapiens
attctactttcttta

SEQ ID NO: 279349 - DNA, 15 bp, Homo sapiens
cattctactttcttt

SEQ ID NO: 279350 - DNA, 15 bp, Homo sapiens
acattctactttctt

SEQ ID NO: 279351 - DNA, 15 bp, Homo sapiens
cacattctactttct

SEQ ID NO: 279352 - DNA, 15 bp, Homo sapiens
acacattctactttc

SEQ ID NO: 279353 - DNA, 15 bp, Homo sapiens
tacacattctacttt

SEQ ID NO: 279354 - DNA, 15 bp, Homo sapiens
gtacacattctactt

SEQ ID NO: 279355 - DNA, 15 bp, Homo sapiens
agtacacattctact

SEQ ID NO: 279356 - DNA, 15 bp, Homo sapiens
cagtacacattctac

SEQ ID NO: 279357 - DNA, 15 bp, Homo sapiens
tcagtacacattcta

SEQ ID NO: 279358 - DNA, 15 bp, Homo sapiens
ctcagtacacattct

SEQ ID NO: 279359 - DNA, 15 bp, Homo sapiens
cctcagtacacattc

SEQ ID NO: 279360 - DNA, 15 bp, Homo sapiens
tcctcagtacacatt

SEQ ID NO: 279361 - DNA, 15 bp, Homo sapiens
gtcctcagtacacat

SEQ ID NO: 279362 - DNA, 15 bp, Homo sapiens
tgtcctcagtacaca

SEQ ID NO: 279363 - DNA, 15 bp, Homo sapiens
ctgtcctcagtacac

SEQ ID NO: 279364 - DNA, 15 bp, Homo sapiens
tctgtcctcagtaca

SEQ ID NO: 279365 - DNA, 15 bp, Homo sapiens
ttctgtcctcagtac

SEQ ID NO: 279366 - DNA, 15 bp, Homo sapiens
cttctgtcctcagta

SEQ ID NO: 279367 - DNA, 15 bp, Homo sapiens
acttctgtcctcagt

SEQ ID NO: 279368 - DNA, 15 bp, Homo sapiens
cacttctgtcctcag

SEQ ID NO: 279369 - DNA, 15 bp, Homo sapiens
acacttctgtcctca

SEQ ID NO: 279370 - DNA, 15 bp, Homo sapiens
gacacttctgtcctc

SEQ ID NO: 279371 - DNA, 15 bp, Homo sapiens
tgacacttctgtcct

SEQ ID NO: 279372 - DNA, 15 bp, Homo sapiens
ctgacacttctgtcc

SEQ ID NO: 279373 - DNA, 15 bp, Homo sapiens
actgacacttctgtc

SEQ ID NO: 279374 - DNA, 15 bp, Homo sapiens
cactgacacttctgt

SEQ ID NO: 279375 - DNA, 15 bp, Homo sapiens
acactgacacttctg

SEQ ID NO: 279376 - DNA, 15 bp, Homo sapiens
gacactgacacttct

SEQ ID NO: 279377 - DNA, 15 bp, Homo sapiens
tgacactgacacttc

SEQ ID NO: 279378 - DNA, 15 bp, Homo sapiens
ctgacactgacactt

SEQ ID NO: 279379 - DNA, 15 bp, Homo sapiens
gctgacactgacact

SEQ ID NO: 279380 - DNA, 15 bp, Homo sapiens
ggctgacactgacac

SEQ ID NO: 279381 - DNA, 15 bp, Homo sapiens
aggctgacactgaca

SEQ ID NO: 279382 - DNA, 15 bp, Homo sapiens
taggctgacactgac

SEQ ID NO: 279383 - DNA, 15 bp, Homo sapiens
ttaggctgacactga

SEQ ID NO: 279384 - DNA, 15 bp, Homo sapiens
attaggctgacactg

SEQ ID NO: 279385 - DNA, 15 bp, Homo sapiens
gattaggctgacact

SEQ ID NO: 279386 - DNA, 15 bp, Homo sapiens
agattaggctgacac

SEQ ID NO: 279387 - DNA, 15 bp, Homo sapiens
cagattaggctgaca

SEQ ID NO: 279388 - DNA, 15 bp, Homo sapiens
gcagattaggctgac

SEQ ID NO: 279389 - DNA, 15 bp, Homo sapiens
agcagattaggctga

SEQ ID NO: 279390 - DNA, 15 bp, Homo sapiens
tagcagattaggctg

SEQ ID NO: 279391 - DNA, 15 bp, Homo sapiens
gtagcagattaggct

SEQ ID NO: 279392 - DNA, 15 bp, Homo sapiens
tgtagcagattaggc

SEQ ID NO: 279393 - DNA, 15 bp, Homo sapiens
atgtagcagattagg

SEQ ID NO: 279394 - DNA, 15 bp, Homo sapiens
tatgtagcagattag

SEQ ID NO: 279395 - DNA, 15 bp, Homo sapiens
atatgtagcagatta

SEQ ID NO: 279396 - DNA, 15 bp, Homo sapiens
aatatgtagcagatt

SEQ ID NO: 279397 - DNA, 15 bp, Homo sapiens
gaatatgtagcagat

SEQ ID NO: 279398 - DNA, 15 bp, Homo sapiens
tgaatatgtagcaga

SEQ ID NO: 279399 - DNA, 15 bp, Homo sapiens
atgaatatgtagcag

SEQ ID NO: 279400 - DNA, 15 bp, Homo sapiens
aatgaatatgtagca

SEQ ID NO: 279401 - DNA, 15 bp, Homo sapiens
gaatgaatatgtagc

SEQ ID NO: 279402 - DNA, 15 bp, Homo sapiens
agaatgaatatgtag

SEQ ID NO: 279403 - DNA, 15 bp, Homo sapiens
tagaatgaatatgta

SEQ ID NO: 279404 - DNA, 15 bp, Homo sapiens
atagaatgaatatgt

SEQ ID NO: 279405 - DNA, 15 bp, Homo sapiens
catagaatgaatatg

SEQ ID NO: 279406 - DNA, 15 bp, Homo sapiens
ccatagaatgaatat

SEQ ID NO: 279407 - DNA, 15 bp, Homo sapiens
tccatagaatgaata

SEQ ID NO: 279408 - DNA, 15 bp, Homo sapiens
gtccatagaatgaat

SEQ ID NO: 279409 - DNA, 15 bp, Homo sapiens
ggtccatagaatgaa

SEQ ID NO: 279410 - DNA, 15 bp, Homo sapiens
aggtccatagaatga

SEQ ID NO: 279411 - DNA, 15 bp, Homo sapiens
aaggtccatagaatg

SEQ ID NO: 279412 - DNA, 15 bp, Homo sapiens
taaggtccatagaat

SEQ ID NO: 279413 - DNA, 15 bp, Homo sapiens
ctaaggtccatagaa

SEQ ID NO: 279414 - DNA, 15 bp, Homo sapiens
gctaaggtccataga

SEQ ID NO: 279415 - DNA, 15 bp, Homo sapiens
tgctaaggtccatag

SEQ ID NO: 279416 - DNA, 15 bp, Homo sapiens
atgctaaggtccata

SEQ ID NO: 279417 - DNA, 15 bp, Homo sapiens
catgctaaggtccat

SEQ ID NO: 279418 - DNA, 15 bp, Homo sapiens
tcatgctaaggtcca

SEQ ID NO: 279419 - DNA, 15 bp, Homo sapiens
gtcatgctaaggtcc

SEQ ID NO: 279420 - DNA, 15 bp, Homo sapiens
tgtcatgctaaggtc

SEQ ID NO: 279421 - DNA, 15 bp, Homo sapiens
ctgtcatgctaaggt

SEQ ID NO: 279422 - DNA, 15 bp, Homo sapiens
cctgtcatgctaagg

SEQ ID NO: 279423 - DNA, 15 bp, Homo sapiens
acctgtcatgctaag

SEQ ID NO: 279424 - DNA, 15 bp, Homo sapiens
tacctgtcatgctaa

SEQ ID NO: 279425 - DNA, 15 bp, Homo sapiens
atacctgtcatgcta

SEQ ID NO: 279426 - DNA, 15 bp, Homo sapiens
gatacctgtcatgct

SEQ ID NO: 279427 - DNA, 15 bp, Homo sapiens
ggatacctgtcatgc

SEQ ID NO: 279428 - DNA, 15 bp, Homo sapiens
tggatacctgtcatg

SEQ ID NO: 279429 - DNA, 15 bp, Homo sapiens
gtggatacctgtcat

SEQ ID NO: 279430 - DNA, 15 bp, Homo sapiens
agtggatacctgtca

SEQ ID NO: 279431 - DNA, 15 bp, Homo sapiens
cagtggatacctgtc

SEQ ID NO: 279432 - DNA, 15 bp, Homo sapiens
tcagtggatacctgt

SEQ ID NO: 279433 - DNA, 15 bp, Homo sapiens
ttcagtggatacctg

SEQ ID NO: 279434 - DNA, 15 bp, Homo sapiens
cttcagtggatacct

SEQ ID NO: 279435 - DNA, 15 bp, Homo sapiens
ccttcagtggatacc

SEQ ID NO: 279436 - DNA, 15 bp, Homo sapiens
tccttcagtggatac

SEQ ID NO: 279437 - DNA, 15 bp, Homo sapiens
ctccttcagtggata

SEQ ID NO: 279438 - DNA, 15 bp, Homo sapiens
tctccttcagtggat

SEQ ID NO: 279439 - DNA, 15 bp, Homo sapiens
atctccttcagtgga

SEQ ID NO: 279440 - DNA, 15 bp, Homo sapiens
catctccttcagtgg

SEQ ID NO: 279441 - DNA, 15 bp, Homo sapiens
gcatctccttcagtg

SEQ ID NO: 279442 - DNA, 15 bp, Homo sapiens
ggcatctccttcagt

SEQ ID NO: 279443 - DNA, 15 bp, Homo sapiens
tggcatctccttcag

SEQ ID NO: 279444 - DNA, 15 bp, Homo sapiens
ttggcatctccttca

SEQ ID NO: 279445 - DNA, 15 bp, Homo sapiens
tttggcatctccttc

SEQ ID NO: 279446 - DNA, 15 bp, Homo sapiens
ttttggcatctcctt

SEQ ID NO: 279447 - DNA, 15 bp, Homo sapiens
gttttggcatctcct

SEQ ID NO: 279448 - DNA, 15 bp, Homo sapiens
agttttggcatctcc

SEQ ID NO: 279449 - DNA, 15 bp, Homo sapiens
cagttttggcatctc

SEQ ID NO: 279450 - DNA, 15 bp, Homo sapiens
acagttttggcatct

SEQ ID NO: 279451 - DNA, 15 bp, Homo sapiens
gacagttttggcatc

SEQ ID NO: 279452 - DNA, 15 bp, Homo sapiens
agacagttttggcat

SEQ ID NO: 279453 - DNA, 15 bp, Homo sapiens
aagacagttttggca

SEQ ID NO: 279454 - DNA, 15 bp, Homo sapiens
gaagacagttttggc

SEQ ID NO: 279455 - DNA, 15 bp, Homo sapiens
ggaagacagttttgg

SEQ ID NO: 279456 - DNA, 15 bp, Homo sapiens
tggaagacagttttg

SEQ ID NO: 279457 - DNA, 15 bp, Homo sapiens
atggaagacagtttt

SEQ ID NO: 279458 - DNA, 15 bp, Homo sapiens
gatggaagacagttt

SEQ ID NO: 279459 - DNA, 15 bp, Homo sapiens
ggatggaagacagtt

SEQ ID NO: 279460 - DNA, 15 bp, Homo sapiens
tggatggaagacagt

SEQ ID NO: 279461 - DNA, 15 bp, Homo sapiens
atggatggaagacag

SEQ ID NO: 279462 - DNA, 15 bp, Homo sapiens
catggatggaagaca

SEQ ID NO: 279463 - DNA, 15 bp, Homo sapiens
ccatggatggaagac

SEQ ID NO: 279464 - DNA, 15 bp, Homo sapiens
tccatggatggaaga

SEQ ID NO: 279465 - DNA, 15 bp, Homo sapiens
ctccatggatggaag

SEQ ID NO: 279466 - DNA, 15 bp, Homo sapiens
tctccatggatggaa

SEQ ID NO: 279467 - DNA, 15 bp, Homo sapiens
atctccatggatgga

SEQ ID NO: 279468 - DNA, 15 bp, Homo sapiens
aatctccatggatgg

SEQ ID NO: 279469 - DNA, 15 bp, Homo sapiens
taatctccatggatg

SEQ ID NO: 279470 - DNA, 15 bp, Homo sapiens
ttaatctccatggat

SEQ ID NO: 279471 - DNA, 15 bp, Homo sapiens
attaatctccatgga

SEQ ID NO: 279472 - DNA, 15 bp, Homo sapiens
aattaatctccatgg

SEQ ID NO: 279473 - DNA, 15 bp, Homo sapiens
aaattaatctccatg

SEQ ID NO: 279474 - DNA, 15 bp, Homo sapiens
aaaattaatctccat

SEQ ID NO: 279475 - DNA, 15 bp, Homo sapiens
caaaattaatctcca

SEQ ID NO: 279476 - DNA, 15 bp, Homo sapiens
tcaaaattaatctcc

SEQ ID NO: 279477 - DNA, 15 bp, Homo sapiens
ctcaaaattaatctc

SEQ ID NO: 279478 - DNA, 15 bp, Homo sapiens
actcaaaattaatct

SEQ ID NO: 279479 - DNA, 15 bp, Homo sapiens
cactcaaaattaatc

SEQ ID NO: 279480 - DNA, 15 bp, Homo sapiens
tcactcaaaattaat

SEQ ID NO: 279481 - DNA, 15 bp, Homo sapiens
ttcactcaaaattaa

SEQ ID NO: 279482 - DNA, 15 bp, Homo sapiens
cttcactcaaaatta

SEQ ID NO: 279483 - DNA, 15 bp, Homo sapiens
tcttcactcaaaatt

SEQ ID NO: 279484 - DNA, 15 bp, Homo sapiens
ctcttcactcaaaat

SEQ ID NO: 279485 - DNA, 15 bp, Homo sapiens
actcttcactcaaaa

SEQ ID NO: 279486 - DNA, 15 bp, Homo sapiens
cactcttcactcaaa

SEQ ID NO: 279487 - DNA, 15 bp, Homo sapiens
acactcttcactcaa

SEQ ID NO: 279488 - DNA, 15 bp, Homo sapiens
tacactcttcactca

SEQ ID NO: 279489 - DNA, 15 bp, Homo sapiens
ttacactcttcactc

SEQ ID NO: 279490 - DNA, 15 bp, Homo sapiens
tttacactcttcact

SEQ ID NO: 279491 - DNA, 15 bp, Homo sapiens
ctttacactcttcac

SEQ ID NO: 279492 - DNA, 15 bp, Homo sapiens
actttacactcttca

SEQ ID NO: 279493 - DNA, 15 bp, Homo sapiens
tactttacactcttc

SEQ ID NO: 279494 - DNA, 15 bp, Homo sapiens
ctactttacactctt

SEQ ID NO: 279495 - DNA, 15 bp, Homo sapiens
cctactttacactct

SEQ ID NO: 279496 - DNA, 15 bp, Homo sapiens
tcctactttacactc

SEQ ID NO: 279497 - DNA, 15 bp, Homo sapiens
gtcctactttacact

SEQ ID NO: 279498 - DNA, 15 bp, Homo sapiens
tgtcctactttacac

SEQ ID NO: 279499 - DNA, 15 bp, Homo sapiens
ttgtcctactttaca

SEQ ID NO: 279500 - DNA, 15 bp, Homo sapiens
cttgtcctactttac

SEQ ID NO: 279501 - DNA, 15 bp, Homo sapiens
ccttgtcctacttta

SEQ ID NO: 279502 - DNA, 15 bp, Homo sapiens
tccttgtcctacttt

SEQ ID NO: 279503 - DNA, 15 bp, Homo sapiens
atccttgtcctactt

SEQ ID NO: 279504 - DNA, 15 bp, Homo sapiens
aatccttgtcctact

SEQ ID NO: 279505 - DNA, 15 bp, Homo sapiens
caatccttgtcctac

SEQ ID NO: 279506 - DNA, 15 bp, Homo sapiens
acaatccttgtccta

SEQ ID NO: 279507 - DNA, 15 bp, Homo sapiens
gacaatccttgtcct

SEQ ID NO: 279508 - DNA, 15 bp, Homo sapiens
tgacaatccttgtcc

SEQ ID NO: 279509 - DNA, 15 bp, Homo sapiens
gtgacaatccttgtc

SEQ ID NO: 279510 - DNA, 15 bp, Homo sapiens
tgtgacaatccttgt

SEQ ID NO: 279511 - DNA, 15 bp, Homo sapiens
atgtgacaatccttg

SEQ ID NO: 279512 - DNA, 15 bp, Homo sapiens
tatgtgacaatcctt

SEQ ID NO: 279513 - DNA, 15 bp, Homo sapiens
ttatgtgacaatcct

SEQ ID NO: 279514 - DNA, 15 bp, Homo sapiens
gttatgtgacaatcc

SEQ ID NO: 279515 - DNA, 15 bp, Homo sapiens
agttatgtgacaatc

SEQ ID NO: 279516 - DNA, 15 bp, Homo sapiens
cagttatgtgacaat

SEQ ID NO: 279517 - DNA, 15 bp, Homo sapiens
ccagttatgtgacaa

SEQ ID NO: 279518 - DNA, 15 bp, Homo sapiens
gccagttatgtgaca

SEQ ID NO: 279519 - DNA, 15 bp, Homo sapiens
ggccagttatgtgac

SEQ ID NO: 279520 - DNA, 15 bp, Homo sapiens
aggccagttatgtga

SEQ ID NO: 279521 - DNA, 15 bp, Homo sapiens
taggccagttatgtg

SEQ ID NO: 279522 - DNA, 15 bp, Homo sapiens
ttaggccagttatgt

SEQ ID NO: 279523 - DNA, 15 bp, Homo sapiens
attaggccagttatg

SEQ ID NO: 279524 - DNA, 15 bp, Homo sapiens
cattaggccagttat

SEQ ID NO: 279525 - DNA, 15 bp, Homo sapiens
ccattaggccagtta

SEQ ID NO: 279526 - DNA, 15 bp, Homo sapiens
tccattaggccagtt

SEQ ID NO: 279527 - DNA, 15 bp, Homo sapiens
atccattaggccagt

SEQ ID NO: 279528 - DNA, 15 bp, Homo sapiens
aatccattaggccag

SEQ ID NO: 279529 - DNA, 15 bp, Homo sapiens
caatccattaggcca

SEQ ID NO: 279530 - DNA, 15 bp, Homo sapiens
gcaatccattaggcc

SEQ ID NO: 279531 - DNA, 15 bp, Homo sapiens
ggcaatccattaggc

SEQ ID NO: 279532 - DNA, 15 bp, Homo sapiens
aggcaatccattagg

SEQ ID NO: 279533 - DNA, 15 bp, Homo sapiens
taggcaatccattag

SEQ ID NO: 279534 - DNA, 15 bp, Homo sapiens
ttaggcaatccatta

SEQ ID NO: 279535 - DNA, 15 bp, Homo sapiens
attaggcaatccatt

SEQ ID NO: 279536 - DNA, 15 bp, Homo sapiens
aattaggcaatccat

SEQ ID NO: 279537 - DNA, 15 bp, Homo sapiens
caattaggcaatcca

SEQ ID NO: 279538 - DNA, 15 bp, Homo sapiens
tcaattaggcaatcc

SEQ ID NO: 279539 - DNA, 15 bp, Homo sapiens
gtcaattaggcaatc

SEQ ID NO: 279540 - DNA, 15 bp, Homo sapiens
agtcaattaggcaat

SEQ ID NO: 279541 - DNA, 15 bp, Homo sapiens
aagtcaattaggcaa

SEQ ID NO: 279542 - DNA, 15 bp, Homo sapiens
gaagtcaattaggca

SEQ ID NO: 279543 - DNA, 15 bp, Homo sapiens
ggaagtcaattaggc

SEQ ID NO: 279544 - DNA, 15 bp, Homo sapiens
aggaagtcaattagg

SEQ ID NO: 279545 - DNA, 15 bp, Homo sapiens
caggaagtcaattag

SEQ ID NO: 279546 - DNA, 15 bp, Homo sapiens
tcaggaagtcaatta

SEQ ID NO: 279547 - DNA, 15 bp, Homo sapiens
ttcaggaagtcaatt

SEQ ID NO: 279548 - DNA, 15 bp, Homo sapiens
gttcaggaagtcaat

SEQ ID NO: 279549 - DNA, 15 bp, Homo sapiens
agttcaggaagtcaa

SEQ ID NO: 279550 - DNA, 15 bp, Homo sapiens
cagttcaggaagtca

SEQ ID NO: 279551 - DNA, 15 bp, Homo sapiens
ccagttcaggaagtc

SEQ ID NO: 279552 - DNA, 15 bp, Homo sapiens
tccagttcaggaagt

SEQ ID NO: 279553 - DNA, 15 bp, Homo sapiens
ttccagttcaggaag

SEQ ID NO: 279554 - DNA, 15 bp, Homo sapiens
gttccagttcaggaa

SEQ ID NO: 279555 - DNA, 15 bp, Homo sapiens
agttccagttcagga

SEQ ID NO: 279556 - DNA, 15 bp, Homo sapiens
tagttccagttcagg

SEQ ID NO: 279557 - DNA, 15 bp, Homo sapiens
gtagttccagttcag

SEQ ID NO: 279558 - DNA, 15 bp, Homo sapiens
agtagttccagttca

SEQ ID NO: 279559 - DNA, 15 bp, Homo sapiens
aagtagttccagttc

SEQ ID NO: 279560 - DNA, 15 bp, Homo sapiens
aaagtagttccagtt

SEQ ID NO: 279561 - DNA, 15 bp, Homo sapiens
gaaagtagttccagt

SEQ ID NO: 279562 - DNA, 15 bp, Homo sapiens
ggaaagtagttccag

SEQ ID NO: 279563 - DNA, 15 bp, Homo sapiens
aggaaagtagttcca

SEQ ID NO: 279564 - DNA, 15 bp, Homo sapiens
taggaaagtagttcc

SEQ ID NO: 279565 - DNA, 15 bp, Homo sapiens
ttaggaaagtagttc

SEQ ID NO: 279566 - DNA, 15 bp, Homo sapiens
tttaggaaagtagtt

SEQ ID NO: 279567 - DNA, 15 bp, Homo sapiens
atttaggaaagtagt

SEQ ID NO: 279568 - DNA, 15 bp, Homo sapiens
tatttaggaaagtag

SEQ ID NO: 279569 - DNA, 15 bp, Homo sapiens
atatttaggaaagta

SEQ ID NO: 279570 - DNA, 15 bp, Homo sapiens
aatatttaggaaagt

SEQ ID NO: 279571 - DNA, 15 bp, Homo sapiens
aaatatttaggaaag

SEQ ID NO: 279572 - DNA, 15 bp, Homo sapiens
gaaatatttaggaaa

SEQ ID NO: 279573 - DNA, 15 bp, Homo sapiens
tgaaatatttaggaa

SEQ ID NO: 279574 - DNA, 15 bp, Homo sapiens
ctgaaatatttagga

SEQ ID NO: 279575 - DNA, 15 bp, Homo sapiens
tctgaaatatttagg

SEQ ID NO: 279576 - DNA, 15 bp, Homo sapiens
ttctgaaatatttag

SEQ ID NO: 279577 - DNA, 15 bp, Homo sapiens
cttctgaaatattta

SEQ ID NO: 279578 - DNA, 15 bp, Homo sapiens
acttctgaaatattt

SEQ ID NO: 279579 - DNA, 15 bp, Homo sapiens
cacttctgaaatatt

SEQ ID NO: 279580 - DNA, 15 bp, Homo sapiens
acacttctgaaatat

SEQ ID NO: 279581 - DNA, 15 bp, Homo sapiens
aacacttctgaaata

SEQ ID NO: 279582 - DNA, 15 bp, Homo sapiens
gaacacttctgaaat

SEQ ID NO: 279583 - DNA, 15 bp, Homo sapiens
agaacacttctgaaa

SEQ ID NO: 279584 - DNA, 15 bp, Homo sapiens
tagaacacttctgaa

SEQ ID NO: 279585 - DNA, 15 bp, Homo sapiens
ttagaacacttctga

SEQ ID NO: 279586 - DNA, 15 bp, Homo sapiens
attagaacacttctg

SEQ ID NO: 279587 - DNA, 15 bp, Homo sapiens
gattagaacacttct

SEQ ID NO: 279588 - DNA, 15 bp, Homo sapiens
tgattagaacacttc

SEQ ID NO: 279589 - DNA, 15 bp, Homo sapiens
atgattagaacactt

SEQ ID NO: 279590 - DNA, 15 bp, Homo sapiens
tatgattagaacact

SEQ ID NO: 279591 - DNA, 15 bp, Homo sapiens
atatgattagaacac

SEQ ID NO: 279592 - DNA, 15 bp, Homo sapiens
tatatgattagaaca

SEQ ID NO: 279593 - DNA, 15 bp, Homo sapiens
ctatatgattagaac

SEQ ID NO: 279594 - DNA, 15 bp, Homo sapiens
tctatatgattagaa

SEQ ID NO: 279595 - DNA, 15 bp, Homo sapiens
atctatatgattaga

SEQ ID NO: 279596 - DNA, 15 bp, Homo sapiens
gatctatatgattag

SEQ ID NO: 279597 - DNA, 15 bp, Homo sapiens
tgatctatatgatta

SEQ ID NO: 279598 - DNA, 15 bp, Homo sapiens
atgatctatatgatt

SEQ ID NO: 279599 - DNA, 15 bp, Homo sapiens
tatgatctatatgat

SEQ ID NO: 279600 - DNA, 15 bp, Homo sapiens
gtatgatctatatga

SEQ ID NO: 279601 - DNA, 15 bp, Homo sapiens
tgtatgatctatatg

SEQ ID NO: 279602 - DNA, 15 bp, Homo sapiens
atgtatgatctatat

SEQ ID NO: 279603 - DNA, 15 bp, Homo sapiens
catgtatgatctata

SEQ ID NO: 279604 - DNA, 15 bp, Homo sapiens
gcatgtatgatctat

SEQ ID NO: 279605 - DNA, 15 bp, Homo sapiens
tgcatgtatgatcta

SEQ ID NO: 279606 - DNA, 15 bp, Homo sapiens
ctgcatgtatgatct

SEQ ID NO: 279607 - DNA, 15 bp, Homo sapiens
actgcatgtatgatc

SEQ ID NO: 279608 - DNA, 15 bp, Homo sapiens
cactgcatgtatgat

SEQ ID NO: 279609 - DNA, 15 bp, Homo sapiens
tcactgcatgtatga

SEQ ID NO: 279610 - DNA, 15 bp, Homo sapiens
ttcactgcatgtatg

SEQ ID NO: 279611 - DNA, 15 bp, Homo sapiens
attcactgcatgtat

SEQ ID NO: 279612 - DNA, 15 bp, Homo sapiens
tattcactgcatgta

SEQ ID NO: 279613 - DNA, 15 bp, Homo sapiens
atattcactgcatgt

SEQ ID NO: 279614 - DNA, 15 bp, Homo sapiens
tatattcactgcatg

SEQ ID NO: 279615 - DNA, 15 bp, Homo sapiens
atatattcactgcat

SEQ ID NO: 279616 - DNA, 15 bp, Homo sapiens
gatatattcactgca

SEQ ID NO: 279617 - DNA, 15 bp, Homo sapiens
agatatattcactgc

SEQ ID NO: 279618 - DNA, 15 bp, Homo sapiens
aagatatattcactg

SEQ ID NO: 279619 - DNA, 15 bp, Homo sapiens
aaagatatattcact

SEQ ID NO: 279620 - DNA, 15 bp, Homo sapiens
taaagatatattcac

SEQ ID NO: 279621 - DNA, 15 bp, Homo sapiens
ataaagatatattca

SEQ ID NO: 279622 - DNA, 15 bp, Homo sapiens
cataaagatatattc

SEQ ID NO: 279623 - DNA, 15 bp, Homo sapiens
acataaagatatatt

SEQ ID NO: 279624 - DNA, 15 bp, Homo sapiens
tacataaagatatat

SEQ ID NO: 279625 - DNA, 15 bp, Homo sapiens
atacataaagatata

SEQ ID NO: 279626 - DNA, 15 bp, Homo sapiens
catacataaagatat

SEQ ID NO: 279627 - DNA, 15 bp, Homo sapiens
acatacataaagata

SEQ ID NO: 279628 - DNA, 15 bp, Homo sapiens
gacatacataaagat

SEQ ID NO: 279629 - DNA, 15 bp, Homo sapiens
ggacatacataaaga

SEQ ID NO: 279630 - DNA, 15 bp, Homo sapiens
tggacatacataaag

SEQ ID NO: 279631 - DNA, 15 bp, Homo sapiens
gtggacatacataaa

SEQ ID NO: 279632 - DNA, 15 bp, Homo sapiens
tgtggacatacataa

SEQ ID NO: 279633 - DNA, 15 bp, Homo sapiens
gtgtggacatacata

SEQ ID NO: 279634 - DNA, 15 bp, Homo sapiens
tgtgtggacatacat

SEQ ID NO: 279635 - DNA, 15 bp, Homo sapiens
atgtgtggacataca

SEQ ID NO: 279636 - DNA, 15 bp, Homo sapiens
tatgtgtggacatac

SEQ ID NO: 279637 - DNA, 15 bp, Homo sapiens
gtatgtgtggacata

SEQ ID NO: 279638 - DNA, 15 bp, Homo sapiens
tgtatgtgtggacat

SEQ ID NO: 279639 - DNA, 15 bp, Homo sapiens
gtgtatgtgtggaca

SEQ ID NO: 279640 - DNA, 15 bp, Homo sapiens
tgtgtatgtgtggac

SEQ ID NO: 279641 - DNA, 15 bp, Homo sapiens
gtgtgtatgtgtgga

SEQ ID NO: 279642 - DNA, 15 bp, Homo sapiens
tgtgtgtatgtgtgg

SEQ ID NO: 279643 - DNA, 15 bp, Homo sapiens
gtgtgtgtatgtgtg

SEQ ID NO: 279644 - DNA, 15 bp, Homo sapiens
cgtgtgtgtatgtgt

SEQ ID NO: 279645 - DNA, 15 bp, Homo sapiens
ccgtgtgtgtatgtg

SEQ ID NO: 279646 - DNA, 15 bp, Homo sapiens
tccgtgtgtgtatgt

SEQ ID NO: 279647 - DNA, 15 bp, Homo sapiens
gtccgtgtgtgtatg

SEQ ID NO: 279648 - DNA, 15 bp, Homo sapiens
tgtccgtgtgtgtat

SEQ ID NO: 279649 - DNA, 15 bp, Homo sapiens
atgtccgtgtgtgta

SEQ ID NO: 279650 - DNA, 15 bp, Homo sapiens
aatgtccgtgtgtgt

SEQ ID NO: 279651 - DNA, 15 bp, Homo sapiens
aaatgtccgtgtgtg

SEQ ID NO: 279652 - DNA, 15 bp, Homo sapiens
caaatgtccgtgtgt

SEQ ID NO: 279653 - DNA, 15 bp, Homo sapiens
acaaatgtccgtgtg

SEQ ID NO: 279654 - DNA, 15 bp, Homo sapiens
tacaaatgtccgtgt

SEQ ID NO: 279655 - DNA, 15 bp, Homo sapiens
gtacaaatgtccgtg

SEQ ID NO: 279656 - DNA, 15 bp, Homo sapiens
cgtacaaatgtccgt

SEQ ID NO: 279657 - DNA, 15 bp, Homo sapiens
tcgtacaaatgtccg

SEQ ID NO: 279658 - DNA, 15 bp, Homo sapiens
ctcgtacaaatgtcc

SEQ ID NO: 279659 - DNA, 15 bp, Homo sapiens
gctcgtacaaatgtc

SEQ ID NO: 279660 - DNA, 15 bp, Homo sapiens
tgctcgtacaaatgt

SEQ ID NO: 279661 - DNA, 15 bp, Homo sapiens
ttgctcgtacaaatg

SEQ ID NO: 279662 - DNA, 15 bp, Homo sapiens
tttgctcgtacaaat

SEQ ID NO: 279663 - DNA, 15 bp, Homo sapiens
atttgctcgtacaaa

SEQ ID NO: 279664 - DNA, 15 bp, Homo sapiens
aatttgctcgtacaa

SEQ ID NO: 279665 - DNA, 15 bp, Homo sapiens
aaatttgctcgtaca

SEQ ID NO: 279666 - DNA, 15 bp, Homo sapiens
caaatttgctcgtac

SEQ ID NO: 279667 - DNA, 15 bp, Homo sapiens
acaaatttgctcgta

SEQ ID NO: 279668 - DNA, 15 bp, Homo sapiens
cacaaatttgctcgt

SEQ ID NO: 279669 - DNA, 15 bp, Homo sapiens
tcacaaatttgctcg

SEQ ID NO: 279670 - DNA, 15 bp, Homo sapiens
atcacaaatttgctc

SEQ ID NO: 279671 - DNA, 15 bp, Homo sapiens
gatcacaaatttgct

SEQ ID NO: 279672 - DNA, 15 bp, Homo sapiens
agatcacaaatttgc

SEQ ID NO: 279673 - DNA, 15 bp, Homo sapiens
aagatcacaaatttg

SEQ ID NO: 279674 - DNA, 15 bp, Homo sapiens
gaagatcacaaattt

SEQ ID NO: 279675 - DNA, 15 bp, Homo sapiens
tgaagatcacaaatt

SEQ ID NO: 279676 - DNA, 15 bp, Homo sapiens
ttgaagatcacaaat

SEQ ID NO: 279677 - DNA, 15 bp, Homo sapiens
tttgaagatcacaaa

SEQ ID NO: 279678 - DNA, 15 bp, Homo sapiens
atttgaagatcacaa

SEQ ID NO: 279679 - DNA, 15 bp, Homo sapiens
aatttgaagatcaca

SEQ ID NO: 279680 - DNA, 15 bp, Homo sapiens
caatttgaagatcac

SEQ ID NO: 279681 - DNA, 15 bp, Homo sapiens
ccaatttgaagatca

SEQ ID NO: 279682 - DNA, 15 bp, Homo sapiens
accaatttgaagatc

SEQ ID NO: 279683 - DNA, 15 bp, Homo sapiens
taccaatttgaagat

SEQ ID NO: 279684 - DNA, 15 bp, Homo sapiens
ataccaatttgaaga

SEQ ID NO: 279685 - DNA, 15 bp, Homo sapiens
gataccaatttgaag

SEQ ID NO: 279686 - DNA, 15 bp, Homo sapiens
agataccaatttgaa

SEQ ID NO: 279687 - DNA, 15 bp, Homo sapiens
gagataccaatttga

SEQ ID NO: 279688 - DNA, 15 bp, Homo sapiens
agagataccaatttg

SEQ ID NO: 279689 - DNA, 15 bp, Homo sapiens
aagagataccaattt

SEQ ID NO: 279690 - DNA, 15 bp, Homo sapiens
taagagataccaatt

SEQ ID NO: 279691 - DNA, 15 bp, Homo sapiens
ataagagataccaat

SEQ ID NO: 279692 - DNA, 15 bp, Homo sapiens
cataagagataccaa

SEQ ID NO: 279693 - DNA, 15 bp, Homo sapiens
acataagagatacca

SEQ ID NO: 279694 - DNA, 15 bp, Homo sapiens
tacataagagatacc

SEQ ID NO: 279695 - DNA, 15 bp, Homo sapiens
ctacataagagatac

SEQ ID NO: 279696 - DNA, 15 bp, Homo sapiens
actacataagagata

SEQ ID NO: 279697 - DNA, 15 bp, Homo sapiens
cactacataagagat

SEQ ID NO: 279698 - DNA, 15 bp, Homo sapiens
tcactacataagaga

SEQ ID NO: 279699 - DNA, 15 bp, Homo sapiens
gtcactacataagag

SEQ ID NO: 279700 - DNA, 15 bp, Homo sapiens
tgtcactacataaga

SEQ ID NO: 279701 - DNA, 15 bp, Homo sapiens
ctgtcactacataag

SEQ ID NO: 279702 - DNA, 15 bp, Homo sapiens
tctgtcactacataa

SEQ ID NO: 279703 - DNA, 15 bp, Homo sapiens
ttctgtcactacata

SEQ ID NO: 279704 - DNA, 15 bp, Homo sapiens
tttctgtcactacat

SEQ ID NO: 279705 - DNA, 15 bp, Homo sapiens
ctttctgtcactaca

SEQ ID NO: 279706 - DNA, 15 bp, Homo sapiens
actttctgtcactac

SEQ ID NO: 279707 - DNA, 15 bp, Homo sapiens
tactttctgtcacta

SEQ ID NO: 279708 - DNA, 15 bp, Homo sapiens
ctactttctgtcact

SEQ ID NO: 279709 - DNA, 15 bp, Homo sapiens
tctactttctgtcac

SEQ ID NO: 279710 - DNA, 15 bp, Homo sapiens
atctactttctgtca

SEQ ID NO: 279711 - DNA, 15 bp, Homo sapiens
aatctactttctgtc

SEQ ID NO: 279712 - DNA, 15 bp, Homo sapiens
taatctactttctgt

SEQ ID NO: 279713 - DNA, 15 bp, Homo sapiens
ctaatctactttctg

SEQ ID NO: 279714 - DNA, 15 bp, Homo sapiens
actaatctactttct

SEQ ID NO: 279715 - DNA, 15 bp, Homo sapiens
cactaatctactttc

SEQ ID NO: 279716 - DNA, 15 bp, Homo sapiens
acactaatctacttt

SEQ ID NO: 279717 - DNA, 15 bp, Homo sapiens
cacactaatctactt

SEQ ID NO: 279718 - DNA, 15 bp, Homo sapiens
ccacactaatctact

SEQ ID NO: 279719 - DNA, 15 bp, Homo sapiens
accacactaatctac

SEQ ID NO: 279720 - DNA, 15 bp, Homo sapiens
gaccacactaatcta

SEQ ID NO: 279721 - DNA, 15 bp, Homo sapiens
agaccacactaatct

SEQ ID NO: 279722 - DNA, 15 bp, Homo sapiens
cagaccacactaatc

SEQ ID NO: 279723 - DNA, 15 bp, Homo sapiens
ccagaccacactaat

SEQ ID NO: 279724 - DNA, 15 bp, Homo sapiens
cccagaccacactaa

SEQ ID NO: 279725 - DNA, 15 bp, Homo sapiens
ccccagaccacacta

SEQ ID NO: 279726 - DNA, 15 bp, Homo sapiens
gccccagaccacact

SEQ ID NO: 279727 - DNA, 15 bp, Homo sapiens
agccccagaccacac

SEQ ID NO: 279728 - DNA, 15 bp, Homo sapiens
aagccccagaccaca

SEQ ID NO: 279729 - DNA, 15 bp, Homo sapiens
caagccccagaccac

SEQ ID NO: 279730 - DNA, 15 bp, Homo sapiens
ccaagccccagacca

SEQ ID NO: 279731 - DNA, 15 bp, Homo sapiens
tccaagccccagacc

SEQ ID NO: 279732 - DNA, 15 bp, Homo sapiens
ttccaagccccagac

SEQ ID NO: 279733 - DNA, 15 bp, Homo sapiens
tttccaagccccaga

SEQ ID NO: 279734 - DNA, 15 bp, Homo sapiens
atttccaagccccag

SEQ ID NO: 279735 - DNA, 15 bp, Homo sapiens
catttccaagcccca

SEQ ID NO: 279736 - DNA, 15 bp, Homo sapiens
ccatttccaagcccc

SEQ ID NO: 279737 - DNA, 15 bp, Homo sapiens
cccatttccaagccc

SEQ ID NO: 279738 - DNA, 15 bp, Homo sapiens
tcccatttccaagcc

SEQ ID NO: 279739 - DNA, 15 bp, Homo sapiens
ttcccatttccaagc

SEQ ID NO: 279740 - DNA, 15 bp, Homo sapiens
tttcccatttccaag

SEQ ID NO: 279741 - DNA, 15 bp, Homo sapiens
ctttcccatttccaa

SEQ ID NO: 279742 - DNA, 15 bp, Homo sapiens
cctttcccatttcca

SEQ ID NO: 279743 - DNA, 15 bp, Homo sapiens
ccctttcccatttcc

SEQ ID NO: 279744 - DNA, 15 bp, Homo sapiens
cccctttcccatttc

SEQ ID NO: 279745 - DNA, 15 bp, Homo sapiens
tcccctttcccattt

SEQ ID NO: 279746 - DNA, 15 bp, Homo sapiens
atcccctttcccatt

SEQ ID NO: 279747 - DNA, 15 bp, Homo sapiens
aatcccctttcccat

SEQ ID NO: 279748 - DNA, 15 bp, Homo sapiens
caatcccctttccca

SEQ ID NO: 279749 - DNA, 15 bp, Homo sapiens
tcaatcccctttccc

SEQ ID NO: 279750 - DNA, 15 bp, Homo sapiens
atcaatcccctttcc

SEQ ID NO: 279751 - DNA, 15 bp, Homo sapiens
aatcaatcccctttc

SEQ ID NO: 279752 - DNA, 15 bp, Homo sapiens
aaatcaatccccttt

SEQ ID NO: 279753 - DNA, 15 bp, Homo sapiens
taaatcaatcccctt

SEQ ID NO: 279754 - DNA, 15 bp, Homo sapiens
ttaaatcaatcccct

SEQ ID NO: 279755 - DNA, 15 bp, Homo sapiens
gttaaatcaatcccc

SEQ ID NO: 279756 - DNA, 15 bp, Homo sapiens
tgttaaatcaatccc

SEQ ID NO: 279757 - DNA, 15 bp, Homo sapiens
ctgttaaatcaatcc

SEQ ID NO: 279758 - DNA, 15 bp, Homo sapiens
cctgttaaatcaatc

SEQ ID NO: 279759 - DNA, 15 bp, Homo sapiens
gcctgttaaatcaat

SEQ ID NO: 279760 - DNA, 15 bp, Homo sapiens
tgcctgttaaatcaa

SEQ ID NO: 279761 - DNA, 15 bp, Homo sapiens
atgcctgttaaatca

SEQ ID NO: 279762 - DNA, 15 bp, Homo sapiens
catgcctgttaaatc

SEQ ID NO: 279763 - DNA, 15 bp, Homo sapiens
tcatgcctgttaaat

SEQ ID NO: 279764 - DNA, 15 bp, Homo sapiens
ctcatgcctgttaaa

SEQ ID NO: 279765 - DNA, 15 bp, Homo sapiens
cctcatgcctgttaa

SEQ ID NO: 279766 - DNA, 15 bp, Homo sapiens
ccctcatgcctgtta

SEQ ID NO: 279767 - DNA, 15 bp, Homo sapiens
tccctcatgcctgtt

SEQ ID NO: 279768 - DNA, 15 bp, Homo sapiens
atccctcatgcctgt

SEQ ID NO: 279769 - DNA, 15 bp, Homo sapiens
gatccctcatgcctg

SEQ ID NO: 279770 - DNA, 15 bp, Homo sapiens
agatccctcatgcct

SEQ ID NO: 279771 - DNA, 15 bp, Homo sapiens
aagatccctcatgcc

SEQ ID NO: 279772 - DNA, 15 bp, Homo sapiens
taagatccctcatgc

SEQ ID NO: 279773 - DNA, 15 bp, Homo sapiens
gtaagatccctcatg

SEQ ID NO: 279774 - DNA, 15 bp, Homo sapiens
agtaagatccctcat

SEQ ID NO: 279775 - DNA, 15 bp, Homo sapiens
cagtaagatccctca

SEQ ID NO: 279776 - DNA, 15 bp, Homo sapiens
ccagtaagatccctc

SEQ ID NO: 279777 - DNA, 15 bp, Homo sapiens
cccagtaagatccct

SEQ ID NO: 279778 - DNA, 15 bp, Homo sapiens
tcccagtaagatccc

SEQ ID NO: 279779 - DNA, 15 bp, Homo sapiens
atcccagtaagatcc

SEQ ID NO: 279780 - DNA, 15 bp, Homo sapiens
catcccagtaagatc

SEQ ID NO: 279781 - DNA, 15 bp, Homo sapiens
tcatcccagtaagat

SEQ ID NO: 279782 - DNA, 15 bp, Homo sapiens
atcatcccagtaaga

SEQ ID NO: 279783 - DNA, 15 bp, Homo sapiens
catcatcccagtaag

SEQ ID NO: 279784 - DNA, 15 bp, Homo sapiens
tcatcatcccagtaa

SEQ ID NO: 279785 - DNA, 15 bp, Homo sapiens
ttcatcatcccagta

SEQ ID NO: 279786 - DNA, 15 bp, Homo sapiens
tttcatcatcccagt

SEQ ID NO: 279787 - DNA, 15 bp, Homo sapiens
ttttcatcatcccag

SEQ ID NO: 279788 - DNA, 15 bp, Homo sapiens
attttcatcatccca

SEQ ID NO: 279789 - DNA, 15 bp, Homo sapiens
cattttcatcatccc

SEQ ID NO: 279790 - DNA, 15 bp, Homo sapiens
acattttcatcatcc

SEQ ID NO: 279791 - DNA, 15 bp, Homo sapiens
aacattttcatcatc

SEQ ID NO: 279792 - DNA, 15 bp, Homo sapiens
gaacattttcatcat

SEQ ID NO: 279793 - DNA, 15 bp, Homo sapiens
agaacattttcatca

SEQ ID NO: 279794 - DNA, 15 bp, Homo sapiens
cagaacattttcatc

SEQ ID NO: 279795 - DNA, 15 bp, Homo sapiens
tcagaacattttcat

SEQ ID NO: 279796 - DNA, 15 bp, Homo sapiens
ttcagaacattttca

SEQ ID NO: 279797 - DNA, 15 bp, Homo sapiens
tttcagaacattttc

SEQ ID NO: 279798 - DNA, 15 bp, Homo sapiens
gtttcagaacatttt

SEQ ID NO: 279799 - DNA, 15 bp, Homo sapiens
agtttcagaacattt

SEQ ID NO: 279800 - DNA, 15 bp, Homo sapiens
cagtttcagaacatt

SEQ ID NO: 279801 - DNA, 15 bp, Homo sapiens
ccagtttcagaacat

SEQ ID NO: 279802 - DNA, 15 bp, Homo sapiens
tccagtttcagaaca

SEQ ID NO: 279803 - DNA, 15 bp, Homo sapiens
atccagtttcagaac

SEQ ID NO: 279804 - DNA, 15 bp, Homo sapiens
aatccagtttcagaa

SEQ ID NO: 279805 - DNA, 15 bp, Homo sapiens
taatccagtttcaga

SEQ ID NO: 279806 - DNA, 15 bp, Homo sapiens
gtaatccagtttcag

SEQ ID NO: 279807 - DNA, 15 bp, Homo sapiens
tgtaatccagtttca

SEQ ID NO: 279808 - DNA, 15 bp, Homo sapiens
ctgtaatccagtttc

SEQ ID NO: 279809 - DNA, 15 bp, Homo sapiens
actgtaatccagttt

SEQ ID NO: 279810 - DNA, 15 bp, Homo sapiens
cactgtaatccagtt

SEQ ID NO: 279811 - DNA, 15 bp, Homo sapiens
tcactgtaatccagt

SEQ ID NO: 279812 - DNA, 15 bp, Homo sapiens
atcactgtaatccag

SEQ ID NO: 279813 - DNA, 15 bp, Homo sapiens
catcactgtaatcca

SEQ ID NO: 279814 - DNA, 15 bp, Homo sapiens
tcatcactgtaatcc

SEQ ID NO: 279815 - DNA, 15 bp, Homo sapiens
atcatcactgtaatc

SEQ ID NO: 279816 - DNA, 15 bp, Homo sapiens
aatcatcactgtaat

SEQ ID NO: 279817 - DNA, 15 bp, Homo sapiens
caatcatcactgtaa

SEQ ID NO: 279818 - DNA, 15 bp, Homo sapiens
gcaatcatcactgta

SEQ ID NO: 279819 - DNA, 15 bp, Homo sapiens
tgcaatcatcactgt

SEQ ID NO: 279820 - DNA, 15 bp, Homo sapiens
atgcaatcatcactg

SEQ ID NO: 279821 - DNA, 15 bp, Homo sapiens
tatgcaatcatcact

SEQ ID NO: 279822 - DNA, 15 bp, Homo sapiens
ttatgcaatcatcac

SEQ ID NO: 279823 - DNA, 15 bp, Homo sapiens
gttatgcaatcatca

SEQ ID NO: 279824 - DNA, 15 bp, Homo sapiens
agttatgcaatcatc

SEQ ID NO: 279825 - DNA, 15 bp, Homo sapiens
aagttatgcaatcat

SEQ ID NO: 279826 - DNA, 15 bp, Homo sapiens
taagttatgcaatca

SEQ ID NO: 279827 - DNA, 15 bp, Homo sapiens
ctaagttatgcaatc

SEQ ID NO: 279828 - DNA, 15 bp, Homo sapiens
actaagttatgcaat

SEQ ID NO: 279829 - DNA, 15 bp, Homo sapiens
tactaagttatgcaa

SEQ ID NO: 279830 - DNA, 15 bp, Homo sapiens
ctactaagttatgca

SEQ ID NO: 279831 - DNA, 15 bp, Homo sapiens
tctactaagttatgc

SEQ ID NO: 279832 - DNA, 15 bp, Homo sapiens
atctactaagttatg

SEQ ID NO: 279833 - DNA, 15 bp, Homo sapiens
aatctactaagttat

SEQ ID NO: 279834 - DNA, 15 bp, Homo sapiens
aaatctactaagtta

SEQ ID NO: 279835 - DNA, 15 bp, Homo sapiens
taaatctactaagtt

SEQ ID NO: 279836 - DNA, 15 bp, Homo sapiens
gtaaatctactaagt

SEQ ID NO: 279837 - DNA, 15 bp, Homo sapiens
agtaaatctactaag

SEQ ID NO: 279838 - DNA, 15 bp, Homo sapiens
tagtaaatctactaa

SEQ ID NO: 279839 - DNA, 15 bp, Homo sapiens
ttagtaaatctacta

SEQ ID NO: 279840 - DNA, 15 bp, Homo sapiens
tttagtaaatctact

SEQ ID NO: 279841 - DNA, 15 bp, Homo sapiens
ctttagtaaatctac

SEQ ID NO: 279842 - DNA, 15 bp, Homo sapiens
actttagtaaatcta

SEQ ID NO: 279843 - DNA, 15 bp, Homo sapiens
gactttagtaaatct

SEQ ID NO: 279844 - DNA, 15 bp, Homo sapiens
tgactttagtaaatc

SEQ ID NO: 279845 - DNA, 15 bp, Homo sapiens
atgactttagtaaat

SEQ ID NO: 279846 - DNA, 15 bp, Homo sapiens
aatgactttagtaaa

SEQ ID NO: 279847 - DNA, 15 bp, Homo sapiens
caatgactttagtaa

SEQ ID NO: 279848 - DNA, 15 bp, Homo sapiens
tcaatgactttagta

SEQ ID NO: 279849 - DNA, 15 bp, Homo sapiens
atcaatgactttagt

SEQ ID NO: 279850 - DNA, 15 bp, Homo sapiens
catcaatgactttag

SEQ ID NO: 279851 - DNA, 15 bp, Homo sapiens
tcatcaatgacttta

SEQ ID NO: 279852 - DNA, 15 bp, Homo sapiens
ttcatcaatgacttt

SEQ ID NO: 279853 - DNA, 15 bp, Homo sapiens
attcatcaatgactt

SEQ ID NO: 279854 - DNA, 15 bp, Homo sapiens
aattcatcaatgact

SEQ ID NO: 279855 - DNA, 15 bp, Homo sapiens
caattcatcaatgac

SEQ ID NO: 279856 - DNA, 15 bp, Homo sapiens
acaattcatcaatga

SEQ ID NO: 279857 - DNA, 15 bp, Homo sapiens
tacaattcatcaatg

SEQ ID NO: 279858 - DNA, 15 bp, Homo sapiens
gtacaattcatcaat

SEQ ID NO: 279859 - DNA, 15 bp, Homo sapiens
agtacaattcatcaa

SEQ ID NO: 279860 - DNA, 15 bp, Homo sapiens
aagtacaattcatca

SEQ ID NO: 279861 - DNA, 15 bp, Homo sapiens
aaagtacaattcatc

SEQ ID NO: 279862 - DNA, 15 bp, Homo sapiens
aaaagtacaattcat

SEQ ID NO: 279863 - DNA, 15 bp, Homo sapiens
aaaaagtacaattca

SEQ ID NO: 279864 - DNA, 15 bp, Homo sapiens
taaaaagtacaattc

SEQ ID NO: 279865 - DNA, 15 bp, Homo sapiens
ttaaaaagtacaatt

SEQ ID NO: 279866 - DNA, 15 bp, Homo sapiens
tttaaaaagtacaat

SEQ ID NO: 279867 - DNA, 15 bp, Homo sapiens
atttaaaaagtacaa

SEQ ID NO: 279868 - DNA, 15 bp, Homo sapiens
catttaaaaagtaca

SEQ ID NO: 279869 - DNA, 15 bp, Homo sapiens
ccatttaaaaagtac

SEQ ID NO: 279870 - DNA, 15 bp, Homo sapiens
cccatttaaaaagta

SEQ ID NO: 279871 - DNA, 15 bp, Homo sapiens
acccatttaaaaagt

SEQ ID NO: 279872 - DNA, 15 bp, Homo sapiens
cacccatttaaaaag

SEQ ID NO: 279873 - DNA, 15 bp, Homo sapiens
tcacccatttaaaaa

SEQ ID NO: 279874 - DNA, 15 bp, Homo sapiens
ttcacccatttaaaa

SEQ ID NO: 279875 - DNA, 15 bp, Homo sapiens
attcacccatttaaa

SEQ ID NO: 279876 - DNA, 15 bp, Homo sapiens
tattcacccatttaa

SEQ ID NO: 279877 - DNA, 15 bp, Homo sapiens
atattcacccattta

SEQ ID NO: 279878 - DNA, 15 bp, Homo sapiens
aatattcacccattt

SEQ ID NO: 279879 - DNA, 15 bp, Homo sapiens
caatattcacccatt

SEQ ID NO: 279880 - DNA, 15 bp, Homo sapiens
acaatattcacccat

SEQ ID NO: 279881 - DNA, 15 bp, Homo sapiens
cacaatattcaccca

SEQ ID NO: 279882 - DNA, 15 bp, Homo sapiens
ccacaatattcaccc

SEQ ID NO: 279883 - DNA, 15 bp, Homo sapiens
accacaatattcacc

SEQ ID NO: 279884 - DNA, 15 bp, Homo sapiens
taccacaatattcac

SEQ ID NO: 279885 - DNA, 15 bp, Homo sapiens
ataccacaatattca

SEQ ID NO: 279886 - DNA, 15 bp, Homo sapiens
cataccacaatattc

SEQ ID NO: 279887 - DNA, 15 bp, Homo sapiens
acataccacaatatt

SEQ ID NO: 279888 - DNA, 15 bp, Homo sapiens
tacataccacaatat

SEQ ID NO: 279889 - DNA, 15 bp, Homo sapiens
ttacataccacaata

SEQ ID NO: 279890 - DNA, 15 bp, Homo sapiens
tttacataccacaat

SEQ ID NO: 279891 - DNA, 15 bp, Homo sapiens
atttacataccacaa

SEQ ID NO: 279892 - DNA, 15 bp, Homo sapiens
aatttacataccaca

SEQ ID NO: 279893 - DNA, 15 bp, Homo sapiens
taatttacataccac

SEQ ID NO: 279894 - DNA, 15 bp, Homo sapiens
ataatttacatacca

SEQ ID NO: 279895 - DNA, 15 bp, Homo sapiens
cataatttacatacc

SEQ ID NO: 279896 - DNA, 15 bp, Homo sapiens
gcataatttacatac

SEQ ID NO: 279897 - DNA, 15 bp, Homo sapiens
ggcataatttacata

SEQ ID NO: 279898 - DNA, 15 bp, Homo sapiens
aggcataatttacat

SEQ ID NO: 279899 - DNA, 15 bp, Homo sapiens
gaggcataatttaca

SEQ ID NO: 279900 - DNA, 15 bp, Homo sapiens
tgaggcataatttac

SEQ ID NO: 279901 - DNA, 15 bp, Homo sapiens
ttgaggcataattta

SEQ ID NO: 279902 - DNA, 15 bp, Homo sapiens
attgaggcataattt

SEQ ID NO: 279903 - DNA, 15 bp, Homo sapiens
cattgaggcataatt

SEQ ID NO: 279904 - DNA, 15 bp, Homo sapiens
tcattgaggcataat

SEQ ID NO: 279905 - DNA, 15 bp, Homo sapiens
ttcattgaggcataa

SEQ ID NO: 279906 - DNA, 15 bp, Homo sapiens
cttcattgaggcata

SEQ ID NO: 279907 - DNA, 15 bp, Homo sapiens
gcttcattgaggcat

SEQ ID NO: 279908 - DNA, 15 bp, Homo sapiens
agcttcattgaggca

SEQ ID NO: 279909 - DNA, 15 bp, Homo sapiens
cagcttcattgaggc

SEQ ID NO: 279910 - DNA, 15 bp, Homo sapiens
acagcttcattgagg

SEQ ID NO: 279911 - DNA, 15 bp, Homo sapiens
aacagcttcattgag

SEQ ID NO: 279912 - DNA, 15 bp, Homo sapiens
taacagcttcattga

SEQ ID NO: 279913 - DNA, 15 bp, Homo sapiens
ttaacagcttcattg

SEQ ID NO: 279914 - DNA, 15 bp, Homo sapiens
tttaacagcttcatt

SEQ ID NO: 279915 - DNA, 15 bp, Homo sapiens
ctttaacagcttcat

SEQ ID NO: 279916 - DNA, 15 bp, Homo sapiens
actttaacagcttca

SEQ ID NO: 279917 - DNA, 15 bp, Homo sapiens
aactttaacagcttc

SEQ ID NO: 279918 - DNA, 15 bp, Homo sapiens
caactttaacagctt

SEQ ID NO: 279919 - DNA, 15 bp, Homo sapiens
tcaactttaacagct

SEQ ID NO: 279920 - DNA, 15 bp, Homo sapiens
atcaactttaacagc

SEQ ID NO: 279921 - DNA, 15 bp, Homo sapiens
tatcaactttaacag

SEQ ID NO: 279922 - DNA, 15 bp, Homo sapiens
atatcaactttaaca

SEQ ID NO: 279923 - DNA, 15 bp, Homo sapiens
aatatcaactttaac

SEQ ID NO: 279924 - DNA, 15 bp, Homo sapiens
gaatatcaactttaa

SEQ ID NO: 279925 - DNA, 15 bp, Homo sapiens
ggaatatcaacttta

SEQ ID NO: 279926 - DNA, 15 bp, Homo sapiens
aggaatatcaacttt

SEQ ID NO: 279927 - DNA, 15 bp, Homo sapiens
gaggaatatcaactt

SEQ ID NO: 279928 - DNA, 15 bp, Homo sapiens
agaggaatatcaact

SEQ ID NO: 279929 - DNA, 15 bp, Homo sapiens
tagaggaatatcaac

SEQ ID NO: 279930 - DNA, 15 bp, Homo sapiens
atagaggaatatcaa

SEQ ID NO: 279931 - DNA, 15 bp, Homo sapiens
aatagaggaatatca

SEQ ID NO: 279932 - DNA, 15 bp, Homo sapiens
caatagaggaatatc

SEQ ID NO: 279933 - DNA, 15 bp, Homo sapiens
ccaatagaggaatat

SEQ ID NO: 279934 - DNA, 15 bp, Homo sapiens
tccaatagaggaata

SEQ ID NO: 279935 - DNA, 15 bp, Homo sapiens
ctccaatagaggaat

SEQ ID NO: 279936 - DNA, 15 bp, Homo sapiens
actccaatagaggaa

SEQ ID NO: 279937 - DNA, 15 bp, Homo sapiens
aactccaatagagga

SEQ ID NO: 279938 - DNA, 15 bp, Homo sapiens
gaactccaatagagg

SEQ ID NO: 279939 - DNA, 15 bp, Homo sapiens
ggaactccaatagag

SEQ ID NO: 279940 - DNA, 15 bp, Homo sapiens
aggaactccaataga

SEQ ID NO: 279941 - DNA, 15 bp, Homo sapiens
caggaactccaatag

SEQ ID NO: 279942 - DNA, 15 bp, Homo sapiens
gcaggaactccaata

SEQ ID NO: 279943 - DNA, 15 bp, Homo sapiens
tgcaggaactccaat

SEQ ID NO: 279944 - DNA, 15 bp, Homo sapiens
ctgcaggaactccaa

SEQ ID NO: 279945 - DNA, 15 bp, Homo sapiens
tctgcaggaactcca

SEQ ID NO: 279946 - DNA, 15 bp, Homo sapiens
atctgcaggaactcc

SEQ ID NO: 279947 - DNA, 15 bp, Homo sapiens
gatctgcaggaactc

SEQ ID NO: 279948 - DNA, 15 bp, Homo sapiens
ggatctgcaggaact

SEQ ID NO: 279949 - DNA, 15 bp, Homo sapiens
aggatctgcaggaac

SEQ ID NO: 279950 - DNA, 15 bp, Homo sapiens
taggatctgcaggaa

SEQ ID NO: 279951 - DNA, 15 bp, Homo sapiens
ctaggatctgcagga

SEQ ID NO: 279952 - DNA, 15 bp, Homo sapiens
tctaggatctgcagg

SEQ ID NO: 279953 - DNA, 15 bp, Homo sapiens
gtctaggatctgcag

SEQ ID NO: 279954 - DNA, 15 bp, Homo sapiens
agtctaggatctgca

SEQ ID NO: 279955 - DNA, 15 bp, Homo sapiens
tagtctaggatctgc

SEQ ID NO: 279956 - DNA, 15 bp, Homo sapiens
gtagtctaggatctg

SEQ ID NO: 279957 - DNA, 15 bp, Homo sapiens
tgtagtctaggatct

SEQ ID NO: 279958 - DNA, 15 bp, Homo sapiens
atgtagtctaggatc

SEQ ID NO: 279959 - DNA, 15 bp, Homo sapiens
tatgtagtctaggat

SEQ ID NO: 279960 - DNA, 15 bp, Homo sapiens
atatgtagtctagga

SEQ ID NO: 279961 - DNA, 15 bp, Homo sapiens
tatatgtagtctagg

SEQ ID NO: 279962 - DNA, 15 bp, Homo sapiens
ttatatgtagtctag

SEQ ID NO: 279963 - DNA, 15 bp, Homo sapiens
attatatgtagtcta

SEQ ID NO: 279964 - DNA, 15 bp, Homo sapiens
tattatatgtagtct

SEQ ID NO: 279965 - DNA, 15 bp, Homo sapiens
atattatatgtagtc

SEQ ID NO: 279966 - DNA, 15 bp, Homo sapiens
aatattatatgtagt

SEQ ID NO: 279967 - DNA, 15 bp, Homo sapiens
taatattatatgtag

SEQ ID NO: 279968 - DNA, 15 bp, Homo sapiens
ttaatattatatgta

SEQ ID NO: 279969 - DNA, 15 bp, Homo sapiens
tttaatattatatgt

SEQ ID NO: 279970 - DNA, 15 bp, Homo sapiens
ttttaatattatatg

SEQ ID NO: 279971 - DNA, 15 bp, Homo sapiens
tttttaatattatat

SEQ ID NO: 279972 - DNA, 15 bp, Homo sapiens
atttttaatattata

SEQ ID NO: 279973 - DNA, 15 bp, Homo sapiens
aatttttaatattat

SEQ ID NO: 279974 - DNA, 15 bp, Homo sapiens
caatttttaatatta

SEQ ID NO: 279975 - DNA, 15 bp, Homo sapiens
acaatttttaatatt

SEQ ID NO: 279976 - DNA, 15 bp, Homo sapiens
tacaatttttaatat

SEQ ID NO: 279977 - DNA, 15 bp, Homo sapiens
atacaatttttaata

SEQ ID NO: 279978 - DNA, 15 bp, Homo sapiens
gatacaatttttaat

SEQ ID NO: 279979 - DNA, 15 bp, Homo sapiens
tgatacaatttttaa

SEQ ID NO: 279980 - DNA, 15 bp, Homo sapiens
gtgatacaattttta

SEQ ID NO: 279981 - DNA, 15 bp, Homo sapiens
ggtgatacaattttt

SEQ ID NO: 279982 - DNA, 15 bp, Homo sapiens
gggtgatacaatttt

SEQ ID NO: 279983 - DNA, 15 bp, Homo sapiens
agggtgatacaattt

SEQ ID NO: 279984 - DNA, 15 bp, Homo sapiens
tagggtgatacaatt

SEQ ID NO: 279985 - DNA, 15 bp, Homo sapiens
ttagggtgatacaat

SEQ ID NO: 279986 - DNA, 15 bp, Homo sapiens
tttagggtgatacaa

SEQ ID NO: 279987 - DNA, 15 bp, Homo sapiens
atttagggtgataca

SEQ ID NO: 279988 - DNA, 15 bp, Homo sapiens
aatttagggtgatac

SEQ ID NO: 279989 - DNA, 15 bp, Homo sapiens
aaatttagggtgata

SEQ ID NO: 279990 - DNA, 15 bp, Homo sapiens
aaaatttagggtgat

SEQ ID NO: 279991 - DNA, 15 bp, Homo sapiens
gaaaatttagggtga

SEQ ID NO: 279992 - DNA, 15 bp, Homo sapiens
tgaaaatttagggtg

SEQ ID NO: 279993 - DNA, 15 bp, Homo sapiens
gtgaaaatttagggt

SEQ ID NO: 279994 - DNA, 15 bp, Homo sapiens
ggtgaaaatttaggg

SEQ ID NO: 279995 - DNA, 15 bp, Homo sapiens
aggtgaaaatttagg

SEQ ID NO: 279996 - DNA, 15 bp, Homo sapiens
caggtgaaaatttag

SEQ ID NO: 279997 - DNA, 15 bp, Homo sapiens
gcaggtgaaaattta

SEQ ID NO: 279998 - DNA, 15 bp, Homo sapiens
agcaggtgaaaattt

SEQ ID NO: 279999 - DNA, 15 bp, Homo sapiens
aagcaggtgaaaatt

SEQ ID NO: 280000 - DNA, 15 bp, Homo sapiens
aaagcaggtgaaaat

SEQ ID NO: 280001 - DNA, 15 bp, Homo sapiens
aaaagcaggtgaaaa

SEQ ID NO: 280002 - DNA, 15 bp, Homo sapiens
aaaaagcaggtgaaa

SEQ ID NO: 280003 - DNA, 15 bp, Homo sapiens
aaaaaagcaggtgaa

SEQ ID NO: 280004 - DNA, 15 bp, Homo sapiens
gaaaaaagcaggtga

SEQ ID NO: 280005 - DNA, 15 bp, Homo sapiens
ggaaaaaagcaggtg

SEQ ID NO: 280006 - DNA, 15 bp, Homo sapiens
gggaaaaaagcaggt

SEQ ID NO: 280007 - DNA, 15 bp, Homo sapiens
tgggaaaaaagcagg

SEQ ID NO: 280008 - DNA, 15 bp, Homo sapiens
gtgggaaaaaagcag

SEQ ID NO: 280009 - DNA, 15 bp, Homo sapiens
agtgggaaaaaagca

SEQ ID NO: 280010 - DNA, 15 bp, Homo sapiens
cagtgggaaaaaagc

SEQ ID NO: 280011 - DNA, 15 bp, Homo sapiens
tcagtgggaaaaaag

SEQ ID NO: 280012 - DNA, 15 bp, Homo sapiens
ttcagtgggaaaaaa

SEQ ID NO: 280013 - DNA, 15 bp, Homo sapiens
cttcagtgggaaaaa

SEQ ID NO: 280014 - DNA, 15 bp, Homo sapiens
acttcagtgggaaaa

SEQ ID NO: 280015 - DNA, 15 bp, Homo sapiens
aacttcagtgggaaa

SEQ ID NO: 280016 - DNA, 15 bp, Homo sapiens
aaacttcagtgggaa

SEQ ID NO: 280017 - DNA, 15 bp, Homo sapiens
taaacttcagtggga

SEQ ID NO: 280018 - DNA, 15 bp, Homo sapiens
ataaacttcagtggg

SEQ ID NO: 280019 - DNA, 15 bp, Homo sapiens
gataaacttcagtgg

SEQ ID NO: 280020 - DNA, 15 bp, Homo sapiens
tgataaacttcagtg

SEQ ID NO: 280021 - DNA, 15 bp, Homo sapiens
ttgataaacttcagt

SEQ ID NO: 280022 - DNA, 15 bp, Homo sapiens
gttgataaacttcag

SEQ ID NO: 280023 - DNA, 15 bp, Homo sapiens
agttgataaacttca

SEQ ID NO: 280024 - DNA, 15 bp, Homo sapiens
tagttgataaacttc

SEQ ID NO: 280025 - DNA, 15 bp, Homo sapiens
gtagttgataaactt

SEQ ID NO: 280026 - DNA, 15 bp, Homo sapiens
tgtagttgataaact

SEQ ID NO: 280027 - DNA, 15 bp, Homo sapiens
ttgtagttgataaac

SEQ ID NO: 280028 - DNA, 15 bp, Homo sapiens
attgtagttgataaa

SEQ ID NO: 280029 - DNA, 15 bp, Homo sapiens
aattgtagttgataa

SEQ ID NO: 280030 - DNA, 15 bp, Homo sapiens
caattgtagttgata

SEQ ID NO: 280031 - DNA, 15 bp, Homo sapiens
gcaattgtagttgat

SEQ ID NO: 280032 - DNA, 15 bp, Homo sapiens
tgcaattgtagttga

SEQ ID NO: 280033 - DNA, 15 bp, Homo sapiens
ctgcaattgtagttg

SEQ ID NO: 280034 - DNA, 15 bp, Homo sapiens
tctgcaattgtagtt

SEQ ID NO: 280035 - DNA, 15 bp, Homo sapiens
ctctgcaattgtagt

SEQ ID NO: 280036 - DNA, 15 bp, Homo sapiens
tctctgcaattgtag

SEQ ID NO: 280037 - DNA, 15 bp, Homo sapiens
ttctctgcaattgta

SEQ ID NO: 280038 - DNA, 15 bp, Homo sapiens
cttctctgcaattgt

SEQ ID NO: 280039 - DNA, 15 bp, Homo sapiens
gcttctctgcaattg

SEQ ID NO: 280040 - DNA, 15 bp, Homo sapiens
agcttctctgcaatt

SEQ ID NO: 280041 - DNA, 15 bp, Homo sapiens
cagcttctctgcaat

SEQ ID NO: 280042 - DNA, 15 bp, Homo sapiens
ccagcttctctgcaa

SEQ ID NO: 280043 - DNA, 15 bp, Homo sapiens
tccagcttctctgca

SEQ ID NO: 280044 - DNA, 15 bp, Homo sapiens
gtccagcttctctgc

SEQ ID NO: 280045 - DNA, 15 bp, Homo sapiens
agtccagcttctctg

SEQ ID NO: 280046 - DNA, 15 bp, Homo sapiens
aagtccagcttctct

SEQ ID NO: 280047 - DNA, 15 bp, Homo sapiens
gaagtccagcttctc

SEQ ID NO: 280048 - DNA, 15 bp, Homo sapiens
cgaagtccagcttct

SEQ ID NO: 280049 - DNA, 15 bp, Homo sapiens
tcgaagtccagcttc

SEQ ID NO: 280050 - DNA, 15 bp, Homo sapiens
ctcgaagtccagctt

SEQ ID NO: 280051 - DNA, 15 bp, Homo sapiens
tctcgaagtccagct

SEQ ID NO: 280052 - DNA, 15 bp, Homo sapiens
atctcgaagtccagc

SEQ ID NO: 280053 - DNA, 15 bp, Homo sapiens
tatctcgaagtccag

SEQ ID NO: 280054 - DNA, 15 bp, Homo sapiens
ttatctcgaagtcca

SEQ ID NO: 280055 - DNA, 15 bp, Homo sapiens
gttatctcgaagtcc

SEQ ID NO: 280056 - DNA, 15 bp, Homo sapiens
tgttatctcgaagtc

SEQ ID NO: 280057 - DNA, 15 bp, Homo sapiens
ctgttatctcgaagt

SEQ ID NO: 280058 - DNA, 15 bp, Homo sapiens
cctgttatctcgaag

SEQ ID NO: 280059 - DNA, 15 bp, Homo sapiens
ccctgttatctcgaa

SEQ ID NO: 280060 - DNA, 15 bp, Homo sapiens
accctgttatctcga

SEQ ID NO: 280061 - DNA, 15 bp, Homo sapiens
gaccctgttatctcg

SEQ ID NO: 280062 - DNA, 15 bp, Homo sapiens
tgaccctgttatctc

SEQ ID NO: 280063 - DNA, 15 bp, Homo sapiens
ctgaccctgttatct

SEQ ID NO: 280064 - DNA, 15 bp, Homo sapiens
tctgaccctgttatc

SEQ ID NO: 280065 - DNA, 15 bp, Homo sapiens
atctgaccctgttat

SEQ ID NO: 280066 - DNA, 15 bp, Homo sapiens
tatctgaccctgtta

SEQ ID NO: 280067 - DNA, 15 bp, Homo sapiens
ttatctgaccctgtt

SEQ ID NO: 280068 - DNA, 15 bp, Homo sapiens
tttatctgaccctgt

SEQ ID NO: 280069 - DNA, 15 bp, Homo sapiens
ttttatctgaccctg

SEQ ID NO: 280070 - DNA, 15 bp, Homo sapiens
tttttatctgaccct

SEQ ID NO: 280071 - DNA, 15 bp, Homo sapiens
gtttttatctgaccc

SEQ ID NO: 280072 - DNA, 15 bp, Homo sapiens
ggtttttatctgacc

SEQ ID NO: 280073 - DNA, 15 bp, Homo sapiens
gggtttttatctgac

SEQ ID NO: 280074 - DNA, 15 bp, Homo sapiens
tgggtttttatctga

SEQ ID NO: 280075 - DNA, 15 bp, Homo sapiens
ctgggtttttatctg

SEQ ID NO: 280076 - DNA, 15 bp, Homo sapiens
actgggtttttatct

SEQ ID NO: 280077 - DNA, 15 bp, Homo sapiens
cactgggtttttatc

SEQ ID NO: 280078 - DNA, 15 bp, Homo sapiens
gcactgggtttttat

SEQ ID NO: 280079 - DNA, 15 bp, Homo sapiens
ggcactgggttttta

SEQ ID NO: 280080 - DNA, 15 bp, Homo sapiens
gggcactgggttttt

SEQ ID NO: 280081 - DNA, 15 bp, Homo sapiens
agggcactgggtttt

SEQ ID NO: 280082 - DNA, 15 bp, Homo sapiens
cagggcactgggttt

SEQ ID NO: 280083 - DNA, 15 bp, Homo sapiens
tcagggcactgggtt

SEQ ID NO: 280084 - DNA, 15 bp, Homo sapiens
ctcagggcactgggt

SEQ ID NO: 280085 - DNA, 15 bp, Homo sapiens
tctcagggcactggg

SEQ ID NO: 280086 - DNA, 15 bp, Homo sapiens
gtctcagggcactgg

SEQ ID NO: 280087 - DNA, 15 bp, Homo sapiens
tgtctcagggcactg

SEQ ID NO: 280088 - DNA, 15 bp, Homo sapiens
atgtctcagggcact

SEQ ID NO: 280089 - DNA, 15 bp, Homo sapiens
tatgtctcagggcac

SEQ ID NO: 280090 - DNA, 15 bp, Homo sapiens
ttatgtctcagggca

SEQ ID NO: 280091 - DNA, 15 bp, Homo sapiens
tttatgtctcagggc

SEQ ID NO: 280092 - DNA, 15 bp, Homo sapiens
ttttatgtctcaggg

SEQ ID NO: 280093 - DNA, 15 bp, Homo sapiens
cttttatgtctcagg

SEQ ID NO: 280094 - DNA, 15 bp, Homo sapiens
ccttttatgtctcag

SEQ ID NO: 280095 - DNA, 15 bp, Homo sapiens
gccttttatgtctca

SEQ ID NO: 280096 - DNA, 15 bp, Homo sapiens
agccttttatgtctc

SEQ ID NO: 280097 - DNA, 15 bp, Homo sapiens
tagccttttatgtct

SEQ ID NO: 280098 - DNA, 15 bp, Homo sapiens
gtagccttttatgtc

SEQ ID NO: 280099 - DNA, 15 bp, Homo sapiens
ggtagccttttatgt

SEQ ID NO: 280100 - DNA, 15 bp, Homo sapiens
gggtagccttttatg

SEQ ID NO: 280101 - DNA, 15 bp, Homo sapiens
agggtagccttttat

SEQ ID NO: 280102 - DNA, 15 bp, Homo sapiens
cagggtagcctttta

SEQ ID NO: 280103 - DNA, 15 bp, Homo sapiens
tcagggtagcctttt

SEQ ID NO: 280104 - DNA, 15 bp, Homo sapiens
gtcagggtagccttt

SEQ ID NO: 280105 - DNA, 15 bp, Homo sapiens
ggtcagggtagcctt

SEQ ID NO: 280106 - DNA, 15 bp, Homo sapiens
gggtcagggtagcct

SEQ ID NO: 280107 - DNA, 15 bp, Homo sapiens
ggggtcagggtagcc

SEQ ID NO: 280108 - DNA, 15 bp, Homo sapiens
aggggtcagggtagc

SEQ ID NO: 280109 - DNA, 15 bp, Homo sapiens
taggggtcagggtag

SEQ ID NO: 280110 - DNA, 15 bp, Homo sapiens
ataggggtcagggta

SEQ ID NO: 280111 - DNA, 15 bp, Homo sapiens
aataggggtcagggt

SEQ ID NO: 280112 - DNA, 15 bp, Homo sapiens
caataggggtcaggg

SEQ ID NO: 280113 - DNA, 15 bp, Homo sapiens
ccaataggggtcagg

SEQ ID NO: 280114 - DNA, 15 bp, Homo sapiens
gccaataggggtcag

SEQ ID NO: 280115 - DNA, 15 bp, Homo sapiens
tgccaataggggtca

SEQ ID NO: 280116 - DNA, 15 bp, Homo sapiens
ttgccaataggggtc

SEQ ID NO: 280117 - DNA, 15 bp, Homo sapiens
cttgccaataggggt

SEQ ID NO: 280118 - DNA, 15 bp, Homo sapiens
ccttgccaatagggg

SEQ ID NO: 280119 - DNA, 15 bp, Homo sapiens
tccttgccaataggg

SEQ ID NO: 280120 - DNA, 15 bp, Homo sapiens
ctccttgccaatagg

SEQ ID NO: 280121 - DNA, 15 bp, Homo sapiens
gctccttgccaatag

SEQ ID NO: 280122 - DNA, 15 bp, Homo sapiens
cgctccttgccaata

SEQ ID NO: 280123 - DNA, 15 bp, Homo sapiens
tcgctccttgccaat

SEQ ID NO: 280124 - DNA, 15 bp, Homo sapiens
ctcgctccttgccaa

SEQ ID NO: 280125 - DNA, 15 bp, Homo sapiens
cctcgctccttgcca

SEQ ID NO: 280126 - DNA, 15 bp, Homo sapiens
acctcgctccttgcc

SEQ ID NO: 280127 - DNA, 15 bp, Homo sapiens
aacctcgctccttgc

SEQ ID NO: 280128 - DNA, 15 bp, Homo sapiens
caacctcgctccttg

SEQ ID NO: 280129 - DNA, 15 bp, Homo sapiens
gcaacctcgctcctt

SEQ ID NO: 280130 - DNA, 15 bp, Homo sapiens
agcaacctcgctcct

SEQ ID NO: 280131 - DNA, 15 bp, Homo sapiens
cagcaacctcgctcc

SEQ ID NO: 280132 - DNA, 15 bp, Homo sapiens
gcagcaacctcgctc

SEQ ID NO: 280133 - DNA, 15 bp, Homo sapiens
ggcagcaacctcgct

SEQ ID NO: 280134 - DNA, 15 bp, Homo sapiens
gggcagcaacctcgc

SEQ ID NO: 280135 - DNA, 15 bp, Homo sapiens
tgggcagcaacctcg

SEQ ID NO: 280136 - DNA, 15 bp, Homo sapiens
atgggcagcaacctc

SEQ ID NO: 280137 - DNA, 15 bp, Homo sapiens
aatgggcagcaacct

SEQ ID NO: 280138 - DNA, 15 bp, Homo sapiens
caatgggcagcaacc

SEQ ID NO: 280139 - DNA, 15 bp, Homo sapiens
gcaatgggcagcaac

SEQ ID NO: 280140 - DNA, 15 bp, Homo sapiens
agcaatgggcagcaa

SEQ ID NO: 280141 - DNA, 15 bp, Homo sapiens
cagcaatgggcagca

SEQ ID NO: 280142 - DNA, 15 bp, Homo sapiens
acagcaatgggcagc

SEQ ID NO: 280143 - DNA, 15 bp, Homo sapiens
tacagcaatgggcag

SEQ ID NO: 280144 - DNA, 15 bp, Homo sapiens
atacagcaatgggca

SEQ ID NO: 280145 - DNA, 15 bp, Homo sapiens
catacagcaatgggc

SEQ ID NO: 280146 - DNA, 15 bp, Homo sapiens
tcatacagcaatggg

SEQ ID NO: 280147 - DNA, 15 bp, Homo sapiens
ttcatacagcaatgg

SEQ ID NO: 280148 - DNA, 15 bp, Homo sapiens
cttcatacagcaatg

SEQ ID NO: 280149 - DNA, 15 bp, Homo sapiens
tcttcatacagcaat

SEQ ID NO: 280150 - DNA, 15 bp, Homo sapiens
ctcttcatacagcaa

SEQ ID NO: 280151 - DNA, 15 bp, Homo sapiens
gctcttcatacagca

SEQ ID NO: 280152 - DNA, 15 bp, Homo sapiens
ggctcttcatacagc

SEQ ID NO: 280153 - DNA, 15 bp, Homo sapiens
tggctcttcatacag

SEQ ID NO: 280154 - DNA, 15 bp, Homo sapiens
ttggctcttcataca

SEQ ID NO: 280155 - DNA, 15 bp, Homo sapiens
tttggctcttcatac

SEQ ID NO: 280156 - DNA, 15 bp, Homo sapiens
gtttggctcttcata

SEQ ID NO: 280157 - DNA, 15 bp, Homo sapiens
ggtttggctcttcat

SEQ ID NO: 280158 - DNA, 15 bp, Homo sapiens
aggtttggctcttca

SEQ ID NO: 280159 - DNA, 15 bp, Homo sapiens
caggtttggctcttc

SEQ ID NO: 280160 - DNA, 15 bp, Homo sapiens
tcaggtttggctctt

SEQ ID NO: 280161 - DNA, 15 bp, Homo sapiens
ttcaggtttggctct

SEQ ID NO: 280162 - DNA, 15 bp, Homo sapiens
cttcaggtttggctc

SEQ ID NO: 280163 - DNA, 15 bp, Homo sapiens
gcttcaggtttggct

SEQ ID NO: 280164 - DNA, 15 bp, Homo sapiens
tgcttcaggtttggc

SEQ ID NO: 280165 - DNA, 15 bp, Homo sapiens
ctgcttcaggtttgg

SEQ ID NO: 280166 - DNA, 15 bp, Homo sapiens
actgcttcaggtttg

SEQ ID NO: 280167 - DNA, 15 bp, Homo sapiens
tactgcttcaggttt

SEQ ID NO: 280168 - DNA, 15 bp, Homo sapiens
ttactgcttcaggtt

SEQ ID NO: 280169 - DNA, 15 bp, Homo sapiens
attactgcttcaggt

SEQ ID NO: 280170 - DNA, 15 bp, Homo sapiens
cattactgcttcagg

SEQ ID NO: 280171 - DNA, 15 bp, Homo sapiens
ccattactgcttcag

SEQ ID NO: 280172 - DNA, 15 bp, Homo sapiens
cccattactgcttca

SEQ ID NO: 280173 - DNA, 15 bp, Homo sapiens
ccccattactgcttc

SEQ ID NO: 280174 - DNA, 15 bp, Homo sapiens
cccccattactgctt

SEQ ID NO: 280175 - DNA, 15 bp, Homo sapiens
ccccccattactgct

SEQ ID NO: 280176 - DNA, 15 bp, Homo sapiens
gccccccattactgc

SEQ ID NO: 280177 - DNA, 15 bp, Homo sapiens
agccccccattactg

SEQ ID NO: 280178 - DNA, 15 bp, Homo sapiens
cagccccccattact

SEQ ID NO: 280179 - DNA, 15 bp, Homo sapiens
ccagccccccattac

SEQ ID NO: 280180 - DNA, 15 bp, Homo sapiens
cccagccccccatta

SEQ ID NO: 280181 - DNA, 15 bp, Homo sapiens
ccccagccccccatt

SEQ ID NO: 280182 - DNA, 15 bp, Homo sapiens
tccccagccccccat

SEQ ID NO: 280183 - DNA, 15 bp, Homo sapiens
atccccagcccccca

SEQ ID NO: 280184 - DNA, 15 bp, Homo sapiens
catccccagcccccc

SEQ ID NO: 280185 - DNA, 15 bp, Homo sapiens
tcatccccagccccc

SEQ ID NO: 280186 - DNA, 15 bp, Homo sapiens
ctcatccccagcccc

SEQ ID NO: 280187 - DNA, 15 bp, Homo sapiens
cctcatccccagccc

SEQ ID NO: 280188 - DNA, 15 bp, Homo sapiens
ccctcatccccagcc

SEQ ID NO: 280189 - DNA, 15 bp, Homo sapiens
accctcatccccagc

SEQ ID NO: 280190 - DNA, 15 bp, Homo sapiens
caccctcatccccag

SEQ ID NO: 280191 - DNA, 15 bp, Homo sapiens
tcaccctcatcccca

SEQ ID NO: 280192 - DNA, 15 bp, Homo sapiens
ctcaccctcatcccc

SEQ ID NO: 280193 - DNA, 15 bp, Homo sapiens
tctcaccctcatccc

SEQ ID NO: 280194 - DNA, 15 bp, Homo sapiens
atctcaccctcatcc

SEQ ID NO: 280195 - DNA, 15 bp, Homo sapiens
aatctcaccctcatc

SEQ ID NO: 280196 - DNA, 15 bp, Homo sapiens
aaatctcaccctcat

SEQ ID NO: 280197 - DNA, 15 bp, Homo sapiens
gaaatctcaccctca

SEQ ID NO: 280198 - DNA, 15 bp, Homo sapiens
ggaaatctcaccctc

SEQ ID NO: 280199 - DNA, 15 bp, Homo sapiens
tggaaatctcaccct

SEQ ID NO: 280200 - DNA, 15 bp, Homo sapiens
ttggaaatctcaccc

SEQ ID NO: 280201 - DNA, 15 bp, Homo sapiens
cttggaaatctcacc

SEQ ID NO: 280202 - DNA, 15 bp, Homo sapiens
gcttggaaatctcac

SEQ ID NO: 280203 - DNA, 15 bp, Homo sapiens
tgcttggaaatctca

SEQ ID NO: 280204 - DNA, 15 bp, Homo sapiens
ctgcttggaaatctc

SEQ ID NO: 280205 - DNA, 15 bp, Homo sapiens
cctgcttggaaatct

SEQ ID NO: 280206 - DNA, 15 bp, Homo sapiens
acctgcttggaaatc

SEQ ID NO: 280207 - DNA, 15 bp, Homo sapiens
gacctgcttggaaat

SEQ ID NO: 280208 - DNA, 15 bp, Homo sapiens
ggacctgcttggaaa

SEQ ID NO: 280209 - DNA, 15 bp, Homo sapiens
gggacctgcttggaa

SEQ ID NO: 280210 - DNA, 15 bp, Homo sapiens
ggggacctgcttgga

SEQ ID NO: 280211 - DNA, 15 bp, Homo sapiens
tggggacctgcttgg

SEQ ID NO: 280212 - DNA, 15 bp, Homo sapiens
ttggggacctgcttg

SEQ ID NO: 280213 - DNA, 15 bp, Homo sapiens
cttggggacctgctt

SEQ ID NO: 280214 - DNA, 15 bp, Homo sapiens
ccttggggacctgct

SEQ ID NO: 280215 - DNA, 15 bp, Homo sapiens
cccttggggacctgc

SEQ ID NO: 280216 - DNA, 15 bp, Homo sapiens
gcccttggggacctg

SEQ ID NO: 280217 - DNA, 15 bp, Homo sapiens
tgcccttggggacct

SEQ ID NO: 280218 - DNA, 15 bp, Homo sapiens
ttgcccttggggacc

SEQ ID NO: 280219 - DNA, 15 bp, Homo sapiens
attgcccttggggac

SEQ ID NO: 280220 - DNA, 15 bp, Homo sapiens
cattgcccttgggga

SEQ ID NO: 280221 - DNA, 15 bp, Homo sapiens
ccattgcccttgggg

SEQ ID NO: 280222 - DNA, 15 bp, Homo sapiens
cccattgcccttggg

SEQ ID NO: 280223 - DNA, 15 bp, Homo sapiens
gcccattgcccttgg

SEQ ID NO: 280224 - DNA, 15 bp, Homo sapiens
tgcccattgcccttg

SEQ ID NO: 280225 - DNA, 15 bp, Homo sapiens
gtgcccattgccctt

SEQ ID NO: 280226 - DNA, 15 bp, Homo sapiens
ggtgcccattgccct

SEQ ID NO: 280227 - DNA, 15 bp, Homo sapiens
cggtgcccattgccc

SEQ ID NO: 280228 - DNA, 15 bp, Homo sapiens
acggtgcccattgcc

SEQ ID NO: 280229 - DNA, 15 bp, Homo sapiens
tacggtgcccattgc

SEQ ID NO: 280230 - DNA, 15 bp, Homo sapiens
atacggtgcccattg

SEQ ID NO: 280231 - DNA, 15 bp, Homo sapiens
aatacggtgcccatt

SEQ ID NO: 280232 - DNA, 15 bp, Homo sapiens
aaatacggtgcccat

SEQ ID NO: 280233 - DNA, 15 bp, Homo sapiens
gaaatacggtgccca

SEQ ID NO: 280234 - DNA, 15 bp, Homo sapiens
tgaaatacggtgccc

SEQ ID NO: 280235 - DNA, 15 bp, Homo sapiens
ttgaaatacggtgcc

SEQ ID NO: 280236 - DNA, 15 bp, Homo sapiens
tttgaaatacggtgc

SEQ ID NO: 280237 - DNA, 15 bp, Homo sapiens
ctttgaaatacggtg

SEQ ID NO: 280238 - DNA, 15 bp, Homo sapiens
gctttgaaatacggt

SEQ ID NO: 280239 - DNA, 15 bp, Homo sapiens
agctttgaaatacgg

SEQ ID NO: 280240 - DNA, 15 bp, Homo sapiens
cagctttgaaatacg

SEQ ID NO: 280241 - DNA, 15 bp, Homo sapiens
gcagctttgaaatac

SEQ ID NO: 280242 - DNA, 15 bp, Homo sapiens
agcagctttgaaata

SEQ ID NO: 280243 - DNA, 15 bp, Homo sapiens
aagcagctttgaaat

SEQ ID NO: 280244 - DNA, 15 bp, Homo sapiens
gaagcagctttgaaa

SEQ ID NO: 280245 - DNA, 15 bp, Homo sapiens
cgaagcagctttgaa

SEQ ID NO: 280246 - DNA, 15 bp, Homo sapiens
ccgaagcagctttga

SEQ ID NO: 280247 - DNA, 15 bp, Homo sapiens
accgaagcagctttg

SEQ ID NO: 280248 - DNA, 15 bp, Homo sapiens
taccgaagcagcttt

SEQ ID NO: 280249 - DNA, 15 bp, Homo sapiens
ataccgaagcagctt

SEQ ID NO: 280250 - DNA, 15 bp, Homo sapiens
cataccgaagcagct

SEQ ID NO: 280251 - DNA, 15 bp, Homo sapiens
acataccgaagcagc

SEQ ID NO: 280252 - DNA, 15 bp, Homo sapiens
cacataccgaagcag

SEQ ID NO: 280253 - DNA, 15 bp, Homo sapiens
acacataccgaagca

SEQ ID NO: 280254 - DNA, 15 bp, Homo sapiens
gacacataccgaagc

SEQ ID NO: 280255 - DNA, 15 bp, Homo sapiens
tgacacataccgaag

SEQ ID NO: 280256 - DNA, 15 bp, Homo sapiens
ttgacacataccgaa

SEQ ID NO: 280257 - DNA, 15 bp, Homo sapiens
tttgacacataccga

SEQ ID NO: 280258 - DNA, 15 bp, Homo sapiens
ttttgacacataccg

SEQ ID NO: 280259 - DNA, 15 bp, Homo sapiens
tttttgacacatacc

SEQ ID NO: 280260 - DNA, 15 bp, Homo sapiens
ttttttgacacatac

SEQ ID NO: 280261 - DNA, 15 bp, Homo sapiens
gttttttgacacata

SEQ ID NO: 280262 - DNA, 15 bp, Homo sapiens
ggttttttgacacat

SEQ ID NO: 280263 - DNA, 15 bp, Homo sapiens
gggttttttgacaca

SEQ ID NO: 280264 - DNA, 15 bp, Homo sapiens
tgggttttttgacac

SEQ ID NO: 280265 - DNA, 15 bp, Homo sapiens
ttgggttttttgaca

SEQ ID NO: 280266 - DNA, 15 bp, Homo sapiens
tttgggttttttgac

SEQ ID NO: 280267 - DNA, 15 bp, Homo sapiens
gtttgggttttttga

SEQ ID NO: 280268 - DNA, 15 bp, Homo sapiens
tgtttgggttttttg

SEQ ID NO: 280269 - DNA, 15 bp, Homo sapiens
atgtttgggtttttt

SEQ ID NO: 280270 - DNA, 15 bp, Homo sapiens
gatgtttgggttttt

SEQ ID NO: 280271 - DNA, 15 bp, Homo sapiens
ggatgtttgggtttt

SEQ ID NO: 280272 - DNA, 15 bp, Homo sapiens
aggatgtttgggttt

SEQ ID NO: 280273 - DNA, 15 bp, Homo sapiens
caggatgtttgggtt

SEQ ID NO: 280274 - DNA, 15 bp, Homo sapiens
tcaggatgtttgggt

SEQ ID NO: 280275 - DNA, 15 bp, Homo sapiens
ctcaggatgtttggg

SEQ ID NO: 280276 - DNA, 15 bp, Homo sapiens
cctcaggatgtttgg

SEQ ID NO: 280277 - DNA, 15 bp, Homo sapiens
acctcaggatgtttg

SEQ ID NO: 280278 - DNA, 15 bp, Homo sapiens
gacctcaggatgttt

SEQ ID NO: 280279 - DNA, 15 bp, Homo sapiens
ggacctcaggatgtt

SEQ ID NO: 280280 - DNA, 15 bp, Homo sapiens
tggacctcaggatgt

SEQ ID NO: 280281 - DNA, 15 bp, Homo sapiens
ttggacctcaggatg

SEQ ID NO: 280282 - DNA, 15 bp, Homo sapiens
gttggacctcaggat

SEQ ID NO: 280283 - DNA, 15 bp, Homo sapiens
agttggacctcagga

SEQ ID NO: 280284 - DNA, 15 bp, Homo sapiens
gagttggacctcagg

SEQ ID NO: 280285 - DNA, 15 bp, Homo sapiens
agagttggacctcag

SEQ ID NO: 280286 - DNA, 15 bp, Homo sapiens
aagagttggacctca

SEQ ID NO: 280287 - DNA, 15 bp, Homo sapiens
taagagttggacctc

SEQ ID NO: 280288 - DNA, 15 bp, Homo sapiens
ttaagagttggacct

SEQ ID NO: 280289 - DNA, 15 bp, Homo sapiens
cttaagagttggacc

SEQ ID NO: 280290 - DNA, 15 bp, Homo sapiens
acttaagagttggac

SEQ ID NO: 280291 - DNA, 15 bp, Homo sapiens
cacttaagagttgga

SEQ ID NO: 280292 - DNA, 15 bp, Homo sapiens
tcacttaagagttgg

SEQ ID NO: 280293 - DNA, 15 bp, Homo sapiens
atcacttaagagttg

SEQ ID NO: 280294 - DNA, 15 bp, Homo sapiens
catcacttaagagtt

SEQ ID NO: 280295 - DNA, 15 bp, Homo sapiens
ccatcacttaagagt

SEQ ID NO: 280296 - DNA, 15 bp, Homo sapiens
gccatcacttaagag

SEQ ID NO: 280297 - DNA, 15 bp, Homo sapiens
tgccatcacttaaga

SEQ ID NO: 280298 - DNA, 15 bp, Homo sapiens
atgccatcacttaag

SEQ ID NO: 280299 - DNA, 15 bp, Homo sapiens
aatgccatcacttaa

SEQ ID NO: 280300 - DNA, 15 bp, Homo sapiens
gaatgccatcactta

SEQ ID NO: 280301 - DNA, 15 bp, Homo sapiens
agaatgccatcactt

SEQ ID NO: 280302 - DNA, 15 bp, Homo sapiens
gagaatgccatcact

SEQ ID NO: 280303 - DNA, 15 bp, Homo sapiens
ggagaatgccatcac

SEQ ID NO: 280304 - DNA, 15 bp, Homo sapiens
aggagaatgccatca

SEQ ID NO: 280305 - DNA, 15 bp, Homo sapiens
gaggagaatgccatc

SEQ ID NO: 280306 - DNA, 15 bp, Homo sapiens
agaggagaatgccat

SEQ ID NO: 280307 - DNA, 15 bp, Homo sapiens
aagaggagaatgcca

SEQ ID NO: 280308 - DNA, 15 bp, Homo sapiens
gaagaggagaatgcc

SEQ ID NO: 280309 - DNA, 15 bp, Homo sapiens
agaagaggagaatgc

SEQ ID NO: 280310 - DNA, 15 bp, Homo sapiens
aagaagaggagaatg

SEQ ID NO: 280311 - DNA, 15 bp, Homo sapiens
aaagaagaggagaat

SEQ ID NO: 280312 - DNA, 15 bp, Homo sapiens
aaaagaagaggagaa

SEQ ID NO: 280313 - DNA, 15 bp, Homo sapiens
taaaagaagaggaga

SEQ ID NO: 280314 - DNA, 15 bp, Homo sapiens
gtaaaagaagaggag

SEQ ID NO: 280315 - DNA, 15 bp, Homo sapiens
tgtaaaagaagagga

SEQ ID NO: 280316 - DNA, 15 bp, Homo sapiens
ctgtaaaagaagagg

SEQ ID NO: 280317 - DNA, 15 bp, Homo sapiens
cctgtaaaagaagag

SEQ ID NO: 280318 - DNA, 15 bp, Homo sapiens
acctgtaaaagaaga

SEQ ID NO: 280319 - DNA, 15 bp, Homo sapiens
aacctgtaaaagaag

SEQ ID NO: 280320 - DNA, 15 bp, Homo sapiens
caacctgtaaaagaa

SEQ ID NO: 280321 - DNA, 15 bp, Homo sapiens
acaacctgtaaaaga

SEQ ID NO: 280322 - DNA, 15 bp, Homo sapiens
gacaacctgtaaaag

SEQ ID NO: 280323 - DNA, 15 bp, Homo sapiens
agacaacctgtaaaa

SEQ ID NO: 280324 - DNA, 15 bp, Homo sapiens
aagacaacctgtaaa

SEQ ID NO: 280325 - DNA, 15 bp, Homo sapiens
taagacaacctgtaa

SEQ ID NO: 280326 - DNA, 15 bp, Homo sapiens
ctaagacaacctgta

SEQ ID NO: 280327 - DNA, 15 bp, Homo sapiens
actaagacaacctgt

SEQ ID NO: 280328 - DNA, 15 bp, Homo sapiens
gactaagacaacctg

SEQ ID NO: 280329 - DNA, 15 bp, Homo sapiens
agactaagacaacct

SEQ ID NO: 280330 - DNA, 15 bp, Homo sapiens
aagactaagacaacc

SEQ ID NO: 280331 - DNA, 15 bp, Homo sapiens
aaagactaagacaac

SEQ ID NO: 280332 - DNA, 15 bp, Homo sapiens
caaagactaagacaa

SEQ ID NO: 280333 - DNA, 15 bp, Homo sapiens
gcaaagactaagaca

SEQ ID NO: 280334 - DNA, 15 bp, Homo sapiens
agcaaagactaagac

SEQ ID NO: 280335 - DNA, 15 bp, Homo sapiens
gagcaaagactaaga

SEQ ID NO: 280336 - DNA, 15 bp, Homo sapiens
agagcaaagactaag

SEQ ID NO: 280337 - DNA, 15 bp, Homo sapiens
gagagcaaagactaa

SEQ ID NO: 280338 - DNA, 15 bp, Homo sapiens
tgagagcaaagacta

SEQ ID NO: 280339 - DNA, 15 bp, Homo sapiens
ctgagagcaaagact

SEQ ID NO: 280340 - DNA, 15 bp, Homo sapiens
gctgagagcaaagac

SEQ ID NO: 280341 - DNA, 15 bp, Homo sapiens
tgctgagagcaaaga

SEQ ID NO: 280342 - DNA, 15 bp, Homo sapiens
atgctgagagcaaag

SEQ ID NO: 280343 - DNA, 15 bp, Homo sapiens
gatgctgagagcaaa

SEQ ID NO: 280344 - DNA, 15 bp, Homo sapiens
cgatgctgagagcaa

SEQ ID NO: 280345 - DNA, 15 bp, Homo sapiens
ccgatgctgagagca

SEQ ID NO: 280346 - DNA, 15 bp, Homo sapiens
accgatgctgagagc

SEQ ID NO: 280347 - DNA, 15 bp, Homo sapiens
caccgatgctgagag

SEQ ID NO: 280348 - DNA, 15 bp, Homo sapiens
gcaccgatgctgaga

SEQ ID NO: 280349 - DNA, 15 bp, Homo sapiens
tgcaccgatgctgag

SEQ ID NO: 280350 - DNA, 15 bp, Homo sapiens
gtgcaccgatgctga

SEQ ID NO: 280351 - DNA, 15 bp, Homo sapiens
agtgcaccgatgctg

SEQ ID NO: 280352 - DNA, 15 bp, Homo sapiens
aagtgcaccgatgct

SEQ ID NO: 280353 - DNA, 15 bp, Homo sapiens
caagtgcaccgatgc

SEQ ID NO: 280354 - DNA, 15 bp, Homo sapiens
acaagtgcaccgatg

SEQ ID NO: 280355 - DNA, 15 bp, Homo sapiens
tacaagtgcaccgat

SEQ ID NO: 280356 - DNA, 15 bp, Homo sapiens
ttacaagtgcaccga

SEQ ID NO: 280357 - DNA, 15 bp, Homo sapiens
attacaagtgcaccg

SEQ ID NO: 280358 - DNA, 15 bp, Homo sapiens
tattacaagtgcacc

SEQ ID NO: 280359 - DNA, 15 bp, Homo sapiens
atattacaagtgcac

SEQ ID NO: 280360 - DNA, 15 bp, Homo sapiens
tatattacaagtgca

SEQ ID NO: 280361 - DNA, 15 bp, Homo sapiens
gtatattacaagtgc

SEQ ID NO: 280362 - DNA, 15 bp, Homo sapiens
agtatattacaagtg

SEQ ID NO: 280363 - DNA, 15 bp, Homo sapiens
aagtatattacaagt

SEQ ID NO: 280364 - DNA, 15 bp, Homo sapiens
gaagtatattacaag

SEQ ID NO: 280365 - DNA, 15 bp, Homo sapiens
tgaagtatattacaa

SEQ ID NO: 280366 - DNA, 15 bp, Homo sapiens
atgaagtatattaca

SEQ ID NO: 280367 - DNA, 15 bp, Homo sapiens
tatgaagtatattac

SEQ ID NO: 280368 - DNA, 15 bp, Homo sapiens
ctatgaagtatatta

SEQ ID NO: 280369 - DNA, 15 bp, Homo sapiens
tctatgaagtatatt

SEQ ID NO: 280370 - DNA, 15 bp, Homo sapiens
atctatgaagtatat

SEQ ID NO: 280371 - DNA, 15 bp, Homo sapiens
aatctatgaagtata

SEQ ID NO: 280372 - DNA, 15 bp, Homo sapiens
gaatctatgaagtat

SEQ ID NO: 280373 - DNA, 15 bp, Homo sapiens
tgaatctatgaagta

SEQ ID NO: 280374 - DNA, 15 bp, Homo sapiens
atgaatctatgaagt

SEQ ID NO: 280375 - DNA, 15 bp, Homo sapiens
gatgaatctatgaag

SEQ ID NO: 280376 - DNA, 15 bp, Homo sapiens
tgatgaatctatgaa

SEQ ID NO: 280377 - DNA, 15 bp, Homo sapiens
ttgatgaatctatga

SEQ ID NO: 280378 - DNA, 15 bp, Homo sapiens
tttgatgaatctatg

SEQ ID NO: 280379 - DNA, 15 bp, Homo sapiens
ctttgatgaatctat

SEQ ID NO: 280380 - DNA, 15 bp, Homo sapiens
actttgatgaatcta

SEQ ID NO: 280381 - DNA, 15 bp, Homo sapiens
cactttgatgaatct

SEQ ID NO: 280382 - DNA, 15 bp, Homo sapiens
tcactttgatgaatc

SEQ ID NO: 280383 - DNA, 15 bp, Homo sapiens
ctcactttgatgaat

SEQ ID NO: 280384 - DNA, 15 bp, Homo sapiens
actcactttgatgaa

SEQ ID NO: 280385 - DNA, 15 bp, Homo sapiens
tactcactttgatga

SEQ ID NO: 280386 - DNA, 15 bp, Homo sapiens
atactcactttgatg

SEQ ID NO: 280387 - DNA, 15 bp, Homo sapiens
aatactcactttgat

SEQ ID NO: 280388 - DNA, 15 bp, Homo sapiens
gaatactcactttga

SEQ ID NO: 280389 - DNA, 15 bp, Homo sapiens
tgaatactcactttg

SEQ ID NO: 280390 - DNA, 15 bp, Homo sapiens
ttgaatactcacttt

SEQ ID NO: 280391 - DNA, 15 bp, Homo sapiens
tttgaatactcactt

SEQ ID NO: 280392 - DNA, 15 bp, Homo sapiens
atttgaatactcact

SEQ ID NO: 280393 - DNA, 15 bp, Homo sapiens
tatttgaatactcac

SEQ ID NO: 280394 - DNA, 15 bp, Homo sapiens
atatttgaatactca

SEQ ID NO: 280395 - DNA, 15 bp, Homo sapiens
tatatttgaatactc

SEQ ID NO: 280396 - DNA, 15 bp, Homo sapiens
gtatatttgaatact

SEQ ID NO: 280397 - DNA, 15 bp, Homo sapiens
agtatatttgaatac

SEQ ID NO: 280398 - DNA, 15 bp, Homo sapiens
aagtatatttgaata

SEQ ID NO: 280399 - DNA, 15 bp, Homo sapiens
aaagtatatttgaat

SEQ ID NO: 280400 - DNA, 15 bp, Homo sapiens
gaaagtatatttgaa

SEQ ID NO: 280401 - DNA, 15 bp, Homo sapiens
agaaagtatatttga

SEQ ID NO: 280402 - DNA, 15 bp, Homo sapiens
aagaaagtatatttg

SEQ ID NO: 280403 - DNA, 15 bp, Homo sapiens
caagaaagtatattt

SEQ ID NO: 280404 - DNA, 15 bp, Homo sapiens
gcaagaaagtatatt

SEQ ID NO: 280405 - DNA, 15 bp, Homo sapiens
ggcaagaaagtatat

SEQ ID NO: 280406 - DNA, 15 bp, Homo sapiens
gggcaagaaagtata

SEQ ID NO: 280407 - DNA, 15 bp, Homo sapiens
agggcaagaaagtat

SEQ ID NO: 280408 - DNA, 15 bp, Homo sapiens
gagggcaagaaagta

SEQ ID NO: 280409 - DNA, 15 bp, Homo sapiens
cgagggcaagaaagt

SEQ ID NO: 280410 - DNA, 15 bp, Homo sapiens
acgagggcaagaaag

SEQ ID NO: 280411 - DNA, 15 bp, Homo sapiens
aacgagggcaagaaa

SEQ ID NO: 280412 - DNA, 15 bp, Homo sapiens
aaacgagggcaagaa

SEQ ID NO: 280413 - DNA, 15 bp, Homo sapiens
gaaacgagggcaaga

SEQ ID NO: 280414 - DNA, 15 bp, Homo sapiens
tgaaacgagggcaag

SEQ ID NO: 280415 - DNA, 15 bp, Homo sapiens
atgaaacgagggcaa

SEQ ID NO: 280416 - DNA, 15 bp, Homo sapiens
tatgaaacgagggca

SEQ ID NO: 280417 - DNA, 15 bp, Homo sapiens
ttatgaaacgagggc

SEQ ID NO: 280418 - DNA, 15 bp, Homo sapiens
tttatgaaacgaggg

SEQ ID NO: 280419 - DNA, 15 bp, Homo sapiens
gtttatgaaacgagg

SEQ ID NO: 280420 - DNA, 15 bp, Homo sapiens
tgtttatgaaacgag

SEQ ID NO: 280421 - DNA, 15 bp, Homo sapiens
ttgtttatgaaacga

SEQ ID NO: 280422 - DNA, 15 bp, Homo sapiens
attgtttatgaaacg

SEQ ID NO: 280423 - DNA, 15 bp, Homo sapiens
gattgtttatgaaac

SEQ ID NO: 280424 - DNA, 15 bp, Homo sapiens
tgattgtttatgaaa

SEQ ID NO: 280425 - DNA, 15 bp, Homo sapiens
atgattgtttatgaa

SEQ ID NO: 280426 - DNA, 15 bp, Homo sapiens
catgattgtttatga

SEQ ID NO: 280427 - DNA, 15 bp, Homo sapiens
tcatgattgtttatg

SEQ ID NO: 280428 - DNA, 15 bp, Homo sapiens
ctcatgattgtttat

SEQ ID NO: 280429 - DNA, 15 bp, Homo sapiens
gctcatgattgttta

SEQ ID NO: 280430 - DNA, 15 bp, Homo sapiens
ggctcatgattgttt

SEQ ID NO: 280431 - DNA, 15 bp, Homo sapiens
aggctcatgattgtt

SEQ ID NO: 280432 - DNA, 15 bp, Homo sapiens
aaggctcatgattgt

SEQ ID NO: 280433 - DNA, 15 bp, Homo sapiens
aaaggctcatgattg

SEQ ID NO: 280434 - DNA, 15 bp, Homo sapiens
taaaggctcatgatt

SEQ ID NO: 280435 - DNA, 15 bp, Homo sapiens
gtaaaggctcatgat

SEQ ID NO: 280436 - DNA, 15 bp, Homo sapiens
tgtaaaggctcatga

SEQ ID NO: 280437 - DNA, 15 bp, Homo sapiens
atgtaaaggctcatg

SEQ ID NO: 280438 - DNA, 15 bp, Homo sapiens
aatgtaaaggctcat

SEQ ID NO: 280439 - DNA, 15 bp, Homo sapiens
caatgtaaaggctca

SEQ ID NO: 280440 - DNA, 15 bp, Homo sapiens
tcaatgtaaaggctc

SEQ ID NO: 280441 - DNA, 15 bp, Homo sapiens
atcaatgtaaaggct

SEQ ID NO: 280442 - DNA, 15 bp, Homo sapiens
gatcaatgtaaaggc

SEQ ID NO: 280443 - DNA, 15 bp, Homo sapiens
ggatcaatgtaaagg

SEQ ID NO: 280444 - DNA, 15 bp, Homo sapiens
tggatcaatgtaaag

SEQ ID NO: 280445 - DNA, 15 bp, Homo sapiens
atggatcaatgtaaa

SEQ ID NO: 280446 - DNA, 15 bp, Homo sapiens
aatggatcaatgtaa

SEQ ID NO: 280447 - DNA, 15 bp, Homo sapiens
aaatggatcaatgta

SEQ ID NO: 280448 - DNA, 15 bp, Homo sapiens
taaatggatcaatgt

SEQ ID NO: 280449 - DNA, 15 bp, Homo sapiens
ataaatggatcaatg

SEQ ID NO: 280450 - DNA, 15 bp, Homo sapiens
aataaatggatcaat

SEQ ID NO: 280451 - DNA, 15 bp, Homo sapiens
aaataaatggatcaa

SEQ ID NO: 280452 - DNA, 15 bp, Homo sapiens
taaataaatggatca

SEQ ID NO: 280453 - DNA, 15 bp, Homo sapiens
gtaaataaatggatc

SEQ ID NO: 280454 - DNA, 15 bp, Homo sapiens
ggtaaataaatggat

SEQ ID NO: 280455 - DNA, 15 bp, Homo sapiens
aggtaaataaatgga

SEQ ID NO: 280456 - DNA, 15 bp, Homo sapiens
aaggtaaataaatgg

SEQ ID NO: 280457 - DNA, 15 bp, Homo sapiens
caaggtaaataaatg

SEQ ID NO: 280458 - DNA, 15 bp, Homo sapiens
tcaaggtaaataaat

SEQ ID NO: 280459 - DNA, 15 bp, Homo sapiens
gtcaaggtaaataaa

SEQ ID NO: 280460 - DNA, 15 bp, Homo sapiens
tgtcaaggtaaataa

SEQ ID NO: 280461 - DNA, 15 bp, Homo sapiens
gtgtcaaggtaaata

SEQ ID NO: 280462 - DNA, 15 bp, Homo sapiens
ggtgtcaaggtaaat

SEQ ID NO: 280463 - DNA, 15 bp, Homo sapiens
tggtgtcaaggtaaa

SEQ ID NO: 280464 - DNA, 15 bp, Homo sapiens
ttggtgtcaaggtaa

SEQ ID NO: 280465 - DNA, 15 bp, Homo sapiens
gttggtgtcaaggta

SEQ ID NO: 280466 - DNA, 15 bp, Homo sapiens
ggttggtgtcaaggt

SEQ ID NO: 280467 - DNA, 15 bp, Homo sapiens
aggttggtgtcaagg

SEQ ID NO: 280468 - DNA, 15 bp, Homo sapiens
aaggttggtgtcaag

SEQ ID NO: 280469 - DNA, 15 bp, Homo sapiens
aaaggttggtgtcaa

SEQ ID NO: 280470 - DNA, 15 bp, Homo sapiens
caaaggttggtgtca

SEQ ID NO: 280471 - DNA, 15 bp, Homo sapiens
gcaaaggttggtgtc

SEQ ID NO: 280472 - DNA, 15 bp, Homo sapiens
tgcaaaggttggtgt

SEQ ID NO: 280473 - DNA, 15 bp, Homo sapiens
ttgcaaaggttggtg

SEQ ID NO: 280474 - DNA, 15 bp, Homo sapiens
cttgcaaaggttggt

SEQ ID NO: 280475 - DNA, 15 bp, Homo sapiens
tcttgcaaaggttgg

SEQ ID NO: 280476 - DNA, 15 bp, Homo sapiens
gtcttgcaaaggttg

SEQ ID NO: 280477 - DNA, 15 bp, Homo sapiens
ggtcttgcaaaggtt

SEQ ID NO: 280478 - DNA, 15 bp, Homo sapiens
aggtcttgcaaaggt

SEQ ID NO: 280479 - DNA, 15 bp, Homo sapiens
aaggtcttgcaaagg

SEQ ID NO: 280480 - DNA, 15 bp, Homo sapiens
gaaggtcttgcaaag

SEQ ID NO: 280481 - DNA, 15 bp, Homo sapiens
agaaggtcttgcaaa

SEQ ID NO: 280482 - DNA, 15 bp, Homo sapiens
cagaaggtcttgcaa

SEQ ID NO: 280483 - DNA, 15 bp, Homo sapiens
tcagaaggtcttgca

SEQ ID NO: 280484 - DNA, 15 bp, Homo sapiens
ctcagaaggtcttgc

SEQ ID NO: 280485 - DNA, 15 bp, Homo sapiens
actcagaaggtcttg

SEQ ID NO: 280486 - DNA, 15 bp, Homo sapiens
cactcagaaggtctt

SEQ ID NO: 280487 - DNA, 15 bp, Homo sapiens
gcactcagaaggtct

SEQ ID NO: 280488 - DNA, 15 bp, Homo sapiens
tgcactcagaaggtc

SEQ ID NO: 280489 - DNA, 15 bp, Homo sapiens
ctgcactcagaaggt

SEQ ID NO: 280490 - DNA, 15 bp, Homo sapiens
tctgcactcagaagg

SEQ ID NO: 280491 - DNA, 15 bp, Homo sapiens
ttctgcactcagaag

SEQ ID NO: 280492 - DNA, 15 bp, Homo sapiens
cttctgcactcagaa

SEQ ID NO: 280493 - DNA, 15 bp, Homo sapiens
tcttctgcactcaga

SEQ ID NO: 280494 - DNA, 15 bp, Homo sapiens
atcttctgcactcag

SEQ ID NO: 280495 - DNA, 15 bp, Homo sapiens
aatcttctgcactca

SEQ ID NO: 280496 - DNA, 15 bp, Homo sapiens
aaatcttctgcactc

SEQ ID NO: 280497 - DNA, 15 bp, Homo sapiens
aaaatcttctgcact

SEQ ID NO: 280498 - DNA, 15 bp, Homo sapiens
caaaatcttctgcac

SEQ ID NO: 280499 - DNA, 15 bp, Homo sapiens
ccaaaatcttctgca

SEQ ID NO: 280500 - DNA, 15 bp, Homo sapiens
tccaaaatcttctgc

SEQ ID NO: 280501 - DNA, 15 bp, Homo sapiens
ctccaaaatcttctg

SEQ ID NO: 280502 - DNA, 15 bp, Homo sapiens
cctccaaaatcttct

SEQ ID NO: 280503 - DNA, 15 bp, Homo sapiens
tcctccaaaatcttc

SEQ ID NO: 280504 - DNA, 15 bp, Homo sapiens
ttcctccaaaatctt

SEQ ID NO: 280505 - DNA, 15 bp, Homo sapiens
cttcctccaaaatct

SEQ ID NO: 280506 - DNA, 15 bp, Homo sapiens
gcttcctccaaaatc

SEQ ID NO: 280507 - DNA, 15 bp, Homo sapiens
agcttcctccaaaat

SEQ ID NO: 280508 - DNA, 15 bp, Homo sapiens
tagcttcctccaaaa

SEQ ID NO: 280509 - DNA, 15 bp, Homo sapiens
ctagcttcctccaaa

SEQ ID NO: 280510 - DNA, 15 bp, Homo sapiens
actagcttcctccaa

SEQ ID NO: 280511 - DNA, 15 bp, Homo sapiens
cactagcttcctcca

SEQ ID NO: 280512 - DNA, 15 bp, Homo sapiens
gcactagcttcctcc

SEQ ID NO: 280513 - DNA, 15 bp, Homo sapiens
agcactagcttcctc

SEQ ID NO: 280514 - DNA, 15 bp, Homo sapiens
cagcactagcttcct

SEQ ID NO: 280515 - DNA, 15 bp, Homo sapiens
acagcactagcttcc

SEQ ID NO: 280516 - DNA, 15 bp, Homo sapiens
tacagcactagcttc

SEQ ID NO: 280517 - DNA, 15 bp, Homo sapiens
gtacagcactagctt

SEQ ID NO: 280518 - DNA, 15 bp, Homo sapiens
agtacagcactagct

SEQ ID NO: 280519 - DNA, 15 bp, Homo sapiens
cagtacagcactagc

SEQ ID NO: 280520 - DNA, 15 bp, Homo sapiens
acagtacagcactag

SEQ ID NO: 280521 - DNA, 15 bp, Homo sapiens
tacagtacagcacta

SEQ ID NO: 280522 - DNA, 15 bp, Homo sapiens
gtacagtacagcact

SEQ ID NO: 280523 - DNA, 15 bp, Homo sapiens
agtacagtacagcac

SEQ ID NO: 280524 - DNA, 15 bp, Homo sapiens
cagtacagtacagca

SEQ ID NO: 280525 - DNA, 15 bp, Homo sapiens
tcagtacagtacagc

SEQ ID NO: 280526 - DNA, 15 bp, Homo sapiens
atcagtacagtacag

SEQ ID NO: 280527 - DNA, 15 bp, Homo sapiens
aatcagtacagtaca

SEQ ID NO: 280528 - DNA, 15 bp, Homo sapiens
aaatcagtacagtac

SEQ ID NO: 280529 - DNA, 15 bp, Homo sapiens
aaaatcagtacagta

SEQ ID NO: 280530 - DNA, 15 bp, Homo sapiens
gaaaatcagtacagt

SEQ ID NO: 280531 - DNA, 15 bp, Homo sapiens
agaaaatcagtacag

SEQ ID NO: 280532 - DNA, 15 bp, Homo sapiens
tagaaaatcagtaca

SEQ ID NO: 280533 - DNA, 15 bp, Homo sapiens
ttagaaaatcagtac

SEQ ID NO: 280534 - DNA, 15 bp, Homo sapiens
tttagaaaatcagta

SEQ ID NO: 280535 - DNA, 15 bp, Homo sapiens
atttagaaaatcagt

SEQ ID NO: 280536 - DNA, 15 bp, Homo sapiens
catttagaaaatcag

SEQ ID NO: 280537 - DNA, 15 bp, Homo sapiens
ccatttagaaaatca

SEQ ID NO: 280538 - DNA, 15 bp, Homo sapiens
cccatttagaaaatc

SEQ ID NO: 280539 - DNA, 15 bp, Homo sapiens
tcccatttagaaaat

SEQ ID NO: 280540 - DNA, 15 bp, Homo sapiens
ttcccatttagaaaa

SEQ ID NO: 280541 - DNA, 15 bp, Homo sapiens
tttcccatttagaaa

SEQ ID NO: 280542 - DNA, 15 bp, Homo sapiens
ctttcccatttagaa

SEQ ID NO: 280543 - DNA, 15 bp, Homo sapiens
tctttcccatttaga

SEQ ID NO: 280544 - DNA, 15 bp, Homo sapiens
ttctttcccatttag

SEQ ID NO: 280545 - DNA, 15 bp, Homo sapiens
tttctttcccattta

SEQ ID NO: 280546 - DNA, 15 bp, Homo sapiens
ctttctttcccattt

SEQ ID NO: 280547 - DNA, 15 bp, Homo sapiens
actttctttcccatt

SEQ ID NO: 280548 - DNA, 15 bp, Homo sapiens
aactttctttcccat

SEQ ID NO: 280549 - DNA, 15 bp, Homo sapiens
gaactttctttccca

SEQ ID NO: 280550 - DNA, 15 bp, Homo sapiens
agaactttctttccc

SEQ ID NO: 280551 - DNA, 15 bp, Homo sapiens
gagaactttctttcc

SEQ ID NO: 280552 - DNA, 15 bp, Homo sapiens
tgagaactttctttc

SEQ ID NO: 280553 - DNA, 15 bp, Homo sapiens
ctgagaactttcttt

SEQ ID NO: 280554 - DNA, 15 bp, Homo sapiens
tctgagaactttctt

SEQ ID NO: 280555 - DNA, 15 bp, Homo sapiens
ttctgagaactttct

SEQ ID NO: 280556 - DNA, 15 bp, Homo sapiens
cttctgagaactttc

SEQ ID NO: 280557 - DNA, 15 bp, Homo sapiens
ccttctgagaacttt

SEQ ID NO: 280558 - DNA, 15 bp, Homo sapiens
tccttctgagaactt

SEQ ID NO: 280559 - DNA, 15 bp, Homo sapiens
ttccttctgagaact

SEQ ID NO: 280560 - DNA, 15 bp, Homo sapiens
cttccttctgagaac

SEQ ID NO: 280561 - DNA, 15 bp, Homo sapiens
ccttccttctgagaa

SEQ ID NO: 280562 - DNA, 15 bp, Homo sapiens
gccttccttctgaga

SEQ ID NO: 280563 - DNA, 15 bp, Homo sapiens
agccttccttctgag

SEQ ID NO: 280564 - DNA, 15 bp, Homo sapiens
tagccttccttctga

SEQ ID NO: 280565 - DNA, 15 bp, Homo sapiens
atagccttccttctg

SEQ ID NO: 280566 - DNA, 15 bp, Homo sapiens
aatagccttccttct

SEQ ID NO: 280567 - DNA, 15 bp, Homo sapiens
aaatagccttccttc

SEQ ID NO: 280568 - DNA, 15 bp, Homo sapiens
aaaatagccttcctt

SEQ ID NO: 280569 - DNA, 15 bp, Homo sapiens
caaaatagccttcct

SEQ ID NO: 280570 - DNA, 15 bp, Homo sapiens
tcaaaatagccttcc

SEQ ID NO: 280571 - DNA, 15 bp, Homo sapiens
ctcaaaatagccttc

SEQ ID NO: 280572 - DNA, 15 bp, Homo sapiens
actcaaaatagcctt

SEQ ID NO: 280573 - DNA, 15 bp, Homo sapiens
gactcaaaatagcct

SEQ ID NO: 280574 - DNA, 15 bp, Homo sapiens
agactcaaaatagcc

SEQ ID NO: 280575 - DNA, 15 bp, Homo sapiens
cagactcaaaatagc

SEQ ID NO: 280576 - DNA, 15 bp, Homo sapiens
gcagactcaaaatag

SEQ ID NO: 280577 - DNA, 15 bp, Homo sapiens
agcagactcaaaata

SEQ ID NO: 280578 - DNA, 15 bp, Homo sapiens
cagcagactcaaaat

SEQ ID NO: 280579 - DNA, 15 bp, Homo sapiens
ccagcagactcaaaa

SEQ ID NO: 280580 - DNA, 15 bp, Homo sapiens
gccagcagactcaaa

SEQ ID NO: 280581 - DNA, 15 bp, Homo sapiens
tgccagcagactcaa

SEQ ID NO: 280582 - DNA, 15 bp, Homo sapiens
atgccagcagactca

SEQ ID NO: 280583 - DNA, 15 bp, Homo sapiens
tatgccagcagactc

SEQ ID NO: 280584 - DNA, 15 bp, Homo sapiens
ctatgccagcagact

SEQ ID NO: 280585 - DNA, 15 bp, Homo sapiens
cctatgccagcagac

SEQ ID NO: 280586 - DNA, 15 bp, Homo sapiens
tcctatgccagcaga

SEQ ID NO: 280587 - DNA, 15 bp, Homo sapiens
ctcctatgccagcag

SEQ ID NO: 280588 - DNA, 15 bp, Homo sapiens
cctcctatgccagca

SEQ ID NO: 280589 - DNA, 15 bp, Homo sapiens
accctcctatgccag

SEQ ID NO: 280590 - DNA, 15 bp, Homo sapiens
caccctcctatgcca

SEQ ID NO: 280591 - DNA, 15 bp, Homo sapiens
tcaccctcctatgcc

SEQ ID NO: 280592 - DNA, 15 bp, Homo sapiens
ctcaccctcctatgc

SEQ ID NO: 280593 - DNA, 15 bp, Homo sapiens
cctcaccctcctatg

SEQ ID NO: 280594 - DNA, 15 bp, Homo sapiens
acctcaccctcctat

SEQ ID NO: 280595 - DNA, 15 bp, Homo sapiens
tacctcaccctccta

SEQ ID NO: 280596 - DNA, 15 bp, Homo sapiens
atacctcaccctcct

SEQ ID NO: 280597 - DNA, 15 bp, Homo sapiens
tatacctcaccctcc

SEQ ID NO: 280598 - DNA, 15 bp, Homo sapiens
atatacctcaccctc

SEQ ID NO: 280599 - DNA, 15 bp, Homo sapiens
catatacctcaccct

SEQ ID NO: 280600 - DNA, 15 bp, Homo sapiens
tcatatacctcaccc

SEQ ID NO: 280601 - DNA, 15 bp, Homo sapiens
ctcatatacctcacc

SEQ ID NO: 280602 - DNA, 15 bp, Homo sapiens
cctcatatacctcac

SEQ ID NO: 280603 - DNA, 15 bp, Homo sapiens
acctcatatacctca

SEQ ID NO: 280604 - DNA, 15 bp, Homo sapiens
gacctcatatacctc

SEQ ID NO: 280605 - DNA, 15 bp, Homo sapiens
tgacctcatatacct

SEQ ID NO: 280606 - DNA, 15 bp, Homo sapiens
ttgacctcatatacc

SEQ ID NO: 280607 - DNA, 15 bp, Homo sapiens
cttgacctcatatac

SEQ ID NO: 280608 - DNA, 15 bp, Homo sapiens
acttgacctcatata

SEQ ID NO: 280609 - DNA, 15 bp, Homo sapiens
gacttgacctcatat

SEQ ID NO: 280610 - DNA, 15 bp, Homo sapiens
agacttgacctcata

SEQ ID NO: 280611 - DNA, 15 bp, Homo sapiens
aagacttgacctcat

SEQ ID NO: 280612 - DNA, 15 bp, Homo sapiens
gaagacttgacctca

SEQ ID NO: 280613 - DNA, 15 bp, Homo sapiens
agaagacttgacctc

SEQ ID NO: 280614 - DNA, 15 bp, Homo sapiens
aagaagacttgacct

SEQ ID NO: 280615 - DNA, 15 bp, Homo sapiens
caagaagacttgacc

SEQ ID NO: 280616 - DNA, 15 bp, Homo sapiens
gcaagaagacttgac

SEQ ID NO: 280617 - DNA, 15 bp, Homo sapiens
agcaagaagacttga

SEQ ID NO: 280618 - DNA, 15 bp, Homo sapiens
cagcaagaagacttg

SEQ ID NO: 280619 - DNA, 15 bp, Homo sapiens
ccagcaagaagactt

SEQ ID NO: 280620 - DNA, 15 bp, Homo sapiens
cccagcaagaagact

SEQ ID NO: 280621 - DNA, 15 bp, Homo sapiens
acccagcaagaagac

SEQ ID NO: 280622 - DNA, 15 bp, Homo sapiens
tacccagcaagaaga

SEQ ID NO: 280623 - DNA, 15 bp, Homo sapiens
atacccagcaagaag

SEQ ID NO: 280624 - DNA, 15 bp, Homo sapiens
aatacccagcaagaa

SEQ ID NO: 280625 - DNA, 15 bp, Homo sapiens
taatacccagcaaga

SEQ ID NO: 280626 - DNA, 15 bp, Homo sapiens
gtaatacccagcaag

SEQ ID NO: 280627 - DNA, 15 bp, Homo sapiens
agtaatacccagcaa

SEQ ID NO: 280628 - DNA, 15 bp, Homo sapiens
aagtaatacccagca

SEQ ID NO: 280629 - DNA, 15 bp, Homo sapiens
taagtaatacccagc

SEQ ID NO: 280630 - DNA, 15 bp, Homo sapiens
ataagtaatacccag

SEQ ID NO: 280631 - DNA, 15 bp, Homo sapiens
aataagtaataccca

SEQ ID NO: 280632 - DNA, 15 bp, Homo sapiens
aaataagtaataccc

SEQ ID NO: 280633 - DNA, 15 bp, Homo sapiens
aaaataagtaatacc

SEQ ID NO: 280634 - DNA, 15 bp, Homo sapiens
aaaaataagtaatac

SEQ ID NO: 280635 - DNA, 15 bp, Homo sapiens
taaaaataagtaata

SEQ ID NO: 280636 - DNA, 15 bp, Homo sapiens
ttaaaaataagtaat

SEQ ID NO: 280637 - DNA, 15 bp, Homo sapiens
tttaaaaataagtaa

SEQ ID NO: 280638 - DNA, 15 bp, Homo sapiens
ctttaaaaataagta

SEQ ID NO: 280639 - DNA, 15 bp, Homo sapiens
tctttaaaaataagt

SEQ ID NO: 280640 - DNA, 15 bp, Homo sapiens
ctctttaaaaataag

SEQ ID NO: 280641 - DNA, 15 bp, Homo sapiens
gctctttaaaaataa

SEQ ID NO: 280642 - DNA, 15 bp, Homo sapiens
agctctttaaaaata

SEQ ID NO: 280643 - DNA, 15 bp, Homo sapiens
cagctctttaaaaat

SEQ ID NO: 280644 - DNA, 15 bp, Homo sapiens
acagctctttaaaaa

SEQ ID NO: 280645 - DNA, 15 bp, Homo sapiens
aacagctctttaaaa

SEQ ID NO: 280646 - DNA, 15 bp, Homo sapiens
aaacagctctttaaa

SEQ ID NO: 280647 - DNA, 15 bp, Homo sapiens
gaaacagctctttaa

SEQ ID NO: 280648 - DNA, 15 bp, Homo sapiens
ggaaacagctcttta

SEQ ID NO: 280649 - DNA, 15 bp, Homo sapiens
aggaaacagctcttt

SEQ ID NO: 280650 - DNA, 15 bp, Homo sapiens
taggaaacagctctt

SEQ ID NO: 280651 - DNA, 15 bp, Homo sapiens
ttaggaaacagctct

SEQ ID NO: 280652 - DNA, 15 bp, Homo sapiens
attaggaaacagctc

SEQ ID NO: 280653 - DNA, 15 bp, Homo sapiens
cattaggaaacagct

SEQ ID NO: 280654 - DNA, 15 bp, Homo sapiens
tcattaggaaacagc

SEQ ID NO: 280655 - DNA, 15 bp, Homo sapiens
atcattaggaaacag

SEQ ID NO: 280656 - DNA, 15 bp, Homo sapiens
catcattaggaaaca

SEQ ID NO: 280657 - DNA, 15 bp, Homo sapiens
acatcattaggaaac

SEQ ID NO: 280658 - DNA, 15 bp, Homo sapiens
tacatcattaggaaa

SEQ ID NO: 280659 - DNA, 15 bp, Homo sapiens
atacatcattaggaa

SEQ ID NO: 280660 - DNA, 15 bp, Homo sapiens
aatacatcattagga

SEQ ID NO: 280661 - DNA, 15 bp, Homo sapiens
aaatacatcattagg

SEQ ID NO: 280662 - DNA, 15 bp, Homo sapiens
caaatacatcattag

SEQ ID NO: 280663 - DNA, 15 bp, Homo sapiens
gcaaatacatcatta

SEQ ID NO: 280664 - DNA, 15 bp, Homo sapiens
tgcaaatacatcatt

SEQ ID NO: 280665 - DNA, 15 bp, Homo sapiens
gtgcaaatacatcat

SEQ ID NO: 280666 - DNA, 15 bp, Homo sapiens
agtgcaaatacatca

SEQ ID NO: 280667 - DNA, 15 bp, Homo sapiens
cagtgcaaatacatc

SEQ ID NO: 280668 - DNA, 15 bp, Homo sapiens
tcagtgcaaatacat

SEQ ID NO: 280669 - DNA, 15 bp, Homo sapiens
ttcagtgcaaataca

SEQ ID NO: 280670 - DNA, 15 bp, Homo sapiens
cttcagtgcaaatac

SEQ ID NO: 280671 - DNA, 15 bp, Homo sapiens
tcttcagtgcaaata

SEQ ID NO: 280672 - DNA, 15 bp, Homo sapiens
atcttcagtgcaaat

SEQ ID NO: 280673 - DNA, 15 bp, Homo sapiens
catcttcagtgcaaa

SEQ ID NO: 280674 - DNA, 15 bp, Homo sapiens
acatcttcagtgcaa

SEQ ID NO: 280675 - DNA, 15 bp, Homo sapiens
gacatcttcagtgca

SEQ ID NO: 280676 - DNA, 15 bp, Homo sapiens
tgacatcttcagtgc

SEQ ID NO: 280677 - DNA, 15 bp, Homo sapiens
ttgacatcttcagtg

SEQ ID NO: 280678 - DNA, 15 bp, Homo sapiens
cttgacatcttcagt

SEQ ID NO: 280679 - DNA, 15 bp, Homo sapiens
acttgacatcttcag

SEQ ID NO: 280680 - DNA, 15 bp, Homo sapiens
tacttgacatcttca

SEQ ID NO: 280681 - DNA, 15 bp, Homo sapiens
ctacttgacatcttc

SEQ ID NO: 280682 - DNA, 15 bp, Homo sapiens
actacttgacatctt

SEQ ID NO: 280683 - DNA, 15 bp, Homo sapiens
aactacttgacatct

SEQ ID NO: 280684 - DNA, 15 bp, Homo sapiens
taactacttgacatc

SEQ ID NO: 280685 - DNA, 15 bp, Homo sapiens
ttaactacttgacat

SEQ ID NO: 280686 - DNA, 15 bp, Homo sapiens
cttaactacttgaca

SEQ ID NO: 280687 - DNA, 15 bp, Homo sapiens
tcttaactacttgac

SEQ ID NO: 280688 - DNA, 15 bp, Homo sapiens
atcttaactacttga

SEQ ID NO: 280689 - DNA, 15 bp, Homo sapiens
catcttaactacttg

SEQ ID NO: 280690 - DNA, 15 bp, Homo sapiens
tcatcttaactactt

SEQ ID NO: 280691 - DNA, 15 bp, Homo sapiens
gtcatcttaactact

SEQ ID NO: 280692 - DNA, 15 bp, Homo sapiens
agtcatcttaactac

SEQ ID NO: 280693 - DNA, 15 bp, Homo sapiens
aagtcatcttaacta

SEQ ID NO: 280694 - DNA, 15 bp, Homo sapiens
caagtcatcttaact

SEQ ID NO: 280695 - DNA, 15 bp, Homo sapiens
tcaagtcatcttaac

SEQ ID NO: 280696 - DNA, 15 bp, Homo sapiens
atcaagtcatcttaa

SEQ ID NO: 280697 - DNA, 15 bp, Homo sapiens
catcaagtcatctta

SEQ ID NO: 280698 - DNA, 15 bp, Homo sapiens
ccatcaagtcatctt

SEQ ID NO: 280699 - DNA, 15 bp, Homo sapiens
cccatcaagtcatct

SEQ ID NO: 280700 - DNA, 15 bp, Homo sapiens
tcccatcaagtcatc

SEQ ID NO: 280701 - DNA, 15 bp, Homo sapiens
ttcccatcaagtcat

SEQ ID NO: 280702 - DNA, 15 bp, Homo sapiens
attcccatcaagtca

SEQ ID NO: 280703 - DNA, 15 bp, Homo sapiens
aattcccatcaagtc

SEQ ID NO: 280704 - DNA, 15 bp, Homo sapiens
aaattcccatcaagt

SEQ ID NO: 280705 - DNA, 15 bp, Homo sapiens
caaattcccatcaag

SEQ ID NO: 280706 - DNA, 15 bp, Homo sapiens
gcaaattcccatcaa

SEQ ID NO: 280707 - DNA, 15 bp, Homo sapiens
tgcaaattcccatca

SEQ ID NO: 280708 - DNA, 15 bp, Homo sapiens
ttgcaaattcccatc

SEQ ID NO: 280709 - DNA, 15 bp, Homo sapiens
gttgcaaattcccat

SEQ ID NO: 280710 - DNA, 15 bp, Homo sapiens
agttgcaaattccca

SEQ ID NO: 280711 - DNA, 15 bp, Homo sapiens
aagttgcaaattccc

SEQ ID NO: 280712 - DNA, 15 bp, Homo sapiens
gaagttgcaaattcc

SEQ ID NO: 280713 - DNA, 15 bp, Homo sapiens
agaagttgcaaattc

SEQ ID NO: 280714 - DNA, 15 bp, Homo sapiens
cagaagttgcaaatt

SEQ ID NO: 280715 - DNA, 15 bp, Homo sapiens
ccagaagttgcaaat

SEQ ID NO: 280716 - DNA, 15 bp, Homo sapiens
cccagaagttgcaaa

SEQ ID NO: 280717 - DNA, 15 bp, Homo sapiens
tcccagaagttgcaa

SEQ ID NO: 280718 - DNA, 15 bp, Homo sapiens
ctcccagaagttgca

SEQ ID NO: 280719 - DNA, 15 bp, Homo sapiens
cctcccagaagttgc

SEQ ID NO: 280720 - DNA, 15 bp, Homo sapiens
ccctcccagaagttg

SEQ ID NO: 280721 - DNA, 15 bp, Homo sapiens
accctcccagaagtt

SEQ ID NO: 280722 - DNA, 15 bp, Homo sapiens
caccctcccagaagt

SEQ ID NO: 280723 - DNA, 15 bp, Homo sapiens
tcaccctcccagaag

SEQ ID NO: 280724 - DNA, 15 bp, Homo sapiens
gtcaccctcccagaa

SEQ ID NO: 280725 - DNA, 15 bp, Homo sapiens
tgtcaccctcccaga

SEQ ID NO: 280726 - DNA, 15 bp, Homo sapiens
ctgtcaccctcccag

SEQ ID NO: 280727 - DNA, 15 bp, Homo sapiens
actgtcaccctccca

SEQ ID NO: 280728 - DNA, 15 bp, Homo sapiens
aactgtcaccctccc

SEQ ID NO: 280729 - DNA, 15 bp, Homo sapiens
aaactgtcaccctcc

SEQ ID NO: 280730 - DNA, 15 bp, Homo sapiens
gaaactgtcaccctc

SEQ ID NO: 280731 - DNA, 15 bp, Homo sapiens
ggaaactgtcaccct

SEQ ID NO: 280732 - DNA, 15 bp, Homo sapiens
gggaaactgtcaccc

SEQ ID NO: 280733 - DNA, 15 bp, Homo sapiens
tgggaaactgtcacc

SEQ ID NO: 280734 - DNA, 15 bp, Homo sapiens
gtgggaaactgtcac

SEQ ID NO: 280735 - DNA, 15 bp, Homo sapiens
tgtgggaaactgtca

SEQ ID NO: 280736 - DNA, 15 bp, Homo sapiens
ctgtgggaaactgtc

SEQ ID NO: 280737 - DNA, 15 bp, Homo sapiens
tctgtgggaaactgt

SEQ ID NO: 280738 - DNA, 15 bp, Homo sapiens
atctgtgggaaactg

SEQ ID NO: 280739 - DNA, 15 bp, Homo sapiens
catctgtgggaaact

SEQ ID NO: 280740 - DNA, 15 bp, Homo sapiens
tcatctgtgggaaac

SEQ ID NO: 280741 - DNA, 15 bp, Homo sapiens
ctcatctgtgggaaa

SEQ ID NO: 280742 - DNA, 15 bp, Homo sapiens
cctcatctgtgggaa

SEQ ID NO: 280743 - DNA, 15 bp, Homo sapiens
ccctcatctgtggga

SEQ ID NO: 280744 - DNA, 15 bp, Homo sapiens
accctcatctgtggg

SEQ ID NO: 280745 - DNA, 15 bp, Homo sapiens
gaccctcatctgtgg

SEQ ID NO: 280746 - DNA, 15 bp, Homo sapiens
agaccctcatctgtg

SEQ ID NO: 280747 - DNA, 15 bp, Homo sapiens
cagaccctcatctgt

SEQ ID NO: 280748 - DNA, 15 bp, Homo sapiens
tcagaccctcatctg

SEQ ID NO: 280749 - DNA, 15 bp, Homo sapiens
ctcagaccctcatct

SEQ ID NO: 280750 - DNA, 15 bp, Homo sapiens
gctcagaccctcatc

SEQ ID NO: 280751 - DNA, 15 bp, Homo sapiens
ggctcagaccctcat

SEQ ID NO: 280752 - DNA, 15 bp, Homo sapiens
tggctcagaccctca

SEQ ID NO: 280753 - DNA, 15 bp, Homo sapiens
atggctcagaccctc

SEQ ID NO: 280754 - DNA, 15 bp, Homo sapiens
aatggctcagaccct

SEQ ID NO: 280755 - DNA, 15 bp, Homo sapiens
gaatggctcagaccc

SEQ ID NO: 280756 - DNA, 15 bp, Homo sapiens
agaatggctcagacc

SEQ ID NO: 280757 - DNA, 15 bp, Homo sapiens
aagaatggctcagac

SEQ ID NO: 280758 - DNA, 15 bp, Homo sapiens
caagaatggctcaga

SEQ ID NO: 280759 - DNA, 15 bp, Homo sapiens
gcaagaatggctcag

SEQ ID NO: 280760 - DNA, 15 bp, Homo sapiens
agcaagaatggctca

SEQ ID NO: 280761 - DNA, 15 bp, Homo sapiens
tagcaagaatggctc

SEQ ID NO: 280762 - DNA, 15 bp, Homo sapiens
atagcaagaatggct

SEQ ID NO: 280763 - DNA, 15 bp, Homo sapiens
catagcaagaatggc

SEQ ID NO: 280764 - DNA, 15 bp, Homo sapiens
ccatagcaagaatgg

SEQ ID NO: 280765 - DNA, 15 bp, Homo sapiens
accatagcaagaatg

SEQ ID NO: 280766 - DNA, 15 bp, Homo sapiens
aaccatagcaagaat

SEQ ID NO: 280767 - DNA, 15 bp, Homo sapiens
caaccatagcaagaa

SEQ ID NO: 280768 - DNA, 15 bp, Homo sapiens
acaaccatagcaaga

SEQ ID NO: 280769 - DNA, 15 bp, Homo sapiens
tacaaccatagcaag

SEQ ID NO: 280770 - DNA, 15 bp, Homo sapiens
ctacaaccatagcaa

SEQ ID NO: 280771 - DNA, 15 bp, Homo sapiens
cctacaaccatagca

SEQ ID NO: 280772 - DNA, 15 bp, Homo sapiens
tcctacaaccatagc

SEQ ID NO: 280773 - DNA, 15 bp, Homo sapiens
atcctacaaccatag

SEQ ID NO: 280774 - DNA, 15 bp, Homo sapiens
gatcctacaaccata

SEQ ID NO: 280775 - DNA, 15 bp, Homo sapiens
ggatcctacaaccat

SEQ ID NO: 280776 - DNA, 15 bp, Homo sapiens
aggatcctacaacca

SEQ ID NO: 280777 - DNA, 15 bp, Homo sapiens
aaggatcctacaacc

SEQ ID NO: 280778 - DNA, 15 bp, Homo sapiens
aaaggatcctacaac

SEQ ID NO: 280779 - DNA, 15 bp, Homo sapiens
aaaaggatcctacaa

SEQ ID NO: 280780 - DNA, 15 bp, Homo sapiens
gaaaaggatcctaca

SEQ ID NO: 280781 - DNA, 15 bp, Homo sapiens
agaaaaggatcctac

SEQ ID NO: 280782 - DNA, 15 bp, Homo sapiens
gagaaaaggatccta

SEQ ID NO: 280783 - DNA, 15 bp, Homo sapiens
tgagaaaaggatcct

SEQ ID NO: 280784 - DNA, 15 bp, Homo sapiens
ttgagaaaaggatcc

SEQ ID NO: 280785 - DNA, 15 bp, Homo sapiens
attgagaaaaggatc

SEQ ID NO: 280786 - DNA, 15 bp, Homo sapiens
aattgagaaaaggat

SEQ ID NO: 280787 - DNA, 15 bp, Homo sapiens
caattgagaaaagga

SEQ ID NO: 280788 - DNA, 15 bp, Homo sapiens
ccaattgagaaaagg

SEQ ID NO: 280789 - DNA, 15 bp, Homo sapiens
cccaattgagaaaag

SEQ ID NO: 280790 - DNA, 15 bp, Homo sapiens
acccaattgagaaaa

SEQ ID NO: 280791 - DNA, 15 bp, Homo sapiens
aacccaattgagaaa

SEQ ID NO: 280792 - DNA, 15 bp, Homo sapiens
aaacccaattgagaa

SEQ ID NO: 280793 - DNA, 15 bp, Homo sapiens
gaaacccaattgaga

SEQ ID NO: 280794 - DNA, 15 bp, Homo sapiens
ggaaacccaattgag

SEQ ID NO: 280795 - DNA, 15 bp, Homo sapiens
tggaaacccaattga

SEQ ID NO: 280796 - DNA, 15 bp, Homo sapiens
ttggaaacccaattg

SEQ ID NO: 280797 - DNA, 15 bp, Homo sapiens
attggaaacccaatt

SEQ ID NO: 280798 - DNA, 15 bp, Homo sapiens
cattggaaacccaat

SEQ ID NO: 280799 - DNA, 15 bp, Homo sapiens
gcattggaaacccaa

SEQ ID NO: 280800 - DNA, 15 bp, Homo sapiens
agcattggaaaccca

SEQ ID NO: 280801 - DNA, 15 bp, Homo sapiens
aagcattggaaaccc

SEQ ID NO: 280802 - DNA, 15 bp, Homo sapiens
aaagcattggaaacc

SEQ ID NO: 280803 - DNA, 15 bp, Homo sapiens
caaagcattggaaac

SEQ ID NO: 280804 - DNA, 15 bp, Homo sapiens
tcaaagcattggaaa

SEQ ID NO: 280805 - DNA, 15 bp, Homo sapiens
atcaaagcattggaa

SEQ ID NO: 280806 - DNA, 15 bp, Homo sapiens
gatcaaagcattgga

SEQ ID NO: 280807 - DNA, 15 bp, Homo sapiens
agatcaaagcattgg

SEQ ID NO: 280808 - DNA, 15 bp, Homo sapiens
aagatcaaagcattg

SEQ ID NO: 280809 - DNA, 15 bp, Homo sapiens
taagatcaaagcatt

SEQ ID NO: 280810 - DNA, 15 bp, Homo sapiens
gtaagatcaaagcat

SEQ ID NO: 280811 - DNA, 15 bp, Homo sapiens
agtaagatcaaagca

SEQ ID NO: 280812 - DNA, 15 bp, Homo sapiens
cagtaagatcaaagc

SEQ ID NO: 280813 - DNA, 15 bp, Homo sapiens
ccagtaagatcaaag

SEQ ID NO: 280814 - DNA, 15 bp, Homo sapiens
tccagtaagatcaaa

SEQ ID NO: 280815 - DNA, 15 bp, Homo sapiens
ctccagtaagatcaa

SEQ ID NO: 280816 - DNA, 15 bp, Homo sapiens
cctccagtaagatca

SEQ ID NO: 280817 - DNA, 15 bp, Homo sapiens
acctccagtaagatc

SEQ ID NO: 280818 - DNA, 15 bp, Homo sapiens
gacctccagtaagat

SEQ ID NO: 280819 - DNA, 15 bp, Homo sapiens
tgacctccagtaaga

SEQ ID NO: 280820 - DNA, 15 bp, Homo sapiens
ctgacctccagtaag

SEQ ID NO: 280821 - DNA, 15 bp, Homo sapiens
tctgacctccagtaa

SEQ ID NO: 280822 - DNA, 15 bp, Homo sapiens
atctgacctccagta

SEQ ID NO: 280823 - DNA, 15 bp, Homo sapiens
aatctgacctccagt

SEQ ID NO: 280824 - DNA, 15 bp, Homo sapiens
taatctgacctccag

SEQ ID NO: 280825 - DNA, 15 bp, Homo sapiens
ctaatctgacctcca

SEQ ID NO: 280826 - DNA, 15 bp, Homo sapiens
tctaatctgacctcc

SEQ ID NO: 280827 - DNA, 15 bp, Homo sapiens
ttctaatctgacctc

SEQ ID NO: 280828 - DNA, 15 bp, Homo sapiens
tttctaatctgacct

SEQ ID NO: 280829 - DNA, 15 bp, Homo sapiens
ctttctaatctgacc

SEQ ID NO: 280830 - DNA, 15 bp, Homo sapiens
gctttctaatctgac

SEQ ID NO: 280831 - DNA, 15 bp, Homo sapiens
tgctttctaatctga

SEQ ID NO: 280832 - DNA, 15 bp, Homo sapiens
atgctttctaatctg

SEQ ID NO: 280833 - DNA, 15 bp, Homo sapiens
catgctttctaatct

SEQ ID NO: 280834 - DNA, 15 bp, Homo sapiens
tcatgctttctaatc

SEQ ID NO: 280835 - DNA, 15 bp, Homo sapiens
atcatgctttctaat

SEQ ID NO: 280836 - DNA, 15 bp, Homo sapiens
catcatgctttctaa

SEQ ID NO: 280837 - DNA, 15 bp, Homo sapiens
gcatcatgctttcta

SEQ ID NO: 280838 - DNA, 15 bp, Homo sapiens
agcatcatgctttct

SEQ ID NO: 280839 - DNA, 15 bp, Homo sapiens
tagcatcatgctttc

SEQ ID NO: 280840 - DNA, 15 bp, Homo sapiens
atagcatcatgcttt

SEQ ID NO: 280841 - DNA, 15 bp, Homo sapiens
gatagcatcatgctt

SEQ ID NO: 280842 - DNA, 15 bp, Homo sapiens
ggatagcatcatgct

SEQ ID NO: 280843 - DNA, 15 bp, Homo sapiens
aggatagcatcatgc

SEQ ID NO: 280844 - DNA, 15 bp, Homo sapiens
aaggatagcatcatg

SEQ ID NO: 280845 - DNA, 15 bp, Homo sapiens
aaaggatagcatcat

SEQ ID NO: 280846 - DNA, 15 bp, Homo sapiens
gaaaggatagcatca

SEQ ID NO: 280847 - DNA, 15 bp, Homo sapiens
tgaaaggatagcatc

SEQ ID NO: 280848 - DNA, 15 bp, Homo sapiens
gtgaaaggatagcat

SEQ ID NO: 280849 - DNA, 15 bp, Homo sapiens
ggtgaaaggatagca

SEQ ID NO: 280850 - DNA, 15 bp, Homo sapiens
aggtgaaaggatagc

SEQ ID NO: 280851 - DNA, 15 bp, Homo sapiens
caggtgaaaggatag

SEQ ID NO: 280852 - DNA, 15 bp, Homo sapiens
gcaggtgaaaggata

SEQ ID NO: 280853 - DNA, 15 bp, Homo sapiens
ggcaggtgaaaggat

SEQ ID NO: 280854 - DNA, 15 bp, Homo sapiens
tggcaggtgaaagga

SEQ ID NO: 280855 - DNA, 15 bp, Homo sapiens
ttggcaggtgaaagg

SEQ ID NO: 280856 - DNA, 15 bp, Homo sapiens
attggcaggtgaaag

SEQ ID NO: 280857 - DNA, 15 bp, Homo sapiens
gattggcaggtgaaa

SEQ ID NO: 280858 - DNA, 15 bp, Homo sapiens
cgattggcaggtgaa

SEQ ID NO: 280859 - DNA, 15 bp, Homo sapiens
ccgattggcaggtga

SEQ ID NO: 280860 - DNA, 15 bp, Homo sapiens
cccgattggcaggtg

SEQ ID NO: 280861 - DNA, 15 bp, Homo sapiens
acccgattggcaggt

SEQ ID NO: 280862 - DNA, 15 bp, Homo sapiens
tacccgattggcagg

SEQ ID NO: 280863 - DNA, 15 bp, Homo sapiens
atacccgattggcag

SEQ ID NO: 280864 - DNA, 15 bp, Homo sapiens
aatacccgattggca

SEQ ID NO: 280865 - DNA, 15 bp, Homo sapiens
gaatacccgattggc

SEQ ID NO: 280866 - DNA, 15 bp, Homo sapiens
tgaatacccgattgg

SEQ ID NO: 280867 - DNA, 15 bp, Homo sapiens
ctgaatacccgattg

SEQ ID NO: 280868 - DNA, 15 bp, Homo sapiens
gctgaatacccgatt

SEQ ID NO: 280869 - DNA, 15 bp, Homo sapiens
agctgaatacccgat

SEQ ID NO: 280870 - DNA, 15 bp, Homo sapiens
cagctgaatacccga

SEQ ID NO: 280871 - DNA, 15 bp, Homo sapiens
tcagctgaatacccg

SEQ ID NO: 280872 - DNA, 15 bp, Homo sapiens
ttcagctgaataccc

SEQ ID NO: 280873 - DNA, 15 bp, Homo sapiens
cttcagctgaatacc

SEQ ID NO: 280874 - DNA, 15 bp, Homo sapiens
gcttcagctgaatac

SEQ ID NO: 280875 - DNA, 15 bp, Homo sapiens
tgcttcagctgaata

SEQ ID NO: 280876 - DNA, 15 bp, Homo sapiens
atgcttcagctgaat

SEQ ID NO: 280877 - DNA, 15 bp, Homo sapiens
aatgcttcagctgaa

SEQ ID NO: 280878 - DNA, 15 bp, Homo sapiens
caatgcttcagctga

SEQ ID NO: 280879 - DNA, 15 bp, Homo sapiens
gcaatgcttcagctg

SEQ ID NO: 280880 - DNA, 15 bp, Homo sapiens
tgcaatgcttcagct

SEQ ID NO: 280881 - DNA, 15 bp, Homo sapiens
gtgcaatgcttcagc

SEQ ID NO: 280882 - DNA, 15 bp, Homo sapiens
cgtgcaatgcttcag

SEQ ID NO: 280883 - DNA, 15 bp, Homo sapiens
gcgtgcaatgcttca

SEQ ID NO: 280884 - DNA, 15 bp, Homo sapiens
agcgtgcaatgcttc

SEQ ID NO: 280885 - DNA, 15 bp, Homo sapiens
cagcgtgcaatgctt

SEQ ID NO: 280886 - DNA, 15 bp, Homo sapiens
ccagcgtgcaatgct

SEQ ID NO: 280887 - DNA, 15 bp, Homo sapiens
accagcgtgcaatgc

SEQ ID NO: 280888 - DNA, 15 bp, Homo sapiens
caccagcgtgcaatg

SEQ ID NO: 280889 - DNA, 15 bp, Homo sapiens
gcaccagcgtgcaat

SEQ ID NO: 280890 - DNA, 15 bp, Homo sapiens
agcaccagcgtgcaa

SEQ ID NO: 280891 - DNA, 15 bp, Homo sapiens
aagcaccagcgtgca

SEQ ID NO: 280892 - DNA, 15 bp, Homo sapiens
gaagcaccagcgtgc

SEQ ID NO: 280893 - DNA, 15 bp, Homo sapiens
agaagcaccagcgtg

SEQ ID NO: 280894 - DNA, 15 bp, Homo sapiens
aagaagcaccagcgt

SEQ ID NO: 280895 - DNA, 15 bp, Homo sapiens
caagaagcaccagcg

SEQ ID NO: 280896 - DNA, 15 bp, Homo sapiens
tcaagaagcaccagc

SEQ ID NO: 280897 - DNA, 15 bp, Homo sapiens
gtcaagaagcaccag

SEQ ID NO: 280898 - DNA, 15 bp, Homo sapiens
agtcaagaagcacca

SEQ ID NO: 280899 - DNA, 15 bp, Homo sapiens
aagtcaagaagcacc

SEQ ID NO: 280900 - DNA, 15 bp, Homo sapiens
caagtcaagaagcac

SEQ ID NO: 280901 - DNA, 15 bp, Homo sapiens
acaagtcaagaagca

SEQ ID NO: 280902 - DNA, 15 bp, Homo sapiens
cacaagtcaagaagc

SEQ ID NO: 280903 - DNA, 15 bp, Homo sapiens
tcacaagtcaagaag

SEQ ID NO: 280904 - DNA, 15 bp, Homo sapiens
ttcacaagtcaagaa

SEQ ID NO: 280905 - DNA, 15 bp, Homo sapiens
cttcacaagtcaaga

SEQ ID NO: 280906 - DNA, 15 bp, Homo sapiens
ccttcacaagtcaag

SEQ ID NO: 280907 - DNA, 15 bp, Homo sapiens
accttcacaagtcaa

SEQ ID NO: 280908 - DNA, 15 bp, Homo sapiens
taccttcacaagtca

SEQ ID NO: 280909 - DNA, 15 bp, Homo sapiens
ttaccttcacaagtc

SEQ ID NO: 280910 - DNA, 15 bp, Homo sapiens
cttaccttcacaagt

SEQ ID NO: 280911 - DNA, 15 bp, Homo sapiens
ccttaccttcacaag

SEQ ID NO: 280912 - DNA, 15 bp, Homo sapiens
tccttaccttcacaa

SEQ ID NO: 280913 - DNA, 15 bp, Homo sapiens
ctccttaccttcaca

SEQ ID NO: 280914 - DNA, 15 bp, Homo sapiens
tctccttaccttcac

SEQ ID NO: 280915 - DNA, 15 bp, Homo sapiens
atctccttaccttca

SEQ ID NO: 280916 - DNA, 15 bp, Homo sapiens
catctccttaccttc

SEQ ID NO: 280917 - DNA, 15 bp, Homo sapiens
ccatctccttacctt

SEQ ID NO: 280918 - DNA, 15 bp, Homo sapiens
tccatctccttacct

SEQ ID NO: 280919 - DNA, 15 bp, Homo sapiens
atccatctccttacc

SEQ ID NO: 280920 - DNA, 15 bp, Homo sapiens
catccatctccttac

SEQ ID NO: 280921 - DNA, 15 bp, Homo sapiens
ccatccatctcctta

SEQ ID NO: 280922 - DNA, 15 bp, Homo sapiens
tccatccatctcctt

SEQ ID NO: 280923 - DNA, 15 bp, Homo sapiens
ctccatccatctcct

SEQ ID NO: 280924 - DNA, 15 bp, Homo sapiens
cctccatccatctcc

SEQ ID NO: 280925 - DNA, 15 bp, Homo sapiens
tcctccatccatctc

SEQ ID NO: 280926 - DNA, 15 bp, Homo sapiens
ctcctccatccatct

SEQ ID NO: 280927 - DNA, 15 bp, Homo sapiens
actcctccatccatc

SEQ ID NO: 280928 - DNA, 15 bp, Homo sapiens
aactcctccatccat

SEQ ID NO: 280929 - DNA, 15 bp, Homo sapiens
gaactcctccatcca

SEQ ID NO: 280930 - DNA, 15 bp, Homo sapiens
tgaactcctccatcc

SEQ ID NO: 280931 - DNA, 15 bp, Homo sapiens
atgaactcctccatc

SEQ ID NO: 280932 - DNA, 15 bp, Homo sapiens
gatgaactcctccat

SEQ ID NO: 280933 - DNA, 15 bp, Homo sapiens
tgatgaactcctcca

SEQ ID NO: 280934 - DNA, 15 bp, Homo sapiens
atgatgaactcctcc

SEQ ID NO: 280935 - DNA, 15 bp, Homo sapiens
catgatgaactcctc

SEQ ID NO: 280936 - DNA, 15 bp, Homo sapiens
tcatgatgaactcct

SEQ ID NO: 280937 - DNA, 15 bp, Homo sapiens
gtcatgatgaactcc

SEQ ID NO: 280938 - DNA, 15 bp, Homo sapiens
ggtcatgatgaactc

SEQ ID NO: 280939 - DNA, 15 bp, Homo sapiens
gggtcatgatgaact

SEQ ID NO: 280940 - DNA, 15 bp, Homo sapiens
ggggtcatgatgaac

SEQ ID NO: 280941 - DNA, 15 bp, Homo sapiens
gggggtcatgatgaa

SEQ ID NO: 280942 - DNA, 15 bp, Homo sapiens
tgggggtcatgatga

SEQ ID NO: 280943 - DNA, 15 bp, Homo sapiens
ctgggggtcatgatg

SEQ ID NO: 280944 - DNA, 15 bp, Homo sapiens
tctgggggtcatgat

SEQ ID NO: 280945 - DNA, 15 bp, Homo sapiens
ctctgggggtcatga

SEQ ID NO: 280946 - DNA, 15 bp, Homo sapiens
cctctgggggtcatg

SEQ ID NO: 280947 - DNA, 15 bp, Homo sapiens
acctctgggggtcat

SEQ ID NO: 280948 - DNA, 15 bp, Homo sapiens
cacctctgggggtca

SEQ ID NO: 280949 - DNA, 15 bp, Homo sapiens
ccacctctgggggtc

SEQ ID NO: 280950 - DNA, 15 bp, Homo sapiens
tccacctctgggggt

SEQ ID NO: 280951 - DNA, 15 bp, Homo sapiens
ctccacctctggggg

SEQ ID NO: 280952 - DNA, 15 bp, Homo sapiens
cctccacctctgggg

SEQ ID NO: 280953 - DNA, 15 bp, Homo sapiens
gcctccacctctggg

SEQ ID NO: 280954 - DNA, 15 bp, Homo sapiens
ggcctccacctctgg

SEQ ID NO: 280955 - DNA, 15 bp, Homo sapiens
gggcctccacctctg

SEQ ID NO: 280956 - DNA, 15 bp, Homo sapiens
agggcctccacctct

SEQ ID NO: 280957 - DNA, 15 bp, Homo sapiens
cagggcctccacctc

SEQ ID NO: 280958 - DNA, 15 bp, Homo sapiens
ccagggcctccacct

SEQ ID NO: 280959 - DNA, 15 bp, Homo sapiens
gccagggcctccacc

SEQ ID NO: 280960 - DNA, 15 bp, Homo sapiens
ggccagggcctccac

SEQ ID NO: 280961 - DNA, 15 bp, Homo sapiens
tggccagggcctcca

SEQ ID NO: 280962 - DNA, 15 bp, Homo sapiens
atggccagggcctcc

SEQ ID NO: 280963 - DNA, 15 bp, Homo sapiens
aatggccagggcctc

SEQ ID NO: 280964 - DNA, 15 bp, Homo sapiens
aaatggccagggcct

SEQ ID NO: 280965 - DNA, 15 bp, Homo sapiens
caaatggccagggcc

SEQ ID NO: 280966 - DNA, 15 bp, Homo sapiens
tcaaatggccagggc

SEQ ID NO: 280967 - DNA, 15 bp, Homo sapiens
ctcaaatggccaggg

SEQ ID NO: 280968 - DNA, 15 bp, Homo sapiens
cctcaaatggccagg

SEQ ID NO: 280969 - DNA, 15 bp, Homo sapiens
tcctcaaatggccag

SEQ ID NO: 280970 - DNA, 15 bp, Homo sapiens
gtcctcaaatggcca

SEQ ID NO: 280971 - DNA, 15 bp, Homo sapiens
agtcctcaaatggcc

SEQ ID NO: 280972 - DNA, 15 bp, Homo sapiens
aagtcctcaaatggc

SEQ ID NO: 280973 - DNA, 15 bp, Homo sapiens
gaagtcctcaaatgg

SEQ ID NO: 280974 - DNA, 15 bp, Homo sapiens
agaagtcctcaaatg

SEQ ID NO: 280975 - DNA, 15 bp, Homo sapiens
tagaagtcctcaaat

SEQ ID NO: 280976 - DNA, 15 bp, Homo sapiens
ctagaagtcctcaaa

SEQ ID NO: 280977 - DNA, 15 bp, Homo sapiens
tctagaagtcctcaa

SEQ ID NO: 280978 - DNA, 15 bp, Homo sapiens
ctctagaagtcctca

SEQ ID NO: 280979 - DNA, 15 bp, Homo sapiens
actctagaagtcctc

SEQ ID NO: 280980 - DNA, 15 bp, Homo sapiens
cactctagaagtcct

SEQ ID NO: 280981 - DNA, 15 bp, Homo sapiens
ccactctagaagtcc

SEQ ID NO: 280982 - DNA, 15 bp, Homo sapiens
tccactctagaagtc

SEQ ID NO: 280983 - DNA, 15 bp, Homo sapiens
gtccactctagaagt

SEQ ID NO: 280984 - DNA, 15 bp, Homo sapiens
tgtccactctagaag

SEQ ID NO: 280985 - DNA, 15 bp, Homo sapiens
gtgtccactctagaa

SEQ ID NO: 280986 - DNA, 15 bp, Homo sapiens
agtgtccactctaga

SEQ ID NO: 280987 - DNA, 15 bp, Homo sapiens
gagtgtccactctag

SEQ ID NO: 280988 - DNA, 15 bp, Homo sapiens
tgagtgtccactcta

SEQ ID NO: 280989 - DNA, 15 bp, Homo sapiens
atgagtgtccactct

SEQ ID NO: 280990 - DNA, 15 bp, Homo sapiens
catgagtgtccactc

SEQ ID NO: 280991 - DNA, 15 bp, Homo sapiens
gcatgagtgtccact

SEQ ID NO: 280992 - DNA, 15 bp, Homo sapiens
tgcatgagtgtccac

SEQ ID NO: 280993 - DNA, 15 bp, Homo sapiens
ctgcatgagtgtcca

SEQ ID NO: 280994 - DNA, 15 bp, Homo sapiens
tctgcatgagtgtcc

SEQ ID NO: 280995 - DNA, 15 bp, Homo sapiens
gtctgcatgagtgtc

SEQ ID NO: 280996 - DNA, 15 bp, Homo sapiens
agtctgcatgagtgt

SEQ ID NO: 280997 - DNA, 15 bp, Homo sapiens
gagtctgcatgagtg

SEQ ID NO: 280998 - DNA, 15 bp, Homo sapiens
ggagtctgcatgagt

SEQ ID NO: 280999 - DNA, 15 bp, Homo sapiens
aggagtctgcatgag

SEQ ID NO: 281000 - DNA, 15 bp, Homo sapiens
aaggagtctgcatga

SEQ ID NO: 281001 - DNA, 15 bp, Homo sapiens
caaggagtctgcatg

SEQ ID NO: 281002 - DNA, 15 bp, Homo sapiens
ccaaggagtctgcat

SEQ ID NO: 281003 - DNA, 15 bp, Homo sapiens
cccaaggagtctgca

SEQ ID NO: 281004 - DNA, 15 bp, Homo sapiens
acccaaggagtctgc

SEQ ID NO: 281005 - DNA, 15 bp, Homo sapiens
cacccaaggagtctg

SEQ ID NO: 281006 - DNA, 15 bp, Homo sapiens
gcacccaaggagtct

SEQ ID NO: 281007 - DNA, 15 bp, Homo sapiens
ggcacccaaggagtc

SEQ ID NO: 281008 - DNA, 15 bp, Homo sapiens
tggcacccaaggagt

SEQ ID NO: 281009 - DNA, 15 bp, Homo sapiens
ctggcacccaaggag

SEQ ID NO: 281010 - DNA, 15 bp, Homo sapiens
gctggcacccaagga

SEQ ID NO: 281011 - DNA, 15 bp, Homo sapiens
ggctggcacccaagg

SEQ ID NO: 281012 - DNA, 15 bp, Homo sapiens
cggctggcacccaag

SEQ ID NO: 281013 - DNA, 15 bp, Homo sapiens
tcggctggcacccaa

SEQ ID NO: 281014 - DNA, 15 bp, Homo sapiens
ttcggctggcaccca

SEQ ID NO: 281015 - DNA, 15 bp, Homo sapiens
attcggctggcaccc

SEQ ID NO: 281016 - DNA, 15 bp, Homo sapiens
cattcggctggcacc

SEQ ID NO: 281017 - DNA, 15 bp, Homo sapiens
ccattcggctggcac

SEQ ID NO: 281018 - DNA, 15 bp, Homo sapiens
tccattcggctggca

SEQ ID NO: 281019 - DNA, 15 bp, Homo sapiens
gtccattcggctggc

SEQ ID NO: 281020 - DNA, 15 bp, Homo sapiens
agtccattcggctgg

SEQ ID NO: 281021 - DNA, 15 bp, Homo sapiens
cagtccattcggctg

SEQ ID NO: 281022 - DNA, 15 bp, Homo sapiens
ccagtccattcggct

SEQ ID NO: 281023 - DNA, 15 bp, Homo sapiens
accagtccattcggc

SEQ ID NO: 281024 - DNA, 15 bp, Homo sapiens
caccagtccattcgg

SEQ ID NO: 281025 - DNA, 15 bp, Homo sapiens
gcaccagtccattcg

SEQ ID NO: 281026 - DNA, 15 bp, Homo sapiens
agcaccagtccattc

SEQ ID NO: 281027 - DNA, 15 bp, Homo sapiens
gagcaccagtccatt

SEQ ID NO: 281028 - DNA, 15 bp, Homo sapiens
ggagcaccagtccat

SEQ ID NO: 281029 - DNA, 15 bp, Homo sapiens
tggagcaccagtcca

SEQ ID NO: 281030 - DNA, 15 bp, Homo sapiens
ctggagcaccagtcc

SEQ ID NO: 281031 - DNA, 15 bp, Homo sapiens
tctggagcaccagtc

SEQ ID NO: 281032 - DNA, 15 bp, Homo sapiens
ctctggagcaccagt

SEQ ID NO: 281033 - DNA, 15 bp, Homo sapiens
actctggagcaccag

SEQ ID NO: 281034 - DNA, 15 bp, Homo sapiens
cactctggagcacca

SEQ ID NO: 281035 - DNA, 15 bp, Homo sapiens
tcactctggagcacc

SEQ ID NO: 281036 - DNA, 15 bp, Homo sapiens
ctcactctggagcac

SEQ ID NO: 281037 - DNA, 15 bp, Homo sapiens
gctcactctggagca

SEQ ID NO: 281038 - DNA, 15 bp, Homo sapiens
ggctcactctggagc

SEQ ID NO: 281039 - DNA, 15 bp, Homo sapiens
aggctcactctggag

SEQ ID NO: 281040 - DNA, 15 bp, Homo sapiens
caggctcactctgga

SEQ ID NO: 281041 - DNA, 15 bp, Homo sapiens
ccaggctcactctgg

SEQ ID NO: 281042 - DNA, 15 bp, Homo sapiens
cccaggctcactctg

SEQ ID NO: 281043 - DNA, 15 bp, Homo sapiens
acccaggctcactct

SEQ ID NO: 281044 - DNA, 15 bp, Homo sapiens
cacccaggctcactc

SEQ ID NO: 281045 - DNA, 15 bp, Homo sapiens
tcacccaggctcact

SEQ ID NO: 281046 - DNA, 15 bp, Homo sapiens
gtcacccaggctcac

SEQ ID NO: 281047 - DNA, 15 bp, Homo sapiens
tgtcacccaggctca

SEQ ID NO: 281048 - DNA, 15 bp, Homo sapiens
ctgtcacccaggctc

SEQ ID NO: 281049 - DNA, 15 bp, Homo sapiens
atctgtcacccaggc

SEQ ID NO: 281050 - DNA, 15 bp, Homo sapiens
catctgtcacccagg

SEQ ID NO: 281051 - DNA, 15 bp, Homo sapiens
tcatctgtcacccag

SEQ ID NO: 281052 - DNA, 15 bp, Homo sapiens
atcatctgtcaccca

SEQ ID NO: 281053 - DNA, 15 bp, Homo sapiens
tatcatctgtcaccc

SEQ ID NO: 281054 - DNA, 15 bp, Homo sapiens
ttatcatctgtcacc

SEQ ID NO: 281055 - DNA, 15 bp, Homo sapiens
tttatcatctgtcac

SEQ ID NO: 281056 - DNA, 15 bp, Homo sapiens
ctttatcatctgtca

SEQ ID NO: 281057 - DNA, 15 bp, Homo sapiens
tctttatcatctgtc

SEQ ID NO: 281058 - DNA, 15 bp, Homo sapiens
gtctttatcatctgt

SEQ ID NO: 281059 - DNA, 15 bp, Homo sapiens
ggtctttatcatctg

SEQ ID NO: 281060 - DNA, 15 bp, Homo sapiens
aggtctttatcatct

SEQ ID NO: 281061 - DNA, 15 bp, Homo sapiens
aaggtctttatcatc

SEQ ID NO: 281062 - DNA, 15 bp, Homo sapiens
caaggtctttatcat

SEQ ID NO: 281063 - DNA, 15 bp, Homo sapiens
gcaaggtctttatca

SEQ ID NO: 281064 - DNA, 15 bp, Homo sapiens
tgcaaggtctttatc

SEQ ID NO: 281065 - DNA, 15 bp, Homo sapiens
ctgcaaggtctttat

SEQ ID NO: 281066 - DNA, 15 bp, Homo sapiens
tctgcaaggtcttta

SEQ ID NO: 281067 - DNA, 15 bp, Homo sapiens
ttctgcaaggtcttt

SEQ ID NO: 281068 - DNA, 15 bp, Homo sapiens
cttctgcaaggtctt

SEQ ID NO: 281069 - DNA, 15 bp, Homo sapiens
ccttctgcaaggtct

SEQ ID NO: 281070 - DNA, 15 bp, Homo sapiens
tccttctgcaaggtc

SEQ ID NO: 281071 - DNA, 15 bp, Homo sapiens
atccttctgcaaggt

SEQ ID NO: 281072 - DNA, 15 bp, Homo sapiens
catccttctgcaagg

SEQ ID NO: 281073 - DNA, 15 bp, Homo sapiens
tcatccttctgcaag

SEQ ID NO: 281074 - DNA, 15 bp, Homo sapiens
ttcatccttctgcaa

SEQ ID NO: 281075 - DNA, 15 bp, Homo sapiens
cttcatccttctgca

SEQ ID NO: 281076 - DNA, 15 bp, Homo sapiens
tcttcatccttctgc

SEQ ID NO: 281077 - DNA, 15 bp, Homo sapiens
ctcttcatccttctg

SEQ ID NO: 281078 - DNA, 15 bp, Homo sapiens
cctcttcatccttct

SEQ ID NO: 281079 - DNA, 15 bp, Homo sapiens
ccctcttcatccttc

SEQ ID NO: 281080 - DNA, 15 bp, Homo sapiens
gccctcttcatcctt

SEQ ID NO: 281081 - DNA, 15 bp, Homo sapiens
tgccctcttcatcct

SEQ ID NO: 281082 - DNA, 15 bp, Homo sapiens
gtgccctcttcatcc

SEQ ID NO: 281083 - DNA, 15 bp, Homo sapiens
tgtgccctcttcatc

SEQ ID NO: 281084 - DNA, 15 bp, Homo sapiens
ctgtgccctcttcat

SEQ ID NO: 281085 - DNA, 15 bp, Homo sapiens
tctgtgccctcttca

SEQ ID NO: 281086 - DNA, 15 bp, Homo sapiens
gtctgtgccctcttc

SEQ ID NO: 281087 - DNA, 15 bp, Homo sapiens
agtctgtgccctctt

SEQ ID NO: 281088 - DNA, 15 bp, Homo sapiens
tagtctgtgccctct

SEQ ID NO: 281089 - DNA, 15 bp, Homo sapiens
ctagtctgtgccctc

SEQ ID NO: 281090 - DNA, 15 bp, Homo sapiens
tctagtctgtgccct

SEQ ID NO: 281091 - DNA, 15 bp, Homo sapiens
ttctagtctgtgccc

SEQ ID NO: 281092 - DNA, 15 bp, Homo sapiens
gttctagtctgtgcc

SEQ ID NO: 281093 - DNA, 15 bp, Homo sapiens
agttctagtctgtgc

SEQ ID NO: 281094 - DNA, 15 bp, Homo sapiens
cagttctagtctgtg

SEQ ID NO: 281095 - DNA, 15 bp, Homo sapiens
gcagttctagtctgt

SEQ ID NO: 281096 - DNA, 15 bp, Homo sapiens
tgcagttctagtctg

SEQ ID NO: 281097 - DNA, 15 bp, Homo sapiens
ttgcagttctagtct

SEQ ID NO: 281098 - DNA, 15 bp, Homo sapiens
attgcagttctagtc

SEQ ID NO: 281099 - DNA, 15 bp, Homo sapiens
cattgcagttctagt

SEQ ID NO: 281100 - DNA, 15 bp, Homo sapiens
acattgcagttctag

SEQ ID NO: 281101 - DNA, 15 bp, Homo sapiens
aacattgcagttcta

SEQ ID NO: 281102 - DNA, 15 bp, Homo sapiens
caacattgcagttct

SEQ ID NO: 281103 - DNA, 15 bp, Homo sapiens
gcaacattgcagttc

SEQ ID NO: 281104 - DNA, 15 bp, Homo sapiens
tgcaacattgcagtt

SEQ ID NO: 281105 - DNA, 15 bp, Homo sapiens
ctgcaacattgcagt

SEQ ID NO: 281106 - DNA, 15 bp, Homo sapiens
gctgcaacattgcag

SEQ ID NO: 281107 - DNA, 15 bp, Homo sapiens
ggctgcaacattgca

SEQ ID NO: 281108 - DNA, 15 bp, Homo sapiens
tggctgcaacattgc

SEQ ID NO: 281109 - DNA, 15 bp, Homo sapiens
ctggctgcaacattg

SEQ ID NO: 281110 - DNA, 15 bp, Homo sapiens
actggctgcaacatt

SEQ ID NO: 281111 - DNA, 15 bp, Homo sapiens
aactggctgcaacat

SEQ ID NO: 281112 - DNA, 15 bp, Homo sapiens
gaactggctgcaaca

SEQ ID NO: 281113 - DNA, 15 bp, Homo sapiens
agaactggctgcaac

SEQ ID NO: 281114 - DNA, 15 bp, Homo sapiens
cagaactggctgcaa

SEQ ID NO: 281115 - DNA, 15 bp, Homo sapiens
gcagaactggctgca

SEQ ID NO: 281116 - DNA, 15 bp, Homo sapiens
ggcagaactggctgc

SEQ ID NO: 281117 - DNA, 15 bp, Homo sapiens
gggcagaactggctg

SEQ ID NO: 281118 - DNA, 15 bp, Homo sapiens
agggcagaactggct

SEQ ID NO: 281119 - DNA, 15 bp, Homo sapiens
cagggcagaactggc

SEQ ID NO: 281120 - DNA, 15 bp, Homo sapiens
tcagggcagaactgg

SEQ ID NO: 281121 - DNA, 15 bp, Homo sapiens
atcagggcagaactg

SEQ ID NO: 281122 - DNA, 15 bp, Homo sapiens
aatcagggcagaact

SEQ ID NO: 281123 - DNA, 15 bp, Homo sapiens
gaatcagggcagaac

SEQ ID NO: 281124 - DNA, 15 bp, Homo sapiens
ggaatcagggcagaa

SEQ ID NO: 281125 - DNA, 15 bp, Homo sapiens
aggaatcagggcaga

SEQ ID NO: 281126 - DNA, 15 bp, Homo sapiens
caggaatcagggcag

SEQ ID NO: 281127 - DNA, 15 bp, Homo sapiens
gcaggaatcagggca

SEQ ID NO: 281128 - DNA, 15 bp, Homo sapiens
tgcaggaatcagggc

SEQ ID NO: 281129 - DNA, 15 bp, Homo sapiens
ctgcaggaatcaggg

SEQ ID NO: 281130 - DNA, 15 bp, Homo sapiens
cctgcaggaatcagg

SEQ ID NO: 281131 - DNA, 15 bp, Homo sapiens
acctgcaggaatcag

SEQ ID NO: 281132 - DNA, 15 bp, Homo sapiens
cacctgcaggaatca

SEQ ID NO: 281133 - DNA, 15 bp, Homo sapiens
gcacctgcaggaatc

SEQ ID NO: 281134 - DNA, 15 bp, Homo sapiens
ggcacctgcaggaat

SEQ ID NO: 281135 - DNA, 15 bp, Homo sapiens
tggcacctgcaggaa

SEQ ID NO: 281136 - DNA, 15 bp, Homo sapiens
ttggcacctgcagga

SEQ ID NO: 281137 - DNA, 15 bp, Homo sapiens
gttggcacctgcagg

SEQ ID NO: 281138 - DNA, 15 bp, Homo sapiens
ggttggcacctgcag

SEQ ID NO: 281139 - DNA, 15 bp, Homo sapiens
gggttggcacctgca

SEQ ID NO: 281140 - DNA, 15 bp, Homo sapiens
agggttggcacctgc

SEQ ID NO: 281141 - DNA, 15 bp, Homo sapiens
cagggttggcacctg

SEQ ID NO: 281142 - DNA, 15 bp, Homo sapiens
tcagggttggcacct

SEQ ID NO: 281143 - DNA, 15 bp, Homo sapiens
ctcagggttggcacc

SEQ ID NO: 281144 - DNA, 15 bp, Homo sapiens
cctcagggttggcac

SEQ ID NO: 281145 - DNA, 15 bp, Homo sapiens
tcctcagggttggca

SEQ ID NO: 281146 - DNA, 15 bp, Homo sapiens
ttcctcagggttggc

SEQ ID NO: 281147 - DNA, 15 bp, Homo sapiens
tttcctcagggttgg

SEQ ID NO: 281148 - DNA, 15 bp, Homo sapiens
atttcctcagggttg

SEQ ID NO: 281149 - DNA, 15 bp, Homo sapiens
tatttcctcagggtt

SEQ ID NO: 281150 - DNA, 15 bp, Homo sapiens
ttatttcctcagggt

SEQ ID NO: 281151 - DNA, 15 bp, Homo sapiens
attatttcctcaggg

SEQ ID NO: 281152 - DNA, 15 bp, Homo sapiens
aattatttcctcagg

SEQ ID NO: 281153 - DNA, 15 bp, Homo sapiens
aaattatttcctcag

SEQ ID NO: 281154 - DNA, 15 bp, Homo sapiens
caaattatttcctca

SEQ ID NO: 281155 - DNA, 15 bp, Homo sapiens
acaaattatttcctc

SEQ ID NO: 281156 - DNA, 15 bp, Homo sapiens
aacaaattatttcct

SEQ ID NO: 281157 - DNA, 15 bp, Homo sapiens
gaacaaattatttcc

SEQ ID NO: 281158 - DNA, 15 bp, Homo sapiens
ggaacaaattatttc

SEQ ID NO: 281159 - DNA, 15 bp, Homo sapiens
tggaacaaattattt

SEQ ID NO: 281160 - DNA, 15 bp, Homo sapiens
ttggaacaaattatt

SEQ ID NO: 281161 - DNA, 15 bp, Homo sapiens
gttggaacaaattat

SEQ ID NO: 281162 - DNA, 15 bp, Homo sapiens
agttggaacaaatta

SEQ ID NO: 281163 - DNA, 15 bp, Homo sapiens
tagttggaacaaatt

SEQ ID NO: 281164 - DNA, 15 bp, Homo sapiens
atagttggaacaaat

SEQ ID NO: 281165 - DNA, 15 bp, Homo sapiens
tatagttggaacaaa

SEQ ID NO: 281166 - DNA, 15 bp, Homo sapiens
gtatagttggaacaa

SEQ ID NO: 281167 - DNA, 15 bp, Homo sapiens
agtatagttggaaca

SEQ ID NO: 281168 - DNA, 15 bp, Homo sapiens
tagtatagttggaac

SEQ ID NO: 281169 - DNA, 15 bp, Homo sapiens
atagtatagttggaa

SEQ ID NO: 281170 - DNA, 15 bp, Homo sapiens
aatagtatagttgga

SEQ ID NO: 281171 - DNA, 15 bp, Homo sapiens
caatagtatagttgg

SEQ ID NO: 281172 - DNA, 15 bp, Homo sapiens
gcaatagtatagttg

SEQ ID NO: 281173 - DNA, 15 bp, Homo sapiens
tgcaatagtatagtt

SEQ ID NO: 281174 - DNA, 15 bp, Homo sapiens
ttgcaatagtatagt

SEQ ID NO: 281175 - DNA, 15 bp, Homo sapiens
tttgcaatagtatag

SEQ ID NO: 281176 - DNA, 15 bp, Homo sapiens
atttgcaatagtata

SEQ ID NO: 281177 - DNA, 15 bp, Homo sapiens
gatttgcaatagtat

SEQ ID NO: 281178 - DNA, 15 bp, Homo sapiens
tgatttgcaatagta

SEQ ID NO: 281179 - DNA, 15 bp, Homo sapiens
atgatttgcaatagt

SEQ ID NO: 281180 - DNA, 15 bp, Homo sapiens
catgatttgcaatag

SEQ ID NO: 281181 - DNA, 15 bp, Homo sapiens
tcatgatttgcaata

SEQ ID NO: 281182 - DNA, 15 bp, Homo sapiens
ttcatgatttgcaat

SEQ ID NO: 281183 - DNA, 15 bp, Homo sapiens
cttcatgatttgcaa

SEQ ID NO: 281184 - DNA, 15 bp, Homo sapiens
acttcatgatttgca

SEQ ID NO: 281185 - DNA, 15 bp, Homo sapiens
aacttcatgatttgc

SEQ ID NO: 281186 - DNA, 15 bp, Homo sapiens
caacttcatgatttg

SEQ ID NO: 281187 - DNA, 15 bp, Homo sapiens
tcaacttcatgattt

SEQ ID NO: 281188 - DNA, 15 bp, Homo sapiens
atcaacttcatgatt

SEQ ID NO: 281189 - DNA, 15 bp, Homo sapiens
catcaacttcatgat

SEQ ID NO: 281190 - DNA, 15 bp, Homo sapiens
ccatcaacttcatga

SEQ ID NO: 281191 - DNA, 15 bp, Homo sapiens
gccatcaacttcatg

SEQ ID NO: 281192 - DNA, 15 bp, Homo sapiens
tgccatcaacttcat

SEQ ID NO: 281193 - DNA, 15 bp, Homo sapiens
atgccatcaacttca

SEQ ID NO: 281194 - DNA, 15 bp, Homo sapiens
gatgccatcaacttc

SEQ ID NO: 281195 - DNA, 15 bp, Homo sapiens
agatgccatcaactt

SEQ ID NO: 281196 - DNA, 15 bp, Homo sapiens
cagatgccatcaact

SEQ ID NO: 281197 - DNA, 15 bp, Homo sapiens
ccagatgccatcaac

SEQ ID NO: 281198 - DNA, 15 bp, Homo sapiens
cccagatgccatcaa

SEQ ID NO: 281199 - DNA, 15 bp, Homo sapiens
tcccagatgccatca

SEQ ID NO: 281200 - DNA, 15 bp, Homo sapiens
ttcccagatgccatc

SEQ ID NO: 281201 - DNA, 15 bp, Homo sapiens
tttcccagatgccat

SEQ ID NO: 281202 - DNA, 15 bp, Homo sapiens
gtttcccagatgcca

SEQ ID NO: 281203 - DNA, 15 bp, Homo sapiens
tgtttcccagatgcc

SEQ ID NO: 281204 - DNA, 15 bp, Homo sapiens
ttgtttcccagatgc

SEQ ID NO: 281205 - DNA, 15 bp, Homo sapiens
cttgtttcccagatg

SEQ ID NO: 281206 - DNA, 15 bp, Homo sapiens
gcttgtttcccagat

SEQ ID NO: 281207 - DNA, 15 bp, Homo sapiens
agcttgtttcccaga

SEQ ID NO: 281208 - DNA, 15 bp, Homo sapiens
cagcttgtttcccag

SEQ ID NO: 281209 - DNA, 15 bp, Homo sapiens
ccagcttgtttccca

SEQ ID NO: 281210 - DNA, 15 bp, Homo sapiens
tccagcttgtttccc

SEQ ID NO: 281211 - DNA, 15 bp, Homo sapiens
ctccagcttgtttcc

SEQ ID NO: 281212 - DNA, 15 bp, Homo sapiens
actccagcttgtttc

SEQ ID NO: 281213 - DNA, 15 bp, Homo sapiens
gactccagcttgttt

SEQ ID NO: 281214 - DNA, 15 bp, Homo sapiens
agactccagcttgtt

SEQ ID NO: 281215 - DNA, 15 bp, Homo sapiens
tagactccagcttgt

SEQ ID NO: 281216 - DNA, 15 bp, Homo sapiens
ttagactccagcttg

SEQ ID NO: 281217 - DNA, 15 bp, Homo sapiens
gttagactccagctt

SEQ ID NO: 281218 - DNA, 15 bp, Homo sapiens
agttagactccagct

SEQ ID NO: 281219 - DNA, 15 bp, Homo sapiens
gagttagactccagc

SEQ ID NO: 281220 - DNA, 15 bp, Homo sapiens
tgagttagactccag

SEQ ID NO: 281221 - DNA, 15 bp, Homo sapiens
atgagttagactcca

SEQ ID NO: 281222 - DNA, 15 bp, Homo sapiens
aatgagttagactcc

SEQ ID NO: 281223 - DNA, 15 bp, Homo sapiens
aaatgagttagactc

SEQ ID NO: 281224 - DNA, 15 bp, Homo sapiens
aaaatgagttagact

SEQ ID NO: 281225 - DNA, 15 bp, Homo sapiens
gaaaatgagttagac

SEQ ID NO: 281226 - DNA, 15 bp, Homo sapiens
agaaaatgagttaga

SEQ ID NO: 281227 - DNA, 15 bp, Homo sapiens
cagaaaatgagttag

SEQ ID NO: 281228 - DNA, 15 bp, Homo sapiens
acagaaaatgagtta

SEQ ID NO: 281229 - DNA, 15 bp, Homo sapiens
aacagaaaatgagtt

SEQ ID NO: 281230 - DNA, 15 bp, Homo sapiens
caacagaaaatgagt

SEQ ID NO: 281231 - DNA, 15 bp, Homo sapiens
acaacagaaaatgag

SEQ ID NO: 281232 - DNA, 15 bp, Homo sapiens
cacaacagaaaatga

SEQ ID NO: 281233 - DNA, 15 bp, Homo sapiens
ccacaacagaaaatg

SEQ ID NO: 281234 - DNA, 15 bp, Homo sapiens
gccacaacagaaaat

SEQ ID NO: 281235 - DNA, 15 bp, Homo sapiens
cgccacaacagaaaa

SEQ ID NO: 281236 - DNA, 15 bp, Homo sapiens
acgccacaacagaaa

SEQ ID NO: 281237 - DNA, 15 bp, Homo sapiens
cacgccacaacagaa

SEQ ID NO: 281238 - DNA, 15 bp, Homo sapiens
tcacgccacaacaga

SEQ ID NO: 281239 - DNA, 15 bp, Homo sapiens
ttcacgccacaacag

SEQ ID NO: 281240 - DNA, 15 bp, Homo sapiens
gttcacgccacaaca

SEQ ID NO: 281241 - DNA, 15 bp, Homo sapiens
agttcacgccacaac

SEQ ID NO: 281242 - DNA, 15 bp, Homo sapiens
aagttcacgccacaa

SEQ ID NO: 281243 - DNA, 15 bp, Homo sapiens
caagttcacgccaca

SEQ ID NO: 281244 - DNA, 15 bp, Homo sapiens
ccaagttcacgccac

SEQ ID NO: 281245 - DNA, 15 bp, Homo sapiens
gccaagttcacgcca

SEQ ID NO: 281246 - DNA, 15 bp, Homo sapiens
tgccaagttcacgcc

SEQ ID NO: 281247 - DNA, 15 bp, Homo sapiens
ttgccaagttcacgc

SEQ ID NO: 281248 - DNA, 15 bp, Homo sapiens
gttgccaagttcacg

SEQ ID NO: 281249 - DNA, 15 bp, Homo sapiens
agttgccaagttcac

SEQ ID NO: 281250 - DNA, 15 bp, Homo sapiens
gagttgccaagttca

SEQ ID NO: 281251 - DNA, 15 bp, Homo sapiens
agagttgccaagttc

SEQ ID NO: 281252 - DNA, 15 bp, Homo sapiens
cagagttgccaagtt

SEQ ID NO: 281253 - DNA, 15 bp, Homo sapiens
ccagagttgccaagt

SEQ ID NO: 281254 - DNA, 15 bp, Homo sapiens
accagagttgccaag

SEQ ID NO: 281255 - DNA, 15 bp, Homo sapiens
caccagagttgccaa

SEQ ID NO: 281256 - DNA, 15 bp, Homo sapiens
tcaccagagttgcca

SEQ ID NO: 281257 - DNA, 15 bp, Homo sapiens
gtcaccagagttgcc

SEQ ID NO: 281258 - DNA, 15 bp, Homo sapiens
tgtcaccagagttgc

SEQ ID NO: 281259 - DNA, 15 bp, Homo sapiens
ttgtcaccagagttg

SEQ ID NO: 281260 - DNA, 15 bp, Homo sapiens
attgtcaccagagtt

SEQ ID NO: 281261 - DNA, 15 bp, Homo sapiens
cattgtcaccagagt

SEQ ID NO: 281262 - DNA, 15 bp, Homo sapiens
ccattgtcaccagag

SEQ ID NO: 281263 - DNA, 15 bp, Homo sapiens
gccattgtcaccaga

SEQ ID NO: 281264 - DNA, 15 bp, Homo sapiens
ggccattgtcaccag

SEQ ID NO: 281265 - DNA, 15 bp, Homo sapiens
aggccattgtcacca

SEQ ID NO: 281266 - DNA, 15 bp, Homo sapiens
aaggccattgtcacc

SEQ ID NO: 281267 - DNA, 15 bp, Homo sapiens
caaggccattgtcac

SEQ ID NO: 281268 - DNA, 15 bp, Homo sapiens
tcaaggccattgtca

SEQ ID NO: 281269 - DNA, 15 bp, Homo sapiens
ctcaaggccattgtc

SEQ ID NO: 281270 - DNA, 15 bp, Homo sapiens
gctcaaggccattgt

SEQ ID NO: 281271 - DNA, 15 bp, Homo sapiens
agctcaaggccattg

SEQ ID NO: 281272 - DNA, 15 bp, Homo sapiens
aagctcaaggccatt

SEQ ID NO: 281273 - DNA, 15 bp, Homo sapiens
caagctcaaggccat

SEQ ID NO: 281274 - DNA, 15 bp, Homo sapiens
acaagctcaaggcca

SEQ ID NO: 281275 - DNA, 15 bp, Homo sapiens
aacaagctcaaggcc

SEQ ID NO: 281276 - DNA, 15 bp, Homo sapiens
caacaagctcaaggc

SEQ ID NO: 281277 - DNA, 15 bp, Homo sapiens
gcaacaagctcaagg

SEQ ID NO: 281278 - DNA, 15 bp, Homo sapiens
ggcaacaagctcaag

SEQ ID NO: 281279 - DNA, 15 bp, Homo sapiens
aggcaacaagctcaa

SEQ ID NO: 281280 - DNA, 15 bp, Homo sapiens
aaggcaacaagctca

SEQ ID NO: 281281 - DNA, 15 bp, Homo sapiens
aaaggcaacaagctc

SEQ ID NO: 281282 - DNA, 15 bp, Homo sapiens
taaaggcaacaagct

SEQ ID NO: 281283 - DNA, 15 bp, Homo sapiens
ataaaggcaacaagc

SEQ ID NO: 281284 - DNA, 15 bp, Homo sapiens
aataaaggcaacaag

SEQ ID NO: 281285 - DNA, 15 bp, Homo sapiens
caataaaggcaacaa

SEQ ID NO: 281286 - DNA, 15 bp, Homo sapiens
acaataaaggcaaca

SEQ ID NO: 281287 - DNA, 15 bp, Homo sapiens
gacaataaaggcaac

SEQ ID NO: 281288 - DNA, 15 bp, Homo sapiens
ggacaataaaggcaa

SEQ ID NO: 281289 - DNA, 15 bp, Homo sapiens
tggacaataaaggca

SEQ ID NO: 281290 - DNA, 15 bp, Homo sapiens
gtggacaataaaggc

SEQ ID NO: 281291 - DNA, 15 bp, Homo sapiens
agtggacaataaagg

SEQ ID NO: 281292 - DNA, 15 bp, Homo sapiens
cagtggacaataaag

SEQ ID NO: 281293 - DNA, 15 bp, Homo sapiens
acagtggacaataaa

SEQ ID NO: 281294 - DNA, 15 bp, Homo sapiens
cacagtggacaataa

SEQ ID NO: 281295 - DNA, 15 bp, Homo sapiens
acacagtggacaata

SEQ ID NO: 281296 - DNA, 15 bp, Homo sapiens
cacacagtggacaat

SEQ ID NO: 281297 - DNA, 15 bp, Homo sapiens
tcacacagtggacaa

SEQ ID NO: 281298 - DNA, 15 bp, Homo sapiens
ctcacacagtggaca

SEQ ID NO: 281299 - DNA, 15 bp, Homo sapiens
actcacacagtggac

SEQ ID NO: 281300 - DNA, 15 bp, Homo sapiens
cactcacacagtgga

SEQ ID NO: 281301 - DNA, 15 bp, Homo sapiens
acactcacacagtgg

SEQ ID NO: 281302 - DNA, 15 bp, Homo sapiens
aacactcacacagtg

SEQ ID NO: 281303 - DNA, 15 bp, Homo sapiens
aaacactcacacagt

SEQ ID NO: 281304 - DNA, 15 bp, Homo sapiens
aaaacactcacacag

SEQ ID NO: 281305 - DNA, 15 bp, Homo sapiens
caaaacactcacaca

SEQ ID NO: 281306 - DNA, 15 bp, Homo sapiens
tcaaaacactcacac

SEQ ID NO: 281307 - DNA, 15 bp, Homo sapiens
ttcaaaacactcaca

SEQ ID NO: 281308 - DNA, 15 bp, Homo sapiens
agtgaatgttagttc

SEQ ID NO: 281309 - DNA, 15 bp, Homo sapiens
cagtgaatgttagtt

SEQ ID NO: 281310 - DNA, 15 bp, Homo sapiens
tcagtgaatgttagt

SEQ ID NO: 281311 - DNA, 15 bp, Homo sapiens
atcagtgaatgttag

SEQ ID NO: 281312 - DNA, 15 bp, Homo sapiens
aatcagtgaatgtta

SEQ ID NO: 281313 - DNA, 15 bp, Homo sapiens
taatcagtgaatgtt

SEQ ID NO: 281314 - DNA, 15 bp, Homo sapiens
ataatcagtgaatgt

SEQ ID NO: 281315 - DNA, 15 bp, Homo sapiens
cataatcagtgaatg

SEQ ID NO: 281316 - DNA, 15 bp, Homo sapiens
acataatcagtgaat

SEQ ID NO: 281317 - DNA, 15 bp, Homo sapiens
tacataatcagtgaa

SEQ ID NO: 281318 - DNA, 15 bp, Homo sapiens
gtacataatcagtga

SEQ ID NO: 281319 - DNA, 15 bp, Homo sapiens
agtacataatcagtg

SEQ ID NO: 281320 - DNA, 15 bp, Homo sapiens
cagtacataatcagt

SEQ ID NO: 281321 - DNA, 15 bp, Homo sapiens
acagtacataatcag

SEQ ID NO: 281322 - DNA, 15 bp, Homo sapiens
gacagtacataatca

SEQ ID NO: 281323 - DNA, 15 bp, Homo sapiens
agacagtacataatc

SEQ ID NO: 281324 - DNA, 15 bp, Homo sapiens
cagacagtacataat

SEQ ID NO: 281325 - DNA, 15 bp, Homo sapiens
acagacagtacataa

SEQ ID NO: 281326 - DNA, 15 bp, Homo sapiens
cacagacagtacata

SEQ ID NO: 281327 - DNA, 15 bp, Homo sapiens
tcacagacagtacat

SEQ ID NO: 281328 - DNA, 15 bp, Homo sapiens
ctcacagacagtaca

SEQ ID NO: 281329 - DNA, 15 bp, Homo sapiens
gctcacagacagtac

SEQ ID NO: 281330 - DNA, 15 bp, Homo sapiens
agctcacagacagta

SEQ ID NO: 281331 - DNA, 15 bp, Homo sapiens
tagctcacagacagt

SEQ ID NO: 281332 - DNA, 15 bp, Homo sapiens
gtagctcacagacag

SEQ ID NO: 281333 - DNA, 15 bp, Homo sapiens
tgtagctcacagaca

SEQ ID NO: 281334 - DNA, 15 bp, Homo sapiens
ctgtagctcacagac

SEQ ID NO: 281335 - DNA, 15 bp, Homo sapiens
tctgtagctcacaga

SEQ ID NO: 281336 - DNA, 15 bp, Homo sapiens
ctctgtagctcacag

SEQ ID NO: 281337 - DNA, 15 bp, Homo sapiens
gctctgtagctcaca

SEQ ID NO: 281338 - DNA, 15 bp, Homo sapiens
agctctgtagctcac

SEQ ID NO: 281339 - DNA, 15 bp, Homo sapiens
tagctctgtagctca

SEQ ID NO: 281340 - DNA, 15 bp, Homo sapiens
ctagctctgtagctc

SEQ ID NO: 281341 - DNA, 15 bp, Homo sapiens
cctagctctgtagct

SEQ ID NO: 281342 - DNA, 15 bp, Homo sapiens
gcctagctctgtagc

SEQ ID NO: 281343 - DNA, 15 bp, Homo sapiens
tgcctagctctgtag

SEQ ID NO: 281344 - DNA, 15 bp, Homo sapiens
gtgcctagctctgta

SEQ ID NO: 281345 - DNA, 15 bp, Homo sapiens
agtgcctagctctgt

SEQ ID NO: 281346 - DNA, 15 bp, Homo sapiens
aagtgcctagctctg

SEQ ID NO: 281347 - DNA, 15 bp, Homo sapiens
aaagtgcctagctct

SEQ ID NO: 281348 - DNA, 15 bp, Homo sapiens
taaagtgcctagctc

SEQ ID NO: 281349 - DNA, 15 bp, Homo sapiens
gtaaagtgcctagct

SEQ ID NO: 281350 - DNA, 15 bp, Homo sapiens
ggtaaagtgcctagc

SEQ ID NO: 281351 - DNA, 15 bp, Homo sapiens
tggtaaagtgcctag

SEQ ID NO: 281352 - DNA, 15 bp, Homo sapiens
ttggtaaagtgccta

SEQ ID NO: 281353 - DNA, 15 bp, Homo sapiens
tttggtaaagtgcct

SEQ ID NO: 281354 - DNA, 15 bp, Homo sapiens
ttttggtaaagtgcc

SEQ ID NO: 281355 - DNA, 15 bp, Homo sapiens
tttttggtaaagtgc

SEQ ID NO: 281356 - DNA, 15 bp, Homo sapiens
atttttggtaaagtg

SEQ ID NO: 281357 - DNA, 15 bp, Homo sapiens
tatttttggtaaagt

SEQ ID NO: 281358 - DNA, 15 bp, Homo sapiens
ctatttttggtaaag

SEQ ID NO: 281359 - DNA, 15 bp, Homo sapiens
gctatttttggtaaa

SEQ ID NO: 281360 - DNA, 15 bp, Homo sapiens
tgctatttttggtaa

SEQ ID NO: 281361 - DNA, 15 bp, Homo sapiens
gtgctatttttggta

SEQ ID NO: 281362 - DNA, 15 bp, Homo sapiens
tgtgctatttttggt

SEQ ID NO: 281363 - DNA, 15 bp, Homo sapiens
atgtgctatttttgg

SEQ ID NO: 281364 - DNA, 15 bp, Homo sapiens
catgtgctatttttg

SEQ ID NO: 281365 - DNA, 15 bp, Homo sapiens
gcatgtgctattttt

SEQ ID NO: 281366 - DNA, 15 bp, Homo sapiens
tgcatgtgctatttt

SEQ ID NO: 281367 - DNA, 15 bp, Homo sapiens
ttgcatgtgctattt

SEQ ID NO: 281368 - DNA, 15 bp, Homo sapiens
gttgcatgtgctatt

SEQ ID NO: 281369 - DNA, 15 bp, Homo sapiens
ggttgcatgtgctat

SEQ ID NO: 281370 - DNA, 15 bp, Homo sapiens
aggttgcatgtgcta

SEQ ID NO: 281371 - DNA, 15 bp, Homo sapiens
gaggttgcatgtgct

SEQ ID NO: 281372 - DNA, 15 bp, Homo sapiens
tgaggttgcatgtgc

SEQ ID NO: 281373 - DNA, 15 bp, Homo sapiens
atgaggttgcatgtg

SEQ ID NO: 281374 - DNA, 15 bp, Homo sapiens
aatgaggttgcatgt

SEQ ID NO: 281375 - DNA, 15 bp, Homo sapiens
caatgaggttgcatg

SEQ ID NO: 281376 - DNA, 15 bp, Homo sapiens
tcaatgaggttgcat

SEQ ID NO: 281377 - DNA, 15 bp, Homo sapiens
ttcaatgaggttgca

SEQ ID NO: 281378 - DNA, 15 bp, Homo sapiens
attcaatgaggttgc

SEQ ID NO: 281379 - DNA, 15 bp, Homo sapiens
aattcaatgaggttg

SEQ ID NO: 281380 - DNA, 15 bp, Homo sapiens
gaattcaatgaggtt

SEQ ID NO: 281381 - DNA, 15 bp, Homo sapiens
ggaattcaatgaggt

SEQ ID NO: 281382 - DNA, 15 bp, Homo sapiens
gggaattcaatgagg

SEQ ID NO: 281383 - DNA, 15 bp, Homo sapiens
ggggaattcaatgag

SEQ ID NO: 281384 - DNA, 15 bp, Homo sapiens
aggggaattcaatga

SEQ ID NO: 281385 - DNA, 15 bp, Homo sapiens
taggggaattcaatg

SEQ ID NO: 281386 - DNA, 15 bp, Homo sapiens
ttaggggaattcaat

SEQ ID NO: 281387 - DNA, 15 bp, Homo sapiens
gttaggggaattcaa

SEQ ID NO: 281388 - DNA, 15 bp, Homo sapiens
tgttaggggaattca

SEQ ID NO: 281389 - DNA, 15 bp, Homo sapiens
ttgttaggggaattc

SEQ ID NO: 281390 - DNA, 15 bp, Homo sapiens
gttgttaggggaatt

SEQ ID NO: 281391 - DNA, 15 bp, Homo sapiens
agttgttaggggaat

SEQ ID NO: 281392 - DNA, 15 bp, Homo sapiens
aagttgttaggggaa

SEQ ID NO: 281393 - DNA, 15 bp, Homo sapiens
gaagttgttagggga

SEQ ID NO: 281394 - DNA, 15 bp, Homo sapiens
agaagttgttagggg

SEQ ID NO: 281395 - DNA, 15 bp, Homo sapiens
aagaagttgttaggg

SEQ ID NO: 281396 - DNA, 15 bp, Homo sapiens
taagaagttgttagg

SEQ ID NO: 281397 - DNA, 15 bp, Homo sapiens
ctaagaagttgttag

SEQ ID NO: 281398 - DNA, 15 bp, Homo sapiens
cctaagaagttgtta

SEQ ID NO: 281399 - DNA, 15 bp, Homo sapiens
tcctaagaagttgtt

SEQ ID NO: 281400 - DNA, 15 bp, Homo sapiens
atcctaagaagttgt

SEQ ID NO: 281401 - DNA, 15 bp, Homo sapiens
tatcctaagaagttg

SEQ ID NO: 281402 - DNA, 15 bp, Homo sapiens
ctatcctaagaagtt

SEQ ID NO: 281403 - DNA, 15 bp, Homo sapiens
cctatcctaagaagt

SEQ ID NO: 281404 - DNA, 15 bp, Homo sapiens
acctatcctaagaag

SEQ ID NO: 281405 - DNA, 15 bp, Homo sapiens
tacctatcctaagaa

SEQ ID NO: 281406 - DNA, 15 bp, Homo sapiens
atacctatcctaaga

SEQ ID NO: 281407 - DNA, 15 bp, Homo sapiens
aatacctatcctaag

SEQ ID NO: 281408 - DNA, 15 bp, Homo sapiens
taatacctatcctaa

SEQ ID NO: 281409 - DNA, 15 bp, Homo sapiens
gtaatacctatccta

SEQ ID NO: 281410 - DNA, 15 bp, Homo sapiens
agtaatacctatcct

SEQ ID NO: 281411 - DNA, 15 bp, Homo sapiens
tagtaatacctatcc

SEQ ID NO: 281412 - DNA, 15 bp, Homo sapiens
atagtaatacctatc

SEQ ID NO: 281413 - DNA, 15 bp, Homo sapiens
aatagtaatacctat

SEQ ID NO: 281414 - DNA, 15 bp, Homo sapiens
gaatagtaataccta

SEQ ID NO: 281415 - DNA, 15 bp, Homo sapiens
ggaatagtaatacct

SEQ ID NO: 281416 - DNA, 15 bp, Homo sapiens
gggaatagtaatacc

SEQ ID NO: 281417 - DNA, 15 bp, Homo sapiens
tgggaatagtaatac

SEQ ID NO: 281418 - DNA, 15 bp, Homo sapiens
gtgggaatagtaata

SEQ ID NO: 281419 - DNA, 15 bp, Homo sapiens
agtgggaatagtaat

SEQ ID NO: 281420 - DNA, 15 bp, Homo sapiens
aagtgggaatagtaa

SEQ ID NO: 281421 - DNA, 15 bp, Homo sapiens
taagtgggaatagta

SEQ ID NO: 281422 - DNA, 15 bp, Homo sapiens
gtaagtgggaatagt

SEQ ID NO: 281423 - DNA, 15 bp, Homo sapiens
tgtaagtgggaatag

SEQ ID NO: 281424 - DNA, 15 bp, Homo sapiens
ctgtaagtgggaata

SEQ ID NO: 281425 - DNA, 15 bp, Homo sapiens
tctgtaagtgggaat

SEQ ID NO: 281426 - DNA, 15 bp, Homo sapiens
atctgtaagtgggaa

SEQ ID NO: 281427 - DNA, 15 bp, Homo sapiens
catctgtaagtggga

SEQ ID NO: 281428 - DNA, 15 bp, Homo sapiens
tcatctgtaagtggg

SEQ ID NO: 281429 - DNA, 15 bp, Homo sapiens
ctcatctgtaagtgg

SEQ ID NO: 281430 - DNA, 15 bp, Homo sapiens
cctcatctgtaagtg

SEQ ID NO: 281431 - DNA, 15 bp, Homo sapiens
tcctcatctgtaagt

SEQ ID NO: 281432 - DNA, 15 bp, Homo sapiens
ctcctcatctgtaag

SEQ ID NO: 281433 - DNA, 15 bp, Homo sapiens
cctcctcatctgtaa

SEQ ID NO: 281434 - DNA, 15 bp, Homo sapiens
gcctcctcatctgta

SEQ ID NO: 281435 - DNA, 15 bp, Homo sapiens
agcctcctcatctgt

SEQ ID NO: 281436 - DNA, 15 bp, Homo sapiens
cagcctcctcatctg

SEQ ID NO: 281437 - DNA, 15 bp, Homo sapiens
tcagcctcctcatct

SEQ ID NO: 281438 - DNA, 15 bp, Homo sapiens
ttcagcctcctcatc

SEQ ID NO: 281439 - DNA, 15 bp, Homo sapiens
cttcagcctcctcat

SEQ ID NO: 281440 - DNA, 15 bp, Homo sapiens
gcttcagcctcctca

SEQ ID NO: 281441 - DNA, 15 bp, Homo sapiens
agcttcagcctcctc

SEQ ID NO: 281442 - DNA, 15 bp, Homo sapiens
cagcttcagcctcct

SEQ ID NO: 281443 - DNA, 15 bp, Homo sapiens
gcagcttcagcctcc

SEQ ID NO: 281444 - DNA, 15 bp, Homo sapiens
tgcagcttcagcctc

SEQ ID NO: 281445 - DNA, 15 bp, Homo sapiens
ctgcagcttcagcct

SEQ ID NO: 281446 - DNA, 15 bp, Homo sapiens
cctgcagcttcagcc

SEQ ID NO: 281447 - DNA, 15 bp, Homo sapiens
gcctgcagcttcagc

SEQ ID NO: 281448 - DNA, 15 bp, Homo sapiens
tgcctgcagcttcag

SEQ ID NO: 281449 - DNA, 15 bp, Homo sapiens
atgcctgcagcttca

SEQ ID NO: 281450 - DNA, 15 bp, Homo sapiens
tatgcctgcagcttc

SEQ ID NO: 281451 - DNA, 15 bp, Homo sapiens
ctatgcctgcagctt

SEQ ID NO: 281452 - DNA, 15 bp, Homo sapiens
gctatgcctgcagct

SEQ ID NO: 281453 - DNA, 15 bp, Homo sapiens
ggctatgcctgcagc

SEQ ID NO: 281454 - DNA, 15 bp, Homo sapiens
gggctatgcctgcag

SEQ ID NO: 281455 - DNA, 15 bp, Homo sapiens
tgggctatgcctgca

SEQ ID NO: 281456 - DNA, 15 bp, Homo sapiens
ttgggctatgcctgc

SEQ ID NO: 281457 - DNA, 15 bp, Homo sapiens
cttgggctatgcctg

SEQ ID NO: 281458 - DNA, 15 bp, Homo sapiens
gcttgggctatgcct

SEQ ID NO: 281459 - DNA, 15 bp, Homo sapiens
agcttgggctatgcc

SEQ ID NO: 281460 - DNA, 15 bp, Homo sapiens
tagcttgggctatgc

SEQ ID NO: 281461 - DNA, 15 bp, Homo sapiens
atagcttgggctatg

SEQ ID NO: 281462 - DNA, 15 bp, Homo sapiens
catagcttgggctat

SEQ ID NO: 281463 - DNA, 15 bp, Homo sapiens
acatagcttgggcta

SEQ ID NO: 281464 - DNA, 15 bp, Homo sapiens
tacatagcttgggct

SEQ ID NO: 281465 - DNA, 15 bp, Homo sapiens
ctacatagcttgggc

SEQ ID NO: 281466 - DNA, 15 bp, Homo sapiens
gctacatagcttggg

SEQ ID NO: 281467 - DNA, 15 bp, Homo sapiens
agctacatagcttgg

SEQ ID NO: 281468 - DNA, 15 bp, Homo sapiens
tagctacatagcttg

SEQ ID NO: 281469 - DNA, 15 bp, Homo sapiens
ctagctacatagctt

SEQ ID NO: 281470 - DNA, 15 bp, Homo sapiens
actagctacatagct

SEQ ID NO: 281471 - DNA, 15 bp, Homo sapiens
tactagctacatagc

SEQ ID NO: 281472 - DNA, 15 bp, Homo sapiens
ttactagctacatag

SEQ ID NO: 281473 - DNA, 15 bp, Homo sapiens
cttactagctacata

SEQ ID NO: 281474 - DNA, 15 bp, Homo sapiens
gcttactagctacat

SEQ ID NO: 281475 - DNA, 15 bp, Homo sapiens
tgcttactagctaca

SEQ ID NO: 281476 - DNA, 15 bp, Homo sapiens
ctgcttactagctac

SEQ ID NO: 281477 - DNA, 15 bp, Homo sapiens
actgcttactagcta

SEQ ID NO: 281478 - DNA, 15 bp, Homo sapiens
tactgcttactagct

SEQ ID NO: 281479 - DNA, 15 bp, Homo sapiens
ctactgcttactagc

SEQ ID NO: 281480 - DNA, 15 bp, Homo sapiens
tctactgcttactag

SEQ ID NO: 281481 - DNA, 15 bp, Homo sapiens
ctctactgcttacta

SEQ ID NO: 281482 - DNA, 15 bp, Homo sapiens
gctctactgcttact

SEQ ID NO: 281483 - DNA, 15 bp, Homo sapiens
ggctctactgcttac

SEQ ID NO: 281484 - DNA, 15 bp, Homo sapiens
tggctctactgctta

SEQ ID NO: 281485 - DNA, 15 bp, Homo sapiens
ctggctctactgctt

SEQ ID NO: 281486 - DNA, 15 bp, Homo sapiens
cctggctctactgct

SEQ ID NO: 281487 - DNA, 15 bp, Homo sapiens
tcctggctctactgc

SEQ ID NO: 281488 - DNA, 15 bp, Homo sapiens
atcctggctctactg

SEQ ID NO: 281489 - DNA, 15 bp, Homo sapiens
aatcctggctctact

SEQ ID NO: 281490 - DNA, 15 bp, Homo sapiens
taatcctggctctac

SEQ ID NO: 281491 - DNA, 15 bp, Homo sapiens
ctaatcctggctcta

SEQ ID NO: 281492 - DNA, 15 bp, Homo sapiens
tctaatcctggctct

SEQ ID NO: 281493 - DNA, 15 bp, Homo sapiens
atctaatcctggctc

SEQ ID NO: 281494 - DNA, 15 bp, Homo sapiens
aatctaatcctggct

SEQ ID NO: 281495 - DNA, 15 bp, Homo sapiens
gaatctaatcctggc

SEQ ID NO: 281496 - DNA, 15 bp, Homo sapiens
ggaatctaatcctgg

SEQ ID NO: 281497 - DNA, 15 bp, Homo sapiens
tggaatctaatcctg

SEQ ID NO: 281498 - DNA, 15 bp, Homo sapiens
ctggaatctaatcct

SEQ ID NO: 281499 - DNA, 15 bp, Homo sapiens
gctggaatctaatcc

SEQ ID NO: 281500 - DNA, 15 bp, Homo sapiens
tgctggaatctaatc

SEQ ID NO: 281501 - DNA, 15 bp, Homo sapiens
atgctggaatctaat

SEQ ID NO: 281502 - DNA, 15 bp, Homo sapiens
catgctggaatctaa

SEQ ID NO: 281503 - DNA, 15 bp, Homo sapiens
ccatgctggaatcta

SEQ ID NO: 281504 - DNA, 15 bp, Homo sapiens
gccatgctggaatct

SEQ ID NO: 281505 - DNA, 15 bp, Homo sapiens
agccatgctggaatc

SEQ ID NO: 281506 - DNA, 15 bp, Homo sapiens
gagccatgctggaat

SEQ ID NO: 281507 - DNA, 15 bp, Homo sapiens
tgagccatgctggaa

SEQ ID NO: 281508 - DNA, 15 bp, Homo sapiens
atgagccatgctgga

SEQ ID NO: 281509 - DNA, 15 bp, Homo sapiens
aatgagccatgctgg

SEQ ID NO: 281510 - DNA, 15 bp, Homo sapiens
gaatgagccatgctg

SEQ ID NO: 281511 - DNA, 15 bp, Homo sapiens
agaatgagccatgct

SEQ ID NO: 281512 - DNA, 15 bp, Homo sapiens
tagaatgagccatgc

SEQ ID NO: 281513 - DNA, 15 bp, Homo sapiens
ttagaatgagccatg

SEQ ID NO: 281514 - DNA, 15 bp, Homo sapiens
tttagaatgagccat

SEQ ID NO: 281515 - DNA, 15 bp, Homo sapiens
ctttagaatgagcca

SEQ ID NO: 281516 - DNA, 15 bp, Homo sapiens
gctttagaatgagcc

SEQ ID NO: 281517 - DNA, 15 bp, Homo sapiens
ggctttagaatgagc

SEQ ID NO: 281518 - DNA, 15 bp, Homo sapiens
tggctttagaatgag

SEQ ID NO: 281519 - DNA, 15 bp, Homo sapiens
atggctttagaatga

SEQ ID NO: 281520 - DNA, 15 bp, Homo sapiens
gatggctttagaatg

SEQ ID NO: 281521 - DNA, 15 bp, Homo sapiens
agatggctttagaat

SEQ ID NO: 281522 - DNA, 15 bp, Homo sapiens
gagatggctttagaa

SEQ ID NO: 281523 - DNA, 15 bp, Homo sapiens
gagagatggctttag

SEQ ID NO: 281524 - DNA, 15 bp, Homo sapiens
agagagatggcttta

SEQ ID NO: 281525 - DNA, 15 bp, Homo sapiens
aagagagatggcttt

SEQ ID NO: 281526 - DNA, 15 bp, Homo sapiens
gaagagagatggctt

SEQ ID NO: 281527 - DNA, 15 bp, Homo sapiens
agaagagagatggct

SEQ ID NO: 281528 - DNA, 15 bp, Homo sapiens
tagaagagagatggc

SEQ ID NO: 281529 - DNA, 15 bp, Homo sapiens
ttagaagagagatgg

SEQ ID NO: 281530 - DNA, 15 bp, Homo sapiens
cttagaagagagatg

SEQ ID NO: 281531 - DNA, 15 bp, Homo sapiens
acttagaagagagat

SEQ ID NO: 281532 - DNA, 15 bp, Homo sapiens
cacttagaagagaga

SEQ ID NO: 281533 - DNA, 15 bp, Homo sapiens
acacttagaagagag

SEQ ID NO: 281534 - DNA, 15 bp, Homo sapiens
gacacttagaagaga

SEQ ID NO: 281535 - DNA, 15 bp, Homo sapiens
tgacacttagaagag

SEQ ID NO: 281536 - DNA, 15 bp, Homo sapiens
ttgacacttagaaga

SEQ ID NO: 281537 - DNA, 15 bp, Homo sapiens
cttgacacttagaag

SEQ ID NO: 281538 - DNA, 15 bp, Homo sapiens
tcttgacacttagaa

SEQ ID NO: 281539 - DNA, 15 bp, Homo sapiens
ttcttgacacttaga

SEQ ID NO: 281540 - DNA, 15 bp, Homo sapiens
cttcttgacacttag

SEQ ID NO: 281541 - DNA, 15 bp, Homo sapiens
acttcttgacactta

SEQ ID NO: 281542 - DNA, 15 bp, Homo sapiens
tacttcttgacactt

SEQ ID NO: 281543 - DNA, 15 bp, Homo sapiens
ttacttcttgacact

SEQ ID NO: 281544 - DNA, 15 bp, Homo sapiens
tttacttcttgacac

SEQ ID NO: 281545 - DNA, 15 bp, Homo sapiens
atttacttcttgaca

SEQ ID NO: 281546 - DNA, 15 bp, Homo sapiens
aatttacttcttgac

SEQ ID NO: 281547 - DNA, 15 bp, Homo sapiens
aaatttacttcttga

SEQ ID NO: 281548 - DNA, 15 bp, Homo sapiens
gaaatttacttcttg

SEQ ID NO: 281549 - DNA, 15 bp, Homo sapiens
ggaaatttacttctt

SEQ ID NO: 281550 - DNA, 15 bp, Homo sapiens
tggaaatttacttct

SEQ ID NO: 281551 - DNA, 15 bp, Homo sapiens
ctggaaatttacttc

SEQ ID NO: 281552 - DNA, 15 bp, Homo sapiens
tctggaaatttactt

SEQ ID NO: 281553 - DNA, 15 bp, Homo sapiens
atctggaaatttact

SEQ ID NO: 281554 - DNA, 15 bp, Homo sapiens
aatctggaaatttac

SEQ ID NO: 281555 - DNA, 15 bp, Homo sapiens
caatctggaaattta

SEQ ID NO: 281556 - DNA, 15 bp, Homo sapiens
acaatctggaaattt

SEQ ID NO: 281557 - DNA, 15 bp, Homo sapiens
cacaatctggaaatt

SEQ ID NO: 281558 - DNA, 15 bp, Homo sapiens
acacaatctggaaat

SEQ ID NO: 281559 - DNA, 15 bp, Homo sapiens
tacacaatctggaaa

SEQ ID NO: 281560 - DNA, 15 bp, Homo sapiens
ttacacaatctggaa

SEQ ID NO: 281561 - DNA, 15 bp, Homo sapiens
cttacacaatctgga

SEQ ID NO: 281562 - DNA, 15 bp, Homo sapiens
acttacacaatctgg

SEQ ID NO: 281563 - DNA, 15 bp, Homo sapiens
tacttacacaatctg

SEQ ID NO: 281564 - DNA, 15 bp, Homo sapiens
ttacttacacaatct

SEQ ID NO: 281565 - DNA, 15 bp, Homo sapiens
gttacttacacaatc

SEQ ID NO: 281566 - DNA, 15 bp, Homo sapiens
agttacttacacaat

SEQ ID NO: 281567 - DNA, 15 bp, Homo sapiens
cagttacttacacaa

SEQ ID NO: 281568 - DNA, 15 bp, Homo sapiens
tcagttacttacaca

SEQ ID NO: 281569 - DNA, 15 bp, Homo sapiens
atcagttacttacac

SEQ ID NO: 281570 - DNA, 15 bp, Homo sapiens
catcagttacttaca

SEQ ID NO: 281571 - DNA, 15 bp, Homo sapiens
ccatcagttacttac

SEQ ID NO: 281572 - DNA, 15 bp, Homo sapiens
cccatcagttactta

SEQ ID NO: 281573 - DNA, 15 bp, Homo sapiens
ccccatcagttactt

SEQ ID NO: 281574 - DNA, 15 bp, Homo sapiens
accccatcagttact

SEQ ID NO: 281575 - DNA, 15 bp, Homo sapiens
aaccccatcagttac

SEQ ID NO: 281576 - DNA, 15 bp, Homo sapiens
aaaccccatcagtta

SEQ ID NO: 281577 - DNA, 15 bp, Homo sapiens
taaaccccatcagtt

SEQ ID NO: 281578 - DNA, 15 bp, Homo sapiens
ttaaaccccatcagt

SEQ ID NO: 281579 - DNA, 15 bp, Homo sapiens
attaaaccccatcag

SEQ ID NO: 281580 - DNA, 15 bp, Homo sapiens
cattaaaccccatca

SEQ ID NO: 281581 - DNA, 15 bp, Homo sapiens
tcattaaaccccatc

SEQ ID NO: 281582 - DNA, 15 bp, Homo sapiens
ctcattaaaccccat

SEQ ID NO: 281583 - DNA, 15 bp, Homo sapiens
tctcattaaacccca

SEQ ID NO: 281584 - DNA, 15 bp, Homo sapiens
atctcattaaacccc

SEQ ID NO: 281585 - DNA, 15 bp, Homo sapiens
catctcattaaaccc

SEQ ID NO: 281586 - DNA, 15 bp, Homo sapiens
acatctcattaaacc

SEQ ID NO: 281587 - DNA, 15 bp, Homo sapiens
aacatctcattaaac

SEQ ID NO: 281588 - DNA, 15 bp, Homo sapiens
caacatctcattaaa

SEQ ID NO: 281589 - DNA, 15 bp, Homo sapiens
gcaacatctcattaa

SEQ ID NO: 281590 - DNA, 15 bp, Homo sapiens
tgcaacatctcatta

SEQ ID NO: 281591 - DNA, 15 bp, Homo sapiens
ttgcaacatctcatt

SEQ ID NO: 281592 - DNA, 15 bp, Homo sapiens
cttgcaacatctcat

SEQ ID NO: 281593 - DNA, 15 bp, Homo sapiens
tcttgcaacatctca

SEQ ID NO: 281594 - DNA, 15 bp, Homo sapiens
ttcttgcaacatctc

SEQ ID NO: 281595 - DNA, 15 bp, Homo sapiens
attcttgcaacatct

SEQ ID NO: 281596 - DNA, 15 bp, Homo sapiens
cattcttgcaacatc

SEQ ID NO: 281597 - DNA, 15 bp, Homo sapiens
ccattcttgcaacat

SEQ ID NO: 281598 - DNA, 15 bp, Homo sapiens
cccattcttgcaaca

SEQ ID NO: 281599 - DNA, 15 bp, Homo sapiens
tcccattcttgcaac

SEQ ID NO: 281600 - DNA, 15 bp, Homo sapiens
ttcccattcttgcaa

SEQ ID NO: 281601 - DNA, 15 bp, Homo sapiens
cttcccattcttgca

SEQ ID NO: 281602 - DNA, 15 bp, Homo sapiens
acttcccattcttgc

SEQ ID NO: 281603 - DNA, 15 bp, Homo sapiens
aacttcccattcttg

SEQ ID NO: 281604 - DNA, 15 bp, Homo sapiens
caacttcccattctt

SEQ ID NO: 281605 - DNA, 15 bp, Homo sapiens
gcaacttcccattct

SEQ ID NO: 281606 - DNA, 15 bp, Homo sapiens
tgcaacttcccattc

SEQ ID NO: 281607 - DNA, 15 bp, Homo sapiens
atgcaacttcccatt

SEQ ID NO: 281608 - DNA, 15 bp, Homo sapiens
gatgcaacttcccat

SEQ ID NO: 281609 - DNA, 15 bp, Homo sapiens
tgatgcaacttccca

SEQ ID NO: 281610 - DNA, 15 bp, Homo sapiens
gtgatgcaacttccc

SEQ ID NO: 281611 - DNA, 15 bp, Homo sapiens
ggtgatgcaacttcc

SEQ ID NO: 281612 - DNA, 15 bp, Homo sapiens
aggtgatgcaacttc

SEQ ID NO: 281613 - DNA, 15 bp, Homo sapiens
gaggtgatgcaactt

SEQ ID NO: 281614 - DNA, 15 bp, Homo sapiens
tgaggtgatgcaact

SEQ ID NO: 281615 - DNA, 15 bp, Homo sapiens
atgaggtgatgcaac

SEQ ID NO: 281616 - DNA, 15 bp, Homo sapiens
gatgaggtgatgcaa

SEQ ID NO: 281617 - DNA, 15 bp, Homo sapiens
ggatgaggtgatgca

SEQ ID NO: 281618 - DNA, 15 bp, Homo sapiens
aggatgaggtgatgc

SEQ ID NO: 281619 - DNA, 15 bp, Homo sapiens
caggatgaggtgatg

SEQ ID NO: 281620 - DNA, 15 bp, Homo sapiens
gcaggatgaggtgat

SEQ ID NO: 281621 - DNA, 15 bp, Homo sapiens
ggcaggatgaggtga

SEQ ID NO: 281622 - DNA, 15 bp, Homo sapiens
tggcaggatgaggtg

SEQ ID NO: 281623 - DNA, 15 bp, Homo sapiens
ttggcaggatgaggt

SEQ ID NO: 281624 - DNA, 15 bp, Homo sapiens
attggcaggatgagg

SEQ ID NO: 281625 - DNA, 15 bp, Homo sapiens
cattggcaggatgag

SEQ ID NO: 281626 - DNA, 15 bp, Homo sapiens
gcattggcaggatga

SEQ ID NO: 281627 - DNA, 15 bp, Homo sapiens
tgcattggcaggatg

SEQ ID NO: 281628 - DNA, 15 bp, Homo sapiens
gtgcattggcaggat

SEQ ID NO: 281629 - DNA, 15 bp, Homo sapiens
agtgcattggcagga

SEQ ID NO: 281630 - DNA, 15 bp, Homo sapiens
cagtgcattggcagg

SEQ ID NO: 281631 - DNA, 15 bp, Homo sapiens
ccagtgcattggcag

SEQ ID NO: 281632 - DNA, 15 bp, Homo sapiens
accagtgcattggca

SEQ ID NO: 281633 - DNA, 15 bp, Homo sapiens
gaccagtgcattggc

SEQ ID NO: 281634 - DNA, 15 bp, Homo sapiens
agaccagtgcattgg

SEQ ID NO: 281635 - DNA, 15 bp, Homo sapiens
aagaccagtgcattg

SEQ ID NO: 281636 - DNA, 15 bp, Homo sapiens
caagaccagtgcatt

SEQ ID NO: 281637 - DNA, 15 bp, Homo sapiens
acaagaccagtgcat

SEQ ID NO: 281638 - DNA, 15 bp, Homo sapiens
aacaagaccagtgca

SEQ ID NO: 281639 - DNA, 15 bp, Homo sapiens
aaacaagaccagtgc

SEQ ID NO: 281640 - DNA, 15 bp, Homo sapiens
aaaacaagaccagtg

SEQ ID NO: 281641 - DNA, 15 bp, Homo sapiens
gaaaacaagaccagt

SEQ ID NO: 281642 - DNA, 15 bp, Homo sapiens
agaaaacaagaccag

SEQ ID NO: 281643 - DNA, 15 bp, Homo sapiens
gagaaaacaagacca

SEQ ID NO: 281644 - DNA, 15 bp, Homo sapiens
agagaaaacaagacc

SEQ ID NO: 281645 - DNA, 15 bp, Homo sapiens
aagagaaaacaagac

SEQ ID NO: 281646 - DNA, 15 bp, Homo sapiens
aaagagaaaacaaga

SEQ ID NO: 281647 - DNA, 15 bp, Homo sapiens
aaaagagaaaacaag

SEQ ID NO: 281648 - DNA, 15 bp, Homo sapiens
caaaagagaaaacaa

SEQ ID NO: 281649 - DNA, 15 bp, Homo sapiens
acaaaagagaaaaca

SEQ ID NO: 281650 - DNA, 15 bp, Homo sapiens
aacaaaagagaaaac

SEQ ID NO: 281651 - DNA, 15 bp, Homo sapiens
gaacaaaagagaaaa

SEQ ID NO: 281652 - DNA, 15 bp, Homo sapiens
agaacaaaagagaaa

SEQ ID NO: 281653 - DNA, 15 bp, Homo sapiens
gagaacaaaagagaa

SEQ ID NO: 281654 - DNA, 15 bp, Homo sapiens
ggagaacaaaagaga

SEQ ID NO: 281655 - DNA, 15 bp, Homo sapiens
gggagaacaaaagag

SEQ ID NO: 281656 - DNA, 15 bp, Homo sapiens
agggagaacaaaaga

SEQ ID NO: 281657 - DNA, 15 bp, Homo sapiens
aagggagaacaaaag

SEQ ID NO: 281658 - DNA, 15 bp, Homo sapiens
aaagggagaacaaaa

SEQ ID NO: 281659 - DNA, 15 bp, Homo sapiens
gaaagggagaacaaa

SEQ ID NO: 281660 - DNA, 15 bp, Homo sapiens
agaaagggagaacaa

SEQ ID NO: 281661 - DNA, 15 bp, Homo sapiens
gagaaagggagaaca

SEQ ID NO: 281662 - DNA, 15 bp, Homo sapiens
ggagaaagggagaac

SEQ ID NO: 281663 - DNA, 15 bp, Homo sapiens
tggagaaagggagaa

SEQ ID NO: 281664 - DNA, 15 bp, Homo sapiens
atggagaaagggaga

SEQ ID NO: 281665 - DNA, 15 bp, Homo sapiens
aatggagaaagggag

SEQ ID NO: 281666 - DNA, 15 bp, Homo sapiens
aaatggagaaaggga

SEQ ID NO: 281667 - DNA, 15 bp, Homo sapiens
gaaatggagaaaggg

SEQ ID NO: 281668 - DNA, 15 bp, Homo sapiens
agaaatggagaaagg

SEQ ID NO: 281669 - DNA, 15 bp, Homo sapiens
gagaaatggagaaag

SEQ ID NO: 281670 - DNA, 15 bp, Homo sapiens
tgagaaatggagaaa

SEQ ID NO: 281671 - DNA, 15 bp, Homo sapiens
gtgagaaatggagaa

SEQ ID NO: 281672 - DNA, 15 bp, Homo sapiens
ggtgagaaatggaga

SEQ ID NO: 281673 - DNA, 15 bp, Homo sapiens
gggtgagaaatggag

SEQ ID NO: 281674 - DNA, 15 bp, Homo sapiens
agggtgagaaatgga

SEQ ID NO: 281675 - DNA, 15 bp, Homo sapiens
cagggtgagaaatgg

SEQ ID NO: 281676 - DNA, 15 bp, Homo sapiens
tcagggtgagaaatg

SEQ ID NO: 281677 - DNA, 15 bp, Homo sapiens
ctcagggtgagaaat

SEQ ID NO: 281678 - DNA, 15 bp, Homo sapiens
tctcagggtgagaaa

SEQ ID NO: 281679 - DNA, 15 bp, Homo sapiens
ttctcagggtgagaa

SEQ ID NO: 281680 - DNA, 15 bp, Homo sapiens
gttctcagggtgaga

SEQ ID NO: 281681 - DNA, 15 bp, Homo sapiens
ggttctcagggtgag

SEQ ID NO: 281682 - DNA, 15 bp, Homo sapiens
tggttctcagggtga

SEQ ID NO: 281683 - DNA, 15 bp, Homo sapiens
ttggttctcagggtg

SEQ ID NO: 281684 - DNA, 15 bp, Homo sapiens
cttggttctcagggt

SEQ ID NO: 281685 - DNA, 15 bp, Homo sapiens
acttggttctcaggg

SEQ ID NO: 281686 - DNA, 15 bp, Homo sapiens
cacttggttctcagg

SEQ ID NO: 281687 - DNA, 15 bp, Homo sapiens
acacttggttctcag

SEQ ID NO: 281688 - DNA, 15 bp, Homo sapiens
cacacttggttctca

SEQ ID NO: 281689 - DNA, 15 bp, Homo sapiens
gcacacttggttctc

SEQ ID NO: 281690 - DNA, 15 bp, Homo sapiens
tgcacacttggttct

SEQ ID NO: 281691 - DNA, 15 bp, Homo sapiens
ctgcacacttggttc

SEQ ID NO: 281692 - DNA, 15 bp, Homo sapiens
actgcacacttggtt

SEQ ID NO: 281693 - DNA, 15 bp, Homo sapiens
aactgcacacttggt

SEQ ID NO: 281694 - DNA, 15 bp, Homo sapiens
caactgcacacttgg

SEQ ID NO: 281695 - DNA, 15 bp, Homo sapiens
acaactgcacacttg

SEQ ID NO: 281696 - DNA, 15 bp, Homo sapiens
cacaactgcacactt

SEQ ID NO: 281697 - DNA, 15 bp, Homo sapiens
ccacaactgcacact

SEQ ID NO: 281698 - DNA, 15 bp, Homo sapiens
cccacaactgcacac

SEQ ID NO: 281699 - DNA, 15 bp, Homo sapiens
acccacaactgcaca

SEQ ID NO: 281700 - DNA, 15 bp, Homo sapiens
tacccacaactgcac

SEQ ID NO: 281701 - DNA, 15 bp, Homo sapiens
gtacccacaactgca

SEQ ID NO: 281702 - DNA, 15 bp, Homo sapiens
cgtacccacaactgc

SEQ ID NO: 281703 - DNA, 15 bp, Homo sapiens
acgtacccacaactg

SEQ ID NO: 281704 - DNA, 15 bp, Homo sapiens
tacgtacccacaact

SEQ ID NO: 281705 - DNA, 15 bp, Homo sapiens
ctacgtacccacaac

SEQ ID NO: 281706 - DNA, 15 bp, Homo sapiens
cctacgtacccacaa

SEQ ID NO: 281707 - DNA, 15 bp, Homo sapiens
tcctacgtacccaca

SEQ ID NO: 281708 - DNA, 15 bp, Homo sapiens
ctcctacgtacccac

SEQ ID NO: 281709 - DNA, 15 bp, Homo sapiens
cctcctacgtaccca

SEQ ID NO: 281710 - DNA, 15 bp, Homo sapiens
gcctcctacgtaccc

SEQ ID NO: 281711 - DNA, 15 bp, Homo sapiens
agcctcctacgtacc

SEQ ID NO: 281712 - DNA, 15 bp, Homo sapiens
gagcctcctacgtac

SEQ ID NO: 281713 - DNA, 15 bp, Homo sapiens
ggagcctcctacgta

SEQ ID NO: 281714 - DNA, 15 bp, Homo sapiens
aggagcctcctacgt

SEQ ID NO: 281715 - DNA, 15 bp, Homo sapiens
taggagcctcctacg

SEQ ID NO: 281716 - DNA, 15 bp, Homo sapiens
ataggagcctcctac

SEQ ID NO: 281717 - DNA, 15 bp, Homo sapiens
gataggagcctccta

SEQ ID NO: 281718 - DNA, 15 bp, Homo sapiens
tgataggagcctcct

SEQ ID NO: 281719 - DNA, 15 bp, Homo sapiens
gtgataggagcctcc

SEQ ID NO: 281720 - DNA, 15 bp, Homo sapiens
tgtgataggagcctc

SEQ ID NO: 281721 - DNA, 15 bp, Homo sapiens
ctgtgataggagcct

SEQ ID NO: 281722 - DNA, 15 bp, Homo sapiens
cctgtgataggagcc

SEQ ID NO: 281723 - DNA, 15 bp, Homo sapiens
gcctgtgataggagc

SEQ ID NO: 281724 - DNA, 15 bp, Homo sapiens
ggcctgtgataggag

SEQ ID NO: 281725 - DNA, 15 bp, Homo sapiens
aggcctgtgatagga

SEQ ID NO: 281726 - DNA, 15 bp, Homo sapiens
aaggcctgtgatagg

SEQ ID NO: 281727 - DNA, 15 bp, Homo sapiens
gaaggcctgtgatag

SEQ ID NO: 281728 - DNA, 15 bp, Homo sapiens
ggaaggcctgtgata

SEQ ID NO: 281729 - DNA, 15 bp, Homo sapiens
tggaaggcctgtgat

SEQ ID NO: 281730 - DNA, 15 bp, Homo sapiens
atggaaggcctgtga

SEQ ID NO: 281731 - DNA, 15 bp, Homo sapiens
catggaaggcctgtg

SEQ ID NO: 281732 - DNA, 15 bp, Homo sapiens
acatggaaggcctgt

SEQ ID NO: 281733 - DNA, 15 bp, Homo sapiens
tacatggaaggcctg

SEQ ID NO: 281734 - DNA, 15 bp, Homo sapiens
ttacatggaaggcct

SEQ ID NO: 281735 - DNA, 15 bp, Homo sapiens
cttacatggaaggcc

SEQ ID NO: 281736 - DNA, 15 bp, Homo sapiens
tcttacatggaaggc

SEQ ID NO: 281737 - DNA, 15 bp, Homo sapiens
gtcttacatggaagg

SEQ ID NO: 281738 - DNA, 15 bp, Homo sapiens
tgtcttacatggaag

SEQ ID NO: 281739 - DNA, 15 bp, Homo sapiens
gtgtcttacatggaa

SEQ ID NO: 281740 - DNA, 15 bp, Homo sapiens
agtgtcttacatgga

SEQ ID NO: 281741 - DNA, 15 bp, Homo sapiens
cagtgtcttacatgg

SEQ ID NO: 281742 - DNA, 15 bp, Homo sapiens
gcagtgtcttacatg

SEQ ID NO: 281743 - DNA, 15 bp, Homo sapiens
ggcagtgtcttacat

SEQ ID NO: 281744 - DNA, 15 bp, Homo sapiens
gggcagtgtcttaca

SEQ ID NO: 281745 - DNA, 15 bp, Homo sapiens
agggcagtgtcttac

SEQ ID NO: 281746 - DNA, 15 bp, Homo sapiens
cagggcagtgtctta

SEQ ID NO: 281747 - DNA, 15 bp, Homo sapiens
ccagggcagtgtctt

SEQ ID NO: 281748 - DNA, 15 bp, Homo sapiens
cccagggcagtgtct

SEQ ID NO: 281749 - DNA, 15 bp, Homo sapiens
acccagggcagtgtc

SEQ ID NO: 281750 - DNA, 15 bp, Homo sapiens
gacccagggcagtgt

SEQ ID NO: 281751 - DNA, 15 bp, Homo sapiens
tgacccagggcagtg

SEQ ID NO: 281752 - DNA, 15 bp, Homo sapiens
ctgacccagggcagt

SEQ ID NO: 281753 - DNA, 15 bp, Homo sapiens
cctgacccagggcag

SEQ ID NO: 281754 - DNA, 15 bp, Homo sapiens
acctgacccagggca

SEQ ID NO: 281755 - DNA, 15 bp, Homo sapiens
cacctgacccagggc

SEQ ID NO: 281756 - DNA, 15 bp, Homo sapiens
gcacctgacccaggg

SEQ ID NO: 281757 - DNA, 15 bp, Homo sapiens
agcacctgacccagg

SEQ ID NO: 281758 - DNA, 15 bp, Homo sapiens
cagcacctgacccag

SEQ ID NO: 281759 - DNA, 15 bp, Homo sapiens
acagcacctgaccca

SEQ ID NO: 281760 - DNA, 15 bp, Homo sapiens
gacagcacctgaccc

SEQ ID NO: 281761 - DNA, 15 bp, Homo sapiens
agacagcacctgacc

SEQ ID NO: 281762 - DNA, 15 bp, Homo sapiens
cagacagcacctgac

SEQ ID NO: 281763 - DNA, 15 bp, Homo sapiens
tcagacagcacctga

SEQ ID NO: 281764 - DNA, 15 bp, Homo sapiens
atcagacagcacctg

SEQ ID NO: 281765 - DNA, 15 bp, Homo sapiens
catcagacagcacct

SEQ ID NO: 281766 - DNA, 15 bp, Homo sapiens
acatcagacagcacc

SEQ ID NO: 281767 - DNA, 15 bp, Homo sapiens
gacatcagacagcac

SEQ ID NO: 281768 - DNA, 15 bp, Homo sapiens
agacatcagacagca

SEQ ID NO: 281769 - DNA, 15 bp, Homo sapiens
cagacatcagacagc

SEQ ID NO: 281770 - DNA, 15 bp, Homo sapiens
acagacatcagacag

SEQ ID NO: 281771 - DNA, 15 bp, Homo sapiens
aacagacatcagaca

SEQ ID NO: 281772 - DNA, 15 bp, Homo sapiens
aaacagacatcagac

SEQ ID NO: 281773 - DNA, 15 bp, Homo sapiens
caaacagacatcaga

SEQ ID NO: 281774 - DNA, 15 bp, Homo sapiens
ccaaacagacatcag

SEQ ID NO: 281775 - DNA, 15 bp, Homo sapiens
cccaaacagacatca

SEQ ID NO: 281776 - DNA, 15 bp, Homo sapiens
gcccaaacagacatc

SEQ ID NO: 281777 - DNA, 15 bp, Homo sapiens
ggcccaaacagacat

SEQ ID NO: 281778 - DNA, 15 bp, Homo sapiens
aggcccaaacagaca

SEQ ID NO: 281779 - DNA, 15 bp, Homo sapiens
aaggcccaaacagac

SEQ ID NO: 281780 - DNA, 15 bp, Homo sapiens
caaggcccaaacaga

SEQ ID NO: 281781 - DNA, 15 bp, Homo sapiens
tcaaggcccaaacag

SEQ ID NO: 281782 - DNA, 15 bp, Homo sapiens
atcaaggcccaaaca

SEQ ID NO: 281783 - DNA, 15 bp, Homo sapiens
aatcaaggcccaaac

SEQ ID NO: 281784 - DNA, 15 bp, Homo sapiens
gaatcaaggcccaaa

SEQ ID NO: 281785 - DNA, 15 bp, Homo sapiens
tgaatcaaggcccaa

SEQ ID NO: 281786 - DNA, 15 bp, Homo sapiens
ctgaatcaaggccca

SEQ ID NO: 281787 - DNA, 15 bp, Homo sapiens
actgaatcaaggccc

SEQ ID NO: 281788 - DNA, 15 bp, Homo sapiens
aactgaatcaaggcc

SEQ ID NO: 281789 - DNA, 15 bp, Homo sapiens
gaactgaatcaaggc

SEQ ID NO: 281790 - DNA, 15 bp, Homo sapiens
agaactgaatcaagg

SEQ ID NO: 281791 - DNA, 15 bp, Homo sapiens
aagaactgaatcaag

SEQ ID NO: 281792 - DNA, 15 bp, Homo sapiens
gaagaactgaatcaa

SEQ ID NO: 281793 - DNA, 15 bp, Homo sapiens
ggaagaactgaatca

SEQ ID NO: 281794 - DNA, 15 bp, Homo sapiens
aggaagaactgaatc

SEQ ID NO: 281795 - DNA, 15 bp, Homo sapiens
taggaagaactgaat

SEQ ID NO: 281796 - DNA, 15 bp, Homo sapiens
ttaggaagaactgaa

SEQ ID NO: 281797 - DNA, 15 bp, Homo sapiens
attaggaagaactga

SEQ ID NO: 281798 - DNA, 15 bp, Homo sapiens
tattaggaagaactg

SEQ ID NO: 281799 - DNA, 15 bp, Homo sapiens
ttattaggaagaact

SEQ ID NO: 281800 - DNA, 15 bp, Homo sapiens
attattaggaagaac

SEQ ID NO: 281801 - DNA, 15 bp, Homo sapiens
cattattaggaagaa

SEQ ID NO: 281802 - DNA, 15 bp, Homo sapiens
ccattattaggaaga

SEQ ID NO: 281803 - DNA, 15 bp, Homo sapiens
gccattattaggaag

SEQ ID NO: 281804 - DNA, 15 bp, Homo sapiens
agccattattaggaa

SEQ ID NO: 281805 - DNA, 15 bp, Homo sapiens
aagccattattagga

SEQ ID NO: 281806 - DNA, 15 bp, Homo sapiens
caagccattattagg

SEQ ID NO: 281807 - DNA, 15 bp, Homo sapiens
tcaagccattattag

SEQ ID NO: 281808 - DNA, 15 bp, Homo sapiens
atcaagccattatta

SEQ ID NO: 281809 - DNA, 15 bp, Homo sapiens
catcaagccattatt

SEQ ID NO: 281810 - DNA, 15 bp, Homo sapiens
tcatcaagccattat

SEQ ID NO: 281811 - DNA, 15 bp, Homo sapiens
ctcatcaagccatta

SEQ ID NO: 281812 - DNA, 15 bp, Homo sapiens
tctcatcaagccatt

SEQ ID NO: 281813 - DNA, 15 bp, Homo sapiens
gtctcatcaagccat

SEQ ID NO: 281814 - DNA, 15 bp, Homo sapiens
ggtctcatcaagcca

SEQ ID NO: 281815 - DNA, 15 bp, Homo sapiens
tggtctcatcaagcc

SEQ ID NO: 281816 - DNA, 15 bp, Homo sapiens
ctggtctcatcaagc

SEQ ID NO: 281817 - DNA, 15 bp, Homo sapiens
gctggtctcatcaag

SEQ ID NO: 281818 - DNA, 15 bp, Homo sapiens
agctggtctcatcaa

SEQ ID NO: 281819 - DNA, 15 bp, Homo sapiens
aagctggtctcatca

SEQ ID NO: 281820 - DNA, 15 bp, Homo sapiens
gaagctggtctcatc

SEQ ID NO: 281821 - DNA, 15 bp, Homo sapiens
agaagctggtctcat

SEQ ID NO: 281822 - DNA, 15 bp, Homo sapiens
gagaagctggtctca

SEQ ID NO: 281823 - DNA, 15 bp, Homo sapiens
agagaagctggtctc

SEQ ID NO: 281824 - DNA, 15 bp, Homo sapiens
cagagaagctggtct

SEQ ID NO: 281825 - DNA, 15 bp, Homo sapiens
acagagaagctggtc

SEQ ID NO: 281826 - DNA, 15 bp, Homo sapiens
aacagagaagctggt

SEQ ID NO: 281827 - DNA, 15 bp, Homo sapiens
taacagagaagctgg

SEQ ID NO: 281828 - DNA, 15 bp, Homo sapiens
ataacagagaagctg

SEQ ID NO: 281829 - DNA, 15 bp, Homo sapiens
gataacagagaagct

SEQ ID NO: 281830 - DNA, 15 bp, Homo sapiens
agataacagagaagc

SEQ ID NO: 281831 - DNA, 15 bp, Homo sapiens
gagataacagagaag

SEQ ID NO: 281832 - DNA, 15 bp, Homo sapiens
tgagataacagagaa

SEQ ID NO: 281833 - DNA, 15 bp, Homo sapiens
ctgagataacagaga

SEQ ID NO: 281834 - DNA, 15 bp, Homo sapiens
actgagataacagag

SEQ ID NO: 281835 - DNA, 15 bp, Homo sapiens
cactgagataacaga

SEQ ID NO: 281836 - DNA, 15 bp, Homo sapiens
ccactgagataacag

SEQ ID NO: 281837 - DNA, 15 bp, Homo sapiens
tccactgagataaca

SEQ ID NO: 281838 - DNA, 15 bp, Homo sapiens
ctccactgagataac

SEQ ID NO: 281839 - DNA, 15 bp, Homo sapiens
actccactgagataa

SEQ ID NO: 281840 - DNA, 15 bp, Homo sapiens
cactccactgagata

SEQ ID NO: 281841 - DNA, 15 bp, Homo sapiens
ccactccactgagat

SEQ ID NO: 281842 - DNA, 15 bp, Homo sapiens
gccactccactgaga

SEQ ID NO: 281843 - DNA, 15 bp, Homo sapiens
tgccactccactgag

SEQ ID NO: 281844 - DNA, 15 bp, Homo sapiens
ctgccactccactga

SEQ ID NO: 281845 - DNA, 15 bp, Homo sapiens
gctgccactccactg

SEQ ID NO: 281846 - DNA, 15 bp, Homo sapiens
tgctgccactccact

SEQ ID NO: 281847 - DNA, 15 bp, Homo sapiens
atgctgccactccac

SEQ ID NO: 281848 - DNA, 15 bp, Homo sapiens
aatgctgccactcca

SEQ ID NO: 281849 - DNA, 15 bp, Homo sapiens
aaatgctgccactcc

SEQ ID NO: 281850 - DNA, 15 bp, Homo sapiens
aaaatgctgccactc

SEQ ID NO: 281851 - DNA, 15 bp, Homo sapiens
caaaatgctgccact

SEQ ID NO: 281852 - DNA, 15 bp, Homo sapiens
gcaaaatgctgccac

SEQ ID NO: 281853 - DNA, 15 bp, Homo sapiens
tgcaaaatgctgcca

SEQ ID NO: 281854 - DNA, 15 bp, Homo sapiens
ttgcaaaatgctgcc

SEQ ID NO: 281855 - DNA, 15 bp, Homo sapiens
attgcaaaatgctgc

SEQ ID NO: 281856 - DNA, 15 bp, Homo sapiens
cattgcaaaatgctg

SEQ ID NO: 281857 - DNA, 15 bp, Homo sapiens
tcattgcaaaatgct

SEQ ID NO: 281858 - DNA, 15 bp, Homo sapiens
ctcattgcaaaatgc

SEQ ID NO: 281859 - DNA, 15 bp, Homo sapiens
tctcattgcaaaatg

SEQ ID NO: 281860 - DNA, 15 bp, Homo sapiens
atctcattgcaaaat

SEQ ID NO: 281861 - DNA, 15 bp, Homo sapiens
tatctcattgcaaaa

SEQ ID NO: 281862 - DNA, 15 bp, Homo sapiens
ctatctcattgcaaa

SEQ ID NO: 281863 - DNA, 15 bp, Homo sapiens
cctatctcattgcaa

SEQ ID NO: 281864 - DNA, 15 bp, Homo sapiens
tcctatctcattgca

SEQ ID NO: 281865 - DNA, 15 bp, Homo sapiens
atcctatctcattgc

SEQ ID NO: 281866 - DNA, 15 bp, Homo sapiens
gatcctatctcattg

SEQ ID NO: 281867 - DNA, 15 bp, Homo sapiens
tgatcctatctcatt

SEQ ID NO: 281868 - DNA, 15 bp, Homo sapiens
ttgatcctatctcat

SEQ ID NO: 281869 - DNA, 15 bp, Homo sapiens
tttgatcctatctca

SEQ ID NO: 281870 - DNA, 15 bp, Homo sapiens
atttgatcctatctc

SEQ ID NO: 281871 - DNA, 15 bp, Homo sapiens
catttgatcctatct

SEQ ID NO: 281872 - DNA, 15 bp, Homo sapiens
tcatttgatcctatc

SEQ ID NO: 281873 - DNA, 15 bp, Homo sapiens
ttcatttgatcctat

SEQ ID NO: 281874 - DNA, 15 bp, Homo sapiens
gttcatttgatccta

SEQ ID NO: 281875 - DNA, 15 bp, Homo sapiens
tgttcatttgatcct

SEQ ID NO: 281876 - DNA, 15 bp, Homo sapiens
ttgttcatttgatcc

SEQ ID NO: 281877 - DNA, 15 bp, Homo sapiens
tttgttcatttgatc

SEQ ID NO: 281878 - DNA, 15 bp, Homo sapiens
ttttgttcatttgat

SEQ ID NO: 281879 - DNA, 15 bp, Homo sapiens
tttttgttcatttga

SEQ ID NO: 281880 - DNA, 15 bp, Homo sapiens
ttttttgttcatttg

SEQ ID NO: 281881 - DNA, 15 bp, Homo sapiens
gttttttgttcattt

SEQ ID NO: 281882 - DNA, 15 bp, Homo sapiens
tgttttttgttcatt

SEQ ID NO: 281883 - DNA, 15 bp, Homo sapiens
ttgttttttgttcat

SEQ ID NO: 281884 - DNA, 15 bp, Homo sapiens
cttgttttttgttca

SEQ ID NO: 281885 - DNA, 15 bp, Homo sapiens
ccttgttttttgttc

SEQ ID NO: 281886 - DNA, 15 bp, Homo sapiens
tccttgttttttgtt

SEQ ID NO: 281887 - DNA, 15 bp, Homo sapiens
ctccttgttttttgt

SEQ ID NO: 281888 - DNA, 15 bp, Homo sapiens
tctccttgttttttg

SEQ ID NO: 281889 - DNA, 15 bp, Homo sapiens
ctctccttgtttttt

SEQ ID NO: 281890 - DNA, 15 bp, Homo sapiens
gctctccttgttttt

SEQ ID NO: 281891 - DNA, 15 bp, Homo sapiens
agctctccttgtttt

SEQ ID NO: 281892 - DNA, 15 bp, Homo sapiens
cagctctccttgttt

SEQ ID NO: 281893 - DNA, 15 bp, Homo sapiens
tcagctctccttgtt

SEQ ID NO: 281894 - DNA, 15 bp, Homo sapiens
atcagctctccttgt

SEQ ID NO: 281895 - DNA, 15 bp, Homo sapiens
aatcagctctccttg

SEQ ID NO: 281896 - DNA, 15 bp, Homo sapiens
caatcagctctcctt

SEQ ID NO: 281897 - DNA, 15 bp, Homo sapiens
acaatcagctctcct

SEQ ID NO: 281898 - DNA, 15 bp, Homo sapiens
aacaatcagctctcc

SEQ ID NO: 281899 - DNA, 15 bp, Homo sapiens
gaacaatcagctctc

SEQ ID NO: 281900 - DNA, 15 bp, Homo sapiens
ggaacaatcagctct

SEQ ID NO: 281901 - DNA, 15 bp, Homo sapiens
aggaacaatcagctc

SEQ ID NO: 281902 - DNA, 15 bp, Homo sapiens
gaggaacaatcagct

SEQ ID NO: 281903 - DNA, 15 bp, Homo sapiens
tgaggaacaatcagc

SEQ ID NO: 281904 - DNA, 15 bp, Homo sapiens
atgaggaacaatcag

SEQ ID NO: 281905 - DNA, 15 bp, Homo sapiens
aatgaggaacaatca

SEQ ID NO: 281906 - DNA, 15 bp, Homo sapiens
taatgaggaacaatc

SEQ ID NO: 281907 - DNA, 15 bp, Homo sapiens
ctaatgaggaacaat

SEQ ID NO: 281908 - DNA, 15 bp, Homo sapiens
gctaatgaggaacaa

SEQ ID NO: 281909 - DNA, 15 bp, Homo sapiens
agctaatgaggaaca

SEQ ID NO: 281910 - DNA, 15 bp, Homo sapiens
aagctaatgaggaac

SEQ ID NO: 281911 - DNA, 15 bp, Homo sapiens
gaagctaatgaggaa

SEQ ID NO: 281912 - DNA, 15 bp, Homo sapiens
ggaagctaatgagga

SEQ ID NO: 281913 - DNA, 15 bp, Homo sapiens
tggaagctaatgagg

SEQ ID NO: 281914 - DNA, 15 bp, Homo sapiens
gtggaagctaatgag

SEQ ID NO: 281915 - DNA, 15 bp, Homo sapiens
ggtggaagctaatga

SEQ ID NO: 281916 - DNA, 15 bp, Homo sapiens
tggtggaagctaatg

SEQ ID NO: 281917 - DNA, 15 bp, Homo sapiens
gtggtggaagctaat

SEQ ID NO: 281918 - DNA, 15 bp, Homo sapiens
ggtggtggaagctaa

SEQ ID NO: 281919 - DNA, 15 bp, Homo sapiens
aggtggtggaagcta

SEQ ID NO: 281920 - DNA, 15 bp, Homo sapiens
taggtggtggaagct

SEQ ID NO: 281921 - DNA, 15 bp, Homo sapiens
ctaggtggtggaagc

SEQ ID NO: 281922 - DNA, 15 bp, Homo sapiens
cctaggtggtggaag

SEQ ID NO: 281923 - DNA, 15 bp, Homo sapiens
ccctaggtggtggaa

SEQ ID NO: 281924 - DNA, 15 bp, Homo sapiens
cccctaggtggtgga

SEQ ID NO: 281925 - DNA, 15 bp, Homo sapiens
acccctaggtggtgg

SEQ ID NO: 281926 - DNA, 15 bp, Homo sapiens
cacccctaggtggtg

SEQ ID NO: 281927 - DNA, 15 bp, Homo sapiens
acacccctaggtggt

SEQ ID NO: 281928 - DNA, 15 bp, Homo sapiens
gacacccctaggtgg

SEQ ID NO: 281929 - DNA, 15 bp, Homo sapiens
agacacccctaggtg

SEQ ID NO: 281930 - DNA, 15 bp, Homo sapiens
aagacacccctaggt

SEQ ID NO: 281931 - DNA, 15 bp, Homo sapiens
aaagacacccctagg

SEQ ID NO: 281932 - DNA, 15 bp, Homo sapiens
gaaagacacccctag

SEQ ID NO: 281933 - DNA, 15 bp, Homo sapiens
ggaaagacaccccta

SEQ ID NO: 281934 - DNA, 15 bp, Homo sapiens
tggaaagacacccct

SEQ ID NO: 281935 - DNA, 15 bp, Homo sapiens
ttggaaagacacccc

SEQ ID NO: 281936 - DNA, 15 bp, Homo sapiens
cttggaaagacaccc

SEQ ID NO: 281937 - DNA, 15 bp, Homo sapiens
acttggaaagacacc

SEQ ID NO: 281938 - DNA, 15 bp, Homo sapiens
tacttggaaagacac

SEQ ID NO: 281939 - DNA, 15 bp, Homo sapiens
ctacttggaaagaca

SEQ ID NO: 281940 - DNA, 15 bp, Homo sapiens
tctacttggaaagac

SEQ ID NO: 281941 - DNA, 15 bp, Homo sapiens
ttctacttggaaaga

SEQ ID NO: 281942 - DNA, 15 bp, Homo sapiens
tttctacttggaaag

SEQ ID NO: 281943 - DNA, 15 bp, Homo sapiens
ctttctacttggaaa

SEQ ID NO: 281944 - DNA, 15 bp, Homo sapiens
tctttctacttggaa

SEQ ID NO: 281945 - DNA, 15 bp, Homo sapiens
gtctttctacttgga

SEQ ID NO: 281946 - DNA, 15 bp, Homo sapiens
agtctttctacttgg

SEQ ID NO: 281947 - DNA, 15 bp, Homo sapiens
gagtctttctacttg

SEQ ID NO: 281948 - DNA, 15 bp, Homo sapiens
agagtctttctactt

SEQ ID NO: 281949 - DNA, 15 bp, Homo sapiens
aagagtctttctact

SEQ ID NO: 281950 - DNA, 15 bp, Homo sapiens
aaagagtctttctac

SEQ ID NO: 281951 - DNA, 15 bp, Homo sapiens
caaagagtctttcta

SEQ ID NO: 281952 - DNA, 15 bp, Homo sapiens
ccaaagagtctttct

SEQ ID NO: 281953 - DNA, 15 bp, Homo sapiens
gccaaagagtctttc

SEQ ID NO: 281954 - DNA, 15 bp, Homo sapiens
ggccaaagagtcttt

SEQ ID NO: 281955 - DNA, 15 bp, Homo sapiens
aggccaaagagtctt

SEQ ID NO: 281956 - DNA, 15 bp, Homo sapiens
aaggccaaagagtct

SEQ ID NO: 281957 - DNA, 15 bp, Homo sapiens
gaaggccaaagagtc

SEQ ID NO: 281958 - DNA, 15 bp, Homo sapiens
ggaaggccaaagagt

SEQ ID NO: 281959 - DNA, 15 bp, Homo sapiens
aggaaggccaaagag

SEQ ID NO: 281960 - DNA, 15 bp, Homo sapiens
taggaaggccaaaga

SEQ ID NO: 281961 - DNA, 15 bp, Homo sapiens
ataggaaggccaaag

SEQ ID NO: 281962 - DNA, 15 bp, Homo sapiens
gataggaaggccaaa

SEQ ID NO: 281963 - DNA, 15 bp, Homo sapiens
ggataggaaggccaa

SEQ ID NO: 281964 - DNA, 15 bp, Homo sapiens
aggataggaaggcca

SEQ ID NO: 281965 - DNA, 15 bp, Homo sapiens
aaggataggaaggcc

SEQ ID NO: 281966 - DNA, 15 bp, Homo sapiens
taaggataggaaggc

SEQ ID NO: 281967 - DNA, 15 bp, Homo sapiens
gtaaggataggaagg

SEQ ID NO: 281968 - DNA, 15 bp, Homo sapiens
ggtaaggataggaag

SEQ ID NO: 281969 - DNA, 15 bp, Homo sapiens
aggtaaggataggaa

SEQ ID NO: 281970 - DNA, 15 bp, Homo sapiens
taggtaaggatagga

SEQ ID NO: 281971 - DNA, 15 bp, Homo sapiens
ttaggtaaggatagg

SEQ ID NO: 281972 - DNA, 15 bp, Homo sapiens
attaggtaaggatag

SEQ ID NO: 281973 - DNA, 15 bp, Homo sapiens
gattaggtaaggata

SEQ ID NO: 281974 - DNA, 15 bp, Homo sapiens
agattaggtaaggat

SEQ ID NO: 281975 - DNA, 15 bp, Homo sapiens
cagattaggtaagga

SEQ ID NO: 281976 - DNA, 15 bp, Homo sapiens
acagattaggtaagg

SEQ ID NO: 281977 - DNA, 15 bp, Homo sapiens
gacagattaggtaag

SEQ ID NO: 281978 - DNA, 15 bp, Homo sapiens
ggacagattaggtaa

SEQ ID NO: 281979 - DNA, 15 bp, Homo sapiens
aggacagattaggta

SEQ ID NO: 281980 - DNA, 15 bp, Homo sapiens
aaggacagattaggt

SEQ ID NO: 281981 - DNA, 15 bp, Homo sapiens
caaggacagattagg

SEQ ID NO: 281982 - DNA, 15 bp, Homo sapiens
acaaggacagattag

SEQ ID NO: 281983 - DNA, 15 bp, Homo sapiens
cacaaggacagatta

SEQ ID NO: 281984 - DNA, 15 bp, Homo sapiens
tcacaaggacagatt

SEQ ID NO: 281985 - DNA, 15 bp, Homo sapiens
atcacaaggacagat

SEQ ID NO: 281986 - DNA, 15 bp, Homo sapiens
aatcacaaggacaga

SEQ ID NO: 281987 - DNA, 15 bp, Homo sapiens
aaatcacaaggacag

SEQ ID NO: 281988 - DNA, 15 bp, Homo sapiens
caaatcacaaggaca

SEQ ID NO: 281989 - DNA, 15 bp, Homo sapiens
ccaaatcacaaggac

SEQ ID NO: 281990 - DNA, 15 bp, Homo sapiens
gccaaatcacaagga

SEQ ID NO: 281991 - DNA, 15 bp, Homo sapiens
tgccaaatcacaagg

SEQ ID NO: 281992 - DNA, 15 bp, Homo sapiens
atgccaaatcacaag

SEQ ID NO: 281993 - DNA, 15 bp, Homo sapiens
tatgccaaatcacaa

SEQ ID NO: 281994 - DNA, 15 bp, Homo sapiens
gtatgccaaatcaca

SEQ ID NO: 281995 - DNA, 15 bp, Homo sapiens
agtatgccaaatcac

SEQ ID NO: 281996 - DNA, 15 bp, Homo sapiens
cagtatgccaaatca

SEQ ID NO: 281997 - DNA, 15 bp, Homo sapiens
tcagtatgccaaatc

SEQ ID NO: 281998 - DNA, 15 bp, Homo sapiens
ttcagtatgccaaat

SEQ ID NO: 281999 - DNA, 15 bp, Homo sapiens
tttcagtatgccaaa

SEQ ID NO: 282000 - DNA, 15 bp, Homo sapiens
atttcagtatgccaa

SEQ ID NO: 282001 - DNA, 15 bp, Homo sapiens
tatttcagtatgcca

SEQ ID NO: 282002 - DNA, 15 bp, Homo sapiens
ctatttcagtatgcc

SEQ ID NO: 282003 - DNA, 15 bp, Homo sapiens
tctatttcagtatgc

SEQ ID NO: 282004 - DNA, 15 bp, Homo sapiens
atctatttcagtatg

SEQ ID NO: 282005 - DNA, 15 bp, Homo sapiens
tatctatttcagtat

SEQ ID NO: 282006 - DNA, 15 bp, Homo sapiens
atatctatttcagta

SEQ ID NO: 282007 - DNA, 15 bp, Homo sapiens
catatctatttcagt

SEQ ID NO: 282008 - DNA, 15 bp, Homo sapiens
tcatatctatttcag

SEQ ID NO: 282009 - DNA, 15 bp, Homo sapiens
ctcatatctatttca

SEQ ID NO: 282010 - DNA, 15 bp, Homo sapiens
tctcatatctatttc

SEQ ID NO: 282011 - DNA, 15 bp, Homo sapiens
ttctcatatctattt

SEQ ID NO: 282012 - DNA, 15 bp, Homo sapiens
tttctcatatctatt

SEQ ID NO: 282013 - DNA, 15 bp, Homo sapiens
atttctcatatctat

SEQ ID NO: 282014 - DNA, 15 bp, Homo sapiens
catttctcatatcta

SEQ ID NO: 282015 - DNA, 15 bp, Homo sapiens
gcatttctcatatct

SEQ ID NO: 282016 - DNA, 15 bp, Homo sapiens
agcatttctcatatc

SEQ ID NO: 282017 - DNA, 15 bp, Homo sapiens
cagcatttctcatat

SEQ ID NO: 282018 - DNA, 15 bp, Homo sapiens
acagcatttctcata

SEQ ID NO: 282019 - DNA, 15 bp, Homo sapiens
aacagcatttctcat

SEQ ID NO: 282020 - DNA, 15 bp, Homo sapiens
aaacagcatttctca

SEQ ID NO: 282021 - DNA, 15 bp, Homo sapiens
gaaacagcatttctc

SEQ ID NO: 282022 - DNA, 15 bp, Homo sapiens
ggaaacagcatttct

SEQ ID NO: 282023 - DNA, 15 bp, Homo sapiens
gggaaacagcatttc

SEQ ID NO: 282024 - DNA, 15 bp, Homo sapiens
ggggaaacagcattt

SEQ ID NO: 282025 - DNA, 15 bp, Homo sapiens
tggggaaacagcatt

SEQ ID NO: 282026 - DNA, 15 bp, Homo sapiens
atggggaaacagcat

SEQ ID NO: 282027 - DNA, 15 bp, Homo sapiens
catggggaaacagca

SEQ ID NO: 282028 - DNA, 15 bp, Homo sapiens
tcatggggaaacagc

SEQ ID NO: 282029 - DNA, 15 bp, Homo sapiens
ctcatggggaaacag

SEQ ID NO: 282030 - DNA, 15 bp, Homo sapiens
tctcatggggaaaca

SEQ ID NO: 282031 - DNA, 15 bp, Homo sapiens
atctcatggggaaac

SEQ ID NO: 282032 - DNA, 15 bp, Homo sapiens
tatctcatggggaaa

SEQ ID NO: 282033 - DNA, 15 bp, Homo sapiens
gtatctcatggggaa

SEQ ID NO: 282034 - DNA, 15 bp, Homo sapiens
tgtatctcatgggga

SEQ ID NO: 282035 - DNA, 15 bp, Homo sapiens
atgtatctcatgggg

SEQ ID NO: 282036 - DNA, 15 bp, Homo sapiens
aatgtatctcatggg

SEQ ID NO: 282037 - DNA, 15 bp, Homo sapiens
gaatgtatctcatgg

SEQ ID NO: 282038 - DNA, 15 bp, Homo sapiens
agaatgtatctcatg

SEQ ID NO: 282039 - DNA, 15 bp, Homo sapiens
aagaatgtatctcat

SEQ ID NO: 282040 - DNA, 15 bp, Homo sapiens
aaagaatgtatctca

SEQ ID NO: 282041 - DNA, 15 bp, Homo sapiens
aaaagaatgtatctc

SEQ ID NO: 282042 - DNA, 15 bp, Homo sapiens
taaaagaatgtatct

SEQ ID NO: 282043 - DNA, 15 bp, Homo sapiens
ataaaagaatgtatc

SEQ ID NO: 282044 - DNA, 15 bp, Homo sapiens
gataaaagaatgtat

SEQ ID NO: 282045 - DNA, 15 bp, Homo sapiens
agataaaagaatgta

SEQ ID NO: 282046 - DNA, 15 bp, Homo sapiens
gagataaaagaatgt

SEQ ID NO: 282047 - DNA, 15 bp, Homo sapiens
agagataaaagaatg

SEQ ID NO: 282048 - DNA, 15 bp, Homo sapiens
aagagataaaagaat

SEQ ID NO: 282049 - DNA, 15 bp, Homo sapiens
aaagagataaaagaa

SEQ ID NO: 282050 - DNA, 15 bp, Homo sapiens
aaaagagataaaaga

SEQ ID NO: 282051 - DNA, 15 bp, Homo sapiens
taaaagagataaaag

SEQ ID NO: 282052 - DNA, 15 bp, Homo sapiens
ctaaaagagataaaa

SEQ ID NO: 282053 - DNA, 15 bp, Homo sapiens
tctaaaagagataaa

SEQ ID NO: 282054 - DNA, 15 bp, Homo sapiens
ctctaaaagagataa

SEQ ID NO: 282055 - DNA, 15 bp, Homo sapiens
tctctaaaagagata

SEQ ID NO: 282056 - DNA, 15 bp, Homo sapiens
ctctctaaaagagat

SEQ ID NO: 282057 - DNA, 15 bp, Homo sapiens
actctctaaaagaga

SEQ ID NO: 282058 - DNA, 15 bp, Homo sapiens
aactctctaaaagag

SEQ ID NO: 282059 - DNA, 15 bp, Homo sapiens
taactctctaaaaga

SEQ ID NO: 282060 - DNA, 15 bp, Homo sapiens
gtaactctctaaaag

SEQ ID NO: 282061 - DNA, 15 bp, Homo sapiens
tgtaactctctaaaa

SEQ ID NO: 282062 - DNA, 15 bp, Homo sapiens
ctgtaactctctaaa

SEQ ID NO: 282063 - DNA, 15 bp, Homo sapiens
tctgtaactctctaa

SEQ ID NO: 282064 - DNA, 15 bp, Homo sapiens
ttctgtaactctcta

SEQ ID NO: 282065 - DNA, 15 bp, Homo sapiens
attctgtaactctct

SEQ ID NO: 282066 - DNA, 15 bp, Homo sapiens
aattctgtaactctc

SEQ ID NO: 282067 - DNA, 15 bp, Homo sapiens
taattctgtaactct

SEQ ID NO: 282068 - DNA, 15 bp, Homo sapiens
ctaattctgtaactc

SEQ ID NO: 282069 - DNA, 15 bp, Homo sapiens
actaattctgtaact

SEQ ID NO: 282070 - DNA, 15 bp, Homo sapiens
aactaattctgtaac

SEQ ID NO: 282071 - DNA, 15 bp, Homo sapiens
caactaattctgtaa

SEQ ID NO: 282072 - DNA, 15 bp, Homo sapiens
tcaactaattctgta

SEQ ID NO: 282073 - DNA, 15 bp, Homo sapiens
atcaactaattctgt

SEQ ID NO: 282074 - DNA, 15 bp, Homo sapiens
aatcaactaattctg

SEQ ID NO: 282075 - DNA, 15 bp, Homo sapiens
aaatcaactaattct

SEQ ID NO: 282076 - DNA, 15 bp, Homo sapiens
caaatcaactaattc

SEQ ID NO: 282077 - DNA, 15 bp, Homo sapiens
acaaatcaactaatt

SEQ ID NO: 282078 - DNA, 15 bp, Homo sapiens
aacaaatcaactaat

SEQ ID NO: 282079 - DNA, 15 bp, Homo sapiens
taacaaatcaactaa

SEQ ID NO: 282080 - DNA, 15 bp, Homo sapiens
ataacaaatcaacta

SEQ ID NO: 282081 - DNA, 15 bp, Homo sapiens
tataacaaatcaact

SEQ ID NO: 282082 - DNA, 15 bp, Homo sapiens
ctataacaaatcaac

SEQ ID NO: 282083 - DNA, 15 bp, Homo sapiens
actataacaaatcaa

SEQ ID NO: 282084 - DNA, 15 bp, Homo sapiens
aactataacaaatca

SEQ ID NO: 282085 - DNA, 15 bp, Homo sapiens
aaactataacaaatc

SEQ ID NO: 282086 - DNA, 15 bp, Homo sapiens
aaaactataacaaat

SEQ ID NO: 282087 - DNA, 15 bp, Homo sapiens
caaaactataacaaa

SEQ ID NO: 282088 - DNA, 15 bp, Homo sapiens
gcaaaactataacaa

SEQ ID NO: 282089 - DNA, 15 bp, Homo sapiens
tgcaaaactataaca

SEQ ID NO: 282090 - DNA, 15 bp, Homo sapiens
atgcaaaactataac

SEQ ID NO: 282091 - DNA, 15 bp, Homo sapiens
aatgcaaaactataa

SEQ ID NO: 282092 - DNA, 15 bp, Homo sapiens
taatgcaaaactata

SEQ ID NO: 282093 - DNA, 15 bp, Homo sapiens
ataatgcaaaactat

SEQ ID NO: 282094 - DNA, 15 bp, Homo sapiens
cataatgcaaaacta

SEQ ID NO: 282095 - DNA, 15 bp, Homo sapiens
acataatgcaaaact

SEQ ID NO: 282096 - DNA, 15 bp, Homo sapiens
aacataatgcaaaac

SEQ ID NO: 282097 - DNA, 15 bp, Homo sapiens
taacataatgcaaaa

SEQ ID NO: 282098 - DNA, 15 bp, Homo sapiens
ataacataatgcaaa

SEQ ID NO: 282099 - DNA, 15 bp, Homo sapiens
cataacataatgcaa

SEQ ID NO: 282100 - DNA, 15 bp, Homo sapiens
gcataacataatgca

SEQ ID NO: 282101 - DNA, 15 bp, Homo sapiens
tgcataacataatgc

SEQ ID NO: 282102 - DNA, 15 bp, Homo sapiens
ttgcataacataatg

SEQ ID NO: 282103 - DNA, 15 bp, Homo sapiens
attgcataacataat

SEQ ID NO: 282104 - DNA, 15 bp, Homo sapiens
cattgcataacataa

SEQ ID NO: 282105 - DNA, 15 bp, Homo sapiens
acattgcataacata

SEQ ID NO: 282106 - DNA, 15 bp, Homo sapiens
aacattgcataacat

SEQ ID NO: 282107 - DNA, 15 bp, Homo sapiens
aaacattgcataaca

SEQ ID NO: 282108 - DNA, 15 bp, Homo sapiens
taaacattgcataac

SEQ ID NO: 282109 - DNA, 15 bp, Homo sapiens
ataaacattgcataa

SEQ ID NO: 282110 - DNA, 15 bp, Homo sapiens
tataaacattgcata

SEQ ID NO: 282111 - DNA, 15 bp, Homo sapiens
atataaacattgcat

SEQ ID NO: 282112 - DNA, 15 bp, Homo sapiens
catataaacattgca

SEQ ID NO: 282113 - DNA, 15 bp, Homo sapiens
gcatataaacattgc

SEQ ID NO: 282114 - DNA, 15 bp, Homo sapiens
ggcatataaacattg

SEQ ID NO: 282115 - DNA, 15 bp, Homo sapiens
gggcatataaacatt

SEQ ID NO: 282116 - DNA, 15 bp, Homo sapiens
tgggcatataaacat

SEQ ID NO: 282117 - DNA, 15 bp, Homo sapiens
ctgggcatataaaca

SEQ ID NO: 282118 - DNA, 15 bp, Homo sapiens
tctgggcatataaac

SEQ ID NO: 282119 - DNA, 15 bp, Homo sapiens
ctctgggcatataaa

SEQ ID NO: 282120 - DNA, 15 bp, Homo sapiens
tctctgggcatataa

SEQ ID NO: 282121 - DNA, 15 bp, Homo sapiens
ctctctgggcatata

SEQ ID NO: 282122 - DNA, 15 bp, Homo sapiens
actctctgggcatat

SEQ ID NO: 282123 - DNA, 15 bp, Homo sapiens
aactctctgggcata

SEQ ID NO: 282124 - DNA, 15 bp, Homo sapiens
caactctctgggcat

SEQ ID NO: 282125 - DNA, 15 bp, Homo sapiens
ccaactctctgggca

SEQ ID NO: 282126 - DNA, 15 bp, Homo sapiens
accaactctctgggc

SEQ ID NO: 282127 - DNA, 15 bp, Homo sapiens
taccaactctctggg

SEQ ID NO: 282128 - DNA, 15 bp, Homo sapiens
ataccaactctctgg

SEQ ID NO: 282129 - DNA, 15 bp, Homo sapiens
aataccaactctctg

SEQ ID NO: 282130 - DNA, 15 bp, Homo sapiens
taataccaactctct

SEQ ID NO: 282131 - DNA, 15 bp, Homo sapiens
ataataccaactctc

SEQ ID NO: 282132 - DNA, 15 bp, Homo sapiens
gataataccaactct

SEQ ID NO: 282133 - DNA, 15 bp, Homo sapiens
tgataataccaactc

SEQ ID NO: 282134 - DNA, 15 bp, Homo sapiens
ttgataataccaact

SEQ ID NO: 282135 - DNA, 15 bp, Homo sapiens
tttgataataccaac

SEQ ID NO: 282136 - DNA, 15 bp, Homo sapiens
gtttgataataccaa

SEQ ID NO: 282137 - DNA, 15 bp, Homo sapiens
agtttgataatacca

SEQ ID NO: 282138 - DNA, 15 bp, Homo sapiens
tagtttgataatacc

SEQ ID NO: 282139 - DNA, 15 bp, Homo sapiens
ttagtttgataatac

SEQ ID NO: 282140 - DNA, 15 bp, Homo sapiens
attagtttgataata

SEQ ID NO: 282141 - DNA, 15 bp, Homo sapiens
cattagtttgataat

SEQ ID NO: 282142 - DNA, 15 bp, Homo sapiens
ccattagtttgataa

SEQ ID NO: 282143 - DNA, 15 bp, Homo sapiens
tccattagtttgata

SEQ ID NO: 282144 - DNA, 15 bp, Homo sapiens
gtccattagtttgat

SEQ ID NO: 282145 - DNA, 15 bp, Homo sapiens
agtccattagtttga

SEQ ID NO: 282146 - DNA, 15 bp, Homo sapiens
aagtccattagtttg

SEQ ID NO: 282147 - DNA, 15 bp, Homo sapiens
gaagtccattagttt

SEQ ID NO: 282148 - DNA, 15 bp, Homo sapiens
tgaagtccattagtt

SEQ ID NO: 282149 - DNA, 15 bp, Homo sapiens
ctgaagtccattagt

SEQ ID NO: 282150 - DNA, 15 bp, Homo sapiens
cctgaagtccattag

SEQ ID NO: 282151 - DNA, 15 bp, Homo sapiens
tcctgaagtccatta

SEQ ID NO: 282152 - DNA, 15 bp, Homo sapiens
ttcctgaagtccatt

SEQ ID NO: 282153 - DNA, 15 bp, Homo sapiens
tttcctgaagtccat

SEQ ID NO: 282154 - DNA, 15 bp, Homo sapiens
ttttcctgaagtcca

SEQ ID NO: 282155 - DNA, 15 bp, Homo sapiens
attttcctgaagtcc

SEQ ID NO: 282156 - DNA, 15 bp, Homo sapiens
aattttcctgaagtc

SEQ ID NO: 282157 - DNA, 15 bp, Homo sapiens
aaattttcctgaagt

SEQ ID NO: 282158 - DNA, 15 bp, Homo sapiens
caaattttcctgaag

SEQ ID NO: 282159 - DNA, 15 bp, Homo sapiens
ccaaattttcctgaa

SEQ ID NO: 282160 - DNA, 15 bp, Homo sapiens
gccaaattttcctga

SEQ ID NO: 282161 - DNA, 15 bp, Homo sapiens
ggccaaattttcctg

SEQ ID NO: 282162 - DNA, 15 bp, Homo sapiens
gggccaaattttcct

SEQ ID NO: 282163 - DNA, 15 bp, Homo sapiens
ggggccaaattttcc

SEQ ID NO: 282164 - DNA, 15 bp, Homo sapiens
tggggccaaattttc

SEQ ID NO: 282165 - DNA, 15 bp, Homo sapiens
ttggggccaaatttt

SEQ ID NO: 282166 - DNA, 15 bp, Homo sapiens
tttggggccaaattt

SEQ ID NO: 282167 - DNA, 15 bp, Homo sapiens
ctttggggccaaatt

SEQ ID NO: 282168 - DNA, 15 bp, Homo sapiens
tctttggggccaaat

SEQ ID NO: 282169 - DNA, 15 bp, Homo sapiens
ttctttggggccaaa

SEQ ID NO: 282170 - DNA, 15 bp, Homo sapiens
attctttggggccaa

SEQ ID NO: 282171 - DNA, 15 bp, Homo sapiens
cattctttggggcca

SEQ ID NO: 282172 - DNA, 15 bp, Homo sapiens
ccattctttggggcc

SEQ ID NO: 282173 - DNA, 15 bp, Homo sapiens
tccattctttggggc

SEQ ID NO: 282174 - DNA, 15 bp, Homo sapiens
ctccattctttgggg

SEQ ID NO: 282175 - DNA, 15 bp, Homo sapiens
gctccattctttggg

SEQ ID NO: 282176 - DNA, 15 bp, Homo sapiens
ggctccattctttgg

SEQ ID NO: 282177 - DNA, 15 bp, Homo sapiens
tggctccattctttg

SEQ ID NO: 282178 - DNA, 15 bp, Homo sapiens
gtggctccattcttt

SEQ ID NO: 282179 - DNA, 15 bp, Homo sapiens
tgtggctccattctt

SEQ ID NO: 282180 - DNA, 15 bp, Homo sapiens
atgtggctccattct

SEQ ID NO: 282181 - DNA, 15 bp, Homo sapiens
tatgtggctccattc

SEQ ID NO: 282182 - DNA, 15 bp, Homo sapiens
ctatgtggctccatt

SEQ ID NO: 282183 - DNA, 15 bp, Homo sapiens
cctatgtggctccat

SEQ ID NO: 282184 - DNA, 15 bp, Homo sapiens
tcctatgtggctcca

SEQ ID NO: 282185 - DNA, 15 bp, Homo sapiens
atcctatgtggctcc

SEQ ID NO: 282186 - DNA, 15 bp, Homo sapiens
catcctatgtggctc

SEQ ID NO: 282187 - DNA, 15 bp, Homo sapiens
ccatcctatgtggct

SEQ ID NO: 282188 - DNA, 15 bp, Homo sapiens
tccatcctatgtggc

SEQ ID NO: 282189 - DNA, 15 bp, Homo sapiens
ctccatcctatgtgg

SEQ ID NO: 282190 - DNA, 15 bp, Homo sapiens
cctccatcctatgtg

SEQ ID NO: 282191 - DNA, 15 bp, Homo sapiens
acctccatcctatgt

SEQ ID NO: 282192 - DNA, 15 bp, Homo sapiens
gacctccatcctatg

SEQ ID NO: 282193 - DNA, 15 bp, Homo sapiens
agacctccatcctat

SEQ ID NO: 282194 - DNA, 15 bp, Homo sapiens
aagacctccatccta

SEQ ID NO: 282195 - DNA, 15 bp, Homo sapiens
aaagacctccatcct

SEQ ID NO: 282196 - DNA, 15 bp, Homo sapiens
caaagacctccatcc

SEQ ID NO: 282197 - DNA, 15 bp, Homo sapiens
tcaaagacctccatc

SEQ ID NO: 282198 - DNA, 15 bp, Homo sapiens
ttcaaagacctccat

SEQ ID NO: 282199 - DNA, 15 bp, Homo sapiens
tttcaaagacctcca

SEQ ID NO: 282200 - DNA, 15 bp, Homo sapiens
atttcaaagacctcc

SEQ ID NO: 282201 - DNA, 15 bp, Homo sapiens
catttcaaagacctc

SEQ ID NO: 282202 - DNA, 15 bp, Homo sapiens
acatttcaaagacct

SEQ ID NO: 282203 - DNA, 15 bp, Homo sapiens
gacatttcaaagacc

SEQ ID NO: 282204 - DNA, 15 bp, Homo sapiens
tgacatttcaaagac

SEQ ID NO: 282205 - DNA, 15 bp, Homo sapiens
atgacatttcaaaga

SEQ ID NO: 282206 - DNA, 15 bp, Homo sapiens
tatgacatttcaaag

SEQ ID NO: 282207 - DNA, 15 bp, Homo sapiens
ttatgacatttcaaa

SEQ ID NO: 282208 - DNA, 15 bp, Homo sapiens
tttatgacatttcaa

SEQ ID NO: 282209 - DNA, 15 bp, Homo sapiens
ctttatgacatttca

SEQ ID NO: 282210 - DNA, 15 bp, Homo sapiens
actttatgacatttc

SEQ ID NO: 282211 - DNA, 15 bp, Homo sapiens
tactttatgacattt

SEQ ID NO: 282212 - DNA, 15 bp, Homo sapiens
atactttatgacatt

SEQ ID NO: 282213 - DNA, 15 bp, Homo sapiens
gatactttatgacat

SEQ ID NO: 282214 - DNA, 15 bp, Homo sapiens
agatactttatgaca

SEQ ID NO: 282215 - DNA, 15 bp, Homo sapiens
cagatactttatgac

SEQ ID NO: 282216 - DNA, 15 bp, Homo sapiens
ccagatactttatga

SEQ ID NO: 282217 - DNA, 15 bp, Homo sapiens
gccagatactttatg

SEQ ID NO: 282218 - DNA, 15 bp, Homo sapiens
agccagatactttat

SEQ ID NO: 282219 - DNA, 15 bp, Homo sapiens
aagccagatacttta

SEQ ID NO: 282220 - DNA, 15 bp, Homo sapiens
gaagccagatacttt

SEQ ID NO: 282221 - DNA, 15 bp, Homo sapiens
ggaagccagatactt

SEQ ID NO: 282222 - DNA, 15 bp, Homo sapiens
aggaagccagatact

SEQ ID NO: 282223 - DNA, 15 bp, Homo sapiens
aaggaagccagatac

SEQ ID NO: 282224 - DNA, 15 bp, Homo sapiens
gaaggaagccagata

SEQ ID NO: 282225 - DNA, 15 bp, Homo sapiens
agaaggaagccagat

SEQ ID NO: 282226 - DNA, 15 bp, Homo sapiens
gagaaggaagccaga

SEQ ID NO: 282227 - DNA, 15 bp, Homo sapiens
ggagaaggaagccag

SEQ ID NO: 282228 - DNA, 15 bp, Homo sapiens
tggagaaggaagcca

SEQ ID NO: 282229 - DNA, 15 bp, Homo sapiens
ctggagaaggaagcc

SEQ ID NO: 282230 - DNA, 15 bp, Homo sapiens
gctggagaaggaagc

SEQ ID NO: 282231 - DNA, 15 bp, Homo sapiens
ggctggagaaggaag

SEQ ID NO: 282232 - DNA, 15 bp, Homo sapiens
aggctggagaaggaa

SEQ ID NO: 282233 - DNA, 15 bp, Homo sapiens
aaggctggagaagga

SEQ ID NO: 282234 - DNA, 15 bp, Homo sapiens
caaggctggagaagg

SEQ ID NO: 282235 - DNA, 15 bp, Homo sapiens
acaaggctggagaag

SEQ ID NO: 282236 - DNA, 15 bp, Homo sapiens
aacaaggctggagaa

SEQ ID NO: 282237 - DNA, 15 bp, Homo sapiens
gaacaaggctggaga

SEQ ID NO: 282238 - DNA, 15 bp, Homo sapiens
tgaacaaggctggag

SEQ ID NO: 282239 - DNA, 15 bp, Homo sapiens
ttgaacaaggctgga

SEQ ID NO: 282240 - DNA, 15 bp, Homo sapiens
tttgaacaaggctgg

SEQ ID NO: 282241 - DNA, 15 bp, Homo sapiens
gtttgaacaaggctg

SEQ ID NO: 282242 - DNA, 15 bp, Homo sapiens
agtttgaacaaggct

SEQ ID NO: 282243 - DNA, 15 bp, Homo sapiens
cagtttgaacaaggc

SEQ ID NO: 282244 - DNA, 15 bp, Homo sapiens
tcagtttgaacaagg

SEQ ID NO: 282245 - DNA, 15 bp, Homo sapiens
gtcagtttgaacaag

SEQ ID NO: 282246 - DNA, 15 bp, Homo sapiens
agtcagtttgaacaa

SEQ ID NO: 282247 - DNA, 15 bp, Homo sapiens
tagtcagtttgaaca

SEQ ID NO: 282248 - DNA, 15 bp, Homo sapiens
ctagtcagtttgaac

SEQ ID NO: 282249 - DNA, 15 bp, Homo sapiens
cctagtcagtttgaa

SEQ ID NO: 282250 - DNA, 15 bp, Homo sapiens
gcctagtcagtttga

SEQ ID NO: 282251 - DNA, 15 bp, Homo sapiens
tgcctagtcagtttg

SEQ ID NO: 282252 - DNA, 15 bp, Homo sapiens
gtgcctagtcagttt

SEQ ID NO: 282253 - DNA, 15 bp, Homo sapiens
tgtgcctagtcagtt

SEQ ID NO: 282254 - DNA, 15 bp, Homo sapiens
ctgtgcctagtcagt

SEQ ID NO: 282255 - DNA, 15 bp, Homo sapiens
cctgtgcctagtcag

SEQ ID NO: 282256 - DNA, 15 bp, Homo sapiens
acctgtgcctagtca

SEQ ID NO: 282257 - DNA, 15 bp, Homo sapiens
cacctgtgcctagtc

SEQ ID NO: 282258 - DNA, 15 bp, Homo sapiens
acacctgtgcctagt

SEQ ID NO: 282259 - DNA, 15 bp, Homo sapiens
tacacctgtgcctag

SEQ ID NO: 282260 - DNA, 15 bp, Homo sapiens
ctacacctgtgccta

SEQ ID NO: 282261 - DNA, 15 bp, Homo sapiens
tctacacctgtgcct

SEQ ID NO: 282262 - DNA, 15 bp, Homo sapiens
gtctacacctgtgcc

SEQ ID NO: 282263 - DNA, 15 bp, Homo sapiens
ggtctacacctgtgc

SEQ ID NO: 282264 - DNA, 15 bp, Homo sapiens
gggtctacacctgtg

SEQ ID NO: 282265 - DNA, 15 bp, Homo sapiens
tgggtctacacctgt

SEQ ID NO: 282266 - DNA, 15 bp, Homo sapiens
gtgggtctacacctg

SEQ ID NO: 282267 - DNA, 15 bp, Homo sapiens
agtgggtctacacct

SEQ ID NO: 282268 - DNA, 15 bp, Homo sapiens
cagtgggtctacacc

SEQ ID NO: 282269 - DNA, 15 bp, Homo sapiens
gcagtgggtctacac

SEQ ID NO: 282270 - DNA, 15 bp, Homo sapiens
ggcagtgggtctaca

SEQ ID NO: 282271 - DNA, 15 bp, Homo sapiens
aggcagtgggtctac

SEQ ID NO: 282272 - DNA, 15 bp, Homo sapiens
gaggcagtgggtcta

SEQ ID NO: 282273 - DNA, 15 bp, Homo sapiens
agaggcagtgggtct

SEQ ID NO: 282274 - DNA, 15 bp, Homo sapiens
gagaggcagtgggtc

SEQ ID NO: 282275 - DNA, 15 bp, Homo sapiens
ggagaggcagtgggt

SEQ ID NO: 282276 - DNA, 15 bp, Homo sapiens
aggagaggcagtggg

SEQ ID NO: 282277 - DNA, 15 bp, Homo sapiens
caggagaggcagtgg

SEQ ID NO: 282278 - DNA, 15 bp, Homo sapiens
acaggagaggcagtg

SEQ ID NO: 282279 - DNA, 15 bp, Homo sapiens
cacaggagaggcagt

SEQ ID NO: 282280 - DNA, 15 bp, Homo sapiens
gcacaggagaggcag

SEQ ID NO: 282281 - DNA, 15 bp, Homo sapiens
agcacaggagaggca

SEQ ID NO: 282282 - DNA, 15 bp, Homo sapiens
gagcacaggagaggc

SEQ ID NO: 282283 - DNA, 15 bp, Homo sapiens
tgagcacaggagagg

SEQ ID NO: 282284 - DNA, 15 bp, Homo sapiens
ctgagcacaggagag

SEQ ID NO: 282285 - DNA, 15 bp, Homo sapiens
gctgagcacaggaga

SEQ ID NO: 282286 - DNA, 15 bp, Homo sapiens
ggctgagcacaggag

SEQ ID NO: 282287 - DNA, 15 bp, Homo sapiens
gggctgagcacagga

SEQ ID NO: 282288 - DNA, 15 bp, Homo sapiens
ggggctgagcacagg

SEQ ID NO: 282289 - DNA, 15 bp, Homo sapiens
tggggctgagcacag

SEQ ID NO: 282290 - DNA, 15 bp, Homo sapiens
ttggggctgagcaca

SEQ ID NO: 282291 - DNA, 15 bp, Homo sapiens
cttggggctgagcac

SEQ ID NO: 282292 - DNA, 15 bp, Homo sapiens
tcttggggctgagca

SEQ ID NO: 282293 - DNA, 15 bp, Homo sapiens
gtcttggggctgagc

SEQ ID NO: 282294 - DNA, 15 bp, Homo sapiens
tgtcttggggctgag

SEQ ID NO: 282295 - DNA, 15 bp, Homo sapiens
ctgtcttggggctga

SEQ ID NO: 282296 - DNA, 15 bp, Homo sapiens
cctgtcttggggctg

SEQ ID NO: 282297 - DNA, 15 bp, Homo sapiens
gcctgtcttggggct

SEQ ID NO: 282298 - DNA, 15 bp, Homo sapiens
tgcctgtcttggggc

SEQ ID NO: 282299 - DNA, 15 bp, Homo sapiens
gtgcctgtcttgggg

SEQ ID NO: 282300 - DNA, 15 bp, Homo sapiens
ggtgcctgtcttggg

SEQ ID NO: 282301 - DNA, 15 bp, Homo sapiens
aggtgcctgtcttgg

SEQ ID NO: 282302 - DNA, 15 bp, Homo sapiens
caggtgcctgtcttg

SEQ ID NO: 282303 - DNA, 15 bp, Homo sapiens
ccaggtgcctgtctt

SEQ ID NO: 282304 - DNA, 15 bp, Homo sapiens
cccaggtgcctgtct

SEQ ID NO: 282305 - DNA, 15 bp, Homo sapiens
tcccaggtgcctgtc

SEQ ID NO: 282306 - DNA, 15 bp, Homo sapiens
ctcccaggtgcctgt

SEQ ID NO: 282307 - DNA, 15 bp, Homo sapiens
tctcccaggtgcctg

SEQ ID NO: 282308 - DNA, 15 bp, Homo sapiens
ctctcccaggtgcct

SEQ ID NO: 282309 - DNA, 15 bp, Homo sapiens
gctctcccaggtgcc

SEQ ID NO: 282310 - DNA, 15 bp, Homo sapiens
agctctcccaggtgc

SEQ ID NO: 282311 - DNA, 15 bp, Homo sapiens
cagctctcccaggtg

SEQ ID NO: 282312 - DNA, 15 bp, Homo sapiens
acagctctcccaggt

SEQ ID NO: 282313 - DNA, 15 bp, Homo sapiens
cacagctctcccagg

SEQ ID NO: 282314 - DNA, 15 bp, Homo sapiens
tcacagctctcccag

SEQ ID NO: 282315 - DNA, 15 bp, Homo sapiens
ctcacagctctccca

SEQ ID NO: 282316 - DNA, 15 bp, Homo sapiens
cctcacagctctccc

SEQ ID NO: 282317 - DNA, 15 bp, Homo sapiens
tcctcacagctctcc

SEQ ID NO: 282318 - DNA, 15 bp, Homo sapiens
gtcctcacagctctc

SEQ ID NO: 282319 - DNA, 15 bp, Homo sapiens
tgtcctcacagctct

SEQ ID NO: 282320 - DNA, 15 bp, Homo sapiens
ctgtcctcacagctc

SEQ ID NO: 282321 - DNA, 15 bp, Homo sapiens
gctgtcctcacagct

SEQ ID NO: 282322 - DNA, 15 bp, Homo sapiens
tgctgtcctcacagc

SEQ ID NO: 282323 - DNA, 15 bp, Homo sapiens
gtgctgtcctcacag

SEQ ID NO: 282324 - DNA, 15 bp, Homo sapiens
tgtgctgtcctcaca

SEQ ID NO: 282325 - DNA, 15 bp, Homo sapiens
ctgtgctgtcctcac

SEQ ID NO: 282326 - DNA, 15 bp, Homo sapiens
tctgtgctgtcctca

SEQ ID NO: 282327 - DNA, 15 bp, Homo sapiens
atctgtgctgtcctc

SEQ ID NO: 282328 - DNA, 15 bp, Homo sapiens
gatctgtgctgtcct

SEQ ID NO: 282329 - DNA, 15 bp, Homo sapiens
ggatctgtgctgtcc

SEQ ID NO: 282330 - DNA, 15 bp, Homo sapiens
gggatctgtgctgtc

SEQ ID NO: 282331 - DNA, 15 bp, Homo sapiens
tgggatctgtgctgt

SEQ ID NO: 282332 - DNA, 15 bp, Homo sapiens
atgggatctgtgctg

SEQ ID NO: 282333 - DNA, 15 bp, Homo sapiens
gatgggatctgtgct

SEQ ID NO: 282334 - DNA, 15 bp, Homo sapiens
ggatgggatctgtgc

SEQ ID NO: 282335 - DNA, 15 bp, Homo sapiens
gggatgggatctgtg

SEQ ID NO: 282336 - DNA, 15 bp, Homo sapiens
tgggatgggatctgt

SEQ ID NO: 282337 - DNA, 15 bp, Homo sapiens
atgggatgggatctg

SEQ ID NO: 282338 - DNA, 15 bp, Homo sapiens
aatgggatgggatct

SEQ ID NO: 282339 - DNA, 15 bp, Homo sapiens
gaatgggatgggatc

SEQ ID NO: 282340 - DNA, 15 bp, Homo sapiens
tgaatgggatgggat

SEQ ID NO: 282341 - DNA, 15 bp, Homo sapiens
atgaatgggatggga

SEQ ID NO: 282342 - DNA, 15 bp, Homo sapiens
catgaatgggatggg

SEQ ID NO: 282343 - DNA, 15 bp, Homo sapiens
tcatgaatgggatgg

SEQ ID NO: 282344 - DNA, 15 bp, Homo sapiens
gtcatgaatgggatg

SEQ ID NO: 282345 - DNA, 15 bp, Homo sapiens
tgtcatgaatgggat

SEQ ID NO: 282346 - DNA, 15 bp, Homo sapiens
ctgtcatgaatggga

SEQ ID NO: 282347 - DNA, 15 bp, Homo sapiens
gctgtcatgaatggg

SEQ ID NO: 282348 - DNA, 15 bp, Homo sapiens
cgctgtcatgaatgg

SEQ ID NO: 282349 - DNA, 15 bp, Homo sapiens
gcgctgtcatgaatg

SEQ ID NO: 282350 - DNA, 15 bp, Homo sapiens
tgcgctgtcatgaat

SEQ ID NO: 282351 - DNA, 15 bp, Homo sapiens
atgcgctgtcatgaa

SEQ ID NO: 282352 - DNA, 15 bp, Homo sapiens
aatgcgctgtcatga

SEQ ID NO: 282353 - DNA, 15 bp, Homo sapiens
aaatgcgctgtcatg

SEQ ID NO: 282354 - DNA, 15 bp, Homo sapiens
aaaatgcgctgtcat

SEQ ID NO: 282355 - DNA, 15 bp, Homo sapiens
taaaatgcgctgtca

SEQ ID NO: 282356 - DNA, 15 bp, Homo sapiens
ttaaaatgcgctgtc

SEQ ID NO: 282357 - DNA, 15 bp, Homo sapiens
tttaaaatgcgctgt

SEQ ID NO: 282358 - DNA, 15 bp, Homo sapiens
gtttaaaatgcgctg

SEQ ID NO: 282359 - DNA, 15 bp, Homo sapiens
agtttaaaatgcgct

SEQ ID NO: 282360 - DNA, 15 bp, Homo sapiens
cagtttaaaatgcgc

SEQ ID NO: 282361 - DNA, 15 bp, Homo sapiens
acagtttaaaatgcg

SEQ ID NO: 282362 - DNA, 15 bp, Homo sapiens
tacagtttaaaatgc

SEQ ID NO: 282363 - DNA, 15 bp, Homo sapiens
ttacagtttaaaatg

SEQ ID NO: 282364 - DNA, 15 bp, Homo sapiens
tttacagtttaaaat

SEQ ID NO: 282365 - DNA, 15 bp, Homo sapiens
ctttacagtttaaaa

SEQ ID NO: 282366 - DNA, 15 bp, Homo sapiens
cctttacagtttaaa

SEQ ID NO: 282367 - DNA, 15 bp, Homo sapiens
tcctttacagtttaa

SEQ ID NO: 282368 - DNA, 15 bp, Homo sapiens
gtcctttacagttta

SEQ ID NO: 282369 - DNA, 15 bp, Homo sapiens
agtcctttacagttt

SEQ ID NO: 282370 - DNA, 15 bp, Homo sapiens
cagtcctttacagtt

SEQ ID NO: 282371 - DNA, 15 bp, Homo sapiens
acagtcctttacagt

SEQ ID NO: 282372 - DNA, 15 bp, Homo sapiens
cacagtcctttacag

SEQ ID NO: 282373 - DNA, 15 bp, Homo sapiens
acacagtcctttaca

SEQ ID NO: 282374 - DNA, 15 bp, Homo sapiens
tacacagtcctttac

SEQ ID NO: 282375 - DNA, 15 bp, Homo sapiens
atacacagtccttta

SEQ ID NO: 282376 - DNA, 15 bp, Homo sapiens
tatacacagtccttt

SEQ ID NO: 282377 - DNA, 15 bp, Homo sapiens
gtatacacagtcctt

SEQ ID NO: 282378 - DNA, 15 bp, Homo sapiens
ggtatacacagtcct

SEQ ID NO: 282379 - DNA, 15 bp, Homo sapiens
tggtatacacagtcc

SEQ ID NO: 282380 - DNA, 15 bp, Homo sapiens
ctggtatacacagtc

SEQ ID NO: 282381 - DNA, 15 bp, Homo sapiens
gctggtatacacagt

SEQ ID NO: 282382 - DNA, 15 bp, Homo sapiens
agctggtatacacag

SEQ ID NO: 282383 - DNA, 15 bp, Homo sapiens
aagctggtatacaca

SEQ ID NO: 282384 - DNA, 15 bp, Homo sapiens
aaagctggtatacac

SEQ ID NO: 282385 - DNA, 15 bp, Homo sapiens
gaaagctggtataca

SEQ ID NO: 282386 - DNA, 15 bp, Homo sapiens
tgaaagctggtatac

SEQ ID NO: 282387 - DNA, 15 bp, Homo sapiens
gtgaaagctggtata

SEQ ID NO: 282388 - DNA, 15 bp, Homo sapiens
agtgaaagctggtat

SEQ ID NO: 282389 - DNA, 15 bp, Homo sapiens
tagtgaaagctggta

SEQ ID NO: 282390 - DNA, 15 bp, Homo sapiens
atagtgaaagctggt

SEQ ID NO: 282391 - DNA, 15 bp, Homo sapiens
gatagtgaaagctgg

SEQ ID NO: 282392 - DNA, 15 bp, Homo sapiens
ggatagtgaaagctg

SEQ ID NO: 282393 - DNA, 15 bp, Homo sapiens
gggatagtgaaagct

SEQ ID NO: 282394 - DNA, 15 bp, Homo sapiens
ggggatagtgaaagc

SEQ ID NO: 282395 - DNA, 15 bp, Homo sapiens
aggggatagtgaaag

SEQ ID NO: 282396 - DNA, 15 bp, Homo sapiens
aaggggatagtgaaa

SEQ ID NO: 282397 - DNA, 15 bp, Homo sapiens
aaaggggatagtgaa

SEQ ID NO: 282398 - DNA, 15 bp, Homo sapiens
taaaggggatagtga

SEQ ID NO: 282399 - DNA, 15 bp, Homo sapiens
ctaaaggggatagtg

SEQ ID NO: 282400 - DNA, 15 bp, Homo sapiens
actaaaggggatagt

SEQ ID NO: 282401 - DNA, 15 bp, Homo sapiens
cactaaaggggatag

SEQ ID NO: 282402 - DNA, 15 bp, Homo sapiens
acactaaaggggata

SEQ ID NO: 282403 - DNA, 15 bp, Homo sapiens
tacactaaaggggat

SEQ ID NO: 282404 - DNA, 15 bp, Homo sapiens
gtacactaaagggga

SEQ ID NO: 282405 - DNA, 15 bp, Homo sapiens
ggtacactaaagggg

SEQ ID NO: 282406 - DNA, 15 bp, Homo sapiens
gggtacactaaaggg

SEQ ID NO: 282407 - DNA, 15 bp, Homo sapiens
ggggtacactaaagg

SEQ ID NO: 282408 - DNA, 15 bp, Homo sapiens
tggggtacactaaag

SEQ ID NO: 282409 - DNA, 15 bp, Homo sapiens
atggggtacactaaa

SEQ ID NO: 282410 - DNA, 15 bp, Homo sapiens
gatggggtacactaa

SEQ ID NO: 282411 - DNA, 15 bp, Homo sapiens
ggatggggtacacta

SEQ ID NO: 282412 - DNA, 15 bp, Homo sapiens
aggatggggtacact

SEQ ID NO: 282413 - DNA, 15 bp, Homo sapiens
caggatggggtacac

SEQ ID NO: 282414 - DNA, 15 bp, Homo sapiens
gcaggatggggtaca

SEQ ID NO: 282415 - DNA, 15 bp, Homo sapiens
tgcaggatggggtac

SEQ ID NO: 282416 - DNA, 15 bp, Homo sapiens
ctgcaggatggggta

SEQ ID NO: 282417 - DNA, 15 bp, Homo sapiens
gctgcaggatggggt

SEQ ID NO: 282418 - DNA, 15 bp, Homo sapiens
tgctgcaggatgggg

SEQ ID NO: 282419 - DNA, 15 bp, Homo sapiens
atgctgcaggatggg

SEQ ID NO: 282420 - DNA, 15 bp, Homo sapiens
catgctgcaggatgg

SEQ ID NO: 282421 - DNA, 15 bp, Homo sapiens
tcatgctgcaggatg

SEQ ID NO: 282422 - DNA, 15 bp, Homo sapiens
atcatgctgcaggat

SEQ ID NO: 282423 - DNA, 15 bp, Homo sapiens
catcatgctgcagga

SEQ ID NO: 282424 - DNA, 15 bp, Homo sapiens
tcatcatgctgcagg

SEQ ID NO: 282425 - DNA, 15 bp, Homo sapiens
ctcatcatgctgcag

SEQ ID NO: 282426 - DNA, 15 bp, Homo sapiens
tctcatcatgctgca

SEQ ID NO: 282427 - DNA, 15 bp, Homo sapiens
atctcatcatgctgc

SEQ ID NO: 282428 - DNA, 15 bp, Homo sapiens
catctcatcatgctg

SEQ ID NO: 282429 - DNA, 15 bp, Homo sapiens
ccatctcatcatgct

SEQ ID NO: 282430 - DNA, 15 bp, Homo sapiens
cccatctcatcatgc

SEQ ID NO: 282431 - DNA, 15 bp, Homo sapiens
gcccatctcatcatg

SEQ ID NO: 282432 - DNA, 15 bp, Homo sapiens
tgcccatctcatcat

SEQ ID NO: 282433 - DNA, 15 bp, Homo sapiens
ctgcccatctcatca

SEQ ID NO: 282434 - DNA, 15 bp, Homo sapiens
gctgcccatctcatc

SEQ ID NO: 282435 - DNA, 15 bp, Homo sapiens
ggctgcccatctcat

SEQ ID NO: 282436 - DNA, 15 bp, Homo sapiens
aggctgcccatctca

SEQ ID NO: 282437 - DNA, 15 bp, Homo sapiens
caggctgcccatctc

SEQ ID NO: 282438 - DNA, 15 bp, Homo sapiens
acaggctgcccatct

SEQ ID NO: 282439 - DNA, 15 bp, Homo sapiens
cacaggctgcccatc

SEQ ID NO: 282440 - DNA, 15 bp, Homo sapiens
tcacaggctgcccat

SEQ ID NO: 282441 - DNA, 15 bp, Homo sapiens
gtcacaggctgccca

SEQ ID NO: 282442 - DNA, 15 bp, Homo sapiens
tgtcacaggctgccc

SEQ ID NO: 282443 - DNA, 15 bp, Homo sapiens
atgtcacaggctgcc

SEQ ID NO: 282444 - DNA, 15 bp, Homo sapiens
catgtcacaggctgc

SEQ ID NO: 282445 - DNA, 15 bp, Homo sapiens
ccatgtcacaggctg

SEQ ID NO: 282446 - DNA, 15 bp, Homo sapiens
tccatgtcacaggct

SEQ ID NO: 282447 - DNA, 15 bp, Homo sapiens
ttccatgtcacaggc

SEQ ID NO: 282448 - DNA, 15 bp, Homo sapiens
tttccatgtcacagg

SEQ ID NO: 282449 - DNA, 15 bp, Homo sapiens
ttttccatgtcacag

SEQ ID NO: 282450 - DNA, 15 bp, Homo sapiens
cttttccatgtcaca

SEQ ID NO: 282451 - DNA, 15 bp, Homo sapiens
ccttttccatgtcac

SEQ ID NO: 282452 - DNA, 15 bp, Homo sapiens
tccttttccatgtca

SEQ ID NO: 282453 - DNA, 15 bp, Homo sapiens
ttccttttccatgtc

SEQ ID NO: 282454 - DNA, 15 bp, Homo sapiens
cttccttttccatgt

SEQ ID NO: 282455 - DNA, 15 bp, Homo sapiens
gcttccttttccatg

SEQ ID NO: 282456 - DNA, 15 bp, Homo sapiens
agcttccttttccat

SEQ ID NO: 282457 - DNA, 15 bp, Homo sapiens
gagcttccttttcca

SEQ ID NO: 282458 - DNA, 15 bp, Homo sapiens
tgagcttccttttcc

SEQ ID NO: 282459 - DNA, 15 bp, Homo sapiens
gtgagcttccttttc

SEQ ID NO: 282460 - DNA, 15 bp, Homo sapiens
ggtgagcttcctttt

SEQ ID NO: 282461 - DNA, 15 bp, Homo sapiens
tggtgagcttccttt

SEQ ID NO: 282462 - DNA, 15 bp, Homo sapiens
ctggtgagcttcctt

SEQ ID NO: 282463 - DNA, 15 bp, Homo sapiens
gctggtgagcttcct

SEQ ID NO: 282464 - DNA, 15 bp, Homo sapiens
ggctggtgagcttcc

SEQ ID NO: 282465 - DNA, 15 bp, Homo sapiens
aggctggtgagcttc

SEQ ID NO: 282466 - DNA, 15 bp, Homo sapiens
taggctggtgagctt

SEQ ID NO: 282467 - DNA, 15 bp, Homo sapiens
gtaggctggtgagct

SEQ ID NO: 282468 - DNA, 15 bp, Homo sapiens
agtaggctggtgagc

SEQ ID NO: 282469 - DNA, 15 bp, Homo sapiens
gagtaggctggtgag

SEQ ID NO: 282470 - DNA, 15 bp, Homo sapiens
agagtaggctggtga

SEQ ID NO: 282471 - DNA, 15 bp, Homo sapiens
cagagtaggctggtg

SEQ ID NO: 282472 - DNA, 15 bp, Homo sapiens
acagagtaggctggt

SEQ ID NO: 282473 - DNA, 15 bp, Homo sapiens
tacagagtaggctgg

SEQ ID NO: 282474 - DNA, 15 bp, Homo sapiens
ttacagagtaggctg

SEQ ID NO: 282475 - DNA, 15 bp, Homo sapiens
gttacagagtaggct

SEQ ID NO: 282476 - DNA, 15 bp, Homo sapiens
ggttacagagtaggc

SEQ ID NO: 282477 - DNA, 15 bp, Homo sapiens
tggttacagagtagg

SEQ ID NO: 282478 - DNA, 15 bp, Homo sapiens
ctggttacagagtag

SEQ ID NO: 282479 - DNA, 15 bp, Homo sapiens
actggttacagagta

SEQ ID NO: 282480 - DNA, 15 bp, Homo sapiens
aactggttacagagt

SEQ ID NO: 282481 - DNA, 15 bp, Homo sapiens
gaactggttacagag

SEQ ID NO: 282482 - DNA, 15 bp, Homo sapiens
ggaactggttacaga

SEQ ID NO: 282483 - DNA, 15 bp, Homo sapiens
aggaactggttacag

SEQ ID NO: 282484 - DNA, 15 bp, Homo sapiens
aaggaactggttaca

SEQ ID NO: 282485 - DNA, 15 bp, Homo sapiens
aaaggaactggttac

SEQ ID NO: 282486 - DNA, 15 bp, Homo sapiens
taaaggaactggtta

SEQ ID NO: 282487 - DNA, 15 bp, Homo sapiens
ataaaggaactggtt

SEQ ID NO: 282488 - DNA, 15 bp, Homo sapiens
cataaaggaactggt

SEQ ID NO: 282489 - DNA, 15 bp, Homo sapiens
tcataaaggaactgg

SEQ ID NO: 282490 - DNA, 15 bp, Homo sapiens
ttcataaaggaactg

SEQ ID NO: 282491 - DNA, 15 bp, Homo sapiens
tttcataaaggaact

SEQ ID NO: 282492 - DNA, 15 bp, Homo sapiens
atttcataaaggaac

SEQ ID NO: 282493 - DNA, 15 bp, Homo sapiens
tatttcataaaggaa

SEQ ID NO: 282494 - DNA, 15 bp, Homo sapiens
gtatttcataaagga

SEQ ID NO: 282495 - DNA, 15 bp, Homo sapiens
tgtatttcataaagg

SEQ ID NO: 282496 - DNA, 15 bp, Homo sapiens
ctgtatttcataaag

SEQ ID NO: 282497 - DNA, 15 bp, Homo sapiens
gctgtatttcataaa

SEQ ID NO: 282498 - DNA, 15 bp, Homo sapiens
ggctgtatttcataa

SEQ ID NO: 282499 - DNA, 15 bp, Homo sapiens
aggctgtatttcata

SEQ ID NO: 282500 - DNA, 15 bp, Homo sapiens
aaggctgtatttcat

SEQ ID NO: 282501 - DNA, 15 bp, Homo sapiens
aaaggctgtatttca

SEQ ID NO: 282502 - DNA, 15 bp, Homo sapiens
gaaaggctgtatttc

SEQ ID NO: 282503 - DNA, 15 bp, Homo sapiens
agaaaggctgtattt

SEQ ID NO: 282504 - DNA, 15 bp, Homo sapiens
tagaaaggctgtatt

SEQ ID NO: 282505 - DNA, 15 bp, Homo sapiens
ctagaaaggctgtat

SEQ ID NO: 282506 - DNA, 15 bp, Homo sapiens
cctagaaaggctgta

SEQ ID NO: 282507 - DNA, 15 bp, Homo sapiens
acctagaaaggctgt

SEQ ID NO: 282508 - DNA, 15 bp, Homo sapiens
tacctagaaaggctg

SEQ ID NO: 282509 - DNA, 15 bp, Homo sapiens
ctacctagaaaggct

SEQ ID NO: 282510 - DNA, 15 bp, Homo sapiens
actacctagaaaggc

SEQ ID NO: 282511 - DNA, 15 bp, Homo sapiens
cactacctagaaagg

SEQ ID NO: 282512 - DNA, 15 bp, Homo sapiens
acactacctagaaag

SEQ ID NO: 282513 - DNA, 15 bp, Homo sapiens
aacactacctagaaa

SEQ ID NO: 282514 - DNA, 15 bp, Homo sapiens
gaacactacctagaa

SEQ ID NO: 282515 - DNA, 15 bp, Homo sapiens
agaacactacctaga

SEQ ID NO: 282516 - DNA, 15 bp, Homo sapiens
cagaacactacctag

SEQ ID NO: 282517 - DNA, 15 bp, Homo sapiens
ccagaacactaccta

SEQ ID NO: 282518 - DNA, 15 bp, Homo sapiens
tccagaacactacct

SEQ ID NO: 282519 - DNA, 15 bp, Homo sapiens
ttccagaacactacc

SEQ ID NO: 282520 - DNA, 15 bp, Homo sapiens
tttccagaacactac

SEQ ID NO: 282521 - DNA, 15 bp, Homo sapiens
ttttccagaacacta

SEQ ID NO: 282522 - DNA, 15 bp, Homo sapiens
attttccagaacact

SEQ ID NO: 282523 - DNA, 15 bp, Homo sapiens
aattttccagaacac

SEQ ID NO: 282524 - DNA, 15 bp, Homo sapiens
taattttccagaaca

SEQ ID NO: 282525 - DNA, 15 bp, Homo sapiens
ctaattttccagaac

SEQ ID NO: 282526 - DNA, 15 bp, Homo sapiens
gctaattttccagaa

SEQ ID NO: 282527 - DNA, 15 bp, Homo sapiens
agctaattttccaga

SEQ ID NO: 282528 - DNA, 15 bp, Homo sapiens
gagctaattttccag

SEQ ID NO: 282529 - DNA, 15 bp, Homo sapiens
ggagctaattttcca

SEQ ID NO: 282530 - DNA, 15 bp, Homo sapiens
tggagctaattttcc

SEQ ID NO: 282531 - DNA, 15 bp, Homo sapiens
ctggagctaattttc

SEQ ID NO: 282532 - DNA, 15 bp, Homo sapiens
gctggagctaatttt

SEQ ID NO: 282533 - DNA, 15 bp, Homo sapiens
agctggagctaattt

SEQ ID NO: 282534 - DNA, 15 bp, Homo sapiens
cagctggagctaatt

SEQ ID NO: 282535 - DNA, 15 bp, Homo sapiens
acagctggagctaat

SEQ ID NO: 282536 - DNA, 15 bp, Homo sapiens
gacagctggagctaa

SEQ ID NO: 282537 - DNA, 15 bp, Homo sapiens
agacagctggagcta

SEQ ID NO: 282538 - DNA, 15 bp, Homo sapiens
cagacagctggagct

SEQ ID NO: 282539 - DNA, 15 bp, Homo sapiens
gcagacagctggagc

SEQ ID NO: 282540 - DNA, 15 bp, Homo sapiens
ggcagacagctggag

SEQ ID NO: 282541 - DNA, 15 bp, Homo sapiens
aggcagacagctgga

SEQ ID NO: 282542 - DNA, 15 bp, Homo sapiens
aaggcagacagctgg

SEQ ID NO: 282543 - DNA, 15 bp, Homo sapiens
gaaggcagacagctg

SEQ ID NO: 282544 - DNA, 15 bp, Homo sapiens
tgaaggcagacagct

SEQ ID NO: 282545 - DNA, 15 bp, Homo sapiens
atgaaggcagacagc

SEQ ID NO: 282546 - DNA, 15 bp, Homo sapiens
catgaaggcagacag

SEQ ID NO: 282547 - DNA, 15 bp, Homo sapiens
gcatgaaggcagaca

SEQ ID NO: 282548 - DNA, 15 bp, Homo sapiens
ggcatgaaggcagac

SEQ ID NO: 282549 - DNA, 15 bp, Homo sapiens
gggcatgaaggcaga

SEQ ID NO: 282550 - DNA, 15 bp, Homo sapiens
agggcatgaaggcag

SEQ ID NO: 282551 - DNA, 15 bp, Homo sapiens
aagggcatgaaggca

SEQ ID NO: 282552 - DNA, 15 bp, Homo sapiens
aaagggcatgaaggc

SEQ ID NO: 282553 - DNA, 15 bp, Homo sapiens
aaaagggcatgaagg

SEQ ID NO: 282554 - DNA, 15 bp, Homo sapiens
aaaaagggcatgaag

SEQ ID NO: 282555 - DNA, 15 bp, Homo sapiens
aaaaaagggcatgaa

SEQ ID NO: 282556 - DNA, 15 bp, Homo sapiens
caaaaaagggcatga

SEQ ID NO: 282557 - DNA, 15 bp, Homo sapiens
tcaaaaaagggcatg

SEQ ID NO: 282558 - DNA, 15 bp, Homo sapiens
ctcaaaaaagggcat

SEQ ID NO: 282559 - DNA, 15 bp, Homo sapiens
tctcaaaaaagggca

SEQ ID NO: 282560 - DNA, 15 bp, Homo sapiens
ttctcaaaaaagggc

SEQ ID NO: 282561 - DNA, 15 bp, Homo sapiens
cttctcaaaaaaggg

SEQ ID NO: 282562 - DNA, 15 bp, Homo sapiens
acttctcaaaaaagg

SEQ ID NO: 282563 - DNA, 15 bp, Homo sapiens
gacttctcaaaaaag

SEQ ID NO: 282564 - DNA, 15 bp, Homo sapiens
tgacttctcaaaaaa

SEQ ID NO: 282565 - DNA, 15 bp, Homo sapiens
gtgacttctcaaaaa

SEQ ID NO: 282566 - DNA, 15 bp, Homo sapiens
cgtgacttctcaaaa

SEQ ID NO: 282567 - DNA, 15 bp, Homo sapiens
ccgtgacttctcaaa

SEQ ID NO: 282568 - DNA, 15 bp, Homo sapiens
gccgtgacttctcaa

SEQ ID NO: 282569 - DNA, 15 bp, Homo sapiens
tgccgtgacttctca

SEQ ID NO: 282570 - DNA, 15 bp, Homo sapiens
atgccgtgacttctc

SEQ ID NO: 282571 - DNA, 15 bp, Homo sapiens
catgccgtgacttct

SEQ ID NO: 282572 - DNA, 15 bp, Homo sapiens
gcatgccgtgacttc

SEQ ID NO: 282573 - DNA, 15 bp, Homo sapiens
tgcatgccgtgactt

SEQ ID NO: 282574 - DNA, 15 bp, Homo sapiens
atgcatgccgtgact

SEQ ID NO: 282575 - DNA, 15 bp, Homo sapiens
aatgcatgccgtgac

SEQ ID NO: 282576 - DNA, 15 bp, Homo sapiens
aaatgcatgccgtga

SEQ ID NO: 282577 - DNA, 15 bp, Homo sapiens
taaatgcatgccgtg

SEQ ID NO: 282578 - DNA, 15 bp, Homo sapiens
ttaaatgcatgccgt

SEQ ID NO: 282579 - DNA, 15 bp, Homo sapiens
gttaaatgcatgccg

SEQ ID NO: 282580 - DNA, 15 bp, Homo sapiens
ggttaaatgcatgcc

SEQ ID NO: 282581 - DNA, 15 bp, Homo sapiens
aggttaaatgcatgc

SEQ ID NO: 282582 - DNA, 15 bp, Homo sapiens
aaggttaaatgcatg

SEQ ID NO: 282583 - DNA, 15 bp, Homo sapiens
aaaggttaaatgcat

SEQ ID NO: 282584 - DNA, 15 bp, Homo sapiens
caaaggttaaatgca

SEQ ID NO: 282585 - DNA, 15 bp, Homo sapiens
acaaaggttaaatgc

SEQ ID NO: 282586 - DNA, 15 bp, Homo sapiens
aacaaaggttaaatg

SEQ ID NO: 282587 - DNA, 15 bp, Homo sapiens
caacaaaggttaaat

SEQ ID NO: 282588 - DNA, 15 bp, Homo sapiens
tcaacaaaggttaaa

SEQ ID NO: 282589 - DNA, 15 bp, Homo sapiens
ttcaacaaaggttaa

SEQ ID NO: 282590 - DNA, 15 bp, Homo sapiens
cttcaacaaaggtta

SEQ ID NO: 282591 - DNA, 15 bp, Homo sapiens
tcttcaacaaaggtt

SEQ ID NO: 282592 - DNA, 15 bp, Homo sapiens
ttcttcaacaaaggt

SEQ ID NO: 282593 - DNA, 15 bp, Homo sapiens
cttcttcaacaaagg

SEQ ID NO: 282594 - DNA, 15 bp, Homo sapiens
acttcttcaacaaag

SEQ ID NO: 282595 - DNA, 15 bp, Homo sapiens
gacttcttcaacaaa

SEQ ID NO: 282596 - DNA, 15 bp, Homo sapiens
tgacttcttcaacaa

SEQ ID NO: 282597 - DNA, 15 bp, Homo sapiens
ttgacttcttcaaca

SEQ ID NO: 282598 - DNA, 15 bp, Homo sapiens
gttgacttcttcaac

SEQ ID NO: 282599 - DNA, 15 bp, Homo sapiens
tgttgacttcttcaa

SEQ ID NO: 282600 - DNA, 15 bp, Homo sapiens
gtgttgacttcttca

SEQ ID NO: 282601 - DNA, 15 bp, Homo sapiens
tgtgttgacttcttc

SEQ ID NO: 282602 - DNA, 15 bp, Homo sapiens
ttgtgttgacttctt

SEQ ID NO: 282603 - DNA, 15 bp, Homo sapiens
tttgtgttgacttct

SEQ ID NO: 282604 - DNA, 15 bp, Homo sapiens
atttgtgttgacttc

SEQ ID NO: 282605 - DNA, 15 bp, Homo sapiens
gatttgtgttgactt

SEQ ID NO: 282606 - DNA, 15 bp, Homo sapiens
tgatttgtgttgact

SEQ ID NO: 282607 - DNA, 15 bp, Homo sapiens
gtgatttgtgttgac

SEQ ID NO: 282608 - DNA, 15 bp, Homo sapiens
agtgatttgtgttga

SEQ ID NO: 282609 - DNA, 15 bp, Homo sapiens
cagtgatttgtgttg

SEQ ID NO: 282610 - DNA, 15 bp, Homo sapiens
acagtgatttgtgtt

SEQ ID NO: 282611 - DNA, 15 bp, Homo sapiens
cacagtgatttgtgt

SEQ ID NO: 282612 - DNA, 15 bp, Homo sapiens
acacagtgatttgtg

SEQ ID NO: 282613 - DNA, 15 bp, Homo sapiens
cacacagtgatttgt

SEQ ID NO: 282614 - DNA, 15 bp, Homo sapiens
gcacacagtgatttg

SEQ ID NO: 282615 - DNA, 15 bp, Homo sapiens
tgcacacagtgattt

SEQ ID NO: 282616 - DNA, 15 bp, Homo sapiens
ttgcacacagtgatt

SEQ ID NO: 282617 - DNA, 15 bp, Homo sapiens
tttgcacacagtgat

SEQ ID NO: 282618 - DNA, 15 bp, Homo sapiens
ctttgcacacagtga

SEQ ID NO: 282619 - DNA, 15 bp, Homo sapiens
gctttgcacacagtg

SEQ ID NO: 282620 - DNA, 15 bp, Homo sapiens
tgctttgcacacagt

SEQ ID NO: 282621 - DNA, 15 bp, Homo sapiens
gtgctttgcacacag

SEQ ID NO: 282622 - DNA, 15 bp, Homo sapiens
ggtgctttgcacaca

SEQ ID NO: 282623 - DNA, 15 bp, Homo sapiens
aggtgctttgcacac

SEQ ID NO: 282624 - DNA, 15 bp, Homo sapiens
gaggtgctttgcaca

SEQ ID NO: 282625 - DNA, 15 bp, Homo sapiens
ggaggtgctttgcac

SEQ ID NO: 282626 - DNA, 15 bp, Homo sapiens
gggaggtgctttgca

SEQ ID NO: 282627 - DNA, 15 bp, Homo sapiens
agggaggtgctttgc

SEQ ID NO: 282628 - DNA, 15 bp, Homo sapiens
cagggaggtgctttg

SEQ ID NO: 282629 - DNA, 15 bp, Homo sapiens
acagggaggtgcttt

SEQ ID NO: 282630 - DNA, 15 bp, Homo sapiens
aacagggaggtgctt

SEQ ID NO: 282631 - DNA, 15 bp, Homo sapiens
aaacagggaggtgct

SEQ ID NO: 282632 - DNA, 15 bp, Homo sapiens
aaaacagggaggtgc

SEQ ID NO: 282633 - DNA, 15 bp, Homo sapiens
aaaaacagggaggtg

SEQ ID NO: 282634 - DNA, 15 bp, Homo sapiens
aaaaaacagggaggt

SEQ ID NO: 282635 - DNA, 15 bp, Homo sapiens
aaaaaaacagggagg

SEQ ID NO: 282636 - DNA, 15 bp, Homo sapiens
aaaaaaaacagggag

SEQ ID NO: 282637 - DNA, 15 bp, Homo sapiens
aaaaaaaaacaggga

SEQ ID NO: 282638 - DNA, 15 bp, Homo sapiens
aaaaaaaaaacaggg

SEQ ID NO: 282639 - DNA, 15 bp, Homo sapiens
aaaaaaaaaaacagg

SEQ ID NO: 282640 - DNA, 15 bp, Homo sapiens
gaaaaaaaaaaacag

SEQ ID NO: 282641 - DNA, 15 bp, Homo sapiens
ggaaaaaaaaaaaca

SEQ ID NO: 282642 - DNA, 15 bp, Homo sapiens
aggaaaaaaaaaaac

SEQ ID NO: 282643 - DNA, 15 bp, Homo sapiens
aaggaaaaaaaaaaa

SEQ ID NO: 282644 - DNA, 15 bp, Homo sapiens
aaaaggaaaaaaaaa

SEQ ID NO: 282645 - DNA, 15 bp, Homo sapiens
taaaaggaaaaaaaa

SEQ ID NO: 282646 - DNA, 15 bp, Homo sapiens
ttaaaaggaaaaaaa

SEQ ID NO: 282647 - DNA, 15 bp, Homo sapiens
tttaaaaggaaaaaa

SEQ ID NO: 282648 - DNA, 15 bp, Homo sapiens
ttttaaaaggaaaaa

SEQ ID NO: 282649 - DNA, 15 bp, Homo sapiens
attttaaaaggaaaa

SEQ ID NO: 282650 - DNA, 15 bp, Homo sapiens
tattttaaaaggaaa

SEQ ID NO: 282651 - DNA, 15 bp, Homo sapiens
gtattttaaaaggaa

SEQ ID NO: 282652 - DNA, 15 bp, Homo sapiens
agtattttaaaagga

SEQ ID NO: 282653 - DNA, 15 bp, Homo sapiens
gagtattttaaaagg

SEQ ID NO: 282654 - DNA, 15 bp, Homo sapiens
ggagtattttaaaag

SEQ ID NO: 282655 - DNA, 15 bp, Homo sapiens
gggagtattttaaaa

SEQ ID NO: 282656 - DNA, 15 bp, Homo sapiens
ggggagtattttaaa

SEQ ID NO: 282657 - DNA, 15 bp, Homo sapiens
gggggagtattttaa

SEQ ID NO: 282658 - DNA, 15 bp, Homo sapiens
ggggggagtatttta

SEQ ID NO: 282659 - DNA, 15 bp, Homo sapiens
tggggggagtatttt

SEQ ID NO: 282660 - DNA, 15 bp, Homo sapiens
ctggggggagtattt

SEQ ID NO: 282661 - DNA, 15 bp, Homo sapiens
actggggggagtatt

SEQ ID NO: 282662 - DNA, 15 bp, Homo sapiens
aactggggggagtat

SEQ ID NO: 282663 - DNA, 15 bp, Homo sapiens
aaactggggggagta

SEQ ID NO: 282664 - DNA, 15 bp, Homo sapiens
aaaactggggggagt

SEQ ID NO: 282665 - DNA, 15 bp, Homo sapiens
gaaaactggggggag

SEQ ID NO: 282666 - DNA, 15 bp, Homo sapiens
agaaaactgggggga

SEQ ID NO: 282667 - DNA, 15 bp, Homo sapiens
gagaaaactgggggg

SEQ ID NO: 282668 - DNA, 15 bp, Homo sapiens
ggagaaaactggggg

SEQ ID NO: 282669 - DNA, 15 bp, Homo sapiens
tggagaaaactgggg

SEQ ID NO: 282670 - DNA, 15 bp, Homo sapiens
atggagaaaactggg

SEQ ID NO: 282671 - DNA, 15 bp, Homo sapiens
gatggagaaaactgg

SEQ ID NO: 282672 - DNA, 15 bp, Homo sapiens
ggatggagaaaactg

SEQ ID NO: 282673 - DNA, 15 bp, Homo sapiens
gggatggagaaaact

SEQ ID NO: 282674 - DNA, 15 bp, Homo sapiens
agggatggagaaaac

SEQ ID NO: 282675 - DNA, 15 bp, Homo sapiens
gagggatggagaaaa

SEQ ID NO: 282676 - DNA, 15 bp, Homo sapiens
tgagggatggagaaa

SEQ ID NO: 282677 - DNA, 15 bp, Homo sapiens
gtgagggatggagaa

SEQ ID NO: 282678 - DNA, 15 bp, Homo sapiens
agtgagggatggaga

SEQ ID NO: 282679 - DNA, 15 bp, Homo sapiens
cagtgagggatggag

SEQ ID NO: 282680 - DNA, 15 bp, Homo sapiens
tcagtgagggatgga

SEQ ID NO: 282681 - DNA, 15 bp, Homo sapiens
gtcagtgagggatgg

SEQ ID NO: 282682 - DNA, 15 bp, Homo sapiens
tgtcagtgagggatg

SEQ ID NO: 282683 - DNA, 15 bp, Homo sapiens
atgtcagtgagggat

SEQ ID NO: 282684 - DNA, 15 bp, Homo sapiens
aatgtcagtgaggga

SEQ ID NO: 282685 - DNA, 15 bp, Homo sapiens
aaatgtcagtgaggg

SEQ ID NO: 282686 - DNA, 15 bp, Homo sapiens
aaaatgtcagtgagg

SEQ ID NO: 282687 - DNA, 15 bp, Homo sapiens
aaaaatgtcagtgag

SEQ ID NO: 282688 - DNA, 15 bp, Homo sapiens
taaaaatgtcagtga

SEQ ID NO: 282689 - DNA, 15 bp, Homo sapiens
ataaaaatgtcagtg

SEQ ID NO: 282690 - DNA, 15 bp, Homo sapiens
aataaaaatgtcagt

SEQ ID NO: 282691 - DNA, 15 bp, Homo sapiens
caataaaaatgtcag

SEQ ID NO: 282692 - DNA, 15 bp, Homo sapiens
gcaataaaaatgtca

SEQ ID NO: 282693 - DNA, 15 bp, Homo sapiens
ggcaataaaaatgtc

SEQ ID NO: 282694 - DNA, 15 bp, Homo sapiens
tggcaataaaaatgt

SEQ ID NO: 282695 - DNA, 15 bp, Homo sapiens
ctggcaataaaaatg

SEQ ID NO: 282696 - DNA, 15 bp, Homo sapiens
cctggcaataaaaat

SEQ ID NO: 282697 - DNA, 15 bp, Homo sapiens
gcctggcaataaaaa

SEQ ID NO: 282698 - DNA, 15 bp, Homo sapiens
agcctggcaataaaa

SEQ ID NO: 282699 - DNA, 15 bp, Homo sapiens
aagcctggcaataaa

SEQ ID NO: 282700 - DNA, 15 bp, Homo sapiens
aaagcctggcaataa

SEQ ID NO: 282701 - DNA, 15 bp, Homo sapiens
caaagcctggcaata

SEQ ID NO: 282702 - DNA, 15 bp, Homo sapiens
ccaaagcctggcaat

SEQ ID NO: 282703 - DNA, 15 bp, Homo sapiens
accaaagcctggcaa

SEQ ID NO: 282704 - DNA, 15 bp, Homo sapiens
aaccaaagcctggca

SEQ ID NO: 282705 - DNA, 15 bp, Homo sapiens
aaaccaaagcctggc

SEQ ID NO: 282706 - DNA, 15 bp, Homo sapiens
caaaccaaagcctgg

SEQ ID NO: 282707 - DNA, 15 bp, Homo sapiens
ccaaaccaaagcctg

SEQ ID NO: 282708 - DNA, 15 bp, Homo sapiens
tccaaaccaaagcct

SEQ ID NO: 282709 - DNA, 15 bp, Homo sapiens
ttccaaaccaaagcc

SEQ ID NO: 282710 - DNA, 15 bp, Homo sapiens
tttccaaaccaaagc

SEQ ID NO: 282711 - DNA, 15 bp, Homo sapiens
ttttccaaaccaaag

SEQ ID NO: 282712 - DNA, 15 bp, Homo sapiens
attttccaaaccaaa

SEQ ID NO: 282713 - DNA, 15 bp, Homo sapiens
aattttccaaaccaa

SEQ ID NO: 282714 - DNA, 15 bp, Homo sapiens
taattttccaaacca

SEQ ID NO: 282715 - DNA, 15 bp, Homo sapiens
ataattttccaaacc

SEQ ID NO: 282716 - DNA, 15 bp, Homo sapiens
cataattttccaaac

SEQ ID NO: 282717 - DNA, 15 bp, Homo sapiens
ccataattttccaaa

SEQ ID NO: 282718 - DNA, 15 bp, Homo sapiens
cccataattttccaa

SEQ ID NO: 282719 - DNA, 15 bp, Homo sapiens
acccataattttcca

SEQ ID NO: 282720 - DNA, 15 bp, Homo sapiens
tacccataattttcc

SEQ ID NO: 282721 - DNA, 15 bp, Homo sapiens
ctacccataattttc

SEQ ID NO: 282722 - DNA, 15 bp, Homo sapiens
cctacccataatttt

SEQ ID NO: 282723 - DNA, 15 bp, Homo sapiens
ccctacccataattt

SEQ ID NO: 282724 - DNA, 15 bp, Homo sapiens
tccctacccataatt

SEQ ID NO: 282725 - DNA, 15 bp, Homo sapiens
ttccctacccataat

SEQ ID NO: 282726 - DNA, 15 bp, Homo sapiens
tttccctacccataa

SEQ ID NO: 282727 - DNA, 15 bp, Homo sapiens
ctttccctacccata

SEQ ID NO: 282728 - DNA, 15 bp, Homo sapiens
actttccctacccat

SEQ ID NO: 282729 - DNA, 15 bp, Homo sapiens
aactttccctaccca

SEQ ID NO: 282730 - DNA, 15 bp, Homo sapiens
gaactttccctaccc

SEQ ID NO: 282731 - DNA, 15 bp, Homo sapiens
tgaactttccctacc

SEQ ID NO: 282732 - DNA, 15 bp, Homo sapiens
ttgaactttccctac

SEQ ID NO: 282733 - DNA, 15 bp, Homo sapiens
cttgaactttcccta

SEQ ID NO: 282734 - DNA, 15 bp, Homo sapiens
ccttgaactttccct

SEQ ID NO: 282735 - DNA, 15 bp, Homo sapiens
cccttgaactttccc

SEQ ID NO: 282736 - DNA, 15 bp, Homo sapiens
gcccttgaactttcc

SEQ ID NO: 282737 - DNA, 15 bp, Homo sapiens
tgcccttgaactttc

SEQ ID NO: 282738 - DNA, 15 bp, Homo sapiens
ctgcccttgaacttt

SEQ ID NO: 282739 - DNA, 15 bp, Homo sapiens
cctgcccttgaactt

SEQ ID NO: 282740 - DNA, 15 bp, Homo sapiens
tcctgcccttgaact

SEQ ID NO: 282741 - DNA, 15 bp, Homo sapiens
atcctgcccttgaac

SEQ ID NO: 282742 - DNA, 15 bp, Homo sapiens
catcctgcccttgaa

SEQ ID NO: 282743 - DNA, 15 bp, Homo sapiens
acatcctgcccttga

SEQ ID NO: 282744 - DNA, 15 bp, Homo sapiens
aacatcctgcccttg

SEQ ID NO: 282745 - DNA, 15 bp, Homo sapiens
gaacatcctgccctt

SEQ ID NO: 282746 - DNA, 15 bp, Homo sapiens
tgaacatcctgccct

SEQ ID NO: 282747 - DNA, 15 bp, Homo sapiens
ctgaacatcctgccc

SEQ ID NO: 282748 - DNA, 15 bp, Homo sapiens
tctgaacatcctgcc

SEQ ID NO: 282749 - DNA, 15 bp, Homo sapiens
ttctgaacatcctgc

SEQ ID NO: 282750 - DNA, 15 bp, Homo sapiens
gttctgaacatcctg

SEQ ID NO: 282751 - DNA, 15 bp, Homo sapiens
cgttctgaacatcct

SEQ ID NO: 282752 - DNA, 15 bp, Homo sapiens
ccgttctgaacatcc

SEQ ID NO: 282753 - DNA, 15 bp, Homo sapiens
gccgttctgaacatc

SEQ ID NO: 282754 - DNA, 15 bp, Homo sapiens
tgccgttctgaacat

SEQ ID NO: 282755 - DNA, 15 bp, Homo sapiens
gtgccgttctgaaca

SEQ ID NO: 282756 - DNA, 15 bp, Homo sapiens
agtgccgttctgaac

SEQ ID NO: 282757 - DNA, 15 bp, Homo sapiens
cagtgccgttctgaa

SEQ ID NO: 282758 - DNA, 15 bp, Homo sapiens
gcagtgccgttctga

SEQ ID NO: 282759 - DNA, 15 bp, Homo sapiens
tgcagtgccgttctg

SEQ ID NO: 282760 - DNA, 15 bp, Homo sapiens
gtgcagtgccgttct

SEQ ID NO: 282761 - DNA, 15 bp, Homo sapiens
tgtgcagtgccgttc

SEQ ID NO: 282762 - DNA, 15 bp, Homo sapiens
atgtgcagtgccgtt

SEQ ID NO: 282763 - DNA, 15 bp, Homo sapiens
gatgtgcagtgccgt

SEQ ID NO: 282764 - DNA, 15 bp, Homo sapiens
agatgtgcagtgccg

SEQ ID NO: 282765 - DNA, 15 bp, Homo sapiens
cagatgtgcagtgcc

SEQ ID NO: 282766 - DNA, 15 bp, Homo sapiens
acagatgtgcagtgc

SEQ ID NO: 282767 - DNA, 15 bp, Homo sapiens
cacagatgtgcagtg

SEQ ID NO: 282768 - DNA, 15 bp, Homo sapiens
tcacagatgtgcagt

SEQ ID NO: 282769 - DNA, 15 bp, Homo sapiens
ttcacagatgtgcag

SEQ ID NO: 282770 - DNA, 15 bp, Homo sapiens
cttcacagatgtgca

SEQ ID NO: 282771 - DNA, 15 bp, Homo sapiens
ccttcacagatgtgc

SEQ ID NO: 282772 - DNA, 15 bp, Homo sapiens
cccttcacagatgtg

SEQ ID NO: 282773 - DNA, 15 bp, Homo sapiens
tcccttcacagatgt

SEQ ID NO: 282774 - DNA, 15 bp, Homo sapiens
ttcccttcacagatg

SEQ ID NO: 282775 - DNA, 15 bp, Homo sapiens
gttcccttcacagat

SEQ ID NO: 282776 - DNA, 15 bp, Homo sapiens
tgttcccttcacaga

SEQ ID NO: 282777 - DNA, 15 bp, Homo sapiens
gtgttcccttcacag

SEQ ID NO: 282778 - DNA, 15 bp, Homo sapiens
tgtgttcccttcaca

SEQ ID NO: 282779 - DNA, 15 bp, Homo sapiens
ttgtgttcccttcac

SEQ ID NO: 282780 - DNA, 15 bp, Homo sapiens
gttgtgttcccttca

SEQ ID NO: 282781 - DNA, 15 bp, Homo sapiens
tgttgtgttcccttc

SEQ ID NO: 282782 - DNA, 15 bp, Homo sapiens
ctgttgtgttccctt

SEQ ID NO: 282783 - DNA, 15 bp, Homo sapiens
cctgttgtgttccct

SEQ ID NO: 282784 - DNA, 15 bp, Homo sapiens
tcctgttgtgttccc

SEQ ID NO: 282785 - DNA, 15 bp, Homo sapiens
ctcctgttgtgttcc

SEQ ID NO: 282786 - DNA, 15 bp, Homo sapiens
tctcctgttgtgttc

SEQ ID NO: 282787 - DNA, 15 bp, Homo sapiens
ctctcctgttgtgtt

SEQ ID NO: 282788 - DNA, 15 bp, Homo sapiens
gctctcctgttgtgt

SEQ ID NO: 282789 - DNA, 15 bp, Homo sapiens
ggctctcctgttgtg

SEQ ID NO: 282790 - DNA, 15 bp, Homo sapiens
tggctctcctgttgt

SEQ ID NO: 282791 - DNA, 15 bp, Homo sapiens
ctggctctcctgttg

SEQ ID NO: 282792 - DNA, 15 bp, Homo sapiens
gctggctctcctgtt

SEQ ID NO: 282793 - DNA, 15 bp, Homo sapiens
tgctggctctcctgt

SEQ ID NO: 282794 - DNA, 15 bp, Homo sapiens
ctgctggctctcctg

SEQ ID NO: 282795 - DNA, 15 bp, Homo sapiens
gctgctggctctcct

SEQ ID NO: 282796 - DNA, 15 bp, Homo sapiens
agctgctggctctcc

SEQ ID NO: 282797 - DNA, 15 bp, Homo sapiens
cagctgctggctctc

SEQ ID NO: 282798 - DNA, 15 bp, Homo sapiens
acagctgctggctct

SEQ ID NO: 282799 - DNA, 15 bp, Homo sapiens
aacagctgctggctc

SEQ ID NO: 282800 - DNA, 15 bp, Homo sapiens
caacagctgctggct

SEQ ID NO: 282801 - DNA, 15 bp, Homo sapiens
tcaacagctgctggc

SEQ ID NO: 282802 - DNA, 15 bp, Homo sapiens
ttcaacagctgctgg

SEQ ID NO: 282803 - DNA, 15 bp, Homo sapiens
tttcaacagctgctg

SEQ ID NO: 282804 - DNA, 15 bp, Homo sapiens
ctttcaacagctgct

SEQ ID NO: 282805 - DNA, 15 bp, Homo sapiens
tctttcaacagctgc

SEQ ID NO: 282806 - DNA, 15 bp, Homo sapiens
ttctttcaacagctg

SEQ ID NO: 282807 - DNA, 15 bp, Homo sapiens
attctttcaacagct

SEQ ID NO: 282808 - DNA, 15 bp, Homo sapiens
cattctttcaacagc

SEQ ID NO: 282809 - DNA, 15 bp, Homo sapiens
ccattctttcaacag

SEQ ID NO: 282810 - DNA, 15 bp, Homo sapiens
tccattctttcaaca

SEQ ID NO: 282811 - DNA, 15 bp, Homo sapiens
ttccattctttcaac

SEQ ID NO: 282812 - DNA, 15 bp, Homo sapiens
attccattctttcaa

SEQ ID NO: 282813 - DNA, 15 bp, Homo sapiens
cattccattctttca

SEQ ID NO: 282814 - DNA, 15 bp, Homo sapiens
acattccattctttc

SEQ ID NO: 282815 - DNA, 15 bp, Homo sapiens
gacattccattcttt

SEQ ID NO: 282816 - DNA, 15 bp, Homo sapiens
tgacattccattctt

SEQ ID NO: 282817 - DNA, 15 bp, Homo sapiens
ctgacattccattct

SEQ ID NO: 282818 - DNA, 15 bp, Homo sapiens
tctgacattccattc

SEQ ID NO: 282819 - DNA, 15 bp, Homo sapiens
atctgacattccatt

SEQ ID NO: 282820 - DNA, 15 bp, Homo sapiens
catctgacattccat

SEQ ID NO: 282821 - DNA, 15 bp, Homo sapiens
ccatctgacattcca

SEQ ID NO: 282822 - DNA, 15 bp, Homo sapiens
accatctgacattcc

SEQ ID NO: 282823 - DNA, 15 bp, Homo sapiens
taccatctgacattc

SEQ ID NO: 282824 - DNA, 15 bp, Homo sapiens
ctaccatctgacatt

SEQ ID NO: 282825 - DNA, 15 bp, Homo sapiens
tctaccatctgacat

SEQ ID NO: 282826 - DNA, 15 bp, Homo sapiens
ctctaccatctgaca

SEQ ID NO: 282827 - DNA, 15 bp, Homo sapiens
cctctaccatctgac

SEQ ID NO: 282828 - DNA, 15 bp, Homo sapiens
tcctctaccatctga

SEQ ID NO: 282829 - DNA, 15 bp, Homo sapiens
ggctcctctaccatc

SEQ ID NO: 282830 - DNA, 15 bp, Homo sapiens
cggctcctctaccat

SEQ ID NO: 282831 - DNA, 15 bp, Homo sapiens
tcggctcctctacca

SEQ ID NO: 282832 - DNA, 15 bp, Homo sapiens
ctcggctcctctacc

SEQ ID NO: 282833 - DNA, 15 bp, Homo sapiens
gctcggctcctctac

SEQ ID NO: 282834 - DNA, 15 bp, Homo sapiens
ggctcggctcctcta

SEQ ID NO: 282835 - DNA, 15 bp, Homo sapiens
gggctcggctcctct

SEQ ID NO: 282836 - DNA, 15 bp, Homo sapiens
tgggctcggctcctc

SEQ ID NO: 282837 - DNA, 15 bp, Homo sapiens
gtgggctcggctcct

SEQ ID NO: 282838 - DNA, 15 bp, Homo sapiens
agtgggctcggctcc

SEQ ID NO: 282839 - DNA, 15 bp, Homo sapiens
gagtgggctcggctc

SEQ ID NO: 282840 - DNA, 15 bp, Homo sapiens
tgagtgggctcggct

SEQ ID NO: 282841 - DNA, 15 bp, Homo sapiens
ctgagtgggctcggc

SEQ ID NO: 282842 - DNA, 15 bp, Homo sapiens
cctgagtgggctcgg

SEQ ID NO: 282843 - DNA, 15 bp, Homo sapiens
ccctgagtgggctcg

SEQ ID NO: 282844 - DNA, 15 bp, Homo sapiens
tccctgagtgggctc

SEQ ID NO: 282845 - DNA, 15 bp, Homo sapiens
atccctgagtgggct

SEQ ID NO: 282846 - DNA, 15 bp, Homo sapiens
catccctgagtgggc

SEQ ID NO: 282847 - DNA, 15 bp, Homo sapiens
ccatccctgagtggg

SEQ ID NO: 282848 - DNA, 15 bp, Homo sapiens
accatccctgagtgg

SEQ ID NO: 282849 - DNA, 15 bp, Homo sapiens
caccatccctgagtg

SEQ ID NO: 282850 - DNA, 15 bp, Homo sapiens
ccaccatccctgagt

SEQ ID NO: 282851 - DNA, 15 bp, Homo sapiens
tccaccatccctgag

SEQ ID NO: 282852 - DNA, 15 bp, Homo sapiens
ttccaccatccctga

SEQ ID NO: 282853 - DNA, 15 bp, Homo sapiens
cttccaccatccctg

SEQ ID NO: 282854 - DNA, 15 bp, Homo sapiens
tcttccaccatccct

SEQ ID NO: 282855 - DNA, 15 bp, Homo sapiens
ctcttccaccatccc

SEQ ID NO: 282856 - DNA, 15 bp, Homo sapiens
tctcttccaccatcc

SEQ ID NO: 282857 - DNA, 15 bp, Homo sapiens
ttctcttccaccatc

SEQ ID NO: 282858 - DNA, 15 bp, Homo sapiens
cttctcttccaccat

SEQ ID NO: 282859 - DNA, 15 bp, Homo sapiens
tcttctcttccacca

SEQ ID NO: 282860 - DNA, 15 bp, Homo sapiens
atcttctcttccacc

SEQ ID NO: 282861 - DNA, 15 bp, Homo sapiens
catcttctcttccac

SEQ ID NO: 282862 - DNA, 15 bp, Homo sapiens
gcatcttctcttcca

SEQ ID NO: 282863 - DNA, 15 bp, Homo sapiens
ggcatcttctcttcc

SEQ ID NO: 282864 - DNA, 15 bp, Homo sapiens
aggcatcttctcttc

SEQ ID NO: 282865 - DNA, 15 bp, Homo sapiens
aaggcatcttctctt

SEQ ID NO: 282866 - DNA, 15 bp, Homo sapiens
gaaggcatcttctct

SEQ ID NO: 282867 - DNA, 15 bp, Homo sapiens
tgaaggcatcttctc

SEQ ID NO: 282868 - DNA, 15 bp, Homo sapiens
ctgaaggcatcttct

SEQ ID NO: 282869 - DNA, 15 bp, Homo sapiens
cctgaaggcatcttc

SEQ ID NO: 282870 - DNA, 15 bp, Homo sapiens
ccctgaaggcatctt

SEQ ID NO: 282871 - DNA, 15 bp, Homo sapiens
gccctgaaggcatct

SEQ ID NO: 282872 - DNA, 15 bp, Homo sapiens
tgccctgaaggcatc

SEQ ID NO: 282873 - DNA, 15 bp, Homo sapiens
ttgccctgaaggcat

SEQ ID NO: 282874 - DNA, 15 bp, Homo sapiens
tttgccctgaaggca

SEQ ID NO: 282875 - DNA, 15 bp, Homo sapiens
ctttgccctgaaggc

SEQ ID NO: 282876 - DNA, 15 bp, Homo sapiens
tctttgccctgaagg

SEQ ID NO: 282877 - DNA, 15 bp, Homo sapiens
ctctttgccctgaag

SEQ ID NO: 282878 - DNA, 15 bp, Homo sapiens
cctctttgccctgaa

SEQ ID NO: 282879 - DNA, 15 bp, Homo sapiens
gcctctttgccctga

SEQ ID NO: 282880 - DNA, 15 bp, Homo sapiens
agcctctttgccctg

SEQ ID NO: 282881 - DNA, 15 bp, Homo sapiens
cagcctctttgccct

SEQ ID NO: 282882 - DNA, 15 bp, Homo sapiens
acagcctctttgccc

SEQ ID NO: 282883 - DNA, 15 bp, Homo sapiens
tacagcctctttgcc

SEQ ID NO: 282884 - DNA, 15 bp, Homo sapiens
ttacagcctctttgc

SEQ ID NO: 282885 - DNA, 15 bp, Homo sapiens
tttacagcctctttg

SEQ ID NO: 282886 - DNA, 15 bp, Homo sapiens
atttacagcctcttt

SEQ ID NO: 282887 - DNA, 15 bp, Homo sapiens
tatttacagcctctt

SEQ ID NO: 282888 - DNA, 15 bp, Homo sapiens
ttatttacagcctct

SEQ ID NO: 282889 - DNA, 15 bp, Homo sapiens
gttatttacagcctc

SEQ ID NO: 282890 - DNA, 15 bp, Homo sapiens
agttatttacagcct

SEQ ID NO: 282891 - DNA, 15 bp, Homo sapiens
gagttatttacagcc

SEQ ID NO: 282892 - DNA, 15 bp, Homo sapiens
ggagttatttacagc

SEQ ID NO: 282893 - DNA, 15 bp, Homo sapiens
tggagttatttacag

SEQ ID NO: 282894 - DNA, 15 bp, Homo sapiens
ttggagttatttaca

SEQ ID NO: 282895 - DNA, 15 bp, Homo sapiens
attggagttatttac

SEQ ID NO: 282896 - DNA, 15 bp, Homo sapiens
cattggagttattta

SEQ ID NO: 282897 - DNA, 15 bp, Homo sapiens
ccattggagttattt

SEQ ID NO: 282898 - DNA, 15 bp, Homo sapiens
cccattggagttatt

SEQ ID NO: 282899 - DNA, 15 bp, Homo sapiens
tcccattggagttat

SEQ ID NO: 282900 - DNA, 15 bp, Homo sapiens
ttcccattggagtta

SEQ ID NO: 282901 - DNA, 15 bp, Homo sapiens
cttcccattggagtt

SEQ ID NO: 282902 - DNA, 15 bp, Homo sapiens
acttcccattggagt

SEQ ID NO: 282903 - DNA, 15 bp, Homo sapiens
gacttcccattggag

SEQ ID NO: 282904 - DNA, 15 bp, Homo sapiens
agacttcccattgga

SEQ ID NO: 282905 - DNA, 15 bp, Homo sapiens
aagacttcccattgg

SEQ ID NO: 282906 - DNA, 15 bp, Homo sapiens
caagacttcccattg

SEQ ID NO: 282907 - DNA, 15 bp, Homo sapiens
acaagacttcccatt

SEQ ID NO: 282908 - DNA, 15 bp, Homo sapiens
gacaagacttcccat

SEQ ID NO: 282909 - DNA, 15 bp, Homo sapiens
agacaagacttccca

SEQ ID NO: 282910 - DNA, 15 bp, Homo sapiens
gagacaagacttccc

SEQ ID NO: 282911 - DNA, 15 bp, Homo sapiens
ggagacaagacttcc

SEQ ID NO: 282912 - DNA, 15 bp, Homo sapiens
gggagacaagacttc

SEQ ID NO: 282913 - DNA, 15 bp, Homo sapiens
agggagacaagactt

SEQ ID NO: 282914 - DNA, 15 bp, Homo sapiens
aagggagacaagact

SEQ ID NO: 282915 - DNA, 15 bp, Homo sapiens
gaagggagacaagac

SEQ ID NO: 282916 - DNA, 15 bp, Homo sapiens
tgaagggagacaaga

SEQ ID NO: 282917 - DNA, 15 bp, Homo sapiens
ctgaagggagacaag

SEQ ID NO: 282918 - DNA, 15 bp, Homo sapiens
tctgaagggagacaa

SEQ ID NO: 282919 - DNA, 15 bp, Homo sapiens
ttctgaagggagaca

SEQ ID NO: 282920 - DNA, 15 bp, Homo sapiens
attctgaagggagac

SEQ ID NO: 282921 - DNA, 15 bp, Homo sapiens
cattctgaagggaga

SEQ ID NO: 282922 - DNA, 15 bp, Homo sapiens
acattctgaagggag

SEQ ID NO: 282923 - DNA, 15 bp, Homo sapiens
tacattctgaaggga

SEQ ID NO: 282924 - DNA, 15 bp, Homo sapiens
gtacattctgaaggg

SEQ ID NO: 282925 - DNA, 15 bp, Homo sapiens
ggtacattctgaagg

SEQ ID NO: 282926 - DNA, 15 bp, Homo sapiens
gggtacattctgaag

SEQ ID NO: 282927 - DNA, 15 bp, Homo sapiens
agggtacattctgaa

SEQ ID NO: 282928 - DNA, 15 bp, Homo sapiens
aagggtacattctga

SEQ ID NO: 282929 - DNA, 15 bp, Homo sapiens
aaagggtacattctg

SEQ ID NO: 282930 - DNA, 15 bp, Homo sapiens
taaagggtacattct

SEQ ID NO: 282931 - DNA, 15 bp, Homo sapiens
ttaaagggtacattc

SEQ ID NO: 282932 - DNA, 15 bp, Homo sapiens
attaaagggtacatt

SEQ ID NO: 282933 - DNA, 15 bp, Homo sapiens
tattaaagggtacat

SEQ ID NO: 282934 - DNA, 15 bp, Homo sapiens
ctattaaagggtaca

SEQ ID NO: 282935 - DNA, 15 bp, Homo sapiens
gctattaaagggtac

SEQ ID NO: 282936 - DNA, 15 bp, Homo sapiens
tgctattaaagggta

SEQ ID NO: 282937 - DNA, 15 bp, Homo sapiens
ttgctattaaagggt

SEQ ID NO: 282938 - DNA, 15 bp, Homo sapiens
gttgctattaaaggg

SEQ ID NO: 282939 - DNA, 15 bp, Homo sapiens
tgttgctattaaagg

SEQ ID NO: 282940 - DNA, 15 bp, Homo sapiens
gtgttgctattaaag

SEQ ID NO: 282941 - DNA, 15 bp, Homo sapiens
agtgttgctattaaa

SEQ ID NO: 282942 - DNA, 15 bp, Homo sapiens
aagtgttgctattaa

SEQ ID NO: 282943 - DNA, 15 bp, Homo sapiens
caagtgttgctatta

SEQ ID NO: 282944 - DNA, 15 bp, Homo sapiens
ccaagtgttgctatt

SEQ ID NO: 282945 - DNA, 15 bp, Homo sapiens
accaagtgttgctat

SEQ ID NO: 282946 - DNA, 15 bp, Homo sapiens
caccaagtgttgcta

SEQ ID NO: 282947 - DNA, 15 bp, Homo sapiens
gcaccaagtgttgct

SEQ ID NO: 282948 - DNA, 15 bp, Homo sapiens
agcaccaagtgttgc

SEQ ID NO: 282949 - DNA, 15 bp, Homo sapiens
gagcaccaagtgttg

SEQ ID NO: 282950 - DNA, 15 bp, Homo sapiens
agagcaccaagtgtt

SEQ ID NO: 282951 - DNA, 15 bp, Homo sapiens
cagagcaccaagtgt

SEQ ID NO: 282952 - DNA, 15 bp, Homo sapiens
tcagagcaccaagtg

SEQ ID NO: 282953 - DNA, 15 bp, Homo sapiens
atcagagcaccaagt

SEQ ID NO: 282954 - DNA, 15 bp, Homo sapiens
tatcagagcaccaag

SEQ ID NO: 282955 - DNA, 15 bp, Homo sapiens
atatcagagcaccaa

SEQ ID NO: 282956 - DNA, 15 bp, Homo sapiens
catatcagagcacca

SEQ ID NO: 282957 - DNA, 15 bp, Homo sapiens
tcatatcagagcacc

SEQ ID NO: 282958 - DNA, 15 bp, Homo sapiens
ctcatatcagagcac

SEQ ID NO: 282959 - DNA, 15 bp, Homo sapiens
tctcatatcagagca

SEQ ID NO: 282960 - DNA, 15 bp, Homo sapiens
ctctcatatcagagc

SEQ ID NO: 282961 - DNA, 15 bp, Homo sapiens
actctcatatcagag

SEQ ID NO: 282962 - DNA, 15 bp, Homo sapiens
tactctcatatcaga

SEQ ID NO: 282963 - DNA, 15 bp, Homo sapiens
ttactctcatatcag

SEQ ID NO: 282964 - DNA, 15 bp, Homo sapiens
gttactctcatatca

SEQ ID NO: 282965 - DNA, 15 bp, Homo sapiens
agttactctcatatc

SEQ ID NO: 282966 - DNA, 15 bp, Homo sapiens
gagttactctcatat

SEQ ID NO: 282967 - DNA, 15 bp, Homo sapiens
agagttactctcata

SEQ ID NO: 282968 - DNA, 15 bp, Homo sapiens
tagagttactctcat

SEQ ID NO: 282969 - DNA, 15 bp, Homo sapiens
ttagagttactctca

SEQ ID NO: 282970 - DNA, 15 bp, Homo sapiens
gttagagttactctc

SEQ ID NO: 282971 - DNA, 15 bp, Homo sapiens
agttagagttactct

SEQ ID NO: 282972 - DNA, 15 bp, Homo sapiens
gagttagagttactc

SEQ ID NO: 282973 - DNA, 15 bp, Homo sapiens
tgagttagagttact

SEQ ID NO: 282974 - DNA, 15 bp, Homo sapiens
ctgagttagagttac

SEQ ID NO: 282975 - DNA, 15 bp, Homo sapiens
gctgagttagagtta

SEQ ID NO: 282976 - DNA, 15 bp, Homo sapiens
ggctgagttagagtt

SEQ ID NO: 282977 - DNA, 15 bp, Homo sapiens
aggctgagttagagt

SEQ ID NO: 282978 - DNA, 15 bp, Homo sapiens
aaggctgagttagag

SEQ ID NO: 282979 - DNA, 15 bp, Homo sapiens
gaaggctgagttaga

SEQ ID NO: 282980 - DNA, 15 bp, Homo sapiens
ggaaggctgagttag

SEQ ID NO: 282981 - DNA, 15 bp, Homo sapiens
aggaaggctgagtta

SEQ ID NO: 282982 - DNA, 15 bp, Homo sapiens
taggaaggctgagtt

SEQ ID NO: 282983 - DNA, 15 bp, Homo sapiens
ctaggaaggctgagt

SEQ ID NO: 282984 - DNA, 15 bp, Homo sapiens
gctaggaaggctgag

SEQ ID NO: 282985 - DNA, 15 bp, Homo sapiens
agctaggaaggctga

SEQ ID NO: 282986 - DNA, 15 bp, Homo sapiens
gagctaggaaggctg

SEQ ID NO: 282987 - DNA, 15 bp, Homo sapiens
tgagctaggaaggct

SEQ ID NO: 282988 - DNA, 15 bp, Homo sapiens
atgagctaggaaggc

SEQ ID NO: 282989 - DNA, 15 bp, Homo sapiens
gatgagctaggaagg

SEQ ID NO: 282990 - DNA, 15 bp, Homo sapiens
agatgagctaggaag

SEQ ID NO: 282991 - DNA, 15 bp, Homo sapiens
cagatgagctaggaa

SEQ ID NO: 282992 - DNA, 15 bp, Homo sapiens
tcagatgagctagga

SEQ ID NO: 282993 - DNA, 15 bp, Homo sapiens
gtcagatgagctagg

SEQ ID NO: 282994 - DNA, 15 bp, Homo sapiens
ggtcagatgagctag

SEQ ID NO: 282995 - DNA, 15 bp, Homo sapiens
aggtcagatgagcta

SEQ ID NO: 282996 - DNA, 15 bp, Homo sapiens
aaggtcagatgagct

SEQ ID NO: 282997 - DNA, 15 bp, Homo sapiens
gaaggtcagatgagc

SEQ ID NO: 282998 - DNA, 15 bp, Homo sapiens
ggaaggtcagatgag

SEQ ID NO: 282999 - DNA, 15 bp, Homo sapiens
tggaaggtcagatga

SEQ ID NO: 283000 - DNA, 15 bp, Homo sapiens
atggaaggtcagatg

SEQ ID NO: 283001 - DNA, 15 bp, Homo sapiens
tatggaaggtcagat

SEQ ID NO: 283002 - DNA, 15 bp, Homo sapiens
atatggaaggtcaga

SEQ ID NO: 283003 - DNA, 15 bp, Homo sapiens
aatatggaaggtcag

SEQ ID NO: 283004 - DNA, 15 bp, Homo sapiens
caatatggaaggtca

SEQ ID NO: 283005 - DNA, 15 bp, Homo sapiens
gcaatatggaaggtc

SEQ ID NO: 283006 - DNA, 15 bp, Homo sapiens
ggcaatatggaaggt

SEQ ID NO: 283007 - DNA, 15 bp, Homo sapiens
tggcaatatggaagg

SEQ ID NO: 283008 - DNA, 15 bp, Homo sapiens
atggcaatatggaag

SEQ ID NO: 283009 - DNA, 15 bp, Homo sapiens
aatggcaatatggaa

SEQ ID NO: 283010 - DNA, 15 bp, Homo sapiens
aaatggcaatatgga

SEQ ID NO: 283011 - DNA, 15 bp, Homo sapiens
caaatggcaatatgg

SEQ ID NO: 283012 - DNA, 15 bp, Homo sapiens
acaaatggcaatatg

SEQ ID NO: 283013 - DNA, 15 bp, Homo sapiens
aacaaatggcaatat

SEQ ID NO: 283014 - DNA, 15 bp, Homo sapiens
gaacaaatggcaata

SEQ ID NO: 283015 - DNA, 15 bp, Homo sapiens
tgaacaaatggcaat

SEQ ID NO: 283016 - DNA, 15 bp, Homo sapiens
ctgaacaaatggcaa

SEQ ID NO: 283017 - DNA, 15 bp, Homo sapiens
cctgaacaaatggca

SEQ ID NO: 283018 - DNA, 15 bp, Homo sapiens
tcctgaacaaatggc

SEQ ID NO: 283019 - DNA, 15 bp, Homo sapiens
ttcctgaacaaatgg

SEQ ID NO: 283020 - DNA, 15 bp, Homo sapiens
attcctgaacaaatg

SEQ ID NO: 283021 - DNA, 15 bp, Homo sapiens
gattcctgaacaaat

SEQ ID NO: 283022 - DNA, 15 bp, Homo sapiens
cgattcctgaacaaa

SEQ ID NO: 283023 - DNA, 15 bp, Homo sapiens
tcgattcctgaacaa

SEQ ID NO: 283024 - DNA, 15 bp, Homo sapiens
ctcgattcctgaaca

SEQ ID NO: 283025 - DNA, 15 bp, Homo sapiens
actcgattcctgaac

SEQ ID NO: 283026 - DNA, 15 bp, Homo sapiens
cactcgattcctgaa

SEQ ID NO: 283027 - DNA, 15 bp, Homo sapiens
tcactcgattcctga

SEQ ID NO: 283028 - DNA, 15 bp, Homo sapiens
ttcactcgattcctg

SEQ ID NO: 283029 - DNA, 15 bp, Homo sapiens
tttcactcgattcct

SEQ ID NO: 283030 - DNA, 15 bp, Homo sapiens
ctttcactcgattcc

SEQ ID NO: 283031 - DNA, 15 bp, Homo sapiens
gctttcactcgattc

SEQ ID NO: 283032 - DNA, 15 bp, Homo sapiens
ggctttcactcgatt

SEQ ID NO: 283033 - DNA, 15 bp, Homo sapiens
aggctttcactcgat

SEQ ID NO: 283034 - DNA, 15 bp, Homo sapiens
caggctttcactcga

SEQ ID NO: 283035 - DNA, 15 bp, Homo sapiens
ccaggctttcactcg

SEQ ID NO: 283036 - DNA, 15 bp, Homo sapiens
accaggctttcactc

SEQ ID NO: 283037 - DNA, 15 bp, Homo sapiens
taccaggctttcact

SEQ ID NO: 283038 - DNA, 15 bp, Homo sapiens
ctaccaggctttcac

SEQ ID NO: 283039 - DNA, 15 bp, Homo sapiens
tctaccaggctttca

SEQ ID NO: 283040 - DNA, 15 bp, Homo sapiens
ctctaccaggctttc

SEQ ID NO: 283041 - DNA, 15 bp, Homo sapiens
tctctaccaggcttt

SEQ ID NO: 283042 - DNA, 15 bp, Homo sapiens
ttctctaccaggctt

SEQ ID NO: 283043 - DNA, 15 bp, Homo sapiens
cttctctaccaggct

SEQ ID NO: 283044 - DNA, 15 bp, Homo sapiens
tcttctctaccaggc

SEQ ID NO: 283045 - DNA, 15 bp, Homo sapiens
gtcttctctaccagg

SEQ ID NO: 283046 - DNA, 15 bp, Homo sapiens
tgtcttctctaccag

SEQ ID NO: 283047 - DNA, 15 bp, Homo sapiens
ctgtcttctctacca

SEQ ID NO: 283048 - DNA, 15 bp, Homo sapiens
cctgtcttctctacc

SEQ ID NO: 283049 - DNA, 15 bp, Homo sapiens
acctgtcttctctac

SEQ ID NO: 283050 - DNA, 15 bp, Homo sapiens
cacctgtcttctcta

SEQ ID NO: 283051 - DNA, 15 bp, Homo sapiens
ccacctgtcttctct

SEQ ID NO: 283052 - DNA, 15 bp, Homo sapiens
tccacctgtcttctc

SEQ ID NO: 283053 - DNA, 15 bp, Homo sapiens
ctccacctgtcttct

SEQ ID NO: 283054 - DNA, 15 bp, Homo sapiens
tctccacctgtcttc

SEQ ID NO: 283055 - DNA, 15 bp, Homo sapiens
ctctccacctgtctt

SEQ ID NO: 283056 - DNA, 15 bp, Homo sapiens
actctccacctgtct

SEQ ID NO: 283057 - DNA, 15 bp, Homo sapiens
tactctccacctgtc

SEQ ID NO: 283058 - DNA, 15 bp, Homo sapiens
atactctccacctgt

SEQ ID NO: 283059 - DNA, 15 bp, Homo sapiens
catactctccacctg

SEQ ID NO: 283060 - DNA, 15 bp, Homo sapiens
gcatactctccacct

SEQ ID NO: 283061 - DNA, 15 bp, Homo sapiens
ggcatactctccacc

SEQ ID NO: 283062 - DNA, 15 bp, Homo sapiens
tggcatactctccac

SEQ ID NO: 283063 - DNA, 15 bp, Homo sapiens
ttggcatactctcca

SEQ ID NO: 283064 - DNA, 15 bp, Homo sapiens
cttggcatactctcc

SEQ ID NO: 283065 - DNA, 15 bp, Homo sapiens
ccttggcatactctc

SEQ ID NO: 283066 - DNA, 15 bp, Homo sapiens
tccttggcatactct

SEQ ID NO: 283067 - DNA, 15 bp, Homo sapiens
ttccttggcatactc

SEQ ID NO: 283068 - DNA, 15 bp, Homo sapiens
gttccttggcatact

SEQ ID NO: 283069 - DNA, 15 bp, Homo sapiens
tgttccttggcatac

SEQ ID NO: 283070 - DNA, 15 bp, Homo sapiens
ctgttccttggcata

SEQ ID NO: 283071 - DNA, 15 bp, Homo sapiens
tctgttccttggcat

SEQ ID NO: 283072 - DNA, 15 bp, Homo sapiens
ctctgttccttggca

SEQ ID NO: 283073 - DNA, 15 bp, Homo sapiens
actctgttccttggc

SEQ ID NO: 283074 - DNA, 15 bp, Homo sapiens
gactctgttccttgg

SEQ ID NO: 283075 - DNA, 15 bp, Homo sapiens
tgactctgttccttg

SEQ ID NO: 283076 - DNA, 15 bp, Homo sapiens
ttgactctgttcctt

SEQ ID NO: 283077 - DNA, 15 bp, Homo sapiens
gttgactctgttcct

SEQ ID NO: 283078 - DNA, 15 bp, Homo sapiens
agttgactctgttcc

SEQ ID NO: 283079 - DNA, 15 bp, Homo sapiens
aagttgactctgttc

SEQ ID NO: 283080 - DNA, 15 bp, Homo sapiens
gaagttgactctgtt

SEQ ID NO: 283081 - DNA, 15 bp, Homo sapiens
agaagttgactctgt

SEQ ID NO: 283082 - DNA, 15 bp, Homo sapiens
aagaagttgactctg

SEQ ID NO: 283083 - DNA, 15 bp, Homo sapiens
aaagaagttgactct

SEQ ID NO: 283084 - DNA, 15 bp, Homo sapiens
taaagaagttgactc

SEQ ID NO: 283085 - DNA, 15 bp, Homo sapiens
ataaagaagttgact

SEQ ID NO: 283086 - DNA, 15 bp, Homo sapiens
tataaagaagttgac

SEQ ID NO: 283087 - DNA, 15 bp, Homo sapiens
atataaagaagttga

SEQ ID NO: 283088 - DNA, 15 bp, Homo sapiens
catataaagaagttg

SEQ ID NO: 283089 - DNA, 15 bp, Homo sapiens
acatataaagaagtt

SEQ ID NO: 283090 - DNA, 15 bp, Homo sapiens
gacatataaagaagt

SEQ ID NO: 283091 - DNA, 15 bp, Homo sapiens
ggacatataaagaag

SEQ ID NO: 283092 - DNA, 15 bp, Homo sapiens
aggacatataaagaa

SEQ ID NO: 283093 - DNA, 15 bp, Homo sapiens
aaggacatataaaga

SEQ ID NO: 283094 - DNA, 15 bp, Homo sapiens
caaggacatataaag

SEQ ID NO: 283095 - DNA, 15 bp, Homo sapiens
acaaggacatataaa

SEQ ID NO: 283096 - DNA, 15 bp, Homo sapiens
gacaaggacatataa

SEQ ID NO: 283097 - DNA, 15 bp, Homo sapiens
agacaaggacatata

SEQ ID NO: 283098 - DNA, 15 bp, Homo sapiens
gagacaaggacatat

SEQ ID NO: 283099 - DNA, 15 bp, Homo sapiens
ggagacaaggacata

SEQ ID NO: 283100 - DNA, 15 bp, Homo sapiens
tggagacaaggacat

SEQ ID NO: 283101 - DNA, 15 bp, Homo sapiens
atggagacaaggaca

SEQ ID NO: 283102 - DNA, 15 bp, Homo sapiens
tatggagacaaggac

SEQ ID NO: 283103 - DNA, 15 bp, Homo sapiens
atatggagacaagga

SEQ ID NO: 283104 - DNA, 15 bp, Homo sapiens
tatatggagacaagg

SEQ ID NO: 283105 - DNA, 15 bp, Homo sapiens
ctatatggagacaag

SEQ ID NO: 283106 - DNA, 15 bp, Homo sapiens
cctatatggagacaa

SEQ ID NO: 283107 - DNA, 15 bp, Homo sapiens
acctatatggagaca

SEQ ID NO: 283108 - DNA, 15 bp, Homo sapiens
tacctatatggagac

SEQ ID NO: 283109 - DNA, 15 bp, Homo sapiens
ctacctatatggaga

SEQ ID NO: 283110 - DNA, 15 bp, Homo sapiens
tctacctatatggag

SEQ ID NO: 283111 - DNA, 15 bp, Homo sapiens
atctacctatatgga

SEQ ID NO: 283112 - DNA, 15 bp, Homo sapiens
aatctacctatatgg

SEQ ID NO: 283113 - DNA, 15 bp, Homo sapiens
aaatctacctatatg

SEQ ID NO: 283114 - DNA, 15 bp, Homo sapiens
aaaatctacctatat

SEQ ID NO: 283115 - DNA, 15 bp, Homo sapiens
caaaatctacctata

SEQ ID NO: 283116 - DNA, 15 bp, Homo sapiens
ccaaaatctacctat

SEQ ID NO: 283117 - DNA, 15 bp, Homo sapiens
cccaaaatctaccta

SEQ ID NO: 283118 - DNA, 15 bp, Homo sapiens
ccccaaaatctacct

SEQ ID NO: 283119 - DNA, 15 bp, Homo sapiens
tccccaaaatctacc

SEQ ID NO: 283120 - DNA, 15 bp, Homo sapiens
gtccccaaaatctac

SEQ ID NO: 283121 - DNA, 15 bp, Homo sapiens
tgtccccaaaatcta

SEQ ID NO: 283122 - DNA, 15 bp, Homo sapiens
ctgtccccaaaatct

SEQ ID NO: 283123 - DNA, 15 bp, Homo sapiens
cctgtccccaaaatc

SEQ ID NO: 283124 - DNA, 15 bp, Homo sapiens
tcctgtccccaaaat

SEQ ID NO: 283125 - DNA, 15 bp, Homo sapiens
atcctgtccccaaaa

SEQ ID NO: 283126 - DNA, 15 bp, Homo sapiens
gatcctgtccccaaa

SEQ ID NO: 283127 - DNA, 15 bp, Homo sapiens
agatcctgtccccaa

SEQ ID NO: 283128 - DNA, 15 bp, Homo sapiens
cagatcctgtcccca

SEQ ID NO: 283129 - DNA, 15 bp, Homo sapiens
acagatcctgtcccc

SEQ ID NO: 283130 - DNA, 15 bp, Homo sapiens
aacagatcctgtccc

SEQ ID NO: 283131 - DNA, 15 bp, Homo sapiens
gaacagatcctgtcc

SEQ ID NO: 283132 - DNA, 15 bp, Homo sapiens
agaacagatcctgtc

SEQ ID NO: 283133 - DNA, 15 bp, Homo sapiens
aagaacagatcctgt

SEQ ID NO: 283134 - DNA, 15 bp, Homo sapiens
aaagaacagatcctg

SEQ ID NO: 283135 - DNA, 15 bp, Homo sapiens
caaagaacagatcct

SEQ ID NO: 283136 - DNA, 15 bp, Homo sapiens
ccaaagaacagatcc

SEQ ID NO: 283137 - DNA, 15 bp, Homo sapiens
accaaagaacagatc

SEQ ID NO: 283138 - DNA, 15 bp, Homo sapiens
aaccaaagaacagat

SEQ ID NO: 283139 - DNA, 15 bp, Homo sapiens
caaccaaagaacaga

SEQ ID NO: 283140 - DNA, 15 bp, Homo sapiens
acaaccaaagaacag

SEQ ID NO: 283141 - DNA, 15 bp, Homo sapiens
gacaaccaaagaaca

SEQ ID NO: 283142 - DNA, 15 bp, Homo sapiens
tgacaaccaaagaac

SEQ ID NO: 283143 - DNA, 15 bp, Homo sapiens
ttgacaaccaaagaa

SEQ ID NO: 283144 - DNA, 15 bp, Homo sapiens
tttgacaaccaaaga

SEQ ID NO: 283145 - DNA, 15 bp, Homo sapiens
gtttgacaaccaaag

SEQ ID NO: 283146 - DNA, 15 bp, Homo sapiens
tgtttgacaaccaaa

SEQ ID NO: 283147 - DNA, 15 bp, Homo sapiens
ctgtttgacaaccaa

SEQ ID NO: 283148 - DNA, 15 bp, Homo sapiens
tctgtttgacaacca

SEQ ID NO: 283149 - DNA, 15 bp, Homo sapiens
atctgtttgacaacc

SEQ ID NO: 283150 - DNA, 15 bp, Homo sapiens
aatctgtttgacaac

SEQ ID NO: 283151 - DNA, 15 bp, Homo sapiens
caatctgtttgacaa

SEQ ID NO: 283152 - DNA, 15 bp, Homo sapiens
ccaatctgtttgaca

SEQ ID NO: 283153 - DNA, 15 bp, Homo sapiens
accaatctgtttgac

SEQ ID NO: 283154 - DNA, 15 bp, Homo sapiens
aaccaatctgtttga

SEQ ID NO: 283155 - DNA, 15 bp, Homo sapiens
aaaccaatctgtttg

SEQ ID NO: 283156 - DNA, 15 bp, Homo sapiens
gaaaccaatctgttt

SEQ ID NO: 283157 - DNA, 15 bp, Homo sapiens
tgaaaccaatctgtt

SEQ ID NO: 283158 - DNA, 15 bp, Homo sapiens
atgaaaccaatctgt

SEQ ID NO: 283159 - DNA, 15 bp, Homo sapiens
aatgaaaccaatctg

SEQ ID NO: 283160 - DNA, 15 bp, Homo sapiens
aaatgaaaccaatct

SEQ ID NO: 283161 - DNA, 15 bp, Homo sapiens
taaatgaaaccaatc

SEQ ID NO: 283162 - DNA, 15 bp, Homo sapiens
gtaaatgaaaccaat

SEQ ID NO: 283163 - DNA, 15 bp, Homo sapiens
cgtaaatgaaaccaa

SEQ ID NO: 283164 - DNA, 15 bp, Homo sapiens
acgtaaatgaaacca

SEQ ID NO: 283165 - DNA, 15 bp, Homo sapiens
gacgtaaatgaaacc

SEQ ID NO: 283166 - DNA, 15 bp, Homo sapiens
tgacgtaaatgaaac

SEQ ID NO: 283167 - DNA, 15 bp, Homo sapiens
ttgacgtaaatgaaa

SEQ ID NO: 283168 - DNA, 15 bp, Homo sapiens
tttgacgtaaatgaa

SEQ ID NO: 283169 - DNA, 15 bp, Homo sapiens
ctttgacgtaaatga

SEQ ID NO: 283170 - DNA, 15 bp, Homo sapiens
actttgacgtaaatg

SEQ ID NO: 283171 - DNA, 15 bp, Homo sapiens
aactttgacgtaaat

SEQ ID NO: 283172 - DNA, 15 bp, Homo sapiens
gaactttgacgtaaa

SEQ ID NO: 283173 - DNA, 15 bp, Homo sapiens
tgaactttgacgtaa

SEQ ID NO: 283174 - DNA, 15 bp, Homo sapiens
ctgaactttgacgta

SEQ ID NO: 283175 - DNA, 15 bp, Homo sapiens
tctgaactttgacgt

SEQ ID NO: 283176 - DNA, 15 bp, Homo sapiens
ctctgaactttgacg

SEQ ID NO: 283177 - DNA, 15 bp, Homo sapiens
gctctgaactttgac

SEQ ID NO: 283178 - DNA, 15 bp, Homo sapiens
tgctctgaactttga

SEQ ID NO: 283179 - DNA, 15 bp, Homo sapiens
atgctctgaactttg

SEQ ID NO: 283180 - DNA, 15 bp, Homo sapiens
aatgctctgaacttt

SEQ ID NO: 283181 - DNA, 15 bp, Homo sapiens
taatgctctgaactt

SEQ ID NO: 283182 - DNA, 15 bp, Homo sapiens
ctaatgctctgaact

SEQ ID NO: 283183 - DNA, 15 bp, Homo sapiens
gctaatgctctgaac

SEQ ID NO: 283184 - DNA, 15 bp, Homo sapiens
tgctaatgctctgaa

SEQ ID NO: 283185 - DNA, 15 bp, Homo sapiens
gtgctaatgctctga

SEQ ID NO: 283186 - DNA, 15 bp, Homo sapiens
ggtgctaatgctctg

SEQ ID NO: 283187 - DNA, 15 bp, Homo sapiens
gggtgctaatgctct

SEQ ID NO: 283188 - DNA, 15 bp, Homo sapiens
agggtgctaatgctc

SEQ ID NO: 283189 - DNA, 15 bp, Homo sapiens
aagggtgctaatgct

SEQ ID NO: 283190 - DNA, 15 bp, Homo sapiens
gaagggtgctaatgc

SEQ ID NO: 283191 - DNA, 15 bp, Homo sapiens
ggaagggtgctaatg

SEQ ID NO: 283192 - DNA, 15 bp, Homo sapiens
aggaagggtgctaat

SEQ ID NO: 283193 - DNA, 15 bp, Homo sapiens
gaggaagggtgctaa

SEQ ID NO: 283194 - DNA, 15 bp, Homo sapiens
ggaggaagggtgcta

SEQ ID NO: 283195 - DNA, 15 bp, Homo sapiens
aggaggaagggtgct

SEQ ID NO: 283196 - DNA, 15 bp, Homo sapiens
aaggaggaagggtgc

SEQ ID NO: 283197 - DNA, 15 bp, Homo sapiens
gaaggaggaagggtg

SEQ ID NO: 283198 - DNA, 15 bp, Homo sapiens
agaaggaggaagggt

SEQ ID NO: 283199 - DNA, 15 bp, Homo sapiens
gagaaggaggaaggg

SEQ ID NO: 283200 - DNA, 15 bp, Homo sapiens
ggagaaggaggaagg

SEQ ID NO: 283201 - DNA, 15 bp, Homo sapiens
gggagaaggaggaag

SEQ ID NO: 283202 - DNA, 15 bp, Homo sapiens
agggagaaggaggaa

SEQ ID NO: 283203 - DNA, 15 bp, Homo sapiens
aagggagaaggagga

SEQ ID NO: 283204 - DNA, 15 bp, Homo sapiens
gaagggagaaggagg

SEQ ID NO: 283205 - DNA, 15 bp, Homo sapiens
ggaagggagaaggag

SEQ ID NO: 283206 - DNA, 15 bp, Homo sapiens
tggaagggagaagga

SEQ ID NO: 283207 - DNA, 15 bp, Homo sapiens
gtggaagggagaagg

SEQ ID NO: 283208 - DNA, 15 bp, Homo sapiens
tgtggaagggagaag

SEQ ID NO: 283209 - DNA, 15 bp, Homo sapiens
atgtggaagggagaa

SEQ ID NO: 283210 - DNA, 15 bp, Homo sapiens
aatgtggaagggaga

SEQ ID NO: 283211 - DNA, 15 bp, Homo sapiens
caatgtggaagggag

SEQ ID NO: 283212 - DNA, 15 bp, Homo sapiens
ccaatgtggaaggga

SEQ ID NO: 283213 - DNA, 15 bp, Homo sapiens
accaatgtggaaggg

SEQ ID NO: 283214 - DNA, 15 bp, Homo sapiens
caccaatgtggaagg

SEQ ID NO: 283215 - DNA, 15 bp, Homo sapiens
tcaccaatgtggaag

SEQ ID NO: 283216 - DNA, 15 bp, Homo sapiens
ctcaccaatgtggaa

SEQ ID NO: 283217 - DNA, 15 bp, Homo sapiens
cctcaccaatgtgga

SEQ ID NO: 283218 - DNA, 15 bp, Homo sapiens
tcctcaccaatgtgg

SEQ ID NO: 283219 - DNA, 15 bp, Homo sapiens
ttcctcaccaatgtg

SEQ ID NO: 283220 - DNA, 15 bp, Homo sapiens
tttcctcaccaatgt

SEQ ID NO: 283221 - DNA, 15 bp, Homo sapiens
atttcctcaccaatg

SEQ ID NO: 283222 - DNA, 15 bp, Homo sapiens
gatttcctcaccaat

SEQ ID NO: 283223 - DNA, 15 bp, Homo sapiens
agatttcctcaccaa

SEQ ID NO: 283224 - DNA, 15 bp, Homo sapiens
aagatttcctcacca

SEQ ID NO: 283225 - DNA, 15 bp, Homo sapiens
caagatttcctcacc

SEQ ID NO: 283226 - DNA, 15 bp, Homo sapiens
acaagatttcctcac

SEQ ID NO: 283227 - DNA, 15 bp, Homo sapiens
gacaagatttcctca

SEQ ID NO: 283228 - DNA, 15 bp, Homo sapiens
agacaagatttcctc

SEQ ID NO: 283229 - DNA, 15 bp, Homo sapiens
aagacaagatttcct

SEQ ID NO: 283230 - DNA, 15 bp, Homo sapiens
gaagacaagatttcc

SEQ ID NO: 283231 - DNA, 15 bp, Homo sapiens
ggaagacaagatttc

SEQ ID NO: 283232 - DNA, 15 bp, Homo sapiens
aggaagacaagattt

SEQ ID NO: 283233 - DNA, 15 bp, Homo sapiens
aaggaagacaagatt

SEQ ID NO: 283234 - DNA, 15 bp, Homo sapiens
caaggaagacaagat

SEQ ID NO: 283235 - DNA, 15 bp, Homo sapiens
gcaaggaagacaaga

SEQ ID NO: 283236 - DNA, 15 bp, Homo sapiens
agcaaggaagacaag

SEQ ID NO: 283237 - DNA, 15 bp, Homo sapiens
aagcaaggaagacaa

SEQ ID NO: 283238 - DNA, 15 bp, Homo sapiens
taagcaaggaagaca

SEQ ID NO: 283239 - DNA, 15 bp, Homo sapiens
ataagcaaggaagac

SEQ ID NO: 283240 - DNA, 15 bp, Homo sapiens
aataagcaaggaaga

SEQ ID NO: 283241 - DNA, 15 bp, Homo sapiens
aaataagcaaggaag

SEQ ID NO: 283242 - DNA, 15 bp, Homo sapiens
caaataagcaaggaa

SEQ ID NO: 283243 - DNA, 15 bp, Homo sapiens
acaaataagcaagga

SEQ ID NO: 283244 - DNA, 15 bp, Homo sapiens
gacaaataagcaagg

SEQ ID NO: 283245 - DNA, 15 bp, Homo sapiens
tgacaaataagcaag

SEQ ID NO: 283246 - DNA, 15 bp, Homo sapiens
atgacaaataagcaa

SEQ ID NO: 283247 - DNA, 15 bp, Homo sapiens
aatgacaaataagca

SEQ ID NO: 283248 - DNA, 15 bp, Homo sapiens
caatgacaaataagc

SEQ ID NO: 283249 - DNA, 15 bp, Homo sapiens
gcaatgacaaataag

SEQ ID NO: 283250 - DNA, 15 bp, Homo sapiens
tgcaatgacaaataa

SEQ ID NO: 283251 - DNA, 15 bp, Homo sapiens
gtgcaatgacaaata

SEQ ID NO: 283252 - DNA, 15 bp, Homo sapiens
tgtgcaatgacaaat

SEQ ID NO: 283253 - DNA, 15 bp, Homo sapiens
ttgtgcaatgacaaa

SEQ ID NO: 283254 - DNA, 15 bp, Homo sapiens
cttgtgcaatgacaa

SEQ ID NO: 283255 - DNA, 15 bp, Homo sapiens
acttgtgcaatgaca

SEQ ID NO: 283256 - DNA, 15 bp, Homo sapiens
cacttgtgcaatgac

SEQ ID NO: 283257 - DNA, 15 bp, Homo sapiens
ccacttgtgcaatga

SEQ ID NO: 283258 - DNA, 15 bp, Homo sapiens
accacttgtgcaatg

SEQ ID NO: 283259 - DNA, 15 bp, Homo sapiens
taccacttgtgcaat

SEQ ID NO: 283260 - DNA, 15 bp, Homo sapiens
gtaccacttgtgcaa

SEQ ID NO: 283261 - DNA, 15 bp, Homo sapiens
ggtaccacttgtgca

SEQ ID NO: 283262 - DNA, 15 bp, Homo sapiens
aggtaccacttgtgc

SEQ ID NO: 283263 - DNA, 15 bp, Homo sapiens
taggtaccacttgtg

SEQ ID NO: 283264 - DNA, 15 bp, Homo sapiens
ctaggtaccacttgt

SEQ ID NO: 283265 - DNA, 15 bp, Homo sapiens
cctaggtaccacttg

SEQ ID NO: 283266 - DNA, 15 bp, Homo sapiens
gcctaggtaccactt

SEQ ID NO: 283267 - DNA, 15 bp, Homo sapiens
tgcctaggtaccact

SEQ ID NO: 283268 - DNA, 15 bp, Homo sapiens
atgcctaggtaccac

SEQ ID NO: 283269 - DNA, 15 bp, Homo sapiens
gatgcctaggtacca

SEQ ID NO: 283270 - DNA, 15 bp, Homo sapiens
cgatgcctaggtacc

SEQ ID NO: 283271 - DNA, 15 bp, Homo sapiens
acgatgcctaggtac

SEQ ID NO: 283272 - DNA, 15 bp, Homo sapiens
tacgatgcctaggta

SEQ ID NO: 283273 - DNA, 15 bp, Homo sapiens
ctacgatgcctaggt

SEQ ID NO: 283274 - DNA, 15 bp, Homo sapiens
cctacgatgcctagg

SEQ ID NO: 283275 - DNA, 15 bp, Homo sapiens
gcctacgatgcctag

SEQ ID NO: 283276 - DNA, 15 bp, Homo sapiens
tgcctacgatgccta

SEQ ID NO: 283277 - DNA, 15 bp, Homo sapiens
ttgcctacgatgcct

SEQ ID NO: 283278 - DNA, 15 bp, Homo sapiens
attgcctacgatgcc

SEQ ID NO: 283279 - DNA, 15 bp, Homo sapiens
cattgcctacgatgc

SEQ ID NO: 283280 - DNA, 15 bp, Homo sapiens
ccattgcctacgatg

SEQ ID NO: 283281 - DNA, 15 bp, Homo sapiens
gccattgcctacgat

SEQ ID NO: 283282 - DNA, 15 bp, Homo sapiens
tgccattgcctacga

SEQ ID NO: 283283 - DNA, 15 bp, Homo sapiens
atgccattgcctacg

SEQ ID NO: 283284 - DNA, 15 bp, Homo sapiens
gatgccattgcctac

SEQ ID NO: 283285 - DNA, 15 bp, Homo sapiens
agatgccattgccta

SEQ ID NO: 283286 - DNA, 15 bp, Homo sapiens
tagatgccattgcct

SEQ ID NO: 283287 - DNA, 15 bp, Homo sapiens
ctagatgccattgcc

SEQ ID NO: 283288 - DNA, 15 bp, Homo sapiens
tctagatgccattgc

SEQ ID NO: 283289 - DNA, 15 bp, Homo sapiens
ttctagatgccattg

SEQ ID NO: 283290 - DNA, 15 bp, Homo sapiens
cttctagatgccatt

SEQ ID NO: 283291 - DNA, 15 bp, Homo sapiens
gcttctagatgccat

SEQ ID NO: 283292 - DNA, 15 bp, Homo sapiens
tgcttctagatgcca

SEQ ID NO: 283293 - DNA, 15 bp, Homo sapiens
atgcttctagatgcc

SEQ ID NO: 283294 - DNA, 15 bp, Homo sapiens
aatgcttctagatgc

SEQ ID NO: 283295 - DNA, 15 bp, Homo sapiens
taatgcttctagatg

SEQ ID NO: 283296 - DNA, 15 bp, Homo sapiens
ttaatgcttctagat

SEQ ID NO: 283297 - DNA, 15 bp, Homo sapiens
cttaatgcttctaga

SEQ ID NO: 283298 - DNA, 15 bp, Homo sapiens
ccttaatgcttctag

SEQ ID NO: 283299 - DNA, 15 bp, Homo sapiens
cccttaatgcttcta

SEQ ID NO: 283300 - DNA, 15 bp, Homo sapiens
tcccttaatgcttct

SEQ ID NO: 283301 - DNA, 15 bp, Homo sapiens
ttcccttaatgcttc

SEQ ID NO: 283302 - DNA, 15 bp, Homo sapiens
gttcccttaatgctt

SEQ ID NO: 283303 - DNA, 15 bp, Homo sapiens
agttcccttaatgct

SEQ ID NO: 283304 - DNA, 15 bp, Homo sapiens
cagttcccttaatgc

SEQ ID NO: 283305 - DNA, 15 bp, Homo sapiens
gcagttcccttaatg

SEQ ID NO: 283306 - DNA, 15 bp, Homo sapiens
agcagttcccttaat

SEQ ID NO: 283307 - DNA, 15 bp, Homo sapiens
aagcagttcccttaa

SEQ ID NO: 283308 - DNA, 15 bp, Homo sapiens
taagcagttccctta

SEQ ID NO: 283309 - DNA, 15 bp, Homo sapiens
ataagcagttccctt

SEQ ID NO: 283310 - DNA, 15 bp, Homo sapiens
gataagcagttccct

SEQ ID NO: 283311 - DNA, 15 bp, Homo sapiens
agataagcagttccc

SEQ ID NO: 283312 - DNA, 15 bp, Homo sapiens
aagataagcagttcc

SEQ ID NO: 283313 - DNA, 15 bp, Homo sapiens
aaagataagcagttc

SEQ ID NO: 283314 - DNA, 15 bp, Homo sapiens
caaagataagcagtt

SEQ ID NO: 283315 - DNA, 15 bp, Homo sapiens
ccaaagataagcagt

SEQ ID NO: 283316 - DNA, 15 bp, Homo sapiens
gccaaagataagcag

SEQ ID NO: 283317 - DNA, 15 bp, Homo sapiens
agccaaagataagca

SEQ ID NO: 283318 - DNA, 15 bp, Homo sapiens
aagccaaagataagc

SEQ ID NO: 283319 - DNA, 15 bp, Homo sapiens
aaagccaaagataag

SEQ ID NO: 283320 - DNA, 15 bp, Homo sapiens
gaaagccaaagataa

SEQ ID NO: 283321 - DNA, 15 bp, Homo sapiens
tgaaagccaaagata

SEQ ID NO: 283322 - DNA, 15 bp, Homo sapiens
atgaaagccaaagat

SEQ ID NO: 283323 - DNA, 15 bp, Homo sapiens
aatgaaagccaaaga

SEQ ID NO: 283324 - DNA, 15 bp, Homo sapiens
caatgaaagccaaag

SEQ ID NO: 283325 - DNA, 15 bp, Homo sapiens
ccaatgaaagccaaa

SEQ ID NO: 283326 - DNA, 15 bp, Homo sapiens
cccaatgaaagccaa

SEQ ID NO: 283327 - DNA, 15 bp, Homo sapiens
ccccaatgaaagcca

SEQ ID NO: 283328 - DNA, 15 bp, Homo sapiens
tccccaatgaaagcc

SEQ ID NO: 283329 - DNA, 15 bp, Homo sapiens
ttccccaatgaaagc

SEQ ID NO: 283330 - DNA, 15 bp, Homo sapiens
tttccccaatgaaag

SEQ ID NO: 283331 - DNA, 15 bp, Homo sapiens
atttccccaatgaaa

SEQ ID NO: 283332 - DNA, 15 bp, Homo sapiens
gatttccccaatgaa

SEQ ID NO: 283333 - DNA, 15 bp, Homo sapiens
tgatttccccaatga

SEQ ID NO: 283334 - DNA, 15 bp, Homo sapiens
ctgatttccccaatg

SEQ ID NO: 283335 - DNA, 15 bp, Homo sapiens
cctgatttccccaat

SEQ ID NO: 283336 - DNA, 15 bp, Homo sapiens
ccctgatttccccaa

SEQ ID NO: 283337 - DNA, 15 bp, Homo sapiens
tccctgatttcccca

SEQ ID NO: 283338 - DNA, 15 bp, Homo sapiens
gtccctgatttcccc

SEQ ID NO: 283339 - DNA, 15 bp, Homo sapiens
agtccctgatttccc

SEQ ID NO: 283340 - DNA, 15 bp, Homo sapiens
tagtccctgatttcc

SEQ ID NO: 283341 - DNA, 15 bp, Homo sapiens
atagtccctgatttc

SEQ ID NO: 283342 - DNA, 15 bp, Homo sapiens
catagtccctgattt

SEQ ID NO: 283343 - DNA, 15 bp, Homo sapiens
gcatagtccctgatt

SEQ ID NO: 283344 - DNA, 15 bp, Homo sapiens
agcatagtccctgat

SEQ ID NO: 283345 - DNA, 15 bp, Homo sapiens
tagcatagtccctga

SEQ ID NO: 283346 - DNA, 15 bp, Homo sapiens
ctagcatagtccctg

SEQ ID NO: 283347 - DNA, 15 bp, Homo sapiens
cctagcatagtccct

SEQ ID NO: 283348 - DNA, 15 bp, Homo sapiens
tcctagcatagtccc

SEQ ID NO: 283349 - DNA, 15 bp, Homo sapiens
ttcctagcatagtcc

SEQ ID NO: 283350 - DNA, 15 bp, Homo sapiens
tttcctagcatagtc

SEQ ID NO: 283351 - DNA, 15 bp, Homo sapiens
ctttcctagcatagt

SEQ ID NO: 283352 - DNA, 15 bp, Homo sapiens
cctttcctagcatag

SEQ ID NO: 283353 - DNA, 15 bp, Homo sapiens
tcctttcctagcata

SEQ ID NO: 283354 - DNA, 15 bp, Homo sapiens
gtcctttcctagcat

SEQ ID NO: 283355 - DNA, 15 bp, Homo sapiens
tgtcctttcctagca

SEQ ID NO: 283356 - DNA, 15 bp, Homo sapiens
ctgtcctttcctagc

SEQ ID NO: 283357 - DNA, 15 bp, Homo sapiens
cctgtcctttcctag

SEQ ID NO: 283358 - DNA, 15 bp, Homo sapiens
tcctgtcctttccta

SEQ ID NO: 283359 - DNA, 15 bp, Homo sapiens
ctcctgtcctttcct

SEQ ID NO: 283360 - DNA, 15 bp, Homo sapiens
cctcctgtcctttcc

SEQ ID NO: 283361 - DNA, 15 bp, Homo sapiens
tcctcctgtcctttc

SEQ ID NO: 283362 - DNA, 15 bp, Homo sapiens
gtcctcctgtccttt

SEQ ID NO: 283363 - DNA, 15 bp, Homo sapiens
agtcctcctgtcctt

SEQ ID NO: 283364 - DNA, 15 bp, Homo sapiens
cagtcctcctgtcct

SEQ ID NO: 283365 - DNA, 15 bp, Homo sapiens
tcagtcctcctgtcc

SEQ ID NO: 283366 - DNA, 15 bp, Homo sapiens
ctcagtcctcctgtc

SEQ ID NO: 283367 - DNA, 15 bp, Homo sapiens
gctcagtcctcctgt

SEQ ID NO: 283368 - DNA, 15 bp, Homo sapiens
agctcagtcctcctg

SEQ ID NO: 283369 - DNA, 15 bp, Homo sapiens
cagctcagtcctcct

SEQ ID NO: 283370 - DNA, 15 bp, Homo sapiens
tcagctcagtcctcc

SEQ ID NO: 283371 - DNA, 15 bp, Homo sapiens
ttcagctcagtcctc

SEQ ID NO: 283372 - DNA, 15 bp, Homo sapiens
gttcagctcagtcct

SEQ ID NO: 283373 - DNA, 15 bp, Homo sapiens
ggttcagctcagtcc

SEQ ID NO: 283374 - DNA, 15 bp, Homo sapiens
aggttcagctcagtc

SEQ ID NO: 283375 - DNA, 15 bp, Homo sapiens
aaggttcagctcagt

SEQ ID NO: 283376 - DNA, 15 bp, Homo sapiens
aaaggttcagctcag

SEQ ID NO: 283377 - DNA, 15 bp, Homo sapiens
gaaaggttcagctca

SEQ ID NO: 283378 - DNA, 15 bp, Homo sapiens
tgaaaggttcagctc

SEQ ID NO: 283379 - DNA, 15 bp, Homo sapiens
ctgaaaggttcagct

SEQ ID NO: 283380 - DNA, 15 bp, Homo sapiens
cctgaaaggttcagc

SEQ ID NO: 283381 - DNA, 15 bp, Homo sapiens
acctgaaaggttcag

SEQ ID NO: 283382 - DNA, 15 bp, Homo sapiens
gacctgaaaggttca

SEQ ID NO: 283383 - DNA, 15 bp, Homo sapiens
agacctgaaaggttc

SEQ ID NO: 283384 - DNA, 15 bp, Homo sapiens
cagacctgaaaggtt

SEQ ID NO: 283385 - DNA, 15 bp, Homo sapiens
gcagacctgaaaggt

SEQ ID NO: 283386 - DNA, 15 bp, Homo sapiens
ggcagacctgaaagg

SEQ ID NO: 283387 - DNA, 15 bp, Homo sapiens
tggcagacctgaaag

SEQ ID NO: 283388 - DNA, 15 bp, Homo sapiens
gtggcagacctgaaa

SEQ ID NO: 283389 - DNA, 15 bp, Homo sapiens
tgtggcagacctgaa

SEQ ID NO: 283390 - DNA, 15 bp, Homo sapiens
ttgtggcagacctga

SEQ ID NO: 283391 - DNA, 15 bp, Homo sapiens
tttgtggcagacctg

SEQ ID NO: 283392 - DNA, 15 bp, Homo sapiens
ttttgtggcagacct

SEQ ID NO: 283393 - DNA, 15 bp, Homo sapiens
cttttgtggcagacc

SEQ ID NO: 283394 - DNA, 15 bp, Homo sapiens
tcttttgtggcagac

SEQ ID NO: 283395 - DNA, 15 bp, Homo sapiens
gtcttttgtggcaga

SEQ ID NO: 283396 - DNA, 15 bp, Homo sapiens
tgtcttttgtggcag

SEQ ID NO: 283397 - DNA, 15 bp, Homo sapiens
ttgtcttttgtggca

SEQ ID NO: 283398 - DNA, 15 bp, Homo sapiens
gttgtcttttgtggc

SEQ ID NO: 283399 - DNA, 15 bp, Homo sapiens
agttgtcttttgtgg

SEQ ID NO: 283400 - DNA, 15 bp, Homo sapiens
cagttgtcttttgtg

SEQ ID NO: 283401 - DNA, 15 bp, Homo sapiens
acagttgtcttttgt

SEQ ID NO: 283402 - DNA, 15 bp, Homo sapiens
tacagttgtcttttg

SEQ ID NO: 283403 - DNA, 15 bp, Homo sapiens
ctacagttgtctttt

SEQ ID NO: 283404 - DNA, 15 bp, Homo sapiens
tctacagttgtcttt

SEQ ID NO: 283405 - DNA, 15 bp, Homo sapiens
ttctacagttgtctt

SEQ ID NO: 283406 - DNA, 15 bp, Homo sapiens
attctacagttgtct

SEQ ID NO: 283407 - DNA, 15 bp, Homo sapiens
tattctacagttgtc

SEQ ID NO: 283408 - DNA, 15 bp, Homo sapiens
atattctacagttgt

SEQ ID NO: 283409 - DNA, 15 bp, Homo sapiens
tatattctacagttg

SEQ ID NO: 283410 - DNA, 15 bp, Homo sapiens
ctatattctacagtt

SEQ ID NO: 283411 - DNA, 15 bp, Homo sapiens
actatattctacagt

SEQ ID NO: 283412 - DNA, 15 bp, Homo sapiens
tactatattctacag

SEQ ID NO: 283413 - DNA, 15 bp, Homo sapiens
atactatattctaca

SEQ ID NO: 283414 - DNA, 15 bp, Homo sapiens
aatactatattctac

SEQ ID NO: 283415 - DNA, 15 bp, Homo sapiens
taatactatattcta

SEQ ID NO: 283416 - DNA, 15 bp, Homo sapiens
ctaatactatattct

SEQ ID NO: 283417 - DNA, 15 bp, Homo sapiens
tctaatactatattc

SEQ ID NO: 283418 - DNA, 15 bp, Homo sapiens
ctctaatactatatt

SEQ ID NO: 283419 - DNA, 15 bp, Homo sapiens
actctaatactatat

SEQ ID NO: 283420 - DNA, 15 bp, Homo sapiens
gactctaatactata

SEQ ID NO: 283421 - DNA, 15 bp, Homo sapiens
tgactctaatactat

SEQ ID NO: 283422 - DNA, 15 bp, Homo sapiens
ttgactctaatacta

SEQ ID NO: 283423 - DNA, 15 bp, Homo sapiens
tttgactctaatact

SEQ ID NO: 283424 - DNA, 15 bp, Homo sapiens
ctttgactctaatac

SEQ ID NO: 283425 - DNA, 15 bp, Homo sapiens
tctttgactctaata

SEQ ID NO: 283426 - DNA, 15 bp, Homo sapiens
ctctttgactctaat

SEQ ID NO: 283427 - DNA, 15 bp, Homo sapiens
cctctttgactctaa

SEQ ID NO: 283428 - DNA, 15 bp, Homo sapiens
gcctctttgactcta

SEQ ID NO: 283429 - DNA, 15 bp, Homo sapiens
tgcctctttgactct

SEQ ID NO: 283430 - DNA, 15 bp, Homo sapiens
atgcctctttgactc

SEQ ID NO: 283431 - DNA, 15 bp, Homo sapiens
aatgcctctttgact

SEQ ID NO: 283432 - DNA, 15 bp, Homo sapiens
caatgcctctttgac

SEQ ID NO: 283433 - DNA, 15 bp, Homo sapiens
ccaatgcctctttga

SEQ ID NO: 283434 - DNA, 15 bp, Homo sapiens
tccaatgcctctttg

SEQ ID NO: 283435 - DNA, 15 bp, Homo sapiens
atccaatgcctcttt

SEQ ID NO: 283436 - DNA, 15 bp, Homo sapiens
gatccaatgcctctt

SEQ ID NO: 283437 - DNA, 15 bp, Homo sapiens
ggatccaatgcctct

SEQ ID NO: 283438 - DNA, 15 bp, Homo sapiens
gggatccaatgcctc

SEQ ID NO: 283439 - DNA, 15 bp, Homo sapiens
tgggatccaatgcct

SEQ ID NO: 283440 - DNA, 15 bp, Homo sapiens
ttgggatccaatgcc

SEQ ID NO: 283441 - DNA, 15 bp, Homo sapiens
gttgggatccaatgc

SEQ ID NO: 283442 - DNA, 15 bp, Homo sapiens
agttgggatccaatg

SEQ ID NO: 283443 - DNA, 15 bp, Homo sapiens
cagttgggatccaat

SEQ ID NO: 283444 - DNA, 15 bp, Homo sapiens
ccagttgggatccaa

SEQ ID NO: 283445 - DNA, 15 bp, Homo sapiens
accagttgggatcca

SEQ ID NO: 283446 - DNA, 15 bp, Homo sapiens
caccagttgggatcc

SEQ ID NO: 283447 - DNA, 15 bp, Homo sapiens
gcaccagttgggatc

SEQ ID NO: 283448 - DNA, 15 bp, Homo sapiens
ggcaccagttgggat

SEQ ID NO: 283449 - DNA, 15 bp, Homo sapiens
tggcaccagttggga

SEQ ID NO: 283450 - DNA, 15 bp, Homo sapiens
gtggcaccagttggg

SEQ ID NO: 283451 - DNA, 15 bp, Homo sapiens
agtggcaccagttgg

SEQ ID NO: 283452 - DNA, 15 bp, Homo sapiens
cagtggcaccagttg

SEQ ID NO: 283453 - DNA, 15 bp, Homo sapiens
acagtggcaccagtt

SEQ ID NO: 283454 - DNA, 15 bp, Homo sapiens
aacagtggcaccagt

SEQ ID NO: 283455 - DNA, 15 bp, Homo sapiens
gaacagtggcaccag

SEQ ID NO: 283456 - DNA, 15 bp, Homo sapiens
agaacagtggcacca

SEQ ID NO: 283457 - DNA, 15 bp, Homo sapiens
gagaacagtggcacc

SEQ ID NO: 283458 - DNA, 15 bp, Homo sapiens
agagaacagtggcac

SEQ ID NO: 283459 - DNA, 15 bp, Homo sapiens
cagagaacagtggca

SEQ ID NO: 283460 - DNA, 15 bp, Homo sapiens
tcagagaacagtggc

SEQ ID NO: 283461 - DNA, 15 bp, Homo sapiens
ctcagagaacagtgg

SEQ ID NO: 283462 - DNA, 15 bp, Homo sapiens
gctcagagaacagtg

SEQ ID NO: 283463 - DNA, 15 bp, Homo sapiens
ggctcagagaacagt

SEQ ID NO: 283464 - DNA, 15 bp, Homo sapiens
gctgaggctcagaga

SEQ ID NO: 283465 - DNA, 15 bp, Homo sapiens
tgctgaggctcagag

SEQ ID NO: 283466 - DNA, 15 bp, Homo sapiens
atgctgaggctcaga

SEQ ID NO: 283467 - DNA, 15 bp, Homo sapiens
gatgctgaggctcag

SEQ ID NO: 283468 - DNA, 15 bp, Homo sapiens
ggatgctgaggctca

SEQ ID NO: 283469 - DNA, 15 bp, Homo sapiens
aggatgctgaggctc

SEQ ID NO: 283470 - DNA, 15 bp, Homo sapiens
aaggatgctgaggct

SEQ ID NO: 283471 - DNA, 15 bp, Homo sapiens
aaaggatgctgaggc

SEQ ID NO: 283472 - DNA, 15 bp, Homo sapiens
gaaaggatgctgagg

SEQ ID NO: 283473 - DNA, 15 bp, Homo sapiens
ggaaaggatgctgag

SEQ ID NO: 283474 - DNA, 15 bp, Homo sapiens
aggaaaggatgctga

SEQ ID NO: 283475 - DNA, 15 bp, Homo sapiens
caggaaaggatgctg

SEQ ID NO: 283476 - DNA, 15 bp, Homo sapiens
tcaggaaaggatgct

SEQ ID NO: 283477 - DNA, 15 bp, Homo sapiens
ctcaggaaaggatgc

SEQ ID NO: 283478 - DNA, 15 bp, Homo sapiens
cctcaggaaaggatg

SEQ ID NO: 283479 - DNA, 15 bp, Homo sapiens
tcctcaggaaaggat

SEQ ID NO: 283480 - DNA, 15 bp, Homo sapiens
ttcctcaggaaagga

SEQ ID NO: 283481 - DNA, 15 bp, Homo sapiens
attcctcaggaaagg

SEQ ID NO: 283482 - DNA, 15 bp, Homo sapiens
cattcctcaggaaag

SEQ ID NO: 283483 - DNA, 15 bp, Homo sapiens
tcattcctcaggaaa

SEQ ID NO: 283484 - DNA, 15 bp, Homo sapiens
ctcattcctcaggaa

SEQ ID NO: 283485 - DNA, 15 bp, Homo sapiens
cctcattcctcagga

SEQ ID NO: 283486 - DNA, 15 bp, Homo sapiens
tcctcattcctcagg

SEQ ID NO: 283487 - DNA, 15 bp, Homo sapiens
atcctcattcctcag

SEQ ID NO: 283488 - DNA, 15 bp, Homo sapiens
catcctcattcctca

SEQ ID NO: 283489 - DNA, 15 bp, Homo sapiens
tcatcctcattcctc

SEQ ID NO: 283490 - DNA, 15 bp, Homo sapiens
ctcatcctcattcct

SEQ ID NO: 283491 - DNA, 15 bp, Homo sapiens
gtccctcatcctcat

SEQ ID NO: 283492 - DNA, 15 bp, Homo sapiens
ggtccctcatcctca

SEQ ID NO: 283493 - DNA, 15 bp, Homo sapiens
aggtccctcatcctc

SEQ ID NO: 283494 - DNA, 15 bp, Homo sapiens
gaggtccctcatcct

SEQ ID NO: 283495 - DNA, 15 bp, Homo sapiens
ggaggtccctcatcc

SEQ ID NO: 283496 - DNA, 15 bp, Homo sapiens
aggaggtccctcatc

SEQ ID NO: 283497 - DNA, 15 bp, Homo sapiens
gaggaggtccctcat

SEQ ID NO: 283498 - DNA, 15 bp, Homo sapiens
tgaggaggtccctca

SEQ ID NO: 283499 - DNA, 15 bp, Homo sapiens
ttgaggaggtccctc

SEQ ID NO: 283500 - DNA, 15 bp, Homo sapiens
cttgaggaggtccct

SEQ ID NO: 283501 - DNA, 15 bp, Homo sapiens
ccttgaggaggtccc

SEQ ID NO: 283502 - DNA, 15 bp, Homo sapiens
accttgaggaggtcc

SEQ ID NO: 283503 - DNA, 15 bp, Homo sapiens
gaccttgaggaggtc

SEQ ID NO: 283504 - DNA, 15 bp, Homo sapiens
tgaccttgaggaggt

SEQ ID NO: 283505 - DNA, 15 bp, Homo sapiens
atgaccttgaggagg

SEQ ID NO: 283506 - DNA, 15 bp, Homo sapiens
gatgaccttgaggag

SEQ ID NO: 283507 - DNA, 15 bp, Homo sapiens
ggatgaccttgagga

SEQ ID NO: 283508 - DNA, 15 bp, Homo sapiens
cggatgaccttgagg

SEQ ID NO: 283509 - DNA, 15 bp, Homo sapiens
tcggatgaccttgag

SEQ ID NO: 283510 - DNA, 15 bp, Homo sapiens
gtcggatgaccttga

SEQ ID NO: 283511 - DNA, 15 bp, Homo sapiens
ggtcggatgaccttg

SEQ ID NO: 283512 - DNA, 15 bp, Homo sapiens
tggtcggatgacctt

SEQ ID NO: 283513 - DNA, 15 bp, Homo sapiens
ctggtcggatgacct

SEQ ID NO: 283514 - DNA, 15 bp, Homo sapiens
gctggtcggatgacc

SEQ ID NO: 283515 - DNA, 15 bp, Homo sapiens
ggctggtcggatgac

SEQ ID NO: 283516 - DNA, 15 bp, Homo sapiens
tggctggtcggatga

SEQ ID NO: 283517 - DNA, 15 bp, Homo sapiens
ctggctggtcggatg

SEQ ID NO: 283518 - DNA, 15 bp, Homo sapiens
cctggctggtcggat

SEQ ID NO: 283519 - DNA, 15 bp, Homo sapiens
ccctggctggtcgga

SEQ ID NO: 283520 - DNA, 15 bp, Homo sapiens
cccctggctggtcgg

SEQ ID NO: 283521 - DNA, 15 bp, Homo sapiens
gcccctggctggtcg

SEQ ID NO: 283522 - DNA, 15 bp, Homo sapiens
tgcccctggctggtc

SEQ ID NO: 283523 - DNA, 15 bp, Homo sapiens
ctgcccctggctggt

SEQ ID NO: 283524 - DNA, 15 bp, Homo sapiens
tctgcccctggctgg

SEQ ID NO: 283525 - DNA, 15 bp, Homo sapiens
ctctgcccctggctg

SEQ ID NO: 283526 - DNA, 15 bp, Homo sapiens
gctctgcccctggct

SEQ ID NO: 283527 - DNA, 15 bp, Homo sapiens
agctctgcccctggc

SEQ ID NO: 283528 - DNA, 15 bp, Homo sapiens
cagctctgcccctgg

SEQ ID NO: 283529 - DNA, 15 bp, Homo sapiens
ccagctctgcccctg

SEQ ID NO: 283530 - DNA, 15 bp, Homo sapiens
tccagctctgcccct

SEQ ID NO: 283531 - DNA, 15 bp, Homo sapiens
ctccagctctgcccc

SEQ ID NO: 283532 - DNA, 15 bp, Homo sapiens
gctccagctctgccc

SEQ ID NO: 283533 - DNA, 15 bp, Homo sapiens
agctccagctctgcc

SEQ ID NO: 283534 - DNA, 15 bp, Homo sapiens
cagctccagctctgc

SEQ ID NO: 283535 - DNA, 15 bp, Homo sapiens
ccagctccagctctg

SEQ ID NO: 283536 - DNA, 15 bp, Homo sapiens
tccagctccagctct

SEQ ID NO: 283537 - DNA, 15 bp, Homo sapiens
ttccagctccagctc

SEQ ID NO: 283538 - DNA, 15 bp, Homo sapiens
cttccagctccagct

SEQ ID NO: 283539 - DNA, 15 bp, Homo sapiens
tcttccagctccagc

SEQ ID NO: 283540 - DNA, 15 bp, Homo sapiens
atcttccagctccag

SEQ ID NO: 283541 - DNA, 15 bp, Homo sapiens
tatcttccagctcca

SEQ ID NO: 283542 - DNA, 15 bp, Homo sapiens
ctatcttccagctcc

SEQ ID NO: 283543 - DNA, 15 bp, Homo sapiens
tctatcttccagctc

SEQ ID NO: 283544 - DNA, 15 bp, Homo sapiens
ttctatcttccagct

SEQ ID NO: 283545 - DNA, 15 bp, Homo sapiens
gttctatcttccagc

SEQ ID NO: 283546 - DNA, 15 bp, Homo sapiens
agttctatcttccag

SEQ ID NO: 283547 - DNA, 15 bp, Homo sapiens
aagttctatcttcca

SEQ ID NO: 283548 - DNA, 15 bp, Homo sapiens
aaagttctatcttcc

SEQ ID NO: 283549 - DNA, 15 bp, Homo sapiens
aaaagttctatcttc

SEQ ID NO: 283550 - DNA, 15 bp, Homo sapiens
gaaaagttctatctt

SEQ ID NO: 283551 - DNA, 15 bp, Homo sapiens
agaaaagttctatct

SEQ ID NO: 283552 - DNA, 15 bp, Homo sapiens
gagaaaagttctatc

SEQ ID NO: 283553 - DNA, 15 bp, Homo sapiens
agagaaaagttctat

SEQ ID NO: 283554 - DNA, 15 bp, Homo sapiens
gagagaaaagttcta

SEQ ID NO: 283555 - DNA, 15 bp, Homo sapiens
ggagagaaaagttct

SEQ ID NO: 283556 - DNA, 15 bp, Homo sapiens
gggagagaaaagttc

SEQ ID NO: 283557 - DNA, 15 bp, Homo sapiens
tgggagagaaaagtt

SEQ ID NO: 283558 - DNA, 15 bp, Homo sapiens
ctgggagagaaaagt

SEQ ID NO: 283559 - DNA, 15 bp, Homo sapiens
actgggagagaaaag

SEQ ID NO: 283560 - DNA, 15 bp, Homo sapiens
gactgggagagaaaa

SEQ ID NO: 283561 - DNA, 15 bp, Homo sapiens
ggactgggagagaaa

SEQ ID NO: 283562 - DNA, 15 bp, Homo sapiens
aggactgggagagaa

SEQ ID NO: 283563 - DNA, 15 bp, Homo sapiens
aaggactgggagaga

SEQ ID NO: 283564 - DNA, 15 bp, Homo sapiens
aaaggactgggagag

SEQ ID NO: 283565 - DNA, 15 bp, Homo sapiens
aaaaggactgggaga

SEQ ID NO: 283566 - DNA, 15 bp, Homo sapiens
gaaaaggactgggag

SEQ ID NO: 283567 - DNA, 15 bp, Homo sapiens
agaaaaggactggga

SEQ ID NO: 283568 - DNA, 15 bp, Homo sapiens
tagaaaaggactggg

SEQ ID NO: 283569 - DNA, 15 bp, Homo sapiens
gtagaaaaggactgg

SEQ ID NO: 283570 - DNA, 15 bp, Homo sapiens
agtagaaaaggactg

SEQ ID NO: 283571 - DNA, 15 bp, Homo sapiens
aagtagaaaaggact

SEQ ID NO: 283572 - DNA, 15 bp, Homo sapiens
caagtagaaaaggac

SEQ ID NO: 283573 - DNA, 15 bp, Homo sapiens
tcaagtagaaaagga

SEQ ID NO: 283574 - DNA, 15 bp, Homo sapiens
atcaagtagaaaagg

SEQ ID NO: 283575 - DNA, 15 bp, Homo sapiens
gatcaagtagaaaag

SEQ ID NO: 283576 - DNA, 15 bp, Homo sapiens
agatcaagtagaaaa

SEQ ID NO: 283577 - DNA, 15 bp, Homo sapiens
gagatcaagtagaaa

SEQ ID NO: 283578 - DNA, 15 bp, Homo sapiens
ggagatcaagtagaa

SEQ ID NO: 283579 - DNA, 15 bp, Homo sapiens
aggagatcaagtaga

SEQ ID NO: 283580 - DNA, 15 bp, Homo sapiens
caggagatcaagtag

SEQ ID NO: 283581 - DNA, 15 bp, Homo sapiens
ccaggagatcaagta

SEQ ID NO: 283582 - DNA, 15 bp, Homo sapiens
cccaggagatcaagt

SEQ ID NO: 283583 - DNA, 15 bp, Homo sapiens
acccaggagatcaag

SEQ ID NO: 283584 - DNA, 15 bp, Homo sapiens
aacccaggagatcaa

SEQ ID NO: 283585 - DNA, 15 bp, Homo sapiens
gaacccaggagatca

SEQ ID NO: 283586 - DNA, 15 bp, Homo sapiens
agaacccaggagatc

SEQ ID NO: 283587 - DNA, 15 bp, Homo sapiens
aagaacccaggagat

SEQ ID NO: 283588 - DNA, 15 bp, Homo sapiens
aaagaacccaggaga

SEQ ID NO: 283589 - DNA, 15 bp, Homo sapiens
gaaagaacccaggag

SEQ ID NO: 283590 - DNA, 15 bp, Homo sapiens
agaaagaacccagga

SEQ ID NO: 283591 - DNA, 15 bp, Homo sapiens
tagaaagaacccagg

SEQ ID NO: 283592 - DNA, 15 bp, Homo sapiens
gtagaaagaacccag

SEQ ID NO: 283593 - DNA, 15 bp, Homo sapiens
agtagaaagaaccca

SEQ ID NO: 283594 - DNA, 15 bp, Homo sapiens
tagtagaaagaaccc

SEQ ID NO: 283595 - DNA, 15 bp, Homo sapiens
ttagtagaaagaacc

SEQ ID NO: 283596 - DNA, 15 bp, Homo sapiens
tttagtagaaagaac

SEQ ID NO: 283597 - DNA, 15 bp, Homo sapiens
atttagtagaaagaa

SEQ ID NO: 283598 - DNA, 15 bp, Homo sapiens
tatttagtagaaaga

SEQ ID NO: 283599 - DNA, 15 bp, Homo sapiens
gtatttagtagaaag

SEQ ID NO: 283600 - DNA, 15 bp, Homo sapiens
tgtatttagtagaaa

SEQ ID NO: 283601 - DNA, 15 bp, Homo sapiens
ctgtatttagtagaa

SEQ ID NO: 283602 - DNA, 15 bp, Homo sapiens
tctgtatttagtaga

SEQ ID NO: 283603 - DNA, 15 bp, Homo sapiens
ttctgtatttagtag

SEQ ID NO: 283604 - DNA, 15 bp, Homo sapiens
tttctgtatttagta

SEQ ID NO: 283605 - DNA, 15 bp, Homo sapiens
atttctgtatttagt

SEQ ID NO: 283606 - DNA, 15 bp, Homo sapiens
catttctgtatttag

SEQ ID NO: 283607 - DNA, 15 bp, Homo sapiens
tcatttctgtattta

SEQ ID NO: 283608 - DNA, 15 bp, Homo sapiens
ttcatttctgtattt

SEQ ID NO: 283609 - DNA, 15 bp, Homo sapiens
gttcatttctgtatt

SEQ ID NO: 283610 - DNA, 15 bp, Homo sapiens
ttgttcatttctgta

SEQ ID NO: 283611 - DNA, 15 bp, Homo sapiens
tttgttcatttctgt

SEQ ID NO: 283612 - DNA, 15 bp, Homo sapiens
ctttgttcatttctg

SEQ ID NO: 283613 - DNA, 15 bp, Homo sapiens
tctttgttcatttct

SEQ ID NO: 283614 - DNA, 15 bp, Homo sapiens
gtctttgttcatttc

SEQ ID NO: 283615 - DNA, 15 bp, Homo sapiens
tgtctttgttcattt

SEQ ID NO: 283616 - DNA, 15 bp, Homo sapiens
atgtctttgttcatt

SEQ ID NO: 283617 - DNA, 15 bp, Homo sapiens
catgtctttgttcat

SEQ ID NO: 283618 - DNA, 15 bp, Homo sapiens
tcatgtctttgttca

SEQ ID NO: 283619 - DNA, 15 bp, Homo sapiens
atcatgtctttgttc

SEQ ID NO: 283620 - DNA, 15 bp, Homo sapiens
tatcatgtctttgtt

SEQ ID NO: 283621 - DNA, 15 bp, Homo sapiens
ttatcatgtctttgt

SEQ ID NO: 283622 - DNA, 15 bp, Homo sapiens
gttatcatgtctttg

SEQ ID NO: 283623 - DNA, 15 bp, Homo sapiens
ggttatcatgtcttt

SEQ ID NO: 283624 - DNA, 15 bp, Homo sapiens
aggttatcatgtctt

SEQ ID NO: 283625 - DNA, 15 bp, Homo sapiens
taggttatcatgtct

SEQ ID NO: 283626 - DNA, 15 bp, Homo sapiens
gtaggttatcatgtc

SEQ ID NO: 283627 - DNA, 15 bp, Homo sapiens
agtaggttatcatgt

SEQ ID NO: 283628 - DNA, 15 bp, Homo sapiens
gagtaggttatcatg

SEQ ID NO: 283629 - DNA, 15 bp, Homo sapiens
tgagtaggttatcat

SEQ ID NO: 283630 - DNA, 15 bp, Homo sapiens
atgagtaggttatca

SEQ ID NO: 283631 - DNA, 15 bp, Homo sapiens
aatgagtaggttatc

SEQ ID NO: 283632 - DNA, 15 bp, Homo sapiens
caatgagtaggttat

SEQ ID NO: 283633 - DNA, 15 bp, Homo sapiens
tcaatgagtaggtta

SEQ ID NO: 283634 - DNA, 15 bp, Homo sapiens
ttcaatgagtaggtt

SEQ ID NO: 283635 - DNA, 15 bp, Homo sapiens
attcaatgagtaggt

SEQ ID NO: 283636 - DNA, 15 bp, Homo sapiens
tattcaatgagtagg

SEQ ID NO: 283637 - DNA, 15 bp, Homo sapiens
ctattcaatgagtag

SEQ ID NO: 283638 - DNA, 15 bp, Homo sapiens
gctattcaatgagta

SEQ ID NO: 283639 - DNA, 15 bp, Homo sapiens
tgctattcaatgagt

SEQ ID NO: 283640 - DNA, 15 bp, Homo sapiens
ttgctattcaatgag

SEQ ID NO: 283641 - DNA, 15 bp, Homo sapiens
tttgctattcaatga

SEQ ID NO: 283642 - DNA, 15 bp, Homo sapiens
ctttgctattcaatg

SEQ ID NO: 283643 - DNA, 15 bp, Homo sapiens
actttgctattcaat

SEQ ID NO: 283644 - DNA, 15 bp, Homo sapiens
tactttgctattcaa

SEQ ID NO: 283645 - DNA, 15 bp, Homo sapiens
atactttgctattca

SEQ ID NO: 283646 - DNA, 15 bp, Homo sapiens
tatactttgctattc

SEQ ID NO: 283647 - DNA, 15 bp, Homo sapiens
atatactttgctatt

SEQ ID NO: 283648 - DNA, 15 bp, Homo sapiens
tatatactttgctat

SEQ ID NO: 283649 - DNA, 15 bp, Homo sapiens
atatatactttgcta

SEQ ID NO: 283650 - DNA, 15 bp, Homo sapiens
aatatatactttgct

SEQ ID NO: 283651 - DNA, 15 bp, Homo sapiens
caatatatactttgc

SEQ ID NO: 283652 - DNA, 15 bp, Homo sapiens
acaatatatactttg

SEQ ID NO: 283653 - DNA, 15 bp, Homo sapiens
gacaatatatacttt

SEQ ID NO: 283654 - DNA, 15 bp, Homo sapiens
agacaatatatactt

SEQ ID NO: 283655 - DNA, 15 bp, Homo sapiens
aagacaatatatact

SEQ ID NO: 283656 - DNA, 15 bp, Homo sapiens
aaagacaatatatac

SEQ ID NO: 283657 - DNA, 15 bp, Homo sapiens
aaaagacaatatata

SEQ ID NO: 283658 - DNA, 15 bp, Homo sapiens
aaaaagacaatatat

SEQ ID NO: 283659 - DNA, 15 bp, Homo sapiens
taaaaagacaatata

SEQ ID NO: 283660 - DNA, 15 bp, Homo sapiens
ataaaaagacaatat

SEQ ID NO: 283661 - DNA, 15 bp, Homo sapiens
cataaaaagacaata

SEQ ID NO: 283662 - DNA, 15 bp, Homo sapiens
gcataaaaagacaat

SEQ ID NO: 283663 - DNA, 15 bp, Homo sapiens
ggcataaaaagacaa

SEQ ID NO: 283664 - DNA, 15 bp, Homo sapiens
tggcataaaaagaca

SEQ ID NO: 283665 - DNA, 15 bp, Homo sapiens
ttggcataaaaagac

SEQ ID NO: 283666 - DNA, 15 bp, Homo sapiens
attggcataaaaaga

SEQ ID NO: 283667 - DNA, 15 bp, Homo sapiens
aattggcataaaaag

SEQ ID NO: 283668 - DNA, 15 bp, Homo sapiens
gaattggcataaaaa

SEQ ID NO: 283669 - DNA, 15 bp, Homo sapiens
agaattggcataaaa

SEQ ID NO: 283670 - DNA, 15 bp, Homo sapiens
cagaattggcataaa

SEQ ID NO: 283671 - DNA, 15 bp, Homo sapiens
ccagaattggcataa

SEQ ID NO: 283672 - DNA, 15 bp, Homo sapiens
tccagaattggcata

SEQ ID NO: 283673 - DNA, 15 bp, Homo sapiens
gtccagaattggcat

SEQ ID NO: 283674 - DNA, 15 bp, Homo sapiens
agtccagaattggca

SEQ ID NO: 283675 - DNA, 15 bp, Homo sapiens
aagtccagaattggc

SEQ ID NO: 283676 - DNA, 15 bp, Homo sapiens
gaagtccagaattgg

SEQ ID NO: 283677 - DNA, 15 bp, Homo sapiens
agaagtccagaattg

SEQ ID NO: 283678 - DNA, 15 bp, Homo sapiens
tagaagtccagaatt

SEQ ID NO: 283679 - DNA, 15 bp, Homo sapiens
ctagaagtccagaat

SEQ ID NO: 283680 - DNA, 15 bp, Homo sapiens
cctagaagtccagaa

SEQ ID NO: 283681 - DNA, 15 bp, Homo sapiens
gcctagaagtccaga

SEQ ID NO: 283682 - DNA, 15 bp, Homo sapiens
ggcctagaagtccag

SEQ ID NO: 283683 - DNA, 15 bp, Homo sapiens
gggcctagaagtcca

SEQ ID NO: 283684 - DNA, 15 bp, Homo sapiens
agggcctagaagtcc

SEQ ID NO: 283685 - DNA, 15 bp, Homo sapiens
aagggcctagaagtc

SEQ ID NO: 283686 - DNA, 15 bp, Homo sapiens
taagggcctagaagt

SEQ ID NO: 283687 - DNA, 15 bp, Homo sapiens
ataagggcctagaag

SEQ ID NO: 283688 - DNA, 15 bp, Homo sapiens
gataagggcctagaa

SEQ ID NO: 283689 - DNA, 15 bp, Homo sapiens
tgataagggcctaga

SEQ ID NO: 283690 - DNA, 15 bp, Homo sapiens
atgataagggcctag

SEQ ID NO: 283691 - DNA, 15 bp, Homo sapiens
catgataagggccta

SEQ ID NO: 283692 - DNA, 15 bp, Homo sapiens
ccatgataagggcct

SEQ ID NO: 283693 - DNA, 15 bp, Homo sapiens
cccatgataagggcc

SEQ ID NO: 283694 - DNA, 15 bp, Homo sapiens
ccccatgataagggc

SEQ ID NO: 283695 - DNA, 15 bp, Homo sapiens
cccccatgataaggg

SEQ ID NO: 283696 - DNA, 15 bp, Homo sapiens
tcccccatgataagg

SEQ ID NO: 283697 - DNA, 15 bp, Homo sapiens
ttcccccatgataag

SEQ ID NO: 283698 - DNA, 15 bp, Homo sapiens
tttcccccatgataa

SEQ ID NO: 283699 - DNA, 15 bp, Homo sapiens
gtttcccccatgata

SEQ ID NO: 283700 - DNA, 15 bp, Homo sapiens
agtttcccccatgat

SEQ ID NO: 283701 - DNA, 15 bp, Homo sapiens
aagtttcccccatga

SEQ ID NO: 283702 - DNA, 15 bp, Homo sapiens
aaagtttcccccatg

SEQ ID NO: 283703 - DNA, 15 bp, Homo sapiens
taaagtttcccccat

SEQ ID NO: 283704 - DNA, 15 bp, Homo sapiens
ctaaagtttccccca

SEQ ID NO: 283705 - DNA, 15 bp, Homo sapiens
cctaaagtttccccc

SEQ ID NO: 283706 - DNA, 15 bp, Homo sapiens
ccctaaagtttcccc

SEQ ID NO: 283707 - DNA, 15 bp, Homo sapiens
gccctaaagtttccc

SEQ ID NO: 283708 - DNA, 15 bp, Homo sapiens
ggccctaaagtttcc

SEQ ID NO: 283709 - DNA, 15 bp, Homo sapiens
tggccctaaagtttc

SEQ ID NO: 283710 - DNA, 15 bp, Homo sapiens
atggccctaaagttt

SEQ ID NO: 283711 - DNA, 15 bp, Homo sapiens
catggccctaaagtt

SEQ ID NO: 283712 - DNA, 15 bp, Homo sapiens
ccatggccctaaagt

SEQ ID NO: 283713 - DNA, 15 bp, Homo sapiens
cccatggccctaaag

SEQ ID NO: 283714 - DNA, 15 bp, Homo sapiens
tcccatggccctaaa

SEQ ID NO: 283715 - DNA, 15 bp, Homo sapiens
ttcccatggccctaa

SEQ ID NO: 283716 - DNA, 15 bp, Homo sapiens
tttcccatggcccta

SEQ ID NO: 283717 - DNA, 15 bp, Homo sapiens
ctttcccatggccct

SEQ ID NO: 283718 - DNA, 15 bp, Homo sapiens
tctttcccatggccc

SEQ ID NO: 283719 - DNA, 15 bp, Homo sapiens
ttctttcccatggcc

SEQ ID NO: 283720 - DNA, 15 bp, Homo sapiens
gttctttcccatggc

SEQ ID NO: 283721 - DNA, 15 bp, Homo sapiens
tgttctttcccatgg

SEQ ID NO: 283722 - DNA, 15 bp, Homo sapiens
ttgttctttcccatg

SEQ ID NO: 283723 - DNA, 15 bp, Homo sapiens
tttgttctttcccat

SEQ ID NO: 283724 - DNA, 15 bp, Homo sapiens
ctttgttctttccca

SEQ ID NO: 283725 - DNA, 15 bp, Homo sapiens
tctttgttctttccc

SEQ ID NO: 283726 - DNA, 15 bp, Homo sapiens
atctttgttctttcc

SEQ ID NO: 283727 - DNA, 15 bp, Homo sapiens
tatctttgttctttc

SEQ ID NO: 283728 - DNA, 15 bp, Homo sapiens
ttatctttgttcttt

SEQ ID NO: 283729 - DNA, 15 bp, Homo sapiens
attatctttgttctt

SEQ ID NO: 283730 - DNA, 15 bp, Homo sapiens
gattatctttgttct

SEQ ID NO: 283731 - DNA, 15 bp, Homo sapiens
ggattatctttgttc

SEQ ID NO: 283732 - DNA, 15 bp, Homo sapiens
gggattatctttgtt

SEQ ID NO: 283733 - DNA, 15 bp, Homo sapiens
tgggattatctttgt

SEQ ID NO: 283734 - DNA, 15 bp, Homo sapiens
ctgggattatctttg

SEQ ID NO: 283735 - DNA, 15 bp, Homo sapiens
cctgggattatcttt

SEQ ID NO: 283736 - DNA, 15 bp, Homo sapiens
acctgggattatctt

SEQ ID NO: 283737 - DNA, 15 bp, Homo sapiens
cacctgggattatct

SEQ ID NO: 283738 - DNA, 15 bp, Homo sapiens
ccacctgggattatc

SEQ ID NO: 283739 - DNA, 15 bp, Homo sapiens
tccacctgggattat

SEQ ID NO: 283740 - DNA, 15 bp, Homo sapiens
ttccacctgggatta

SEQ ID NO: 283741 - DNA, 15 bp, Homo sapiens
tttccacctgggatt

SEQ ID NO: 283742 - DNA, 15 bp, Homo sapiens
ttttccacctgggat

SEQ ID NO: 283743 - DNA, 15 bp, Homo sapiens
cttttccacctggga

SEQ ID NO: 283744 - DNA, 15 bp, Homo sapiens
tcttttccacctggg

SEQ ID NO: 283745 - DNA, 15 bp, Homo sapiens
atcttttccacctgg

SEQ ID NO: 283746 - DNA, 15 bp, Homo sapiens
gatcttttccacctg

SEQ ID NO: 283747 - DNA, 15 bp, Homo sapiens
tgatcttttccacct

SEQ ID NO: 283748 - DNA, 15 bp, Homo sapiens
ttgatcttttccacc

SEQ ID NO: 283749 - DNA, 15 bp, Homo sapiens
tttgatcttttccac

SEQ ID NO: 283750 - DNA, 15 bp, Homo sapiens
atttgatcttttcca

SEQ ID NO: 283751 - DNA, 15 bp, Homo sapiens
gatttgatcttttcc

SEQ ID NO: 283752 - DNA, 15 bp, Homo sapiens
ggatttgatcttttc

SEQ ID NO: 283753 - DNA, 15 bp, Homo sapiens
tggatttgatctttt

SEQ ID NO: 283754 - DNA, 15 bp, Homo sapiens
ctggatttgatcttt

SEQ ID NO: 283755 - DNA, 15 bp, Homo sapiens
gctggatttgatctt

SEQ ID NO: 283756 - DNA, 15 bp, Homo sapiens
ggctggatttgatct

SEQ ID NO: 283757 - DNA, 15 bp, Homo sapiens
tggctggatttgatc

SEQ ID NO: 283758 - DNA, 15 bp, Homo sapiens
ctggctggatttgat

SEQ ID NO: 283759 - DNA, 15 bp, Homo sapiens
cctggctggatttga

SEQ ID NO: 283760 - DNA, 15 bp, Homo sapiens
acctggctggatttg

SEQ ID NO: 283761 - DNA, 15 bp, Homo sapiens
cacctggctggattt

SEQ ID NO: 283762 - DNA, 15 bp, Homo sapiens
ccacctggctggatt

SEQ ID NO: 283763 - DNA, 15 bp, Homo sapiens
gccacctggctggat

SEQ ID NO: 283764 - DNA, 15 bp, Homo sapiens
agccacctggctgga

SEQ ID NO: 283765 - DNA, 15 bp, Homo sapiens
cagccacctggctgg

SEQ ID NO: 283766 - DNA, 15 bp, Homo sapiens
gcagccacctggctg

SEQ ID NO: 283767 - DNA, 15 bp, Homo sapiens
cgcagccacctggct

SEQ ID NO: 283768 - DNA, 15 bp, Homo sapiens
acgcagccacctggc

SEQ ID NO: 283769 - DNA, 15 bp, Homo sapiens
cacgcagccacctgg

SEQ ID NO: 283770 - DNA, 15 bp, Homo sapiens
ccacgcagccacctg

SEQ ID NO: 283771 - DNA, 15 bp, Homo sapiens
cccacgcagccacct

SEQ ID NO: 283772 - DNA, 15 bp, Homo sapiens
tcccacgcagccacc

SEQ ID NO: 283773 - DNA, 15 bp, Homo sapiens
atcccacgcagccac

SEQ ID NO: 283774 - DNA, 15 bp, Homo sapiens
aatcccacgcagcca

SEQ ID NO: 283775 - DNA, 15 bp, Homo sapiens
taatcccacgcagcc

SEQ ID NO: 283776 - DNA, 15 bp, Homo sapiens
ctaatcccacgcagc

SEQ ID NO: 283777 - DNA, 15 bp, Homo sapiens
actaatcccacgcag

SEQ ID NO: 283778 - DNA, 15 bp, Homo sapiens
aactaatcccacgca

SEQ ID NO: 283779 - DNA, 15 bp, Homo sapiens
aaactaatcccacgc

SEQ ID NO: 283780 - DNA, 15 bp, Homo sapiens
taaactaatcccacg

SEQ ID NO: 283781 - DNA, 15 bp, Homo sapiens
ataaactaatcccac

SEQ ID NO: 283782 - DNA, 15 bp, Homo sapiens
aataaactaatccca

SEQ ID NO: 283783 - DNA, 15 bp, Homo sapiens
aaataaactaatccc

SEQ ID NO: 283784 - DNA, 15 bp, Homo sapiens
gaaataaactaatcc

SEQ ID NO: 283785 - DNA, 15 bp, Homo sapiens
tgaaataaactaatc

SEQ ID NO: 283786 - DNA, 15 bp, Homo sapiens
atgaaataaactaat

SEQ ID NO: 283787 - DNA, 15 bp, Homo sapiens
gatgaaataaactaa

SEQ ID NO: 283788 - DNA, 15 bp, Homo sapiens
ggatgaaataaacta

SEQ ID NO: 283789 - DNA, 15 bp, Homo sapiens
aggatgaaataaact

SEQ ID NO: 283790 - DNA, 15 bp, Homo sapiens
gaggatgaaataaac

SEQ ID NO: 283791 - DNA, 15 bp, Homo sapiens
tgaggatgaaataaa

SEQ ID NO: 283792 - DNA, 15 bp, Homo sapiens
gtgaggatgaaataa

SEQ ID NO: 283793 - DNA, 15 bp, Homo sapiens
agtgaggatgaaata

SEQ ID NO: 283794 - DNA, 15 bp, Homo sapiens
cagtgaggatgaaat

SEQ ID NO: 283795 - DNA, 15 bp, Homo sapiens
ccagtgaggatgaaa

SEQ ID NO: 283796 - DNA, 15 bp, Homo sapiens
accagtgaggatgaa

SEQ ID NO: 283797 - DNA, 15 bp, Homo sapiens
caccagtgaggatga

SEQ ID NO: 283798 - DNA, 15 bp, Homo sapiens
tcaccagtgaggatg

SEQ ID NO: 283799 - DNA, 15 bp, Homo sapiens
ctcaccagtgaggat

SEQ ID NO: 283800 - DNA, 15 bp, Homo sapiens
tctcaccagtgagga

SEQ ID NO: 283801 - DNA, 15 bp, Homo sapiens
ctctcaccagtgagg

SEQ ID NO: 283802 - DNA, 15 bp, Homo sapiens
cctctcaccagtgag

SEQ ID NO: 283803 - DNA, 15 bp, Homo sapiens
gcctctcaccagtga

SEQ ID NO: 283804 - DNA, 15 bp, Homo sapiens
ggcctctcaccagtg

SEQ ID NO: 283805 - DNA, 15 bp, Homo sapiens
aggcctctcaccagt

SEQ ID NO: 283806 - DNA, 15 bp, Homo sapiens
aaggcctctcaccag

SEQ ID NO: 283807 - DNA, 15 bp, Homo sapiens
caaggcctctcacca

SEQ ID NO: 283808 - DNA, 15 bp, Homo sapiens
tcaaggcctctcacc

SEQ ID NO: 283809 - DNA, 15 bp, Homo sapiens
ttcaaggcctctcac

SEQ ID NO: 283810 - DNA, 15 bp, Homo sapiens
attcaaggcctctca

SEQ ID NO: 283811 - DNA, 15 bp, Homo sapiens
aattcaaggcctctc

SEQ ID NO: 283812 - DNA, 15 bp, Homo sapiens
gaattcaaggcctct

SEQ ID NO: 283813 - DNA, 15 bp, Homo sapiens
ggaattcaaggcctc

SEQ ID NO: 283814 - DNA, 15 bp, Homo sapiens
aggaattcaaggcct

SEQ ID NO: 283815 - DNA, 15 bp, Homo sapiens
aaggaattcaaggcc

SEQ ID NO: 283816 - DNA, 15 bp, Homo sapiens
caaggaattcaaggc

SEQ ID NO: 283817 - DNA, 15 bp, Homo sapiens
tcaaggaattcaagg

SEQ ID NO: 283818 - DNA, 15 bp, Homo sapiens
atcaaggaattcaag

SEQ ID NO: 283819 - DNA, 15 bp, Homo sapiens
aatcaaggaattcaa

SEQ ID NO: 283820 - DNA, 15 bp, Homo sapiens
aaatcaaggaattca

SEQ ID NO: 283821 - DNA, 15 bp, Homo sapiens
aaaatcaaggaattc

SEQ ID NO: 283822 - DNA, 15 bp, Homo sapiens
taaaatcaaggaatt

SEQ ID NO: 283823 - DNA, 15 bp, Homo sapiens
ataaaatcaaggaat

SEQ ID NO: 283824 - DNA, 15 bp, Homo sapiens
cataaaatcaaggaa

SEQ ID NO: 283825 - DNA, 15 bp, Homo sapiens
tcataaaatcaagga

SEQ ID NO: 283826 - DNA, 15 bp, Homo sapiens
gtcataaaatcaagg

SEQ ID NO: 283827 - DNA, 15 bp, Homo sapiens
ggtcataaaatcaag

SEQ ID NO: 283828 - DNA, 15 bp, Homo sapiens
gggtcataaaatcaa

SEQ ID NO: 283829 - DNA, 15 bp, Homo sapiens
agggtcataaaatca

SEQ ID NO: 283830 - DNA, 15 bp, Homo sapiens
gagggtcataaaatc

SEQ ID NO: 283831 - DNA, 15 bp, Homo sapiens
ggagggtcataaaat

SEQ ID NO: 283832 - DNA, 15 bp, Homo sapiens
aggagggtcataaaa

SEQ ID NO: 283833 - DNA, 15 bp, Homo sapiens
taggagggtcataaa

SEQ ID NO: 283834 - DNA, 15 bp, Homo sapiens
gtaggagggtcataa

SEQ ID NO: 283835 - DNA, 15 bp, Homo sapiens
agtaggagggtcata

SEQ ID NO: 283836 - DNA, 15 bp, Homo sapiens
tagtaggagggtcat

SEQ ID NO: 283837 - DNA, 15 bp, Homo sapiens
ttagtaggagggtca

SEQ ID NO: 283838 - DNA, 15 bp, Homo sapiens
attagtaggagggtc

SEQ ID NO: 283839 - DNA, 15 bp, Homo sapiens
gattagtaggagggt

SEQ ID NO: 283840 - DNA, 15 bp, Homo sapiens
agattagtaggaggg

SEQ ID NO: 283841 - DNA, 15 bp, Homo sapiens
gagattagtaggagg

SEQ ID NO: 283842 - DNA, 15 bp, Homo sapiens
agagattagtaggag

SEQ ID NO: 283843 - DNA, 15 bp, Homo sapiens
gagagattagtagga

SEQ ID NO: 283844 - DNA, 15 bp, Homo sapiens
agagagattagtagg

SEQ ID NO: 283845 - DNA, 15 bp, Homo sapiens
gagagagattagtag

SEQ ID NO: 283846 - DNA, 15 bp, Homo sapiens
agagagagattagta

SEQ ID NO: 283847 - DNA, 15 bp, Homo sapiens
gagagagagattagt

SEQ ID NO: 283848 - DNA, 15 bp, Homo sapiens
agagagagagattag

SEQ ID NO: 283849 - DNA, 15 bp, Homo sapiens
gagagagagagatta

SEQ ID NO: 283850 - DNA, 15 bp, Homo sapiens
ggagagagagagatt

SEQ ID NO: 283851 - DNA, 15 bp, Homo sapiens
gggagagagagagat

SEQ ID NO: 283852 - DNA, 15 bp, Homo sapiens
ggagggagagagaga

SEQ ID NO: 283853 - DNA, 15 bp, Homo sapiens
gggagggagagagag

SEQ ID NO: 283854 - DNA, 15 bp, Homo sapiens
ggggagggagagaga

SEQ ID NO: 283855 - DNA, 15 bp, Homo sapiens
tggggagggagagag

SEQ ID NO: 283856 - DNA, 15 bp, Homo sapiens
gtggggagggagaga

SEQ ID NO: 283857 - DNA, 15 bp, Homo sapiens
agtggggagggagag

SEQ ID NO: 283858 - DNA, 15 bp, Homo sapiens
cagtggggagggaga

SEQ ID NO: 283859 - DNA, 15 bp, Homo sapiens
acagtggggagggag

SEQ ID NO: 283860 - DNA, 15 bp, Homo sapiens
gacagtggggaggga

SEQ ID NO: 283861 - DNA, 15 bp, Homo sapiens
agacagtggggaggg

SEQ ID NO: 283862 - DNA, 15 bp, Homo sapiens
gagacagtggggagg

SEQ ID NO: 283863 - DNA, 15 bp, Homo sapiens
ggagacagtggggag

SEQ ID NO: 283864 - DNA, 15 bp, Homo sapiens
gggagacagtgggga

SEQ ID NO: 283865 - DNA, 15 bp, Homo sapiens
agggagacagtgggg

SEQ ID NO: 283866 - DNA, 15 bp, Homo sapiens
gagggagacagtggg

SEQ ID NO: 283867 - DNA, 15 bp, Homo sapiens
agagggagacagtgg

SEQ ID NO: 283868 - DNA, 15 bp, Homo sapiens
gagagggagacagtg

SEQ ID NO: 283869 - DNA, 15 bp, Homo sapiens
agagagggagacagt

SEQ ID NO: 283870 - DNA, 15 bp, Homo sapiens
aagagagggagacag

SEQ ID NO: 283871 - DNA, 15 bp, Homo sapiens
aaagagagggagaca

SEQ ID NO: 283872 - DNA, 15 bp, Homo sapiens
aaaagagagggagac

SEQ ID NO: 283873 - DNA, 15 bp, Homo sapiens
aaaaagagagggaga

SEQ ID NO: 283874 - DNA, 15 bp, Homo sapiens
aaaaaagagagggag

SEQ ID NO: 283875 - DNA, 15 bp, Homo sapiens
caaaaaagagaggga

SEQ ID NO: 283876 - DNA, 15 bp, Homo sapiens
acaaaaaagagaggg

SEQ ID NO: 283877 - DNA, 15 bp, Homo sapiens
tacaaaaaagagagg

SEQ ID NO: 283878 - DNA, 15 bp, Homo sapiens
gtacaaaaaagagag

SEQ ID NO: 283879 - DNA, 15 bp, Homo sapiens
agtacaaaaaagaga

SEQ ID NO: 283880 - DNA, 15 bp, Homo sapiens
cagtacaaaaaagag

SEQ ID NO: 283881 - DNA, 15 bp, Homo sapiens
acagtacaaaaaaga

SEQ ID NO: 283882 - DNA, 15 bp, Homo sapiens
aacagtacaaaaaag

SEQ ID NO: 283883 - DNA, 15 bp, Homo sapiens
aaacagtacaaaaaa

SEQ ID NO: 283884 - DNA, 15 bp, Homo sapiens
gaaacagtacaaaaa

SEQ ID NO: 283885 - DNA, 15 bp, Homo sapiens
tgaaacagtacaaaa

SEQ ID NO: 283886 - DNA, 15 bp, Homo sapiens
ctgaaacagtacaaa

SEQ ID NO: 283887 - DNA, 15 bp, Homo sapiens
gctgaaacagtacaa

SEQ ID NO: 283888 - DNA, 15 bp, Homo sapiens
tgctgaaacagtaca

SEQ ID NO: 283889 - DNA, 15 bp, Homo sapiens
atgctgaaacagtac

SEQ ID NO: 283890 - DNA, 15 bp, Homo sapiens
catgctgaaacagta

SEQ ID NO: 283891 - DNA, 15 bp, Homo sapiens
ccatgctgaaacagt

SEQ ID NO: 283892 - DNA, 15 bp, Homo sapiens
tccatgctgaaacag

SEQ ID NO: 283893 - DNA, 15 bp, Homo sapiens
ctccatgctgaaaca

SEQ ID NO: 283894 - DNA, 15 bp, Homo sapiens
actccatgctgaaac

SEQ ID NO: 283895 - DNA, 15 bp, Homo sapiens
aactccatgctgaaa

SEQ ID NO: 283896 - DNA, 15 bp, Homo sapiens
caactccatgctgaa

SEQ ID NO: 283897 - DNA, 15 bp, Homo sapiens
ccaactccatgctga

SEQ ID NO: 283898 - DNA, 15 bp, Homo sapiens
cccaactccatgctg

SEQ ID NO: 283899 - DNA, 15 bp, Homo sapiens
ccccaactccatgct

SEQ ID NO: 283900 - DNA, 15 bp, Homo sapiens
tccccaactccatgc

SEQ ID NO: 283901 - DNA, 15 bp, Homo sapiens
atccccaactccatg

SEQ ID NO: 283902 - DNA, 15 bp, Homo sapiens
catccccaactccat

SEQ ID NO: 283903 - DNA, 15 bp, Homo sapiens
ccatccccaactcca

SEQ ID NO: 283904 - DNA, 15 bp, Homo sapiens
cccatccccaactcc

SEQ ID NO: 283905 - DNA, 15 bp, Homo sapiens
acccatccccaactc

SEQ ID NO: 283906 - DNA, 15 bp, Homo sapiens
tacccatccccaact

SEQ ID NO: 283907 - DNA, 15 bp, Homo sapiens
ttacccatccccaac

SEQ ID NO: 283908 - DNA, 15 bp, Homo sapiens
cttacccatccccaa

SEQ ID NO: 283909 - DNA, 15 bp, Homo sapiens
tcttacccatcccca

SEQ ID NO: 283910 - DNA, 15 bp, Homo sapiens
ctcttacccatcccc

SEQ ID NO: 283911 - DNA, 15 bp, Homo sapiens
actcttacccatccc

SEQ ID NO: 283912 - DNA, 15 bp, Homo sapiens
aactcttacccatcc

SEQ ID NO: 283913 - DNA, 15 bp, Homo sapiens
taactcttacccatc

SEQ ID NO: 283914 - DNA, 15 bp, Homo sapiens
ttaactcttacccat

SEQ ID NO: 283915 - DNA, 15 bp, Homo sapiens
cttaactcttaccca

SEQ ID NO: 283916 - DNA, 15 bp, Homo sapiens
tcttaactcttaccc

SEQ ID NO: 283917 - DNA, 15 bp, Homo sapiens
ctcttaactcttacc

SEQ ID NO: 283918 - DNA, 15 bp, Homo sapiens
actcttaactcttac

SEQ ID NO: 283919 - DNA, 15 bp, Homo sapiens
aactcttaactctta

SEQ ID NO: 283920 - DNA, 15 bp, Homo sapiens
gaactcttaactctt

SEQ ID NO: 283921 - DNA, 15 bp, Homo sapiens
tgaactcttaactct

SEQ ID NO: 283922 - DNA, 15 bp, Homo sapiens
ctgaactcttaactc

SEQ ID NO: 283923 - DNA, 15 bp, Homo sapiens
gctgaactcttaact

SEQ ID NO: 283924 - DNA, 15 bp, Homo sapiens
agctgaactcttaac

SEQ ID NO: 283925 - DNA, 15 bp, Homo sapiens
gagctgaactcttaa

SEQ ID NO: 283926 - DNA, 15 bp, Homo sapiens
ggagctgaactctta

SEQ ID NO: 283927 - DNA, 15 bp, Homo sapiens
tggagctgaactctt

SEQ ID NO: 283928 - DNA, 15 bp, Homo sapiens
gtggagctgaactct

SEQ ID NO: 283929 - DNA, 15 bp, Homo sapiens
agtggagctgaactc

SEQ ID NO: 283930 - DNA, 15 bp, Homo sapiens
cagtggagctgaact

SEQ ID NO: 283931 - DNA, 15 bp, Homo sapiens
acagtggagctgaac

SEQ ID NO: 283932 - DNA, 15 bp, Homo sapiens
cacagtggagctgaa

SEQ ID NO: 283933 - DNA, 15 bp, Homo sapiens
ccacagtggagctga

SEQ ID NO: 283934 - DNA, 15 bp, Homo sapiens
tccacagtggagctg

SEQ ID NO: 283935 - DNA, 15 bp, Homo sapiens
ttccacagtggagct

SEQ ID NO: 283936 - DNA, 15 bp, Homo sapiens
cttccacagtggagc

SEQ ID NO: 283937 - DNA, 15 bp, Homo sapiens
ccttccacagtggag

SEQ ID NO: 283938 - DNA, 15 bp, Homo sapiens
cccttccacagtgga

SEQ ID NO: 283939 - DNA, 15 bp, Homo sapiens
acccttccacagtgg

SEQ ID NO: 283940 - DNA, 15 bp, Homo sapiens
tacccttccacagtg

SEQ ID NO: 283941 - DNA, 15 bp, Homo sapiens
ttacccttccacagt

SEQ ID NO: 283942 - DNA, 15 bp, Homo sapiens
gttacccttccacag

SEQ ID NO: 283943 - DNA, 15 bp, Homo sapiens
tgttacccttccaca

SEQ ID NO: 283944 - DNA, 15 bp, Homo sapiens
gtgttacccttccac

SEQ ID NO: 283945 - DNA, 15 bp, Homo sapiens
tgtgttacccttcca

SEQ ID NO: 283946 - DNA, 15 bp, Homo sapiens
ctgtgttacccttcc

SEQ ID NO: 283947 - DNA, 15 bp, Homo sapiens
cctgtgttacccttc

SEQ ID NO: 283948 - DNA, 15 bp, Homo sapiens
ccctgtgttaccctt

SEQ ID NO: 283949 - DNA, 15 bp, Homo sapiens
gccctgtgttaccct

SEQ ID NO: 283950 - DNA, 15 bp, Homo sapiens
agccctgtgttaccc

SEQ ID NO: 283951 - DNA, 15 bp, Homo sapiens
cagccctgtgttacc

SEQ ID NO: 283952 - DNA, 15 bp, Homo sapiens
tcagccctgtgttac

SEQ ID NO: 283953 - DNA, 15 bp, Homo sapiens
ttcagccctgtgtta

SEQ ID NO: 283954 - DNA, 15 bp, Homo sapiens
gttcagccctgtgtt

SEQ ID NO: 283955 - DNA, 15 bp, Homo sapiens
cgttcagccctgtgt

SEQ ID NO: 283956 - DNA, 15 bp, Homo sapiens
gcgttcagccctgtg

SEQ ID NO: 283957 - DNA, 15 bp, Homo sapiens
tgcgttcagccctgt

SEQ ID NO: 283958 - DNA, 15 bp, Homo sapiens
atgcgttcagccctg

SEQ ID NO: 283959 - DNA, 15 bp, Homo sapiens
aatgcgttcagccct

SEQ ID NO: 283960 - DNA, 15 bp, Homo sapiens
caatgcgttcagccc

SEQ ID NO: 283961 - DNA, 15 bp, Homo sapiens
tcaatgcgttcagcc

SEQ ID NO: 283962 - DNA, 15 bp, Homo sapiens
ttcaatgcgttcagc

SEQ ID NO: 283963 - DNA, 15 bp, Homo sapiens
cttcaatgcgttcag

SEQ ID NO: 283964 - DNA, 15 bp, Homo sapiens
tcttcaatgcgttca

SEQ ID NO: 283965 - DNA, 15 bp, Homo sapiens
ctcttcaatgcgttc

SEQ ID NO: 283966 - DNA, 15 bp, Homo sapiens
gctcttcaatgcgtt

SEQ ID NO: 283967 - DNA, 15 bp, Homo sapiens
agctcttcaatgcgt

SEQ ID NO: 283968 - DNA, 15 bp, Homo sapiens
cagctcttcaatgcg

SEQ ID NO: 283969 - DNA, 15 bp, Homo sapiens
tcagctcttcaatgc

SEQ ID NO: 283970 - DNA, 15 bp, Homo sapiens
ttcagctcttcaatg

SEQ ID NO: 283971 - DNA, 15 bp, Homo sapiens
gttcagctcttcaat

SEQ ID NO: 283972 - DNA, 15 bp, Homo sapiens
tgttcagctcttcaa

SEQ ID NO: 283973 - DNA, 15 bp, Homo sapiens
gtgttcagctcttca

SEQ ID NO: 283974 - DNA, 15 bp, Homo sapiens
tgtgttcagctcttc

SEQ ID NO: 283975 - DNA, 15 bp, Homo sapiens
atgtgttcagctctt

SEQ ID NO: 283976 - DNA, 15 bp, Homo sapiens
aatgtgttcagctct

SEQ ID NO: 283977 - DNA, 15 bp, Homo sapiens
caatgtgttcagctc

SEQ ID NO: 283978 - DNA, 15 bp, Homo sapiens
acaatgtgttcagct

SEQ ID NO: 283979 - DNA, 15 bp, Homo sapiens
aacaatgtgttcagc

SEQ ID NO: 283980 - DNA, 15 bp, Homo sapiens
aaacaatgtgttcag

SEQ ID NO: 283981 - DNA, 15 bp, Homo sapiens
aaaacaatgtgttca

SEQ ID NO: 283982 - DNA, 15 bp, Homo sapiens
caaaacaatgtgttc

SEQ ID NO: 283983 - DNA, 15 bp, Homo sapiens
ccaaaacaatgtgtt

SEQ ID NO: 283984 - DNA, 15 bp, Homo sapiens
gccaaaacaatgtgt

SEQ ID NO: 283985 - DNA, 15 bp, Homo sapiens
ggccaaaacaatgtg

SEQ ID NO: 283986 - DNA, 15 bp, Homo sapiens
aggccaaaacaatgt

SEQ ID NO: 283987 - DNA, 15 bp, Homo sapiens
caggccaaaacaatg

SEQ ID NO: 283988 - DNA, 15 bp, Homo sapiens
acaggccaaaacaat

SEQ ID NO: 283989 - DNA, 15 bp, Homo sapiens
aacaggccaaaacaa

SEQ ID NO: 283990 - DNA, 15 bp, Homo sapiens
aaacaggccaaaaca

SEQ ID NO: 283991 - DNA, 15 bp, Homo sapiens
caaacaggccaaaac

SEQ ID NO: 283992 - DNA, 15 bp, Homo sapiens
ccaaacaggccaaaa

SEQ ID NO: 283993 - DNA, 15 bp, Homo sapiens
tccaaacaggccaaa

SEQ ID NO: 283994 - DNA, 15 bp, Homo sapiens
ttccaaacaggccaa

SEQ ID NO: 283995 - DNA, 15 bp, Homo sapiens
attccaaacaggcca

SEQ ID NO: 283996 - DNA, 15 bp, Homo sapiens
aattccaaacaggcc

SEQ ID NO: 283997 - DNA, 15 bp, Homo sapiens
aaattccaaacaggc

SEQ ID NO: 283998 - DNA, 15 bp, Homo sapiens
caaattccaaacagg

SEQ ID NO: 283999 - DNA, 15 bp, Homo sapiens
acaaattccaaacag

SEQ ID NO: 284000 - DNA, 15 bp, Homo sapiens
aacaaattccaaaca

SEQ ID NO: 284001 - DNA, 15 bp, Homo sapiens
taacaaattccaaac

SEQ ID NO: 284002 - DNA, 15 bp, Homo sapiens
ataacaaattccaaa

SEQ ID NO: 284003 - DNA, 15 bp, Homo sapiens
cataacaaattccaa

SEQ ID NO: 284004 - DNA, 15 bp, Homo sapiens
gcataacaaattcca

SEQ ID NO: 284005 - DNA, 15 bp, Homo sapiens
tgcataacaaattcc

SEQ ID NO: 284006 - DNA, 15 bp, Homo sapiens
atgcataacaaattc

SEQ ID NO: 284007 - DNA, 15 bp, Homo sapiens
tatgcataacaaatt

SEQ ID NO: 284008 - DNA, 15 bp, Homo sapiens
ttatgcataacaaat

SEQ ID NO: 284009 - DNA, 15 bp, Homo sapiens
gttatgcataacaaa

SEQ ID NO: 284010 - DNA, 15 bp, Homo sapiens
agttatgcataacaa

SEQ ID NO: 284011 - DNA, 15 bp, Homo sapiens
aagttatgcataaca

SEQ ID NO: 284012 - DNA, 15 bp, Homo sapiens
aaagttatgcataac

SEQ ID NO: 284013 - DNA, 15 bp, Homo sapiens
aaaagttatgcataa

SEQ ID NO: 284014 - DNA, 15 bp, Homo sapiens
caaaagttatgcata

SEQ ID NO: 284015 - DNA, 15 bp, Homo sapiens
tcaaaagttatgcat

SEQ ID NO: 284016 - DNA, 15 bp, Homo sapiens
ctcaaaagttatgca

SEQ ID NO: 284017 - DNA, 15 bp, Homo sapiens
cctcaaaagttatgc

SEQ ID NO: 284018 - DNA, 15 bp, Homo sapiens
tcctcaaaagttatg

SEQ ID NO: 284019 - DNA, 15 bp, Homo sapiens
gtcctcaaaagttat

SEQ ID NO: 284020 - DNA, 15 bp, Homo sapiens
tgtcctcaaaagtta

SEQ ID NO: 284021 - DNA, 15 bp, Homo sapiens
atgtcctcaaaagtt

SEQ ID NO: 284022 - DNA, 15 bp, Homo sapiens
aatgtcctcaaaagt

SEQ ID NO: 284023 - DNA, 15 bp, Homo sapiens
aaatgtcctcaaaag

SEQ ID NO: 284024 - DNA, 15 bp, Homo sapiens
aaaatgtcctcaaaa

SEQ ID NO: 284025 - DNA, 15 bp, Homo sapiens
caaaatgtcctcaaa

SEQ ID NO: 284026 - DNA, 15 bp, Homo sapiens
gcaaaatgtcctcaa

SEQ ID NO: 284027 - DNA, 15 bp, Homo sapiens
ggcaaaatgtcctca

SEQ ID NO: 284028 - DNA, 15 bp, Homo sapiens
gggcaaaatgtcctc

SEQ ID NO: 284029 - DNA, 15 bp, Homo sapiens
tgggcaaaatgtcct

SEQ ID NO: 284030 - DNA, 15 bp, Homo sapiens
ttgggcaaaatgtcc

SEQ ID NO: 284031 - DNA, 15 bp, Homo sapiens
attgggcaaaatgtc

SEQ ID NO: 284032 - DNA, 15 bp, Homo sapiens
aattgggcaaaatgt

SEQ ID NO: 284033 - DNA, 15 bp, Homo sapiens
caattgggcaaaatg

SEQ ID NO: 284034 - DNA, 15 bp, Homo sapiens
gcaattgggcaaaat

SEQ ID NO: 284035 - DNA, 15 bp, Homo sapiens
agcaattgggcaaaa

SEQ ID NO: 284036 - DNA, 15 bp, Homo sapiens
gagcaattgggcaaa

SEQ ID NO: 284037 - DNA, 15 bp, Homo sapiens
tgagcaattgggcaa

SEQ ID NO: 284038 - DNA, 15 bp, Homo sapiens
gtgagcaattgggca

SEQ ID NO: 284039 - DNA, 15 bp, Homo sapiens
agtgagcaattgggc

SEQ ID NO: 284040 - DNA, 15 bp, Homo sapiens
aagtgagcaattggg

SEQ ID NO: 284041 - DNA, 15 bp, Homo sapiens
caagtgagcaattgg

SEQ ID NO: 284042 - DNA, 15 bp, Homo sapiens
acaagtgagcaattg

SEQ ID NO: 284043 - DNA, 15 bp, Homo sapiens
aacaagtgagcaatt

SEQ ID NO: 284044 - DNA, 15 bp, Homo sapiens
aaacaagtgagcaat

SEQ ID NO: 284045 - DNA, 15 bp, Homo sapiens
gaaacaagtgagcaa

SEQ ID NO: 284046 - DNA, 15 bp, Homo sapiens
ggaaacaagtgagca

SEQ ID NO: 284047 - DNA, 15 bp, Homo sapiens
gggaaacaagtgagc

SEQ ID NO: 284048 - DNA, 15 bp, Homo sapiens
ggggaaacaagtgag

SEQ ID NO: 284049 - DNA, 15 bp, Homo sapiens
aggggaaacaagtga

SEQ ID NO: 284050 - DNA, 15 bp, Homo sapiens
caggggaaacaagtg

SEQ ID NO: 284051 - DNA, 15 bp, Homo sapiens
acaggggaaacaagt

SEQ ID NO: 284052 - DNA, 15 bp, Homo sapiens
cacaggggaaacaag

SEQ ID NO: 284053 - DNA, 15 bp, Homo sapiens
ccacaggggaaacaa

SEQ ID NO: 284054 - DNA, 15 bp, Homo sapiens
tccacaggggaaaca

SEQ ID NO: 284055 - DNA, 15 bp, Homo sapiens
ttccacaggggaaac

SEQ ID NO: 284056 - DNA, 15 bp, Homo sapiens
tttccacaggggaaa

SEQ ID NO: 284057 - DNA, 15 bp, Homo sapiens
gtttccacaggggaa

SEQ ID NO: 284058 - DNA, 15 bp, Homo sapiens
tgtttccacagggga

SEQ ID NO: 284059 - DNA, 15 bp, Homo sapiens
gtgtttccacagggg

SEQ ID NO: 284060 - DNA, 15 bp, Homo sapiens
agtgtttccacaggg

SEQ ID NO: 284061 - DNA, 15 bp, Homo sapiens
tagtgtttccacagg

SEQ ID NO: 284062 - DNA, 15 bp, Homo sapiens
atagtgtttccacag

SEQ ID NO: 284063 - DNA, 15 bp, Homo sapiens
gatagtgtttccaca

SEQ ID NO: 284064 - DNA, 15 bp, Homo sapiens
agatagtgtttccac

SEQ ID NO: 284065 - DNA, 15 bp, Homo sapiens
cagatagtgtttcca

SEQ ID NO: 284066 - DNA, 15 bp, Homo sapiens
tcagatagtgtttcc

SEQ ID NO: 284067 - DNA, 15 bp, Homo sapiens
atcagatagtgtttc

SEQ ID NO: 284068 - DNA, 15 bp, Homo sapiens
tatcagatagtgttt

SEQ ID NO: 284069 - DNA, 15 bp, Homo sapiens
ttatcagatagtgtt

SEQ ID NO: 284070 - DNA, 15 bp, Homo sapiens
gttatcagatagtgt

SEQ ID NO: 284071 - DNA, 15 bp, Homo sapiens
agttatcagatagtg

SEQ ID NO: 284072 - DNA, 15 bp, Homo sapiens
tagttatcagatagt

SEQ ID NO: 284073 - DNA, 15 bp, Homo sapiens
atagttatcagatag

SEQ ID NO: 284074 - DNA, 15 bp, Homo sapiens
catagttatcagata

SEQ ID NO: 284075 - DNA, 15 bp, Homo sapiens
acatagttatcagat

SEQ ID NO: 284076 - DNA, 15 bp, Homo sapiens
gacatagttatcaga

SEQ ID NO: 284077 - DNA, 15 bp, Homo sapiens
agacatagttatcag

SEQ ID NO: 284078 - DNA, 15 bp, Homo sapiens
tagacatagttatca

SEQ ID NO: 284079 - DNA, 15 bp, Homo sapiens
atagacatagttatc

SEQ ID NO: 284080 - DNA, 15 bp, Homo sapiens
tatagacatagttat

SEQ ID NO: 284081 - DNA, 15 bp, Homo sapiens
gtatagacatagtta

SEQ ID NO: 284082 - DNA, 15 bp, Homo sapiens
tgtatagacatagtt

SEQ ID NO: 284083 - DNA, 15 bp, Homo sapiens
atgtatagacatagt

SEQ ID NO: 284084 - DNA, 15 bp, Homo sapiens
gatgtatagacatag

SEQ ID NO: 284085 - DNA, 15 bp, Homo sapiens
ggatgtatagacata

SEQ ID NO: 284086 - DNA, 15 bp, Homo sapiens
gggatgtatagacat

SEQ ID NO: 284087 - DNA, 15 bp, Homo sapiens
agggatgtatagaca

SEQ ID NO: 284088 - DNA, 15 bp, Homo sapiens
tagggatgtatagac

SEQ ID NO: 284089 - DNA, 15 bp, Homo sapiens
atagggatgtataga

SEQ ID NO: 284090 - DNA, 15 bp, Homo sapiens
gatagggatgtatag

SEQ ID NO: 284091 - DNA, 15 bp, Homo sapiens
agatagggatgtata

SEQ ID NO: 284092 - DNA, 15 bp, Homo sapiens
tagatagggatgtat

SEQ ID NO: 284093 - DNA, 15 bp, Homo sapiens
gtagatagggatgta

SEQ ID NO: 284094 - DNA, 15 bp, Homo sapiens
agtagatagggatgt

SEQ ID NO: 284095 - DNA, 15 bp, Homo sapiens
aagtagatagggatg

SEQ ID NO: 284096 - DNA, 15 bp, Homo sapiens
aaagtagatagggat

SEQ ID NO: 284097 - DNA, 15 bp, Homo sapiens
caaagtagataggga

SEQ ID NO: 284098 - DNA, 15 bp, Homo sapiens
gcaaagtagataggg

SEQ ID NO: 284099 - DNA, 15 bp, Homo sapiens
ggcaaagtagatagg

SEQ ID NO: 284100 - DNA, 15 bp, Homo sapiens
aggcaaagtagatag

SEQ ID NO: 284101 - DNA, 15 bp, Homo sapiens
aaggcaaagtagata

SEQ ID NO: 284102 - DNA, 15 bp, Homo sapiens
gaaggcaaagtagat

SEQ ID NO: 284103 - DNA, 15 bp, Homo sapiens
ggaaggcaaagtaga

SEQ ID NO: 284104 - DNA, 15 bp, Homo sapiens
tggaaggcaaagtag

SEQ ID NO: 284105 - DNA, 15 bp, Homo sapiens
ttggaaggcaaagta

SEQ ID NO: 284106 - DNA, 15 bp, Homo sapiens
tttggaaggcaaagt

SEQ ID NO: 284107 - DNA, 15 bp, Homo sapiens
ttttggaaggcaaag

SEQ ID NO: 284108 - DNA, 15 bp, Homo sapiens
attttggaaggcaaa

SEQ ID NO: 284109 - DNA, 15 bp, Homo sapiens
aattttggaaggcaa

SEQ ID NO: 284110 - DNA, 15 bp, Homo sapiens
taattttggaaggca

SEQ ID NO: 284111 - DNA, 15 bp, Homo sapiens
ctaattttggaaggc

SEQ ID NO: 284112 - DNA, 15 bp, Homo sapiens
cctaattttggaagg

SEQ ID NO: 284113 - DNA, 15 bp, Homo sapiens
tcctaattttggaag

SEQ ID NO: 284114 - DNA, 15 bp, Homo sapiens
atcctaattttggaa

SEQ ID NO: 284115 - DNA, 15 bp, Homo sapiens
catcctaattttgga

SEQ ID NO: 284116 - DNA, 15 bp, Homo sapiens
tcatcctaattttgg

SEQ ID NO: 284117 - DNA, 15 bp, Homo sapiens
ttcatcctaattttg

SEQ ID NO: 284118 - DNA, 15 bp, Homo sapiens
attcatcctaatttt

SEQ ID NO: 284119 - DNA, 15 bp, Homo sapiens
aattcatcctaattt

SEQ ID NO: 284120 - DNA, 15 bp, Homo sapiens
taattcatcctaatt

SEQ ID NO: 284121 - DNA, 15 bp, Homo sapiens
ataattcatcctaat

SEQ ID NO: 284122 - DNA, 15 bp, Homo sapiens
aataattcatcctaa

SEQ ID NO: 284123 - DNA, 15 bp, Homo sapiens
aaataattcatccta

SEQ ID NO: 284124 - DNA, 15 bp, Homo sapiens
gaaataattcatcct

SEQ ID NO: 284125 - DNA, 15 bp, Homo sapiens
agaaataattcatcc

SEQ ID NO: 284126 - DNA, 15 bp, Homo sapiens
aagaaataattcatc

SEQ ID NO: 284127 - DNA, 15 bp, Homo sapiens
gaagaaataattcat

SEQ ID NO: 284128 - DNA, 15 bp, Homo sapiens
ggaagaaataattca

SEQ ID NO: 284129 - DNA, 15 bp, Homo sapiens
gggaagaaataattc

SEQ ID NO: 284130 - DNA, 15 bp, Homo sapiens
agggaagaaataatt

SEQ ID NO: 284131 - DNA, 15 bp, Homo sapiens
aagggaagaaataat

SEQ ID NO: 284132 - DNA, 15 bp, Homo sapiens
gaagggaagaaataa

SEQ ID NO: 284133 - DNA, 15 bp, Homo sapiens
agaagggaagaaata

SEQ ID NO: 284134 - DNA, 15 bp, Homo sapiens
gagaagggaagaaat

SEQ ID NO: 284135 - DNA, 15 bp, Homo sapiens
cgagaagggaagaaa

SEQ ID NO: 284136 - DNA, 15 bp, Homo sapiens
gcgagaagggaagaa

SEQ ID NO: 284137 - DNA, 15 bp, Homo sapiens
ggcgagaagggaaga

SEQ ID NO: 284138 - DNA, 15 bp, Homo sapiens
tggcgagaagggaag

SEQ ID NO: 284139 - DNA, 15 bp, Homo sapiens
gtggcgagaagggaa

SEQ ID NO: 284140 - DNA, 15 bp, Homo sapiens
agtggcgagaaggga

SEQ ID NO: 284141 - DNA, 15 bp, Homo sapiens
gagtggcgagaaggg

SEQ ID NO: 284142 - DNA, 15 bp, Homo sapiens
agagtggcgagaagg

SEQ ID NO: 284143 - DNA, 15 bp, Homo sapiens
gagagtggcgagaag

SEQ ID NO: 284144 - DNA, 15 bp, Homo sapiens
ggagagtggcgagaa

SEQ ID NO: 284145 - DNA, 15 bp, Homo sapiens
tggagagtggcgaga

SEQ ID NO: 284146 - DNA, 15 bp, Homo sapiens
ttggagagtggcgag

SEQ ID NO: 284147 - DNA, 15 bp, Homo sapiens
tttggagagtggcga

SEQ ID NO: 284148 - DNA, 15 bp, Homo sapiens
ttttggagagtggcg

SEQ ID NO: 284149 - DNA, 15 bp, Homo sapiens
gttttggagagtggc

SEQ ID NO: 284150 - DNA, 15 bp, Homo sapiens
agttttggagagtgg

SEQ ID NO: 284151 - DNA, 15 bp, Homo sapiens
aagttttggagagtg

SEQ ID NO: 284152 - DNA, 15 bp, Homo sapiens
taagttttggagagt

SEQ ID NO: 284153 - DNA, 15 bp, Homo sapiens
ttaagttttggagag

SEQ ID NO: 284154 - DNA, 15 bp, Homo sapiens
tttaagttttggaga

SEQ ID NO: 284155 - DNA, 15 bp, Homo sapiens
ttttaagttttggag

SEQ ID NO: 284156 - DNA, 15 bp, Homo sapiens
tttttaagttttgga

SEQ ID NO: 284157 - DNA, 15 bp, Homo sapiens
ctttttaagttttgg

SEQ ID NO: 284158 - DNA, 15 bp, Homo sapiens
tctttttaagttttg

SEQ ID NO: 284159 - DNA, 15 bp, Homo sapiens
ttctttttaagtttt

SEQ ID NO: 284160 - DNA, 15 bp, Homo sapiens
attctttttaagttt

SEQ ID NO: 284161 - DNA, 15 bp, Homo sapiens
cattctttttaagtt

SEQ ID NO: 284162 - DNA, 15 bp, Homo sapiens
gcattctttttaagt

SEQ ID NO: 284163 - DNA, 15 bp, Homo sapiens
agcattctttttaag

SEQ ID NO: 284164 - DNA, 15 bp, Homo sapiens
aagcattctttttaa

SEQ ID NO: 284165 - DNA, 15 bp, Homo sapiens
aaagcattcttttta

SEQ ID NO: 284166 - DNA, 15 bp, Homo sapiens
caaagcattcttttt

SEQ ID NO: 284167 - DNA, 15 bp, Homo sapiens
ccaaagcattctttt

SEQ ID NO: 284168 - DNA, 15 bp, Homo sapiens
tccaaagcattcttt

SEQ ID NO: 284169 - DNA, 15 bp, Homo sapiens
gtccaaagcattctt

SEQ ID NO: 284170 - DNA, 15 bp, Homo sapiens
tgtccaaagcattct

SEQ ID NO: 284171 - DNA, 15 bp, Homo sapiens
ttgtccaaagcattc

SEQ ID NO: 284172 - DNA, 15 bp, Homo sapiens
gttgtccaaagcatt

SEQ ID NO: 284173 - DNA, 15 bp, Homo sapiens
ggttgtccaaagcat

SEQ ID NO: 284174 - DNA, 15 bp, Homo sapiens
aggttgtccaaagca

SEQ ID NO: 284175 - DNA, 15 bp, Homo sapiens
caggttgtccaaagc

SEQ ID NO: 284176 - DNA, 15 bp, Homo sapiens
ccaggttgtccaaag

SEQ ID NO: 284177 - DNA, 15 bp, Homo sapiens
gccaggttgtccaaa

SEQ ID NO: 284178 - DNA, 15 bp, Homo sapiens
tgccaggttgtccaa

SEQ ID NO: 284179 - DNA, 15 bp, Homo sapiens
gtgccaggttgtcca

SEQ ID NO: 284180 - DNA, 15 bp, Homo sapiens
agtgccaggttgtcc

SEQ ID NO: 284181 - DNA, 15 bp, Homo sapiens
gagtgccaggttgtc

SEQ ID NO: 284182 - DNA, 15 bp, Homo sapiens
agagtgccaggttgt

SEQ ID NO: 284183 - DNA, 15 bp, Homo sapiens
gagagtgccaggttg

SEQ ID NO: 284184 - DNA, 15 bp, Homo sapiens
agagagtgccaggtt

SEQ ID NO: 284185 - DNA, 15 bp, Homo sapiens
gagagagtgccaggt

SEQ ID NO: 284186 - DNA, 15 bp, Homo sapiens
tgagagagtgccagg

SEQ ID NO: 284187 - DNA, 15 bp, Homo sapiens
ctgagagagtgccag

SEQ ID NO: 284188 - DNA, 15 bp, Homo sapiens
gctgagagagtgcca

SEQ ID NO: 284189 - DNA, 15 bp, Homo sapiens
ggctgagagagtgcc

SEQ ID NO: 284190 - DNA, 15 bp, Homo sapiens
gggctgagagagtgc

SEQ ID NO: 284191 - DNA, 15 bp, Homo sapiens
agggctgagagagtg

SEQ ID NO: 284192 - DNA, 15 bp, Homo sapiens
gagggctgagagagt

SEQ ID NO: 284193 - DNA, 15 bp, Homo sapiens
agagggctgagagag

SEQ ID NO: 284194 - DNA, 15 bp, Homo sapiens
gagagggctgagaga

SEQ ID NO: 284195 - DNA, 15 bp, Homo sapiens
agagagggctgagag

SEQ ID NO: 284196 - DNA, 15 bp, Homo sapiens
aagagagggctgaga

SEQ ID NO: 284197 - DNA, 15 bp, Homo sapiens
taagagagggctgag

SEQ ID NO: 284198 - DNA, 15 bp, Homo sapiens
ataagagagggctga

SEQ ID NO: 284199 - DNA, 15 bp, Homo sapiens
aataagagagggctg

SEQ ID NO: 284200 - DNA, 15 bp, Homo sapiens
gaataagagagggct

SEQ ID NO: 284201 - DNA, 15 bp, Homo sapiens
agaataagagagggc

SEQ ID NO: 284202 - DNA, 15 bp, Homo sapiens
aagaataagagaggg

SEQ ID NO: 284203 - DNA, 15 bp, Homo sapiens
aaagaataagagagg

SEQ ID NO: 284204 - DNA, 15 bp, Homo sapiens
aaaagaataagagag

SEQ ID NO: 284205 - DNA, 15 bp, Homo sapiens
aaaaagaataagaga

SEQ ID NO: 284206 - DNA, 15 bp, Homo sapiens
taaaaagaataagag

SEQ ID NO: 284207 - DNA, 15 bp, Homo sapiens
ttaaaaagaataaga

SEQ ID NO: 284208 - DNA, 15 bp, Homo sapiens
tttaaaaagaataag

SEQ ID NO: 284209 - DNA, 15 bp, Homo sapiens
ttttaaaaagaataa

SEQ ID NO: 284210 - DNA, 15 bp, Homo sapiens
cttttaaaaagaata

SEQ ID NO: 284211 - DNA, 15 bp, Homo sapiens
tcttttaaaaagaat

SEQ ID NO: 284212 - DNA, 15 bp, Homo sapiens
ttcttttaaaaagaa

SEQ ID NO: 284213 - DNA, 15 bp, Homo sapiens
attcttttaaaaaga

SEQ ID NO: 284214 - DNA, 15 bp, Homo sapiens
tattcttttaaaaag

SEQ ID NO: 284215 - DNA, 15 bp, Homo sapiens
ttattcttttaaaaa

SEQ ID NO: 284216 - DNA, 15 bp, Homo sapiens
attattcttttaaaa

SEQ ID NO: 284217 - DNA, 15 bp, Homo sapiens
aattattcttttaaa

SEQ ID NO: 284218 - DNA, 15 bp, Homo sapiens
caattattcttttaa

SEQ ID NO: 284219 - DNA, 15 bp, Homo sapiens
acaattattctttta

SEQ ID NO: 284220 - DNA, 15 bp, Homo sapiens
aacaattattctttt

SEQ ID NO: 284221 - DNA, 15 bp, Homo sapiens
aaacaattattcttt

SEQ ID NO: 284222 - DNA, 15 bp, Homo sapiens
ctgaaacaattattc

SEQ ID NO: 284223 - DNA, 15 bp, Homo sapiens
cctgaaacaattatt

SEQ ID NO: 284224 - DNA, 15 bp, Homo sapiens
ccctgaaacaattat

SEQ ID NO: 284225 - DNA, 15 bp, Homo sapiens
gccctgaaacaatta

SEQ ID NO: 284226 - DNA, 15 bp, Homo sapiens
tgccctgaaacaatt

SEQ ID NO: 284227 - DNA, 15 bp, Homo sapiens
ttgccctgaaacaat

SEQ ID NO: 284228 - DNA, 15 bp, Homo sapiens
tttgccctgaaacaa

SEQ ID NO: 284229 - DNA, 15 bp, Homo sapiens
atttgccctgaaaca

SEQ ID NO: 284230 - DNA, 15 bp, Homo sapiens
catttgccctgaaac

SEQ ID NO: 284231 - DNA, 15 bp, Homo sapiens
tcatttgccctgaaa

SEQ ID NO: 284232 - DNA, 15 bp, Homo sapiens
ttcatttgccctgaa

SEQ ID NO: 284233 - DNA, 15 bp, Homo sapiens
cttcatttgccctga

SEQ ID NO: 284234 - DNA, 15 bp, Homo sapiens
tcttcatttgccctg

SEQ ID NO: 284235 - DNA, 15 bp, Homo sapiens
ttcttcatttgccct

SEQ ID NO: 284236 - DNA, 15 bp, Homo sapiens
tttcttcatttgccc

SEQ ID NO: 284237 - DNA, 15 bp, Homo sapiens
atttcttcatttgcc

SEQ ID NO: 284238 - DNA, 15 bp, Homo sapiens
catttcttcatttgc

SEQ ID NO: 284239 - DNA, 15 bp, Homo sapiens
gcatttcttcatttg

SEQ ID NO: 284240 - DNA, 15 bp, Homo sapiens
tgcatttcttcattt

SEQ ID NO: 284241 - DNA, 15 bp, Homo sapiens
atgcatttcttcatt

SEQ ID NO: 284242 - DNA, 15 bp, Homo sapiens
aatgcatttcttcat

SEQ ID NO: 284243 - DNA, 15 bp, Homo sapiens
gaatgcatttcttca

SEQ ID NO: 284244 - DNA, 15 bp, Homo sapiens
ggaatgcatttcttc

SEQ ID NO: 284245 - DNA, 15 bp, Homo sapiens
gggaatgcatttctt

SEQ ID NO: 284246 - DNA, 15 bp, Homo sapiens
agggaatgcatttct

SEQ ID NO: 284247 - DNA, 15 bp, Homo sapiens
aagggaatgcatttc

SEQ ID NO: 284248 - DNA, 15 bp, Homo sapiens
aaagggaatgcattt

SEQ ID NO: 284249 - DNA, 15 bp, Homo sapiens
gaaagggaatgcatt

SEQ ID NO: 284250 - DNA, 15 bp, Homo sapiens
tgaaagggaatgcat

SEQ ID NO: 284251 - DNA, 15 bp, Homo sapiens
ctgaaagggaatgca

SEQ ID NO: 284252 - DNA, 15 bp, Homo sapiens
tctgaaagggaatgc

SEQ ID NO: 284253 - DNA, 15 bp, Homo sapiens
gtctgaaagggaatg

SEQ ID NO: 284254 - DNA, 15 bp, Homo sapiens
ggtctgaaagggaat

SEQ ID NO: 284255 - DNA, 15 bp, Homo sapiens
gggtctgaaagggaa

SEQ ID NO: 284256 - DNA, 15 bp, Homo sapiens
tgggtctgaaaggga

SEQ ID NO: 284257 - DNA, 15 bp, Homo sapiens
gtgggtctgaaaggg

SEQ ID NO: 284258 - DNA, 15 bp, Homo sapiens
agtgggtctgaaagg

SEQ ID NO: 284259 - DNA, 15 bp, Homo sapiens
tagtgggtctgaaag

SEQ ID NO: 284260 - DNA, 15 bp, Homo sapiens
ctagtgggtctgaaa

SEQ ID NO: 284261 - DNA, 15 bp, Homo sapiens
gctagtgggtctgaa

SEQ ID NO: 284262 - DNA, 15 bp, Homo sapiens
ggctagtgggtctga

SEQ ID NO: 284263 - DNA, 15 bp, Homo sapiens
gggctagtgggtctg

SEQ ID NO: 284264 - DNA, 15 bp, Homo sapiens
tgggctagtgggtct

SEQ ID NO: 284265 - DNA, 15 bp, Homo sapiens
gtgggctagtgggtc

SEQ ID NO: 284266 - DNA, 15 bp, Homo sapiens
agtgggctagtgggt

SEQ ID NO: 284267 - DNA, 15 bp, Homo sapiens
tagtgggctagtggg

SEQ ID NO: 284268 - DNA, 15 bp, Homo sapiens
ctagtgggctagtgg

SEQ ID NO: 284269 - DNA, 15 bp, Homo sapiens
actagtgggctagtg

SEQ ID NO: 284270 - DNA, 15 bp, Homo sapiens
aactagtgggctagt

SEQ ID NO: 284271 - DNA, 15 bp, Homo sapiens
taactagtgggctag

SEQ ID NO: 284272 - DNA, 15 bp, Homo sapiens
gtaactagtgggcta

SEQ ID NO: 284273 - DNA, 15 bp, Homo sapiens
agtaactagtgggct

SEQ ID NO: 284274 - DNA, 15 bp, Homo sapiens
aagtaactagtgggc

SEQ ID NO: 284275 - DNA, 15 bp, Homo sapiens
gaagtaactagtggg

SEQ ID NO: 284276 - DNA, 15 bp, Homo sapiens
agaagtaactagtgg

SEQ ID NO: 284277 - DNA, 15 bp, Homo sapiens
cagaagtaactagtg

SEQ ID NO: 284278 - DNA, 15 bp, Homo sapiens
acagaagtaactagt

SEQ ID NO: 284279 - DNA, 15 bp, Homo sapiens
gacagaagtaactag

SEQ ID NO: 284280 - DNA, 15 bp, Homo sapiens
ggacagaagtaacta

SEQ ID NO: 284281 - DNA, 15 bp, Homo sapiens
aggacagaagtaact

SEQ ID NO: 284282 - DNA, 15 bp, Homo sapiens
gaggacagaagtaac

SEQ ID NO: 284283 - DNA, 15 bp, Homo sapiens
agaggacagaagtaa

SEQ ID NO: 284284 - DNA, 15 bp, Homo sapiens
tagaggacagaagta

SEQ ID NO: 284285 - DNA, 15 bp, Homo sapiens
gtagaggacagaagt

SEQ ID NO: 284286 - DNA, 15 bp, Homo sapiens
tgtagaggacagaag

SEQ ID NO: 284287 - DNA, 15 bp, Homo sapiens
ttgtagaggacagaa

SEQ ID NO: 284288 - DNA, 15 bp, Homo sapiens
gttgtagaggacaga

SEQ ID NO: 284289 - DNA, 15 bp, Homo sapiens
tgttgtagaggacag

SEQ ID NO: 284290 - DNA, 15 bp, Homo sapiens
ttgttgtagaggaca

SEQ ID NO: 284291 - DNA, 15 bp, Homo sapiens
cttgttgtagaggac

SEQ ID NO: 284292 - DNA, 15 bp, Homo sapiens
gcttgttgtagagga

SEQ ID NO: 284293 - DNA, 15 bp, Homo sapiens
ggcttgttgtagagg

SEQ ID NO: 284294 - DNA, 15 bp, Homo sapiens
aggcttgttgtagag

SEQ ID NO: 284295 - DNA, 15 bp, Homo sapiens
caggcttgttgtaga

SEQ ID NO: 284296 - DNA, 15 bp, Homo sapiens
tcaggcttgttgtag

SEQ ID NO: 284297 - DNA, 15 bp, Homo sapiens
ctcaggcttgttgta

SEQ ID NO: 284298 - DNA, 15 bp, Homo sapiens
actcaggcttgttgt

SEQ ID NO: 284299 - DNA, 15 bp, Homo sapiens
aactcaggcttgttg

SEQ ID NO: 284300 - DNA, 15 bp, Homo sapiens
aaactcaggcttgtt

SEQ ID NO: 284301 - DNA, 15 bp, Homo sapiens
taaactcaggcttgt

SEQ ID NO: 284302 - DNA, 15 bp, Homo sapiens
ataaactcaggcttg

SEQ ID NO: 284303 - DNA, 15 bp, Homo sapiens
tataaactcaggctt

SEQ ID NO: 284304 - DNA, 15 bp, Homo sapiens
gtataaactcaggct

SEQ ID NO: 284305 - DNA, 15 bp, Homo sapiens
ggtataaactcaggc

SEQ ID NO: 284306 - DNA, 15 bp, Homo sapiens
cggtataaactcagg

SEQ ID NO: 284307 - DNA, 15 bp, Homo sapiens
gcggtataaactcag

SEQ ID NO: 284308 - DNA, 15 bp, Homo sapiens
tgcggtataaactca

SEQ ID NO: 284309 - DNA, 15 bp, Homo sapiens
ttgcggtataaactc

SEQ ID NO: 284310 - DNA, 15 bp, Homo sapiens
cttgcggtataaact

SEQ ID NO: 284311 - DNA, 15 bp, Homo sapiens
tcttgcggtataaac

SEQ ID NO: 284312 - DNA, 15 bp, Homo sapiens
ctcttgcggtataaa

SEQ ID NO: 284313 - DNA, 15 bp, Homo sapiens
cctcttgcggtataa

SEQ ID NO: 284314 - DNA, 15 bp, Homo sapiens
ccctcttgcggtata

SEQ ID NO: 284315 - DNA, 15 bp, Homo sapiens
gccctcttgcggtat

SEQ ID NO: 284316 - DNA, 15 bp, Homo sapiens
agccctcttgcggta

SEQ ID NO: 284317 - DNA, 15 bp, Homo sapiens
cagccctcttgcggt

SEQ ID NO: 284318 - DNA, 15 bp, Homo sapiens
gcagccctcttgcgg

SEQ ID NO: 284319 - DNA, 15 bp, Homo sapiens
tgcagccctcttgcg

SEQ ID NO: 284320 - DNA, 15 bp, Homo sapiens
atgcagccctcttgc

SEQ ID NO: 284321 - DNA, 15 bp, Homo sapiens
gatgcagccctcttg

SEQ ID NO: 284322 - DNA, 15 bp, Homo sapiens
agatgcagccctctt

SEQ ID NO: 284323 - DNA, 15 bp, Homo sapiens
gagatgcagccctct

SEQ ID NO: 284324 - DNA, 15 bp, Homo sapiens
ggagatgcagccctc

SEQ ID NO: 284325 - DNA, 15 bp, Homo sapiens
aggagatgcagccct

SEQ ID NO: 284326 - DNA, 15 bp, Homo sapiens
gaggagatgcagccc

SEQ ID NO: 284327 - DNA, 15 bp, Homo sapiens
ggaggagatgcagcc

SEQ ID NO: 284328 - DNA, 15 bp, Homo sapiens
gggaggagatgcagc

SEQ ID NO: 284329 - DNA, 15 bp, Homo sapiens
agggaggagatgcag

SEQ ID NO: 284330 - DNA, 15 bp, Homo sapiens
cagggaggagatgca

SEQ ID NO: 284331 - DNA, 15 bp, Homo sapiens
acagggaggagatgc

SEQ ID NO: 284332 - DNA, 15 bp, Homo sapiens
gacagggaggagatg

SEQ ID NO: 284333 - DNA, 15 bp, Homo sapiens
tgacagggaggagat

SEQ ID NO: 284334 - DNA, 15 bp, Homo sapiens
gtgacagggaggaga

SEQ ID NO: 284335 - DNA, 15 bp, Homo sapiens
tgtgacagggaggag

SEQ ID NO: 284336 - DNA, 15 bp, Homo sapiens
atgtgacagggagga

SEQ ID NO: 284337 - DNA, 15 bp, Homo sapiens
catgtgacagggagg

SEQ ID NO: 284338 - DNA, 15 bp, Homo sapiens
ccatgtgacagggag

SEQ ID NO: 284339 - DNA, 15 bp, Homo sapiens
gccatgtgacaggga

SEQ ID NO: 284340 - DNA, 15 bp, Homo sapiens
tgccatgtgacaggg

SEQ ID NO: 284341 - DNA, 15 bp, Homo sapiens
gtgccatgtgacagg

SEQ ID NO: 284342 - DNA, 15 bp, Homo sapiens
agtgccatgtgacag

SEQ ID NO: 284343 - DNA, 15 bp, Homo sapiens
cagtgccatgtgaca

SEQ ID NO: 284344 - DNA, 15 bp, Homo sapiens
ccagtgccatgtgac

SEQ ID NO: 284345 - DNA, 15 bp, Homo sapiens
cccagtgccatgtga

SEQ ID NO: 284346 - DNA, 15 bp, Homo sapiens
gcccagtgccatgtg

SEQ ID NO: 284347 - DNA, 15 bp, Homo sapiens
ggcccagtgccatgt

SEQ ID NO: 284348 - DNA, 15 bp, Homo sapiens
aggcccagtgccatg

SEQ ID NO: 284349 - DNA, 15 bp, Homo sapiens
aaggcccagtgccat

SEQ ID NO: 284350 - DNA, 15 bp, Homo sapiens
aaaggcccagtgcca

SEQ ID NO: 284351 - DNA, 15 bp, Homo sapiens
gaaaggcccagtgcc

SEQ ID NO: 284352 - DNA, 15 bp, Homo sapiens
ggaaaggcccagtgc

SEQ ID NO: 284353 - DNA, 15 bp, Homo sapiens
gggaaaggcccagtg

SEQ ID NO: 284354 - DNA, 15 bp, Homo sapiens
agggaaaggcccagt

SEQ ID NO: 284355 - DNA, 15 bp, Homo sapiens
tagggaaaggcccag

SEQ ID NO: 284356 - DNA, 15 bp, Homo sapiens
atagggaaaggccca

SEQ ID NO: 284357 - DNA, 15 bp, Homo sapiens
tatagggaaaggccc

SEQ ID NO: 284358 - DNA, 15 bp, Homo sapiens
ctatagggaaaggcc

SEQ ID NO: 284359 - DNA, 15 bp, Homo sapiens
actatagggaaaggc

SEQ ID NO: 284360 - DNA, 15 bp, Homo sapiens
gactatagggaaagg

SEQ ID NO: 284361 - DNA, 15 bp, Homo sapiens
tgactatagggaaag

SEQ ID NO: 284362 - DNA, 15 bp, Homo sapiens
gtgactatagggaaa

SEQ ID NO: 284363 - DNA, 15 bp, Homo sapiens
tgtgactatagggaa

SEQ ID NO: 284364 - DNA, 15 bp, Homo sapiens
ctgtgactataggga

SEQ ID NO: 284365 - DNA, 15 bp, Homo sapiens
cctgtgactataggg

SEQ ID NO: 284366 - DNA, 15 bp, Homo sapiens
gcctgtgactatagg

SEQ ID NO: 284367 - DNA, 15 bp, Homo sapiens
agcctgtgactatag

SEQ ID NO: 284368 - DNA, 15 bp, Homo sapiens
cagcctgtgactata

SEQ ID NO: 284369 - DNA, 15 bp, Homo sapiens
tcagcctgtgactat

SEQ ID NO: 284370 - DNA, 15 bp, Homo sapiens
gtcagcctgtgacta

SEQ ID NO: 284371 - DNA, 15 bp, Homo sapiens
tgtcagcctgtgact

SEQ ID NO: 284372 - DNA, 15 bp, Homo sapiens
atgtcagcctgtgac

SEQ ID NO: 284373 - DNA, 15 bp, Homo sapiens
catgtcagcctgtga

SEQ ID NO: 284374 - DNA, 15 bp, Homo sapiens
gcatgtcagcctgtg

SEQ ID NO: 284375 - DNA, 15 bp, Homo sapiens
tgcatgtcagcctgt

SEQ ID NO: 284376 - DNA, 15 bp, Homo sapiens
atgcatgtcagcctg

SEQ ID NO: 284377 - DNA, 15 bp, Homo sapiens
aatgcatgtcagcct

SEQ ID NO: 284378 - DNA, 15 bp, Homo sapiens
gaatgcatgtcagcc

SEQ ID NO: 284379 - DNA, 15 bp, Homo sapiens
tgaatgcatgtcagc

SEQ ID NO: 284380 - DNA, 15 bp, Homo sapiens
ctgaatgcatgtcag

SEQ ID NO: 284381 - DNA, 15 bp, Homo sapiens
tctgaatgcatgtca

SEQ ID NO: 284382 - DNA, 15 bp, Homo sapiens
ctctgaatgcatgtc

SEQ ID NO: 284383 - DNA, 15 bp, Homo sapiens
tctctgaatgcatgt

SEQ ID NO: 284384 - DNA, 15 bp, Homo sapiens
gtctctgaatgcatg

SEQ ID NO: 284385 - DNA, 15 bp, Homo sapiens
agtctctgaatgcat

SEQ ID NO: 284386 - DNA, 15 bp, Homo sapiens
cagtctctgaatgca

SEQ ID NO: 284387 - DNA, 15 bp, Homo sapiens
gcagtctctgaatgc

SEQ ID NO: 284388 - DNA, 15 bp, Homo sapiens
agcagtctctgaatg

SEQ ID NO: 284389 - DNA, 15 bp, Homo sapiens
cagcagtctctgaat

SEQ ID NO: 284390 - DNA, 15 bp, Homo sapiens
tcagcagtctctgaa

SEQ ID NO: 284391 - DNA, 15 bp, Homo sapiens
ctcagcagtctctga

SEQ ID NO: 284392 - DNA, 15 bp, Homo sapiens
tctcagcagtctctg

SEQ ID NO: 284393 - DNA, 15 bp, Homo sapiens
ctctcagcagtctct

SEQ ID NO: 284394 - DNA, 15 bp, Homo sapiens
tctctcagcagtctc

SEQ ID NO: 284395 - DNA, 15 bp, Homo sapiens
atctctcagcagtct

SEQ ID NO: 284396 - DNA, 15 bp, Homo sapiens
gatctctcagcagtc

SEQ ID NO: 284397 - DNA, 15 bp, Homo sapiens
tgatctctcagcagt

SEQ ID NO: 284398 - DNA, 15 bp, Homo sapiens
ctgatctctcagcag

SEQ ID NO: 284399 - DNA, 15 bp, Homo sapiens
cctgatctctcagca

SEQ ID NO: 284400 - DNA, 15 bp, Homo sapiens
tcctgatctctcagc

SEQ ID NO: 284401 - DNA, 15 bp, Homo sapiens
atcctgatctctcag

SEQ ID NO: 284402 - DNA, 15 bp, Homo sapiens
tatcctgatctctca

SEQ ID NO: 284403 - DNA, 15 bp, Homo sapiens
ctatcctgatctctc

SEQ ID NO: 284404 - DNA, 15 bp, Homo sapiens
cctatcctgatctct

SEQ ID NO: 284405 - DNA, 15 bp, Homo sapiens
tcctatcctgatctc

SEQ ID NO: 284406 - DNA, 15 bp, Homo sapiens
ctcctatcctgatct

SEQ ID NO: 284407 - DNA, 15 bp, Homo sapiens
gctcctatcctgatc

SEQ ID NO: 284408 - DNA, 15 bp, Homo sapiens
ggctcctatcctgat

SEQ ID NO: 284409 - DNA, 15 bp, Homo sapiens
tggctcctatcctga

SEQ ID NO: 284410 - DNA, 15 bp, Homo sapiens
ctggctcctatcctg

SEQ ID NO: 284411 - DNA, 15 bp, Homo sapiens
gctggctcctatcct

SEQ ID NO: 284412 - DNA, 15 bp, Homo sapiens
agctggctcctatcc

SEQ ID NO: 284413 - DNA, 15 bp, Homo sapiens
cagctggctcctatc

SEQ ID NO: 284414 - DNA, 15 bp, Homo sapiens
ccagctggctcctat

SEQ ID NO: 284415 - DNA, 15 bp, Homo sapiens
tccagctggctccta

SEQ ID NO: 284416 - DNA, 15 bp, Homo sapiens
ctccagctggctcct

SEQ ID NO: 284417 - DNA, 15 bp, Homo sapiens
gctccagctggctcc

SEQ ID NO: 284418 - DNA, 15 bp, Homo sapiens
cgctccagctggctc

SEQ ID NO: 284419 - DNA, 15 bp, Homo sapiens
tcgctccagctggct

SEQ ID NO: 284420 - DNA, 15 bp, Homo sapiens
ttcgctccagctggc

SEQ ID NO: 284421 - DNA, 15 bp, Homo sapiens
tttcgctccagctgg

SEQ ID NO: 284422 - DNA, 15 bp, Homo sapiens
atttcgctccagctg

SEQ ID NO: 284423 - DNA, 15 bp, Homo sapiens
catttcgctccagct

SEQ ID NO: 284424 - DNA, 15 bp, Homo sapiens
acatttcgctccagc

SEQ ID NO: 284425 - DNA, 15 bp, Homo sapiens
aacatttcgctccag

SEQ ID NO: 284426 - DNA, 15 bp, Homo sapiens
taacatttcgctcca

SEQ ID NO: 284427 - DNA, 15 bp, Homo sapiens
ataacatttcgctcc

SEQ ID NO: 284428 - DNA, 15 bp, Homo sapiens
tataacatttcgctc

SEQ ID NO: 284429 - DNA, 15 bp, Homo sapiens
ctataacatttcgct

SEQ ID NO: 284430 - DNA, 15 bp, Homo sapiens
gctataacatttcgc

SEQ ID NO: 284431 - DNA, 15 bp, Homo sapiens
agctataacatttcg

SEQ ID NO: 284432 - DNA, 15 bp, Homo sapiens
gagctataacatttc

SEQ ID NO: 284433 - DNA, 15 bp, Homo sapiens
tgagctataacattt

SEQ ID NO: 284434 - DNA, 15 bp, Homo sapiens
ctgagctataacatt

SEQ ID NO: 284435 - DNA, 15 bp, Homo sapiens
tctgagctataacat

SEQ ID NO: 284436 - DNA, 15 bp, Homo sapiens
ttctgagctataaca

SEQ ID NO: 284437 - DNA, 15 bp, Homo sapiens
gttctgagctataac

SEQ ID NO: 284438 - DNA, 15 bp, Homo sapiens
tgttctgagctataa

SEQ ID NO: 284439 - DNA, 15 bp, Homo sapiens
ctgttctgagctata

SEQ ID NO: 284440 - DNA, 15 bp, Homo sapiens
actgttctgagctat

SEQ ID NO: 284441 - DNA, 15 bp, Homo sapiens
aactgttctgagcta

SEQ ID NO: 284442 - DNA, 15 bp, Homo sapiens
aaactgttctgagct

SEQ ID NO: 284443 - DNA, 15 bp, Homo sapiens
taaactgttctgagc

SEQ ID NO: 284444 - DNA, 15 bp, Homo sapiens
ttaaactgttctgag

SEQ ID NO: 284445 - DNA, 15 bp, Homo sapiens
attaaactgttctga

SEQ ID NO: 284446 - DNA, 15 bp, Homo sapiens
gattaaactgttctg

SEQ ID NO: 284447 - DNA, 15 bp, Homo sapiens
ggattaaactgttct

SEQ ID NO: 284448 - DNA, 15 bp, Homo sapiens
tggattaaactgttc

SEQ ID NO: 284449 - DNA, 15 bp, Homo sapiens
ttggattaaactgtt

SEQ ID NO: 284450 - DNA, 15 bp, Homo sapiens
tttggattaaactgt

SEQ ID NO: 284451 - DNA, 15 bp, Homo sapiens
gtttggattaaactg

SEQ ID NO: 284452 - DNA, 15 bp, Homo sapiens
tgtttggattaaact

SEQ ID NO: 284453 - DNA, 15 bp, Homo sapiens
gtgtttggattaaac

SEQ ID NO: 284454 - DNA, 15 bp, Homo sapiens
tgtgtttggattaaa

SEQ ID NO: 284455 - DNA, 15 bp, Homo sapiens
ttgtgtttggattaa

SEQ ID NO: 284456 - DNA, 15 bp, Homo sapiens
cttgtgtttggatta

SEQ ID NO: 284457 - DNA, 15 bp, Homo sapiens
ccttgtgtttggatt

SEQ ID NO: 284458 - DNA, 15 bp, Homo sapiens
cccttgtgtttggat

SEQ ID NO: 284459 - DNA, 15 bp, Homo sapiens
gcccttgtgtttgga

SEQ ID NO: 284460 - DNA, 15 bp, Homo sapiens
tgcccttgtgtttgg

SEQ ID NO: 284461 - DNA, 15 bp, Homo sapiens
ctgcccttgtgtttg

SEQ ID NO: 284462 - DNA, 15 bp, Homo sapiens
actgcccttgtgttt

SEQ ID NO: 284463 - DNA, 15 bp, Homo sapiens
cactgcccttgtgtt

SEQ ID NO: 284464 - DNA, 15 bp, Homo sapiens
gcactgcccttgtgt

SEQ ID NO: 284465 - DNA, 15 bp, Homo sapiens
agcactgcccttgtg

SEQ ID NO: 284466 - DNA, 15 bp, Homo sapiens
aagcactgcccttgt

SEQ ID NO: 284467 - DNA, 15 bp, Homo sapiens
caagcactgcccttg

SEQ ID NO: 284468 - DNA, 15 bp, Homo sapiens
acaagcactgccctt

SEQ ID NO: 284469 - DNA, 15 bp, Homo sapiens
cacaagcactgccct

SEQ ID NO: 284470 - DNA, 15 bp, Homo sapiens
gcacaagcactgccc

SEQ ID NO: 284471 - DNA, 15 bp, Homo sapiens
ggcacaagcactgcc

SEQ ID NO: 284472 - DNA, 15 bp, Homo sapiens
aggcacaagcactgc

SEQ ID NO: 284473 - DNA, 15 bp, Homo sapiens
taggcacaagcactg

SEQ ID NO: 284474 - DNA, 15 bp, Homo sapiens
ttaggcacaagcact

SEQ ID NO: 284475 - DNA, 15 bp, Homo sapiens
gttaggcacaagcac

SEQ ID NO: 284476 - DNA, 15 bp, Homo sapiens
tgttaggcacaagca

SEQ ID NO: 284477 - DNA, 15 bp, Homo sapiens
gtgttaggcacaagc

SEQ ID NO: 284478 - DNA, 15 bp, Homo sapiens
tgtgttaggcacaag

SEQ ID NO: 284479 - DNA, 15 bp, Homo sapiens
ttgtgttaggcacaa

SEQ ID NO: 284480 - DNA, 15 bp, Homo sapiens
gttgtgttaggcaca

SEQ ID NO: 284481 - DNA, 15 bp, Homo sapiens
agttgtgttaggcac

SEQ ID NO: 284482 - DNA, 15 bp, Homo sapiens
cagttgtgttaggca

SEQ ID NO: 284483 - DNA, 15 bp, Homo sapiens
acagttgtgttaggc

SEQ ID NO: 284484 - DNA, 15 bp, Homo sapiens
cacagttgtgttagg

SEQ ID NO: 284485 - DNA, 15 bp, Homo sapiens
ccacagttgtgttag

SEQ ID NO: 284486 - DNA, 15 bp, Homo sapiens
accacagttgtgtta

SEQ ID NO: 284487 - DNA, 15 bp, Homo sapiens
taccacagttgtgtt

SEQ ID NO: 284488 - DNA, 15 bp, Homo sapiens
ctaccacagttgtgt

SEQ ID NO: 284489 - DNA, 15 bp, Homo sapiens
cctaccacagttgtg

SEQ ID NO: 284490 - DNA, 15 bp, Homo sapiens
ccctaccacagttgt

SEQ ID NO: 284491 - DNA, 15 bp, Homo sapiens
cccctaccacagttg

SEQ ID NO: 284492 - DNA, 15 bp, Homo sapiens
acccctaccacagtt

SEQ ID NO: 284493 - DNA, 15 bp, Homo sapiens
cacccctaccacagt

SEQ ID NO: 284494 - DNA, 15 bp, Homo sapiens
acacccctaccacag

SEQ ID NO: 284495 - DNA, 15 bp, Homo sapiens
cacacccctaccaca

SEQ ID NO: 284496 - DNA, 15 bp, Homo sapiens
ccacacccctaccac

SEQ ID NO: 284497 - DNA, 15 bp, Homo sapiens
accacacccctacca

SEQ ID NO: 284498 - DNA, 15 bp, Homo sapiens
caccacacccctacc

SEQ ID NO: 284499 - DNA, 15 bp, Homo sapiens
acaccacacccctac

SEQ ID NO: 284500 - DNA, 15 bp, Homo sapiens
cacaccacaccccta

SEQ ID NO: 284501 - DNA, 15 bp, Homo sapiens
ccacaccacacccct

SEQ ID NO: 284502 - DNA, 15 bp, Homo sapiens
accacaccacacccc

SEQ ID NO: 284503 - DNA, 15 bp, Homo sapiens
caccacaccacaccc

SEQ ID NO: 284504 - DNA, 15 bp, Homo sapiens
acaccacaccacacc

SEQ ID NO: 284505 - DNA, 15 bp, Homo sapiens
cacaccacaccacac

SEQ ID NO: 284506 - DNA, 15 bp, Homo sapiens
acacaccacaccaca

SEQ ID NO: 284507 - DNA, 15 bp, Homo sapiens
cacacaccacaccac

SEQ ID NO: 284508 - DNA, 15 bp, Homo sapiens
ccacacaccacacca

SEQ ID NO: 284509 - DNA, 15 bp, Homo sapiens
tccacacaccacacc

SEQ ID NO: 284510 - DNA, 15 bp, Homo sapiens
ctccacacaccacac

SEQ ID NO: 284511 - DNA, 15 bp, Homo sapiens
actccacacaccaca

SEQ ID NO: 284512 - DNA, 15 bp, Homo sapiens
cactccacacaccac

SEQ ID NO: 284513 - DNA, 15 bp, Homo sapiens
ccactccacacacca

SEQ ID NO: 284514 - DNA, 15 bp, Homo sapiens
accactccacacacc

SEQ ID NO: 284515 - DNA, 15 bp, Homo sapiens
caccactccacacac

SEQ ID NO: 284516 - DNA, 15 bp, Homo sapiens
ccaccactccacaca

SEQ ID NO: 284517 - DNA, 15 bp, Homo sapiens
gccaccactccacac

SEQ ID NO: 284518 - DNA, 15 bp, Homo sapiens
tgccaccactccaca

SEQ ID NO: 284519 - DNA, 15 bp, Homo sapiens
ctgccaccactccac

SEQ ID NO: 284520 - DNA, 15 bp, Homo sapiens
gctgccaccactcca

SEQ ID NO: 284521 - DNA, 15 bp, Homo sapiens
agctgccaccactcc

SEQ ID NO: 284522 - DNA, 15 bp, Homo sapiens
aagctgccaccactc

SEQ ID NO: 284523 - DNA, 15 bp, Homo sapiens
aaagctgccaccact

SEQ ID NO: 284524 - DNA, 15 bp, Homo sapiens
aaaagctgccaccac

SEQ ID NO: 284525 - DNA, 15 bp, Homo sapiens
taaaagctgccacca

SEQ ID NO: 284526 - DNA, 15 bp, Homo sapiens
gtaaaagctgccacc

SEQ ID NO: 284527 - DNA, 15 bp, Homo sapiens
tgtaaaagctgccac

SEQ ID NO: 284528 - DNA, 15 bp, Homo sapiens
ctgtaaaagctgcca

SEQ ID NO: 284529 - DNA, 15 bp, Homo sapiens
gctgtaaaagctgcc

SEQ ID NO: 284530 - DNA, 15 bp, Homo sapiens
agctgtaaaagctgc

SEQ ID NO: 284531 - DNA, 15 bp, Homo sapiens
aagctgtaaaagctg

SEQ ID NO: 284532 - DNA, 15 bp, Homo sapiens
aaagctgtaaaagct

SEQ ID NO: 284533 - DNA, 15 bp, Homo sapiens
taaagctgtaaaagc

SEQ ID NO: 284534 - DNA, 15 bp, Homo sapiens
ataaagctgtaaaag

SEQ ID NO: 284535 - DNA, 15 bp, Homo sapiens
gataaagctgtaaaa

SEQ ID NO: 284536 - DNA, 15 bp, Homo sapiens
tgataaagctgtaaa

SEQ ID NO: 284537 - DNA, 15 bp, Homo sapiens
atgataaagctgtaa

SEQ ID NO: 284538 - DNA, 15 bp, Homo sapiens
catgataaagctgta

SEQ ID NO: 284539 - DNA, 15 bp, Homo sapiens
ccatgataaagctgt

SEQ ID NO: 284540 - DNA, 15 bp, Homo sapiens
cccatgataaagctg

SEQ ID NO: 284541 - DNA, 15 bp, Homo sapiens
ccccatgataaagct

SEQ ID NO: 284542 - DNA, 15 bp, Homo sapiens
accccatgataaagc

SEQ ID NO: 284543 - DNA, 15 bp, Homo sapiens
aaccccatgataaag

SEQ ID NO: 284544 - DNA, 15 bp, Homo sapiens
gaaccccatgataaa

SEQ ID NO: 284545 - DNA, 15 bp, Homo sapiens
tgaaccccatgataa

SEQ ID NO: 284546 - DNA, 15 bp, Homo sapiens
atgaaccccatgata

SEQ ID NO: 284547 - DNA, 15 bp, Homo sapiens
catgaaccccatgat

SEQ ID NO: 284548 - DNA, 15 bp, Homo sapiens
ccatgaaccccatga

SEQ ID NO: 284549 - DNA, 15 bp, Homo sapiens
cccatgaaccccatg

SEQ ID NO: 284550 - DNA, 15 bp, Homo sapiens
gcccatgaaccccat

SEQ ID NO: 284551 - DNA, 15 bp, Homo sapiens
agcccatgaacccca

SEQ ID NO: 284552 - DNA, 15 bp, Homo sapiens
cagcccatgaacccc

SEQ ID NO: 284553 - DNA, 15 bp, Homo sapiens
ccagcccatgaaccc

SEQ ID NO: 284554 - DNA, 15 bp, Homo sapiens
tccagcccatgaacc

SEQ ID NO: 284555 - DNA, 15 bp, Homo sapiens
ctccagcccatgaac

SEQ ID NO: 284556 - DNA, 15 bp, Homo sapiens
cctccagcccatgaa

SEQ ID NO: 284557 - DNA, 15 bp, Homo sapiens
tcctccagcccatga

SEQ ID NO: 284558 - DNA, 15 bp, Homo sapiens
ctcctccagcccatg

SEQ ID NO: 284559 - DNA, 15 bp, Homo sapiens
tctcctccagcccat

SEQ ID NO: 284560 - DNA, 15 bp, Homo sapiens
atctcctccagccca

SEQ ID NO: 284561 - DNA, 15 bp, Homo sapiens
catctcctccagccc

SEQ ID NO: 284562 - DNA, 15 bp, Homo sapiens
acatctcctccagcc

SEQ ID NO: 284563 - DNA, 15 bp, Homo sapiens
cacatctcctccagc

SEQ ID NO: 284564 - DNA, 15 bp, Homo sapiens
tcacatctcctccag

SEQ ID NO: 284565 - DNA, 15 bp, Homo sapiens
ttcacatctcctcca

SEQ ID NO: 284566 - DNA, 15 bp, Homo sapiens
gttcacatctcctcc

SEQ ID NO: 284567 - DNA, 15 bp, Homo sapiens
agttcacatctcctc

SEQ ID NO: 284568 - DNA, 15 bp, Homo sapiens
gagttcacatctcct

SEQ ID NO: 284569 - DNA, 15 bp, Homo sapiens
agagttcacatctcc

SEQ ID NO: 284570 - DNA, 15 bp, Homo sapiens
aagagttcacatctc

SEQ ID NO: 284571 - DNA, 15 bp, Homo sapiens
gaagagttcacatct

SEQ ID NO: 284572 - DNA, 15 bp, Homo sapiens
ggaagagttcacatc

SEQ ID NO: 284573 - DNA, 15 bp, Homo sapiens
aggaagagttcacat

SEQ ID NO: 284574 - DNA, 15 bp, Homo sapiens
aaggaagagttcaca

SEQ ID NO: 284575 - DNA, 15 bp, Homo sapiens
caaggaagagttcac

SEQ ID NO: 284576 - DNA, 15 bp, Homo sapiens
acaaggaagagttca

SEQ ID NO: 284577 - DNA, 15 bp, Homo sapiens
gacaaggaagagttc

SEQ ID NO: 284578 - DNA, 15 bp, Homo sapiens
agacaaggaagagtt

SEQ ID NO: 284579 - DNA, 15 bp, Homo sapiens
aagacaaggaagagt

SEQ ID NO: 284580 - DNA, 15 bp, Homo sapiens
aaagacaaggaagag

SEQ ID NO: 284581 - DNA, 15 bp, Homo sapiens
aaaagacaaggaaga

SEQ ID NO: 284582 - DNA, 15 bp, Homo sapiens
taaaagacaaggaag

SEQ ID NO: 284583 - DNA, 15 bp, Homo sapiens
gtaaaagacaaggaa

SEQ ID NO: 284584 - DNA, 15 bp, Homo sapiens
ggtaaaagacaagga

SEQ ID NO: 284585 - DNA, 15 bp, Homo sapiens
gggtaaaagacaagg

SEQ ID NO: 284586 - DNA, 15 bp, Homo sapiens
ggggtaaaagacaag

SEQ ID NO: 284587 - DNA, 15 bp, Homo sapiens
aggggtaaaagacaa

SEQ ID NO: 284588 - DNA, 15 bp, Homo sapiens
aaggggtaaaagaca

SEQ ID NO: 284589 - DNA, 15 bp, Homo sapiens
caaggggtaaaagac

SEQ ID NO: 284590 - DNA, 15 bp, Homo sapiens
acaaggggtaaaaga

SEQ ID NO: 284591 - DNA, 15 bp, Homo sapiens
gacaaggggtaaaag

SEQ ID NO: 284592 - DNA, 15 bp, Homo sapiens
agacaaggggtaaaa

SEQ ID NO: 284593 - DNA, 15 bp, Homo sapiens
aagacaaggggtaaa

SEQ ID NO: 284594 - DNA, 15 bp, Homo sapiens
aaagacaaggggtaa

SEQ ID NO: 284595 - DNA, 15 bp, Homo sapiens
aaaagacaaggggta

SEQ ID NO: 284596 - DNA, 15 bp, Homo sapiens
caaaagacaaggggt

SEQ ID NO: 284597 - DNA, 15 bp, Homo sapiens
tcaaaagacaagggg

SEQ ID NO: 284598 - DNA, 15 bp, Homo sapiens
gtcaaaagacaaggg

SEQ ID NO: 284599 - DNA, 15 bp, Homo sapiens
ggtcaaaagacaagg

SEQ ID NO: 284600 - DNA, 15 bp, Homo sapiens
aggtcaaaagacaag

SEQ ID NO: 284601 - DNA, 15 bp, Homo sapiens
caggtcaaaagacaa

SEQ ID NO: 284602 - DNA, 15 bp, Homo sapiens
tcaggtcaaaagaca

SEQ ID NO: 284603 - DNA, 15 bp, Homo sapiens
gtcaggtcaaaagac

SEQ ID NO: 284604 - DNA, 15 bp, Homo sapiens
tgtcaggtcaaaaga

SEQ ID NO: 284605 - DNA, 15 bp, Homo sapiens
ctgtcaggtcaaaag

SEQ ID NO: 284606 - DNA, 15 bp, Homo sapiens
gctgtcaggtcaaaa

SEQ ID NO: 284607 - DNA, 15 bp, Homo sapiens
ggctgtcaggtcaaa

SEQ ID NO: 284608 - DNA, 15 bp, Homo sapiens
aggctgtcaggtcaa

SEQ ID NO: 284609 - DNA, 15 bp, Homo sapiens
caggctgtcaggtca

SEQ ID NO: 284610 - DNA, 15 bp, Homo sapiens
tcaggctgtcaggtc

SEQ ID NO: 284611 - DNA, 15 bp, Homo sapiens
gtcaggctgtcaggt

SEQ ID NO: 284612 - DNA, 15 bp, Homo sapiens
tgtcaggctgtcagg

SEQ ID NO: 284613 - DNA, 15 bp, Homo sapiens
gtgtcaggctgtcag

SEQ ID NO: 284614 - DNA, 15 bp, Homo sapiens
tgtgtcaggctgtca

SEQ ID NO: 284615 - DNA, 15 bp, Homo sapiens
atgtgtcaggctgtc

SEQ ID NO: 284616 - DNA, 15 bp, Homo sapiens
catgtgtcaggctgt

SEQ ID NO: 284617 - DNA, 15 bp, Homo sapiens
acatgtgtcaggctg

SEQ ID NO: 284618 - DNA, 15 bp, Homo sapiens
tacatgtgtcaggct

SEQ ID NO: 284619 - DNA, 15 bp, Homo sapiens
ctacatgtgtcaggc

SEQ ID NO: 284620 - DNA, 15 bp, Homo sapiens
gctacatgtgtcagg

SEQ ID NO: 284621 - DNA, 15 bp, Homo sapiens
agctacatgtgtcag

SEQ ID NO: 284622 - DNA, 15 bp, Homo sapiens
aagctacatgtgtca

SEQ ID NO: 284623 - DNA, 15 bp, Homo sapiens
aaagctacatgtgtc

SEQ ID NO: 284624 - DNA, 15 bp, Homo sapiens
caaagctacatgtgt

SEQ ID NO: 284625 - DNA, 15 bp, Homo sapiens
ccaaagctacatgtg

SEQ ID NO: 284626 - DNA, 15 bp, Homo sapiens
cccaaagctacatgt

SEQ ID NO: 284627 - DNA, 15 bp, Homo sapiens
ccccaaagctacatg

SEQ ID NO: 284628 - DNA, 15 bp, Homo sapiens
tccccaaagctacat

SEQ ID NO: 284629 - DNA, 15 bp, Homo sapiens
ctccccaaagctaca

SEQ ID NO: 284630 - DNA, 15 bp, Homo sapiens
tctccccaaagctac

SEQ ID NO: 284631 - DNA, 15 bp, Homo sapiens
gtctccccaaagcta

SEQ ID NO: 284632 - DNA, 15 bp, Homo sapiens
ggtctccccaaagct

SEQ ID NO: 284633 - DNA, 15 bp, Homo sapiens
gggtctccccaaagc

SEQ ID NO: 284634 - DNA, 15 bp, Homo sapiens
agggtctccccaaag

SEQ ID NO: 284635 - DNA, 15 bp, Homo sapiens
cagggtctccccaaa

SEQ ID NO: 284636 - DNA, 15 bp, Homo sapiens
ccagggtctccccaa

SEQ ID NO: 284637 - DNA, 15 bp, Homo sapiens
accagggtctcccca

SEQ ID NO: 284638 - DNA, 15 bp, Homo sapiens
aaccagggtctcccc

SEQ ID NO: 284639 - DNA, 15 bp, Homo sapiens
caaccagggtctccc

SEQ ID NO: 284640 - DNA, 15 bp, Homo sapiens
ccaaccagggtctcc

SEQ ID NO: 284641 - DNA, 15 bp, Homo sapiens
accaaccagggtctc

SEQ ID NO: 284642 - DNA, 15 bp, Homo sapiens
caccaaccagggtct

SEQ ID NO: 284643 - DNA, 15 bp, Homo sapiens
tcaccaaccagggtc

SEQ ID NO: 284644 - DNA, 15 bp, Homo sapiens
atcaccaaccagggt

SEQ ID NO: 284645 - DNA, 15 bp, Homo sapiens
catcaccaaccaggg

SEQ ID NO: 284646 - DNA, 15 bp, Homo sapiens
tcatcaccaaccagg

SEQ ID NO: 284647 - DNA, 15 bp, Homo sapiens
ctcatcaccaaccag

SEQ ID NO: 284648 - DNA, 15 bp, Homo sapiens
actcatcaccaacca

SEQ ID NO: 284649 - DNA, 15 bp, Homo sapiens
gactcatcaccaacc

SEQ ID NO: 284650 - DNA, 15 bp, Homo sapiens
tgactcatcaccaac

SEQ ID NO: 284651 - DNA, 15 bp, Homo sapiens
atgactcatcaccaa

SEQ ID NO: 284652 - DNA, 15 bp, Homo sapiens
aatgactcatcacca

SEQ ID NO: 284653 - DNA, 15 bp, Homo sapiens
aaatgactcatcacc

SEQ ID NO: 284654 - DNA, 15 bp, Homo sapiens
caaatgactcatcac

SEQ ID NO: 284655 - DNA, 15 bp, Homo sapiens
acaaatgactcatca

SEQ ID NO: 284656 - DNA, 15 bp, Homo sapiens
cacaaatgactcatc

SEQ ID NO: 284657 - DNA, 15 bp, Homo sapiens
ccacaaatgactcat

SEQ ID NO: 284658 - DNA, 15 bp, Homo sapiens
gccacaaatgactca

SEQ ID NO: 284659 - DNA, 15 bp, Homo sapiens
agccacaaatgactc

SEQ ID NO: 284660 - DNA, 15 bp, Homo sapiens
aagccacaaatgact

SEQ ID NO: 284661 - DNA, 15 bp, Homo sapiens
taagccacaaatgac

SEQ ID NO: 284662 - DNA, 15 bp, Homo sapiens
ttaagccacaaatga

SEQ ID NO: 284663 - DNA, 15 bp, Homo sapiens
tttaagccacaaatg

SEQ ID NO: 284664 - DNA, 15 bp, Homo sapiens
ttttaagccacaaat

SEQ ID NO: 284665 - DNA, 15 bp, Homo sapiens
tttttaagccacaaa

SEQ ID NO: 284666 - DNA, 15 bp, Homo sapiens
atttttaagccacaa

SEQ ID NO: 284667 - DNA, 15 bp, Homo sapiens
tatttttaagccaca

SEQ ID NO: 284668 - DNA, 15 bp, Homo sapiens
ctatttttaagccac

SEQ ID NO: 284669 - DNA, 15 bp, Homo sapiens
tctatttttaagcca

SEQ ID NO: 284670 - DNA, 15 bp, Homo sapiens
ttctatttttaagcc

SEQ ID NO: 284671 - DNA, 15 bp, Homo sapiens
gttctatttttaagc

SEQ ID NO: 284672 - DNA, 15 bp, Homo sapiens
agttctatttttaag

SEQ ID NO: 284673 - DNA, 15 bp, Homo sapiens
gagttctatttttaa

SEQ ID NO: 284674 - DNA, 15 bp, Homo sapiens
agagttctattttta

SEQ ID NO: 284675 - DNA, 15 bp, Homo sapiens
gagagttctattttt

SEQ ID NO: 284676 - DNA, 15 bp, Homo sapiens
tgagagttctatttt

SEQ ID NO: 284677 - DNA, 15 bp, Homo sapiens
ttgagagttctattt

SEQ ID NO: 284678 - DNA, 15 bp, Homo sapiens
tttgagagttctatt

SEQ ID NO: 284679 - DNA, 15 bp, Homo sapiens
ctttgagagttctat

SEQ ID NO: 284680 - DNA, 15 bp, Homo sapiens
gctttgagagttcta

SEQ ID NO: 284681 - DNA, 15 bp, Homo sapiens
tgctttgagagttct

SEQ ID NO: 284682 - DNA, 15 bp, Homo sapiens
ttgctttgagagttc

SEQ ID NO: 284683 - DNA, 15 bp, Homo sapiens
gttgctttgagagtt

SEQ ID NO: 284684 - DNA, 15 bp, Homo sapiens
tgttgctttgagagt

SEQ ID NO: 284685 - DNA, 15 bp, Homo sapiens
ttgttgctttgagag

SEQ ID NO: 284686 - DNA, 15 bp, Homo sapiens
attgttgctttgaga

SEQ ID NO: 284687 - DNA, 15 bp, Homo sapiens
cattgttgctttgag

SEQ ID NO: 284688 - DNA, 15 bp, Homo sapiens
gcattgttgctttga

SEQ ID NO: 284689 - DNA, 15 bp, Homo sapiens
ggcattgttgctttg

SEQ ID NO: 284690 - DNA, 15 bp, Homo sapiens
gggcattgttgcttt

SEQ ID NO: 284691 - DNA, 15 bp, Homo sapiens
agggcattgttgctt

SEQ ID NO: 284692 - DNA, 15 bp, Homo sapiens
aagggcattgttgct

SEQ ID NO: 284693 - DNA, 15 bp, Homo sapiens
caagggcattgttgc

SEQ ID NO: 284694 - DNA, 15 bp, Homo sapiens
ccaagggcattgttg

SEQ ID NO: 284695 - DNA, 15 bp, Homo sapiens
cccaagggcattgtt

SEQ ID NO: 284696 - DNA, 15 bp, Homo sapiens
tcccaagggcattgt

SEQ ID NO: 284697 - DNA, 15 bp, Homo sapiens
gtcccaagggcattg

SEQ ID NO: 284698 - DNA, 15 bp, Homo sapiens
agtcccaagggcatt

SEQ ID NO: 284699 - DNA, 15 bp, Homo sapiens
aagtcccaagggcat

SEQ ID NO: 284700 - DNA, 15 bp, Homo sapiens
aaagtcccaagggca

SEQ ID NO: 284701 - DNA, 15 bp, Homo sapiens
aaaagtcccaagggc

SEQ ID NO: 284702 - DNA, 15 bp, Homo sapiens
aaaaagtcccaaggg

SEQ ID NO: 284703 - DNA, 15 bp, Homo sapiens
caaaaagtcccaagg

SEQ ID NO: 284704 - DNA, 15 bp, Homo sapiens
tcaaaaagtcccaag

SEQ ID NO: 284705 - DNA, 15 bp, Homo sapiens
atcaaaaagtcccaa

SEQ ID NO: 284706 - DNA, 15 bp, Homo sapiens
catcaaaaagtccca

SEQ ID NO: 284707 - DNA, 15 bp, Homo sapiens
gcatcaaaaagtccc

SEQ ID NO: 284708 - DNA, 15 bp, Homo sapiens
tgcatcaaaaagtcc

SEQ ID NO: 284709 - DNA, 15 bp, Homo sapiens
atgcatcaaaaagtc

SEQ ID NO: 284710 - DNA, 15 bp, Homo sapiens
tatgcatcaaaaagt

SEQ ID NO: 284711 - DNA, 15 bp, Homo sapiens
atatgcatcaaaaag

SEQ ID NO: 284712 - DNA, 15 bp, Homo sapiens
catatgcatcaaaaa

SEQ ID NO: 284713 - DNA, 15 bp, Homo sapiens
acatatgcatcaaaa

SEQ ID NO: 284714 - DNA, 15 bp, Homo sapiens
gacatatgcatcaaa

SEQ ID NO: 284715 - DNA, 15 bp, Homo sapiens
agacatatgcatcaa

SEQ ID NO: 284716 - DNA, 15 bp, Homo sapiens
aagacatatgcatca

SEQ ID NO: 284717 - DNA, 15 bp, Homo sapiens
aaagacatatgcatc

SEQ ID NO: 284718 - DNA, 15 bp, Homo sapiens
caaagacatatgcat

SEQ ID NO: 284719 - DNA, 15 bp, Homo sapiens
acaaagacatatgca

SEQ ID NO: 284720 - DNA, 15 bp, Homo sapiens
aacaaagacatatgc

SEQ ID NO: 284721 - DNA, 15 bp, Homo sapiens
gaacaaagacatatg

SEQ ID NO: 284722 - DNA, 15 bp, Homo sapiens
tgaacaaagacatat

SEQ ID NO: 284723 - DNA, 15 bp, Homo sapiens
atgaacaaagacata

SEQ ID NO: 284724 - DNA, 15 bp, Homo sapiens
tatgaacaaagacat

SEQ ID NO: 284725 - DNA, 15 bp, Homo sapiens
ctatgaacaaagaca

SEQ ID NO: 284726 - DNA, 15 bp, Homo sapiens
tctatgaacaaagac

SEQ ID NO: 284727 - DNA, 15 bp, Homo sapiens
ttctatgaacaaaga

SEQ ID NO: 284728 - DNA, 15 bp, Homo sapiens
attctatgaacaaag

SEQ ID NO: 284729 - DNA, 15 bp, Homo sapiens
aattctatgaacaaa

SEQ ID NO: 284730 - DNA, 15 bp, Homo sapiens
aaattctatgaacaa

SEQ ID NO: 284731 - DNA, 15 bp, Homo sapiens
caaattctatgaaca

SEQ ID NO: 284732 - DNA, 15 bp, Homo sapiens
ccaaattctatgaac

SEQ ID NO: 284733 - DNA, 15 bp, Homo sapiens
cccaaattctatgaa

SEQ ID NO: 284734 - DNA, 15 bp, Homo sapiens
tcccaaattctatga

SEQ ID NO: 284735 - DNA, 15 bp, Homo sapiens
ctcccaaattctatg

SEQ ID NO: 284736 - DNA, 15 bp, Homo sapiens
tctcccaaattctat

SEQ ID NO: 284737 - DNA, 15 bp, Homo sapiens
ttctcccaaattcta

SEQ ID NO: 284738 - DNA, 15 bp, Homo sapiens
tttctcccaaattct

SEQ ID NO: 284739 - DNA, 15 bp, Homo sapiens
ttttctcccaaattc

SEQ ID NO: 284740 - DNA, 15 bp, Homo sapiens
cttttctcccaaatt

SEQ ID NO: 284741 - DNA, 15 bp, Homo sapiens
tcttttctcccaaat

SEQ ID NO: 284742 - DNA, 15 bp, Homo sapiens
ctcttttctcccaaa

SEQ ID NO: 284743 - DNA, 15 bp, Homo sapiens
tctcttttctcccaa

SEQ ID NO: 284744 - DNA, 15 bp, Homo sapiens
ctctcttttctccca

SEQ ID NO: 284745 - DNA, 15 bp, Homo sapiens
tctctcttttctccc

SEQ ID NO: 284746 - DNA, 15 bp, Homo sapiens
ctctctcttttctcc

SEQ ID NO: 284747 - DNA, 15 bp, Homo sapiens
tctctctcttttctc

SEQ ID NO: 284748 - DNA, 15 bp, Homo sapiens
ctctctctcttttct

SEQ ID NO: 284749 - DNA, 15 bp, Homo sapiens
cctctctctcttttc

SEQ ID NO: 284750 - DNA, 15 bp, Homo sapiens
ccctctctctctttt

SEQ ID NO: 284751 - DNA, 15 bp, Homo sapiens
tccctctctctcttt

SEQ ID NO: 284752 - DNA, 15 bp, Homo sapiens
ctccctctctctctt

SEQ ID NO: 284753 - DNA, 15 bp, Homo sapiens
ttctctccctctctc

SEQ ID NO: 284754 - DNA, 15 bp, Homo sapiens
tttctctccctctct

SEQ ID NO: 284755 - DNA, 15 bp, Homo sapiens
ctttctctccctctc

SEQ ID NO: 284756 - DNA, 15 bp, Homo sapiens
tctttctctccctct

SEQ ID NO: 284757 - DNA, 15 bp, Homo sapiens
gtctttctctccctc

SEQ ID NO: 284758 - DNA, 15 bp, Homo sapiens
agtctttctctccct

SEQ ID NO: 284759 - DNA, 15 bp, Homo sapiens
gagtctttctctccc

SEQ ID NO: 284760 - DNA, 15 bp, Homo sapiens
agagtctttctctcc

SEQ ID NO: 284761 - DNA, 15 bp, Homo sapiens
cagagtctttctctc

SEQ ID NO: 284762 - DNA, 15 bp, Homo sapiens
cacagagtctttctc

SEQ ID NO: 284763 - DNA, 15 bp, Homo sapiens
acacagagtctttct

SEQ ID NO: 284764 - DNA, 15 bp, Homo sapiens
cacacagagtctttc

SEQ ID NO: 284765 - DNA, 15 bp, Homo sapiens
acacacagagtcttt

SEQ ID NO: 284766 - DNA, 15 bp, Homo sapiens
cacacacagagtctt

SEQ ID NO: 284767 - DNA, 15 bp, Homo sapiens
acacacacagagtct

SEQ ID NO: 284768 - DNA, 15 bp, Homo sapiens
cacacacacagagtc

SEQ ID NO: 284769 - DNA, 15 bp, Homo sapiens
acacacacacagagt

SEQ ID NO: 284770 - DNA, 15 bp, Homo sapiens
cacacacacacacag

SEQ ID NO: 284771 - DNA, 15 bp, Homo sapiens
ctacacacacacaca

SEQ ID NO: 284772 - DNA, 15 bp, Homo sapiens
cctacacacacacac

SEQ ID NO: 284773 - DNA, 15 bp, Homo sapiens
tcctacacacacaca

SEQ ID NO: 284774 - DNA, 15 bp, Homo sapiens
ttcctacacacacac

SEQ ID NO: 284775 - DNA, 15 bp, Homo sapiens
tttcctacacacaca

SEQ ID NO: 284776 - DNA, 15 bp, Homo sapiens
gtttcctacacacac

SEQ ID NO: 284777 - DNA, 15 bp, Homo sapiens
tgtttcctacacaca

SEQ ID NO: 284778 - DNA, 15 bp, Homo sapiens
ttgtttcctacacac

SEQ ID NO: 284779 - DNA, 15 bp, Homo sapiens
attgtttcctacaca

SEQ ID NO: 284780 - DNA, 15 bp, Homo sapiens
aattgtttcctacac

SEQ ID NO: 284781 - DNA, 15 bp, Homo sapiens
taattgtttcctaca

SEQ ID NO: 284782 - DNA, 15 bp, Homo sapiens
ataattgtttcctac

SEQ ID NO: 284783 - DNA, 15 bp, Homo sapiens
cataattgtttccta

SEQ ID NO: 284784 - DNA, 15 bp, Homo sapiens
acataattgtttcct

SEQ ID NO: 284785 - DNA, 15 bp, Homo sapiens
gacataattgtttcc

SEQ ID NO: 284786 - DNA, 15 bp, Homo sapiens
ggacataattgtttc

SEQ ID NO: 284787 - DNA, 15 bp, Homo sapiens
aggacataattgttt

SEQ ID NO: 284788 - DNA, 15 bp, Homo sapiens
caggacataattgtt

SEQ ID NO: 284789 - DNA, 15 bp, Homo sapiens
gcaggacataattgt

SEQ ID NO: 284790 - DNA, 15 bp, Homo sapiens
ggcaggacataattg

SEQ ID NO: 284791 - DNA, 15 bp, Homo sapiens
aggcaggacataatt

SEQ ID NO: 284792 - DNA, 15 bp, Homo sapiens
taggcaggacataat

SEQ ID NO: 284793 - DNA, 15 bp, Homo sapiens
ttaggcaggacataa

SEQ ID NO: 284794 - DNA, 15 bp, Homo sapiens
tttaggcaggacata

SEQ ID NO: 284795 - DNA, 15 bp, Homo sapiens
ttttaggcaggacat

SEQ ID NO: 284796 - DNA, 15 bp, Homo sapiens
tttttaggcaggaca

SEQ ID NO: 284797 - DNA, 15 bp, Homo sapiens
atttttaggcaggac

SEQ ID NO: 284798 - DNA, 15 bp, Homo sapiens
aatttttaggcagga

SEQ ID NO: 284799 - DNA, 15 bp, Homo sapiens
taatttttaggcagg

SEQ ID NO: 284800 - DNA, 15 bp, Homo sapiens
ttaatttttaggcag

SEQ ID NO: 284801 - DNA, 15 bp, Homo sapiens
cttaatttttaggca

SEQ ID NO: 284802 - DNA, 15 bp, Homo sapiens
acttaatttttaggc

SEQ ID NO: 284803 - DNA, 15 bp, Homo sapiens
cacttaatttttagg

SEQ ID NO: 284804 - DNA, 15 bp, Homo sapiens
ccacttaatttttag

SEQ ID NO: 284805 - DNA, 15 bp, Homo sapiens
tccacttaattttta

SEQ ID NO: 284806 - DNA, 15 bp, Homo sapiens
ctccacttaattttt

SEQ ID NO: 284807 - DNA, 15 bp, Homo sapiens
tctccacttaatttt

SEQ ID NO: 284808 - DNA, 15 bp, Homo sapiens
ttctccacttaattt

SEQ ID NO: 284809 - DNA, 15 bp, Homo sapiens
cttctccacttaatt

SEQ ID NO: 284810 - DNA, 15 bp, Homo sapiens
tcttctccacttaat

SEQ ID NO: 284811 - DNA, 15 bp, Homo sapiens
ttcttctccacttaa

SEQ ID NO: 284812 - DNA, 15 bp, Homo sapiens
cttcttctccactta

SEQ ID NO: 284813 - DNA, 15 bp, Homo sapiens
tcttcttctccactt

SEQ ID NO: 284814 - DNA, 15 bp, Homo sapiens
ctcttcttctccact

SEQ ID NO: 284815 - DNA, 15 bp, Homo sapiens
gctcttcttctccac

SEQ ID NO: 284816 - DNA, 15 bp, Homo sapiens
tgctcttcttctcca

SEQ ID NO: 284817 - DNA, 15 bp, Homo sapiens
atgctcttcttctcc

SEQ ID NO: 284818 - DNA, 15 bp, Homo sapiens
catgctcttcttctc

SEQ ID NO: 284819 - DNA, 15 bp, Homo sapiens
ccatgctcttcttct

SEQ ID NO: 284820 - DNA, 15 bp, Homo sapiens
cccatgctcttcttc

SEQ ID NO: 284821 - DNA, 15 bp, Homo sapiens
ccccatgctcttctt

SEQ ID NO: 284822 - DNA, 15 bp, Homo sapiens
cccccatgctcttct

SEQ ID NO: 284823 - DNA, 15 bp, Homo sapiens
tcccccatgctcttc

SEQ ID NO: 284824 - DNA, 15 bp, Homo sapiens
ttcccccatgctctt

SEQ ID NO: 284825 - DNA, 15 bp, Homo sapiens
attcccccatgctct

SEQ ID NO: 284826 - DNA, 15 bp, Homo sapiens
aattcccccatgctc

SEQ ID NO: 284827 - DNA, 15 bp, Homo sapiens
caattcccccatgct

SEQ ID NO: 284828 - DNA, 15 bp, Homo sapiens
ccaattcccccatgc

SEQ ID NO: 284829 - DNA, 15 bp, Homo sapiens
gccaattcccccatg

SEQ ID NO: 284830 - DNA, 15 bp, Homo sapiens
ggccaattcccccat

SEQ ID NO: 284831 - DNA, 15 bp, Homo sapiens
tggccaattccccca

SEQ ID NO: 284832 - DNA, 15 bp, Homo sapiens
gtggccaattccccc

SEQ ID NO: 284833 - DNA, 15 bp, Homo sapiens
ggtggccaattcccc

SEQ ID NO: 284834 - DNA, 15 bp, Homo sapiens
tggtggccaattccc

SEQ ID NO: 284835 - DNA, 15 bp, Homo sapiens
ctggtggccaattcc

SEQ ID NO: 284836 - DNA, 15 bp, Homo sapiens
cctggtggccaattc

SEQ ID NO: 284837 - DNA, 15 bp, Homo sapiens
gcctggtggccaatt

SEQ ID NO: 284838 - DNA, 15 bp, Homo sapiens
agcctggtggccaat

SEQ ID NO: 284839 - DNA, 15 bp, Homo sapiens
gagcctggtggccaa

SEQ ID NO: 284840 - DNA, 15 bp, Homo sapiens
tgagcctggtggcca

SEQ ID NO: 284841 - DNA, 15 bp, Homo sapiens
atgagcctggtggcc

SEQ ID NO: 284842 - DNA, 15 bp, Homo sapiens
gatgagcctggtggc

SEQ ID NO: 284843 - DNA, 15 bp, Homo sapiens
tgatgagcctggtgg

SEQ ID NO: 284844 - DNA, 15 bp, Homo sapiens
gtgatgagcctggtg

SEQ ID NO: 284845 - DNA, 15 bp, Homo sapiens
tgtgatgagcctggt

SEQ ID NO: 284846 - DNA, 15 bp, Homo sapiens
ctgtgatgagcctgg

SEQ ID NO: 284847 - DNA, 15 bp, Homo sapiens
actgtgatgagcctg

SEQ ID NO: 284848 - DNA, 15 bp, Homo sapiens
tactgtgatgagcct

SEQ ID NO: 284849 - DNA, 15 bp, Homo sapiens
ctactgtgatgagcc

SEQ ID NO: 284850 - DNA, 15 bp, Homo sapiens
gctactgtgatgagc

SEQ ID NO: 284851 - DNA, 15 bp, Homo sapiens
tgctactgtgatgag

SEQ ID NO: 284852 - DNA, 15 bp, Homo sapiens
ctgctactgtgatga

SEQ ID NO: 284853 - DNA, 15 bp, Homo sapiens
tctgctactgtgatg

SEQ ID NO: 284854 - DNA, 15 bp, Homo sapiens
ctctgctactgtgat

SEQ ID NO: 284855 - DNA, 15 bp, Homo sapiens
tctctgctactgtga

SEQ ID NO: 284856 - DNA, 15 bp, Homo sapiens
atctctgctactgtg

SEQ ID NO: 284857 - DNA, 15 bp, Homo sapiens
catctctgctactgt

SEQ ID NO: 284858 - DNA, 15 bp, Homo sapiens
tcatctctgctactg

SEQ ID NO: 284859 - DNA, 15 bp, Homo sapiens
ctcatctctgctact

SEQ ID NO: 284860 - DNA, 15 bp, Homo sapiens
cctcatctctgctac

SEQ ID NO: 284861 - DNA, 15 bp, Homo sapiens
gcctcatctctgcta

SEQ ID NO: 284862 - DNA, 15 bp, Homo sapiens
agcctcatctctgct

SEQ ID NO: 284863 - DNA, 15 bp, Homo sapiens
cagcctcatctctgc

SEQ ID NO: 284864 - DNA, 15 bp, Homo sapiens
tcagcctcatctctg

SEQ ID NO: 284865 - DNA, 15 bp, Homo sapiens
ctcagcctcatctct

SEQ ID NO: 284866 - DNA, 15 bp, Homo sapiens
tctcagcctcatctc

SEQ ID NO: 284867 - DNA, 15 bp, Homo sapiens
ctctcagcctcatct

SEQ ID NO: 284868 - DNA, 15 bp, Homo sapiens
gctctcagcctcatc

SEQ ID NO: 284869 - DNA, 15 bp, Homo sapiens
agctctcagcctcat

SEQ ID NO: 284870 - DNA, 15 bp, Homo sapiens
cagctctcagcctca

SEQ ID NO: 284871 - DNA, 15 bp, Homo sapiens
acagctctcagcctc

SEQ ID NO: 284872 - DNA, 15 bp, Homo sapiens
gacagctctcagcct

SEQ ID NO: 284873 - DNA, 15 bp, Homo sapiens
agacagctctcagcc

SEQ ID NO: 284874 - DNA, 15 bp, Homo sapiens
cagacagctctcagc

SEQ ID NO: 284875 - DNA, 15 bp, Homo sapiens
acagacagctctcag

SEQ ID NO: 284876 - DNA, 15 bp, Homo sapiens
cacagacagctctca

SEQ ID NO: 284877 - DNA, 15 bp, Homo sapiens
acacagacagctctc

SEQ ID NO: 284878 - DNA, 15 bp, Homo sapiens
tacacagacagctct

SEQ ID NO: 284879 - DNA, 15 bp, Homo sapiens
gtacacagacagctc

SEQ ID NO: 284880 - DNA, 15 bp, Homo sapiens
ggtacacagacagct

SEQ ID NO: 284881 - DNA, 15 bp, Homo sapiens
aggtacacagacagc

SEQ ID NO: 284882 - DNA, 15 bp, Homo sapiens
caggtacacagacag

SEQ ID NO: 284883 - DNA, 15 bp, Homo sapiens
acaggtacacagaca

SEQ ID NO: 284884 - DNA, 15 bp, Homo sapiens
cacaggtacacagac

SEQ ID NO: 284885 - DNA, 15 bp, Homo sapiens
ccacaggtacacaga

SEQ ID NO: 284886 - DNA, 15 bp, Homo sapiens
gccacaggtacacag

SEQ ID NO: 284887 - DNA, 15 bp, Homo sapiens
ggccacaggtacaca

SEQ ID NO: 284888 - DNA, 15 bp, Homo sapiens
aggccacaggtacac

SEQ ID NO: 284889 - DNA, 15 bp, Homo sapiens
aaggccacaggtaca

SEQ ID NO: 284890 - DNA, 15 bp, Homo sapiens
taaggccacaggtac

SEQ ID NO: 284891 - DNA, 15 bp, Homo sapiens
ttaaggccacaggta

SEQ ID NO: 284892 - DNA, 15 bp, Homo sapiens
tttaaggccacaggt

SEQ ID NO: 284893 - DNA, 15 bp, Homo sapiens
ctttaaggccacagg

SEQ ID NO: 284894 - DNA, 15 bp, Homo sapiens
cctttaaggccacag

SEQ ID NO: 284895 - DNA, 15 bp, Homo sapiens
acctttaaggccaca

SEQ ID NO: 284896 - DNA, 15 bp, Homo sapiens
tacctttaaggccac

SEQ ID NO: 284897 - DNA, 15 bp, Homo sapiens
gtacctttaaggcca

SEQ ID NO: 284898 - DNA, 15 bp, Homo sapiens
ggtacctttaaggcc

SEQ ID NO: 284899 - DNA, 15 bp, Homo sapiens
tggtacctttaaggc

SEQ ID NO: 284900 - DNA, 15 bp, Homo sapiens
ttggtacctttaagg

SEQ ID NO: 284901 - DNA, 15 bp, Homo sapiens
attggtacctttaag

SEQ ID NO: 284902 - DNA, 15 bp, Homo sapiens
gattggtacctttaa

SEQ ID NO: 284903 - DNA, 15 bp, Homo sapiens
tgattggtaccttta

SEQ ID NO: 284904 - DNA, 15 bp, Homo sapiens
ctgattggtaccttt

SEQ ID NO: 284905 - DNA, 15 bp, Homo sapiens
tctgattggtacctt

SEQ ID NO: 284906 - DNA, 15 bp, Homo sapiens
atctgattggtacct

SEQ ID NO: 284907 - DNA, 15 bp, Homo sapiens
tatctgattggtacc

SEQ ID NO: 284908 - DNA, 15 bp, Homo sapiens
ttatctgattggtac

SEQ ID NO: 284909 - DNA, 15 bp, Homo sapiens
attatctgattggta

SEQ ID NO: 284910 - DNA, 15 bp, Homo sapiens
tattatctgattggt

SEQ ID NO: 284911 - DNA, 15 bp, Homo sapiens
ctattatctgattgg

SEQ ID NO: 284912 - DNA, 15 bp, Homo sapiens
gctattatctgattg

SEQ ID NO: 284913 - DNA, 15 bp, Homo sapiens
agctattatctgatt

SEQ ID NO: 284914 - DNA, 15 bp, Homo sapiens
gagctattatctgat

SEQ ID NO: 284915 - DNA, 15 bp, Homo sapiens
agagctattatctga

SEQ ID NO: 284916 - DNA, 15 bp, Homo sapiens
gagagctattatctg

SEQ ID NO: 284917 - DNA, 15 bp, Homo sapiens
ggagagctattatct

SEQ ID NO: 284918 - DNA, 15 bp, Homo sapiens
tggagagctattatc

SEQ ID NO: 284919 - DNA, 15 bp, Homo sapiens
gtggagagctattat

SEQ ID NO: 284920 - DNA, 15 bp, Homo sapiens
agtggagagctatta

SEQ ID NO: 284921 - DNA, 15 bp, Homo sapiens
cagtggagagctatt

SEQ ID NO: 284922 - DNA, 15 bp, Homo sapiens
tcagtggagagctat

SEQ ID NO: 284923 - DNA, 15 bp, Homo sapiens
ctcagtggagagcta

SEQ ID NO: 284924 - DNA, 15 bp, Homo sapiens
actcagtggagagct

SEQ ID NO: 284925 - DNA, 15 bp, Homo sapiens
tactcagtggagagc

SEQ ID NO: 284926 - DNA, 15 bp, Homo sapiens
gtactcagtggagag

SEQ ID NO: 284927 - DNA, 15 bp, Homo sapiens
tgtactcagtggaga

SEQ ID NO: 284928 - DNA, 15 bp, Homo sapiens
ttgtactcagtggag

SEQ ID NO: 284929 - DNA, 15 bp, Homo sapiens
tttgtactcagtgga

SEQ ID NO: 284930 - DNA, 15 bp, Homo sapiens
gtttgtactcagtgg

SEQ ID NO: 284931 - DNA, 15 bp, Homo sapiens
agtttgtactcagtg

SEQ ID NO: 284932 - DNA, 15 bp, Homo sapiens
cagtttgtactcagt

SEQ ID NO: 284933 - DNA, 15 bp, Homo sapiens
acagtttgtactcag

SEQ ID NO: 284934 - DNA, 15 bp, Homo sapiens
cacagtttgtactca

SEQ ID NO: 284935 - DNA, 15 bp, Homo sapiens
acacagtttgtactc

SEQ ID NO: 284936 - DNA, 15 bp, Homo sapiens
tacacagtttgtact

SEQ ID NO: 284937 - DNA, 15 bp, Homo sapiens
atacacagtttgtac

SEQ ID NO: 284938 - DNA, 15 bp, Homo sapiens
tatacacagtttgta

SEQ ID NO: 284939 - DNA, 15 bp, Homo sapiens
ttatacacagtttgt

SEQ ID NO: 284940 - DNA, 15 bp, Homo sapiens
cttatacacagtttg

SEQ ID NO: 284941 - DNA, 15 bp, Homo sapiens
ccttatacacagttt

SEQ ID NO: 284942 - DNA, 15 bp, Homo sapiens
gccttatacacagtt

SEQ ID NO: 284943 - DNA, 15 bp, Homo sapiens
tgccttatacacagt

SEQ ID NO: 284944 - DNA, 15 bp, Homo sapiens
atgccttatacacag

SEQ ID NO: 284945 - DNA, 15 bp, Homo sapiens
aatgccttatacaca

SEQ ID NO: 284946 - DNA, 15 bp, Homo sapiens
aaatgccttatacac

SEQ ID NO: 284947 - DNA, 15 bp, Homo sapiens
aaaatgccttataca

SEQ ID NO: 284948 - DNA, 15 bp, Homo sapiens
caaaatgccttatac

SEQ ID NO: 284949 - DNA, 15 bp, Homo sapiens
gcaaaatgccttata

SEQ ID NO: 284950 - DNA, 15 bp, Homo sapiens
agcaaaatgccttat

SEQ ID NO: 284951 - DNA, 15 bp, Homo sapiens
tagcaaaatgcctta

SEQ ID NO: 284952 - DNA, 15 bp, Homo sapiens
ctagcaaaatgcctt

SEQ ID NO: 284953 - DNA, 15 bp, Homo sapiens
cctagcaaaatgcct

SEQ ID NO: 284954 - DNA, 15 bp, Homo sapiens
acctagcaaaatgcc

SEQ ID NO: 284955 - DNA, 15 bp, Homo sapiens
tacctagcaaaatgc

SEQ ID NO: 284956 - DNA, 15 bp, Homo sapiens
gtacctagcaaaatg

SEQ ID NO: 284957 - DNA, 15 bp, Homo sapiens
agtacctagcaaaat

SEQ ID NO: 284958 - DNA, 15 bp, Homo sapiens
cagtacctagcaaaa

SEQ ID NO: 284959 - DNA, 15 bp, Homo sapiens
ccagtacctagcaaa

SEQ ID NO: 284960 - DNA, 15 bp, Homo sapiens
cccagtacctagcaa

SEQ ID NO: 284961 - DNA, 15 bp, Homo sapiens
ccccagtacctagca

SEQ ID NO: 284962 - DNA, 15 bp, Homo sapiens
tccccagtacctagc

SEQ ID NO: 284963 - DNA, 15 bp, Homo sapiens
ttccccagtacctag

SEQ ID NO: 284964 - DNA, 15 bp, Homo sapiens
attccccagtaccta

SEQ ID NO: 284965 - DNA, 15 bp, Homo sapiens
aattccccagtacct

SEQ ID NO: 284966 - DNA, 15 bp, Homo sapiens
aaattccccagtacc

SEQ ID NO: 284967 - DNA, 15 bp, Homo sapiens
aaaattccccagtac

SEQ ID NO: 284968 - DNA, 15 bp, Homo sapiens
caaaattccccagta

SEQ ID NO: 284969 - DNA, 15 bp, Homo sapiens
tcaaaattccccagt

SEQ ID NO: 284970 - DNA, 15 bp, Homo sapiens
ctcaaaattccccag

SEQ ID NO: 284971 - DNA, 15 bp, Homo sapiens
actcaaaattcccca

SEQ ID NO: 284972 - DNA, 15 bp, Homo sapiens
tactcaaaattcccc

SEQ ID NO: 284973 - DNA, 15 bp, Homo sapiens
gtactcaaaattccc

SEQ ID NO: 284974 - DNA, 15 bp, Homo sapiens
agtactcaaaattcc

SEQ ID NO: 284975 - DNA, 15 bp, Homo sapiens
aagtactcaaaattc

SEQ ID NO: 284976 - DNA, 15 bp, Homo sapiens
taagtactcaaaatt

SEQ ID NO: 284977 - DNA, 15 bp, Homo sapiens
ataagtactcaaaat

SEQ ID NO: 284978 - DNA, 15 bp, Homo sapiens
cataagtactcaaaa

SEQ ID NO: 284979 - DNA, 15 bp, Homo sapiens
acataagtactcaaa

SEQ ID NO: 284980 - DNA, 15 bp, Homo sapiens
tacataagtactcaa

SEQ ID NO: 284981 - DNA, 15 bp, Homo sapiens
atacataagtactca

SEQ ID NO: 284982 - DNA, 15 bp, Homo sapiens
tatacataagtactc

SEQ ID NO: 284983 - DNA, 15 bp, Homo sapiens
ttatacataagtact

SEQ ID NO: 284984 - DNA, 15 bp, Homo sapiens
attatacataagtac

SEQ ID NO: 284985 - DNA, 15 bp, Homo sapiens
cattatacataagta

SEQ ID NO: 284986 - DNA, 15 bp, Homo sapiens
gcattatacataagt

SEQ ID NO: 284987 - DNA, 15 bp, Homo sapiens
agcattatacataag

SEQ ID NO: 284988 - DNA, 15 bp, Homo sapiens
tagcattatacataa

SEQ ID NO: 284989 - DNA, 15 bp, Homo sapiens
ctagcattatacata

SEQ ID NO: 284990 - DNA, 15 bp, Homo sapiens
tctagcattatacat

SEQ ID NO: 284991 - DNA, 15 bp, Homo sapiens
atctagcattataca

SEQ ID NO: 284992 - DNA, 15 bp, Homo sapiens
gatctagcattatac

SEQ ID NO: 284993 - DNA, 15 bp, Homo sapiens
agatctagcattata

SEQ ID NO: 284994 - DNA, 15 bp, Homo sapiens
aagatctagcattat

SEQ ID NO: 284995 - DNA, 15 bp, Homo sapiens
aaagatctagcatta

SEQ ID NO: 284996 - DNA, 15 bp, Homo sapiens
aaaagatctagcatt

SEQ ID NO: 284997 - DNA, 15 bp, Homo sapiens
gaaaagatctagcat

SEQ ID NO: 284998 - DNA, 15 bp, Homo sapiens
ggaaaagatctagca

SEQ ID NO: 284999 - DNA, 15 bp, Homo sapiens
tggaaaagatctagc

SEQ ID NO: 285000 - DNA, 15 bp, Homo sapiens
atggaaaagatctag

SEQ ID NO: 285001 - DNA, 15 bp, Homo sapiens
aatggaaaagatcta

SEQ ID NO: 285002 - DNA, 15 bp, Homo sapiens
taatggaaaagatct

SEQ ID NO: 285003 - DNA, 15 bp, Homo sapiens
ttaatggaaaagatc

SEQ ID NO: 285004 - DNA, 15 bp, Homo sapiens
cttaatggaaaagat

SEQ ID NO: 285005 - DNA, 15 bp, Homo sapiens
tcttaatggaaaaga

SEQ ID NO: 285006 - DNA, 15 bp, Homo sapiens
gtcttaatggaaaag

SEQ ID NO: 285007 - DNA, 15 bp, Homo sapiens
tgtcttaatggaaaa

SEQ ID NO: 285008 - DNA, 15 bp, Homo sapiens
atgtcttaatggaaa

SEQ ID NO: 285009 - DNA, 15 bp, Homo sapiens
aatgtcttaatggaa

SEQ ID NO: 285010 - DNA, 15 bp, Homo sapiens
aaatgtcttaatgga

SEQ ID NO: 285011 - DNA, 15 bp, Homo sapiens
taaatgtcttaatgg

SEQ ID NO: 285012 - DNA, 15 bp, Homo sapiens
ttaaatgtcttaatg

SEQ ID NO: 285013 - DNA, 15 bp, Homo sapiens
tttaaatgtcttaat

SEQ ID NO: 285014 - DNA, 15 bp, Homo sapiens
atttaaatgtcttaa

SEQ ID NO: 285015 - DNA, 15 bp, Homo sapiens
aatttaaatgtctta

SEQ ID NO: 285016 - DNA, 15 bp, Homo sapiens
taatttaaatgtctt

SEQ ID NO: 285017 - DNA, 15 bp, Homo sapiens
ataatttaaatgtct

SEQ ID NO: 285018 - DNA, 15 bp, Homo sapiens
tataatttaaatgtc

SEQ ID NO: 285019 - DNA, 15 bp, Homo sapiens
gtataatttaaatgt

SEQ ID NO: 285020 - DNA, 15 bp, Homo sapiens
tgtataatttaaatg

SEQ ID NO: 285021 - DNA, 15 bp, Homo sapiens
atgtataatttaaat

SEQ ID NO: 285022 - DNA, 15 bp, Homo sapiens
tatgtataatttaaa

SEQ ID NO: 285023 - DNA, 15 bp, Homo sapiens
atatgtataatttaa

SEQ ID NO: 285024 - DNA, 15 bp, Homo sapiens
aatatgtataattta

SEQ ID NO: 285025 - DNA, 15 bp, Homo sapiens
aaatatgtataattt

SEQ ID NO: 285026 - DNA, 15 bp, Homo sapiens
aaaatatgtataatt

SEQ ID NO: 285027 - DNA, 15 bp, Homo sapiens
aaaaatatgtataat

SEQ ID NO: 285028 - DNA, 15 bp, Homo sapiens
taaaaatatgtataa

SEQ ID NO: 285029 - DNA, 15 bp, Homo sapiens
gtaaaaatatgtata

SEQ ID NO: 285030 - DNA, 15 bp, Homo sapiens
tgtaaaaatatgtat

SEQ ID NO: 285031 - DNA, 15 bp, Homo sapiens
ttgtaaaaatatgta

SEQ ID NO: 285032 - DNA, 15 bp, Homo sapiens
cttgtaaaaatatgt

SEQ ID NO: 285033 - DNA, 15 bp, Homo sapiens
ccttgtaaaaatatg

SEQ ID NO: 285034 - DNA, 15 bp, Homo sapiens
cccttgtaaaaatat

SEQ ID NO: 285035 - DNA, 15 bp, Homo sapiens
ccccttgtaaaaata

SEQ ID NO: 285036 - DNA, 15 bp, Homo sapiens
gccccttgtaaaaat

SEQ ID NO: 285037 - DNA, 15 bp, Homo sapiens
tgccccttgtaaaaa

SEQ ID NO: 285038 - DNA, 15 bp, Homo sapiens
ctgccccttgtaaaa

SEQ ID NO: 285039 - DNA, 15 bp, Homo sapiens
cctgccccttgtaaa

SEQ ID NO: 285040 - DNA, 15 bp, Homo sapiens
tcctgccccttgtaa

SEQ ID NO: 285041 - DNA, 15 bp, Homo sapiens
ttcctgccccttgta

SEQ ID NO: 285042 - DNA, 15 bp, Homo sapiens
cttcctgccccttgt

SEQ ID NO: 285043 - DNA, 15 bp, Homo sapiens
acttcctgccccttg

SEQ ID NO: 285044 - DNA, 15 bp, Homo sapiens
gacttcctgcccctt

SEQ ID NO: 285045 - DNA, 15 bp, Homo sapiens
ggacttcctgcccct

SEQ ID NO: 285046 - DNA, 15 bp, Homo sapiens
tggacttcctgcccc

SEQ ID NO: 285047 - DNA, 15 bp, Homo sapiens
ctggacttcctgccc

SEQ ID NO: 285048 - DNA, 15 bp, Homo sapiens
gctggacttcctgcc

SEQ ID NO: 285049 - DNA, 15 bp, Homo sapiens
ggctggacttcctgc

SEQ ID NO: 285050 - DNA, 15 bp, Homo sapiens
tggctggacttcctg

SEQ ID NO: 285051 - DNA, 15 bp, Homo sapiens
atggctggacttcct

SEQ ID NO: 285052 - DNA, 15 bp, Homo sapiens
tatggctggacttcc

SEQ ID NO: 285053 - DNA, 15 bp, Homo sapiens
atatggctggacttc

SEQ ID NO: 285054 - DNA, 15 bp, Homo sapiens
tatatggctggactt

SEQ ID NO: 285055 - DNA, 15 bp, Homo sapiens
atatatggctggact

SEQ ID NO: 285056 - DNA, 15 bp, Homo sapiens
tatatatggctggac

SEQ ID NO: 285057 - DNA, 15 bp, Homo sapiens
ttatatatggctgga

SEQ ID NO: 285058 - DNA, 15 bp, Homo sapiens
tttatatatggctgg

SEQ ID NO: 285059 - DNA, 15 bp, Homo sapiens
ctttatatatggctg

SEQ ID NO: 285060 - DNA, 15 bp, Homo sapiens
cctttatatatggct

SEQ ID NO: 285061 - DNA, 15 bp, Homo sapiens
tcctttatatatggc

SEQ ID NO: 285062 - DNA, 15 bp, Homo sapiens
ttcctttatatatgg

SEQ ID NO: 285063 - DNA, 15 bp, Homo sapiens
tttcctttatatatg

SEQ ID NO: 285064 - DNA, 15 bp, Homo sapiens
ttttcctttatatat

SEQ ID NO: 285065 - DNA, 15 bp, Homo sapiens
tttttcctttatata

SEQ ID NO: 285066 - DNA, 15 bp, Homo sapiens
atttttcctttatat

SEQ ID NO: 285067 - DNA, 15 bp, Homo sapiens
tatttttcctttata

SEQ ID NO: 285068 - DNA, 15 bp, Homo sapiens
ttatttttcctttat

SEQ ID NO: 285069 - DNA, 15 bp, Homo sapiens
cttatttttccttta

SEQ ID NO: 285070 - DNA, 15 bp, Homo sapiens
tcttatttttccttt

SEQ ID NO: 285071 - DNA, 15 bp, Homo sapiens
atcttatttttcctt

SEQ ID NO: 285072 - DNA, 15 bp, Homo sapiens
tatcttatttttcct

SEQ ID NO: 285073 - DNA, 15 bp, Homo sapiens
ttatcttatttttcc

SEQ ID NO: 285074 - DNA, 15 bp, Homo sapiens
gttatcttatttttc

SEQ ID NO: 285075 - DNA, 15 bp, Homo sapiens
tgttatcttattttt

SEQ ID NO: 285076 - DNA, 15 bp, Homo sapiens
ttgttatcttatttt

SEQ ID NO: 285077 - DNA, 15 bp, Homo sapiens
tttgttatcttattt

SEQ ID NO: 285078 - DNA, 15 bp, Homo sapiens
ttttgttatcttatt

SEQ ID NO: 285079 - DNA, 15 bp, Homo sapiens
gttttgttatcttat

SEQ ID NO: 285080 - DNA, 15 bp, Homo sapiens
tgttttgttatctta

SEQ ID NO: 285081 - DNA, 15 bp, Homo sapiens
ttgttttgttatctt

SEQ ID NO: 285082 - DNA, 15 bp, Homo sapiens
cttgttttgttatct

SEQ ID NO: 285083 - DNA, 15 bp, Homo sapiens
tcttgttttgttatc

SEQ ID NO: 285084 - DNA, 15 bp, Homo sapiens
ttcttgttttgttat

SEQ ID NO: 285085 - DNA, 15 bp, Homo sapiens
gttcttgttttgtta

SEQ ID NO: 285086 - DNA, 15 bp, Homo sapiens
tgttcttgttttgtt

SEQ ID NO: 285087 - DNA, 15 bp, Homo sapiens
ttgttcttgttttgt

SEQ ID NO: 285088 - DNA, 15 bp, Homo sapiens
cttgttcttgttttg

SEQ ID NO: 285089 - DNA, 15 bp, Homo sapiens
acttgttcttgtttt

SEQ ID NO: 285090 - DNA, 15 bp, Homo sapiens
tacttgttcttgttt

SEQ ID NO: 285091 - DNA, 15 bp, Homo sapiens
ttacttgttcttgtt

SEQ ID NO: 285092 - DNA, 15 bp, Homo sapiens
cttacttgttcttgt

SEQ ID NO: 285093 - DNA, 15 bp, Homo sapiens
ccttacttgttcttg

SEQ ID NO: 285094 - DNA, 15 bp, Homo sapiens
gccttacttgttctt

SEQ ID NO: 285095 - DNA, 15 bp, Homo sapiens
tgccttacttgttct

SEQ ID NO: 285096 - DNA, 15 bp, Homo sapiens
atgccttacttgttc

SEQ ID NO: 285097 - DNA, 15 bp, Homo sapiens
gatgccttacttgtt

SEQ ID NO: 285098 - DNA, 15 bp, Homo sapiens
cgatgccttacttgt

SEQ ID NO: 285099 - DNA, 15 bp, Homo sapiens
gcgatgccttacttg

SEQ ID NO: 285100 - DNA, 15 bp, Homo sapiens
agcgatgccttactt

SEQ ID NO: 285101 - DNA, 15 bp, Homo sapiens
tagcgatgccttact

SEQ ID NO: 285102 - DNA, 15 bp, Homo sapiens
ttagcgatgccttac

SEQ ID NO: 285103 - DNA, 15 bp, Homo sapiens
cttagcgatgcctta

SEQ ID NO: 285104 - DNA, 15 bp, Homo sapiens
gcttagcgatgcctt

SEQ ID NO: 285105 - DNA, 15 bp, Homo sapiens
tgcttagcgatgcct

SEQ ID NO: 285106 - DNA, 15 bp, Homo sapiens
ttgcttagcgatgcc

SEQ ID NO: 285107 - DNA, 15 bp, Homo sapiens
attgcttagcgatgc

SEQ ID NO: 285108 - DNA, 15 bp, Homo sapiens
tattgcttagcgatg

SEQ ID NO: 285109 - DNA, 15 bp, Homo sapiens
atattgcttagcgat

SEQ ID NO: 285110 - DNA, 15 bp, Homo sapiens
tatattgcttagcga

SEQ ID NO: 285111 - DNA, 15 bp, Homo sapiens
atatattgcttagcg

SEQ ID NO: 285112 - DNA, 15 bp, Homo sapiens
gatatattgcttagc

SEQ ID NO: 285113 - DNA, 15 bp, Homo sapiens
tgatatattgcttag

SEQ ID NO: 285114 - DNA, 15 bp, Homo sapiens
ttgatatattgctta

SEQ ID NO: 285115 - DNA, 15 bp, Homo sapiens
attgatatattgctt

SEQ ID NO: 285116 - DNA, 15 bp, Homo sapiens
cattgatatattgct

SEQ ID NO: 285117 - DNA, 15 bp, Homo sapiens
tcattgatatattgc

SEQ ID NO: 285118 - DNA, 15 bp, Homo sapiens
gtcattgatatattg

SEQ ID NO: 285119 - DNA, 15 bp, Homo sapiens
agtcattgatatatt

SEQ ID NO: 285120 - DNA, 15 bp, Homo sapiens
tagtcattgatatat

SEQ ID NO: 285121 - DNA, 15 bp, Homo sapiens
ttagtcattgatata

SEQ ID NO: 285122 - DNA, 15 bp, Homo sapiens
attagtcattgatat

SEQ ID NO: 285123 - DNA, 15 bp, Homo sapiens
tattagtcattgata

SEQ ID NO: 285124 - DNA, 15 bp, Homo sapiens
atattagtcattgat

SEQ ID NO: 285125 - DNA, 15 bp, Homo sapiens
catattagtcattga

SEQ ID NO: 285126 - DNA, 15 bp, Homo sapiens
tcatattagtcattg

SEQ ID NO: 285127 - DNA, 15 bp, Homo sapiens
ctcatattagtcatt

SEQ ID NO: 285128 - DNA, 15 bp, Homo sapiens
gctcatattagtcat

SEQ ID NO: 285129 - DNA, 15 bp, Homo sapiens
tgctcatattagtca

SEQ ID NO: 285130 - DNA, 15 bp, Homo sapiens
atgctcatattagtc

SEQ ID NO: 285131 - DNA, 15 bp, Homo sapiens
aatgctcatattagt

SEQ ID NO: 285132 - DNA, 15 bp, Homo sapiens
caatgctcatattag

SEQ ID NO: 285133 - DNA, 15 bp, Homo sapiens
gcaatgctcatatta

SEQ ID NO: 285134 - DNA, 15 bp, Homo sapiens
tgcaatgctcatatt

SEQ ID NO: 285135 - DNA, 15 bp, Homo sapiens
gtgcaatgctcatat

SEQ ID NO: 285136 - DNA, 15 bp, Homo sapiens
tgtgcaatgctcata

SEQ ID NO: 285137 - DNA, 15 bp, Homo sapiens
gtgtgcaatgctcat

SEQ ID NO: 285138 - DNA, 15 bp, Homo sapiens
tgtgtgcaatgctca

SEQ ID NO: 285139 - DNA, 15 bp, Homo sapiens
ctgtgtgcaatgctc

SEQ ID NO: 285140 - DNA, 15 bp, Homo sapiens
actgtgtgcaatgct

SEQ ID NO: 285141 - DNA, 15 bp, Homo sapiens
tactgtgtgcaatgc

SEQ ID NO: 285142 - DNA, 15 bp, Homo sapiens
ttactgtgtgcaatg

SEQ ID NO: 285143 - DNA, 15 bp, Homo sapiens
cttactgtgtgcaat

SEQ ID NO: 285144 - DNA, 15 bp, Homo sapiens
acttactgtgtgcaa

SEQ ID NO: 285145 - DNA, 15 bp, Homo sapiens
cacttactgtgtgca

SEQ ID NO: 285146 - DNA, 15 bp, Homo sapiens
gcacttactgtgtgc

SEQ ID NO: 285147 - DNA, 15 bp, Homo sapiens
agcacttactgtgtg

SEQ ID NO: 285148 - DNA, 15 bp, Homo sapiens
cagcacttactgtgt

SEQ ID NO: 285149 - DNA, 15 bp, Homo sapiens
tcagcacttactgtg

SEQ ID NO: 285150 - DNA, 15 bp, Homo sapiens
ttcagcacttactgt

SEQ ID NO: 285151 - DNA, 15 bp, Homo sapiens
cttcagcacttactg

SEQ ID NO: 285152 - DNA, 15 bp, Homo sapiens
ccttcagcacttact

SEQ ID NO: 285153 - DNA, 15 bp, Homo sapiens
accttcagcacttac

SEQ ID NO: 285154 - DNA, 15 bp, Homo sapiens
aaccttcagcactta

SEQ ID NO: 285155 - DNA, 15 bp, Homo sapiens
caaccttcagcactt

SEQ ID NO: 285156 - DNA, 15 bp, Homo sapiens
tcaaccttcagcact

SEQ ID NO: 285157 - DNA, 15 bp, Homo sapiens
ctcaaccttcagcac

SEQ ID NO: 285158 - DNA, 15 bp, Homo sapiens
cctcaaccttcagca

SEQ ID NO: 285159 - DNA, 15 bp, Homo sapiens
tcctcaaccttcagc

SEQ ID NO: 285160 - DNA, 15 bp, Homo sapiens
ctcctcaaccttcag

SEQ ID NO: 285161 - DNA, 15 bp, Homo sapiens
actcctcaaccttca

SEQ ID NO: 285162 - DNA, 15 bp, Homo sapiens
aactcctcaaccttc

SEQ ID NO: 285163 - DNA, 15 bp, Homo sapiens
caactcctcaacctt

SEQ ID NO: 285164 - DNA, 15 bp, Homo sapiens
tcaactcctcaacct

SEQ ID NO: 285165 - DNA, 15 bp, Homo sapiens
ttcaactcctcaacc

SEQ ID NO: 285166 - DNA, 15 bp, Homo sapiens
tttcaactcctcaac

SEQ ID NO: 285167 - DNA, 15 bp, Homo sapiens
ttttcaactcctcaa

SEQ ID NO: 285168 - DNA, 15 bp, Homo sapiens
cttttcaactcctca

SEQ ID NO: 285169 - DNA, 15 bp, Homo sapiens
tcttttcaactcctc

SEQ ID NO: 285170 - DNA, 15 bp, Homo sapiens
atcttttcaactcct

SEQ ID NO: 285171 - DNA, 15 bp, Homo sapiens
tatcttttcaactcc

SEQ ID NO: 285172 - DNA, 15 bp, Homo sapiens
ctatcttttcaactc

SEQ ID NO: 285173 - DNA, 15 bp, Homo sapiens
gctatcttttcaact

SEQ ID NO: 285174 - DNA, 15 bp, Homo sapiens
agctatcttttcaac

SEQ ID NO: 285175 - DNA, 15 bp, Homo sapiens
cagctatcttttcaa

SEQ ID NO: 285176 - DNA, 15 bp, Homo sapiens
ccagctatcttttca

SEQ ID NO: 285177 - DNA, 15 bp, Homo sapiens
tccagctatcttttc

SEQ ID NO: 285178 - DNA, 15 bp, Homo sapiens
atccagctatctttt

SEQ ID NO: 285179 - DNA, 15 bp, Homo sapiens
catccagctatcttt

SEQ ID NO: 285180 - DNA, 15 bp, Homo sapiens
gcatccagctatctt

SEQ ID NO: 285181 - DNA, 15 bp, Homo sapiens
agcatccagctatct

SEQ ID NO: 285182 - DNA, 15 bp, Homo sapiens
tagcatccagctatc

SEQ ID NO: 285183 - DNA, 15 bp, Homo sapiens
atagcatccagctat

SEQ ID NO: 285184 - DNA, 15 bp, Homo sapiens
tatagcatccagcta

SEQ ID NO: 285185 - DNA, 15 bp, Homo sapiens
ttatagcatccagct

SEQ ID NO: 285186 - DNA, 15 bp, Homo sapiens
gttatagcatccagc

SEQ ID NO: 285187 - DNA, 15 bp, Homo sapiens
tgttatagcatccag

SEQ ID NO: 285188 - DNA, 15 bp, Homo sapiens
atgttatagcatcca

SEQ ID NO: 285189 - DNA, 15 bp, Homo sapiens
catgttatagcatcc

SEQ ID NO: 285190 - DNA, 15 bp, Homo sapiens
acatgttatagcatc

SEQ ID NO: 285191 - DNA, 15 bp, Homo sapiens
aacatgttatagcat

SEQ ID NO: 285192 - DNA, 15 bp, Homo sapiens
aaacatgttatagca

SEQ ID NO: 285193 - DNA, 15 bp, Homo sapiens
aaaacatgttatagc

SEQ ID NO: 285194 - DNA, 15 bp, Homo sapiens
caaaacatgttatag

SEQ ID NO: 285195 - DNA, 15 bp, Homo sapiens
ccaaaacatgttata

SEQ ID NO: 285196 - DNA, 15 bp, Homo sapiens
gccaaaacatgttat

SEQ ID NO: 285197 - DNA, 15 bp, Homo sapiens
agccaaaacatgtta

SEQ ID NO: 285198 - DNA, 15 bp, Homo sapiens
cagccaaaacatgtt

SEQ ID NO: 285199 - DNA, 15 bp, Homo sapiens
acagccaaaacatgt

SEQ ID NO: 285200 - DNA, 15 bp, Homo sapiens
tacagccaaaacatg

SEQ ID NO: 285201 - DNA, 15 bp, Homo sapiens
ctacagccaaaacat

SEQ ID NO: 285202 - DNA, 15 bp, Homo sapiens
cctacagccaaaaca

SEQ ID NO: 285203 - DNA, 15 bp, Homo sapiens
ccctacagccaaaac

SEQ ID NO: 285204 - DNA, 15 bp, Homo sapiens
cccctacagccaaaa

SEQ ID NO: 285205 - DNA, 15 bp, Homo sapiens
tcccctacagccaaa

SEQ ID NO: 285206 - DNA, 15 bp, Homo sapiens
ctcccctacagccaa

SEQ ID NO: 285207 - DNA, 15 bp, Homo sapiens
tctcccctacagcca

SEQ ID NO: 285208 - DNA, 15 bp, Homo sapiens
atctcccctacagcc

SEQ ID NO: 285209 - DNA, 15 bp, Homo sapiens
aatctcccctacagc

SEQ ID NO: 285210 - DNA, 15 bp, Homo sapiens
aaatctcccctacag

SEQ ID NO: 285211 - DNA, 15 bp, Homo sapiens
aaaatctcccctaca

SEQ ID NO: 285212 - DNA, 15 bp, Homo sapiens
caaaatctcccctac

SEQ ID NO: 285213 - DNA, 15 bp, Homo sapiens
tcaaaatctccccta

SEQ ID NO: 285214 - DNA, 15 bp, Homo sapiens
ctcaaaatctcccct

SEQ ID NO: 285215 - DNA, 15 bp, Homo sapiens
actcaaaatctcccc

SEQ ID NO: 285216 - DNA, 15 bp, Homo sapiens
aactcaaaatctccc

SEQ ID NO: 285217 - DNA, 15 bp, Homo sapiens
caactcaaaatctcc

SEQ ID NO: 285218 - DNA, 15 bp, Homo sapiens
tcaactcaaaatctc

SEQ ID NO: 285219 - DNA, 15 bp, Homo sapiens
ttcaactcaaaatct

SEQ ID NO: 285220 - DNA, 15 bp, Homo sapiens
attcaactcaaaatc

SEQ ID NO: 285221 - DNA, 15 bp, Homo sapiens
tattcaactcaaaat

SEQ ID NO: 285222 - DNA, 15 bp, Homo sapiens
ctattcaactcaaaa

SEQ ID NO: 285223 - DNA, 15 bp, Homo sapiens
tctattcaactcaaa

SEQ ID NO: 285224 - DNA, 15 bp, Homo sapiens
gtctattcaactcaa

SEQ ID NO: 285225 - DNA, 15 bp, Homo sapiens
tgtctattcaactca

SEQ ID NO: 285226 - DNA, 15 bp, Homo sapiens
ctgtctattcaactc

SEQ ID NO: 285227 - DNA, 15 bp, Homo sapiens
tctgtctattcaact

SEQ ID NO: 285228 - DNA, 15 bp, Homo sapiens
ttctgtctattcaac

SEQ ID NO: 285229 - DNA, 15 bp, Homo sapiens
tttctgtctattcaa

SEQ ID NO: 285230 - DNA, 15 bp, Homo sapiens
ttttctgtctattca

SEQ ID NO: 285231 - DNA, 15 bp, Homo sapiens
gttttctgtctattc

SEQ ID NO: 285232 - DNA, 15 bp, Homo sapiens
agttttctgtctatt

SEQ ID NO: 285233 - DNA, 15 bp, Homo sapiens
gagttttctgtctat

SEQ ID NO: 285234 - DNA, 15 bp, Homo sapiens
tgagttttctgtcta

SEQ ID NO: 285235 - DNA, 15 bp, Homo sapiens
ctgagttttctgtct

SEQ ID NO: 285236 - DNA, 15 bp, Homo sapiens
actgagttttctgtc

SEQ ID NO: 285237 - DNA, 15 bp, Homo sapiens
gactgagttttctgt

SEQ ID NO: 285238 - DNA, 15 bp, Homo sapiens
agactgagttttctg

SEQ ID NO: 285239 - DNA, 15 bp, Homo sapiens
cagactgagttttct

SEQ ID NO: 285240 - DNA, 15 bp, Homo sapiens
gcagactgagttttc

SEQ ID NO: 285241 - DNA, 15 bp, Homo sapiens
ggcagactgagtttt

SEQ ID NO: 285242 - DNA, 15 bp, Homo sapiens
gggcagactgagttt

SEQ ID NO: 285243 - DNA, 15 bp, Homo sapiens
agggcagactgagtt

SEQ ID NO: 285244 - DNA, 15 bp, Homo sapiens
gagggcagactgagt

SEQ ID NO: 285245 - DNA, 15 bp, Homo sapiens
tgagggcagactgag

SEQ ID NO: 285246 - DNA, 15 bp, Homo sapiens
ttgagggcagactga

SEQ ID NO: 285247 - DNA, 15 bp, Homo sapiens
gttgagggcagactg

SEQ ID NO: 285248 - DNA, 15 bp, Homo sapiens
agttgagggcagact

SEQ ID NO: 285249 - DNA, 15 bp, Homo sapiens
gagttgagggcagac

SEQ ID NO: 285250 - DNA, 15 bp, Homo sapiens
agagttgagggcaga

SEQ ID NO: 285251 - DNA, 15 bp, Homo sapiens
tagagttgagggcag

SEQ ID NO: 285252 - DNA, 15 bp, Homo sapiens
ctagagttgagggca

SEQ ID NO: 285253 - DNA, 15 bp, Homo sapiens
cctagagttgagggc

SEQ ID NO: 285254 - DNA, 15 bp, Homo sapiens
tcctagagttgaggg

SEQ ID NO: 285255 - DNA, 15 bp, Homo sapiens
ctcctagagttgagg

SEQ ID NO: 285256 - DNA, 15 bp, Homo sapiens
actcctagagttgag

SEQ ID NO: 285257 - DNA, 15 bp, Homo sapiens
gactcctagagttga

SEQ ID NO: 285258 - DNA, 15 bp, Homo sapiens
ggactcctagagttg

SEQ ID NO: 285259 - DNA, 15 bp, Homo sapiens
tggactcctagagtt

SEQ ID NO: 285260 - DNA, 15 bp, Homo sapiens
gtggactcctagagt

SEQ ID NO: 285261 - DNA, 15 bp, Homo sapiens
tgtggactcctagag

SEQ ID NO: 285262 - DNA, 15 bp, Homo sapiens
ttgtggactcctaga

SEQ ID NO: 285263 - DNA, 15 bp, Homo sapiens
cttgtggactcctag

SEQ ID NO: 285264 - DNA, 15 bp, Homo sapiens
tcttgtggactccta

SEQ ID NO: 285265 - DNA, 15 bp, Homo sapiens
ctcttgtggactcct

SEQ ID NO: 285266 - DNA, 15 bp, Homo sapiens
tctcttgtggactcc

SEQ ID NO: 285267 - DNA, 15 bp, Homo sapiens
ttctcttgtggactc

SEQ ID NO: 285268 - DNA, 15 bp, Homo sapiens
cttctcttgtggact

SEQ ID NO: 285269 - DNA, 15 bp, Homo sapiens
tcttctcttgtggac

SEQ ID NO: 285270 - DNA, 15 bp, Homo sapiens
gtcttctcttgtgga

SEQ ID NO: 285271 - DNA, 15 bp, Homo sapiens
agtcttctcttgtgg

SEQ ID NO: 285272 - DNA, 15 bp, Homo sapiens
gagtcttctcttgtg

SEQ ID NO: 285273 - DNA, 15 bp, Homo sapiens
agagtcttctcttgt

SEQ ID NO: 285274 - DNA, 15 bp, Homo sapiens
gagagtcttctcttg

SEQ ID NO: 285275 - DNA, 15 bp, Homo sapiens
tgagagtcttctctt

SEQ ID NO: 285276 - DNA, 15 bp, Homo sapiens
atgagagtcttctct

SEQ ID NO: 285277 - DNA, 15 bp, Homo sapiens
aatgagagtcttctc

SEQ ID NO: 285278 - DNA, 15 bp, Homo sapiens
taatgagagtcttct

SEQ ID NO: 285279 - DNA, 15 bp, Homo sapiens
ataatgagagtcttc

SEQ ID NO: 285280 - DNA, 15 bp, Homo sapiens
cataatgagagtctt

SEQ ID NO: 285281 - DNA, 15 bp, Homo sapiens
ccataatgagagtct

SEQ ID NO: 285282 - DNA, 15 bp, Homo sapiens
gccataatgagagtc

SEQ ID NO: 285283 - DNA, 15 bp, Homo sapiens
ggccataatgagagt

SEQ ID NO: 285284 - DNA, 15 bp, Homo sapiens
aggccataatgagag

SEQ ID NO: 285285 - DNA, 15 bp, Homo sapiens
caggccataatgaga

SEQ ID NO: 285286 - DNA, 15 bp, Homo sapiens
acaggccataatgag

SEQ ID NO: 285287 - DNA, 15 bp, Homo sapiens
tacaggccataatga

SEQ ID NO: 285288 - DNA, 15 bp, Homo sapiens
gtacaggccataatg

SEQ ID NO: 285289 - DNA, 15 bp, Homo sapiens
agtacaggccataat

SEQ ID NO: 285290 - DNA, 15 bp, Homo sapiens
gagtacaggccataa

SEQ ID NO: 285291 - DNA, 15 bp, Homo sapiens
cgagtacaggccata

SEQ ID NO: 285292 - DNA, 15 bp, Homo sapiens
ccgagtacaggccat

SEQ ID NO: 285293 - DNA, 15 bp, Homo sapiens
cccgagtacaggcca

SEQ ID NO: 285294 - DNA, 15 bp, Homo sapiens
gcccgagtacaggcc

SEQ ID NO: 285295 - DNA, 15 bp, Homo sapiens
agcccgagtacaggc

SEQ ID NO: 285296 - DNA, 15 bp, Homo sapiens
aagcccgagtacagg

SEQ ID NO: 285297 - DNA, 15 bp, Homo sapiens
aaagcccgagtacag

SEQ ID NO: 285298 - DNA, 15 bp, Homo sapiens
caaagcccgagtaca

SEQ ID NO: 285299 - DNA, 15 bp, Homo sapiens
acaaagcccgagtac

SEQ ID NO: 285300 - DNA, 15 bp, Homo sapiens
cacaaagcccgagta

SEQ ID NO: 285301 - DNA, 15 bp, Homo sapiens
tcacaaagcccgagt

SEQ ID NO: 285302 - DNA, 15 bp, Homo sapiens
atcacaaagcccgag

SEQ ID NO: 285303 - DNA, 15 bp, Homo sapiens
aatcacaaagcccga

SEQ ID NO: 285304 - DNA, 15 bp, Homo sapiens
aaatcacaaagcccg

SEQ ID NO: 285305 - DNA, 15 bp, Homo sapiens
aaaatcacaaagccc

SEQ ID NO: 285306 - DNA, 15 bp, Homo sapiens
gaaaatcacaaagcc

SEQ ID NO: 285307 - DNA, 15 bp, Homo sapiens
tgaaaatcacaaagc

SEQ ID NO: 285308 - DNA, 15 bp, Homo sapiens
ctgaaaatcacaaag

SEQ ID NO: 285309 - DNA, 15 bp, Homo sapiens
actgaaaatcacaaa

SEQ ID NO: 285310 - DNA, 15 bp, Homo sapiens
tactgaaaatcacaa

SEQ ID NO: 285311 - DNA, 15 bp, Homo sapiens
atactgaaaatcaca

SEQ ID NO: 285312 - DNA, 15 bp, Homo sapiens
tatactgaaaatcac

SEQ ID NO: 285313 - DNA, 15 bp, Homo sapiens
gtatactgaaaatca

SEQ ID NO: 285314 - DNA, 15 bp, Homo sapiens
cgtatactgaaaatc

SEQ ID NO: 285315 - DNA, 15 bp, Homo sapiens
gcgtatactgaaaat

SEQ ID NO: 285316 - DNA, 15 bp, Homo sapiens
agcgtatactgaaaa

SEQ ID NO: 285317 - DNA, 15 bp, Homo sapiens
tagcgtatactgaaa

SEQ ID NO: 285318 - DNA, 15 bp, Homo sapiens
ttagcgtatactgaa

SEQ ID NO: 285319 - DNA, 15 bp, Homo sapiens
tttagcgtatactga

SEQ ID NO: 285320 - DNA, 15 bp, Homo sapiens
ctttagcgtatactg

SEQ ID NO: 285321 - DNA, 15 bp, Homo sapiens
actttagcgtatact

SEQ ID NO: 285322 - DNA, 15 bp, Homo sapiens
gactttagcgtatac

SEQ ID NO: 285323 - DNA, 15 bp, Homo sapiens
tgactttagcgtata

SEQ ID NO: 285324 - DNA, 15 bp, Homo sapiens
ttgactttagcgtat

SEQ ID NO: 285325 - DNA, 15 bp, Homo sapiens
cttgactttagcgta

SEQ ID NO: 285326 - DNA, 15 bp, Homo sapiens
gcttgactttagcgt

SEQ ID NO: 285327 - DNA, 15 bp, Homo sapiens
tgcttgactttagcg

SEQ ID NO: 285328 - DNA, 15 bp, Homo sapiens
ttgcttgactttagc

SEQ ID NO: 285329 - DNA, 15 bp, Homo sapiens
tttgcttgactttag

SEQ ID NO: 285330 - DNA, 15 bp, Homo sapiens
ttttgcttgacttta

SEQ ID NO: 285331 - DNA, 15 bp, Homo sapiens
gttttgcttgacttt

SEQ ID NO: 285332 - DNA, 15 bp, Homo sapiens
ggttttgcttgactt

SEQ ID NO: 285333 - DNA, 15 bp, Homo sapiens
aggttttgcttgact

SEQ ID NO: 285334 - DNA, 15 bp, Homo sapiens
aaggttttgcttgac

SEQ ID NO: 285335 - DNA, 15 bp, Homo sapiens
caaggttttgcttga

SEQ ID NO: 285336 - DNA, 15 bp, Homo sapiens
gcaaggttttgcttg

SEQ ID NO: 285337 - DNA, 15 bp, Homo sapiens
ggcaaggttttgctt

SEQ ID NO: 285338 - DNA, 15 bp, Homo sapiens
aggcaaggttttgct

SEQ ID NO: 285339 - DNA, 15 bp, Homo sapiens
aaggcaaggttttgc

SEQ ID NO: 285340 - DNA, 15 bp, Homo sapiens
caaggcaaggttttg

SEQ ID NO: 285341 - DNA, 15 bp, Homo sapiens
tcaaggcaaggtttt

SEQ ID NO: 285342 - DNA, 15 bp, Homo sapiens
ttcaaggcaaggttt

SEQ ID NO: 285343 - DNA, 15 bp, Homo sapiens
tttcaaggcaaggtt

SEQ ID NO: 285344 - DNA, 15 bp, Homo sapiens
atttcaaggcaaggt

SEQ ID NO: 285345 - DNA, 15 bp, Homo sapiens
gatttcaaggcaagg

SEQ ID NO: 285346 - DNA, 15 bp, Homo sapiens
tgatttcaaggcaag

SEQ ID NO: 285347 - DNA, 15 bp, Homo sapiens
ctgatttcaaggcaa

SEQ ID NO: 285348 - DNA, 15 bp, Homo sapiens
gctgatttcaaggca

SEQ ID NO: 285349 - DNA, 15 bp, Homo sapiens
agctgatttcaaggc

SEQ ID NO: 285350 - DNA, 15 bp, Homo sapiens
tagctgatttcaagg

SEQ ID NO: 285351 - DNA, 15 bp, Homo sapiens
gtagctgatttcaag

SEQ ID NO: 285352 - DNA, 15 bp, Homo sapiens
agtagctgatttcaa

SEQ ID NO: 285353 - DNA, 15 bp, Homo sapiens
cagtagctgatttca

SEQ ID NO: 285354 - DNA, 15 bp, Homo sapiens
tcagtagctgatttc

SEQ ID NO: 285355 - DNA, 15 bp, Homo sapiens
ctcagtagctgattt

SEQ ID NO: 285356 - DNA, 15 bp, Homo sapiens
tctcagtagctgatt

SEQ ID NO: 285357 - DNA, 15 bp, Homo sapiens
atctcagtagctgat

SEQ ID NO: 285358 - DNA, 15 bp, Homo sapiens
aatctcagtagctga

SEQ ID NO: 285359 - DNA, 15 bp, Homo sapiens
taatctcagtagctg

SEQ ID NO: 285360 - DNA, 15 bp, Homo sapiens
ctaatctcagtagct

SEQ ID NO: 285361 - DNA, 15 bp, Homo sapiens
cctaatctcagtagc

SEQ ID NO: 285362 - DNA, 15 bp, Homo sapiens
ccctaatctcagtag

SEQ ID NO: 285363 - DNA, 15 bp, Homo sapiens
tccctaatctcagta

SEQ ID NO: 285364 - DNA, 15 bp, Homo sapiens
atccctaatctcagt

SEQ ID NO: 285365 - DNA, 15 bp, Homo sapiens
aatccctaatctcag

SEQ ID NO: 285366 - DNA, 15 bp, Homo sapiens
caatccctaatctca

SEQ ID NO: 285367 - DNA, 15 bp, Homo sapiens
tcaatccctaatctc

SEQ ID NO: 285368 - DNA, 15 bp, Homo sapiens
ctcaatccctaatct

SEQ ID NO: 285369 - DNA, 15 bp, Homo sapiens
tctcaatccctaatc

SEQ ID NO: 285370 - DNA, 15 bp, Homo sapiens
ttctcaatccctaat

SEQ ID NO: 285371 - DNA, 15 bp, Homo sapiens
attctcaatccctaa

SEQ ID NO: 285372 - DNA, 15 bp, Homo sapiens
cattctcaatcccta

SEQ ID NO: 285373 - DNA, 15 bp, Homo sapiens
gcattctcaatccct

SEQ ID NO: 285374 - DNA, 15 bp, Homo sapiens
agcattctcaatccc

SEQ ID NO: 285375 - DNA, 15 bp, Homo sapiens
aagcattctcaatcc

SEQ ID NO: 285376 - DNA, 15 bp, Homo sapiens
gaagcattctcaatc

SEQ ID NO: 285377 - DNA, 15 bp, Homo sapiens
tgaagcattctcaat

SEQ ID NO: 285378 - DNA, 15 bp, Homo sapiens
ctgaagcattctcaa

SEQ ID NO: 285379 - DNA, 15 bp, Homo sapiens
cctgaagcattctca

SEQ ID NO: 285380 - DNA, 15 bp, Homo sapiens
ccctgaagcattctc

SEQ ID NO: 285381 - DNA, 15 bp, Homo sapiens
tccctgaagcattct

SEQ ID NO: 285382 - DNA, 15 bp, Homo sapiens
gtccctgaagcattc

SEQ ID NO: 285383 - DNA, 15 bp, Homo sapiens
cgtccctgaagcatt

SEQ ID NO: 285384 - DNA, 15 bp, Homo sapiens
ccgtccctgaagcat

SEQ ID NO: 285385 - DNA, 15 bp, Homo sapiens
gccgtccctgaagca

SEQ ID NO: 285386 - DNA, 15 bp, Homo sapiens
tgccgtccctgaagc

SEQ ID NO: 285387 - DNA, 15 bp, Homo sapiens
atgccgtccctgaag

SEQ ID NO: 285388 - DNA, 15 bp, Homo sapiens
tatgccgtccctgaa

SEQ ID NO: 285389 - DNA, 15 bp, Homo sapiens
ttatgccgtccctga

SEQ ID NO: 285390 - DNA, 15 bp, Homo sapiens
tttatgccgtccctg

SEQ ID NO: 285391 - DNA, 15 bp, Homo sapiens
ttttatgccgtccct

SEQ ID NO: 285392 - DNA, 15 bp, Homo sapiens
attttatgccgtccc

SEQ ID NO: 285393 - DNA, 15 bp, Homo sapiens
tattttatgccgtcc

SEQ ID NO: 285394 - DNA, 15 bp, Homo sapiens
ttattttatgccgtc

SEQ ID NO: 285395 - DNA, 15 bp, Homo sapiens
attattttatgccgt

SEQ ID NO: 285396 - DNA, 15 bp, Homo sapiens
gattattttatgccg

SEQ ID NO: 285397 - DNA, 15 bp, Homo sapiens
tgattattttatgcc

SEQ ID NO: 285398 - DNA, 15 bp, Homo sapiens
ctgattattttatgc

SEQ ID NO: 285399 - DNA, 15 bp, Homo sapiens
tctgattattttatg

SEQ ID NO: 285400 - DNA, 15 bp, Homo sapiens
ctctgattattttat

SEQ ID NO: 285401 - DNA, 15 bp, Homo sapiens
tctctgattatttta

SEQ ID NO: 285402 - DNA, 15 bp, Homo sapiens
ttctctgattatttt

SEQ ID NO: 285403 - DNA, 15 bp, Homo sapiens
cttctctgattattt

SEQ ID NO: 285404 - DNA, 15 bp, Homo sapiens
gcttctctgattatt

SEQ ID NO: 285405 - DNA, 15 bp, Homo sapiens
cgcttctctgattat

SEQ ID NO: 285406 - DNA, 15 bp, Homo sapiens
ccgcttctctgatta

SEQ ID NO: 285407 - DNA, 15 bp, Homo sapiens
tccgcttctctgatt

SEQ ID NO: 285408 - DNA, 15 bp, Homo sapiens
gtccgcttctctgat

SEQ ID NO: 285409 - DNA, 15 bp, Homo sapiens
agtccgcttctctga

SEQ ID NO: 285410 - DNA, 15 bp, Homo sapiens
gagtccgcttctctg

SEQ ID NO: 285411 - DNA, 15 bp, Homo sapiens
agagtccgcttctct

SEQ ID NO: 285412 - DNA, 15 bp, Homo sapiens
tagagtccgcttctc

SEQ ID NO: 285413 - DNA, 15 bp, Homo sapiens
atagagtccgcttct

SEQ ID NO: 285414 - DNA, 15 bp, Homo sapiens
gatagagtccgcttc

SEQ ID NO: 285415 - DNA, 15 bp, Homo sapiens
ggatagagtccgctt

SEQ ID NO: 285416 - DNA, 15 bp, Homo sapiens
tggatagagtccgct

SEQ ID NO: 285417 - DNA, 15 bp, Homo sapiens
ctggatagagtccgc

SEQ ID NO: 285418 - DNA, 15 bp, Homo sapiens
actggatagagtccg

SEQ ID NO: 285419 - DNA, 15 bp, Homo sapiens
cactggatagagtcc

SEQ ID NO: 285420 - DNA, 15 bp, Homo sapiens
ccactggatagagtc

SEQ ID NO: 285421 - DNA, 15 bp, Homo sapiens
gccactggatagagt

SEQ ID NO: 285422 - DNA, 15 bp, Homo sapiens
tgccactggatagag

SEQ ID NO: 285423 - DNA, 15 bp, Homo sapiens
ctgccactggataga

SEQ ID NO: 285424 - DNA, 15 bp, Homo sapiens
actgccactggatag

SEQ ID NO: 285425 - DNA, 15 bp, Homo sapiens
tactgccactggata

SEQ ID NO: 285426 - DNA, 15 bp, Homo sapiens
ttactgccactggat

SEQ ID NO: 285427 - DNA, 15 bp, Homo sapiens
attactgccactgga

SEQ ID NO: 285428 - DNA, 15 bp, Homo sapiens
tattactgccactgg

SEQ ID NO: 285429 - DNA, 15 bp, Homo sapiens
gtattactgccactg

SEQ ID NO: 285430 - DNA, 15 bp, Homo sapiens
ggtattactgccact

SEQ ID NO: 285431 - DNA, 15 bp, Homo sapiens
aggtattactgccac

SEQ ID NO: 285432 - DNA, 15 bp, Homo sapiens
caggtattactgcca

SEQ ID NO: 285433 - DNA, 15 bp, Homo sapiens
acaggtattactgcc

SEQ ID NO: 285434 - DNA, 15 bp, Homo sapiens
aacaggtattactgc

SEQ ID NO: 285435 - DNA, 15 bp, Homo sapiens
caacaggtattactg

SEQ ID NO: 285436 - DNA, 15 bp, Homo sapiens
acaacaggtattact

SEQ ID NO: 285437 - DNA, 15 bp, Homo sapiens
gacaacaggtattac

SEQ ID NO: 285438 - DNA, 15 bp, Homo sapiens
ggacaacaggtatta

SEQ ID NO: 285439 - DNA, 15 bp, Homo sapiens
tggacaacaggtatt

SEQ ID NO: 285440 - DNA, 15 bp, Homo sapiens
ttggacaacaggtat

SEQ ID NO: 285441 - DNA, 15 bp, Homo sapiens
attggacaacaggta

SEQ ID NO: 285442 - DNA, 15 bp, Homo sapiens
cattggacaacaggt

SEQ ID NO: 285443 - DNA, 15 bp, Homo sapiens
tcattggacaacagg

SEQ ID NO: 285444 - DNA, 15 bp, Homo sapiens
atcattggacaacag

SEQ ID NO: 285445 - DNA, 15 bp, Homo sapiens
tatcattggacaaca

SEQ ID NO: 285446 - DNA, 15 bp, Homo sapiens
ctatcattggacaac

SEQ ID NO: 285447 - DNA, 15 bp, Homo sapiens
tctatcattggacaa

SEQ ID NO: 285448 - DNA, 15 bp, Homo sapiens
atctatcattggaca

SEQ ID NO: 285449 - DNA, 15 bp, Homo sapiens
catctatcattggac

SEQ ID NO: 285450 - DNA, 15 bp, Homo sapiens
tcatctatcattgga

SEQ ID NO: 285451 - DNA, 15 bp, Homo sapiens
atcatctatcattgg

SEQ ID NO: 285452 - DNA, 15 bp, Homo sapiens
aatcatctatcattg

SEQ ID NO: 285453 - DNA, 15 bp, Homo sapiens
taatcatctatcatt

SEQ ID NO: 285454 - DNA, 15 bp, Homo sapiens
ttaatcatctatcat

SEQ ID NO: 285455 - DNA, 15 bp, Homo sapiens
tttaatcatctatca

SEQ ID NO: 285456 - DNA, 15 bp, Homo sapiens
ttttaatcatctatc

SEQ ID NO: 285457 - DNA, 15 bp, Homo sapiens
gttttaatcatctat

SEQ ID NO: 285458 - DNA, 15 bp, Homo sapiens
agttttaatcatcta

SEQ ID NO: 285459 - DNA, 15 bp, Homo sapiens
aagttttaatcatct

SEQ ID NO: 285460 - DNA, 15 bp, Homo sapiens
aaagttttaatcatc

SEQ ID NO: 285461 - DNA, 15 bp, Homo sapiens
aaaagttttaatcat

SEQ ID NO: 285462 - DNA, 15 bp, Homo sapiens
caaaagttttaatca

SEQ ID NO: 285463 - DNA, 15 bp, Homo sapiens
ccaaaagttttaatc

SEQ ID NO: 285464 - DNA, 15 bp, Homo sapiens
tccaaaagttttaat

SEQ ID NO: 285465 - DNA, 15 bp, Homo sapiens
ttccaaaagttttaa

SEQ ID NO: 285466 - DNA, 15 bp, Homo sapiens
tttccaaaagtttta

SEQ ID NO: 285467 - DNA, 15 bp, Homo sapiens
atttccaaaagtttt

SEQ ID NO: 285468 - DNA, 15 bp, Homo sapiens
aatttccaaaagttt

SEQ ID NO: 285469 - DNA, 15 bp, Homo sapiens
aaatttccaaaagtt

SEQ ID NO: 285470 - DNA, 15 bp, Homo sapiens
aaaatttccaaaagt

SEQ ID NO: 285471 - DNA, 15 bp, Homo sapiens
aaaaatttccaaaag

SEQ ID NO: 285472 - DNA, 15 bp, Homo sapiens
taaaaatttccaaaa

SEQ ID NO: 285473 - DNA, 15 bp, Homo sapiens
ataaaaatttccaaa

SEQ ID NO: 285474 - DNA, 15 bp, Homo sapiens
aataaaaatttccaa

SEQ ID NO: 285475 - DNA, 15 bp, Homo sapiens
aaataaaaatttcca

SEQ ID NO: 285476 - DNA, 15 bp, Homo sapiens
caaataaaaatttcc

SEQ ID NO: 285477 - DNA, 15 bp, Homo sapiens
ccaaataaaaatttc

SEQ ID NO: 285478 - DNA, 15 bp, Homo sapiens
tccaaataaaaattt

SEQ ID NO: 285479 - DNA, 15 bp, Homo sapiens
ttccaaataaaaatt

SEQ ID NO: 285480 - DNA, 15 bp, Homo sapiens
tttccaaataaaaat

SEQ ID NO: 285481 - DNA, 15 bp, Homo sapiens
atttccaaataaaaa

SEQ ID NO: 285482 - DNA, 15 bp, Homo sapiens
aatttccaaataaaa

SEQ ID NO: 285483 - DNA, 15 bp, Homo sapiens
aaatttccaaataaa

SEQ ID NO: 285484 - DNA, 15 bp, Homo sapiens
gaaatttccaaataa

SEQ ID NO: 285485 - DNA, 15 bp, Homo sapiens
ggaaatttccaaata

SEQ ID NO: 285486 - DNA, 15 bp, Homo sapiens
tggaaatttccaaat

SEQ ID NO: 285487 - DNA, 15 bp, Homo sapiens
ctggaaatttccaaa

SEQ ID NO: 285488 - DNA, 15 bp, Homo sapiens
tctggaaatttccaa

SEQ ID NO: 285489 - DNA, 15 bp, Homo sapiens
ttctggaaatttcca

SEQ ID NO: 285490 - DNA, 15 bp, Homo sapiens
cttctggaaatttcc

SEQ ID NO: 285491 - DNA, 15 bp, Homo sapiens
gcttctggaaatttc

SEQ ID NO: 285492 - DNA, 15 bp, Homo sapiens
tgcttctggaaattt

SEQ ID NO: 285493 - DNA, 15 bp, Homo sapiens
atgcttctggaaatt

SEQ ID NO: 285494 - DNA, 15 bp, Homo sapiens
gatgcttctggaaat

SEQ ID NO: 285495 - DNA, 15 bp, Homo sapiens
agatgcttctggaaa

SEQ ID NO: 285496 - DNA, 15 bp, Homo sapiens
cagatgcttctggaa

SEQ ID NO: 285497 - DNA, 15 bp, Homo sapiens
tcagatgcttctgga

SEQ ID NO: 285498 - DNA, 15 bp, Homo sapiens
ttcagatgcttctgg

SEQ ID NO: 285499 - DNA, 15 bp, Homo sapiens
attcagatgcttctg

SEQ ID NO: 285500 - DNA, 15 bp, Homo sapiens
cattcagatgcttct

SEQ ID NO: 285501 - DNA, 15 bp, Homo sapiens
ccattcagatgcttc

SEQ ID NO: 285502 - DNA, 15 bp, Homo sapiens
gccattcagatgctt

SEQ ID NO: 285503 - DNA, 15 bp, Homo sapiens
tgccattcagatgct

SEQ ID NO: 285504 - DNA, 15 bp, Homo sapiens
atgccattcagatgc

SEQ ID NO: 285505 - DNA, 15 bp, Homo sapiens
gatgccattcagatg

SEQ ID NO: 285506 - DNA, 15 bp, Homo sapiens
ggatgccattcagat

SEQ ID NO: 285507 - DNA, 15 bp, Homo sapiens
tggatgccattcaga

SEQ ID NO: 285508 - DNA, 15 bp, Homo sapiens
gtggatgccattcag

SEQ ID NO: 285509 - DNA, 15 bp, Homo sapiens
agtggatgccattca

SEQ ID NO: 285510 - DNA, 15 bp, Homo sapiens
gagtggatgccattc

SEQ ID NO: 285511 - DNA, 15 bp, Homo sapiens
ggagtggatgccatt

SEQ ID NO: 285512 - DNA, 15 bp, Homo sapiens
tggagtggatgccat

SEQ ID NO: 285513 - DNA, 15 bp, Homo sapiens
atggagtggatgcca

SEQ ID NO: 285514 - DNA, 15 bp, Homo sapiens
gatggagtggatgcc

SEQ ID NO: 285515 - DNA, 15 bp, Homo sapiens
agatggagtggatgc

SEQ ID NO: 285516 - DNA, 15 bp, Homo sapiens
aagatggagtggatg

SEQ ID NO: 285517 - DNA, 15 bp, Homo sapiens
aaagatggagtggat

SEQ ID NO: 285518 - DNA, 15 bp, Homo sapiens
aaaagatggagtgga

SEQ ID NO: 285519 - DNA, 15 bp, Homo sapiens
aaaaagatggagtgg

SEQ ID NO: 285520 - DNA, 15 bp, Homo sapiens
caaaaagatggagtg

SEQ ID NO: 285521 - DNA, 15 bp, Homo sapiens
tcaaaaagatggagt

SEQ ID NO: 285522 - DNA, 15 bp, Homo sapiens
ttcaaaaagatggag

SEQ ID NO: 285523 - DNA, 15 bp, Homo sapiens
tttcaaaaagatgga

SEQ ID NO: 285524 - DNA, 15 bp, Homo sapiens
gtttcaaaaagatgg

SEQ ID NO: 285525 - DNA, 15 bp, Homo sapiens
agtttcaaaaagatg

SEQ ID NO: 285526 - DNA, 15 bp, Homo sapiens
cagtttcaaaaagat

SEQ ID NO: 285527 - DNA, 15 bp, Homo sapiens
tcagtttcaaaaaga

SEQ ID NO: 285528 - DNA, 15 bp, Homo sapiens
ctcagtttcaaaaag

SEQ ID NO: 285529 - DNA, 15 bp, Homo sapiens
cctcagtttcaaaaa

SEQ ID NO: 285530 - DNA, 15 bp, Homo sapiens
acctcagtttcaaaa

SEQ ID NO: 285531 - DNA, 15 bp, Homo sapiens
gacctcagtttcaaa

SEQ ID NO: 285532 - DNA, 15 bp, Homo sapiens
tgacctcagtttcaa

SEQ ID NO: 285533 - DNA, 15 bp, Homo sapiens
ctgacctcagtttca

SEQ ID NO: 285534 - DNA, 15 bp, Homo sapiens
actgacctcagtttc

SEQ ID NO: 285535 - DNA, 15 bp, Homo sapiens
cactgacctcagttt

SEQ ID NO: 285536 - DNA, 15 bp, Homo sapiens
acactgacctcagtt

SEQ ID NO: 285537 - DNA, 15 bp, Homo sapiens
cacactgacctcagt

SEQ ID NO: 285538 - DNA, 15 bp, Homo sapiens
gcacactgacctcag

SEQ ID NO: 285539 - DNA, 15 bp, Homo sapiens
cgcacactgacctca

SEQ ID NO: 285540 - DNA, 15 bp, Homo sapiens
tcgcacactgacctc

SEQ ID NO: 285541 - DNA, 15 bp, Homo sapiens
gtcgcacactgacct

SEQ ID NO: 285542 - DNA, 15 bp, Homo sapiens
cgtcgcacactgacc

SEQ ID NO: 285543 - DNA, 15 bp, Homo sapiens
acgtcgcacactgac

SEQ ID NO: 285544 - DNA, 15 bp, Homo sapiens
cacgtcgcacactga

SEQ ID NO: 285545 - DNA, 15 bp, Homo sapiens
gcacgtcgcacactg

SEQ ID NO: 285546 - DNA, 15 bp, Homo sapiens
agcacgtcgcacact

SEQ ID NO: 285547 - DNA, 15 bp, Homo sapiens
aagcacgtcgcacac

SEQ ID NO: 285548 - DNA, 15 bp, Homo sapiens
aaagcacgtcgcaca

SEQ ID NO: 285549 - DNA, 15 bp, Homo sapiens
caaagcacgtcgcac

SEQ ID NO: 285550 - DNA, 15 bp, Homo sapiens
gcaaagcacgtcgca

SEQ ID NO: 285551 - DNA, 15 bp, Homo sapiens
tgcaaagcacgtcgc

SEQ ID NO: 285552 - DNA, 15 bp, Homo sapiens
ctgcaaagcacgtcg

SEQ ID NO: 285553 - DNA, 15 bp, Homo sapiens
cctgcaaagcacgtc

SEQ ID NO: 285554 - DNA, 15 bp, Homo sapiens
ccctgcaaagcacgt

SEQ ID NO: 285555 - DNA, 15 bp, Homo sapiens
cccctgcaaagcacg

SEQ ID NO: 285556 - DNA, 15 bp, Homo sapiens
acccctgcaaagcac

SEQ ID NO: 285557 - DNA, 15 bp, Homo sapiens
gacccctgcaaagca

SEQ ID NO: 285558 - DNA, 15 bp, Homo sapiens
agacccctgcaaagc

SEQ ID NO: 285559 - DNA, 15 bp, Homo sapiens
aagacccctgcaaag

SEQ ID NO: 285560 - DNA, 15 bp, Homo sapiens
caagacccctgcaaa

SEQ ID NO: 285561 - DNA, 15 bp, Homo sapiens
acaagacccctgcaa

SEQ ID NO: 285562 - DNA, 15 bp, Homo sapiens
aacaagacccctgca

SEQ ID NO: 285563 - DNA, 15 bp, Homo sapiens
taacaagacccctgc

SEQ ID NO: 285564 - DNA, 15 bp, Homo sapiens
gtaacaagacccctg

SEQ ID NO: 285565 - DNA, 15 bp, Homo sapiens
cgtaacaagacccct

SEQ ID NO: 285566 - DNA, 15 bp, Homo sapiens
tcgtaacaagacccc

SEQ ID NO: 285567 - DNA, 15 bp, Homo sapiens
ttcgtaacaagaccc

SEQ ID NO: 285568 - DNA, 15 bp, Homo sapiens
gttcgtaacaagacc

SEQ ID NO: 285569 - DNA, 15 bp, Homo sapiens
agttcgtaacaagac

SEQ ID NO: 285570 - DNA, 15 bp, Homo sapiens
aagttcgtaacaaga

SEQ ID NO: 285571 - DNA, 15 bp, Homo sapiens
caagttcgtaacaag

SEQ ID NO: 285572 - DNA, 15 bp, Homo sapiens
gcaagttcgtaacaa

SEQ ID NO: 285573 - DNA, 15 bp, Homo sapiens
ggcaagttcgtaaca

SEQ ID NO: 285574 - DNA, 15 bp, Homo sapiens
tggcaagttcgtaac

SEQ ID NO: 285575 - DNA, 15 bp, Homo sapiens
gtggcaagttcgtaa

SEQ ID NO: 285576 - DNA, 15 bp, Homo sapiens
tgtggcaagttcgta

SEQ ID NO: 285577 - DNA, 15 bp, Homo sapiens
atgtggcaagttcgt

SEQ ID NO: 285578 - DNA, 15 bp, Homo sapiens
tatgtggcaagttcg

SEQ ID NO: 285579 - DNA, 15 bp, Homo sapiens
gtatgtggcaagttc

SEQ ID NO: 285580 - DNA, 15 bp, Homo sapiens
tgtatgtggcaagtt

SEQ ID NO: 285581 - DNA, 15 bp, Homo sapiens
ctgtatgtggcaagt

SEQ ID NO: 285582 - DNA, 15 bp, Homo sapiens
tctgtatgtggcaag

SEQ ID NO: 285583 - DNA, 15 bp, Homo sapiens
ctctgtatgtggcaa

SEQ ID NO: 285584 - DNA, 15 bp, Homo sapiens
gctctgtatgtggca

SEQ ID NO: 285585 - DNA, 15 bp, Homo sapiens
tgctctgtatgtggc

SEQ ID NO: 285586 - DNA, 15 bp, Homo sapiens
atgctctgtatgtgg

SEQ ID NO: 285587 - DNA, 15 bp, Homo sapiens
gatgctctgtatgtg

SEQ ID NO: 285588 - DNA, 15 bp, Homo sapiens
tgatgctctgtatgt

SEQ ID NO: 285589 - DNA, 15 bp, Homo sapiens
gtgatgctctgtatg

SEQ ID NO: 285590 - DNA, 15 bp, Homo sapiens
tgtgatgctctgtat

SEQ ID NO: 285591 - DNA, 15 bp, Homo sapiens
ctgtgatgctctgta

SEQ ID NO: 285592 - DNA, 15 bp, Homo sapiens
cctgtgatgctctgt

SEQ ID NO: 285593 - DNA, 15 bp, Homo sapiens
ccctgtgatgctctg

SEQ ID NO: 285594 - DNA, 15 bp, Homo sapiens
cccctgtgatgctct

SEQ ID NO: 285595 - DNA, 15 bp, Homo sapiens
gcccctgtgatgctc

SEQ ID NO: 285596 - DNA, 15 bp, Homo sapiens
tgcccctgtgatgct

SEQ ID NO: 285597 - DNA, 15 bp, Homo sapiens
atgcccctgtgatgc

SEQ ID NO: 285598 - DNA, 15 bp, Homo sapiens
catgcccctgtgatg

SEQ ID NO: 285599 - DNA, 15 bp, Homo sapiens
tcatgcccctgtgat

SEQ ID NO: 285600 - DNA, 15 bp, Homo sapiens
atcatgcccctgtga

SEQ ID NO: 285601 - DNA, 15 bp, Homo sapiens
catcatgcccctgtg

SEQ ID NO: 285602 - DNA, 15 bp, Homo sapiens
ccatcatgcccctgt

SEQ ID NO: 285603 - DNA, 15 bp, Homo sapiens
cccatcatgcccctg

SEQ ID NO: 285604 - DNA, 15 bp, Homo sapiens
ccccatcatgcccct

SEQ ID NO: 285605 - DNA, 15 bp, Homo sapiens
tccccatcatgcccc

SEQ ID NO: 285606 - DNA, 15 bp, Homo sapiens
ctccccatcatgccc

SEQ ID NO: 285607 - DNA, 15 bp, Homo sapiens
cctccccatcatgcc

SEQ ID NO: 285608 - DNA, 15 bp, Homo sapiens
tcctccccatcatgc

SEQ ID NO: 285609 - DNA, 15 bp, Homo sapiens
ctcctccccatcatg

SEQ ID NO: 285610 - DNA, 15 bp, Homo sapiens
tctcctccccatcat

SEQ ID NO: 285611 - DNA, 15 bp, Homo sapiens
ctctcctccccatca

SEQ ID NO: 285612 - DNA, 15 bp, Homo sapiens
actctcctccccatc

SEQ ID NO: 285613 - DNA, 15 bp, Homo sapiens
gactctcctccccat

SEQ ID NO: 285614 - DNA, 15 bp, Homo sapiens
agactctcctcccca

SEQ ID NO: 285615 - DNA, 15 bp, Homo sapiens
cagactctcctcccc

SEQ ID NO: 285616 - DNA, 15 bp, Homo sapiens
gcagactctcctccc

SEQ ID NO: 285617 - DNA, 15 bp, Homo sapiens
tgcagactctcctcc

SEQ ID NO: 285618 - DNA, 15 bp, Homo sapiens
ctgcagactctcctc

SEQ ID NO: 285619 - DNA, 15 bp, Homo sapiens
actgcagactctcct

SEQ ID NO: 285620 - DNA, 15 bp, Homo sapiens
tactgcagactctcc

SEQ ID NO: 285621 - DNA, 15 bp, Homo sapiens
ttactgcagactctc

SEQ ID NO: 285622 - DNA, 15 bp, Homo sapiens
tttactgcagactct

SEQ ID NO: 285623 - DNA, 15 bp, Homo sapiens
ttttactgcagactc

SEQ ID NO: 285624 - DNA, 15 bp, Homo sapiens
attttactgcagact

SEQ ID NO: 285625 - DNA, 15 bp, Homo sapiens
cattttactgcagac

SEQ ID NO: 285626 - DNA, 15 bp, Homo sapiens
tcattttactgcaga

SEQ ID NO: 285627 - DNA, 15 bp, Homo sapiens
ctcattttactgcag

SEQ ID NO: 285628 - DNA, 15 bp, Homo sapiens
gctcattttactgca

SEQ ID NO: 285629 - DNA, 15 bp, Homo sapiens
agctcattttactgc

SEQ ID NO: 285630 - DNA, 15 bp, Homo sapiens
aagctcattttactg

SEQ ID NO: 285631 - DNA, 15 bp, Homo sapiens
caagctcattttact

SEQ ID NO: 285632 - DNA, 15 bp, Homo sapiens
acaagctcattttac

SEQ ID NO: 285633 - DNA, 15 bp, Homo sapiens
cacaagctcatttta

SEQ ID NO: 285634 - DNA, 15 bp, Homo sapiens
gcacaagctcatttt

SEQ ID NO: 285635 - DNA, 15 bp, Homo sapiens
agcacaagctcattt

SEQ ID NO: 285636 - DNA, 15 bp, Homo sapiens
cagcacaagctcatt

SEQ ID NO: 285637 - DNA, 15 bp, Homo sapiens
gcagcacaagctcat

SEQ ID NO: 285638 - DNA, 15 bp, Homo sapiens
agcagcacaagctca

SEQ ID NO: 285639 - DNA, 15 bp, Homo sapiens
gagcagcacaagctc

SEQ ID NO: 285640 - DNA, 15 bp, Homo sapiens
cgagcagcacaagct

SEQ ID NO: 285641 - DNA, 15 bp, Homo sapiens
gcgagcagcacaagc

SEQ ID NO: 285642 - DNA, 15 bp, Homo sapiens
tgcgagcagcacaag

SEQ ID NO: 285643 - DNA, 15 bp, Homo sapiens
ttgcgagcagcacaa

SEQ ID NO: 285644 - DNA, 15 bp, Homo sapiens
tttgcgagcagcaca

SEQ ID NO: 285645 - DNA, 15 bp, Homo sapiens
gtttgcgagcagcac

SEQ ID NO: 285646 - DNA, 15 bp, Homo sapiens
tgtttgcgagcagca

SEQ ID NO: 285647 - DNA, 15 bp, Homo sapiens
ctgtttgcgagcagc

SEQ ID NO: 285648 - DNA, 15 bp, Homo sapiens
cctgtttgcgagcag

SEQ ID NO: 285649 - DNA, 15 bp, Homo sapiens
gcctgtttgcgagca

SEQ ID NO: 285650 - DNA, 15 bp, Homo sapiens
ggcctgtttgcgagc

SEQ ID NO: 285651 - DNA, 15 bp, Homo sapiens
tggcctgtttgcgag

SEQ ID NO: 285652 - DNA, 15 bp, Homo sapiens
gtggcctgtttgcga

SEQ ID NO: 285653 - DNA, 15 bp, Homo sapiens
tgtggcctgtttgcg

SEQ ID NO: 285654 - DNA, 15 bp, Homo sapiens
ctgtggcctgtttgc

SEQ ID NO: 285655 - DNA, 15 bp, Homo sapiens
actgtggcctgtttg

SEQ ID NO: 285656 - DNA, 15 bp, Homo sapiens
cactgtggcctgttt

SEQ ID NO: 285657 - DNA, 15 bp, Homo sapiens
acactgtggcctgtt

SEQ ID NO: 285658 - DNA, 15 bp, Homo sapiens
cacactgtggcctgt

SEQ ID NO: 285659 - DNA, 15 bp, Homo sapiens
ccacactgtggcctg

SEQ ID NO: 285660 - DNA, 15 bp, Homo sapiens
cccacactgtggcct

SEQ ID NO: 285661 - DNA, 15 bp, Homo sapiens
gcccacactgtggcc

SEQ ID NO: 285662 - DNA, 15 bp, Homo sapiens
tgcccacactgtggc

SEQ ID NO: 285663 - DNA, 15 bp, Homo sapiens
atgcccacactgtgg

SEQ ID NO: 285664 - DNA, 15 bp, Homo sapiens
catgcccacactgtg

SEQ ID NO: 285665 - DNA, 15 bp, Homo sapiens
ccatgcccacactgt

SEQ ID NO: 285666 - DNA, 15 bp, Homo sapiens
accatgcccacactg

SEQ ID NO: 285667 - DNA, 15 bp, Homo sapiens
aaccatgcccacact

SEQ ID NO: 285668 - DNA, 15 bp, Homo sapiens
caaccatgcccacac

SEQ ID NO: 285669 - DNA, 15 bp, Homo sapiens
acaaccatgcccaca

SEQ ID NO: 285670 - DNA, 15 bp, Homo sapiens
aacaaccatgcccac

SEQ ID NO: 285671 - DNA, 15 bp, Homo sapiens
caacaaccatgccca

SEQ ID NO: 285672 - DNA, 15 bp, Homo sapiens
ccaacaaccatgccc

SEQ ID NO: 285673 - DNA, 15 bp, Homo sapiens
gccaacaaccatgcc

SEQ ID NO: 285674 - DNA, 15 bp, Homo sapiens
ggccaacaaccatgc

SEQ ID NO: 285675 - DNA, 15 bp, Homo sapiens
aggccaacaaccatg

SEQ ID NO: 285676 - DNA, 15 bp, Homo sapiens
caggccaacaaccat

SEQ ID NO: 285677 - DNA, 15 bp, Homo sapiens
tcaggccaacaacca

SEQ ID NO: 285678 - DNA, 15 bp, Homo sapiens
ttcaggccaacaacc

SEQ ID NO: 285679 - DNA, 15 bp, Homo sapiens
cttcaggccaacaac

SEQ ID NO: 285680 - DNA, 15 bp, Homo sapiens
tcttcaggccaacaa

SEQ ID NO: 285681 - DNA, 15 bp, Homo sapiens
gtcttcaggccaaca

SEQ ID NO: 285682 - DNA, 15 bp, Homo sapiens
ggtcttcaggccaac

SEQ ID NO: 285683 - DNA, 15 bp, Homo sapiens
tggtcttcaggccaa

SEQ ID NO: 285684 - DNA, 15 bp, Homo sapiens
ctggtcttcaggcca

SEQ ID NO: 285685 - DNA, 15 bp, Homo sapiens
gctggtcttcaggcc

SEQ ID NO: 285686 - DNA, 15 bp, Homo sapiens
tgctggtcttcaggc

SEQ ID NO: 285687 - DNA, 15 bp, Homo sapiens
atgctggtcttcagg

SEQ ID NO: 285688 - DNA, 15 bp, Homo sapiens
aatgctggtcttcag

SEQ ID NO: 285689 - DNA, 15 bp, Homo sapiens
aaatgctggtcttca

SEQ ID NO: 285690 - DNA, 15 bp, Homo sapiens
caaatgctggtcttc

SEQ ID NO: 285691 - DNA, 15 bp, Homo sapiens
gcaaatgctggtctt

SEQ ID NO: 285692 - DNA, 15 bp, Homo sapiens
ggcaaatgctggtct

SEQ ID NO: 285693 - DNA, 15 bp, Homo sapiens
aggcaaatgctggtc

SEQ ID NO: 285694 - DNA, 15 bp, Homo sapiens
gaggcaaatgctggt

SEQ ID NO: 285695 - DNA, 15 bp, Homo sapiens
ggaggcaaatgctgg

SEQ ID NO: 285696 - DNA, 15 bp, Homo sapiens
tggaggcaaatgctg

SEQ ID NO: 285697 - DNA, 15 bp, Homo sapiens
ctggaggcaaatgct

SEQ ID NO: 285698 - DNA, 15 bp, Homo sapiens
gctggaggcaaatgc

SEQ ID NO: 285699 - DNA, 15 bp, Homo sapiens
agctggaggcaaatg

SEQ ID NO: 285700 - DNA, 15 bp, Homo sapiens
gagctggaggcaaat

SEQ ID NO: 285701 - DNA, 15 bp, Homo sapiens
ggagctggaggcaaa

SEQ ID NO: 285702 - DNA, 15 bp, Homo sapiens
cggagctggaggcaa

SEQ ID NO: 285703 - DNA, 15 bp, Homo sapiens
acggagctggaggca

SEQ ID NO: 285704 - DNA, 15 bp, Homo sapiens
cacggagctggaggc

SEQ ID NO: 285705 - DNA, 15 bp, Homo sapiens
gcacggagctggagg

SEQ ID NO: 285706 - DNA, 15 bp, Homo sapiens
agcacggagctggag

SEQ ID NO: 285707 - DNA, 15 bp, Homo sapiens
cagcacggagctgga

SEQ ID NO: 285708 - DNA, 15 bp, Homo sapiens
acagcacggagctgg

SEQ ID NO: 285709 - DNA, 15 bp, Homo sapiens
cacagcacggagctg

SEQ ID NO: 285710 - DNA, 15 bp, Homo sapiens
tcacagcacggagct

SEQ ID NO: 285711 - DNA, 15 bp, Homo sapiens
atcacagcacggagc

SEQ ID NO: 285712 - DNA, 15 bp, Homo sapiens
aatcacagcacggag

SEQ ID NO: 285713 - DNA, 15 bp, Homo sapiens
aaatcacagcacgga

SEQ ID NO: 285714 - DNA, 15 bp, Homo sapiens
gaaatcacagcacgg

SEQ ID NO: 285715 - DNA, 15 bp, Homo sapiens
ggaaatcacagcacg

SEQ ID NO: 285716 - DNA, 15 bp, Homo sapiens
tggaaatcacagcac

SEQ ID NO: 285717 - DNA, 15 bp, Homo sapiens
atggaaatcacagca

SEQ ID NO: 285718 - DNA, 15 bp, Homo sapiens
catggaaatcacagc

SEQ ID NO: 285719 - DNA, 15 bp, Homo sapiens
ccatggaaatcacag

SEQ ID NO: 285720 - DNA, 15 bp, Homo sapiens
tccatggaaatcaca

SEQ ID NO: 285721 - DNA, 15 bp, Homo sapiens
gtccatggaaatcac

SEQ ID NO: 285722 - DNA, 15 bp, Homo sapiens
agtccatggaaatca

SEQ ID NO: 285723 - DNA, 15 bp, Homo sapiens
gagtccatggaaatc

SEQ ID NO: 285724 - DNA, 15 bp, Homo sapiens
agagtccatggaaat

SEQ ID NO: 285725 - DNA, 15 bp, Homo sapiens
tagagtccatggaaa

SEQ ID NO: 285726 - DNA, 15 bp, Homo sapiens
ctagagtccatggaa

SEQ ID NO: 285727 - DNA, 15 bp, Homo sapiens
cctagagtccatgga

SEQ ID NO: 285728 - DNA, 15 bp, Homo sapiens
acctagagtccatgg

SEQ ID NO: 285729 - DNA, 15 bp, Homo sapiens
tacctagagtccatg

SEQ ID NO: 285730 - DNA, 15 bp, Homo sapiens
gtacctagagtccat

SEQ ID NO: 285731 - DNA, 15 bp, Homo sapiens
cgtacctagagtcca

SEQ ID NO: 285732 - DNA, 15 bp, Homo sapiens
acgtacctagagtcc

SEQ ID NO: 285733 - DNA, 15 bp, Homo sapiens
aacgtacctagagtc

SEQ ID NO: 285734 - DNA, 15 bp, Homo sapiens
caacgtacctagagt

SEQ ID NO: 285735 - DNA, 15 bp, Homo sapiens
ccaacgtacctagag

SEQ ID NO: 285736 - DNA, 15 bp, Homo sapiens
gccaacgtacctaga

SEQ ID NO: 285737 - DNA, 15 bp, Homo sapiens
agccaacgtacctag

SEQ ID NO: 285738 - DNA, 15 bp, Homo sapiens
aagccaacgtaccta

SEQ ID NO: 285739 - DNA, 15 bp, Homo sapiens
aaagccaacgtacct

SEQ ID NO: 285740 - DNA, 15 bp, Homo sapiens
caaagccaacgtacc

SEQ ID NO: 285741 - DNA, 15 bp, Homo sapiens
acaaagccaacgtac

SEQ ID NO: 285742 - DNA, 15 bp, Homo sapiens
aacaaagccaacgta

SEQ ID NO: 285743 - DNA, 15 bp, Homo sapiens
caacaaagccaacgt

SEQ ID NO: 285744 - DNA, 15 bp, Homo sapiens
tcaacaaagccaacg

SEQ ID NO: 285745 - DNA, 15 bp, Homo sapiens
ctcaacaaagccaac

SEQ ID NO: 285746 - DNA, 15 bp, Homo sapiens
gctcaacaaagccaa

SEQ ID NO: 285747 - DNA, 15 bp, Homo sapiens
ggctcaacaaagcca

SEQ ID NO: 285748 - DNA, 15 bp, Homo sapiens
tggctcaacaaagcc

SEQ ID NO: 285749 - DNA, 15 bp, Homo sapiens
ttggctcaacaaagc

SEQ ID NO: 285750 - DNA, 15 bp, Homo sapiens
attggctcaacaaag

SEQ ID NO: 285751 - DNA, 15 bp, Homo sapiens
aattggctcaacaaa

SEQ ID NO: 285752 - DNA, 15 bp, Homo sapiens
gaattggctcaacaa

SEQ ID NO: 285753 - DNA, 15 bp, Homo sapiens
agaattggctcaaca

SEQ ID NO: 285754 - DNA, 15 bp, Homo sapiens
aagaattggctcaac

SEQ ID NO: 285755 - DNA, 15 bp, Homo sapiens
gaagaattggctcaa

SEQ ID NO: 285756 - DNA, 15 bp, Homo sapiens
ggaagaattggctca

SEQ ID NO: 285757 - DNA, 15 bp, Homo sapiens
tggaagaattggctc

SEQ ID NO: 285758 - DNA, 15 bp, Homo sapiens
atggaagaattggct

SEQ ID NO: 285759 - DNA, 15 bp, Homo sapiens
tatggaagaattggc

SEQ ID NO: 285760 - DNA, 15 bp, Homo sapiens
ttatggaagaattgg

SEQ ID NO: 285761 - DNA, 15 bp, Homo sapiens
cttatggaagaattg

SEQ ID NO: 285762 - DNA, 15 bp, Homo sapiens
tcttatggaagaatt

SEQ ID NO: 285763 - DNA, 15 bp, Homo sapiens
ttcttatggaagaat

SEQ ID NO: 285764 - DNA, 15 bp, Homo sapiens
attcttatggaagaa

SEQ ID NO: 285765 - DNA, 15 bp, Homo sapiens
tattcttatggaaga

SEQ ID NO: 285766 - DNA, 15 bp, Homo sapiens
atattcttatggaag

SEQ ID NO: 285767 - DNA, 15 bp, Homo sapiens
aatattcttatggaa

SEQ ID NO: 285768 - DNA, 15 bp, Homo sapiens
taatattcttatgga

SEQ ID NO: 285769 - DNA, 15 bp, Homo sapiens
ttaatattcttatgg

SEQ ID NO: 285770 - DNA, 15 bp, Homo sapiens
tttaatattcttatg

SEQ ID NO: 285771 - DNA, 15 bp, Homo sapiens
atttaatattcttat

SEQ ID NO: 285772 - DNA, 15 bp, Homo sapiens
tatttaatattctta

SEQ ID NO: 285773 - DNA, 15 bp, Homo sapiens
atatttaatattctt

SEQ ID NO: 285774 - DNA, 15 bp, Homo sapiens
aatatttaatattct

SEQ ID NO: 285775 - DNA, 15 bp, Homo sapiens
taatatttaatattc

SEQ ID NO: 285776 - DNA, 15 bp, Homo sapiens
ataatatttaatatt

SEQ ID NO: 285777 - DNA, 15 bp, Homo sapiens
tataatatttaatat

SEQ ID NO: 285778 - DNA, 15 bp, Homo sapiens
atataatatttaata

SEQ ID NO: 285779 - DNA, 15 bp, Homo sapiens
aatataatatttaat

SEQ ID NO: 285780 - DNA, 15 bp, Homo sapiens
aaatataatatttaa

SEQ ID NO: 285781 - DNA, 15 bp, Homo sapiens
aaaatataatattta

SEQ ID NO: 285782 - DNA, 15 bp, Homo sapiens
caaaatataatattt

SEQ ID NO: 285783 - DNA, 15 bp, Homo sapiens
gcaaaatataatatt

SEQ ID NO: 285784 - DNA, 15 bp, Homo sapiens
cgcaaaatataatat

SEQ ID NO: 285785 - DNA, 15 bp, Homo sapiens
ccgcaaaatataata

SEQ ID NO: 285786 - DNA, 15 bp, Homo sapiens
gccgcaaaatataat

SEQ ID NO: 285787 - DNA, 15 bp, Homo sapiens
agccgcaaaatataa

SEQ ID NO: 285788 - DNA, 15 bp, Homo sapiens
cagccgcaaaatata

SEQ ID NO: 285789 - DNA, 15 bp, Homo sapiens
gcagccgcaaaatat

SEQ ID NO: 285790 - DNA, 15 bp, Homo sapiens
tgcagccgcaaaata

SEQ ID NO: 285791 - DNA, 15 bp, Homo sapiens
atgcagccgcaaaat

SEQ ID NO: 285792 - DNA, 15 bp, Homo sapiens
aatgcagccgcaaaa

SEQ ID NO: 285793 - DNA, 15 bp, Homo sapiens
caatgcagccgcaaa

SEQ ID NO: 285794 - DNA, 15 bp, Homo sapiens
ccaatgcagccgcaa

SEQ ID NO: 285795 - DNA, 15 bp, Homo sapiens
accaatgcagccgca

SEQ ID NO: 285796 - DNA, 15 bp, Homo sapiens
taccaatgcagccgc

SEQ ID NO: 285797 - DNA, 15 bp, Homo sapiens
ataccaatgcagccg

SEQ ID NO: 285798 - DNA, 15 bp, Homo sapiens
tataccaatgcagcc

SEQ ID NO: 285799 - DNA, 15 bp, Homo sapiens
ttataccaatgcagc

SEQ ID NO: 285800 - DNA, 15 bp, Homo sapiens
cttataccaatgcag

SEQ ID NO: 285801 - DNA, 15 bp, Homo sapiens
tcttataccaatgca

SEQ ID NO: 285802 - DNA, 15 bp, Homo sapiens
attcttataccaatg

SEQ ID NO: 285803 - DNA, 15 bp, Homo sapiens
cattcttataccaat

SEQ ID NO: 285804 - DNA, 15 bp, Homo sapiens
tcattcttataccaa

SEQ ID NO: 285805 - DNA, 15 bp, Homo sapiens
ttcattcttatacca

SEQ ID NO: 285806 - DNA, 15 bp, Homo sapiens
attcattcttatacc

SEQ ID NO: 285807 - DNA, 15 bp, Homo sapiens
tattcattcttatac

SEQ ID NO: 285808 - DNA, 15 bp, Homo sapiens
atattcattcttata

SEQ ID NO: 285809 - DNA, 15 bp, Homo sapiens
tatattcattcttat

SEQ ID NO: 285810 - DNA, 15 bp, Homo sapiens
ttatattcattctta

SEQ ID NO: 285811 - DNA, 15 bp, Homo sapiens
attatattcattctt

SEQ ID NO: 285812 - DNA, 15 bp, Homo sapiens
gattatattcattct

SEQ ID NO: 285813 - DNA, 15 bp, Homo sapiens
ggattatattcattc

SEQ ID NO: 285814 - DNA, 15 bp, Homo sapiens
tggattatattcatt

SEQ ID NO: 285815 - DNA, 15 bp, Homo sapiens
ctggattatattcat

SEQ ID NO: 285816 - DNA, 15 bp, Homo sapiens
cctggattatattca

SEQ ID NO: 285817 - DNA, 15 bp, Homo sapiens
gcctggattatattc

SEQ ID NO: 285818 - DNA, 15 bp, Homo sapiens
agcctggattatatt

SEQ ID NO: 285819 - DNA, 15 bp, Homo sapiens
cagcctggattatat

SEQ ID NO: 285820 - DNA, 15 bp, Homo sapiens
ccagcctggattata

SEQ ID NO: 285821 - DNA, 15 bp, Homo sapiens
tccagcctggattat

SEQ ID NO: 285822 - DNA, 15 bp, Homo sapiens
atccagcctggatta

SEQ ID NO: 285823 - DNA, 15 bp, Homo sapiens
aatccagcctggatt

SEQ ID NO: 285824 - DNA, 15 bp, Homo sapiens
aaatccagcctggat

SEQ ID NO: 285825 - DNA, 15 bp, Homo sapiens
taaatccagcctgga

SEQ ID NO: 285826 - DNA, 15 bp, Homo sapiens
ataaatccagcctgg

SEQ ID NO: 285827 - DNA, 15 bp, Homo sapiens
aataaatccagcctg

SEQ ID NO: 285828 - DNA, 15 bp, Homo sapiens
taataaatccagcct

SEQ ID NO: 285829 - DNA, 15 bp, Homo sapiens
ataataaatccagcc

SEQ ID NO: 285830 - DNA, 15 bp, Homo sapiens
aataataaatccagc

SEQ ID NO: 285831 - DNA, 15 bp, Homo sapiens
caataataaatccag

SEQ ID NO: 285832 - DNA, 15 bp, Homo sapiens
acaataataaatcca

SEQ ID NO: 285833 - DNA, 15 bp, Homo sapiens
aacaataataaatcc

SEQ ID NO: 285834 - DNA, 15 bp, Homo sapiens
caacaataataaatc

SEQ ID NO: 285835 - DNA, 15 bp, Homo sapiens
acaacaataataaat

SEQ ID NO: 285836 - DNA, 15 bp, Homo sapiens
taacaacaataataa

SEQ ID NO: 285837 - DNA, 15 bp, Homo sapiens
ataacaacaataata

SEQ ID NO: 285838 - DNA, 15 bp, Homo sapiens
taataacaacaataa

SEQ ID NO: 285839 - DNA, 15 bp, Homo sapiens
ataataacaacaata

SEQ ID NO: 285840 - DNA, 15 bp, Homo sapiens
aataataacaacaat

SEQ ID NO: 285841 - DNA, 15 bp, Homo sapiens
taataataacaacaa

SEQ ID NO: 285842 - DNA, 15 bp, Homo sapiens
gtaataataacaaca

SEQ ID NO: 285843 - DNA, 15 bp, Homo sapiens
agtaataataacaac

SEQ ID NO: 285844 - DNA, 15 bp, Homo sapiens
tagtaataataacaa

SEQ ID NO: 285845 - DNA, 15 bp, Homo sapiens
atagtaataataaca

SEQ ID NO: 285846 - DNA, 15 bp, Homo sapiens
aatagtaataataac

SEQ ID NO: 285847 - DNA, 15 bp, Homo sapiens
taatagtaataataa

SEQ ID NO: 285848 - DNA, 15 bp, Homo sapiens
ataatagtaataata

SEQ ID NO: 285849 - DNA, 15 bp, Homo sapiens
aataatagtaataat

SEQ ID NO: 285850 - DNA, 15 bp, Homo sapiens
aaataatagtaataa

SEQ ID NO: 285851 - DNA, 15 bp, Homo sapiens
aaaataatagtaata

SEQ ID NO: 285852 - DNA, 15 bp, Homo sapiens
aaaaataatagtaat

SEQ ID NO: 285853 - DNA, 15 bp, Homo sapiens
taaaaataatagtaa

SEQ ID NO: 285854 - DNA, 15 bp, Homo sapiens
ctaaaaataatagta

SEQ ID NO: 285855 - DNA, 15 bp, Homo sapiens
tctaaaaataatagt

SEQ ID NO: 285856 - DNA, 15 bp, Homo sapiens
ctctaaaaataatag

SEQ ID NO: 285857 - DNA, 15 bp, Homo sapiens
tctctaaaaataata

SEQ ID NO: 285858 - DNA, 15 bp, Homo sapiens
gtctctaaaaataat

SEQ ID NO: 285859 - DNA, 15 bp, Homo sapiens
tgtctctaaaaataa

SEQ ID NO: 285860 - DNA, 15 bp, Homo sapiens
gtgtctctaaaaata

SEQ ID NO: 285861 - DNA, 15 bp, Homo sapiens
cgtgtctctaaaaat

SEQ ID NO: 285862 - DNA, 15 bp, Homo sapiens
ccgtgtctctaaaaa

SEQ ID NO: 285863 - DNA, 15 bp, Homo sapiens
accgtgtctctaaaa

SEQ ID NO: 285864 - DNA, 15 bp, Homo sapiens
gaccgtgtctctaaa

SEQ ID NO: 285865 - DNA, 15 bp, Homo sapiens
agaccgtgtctctaa

SEQ ID NO: 285866 - DNA, 15 bp, Homo sapiens
gagaccgtgtctcta

SEQ ID NO: 285867 - DNA, 15 bp, Homo sapiens
tgagaccgtgtctct

SEQ ID NO: 285868 - DNA, 15 bp, Homo sapiens
gtgagaccgtgtctc

SEQ ID NO: 285869 - DNA, 15 bp, Homo sapiens
agtgagaccgtgtct

SEQ ID NO: 285870 - DNA, 15 bp, Homo sapiens
gagtgagaccgtgtc

SEQ ID NO: 285871 - DNA, 15 bp, Homo sapiens
agagtgagaccgtgt

SEQ ID NO: 285872 - DNA, 15 bp, Homo sapiens
cagagtgagaccgtg

SEQ ID NO: 285873 - DNA, 15 bp, Homo sapiens
acagagtgagaccgt

SEQ ID NO: 285874 - DNA, 15 bp, Homo sapiens
gacagagtgagaccg

SEQ ID NO: 285875 - DNA, 15 bp, Homo sapiens
tgacagagtgagacc

SEQ ID NO: 285876 - DNA, 15 bp, Homo sapiens
tcagcctgggtgaca

SEQ ID NO: 285877 - DNA, 15 bp, Homo sapiens
ttcagcctgggtgac

SEQ ID NO: 285878 - DNA, 15 bp, Homo sapiens
cttcagcctgggtga

SEQ ID NO: 285879 - DNA, 15 bp, Homo sapiens
acttcagcctgggtg

SEQ ID NO: 285880 - DNA, 15 bp, Homo sapiens
cacttcagcctgggt

SEQ ID NO: 285881 - DNA, 15 bp, Homo sapiens
acacttcagcctggg

SEQ ID NO: 285882 - DNA, 15 bp, Homo sapiens
tacacttcagcctgg

SEQ ID NO: 285883 - DNA, 15 bp, Homo sapiens
gtacacttcagcctg

SEQ ID NO: 285884 - DNA, 15 bp, Homo sapiens
agtacacttcagcct

SEQ ID NO: 285885 - DNA, 15 bp, Homo sapiens
cagtacacttcagcc

SEQ ID NO: 285886 - DNA, 15 bp, Homo sapiens
tcagtacacttcagc

SEQ ID NO: 285887 - DNA, 15 bp, Homo sapiens
gtcagtacacttcag

SEQ ID NO: 285888 - DNA, 15 bp, Homo sapiens
tgtcagtacacttca

SEQ ID NO: 285889 - DNA, 15 bp, Homo sapiens
atgtcagtacacttc

SEQ ID NO: 285890 - DNA, 15 bp, Homo sapiens
catgtcagtacactt

SEQ ID NO: 285891 - DNA, 15 bp, Homo sapiens
tcatgtcagtacact

SEQ ID NO: 285892 - DNA, 15 bp, Homo sapiens
atcatgtcagtacac

SEQ ID NO: 285893 - DNA, 15 bp, Homo sapiens
gatcatgtcagtaca

SEQ ID NO: 285894 - DNA, 15 bp, Homo sapiens
tgatcatgtcagtac

SEQ ID NO: 285895 - DNA, 15 bp, Homo sapiens
atgatcatgtcagta

SEQ ID NO: 285896 - DNA, 15 bp, Homo sapiens
tatgatcatgtcagt

SEQ ID NO: 285897 - DNA, 15 bp, Homo sapiens
ctatgatcatgtcag

SEQ ID NO: 285898 - DNA, 15 bp, Homo sapiens
gctatgatcatgtca

SEQ ID NO: 285899 - DNA, 15 bp, Homo sapiens
agctatgatcatgtc

SEQ ID NO: 285900 - DNA, 15 bp, Homo sapiens
gagctatgatcatgt

SEQ ID NO: 285901 - DNA, 15 bp, Homo sapiens
tgagctatgatcatg

SEQ ID NO: 285902 - DNA, 15 bp, Homo sapiens
gtgagctatgatcat

SEQ ID NO: 285903 - DNA, 15 bp, Homo sapiens
agtgagctatgatca

SEQ ID NO: 285904 - DNA, 15 bp, Homo sapiens
cagtgagctatgatc

SEQ ID NO: 285905 - DNA, 15 bp, Homo sapiens
ttacagtgagctatg

SEQ ID NO: 285906 - DNA, 15 bp, Homo sapiens
gttacagtgagctat

SEQ ID NO: 285907 - DNA, 15 bp, Homo sapiens
ggttacagtgagcta

SEQ ID NO: 285908 - DNA, 15 bp, Homo sapiens
aggttacagtgagct

SEQ ID NO: 285909 - DNA, 15 bp, Homo sapiens
caaggttacagtgag

SEQ ID NO: 285910 - DNA, 15 bp, Homo sapiens
tcaaggttacagtga

SEQ ID NO: 285911 - DNA, 15 bp, Homo sapiens
gtcaaggttacagtg

SEQ ID NO: 285912 - DNA, 15 bp, Homo sapiens
ggtcaaggttacagt

SEQ ID NO: 285913 - DNA, 15 bp, Homo sapiens
aggtcaaggttacag

SEQ ID NO: 285914 - DNA, 15 bp, Homo sapiens
gaggtcaaggttaca

SEQ ID NO: 285915 - DNA, 15 bp, Homo sapiens
agaggtcaaggttac

SEQ ID NO: 285916 - DNA, 15 bp, Homo sapiens
aagaggtcaaggtta

SEQ ID NO: 285917 - DNA, 15 bp, Homo sapiens
aaagaggtcaaggtt

SEQ ID NO: 285918 - DNA, 15 bp, Homo sapiens
caaagaggtcaaggt

SEQ ID NO: 285919 - DNA, 15 bp, Homo sapiens
ccaaagaggtcaagg

SEQ ID NO: 285920 - DNA, 15 bp, Homo sapiens
gccaaagaggtcaag

SEQ ID NO: 285921 - DNA, 15 bp, Homo sapiens
agccaaagaggtcaa

SEQ ID NO: 285922 - DNA, 15 bp, Homo sapiens
gagccaaagaggtca

SEQ ID NO: 285923 - DNA, 15 bp, Homo sapiens
tgagccaaagaggtc

SEQ ID NO: 285924 - DNA, 15 bp, Homo sapiens
ttgagccaaagaggt

SEQ ID NO: 285925 - DNA, 15 bp, Homo sapiens
cttgagccaaagagg

SEQ ID NO: 285926 - DNA, 15 bp, Homo sapiens
acttgagccaaagag

SEQ ID NO: 285927 - DNA, 15 bp, Homo sapiens
cacttgagccaaaga

SEQ ID NO: 285928 - DNA, 15 bp, Homo sapiens
tcacttgagccaaag

SEQ ID NO: 285929 - DNA, 15 bp, Homo sapiens
atcacttgagccaaa

SEQ ID NO: 285930 - DNA, 15 bp, Homo sapiens
gatcacttgagccaa

SEQ ID NO: 285931 - DNA, 15 bp, Homo sapiens
ggatcacttgagcca

SEQ ID NO: 285932 - DNA, 15 bp, Homo sapiens
aaggatcacttgagc

SEQ ID NO: 285933 - DNA, 15 bp, Homo sapiens
gaaggatcacttgag

SEQ ID NO: 285934 - DNA, 15 bp, Homo sapiens
tgaaggatcacttga

SEQ ID NO: 285935 - DNA, 15 bp, Homo sapiens
ctgaaggatcacttg

SEQ ID NO: 285936 - DNA, 15 bp, Homo sapiens
actgaaggatcactt

SEQ ID NO: 285937 - DNA, 15 bp, Homo sapiens
gactgaaggatcact

SEQ ID NO: 285938 - DNA, 15 bp, Homo sapiens
agactgaaggatcac

SEQ ID NO: 285939 - DNA, 15 bp, Homo sapiens
gagactgaaggatca

SEQ ID NO: 285940 - DNA, 15 bp, Homo sapiens
tgagactgaaggatc

SEQ ID NO: 285941 - DNA, 15 bp, Homo sapiens
ctgagactgaaggat

SEQ ID NO: 285942 - DNA, 15 bp, Homo sapiens
actgagactgaagga

SEQ ID NO: 285943 - DNA, 15 bp, Homo sapiens
gactgagactgaagg

SEQ ID NO: 285944 - DNA, 15 bp, Homo sapiens
agactgagactgaag

SEQ ID NO: 285945 - DNA, 15 bp, Homo sapiens
gagactgagactgaa

SEQ ID NO: 285946 - DNA, 15 bp, Homo sapiens
ggagactgagactga

SEQ ID NO: 285947 - DNA, 15 bp, Homo sapiens
aggagactgagactg

SEQ ID NO: 285948 - DNA, 15 bp, Homo sapiens
caggagactgagact

SEQ ID NO: 285949 - DNA, 15 bp, Homo sapiens
tcaggagactgagac

SEQ ID NO: 285950 - DNA, 15 bp, Homo sapiens
ctcaggagactgaga

SEQ ID NO: 285951 - DNA, 15 bp, Homo sapiens
actcaggagactgag

SEQ ID NO: 285952 - DNA, 15 bp, Homo sapiens
tactcaggagactga

SEQ ID NO: 285953 - DNA, 15 bp, Homo sapiens
ctactcaggagactg

SEQ ID NO: 285954 - DNA, 15 bp, Homo sapiens
actactcaggagact

SEQ ID NO: 285955 - DNA, 15 bp, Homo sapiens
aactactcaggagac

SEQ ID NO: 285956 - DNA, 15 bp, Homo sapiens
caactactcaggaga

SEQ ID NO: 285957 - DNA, 15 bp, Homo sapiens
tcctgtaatcccaac

SEQ ID NO: 285958 - DNA, 15 bp, Homo sapiens
ttcctgtaatcccaa

SEQ ID NO: 285959 - DNA, 15 bp, Homo sapiens
attcctgtaatccca

SEQ ID NO: 285960 - DNA, 15 bp, Homo sapiens
cattcctgtaatccc

SEQ ID NO: 285961 - DNA, 15 bp, Homo sapiens
gcattcctgtaatcc

SEQ ID NO: 285962 - DNA, 15 bp, Homo sapiens
tgcattcctgtaatc

SEQ ID NO: 285963 - DNA, 15 bp, Homo sapiens
gtgcattcctgtaat

SEQ ID NO: 285964 - DNA, 15 bp, Homo sapiens
ggtgcattcctgtaa

SEQ ID NO: 285965 - DNA, 15 bp, Homo sapiens
tggtgcattcctgta

SEQ ID NO: 285966 - DNA, 15 bp, Homo sapiens
gtggtgcattcctgt

SEQ ID NO: 285967 - DNA, 15 bp, Homo sapiens
ggtggtgcattcctg

SEQ ID NO: 285968 - DNA, 15 bp, Homo sapiens
tggtggtgcattcct

SEQ ID NO: 285969 - DNA, 15 bp, Homo sapiens
atggtggtgcattcc

SEQ ID NO: 285970 - DNA, 15 bp, Homo sapiens
catggtggtgcattc

SEQ ID NO: 285971 - DNA, 15 bp, Homo sapiens
ccatggtggtgcatt

SEQ ID NO: 285972 - DNA, 15 bp, Homo sapiens
gccatggtggtgcat

SEQ ID NO: 285973 - DNA, 15 bp, Homo sapiens
agccatggtggtgca

SEQ ID NO: 285974 - DNA, 15 bp, Homo sapiens
cagccatggtggtgc

SEQ ID NO: 285975 - DNA, 15 bp, Homo sapiens
ccagccatggtggtg

SEQ ID NO: 285976 - DNA, 15 bp, Homo sapiens
gccagccatggtggt

SEQ ID NO: 285977 - DNA, 15 bp, Homo sapiens
tgccagccatggtgg

SEQ ID NO: 285978 - DNA, 15 bp, Homo sapiens
ttgccagccatggtg

SEQ ID NO: 285979 - DNA, 15 bp, Homo sapiens
tttgccagccatggt

SEQ ID NO: 285980 - DNA, 15 bp, Homo sapiens
atttgccagccatgg

SEQ ID NO: 285981 - DNA, 15 bp, Homo sapiens
aatttgccagccatg

SEQ ID NO: 285982 - DNA, 15 bp, Homo sapiens
aaatttgccagccat

SEQ ID NO: 285983 - DNA, 15 bp, Homo sapiens
aaaatttgccagcca

SEQ ID NO: 285984 - DNA, 15 bp, Homo sapiens
aaaaatttgccagcc

SEQ ID NO: 285985 - DNA, 15 bp, Homo sapiens
aaaaaatttgccagc

SEQ ID NO: 285986 - DNA, 15 bp, Homo sapiens
aaaaaaatttgccag

SEQ ID NO: 285987 - DNA, 15 bp, Homo sapiens
aaaaaaaatttgcca

SEQ ID NO: 285988 - DNA, 15 bp, Homo sapiens
aaaaaaaaatttgcc

SEQ ID NO: 285989 - DNA, 15 bp, Homo sapiens
aaaaaaaaaatttgc

SEQ ID NO: 285990 - DNA, 15 bp, Homo sapiens
aaaaaaaaaaatttg

SEQ ID NO: 285991 - DNA, 15 bp, Homo sapiens
aaaaaaaaaaaattt

SEQ ID NO: 285992 - DNA, 15 bp, Homo sapiens
gaaaaaaaaaaaatt

SEQ ID NO: 285993 - DNA, 15 bp, Homo sapiens
agaaaaaaaaaaaat

SEQ ID NO: 285994 - DNA, 15 bp, Homo sapiens
aagaaaaaaaaaaaa

SEQ ID NO: 285995 - DNA, 15 bp, Homo sapiens
aaagaaaaaaaaaaa

SEQ ID NO: 285996 - DNA, 15 bp, Homo sapiens
caaagaaaaaaaaaa

SEQ ID NO: 285997 - DNA, 15 bp, Homo sapiens
tcaaagaaaaaaaaa

SEQ ID NO: 285998 - DNA, 15 bp, Homo sapiens
ctcaaagaaaaaaaa

SEQ ID NO: 285999 - DNA, 15 bp, Homo sapiens
tctcaaagaaaaaaa

SEQ ID NO: 286000 - DNA, 15 bp, Homo sapiens
gtctcaaagaaaaaa

SEQ ID NO: 286001 - DNA, 15 bp, Homo sapiens
tgtctcaaagaaaaa

SEQ ID NO: 286002 - DNA, 15 bp, Homo sapiens
ctgtctcaaagaaaa

SEQ ID NO: 286003 - DNA, 15 bp, Homo sapiens
cctgtctcaaagaaa

SEQ ID NO: 286004 - DNA, 15 bp, Homo sapiens
ccctgtctcaaagaa

SEQ ID NO: 286005 - DNA, 15 bp, Homo sapiens
accctgtctcaaaga

SEQ ID NO: 286006 - DNA, 15 bp, Homo sapiens
gaccctgtctcaaag

SEQ ID NO: 286007 - DNA, 15 bp, Homo sapiens
gagaccctgtctcaa

SEQ ID NO: 286008 - DNA, 15 bp, Homo sapiens
tgagaccctgtctca

SEQ ID NO: 286009 - DNA, 15 bp, Homo sapiens
gtgagaccctgtctc

SEQ ID NO: 286010 - DNA, 15 bp, Homo sapiens
agtgagaccctgtct

SEQ ID NO: 286011 - DNA, 15 bp, Homo sapiens
aaacagagtgagacc

SEQ ID NO: 286012 - DNA, 15 bp, Homo sapiens
gaaacagagtgagac

SEQ ID NO: 286013 - DNA, 15 bp, Homo sapiens
ggaaacagagtgaga

SEQ ID NO: 286014 - DNA, 15 bp, Homo sapiens
gggaaacagagtgag

SEQ ID NO: 286015 - DNA, 15 bp, Homo sapiens
tgggaaacagagtga

SEQ ID NO: 286016 - DNA, 15 bp, Homo sapiens
ctgggaaacagagtg

SEQ ID NO: 286017 - DNA, 15 bp, Homo sapiens
tctgggaaacagagt

SEQ ID NO: 286018 - DNA, 15 bp, Homo sapiens
gtctgggaaacagag

SEQ ID NO: 286019 - DNA, 15 bp, Homo sapiens
agtctgggaaacaga

SEQ ID NO: 286020 - DNA, 15 bp, Homo sapiens
cagtctgggaaacag

SEQ ID NO: 286021 - DNA, 15 bp, Homo sapiens
ccagtctgggaaaca

SEQ ID NO: 286022 - DNA, 15 bp, Homo sapiens
tccagtctgggaaac

SEQ ID NO: 286023 - DNA, 15 bp, Homo sapiens
ctccagtctgggaaa

SEQ ID NO: 286024 - DNA, 15 bp, Homo sapiens
actccagtctgggaa

SEQ ID NO: 286025 - DNA, 15 bp, Homo sapiens
cactccagtctggga

SEQ ID NO: 286026 - DNA, 15 bp, Homo sapiens
catgattgcaccact

SEQ ID NO: 286027 - DNA, 15 bp, Homo sapiens
ccatgattgcaccac

SEQ ID NO: 286028 - DNA, 15 bp, Homo sapiens
gccatgattgcacca

SEQ ID NO: 286029 - DNA, 15 bp, Homo sapiens
agccatgattgcacc

SEQ ID NO: 286030 - DNA, 15 bp, Homo sapiens
gagccatgattgcac

SEQ ID NO: 286031 - DNA, 15 bp, Homo sapiens
tgagccatgattgca

SEQ ID NO: 286032 - DNA, 15 bp, Homo sapiens
gtgagccatgattgc

SEQ ID NO: 286033 - DNA, 15 bp, Homo sapiens
tgtgagccatgattg

SEQ ID NO: 286034 - DNA, 15 bp, Homo sapiens
ttgtgagccatgatt

SEQ ID NO: 286035 - DNA, 15 bp, Homo sapiens
gttgtgagccatgat

SEQ ID NO: 286036 - DNA, 15 bp, Homo sapiens
tgttgtgagccatga

SEQ ID NO: 286037 - DNA, 15 bp, Homo sapiens
ttgttgtgagccatg

SEQ ID NO: 286038 - DNA, 15 bp, Homo sapiens
gttgttgtgagccat

SEQ ID NO: 286039 - DNA, 15 bp, Homo sapiens
ggttgttgtgagcca

SEQ ID NO: 286040 - DNA, 15 bp, Homo sapiens
aggttgttgtgagcc

SEQ ID NO: 286041 - DNA, 15 bp, Homo sapiens
gaggttgttgtgagc

SEQ ID NO: 286042 - DNA, 15 bp, Homo sapiens
agaggttgttgtgag

SEQ ID NO: 286043 - DNA, 15 bp, Homo sapiens
cagaggttgttgtga

SEQ ID NO: 286044 - DNA, 15 bp, Homo sapiens
gcagaggttgttgtg

SEQ ID NO: 286045 - DNA, 15 bp, Homo sapiens
ggcagaggttgttgt

SEQ ID NO: 286046 - DNA, 15 bp, Homo sapiens
aggcagaggttgttg

SEQ ID NO: 286047 - DNA, 15 bp, Homo sapiens
gaggcagaggttgtt

SEQ ID NO: 286048 - DNA, 15 bp, Homo sapiens
ggaggcagaggttgt

SEQ ID NO: 286049 - DNA, 15 bp, Homo sapiens
gccctggaggcagag

SEQ ID NO: 286050 - DNA, 15 bp, Homo sapiens
agccctggaggcaga

SEQ ID NO: 286051 - DNA, 15 bp, Homo sapiens
gagccctggaggcag

SEQ ID NO: 286052 - DNA, 15 bp, Homo sapiens
tgagccctggaggca

SEQ ID NO: 286053 - DNA, 15 bp, Homo sapiens
ttgagccctggaggc

SEQ ID NO: 286054 - DNA, 15 bp, Homo sapiens
cttgagccctggagg

SEQ ID NO: 286055 - DNA, 15 bp, Homo sapiens
acttgagccctggag

SEQ ID NO: 286056 - DNA, 15 bp, Homo sapiens
tacttgagccctgga

SEQ ID NO: 286057 - DNA, 15 bp, Homo sapiens
ttacttgagccctgg

SEQ ID NO: 286058 - DNA, 15 bp, Homo sapiens
attacttgagccctg

SEQ ID NO: 286059 - DNA, 15 bp, Homo sapiens
gattacttgagccct

SEQ ID NO: 286060 - DNA, 15 bp, Homo sapiens
agattacttgagccc

SEQ ID NO: 286061 - DNA, 15 bp, Homo sapiens
aagattacttgagcc

SEQ ID NO: 286062 - DNA, 15 bp, Homo sapiens
gaagattacttgagc

SEQ ID NO: 286063 - DNA, 15 bp, Homo sapiens
ggaagattacttgag

SEQ ID NO: 286064 - DNA, 15 bp, Homo sapiens
aggaagattacttga

SEQ ID NO: 286065 - DNA, 15 bp, Homo sapiens
caggaagattacttg

SEQ ID NO: 286066 - DNA, 15 bp, Homo sapiens
gcaggaagattactt

SEQ ID NO: 286067 - DNA, 15 bp, Homo sapiens
ggcaggaagattact

SEQ ID NO: 286068 - DNA, 15 bp, Homo sapiens
aggcaggaagattac

SEQ ID NO: 286069 - DNA, 15 bp, Homo sapiens
aaggcaggaagatta

SEQ ID NO: 286070 - DNA, 15 bp, Homo sapiens
taaggcaggaagatt

SEQ ID NO: 286071 - DNA, 15 bp, Homo sapiens
ctaaggcaggaagat

SEQ ID NO: 286072 - DNA, 15 bp, Homo sapiens
gctaaggcaggaaga

SEQ ID NO: 286073 - DNA, 15 bp, Homo sapiens
agctaaggcaggaag

SEQ ID NO: 286074 - DNA, 15 bp, Homo sapiens
aagctaaggcaggaa

SEQ ID NO: 286075 - DNA, 15 bp, Homo sapiens
aaagctaaggcagga

SEQ ID NO: 286076 - DNA, 15 bp, Homo sapiens
gaaagctaaggcagg

SEQ ID NO: 286077 - DNA, 15 bp, Homo sapiens
ggaaagctaaggcag

SEQ ID NO: 286078 - DNA, 15 bp, Homo sapiens
cggaaagctaaggca

SEQ ID NO: 286079 - DNA, 15 bp, Homo sapiens
tcggaaagctaaggc

SEQ ID NO: 286080 - DNA, 15 bp, Homo sapiens
ctcggaaagctaagg

SEQ ID NO: 286081 - DNA, 15 bp, Homo sapiens
actcggaaagctaag

SEQ ID NO: 286082 - DNA, 15 bp, Homo sapiens
tactcggaaagctaa

SEQ ID NO: 286083 - DNA, 15 bp, Homo sapiens
ctactcggaaagcta

SEQ ID NO: 286084 - DNA, 15 bp, Homo sapiens
gctactcggaaagct

SEQ ID NO: 286085 - DNA, 15 bp, Homo sapiens
agctactcggaaagc

SEQ ID NO: 286086 - DNA, 15 bp, Homo sapiens
cagctactcggaaag

SEQ ID NO: 286087 - DNA, 15 bp, Homo sapiens
ccagctactcggaaa

SEQ ID NO: 286088 - DNA, 15 bp, Homo sapiens
cccagctactcggaa

SEQ ID NO: 286089 - DNA, 15 bp, Homo sapiens
tcccagctactcgga

SEQ ID NO: 286090 - DNA, 15 bp, Homo sapiens
gctgtagtcccagct

SEQ ID NO: 286091 - DNA, 15 bp, Homo sapiens
agctgtagtcccagc

SEQ ID NO: 286092 - DNA, 15 bp, Homo sapiens
cagctgtagtcccag

SEQ ID NO: 286093 - DNA, 15 bp, Homo sapiens
ccagctgtagtccca

SEQ ID NO: 286094 - DNA, 15 bp, Homo sapiens
cccagctgtagtccc

SEQ ID NO: 286095 - DNA, 15 bp, Homo sapiens
gcccagctgtagtcc

SEQ ID NO: 286096 - DNA, 15 bp, Homo sapiens
tgcccagctgtagtc

SEQ ID NO: 286097 - DNA, 15 bp, Homo sapiens
gtgcccagctgtagt

SEQ ID NO: 286098 - DNA, 15 bp, Homo sapiens
ggtgcccagctgtag

SEQ ID NO: 286099 - DNA, 15 bp, Homo sapiens
tggtgcccagctgta

SEQ ID NO: 286100 - DNA, 15 bp, Homo sapiens
atggtgcccagctgt

SEQ ID NO: 286101 - DNA, 15 bp, Homo sapiens
gatggtgcccagctg

SEQ ID NO: 286102 - DNA, 15 bp, Homo sapiens
tgatggtgcccagct

SEQ ID NO: 286103 - DNA, 15 bp, Homo sapiens
atgatggtgcccagc

SEQ ID NO: 286104 - DNA, 15 bp, Homo sapiens
catgatggtgcccag

SEQ ID NO: 286105 - DNA, 15 bp, Homo sapiens
gcatgatggtgccca

SEQ ID NO: 286106 - DNA, 15 bp, Homo sapiens
ggcatgatggtgccc

SEQ ID NO: 286107 - DNA, 15 bp, Homo sapiens
gggcatgatggtgcc

SEQ ID NO: 286108 - DNA, 15 bp, Homo sapiens
tgggcatgatggtgc

SEQ ID NO: 286109 - DNA, 15 bp, Homo sapiens
ctgggcatgatggtg

SEQ ID NO: 286110 - DNA, 15 bp, Homo sapiens
gctgggcatgatggt

SEQ ID NO: 286111 - DNA, 15 bp, Homo sapiens
agctgggcatgatgg

SEQ ID NO: 286112 - DNA, 15 bp, Homo sapiens
tagctgggcatgatg

SEQ ID NO: 286113 - DNA, 15 bp, Homo sapiens
ttagctgggcatgat

SEQ ID NO: 286114 - DNA, 15 bp, Homo sapiens
attagctgggcatga

SEQ ID NO: 286115 - DNA, 15 bp, Homo sapiens
taattagctgggcat

SEQ ID NO: 286116 - DNA, 15 bp, Homo sapiens
ttaattagctgggca

SEQ ID NO: 286117 - DNA, 15 bp, Homo sapiens
tttaattagctgggc

SEQ ID NO: 286118 - DNA, 15 bp, Homo sapiens
ttttaattagctggg

SEQ ID NO: 286119 - DNA, 15 bp, Homo sapiens
tttttaattagctgg

SEQ ID NO: 286120 - DNA, 15 bp, Homo sapiens
ttttttaattagctg

SEQ ID NO: 286121 - DNA, 15 bp, Homo sapiens
tttttttaattagct

SEQ ID NO: 286122 - DNA, 15 bp, Homo sapiens
ttttttttaattagc

SEQ ID NO: 286123 - DNA, 15 bp, Homo sapiens
attttttttaattag

SEQ ID NO: 286124 - DNA, 15 bp, Homo sapiens
aattttttttaatta

SEQ ID NO: 286125 - DNA, 15 bp, Homo sapiens
taattttttttaatt

SEQ ID NO: 286126 - DNA, 15 bp, Homo sapiens
ataattttttttaat

SEQ ID NO: 286127 - DNA, 15 bp, Homo sapiens
aataattttttttaa

SEQ ID NO: 286128 - DNA, 15 bp, Homo sapiens
caataatttttttta

SEQ ID NO: 286129 - DNA, 15 bp, Homo sapiens
acaataatttttttt

SEQ ID NO: 286130 - DNA, 15 bp, Homo sapiens
tacaataattttttt

SEQ ID NO: 286131 - DNA, 15 bp, Homo sapiens
ctacaataatttttt

SEQ ID NO: 286132 - DNA, 15 bp, Homo sapiens
tctacaataattttt

SEQ ID NO: 286133 - DNA, 15 bp, Homo sapiens
ctctacaataatttt

SEQ ID NO: 286134 - DNA, 15 bp, Homo sapiens
tctctacaataattt

SEQ ID NO: 286135 - DNA, 15 bp, Homo sapiens
atctctacaataatt

SEQ ID NO: 286136 - DNA, 15 bp, Homo sapiens
catctctacaataat

SEQ ID NO: 286137 - DNA, 15 bp, Homo sapiens
ccatctctacaataa

SEQ ID NO: 286138 - DNA, 15 bp, Homo sapiens
cccatctctacaata

SEQ ID NO: 286139 - DNA, 15 bp, Homo sapiens
ccccatctctacaat

SEQ ID NO: 286140 - DNA, 15 bp, Homo sapiens
cccccatctctacaa

SEQ ID NO: 286141 - DNA, 15 bp, Homo sapiens
ccccccatctctaca

SEQ ID NO: 286142 - DNA, 15 bp, Homo sapiens
cccccccatctctac

SEQ ID NO: 286143 - DNA, 15 bp, Homo sapiens
acccccccatctcta

SEQ ID NO: 286144 - DNA, 15 bp, Homo sapiens
gacccccccatctct

SEQ ID NO: 286145 - DNA, 15 bp, Homo sapiens
agacccccccatctc

SEQ ID NO: 286146 - DNA, 15 bp, Homo sapiens
gagacccccccatct

SEQ ID NO: 286147 - DNA, 15 bp, Homo sapiens
tgagacccccccatc

SEQ ID NO: 286148 - DNA, 15 bp, Homo sapiens
gtgagacccccccat

SEQ ID NO: 286149 - DNA, 15 bp, Homo sapiens
agtgagaccccccca

SEQ ID NO: 286150 - DNA, 15 bp, Homo sapiens
cagtgagaccccccc

SEQ ID NO: 286151 - DNA, 15 bp, Homo sapiens
acagtgagacccccc

SEQ ID NO: 286152 - DNA, 15 bp, Homo sapiens
cacagtgagaccccc

SEQ ID NO: 286153 - DNA, 15 bp, Homo sapiens
acacagtgagacccc

SEQ ID NO: 286154 - DNA, 15 bp, Homo sapiens
aacacagtgagaccc

SEQ ID NO: 286155 - DNA, 15 bp, Homo sapiens
caacacagtgagacc

SEQ ID NO: 286156 - DNA, 15 bp, Homo sapiens
gcaacacagtgagac

SEQ ID NO: 286157 - DNA, 15 bp, Homo sapiens
ggcaacacagtgaga

SEQ ID NO: 286158 - DNA, 15 bp, Homo sapiens
gggcaacacagtgag

SEQ ID NO: 286159 - DNA, 15 bp, Homo sapiens
tgggcaacacagtga

SEQ ID NO: 286160 - DNA, 15 bp, Homo sapiens
ctgggcaacacagtg

SEQ ID NO: 286161 - DNA, 15 bp, Homo sapiens
tctgggcaacacagt

SEQ ID NO: 286162 - DNA, 15 bp, Homo sapiens
gtctgggcaacacag

SEQ ID NO: 286163 - DNA, 15 bp, Homo sapiens
agtctgggcaacaca

SEQ ID NO: 286164 - DNA, 15 bp, Homo sapiens
cagtctgggcaacac

SEQ ID NO: 286165 - DNA, 15 bp, Homo sapiens
ccagtctgggcaaca

SEQ ID NO: 286166 - DNA, 15 bp, Homo sapiens
accagtctgggcaac

SEQ ID NO: 286167 - DNA, 15 bp, Homo sapiens
aaccagtctgggcaa

SEQ ID NO: 286168 - DNA, 15 bp, Homo sapiens
aaaccagtctgggca

SEQ ID NO: 286169 - DNA, 15 bp, Homo sapiens
aaaaccagtctgggc

SEQ ID NO: 286170 - DNA, 15 bp, Homo sapiens
taaaaccagtctggg

SEQ ID NO: 286171 - DNA, 15 bp, Homo sapiens
ttaaaaccagtctgg

SEQ ID NO: 286172 - DNA, 15 bp, Homo sapiens
cttaaaaccagtctg

SEQ ID NO: 286173 - DNA, 15 bp, Homo sapiens
gcttaaaaccagtct

SEQ ID NO: 286174 - DNA, 15 bp, Homo sapiens
agcttaaaaccagtc

SEQ ID NO: 286175 - DNA, 15 bp, Homo sapiens
gagcttaaaaccagt

SEQ ID NO: 286176 - DNA, 15 bp, Homo sapiens
ggagcttaaaaccag

SEQ ID NO: 286177 - DNA, 15 bp, Homo sapiens
aggagcttaaaacca

SEQ ID NO: 286178 - DNA, 15 bp, Homo sapiens
caggagcttaaaacc

SEQ ID NO: 286179 - DNA, 15 bp, Homo sapiens
acaggagcttaaaac

SEQ ID NO: 286180 - DNA, 15 bp, Homo sapiens
cacaggagcttaaaa

SEQ ID NO: 286181 - DNA, 15 bp, Homo sapiens
gcacaggagcttaaa

SEQ ID NO: 286182 - DNA, 15 bp, Homo sapiens
agcacaggagcttaa

SEQ ID NO: 286183 - DNA, 15 bp, Homo sapiens
gagcacaggagctta

SEQ ID NO: 286184 - DNA, 15 bp, Homo sapiens
agagcacaggagctt

SEQ ID NO: 286185 - DNA, 15 bp, Homo sapiens
tagagcacaggagct

SEQ ID NO: 286186 - DNA, 15 bp, Homo sapiens
ctagagcacaggagc

SEQ ID NO: 286187 - DNA, 15 bp, Homo sapiens
gctagagcacaggag

SEQ ID NO: 286188 - DNA, 15 bp, Homo sapiens
tgctagagcacagga

SEQ ID NO: 286189 - DNA, 15 bp, Homo sapiens
ctgctagagcacagg

SEQ ID NO: 286190 - DNA, 15 bp, Homo sapiens
actgctagagcacag

SEQ ID NO: 286191 - DNA, 15 bp, Homo sapiens
gactgctagagcaca

SEQ ID NO: 286192 - DNA, 15 bp, Homo sapiens
ggactgctagagcac

SEQ ID NO: 286193 - DNA, 15 bp, Homo sapiens
aggactgctagagca

SEQ ID NO: 286194 - DNA, 15 bp, Homo sapiens
gaggactgctagagc

SEQ ID NO: 286195 - DNA, 15 bp, Homo sapiens
ggaggactgctagag

SEQ ID NO: 286196 - DNA, 15 bp, Homo sapiens
gggaggactgctaga

SEQ ID NO: 286197 - DNA, 15 bp, Homo sapiens
tgggaggactgctag

SEQ ID NO: 286198 - DNA, 15 bp, Homo sapiens
gtgggaggactgcta

SEQ ID NO: 286199 - DNA, 15 bp, Homo sapiens
ggtgggaggactgct

SEQ ID NO: 286200 - DNA, 15 bp, Homo sapiens
aggtgggaggactgc

SEQ ID NO: 286201 - DNA, 15 bp, Homo sapiens
gaggtgggaggactg

SEQ ID NO: 286202 - DNA, 15 bp, Homo sapiens
tgaggtgggaggact

SEQ ID NO: 286203 - DNA, 15 bp, Homo sapiens
ctgaggtgggaggac

SEQ ID NO: 286204 - DNA, 15 bp, Homo sapiens
gctgaggtgggagga

SEQ ID NO: 286205 - DNA, 15 bp, Homo sapiens
agctgaggtgggagg

SEQ ID NO: 286206 - DNA, 15 bp, Homo sapiens
aagctgaggtgggag

SEQ ID NO: 286207 - DNA, 15 bp, Homo sapiens
gaagctgaggtggga

SEQ ID NO: 286208 - DNA, 15 bp, Homo sapiens
ggaagctgaggtggg

SEQ ID NO: 286209 - DNA, 15 bp, Homo sapiens
gggaagctgaggtgg

SEQ ID NO: 286210 - DNA, 15 bp, Homo sapiens
tgggaagctgaggtg

SEQ ID NO: 286211 - DNA, 15 bp, Homo sapiens
ttgggaagctgaggt

SEQ ID NO: 286212 - DNA, 15 bp, Homo sapiens
tttgggaagctgagg

SEQ ID NO: 286213 - DNA, 15 bp, Homo sapiens
ctttgggaagctgag

SEQ ID NO: 286214 - DNA, 15 bp, Homo sapiens
actttgggaagctga

SEQ ID NO: 286215 - DNA, 15 bp, Homo sapiens
cactttgggaagctg

SEQ ID NO: 286216 - DNA, 15 bp, Homo sapiens
acactttgggaagct

SEQ ID NO: 286217 - DNA, 15 bp, Homo sapiens
aacactttgggaagc

SEQ ID NO: 286218 - DNA, 15 bp, Homo sapiens
caacactttgggaag

SEQ ID NO: 286219 - DNA, 15 bp, Homo sapiens
ccaacactttgggaa

SEQ ID NO: 286220 - DNA, 15 bp, Homo sapiens
gccaacactttggga

SEQ ID NO: 286221 - DNA, 15 bp, Homo sapiens
tgccaacactttggg

SEQ ID NO: 286222 - DNA, 15 bp, Homo sapiens
atgccaacactttgg

SEQ ID NO: 286223 - DNA, 15 bp, Homo sapiens
aatgccaacactttg

SEQ ID NO: 286224 - DNA, 15 bp, Homo sapiens
caatgccaacacttt

SEQ ID NO: 286225 - DNA, 15 bp, Homo sapiens
gcaatgccaacactt

SEQ ID NO: 286226 - DNA, 15 bp, Homo sapiens
tgcaatgccaacact

SEQ ID NO: 286227 - DNA, 15 bp, Homo sapiens
ctgcaatgccaacac

SEQ ID NO: 286228 - DNA, 15 bp, Homo sapiens
cctgcaatgccaaca

SEQ ID NO: 286229 - DNA, 15 bp, Homo sapiens
gcctgcaatgccaac

SEQ ID NO: 286230 - DNA, 15 bp, Homo sapiens
cgcctgcaatgccaa

SEQ ID NO: 286231 - DNA, 15 bp, Homo sapiens
acgcctgcaatgcca

SEQ ID NO: 286232 - DNA, 15 bp, Homo sapiens
cacgcctgcaatgcc

SEQ ID NO: 286233 - DNA, 15 bp, Homo sapiens
tcacgcctgcaatgc

SEQ ID NO: 286234 - DNA, 15 bp, Homo sapiens
ctcacgcctgcaatg

SEQ ID NO: 286235 - DNA, 15 bp, Homo sapiens
gctcacgcctgcaat

SEQ ID NO: 286236 - DNA, 15 bp, Homo sapiens
ggctcacgcctgcaa

SEQ ID NO: 286237 - DNA, 15 bp, Homo sapiens
tggctcacgcctgca

SEQ ID NO: 286238 - DNA, 15 bp, Homo sapiens
gtggctcacgcctgc

SEQ ID NO: 286239 - DNA, 15 bp, Homo sapiens
caggctgggcacagt

SEQ ID NO: 286240 - DNA, 15 bp, Homo sapiens
ccaggctgggcacag

SEQ ID NO: 286241 - DNA, 15 bp, Homo sapiens
tccaggctgggcaca

SEQ ID NO: 286242 - DNA, 15 bp, Homo sapiens
atccaggctgggcac

SEQ ID NO: 286243 - DNA, 15 bp, Homo sapiens
aatccaggctgggca

SEQ ID NO: 286244 - DNA, 15 bp, Homo sapiens
gaatccaggctgggc

SEQ ID NO: 286245 - DNA, 15 bp, Homo sapiens
cgaatccaggctggg

SEQ ID NO: 286246 - DNA, 15 bp, Homo sapiens
acgaatccaggctgg

SEQ ID NO: 286247 - DNA, 15 bp, Homo sapiens
aacgaatccaggctg

SEQ ID NO: 286248 - DNA, 15 bp, Homo sapiens
caacgaatccaggct

SEQ ID NO: 286249 - DNA, 15 bp, Homo sapiens
acaacgaatccaggc

SEQ ID NO: 286250 - DNA, 15 bp, Homo sapiens
aacaacgaatccagg

SEQ ID NO: 286251 - DNA, 15 bp, Homo sapiens
taacaacgaatccag

SEQ ID NO: 286252 - DNA, 15 bp, Homo sapiens
ataacaacgaatcca

SEQ ID NO: 286253 - DNA, 15 bp, Homo sapiens
aataacaacgaatcc

SEQ ID NO: 286254 - DNA, 15 bp, Homo sapiens
taataacaacgaatc

SEQ ID NO: 286255 - DNA, 15 bp, Homo sapiens
ataataacaacgaat

SEQ ID NO: 286256 - DNA, 15 bp, Homo sapiens
aataataacaacgaa

SEQ ID NO: 286257 - DNA, 15 bp, Homo sapiens
gaataataacaacga

SEQ ID NO: 286258 - DNA, 15 bp, Homo sapiens
cgaataataacaacg

SEQ ID NO: 286259 - DNA, 15 bp, Homo sapiens
acgaataataacaac

SEQ ID NO: 286260 - DNA, 15 bp, Homo sapiens
gacgaataataacaa

SEQ ID NO: 286261 - DNA, 15 bp, Homo sapiens
tgacgaataataaca

SEQ ID NO: 286262 - DNA, 15 bp, Homo sapiens
atgacgaataataac

SEQ ID NO: 286263 - DNA, 15 bp, Homo sapiens
aatgacgaataataa

SEQ ID NO: 286264 - DNA, 15 bp, Homo sapiens
aaatgacgaataata

SEQ ID NO: 286265 - DNA, 15 bp, Homo sapiens
taaatgacgaataat

SEQ ID NO: 286266 - DNA, 15 bp, Homo sapiens
ataaatgacgaataa

SEQ ID NO: 286267 - DNA, 15 bp, Homo sapiens
aataaatgacgaata

SEQ ID NO: 286268 - DNA, 15 bp, Homo sapiens
taataaatgacgaat

SEQ ID NO: 286269 - DNA, 15 bp, Homo sapiens
ataataaatgacgaa

SEQ ID NO: 286270 - DNA, 15 bp, Homo sapiens
aataataaatgacga

SEQ ID NO: 286271 - DNA, 15 bp, Homo sapiens
taataataaatgacg

SEQ ID NO: 286272 - DNA, 15 bp, Homo sapiens
ataataataaatgac

SEQ ID NO: 286273 - DNA, 15 bp, Homo sapiens
tataataataaatga

SEQ ID NO: 286274 - DNA, 15 bp, Homo sapiens
atataataataaatg

SEQ ID NO: 286275 - DNA, 15 bp, Homo sapiens
aatataataataaat

SEQ ID NO: 286276 - DNA, 15 bp, Homo sapiens
aaatataataataaa

SEQ ID NO: 286277 - DNA, 15 bp, Homo sapiens
taaatataataataa

SEQ ID NO: 286278 - DNA, 15 bp, Homo sapiens
ataaatataataata

SEQ ID NO: 286279 - DNA, 15 bp, Homo sapiens
aataaatataataat

SEQ ID NO: 286280 - DNA, 15 bp, Homo sapiens
aaataaatataataa

SEQ ID NO: 286281 - DNA, 15 bp, Homo sapiens
aaaataaatataata

SEQ ID NO: 286282 - DNA, 15 bp, Homo sapiens
gaaaataaatataat

SEQ ID NO: 286283 - DNA, 15 bp, Homo sapiens
agaaaataaatataa

SEQ ID NO: 286284 - DNA, 15 bp, Homo sapiens
aagaaaataaatata

SEQ ID NO: 286285 - DNA, 15 bp, Homo sapiens
gaagaaaataaatat

SEQ ID NO: 286286 - DNA, 15 bp, Homo sapiens
agaagaaaataaata

SEQ ID NO: 286287 - DNA, 15 bp, Homo sapiens
cagaagaaaataaat

SEQ ID NO: 286288 - DNA, 15 bp, Homo sapiens
tcagaagaaaataaa

SEQ ID NO: 286289 - DNA, 15 bp, Homo sapiens
atcagaagaaaataa

SEQ ID NO: 286290 - DNA, 15 bp, Homo sapiens
aatcagaagaaaata

SEQ ID NO: 286291 - DNA, 15 bp, Homo sapiens
aaatcagaagaaaat

SEQ ID NO: 286292 - DNA, 15 bp, Homo sapiens
aaaatcagaagaaaa

SEQ ID NO: 286293 - DNA, 15 bp, Homo sapiens
taaaatcagaagaaa

SEQ ID NO: 286294 - DNA, 15 bp, Homo sapiens
ttaaaatcagaagaa

SEQ ID NO: 286295 - DNA, 15 bp, Homo sapiens
tttaaaatcagaaga

SEQ ID NO: 286296 - DNA, 15 bp, Homo sapiens
ctttaaaatcagaag

SEQ ID NO: 286297 - DNA, 15 bp, Homo sapiens
tctttaaaatcagaa

SEQ ID NO: 286298 - DNA, 15 bp, Homo sapiens
ttctttaaaatcaga

SEQ ID NO: 286299 - DNA, 15 bp, Homo sapiens
cttctttaaaatcag

SEQ ID NO: 286300 - DNA, 15 bp, Homo sapiens
acttctttaaaatca

SEQ ID NO: 286301 - DNA, 15 bp, Homo sapiens
aacttctttaaaatc

SEQ ID NO: 286302 - DNA, 15 bp, Homo sapiens
taacttctttaaaat

SEQ ID NO: 286303 - DNA, 15 bp, Homo sapiens
ttaacttctttaaaa

SEQ ID NO: 286304 - DNA, 15 bp, Homo sapiens
tttaacttctttaaa

SEQ ID NO: 286305 - DNA, 15 bp, Homo sapiens
ttttaacttctttaa

SEQ ID NO: 286306 - DNA, 15 bp, Homo sapiens
attttaacttcttta

SEQ ID NO: 286307 - DNA, 15 bp, Homo sapiens
aattttaacttcttt

SEQ ID NO: 286308 - DNA, 15 bp, Homo sapiens
aaattttaacttctt

SEQ ID NO: 286309 - DNA, 15 bp, Homo sapiens
taaattttaacttct

SEQ ID NO: 286310 - DNA, 15 bp, Homo sapiens
ctaaattttaacttc

SEQ ID NO: 286311 - DNA, 15 bp, Homo sapiens
tctaaattttaactt

SEQ ID NO: 286312 - DNA, 15 bp, Homo sapiens
gtctaaattttaact

SEQ ID NO: 286313 - DNA, 15 bp, Homo sapiens
agtctaaattttaac

SEQ ID NO: 286314 - DNA, 15 bp, Homo sapiens
aagtctaaattttaa

SEQ ID NO: 286315 - DNA, 15 bp, Homo sapiens
aaagtctaaatttta

SEQ ID NO: 286316 - DNA, 15 bp, Homo sapiens
aaaagtctaaatttt

SEQ ID NO: 286317 - DNA, 15 bp, Homo sapiens
aaaaagtctaaattt

SEQ ID NO: 286318 - DNA, 15 bp, Homo sapiens
aaaaaagtctaaatt

SEQ ID NO: 286319 - DNA, 15 bp, Homo sapiens
caaaaaagtctaaat

SEQ ID NO: 286320 - DNA, 15 bp, Homo sapiens
acaaaaaagtctaaa

SEQ ID NO: 286321 - DNA, 15 bp, Homo sapiens
cacaaaaaagtctaa

SEQ ID NO: 286322 - DNA, 15 bp, Homo sapiens
acacaaaaaagtcta

SEQ ID NO: 286323 - DNA, 15 bp, Homo sapiens
gacacaaaaaagtct

SEQ ID NO: 286324 - DNA, 15 bp, Homo sapiens
ggacacaaaaaagtc

SEQ ID NO: 286325 - DNA, 15 bp, Homo sapiens
gggacacaaaaaagt

SEQ ID NO: 286326 - DNA, 15 bp, Homo sapiens
tgggacacaaaaaag

SEQ ID NO: 286327 - DNA, 15 bp, Homo sapiens
atgggacacaaaaaa

SEQ ID NO: 286328 - DNA, 15 bp, Homo sapiens
tatgggacacaaaaa

SEQ ID NO: 286329 - DNA, 15 bp, Homo sapiens
ttatgggacacaaaa

SEQ ID NO: 286330 - DNA, 15 bp, Homo sapiens
cttatgggacacaaa

SEQ ID NO: 286331 - DNA, 15 bp, Homo sapiens
acttatgggacacaa

SEQ ID NO: 286332 - DNA, 15 bp, Homo sapiens
tacttatgggacaca

SEQ ID NO: 286333 - DNA, 15 bp, Homo sapiens
gtacttatgggacac

SEQ ID NO: 286334 - DNA, 15 bp, Homo sapiens
tgtacttatgggaca

SEQ ID NO: 286335 - DNA, 15 bp, Homo sapiens
ctgtacttatgggac

SEQ ID NO: 286336 - DNA, 15 bp, Homo sapiens
actgtacttatggga

SEQ ID NO: 286337 - DNA, 15 bp, Homo sapiens
cactgtacttatggg

SEQ ID NO: 286338 - DNA, 15 bp, Homo sapiens
ccactgtacttatgg

SEQ ID NO: 286339 - DNA, 15 bp, Homo sapiens
gccactgtacttatg

SEQ ID NO: 286340 - DNA, 15 bp, Homo sapiens
ggccactgtacttat

SEQ ID NO: 286341 - DNA, 15 bp, Homo sapiens
aggccactgtactta

SEQ ID NO: 286342 - DNA, 15 bp, Homo sapiens
gaggccactgtactt

SEQ ID NO: 286343 - DNA, 15 bp, Homo sapiens
tgaggccactgtact

SEQ ID NO: 286344 - DNA, 15 bp, Homo sapiens
ctgaggccactgtac

SEQ ID NO: 286345 - DNA, 15 bp, Homo sapiens
cctgaggccactgta

SEQ ID NO: 286346 - DNA, 15 bp, Homo sapiens
gcctgaggccactgt

SEQ ID NO: 286347 - DNA, 15 bp, Homo sapiens
tgcctgaggccactg

SEQ ID NO: 286348 - DNA, 15 bp, Homo sapiens
gtgcctgaggccact

SEQ ID NO: 286349 - DNA, 15 bp, Homo sapiens
agtgcctgaggccac

SEQ ID NO: 286350 - DNA, 15 bp, Homo sapiens
cagtgcctgaggcca

SEQ ID NO: 286351 - DNA, 15 bp, Homo sapiens
acagtgcctgaggcc

SEQ ID NO: 286352 - DNA, 15 bp, Homo sapiens
cacagtgcctgaggc

SEQ ID NO: 286353 - DNA, 15 bp, Homo sapiens
gcacagtgcctgagg

SEQ ID NO: 286354 - DNA, 15 bp, Homo sapiens
ggcacagtgcctgag

SEQ ID NO: 286355 - DNA, 15 bp, Homo sapiens
aggcacagtgcctga

SEQ ID NO: 286356 - DNA, 15 bp, Homo sapiens
caggcacagtgcctg

SEQ ID NO: 286357 - DNA, 15 bp, Homo sapiens
gcaggcacagtgcct

SEQ ID NO: 286358 - DNA, 15 bp, Homo sapiens
tgcaggcacagtgcc

SEQ ID NO: 286359 - DNA, 15 bp, Homo sapiens
gtgcaggcacagtgc

SEQ ID NO: 286360 - DNA, 15 bp, Homo sapiens
agtgcaggcacagtg

SEQ ID NO: 286361 - DNA, 15 bp, Homo sapiens
cagtgcaggcacagt

SEQ ID NO: 286362 - DNA, 15 bp, Homo sapiens
gcagtgcaggcacag

SEQ ID NO: 286363 - DNA, 15 bp, Homo sapiens
ggcagtgcaggcaca

SEQ ID NO: 286364 - DNA, 15 bp, Homo sapiens
aggcagtgcaggcac

SEQ ID NO: 286365 - DNA, 15 bp, Homo sapiens
caggcagtgcaggca

SEQ ID NO: 286366 - DNA, 15 bp, Homo sapiens
gcaggcagtgcaggc

SEQ ID NO: 286367 - DNA, 15 bp, Homo sapiens
agcaggcagtgcagg

SEQ ID NO: 286368 - DNA, 15 bp, Homo sapiens
cagcaggcagtgcag

SEQ ID NO: 286369 - DNA, 15 bp, Homo sapiens
ccagcaggcagtgca

SEQ ID NO: 286370 - DNA, 15 bp, Homo sapiens
tccagcaggcagtgc

SEQ ID NO: 286371 - DNA, 15 bp, Homo sapiens
ctccagcaggcagtg

SEQ ID NO: 286372 - DNA, 15 bp, Homo sapiens
tctccagcaggcagt

SEQ ID NO: 286373 - DNA, 15 bp, Homo sapiens
ttctccagcaggcag

SEQ ID NO: 286374 - DNA, 15 bp, Homo sapiens
tttctccagcaggca

SEQ ID NO: 286375 - DNA, 15 bp, Homo sapiens
atttctccagcaggc

SEQ ID NO: 286376 - DNA, 15 bp, Homo sapiens
aatttctccagcagg

SEQ ID NO: 286377 - DNA, 15 bp, Homo sapiens
caatttctccagcag

SEQ ID NO: 286378 - DNA, 15 bp, Homo sapiens
tcaatttctccagca

SEQ ID NO: 286379 - DNA, 15 bp, Homo sapiens
gtcaatttctccagc

SEQ ID NO: 286380 - DNA, 15 bp, Homo sapiens
agtcaatttctccag

SEQ ID NO: 286381 - DNA, 15 bp, Homo sapiens
aagtcaatttctcca

SEQ ID NO: 286382 - DNA, 15 bp, Homo sapiens
aaagtcaatttctcc

SEQ ID NO: 286383 - DNA, 15 bp, Homo sapiens
taaagtcaatttctc

SEQ ID NO: 286384 - DNA, 15 bp, Homo sapiens
ataaagtcaatttct

SEQ ID NO: 286385 - DNA, 15 bp, Homo sapiens
aataaagtcaatttc

SEQ ID NO: 286386 - DNA, 15 bp, Homo sapiens
aaataaagtcaattt

SEQ ID NO: 286387 - DNA, 15 bp, Homo sapiens
gaaataaagtcaatt

SEQ ID NO: 286388 - DNA, 15 bp, Homo sapiens
agaaataaagtcaat

SEQ ID NO: 286389 - DNA, 15 bp, Homo sapiens
gagaaataaagtcaa

SEQ ID NO: 286390 - DNA, 15 bp, Homo sapiens
ggagaaataaagtca

SEQ ID NO: 286391 - DNA, 15 bp, Homo sapiens
gggagaaataaagtc

SEQ ID NO: 286392 - DNA, 15 bp, Homo sapiens
agggagaaataaagt

SEQ ID NO: 286393 - DNA, 15 bp, Homo sapiens
aagggagaaataaag

SEQ ID NO: 286394 - DNA, 15 bp, Homo sapiens
aaagggagaaataaa

SEQ ID NO: 286395 - DNA, 15 bp, Homo sapiens
gaaagggagaaataa

SEQ ID NO: 286396 - DNA, 15 bp, Homo sapiens
ggaaagggagaaata

SEQ ID NO: 286397 - DNA, 15 bp, Homo sapiens
tggaaagggagaaat

SEQ ID NO: 286398 - DNA, 15 bp, Homo sapiens
ttggaaagggagaaa

SEQ ID NO: 286399 - DNA, 15 bp, Homo sapiens
gttggaaagggagaa

SEQ ID NO: 286400 - DNA, 15 bp, Homo sapiens
tgttggaaagggaga

SEQ ID NO: 286401 - DNA, 15 bp, Homo sapiens
ctgttggaaagggag

SEQ ID NO: 286402 - DNA, 15 bp, Homo sapiens
gctgttggaaaggga

SEQ ID NO: 286403 - DNA, 15 bp, Homo sapiens
ggctgttggaaaggg

SEQ ID NO: 286404 - DNA, 15 bp, Homo sapiens
gggctgttggaaagg

SEQ ID NO: 286405 - DNA, 15 bp, Homo sapiens
ggggctgttggaaag

SEQ ID NO: 286406 - DNA, 15 bp, Homo sapiens
tggggctgttggaaa

SEQ ID NO: 286407 - DNA, 15 bp, Homo sapiens
atggggctgttggaa

SEQ ID NO: 286408 - DNA, 15 bp, Homo sapiens
gatggggctgttgga

SEQ ID NO: 286409 - DNA, 15 bp, Homo sapiens
ggatggggctgttgg

SEQ ID NO: 286410 - DNA, 15 bp, Homo sapiens
aggatggggctgttg

SEQ ID NO: 286411 - DNA, 15 bp, Homo sapiens
aaggatggggctgtt

SEQ ID NO: 286412 - DNA, 15 bp, Homo sapiens
gaaggatggggctgt

SEQ ID NO: 286413 - DNA, 15 bp, Homo sapiens
agaaggatggggctg

SEQ ID NO: 286414 - DNA, 15 bp, Homo sapiens
cagaaggatggggct

SEQ ID NO: 286415 - DNA, 15 bp, Homo sapiens
ccagaaggatggggc

SEQ ID NO: 286416 - DNA, 15 bp, Homo sapiens
tccagaaggatgggg

SEQ ID NO: 286417 - DNA, 15 bp, Homo sapiens
ttccagaaggatggg

SEQ ID NO: 286418 - DNA, 15 bp, Homo sapiens
tttccagaaggatgg

SEQ ID NO: 286419 - DNA, 15 bp, Homo sapiens
atttccagaaggatg

SEQ ID NO: 286420 - DNA, 15 bp, Homo sapiens
aatttccagaaggat

SEQ ID NO: 286421 - DNA, 15 bp, Homo sapiens
aaatttccagaagga

SEQ ID NO: 286422 - DNA, 15 bp, Homo sapiens
aaaatttccagaagg

SEQ ID NO: 286423 - DNA, 15 bp, Homo sapiens
gaaaatttccagaag

SEQ ID NO: 286424 - DNA, 15 bp, Homo sapiens
tgaaaatttccagaa

SEQ ID NO: 286425 - DNA, 15 bp, Homo sapiens
gtgaaaatttccaga

SEQ ID NO: 286426 - DNA, 15 bp, Homo sapiens
tgtgaaaatttccag

SEQ ID NO: 286427 - DNA, 15 bp, Homo sapiens
ctgtgaaaatttcca

SEQ ID NO: 286428 - DNA, 15 bp, Homo sapiens
tctgtgaaaatttcc

SEQ ID NO: 286429 - DNA, 15 bp, Homo sapiens
atctgtgaaaatttc

SEQ ID NO: 286430 - DNA, 15 bp, Homo sapiens
tatctgtgaaaattt

SEQ ID NO: 286431 - DNA, 15 bp, Homo sapiens
ttatctgtgaaaatt

SEQ ID NO: 286432 - DNA, 15 bp, Homo sapiens
cttatctgtgaaaat

SEQ ID NO: 286433 - DNA, 15 bp, Homo sapiens
tcttatctgtgaaaa

SEQ ID NO: 286434 - DNA, 15 bp, Homo sapiens
ttcttatctgtgaaa

SEQ ID NO: 286435 - DNA, 15 bp, Homo sapiens
tttcttatctgtgaa

SEQ ID NO: 286436 - DNA, 15 bp, Homo sapiens
ttttcttatctgtga

SEQ ID NO: 286437 - DNA, 15 bp, Homo sapiens
gttttcttatctgtg

SEQ ID NO: 286438 - DNA, 15 bp, Homo sapiens
tgttttcttatctgt

SEQ ID NO: 286439 - DNA, 15 bp, Homo sapiens
atgttttcttatctg

SEQ ID NO: 286440 - DNA, 15 bp, Homo sapiens
catgttttcttatct

SEQ ID NO: 286441 - DNA, 15 bp, Homo sapiens
gcatgttttcttatc

SEQ ID NO: 286442 - DNA, 15 bp, Homo sapiens
agcatgttttcttat

SEQ ID NO: 286443 - DNA, 15 bp, Homo sapiens
gagcatgttttctta

SEQ ID NO: 286444 - DNA, 15 bp, Homo sapiens
tgagcatgttttctt

SEQ ID NO: 286445 - DNA, 15 bp, Homo sapiens
ctgagcatgttttct

SEQ ID NO: 286446 - DNA, 15 bp, Homo sapiens
tctgagcatgttttc

SEQ ID NO: 286447 - DNA, 15 bp, Homo sapiens
ctctgagcatgtttt

SEQ ID NO: 286448 - DNA, 15 bp, Homo sapiens
tctctgagcatgttt

SEQ ID NO: 286449 - DNA, 15 bp, Homo sapiens
gtctctgagcatgtt

SEQ ID NO: 286450 - DNA, 15 bp, Homo sapiens
tgtctctgagcatgt

SEQ ID NO: 286451 - DNA, 15 bp, Homo sapiens
ctgtctctgagcatg

SEQ ID NO: 286452 - DNA, 15 bp, Homo sapiens
tctgtctctgagcat

SEQ ID NO: 286453 - DNA, 15 bp, Homo sapiens
atctgtctctgagca

SEQ ID NO: 286454 - DNA, 15 bp, Homo sapiens
catctgtctctgagc

SEQ ID NO: 286455 - DNA, 15 bp, Homo sapiens
gcatctgtctctgag

SEQ ID NO: 286456 - DNA, 15 bp, Homo sapiens
ggcatctgtctctga

SEQ ID NO: 286457 - DNA, 15 bp, Homo sapiens
aggcatctgtctctg

SEQ ID NO: 286458 - DNA, 15 bp, Homo sapiens
aaggcatctgtctct

SEQ ID NO: 286459 - DNA, 15 bp, Homo sapiens
taaggcatctgtctc

SEQ ID NO: 286460 - DNA, 15 bp, Homo sapiens
ataaggcatctgtct

SEQ ID NO: 286461 - DNA, 15 bp, Homo sapiens
tataaggcatctgtc

SEQ ID NO: 286462 - DNA, 15 bp, Homo sapiens
gtataaggcatctgt

SEQ ID NO: 286463 - DNA, 15 bp, Homo sapiens
agtataaggcatctg

SEQ ID NO: 286464 - DNA, 15 bp, Homo sapiens
tagtataaggcatct

SEQ ID NO: 286465 - DNA, 15 bp, Homo sapiens
ttagtataaggcatc

SEQ ID NO: 286466 - DNA, 15 bp, Homo sapiens
tttagtataaggcat

SEQ ID NO: 286467 - DNA, 15 bp, Homo sapiens
gtttagtataaggca

SEQ ID NO: 286468 - DNA, 15 bp, Homo sapiens
ggtttagtataaggc

SEQ ID NO: 286469 - DNA, 15 bp, Homo sapiens
gggtttagtataagg

SEQ ID NO: 286470 - DNA, 15 bp, Homo sapiens
ggggtttagtataag

SEQ ID NO: 286471 - DNA, 15 bp, Homo sapiens
aggggtttagtataa

SEQ ID NO: 286472 - DNA, 15 bp, Homo sapiens
aaggggtttagtata

SEQ ID NO: 286473 - DNA, 15 bp, Homo sapiens
gaaggggtttagtat

SEQ ID NO: 286474 - DNA, 15 bp, Homo sapiens
tgaaggggtttagta

SEQ ID NO: 286475 - DNA, 15 bp, Homo sapiens
ttgaaggggtttagt

SEQ ID NO: 286476 - DNA, 15 bp, Homo sapiens
attgaaggggtttag

SEQ ID NO: 286477 - DNA, 15 bp, Homo sapiens
cattgaaggggttta

SEQ ID NO: 286478 - DNA, 15 bp, Homo sapiens
acattgaaggggttt

SEQ ID NO: 286479 - DNA, 15 bp, Homo sapiens
cacattgaaggggtt

SEQ ID NO: 286480 - DNA, 15 bp, Homo sapiens
ccacattgaaggggt

SEQ ID NO: 286481 - DNA, 15 bp, Homo sapiens
accacattgaagggg

SEQ ID NO: 286482 - DNA, 15 bp, Homo sapiens
gaccacattgaaggg

SEQ ID NO: 286483 - DNA, 15 bp, Homo sapiens
agaccacattgaagg

SEQ ID NO: 286484 - DNA, 15 bp, Homo sapiens
tagaccacattgaag

SEQ ID NO: 286485 - DNA, 15 bp, Homo sapiens
ttagaccacattgaa

SEQ ID NO: 286486 - DNA, 15 bp, Homo sapiens
attagaccacattga

SEQ ID NO: 286487 - DNA, 15 bp, Homo sapiens
aattagaccacattg

SEQ ID NO: 286488 - DNA, 15 bp, Homo sapiens
caattagaccacatt

SEQ ID NO: 286489 - DNA, 15 bp, Homo sapiens
acaattagaccacat

SEQ ID NO: 286490 - DNA, 15 bp, Homo sapiens
aacaattagaccaca

SEQ ID NO: 286491 - DNA, 15 bp, Homo sapiens
aaacaattagaccac

SEQ ID NO: 286492 - DNA, 15 bp, Homo sapiens
gaaacaattagacca

SEQ ID NO: 286493 - DNA, 15 bp, Homo sapiens
tgaaacaattagacc

SEQ ID NO: 286494 - DNA, 15 bp, Homo sapiens
ttgaaacaattagac

SEQ ID NO: 286495 - DNA, 15 bp, Homo sapiens
tttgaaacaattaga

SEQ ID NO: 286496 - DNA, 15 bp, Homo sapiens
atttgaaacaattag

SEQ ID NO: 286497 - DNA, 15 bp, Homo sapiens
catttgaaacaatta

SEQ ID NO: 286498 - DNA, 15 bp, Homo sapiens
tcatttgaaacaatt

SEQ ID NO: 286499 - DNA, 15 bp, Homo sapiens
ctcatttgaaacaat

SEQ ID NO: 286500 - DNA, 15 bp, Homo sapiens
tctcatttgaaacaa

SEQ ID NO: 286501 - DNA, 15 bp, Homo sapiens
ttctcatttgaaaca

SEQ ID NO: 286502 - DNA, 15 bp, Homo sapiens
tttctcatttgaaac

SEQ ID NO: 286503 - DNA, 15 bp, Homo sapiens
ttttctcatttgaaa

SEQ ID NO: 286504 - DNA, 15 bp, Homo sapiens
attttctcatttgaa

SEQ ID NO: 286505 - DNA, 15 bp, Homo sapiens
aattttctcatttga

SEQ ID NO: 286506 - DNA, 15 bp, Homo sapiens
taattttctcatttg

SEQ ID NO: 286507 - DNA, 15 bp, Homo sapiens
ttaattttctcattt

SEQ ID NO: 286508 - DNA, 15 bp, Homo sapiens
tttaattttctcatt

SEQ ID NO: 286509 - DNA, 15 bp, Homo sapiens
ttttaattttctcat

SEQ ID NO: 286510 - DNA, 15 bp, Homo sapiens
attttaattttctca

SEQ ID NO: 286511 - DNA, 15 bp, Homo sapiens
tattttaattttctc

SEQ ID NO: 286512 - DNA, 15 bp, Homo sapiens
ttattttaattttct

SEQ ID NO: 286513 - DNA, 15 bp, Homo sapiens
cttattttaattttc

SEQ ID NO: 286514 - DNA, 15 bp, Homo sapiens
gcttattttaatttt

SEQ ID NO: 286515 - DNA, 15 bp, Homo sapiens
tgcttattttaattt

SEQ ID NO: 286516 - DNA, 15 bp, Homo sapiens
atgcttattttaatt

SEQ ID NO: 286517 - DNA, 15 bp, Homo sapiens
aatgcttattttaat

SEQ ID NO: 286518 - DNA, 15 bp, Homo sapiens
aaatgcttattttaa

SEQ ID NO: 286519 - DNA, 15 bp, Homo sapiens
aaaatgcttatttta

SEQ ID NO: 286520 - DNA, 15 bp, Homo sapiens
taaaatgcttatttt

SEQ ID NO: 286521 - DNA, 15 bp, Homo sapiens
ataaaatgcttattt

SEQ ID NO: 286522 - DNA, 15 bp, Homo sapiens
aataaaatgcttatt

SEQ ID NO: 286523 - DNA, 15 bp, Homo sapiens
aaataaaatgcttat

SEQ ID NO: 286524 - DNA, 15 bp, Homo sapiens
aaaataaaatgctta

SEQ ID NO: 286525 - DNA, 15 bp, Homo sapiens
taaaataaaatgctt

SEQ ID NO: 286526 - DNA, 15 bp, Homo sapiens
ttaaaataaaatgct

SEQ ID NO: 286527 - DNA, 15 bp, Homo sapiens
cttaaaataaaatgc

SEQ ID NO: 286528 - DNA, 15 bp, Homo sapiens
gcttaaaataaaatg

SEQ ID NO: 286529 - DNA, 15 bp, Homo sapiens
ggcttaaaataaaat

SEQ ID NO: 286530 - DNA, 15 bp, Homo sapiens
gggcttaaaataaaa

SEQ ID NO: 286531 - DNA, 15 bp, Homo sapiens
agggcttaaaataaa

SEQ ID NO: 286532 - DNA, 15 bp, Homo sapiens
cagggcttaaaataa

SEQ ID NO: 286533 - DNA, 15 bp, Homo sapiens
acagggcttaaaata

SEQ ID NO: 286534 - DNA, 15 bp, Homo sapiens
gacagggcttaaaat

SEQ ID NO: 286535 - DNA, 15 bp, Homo sapiens
agacagggcttaaaa

SEQ ID NO: 286536 - DNA, 15 bp, Homo sapiens
cagacagggcttaaa

SEQ ID NO: 286537 - DNA, 15 bp, Homo sapiens
tcagacagggcttaa

SEQ ID NO: 286538 - DNA, 15 bp, Homo sapiens
atcagacagggctta

SEQ ID NO: 286539 - DNA, 15 bp, Homo sapiens
tatcagacagggctt

SEQ ID NO: 286540 - DNA, 15 bp, Homo sapiens
ttatcagacagggct

SEQ ID NO: 286541 - DNA, 15 bp, Homo sapiens
gttatcagacagggc

SEQ ID NO: 286542 - DNA, 15 bp, Homo sapiens
agttatcagacaggg

SEQ ID NO: 286543 - DNA, 15 bp, Homo sapiens
aagttatcagacagg

SEQ ID NO: 286544 - DNA, 15 bp, Homo sapiens
caagttatcagacag

SEQ ID NO: 286545 - DNA, 15 bp, Homo sapiens
ccaagttatcagaca

SEQ ID NO: 286546 - DNA, 15 bp, Homo sapiens
gccaagttatcagac

SEQ ID NO: 286547 - DNA, 15 bp, Homo sapiens
agccaagttatcaga

SEQ ID NO: 286548 - DNA, 15 bp, Homo sapiens
aagccaagttatcag

SEQ ID NO: 286549 - DNA, 15 bp, Homo sapiens
aaagccaagttatca

SEQ ID NO: 286550 - DNA, 15 bp, Homo sapiens
caaagccaagttatc

SEQ ID NO: 286551 - DNA, 15 bp, Homo sapiens
ccaaagccaagttat

SEQ ID NO: 286552 - DNA, 15 bp, Homo sapiens
cccaaagccaagtta

SEQ ID NO: 286553 - DNA, 15 bp, Homo sapiens
tcccaaagccaagtt

SEQ ID NO: 286554 - DNA, 15 bp, Homo sapiens
ttcccaaagccaagt

SEQ ID NO: 286555 - DNA, 15 bp, Homo sapiens
tttcccaaagccaag

SEQ ID NO: 286556 - DNA, 15 bp, Homo sapiens
atttcccaaagccaa

SEQ ID NO: 286557 - DNA, 15 bp, Homo sapiens
tatttcccaaagcca

SEQ ID NO: 286558 - DNA, 15 bp, Homo sapiens
ctatttcccaaagcc

SEQ ID NO: 286559 - DNA, 15 bp, Homo sapiens
cctatttcccaaagc

SEQ ID NO: 286560 - DNA, 15 bp, Homo sapiens
tcctatttcccaaag

SEQ ID NO: 286561 - DNA, 15 bp, Homo sapiens
ttcctatttcccaaa

SEQ ID NO: 286562 - DNA, 15 bp, Homo sapiens
gttcctatttcccaa

SEQ ID NO: 286563 - DNA, 15 bp, Homo sapiens
agttcctatttccca

SEQ ID NO: 286564 - DNA, 15 bp, Homo sapiens
aagttcctatttccc

SEQ ID NO: 286565 - DNA, 15 bp, Homo sapiens
gaagttcctatttcc

SEQ ID NO: 286566 - DNA, 15 bp, Homo sapiens
tgaagttcctatttc

SEQ ID NO: 286567 - DNA, 15 bp, Homo sapiens
ctgaagttcctattt

SEQ ID NO: 286568 - DNA, 15 bp, Homo sapiens
gctgaagttcctatt

SEQ ID NO: 286569 - DNA, 15 bp, Homo sapiens
tgctgaagttcctat

SEQ ID NO: 286570 - DNA, 15 bp, Homo sapiens
ttgctgaagttccta

SEQ ID NO: 286571 - DNA, 15 bp, Homo sapiens
gttgctgaagttcct

SEQ ID NO: 286572 - DNA, 15 bp, Homo sapiens
ggttgctgaagttcc

SEQ ID NO: 286573 - DNA, 15 bp, Homo sapiens
gggttgctgaagttc

SEQ ID NO: 286574 - DNA, 15 bp, Homo sapiens
tgggttgctgaagtt

SEQ ID NO: 286575 - DNA, 15 bp, Homo sapiens
ctgggttgctgaagt

SEQ ID NO: 286576 - DNA, 15 bp, Homo sapiens
gctgggttgctgaag

SEQ ID NO: 286577 - DNA, 15 bp, Homo sapiens
tgctgggttgctgaa

SEQ ID NO: 286578 - DNA, 15 bp, Homo sapiens
atgctgggttgctga

SEQ ID NO: 286579 - DNA, 15 bp, Homo sapiens
aatgctgggttgctg

SEQ ID NO: 286580 - DNA, 15 bp, Homo sapiens
gaatgctgggttgct

SEQ ID NO: 286581 - DNA, 15 bp, Homo sapiens
tgaatgctgggttgc

SEQ ID NO: 286582 - DNA, 15 bp, Homo sapiens
ttgaatgctgggttg

SEQ ID NO: 286583 - DNA, 15 bp, Homo sapiens
tttgaatgctgggtt

SEQ ID NO: 286584 - DNA, 15 bp, Homo sapiens
ttttgaatgctgggt

SEQ ID NO: 286585 - DNA, 15 bp, Homo sapiens
gttttgaatgctggg

SEQ ID NO: 286586 - DNA, 15 bp, Homo sapiens
tgttttgaatgctgg

SEQ ID NO: 286587 - DNA, 15 bp, Homo sapiens
ttgttttgaatgctg

SEQ ID NO: 286588 - DNA, 15 bp, Homo sapiens
attgttttgaatgct

SEQ ID NO: 286589 - DNA, 15 bp, Homo sapiens
cattgttttgaatgc

SEQ ID NO: 286590 - DNA, 15 bp, Homo sapiens
ccattgttttgaatg

SEQ ID NO: 286591 - DNA, 15 bp, Homo sapiens
tccattgttttgaat

SEQ ID NO: 286592 - DNA, 15 bp, Homo sapiens
atccattgttttgaa

SEQ ID NO: 286593 - DNA, 15 bp, Homo sapiens
tatccattgttttga

SEQ ID NO: 286594 - DNA, 15 bp, Homo sapiens
gtatccattgttttg

SEQ ID NO: 286595 - DNA, 15 bp, Homo sapiens
tgtatccattgtttt

SEQ ID NO: 286596 - DNA, 15 bp, Homo sapiens
ttgtatccattgttt

SEQ ID NO: 286597 - DNA, 15 bp, Homo sapiens
gttgtatccattgtt

SEQ ID NO: 286598 - DNA, 15 bp, Homo sapiens
tgttgtatccattgt

SEQ ID NO: 286599 - DNA, 15 bp, Homo sapiens
ttgttgtatccattg

SEQ ID NO: 286600 - DNA, 15 bp, Homo sapiens
tttgttgtatccatt

SEQ ID NO: 286601 - DNA, 15 bp, Homo sapiens
ttttgttgtatccat

SEQ ID NO: 286602 - DNA, 15 bp, Homo sapiens
tttttgttgtatcca

SEQ ID NO: 286603 - DNA, 15 bp, Homo sapiens
atttttgttgtatcc

SEQ ID NO: 286604 - DNA, 15 bp, Homo sapiens
aatttttgttgtatc

SEQ ID NO: 286605 - DNA, 15 bp, Homo sapiens
aaatttttgttgtat

SEQ ID NO: 286606 - DNA, 15 bp, Homo sapiens
aaaatttttgttgta

SEQ ID NO: 286607 - DNA, 15 bp, Homo sapiens
taaaatttttgttgt

SEQ ID NO: 286608 - DNA, 15 bp, Homo sapiens
ttaaaatttttgttg

SEQ ID NO: 286609 - DNA, 15 bp, Homo sapiens
cttaaaatttttgtt

SEQ ID NO: 286610 - DNA, 15 bp, Homo sapiens
tcttaaaatttttgt

SEQ ID NO: 286611 - DNA, 15 bp, Homo sapiens
gtcttaaaatttttg

SEQ ID NO: 286612 - DNA, 15 bp, Homo sapiens
tgtcttaaaattttt

SEQ ID NO: 286613 - DNA, 15 bp, Homo sapiens
ttgtcttaaaatttt

SEQ ID NO: 286614 - DNA, 15 bp, Homo sapiens
gttgtcttaaaattt

SEQ ID NO: 286615 - DNA, 15 bp, Homo sapiens
agttgtcttaaaatt

SEQ ID NO: 286616 - DNA, 15 bp, Homo sapiens
aagttgtcttaaaat

SEQ ID NO: 286617 - DNA, 15 bp, Homo sapiens
taagttgtcttaaaa

SEQ ID NO: 286618 - DNA, 15 bp, Homo sapiens
ttaagttgtcttaaa

SEQ ID NO: 286619 - DNA, 15 bp, Homo sapiens
attaagttgtcttaa

SEQ ID NO: 286620 - DNA, 15 bp, Homo sapiens
tattaagttgtctta

SEQ ID NO: 286621 - DNA, 15 bp, Homo sapiens
ctattaagttgtctt

SEQ ID NO: 286622 - DNA, 15 bp, Homo sapiens
actattaagttgtct

SEQ ID NO: 286623 - DNA, 15 bp, Homo sapiens
gactattaagttgtc

SEQ ID NO: 286624 - DNA, 15 bp, Homo sapiens
agactattaagttgt

SEQ ID NO: 286625 - DNA, 15 bp, Homo sapiens
aagactattaagttg

SEQ ID NO: 286626 - DNA, 15 bp, Homo sapiens
caagactattaagtt

SEQ ID NO: 286627 - DNA, 15 bp, Homo sapiens
gcaagactattaagt

SEQ ID NO: 286628 - DNA, 15 bp, Homo sapiens
agcaagactattaag

SEQ ID NO: 286629 - DNA, 15 bp, Homo sapiens
aagcaagactattaa

SEQ ID NO: 286630 - DNA, 15 bp, Homo sapiens
aaagcaagactatta

SEQ ID NO: 286631 - DNA, 15 bp, Homo sapiens
aaaagcaagactatt

SEQ ID NO: 286632 - DNA, 15 bp, Homo sapiens
gaaaagcaagactat

SEQ ID NO: 286633 - DNA, 15 bp, Homo sapiens
agaaaagcaagacta

SEQ ID NO: 286634 - DNA, 15 bp, Homo sapiens
gagaaaagcaagact

SEQ ID NO: 286635 - DNA, 15 bp, Homo sapiens
ggagaaaagcaagac

SEQ ID NO: 286636 - DNA, 15 bp, Homo sapiens
gggagaaaagcaaga

SEQ ID NO: 286637 - DNA, 15 bp, Homo sapiens
cgggagaaaagcaag

SEQ ID NO: 286638 - DNA, 15 bp, Homo sapiens
tcgggagaaaagcaa

SEQ ID NO: 286639 - DNA, 15 bp, Homo sapiens
ctcgggagaaaagca

SEQ ID NO: 286640 - DNA, 15 bp, Homo sapiens
actcgggagaaaagc

SEQ ID NO: 286641 - DNA, 15 bp, Homo sapiens
aactcgggagaaaag

SEQ ID NO: 286642 - DNA, 15 bp, Homo sapiens
aaactcgggagaaaa

SEQ ID NO: 286643 - DNA, 15 bp, Homo sapiens
aaaactcgggagaaa

SEQ ID NO: 286644 - DNA, 15 bp, Homo sapiens
caaaactcgggagaa

SEQ ID NO: 286645 - DNA, 15 bp, Homo sapiens
ccaaaactcgggaga

SEQ ID NO: 286646 - DNA, 15 bp, Homo sapiens
tccaaaactcgggag

SEQ ID NO: 286647 - DNA, 15 bp, Homo sapiens
ttccaaaactcggga

SEQ ID NO: 286648 - DNA, 15 bp, Homo sapiens
tttccaaaactcggg

SEQ ID NO: 286649 - DNA, 15 bp, Homo sapiens
ttttccaaaactcgg

SEQ ID NO: 286650 - DNA, 15 bp, Homo sapiens
tttttccaaaactcg

SEQ ID NO: 286651 - DNA, 15 bp, Homo sapiens
gtttttccaaaactc

SEQ ID NO: 286652 - DNA, 15 bp, Homo sapiens
tgtttttccaaaact

SEQ ID NO: 286653 - DNA, 15 bp, Homo sapiens
atgtttttccaaaac

SEQ ID NO: 286654 - DNA, 15 bp, Homo sapiens
catgtttttccaaaa

SEQ ID NO: 286655 - DNA, 15 bp, Homo sapiens
acatgtttttccaaa

SEQ ID NO: 286656 - DNA, 15 bp, Homo sapiens
cacatgtttttccaa

SEQ ID NO: 286657 - DNA, 15 bp, Homo sapiens
gcacatgtttttcca

SEQ ID NO: 286658 - DNA, 15 bp, Homo sapiens
ggcacatgtttttcc

SEQ ID NO: 286659 - DNA, 15 bp, Homo sapiens
aggcacatgtttttc

SEQ ID NO: 286660 - DNA, 15 bp, Homo sapiens
aaggcacatgttttt

SEQ ID NO: 286661 - DNA, 15 bp, Homo sapiens
aaaggcacatgtttt

SEQ ID NO: 286662 - DNA, 15 bp, Homo sapiens
aaaaggcacatgttt

SEQ ID NO: 286663 - DNA, 15 bp, Homo sapiens
gaaaaggcacatgtt

SEQ ID NO: 286664 - DNA, 15 bp, Homo sapiens
ggaaaaggcacatgt

SEQ ID NO: 286665 - DNA, 15 bp, Homo sapiens
tggaaaaggcacatg

SEQ ID NO: 286666 - DNA, 15 bp, Homo sapiens
atggaaaaggcacat

SEQ ID NO: 286667 - DNA, 15 bp, Homo sapiens
aatggaaaaggcaca

SEQ ID NO: 286668 - DNA, 15 bp, Homo sapiens
gaatggaaaaggcac

SEQ ID NO: 286669 - DNA, 15 bp, Homo sapiens
agaatggaaaaggca

SEQ ID NO: 286670 - DNA, 15 bp, Homo sapiens
aagaatggaaaaggc

SEQ ID NO: 286671 - DNA, 15 bp, Homo sapiens
aaagaatggaaaagg

SEQ ID NO: 286672 - DNA, 15 bp, Homo sapiens
aaaagaatggaaaag

SEQ ID NO: 286673 - DNA, 15 bp, Homo sapiens
taaaagaatggaaaa

SEQ ID NO: 286674 - DNA, 15 bp, Homo sapiens
ataaaagaatggaaa

SEQ ID NO: 286675 - DNA, 15 bp, Homo sapiens
gataaaagaatggaa

SEQ ID NO: 286676 - DNA, 15 bp, Homo sapiens
agataaaagaatgga

SEQ ID NO: 286677 - DNA, 15 bp, Homo sapiens
cagataaaagaatgg

SEQ ID NO: 286678 - DNA, 15 bp, Homo sapiens
tcagataaaagaatg

SEQ ID NO: 286679 - DNA, 15 bp, Homo sapiens
gtcagataaaagaat

SEQ ID NO: 286680 - DNA, 15 bp, Homo sapiens
tgtcagataaaagaa

SEQ ID NO: 286681 - DNA, 15 bp, Homo sapiens
ttgtcagataaaaga

SEQ ID NO: 286682 - DNA, 15 bp, Homo sapiens
attgtcagataaaag

SEQ ID NO: 286683 - DNA, 15 bp, Homo sapiens
cattgtcagataaaa

SEQ ID NO: 286684 - DNA, 15 bp, Homo sapiens
tcattgtcagataaa

SEQ ID NO: 286685 - DNA, 15 bp, Homo sapiens
ctcattgtcagataa

SEQ ID NO: 286686 - DNA, 15 bp, Homo sapiens
actcattgtcagata

SEQ ID NO: 286687 - DNA, 15 bp, Homo sapiens
gactcattgtcagat

SEQ ID NO: 286688 - DNA, 15 bp, Homo sapiens
agactcattgtcaga

SEQ ID NO: 286689 - DNA, 15 bp, Homo sapiens
aagactcattgtcag

SEQ ID NO: 286690 - DNA, 15 bp, Homo sapiens
taagactcattgtca

SEQ ID NO: 286691 - DNA, 15 bp, Homo sapiens
gtaagactcattgtc

SEQ ID NO: 286692 - DNA, 15 bp, Homo sapiens
agtaagactcattgt

SEQ ID NO: 286693 - DNA, 15 bp, Homo sapiens
cagtaagactcattg

SEQ ID NO: 286694 - DNA, 15 bp, Homo sapiens
ccagtaagactcatt

SEQ ID NO: 286695 - DNA, 15 bp, Homo sapiens
accagtaagactcat

SEQ ID NO: 286696 - DNA, 15 bp, Homo sapiens
aaccagtaagactca

SEQ ID NO: 286697 - DNA, 15 bp, Homo sapiens
aaaccagtaagactc

SEQ ID NO: 286698 - DNA, 15 bp, Homo sapiens
taaaccagtaagact

SEQ ID NO: 286699 - DNA, 15 bp, Homo sapiens
ttaaaccagtaagac

SEQ ID NO: 286700 - DNA, 15 bp, Homo sapiens
cttaaaccagtaaga

SEQ ID NO: 286701 - DNA, 15 bp, Homo sapiens
tcttaaaccagtaag

SEQ ID NO: 286702 - DNA, 15 bp, Homo sapiens
ctcttaaaccagtaa

SEQ ID NO: 286703 - DNA, 15 bp, Homo sapiens
tctcttaaaccagta

SEQ ID NO: 286704 - DNA, 15 bp, Homo sapiens
atctcttaaaccagt

SEQ ID NO: 286705 - DNA, 15 bp, Homo sapiens
gatctcttaaaccag

SEQ ID NO: 286706 - DNA, 15 bp, Homo sapiens
agatctcttaaacca

SEQ ID NO: 286707 - DNA, 15 bp, Homo sapiens
cagatctcttaaacc

SEQ ID NO: 286708 - DNA, 15 bp, Homo sapiens
acagatctcttaaac

SEQ ID NO: 286709 - DNA, 15 bp, Homo sapiens
aacagatctcttaaa

SEQ ID NO: 286710 - DNA, 15 bp, Homo sapiens
gaacagatctcttaa

SEQ ID NO: 286711 - DNA, 15 bp, Homo sapiens
cgaacagatctctta

SEQ ID NO: 286712 - DNA, 15 bp, Homo sapiens
gcgaacagatctctt

SEQ ID NO: 286713 - DNA, 15 bp, Homo sapiens
agcgaacagatctct

SEQ ID NO: 286714 - DNA, 15 bp, Homo sapiens
cagcgaacagatctc

SEQ ID NO: 286715 - DNA, 15 bp, Homo sapiens
tcagcgaacagatct

SEQ ID NO: 286716 - DNA, 15 bp, Homo sapiens
ctcagcgaacagatc

SEQ ID NO: 286717 - DNA, 15 bp, Homo sapiens
tctcagcgaacagat

SEQ ID NO: 286718 - DNA, 15 bp, Homo sapiens
ctctcagcgaacaga

SEQ ID NO: 286719 - DNA, 15 bp, Homo sapiens
actctcagcgaacag

SEQ ID NO: 286720 - DNA, 15 bp, Homo sapiens
cactctcagcgaaca

SEQ ID NO: 286721 - DNA, 15 bp, Homo sapiens
gcactctcagcgaac

SEQ ID NO: 286722 - DNA, 15 bp, Homo sapiens
tgcactctcagcgaa

SEQ ID NO: 286723 - DNA, 15 bp, Homo sapiens
ttgcactctcagcga

SEQ ID NO: 286724 - DNA, 15 bp, Homo sapiens
gttgcactctcagcg

SEQ ID NO: 286725 - DNA, 15 bp, Homo sapiens
tgttgcactctcagc

SEQ ID NO: 286726 - DNA, 15 bp, Homo sapiens
ctgttgcactctcag

SEQ ID NO: 286727 - DNA, 15 bp, Homo sapiens
actgttgcactctca

SEQ ID NO: 286728 - DNA, 15 bp, Homo sapiens
tactgttgcactctc

SEQ ID NO: 286729 - DNA, 15 bp, Homo sapiens
gtactgttgcactct

SEQ ID NO: 286730 - DNA, 15 bp, Homo sapiens
tgtactgttgcactc

SEQ ID NO: 286731 - DNA, 15 bp, Homo sapiens
ttgtactgttgcact

SEQ ID NO: 286732 - DNA, 15 bp, Homo sapiens
tttgtactgttgcac

SEQ ID NO: 286733 - DNA, 15 bp, Homo sapiens
ttttgtactgttgca

SEQ ID NO: 286734 - DNA, 15 bp, Homo sapiens
attttgtactgttgc

SEQ ID NO: 286735 - DNA, 15 bp, Homo sapiens
tattttgtactgttg

SEQ ID NO: 286736 - DNA, 15 bp, Homo sapiens
ttattttgtactgtt

SEQ ID NO: 286737 - DNA, 15 bp, Homo sapiens
gttattttgtactgt

SEQ ID NO: 286738 - DNA, 15 bp, Homo sapiens
tgttattttgtactg

SEQ ID NO: 286739 - DNA, 15 bp, Homo sapiens
atgttattttgtact

SEQ ID NO: 286740 - DNA, 15 bp, Homo sapiens
aatgttattttgtac

SEQ ID NO: 286741 - DNA, 15 bp, Homo sapiens
aaatgttattttgta

SEQ ID NO: 286742 - DNA, 15 bp, Homo sapiens
aaaatgttattttgt

SEQ ID NO: 286743 - DNA, 15 bp, Homo sapiens
aaaaatgttattttg

SEQ ID NO: 286744 - DNA, 15 bp, Homo sapiens
aaaaaatgttatttt

SEQ ID NO: 286745 - DNA, 15 bp, Homo sapiens
aaaaaaatgttattt

SEQ ID NO: 286746 - DNA, 15 bp, Homo sapiens
gaaaaaaatgttatt

SEQ ID NO: 286747 - DNA, 15 bp, Homo sapiens
tgaaaaaaatgttat

SEQ ID NO: 286748 - DNA, 15 bp, Homo sapiens
atgaaaaaaatgtta

SEQ ID NO: 286749 - DNA, 15 bp, Homo sapiens
gatgaaaaaaatgtt

SEQ ID NO: 286750 - DNA, 15 bp, Homo sapiens
agatgaaaaaaatgt

SEQ ID NO: 286751 - DNA, 15 bp, Homo sapiens
cagatgaaaaaaatg

SEQ ID NO: 286752 - DNA, 15 bp, Homo sapiens
tcagatgaaaaaaat

SEQ ID NO: 286753 - DNA, 15 bp, Homo sapiens
atcagatgaaaaaaa

SEQ ID NO: 286754 - DNA, 15 bp, Homo sapiens
catcagatgaaaaaa

SEQ ID NO: 286755 - DNA, 15 bp, Homo sapiens
acatcagatgaaaaa

SEQ ID NO: 286756 - DNA, 15 bp, Homo sapiens
aacatcagatgaaaa

SEQ ID NO: 286757 - DNA, 15 bp, Homo sapiens
aaacatcagatgaaa

SEQ ID NO: 286758 - DNA, 15 bp, Homo sapiens
caaacatcagatgaa

SEQ ID NO: 286759 - DNA, 15 bp, Homo sapiens
gcaaacatcagatga

SEQ ID NO: 286760 - DNA, 15 bp, Homo sapiens
tgcaaacatcagatg

SEQ ID NO: 286761 - DNA, 15 bp, Homo sapiens
ttgcaaacatcagat

SEQ ID NO: 286762 - DNA, 15 bp, Homo sapiens
tttgcaaacatcaga

SEQ ID NO: 286763 - DNA, 15 bp, Homo sapiens
atttgcaaacatcag

SEQ ID NO: 286764 - DNA, 15 bp, Homo sapiens
aatttgcaaacatca

SEQ ID NO: 286765 - DNA, 15 bp, Homo sapiens
gaatttgcaaacatc

SEQ ID NO: 286766 - DNA, 15 bp, Homo sapiens
tgaatttgcaaacat

SEQ ID NO: 286767 - DNA, 15 bp, Homo sapiens
atgaatttgcaaaca

SEQ ID NO: 286768 - DNA, 15 bp, Homo sapiens
gatgaatttgcaaac

SEQ ID NO: 286769 - DNA, 15 bp, Homo sapiens
agatgaatttgcaaa

SEQ ID NO: 286770 - DNA, 15 bp, Homo sapiens
cagatgaatttgcaa

SEQ ID NO: 286771 - DNA, 15 bp, Homo sapiens
ccagatgaatttgca

SEQ ID NO: 286772 - DNA, 15 bp, Homo sapiens
tccagatgaatttgc

SEQ ID NO: 286773 - DNA, 15 bp, Homo sapiens
gtccagatgaatttg

SEQ ID NO: 286774 - DNA, 15 bp, Homo sapiens
tgtccagatgaattt

SEQ ID NO: 286775 - DNA, 15 bp, Homo sapiens
ctgtccagatgaatt

SEQ ID NO: 286776 - DNA, 15 bp, Homo sapiens
cctgtccagatgaat

SEQ ID NO: 286777 - DNA, 15 bp, Homo sapiens
ccctgtccagatgaa

SEQ ID NO: 286778 - DNA, 15 bp, Homo sapiens
tccctgtccagatga

SEQ ID NO: 286779 - DNA, 15 bp, Homo sapiens
ttccctgtccagatg

SEQ ID NO: 286780 - DNA, 15 bp, Homo sapiens
cttccctgtccagat

SEQ ID NO: 286781 - DNA, 15 bp, Homo sapiens
ccttccctgtccaga

SEQ ID NO: 286782 - DNA, 15 bp, Homo sapiens
cccttccctgtccag

SEQ ID NO: 286783 - DNA, 15 bp, Homo sapiens
gcccttccctgtcca

SEQ ID NO: 286784 - DNA, 15 bp, Homo sapiens
tgcccttccctgtcc

SEQ ID NO: 286785 - DNA, 15 bp, Homo sapiens
ctgcccttccctgtc

SEQ ID NO: 286786 - DNA, 15 bp, Homo sapiens
tctgcccttccctgt

SEQ ID NO: 286787 - DNA, 15 bp, Homo sapiens
gtctgcccttccctg

SEQ ID NO: 286788 - DNA, 15 bp, Homo sapiens
tgtctgcccttccct

SEQ ID NO: 286789 - DNA, 15 bp, Homo sapiens
atgtctgcccttccc

SEQ ID NO: 286790 - DNA, 15 bp, Homo sapiens
aatgtctgcccttcc

SEQ ID NO: 286791 - DNA, 15 bp, Homo sapiens
caatgtctgcccttc

SEQ ID NO: 286792 - DNA, 15 bp, Homo sapiens
ccaatgtctgccctt

SEQ ID NO: 286793 - DNA, 15 bp, Homo sapiens
tccaatgtctgccct

SEQ ID NO: 286794 - DNA, 15 bp, Homo sapiens
ttccaatgtctgccc

SEQ ID NO: 286795 - DNA, 15 bp, Homo sapiens
tttccaatgtctgcc

SEQ ID NO: 286796 - DNA, 15 bp, Homo sapiens
atttccaatgtctgc

SEQ ID NO: 286797 - DNA, 15 bp, Homo sapiens
catttccaatgtctg

SEQ ID NO: 286798 - DNA, 15 bp, Homo sapiens
tcatttccaatgtct

SEQ ID NO: 286799 - DNA, 15 bp, Homo sapiens
ctcatttccaatgtc

SEQ ID NO: 286800 - DNA, 15 bp, Homo sapiens
actcatttccaatgt

SEQ ID NO: 286801 - DNA, 15 bp, Homo sapiens
cactcatttccaatg

SEQ ID NO: 286802 - DNA, 15 bp, Homo sapiens
tcactcatttccaat

SEQ ID NO: 286803 - DNA, 15 bp, Homo sapiens
ctcactcatttccaa

SEQ ID NO: 286804 - DNA, 15 bp, Homo sapiens
cctcactcatttcca

SEQ ID NO: 286805 - DNA, 15 bp, Homo sapiens
gcctcactcatttcc

SEQ ID NO: 286806 - DNA, 15 bp, Homo sapiens
cgcctcactcatttc

SEQ ID NO: 286807 - DNA, 15 bp, Homo sapiens
ccgcctcactcattt

SEQ ID NO: 286808 - DNA, 15 bp, Homo sapiens
tccgcctcactcatt

SEQ ID NO: 286809 - DNA, 15 bp, Homo sapiens
atccgcctcactcat

SEQ ID NO: 286810 - DNA, 15 bp, Homo sapiens
gatccgcctcactca

SEQ ID NO: 286811 - DNA, 15 bp, Homo sapiens
agatccgcctcactc

SEQ ID NO: 286812 - DNA, 15 bp, Homo sapiens
cagatccgcctcact

SEQ ID NO: 286813 - DNA, 15 bp, Homo sapiens
ccagatccgcctcac

SEQ ID NO: 286814 - DNA, 15 bp, Homo sapiens
accagatccgcctca

SEQ ID NO: 286815 - DNA, 15 bp, Homo sapiens
caccagatccgcctc

SEQ ID NO: 286816 - DNA, 15 bp, Homo sapiens
tcaccagatccgcct

SEQ ID NO: 286817 - DNA, 15 bp, Homo sapiens
ctcaccagatccgcc

SEQ ID NO: 286818 - DNA, 15 bp, Homo sapiens
cctcaccagatccgc

SEQ ID NO: 286819 - DNA, 15 bp, Homo sapiens
tcctcaccagatccg

SEQ ID NO: 286820 - DNA, 15 bp, Homo sapiens
gtcctcaccagatcc

SEQ ID NO: 286821 - DNA, 15 bp, Homo sapiens
agtcctcaccagatc

SEQ ID NO: 286822 - DNA, 15 bp, Homo sapiens
cagtcctcaccagat

SEQ ID NO: 286823 - DNA, 15 bp, Homo sapiens
gcagtcctcaccaga

SEQ ID NO: 286824 - DNA, 15 bp, Homo sapiens
tgcagtcctcaccag

SEQ ID NO: 286825 - DNA, 15 bp, Homo sapiens
ttgcagtcctcacca

SEQ ID NO: 286826 - DNA, 15 bp, Homo sapiens
attgcagtcctcacc

SEQ ID NO: 286827 - DNA, 15 bp, Homo sapiens
cattgcagtcctcac

SEQ ID NO: 286828 - DNA, 15 bp, Homo sapiens
tcattgcagtcctca

SEQ ID NO: 286829 - DNA, 15 bp, Homo sapiens
ctcattgcagtcctc

SEQ ID NO: 286830 - DNA, 15 bp, Homo sapiens
tctcattgcagtcct

SEQ ID NO: 286831 - DNA, 15 bp, Homo sapiens
ctctcattgcagtcc

SEQ ID NO: 286832 - DNA, 15 bp, Homo sapiens
gctctcattgcagtc

SEQ ID NO: 286833 - DNA, 15 bp, Homo sapiens
agctctcattgcagt

SEQ ID NO: 286834 - DNA, 15 bp, Homo sapiens
cagctctcattgcag

SEQ ID NO: 286835 - DNA, 15 bp, Homo sapiens
tcagctctcattgca

SEQ ID NO: 286836 - DNA, 15 bp, Homo sapiens
ttcagctctcattgc

SEQ ID NO: 286837 - DNA, 15 bp, Homo sapiens
cttcagctctcattg

SEQ ID NO: 286838 - DNA, 15 bp, Homo sapiens
gcttcagctctcatt

SEQ ID NO: 286839 - DNA, 15 bp, Homo sapiens
ggcttcagctctcat

SEQ ID NO: 286840 - DNA, 15 bp, Homo sapiens
aggcttcagctctca

SEQ ID NO: 286841 - DNA, 15 bp, Homo sapiens
gaggcttcagctctc

SEQ ID NO: 286842 - DNA, 15 bp, Homo sapiens
tgaggcttcagctct

SEQ ID NO: 286843 - DNA, 15 bp, Homo sapiens
gtgaggcttcagctc

SEQ ID NO: 286844 - DNA, 15 bp, Homo sapiens
ggtgaggcttcagct

SEQ ID NO: 286845 - DNA, 15 bp, Homo sapiens
aggtgaggcttcagc

SEQ ID NO: 286846 - DNA, 15 bp, Homo sapiens
caggtgaggcttcag

SEQ ID NO: 286847 - DNA, 15 bp, Homo sapiens
tcaggtgaggcttca

SEQ ID NO: 286848 - DNA, 15 bp, Homo sapiens
ttcaggtgaggcttc

SEQ ID NO: 286849 - DNA, 15 bp, Homo sapiens
cttcaggtgaggctt

SEQ ID NO: 286850 - DNA, 15 bp, Homo sapiens
acttcaggtgaggct

SEQ ID NO: 286851 - DNA, 15 bp, Homo sapiens
cacttcaggtgaggc

SEQ ID NO: 286852 - DNA, 15 bp, Homo sapiens
ccacttcaggtgagg

SEQ ID NO: 286853 - DNA, 15 bp, Homo sapiens
gccacttcaggtgag

SEQ ID NO: 286854 - DNA, 15 bp, Homo sapiens
agccacttcaggtga

SEQ ID NO: 286855 - DNA, 15 bp, Homo sapiens
aagccacttcaggtg

SEQ ID NO: 286856 - DNA, 15 bp, Homo sapiens
gaagccacttcaggt

SEQ ID NO: 286857 - DNA, 15 bp, Homo sapiens
ggaagccacttcagg

SEQ ID NO: 286858 - DNA, 15 bp, Homo sapiens
gggaagccacttcag

SEQ ID NO: 286859 - DNA, 15 bp, Homo sapiens
tgggaagccacttca

SEQ ID NO: 286860 - DNA, 15 bp, Homo sapiens
ctgggaagccacttc

SEQ ID NO: 286861 - DNA, 15 bp, Homo sapiens
cctgggaagccactt

SEQ ID NO: 286862 - DNA, 15 bp, Homo sapiens
acctgggaagccact

SEQ ID NO: 286863 - DNA, 15 bp, Homo sapiens
gacctgggaagccac

SEQ ID NO: 286864 - DNA, 15 bp, Homo sapiens
ggacctgggaagcca

SEQ ID NO: 286865 - DNA, 15 bp, Homo sapiens
tggacctgggaagcc

SEQ ID NO: 286866 - DNA, 15 bp, Homo sapiens
ctggacctgggaagc

SEQ ID NO: 286867 - DNA, 15 bp, Homo sapiens
gctggacctgggaag

SEQ ID NO: 286868 - DNA, 15 bp, Homo sapiens
agctggacctgggaa

SEQ ID NO: 286869 - DNA, 15 bp, Homo sapiens
cagctggacctggga

SEQ ID NO: 286870 - DNA, 15 bp, Homo sapiens
tcagctggacctggg

SEQ ID NO: 286871 - DNA, 15 bp, Homo sapiens
atcagctggacctgg

SEQ ID NO: 286872 - DNA, 15 bp, Homo sapiens
aatcagctggacctg

SEQ ID NO: 286873 - DNA, 15 bp, Homo sapiens
caatcagctggacct

SEQ ID NO: 286874 - DNA, 15 bp, Homo sapiens
acaatcagctggacc

SEQ ID NO: 286875 - DNA, 15 bp, Homo sapiens
aacaatcagctggac

SEQ ID NO: 286876 - DNA, 15 bp, Homo sapiens
gaacaatcagctgga

SEQ ID NO: 286877 - DNA, 15 bp, Homo sapiens
ggaacaatcagctgg

SEQ ID NO: 286878 - DNA, 15 bp, Homo sapiens
aggaacaatcagctg

SEQ ID NO: 286879 - DNA, 15 bp, Homo sapiens
taggaacaatcagct

SEQ ID NO: 286880 - DNA, 15 bp, Homo sapiens
ataggaacaatcagc

SEQ ID NO: 286881 - DNA, 15 bp, Homo sapiens
cataggaacaatcag

SEQ ID NO: 286882 - DNA, 15 bp, Homo sapiens
gcataggaacaatca

SEQ ID NO: 286883 - DNA, 15 bp, Homo sapiens
tgcataggaacaatc

SEQ ID NO: 286884 - DNA, 15 bp, Homo sapiens
ctgcataggaacaat

SEQ ID NO: 286885 - DNA, 15 bp, Homo sapiens
tctgcataggaacaa

SEQ ID NO: 286886 - DNA, 15 bp, Homo sapiens
ttctgcataggaaca

SEQ ID NO: 286887 - DNA, 15 bp, Homo sapiens
tttctgcataggaac

SEQ ID NO: 286888 - DNA, 15 bp, Homo sapiens
atttctgcataggaa

SEQ ID NO: 286889 - DNA, 15 bp, Homo sapiens
catttctgcatagga

SEQ ID NO: 286890 - DNA, 15 bp, Homo sapiens
gcatttctgcatagg

SEQ ID NO: 286891 - DNA, 15 bp, Homo sapiens
tgcatttctgcatag

SEQ ID NO: 286892 - DNA, 15 bp, Homo sapiens
ctgcatttctgcata

SEQ ID NO: 286893 - DNA, 15 bp, Homo sapiens
cctgcatttctgcat

SEQ ID NO: 286894 - DNA, 15 bp, Homo sapiens
gcctgcatttctgca

SEQ ID NO: 286895 - DNA, 15 bp, Homo sapiens
agcctgcatttctgc

SEQ ID NO: 286896 - DNA, 15 bp, Homo sapiens
gagcctgcatttctg

SEQ ID NO: 286897 - DNA, 15 bp, Homo sapiens
agagcctgcatttct

SEQ ID NO: 286898 - DNA, 15 bp, Homo sapiens
tagagcctgcatttc

SEQ ID NO: 286899 - DNA, 15 bp, Homo sapiens
ctagagcctgcattt

SEQ ID NO: 286900 - DNA, 15 bp, Homo sapiens
actagagcctgcatt

SEQ ID NO: 286901 - DNA, 15 bp, Homo sapiens
cactagagcctgcat

SEQ ID NO: 286902 - DNA, 15 bp, Homo sapiens
ccactagagcctgca

SEQ ID NO: 286903 - DNA, 15 bp, Homo sapiens
gccactagagcctgc

SEQ ID NO: 286904 - DNA, 15 bp, Homo sapiens
ggccactagagcctg

SEQ ID NO: 286905 - DNA, 15 bp, Homo sapiens
tggccactagagcct

SEQ ID NO: 286906 - DNA, 15 bp, Homo sapiens
ctggccactagagcc

SEQ ID NO: 286907 - DNA, 15 bp, Homo sapiens
tctggccactagagc

SEQ ID NO: 286908 - DNA, 15 bp, Homo sapiens
atctggccactagag

SEQ ID NO: 286909 - DNA, 15 bp, Homo sapiens
gatctggccactaga

SEQ ID NO: 286910 - DNA, 15 bp, Homo sapiens
agatctggccactag

SEQ ID NO: 286911 - DNA, 15 bp, Homo sapiens
aagatctggccacta

SEQ ID NO: 286912 - DNA, 15 bp, Homo sapiens
gaagatctggccact

SEQ ID NO: 286913 - DNA, 15 bp, Homo sapiens
ggaagatctggccac

SEQ ID NO: 286914 - DNA, 15 bp, Homo sapiens
aggaagatctggcca

SEQ ID NO: 286915 - DNA, 15 bp, Homo sapiens
caggaagatctggcc

SEQ ID NO: 286916 - DNA, 15 bp, Homo sapiens
acaggaagatctggc

SEQ ID NO: 286917 - DNA, 15 bp, Homo sapiens
cacaggaagatctgg

SEQ ID NO: 286918 - DNA, 15 bp, Homo sapiens
acacaggaagatctg

SEQ ID NO: 286919 - DNA, 15 bp, Homo sapiens
aacacaggaagatct

SEQ ID NO: 286920 - DNA, 15 bp, Homo sapiens
aaacacaggaagatc

SEQ ID NO: 286921 - DNA, 15 bp, Homo sapiens
gaaacacaggaagat

SEQ ID NO: 286922 - DNA, 15 bp, Homo sapiens
tgaaacacaggaaga

SEQ ID NO: 286923 - DNA, 15 bp, Homo sapiens
ttgaaacacaggaag

SEQ ID NO: 286924 - DNA, 15 bp, Homo sapiens
tttgaaacacaggaa

SEQ ID NO: 286925 - DNA, 15 bp, Homo sapiens
ctttgaaacacagga

SEQ ID NO: 286926 - DNA, 15 bp, Homo sapiens
tctttgaaacacagg

SEQ ID NO: 286927 - DNA, 15 bp, Homo sapiens
ctctttgaaacacag

SEQ ID NO: 286928 - DNA, 15 bp, Homo sapiens
cctctttgaaacaca

SEQ ID NO: 286929 - DNA, 15 bp, Homo sapiens
tcctctttgaaacac

SEQ ID NO: 286930 - DNA, 15 bp, Homo sapiens
ctcctctttgaaaca

SEQ ID NO: 286931 - DNA, 15 bp, Homo sapiens
tctcctctttgaaac

SEQ ID NO: 286932 - DNA, 15 bp, Homo sapiens
gtctcctctttgaaa

SEQ ID NO: 286933 - DNA, 15 bp, Homo sapiens
tgtctcctctttgaa

SEQ ID NO: 286934 - DNA, 15 bp, Homo sapiens
ctgtctcctctttga

SEQ ID NO: 286935 - DNA, 15 bp, Homo sapiens
tctgtctcctctttg

SEQ ID NO: 286936 - DNA, 15 bp, Homo sapiens
ttctgtctcctcttt

SEQ ID NO: 286937 - DNA, 15 bp, Homo sapiens
attctgtctcctctt

SEQ ID NO: 286938 - DNA, 15 bp, Homo sapiens
tattctgtctcctct

SEQ ID NO: 286939 - DNA, 15 bp, Homo sapiens
gtattctgtctcctc

SEQ ID NO: 286940 - DNA, 15 bp, Homo sapiens
agtattctgtctcct

SEQ ID NO: 286941 - DNA, 15 bp, Homo sapiens
cagtattctgtctcc

SEQ ID NO: 286942 - DNA, 15 bp, Homo sapiens
gcagtattctgtctc

SEQ ID NO: 286943 - DNA, 15 bp, Homo sapiens
tgcagtattctgtct

SEQ ID NO: 286944 - DNA, 15 bp, Homo sapiens
atgcagtattctgtc

SEQ ID NO: 286945 - DNA, 15 bp, Homo sapiens
aatgcagtattctgt

SEQ ID NO: 286946 - DNA, 15 bp, Homo sapiens
aaatgcagtattctg

SEQ ID NO: 286947 - DNA, 15 bp, Homo sapiens
aaaatgcagtattct

SEQ ID NO: 286948 - DNA, 15 bp, Homo sapiens
taaaatgcagtattc

SEQ ID NO: 286949 - DNA, 15 bp, Homo sapiens
ataaaatgcagtatt

SEQ ID NO: 286950 - DNA, 15 bp, Homo sapiens
cataaaatgcagtat

SEQ ID NO: 286951 - DNA, 15 bp, Homo sapiens
caacataaaatgcag

SEQ ID NO: 286952 - DNA, 15 bp, Homo sapiens
tcaacataaaatgca

SEQ ID NO: 286953 - DNA, 15 bp, Homo sapiens
ttcaacataaaatgc

SEQ ID NO: 286954 - DNA, 15 bp, Homo sapiens
attcaacataaaatg

SEQ ID NO: 286955 - DNA, 15 bp, Homo sapiens
gattcaacataaaat

SEQ ID NO: 286956 - DNA, 15 bp, Homo sapiens
agattcaacataaaa

SEQ ID NO: 286957 - DNA, 15 bp, Homo sapiens
gagattcaacataaa

SEQ ID NO: 286958 - DNA, 15 bp, Homo sapiens
ggagattcaacataa

SEQ ID NO: 286959 - DNA, 15 bp, Homo sapiens
tggagattcaacata

SEQ ID NO: 286960 - DNA, 15 bp, Homo sapiens
ttggagattcaacat

SEQ ID NO: 286961 - DNA, 15 bp, Homo sapiens
attggagattcaaca

SEQ ID NO: 286962 - DNA, 15 bp, Homo sapiens
aattggagattcaac

SEQ ID NO: 286963 - DNA, 15 bp, Homo sapiens
aaattggagattcaa

SEQ ID NO: 286964 - DNA, 15 bp, Homo sapiens
aaaattggagattca

SEQ ID NO: 286965 - DNA, 15 bp, Homo sapiens
taaaattggagattc

SEQ ID NO: 286966 - DNA, 15 bp, Homo sapiens
ttaaaattggagatt

SEQ ID NO: 286967 - DNA, 15 bp, Homo sapiens
tttaaaattggagat

SEQ ID NO: 286968 - DNA, 15 bp, Homo sapiens
ttttaaaattggaga

SEQ ID NO: 286969 - DNA, 15 bp, Homo sapiens
attttaaaattggag

SEQ ID NO: 286970 - DNA, 15 bp, Homo sapiens
tattttaaaattgga

SEQ ID NO: 286971 - DNA, 15 bp, Homo sapiens
atattttaaaattgg

SEQ ID NO: 286972 - DNA, 15 bp, Homo sapiens
aatattttaaaattg

SEQ ID NO: 286973 - DNA, 15 bp, Homo sapiens
caatattttaaaatt

SEQ ID NO: 286974 - DNA, 15 bp, Homo sapiens
ccaatattttaaaat

SEQ ID NO: 286975 - DNA, 15 bp, Homo sapiens
gccaatattttaaaa

SEQ ID NO: 286976 - DNA, 15 bp, Homo sapiens
ggccaatattttaaa

SEQ ID NO: 286977 - DNA, 15 bp, Homo sapiens
aggccaatattttaa

SEQ ID NO: 286978 - DNA, 15 bp, Homo sapiens
gaggccaatatttta

SEQ ID NO: 286979 - DNA, 15 bp, Homo sapiens
tgaggccaatatttt

SEQ ID NO: 286980 - DNA, 15 bp, Homo sapiens
ttgaggccaatattt

SEQ ID NO: 286981 - DNA, 15 bp, Homo sapiens
tttgaggccaatatt

SEQ ID NO: 286982 - DNA, 15 bp, Homo sapiens
atttgaggccaatat

SEQ ID NO: 286983 - DNA, 15 bp, Homo sapiens
gatttgaggccaata

SEQ ID NO: 286984 - DNA, 15 bp, Homo sapiens
ggatttgaggccaat

SEQ ID NO: 286985 - DNA, 15 bp, Homo sapiens
tggatttgaggccaa

SEQ ID NO: 286986 - DNA, 15 bp, Homo sapiens
ttggatttgaggcca

SEQ ID NO: 286987 - DNA, 15 bp, Homo sapiens
tttggatttgaggcc

SEQ ID NO: 286988 - DNA, 15 bp, Homo sapiens
ttttggatttgaggc

SEQ ID NO: 286989 - DNA, 15 bp, Homo sapiens
gttttggatttgagg

SEQ ID NO: 286990 - DNA, 15 bp, Homo sapiens
agttttggatttgag

SEQ ID NO: 286991 - DNA, 15 bp, Homo sapiens
gagttttggatttga

SEQ ID NO: 286992 - DNA, 15 bp, Homo sapiens
agagttttggatttg

SEQ ID NO: 286993 - DNA, 15 bp, Homo sapiens
aagagttttggattt

SEQ ID NO: 286994 - DNA, 15 bp, Homo sapiens
taagagttttggatt

SEQ ID NO: 286995 - DNA, 15 bp, Homo sapiens
ttaagagttttggat

SEQ ID NO: 286996 - DNA, 15 bp, Homo sapiens
tttaagagttttgga

SEQ ID NO: 286997 - DNA, 15 bp, Homo sapiens
ctttaagagttttgg

SEQ ID NO: 286998 - DNA, 15 bp, Homo sapiens
actttaagagttttg

SEQ ID NO: 286999 - DNA, 15 bp, Homo sapiens
tactttaagagtttt

SEQ ID NO: 287000 - DNA, 15 bp, Homo sapiens
gtactttaagagttt

SEQ ID NO: 287001 - DNA, 15 bp, Homo sapiens
agtactttaagagtt

SEQ ID NO: 287002 - DNA, 15 bp, Homo sapiens
aagtactttaagagt

SEQ ID NO: 287003 - DNA, 15 bp, Homo sapiens
caagtactttaagag

SEQ ID NO: 287004 - DNA, 15 bp, Homo sapiens
gcaagtactttaaga

SEQ ID NO: 287005 - DNA, 15 bp, Homo sapiens
tgcaagtactttaag

SEQ ID NO: 287006 - DNA, 15 bp, Homo sapiens
ctgcaagtactttaa

SEQ ID NO: 287007 - DNA, 15 bp, Homo sapiens
cctgcaagtacttta

SEQ ID NO: 287008 - DNA, 15 bp, Homo sapiens
gcctgcaagtacttt

SEQ ID NO: 287009 - DNA, 15 bp, Homo sapiens
ggcctgcaagtactt

SEQ ID NO: 287010 - DNA, 15 bp, Homo sapiens
tggcctgcaagtact

SEQ ID NO: 287011 - DNA, 15 bp, Homo sapiens
ttggcctgcaagtac

SEQ ID NO: 287012 - DNA, 15 bp, Homo sapiens
cttggcctgcaagta

SEQ ID NO: 287013 - DNA, 15 bp, Homo sapiens
gcttggcctgcaagt

SEQ ID NO: 287014 - DNA, 15 bp, Homo sapiens
tgcttggcctgcaag

SEQ ID NO: 287015 - DNA, 15 bp, Homo sapiens
ttgcttggcctgcaa

SEQ ID NO: 287016 - DNA, 15 bp, Homo sapiens
tttgcttggcctgca

SEQ ID NO: 287017 - DNA, 15 bp, Homo sapiens
ttttgcttggcctgc

SEQ ID NO: 287018 - DNA, 15 bp, Homo sapiens
gttttgcttggcctg

SEQ ID NO: 287019 - DNA, 15 bp, Homo sapiens
tgttttgcttggcct

SEQ ID NO: 287020 - DNA, 15 bp, Homo sapiens
gtgttttgcttggcc

SEQ ID NO: 287021 - DNA, 15 bp, Homo sapiens
ggtgttttgcttggc

SEQ ID NO: 287022 - DNA, 15 bp, Homo sapiens
aggtgttttgcttgg

SEQ ID NO: 287023 - DNA, 15 bp, Homo sapiens
gaggtgttttgcttg

SEQ ID NO: 287024 - DNA, 15 bp, Homo sapiens
agaggtgttttgctt

SEQ ID NO: 287025 - DNA, 15 bp, Homo sapiens
cagaggtgttttgct

SEQ ID NO: 287026 - DNA, 15 bp, Homo sapiens
gcagaggtgttttgc

SEQ ID NO: 287027 - DNA, 15 bp, Homo sapiens
tgcagaggtgttttg

SEQ ID NO: 287028 - DNA, 15 bp, Homo sapiens
ctgcagaggtgtttt

SEQ ID NO: 287029 - DNA, 15 bp, Homo sapiens
cctgcagaggtgttt

SEQ ID NO: 287030 - DNA, 15 bp, Homo sapiens
gcctgcagaggtgtt

SEQ ID NO: 287031 - DNA, 15 bp, Homo sapiens
ggcctgcagaggtgt

SEQ ID NO: 287032 - DNA, 15 bp, Homo sapiens
tggcctgcagaggtg

SEQ ID NO: 287033 - DNA, 15 bp, Homo sapiens
ctggcctgcagaggt

SEQ ID NO: 287034 - DNA, 15 bp, Homo sapiens
tctggcctgcagagg

SEQ ID NO: 287035 - DNA, 15 bp, Homo sapiens
atctggcctgcagag

SEQ ID NO: 287036 - DNA, 15 bp, Homo sapiens
aatctggcctgcaga

SEQ ID NO: 287037 - DNA, 15 bp, Homo sapiens
aaatctggcctgcag

SEQ ID NO: 287038 - DNA, 15 bp, Homo sapiens
caaatctggcctgca

SEQ ID NO: 287039 - DNA, 15 bp, Homo sapiens
ccaaatctggcctgc

SEQ ID NO: 287040 - DNA, 15 bp, Homo sapiens
cccaaatctggcctg

SEQ ID NO: 287041 - DNA, 15 bp, Homo sapiens
gcccaaatctggcct

SEQ ID NO: 287042 - DNA, 15 bp, Homo sapiens
ggcccaaatctggcc

SEQ ID NO: 287043 - DNA, 15 bp, Homo sapiens
aggcccaaatctggc

SEQ ID NO: 287044 - DNA, 15 bp, Homo sapiens
gaggcccaaatctgg

SEQ ID NO: 287045 - DNA, 15 bp, Homo sapiens
ggaggcccaaatctg

SEQ ID NO: 287046 - DNA, 15 bp, Homo sapiens
aggaggcccaaatct

SEQ ID NO: 287047 - DNA, 15 bp, Homo sapiens
caggaggcccaaatc

SEQ ID NO: 287048 - DNA, 15 bp, Homo sapiens
acaggaggcccaaat

SEQ ID NO: 287049 - DNA, 15 bp, Homo sapiens
aacaggaggcccaaa

SEQ ID NO: 287050 - DNA, 15 bp, Homo sapiens
aaacaggaggcccaa

SEQ ID NO: 287051 - DNA, 15 bp, Homo sapiens
aaaacaggaggccca

SEQ ID NO: 287052 - DNA, 15 bp, Homo sapiens
gaaaacaggaggccc

SEQ ID NO: 287053 - DNA, 15 bp, Homo sapiens
tgaaaacaggaggcc

SEQ ID NO: 287054 - DNA, 15 bp, Homo sapiens
ctgaaaacaggaggc

SEQ ID NO: 287055 - DNA, 15 bp, Homo sapiens
gctgaaaacaggagg

SEQ ID NO: 287056 - DNA, 15 bp, Homo sapiens
ggctgaaaacaggag

SEQ ID NO: 287057 - DNA, 15 bp, Homo sapiens
aggctgaaaacagga

SEQ ID NO: 287058 - DNA, 15 bp, Homo sapiens
gaggctgaaaacagg

SEQ ID NO: 287059 - DNA, 15 bp, Homo sapiens
agaggctgaaaacag

SEQ ID NO: 287060 - DNA, 15 bp, Homo sapiens
tagaggctgaaaaca

SEQ ID NO: 287061 - DNA, 15 bp, Homo sapiens
atagaggctgaaaac

SEQ ID NO: 287062 - DNA, 15 bp, Homo sapiens
aatagaggctgaaaa

SEQ ID NO: 287063 - DNA, 15 bp, Homo sapiens
gaatagaggctgaaa

SEQ ID NO: 287064 - DNA, 15 bp, Homo sapiens
agaatagaggctgaa

SEQ ID NO: 287065 - DNA, 15 bp, Homo sapiens
tagaatagaggctga

SEQ ID NO: 287066 - DNA, 15 bp, Homo sapiens
ttagaatagaggctg

SEQ ID NO: 287067 - DNA, 15 bp, Homo sapiens
tttagaatagaggct

SEQ ID NO: 287068 - DNA, 15 bp, Homo sapiens
gtttagaatagaggc

SEQ ID NO: 287069 - DNA, 15 bp, Homo sapiens
agtttagaatagagg

SEQ ID NO: 287070 - DNA, 15 bp, Homo sapiens
cagtttagaatagag

SEQ ID NO: 287071 - DNA, 15 bp, Homo sapiens
acagtttagaataga

SEQ ID NO: 287072 - DNA, 15 bp, Homo sapiens
gacagtttagaatag

SEQ ID NO: 287073 - DNA, 15 bp, Homo sapiens
agacagtttagaata

SEQ ID NO: 287074 - DNA, 15 bp, Homo sapiens
gagacagtttagaat

SEQ ID NO: 287075 - DNA, 15 bp, Homo sapiens
agagacagtttagaa

SEQ ID NO: 287076 - DNA, 15 bp, Homo sapiens
gagagacagtttaga

SEQ ID NO: 287077 - DNA, 15 bp, Homo sapiens
agagagacagtttag

SEQ ID NO: 287078 - DNA, 15 bp, Homo sapiens
aagagagacagttta

SEQ ID NO: 287079 - DNA, 15 bp, Homo sapiens
aaagagagacagttt

SEQ ID NO: 287080 - DNA, 15 bp, Homo sapiens
gaaagagagacagtt

SEQ ID NO: 287081 - DNA, 15 bp, Homo sapiens
agaaagagagacagt

SEQ ID NO: 287082 - DNA, 15 bp, Homo sapiens
cagaaagagagacag

SEQ ID NO: 287083 - DNA, 15 bp, Homo sapiens
ccagaaagagagaca

SEQ ID NO: 287084 - DNA, 15 bp, Homo sapiens
accagaaagagagac

SEQ ID NO: 287085 - DNA, 15 bp, Homo sapiens
gaccagaaagagaga

SEQ ID NO: 287086 - DNA, 15 bp, Homo sapiens
agaccagaaagagag

SEQ ID NO: 287087 - DNA, 15 bp, Homo sapiens
aagaccagaaagaga

SEQ ID NO: 287088 - DNA, 15 bp, Homo sapiens
caagaccagaaagag

SEQ ID NO: 287089 - DNA, 15 bp, Homo sapiens
tcaagaccagaaaga

SEQ ID NO: 287090 - DNA, 15 bp, Homo sapiens
ttcaagaccagaaag

SEQ ID NO: 287091 - DNA, 15 bp, Homo sapiens
attcaagaccagaaa

SEQ ID NO: 287092 - DNA, 15 bp, Homo sapiens
aattcaagaccagaa

SEQ ID NO: 287093 - DNA, 15 bp, Homo sapiens
caattcaagaccaga

SEQ ID NO: 287094 - DNA, 15 bp, Homo sapiens
ccaattcaagaccag

SEQ ID NO: 287095 - DNA, 15 bp, Homo sapiens
gccaattcaagacca

SEQ ID NO: 287096 - DNA, 15 bp, Homo sapiens
agccaattcaagacc

SEQ ID NO: 287097 - DNA, 15 bp, Homo sapiens
cagccaattcaagac

SEQ ID NO: 287098 - DNA, 15 bp, Homo sapiens
acagccaattcaaga

SEQ ID NO: 287099 - DNA, 15 bp, Homo sapiens
cacagccaattcaag

SEQ ID NO: 287100 - DNA, 15 bp, Homo sapiens
gcacagccaattcaa

SEQ ID NO: 287101 - DNA, 15 bp, Homo sapiens
agcacagccaattca

SEQ ID NO: 287102 - DNA, 15 bp, Homo sapiens
gagcacagccaattc

SEQ ID NO: 287103 - DNA, 15 bp, Homo sapiens
ggagcacagccaatt

SEQ ID NO: 287104 - DNA, 15 bp, Homo sapiens
gggagcacagccaat

SEQ ID NO: 287105 - DNA, 15 bp, Homo sapiens
agggagcacagccaa

SEQ ID NO: 287106 - DNA, 15 bp, Homo sapiens
cagggagcacagcca

SEQ ID NO: 287107 - DNA, 15 bp, Homo sapiens
tcagggagcacagcc

SEQ ID NO: 287108 - DNA, 15 bp, Homo sapiens
ctcagggagcacagc

SEQ ID NO: 287109 - DNA, 15 bp, Homo sapiens
actcagggagcacag

SEQ ID NO: 287110 - DNA, 15 bp, Homo sapiens
cactcagggagcaca

SEQ ID NO: 287111 - DNA, 15 bp, Homo sapiens
gcactcagggagcac

SEQ ID NO: 287112 - DNA, 15 bp, Homo sapiens
ggcactcagggagca

SEQ ID NO: 287113 - DNA, 15 bp, Homo sapiens
tggcactcagggagc

SEQ ID NO: 287114 - DNA, 15 bp, Homo sapiens
ctggcactcagggag

SEQ ID NO: 287115 - DNA, 15 bp, Homo sapiens
cctggcactcaggga

SEQ ID NO: 287116 - DNA, 15 bp, Homo sapiens
tcctggcactcaggg

SEQ ID NO: 287117 - DNA, 15 bp, Homo sapiens
ttcctggcactcagg

SEQ ID NO: 287118 - DNA, 15 bp, Homo sapiens
tttcctggcactcag

SEQ ID NO: 287119 - DNA, 15 bp, Homo sapiens
gtttcctggcactca

SEQ ID NO: 287120 - DNA, 15 bp, Homo sapiens
cgtttcctggcactc

SEQ ID NO: 287121 - DNA, 15 bp, Homo sapiens
acgtttcctggcact

SEQ ID NO: 287122 - DNA, 15 bp, Homo sapiens
aacgtttcctggcac

SEQ ID NO: 287123 - DNA, 15 bp, Homo sapiens
gaacgtttcctggca

SEQ ID NO: 287124 - DNA, 15 bp, Homo sapiens
agaacgtttcctggc

SEQ ID NO: 287125 - DNA, 15 bp, Homo sapiens
aagaacgtttcctgg

SEQ ID NO: 287126 - DNA, 15 bp, Homo sapiens
taagaacgtttcctg

SEQ ID NO: 287127 - DNA, 15 bp, Homo sapiens
ttaagaacgtttcct

SEQ ID NO: 287128 - DNA, 15 bp, Homo sapiens
gttaagaacgtttcc

SEQ ID NO: 287129 - DNA, 15 bp, Homo sapiens
ggttaagaacgtttc

SEQ ID NO: 287130 - DNA, 15 bp, Homo sapiens
gggttaagaacgttt

SEQ ID NO: 287131 - DNA, 15 bp, Homo sapiens
agggttaagaacgtt

SEQ ID NO: 287132 - DNA, 15 bp, Homo sapiens
aagggttaagaacgt

SEQ ID NO: 287133 - DNA, 15 bp, Homo sapiens
caagggttaagaacg

SEQ ID NO: 287134 - DNA, 15 bp, Homo sapiens
gcaagggttaagaac

SEQ ID NO: 287135 - DNA, 15 bp, Homo sapiens
agcaagggttaagaa

SEQ ID NO: 287136 - DNA, 15 bp, Homo sapiens
gagcaagggttaaga

SEQ ID NO: 287137 - DNA, 15 bp, Homo sapiens
ggagcaagggttaag

SEQ ID NO: 287138 - DNA, 15 bp, Homo sapiens
aggagcaagggttaa

SEQ ID NO: 287139 - DNA, 15 bp, Homo sapiens
gaggagcaagggtta

SEQ ID NO: 287140 - DNA, 15 bp, Homo sapiens
ggaggagcaagggtt

SEQ ID NO: 287141 - DNA, 15 bp, Homo sapiens
tggaggagcaagggt

SEQ ID NO: 287142 - DNA, 15 bp, Homo sapiens
atggaggagcaaggg

SEQ ID NO: 287143 - DNA, 15 bp, Homo sapiens
gatggaggagcaagg

SEQ ID NO: 287144 - DNA, 15 bp, Homo sapiens
agatggaggagcaag

SEQ ID NO: 287145 - DNA, 15 bp, Homo sapiens
cagatggaggagcaa

SEQ ID NO: 287146 - DNA, 15 bp, Homo sapiens
gcagatggaggagca

SEQ ID NO: 287147 - DNA, 15 bp, Homo sapiens
ggcagatggaggagc

SEQ ID NO: 287148 - DNA, 15 bp, Homo sapiens
tggcagatggaggag

SEQ ID NO: 287149 - DNA, 15 bp, Homo sapiens
ttggcagatggagga

SEQ ID NO: 287150 - DNA, 15 bp, Homo sapiens
tttggcagatggagg

SEQ ID NO: 287151 - DNA, 15 bp, Homo sapiens
ttttggcagatggag

SEQ ID NO: 287152 - DNA, 15 bp, Homo sapiens
tttttggcagatgga

SEQ ID NO: 287153 - DNA, 15 bp, Homo sapiens
ctttttggcagatgg

SEQ ID NO: 287154 - DNA, 15 bp, Homo sapiens
cctttttggcagatg

SEQ ID NO: 287155 - DNA, 15 bp, Homo sapiens
tcctttttggcagat

SEQ ID NO: 287156 - DNA, 15 bp, Homo sapiens
gtcctttttggcaga

SEQ ID NO: 287157 - DNA, 15 bp, Homo sapiens
ggtcctttttggcag

SEQ ID NO: 287158 - DNA, 15 bp, Homo sapiens
gggtcctttttggca

SEQ ID NO: 287159 - DNA, 15 bp, Homo sapiens
ggggtcctttttggc

SEQ ID NO: 287160 - DNA, 15 bp, Homo sapiens
aggggtcctttttgg

SEQ ID NO: 287161 - DNA, 15 bp, Homo sapiens
aaggggtcctttttg

SEQ ID NO: 287162 - DNA, 15 bp, Homo sapiens
gaaggggtccttttt

SEQ ID NO: 287163 - DNA, 15 bp, Homo sapiens
agaaggggtcctttt

SEQ ID NO: 287164 - DNA, 15 bp, Homo sapiens
gagaaggggtccttt

SEQ ID NO: 287165 - DNA, 15 bp, Homo sapiens
agagaaggggtcctt

SEQ ID NO: 287166 - DNA, 15 bp, Homo sapiens
gagagaaggggtcct

SEQ ID NO: 287167 - DNA, 15 bp, Homo sapiens
agagagaaggggtcc

SEQ ID NO: 287168 - DNA, 15 bp, Homo sapiens
gagagagaaggggtc

SEQ ID NO: 287169 - DNA, 15 bp, Homo sapiens
agagagagaaggggt

SEQ ID NO: 287170 - DNA, 15 bp, Homo sapiens
tagagagagaagggg

SEQ ID NO: 287171 - DNA, 15 bp, Homo sapiens
ttagagagagaaggg

SEQ ID NO: 287172 - DNA, 15 bp, Homo sapiens
cttagagagagaagg

SEQ ID NO: 287173 - DNA, 15 bp, Homo sapiens
tcttagagagagaag

SEQ ID NO: 287174 - DNA, 15 bp, Homo sapiens
atcttagagagagaa

SEQ ID NO: 287175 - DNA, 15 bp, Homo sapiens
catcttagagagaga

SEQ ID NO: 287176 - DNA, 15 bp, Homo sapiens
ccatcttagagagag

SEQ ID NO: 287177 - DNA, 15 bp, Homo sapiens
cccatcttagagaga

SEQ ID NO: 287178 - DNA, 15 bp, Homo sapiens
tcccatcttagagag

SEQ ID NO: 287179 - DNA, 15 bp, Homo sapiens
ttcccatcttagaga

SEQ ID NO: 287180 - DNA, 15 bp, Homo sapiens
cttcccatcttagag

SEQ ID NO: 287181 - DNA, 15 bp, Homo sapiens
gcttcccatcttaga

SEQ ID NO: 287182 - DNA, 15 bp, Homo sapiens
ggcttcccatcttag

SEQ ID NO: 287183 - DNA, 15 bp, Homo sapiens
aggcttcccatctta

SEQ ID NO: 287184 - DNA, 15 bp, Homo sapiens
aaggcttcccatctt

SEQ ID NO: 287185 - DNA, 15 bp, Homo sapiens
aaaggcttcccatct

SEQ ID NO: 287186 - DNA, 15 bp, Homo sapiens
caaaggcttcccatc

SEQ ID NO: 287187 - DNA, 15 bp, Homo sapiens
ccaaaggcttcccat

SEQ ID NO: 287188 - DNA, 15 bp, Homo sapiens
accaaaggcttccca

SEQ ID NO: 287189 - DNA, 15 bp, Homo sapiens
gaccaaaggcttccc

SEQ ID NO: 287190 - DNA, 15 bp, Homo sapiens
agaccaaaggcttcc

SEQ ID NO: 287191 - DNA, 15 bp, Homo sapiens
gagaccaaaggcttc

SEQ ID NO: 287192 - DNA, 15 bp, Homo sapiens
tgagaccaaaggctt

SEQ ID NO: 287193 - DNA, 15 bp, Homo sapiens
ctgagaccaaaggct

SEQ ID NO: 287194 - DNA, 15 bp, Homo sapiens
cctgagaccaaaggc

SEQ ID NO: 287195 - DNA, 15 bp, Homo sapiens
ccctgagaccaaagg

SEQ ID NO: 287196 - DNA, 15 bp, Homo sapiens
accctgagaccaaag

SEQ ID NO: 287197 - DNA, 15 bp, Homo sapiens
caccctgagaccaaa

SEQ ID NO: 287198 - DNA, 15 bp, Homo sapiens
gcaccctgagaccaa

SEQ ID NO: 287199 - DNA, 15 bp, Homo sapiens
ggcaccctgagacca

SEQ ID NO: 287200 - DNA, 15 bp, Homo sapiens
gggcaccctgagacc

SEQ ID NO: 287201 - DNA, 15 bp, Homo sapiens
ggggcaccctgagac

SEQ ID NO: 287202 - DNA, 15 bp, Homo sapiens
cggggcaccctgaga

SEQ ID NO: 287203 - DNA, 15 bp, Homo sapiens
ccggggcaccctgag

SEQ ID NO: 287204 - DNA, 15 bp, Homo sapiens
cccggggcaccctga

SEQ ID NO: 287205 - DNA, 15 bp, Homo sapiens
acccggggcaccctg

SEQ ID NO: 287206 - DNA, 15 bp, Homo sapiens
gacccggggcaccct

SEQ ID NO: 287207 - DNA, 15 bp, Homo sapiens
cgacccggggcaccc

SEQ ID NO: 287208 - DNA, 15 bp, Homo sapiens
acgacccggggcacc

SEQ ID NO: 287209 - DNA, 15 bp, Homo sapiens
aacgacccggggcac

SEQ ID NO: 287210 - DNA, 15 bp, Homo sapiens
aaacgacccggggca

SEQ ID NO: 287211 - DNA, 15 bp, Homo sapiens
caaacgacccggggc

SEQ ID NO: 287212 - DNA, 15 bp, Homo sapiens
gcaaacgacccgggg

SEQ ID NO: 287213 - DNA, 15 bp, Homo sapiens
ggcaaacgacccggg

SEQ ID NO: 287214 - DNA, 15 bp, Homo sapiens
tggcaaacgacccgg

SEQ ID NO: 287215 - DNA, 15 bp, Homo sapiens
atggcaaacgacccg

SEQ ID NO: 287216 - DNA, 15 bp, Homo sapiens
gatggcaaacgaccc

SEQ ID NO: 287217 - DNA, 15 bp, Homo sapiens
agatggcaaacgacc

SEQ ID NO: 287218 - DNA, 15 bp, Homo sapiens
tagatggcaaacgac

SEQ ID NO: 287219 - DNA, 15 bp, Homo sapiens
ttagatggcaaacga

SEQ ID NO: 287220 - DNA, 15 bp, Homo sapiens
gttagatggcaaacg

SEQ ID NO: 287221 - DNA, 15 bp, Homo sapiens
tgttagatggcaaac

SEQ ID NO: 287222 - DNA, 15 bp, Homo sapiens
gtgttagatggcaaa

SEQ ID NO: 287223 - DNA, 15 bp, Homo sapiens
tgtgttagatggcaa

SEQ ID NO: 287224 - DNA, 15 bp, Homo sapiens
atgtgttagatggca

SEQ ID NO: 287225 - DNA, 15 bp, Homo sapiens
aatgtgttagatggc

SEQ ID NO: 287226 - DNA, 15 bp, Homo sapiens
aaatgtgttagatgg

SEQ ID NO: 287227 - DNA, 15 bp, Homo sapiens
aaaatgtgttagatg

SEQ ID NO: 287228 - DNA, 15 bp, Homo sapiens
gaaaatgtgttagat

SEQ ID NO: 287229 - DNA, 15 bp, Homo sapiens
tgaaaatgtgttaga

SEQ ID NO: 287230 - DNA, 15 bp, Homo sapiens
ttgaaaatgtgttag

SEQ ID NO: 287231 - DNA, 15 bp, Homo sapiens
tttgaaaatgtgtta

SEQ ID NO: 287232 - DNA, 15 bp, Homo sapiens
gtttgaaaatgtgtt

SEQ ID NO: 287233 - DNA, 15 bp, Homo sapiens
tgtttgaaaatgtgt

SEQ ID NO: 287234 - DNA, 15 bp, Homo sapiens
gtgtttgaaaatgtg

SEQ ID NO: 287235 - DNA, 15 bp, Homo sapiens
agtgtttgaaaatgt

SEQ ID NO: 287236 - DNA, 15 bp, Homo sapiens
cagtgtttgaaaatg

SEQ ID NO: 287237 - DNA, 15 bp, Homo sapiens
gcagtgtttgaaaat

SEQ ID NO: 287238 - DNA, 15 bp, Homo sapiens
agcagtgtttgaaaa

SEQ ID NO: 287239 - DNA, 15 bp, Homo sapiens
aagcagtgtttgaaa

SEQ ID NO: 287240 - DNA, 15 bp, Homo sapiens
taagcagtgtttgaa

SEQ ID NO: 287241 - DNA, 15 bp, Homo sapiens
ttaagcagtgtttga

SEQ ID NO: 287242 - DNA, 15 bp, Homo sapiens
tttaagcagtgtttg

SEQ ID NO: 287243 - DNA, 15 bp, Homo sapiens
atttaagcagtgttt

SEQ ID NO: 287244 - DNA, 15 bp, Homo sapiens
aatttaagcagtgtt

SEQ ID NO: 287245 - DNA, 15 bp, Homo sapiens
aaatttaagcagtgt

SEQ ID NO: 287246 - DNA, 15 bp, Homo sapiens
gaaatttaagcagtg

SEQ ID NO: 287247 - DNA, 15 bp, Homo sapiens
ggaaatttaagcagt

SEQ ID NO: 287248 - DNA, 15 bp, Homo sapiens
tggaaatttaagcag

SEQ ID NO: 287249 - DNA, 15 bp, Homo sapiens
atggaaatttaagca

SEQ ID NO: 287250 - DNA, 15 bp, Homo sapiens
aatggaaatttaagc

SEQ ID NO: 287251 - DNA, 15 bp, Homo sapiens
aaatggaaatttaag

SEQ ID NO: 287252 - DNA, 15 bp, Homo sapiens
aaaatggaaatttaa

SEQ ID NO: 287253 - DNA, 15 bp, Homo sapiens
aaaaatggaaattta

SEQ ID NO: 287254 - DNA, 15 bp, Homo sapiens
gaaaaatggaaattt

SEQ ID NO: 287255 - DNA, 15 bp, Homo sapiens
agaaaaatggaaatt

SEQ ID NO: 287256 - DNA, 15 bp, Homo sapiens
gagaaaaatggaaat

SEQ ID NO: 287257 - DNA, 15 bp, Homo sapiens
cgagaaaaatggaaa

SEQ ID NO: 287258 - DNA, 15 bp, Homo sapiens
tcgagaaaaatggaa

SEQ ID NO: 287259 - DNA, 15 bp, Homo sapiens
ctcgagaaaaatgga

SEQ ID NO: 287260 - DNA, 15 bp, Homo sapiens
cctcgagaaaaatgg

SEQ ID NO: 287261 - DNA, 15 bp, Homo sapiens
gcctcgagaaaaatg

SEQ ID NO: 287262 - DNA, 15 bp, Homo sapiens
tgcctcgagaaaaat

SEQ ID NO: 287263 - DNA, 15 bp, Homo sapiens
ttgcctcgagaaaaa

SEQ ID NO: 287264 - DNA, 15 bp, Homo sapiens
tttgcctcgagaaaa

SEQ ID NO: 287265 - DNA, 15 bp, Homo sapiens
atttgcctcgagaaa

SEQ ID NO: 287266 - DNA, 15 bp, Homo sapiens
tatttgcctcgagaa

SEQ ID NO: 287267 - DNA, 15 bp, Homo sapiens
gtatttgcctcgaga

SEQ ID NO: 287268 - DNA, 15 bp, Homo sapiens
agtatttgcctcgag

SEQ ID NO: 287269 - DNA, 15 bp, Homo sapiens
cagtatttgcctcga

SEQ ID NO: 287270 - DNA, 15 bp, Homo sapiens
acagtatttgcctcg

SEQ ID NO: 287271 - DNA, 15 bp, Homo sapiens
tacagtatttgcctc

SEQ ID NO: 287272 - DNA, 15 bp, Homo sapiens
atacagtatttgcct

SEQ ID NO: 287273 - DNA, 15 bp, Homo sapiens
catacagtatttgcc

SEQ ID NO: 287274 - DNA, 15 bp, Homo sapiens
gcatacagtatttgc

SEQ ID NO: 287275 - DNA, 15 bp, Homo sapiens
ggcatacagtatttg

SEQ ID NO: 287276 - DNA, 15 bp, Homo sapiens
tggcatacagtattt

SEQ ID NO: 287277 - DNA, 15 bp, Homo sapiens
gtggcatacagtatt

SEQ ID NO: 287278 - DNA, 15 bp, Homo sapiens
tgtggcatacagtat

SEQ ID NO: 287279 - DNA, 15 bp, Homo sapiens
gtgtggcatacagta

SEQ ID NO: 287280 - DNA, 15 bp, Homo sapiens
ggtgtggcatacagt

SEQ ID NO: 287281 - DNA, 15 bp, Homo sapiens
tggtgtggcatacag

SEQ ID NO: 287282 - DNA, 15 bp, Homo sapiens
ttggtgtggcataca

SEQ ID NO: 287283 - DNA, 15 bp, Homo sapiens
attggtgtggcatac

SEQ ID NO: 287284 - DNA, 15 bp, Homo sapiens
tattggtgtggcata

SEQ ID NO: 287285 - DNA, 15 bp, Homo sapiens
ttattggtgtggcat

SEQ ID NO: 287286 - DNA, 15 bp, Homo sapiens
tttattggtgtggca

SEQ ID NO: 287287 - DNA, 15 bp, Homo sapiens
atttattggtgtggc

SEQ ID NO: 287288 - DNA, 15 bp, Homo sapiens
gatttattggtgtgg

SEQ ID NO: 287289 - DNA, 15 bp, Homo sapiens
tgatttattggtgtg

SEQ ID NO: 287290 - DNA, 15 bp, Homo sapiens
atgatttattggtgt

SEQ ID NO: 287291 - DNA, 15 bp, Homo sapiens
gatgatttattggtg

SEQ ID NO: 287292 - DNA, 15 bp, Homo sapiens
agatgatttattggt

SEQ ID NO: 287293 - DNA, 15 bp, Homo sapiens
tagatgatttattgg

SEQ ID NO: 287294 - DNA, 15 bp, Homo sapiens
gtagatgatttattg

SEQ ID NO: 287295 - DNA, 15 bp, Homo sapiens
tgtagatgatttatt

SEQ ID NO: 287296 - DNA, 15 bp, Homo sapiens
ctgtagatgatttat

SEQ ID NO: 287297 - DNA, 15 bp, Homo sapiens
gctgtagatgattta

SEQ ID NO: 287298 - DNA, 15 bp, Homo sapiens
agctgtagatgattt

SEQ ID NO: 287299 - DNA, 15 bp, Homo sapiens
aagctgtagatgatt

SEQ ID NO: 287300 - DNA, 15 bp, Homo sapiens
taagctgtagatgat

SEQ ID NO: 287301 - DNA, 15 bp, Homo sapiens
gtaagctgtagatga

SEQ ID NO: 287302 - DNA, 15 bp, Homo sapiens
agtaagctgtagatg

SEQ ID NO: 287303 - DNA, 15 bp, Homo sapiens
cagtaagctgtagat

SEQ ID NO: 287304 - DNA, 15 bp, Homo sapiens
acagtaagctgtaga

SEQ ID NO: 287305 - DNA, 15 bp, Homo sapiens
tacagtaagctgtag

SEQ ID NO: 287306 - DNA, 15 bp, Homo sapiens
ttacagtaagctgta

SEQ ID NO: 287307 - DNA, 15 bp, Homo sapiens
cttacagtaagctgt

SEQ ID NO: 287308 - DNA, 15 bp, Homo sapiens
gcttacagtaagctg

SEQ ID NO: 287309 - DNA, 15 bp, Homo sapiens
ggcttacagtaagct

SEQ ID NO: 287310 - DNA, 15 bp, Homo sapiens
gggcttacagtaagc

SEQ ID NO: 287311 - DNA, 15 bp, Homo sapiens
ggggcttacagtaag

SEQ ID NO: 287312 - DNA, 15 bp, Homo sapiens
tggggcttacagtaa

SEQ ID NO: 287313 - DNA, 15 bp, Homo sapiens
ctggggcttacagta

SEQ ID NO: 287314 - DNA, 15 bp, Homo sapiens
tctggggcttacagt

SEQ ID NO: 287315 - DNA, 15 bp, Homo sapiens
ctctggggcttacag

SEQ ID NO: 287316 - DNA, 15 bp, Homo sapiens
gctctggggcttaca

SEQ ID NO: 287317 - DNA, 15 bp, Homo sapiens
agctctggggcttac

SEQ ID NO: 287318 - DNA, 15 bp, Homo sapiens
tagctctggggctta

SEQ ID NO: 287319 - DNA, 15 bp, Homo sapiens
gtagctctggggctt

SEQ ID NO: 287320 - DNA, 15 bp, Homo sapiens
tgtagctctggggct

SEQ ID NO: 287321 - DNA, 15 bp, Homo sapiens
atgtagctctggggc

SEQ ID NO: 287322 - DNA, 15 bp, Homo sapiens
tatgtagctctgggg

SEQ ID NO: 287323 - DNA, 15 bp, Homo sapiens
atatgtagctctggg

SEQ ID NO: 287324 - DNA, 15 bp, Homo sapiens
gatatgtagctctgg

SEQ ID NO: 287325 - DNA, 15 bp, Homo sapiens
tgatatgtagctctg

SEQ ID NO: 287326 - DNA, 15 bp, Homo sapiens
gtgatatgtagctct

SEQ ID NO: 287327 - DNA, 15 bp, Homo sapiens
agtgatatgtagctc

SEQ ID NO: 287328 - DNA, 15 bp, Homo sapiens
tagtgatatgtagct

SEQ ID NO: 287329 - DNA, 15 bp, Homo sapiens
ttagtgatatgtagc

SEQ ID NO: 287330 - DNA, 15 bp, Homo sapiens
gttagtgatatgtag

SEQ ID NO: 287331 - DNA, 15 bp, Homo sapiens
agttagtgatatgta

SEQ ID NO: 287332 - DNA, 15 bp, Homo sapiens
gagttagtgatatgt

SEQ ID NO: 287333 - DNA, 15 bp, Homo sapiens
agagttagtgatatg

SEQ ID NO: 287334 - DNA, 15 bp, Homo sapiens
tagagttagtgatat

SEQ ID NO: 287335 - DNA, 15 bp, Homo sapiens
gtagagttagtgata

SEQ ID NO: 287336 - DNA, 15 bp, Homo sapiens
tgtagagttagtgat

SEQ ID NO: 287337 - DNA, 15 bp, Homo sapiens
atgtagagttagtga

SEQ ID NO: 287338 - DNA, 15 bp, Homo sapiens
gatgtagagttagtg

SEQ ID NO: 287339 - DNA, 15 bp, Homo sapiens
tgatgtagagttagt

SEQ ID NO: 287340 - DNA, 15 bp, Homo sapiens
atgatgtagagttag

SEQ ID NO: 287341 - DNA, 15 bp, Homo sapiens
gatgatgtagagtta

SEQ ID NO: 287342 - DNA, 15 bp, Homo sapiens
agatgatgtagagtt

SEQ ID NO: 287343 - DNA, 15 bp, Homo sapiens
gagatgatgtagagt

SEQ ID NO: 287344 - DNA, 15 bp, Homo sapiens
agagatgatgtagag

SEQ ID NO: 287345 - DNA, 15 bp, Homo sapiens
cagagatgatgtaga

SEQ ID NO: 287346 - DNA, 15 bp, Homo sapiens
tcagagatgatgtag

SEQ ID NO: 287347 - DNA, 15 bp, Homo sapiens
ttcagagatgatgta

SEQ ID NO: 287348 - DNA, 15 bp, Homo sapiens
tttcagagatgatgt

SEQ ID NO: 287349 - DNA, 15 bp, Homo sapiens
ttttcagagatgatg

SEQ ID NO: 287350 - DNA, 15 bp, Homo sapiens
attttcagagatgat

SEQ ID NO: 287351 - DNA, 15 bp, Homo sapiens
tattttcagagatga

SEQ ID NO: 287352 - DNA, 15 bp, Homo sapiens
ttattttcagagatg

SEQ ID NO: 287353 - DNA, 15 bp, Homo sapiens
gttattttcagagat

SEQ ID NO: 287354 - DNA, 15 bp, Homo sapiens
cgttattttcagaga

SEQ ID NO: 287355 - DNA, 15 bp, Homo sapiens
acgttattttcagag

SEQ ID NO: 287356 - DNA, 15 bp, Homo sapiens
aacgttattttcaga

SEQ ID NO: 287357 - DNA, 15 bp, Homo sapiens
caacgttattttcag

SEQ ID NO: 287358 - DNA, 15 bp, Homo sapiens
acaacgttattttca

SEQ ID NO: 287359 - DNA, 15 bp, Homo sapiens
aacaacgttattttc

SEQ ID NO: 287360 - DNA, 15 bp, Homo sapiens
taacaacgttatttt

SEQ ID NO: 287361 - DNA, 15 bp, Homo sapiens
ctaacaacgttattt

SEQ ID NO: 287362 - DNA, 15 bp, Homo sapiens
tctaacaacgttatt

SEQ ID NO: 287363 - DNA, 15 bp, Homo sapiens
ttctaacaacgttat

SEQ ID NO: 287364 - DNA, 15 bp, Homo sapiens
cttctaacaacgtta

SEQ ID NO: 287365 - DNA, 15 bp, Homo sapiens
gcttctaacaacgtt

SEQ ID NO: 287366 - DNA, 15 bp, Homo sapiens
agcttctaacaacgt

SEQ ID NO: 287367 - DNA, 15 bp, Homo sapiens
gagcttctaacaacg

SEQ ID NO: 287368 - DNA, 15 bp, Homo sapiens
tgagcttctaacaac

SEQ ID NO: 287369 - DNA, 15 bp, Homo sapiens
atgagcttctaacaa

SEQ ID NO: 287370 - DNA, 15 bp, Homo sapiens
tatgagcttctaaca

SEQ ID NO: 287371 - DNA, 15 bp, Homo sapiens
ttatgagcttctaac

SEQ ID NO: 287372 - DNA, 15 bp, Homo sapiens
tttatgagcttctaa

SEQ ID NO: 287373 - DNA, 15 bp, Homo sapiens
gtttatgagcttcta

SEQ ID NO: 287374 - DNA, 15 bp, Homo sapiens
tgtttatgagcttct

SEQ ID NO: 287375 - DNA, 15 bp, Homo sapiens
atgtttatgagcttc

SEQ ID NO: 287376 - DNA, 15 bp, Homo sapiens
tatgtttatgagctt

SEQ ID NO: 287377 - DNA, 15 bp, Homo sapiens
gtatgtttatgagct

SEQ ID NO: 287378 - DNA, 15 bp, Homo sapiens
tgtatgtttatgagc

SEQ ID NO: 287379 - DNA, 15 bp, Homo sapiens
gtgtatgtttatgag

SEQ ID NO: 287380 - DNA, 15 bp, Homo sapiens
agtgtatgtttatga

SEQ ID NO: 287381 - DNA, 15 bp, Homo sapiens
gagtgtatgtttatg

SEQ ID NO: 287382 - DNA, 15 bp, Homo sapiens
agagtgtatgtttat

SEQ ID NO: 287383 - DNA, 15 bp, Homo sapiens
cagagtgtatgttta

SEQ ID NO: 287384 - DNA, 15 bp, Homo sapiens
acagagtgtatgttt

SEQ ID NO: 287385 - DNA, 15 bp, Homo sapiens
aacagagtgtatgtt

SEQ ID NO: 287386 - DNA, 15 bp, Homo sapiens
aaacagagtgtatgt

SEQ ID NO: 287387 - DNA, 15 bp, Homo sapiens
caaacagagtgtatg

SEQ ID NO: 287388 - DNA, 15 bp, Homo sapiens
acaaacagagtgtat

SEQ ID NO: 287389 - DNA, 15 bp, Homo sapiens
aacaaacagagtgta

SEQ ID NO: 287390 - DNA, 15 bp, Homo sapiens
aaacaaacagagtgt

SEQ ID NO: 287391 - DNA, 15 bp, Homo sapiens
taaacaaacagagtg

SEQ ID NO: 287392 - DNA, 15 bp, Homo sapiens
ttaaacaaacagagt

SEQ ID NO: 287393 - DNA, 15 bp, Homo sapiens
cttaaacaaacagag

SEQ ID NO: 287394 - DNA, 15 bp, Homo sapiens
tcttaaacaaacaga

SEQ ID NO: 287395 - DNA, 15 bp, Homo sapiens
ttcttaaacaaacag

SEQ ID NO: 287396 - DNA, 15 bp, Homo sapiens
gttcttaaacaaaca

SEQ ID NO: 287397 - DNA, 15 bp, Homo sapiens
agttcttaaacaaac

SEQ ID NO: 287398 - DNA, 15 bp, Homo sapiens
cagttcttaaacaaa

SEQ ID NO: 287399 - DNA, 15 bp, Homo sapiens
gcagttcttaaacaa

SEQ ID NO: 287400 - DNA, 15 bp, Homo sapiens
tgcagttcttaaaca

SEQ ID NO: 287401 - DNA, 15 bp, Homo sapiens
ttgcagttcttaaac

SEQ ID NO: 287402 - DNA, 15 bp, Homo sapiens
cttgcagttcttaaa

SEQ ID NO: 287403 - DNA, 15 bp, Homo sapiens
tcttgcagttcttaa

SEQ ID NO: 287404 - DNA, 15 bp, Homo sapiens
ctcttgcagttctta

SEQ ID NO: 287405 - DNA, 15 bp, Homo sapiens
gctcttgcagttctt

SEQ ID NO: 287406 - DNA, 15 bp, Homo sapiens
agctcttgcagttct

SEQ ID NO: 287407 - DNA, 15 bp, Homo sapiens
aagctcttgcagttc

SEQ ID NO: 287408 - DNA, 15 bp, Homo sapiens
aaagctcttgcagtt

SEQ ID NO: 287409 - DNA, 15 bp, Homo sapiens
aaaagctcttgcagt

SEQ ID NO: 287410 - DNA, 15 bp, Homo sapiens
taaaagctcttgcag

SEQ ID NO: 287411 - DNA, 15 bp, Homo sapiens
ttaaaagctcttgca

SEQ ID NO: 287412 - DNA, 15 bp, Homo sapiens
tttaaaagctcttgc

SEQ ID NO: 287413 - DNA, 15 bp, Homo sapiens
ttttaaaagctcttg

SEQ ID NO: 287414 - DNA, 15 bp, Homo sapiens
gttttaaaagctctt

SEQ ID NO: 287415 - DNA, 15 bp, Homo sapiens
tgttttaaaagctct

SEQ ID NO: 287416 - DNA, 15 bp, Homo sapiens
atgttttaaaagctc

SEQ ID NO: 287417 - DNA, 15 bp, Homo sapiens
catgttttaaaagct

SEQ ID NO: 287418 - DNA, 15 bp, Homo sapiens
ccatgttttaaaagc

SEQ ID NO: 287419 - DNA, 15 bp, Homo sapiens
accatgttttaaaag

SEQ ID NO: 287420 - DNA, 15 bp, Homo sapiens
aaccatgttttaaaa

SEQ ID NO: 287421 - DNA, 15 bp, Homo sapiens
caaccatgttttaaa

SEQ ID NO: 287422 - DNA, 15 bp, Homo sapiens
gcaaccatgttttaa

SEQ ID NO: 287423 - DNA, 15 bp, Homo sapiens
agcaaccatgtttta

SEQ ID NO: 287424 - DNA, 15 bp, Homo sapiens
tagcaaccatgtttt

SEQ ID NO: 287425 - DNA, 15 bp, Homo sapiens
ttagcaaccatgttt

SEQ ID NO: 287426 - DNA, 15 bp, Homo sapiens
cttagcaaccatgtt

SEQ ID NO: 287427 - DNA, 15 bp, Homo sapiens
acttagcaaccatgt

SEQ ID NO: 287428 - DNA, 15 bp, Homo sapiens
gacttagcaaccatg

SEQ ID NO: 287429 - DNA, 15 bp, Homo sapiens
tgacttagcaaccat

SEQ ID NO: 287430 - DNA, 15 bp, Homo sapiens
gtgacttagcaacca

SEQ ID NO: 287431 - DNA, 15 bp, Homo sapiens
tgtgacttagcaacc

SEQ ID NO: 287432 - DNA, 15 bp, Homo sapiens
ctgtgacttagcaac

SEQ ID NO: 287433 - DNA, 15 bp, Homo sapiens
cctgtgacttagcaa

SEQ ID NO: 287434 - DNA, 15 bp, Homo sapiens
ccctgtgacttagca

SEQ ID NO: 287435 - DNA, 15 bp, Homo sapiens
gccctgtgacttagc

SEQ ID NO: 287436 - DNA, 15 bp, Homo sapiens
tgccctgtgacttag

SEQ ID NO: 287437 - DNA, 15 bp, Homo sapiens
atgccctgtgactta

SEQ ID NO: 287438 - DNA, 15 bp, Homo sapiens
tatgccctgtgactt

SEQ ID NO: 287439 - DNA, 15 bp, Homo sapiens
atatgccctgtgact

SEQ ID NO: 287440 - DNA, 15 bp, Homo sapiens
aatatgccctgtgac

SEQ ID NO: 287441 - DNA, 15 bp, Homo sapiens
aaatatgccctgtga

SEQ ID NO: 287442 - DNA, 15 bp, Homo sapiens
aaaatatgccctgtg

SEQ ID NO: 287443 - DNA, 15 bp, Homo sapiens
gaaaatatgccctgt

SEQ ID NO: 287444 - DNA, 15 bp, Homo sapiens
ggaaaatatgccctg

SEQ ID NO: 287445 - DNA, 15 bp, Homo sapiens
tggaaaatatgccct

SEQ ID NO: 287446 - DNA, 15 bp, Homo sapiens
ctggaaaatatgccc

SEQ ID NO: 287447 - DNA, 15 bp, Homo sapiens
cctggaaaatatgcc

SEQ ID NO: 287448 - DNA, 15 bp, Homo sapiens
tcctggaaaatatgc

SEQ ID NO: 287449 - DNA, 15 bp, Homo sapiens
gtcctggaaaatatg

SEQ ID NO: 287450 - DNA, 15 bp, Homo sapiens
tgtcctggaaaatat

SEQ ID NO: 287451 - DNA, 15 bp, Homo sapiens
atgtcctggaaaata

SEQ ID NO: 287452 - DNA, 15 bp, Homo sapiens
tatgtcctggaaaat

SEQ ID NO: 287453 - DNA, 15 bp, Homo sapiens
ttatgtcctggaaaa

SEQ ID NO: 287454 - DNA, 15 bp, Homo sapiens
tttatgtcctggaaa

SEQ ID NO: 287455 - DNA, 15 bp, Homo sapiens
atttatgtcctggaa

SEQ ID NO: 287456 - DNA, 15 bp, Homo sapiens
catttatgtcctgga

SEQ ID NO: 287457 - DNA, 15 bp, Homo sapiens
ccatttatgtcctgg

SEQ ID NO: 287458 - DNA, 15 bp, Homo sapiens
tccatttatgtcctg

SEQ ID NO: 287459 - DNA, 15 bp, Homo sapiens
ttccatttatgtcct

SEQ ID NO: 287460 - DNA, 15 bp, Homo sapiens
cttccatttatgtcc

SEQ ID NO: 287461 - DNA, 15 bp, Homo sapiens
acttccatttatgtc

SEQ ID NO: 287462 - DNA, 15 bp, Homo sapiens
cacttccatttatgt

SEQ ID NO: 287463 - DNA, 15 bp, Homo sapiens
tcacttccatttatg

SEQ ID NO: 287464 - DNA, 15 bp, Homo sapiens
ttcacttccatttat

SEQ ID NO: 287465 - DNA, 15 bp, Homo sapiens
gttcacttccattta

SEQ ID NO: 287466 - DNA, 15 bp, Homo sapiens
tgttcacttccattt

SEQ ID NO: 287467 - DNA, 15 bp, Homo sapiens
atgttcacttccatt

SEQ ID NO: 287468 - DNA, 15 bp, Homo sapiens
tatgttcacttccat

SEQ ID NO: 287469 - DNA, 15 bp, Homo sapiens
atatgttcacttcca

SEQ ID NO: 287470 - DNA, 15 bp, Homo sapiens
catatgttcacttcc

SEQ ID NO: 287471 - DNA, 15 bp, Homo sapiens
gcatatgttcacttc

SEQ ID NO: 287472 - DNA, 15 bp, Homo sapiens
ggcatatgttcactt

SEQ ID NO: 287473 - DNA, 15 bp, Homo sapiens
gggcatatgttcact

SEQ ID NO: 287474 - DNA, 15 bp, Homo sapiens
ggggcatatgttcac

SEQ ID NO: 287475 - DNA, 15 bp, Homo sapiens
aggggcatatgttca

SEQ ID NO: 287476 - DNA, 15 bp, Homo sapiens
aaggggcatatgttc

SEQ ID NO: 287477 - DNA, 15 bp, Homo sapiens
taaggggcatatgtt

SEQ ID NO: 287478 - DNA, 15 bp, Homo sapiens
ttaaggggcatatgt

SEQ ID NO: 287479 - DNA, 15 bp, Homo sapiens
tttaaggggcatatg

SEQ ID NO: 287480 - DNA, 15 bp, Homo sapiens
atttaaggggcatat

SEQ ID NO: 287481 - DNA, 15 bp, Homo sapiens
aatttaaggggcata

SEQ ID NO: 287482 - DNA, 15 bp, Homo sapiens
caatttaaggggcat

SEQ ID NO: 287483 - DNA, 15 bp, Homo sapiens
acaatttaaggggca

SEQ ID NO: 287484 - DNA, 15 bp, Homo sapiens
gacaatttaaggggc

SEQ ID NO: 287485 - DNA, 15 bp, Homo sapiens
tgacaatttaagggg

SEQ ID NO: 287486 - DNA, 15 bp, Homo sapiens
ctgacaatttaaggg

SEQ ID NO: 287487 - DNA, 15 bp, Homo sapiens
tctgacaatttaagg

SEQ ID NO: 287488 - DNA, 15 bp, Homo sapiens
atctgacaatttaag

SEQ ID NO: 287489 - DNA, 15 bp, Homo sapiens
aatctgacaatttaa

SEQ ID NO: 287490 - DNA, 15 bp, Homo sapiens
gaatctgacaattta

SEQ ID NO: 287491 - DNA, 15 bp, Homo sapiens
agaatctgacaattt

SEQ ID NO: 287492 - DNA, 15 bp, Homo sapiens
aagaatctgacaatt

SEQ ID NO: 287493 - DNA, 15 bp, Homo sapiens
aaagaatctgacaat

SEQ ID NO: 287494 - DNA, 15 bp, Homo sapiens
aaaagaatctgacaa

SEQ ID NO: 287495 - DNA, 15 bp, Homo sapiens
aaaaagaatctgaca

SEQ ID NO: 287496 - DNA, 15 bp, Homo sapiens
aaaaaagaatctgac

SEQ ID NO: 287497 - DNA, 15 bp, Homo sapiens
aaaaaaagaatctga

SEQ ID NO: 287498 - DNA, 15 bp, Homo sapiens
taaaaaaagaatctg

SEQ ID NO: 287499 - DNA, 15 bp, Homo sapiens
ataaaaaaagaatct

SEQ ID NO: 287500 - DNA, 15 bp, Homo sapiens
tataaaaaaagaatc

SEQ ID NO: 287501 - DNA, 15 bp, Homo sapiens
ttataaaaaaagaat

SEQ ID NO: 287502 - DNA, 15 bp, Homo sapiens
cttataaaaaaagaa

SEQ ID NO: 287503 - DNA, 15 bp, Homo sapiens
tcttataaaaaaaga

SEQ ID NO: 287504 - DNA, 15 bp, Homo sapiens
ttcttataaaaaaag

SEQ ID NO: 287505 - DNA, 15 bp, Homo sapiens
cttcttataaaaaaa

SEQ ID NO: 287506 - DNA, 15 bp, Homo sapiens
tcttcttataaaaaa

SEQ ID NO: 287507 - DNA, 15 bp, Homo sapiens
ctcttcttataaaaa

SEQ ID NO: 287508 - DNA, 15 bp, Homo sapiens
tctcttcttataaaa

SEQ ID NO: 287509 - DNA, 15 bp, Homo sapiens
ctctcttcttataaa

SEQ ID NO: 287510 - DNA, 15 bp, Homo sapiens
cctctcttcttataa

SEQ ID NO: 287511 - DNA, 15 bp, Homo sapiens
gcctctcttcttata

SEQ ID NO: 287512 - DNA, 15 bp, Homo sapiens
ggcctctcttcttat

SEQ ID NO: 287513 - DNA, 15 bp, Homo sapiens
gggcctctcttctta

SEQ ID NO: 287514 - DNA, 15 bp, Homo sapiens
tgggcctctcttctt

SEQ ID NO: 287515 - DNA, 15 bp, Homo sapiens
ttgggcctctcttct

SEQ ID NO: 287516 - DNA, 15 bp, Homo sapiens
tttgggcctctcttc

SEQ ID NO: 287517 - DNA, 15 bp, Homo sapiens
atttgggcctctctt

SEQ ID NO: 287518 - DNA, 15 bp, Homo sapiens
gatttgggcctctct

SEQ ID NO: 287519 - DNA, 15 bp, Homo sapiens
agatttgggcctctc

SEQ ID NO: 287520 - DNA, 15 bp, Homo sapiens
cagatttgggcctct

SEQ ID NO: 287521 - DNA, 15 bp, Homo sapiens
acagatttgggcctc

SEQ ID NO: 287522 - DNA, 15 bp, Homo sapiens
gacagatttgggcct

SEQ ID NO: 287523 - DNA, 15 bp, Homo sapiens
agacagatttgggcc

SEQ ID NO: 287524 - DNA, 15 bp, Homo sapiens
cagacagatttgggc

SEQ ID NO: 287525 - DNA, 15 bp, Homo sapiens
acagacagatttggg

SEQ ID NO: 287526 - DNA, 15 bp, Homo sapiens
aacagacagatttgg

SEQ ID NO: 287527 - DNA, 15 bp, Homo sapiens
gaacagacagatttg

SEQ ID NO: 287528 - DNA, 15 bp, Homo sapiens
agaacagacagattt

SEQ ID NO: 287529 - DNA, 15 bp, Homo sapiens
cagaacagacagatt

SEQ ID NO: 287530 - DNA, 15 bp, Homo sapiens
gcagaacagacagat

SEQ ID NO: 287531 - DNA, 15 bp, Homo sapiens
ggcagaacagacaga

SEQ ID NO: 287532 - DNA, 15 bp, Homo sapiens
tggcagaacagacag

SEQ ID NO: 287533 - DNA, 15 bp, Homo sapiens
ctggcagaacagaca

SEQ ID NO: 287534 - DNA, 15 bp, Homo sapiens
cctggcagaacagac

SEQ ID NO: 287535 - DNA, 15 bp, Homo sapiens
tcctggcagaacaga

SEQ ID NO: 287536 - DNA, 15 bp, Homo sapiens
atcctggcagaacag

SEQ ID NO: 287537 - DNA, 15 bp, Homo sapiens
tatcctggcagaaca

SEQ ID NO: 287538 - DNA, 15 bp, Homo sapiens
atatcctggcagaac

SEQ ID NO: 287539 - DNA, 15 bp, Homo sapiens
aatatcctggcagaa

SEQ ID NO: 287540 - DNA, 15 bp, Homo sapiens
taatatcctggcaga

SEQ ID NO: 287541 - DNA, 15 bp, Homo sapiens
ttaatatcctggcag

SEQ ID NO: 287542 - DNA, 15 bp, Homo sapiens
gttaatatcctggca

SEQ ID NO: 287543 - DNA, 15 bp, Homo sapiens
agttaatatcctggc

SEQ ID NO: 287544 - DNA, 15 bp, Homo sapiens
aagttaatatcctgg

SEQ ID NO: 287545 - DNA, 15 bp, Homo sapiens
caagttaatatcctg

SEQ ID NO: 287546 - DNA, 15 bp, Homo sapiens
tcaagttaatatcct

SEQ ID NO: 287547 - DNA, 15 bp, Homo sapiens
gtcaagttaatatcc

SEQ ID NO: 287548 - DNA, 15 bp, Homo sapiens
ggtcaagttaatatc

SEQ ID NO: 287549 - DNA, 15 bp, Homo sapiens
tggtcaagttaatat

SEQ ID NO: 287550 - DNA, 15 bp, Homo sapiens
ttggtcaagttaata

SEQ ID NO: 287551 - DNA, 15 bp, Homo sapiens
tttggtcaagttaat

SEQ ID NO: 287552 - DNA, 15 bp, Homo sapiens
ctttggtcaagttaa

SEQ ID NO: 287553 - DNA, 15 bp, Homo sapiens
tctttggtcaagtta

SEQ ID NO: 287554 - DNA, 15 bp, Homo sapiens
ttctttggtcaagtt

SEQ ID NO: 287555 - DNA, 15 bp, Homo sapiens
cttctttggtcaagt

SEQ ID NO: 287556 - DNA, 15 bp, Homo sapiens
tcttctttggtcaag

SEQ ID NO: 287557 - DNA, 15 bp, Homo sapiens
ctcttctttggtcaa

SEQ ID NO: 287558 - DNA, 15 bp, Homo sapiens
actcttctttggtca

SEQ ID NO: 287559 - DNA, 15 bp, Homo sapiens
aactcttctttggtc

SEQ ID NO: 287560 - DNA, 15 bp, Homo sapiens
caactcttctttggt

SEQ ID NO: 287561 - DNA, 15 bp, Homo sapiens
tcaactcttctttgg

SEQ ID NO: 287562 - DNA, 15 bp, Homo sapiens
atcaactcttctttg

SEQ ID NO: 287563 - DNA, 15 bp, Homo sapiens
aatcaactcttcttt

SEQ ID NO: 287564 - DNA, 15 bp, Homo sapiens
taatcaactcttctt

SEQ ID NO: 287565 - DNA, 15 bp, Homo sapiens
ataatcaactcttct

SEQ ID NO: 287566 - DNA, 15 bp, Homo sapiens
tataatcaactcttc

SEQ ID NO: 287567 - DNA, 15 bp, Homo sapiens
gtataatcaactctt

SEQ ID NO: 287568 - DNA, 15 bp, Homo sapiens
agtataatcaactct

SEQ ID NO: 287569 - DNA, 15 bp, Homo sapiens
tagtataatcaactc

SEQ ID NO: 287570 - DNA, 15 bp, Homo sapiens
ttagtataatcaact

SEQ ID NO: 287571 - DNA, 15 bp, Homo sapiens
cttagtataatcaac

SEQ ID NO: 287572 - DNA, 15 bp, Homo sapiens
acttagtataatcaa

SEQ ID NO: 287573 - DNA, 15 bp, Homo sapiens
cacttagtataatca

SEQ ID NO: 287574 - DNA, 15 bp, Homo sapiens
acacttagtataatc

SEQ ID NO: 287575 - DNA, 15 bp, Homo sapiens
cacacttagtataat

SEQ ID NO: 287576 - DNA, 15 bp, Homo sapiens
acacacttagtataa

SEQ ID NO: 287577 - DNA, 15 bp, Homo sapiens
tacacacttagtata

SEQ ID NO: 287578 - DNA, 15 bp, Homo sapiens
ttacacacttagtat

SEQ ID NO: 287579 - DNA, 15 bp, Homo sapiens
cttacacacttagta

SEQ ID NO: 287580 - DNA, 15 bp, Homo sapiens
acttacacacttagt

SEQ ID NO: 287581 - DNA, 15 bp, Homo sapiens
cacttacacacttag

SEQ ID NO: 287582 - DNA, 15 bp, Homo sapiens
acacttacacactta

SEQ ID NO: 287583 - DNA, 15 bp, Homo sapiens
aacacttacacactt

SEQ ID NO: 287584 - DNA, 15 bp, Homo sapiens
taacacttacacact

SEQ ID NO: 287585 - DNA, 15 bp, Homo sapiens
ctaacacttacacac

SEQ ID NO: 287586 - DNA, 15 bp, Homo sapiens
actaacacttacaca

SEQ ID NO: 287587 - DNA, 15 bp, Homo sapiens
tactaacacttacac

SEQ ID NO: 287588 - DNA, 15 bp, Homo sapiens
ttactaacacttaca

SEQ ID NO: 287589 - DNA, 15 bp, Homo sapiens
attactaacacttac

SEQ ID NO: 287590 - DNA, 15 bp, Homo sapiens
aattactaacactta

SEQ ID NO: 287591 - DNA, 15 bp, Homo sapiens
taattactaacactt

SEQ ID NO: 287592 - DNA, 15 bp, Homo sapiens
ataattactaacact

SEQ ID NO: 287593 - DNA, 15 bp, Homo sapiens
aataattactaacac

SEQ ID NO: 287594 - DNA, 15 bp, Homo sapiens
caataattactaaca

SEQ ID NO: 287595 - DNA, 15 bp, Homo sapiens
ccaataattactaac

SEQ ID NO: 287596 - DNA, 15 bp, Homo sapiens
tccaataattactaa

SEQ ID NO: 287597 - DNA, 15 bp, Homo sapiens
ttccaataattacta

SEQ ID NO: 287598 - DNA, 15 bp, Homo sapiens
tttccaataattact

SEQ ID NO: 287599 - DNA, 15 bp, Homo sapiens
gtttccaataattac

SEQ ID NO: 287600 - DNA, 15 bp, Homo sapiens
agtttccaataatta

SEQ ID NO: 287601 - DNA, 15 bp, Homo sapiens
tagtttccaataatt

SEQ ID NO: 287602 - DNA, 15 bp, Homo sapiens
atagtttccaataat

SEQ ID NO: 287603 - DNA, 15 bp, Homo sapiens
gatagtttccaataa

SEQ ID NO: 287604 - DNA, 15 bp, Homo sapiens
ggatagtttccaata

SEQ ID NO: 287605 - DNA, 15 bp, Homo sapiens
aggatagtttccaat

SEQ ID NO: 287606 - DNA, 15 bp, Homo sapiens
gaggatagtttccaa

SEQ ID NO: 287607 - DNA, 15 bp, Homo sapiens
agaggatagtttcca

SEQ ID NO: 287608 - DNA, 15 bp, Homo sapiens
cagaggatagtttcc

SEQ ID NO: 287609 - DNA, 15 bp, Homo sapiens
tcagaggatagtttc

SEQ ID NO: 287610 - DNA, 15 bp, Homo sapiens
gtcagaggatagttt

SEQ ID NO: 287611 - DNA, 15 bp, Homo sapiens
agtcagaggatagtt

SEQ ID NO: 287612 - DNA, 15 bp, Homo sapiens
aagtcagaggatagt

SEQ ID NO: 287613 - DNA, 15 bp, Homo sapiens
taagtcagaggatag

SEQ ID NO: 287614 - DNA, 15 bp, Homo sapiens
gtaagtcagaggata

SEQ ID NO: 287615 - DNA, 15 bp, Homo sapiens
agtaagtcagaggat

SEQ ID NO: 287616 - DNA, 15 bp, Homo sapiens
aagtaagtcagagga

SEQ ID NO: 287617 - DNA, 15 bp, Homo sapiens
taagtaagtcagagg

SEQ ID NO: 287618 - DNA, 15 bp, Homo sapiens
ctaagtaagtcagag

SEQ ID NO: 287619 - DNA, 15 bp, Homo sapiens
gctaagtaagtcaga

SEQ ID NO: 287620 - DNA, 15 bp, Homo sapiens
agctaagtaagtcag

SEQ ID NO: 287621 - DNA, 15 bp, Homo sapiens
tagctaagtaagtca

SEQ ID NO: 287622 - DNA, 15 bp, Homo sapiens
ttagctaagtaagtc

SEQ ID NO: 287623 - DNA, 15 bp, Homo sapiens
tttagctaagtaagt

SEQ ID NO: 287624 - DNA, 15 bp, Homo sapiens
atttagctaagtaag

SEQ ID NO: 287625 - DNA, 15 bp, Homo sapiens
catttagctaagtaa

SEQ ID NO: 287626 - DNA, 15 bp, Homo sapiens
ccatttagctaagta

SEQ ID NO: 287627 - DNA, 15 bp, Homo sapiens
cccatttagctaagt

SEQ ID NO: 287628 - DNA, 15 bp, Homo sapiens
gcccatttagctaag

SEQ ID NO: 287629 - DNA, 15 bp, Homo sapiens
tgcccatttagctaa

SEQ ID NO: 287630 - DNA, 15 bp, Homo sapiens
gtgcccatttagcta

SEQ ID NO: 287631 - DNA, 15 bp, Homo sapiens
tgtgcccatttagct

SEQ ID NO: 287632 - DNA, 15 bp, Homo sapiens
atgtgcccatttagc

SEQ ID NO: 287633 - DNA, 15 bp, Homo sapiens
aatgtgcccatttag

SEQ ID NO: 287634 - DNA, 15 bp, Homo sapiens
caatgtgcccattta

SEQ ID NO: 287635 - DNA, 15 bp, Homo sapiens
acaatgtgcccattt

SEQ ID NO: 287636 - DNA, 15 bp, Homo sapiens
tacaatgtgcccatt

SEQ ID NO: 287637 - DNA, 15 bp, Homo sapiens
atacaatgtgcccat

SEQ ID NO: 287638 - DNA, 15 bp, Homo sapiens
catacaatgtgccca

SEQ ID NO: 287639 - DNA, 15 bp, Homo sapiens
tcatacaatgtgccc

SEQ ID NO: 287640 - DNA, 15 bp, Homo sapiens
ttcatacaatgtgcc

SEQ ID NO: 287641 - DNA, 15 bp, Homo sapiens
tttcatacaatgtgc

SEQ ID NO: 287642 - DNA, 15 bp, Homo sapiens
gtttcatacaatgtg

SEQ ID NO: 287643 - DNA, 15 bp, Homo sapiens
agtttcatacaatgt

SEQ ID NO: 287644 - DNA, 15 bp, Homo sapiens
aagtttcatacaatg

SEQ ID NO: 287645 - DNA, 15 bp, Homo sapiens
caagtttcatacaat

SEQ ID NO: 287646 - DNA, 15 bp, Homo sapiens
tcaagtttcatacaa

SEQ ID NO: 287647 - DNA, 15 bp, Homo sapiens
atcaagtttcataca

SEQ ID NO: 287648 - DNA, 15 bp, Homo sapiens
aatcaagtttcatac

SEQ ID NO: 287649 - DNA, 15 bp, Homo sapiens
aaatcaagtttcata

SEQ ID NO: 287650 - DNA, 15 bp, Homo sapiens
taaatcaagtttcat

SEQ ID NO: 287651 - DNA, 15 bp, Homo sapiens
ctaaatcaagtttca

SEQ ID NO: 287652 - DNA, 15 bp, Homo sapiens
actaaatcaagtttc

SEQ ID NO: 287653 - DNA, 15 bp, Homo sapiens
aactaaatcaagttt

SEQ ID NO: 287654 - DNA, 15 bp, Homo sapiens
aaactaaatcaagtt

SEQ ID NO: 287655 - DNA, 15 bp, Homo sapiens
gaaactaaatcaagt

SEQ ID NO: 287656 - DNA, 15 bp, Homo sapiens
agaaactaaatcaag

SEQ ID NO: 287657 - DNA, 15 bp, Homo sapiens
tagaaactaaatcaa

SEQ ID NO: 287658 - DNA, 15 bp, Homo sapiens
ctagaaactaaatca

SEQ ID NO: 287659 - DNA, 15 bp, Homo sapiens
gctagaaactaaatc

SEQ ID NO: 287660 - DNA, 15 bp, Homo sapiens
tgctagaaactaaat

SEQ ID NO: 287661 - DNA, 15 bp, Homo sapiens
atgctagaaactaaa

SEQ ID NO: 287662 - DNA, 15 bp, Homo sapiens
tatgctagaaactaa

SEQ ID NO: 287663 - DNA, 15 bp, Homo sapiens
atatgctagaaacta

SEQ ID NO: 287664 - DNA, 15 bp, Homo sapiens
catatgctagaaact

SEQ ID NO: 287665 - DNA, 15 bp, Homo sapiens
acatatgctagaaac

SEQ ID NO: 287666 - DNA, 15 bp, Homo sapiens
tacatatgctagaaa

SEQ ID NO: 287667 - DNA, 15 bp, Homo sapiens
ctacatatgctagaa

SEQ ID NO: 287668 - DNA, 15 bp, Homo sapiens
cctacatatgctaga

SEQ ID NO: 287669 - DNA, 15 bp, Homo sapiens
acctacatatgctag

SEQ ID NO: 287670 - DNA, 15 bp, Homo sapiens
tacctacatatgcta

SEQ ID NO: 287671 - DNA, 15 bp, Homo sapiens
atacctacatatgct

SEQ ID NO: 287672 - DNA, 15 bp, Homo sapiens
tatacctacatatgc

SEQ ID NO: 287673 - DNA, 15 bp, Homo sapiens
ttatacctacatatg

SEQ ID NO: 287674 - DNA, 15 bp, Homo sapiens
cttatacctacatat

SEQ ID NO: 287675 - DNA, 15 bp, Homo sapiens
ccttatacctacata

SEQ ID NO: 287676 - DNA, 15 bp, Homo sapiens
accttatacctacat

SEQ ID NO: 287677 - DNA, 15 bp, Homo sapiens
taccttatacctaca

SEQ ID NO: 287678 - DNA, 15 bp, Homo sapiens
gtaccttatacctac

SEQ ID NO: 287679 - DNA, 15 bp, Homo sapiens
tgtaccttataccta

SEQ ID NO: 287680 - DNA, 15 bp, Homo sapiens
ctgtaccttatacct

SEQ ID NO: 287681 - DNA, 15 bp, Homo sapiens
cctgtaccttatacc

SEQ ID NO: 287682 - DNA, 15 bp, Homo sapiens
acctgtaccttatac

SEQ ID NO: 287683 - DNA, 15 bp, Homo sapiens
aacctgtaccttata

SEQ ID NO: 287684 - DNA, 15 bp, Homo sapiens
caacctgtaccttat

SEQ ID NO: 287685 - DNA, 15 bp, Homo sapiens
tcaacctgtacctta

SEQ ID NO: 287686 - DNA, 15 bp, Homo sapiens
gtcaacctgtacctt

SEQ ID NO: 287687 - DNA, 15 bp, Homo sapiens
tgtcaacctgtacct

SEQ ID NO: 287688 - DNA, 15 bp, Homo sapiens
atgtcaacctgtacc

SEQ ID NO: 287689 - DNA, 15 bp, Homo sapiens
catgtcaacctgtac

SEQ ID NO: 287690 - DNA, 15 bp, Homo sapiens
ccatgtcaacctgta

SEQ ID NO: 287691 - DNA, 15 bp, Homo sapiens
tccatgtcaacctgt

SEQ ID NO: 287692 - DNA, 15 bp, Homo sapiens
atccatgtcaacctg

SEQ ID NO: 287693 - DNA, 15 bp, Homo sapiens
tatccatgtcaacct

SEQ ID NO: 287694 - DNA, 15 bp, Homo sapiens
ttatccatgtcaacc

SEQ ID NO: 287695 - DNA, 15 bp, Homo sapiens
tttatccatgtcaac

SEQ ID NO: 287696 - DNA, 15 bp, Homo sapiens
atttatccatgtcaa

SEQ ID NO: 287697 - DNA, 15 bp, Homo sapiens
gatttatccatgtca

SEQ ID NO: 287698 - DNA, 15 bp, Homo sapiens
ggatttatccatgtc

SEQ ID NO: 287699 - DNA, 15 bp, Homo sapiens
aggatttatccatgt

SEQ ID NO: 287700 - DNA, 15 bp, Homo sapiens
caggatttatccatg

SEQ ID NO: 287701 - DNA, 15 bp, Homo sapiens
ccaggatttatccat

SEQ ID NO: 287702 - DNA, 15 bp, Homo sapiens
gccaggatttatcca

SEQ ID NO: 287703 - DNA, 15 bp, Homo sapiens
agccaggatttatcc

SEQ ID NO: 287704 - DNA, 15 bp, Homo sapiens
aagccaggatttatc

SEQ ID NO: 287705 - DNA, 15 bp, Homo sapiens
aaagccaggatttat

SEQ ID NO: 287706 - DNA, 15 bp, Homo sapiens
taaagccaggattta

SEQ ID NO: 287707 - DNA, 15 bp, Homo sapiens
ctaaagccaggattt

SEQ ID NO: 287708 - DNA, 15 bp, Homo sapiens
actaaagccaggatt

SEQ ID NO: 287709 - DNA, 15 bp, Homo sapiens
aactaaagccaggat

SEQ ID NO: 287710 - DNA, 15 bp, Homo sapiens
aaactaaagccagga

SEQ ID NO: 287711 - DNA, 15 bp, Homo sapiens
aaaactaaagccagg

SEQ ID NO: 287712 - DNA, 15 bp, Homo sapiens
gaaaactaaagccag

SEQ ID NO: 287713 - DNA, 15 bp, Homo sapiens
tgaaaactaaagcca

SEQ ID NO: 287714 - DNA, 15 bp, Homo sapiens
atgaaaactaaagcc

SEQ ID NO: 287715 - DNA, 15 bp, Homo sapiens
catgaaaactaaagc

SEQ ID NO: 287716 - DNA, 15 bp, Homo sapiens
tcatgaaaactaaag

SEQ ID NO: 287717 - DNA, 15 bp, Homo sapiens
ttcatgaaaactaaa

SEQ ID NO: 287718 - DNA, 15 bp, Homo sapiens
gttcatgaaaactaa

SEQ ID NO: 287719 - DNA, 15 bp, Homo sapiens
ggttcatgaaaacta

SEQ ID NO: 287720 - DNA, 15 bp, Homo sapiens
gggttcatgaaaact

SEQ ID NO: 287721 - DNA, 15 bp, Homo sapiens
agggttcatgaaaac

SEQ ID NO: 287722 - DNA, 15 bp, Homo sapiens
tagggttcatgaaaa

SEQ ID NO: 287723 - DNA, 15 bp, Homo sapiens
ttagggttcatgaaa

SEQ ID NO: 287724 - DNA, 15 bp, Homo sapiens
tttagggttcatgaa

SEQ ID NO: 287725 - DNA, 15 bp, Homo sapiens
ctttagggttcatga

SEQ ID NO: 287726 - DNA, 15 bp, Homo sapiens
actttagggttcatg

SEQ ID NO: 287727 - DNA, 15 bp, Homo sapiens
aactttagggttcat

SEQ ID NO: 287728 - DNA, 15 bp, Homo sapiens
gaactttagggttca

SEQ ID NO: 287729 - DNA, 15 bp, Homo sapiens
tgaactttagggttc

SEQ ID NO: 287730 - DNA, 15 bp, Homo sapiens
gtgaactttagggtt

SEQ ID NO: 287731 - DNA, 15 bp, Homo sapiens
tgtgaactttagggt

SEQ ID NO: 287732 - DNA, 15 bp, Homo sapiens
ttgtgaactttaggg

SEQ ID NO: 287733 - DNA, 15 bp, Homo sapiens
attgtgaactttagg

SEQ ID NO: 287734 - DNA, 15 bp, Homo sapiens
aattgtgaactttag

SEQ ID NO: 287735 - DNA, 15 bp, Homo sapiens
aaattgtgaacttta

SEQ ID NO: 287736 - DNA, 15 bp, Homo sapiens
caaattgtgaacttt

SEQ ID NO: 287737 - DNA, 15 bp, Homo sapiens
gcaaattgtgaactt

SEQ ID NO: 287738 - DNA, 15 bp, Homo sapiens
agcaaattgtgaact

SEQ ID NO: 287739 - DNA, 15 bp, Homo sapiens
cagcaaattgtgaac

SEQ ID NO: 287740 - DNA, 15 bp, Homo sapiens
tcagcaaattgtgaa

SEQ ID NO: 287741 - DNA, 15 bp, Homo sapiens
ttcagcaaattgtga

SEQ ID NO: 287742 - DNA, 15 bp, Homo sapiens
gttcagcaaattgtg

SEQ ID NO: 287743 - DNA, 15 bp, Homo sapiens
agttcagcaaattgt

SEQ ID NO: 287744 - DNA, 15 bp, Homo sapiens
aagttcagcaaattg

SEQ ID NO: 287745 - DNA, 15 bp, Homo sapiens
aaagttcagcaaatt

SEQ ID NO: 287746 - DNA, 15 bp, Homo sapiens
caaagttcagcaaat

SEQ ID NO: 287747 - DNA, 15 bp, Homo sapiens
acaaagttcagcaaa

SEQ ID NO: 287748 - DNA, 15 bp, Homo sapiens
tacaaagttcagcaa

SEQ ID NO: 287749 - DNA, 15 bp, Homo sapiens
atacaaagttcagca

SEQ ID NO: 287750 - DNA, 15 bp, Homo sapiens
aatacaaagttcagc

SEQ ID NO: 287751 - DNA, 15 bp, Homo sapiens
aaatacaaagttcag

SEQ ID NO: 287752 - DNA, 15 bp, Homo sapiens
taaatacaaagttca

SEQ ID NO: 287753 - DNA, 15 bp, Homo sapiens
ttaaatacaaagttc

SEQ ID NO: 287754 - DNA, 15 bp, Homo sapiens
attaaatacaaagtt

SEQ ID NO: 287755 - DNA, 15 bp, Homo sapiens
tattaaatacaaagt

SEQ ID NO: 287756 - DNA, 15 bp, Homo sapiens
atattaaatacaaag

SEQ ID NO: 287757 - DNA, 15 bp, Homo sapiens
aatattaaatacaaa

SEQ ID NO: 287758 - DNA, 15 bp, Homo sapiens
aaatattaaatacaa

SEQ ID NO: 287759 - DNA, 15 bp, Homo sapiens
taaatattaaataca

SEQ ID NO: 287760 - DNA, 15 bp, Homo sapiens
gtaaatattaaatac

SEQ ID NO: 287761 - DNA, 15 bp, Homo sapiens
agtaaatattaaata

SEQ ID NO: 287762 - DNA, 15 bp, Homo sapiens
cagtaaatattaaat

SEQ ID NO: 287763 - DNA, 15 bp, Homo sapiens
tcagtaaatattaaa

SEQ ID NO: 287764 - DNA, 15 bp, Homo sapiens
atcagtaaatattaa

SEQ ID NO: 287765 - DNA, 15 bp, Homo sapiens
catcagtaaatatta

SEQ ID NO: 287766 - DNA, 15 bp, Homo sapiens
tcatcagtaaatatt

SEQ ID NO: 287767 - DNA, 15 bp, Homo sapiens
ttcatcagtaaatat

SEQ ID NO: 287768 - DNA, 15 bp, Homo sapiens
tttcatcagtaaata

SEQ ID NO: 287769 - DNA, 15 bp, Homo sapiens
atttcatcagtaaat

SEQ ID NO: 287770 - DNA, 15 bp, Homo sapiens
aatttcatcagtaaa

SEQ ID NO: 287771 - DNA, 15 bp, Homo sapiens
gaatttcatcagtaa

SEQ ID NO: 287772 - DNA, 15 bp, Homo sapiens
agaatttcatcagta

SEQ ID NO: 287773 - DNA, 15 bp, Homo sapiens
aagaatttcatcagt

SEQ ID NO: 287774 - DNA, 15 bp, Homo sapiens
taagaatttcatcag

SEQ ID NO: 287775 - DNA, 15 bp, Homo sapiens
gtaagaatttcatca

SEQ ID NO: 287776 - DNA, 15 bp, Homo sapiens
cgtaagaatttcatc

SEQ ID NO: 287777 - DNA, 15 bp, Homo sapiens
ccgtaagaatttcat

SEQ ID NO: 287778 - DNA, 15 bp, Homo sapiens
accgtaagaatttca

SEQ ID NO: 287779 - DNA, 15 bp, Homo sapiens
caccgtaagaatttc

SEQ ID NO: 287780 - DNA, 15 bp, Homo sapiens
acaccgtaagaattt

SEQ ID NO: 287781 - DNA, 15 bp, Homo sapiens
gacaccgtaagaatt

SEQ ID NO: 287782 - DNA, 15 bp, Homo sapiens
cgacaccgtaagaat

SEQ ID NO: 287783 - DNA, 15 bp, Homo sapiens
acgacaccgtaagaa

SEQ ID NO: 287784 - DNA, 15 bp, Homo sapiens
gacgacaccgtaaga

SEQ ID NO: 287785 - DNA, 15 bp, Homo sapiens
ggacgacaccgtaag

SEQ ID NO: 287786 - DNA, 15 bp, Homo sapiens
gggacgacaccgtaa

SEQ ID NO: 287787 - DNA, 15 bp, Homo sapiens
agggacgacaccgta

SEQ ID NO: 287788 - DNA, 15 bp, Homo sapiens
aagggacgacaccgt

SEQ ID NO: 287789 - DNA, 15 bp, Homo sapiens
gaagggacgacaccg

SEQ ID NO: 287790 - DNA, 15 bp, Homo sapiens
ggaagggacgacacc

SEQ ID NO: 287791 - DNA, 15 bp, Homo sapiens
tggaagggacgacac

SEQ ID NO: 287792 - DNA, 15 bp, Homo sapiens
ttggaagggacgaca

SEQ ID NO: 287793 - DNA, 15 bp, Homo sapiens
tttggaagggacgac

SEQ ID NO: 287794 - DNA, 15 bp, Homo sapiens
ttttggaagggacga

SEQ ID NO: 287795 - DNA, 15 bp, Homo sapiens
gttttggaagggacg

SEQ ID NO: 287796 - DNA, 15 bp, Homo sapiens
tgttttggaagggac

SEQ ID NO: 287797 - DNA, 15 bp, Homo sapiens
ttgttttggaaggga

SEQ ID NO: 287798 - DNA, 15 bp, Homo sapiens
tttgttttggaaggg

SEQ ID NO: 287799 - DNA, 15 bp, Homo sapiens
ttttgttttggaagg

SEQ ID NO: 287800 - DNA, 15 bp, Homo sapiens
attttgttttggaag

SEQ ID NO: 287801 - DNA, 15 bp, Homo sapiens
gattttgttttggaa

SEQ ID NO: 287802 - DNA, 15 bp, Homo sapiens
cgattttgttttgga

SEQ ID NO: 287803 - DNA, 15 bp, Homo sapiens
ccgattttgttttgg

SEQ ID NO: 287804 - DNA, 15 bp, Homo sapiens
tccgattttgttttg

SEQ ID NO: 287805 - DNA, 15 bp, Homo sapiens
ctccgattttgtttt

SEQ ID NO: 287806 - DNA, 15 bp, Homo sapiens
cctccgattttgttt

SEQ ID NO: 287807 - DNA, 15 bp, Homo sapiens
gcctccgattttgtt

SEQ ID NO: 287808 - DNA, 15 bp, Homo sapiens
tgcctccgattttgt

SEQ ID NO: 287809 - DNA, 15 bp, Homo sapiens
atgcctccgattttg

SEQ ID NO: 287810 - DNA, 15 bp, Homo sapiens
tatgcctccgatttt

SEQ ID NO: 287811 - DNA, 15 bp, Homo sapiens
gtatgcctccgattt

SEQ ID NO: 287812 - DNA, 15 bp, Homo sapiens
agtatgcctccgatt

SEQ ID NO: 287813 - DNA, 15 bp, Homo sapiens
aagtatgcctccgat

SEQ ID NO: 287814 - DNA, 15 bp, Homo sapiens
taagtatgcctccga

SEQ ID NO: 287815 - DNA, 15 bp, Homo sapiens
ctaagtatgcctccg

SEQ ID NO: 287816 - DNA, 15 bp, Homo sapiens
tctaagtatgcctcc

SEQ ID NO: 287817 - DNA, 15 bp, Homo sapiens
gtctaagtatgcctc

SEQ ID NO: 287818 - DNA, 15 bp, Homo sapiens
agtctaagtatgcct

SEQ ID NO: 287819 - DNA, 15 bp, Homo sapiens
aagtctaagtatgcc

SEQ ID NO: 287820 - DNA, 15 bp, Homo sapiens
aaagtctaagtatgc

SEQ ID NO: 287821 - DNA, 15 bp, Homo sapiens
aaaagtctaagtatg

SEQ ID NO: 287822 - DNA, 15 bp, Homo sapiens
gaaaagtctaagtat

SEQ ID NO: 287823 - DNA, 15 bp, Homo sapiens
ggaaaagtctaagta

SEQ ID NO: 287824 - DNA, 15 bp, Homo sapiens
gggaaaagtctaagt

SEQ ID NO: 287825 - DNA, 15 bp, Homo sapiens
ggggaaaagtctaag

SEQ ID NO: 287826 - DNA, 15 bp, Homo sapiens
aggggaaaagtctaa

SEQ ID NO: 287827 - DNA, 15 bp, Homo sapiens
caggggaaaagtcta

SEQ ID NO: 287828 - DNA, 15 bp, Homo sapiens
tcaggggaaaagtct

SEQ ID NO: 287829 - DNA, 15 bp, Homo sapiens
ctcaggggaaaagtc

SEQ ID NO: 287830 - DNA, 15 bp, Homo sapiens
tctcaggggaaaagt

SEQ ID NO: 287831 - DNA, 15 bp, Homo sapiens
gtctcaggggaaaag

SEQ ID NO: 287832 - DNA, 15 bp, Homo sapiens
tgtctcaggggaaaa

SEQ ID NO: 287833 - DNA, 15 bp, Homo sapiens
atgtctcaggggaaa

SEQ ID NO: 287834 - DNA, 15 bp, Homo sapiens
catgtctcaggggaa

SEQ ID NO: 287835 - DNA, 15 bp, Homo sapiens
ccatgtctcagggga

SEQ ID NO: 287836 - DNA, 15 bp, Homo sapiens
accatgtctcagggg

SEQ ID NO: 287837 - DNA, 15 bp, Homo sapiens
gaccatgtctcaggg

SEQ ID NO: 287838 - DNA, 15 bp, Homo sapiens
ggaccatgtctcagg

SEQ ID NO: 287839 - DNA, 15 bp, Homo sapiens
gggaccatgtctcag

SEQ ID NO: 287840 - DNA, 15 bp, Homo sapiens
tgggaccatgtctca

SEQ ID NO: 287841 - DNA, 15 bp, Homo sapiens
ttgggaccatgtctc

SEQ ID NO: 287842 - DNA, 15 bp, Homo sapiens
cttgggaccatgtct

SEQ ID NO: 287843 - DNA, 15 bp, Homo sapiens
acttgggaccatgtc

SEQ ID NO: 287844 - DNA, 15 bp, Homo sapiens
gacttgggaccatgt

SEQ ID NO: 287845 - DNA, 15 bp, Homo sapiens
agacttgggaccatg

SEQ ID NO: 287846 - DNA, 15 bp, Homo sapiens
tagacttgggaccat

SEQ ID NO: 287847 - DNA, 15 bp, Homo sapiens
ctagacttgggacca

SEQ ID NO: 287848 - DNA, 15 bp, Homo sapiens
cctagacttgggacc

SEQ ID NO: 287849 - DNA, 15 bp, Homo sapiens
gcctagacttgggac

SEQ ID NO: 287850 - DNA, 15 bp, Homo sapiens
agcctagacttggga

SEQ ID NO: 287851 - DNA, 15 bp, Homo sapiens
tagcctagacttggg

SEQ ID NO: 287852 - DNA, 15 bp, Homo sapiens
gtagcctagacttgg

SEQ ID NO: 287853 - DNA, 15 bp, Homo sapiens
tgtagcctagacttg

SEQ ID NO: 287854 - DNA, 15 bp, Homo sapiens
ttgtagcctagactt

SEQ ID NO: 287855 - DNA, 15 bp, Homo sapiens
gttgtagcctagact

SEQ ID NO: 287856 - DNA, 15 bp, Homo sapiens
agttgtagcctagac

SEQ ID NO: 287857 - DNA, 15 bp, Homo sapiens
aagttgtagcctaga

SEQ ID NO: 287858 - DNA, 15 bp, Homo sapiens
gaagttgtagcctag

SEQ ID NO: 287859 - DNA, 15 bp, Homo sapiens
tgaagttgtagccta

SEQ ID NO: 287860 - DNA, 15 bp, Homo sapiens
atgaagttgtagcct

SEQ ID NO: 287861 - DNA, 15 bp, Homo sapiens
gatgaagttgtagcc

SEQ ID NO: 287862 - DNA, 15 bp, Homo sapiens
tgatgaagttgtagc

SEQ ID NO: 287863 - DNA, 15 bp, Homo sapiens
gtgatgaagttgtag

SEQ ID NO: 287864 - DNA, 15 bp, Homo sapiens
agtgatgaagttgta

SEQ ID NO: 287865 - DNA, 15 bp, Homo sapiens
cagtgatgaagttgt

SEQ ID NO: 287866 - DNA, 15 bp, Homo sapiens
tcagtgatgaagttg

SEQ ID NO: 287867 - DNA, 15 bp, Homo sapiens
gtcagtgatgaagtt

SEQ ID NO: 287868 - DNA, 15 bp, Homo sapiens
ggtcagtgatgaagt

SEQ ID NO: 287869 - DNA, 15 bp, Homo sapiens
gggtcagtgatgaag

SEQ ID NO: 287870 - DNA, 15 bp, Homo sapiens
agggtcagtgatgaa

SEQ ID NO: 287871 - DNA, 15 bp, Homo sapiens
aagggtcagtgatga

SEQ ID NO: 287872 - DNA, 15 bp, Homo sapiens
aaagggtcagtgatg

SEQ ID NO: 287873 - DNA, 15 bp, Homo sapiens
aaaagggtcagtgat

SEQ ID NO: 287874 - DNA, 15 bp, Homo sapiens
aaaaagggtcagtga

SEQ ID NO: 287875 - DNA, 15 bp, Homo sapiens
gaaaaagggtcagtg

SEQ ID NO: 287876 - DNA, 15 bp, Homo sapiens
tgaaaaagggtcagt

SEQ ID NO: 287877 - DNA, 15 bp, Homo sapiens
atgaaaaagggtcag

SEQ ID NO: 287878 - DNA, 15 bp, Homo sapiens
catgaaaaagggtca

SEQ ID NO: 287879 - DNA, 15 bp, Homo sapiens
ccatgaaaaagggtc

SEQ ID NO: 287880 - DNA, 15 bp, Homo sapiens
tccatgaaaaagggt

SEQ ID NO: 287881 - DNA, 15 bp, Homo sapiens
ttccatgaaaaaggg

SEQ ID NO: 287882 - DNA, 15 bp, Homo sapiens
tttccatgaaaaagg

SEQ ID NO: 287883 - DNA, 15 bp, Homo sapiens
atttccatgaaaaag

SEQ ID NO: 287884 - DNA, 15 bp, Homo sapiens
aatttccatgaaaaa

SEQ ID NO: 287885 - DNA, 15 bp, Homo sapiens
aaatttccatgaaaa

SEQ ID NO: 287886 - DNA, 15 bp, Homo sapiens
caaatttccatgaaa

SEQ ID NO: 287887 - DNA, 15 bp, Homo sapiens
ccaaatttccatgaa

SEQ ID NO: 287888 - DNA, 15 bp, Homo sapiens
gccaaatttccatga

SEQ ID NO: 287889 - DNA, 15 bp, Homo sapiens
tgccaaatttccatg

SEQ ID NO: 287890 - DNA, 15 bp, Homo sapiens
ctgccaaatttccat

SEQ ID NO: 287891 - DNA, 15 bp, Homo sapiens
actgccaaatttcca

SEQ ID NO: 287892 - DNA, 15 bp, Homo sapiens
aactgccaaatttcc

SEQ ID NO: 287893 - DNA, 15 bp, Homo sapiens
taactgccaaatttc

SEQ ID NO: 287894 - DNA, 15 bp, Homo sapiens
ctaactgccaaattt

SEQ ID NO: 287895 - DNA, 15 bp, Homo sapiens
actaactgccaaatt

SEQ ID NO: 287896 - DNA, 15 bp, Homo sapiens
cactaactgccaaat

SEQ ID NO: 287897 - DNA, 15 bp, Homo sapiens
tcactaactgccaaa

SEQ ID NO: 287898 - DNA, 15 bp, Homo sapiens
atcactaactgccaa

SEQ ID NO: 287899 - DNA, 15 bp, Homo sapiens
tatcactaactgcca

SEQ ID NO: 287900 - DNA, 15 bp, Homo sapiens
ctatcactaactgcc

SEQ ID NO: 287901 - DNA, 15 bp, Homo sapiens
cctatcactaactgc

SEQ ID NO: 287902 - DNA, 15 bp, Homo sapiens
acctatcactaactg

SEQ ID NO: 287903 - DNA, 15 bp, Homo sapiens
tacctatcactaact

SEQ ID NO: 287904 - DNA, 15 bp, Homo sapiens
ctacctatcactaac

SEQ ID NO: 287905 - DNA, 15 bp, Homo sapiens
gctacctatcactaa

SEQ ID NO: 287906 - DNA, 15 bp, Homo sapiens
cgctacctatcacta

SEQ ID NO: 287907 - DNA, 15 bp, Homo sapiens
acgctacctatcact

SEQ ID NO: 287908 - DNA, 15 bp, Homo sapiens
gacgctacctatcac

SEQ ID NO: 287909 - DNA, 15 bp, Homo sapiens
agacgctacctatca

SEQ ID NO: 287910 - DNA, 15 bp, Homo sapiens
cagacgctacctatc

SEQ ID NO: 287911 - DNA, 15 bp, Homo sapiens
tcagacgctacctat

SEQ ID NO: 287912 - DNA, 15 bp, Homo sapiens
ctcagacgctaccta

SEQ ID NO: 287913 - DNA, 15 bp, Homo sapiens
gctcagacgctacct

SEQ ID NO: 287914 - DNA, 15 bp, Homo sapiens
agctcagacgctacc

SEQ ID NO: 287915 - DNA, 15 bp, Homo sapiens
aagctcagacgctac

SEQ ID NO: 287916 - DNA, 15 bp, Homo sapiens
taagctcagacgcta

SEQ ID NO: 287917 - DNA, 15 bp, Homo sapiens
ataagctcagacgct

SEQ ID NO: 287918 - DNA, 15 bp, Homo sapiens
tataagctcagacgc

SEQ ID NO: 287919 - DNA, 15 bp, Homo sapiens
ctataagctcagacg

SEQ ID NO: 287920 - DNA, 15 bp, Homo sapiens
gctataagctcagac

SEQ ID NO: 287921 - DNA, 15 bp, Homo sapiens
agctataagctcaga

SEQ ID NO: 287922 - DNA, 15 bp, Homo sapiens
gagctataagctcag

SEQ ID NO: 287923 - DNA, 15 bp, Homo sapiens
tgagctataagctca

SEQ ID NO: 287924 - DNA, 15 bp, Homo sapiens
ctgagctataagctc

SEQ ID NO: 287925 - DNA, 15 bp, Homo sapiens
tctgagctataagct

SEQ ID NO: 287926 - DNA, 15 bp, Homo sapiens
atctgagctataagc

SEQ ID NO: 287927 - DNA, 15 bp, Homo sapiens
tatctgagctataag

SEQ ID NO: 287928 - DNA, 15 bp, Homo sapiens
atatctgagctataa

SEQ ID NO: 287929 - DNA, 15 bp, Homo sapiens
aatatctgagctata

SEQ ID NO: 287930 - DNA, 15 bp, Homo sapiens
aaatatctgagctat

SEQ ID NO: 287931 - DNA, 15 bp, Homo sapiens
aaaatatctgagcta

SEQ ID NO: 287932 - DNA, 15 bp, Homo sapiens
gaaaatatctgagct

SEQ ID NO: 287933 - DNA, 15 bp, Homo sapiens
tgaaaatatctgagc

SEQ ID NO: 287934 - DNA, 15 bp, Homo sapiens
ttgaaaatatctgag

SEQ ID NO: 287935 - DNA, 15 bp, Homo sapiens
tttgaaaatatctga

SEQ ID NO: 287936 - DNA, 15 bp, Homo sapiens
ctttgaaaatatctg

SEQ ID NO: 287937 - DNA, 15 bp, Homo sapiens
actttgaaaatatct

SEQ ID NO: 287938 - DNA, 15 bp, Homo sapiens
tactttgaaaatatc

SEQ ID NO: 287939 - DNA, 15 bp, Homo sapiens
ctactttgaaaatat

SEQ ID NO: 287940 - DNA, 15 bp, Homo sapiens
cctactttgaaaata

SEQ ID NO: 287941 - DNA, 15 bp, Homo sapiens
tcctactttgaaaat

SEQ ID NO: 287942 - DNA, 15 bp, Homo sapiens
ttcctactttgaaaa

SEQ ID NO: 287943 - DNA, 15 bp, Homo sapiens
cttcctactttgaaa

SEQ ID NO: 287944 - DNA, 15 bp, Homo sapiens
acttcctactttgaa

SEQ ID NO: 287945 - DNA, 15 bp, Homo sapiens
tacttcctactttga

SEQ ID NO: 287946 - DNA, 15 bp, Homo sapiens
ctacttcctactttg

SEQ ID NO: 287947 - DNA, 15 bp, Homo sapiens
tctacttcctacttt

SEQ ID NO: 287948 - DNA, 15 bp, Homo sapiens
atctacttcctactt

SEQ ID NO: 287949 - DNA, 15 bp, Homo sapiens
catctacttcctact

SEQ ID NO: 287950 - DNA, 15 bp, Homo sapiens
ccatctacttcctac

SEQ ID NO: 287951 - DNA, 15 bp, Homo sapiens
gccatctacttccta

SEQ ID NO: 287952 - DNA, 15 bp, Homo sapiens
ggccatctacttcct

SEQ ID NO: 287953 - DNA, 15 bp, Homo sapiens
gggccatctacttcc

SEQ ID NO: 287954 - DNA, 15 bp, Homo sapiens
agggccatctacttc

SEQ ID NO: 287955 - DNA, 15 bp, Homo sapiens
tagggccatctactt

SEQ ID NO: 287956 - DNA, 15 bp, Homo sapiens
atagggccatctact

SEQ ID NO: 287957 - DNA, 15 bp, Homo sapiens
aatagggccatctac

SEQ ID NO: 287958 - DNA, 15 bp, Homo sapiens
taatagggccatcta

SEQ ID NO: 287959 - DNA, 15 bp, Homo sapiens
ttaatagggccatct

SEQ ID NO: 287960 - DNA, 15 bp, Homo sapiens
attaatagggccatc

SEQ ID NO: 287961 - DNA, 15 bp, Homo sapiens
tattaatagggccat

SEQ ID NO: 287962 - DNA, 15 bp, Homo sapiens
atattaatagggcca

SEQ ID NO: 287963 - DNA, 15 bp, Homo sapiens
gatattaatagggcc

SEQ ID NO: 287964 - DNA, 15 bp, Homo sapiens
tgatattaatagggc

SEQ ID NO: 287965 - DNA, 15 bp, Homo sapiens
ttgatattaataggg

SEQ ID NO: 287966 - DNA, 15 bp, Homo sapiens
gttgatattaatagg

SEQ ID NO: 287967 - DNA, 15 bp, Homo sapiens
agttgatattaatag

SEQ ID NO: 287968 - DNA, 15 bp, Homo sapiens
cagttgatattaata

SEQ ID NO: 287969 - DNA, 15 bp, Homo sapiens
gcagttgatattaat

SEQ ID NO: 287970 - DNA, 15 bp, Homo sapiens
ggcagttgatattaa

SEQ ID NO: 287971 - DNA, 15 bp, Homo sapiens
tggcagttgatatta

SEQ ID NO: 287972 - DNA, 15 bp, Homo sapiens
atggcagttgatatt

SEQ ID NO: 287973 - DNA, 15 bp, Homo sapiens
aatggcagttgatat

SEQ ID NO: 287974 - DNA, 15 bp, Homo sapiens
aaatggcagttgata

SEQ ID NO: 287975 - DNA, 15 bp, Homo sapiens
gaaatggcagttgat

SEQ ID NO: 287976 - DNA, 15 bp, Homo sapiens
tgaaatggcagttga

SEQ ID NO: 287977 - DNA, 15 bp, Homo sapiens
ctgaaatggcagttg

SEQ ID NO: 287978 - DNA, 15 bp, Homo sapiens
actgaaatggcagtt

SEQ ID NO: 287979 - DNA, 15 bp, Homo sapiens
tactgaaatggcagt

SEQ ID NO: 287980 - DNA, 15 bp, Homo sapiens
ctactgaaatggcag

SEQ ID NO: 287981 - DNA, 15 bp, Homo sapiens
tctactgaaatggca

SEQ ID NO: 287982 - DNA, 15 bp, Homo sapiens
ctctactgaaatggc

SEQ ID NO: 287983 - DNA, 15 bp, Homo sapiens
gctctactgaaatgg

SEQ ID NO: 287984 - DNA, 15 bp, Homo sapiens
agctctactgaaatg

SEQ ID NO: 287985 - DNA, 15 bp, Homo sapiens
cagctctactgaaat

SEQ ID NO: 287986 - DNA, 15 bp, Homo sapiens
gcagctctactgaaa

SEQ ID NO: 287987 - DNA, 15 bp, Homo sapiens
ggcagctctactgaa

SEQ ID NO: 287988 - DNA, 15 bp, Homo sapiens
aggcagctctactga

SEQ ID NO: 287989 - DNA, 15 bp, Homo sapiens
gaggcagctctactg

SEQ ID NO: 287990 - DNA, 15 bp, Homo sapiens
tgaggcagctctact

SEQ ID NO: 287991 - DNA, 15 bp, Homo sapiens
atgaggcagctctac

SEQ ID NO: 287992 - DNA, 15 bp, Homo sapiens
gatgaggcagctcta

SEQ ID NO: 287993 - DNA, 15 bp, Homo sapiens
tgatgaggcagctct

SEQ ID NO: 287994 - DNA, 15 bp, Homo sapiens
ctgatgaggcagctc

SEQ ID NO: 287995 - DNA, 15 bp, Homo sapiens
actgatgaggcagct

SEQ ID NO: 287996 - DNA, 15 bp, Homo sapiens
gactgatgaggcagc

SEQ ID NO: 287997 - DNA, 15 bp, Homo sapiens
agactgatgaggcag

SEQ ID NO: 287998 - DNA, 15 bp, Homo sapiens
gagactgatgaggca

SEQ ID NO: 287999 - DNA, 15 bp, Homo sapiens
agagactgatgaggc

SEQ ID NO: 288000 - DNA, 15 bp, Homo sapiens
aagagactgatgagg

SEQ ID NO: 288001 - DNA, 15 bp, Homo sapiens
aaagagactgatgag

SEQ ID NO: 288002 - DNA, 15 bp, Homo sapiens
aaaagagactgatga

SEQ ID NO: 288003 - DNA, 15 bp, Homo sapiens
gaaaagagactgatg

SEQ ID NO: 288004 - DNA, 15 bp, Homo sapiens
ggaaaagagactgat

SEQ ID NO: 288005 - DNA, 15 bp, Homo sapiens
gggaaaagagactga

SEQ ID NO: 288006 - DNA, 15 bp, Homo sapiens
ggggaaaagagactg

SEQ ID NO: 288007 - DNA, 15 bp, Homo sapiens
cggggaaaagagact

SEQ ID NO: 288008 - DNA, 15 bp, Homo sapiens
acggggaaaagagac

SEQ ID NO: 288009 - DNA, 15 bp, Homo sapiens
cacggggaaaagaga

SEQ ID NO: 288010 - DNA, 15 bp, Homo sapiens
ccacggggaaaagag

SEQ ID NO: 288011 - DNA, 15 bp, Homo sapiens
tccacggggaaaaga

SEQ ID NO: 288012 - DNA, 15 bp, Homo sapiens
ttccacggggaaaag

SEQ ID NO: 288013 - DNA, 15 bp, Homo sapiens
cttccacggggaaaa

SEQ ID NO: 288014 - DNA, 15 bp, Homo sapiens
tcttccacggggaaa

SEQ ID NO: 288015 - DNA, 15 bp, Homo sapiens
gtcttccacggggaa

SEQ ID NO: 288016 - DNA, 15 bp, Homo sapiens
tgtcttccacgggga

SEQ ID NO: 288017 - DNA, 15 bp, Homo sapiens
gtgtcttccacgggg

SEQ ID NO: 288018 - DNA, 15 bp, Homo sapiens
agtgtcttccacggg

SEQ ID NO: 288019 - DNA, 15 bp, Homo sapiens
gagtgtcttccacgg

SEQ ID NO: 288020 - DNA, 15 bp, Homo sapiens
tgagtgtcttccacg

SEQ ID NO: 288021 - DNA, 15 bp, Homo sapiens
gtgagtgtcttccac

SEQ ID NO: 288022 - DNA, 15 bp, Homo sapiens
tgtgagtgtcttcca

SEQ ID NO: 288023 - DNA, 15 bp, Homo sapiens
gtgtgagtgtcttcc

SEQ ID NO: 288024 - DNA, 15 bp, Homo sapiens
ggtgtgagtgtcttc

SEQ ID NO: 288025 - DNA, 15 bp, Homo sapiens
tggtgtgagtgtctt

SEQ ID NO: 288026 - DNA, 15 bp, Homo sapiens
gtggtgtgagtgtct

SEQ ID NO: 288027 - DNA, 15 bp, Homo sapiens
ggtggtgtgagtgtc

SEQ ID NO: 288028 - DNA, 15 bp, Homo sapiens
aggtggtgtgagtgt

SEQ ID NO: 288029 - DNA, 15 bp, Homo sapiens
aaggtggtgtgagtg

SEQ ID NO: 288030 - DNA, 15 bp, Homo sapiens
aaaggtggtgtgagt

SEQ ID NO: 288031 - DNA, 15 bp, Homo sapiens
aaaaggtggtgtgag

SEQ ID NO: 288032 - DNA, 15 bp, Homo sapiens
taaaaggtggtgtga

SEQ ID NO: 288033 - DNA, 15 bp, Homo sapiens
gtaaaaggtggtgtg

SEQ ID NO: 288034 - DNA, 15 bp, Homo sapiens
ggtaaaaggtggtgt

SEQ ID NO: 288035 - DNA, 15 bp, Homo sapiens
aggtaaaaggtggtg

SEQ ID NO: 288036 - DNA, 15 bp, Homo sapiens
taggtaaaaggtggt

SEQ ID NO: 288037 - DNA, 15 bp, Homo sapiens
ataggtaaaaggtgg

SEQ ID NO: 288038 - DNA, 15 bp, Homo sapiens
gataggtaaaaggtg

SEQ ID NO: 288039 - DNA, 15 bp, Homo sapiens
tgataggtaaaaggt

SEQ ID NO: 288040 - DNA, 15 bp, Homo sapiens
ctgataggtaaaagg

SEQ ID NO: 288041 - DNA, 15 bp, Homo sapiens
cctgataggtaaaag

SEQ ID NO: 288042 - DNA, 15 bp, Homo sapiens
tcctgataggtaaaa

SEQ ID NO: 288043 - DNA, 15 bp, Homo sapiens
gtcctgataggtaaa

SEQ ID NO: 288044 - DNA, 15 bp, Homo sapiens
tgtcctgataggtaa

SEQ ID NO: 288045 - DNA, 15 bp, Homo sapiens
gtgtcctgataggta

SEQ ID NO: 288046 - DNA, 15 bp, Homo sapiens
agtgtcctgataggt

SEQ ID NO: 288047 - DNA, 15 bp, Homo sapiens
gagtgtcctgatagg

SEQ ID NO: 288048 - DNA, 15 bp, Homo sapiens
agagtgtcctgatag

SEQ ID NO: 288049 - DNA, 15 bp, Homo sapiens
gagagtgtcctgata

SEQ ID NO: 288050 - DNA, 15 bp, Homo sapiens
tgagagtgtcctgat

SEQ ID NO: 288051 - DNA, 15 bp, Homo sapiens
ctgagagtgtcctga

SEQ ID NO: 288052 - DNA, 15 bp, Homo sapiens
cctgagagtgtcctg

SEQ ID NO: 288053 - DNA, 15 bp, Homo sapiens
tcctgagagtgtcct

SEQ ID NO: 288054 - DNA, 15 bp, Homo sapiens
ttcctgagagtgtcc

SEQ ID NO: 288055 - DNA, 15 bp, Homo sapiens
cttcctgagagtgtc

SEQ ID NO: 288056 - DNA, 15 bp, Homo sapiens
tcttcctgagagtgt

SEQ ID NO: 288057 - DNA, 15 bp, Homo sapiens
ttcttcctgagagtg

SEQ ID NO: 288058 - DNA, 15 bp, Homo sapiens
tttcttcctgagagt

SEQ ID NO: 288059 - DNA, 15 bp, Homo sapiens
atttcttcctgagag

SEQ ID NO: 288060 - DNA, 15 bp, Homo sapiens
tatttcttcctgaga

SEQ ID NO: 288061 - DNA, 15 bp, Homo sapiens
ctatttcttcctgag

SEQ ID NO: 288062 - DNA, 15 bp, Homo sapiens
actatttcttcctga

SEQ ID NO: 288063 - DNA, 15 bp, Homo sapiens
tactatttcttcctg

SEQ ID NO: 288064 - DNA, 15 bp, Homo sapiens
ctactatttcttcct

SEQ ID NO: 288065 - DNA, 15 bp, Homo sapiens
cctactatttcttcc

SEQ ID NO: 288066 - DNA, 15 bp, Homo sapiens
acctactatttcttc

SEQ ID NO: 288067 - DNA, 15 bp, Homo sapiens
tacctactatttctt

SEQ ID NO: 288068 - DNA, 15 bp, Homo sapiens
ctacctactatttct

SEQ ID NO: 288069 - DNA, 15 bp, Homo sapiens
cctacctactatttc

SEQ ID NO: 288070 - DNA, 15 bp, Homo sapiens
ccctacctactattt

SEQ ID NO: 288071 - DNA, 15 bp, Homo sapiens
gccctacctactatt

SEQ ID NO: 288072 - DNA, 15 bp, Homo sapiens
agccctacctactat

SEQ ID NO: 288073 - DNA, 15 bp, Homo sapiens
gagccctacctacta

SEQ ID NO: 288074 - DNA, 15 bp, Homo sapiens
ggagccctacctact

SEQ ID NO: 288075 - DNA, 15 bp, Homo sapiens
tggagccctacctac

SEQ ID NO: 288076 - DNA, 15 bp, Homo sapiens
ctggagccctaccta

SEQ ID NO: 288077 - DNA, 15 bp, Homo sapiens
cctggagccctacct

SEQ ID NO: 288078 - DNA, 15 bp, Homo sapiens
tcctggagccctacc

SEQ ID NO: 288079 - DNA, 15 bp, Homo sapiens
gtcctggagccctac

SEQ ID NO: 288080 - DNA, 15 bp, Homo sapiens
ggtcctggagcccta

SEQ ID NO: 288081 - DNA, 15 bp, Homo sapiens
aggtcctggagccct

SEQ ID NO: 288082 - DNA, 15 bp, Homo sapiens
gaggtcctggagccc

SEQ ID NO: 288083 - DNA, 15 bp, Homo sapiens
agaggtcctggagcc

SEQ ID NO: 288084 - DNA, 15 bp, Homo sapiens
cagaggtcctggagc

SEQ ID NO: 288085 - DNA, 15 bp, Homo sapiens
tcagaggtcctggag

SEQ ID NO: 288086 - DNA, 15 bp, Homo sapiens
atcagaggtcctgga

SEQ ID NO: 288087 - DNA, 15 bp, Homo sapiens
catcagaggtcctgg

SEQ ID NO: 288088 - DNA, 15 bp, Homo sapiens
ccatcagaggtcctg

SEQ ID NO: 288089 - DNA, 15 bp, Homo sapiens
accatcagaggtcct

SEQ ID NO: 288090 - DNA, 15 bp, Homo sapiens
caccatcagaggtcc

SEQ ID NO: 288091 - DNA, 15 bp, Homo sapiens
ccaccatcagaggtc

SEQ ID NO: 288092 - DNA, 15 bp, Homo sapiens
tccaccatcagaggt

SEQ ID NO: 288093 - DNA, 15 bp, Homo sapiens
ttccaccatcagagg

SEQ ID NO: 288094 - DNA, 15 bp, Homo sapiens
attccaccatcagag

SEQ ID NO: 288095 - DNA, 15 bp, Homo sapiens
gattccaccatcaga

SEQ ID NO: 288096 - DNA, 15 bp, Homo sapiens
agattccaccatcag

SEQ ID NO: 288097 - DNA, 15 bp, Homo sapiens
tagattccaccatca

SEQ ID NO: 288098 - DNA, 15 bp, Homo sapiens
gtagattccaccatc

SEQ ID NO: 288099 - DNA, 15 bp, Homo sapiens
agtagattccaccat

SEQ ID NO: 288100 - DNA, 15 bp, Homo sapiens
tagtagattccacca

SEQ ID NO: 288101 - DNA, 15 bp, Homo sapiens
ctagtagattccacc

SEQ ID NO: 288102 - DNA, 15 bp, Homo sapiens
tctagtagattccac

SEQ ID NO: 288103 - DNA, 15 bp, Homo sapiens
ttctagtagattcca

SEQ ID NO: 288104 - DNA, 15 bp, Homo sapiens
attctagtagattcc

SEQ ID NO: 288105 - DNA, 15 bp, Homo sapiens
cattctagtagattc

SEQ ID NO: 288106 - DNA, 15 bp, Homo sapiens
gcattctagtagatt

SEQ ID NO: 288107 - DNA, 15 bp, Homo sapiens
tgcattctagtagat

SEQ ID NO: 288108 - DNA, 15 bp, Homo sapiens
ctgcattctagtaga

SEQ ID NO: 288109 - DNA, 15 bp, Homo sapiens
actgcattctagtag

SEQ ID NO: 288110 - DNA, 15 bp, Homo sapiens
aactgcattctagta

SEQ ID NO: 288111 - DNA, 15 bp, Homo sapiens
caactgcattctagt

SEQ ID NO: 288112 - DNA, 15 bp, Homo sapiens
acaactgcattctag

SEQ ID NO: 288113 - DNA, 15 bp, Homo sapiens
gacaactgcattcta

SEQ ID NO: 288114 - DNA, 15 bp, Homo sapiens
ggacaactgcattct

SEQ ID NO: 288115 - DNA, 15 bp, Homo sapiens
aggacaactgcattc

SEQ ID NO: 288116 - DNA, 15 bp, Homo sapiens
aaggacaactgcatt

SEQ ID NO: 288117 - DNA, 15 bp, Homo sapiens
taaggacaactgcat

SEQ ID NO: 288118 - DNA, 15 bp, Homo sapiens
ttaaggacaactgca

SEQ ID NO: 288119 - DNA, 15 bp, Homo sapiens
gttaaggacaactgc

SEQ ID NO: 288120 - DNA, 15 bp, Homo sapiens
tgttaaggacaactg

SEQ ID NO: 288121 - DNA, 15 bp, Homo sapiens
ttgttaaggacaact

SEQ ID NO: 288122 - DNA, 15 bp, Homo sapiens
cttgttaaggacaac

SEQ ID NO: 288123 - DNA, 15 bp, Homo sapiens
ccttgttaaggacaa

SEQ ID NO: 288124 - DNA, 15 bp, Homo sapiens
tccttgttaaggaca

SEQ ID NO: 288125 - DNA, 15 bp, Homo sapiens
atccttgttaaggac

SEQ ID NO: 288126 - DNA, 15 bp, Homo sapiens
tatccttgttaagga

SEQ ID NO: 288127 - DNA, 15 bp, Homo sapiens
gtatccttgttaagg

SEQ ID NO: 288128 - DNA, 15 bp, Homo sapiens
ggtatccttgttaag

SEQ ID NO: 288129 - DNA, 15 bp, Homo sapiens
aggtatccttgttaa

SEQ ID NO: 288130 - DNA, 15 bp, Homo sapiens
taggtatccttgtta

SEQ ID NO: 288131 - DNA, 15 bp, Homo sapiens
ataggtatccttgtt

SEQ ID NO: 288132 - DNA, 15 bp, Homo sapiens
gataggtatccttgt

SEQ ID NO: 288133 - DNA, 15 bp, Homo sapiens
agataggtatccttg

SEQ ID NO: 288134 - DNA, 15 bp, Homo sapiens
gagataggtatcctt

SEQ ID NO: 288135 - DNA, 15 bp, Homo sapiens
tgagataggtatcct

SEQ ID NO: 288136 - DNA, 15 bp, Homo sapiens
atgagataggtatcc

SEQ ID NO: 288137 - DNA, 15 bp, Homo sapiens
catgagataggtatc

SEQ ID NO: 288138 - DNA, 15 bp, Homo sapiens
acatgagataggtat

SEQ ID NO: 288139 - DNA, 15 bp, Homo sapiens
aacatgagataggta

SEQ ID NO: 288140 - DNA, 15 bp, Homo sapiens
caacatgagataggt

SEQ ID NO: 288141 - DNA, 15 bp, Homo sapiens
gcaacatgagatagg

SEQ ID NO: 288142 - DNA, 15 bp, Homo sapiens
agcaacatgagatag

SEQ ID NO: 288143 - DNA, 15 bp, Homo sapiens
gagcaacatgagata

SEQ ID NO: 288144 - DNA, 15 bp, Homo sapiens
tgagcaacatgagat

SEQ ID NO: 288145 - DNA, 15 bp, Homo sapiens
atgagcaacatgaga

SEQ ID NO: 288146 - DNA, 15 bp, Homo sapiens
gatgagcaacatgag

SEQ ID NO: 288147 - DNA, 15 bp, Homo sapiens
tgatgagcaacatga

SEQ ID NO: 288148 - DNA, 15 bp, Homo sapiens
gtgatgagcaacatg

SEQ ID NO: 288149 - DNA, 15 bp, Homo sapiens
tgtgatgagcaacat

SEQ ID NO: 288150 - DNA, 15 bp, Homo sapiens
gtgtgatgagcaaca

SEQ ID NO: 288151 - DNA, 15 bp, Homo sapiens
ggtgtgatgagcaac

SEQ ID NO: 288152 - DNA, 15 bp, Homo sapiens
gggtgtgatgagcaa

SEQ ID NO: 288153 - DNA, 15 bp, Homo sapiens
tgggtgtgatgagca

SEQ ID NO: 288154 - DNA, 15 bp, Homo sapiens
atgggtgtgatgagc

SEQ ID NO: 288155 - DNA, 15 bp, Homo sapiens
catgggtgtgatgag

SEQ ID NO: 288156 - DNA, 15 bp, Homo sapiens
gcatgggtgtgatga

SEQ ID NO: 288157 - DNA, 15 bp, Homo sapiens
tgcatgggtgtgatg

SEQ ID NO: 288158 - DNA, 15 bp, Homo sapiens
ctgcatgggtgtgat

SEQ ID NO: 288159 - DNA, 15 bp, Homo sapiens
tctgcatgggtgtga

SEQ ID NO: 288160 - DNA, 15 bp, Homo sapiens
ctctgcatgggtgtg

SEQ ID NO: 288161 - DNA, 15 bp, Homo sapiens
tctctgcatgggtgt

SEQ ID NO: 288162 - DNA, 15 bp, Homo sapiens
gtctctgcatgggtg

SEQ ID NO: 288163 - DNA, 15 bp, Homo sapiens
ggtctctgcatgggt

SEQ ID NO: 288164 - DNA, 15 bp, Homo sapiens
aggtctctgcatggg

SEQ ID NO: 288165 - DNA, 15 bp, Homo sapiens
caggtctctgcatgg

SEQ ID NO: 288166 - DNA, 15 bp, Homo sapiens
gcaggtctctgcatg

SEQ ID NO: 288167 - DNA, 15 bp, Homo sapiens
ggcaggtctctgcat

SEQ ID NO: 288168 - DNA, 15 bp, Homo sapiens
tggcaggtctctgca

SEQ ID NO: 288169 - DNA, 15 bp, Homo sapiens
gtggcaggtctctgc

SEQ ID NO: 288170 - DNA, 15 bp, Homo sapiens
ggtggcaggtctctg

SEQ ID NO: 288171 - DNA, 15 bp, Homo sapiens
aggtggcaggtctct

SEQ ID NO: 288172 - DNA, 15 bp, Homo sapiens
aaggtggcaggtctc

SEQ ID NO: 288173 - DNA, 15 bp, Homo sapiens
caaggtggcaggtct

SEQ ID NO: 288174 - DNA, 15 bp, Homo sapiens
acaaggtggcaggtc

SEQ ID NO: 288175 - DNA, 15 bp, Homo sapiens
tacaaggtggcaggt

SEQ ID NO: 288176 - DNA, 15 bp, Homo sapiens
ttacaaggtggcagg

SEQ ID NO: 288177 - DNA, 15 bp, Homo sapiens
attacaaggtggcag

SEQ ID NO: 288178 - DNA, 15 bp, Homo sapiens
aattacaaggtggca

SEQ ID NO: 288179 - DNA, 15 bp, Homo sapiens
aaattacaaggtggc

SEQ ID NO: 288180 - DNA, 15 bp, Homo sapiens
caaattacaaggtgg

SEQ ID NO: 288181 - DNA, 15 bp, Homo sapiens
tcaaattacaaggtg

SEQ ID NO: 288182 - DNA, 15 bp, Homo sapiens
ctcaaattacaaggt

SEQ ID NO: 288183 - DNA, 15 bp, Homo sapiens
tctcaaattacaagg

SEQ ID NO: 288184 - DNA, 15 bp, Homo sapiens
ctctcaaattacaag

SEQ ID NO: 288185 - DNA, 15 bp, Homo sapiens
gctctcaaattacaa

SEQ ID NO: 288186 - DNA, 15 bp, Homo sapiens
agctctcaaattaca

SEQ ID NO: 288187 - DNA, 15 bp, Homo sapiens
cagctctcaaattac

SEQ ID NO: 288188 - DNA, 15 bp, Homo sapiens
ccagctctcaaatta

SEQ ID NO: 288189 - DNA, 15 bp, Homo sapiens
tccagctctcaaatt

SEQ ID NO: 288190 - DNA, 15 bp, Homo sapiens
ttccagctctcaaat

SEQ ID NO: 288191 - DNA, 15 bp, Homo sapiens
attccagctctcaaa

SEQ ID NO: 288192 - DNA, 15 bp, Homo sapiens
aattccagctctcaa

SEQ ID NO: 288193 - DNA, 15 bp, Homo sapiens
aaattccagctctca

SEQ ID NO: 288194 - DNA, 15 bp, Homo sapiens
gaaattccagctctc

SEQ ID NO: 288195 - DNA, 15 bp, Homo sapiens
ggaaattccagctct

SEQ ID NO: 288196 - DNA, 15 bp, Homo sapiens
tggaaattccagctc

SEQ ID NO: 288197 - DNA, 15 bp, Homo sapiens
atggaaattccagct

SEQ ID NO: 288198 - DNA, 15 bp, Homo sapiens
tatggaaattccagc

SEQ ID NO: 288199 - DNA, 15 bp, Homo sapiens
gtatggaaattccag

SEQ ID NO: 288200 - DNA, 15 bp, Homo sapiens
tgtatggaaattcca

SEQ ID NO: 288201 - DNA, 15 bp, Homo sapiens
gtgtatggaaattcc

SEQ ID NO: 288202 - DNA, 15 bp, Homo sapiens
ggtgtatggaaattc

SEQ ID NO: 288203 - DNA, 15 bp, Homo sapiens
gggtgtatggaaatt

SEQ ID NO: 288204 - DNA, 15 bp, Homo sapiens
cgggtgtatggaaat

SEQ ID NO: 288205 - DNA, 15 bp, Homo sapiens
gcgggtgtatggaaa

SEQ ID NO: 288206 - DNA, 15 bp, Homo sapiens
agcgggtgtatggaa

SEQ ID NO: 288207 - DNA, 15 bp, Homo sapiens
tagcgggtgtatgga

SEQ ID NO: 288208 - DNA, 15 bp, Homo sapiens
gtagcgggtgtatgg

SEQ ID NO: 288209 - DNA, 15 bp, Homo sapiens
ggtagcgggtgtatg

SEQ ID NO: 288210 - DNA, 15 bp, Homo sapiens
gggtagcgggtgtat

SEQ ID NO: 288211 - DNA, 15 bp, Homo sapiens
agggtagcgggtgta

SEQ ID NO: 288212 - DNA, 15 bp, Homo sapiens
gagggtagcgggtgt

SEQ ID NO: 288213 - DNA, 15 bp, Homo sapiens
tgagggtagcgggtg

SEQ ID NO: 288214 - DNA, 15 bp, Homo sapiens
gtgagggtagcgggt

SEQ ID NO: 288215 - DNA, 15 bp, Homo sapiens
agtgagggtagcggg

SEQ ID NO: 288216 - DNA, 15 bp, Homo sapiens
gagtgagggtagcgg

SEQ ID NO: 288217 - DNA, 15 bp, Homo sapiens
ggagtgagggtagcg

SEQ ID NO: 288218 - DNA, 15 bp, Homo sapiens
tggagtgagggtagc

SEQ ID NO: 288219 - DNA, 15 bp, Homo sapiens
atggagtgagggtag

SEQ ID NO: 288220 - DNA, 15 bp, Homo sapiens
catggagtgagggta

SEQ ID NO: 288221 - DNA, 15 bp, Homo sapiens
gcatggagtgagggt

SEQ ID NO: 288222 - DNA, 15 bp, Homo sapiens
ggcatggagtgaggg

SEQ ID NO: 288223 - DNA, 15 bp, Homo sapiens
tggcatggagtgagg

SEQ ID NO: 288224 - DNA, 15 bp, Homo sapiens
ctggcatggagtgag

SEQ ID NO: 288225 - DNA, 15 bp, Homo sapiens
tctggcatggagtga

SEQ ID NO: 288226 - DNA, 15 bp, Homo sapiens
ttctggcatggagtg

SEQ ID NO: 288227 - DNA, 15 bp, Homo sapiens
tttctggcatggagt

SEQ ID NO: 288228 - DNA, 15 bp, Homo sapiens
ttttctggcatggag

SEQ ID NO: 288229 - DNA, 15 bp, Homo sapiens
attttctggcatgga

SEQ ID NO: 288230 - DNA, 15 bp, Homo sapiens
cattttctggcatgg

SEQ ID NO: 288231 - DNA, 15 bp, Homo sapiens
gcattttctggcatg

SEQ ID NO: 288232 - DNA, 15 bp, Homo sapiens
tgcattttctggcat

SEQ ID NO: 288233 - DNA, 15 bp, Homo sapiens
ctgcattttctggca

SEQ ID NO: 288234 - DNA, 15 bp, Homo sapiens
tctgcattttctggc

SEQ ID NO: 288235 - DNA, 15 bp, Homo sapiens
ttctgcattttctgg

SEQ ID NO: 288236 - DNA, 15 bp, Homo sapiens
tttctgcattttctg

SEQ ID NO: 288237 - DNA, 15 bp, Homo sapiens
ttttctgcattttct

SEQ ID NO: 288238 - DNA, 15 bp, Homo sapiens
attttctgcattttc

SEQ ID NO: 288239 - DNA, 15 bp, Homo sapiens
cattttctgcatttt

SEQ ID NO: 288240 - DNA, 15 bp, Homo sapiens
tcattttctgcattt

SEQ ID NO: 288241 - DNA, 15 bp, Homo sapiens
ttcattttctgcatt

SEQ ID NO: 288242 - DNA, 15 bp, Homo sapiens
gttcattttctgcat

SEQ ID NO: 288243 - DNA, 15 bp, Homo sapiens
ggttcattttctgca

SEQ ID NO: 288244 - DNA, 15 bp, Homo sapiens
gggttcattttctgc

SEQ ID NO: 288245 - DNA, 15 bp, Homo sapiens
tgggttcattttctg

SEQ ID NO: 288246 - DNA, 15 bp, Homo sapiens
atgggttcattttct

SEQ ID NO: 288247 - DNA, 15 bp, Homo sapiens
catgggttcattttc

SEQ ID NO: 288248 - DNA, 15 bp, Homo sapiens
ccatgggttcatttt

SEQ ID NO: 288249 - DNA, 15 bp, Homo sapiens
gccatgggttcattt

SEQ ID NO: 288250 - DNA, 15 bp, Homo sapiens
ggccatgggttcatt

SEQ ID NO: 288251 - DNA, 15 bp, Homo sapiens
gggccatgggttcat

SEQ ID NO: 288252 - DNA, 15 bp, Homo sapiens
tgggccatgggttca

SEQ ID NO: 288253 - DNA, 15 bp, Homo sapiens
ctgggccatgggttc

SEQ ID NO: 288254 - DNA, 15 bp, Homo sapiens
actgggccatgggtt

SEQ ID NO: 288255 - DNA, 15 bp, Homo sapiens
aactgggccatgggt

SEQ ID NO: 288256 - DNA, 15 bp, Homo sapiens
aaactgggccatggg

SEQ ID NO: 288257 - DNA, 15 bp, Homo sapiens
caaactgggccatgg

SEQ ID NO: 288258 - DNA, 15 bp, Homo sapiens
tcaaactgggccatg

SEQ ID NO: 288259 - DNA, 15 bp, Homo sapiens
ctcaaactgggccat

SEQ ID NO: 288260 - DNA, 15 bp, Homo sapiens
tctcaaactgggcca

SEQ ID NO: 288261 - DNA, 15 bp, Homo sapiens
atctcaaactgggcc

SEQ ID NO: 288262 - DNA, 15 bp, Homo sapiens
tatctcaaactgggc

SEQ ID NO: 288263 - DNA, 15 bp, Homo sapiens
gtatctcaaactggg

SEQ ID NO: 288264 - DNA, 15 bp, Homo sapiens
tgtatctcaaactgg

SEQ ID NO: 288265 - DNA, 15 bp, Homo sapiens
ttgtatctcaaactg

SEQ ID NO: 288266 - DNA, 15 bp, Homo sapiens
attgtatctcaaact

SEQ ID NO: 288267 - DNA, 15 bp, Homo sapiens
aattgtatctcaaac

SEQ ID NO: 288268 - DNA, 15 bp, Homo sapiens
caattgtatctcaaa

SEQ ID NO: 288269 - DNA, 15 bp, Homo sapiens
tcaattgtatctcaa

SEQ ID NO: 288270 - DNA, 15 bp, Homo sapiens
atcaattgtatctca

SEQ ID NO: 288271 - DNA, 15 bp, Homo sapiens
gatcaattgtatctc

SEQ ID NO: 288272 - DNA, 15 bp, Homo sapiens
agatcaattgtatct

SEQ ID NO: 288273 - DNA, 15 bp, Homo sapiens
aagatcaattgtatc

SEQ ID NO: 288274 - DNA, 15 bp, Homo sapiens
caagatcaattgtat

SEQ ID NO: 288275 - DNA, 15 bp, Homo sapiens
tcaagatcaattgta

SEQ ID NO: 288276 - DNA, 15 bp, Homo sapiens
ctcaagatcaattgt

SEQ ID NO: 288277 - DNA, 15 bp, Homo sapiens
cctcaagatcaattg

SEQ ID NO: 288278 - DNA, 15 bp, Homo sapiens
gcctcaagatcaatt

SEQ ID NO: 288279 - DNA, 15 bp, Homo sapiens
ggcctcaagatcaat

SEQ ID NO: 288280 - DNA, 15 bp, Homo sapiens
gggcctcaagatcaa

SEQ ID NO: 288281 - DNA, 15 bp, Homo sapiens
ggggcctcaagatca

SEQ ID NO: 288282 - DNA, 15 bp, Homo sapiens
tggggcctcaagatc

SEQ ID NO: 288283 - DNA, 15 bp, Homo sapiens
ctggggcctcaagat

SEQ ID NO: 288284 - DNA, 15 bp, Homo sapiens
tctggggcctcaaga

SEQ ID NO: 288285 - DNA, 15 bp, Homo sapiens
ctctggggcctcaag

SEQ ID NO: 288286 - DNA, 15 bp, Homo sapiens
tctctggggcctcaa

SEQ ID NO: 288287 - DNA, 15 bp, Homo sapiens
ctctctggggcctca

SEQ ID NO: 288288 - DNA, 15 bp, Homo sapiens
tctctctggggcctc

SEQ ID NO: 288289 - DNA, 15 bp, Homo sapiens
ttctctctggggcct

SEQ ID NO: 288290 - DNA, 15 bp, Homo sapiens
gttctctctggggcc

SEQ ID NO: 288291 - DNA, 15 bp, Homo sapiens
agttctctctggggc

SEQ ID NO: 288292 - DNA, 15 bp, Homo sapiens
cagttctctctgggg

SEQ ID NO: 288293 - DNA, 15 bp, Homo sapiens
gcagttctctctggg

SEQ ID NO: 288294 - DNA, 15 bp, Homo sapiens
tgcagttctctctgg

SEQ ID NO: 288295 - DNA, 15 bp, Homo sapiens
ctgcagttctctctg

SEQ ID NO: 288296 - DNA, 15 bp, Homo sapiens
cctgcagttctctct

SEQ ID NO: 288297 - DNA, 15 bp, Homo sapiens
ccctgcagttctctc

SEQ ID NO: 288298 - DNA, 15 bp, Homo sapiens
tccctgcagttctct

SEQ ID NO: 288299 - DNA, 15 bp, Homo sapiens
gtccctgcagttctc

SEQ ID NO: 288300 - DNA, 15 bp, Homo sapiens
tgtccctgcagttct

SEQ ID NO: 288301 - DNA, 15 bp, Homo sapiens
ctgtccctgcagttc

SEQ ID NO: 288302 - DNA, 15 bp, Homo sapiens
actgtccctgcagtt

SEQ ID NO: 288303 - DNA, 15 bp, Homo sapiens
cactgtccctgcagt

SEQ ID NO: 288304 - DNA, 15 bp, Homo sapiens
acactgtccctgcag

SEQ ID NO: 288305 - DNA, 15 bp, Homo sapiens
cacactgtccctgca

SEQ ID NO: 288306 - DNA, 15 bp, Homo sapiens
gcacactgtccctgc

SEQ ID NO: 288307 - DNA, 15 bp, Homo sapiens
tgcacactgtccctg

SEQ ID NO: 288308 - DNA, 15 bp, Homo sapiens
ctgcacactgtccct

SEQ ID NO: 288309 - DNA, 15 bp, Homo sapiens
tctgcacactgtccc

SEQ ID NO: 288310 - DNA, 15 bp, Homo sapiens
ctctgcacactgtcc

SEQ ID NO: 288311 - DNA, 15 bp, Homo sapiens
tctctgcacactgtc

SEQ ID NO: 288312 - DNA, 15 bp, Homo sapiens
ttctctgcacactgt

SEQ ID NO: 288313 - DNA, 15 bp, Homo sapiens
cttctctgcacactg

SEQ ID NO: 288314 - DNA, 15 bp, Homo sapiens
ccttctctgcacact

SEQ ID NO: 288315 - DNA, 15 bp, Homo sapiens
accttctctgcacac

SEQ ID NO: 288316 - DNA, 15 bp, Homo sapiens
caccttctctgcaca

SEQ ID NO: 288317 - DNA, 15 bp, Homo sapiens
tcaccttctctgcac

SEQ ID NO: 288318 - DNA, 15 bp, Homo sapiens
ttcaccttctctgca

SEQ ID NO: 288319 - DNA, 15 bp, Homo sapiens
tttcaccttctctgc

SEQ ID NO: 288320 - DNA, 15 bp, Homo sapiens
ttttcaccttctctg

SEQ ID NO: 288321 - DNA, 15 bp, Homo sapiens
attttcaccttctct

SEQ ID NO: 288322 - DNA, 15 bp, Homo sapiens
tattttcaccttctc

SEQ ID NO: 288323 - DNA, 15 bp, Homo sapiens
ttattttcaccttct

SEQ ID NO: 288324 - DNA, 15 bp, Homo sapiens
gttattttcaccttc

SEQ ID NO: 288325 - DNA, 15 bp, Homo sapiens
cgttattttcacctt

SEQ ID NO: 288326 - DNA, 15 bp, Homo sapiens
acgttattttcacct

SEQ ID NO: 288327 - DNA, 15 bp, Homo sapiens
cacgttattttcacc

SEQ ID NO: 288328 - DNA, 15 bp, Homo sapiens
ccacgttattttcac

SEQ ID NO: 288329 - DNA, 15 bp, Homo sapiens
tccacgttattttca

SEQ ID NO: 288330 - DNA, 15 bp, Homo sapiens
atccacgttattttc

SEQ ID NO: 288331 - DNA, 15 bp, Homo sapiens
catccacgttatttt

SEQ ID NO: 288332 - DNA, 15 bp, Homo sapiens
gcatccacgttattt

SEQ ID NO: 288333 - DNA, 15 bp, Homo sapiens
agcatccacgttatt

SEQ ID NO: 288334 - DNA, 15 bp, Homo sapiens
tagcatccacgttat

SEQ ID NO: 288335 - DNA, 15 bp, Homo sapiens
atagcatccacgtta

SEQ ID NO: 288336 - DNA, 15 bp, Homo sapiens
aatagcatccacgtt

SEQ ID NO: 288337 - DNA, 15 bp, Homo sapiens
taatagcatccacgt

SEQ ID NO: 288338 - DNA, 15 bp, Homo sapiens
ctaatagcatccacg

SEQ ID NO: 288339 - DNA, 15 bp, Homo sapiens
tctaatagcatccac

SEQ ID NO: 288340 - DNA, 15 bp, Homo sapiens
atctaatagcatcca

SEQ ID NO: 288341 - DNA, 15 bp, Homo sapiens
catctaatagcatcc

SEQ ID NO: 288342 - DNA, 15 bp, Homo sapiens
tcatctaatagcatc

SEQ ID NO: 288343 - DNA, 15 bp, Homo sapiens
gtcatctaatagcat

SEQ ID NO: 288344 - DNA, 15 bp, Homo sapiens
agtcatctaatagca

SEQ ID NO: 288345 - DNA, 15 bp, Homo sapiens
cagtcatctaatagc

SEQ ID NO: 288346 - DNA, 15 bp, Homo sapiens
acagtcatctaatag

SEQ ID NO: 288347 - DNA, 15 bp, Homo sapiens
tacagtcatctaata

SEQ ID NO: 288348 - DNA, 15 bp, Homo sapiens
gtacagtcatctaat

SEQ ID NO: 288349 - DNA, 15 bp, Homo sapiens
ggtacagtcatctaa

SEQ ID NO: 288350 - DNA, 15 bp, Homo sapiens
aggtacagtcatcta

SEQ ID NO: 288351 - DNA, 15 bp, Homo sapiens
taggtacagtcatct

SEQ ID NO: 288352 - DNA, 15 bp, Homo sapiens
ctaggtacagtcatc

SEQ ID NO: 288353 - DNA, 15 bp, Homo sapiens
gctaggtacagtcat

SEQ ID NO: 288354 - DNA, 15 bp, Homo sapiens
tgctaggtacagtca

SEQ ID NO: 288355 - DNA, 15 bp, Homo sapiens
atgctaggtacagtc

SEQ ID NO: 288356 - DNA, 15 bp, Homo sapiens
catgctaggtacagt

SEQ ID NO: 288357 - DNA, 15 bp, Homo sapiens
acatgctaggtacag

SEQ ID NO: 288358 - DNA, 15 bp, Homo sapiens
cacatgctaggtaca

SEQ ID NO: 288359 - DNA, 15 bp, Homo sapiens
gcacatgctaggtac

SEQ ID NO: 288360 - DNA, 15 bp, Homo sapiens
agcacatgctaggta

SEQ ID NO: 288361 - DNA, 15 bp, Homo sapiens
aagcacatgctaggt

SEQ ID NO: 288362 - DNA, 15 bp, Homo sapiens
aaagcacatgctagg

SEQ ID NO: 288363 - DNA, 15 bp, Homo sapiens
aaaagcacatgctag

SEQ ID NO: 288364 - DNA, 15 bp, Homo sapiens
gaaaagcacatgcta

SEQ ID NO: 288365 - DNA, 15 bp, Homo sapiens
ggaaaagcacatgct

SEQ ID NO: 288366 - DNA, 15 bp, Homo sapiens
aggaaaagcacatgc

SEQ ID NO: 288367 - DNA, 15 bp, Homo sapiens
gaggaaaagcacatg

SEQ ID NO: 288368 - DNA, 15 bp, Homo sapiens
agaggaaaagcacat

SEQ ID NO: 288369 - DNA, 15 bp, Homo sapiens
tagaggaaaagcaca

SEQ ID NO: 288370 - DNA, 15 bp, Homo sapiens
ctagaggaaaagcac

SEQ ID NO: 288371 - DNA, 15 bp, Homo sapiens
gctagaggaaaagca

SEQ ID NO: 288372 - DNA, 15 bp, Homo sapiens
tgctagaggaaaagc

SEQ ID NO: 288373 - DNA, 15 bp, Homo sapiens
ctgctagaggaaaag

SEQ ID NO: 288374 - DNA, 15 bp, Homo sapiens
actgctagaggaaaa

SEQ ID NO: 288375 - DNA, 15 bp, Homo sapiens
cactgctagaggaaa

SEQ ID NO: 288376 - DNA, 15 bp, Homo sapiens
ccactgctagaggaa

SEQ ID NO: 288377 - DNA, 15 bp, Homo sapiens
cccactgctagagga

SEQ ID NO: 288378 - DNA, 15 bp, Homo sapiens
tcccactgctagagg

SEQ ID NO: 288379 - DNA, 15 bp, Homo sapiens
ctcccactgctagag

SEQ ID NO: 288380 - DNA, 15 bp, Homo sapiens
cctcccactgctaga

SEQ ID NO: 288381 - DNA, 15 bp, Homo sapiens
tcctcccactgctag

SEQ ID NO: 288382 - DNA, 15 bp, Homo sapiens
ttcctcccactgcta

SEQ ID NO: 288383 - DNA, 15 bp, Homo sapiens
cttcctcccactgct

SEQ ID NO: 288384 - DNA, 15 bp, Homo sapiens
acttcctcccactgc

SEQ ID NO: 288385 - DNA, 15 bp, Homo sapiens
cacttcctcccactg

SEQ ID NO: 288386 - DNA, 15 bp, Homo sapiens
ccacttcctcccact

SEQ ID NO: 288387 - DNA, 15 bp, Homo sapiens
gccacttcctcccac

SEQ ID NO: 288388 - DNA, 15 bp, Homo sapiens
tgccacttcctccca

SEQ ID NO: 288389 - DNA, 15 bp, Homo sapiens
gtgccacttcctccc

SEQ ID NO: 288390 - DNA, 15 bp, Homo sapiens
tgtgccacttcctcc

SEQ ID NO: 288391 - DNA, 15 bp, Homo sapiens
ctgtgccacttcctc

SEQ ID NO: 288392 - DNA, 15 bp, Homo sapiens
cctgtgccacttcct

SEQ ID NO: 288393 - DNA, 15 bp, Homo sapiens
tcctgtgccacttcc

SEQ ID NO: 288394 - DNA, 15 bp, Homo sapiens
ctcctgtgccacttc

SEQ ID NO: 288395 - DNA, 15 bp, Homo sapiens
actcctgtgccactt

SEQ ID NO: 288396 - DNA, 15 bp, Homo sapiens
cactcctgtgccact

SEQ ID NO: 288397 - DNA, 15 bp, Homo sapiens
gcactcctgtgccac

SEQ ID NO: 288398 - DNA, 15 bp, Homo sapiens
tgcactcctgtgcca

SEQ ID NO: 288399 - DNA, 15 bp, Homo sapiens
atgcactcctgtgcc

SEQ ID NO: 288400 - DNA, 15 bp, Homo sapiens
aatgcactcctgtgc

SEQ ID NO: 288401 - DNA, 15 bp, Homo sapiens
taatgcactcctgtg

SEQ ID NO: 288402 - DNA, 15 bp, Homo sapiens
ttaatgcactcctgt

SEQ ID NO: 288403 - DNA, 15 bp, Homo sapiens
cttaatgcactcctg

SEQ ID NO: 288404 - DNA, 15 bp, Homo sapiens
ccttaatgcactcct

SEQ ID NO: 288405 - DNA, 15 bp, Homo sapiens
tccttaatgcactcc

SEQ ID NO: 288406 - DNA, 15 bp, Homo sapiens
ctccttaatgcactc

SEQ ID NO: 288407 - DNA, 15 bp, Homo sapiens
actccttaatgcact

SEQ ID NO: 288408 - DNA, 15 bp, Homo sapiens
aactccttaatgcac

SEQ ID NO: 288409 - DNA, 15 bp, Homo sapiens
aaactccttaatgca

SEQ ID NO: 288410 - DNA, 15 bp, Homo sapiens
caaactccttaatgc

SEQ ID NO: 288411 - DNA, 15 bp, Homo sapiens
gcaaactccttaatg

SEQ ID NO: 288412 - DNA, 15 bp, Homo sapiens
ggcaaactccttaat

SEQ ID NO: 288413 - DNA, 15 bp, Homo sapiens
gggcaaactccttaa

SEQ ID NO: 288414 - DNA, 15 bp, Homo sapiens
agggcaaactcctta

SEQ ID NO: 288415 - DNA, 15 bp, Homo sapiens
gagggcaaactcctt

SEQ ID NO: 288416 - DNA, 15 bp, Homo sapiens
agagggcaaactcct

SEQ ID NO: 288417 - DNA, 15 bp, Homo sapiens
aagagggcaaactcc

SEQ ID NO: 288418 - DNA, 15 bp, Homo sapiens
gaagagggcaaactc

SEQ ID NO: 288419 - DNA, 15 bp, Homo sapiens
tgaagagggcaaact

SEQ ID NO: 288420 - DNA, 15 bp, Homo sapiens
atgaagagggcaaac

SEQ ID NO: 288421 - DNA, 15 bp, Homo sapiens
tatgaagagggcaaa

SEQ ID NO: 288422 - DNA, 15 bp, Homo sapiens
ttatgaagagggcaa

SEQ ID NO: 288423 - DNA, 15 bp, Homo sapiens
attatgaagagggca

SEQ ID NO: 288424 - DNA, 15 bp, Homo sapiens
tattatgaagagggc

SEQ ID NO: 288425 - DNA, 15 bp, Homo sapiens
ctattatgaagaggg

SEQ ID NO: 288426 - DNA, 15 bp, Homo sapiens
gctattatgaagagg

SEQ ID NO: 288427 - DNA, 15 bp, Homo sapiens
tgctattatgaagag

SEQ ID NO: 288428 - DNA, 15 bp, Homo sapiens
atgctattatgaaga

SEQ ID NO: 288429 - DNA, 15 bp, Homo sapiens
catgctattatgaag

SEQ ID NO: 288430 - DNA, 15 bp, Homo sapiens
tcatgctattatgaa

SEQ ID NO: 288431 - DNA, 15 bp, Homo sapiens
ctcatgctattatga

SEQ ID NO: 288432 - DNA, 15 bp, Homo sapiens
actcatgctattatg

SEQ ID NO: 288433 - DNA, 15 bp, Homo sapiens
tactcatgctattat

SEQ ID NO: 288434 - DNA, 15 bp, Homo sapiens
ctactcatgctatta

SEQ ID NO: 288435 - DNA, 15 bp, Homo sapiens
tctactcatgctatt

SEQ ID NO: 288436 - DNA, 15 bp, Homo sapiens
ttctactcatgctat

SEQ ID NO: 288437 - DNA, 15 bp, Homo sapiens
tttctactcatgcta

SEQ ID NO: 288438 - DNA, 15 bp, Homo sapiens
atttctactcatgct

SEQ ID NO: 288439 - DNA, 15 bp, Homo sapiens
tatttctactcatgc

SEQ ID NO: 288440 - DNA, 15 bp, Homo sapiens
ttatttctactcatg

SEQ ID NO: 288441 - DNA, 15 bp, Homo sapiens
attatttctactcat

SEQ ID NO: 288442 - DNA, 15 bp, Homo sapiens
tattatttctactca

SEQ ID NO: 288443 - DNA, 15 bp, Homo sapiens
ttattatttctactc

SEQ ID NO: 288444 - DNA, 15 bp, Homo sapiens
cttattatttctact

SEQ ID NO: 288445 - DNA, 15 bp, Homo sapiens
ccttattatttctac

SEQ ID NO: 288446 - DNA, 15 bp, Homo sapiens
gccttattatttcta

SEQ ID NO: 288447 - DNA, 15 bp, Homo sapiens
tgccttattatttct

SEQ ID NO: 288448 - DNA, 15 bp, Homo sapiens
ttgccttattatttc

SEQ ID NO: 288449 - DNA, 15 bp, Homo sapiens
cttgccttattattt

SEQ ID NO: 288450 - DNA, 15 bp, Homo sapiens
ccttgccttattatt

SEQ ID NO: 288451 - DNA, 15 bp, Homo sapiens
gccttgccttattat

SEQ ID NO: 288452 - DNA, 15 bp, Homo sapiens
ggccttgccttatta

SEQ ID NO: 288453 - DNA, 15 bp, Homo sapiens
aggccttgccttatt

SEQ ID NO: 288454 - DNA, 15 bp, Homo sapiens
aaggccttgccttat

SEQ ID NO: 288455 - DNA, 15 bp, Homo sapiens
aaaggccttgcctta

SEQ ID NO: 288456 - DNA, 15 bp, Homo sapiens
taaaggccttgcctt

SEQ ID NO: 288457 - DNA, 15 bp, Homo sapiens
ttaaaggccttgcct

SEQ ID NO: 288458 - DNA, 15 bp, Homo sapiens
tttaaaggccttgcc

SEQ ID NO: 288459 - DNA, 15 bp, Homo sapiens
ctttaaaggccttgc

SEQ ID NO: 288460 - DNA, 15 bp, Homo sapiens
tctttaaaggccttg

SEQ ID NO: 288461 - DNA, 15 bp, Homo sapiens
ttctttaaaggcctt

SEQ ID NO: 288462 - DNA, 15 bp, Homo sapiens
gttctttaaaggcct

SEQ ID NO: 288463 - DNA, 15 bp, Homo sapiens
tgttctttaaaggcc

SEQ ID NO: 288464 - DNA, 15 bp, Homo sapiens
ctgttctttaaaggc

SEQ ID NO: 288465 - DNA, 15 bp, Homo sapiens
gctgttctttaaagg

SEQ ID NO: 288466 - DNA, 15 bp, Homo sapiens
tgctgttctttaaag

SEQ ID NO: 288467 - DNA, 15 bp, Homo sapiens
atgctgttctttaaa

SEQ ID NO: 288468 - DNA, 15 bp, Homo sapiens
aatgctgttctttaa

SEQ ID NO: 288469 - DNA, 15 bp, Homo sapiens
taatgctgttcttta

SEQ ID NO: 288470 - DNA, 15 bp, Homo sapiens
ttaatgctgttcttt

SEQ ID NO: 288471 - DNA, 15 bp, Homo sapiens
attaatgctgttctt

SEQ ID NO: 288472 - DNA, 15 bp, Homo sapiens
tattaatgctgttct

SEQ ID NO: 288473 - DNA, 15 bp, Homo sapiens
ttattaatgctgttc

SEQ ID NO: 288474 - DNA, 15 bp, Homo sapiens
attattaatgctgtt

SEQ ID NO: 288475 - DNA, 15 bp, Homo sapiens
aattattaatgctgt

SEQ ID NO: 288476 - DNA, 15 bp, Homo sapiens
caattattaatgctg

SEQ ID NO: 288477 - DNA, 15 bp, Homo sapiens
tcaattattaatgct

SEQ ID NO: 288478 - DNA, 15 bp, Homo sapiens
ttcaattattaatgc

SEQ ID NO: 288479 - DNA, 15 bp, Homo sapiens
tttcaattattaatg

SEQ ID NO: 288480 - DNA, 15 bp, Homo sapiens
ctttcaattattaat

SEQ ID NO: 288481 - DNA, 15 bp, Homo sapiens
cctttcaattattaa

SEQ ID NO: 288482 - DNA, 15 bp, Homo sapiens
acctttcaattatta

SEQ ID NO: 288483 - DNA, 15 bp, Homo sapiens
cacctttcaattatt

SEQ ID NO: 288484 - DNA, 15 bp, Homo sapiens
gcacctttcaattat

SEQ ID NO: 288485 - DNA, 15 bp, Homo sapiens
agcacctttcaatta

SEQ ID NO: 288486 - DNA, 15 bp, Homo sapiens
gagcacctttcaatt

SEQ ID NO: 288487 - DNA, 15 bp, Homo sapiens
ggagcacctttcaat

SEQ ID NO: 288488 - DNA, 15 bp, Homo sapiens
tggagcacctttcaa

SEQ ID NO: 288489 - DNA, 15 bp, Homo sapiens
ctggagcacctttca

SEQ ID NO: 288490 - DNA, 15 bp, Homo sapiens
cctggagcacctttc

SEQ ID NO: 288491 - DNA, 15 bp, Homo sapiens
gcctggagcaccttt

SEQ ID NO: 288492 - DNA, 15 bp, Homo sapiens
tgcctggagcacctt

SEQ ID NO: 288493 - DNA, 15 bp, Homo sapiens
ctgcctggagcacct

SEQ ID NO: 288494 - DNA, 15 bp, Homo sapiens
gctgcctggagcacc

SEQ ID NO: 288495 - DNA, 15 bp, Homo sapiens
atggctgcctggagc

SEQ ID NO: 288496 - DNA, 15 bp, Homo sapiens
catggctgcctggag

SEQ ID NO: 288497 - DNA, 15 bp, Homo sapiens
acatggctgcctgga

SEQ ID NO: 288498 - DNA, 15 bp, Homo sapiens
cacatggctgcctgg

SEQ ID NO: 288499 - DNA, 15 bp, Homo sapiens
ccacatggctgcctg

SEQ ID NO: 288500 - DNA, 15 bp, Homo sapiens
accacatggctgcct

SEQ ID NO: 288501 - DNA, 15 bp, Homo sapiens
gaccacatggctgcc

SEQ ID NO: 288502 - DNA, 15 bp, Homo sapiens
agaccacatggctgc

SEQ ID NO: 288503 - DNA, 15 bp, Homo sapiens
aagaccacatggctg

SEQ ID NO: 288504 - DNA, 15 bp, Homo sapiens
gaagaccacatggct

SEQ ID NO: 288505 - DNA, 15 bp, Homo sapiens
ggaagaccacatggc

SEQ ID NO: 288506 - DNA, 15 bp, Homo sapiens
tggaagaccacatgg

SEQ ID NO: 288507 - DNA, 15 bp, Homo sapiens
ctggaagaccacatg

SEQ ID NO: 288508 - DNA, 15 bp, Homo sapiens
actggaagaccacat

SEQ ID NO: 288509 - DNA, 15 bp, Homo sapiens
cactggaagaccaca

SEQ ID NO: 288510 - DNA, 15 bp, Homo sapiens
gcactggaagaccac

SEQ ID NO: 288511 - DNA, 15 bp, Homo sapiens
ggcactggaagacca

SEQ ID NO: 288512 - DNA, 15 bp, Homo sapiens
aggcactggaagacc

SEQ ID NO: 288513 - DNA, 15 bp, Homo sapiens
aaggcactggaagac

SEQ ID NO: 288514 - DNA, 15 bp, Homo sapiens
aaaggcactggaaga

SEQ ID NO: 288515 - DNA, 15 bp, Homo sapiens
caaaggcactggaag

SEQ ID NO: 288516 - DNA, 15 bp, Homo sapiens
tcaaaggcactggaa

SEQ ID NO: 288517 - DNA, 15 bp, Homo sapiens
ctcaaaggcactgga

SEQ ID NO: 288518 - DNA, 15 bp, Homo sapiens
actcaaaggcactgg

SEQ ID NO: 288519 - DNA, 15 bp, Homo sapiens
tactcaaaggcactg

SEQ ID NO: 288520 - DNA, 15 bp, Homo sapiens
gtactcaaaggcact

SEQ ID NO: 288521 - DNA, 15 bp, Homo sapiens
tgtactcaaaggcac

SEQ ID NO: 288522 - DNA, 15 bp, Homo sapiens
ttgtactcaaaggca

SEQ ID NO: 288523 - DNA, 15 bp, Homo sapiens
attgtactcaaaggc

SEQ ID NO: 288524 - DNA, 15 bp, Homo sapiens
gattgtactcaaagg

SEQ ID NO: 288525 - DNA, 15 bp, Homo sapiens
agattgtactcaaag

SEQ ID NO: 288526 - DNA, 15 bp, Homo sapiens
cagattgtactcaaa

SEQ ID NO: 288527 - DNA, 15 bp, Homo sapiens
acagattgtactcaa

SEQ ID NO: 288528 - DNA, 15 bp, Homo sapiens
aacagattgtactca

SEQ ID NO: 288529 - DNA, 15 bp, Homo sapiens
taacagattgtactc

SEQ ID NO: 288530 - DNA, 15 bp, Homo sapiens
ataacagattgtact

SEQ ID NO: 288531 - DNA, 15 bp, Homo sapiens
gataacagattgtac

SEQ ID NO: 288532 - DNA, 15 bp, Homo sapiens
tgataacagattgta

SEQ ID NO: 288533 - DNA, 15 bp, Homo sapiens
ctgataacagattgt

SEQ ID NO: 288534 - DNA, 15 bp, Homo sapiens
cctgataacagattg

SEQ ID NO: 288535 - DNA, 15 bp, Homo sapiens
acctgataacagatt

SEQ ID NO: 288536 - DNA, 15 bp, Homo sapiens
tacctgataacagat

SEQ ID NO: 288537 - DNA, 15 bp, Homo sapiens
gtacctgataacaga

SEQ ID NO: 288538 - DNA, 15 bp, Homo sapiens
cgtacctgataacag

SEQ ID NO: 288539 - DNA, 15 bp, Homo sapiens
tcgtacctgataaca

SEQ ID NO: 288540 - DNA, 15 bp, Homo sapiens
ctcgtacctgataac

SEQ ID NO: 288541 - DNA, 15 bp, Homo sapiens
cctcgtacctgataa

SEQ ID NO: 288542 - DNA, 15 bp, Homo sapiens
acctcgtacctgata

SEQ ID NO: 288543 - DNA, 15 bp, Homo sapiens
cacctcgtacctgat

SEQ ID NO: 288544 - DNA, 15 bp, Homo sapiens
tcacctcgtacctga

SEQ ID NO: 288545 - DNA, 15 bp, Homo sapiens
ctcacctcgtacctg

SEQ ID NO: 288546 - DNA, 15 bp, Homo sapiens
cctcacctcgtacct

SEQ ID NO: 288547 - DNA, 15 bp, Homo sapiens
gcctcacctcgtacc

SEQ ID NO: 288548 - DNA, 15 bp, Homo sapiens
agcctcacctcgtac

SEQ ID NO: 288549 - DNA, 15 bp, Homo sapiens
cagcctcacctcgta

SEQ ID NO: 288550 - DNA, 15 bp, Homo sapiens
tcagcctcacctcgt

SEQ ID NO: 288551 - DNA, 15 bp, Homo sapiens
ctcagcctcacctcg

SEQ ID NO: 288552 - DNA, 15 bp, Homo sapiens
cctcagcctcacctc

SEQ ID NO: 288553 - DNA, 15 bp, Homo sapiens
tcctcagcctcacct

SEQ ID NO: 288554 - DNA, 15 bp, Homo sapiens
ctcctcagcctcacc

SEQ ID NO: 288555 - DNA, 15 bp, Homo sapiens
actcctcagcctcac

SEQ ID NO: 288556 - DNA, 15 bp, Homo sapiens
tactcctcagcctca

SEQ ID NO: 288557 - DNA, 15 bp, Homo sapiens
ctactcctcagcctc

SEQ ID NO: 288558 - DNA, 15 bp, Homo sapiens
tctactcctcagcct

SEQ ID NO: 288559 - DNA, 15 bp, Homo sapiens
gtctactcctcagcc

SEQ ID NO: 288560 - DNA, 15 bp, Homo sapiens
tgtctactcctcagc

SEQ ID NO: 288561 - DNA, 15 bp, Homo sapiens
ttgtctactcctcag

SEQ ID NO: 288562 - DNA, 15 bp, Homo sapiens
cttgtctactcctca

SEQ ID NO: 288563 - DNA, 15 bp, Homo sapiens
ccttgtctactcctc

SEQ ID NO: 288564 - DNA, 15 bp, Homo sapiens
tccttgtctactcct

SEQ ID NO: 288565 - DNA, 15 bp, Homo sapiens
ctccttgtctactcc

SEQ ID NO: 288566 - DNA, 15 bp, Homo sapiens
cctccttgtctactc

SEQ ID NO: 288567 - DNA, 15 bp, Homo sapiens
ccctccttgtctact

SEQ ID NO: 288568 - DNA, 15 bp, Homo sapiens
accctccttgtctac

SEQ ID NO: 288569 - DNA, 15 bp, Homo sapiens
caccctccttgtcta

SEQ ID NO: 288570 - DNA, 15 bp, Homo sapiens
gcaccctccttgtct

SEQ ID NO: 288571 - DNA, 15 bp, Homo sapiens
tgcaccctccttgtc

SEQ ID NO: 288572 - DNA, 15 bp, Homo sapiens
atgcaccctccttgt

SEQ ID NO: 288573 - DNA, 15 bp, Homo sapiens
aatgcaccctccttg

SEQ ID NO: 288574 - DNA, 15 bp, Homo sapiens
aaatgcaccctcctt

SEQ ID NO: 288575 - DNA, 15 bp, Homo sapiens
caaatgcaccctcct

SEQ ID NO: 288576 - DNA, 15 bp, Homo sapiens
ccaaatgcaccctcc

SEQ ID NO: 288577 - DNA, 15 bp, Homo sapiens
gccaaatgcaccctc

SEQ ID NO: 288578 - DNA, 15 bp, Homo sapiens
cgccaaatgcaccct

SEQ ID NO: 288579 - DNA, 15 bp, Homo sapiens
ccgccaaatgcaccc

SEQ ID NO: 288580 - DNA, 15 bp, Homo sapiens
gccgccaaatgcacc

SEQ ID NO: 288581 - DNA, 15 bp, Homo sapiens
agccgccaaatgcac

SEQ ID NO: 288582 - DNA, 15 bp, Homo sapiens
cagccgccaaatgca

SEQ ID NO: 288583 - DNA, 15 bp, Homo sapiens
acagccgccaaatgc

SEQ ID NO: 288584 - DNA, 15 bp, Homo sapiens
cacagccgccaaatg

SEQ ID NO: 288585 - DNA, 15 bp, Homo sapiens
acacagccgccaaat

SEQ ID NO: 288586 - DNA, 15 bp, Homo sapiens
gacacagccgccaaa

SEQ ID NO: 288587 - DNA, 15 bp, Homo sapiens
agacacagccgccaa

SEQ ID NO: 288588 - DNA, 15 bp, Homo sapiens
cagacacagccgcca

SEQ ID NO: 288589 - DNA, 15 bp, Homo sapiens
acagacacagccgcc

SEQ ID NO: 288590 - DNA, 15 bp, Homo sapiens
cacagacacagccgc

SEQ ID NO: 288591 - DNA, 15 bp, Homo sapiens
acacagacacagccg

SEQ ID NO: 288592 - DNA, 15 bp, Homo sapiens
cacacagacacagcc

SEQ ID NO: 288593 - DNA, 15 bp, Homo sapiens
gcacacagacacagc

SEQ ID NO: 288594 - DNA, 15 bp, Homo sapiens
tgcacacagacacag

SEQ ID NO: 288595 - DNA, 15 bp, Homo sapiens
atgcacacagacaca

SEQ ID NO: 288596 - DNA, 15 bp, Homo sapiens
catgcacacagacac

SEQ ID NO: 288597 - DNA, 15 bp, Homo sapiens
gcatgcacacagaca

SEQ ID NO: 288598 - DNA, 15 bp, Homo sapiens
tgcatgcacacagac

SEQ ID NO: 288599 - DNA, 15 bp, Homo sapiens
atgcatgcacacaga

SEQ ID NO: 288600 - DNA, 15 bp, Homo sapiens
catgcatgcacacag

SEQ ID NO: 288601 - DNA, 15 bp, Homo sapiens
acatgcatgcacaca

SEQ ID NO: 288602 - DNA, 15 bp, Homo sapiens
cacatgcatgcacac

SEQ ID NO: 288603 - DNA, 15 bp, Homo sapiens
gcacatgcatgcaca

SEQ ID NO: 288604 - DNA, 15 bp, Homo sapiens
agcacatgcatgcac

SEQ ID NO: 288605 - DNA, 15 bp, Homo sapiens
aagcacatgcatgca

SEQ ID NO: 288606 - DNA, 15 bp, Homo sapiens
taagcacatgcatgc

SEQ ID NO: 288607 - DNA, 15 bp, Homo sapiens
ataagcacatgcatg

SEQ ID NO: 288608 - DNA, 15 bp, Homo sapiens
cataagcacatgcat

SEQ ID NO: 288609 - DNA, 15 bp, Homo sapiens
gcataagcacatgca

SEQ ID NO: 288610 - DNA, 15 bp, Homo sapiens
agcataagcacatgc

SEQ ID NO: 288611 - DNA, 15 bp, Homo sapiens
aagcataagcacatg

SEQ ID NO: 288612 - DNA, 15 bp, Homo sapiens
caagcataagcacat

SEQ ID NO: 288613 - DNA, 15 bp, Homo sapiens
ccaagcataagcaca

SEQ ID NO: 288614 - DNA, 15 bp, Homo sapiens
tccaagcataagcac

SEQ ID NO: 288615 - DNA, 15 bp, Homo sapiens
ctccaagcataagca

SEQ ID NO: 288616 - DNA, 15 bp, Homo sapiens
cctccaagcataagc

SEQ ID NO: 288617 - DNA, 15 bp, Homo sapiens
tcctccaagcataag

SEQ ID NO: 288618 - DNA, 15 bp, Homo sapiens
ttcctccaagcataa

SEQ ID NO: 288619 - DNA, 15 bp, Homo sapiens
cttcctccaagcata

SEQ ID NO: 288620 - DNA, 15 bp, Homo sapiens
acttcctccaagcat

SEQ ID NO: 288621 - DNA, 15 bp, Homo sapiens
tacttcctccaagca

SEQ ID NO: 288622 - DNA, 15 bp, Homo sapiens
atacttcctccaagc

SEQ ID NO: 288623 - DNA, 15 bp, Homo sapiens
catacttcctccaag

SEQ ID NO: 288624 - DNA, 15 bp, Homo sapiens
tcatacttcctccaa

SEQ ID NO: 288625 - DNA, 15 bp, Homo sapiens
ttcatacttcctcca

SEQ ID NO: 288626 - DNA, 15 bp, Homo sapiens
attcatacttcctcc

SEQ ID NO: 288627 - DNA, 15 bp, Homo sapiens
tattcatacttcctc

SEQ ID NO: 288628 - DNA, 15 bp, Homo sapiens
ttattcatacttcct

SEQ ID NO: 288629 - DNA, 15 bp, Homo sapiens
cttattcatacttcc

SEQ ID NO: 288630 - DNA, 15 bp, Homo sapiens
tcttattcatacttc

SEQ ID NO: 288631 - DNA, 15 bp, Homo sapiens
atcttattcatactt

SEQ ID NO: 288632 - DNA, 15 bp, Homo sapiens
aatcttattcatact

SEQ ID NO: 288633 - DNA, 15 bp, Homo sapiens
aaatcttattcatac

SEQ ID NO: 288634 - DNA, 15 bp, Homo sapiens
caaatcttattcata

SEQ ID NO: 288635 - DNA, 15 bp, Homo sapiens
ccaaatcttattcat

SEQ ID NO: 288636 - DNA, 15 bp, Homo sapiens
gccaaatcttattca

SEQ ID NO: 288637 - DNA, 15 bp, Homo sapiens
tgccaaatcttattc

SEQ ID NO: 288638 - DNA, 15 bp, Homo sapiens
ctgccaaatcttatt

SEQ ID NO: 288639 - DNA, 15 bp, Homo sapiens
gctgccaaatcttat

SEQ ID NO: 288640 - DNA, 15 bp, Homo sapiens
agctgccaaatctta

SEQ ID NO: 288641 - DNA, 15 bp, Homo sapiens
tagctgccaaatctt

SEQ ID NO: 288642 - DNA, 15 bp, Homo sapiens
gtagctgccaaatct

SEQ ID NO: 288643 - DNA, 15 bp, Homo sapiens
tgtagctgccaaatc

SEQ ID NO: 288644 - DNA, 15 bp, Homo sapiens
ctgtagctgccaaat

SEQ ID NO: 288645 - DNA, 15 bp, Homo sapiens
gctgtagctgccaaa

SEQ ID NO: 288646 - DNA, 15 bp, Homo sapiens
tgctgtagctgccaa

SEQ ID NO: 288647 - DNA, 15 bp, Homo sapiens
ttgctgtagctgcca

SEQ ID NO: 288648 - DNA, 15 bp, Homo sapiens
cttgctgtagctgcc

SEQ ID NO: 288649 - DNA, 15 bp, Homo sapiens
acttgctgtagctgc

SEQ ID NO: 288650 - DNA, 15 bp, Homo sapiens
tacttgctgtagctg

SEQ ID NO: 288651 - DNA, 15 bp, Homo sapiens
ttacttgctgtagct

SEQ ID NO: 288652 - DNA, 15 bp, Homo sapiens
tttacttgctgtagc

SEQ ID NO: 288653 - DNA, 15 bp, Homo sapiens
ttttacttgctgtag

SEQ ID NO: 288654 - DNA, 15 bp, Homo sapiens
attttacttgctgta

SEQ ID NO: 288655 - DNA, 15 bp, Homo sapiens
aattttacttgctgt

SEQ ID NO: 288656 - DNA, 15 bp, Homo sapiens
taattttacttgctg

SEQ ID NO: 288657 - DNA, 15 bp, Homo sapiens
ataattttacttgct

SEQ ID NO: 288658 - DNA, 15 bp, Homo sapiens
tataattttacttgc

SEQ ID NO: 288659 - DNA, 15 bp, Homo sapiens
ctataattttacttg

SEQ ID NO: 288660 - DNA, 15 bp, Homo sapiens
tctataattttactt

SEQ ID NO: 288661 - DNA, 15 bp, Homo sapiens
ttctataattttact

SEQ ID NO: 288662 - DNA, 15 bp, Homo sapiens
cttctataattttac

SEQ ID NO: 288663 - DNA, 15 bp, Homo sapiens
ccttctataatttta

SEQ ID NO: 288664 - DNA, 15 bp, Homo sapiens
gccttctataatttt

SEQ ID NO: 288665 - DNA, 15 bp, Homo sapiens
tgccttctataattt

SEQ ID NO: 288666 - DNA, 15 bp, Homo sapiens
ttgccttctataatt

SEQ ID NO: 288667 - DNA, 15 bp, Homo sapiens
attgccttctataat

SEQ ID NO: 288668 - DNA, 15 bp, Homo sapiens
cattgccttctataa

SEQ ID NO: 288669 - DNA, 15 bp, Homo sapiens
acattgccttctata

SEQ ID NO: 288670 - DNA, 15 bp, Homo sapiens
tacattgccttctat

SEQ ID NO: 288671 - DNA, 15 bp, Homo sapiens
atacattgccttcta

SEQ ID NO: 288672 - DNA, 15 bp, Homo sapiens
catacattgccttct

SEQ ID NO: 288673 - DNA, 15 bp, Homo sapiens
acatacattgccttc

SEQ ID NO: 288674 - DNA, 15 bp, Homo sapiens
tacatacattgcctt

SEQ ID NO: 288675 - DNA, 15 bp, Homo sapiens
atacatacattgcct

SEQ ID NO: 288676 - DNA, 15 bp, Homo sapiens
tatacatacattgcc

SEQ ID NO: 288677 - DNA, 15 bp, Homo sapiens
atatacatacattgc

SEQ ID NO: 288678 - DNA, 15 bp, Homo sapiens
aatatacatacattg

SEQ ID NO: 288679 - DNA, 15 bp, Homo sapiens
taatatacatacatt

SEQ ID NO: 288680 - DNA, 15 bp, Homo sapiens
gtaatatacatacat

SEQ ID NO: 288681 - DNA, 15 bp, Homo sapiens
ggtaatatacataca

SEQ ID NO: 288682 - DNA, 15 bp, Homo sapiens
tggtaatatacatac

SEQ ID NO: 288683 - DNA, 15 bp, Homo sapiens
atggtaatatacata

SEQ ID NO: 288684 - DNA, 15 bp, Homo sapiens
catggtaatatacat

SEQ ID NO: 288685 - DNA, 15 bp, Homo sapiens
acatggtaatataca

SEQ ID NO: 288686 - DNA, 15 bp, Homo sapiens
tacatggtaatatac

SEQ ID NO: 288687 - DNA, 15 bp, Homo sapiens
ctacatggtaatata

SEQ ID NO: 288688 - DNA, 15 bp, Homo sapiens
tctacatggtaatat

SEQ ID NO: 288689 - DNA, 15 bp, Homo sapiens
gtctacatggtaata

SEQ ID NO: 288690 - DNA, 15 bp, Homo sapiens
agtctacatggtaat

SEQ ID NO: 288691 - DNA, 15 bp, Homo sapiens
cagtctacatggtaa

SEQ ID NO: 288692 - DNA, 15 bp, Homo sapiens
ccagtctacatggta

SEQ ID NO: 288693 - DNA, 15 bp, Homo sapiens
accagtctacatggt

SEQ ID NO: 288694 - DNA, 15 bp, Homo sapiens
caccagtctacatgg

SEQ ID NO: 288695 - DNA, 15 bp, Homo sapiens
ccaccagtctacatg

SEQ ID NO: 288696 - DNA, 15 bp, Homo sapiens
accaccagtctacat

SEQ ID NO: 288697 - DNA, 15 bp, Homo sapiens
caccaccagtctaca

SEQ ID NO: 288698 - DNA, 15 bp, Homo sapiens
ccaccaccagtctac

SEQ ID NO: 288699 - DNA, 15 bp, Homo sapiens
accaccaccagtcta

SEQ ID NO: 288700 - DNA, 15 bp, Homo sapiens
aaccaccaccagtct

SEQ ID NO: 288701 - DNA, 15 bp, Homo sapiens
gaaccaccaccagtc

SEQ ID NO: 288702 - DNA, 15 bp, Homo sapiens
agaaccaccaccagt

SEQ ID NO: 288703 - DNA, 15 bp, Homo sapiens
aagaaccaccaccag

SEQ ID NO: 288704 - DNA, 15 bp, Homo sapiens
aaagaaccaccacca

SEQ ID NO: 288705 - DNA, 15 bp, Homo sapiens
aaaagaaccaccacc

SEQ ID NO: 288706 - DNA, 15 bp, Homo sapiens
caaaagaaccaccac

SEQ ID NO: 288707 - DNA, 15 bp, Homo sapiens
acaaaagaaccacca

SEQ ID NO: 288708 - DNA, 15 bp, Homo sapiens
cacaaaagaaccacc

SEQ ID NO: 288709 - DNA, 15 bp, Homo sapiens
ccacaaaagaaccac

SEQ ID NO: 288710 - DNA, 15 bp, Homo sapiens
cccacaaaagaacca

SEQ ID NO: 288711 - DNA, 15 bp, Homo sapiens
acccacaaaagaacc

SEQ ID NO: 288712 - DNA, 15 bp, Homo sapiens
gacccacaaaagaac

SEQ ID NO: 288713 - DNA, 15 bp, Homo sapiens
tgacccacaaaagaa

SEQ ID NO: 288714 - DNA, 15 bp, Homo sapiens
ttgacccacaaaaga

SEQ ID NO: 288715 - DNA, 15 bp, Homo sapiens
tttgacccacaaaag

SEQ ID NO: 288716 - DNA, 15 bp, Homo sapiens
gtttgacccacaaaa

SEQ ID NO: 288717 - DNA, 15 bp, Homo sapiens
tgtttgacccacaaa

SEQ ID NO: 288718 - DNA, 15 bp, Homo sapiens
gtgtttgacccacaa

SEQ ID NO: 288719 - DNA, 15 bp, Homo sapiens
ggtgtttgacccaca

SEQ ID NO: 288720 - DNA, 15 bp, Homo sapiens
gggtgtttgacccac

SEQ ID NO: 288721 - DNA, 15 bp, Homo sapiens
tgggtgtttgaccca

SEQ ID NO: 288722 - DNA, 15 bp, Homo sapiens
atgggtgtttgaccc

SEQ ID NO: 288723 - DNA, 15 bp, Homo sapiens
aatgggtgtttgacc

SEQ ID NO: 288724 - DNA, 15 bp, Homo sapiens
aaatgggtgtttgac

SEQ ID NO: 288725 - DNA, 15 bp, Homo sapiens
caaatgggtgtttga

SEQ ID NO: 288726 - DNA, 15 bp, Homo sapiens
ccaaatgggtgtttg

SEQ ID NO: 288727 - DNA, 15 bp, Homo sapiens
cccaaatgggtgttt

SEQ ID NO: 288728 - DNA, 15 bp, Homo sapiens
tcccaaatgggtgtt

SEQ ID NO: 288729 - DNA, 15 bp, Homo sapiens
ttcccaaatgggtgt

SEQ ID NO: 288730 - DNA, 15 bp, Homo sapiens
attcccaaatgggtg

SEQ ID NO: 288731 - DNA, 15 bp, Homo sapiens
aattcccaaatgggt

SEQ ID NO: 288732 - DNA, 15 bp, Homo sapiens
caattcccaaatggg

SEQ ID NO: 288733 - DNA, 15 bp, Homo sapiens
ccaattcccaaatgg

SEQ ID NO: 288734 - DNA, 15 bp, Homo sapiens
tccaattcccaaatg

SEQ ID NO: 288735 - DNA, 15 bp, Homo sapiens
atccaattcccaaat

SEQ ID NO: 288736 - DNA, 15 bp, Homo sapiens
catccaattcccaaa

SEQ ID NO: 288737 - DNA, 15 bp, Homo sapiens
tcatccaattcccaa

SEQ ID NO: 288738 - DNA, 15 bp, Homo sapiens
ttcatccaattccca

SEQ ID NO: 288739 - DNA, 15 bp, Homo sapiens
tttcatccaattccc

SEQ ID NO: 288740 - DNA, 15 bp, Homo sapiens
ctttcatccaattcc

SEQ ID NO: 288741 - DNA, 15 bp, Homo sapiens
gctttcatccaattc

SEQ ID NO: 288742 - DNA, 15 bp, Homo sapiens
agctttcatccaatt

SEQ ID NO: 288743 - DNA, 15 bp, Homo sapiens
cagctttcatccaat

SEQ ID NO: 288744 - DNA, 15 bp, Homo sapiens
gcagctttcatccaa

SEQ ID NO: 288745 - DNA, 15 bp, Homo sapiens
tgcagctttcatcca

SEQ ID NO: 288746 - DNA, 15 bp, Homo sapiens
ttgcagctttcatcc

SEQ ID NO: 288747 - DNA, 15 bp, Homo sapiens
tttgcagctttcatc

SEQ ID NO: 288748 - DNA, 15 bp, Homo sapiens
ttttgcagctttcat

SEQ ID NO: 288749 - DNA, 15 bp, Homo sapiens
tttttgcagctttca

SEQ ID NO: 288750 - DNA, 15 bp, Homo sapiens
atttttgcagctttc

SEQ ID NO: 288751 - DNA, 15 bp, Homo sapiens
aatttttgcagcttt

SEQ ID NO: 288752 - DNA, 15 bp, Homo sapiens
aaatttttgcagctt

SEQ ID NO: 288753 - DNA, 15 bp, Homo sapiens
aaaatttttgcagct

SEQ ID NO: 288754 - DNA, 15 bp, Homo sapiens
caaaatttttgcagc

SEQ ID NO: 288755 - DNA, 15 bp, Homo sapiens
gcaaaatttttgcag

SEQ ID NO: 288756 - DNA, 15 bp, Homo sapiens
ggcaaaatttttgca

SEQ ID NO: 288757 - DNA, 15 bp, Homo sapiens
aggcaaaatttttgc

SEQ ID NO: 288758 - DNA, 15 bp, Homo sapiens
caggcaaaatttttg

SEQ ID NO: 288759 - DNA, 15 bp, Homo sapiens
gcaggcaaaattttt

SEQ ID NO: 288760 - DNA, 15 bp, Homo sapiens
ggcaggcaaaatttt

SEQ ID NO: 288761 - DNA, 15 bp, Homo sapiens
tggcaggcaaaattt

SEQ ID NO: 288762 - DNA, 15 bp, Homo sapiens
ctggcaggcaaaatt

SEQ ID NO: 288763 - DNA, 15 bp, Homo sapiens
cctggcaggcaaaat

SEQ ID NO: 288764 - DNA, 15 bp, Homo sapiens
acctggcaggcaaaa

SEQ ID NO: 288765 - DNA, 15 bp, Homo sapiens
tacctggcaggcaaa

SEQ ID NO: 288766 - DNA, 15 bp, Homo sapiens
gtacctggcaggcaa

SEQ ID NO: 288767 - DNA, 15 bp, Homo sapiens
ggtacctggcaggca

SEQ ID NO: 288768 - DNA, 15 bp, Homo sapiens
gggtacctggcaggc

SEQ ID NO: 288769 - DNA, 15 bp, Homo sapiens
agggtacctggcagg

SEQ ID NO: 288770 - DNA, 15 bp, Homo sapiens
tagggtacctggcag

SEQ ID NO: 288771 - DNA, 15 bp, Homo sapiens
atagggtacctggca

SEQ ID NO: 288772 - DNA, 15 bp, Homo sapiens
tatagggtacctggc

SEQ ID NO: 288773 - DNA, 15 bp, Homo sapiens
ctatagggtacctgg

SEQ ID NO: 288774 - DNA, 15 bp, Homo sapiens
actatagggtacctg

SEQ ID NO: 288775 - DNA, 15 bp, Homo sapiens
aactatagggtacct

SEQ ID NO: 288776 - DNA, 15 bp, Homo sapiens
caactatagggtacc

SEQ ID NO: 288777 - DNA, 15 bp, Homo sapiens
ccaactatagggtac

SEQ ID NO: 288778 - DNA, 15 bp, Homo sapiens
accaactatagggta

SEQ ID NO: 288779 - DNA, 15 bp, Homo sapiens
gaccaactatagggt

SEQ ID NO: 288780 - DNA, 15 bp, Homo sapiens
tgaccaactataggg

SEQ ID NO: 288781 - DNA, 15 bp, Homo sapiens
ttgaccaactatagg

SEQ ID NO: 288782 - DNA, 15 bp, Homo sapiens
attgaccaactatag

SEQ ID NO: 288783 - DNA, 15 bp, Homo sapiens
cattgaccaactata

SEQ ID NO: 288784 - DNA, 15 bp, Homo sapiens
tcattgaccaactat

SEQ ID NO: 288785 - DNA, 15 bp, Homo sapiens
ttcattgaccaacta

SEQ ID NO: 288786 - DNA, 15 bp, Homo sapiens
tttcattgaccaact

SEQ ID NO: 288787 - DNA, 15 bp, Homo sapiens
gtttcattgaccaac

SEQ ID NO: 288788 - DNA, 15 bp, Homo sapiens
ggtttcattgaccaa

SEQ ID NO: 288789 - DNA, 15 bp, Homo sapiens
gggtttcattgacca

SEQ ID NO: 288790 - DNA, 15 bp, Homo sapiens
tgggtttcattgacc

SEQ ID NO: 288791 - DNA, 15 bp, Homo sapiens
ttgggtttcattgac

SEQ ID NO: 288792 - DNA, 15 bp, Homo sapiens
tttgggtttcattga

SEQ ID NO: 288793 - DNA, 15 bp, Homo sapiens
gtttgggtttcattg

SEQ ID NO: 288794 - DNA, 15 bp, Homo sapiens
agtttgggtttcatt

SEQ ID NO: 288795 - DNA, 15 bp, Homo sapiens
tagtttgggtttcat

SEQ ID NO: 288796 - DNA, 15 bp, Homo sapiens
ttagtttgggtttca

SEQ ID NO: 288797 - DNA, 15 bp, Homo sapiens
cttagtttgggtttc

SEQ ID NO: 288798 - DNA, 15 bp, Homo sapiens
ccttagtttgggttt

SEQ ID NO: 288799 - DNA, 15 bp, Homo sapiens
tccttagtttgggtt

SEQ ID NO: 288800 - DNA, 15 bp, Homo sapiens
atccttagtttgggt

SEQ ID NO: 288801 - DNA, 15 bp, Homo sapiens
aatccttagtttggg

SEQ ID NO: 288802 - DNA, 15 bp, Homo sapiens
aaatccttagtttgg

SEQ ID NO: 288803 - DNA, 15 bp, Homo sapiens
gaaatccttagtttg

SEQ ID NO: 288804 - DNA, 15 bp, Homo sapiens
agaaatccttagttt

SEQ ID NO: 288805 - DNA, 15 bp, Homo sapiens
tagaaatccttagtt

SEQ ID NO: 288806 - DNA, 15 bp, Homo sapiens
atagaaatccttagt

SEQ ID NO: 288807 - DNA, 15 bp, Homo sapiens
aatagaaatccttag

SEQ ID NO: 288808 - DNA, 15 bp, Homo sapiens
gaatagaaatcctta

SEQ ID NO: 288809 - DNA, 15 bp, Homo sapiens
agaatagaaatcctt

SEQ ID NO: 288810 - DNA, 15 bp, Homo sapiens
gagaatagaaatcct

SEQ ID NO: 288811 - DNA, 15 bp, Homo sapiens
agagaatagaaatcc

SEQ ID NO: 288812 - DNA, 15 bp, Homo sapiens
aagagaatagaaatc

SEQ ID NO: 288813 - DNA, 15 bp, Homo sapiens
taagagaatagaaat

SEQ ID NO: 288814 - DNA, 15 bp, Homo sapiens
ttaagagaatagaaa

SEQ ID NO: 288815 - DNA, 15 bp, Homo sapiens
cttaagagaatagaa

SEQ ID NO: 288816 - DNA, 15 bp, Homo sapiens
tcttaagagaataga

SEQ ID NO: 288817 - DNA, 15 bp, Homo sapiens
atcttaagagaatag

SEQ ID NO: 288818 - DNA, 15 bp, Homo sapiens
catcttaagagaata

SEQ ID NO: 288819 - DNA, 15 bp, Homo sapiens
ccatcttaagagaat

SEQ ID NO: 288820 - DNA, 15 bp, Homo sapiens
tccatcttaagagaa

SEQ ID NO: 288821 - DNA, 15 bp, Homo sapiens
atccatcttaagaga

SEQ ID NO: 288822 - DNA, 15 bp, Homo sapiens
aatccatcttaagag

SEQ ID NO: 288823 - DNA, 15 bp, Homo sapiens
gaatccatcttaaga

SEQ ID NO: 288824 - DNA, 15 bp, Homo sapiens
tgaatccatcttaag

SEQ ID NO: 288825 - DNA, 15 bp, Homo sapiens
atgaatccatcttaa

SEQ ID NO: 288826 - DNA, 15 bp, Homo sapiens
gatgaatccatctta

SEQ ID NO: 288827 - DNA, 15 bp, Homo sapiens
agatgaatccatctt

SEQ ID NO: 288828 - DNA, 15 bp, Homo sapiens
cagatgaatccatct

SEQ ID NO: 288829 - DNA, 15 bp, Homo sapiens
gcagatgaatccatc

SEQ ID NO: 288830 - DNA, 15 bp, Homo sapiens
agcagatgaatccat

SEQ ID NO: 288831 - DNA, 15 bp, Homo sapiens
gagcagatgaatcca

SEQ ID NO: 288832 - DNA, 15 bp, Homo sapiens
tgagcagatgaatcc

SEQ ID NO: 288833 - DNA, 15 bp, Homo sapiens
atgagcagatgaatc

SEQ ID NO: 288834 - DNA, 15 bp, Homo sapiens
aatgagcagatgaat

SEQ ID NO: 288835 - DNA, 15 bp, Homo sapiens
gaatgagcagatgaa

SEQ ID NO: 288836 - DNA, 15 bp, Homo sapiens
tgaatgagcagatga

SEQ ID NO: 288837 - DNA, 15 bp, Homo sapiens
gtgaatgagcagatg

SEQ ID NO: 288838 - DNA, 15 bp, Homo sapiens
agtgaatgagcagat

SEQ ID NO: 288839 - DNA, 15 bp, Homo sapiens
gagtgaatgagcaga

SEQ ID NO: 288840 - DNA, 15 bp, Homo sapiens
ggagtgaatgagcag

SEQ ID NO: 288841 - DNA, 15 bp, Homo sapiens
aggagtgaatgagca

SEQ ID NO: 288842 - DNA, 15 bp, Homo sapiens
caggagtgaatgagc

SEQ ID NO: 288843 - DNA, 15 bp, Homo sapiens
acaggagtgaatgag

SEQ ID NO: 288844 - DNA, 15 bp, Homo sapiens
aacaggagtgaatga

SEQ ID NO: 288845 - DNA, 15 bp, Homo sapiens
aaacaggagtgaatg

SEQ ID NO: 288846 - DNA, 15 bp, Homo sapiens
gaaacaggagtgaat

SEQ ID NO: 288847 - DNA, 15 bp, Homo sapiens
agaaacaggagtgaa

SEQ ID NO: 288848 - DNA, 15 bp, Homo sapiens
aagaaacaggagtga

SEQ ID NO: 288849 - DNA, 15 bp, Homo sapiens
gaagaaacaggagtg

SEQ ID NO: 288850 - DNA, 15 bp, Homo sapiens
agaagaaacaggagt

SEQ ID NO: 288851 - DNA, 15 bp, Homo sapiens
cagaagaaacaggag

SEQ ID NO: 288852 - DNA, 15 bp, Homo sapiens
gcagaagaaacagga

SEQ ID NO: 288853 - DNA, 15 bp, Homo sapiens
ggcagaagaaacagg

SEQ ID NO: 288854 - DNA, 15 bp, Homo sapiens
tggcagaagaaacag

SEQ ID NO: 288855 - DNA, 15 bp, Homo sapiens
atggcagaagaaaca

SEQ ID NO: 288856 - DNA, 15 bp, Homo sapiens
catggcagaagaaac

SEQ ID NO: 288857 - DNA, 15 bp, Homo sapiens
tcatggcagaagaaa

SEQ ID NO: 288858 - DNA, 15 bp, Homo sapiens
ttcatggcagaagaa

SEQ ID NO: 288859 - DNA, 15 bp, Homo sapiens
cttcatggcagaaga

SEQ ID NO: 288860 - DNA, 15 bp, Homo sapiens
tcttcatggcagaag

SEQ ID NO: 288861 - DNA, 15 bp, Homo sapiens
atcttcatggcagaa

SEQ ID NO: 288862 - DNA, 15 bp, Homo sapiens
gatcttcatggcaga

SEQ ID NO: 288863 - DNA, 15 bp, Homo sapiens
tgatcttcatggcag

SEQ ID NO: 288864 - DNA, 15 bp, Homo sapiens
ctgatcttcatggca

SEQ ID NO: 288865 - DNA, 15 bp, Homo sapiens
cctgatcttcatggc

SEQ ID NO: 288866 - DNA, 15 bp, Homo sapiens
acctgatcttcatgg

SEQ ID NO: 288867 - DNA, 15 bp, Homo sapiens
cacctgatcttcatg

SEQ ID NO: 288868 - DNA, 15 bp, Homo sapiens
tcacctgatcttcat

SEQ ID NO: 288869 - DNA, 15 bp, Homo sapiens
gtcacctgatcttca

SEQ ID NO: 288870 - DNA, 15 bp, Homo sapiens
agtcacctgatcttc

SEQ ID NO: 288871 - DNA, 15 bp, Homo sapiens
cagtcacctgatctt

SEQ ID NO: 288872 - DNA, 15 bp, Homo sapiens
gcagtcacctgatct

SEQ ID NO: 288873 - DNA, 15 bp, Homo sapiens
ggcagtcacctgatc

SEQ ID NO: 288874 - DNA, 15 bp, Homo sapiens
tggcagtcacctgat

SEQ ID NO: 288875 - DNA, 15 bp, Homo sapiens
ctggcagtcacctga

SEQ ID NO: 288876 - DNA, 15 bp, Homo sapiens
tctggcagtcacctg

SEQ ID NO: 288877 - DNA, 15 bp, Homo sapiens
ctctggcagtcacct

SEQ ID NO: 288878 - DNA, 15 bp, Homo sapiens
cctctggcagtcacc

SEQ ID NO: 288879 - DNA, 15 bp, Homo sapiens
ccctctggcagtcac

SEQ ID NO: 288880 - DNA, 15 bp, Homo sapiens
gccctctggcagtca

SEQ ID NO: 288881 - DNA, 15 bp, Homo sapiens
ggccctctggcagtc

SEQ ID NO: 288882 - DNA, 15 bp, Homo sapiens
tggccctctggcagt

SEQ ID NO: 288883 - DNA, 15 bp, Homo sapiens
atggccctctggcag

SEQ ID NO: 288884 - DNA, 15 bp, Homo sapiens
gatggccctctggca

SEQ ID NO: 288885 - DNA, 15 bp, Homo sapiens
agatggccctctggc

SEQ ID NO: 288886 - DNA, 15 bp, Homo sapiens
aagatggccctctgg

SEQ ID NO: 288887 - DNA, 15 bp, Homo sapiens
gaagatggccctctg

SEQ ID NO: 288888 - DNA, 15 bp, Homo sapiens
tgaagatggccctct

SEQ ID NO: 288889 - DNA, 15 bp, Homo sapiens
ttgaagatggccctc

SEQ ID NO: 288890 - DNA, 15 bp, Homo sapiens
tttgaagatggccct

SEQ ID NO: 288891 - DNA, 15 bp, Homo sapiens
gtttgaagatggccc

SEQ ID NO: 288892 - DNA, 15 bp, Homo sapiens
ggtttgaagatggcc

SEQ ID NO: 288893 - DNA, 15 bp, Homo sapiens
gggtttgaagatggc

SEQ ID NO: 288894 - DNA, 15 bp, Homo sapiens
cgggtttgaagatgg

SEQ ID NO: 288895 - DNA, 15 bp, Homo sapiens
tcgggtttgaagatg

SEQ ID NO: 288896 - DNA, 15 bp, Homo sapiens
ttcgggtttgaagat

SEQ ID NO: 288897 - DNA, 15 bp, Homo sapiens
cttcgggtttgaaga

SEQ ID NO: 288898 - DNA, 15 bp, Homo sapiens
ccttcgggtttgaag

SEQ ID NO: 288899 - DNA, 15 bp, Homo sapiens
accttcgggtttgaa

SEQ ID NO: 288900 - DNA, 15 bp, Homo sapiens
aaccttcgggtttga

SEQ ID NO: 288901 - DNA, 15 bp, Homo sapiens
taaccttcgggtttg

SEQ ID NO: 288902 - DNA, 15 bp, Homo sapiens
ttaaccttcgggttt

SEQ ID NO: 288903 - DNA, 15 bp, Homo sapiens
cttaaccttcgggtt

SEQ ID NO: 288904 - DNA, 15 bp, Homo sapiens
gcttaaccttcgggt

SEQ ID NO: 288905 - DNA, 15 bp, Homo sapiens
tgcttaaccttcggg

SEQ ID NO: 288906 - DNA, 15 bp, Homo sapiens
ctgcttaaccttcgg

SEQ ID NO: 288907 - DNA, 15 bp, Homo sapiens
tctgcttaaccttcg

SEQ ID NO: 288908 - DNA, 15 bp, Homo sapiens
ctctgcttaaccttc

SEQ ID NO: 288909 - DNA, 15 bp, Homo sapiens
cctctgcttaacctt

SEQ ID NO: 288910 - DNA, 15 bp, Homo sapiens
acctctgcttaacct

SEQ ID NO: 288911 - DNA, 15 bp, Homo sapiens
aacctctgcttaacc

SEQ ID NO: 288912 - DNA, 15 bp, Homo sapiens
caacctctgcttaac

SEQ ID NO: 288913 - DNA, 15 bp, Homo sapiens
tcaacctctgcttaa

SEQ ID NO: 288914 - DNA, 15 bp, Homo sapiens
gtcaacctctgctta

SEQ ID NO: 288915 - DNA, 15 bp, Homo sapiens
agtcaacctctgctt

SEQ ID NO: 288916 - DNA, 15 bp, Homo sapiens
cagtcaacctctgct

SEQ ID NO: 288917 - DNA, 15 bp, Homo sapiens
ccagtcaacctctgc

SEQ ID NO: 288918 - DNA, 15 bp, Homo sapiens
cccagtcaacctctg

SEQ ID NO: 288919 - DNA, 15 bp, Homo sapiens
tcccagtcaacctct

SEQ ID NO: 288920 - DNA, 15 bp, Homo sapiens
ttcccagtcaacctc

SEQ ID NO: 288921 - DNA, 15 bp, Homo sapiens
gttcccagtcaacct

SEQ ID NO: 288922 - DNA, 15 bp, Homo sapiens
agttcccagtcaacc

SEQ ID NO: 288923 - DNA, 15 bp, Homo sapiens
aagttcccagtcaac

SEQ ID NO: 288924 - DNA, 15 bp, Homo sapiens
aaagttcccagtcaa

SEQ ID NO: 288925 - DNA, 15 bp, Homo sapiens
aaaagttcccagtca

SEQ ID NO: 288926 - DNA, 15 bp, Homo sapiens
gaaaagttcccagtc

SEQ ID NO: 288927 - DNA, 15 bp, Homo sapiens
ggaaaagttcccagt

SEQ ID NO: 288928 - DNA, 15 bp, Homo sapiens
gggaaaagttcccag

SEQ ID NO: 288929 - DNA, 15 bp, Homo sapiens
agggaaaagttccca

SEQ ID NO: 288930 - DNA, 15 bp, Homo sapiens
cagggaaaagttccc

SEQ ID NO: 288931 - DNA, 15 bp, Homo sapiens
gcagggaaaagttcc

SEQ ID NO: 288932 - DNA, 15 bp, Homo sapiens
tgcagggaaaagttc

SEQ ID NO: 288933 - DNA, 15 bp, Homo sapiens
atgcagggaaaagtt

SEQ ID NO: 288934 - DNA, 15 bp, Homo sapiens
catgcagggaaaagt

SEQ ID NO: 288935 - DNA, 15 bp, Homo sapiens
tcatgcagggaaaag

SEQ ID NO: 288936 - DNA, 15 bp, Homo sapiens
gtcatgcagggaaaa

SEQ ID NO: 288937 - DNA, 15 bp, Homo sapiens
tgtcatgcagggaaa

SEQ ID NO: 288938 - DNA, 15 bp, Homo sapiens
atgtcatgcagggaa

SEQ ID NO: 288939 - DNA, 15 bp, Homo sapiens
gagagtctccttcca

SEQ ID NO: 288940 - DNA, 15 bp, Homo sapiens
ggagagtctccttcc

SEQ ID NO: 288941 - DNA, 15 bp, Homo sapiens
aggagagtctccttc

SEQ ID NO: 288942 - DNA, 15 bp, Homo sapiens
caggagagtctcctt

SEQ ID NO: 288943 - DNA, 15 bp, Homo sapiens
tcaggagagtctcct

SEQ ID NO: 288944 - DNA, 15 bp, Homo sapiens
ctcaggagagtctcc

SEQ ID NO: 288945 - DNA, 15 bp, Homo sapiens
tctcaggagagtctc

SEQ ID NO: 288946 - DNA, 15 bp, Homo sapiens
atctcaggagagtct

SEQ ID NO: 288947 - DNA, 15 bp, Homo sapiens
catctcaggagagtc

SEQ ID NO: 288948 - DNA, 15 bp, Homo sapiens
tcatctcaggagagt

SEQ ID NO: 288949 - DNA, 15 bp, Homo sapiens
ctcatctcaggagag

SEQ ID NO: 288950 - DNA, 15 bp, Homo sapiens
actcatctcaggaga

SEQ ID NO: 288951 - DNA, 15 bp, Homo sapiens
cactcatctcaggag

SEQ ID NO: 288952 - DNA, 15 bp, Homo sapiens
tcactcatctcagga

SEQ ID NO: 288953 - DNA, 15 bp, Homo sapiens
ctcactcatctcagg

SEQ ID NO: 288954 - DNA, 15 bp, Homo sapiens
cctcactcatctcag

SEQ ID NO: 288955 - DNA, 15 bp, Homo sapiens
ccctcactcatctca

SEQ ID NO: 288956 - DNA, 15 bp, Homo sapiens
cccctcactcatctc

SEQ ID NO: 288957 - DNA, 15 bp, Homo sapiens
tcccctcactcatct

SEQ ID NO: 288958 - DNA, 15 bp, Homo sapiens
ttcccctcactcatc

SEQ ID NO: 288959 - DNA, 15 bp, Homo sapiens
gttcccctcactcat

SEQ ID NO: 288960 - DNA, 15 bp, Homo sapiens
ggttcccctcactca

SEQ ID NO: 288961 - DNA, 15 bp, Homo sapiens
cggttcccctcactc

SEQ ID NO: 288962 - DNA, 15 bp, Homo sapiens
gcggttcccctcact

SEQ ID NO: 288963 - DNA, 15 bp, Homo sapiens
tgcggttcccctcac

SEQ ID NO: 288964 - DNA, 15 bp, Homo sapiens
ttgcggttcccctca

SEQ ID NO: 288965 - DNA, 15 bp, Homo sapiens
gttgcggttcccctc

SEQ ID NO: 288966 - DNA, 15 bp, Homo sapiens
tgttgcggttcccct

SEQ ID NO: 288967 - DNA, 15 bp, Homo sapiens
ctgttgcggttcccc

SEQ ID NO: 288968 - DNA, 15 bp, Homo sapiens
tctgttgcggttccc

SEQ ID NO: 288969 - DNA, 15 bp, Homo sapiens
gtctgttgcggttcc

SEQ ID NO: 288970 - DNA, 15 bp, Homo sapiens
tgtctgttgcggttc

SEQ ID NO: 288971 - DNA, 15 bp, Homo sapiens
ctgtctgttgcggtt

SEQ ID NO: 288972 - DNA, 15 bp, Homo sapiens
cctgtctgttgcggt

SEQ ID NO: 288973 - DNA, 15 bp, Homo sapiens
gcctgtctgttgcgg

SEQ ID NO: 288974 - DNA, 15 bp, Homo sapiens
ggcctgtctgttgcg

SEQ ID NO: 288975 - DNA, 15 bp, Homo sapiens
aggcctgtctgttgc

SEQ ID NO: 288976 - DNA, 15 bp, Homo sapiens
caggcctgtctgttg

SEQ ID NO: 288977 - DNA, 15 bp, Homo sapiens
tcaggcctgtctgtt

SEQ ID NO: 288978 - DNA, 15 bp, Homo sapiens
ctcaggcctgtctgt

SEQ ID NO: 288979 - DNA, 15 bp, Homo sapiens
tctcaggcctgtctg

SEQ ID NO: 288980 - DNA, 15 bp, Homo sapiens
ctctcaggcctgtct

SEQ ID NO: 288981 - DNA, 15 bp, Homo sapiens
gctctcaggcctgtc

SEQ ID NO: 288982 - DNA, 15 bp, Homo sapiens
cgctctcaggcctgt

SEQ ID NO: 288983 - DNA, 15 bp, Homo sapiens
gcgctctcaggcctg

SEQ ID NO: 288984 - DNA, 15 bp, Homo sapiens
agcgctctcaggcct

SEQ ID NO: 288985 - DNA, 15 bp, Homo sapiens
cagcgctctcaggcc

SEQ ID NO: 288986 - DNA, 15 bp, Homo sapiens
gcagcgctctcaggc

SEQ ID NO: 288987 - DNA, 15 bp, Homo sapiens
ggcagcgctctcagg

SEQ ID NO: 288988 - DNA, 15 bp, Homo sapiens
aggcagcgctctcag

SEQ ID NO: 288989 - DNA, 15 bp, Homo sapiens
aaggcagcgctctca

SEQ ID NO: 288990 - DNA, 15 bp, Homo sapiens
gaaggcagcgctctc

SEQ ID NO: 288991 - DNA, 15 bp, Homo sapiens
cgaaggcagcgctct

SEQ ID NO: 288992 - DNA, 15 bp, Homo sapiens
ccgaaggcagcgctc

SEQ ID NO: 288993 - DNA, 15 bp, Homo sapiens
cccgaaggcagcgct

SEQ ID NO: 288994 - DNA, 15 bp, Homo sapiens
acccgaaggcagcgc

SEQ ID NO: 288995 - DNA, 15 bp, Homo sapiens
tacccgaaggcagcg

SEQ ID NO: 288996 - DNA, 15 bp, Homo sapiens
ctacccgaaggcagc

SEQ ID NO: 288997 - DNA, 15 bp, Homo sapiens
tctacccgaaggcag

SEQ ID NO: 288998 - DNA, 15 bp, Homo sapiens
ttctacccgaaggca

SEQ ID NO: 288999 - DNA, 15 bp, Homo sapiens
cttctacccgaaggc

SEQ ID NO: 289000 - DNA, 15 bp, Homo sapiens
ccttctacccgaagg

SEQ ID NO: 289001 - DNA, 15 bp, Homo sapiens
accttctacccgaag

SEQ ID NO: 289002 - DNA, 15 bp, Homo sapiens
gaccttctacccgaa

SEQ ID NO: 289003 - DNA, 15 bp, Homo sapiens
tgaccttctacccga

SEQ ID NO: 289004 - DNA, 15 bp, Homo sapiens
gtgaccttctacccg

SEQ ID NO: 289005 - DNA, 15 bp, Homo sapiens
tgtgaccttctaccc

SEQ ID NO: 289006 - DNA, 15 bp, Homo sapiens
ctgtgaccttctacc

SEQ ID NO: 289007 - DNA, 15 bp, Homo sapiens
tctgtgaccttctac

SEQ ID NO: 289008 - DNA, 15 bp, Homo sapiens
ctctgtgaccttcta

SEQ ID NO: 289009 - DNA, 15 bp, Homo sapiens
gctctgtgaccttct

SEQ ID NO: 289010 - DNA, 15 bp, Homo sapiens
agctctgtgaccttc

SEQ ID NO: 289011 - DNA, 15 bp, Homo sapiens
aagctctgtgacctt

SEQ ID NO: 289012 - DNA, 15 bp, Homo sapiens
aaagctctgtgacct

SEQ ID NO: 289013 - DNA, 15 bp, Homo sapiens
caaagctctgtgacc

SEQ ID NO: 289014 - DNA, 15 bp, Homo sapiens
gcaaagctctgtgac

SEQ ID NO: 289015 - DNA, 15 bp, Homo sapiens
agcaaagctctgtga

SEQ ID NO: 289016 - DNA, 15 bp, Homo sapiens
aagcaaagctctgtg

SEQ ID NO: 289017 - DNA, 15 bp, Homo sapiens
caagcaaagctctgt

SEQ ID NO: 289018 - DNA, 15 bp, Homo sapiens
tcaagcaaagctctg

SEQ ID NO: 289019 - DNA, 15 bp, Homo sapiens
ttcaagcaaagctct

SEQ ID NO: 289020 - DNA, 15 bp, Homo sapiens
tttcaagcaaagctc

SEQ ID NO: 289021 - DNA, 15 bp, Homo sapiens
ttttcaagcaaagct

SEQ ID NO: 289022 - DNA, 15 bp, Homo sapiens
cttttcaagcaaagc

SEQ ID NO: 289023 - DNA, 15 bp, Homo sapiens
tcttttcaagcaaag

SEQ ID NO: 289024 - DNA, 15 bp, Homo sapiens
ttcttttcaagcaaa

SEQ ID NO: 289025 - DNA, 15 bp, Homo sapiens
attcttttcaagcaa

SEQ ID NO: 289026 - DNA, 15 bp, Homo sapiens
cattcttttcaagca

SEQ ID NO: 289027 - DNA, 15 bp, Homo sapiens
gcattcttttcaagc

SEQ ID NO: 289028 - DNA, 15 bp, Homo sapiens
agcattcttttcaag

SEQ ID NO: 289029 - DNA, 15 bp, Homo sapiens
cagcattcttttcaa

SEQ ID NO: 289030 - DNA, 15 bp, Homo sapiens
ccagcattcttttca

SEQ ID NO: 289031 - DNA, 15 bp, Homo sapiens
gccagcattcttttc

SEQ ID NO: 289032 - DNA, 15 bp, Homo sapiens
agccagcattctttt

SEQ ID NO: 289033 - DNA, 15 bp, Homo sapiens
tcagccagcattctt

SEQ ID NO: 289034 - DNA, 15 bp, Homo sapiens
ttcagccagcattct

SEQ ID NO: 289035 - DNA, 15 bp, Homo sapiens
cttcagccagcattc

SEQ ID NO: 289036 - DNA, 15 bp, Homo sapiens
tcttcagccagcatt

SEQ ID NO: 289037 - DNA, 15 bp, Homo sapiens
ctcttcagccagcat

SEQ ID NO: 289038 - DNA, 15 bp, Homo sapiens
cctcttcagccagca

SEQ ID NO: 289039 - DNA, 15 bp, Homo sapiens
tcctcttcagccagc

SEQ ID NO: 289040 - DNA, 15 bp, Homo sapiens
ttcctcttcagccag

SEQ ID NO: 289041 - DNA, 15 bp, Homo sapiens
tttcctcttcagcca

SEQ ID NO: 289042 - DNA, 15 bp, Homo sapiens
gtttcctcttcagcc

SEQ ID NO: 289043 - DNA, 15 bp, Homo sapiens
tgtttcctcttcagc

SEQ ID NO: 289044 - DNA, 15 bp, Homo sapiens
atgtttcctcttcag

SEQ ID NO: 289045 - DNA, 15 bp, Homo sapiens
aatgtttcctcttca

SEQ ID NO: 289046 - DNA, 15 bp, Homo sapiens
caatgtttcctcttc

SEQ ID NO: 289047 - DNA, 15 bp, Homo sapiens
gcaatgtttcctctt

SEQ ID NO: 289048 - DNA, 15 bp, Homo sapiens
ggcaatgtttcctct

SEQ ID NO: 289049 - DNA, 15 bp, Homo sapiens
tggcaatgtttcctc

SEQ ID NO: 289050 - DNA, 15 bp, Homo sapiens
ttggcaatgtttcct

SEQ ID NO: 289051 - DNA, 15 bp, Homo sapiens
gttggcaatgtttcc

SEQ ID NO: 289052 - DNA, 15 bp, Homo sapiens
agttggcaatgtttc

SEQ ID NO: 289053 - DNA, 15 bp, Homo sapiens
gagttggcaatgttt

SEQ ID NO: 289054 - DNA, 15 bp, Homo sapiens
ggagttggcaatgtt

SEQ ID NO: 289055 - DNA, 15 bp, Homo sapiens
gggagttggcaatgt

SEQ ID NO: 289056 - DNA, 15 bp, Homo sapiens
agggagttggcaatg

SEQ ID NO: 289057 - DNA, 15 bp, Homo sapiens
gagggagttggcaat

SEQ ID NO: 289058 - DNA, 15 bp, Homo sapiens
ggagggagttggcaa

SEQ ID NO: 289059 - DNA, 15 bp, Homo sapiens
aggagggagttggca

SEQ ID NO: 289060 - DNA, 15 bp, Homo sapiens
gaggagggagttggc

SEQ ID NO: 289061 - DNA, 15 bp, Homo sapiens
agaggagggagttgg

SEQ ID NO: 289062 - DNA, 15 bp, Homo sapiens
aagaggagggagttg

SEQ ID NO: 289063 - DNA, 15 bp, Homo sapiens
aaagaggagggagtt

SEQ ID NO: 289064 - DNA, 15 bp, Homo sapiens
caaagaggagggagt

SEQ ID NO: 289065 - DNA, 15 bp, Homo sapiens
tcaaagaggagggag

SEQ ID NO: 289066 - DNA, 15 bp, Homo sapiens
ctcaaagaggaggga

SEQ ID NO: 289067 - DNA, 15 bp, Homo sapiens
gctcaaagaggaggg

SEQ ID NO: 289068 - DNA, 15 bp, Homo sapiens
ggctcaaagaggagg

SEQ ID NO: 289069 - DNA, 15 bp, Homo sapiens
gggctcaaagaggag

SEQ ID NO: 289070 - DNA, 15 bp, Homo sapiens
tgggctcaaagagga

SEQ ID NO: 289071 - DNA, 15 bp, Homo sapiens
gtgggctcaaagagg

SEQ ID NO: 289072 - DNA, 15 bp, Homo sapiens
agtgggctcaaagag

SEQ ID NO: 289073 - DNA, 15 bp, Homo sapiens
cagtgggctcaaaga

SEQ ID NO: 289074 - DNA, 15 bp, Homo sapiens
ccagtgggctcaaag

SEQ ID NO: 289075 - DNA, 15 bp, Homo sapiens
cccagtgggctcaaa

SEQ ID NO: 289076 - DNA, 15 bp, Homo sapiens
gcccagtgggctcaa

SEQ ID NO: 289077 - DNA, 15 bp, Homo sapiens
ggcccagtgggctca

SEQ ID NO: 289078 - DNA, 15 bp, Homo sapiens
tggcccagtgggctc

SEQ ID NO: 289079 - DNA, 15 bp, Homo sapiens
ctggcccagtgggct

SEQ ID NO: 289080 - DNA, 15 bp, Homo sapiens
tctggcccagtgggc

SEQ ID NO: 289081 - DNA, 15 bp, Homo sapiens
ttctggcccagtggg

SEQ ID NO: 289082 - DNA, 15 bp, Homo sapiens
attctggcccagtgg

SEQ ID NO: 289083 - DNA, 15 bp, Homo sapiens
aattctggcccagtg

SEQ ID NO: 289084 - DNA, 15 bp, Homo sapiens
caattctggcccagt

SEQ ID NO: 289085 - DNA, 15 bp, Homo sapiens
acaattctggcccag

SEQ ID NO: 289086 - DNA, 15 bp, Homo sapiens
tacaattctggccca

SEQ ID NO: 289087 - DNA, 15 bp, Homo sapiens
atacaattctggccc

SEQ ID NO: 289088 - DNA, 15 bp, Homo sapiens
tatacaattctggcc

SEQ ID NO: 289089 - DNA, 15 bp, Homo sapiens
atatacaattctggc

SEQ ID NO: 289090 - DNA, 15 bp, Homo sapiens
aatatacaattctgg

SEQ ID NO: 289091 - DNA, 15 bp, Homo sapiens
gaatatacaattctg

SEQ ID NO: 289092 - DNA, 15 bp, Homo sapiens
tgaatatacaattct

SEQ ID NO: 289093 - DNA, 15 bp, Homo sapiens
atgaatatacaattc

SEQ ID NO: 289094 - DNA, 15 bp, Homo sapiens
tatgaatatacaatt

SEQ ID NO: 289095 - DNA, 15 bp, Homo sapiens
atatgaatatacaat

SEQ ID NO: 289096 - DNA, 15 bp, Homo sapiens
aatatgaatatacaa

SEQ ID NO: 289097 - DNA, 15 bp, Homo sapiens
aaatatgaatataca

SEQ ID NO: 289098 - DNA, 15 bp, Homo sapiens
caaatatgaatatac

SEQ ID NO: 289099 - DNA, 15 bp, Homo sapiens
acaaatatgaatata

SEQ ID NO: 289100 - DNA, 15 bp, Homo sapiens
gacaaatatgaatat

SEQ ID NO: 289101 - DNA, 15 bp, Homo sapiens
tgacaaatatgaata

SEQ ID NO: 289102 - DNA, 15 bp, Homo sapiens
atgacaaatatgaat

SEQ ID NO: 289103 - DNA, 15 bp, Homo sapiens
gatgacaaatatgaa

SEQ ID NO: 289104 - DNA, 15 bp, Homo sapiens
agatgacaaatatga

SEQ ID NO: 289105 - DNA, 15 bp, Homo sapiens
cagatgacaaatatg

SEQ ID NO: 289106 - DNA, 15 bp, Homo sapiens
acagatgacaaatat

SEQ ID NO: 289107 - DNA, 15 bp, Homo sapiens
cacagatgacaaata

SEQ ID NO: 289108 - DNA, 15 bp, Homo sapiens
gcacagatgacaaat

SEQ ID NO: 289109 - DNA, 15 bp, Homo sapiens
ggcacagatgacaaa

SEQ ID NO: 289110 - DNA, 15 bp, Homo sapiens
gggcacagatgacaa

SEQ ID NO: 289111 - DNA, 15 bp, Homo sapiens
agggcacagatgaca

SEQ ID NO: 289112 - DNA, 15 bp, Homo sapiens
aagggcacagatgac

SEQ ID NO: 289113 - DNA, 15 bp, Homo sapiens
aaagggcacagatga

SEQ ID NO: 289114 - DNA, 15 bp, Homo sapiens
gaaagggcacagatg

SEQ ID NO: 289115 - DNA, 15 bp, Homo sapiens
ggaaagggcacagat

SEQ ID NO: 289116 - DNA, 15 bp, Homo sapiens
tggaaagggcacaga

SEQ ID NO: 289117 - DNA, 15 bp, Homo sapiens
gtggaaagggcacag

SEQ ID NO: 289118 - DNA, 15 bp, Homo sapiens
agtggaaagggcaca

SEQ ID NO: 289119 - DNA, 15 bp, Homo sapiens
gagtggaaagggcac

SEQ ID NO: 289120 - DNA, 15 bp, Homo sapiens
agagtggaaagggca

SEQ ID NO: 289121 - DNA, 15 bp, Homo sapiens
cagagtggaaagggc

SEQ ID NO: 289122 - DNA, 15 bp, Homo sapiens
ccagagtggaaaggg

SEQ ID NO: 289123 - DNA, 15 bp, Homo sapiens
cccagagtggaaagg

SEQ ID NO: 289124 - DNA, 15 bp, Homo sapiens
ccccagagtggaaag

SEQ ID NO: 289125 - DNA, 15 bp, Homo sapiens
gccccagagtggaaa

SEQ ID NO: 289126 - DNA, 15 bp, Homo sapiens
tgccccagagtggaa

SEQ ID NO: 289127 - DNA, 15 bp, Homo sapiens
ttgccccagagtgga

SEQ ID NO: 289128 - DNA, 15 bp, Homo sapiens
tttgccccagagtgg

SEQ ID NO: 289129 - DNA, 15 bp, Homo sapiens
ttttgccccagagtg

SEQ ID NO: 289130 - DNA, 15 bp, Homo sapiens
tttttgccccagagt

SEQ ID NO: 289131 - DNA, 15 bp, Homo sapiens
ctttttgccccagag

SEQ ID NO: 289132 - DNA, 15 bp, Homo sapiens
cctttttgccccaga

SEQ ID NO: 289133 - DNA, 15 bp, Homo sapiens
acctttttgccccag

SEQ ID NO: 289134 - DNA, 15 bp, Homo sapiens
gacctttttgcccca

SEQ ID NO: 289135 - DNA, 15 bp, Homo sapiens
agacctttttgcccc

SEQ ID NO: 289136 - DNA, 15 bp, Homo sapiens
cagacctttttgccc

SEQ ID NO: 289137 - DNA, 15 bp, Homo sapiens
gcagacctttttgcc

SEQ ID NO: 289138 - DNA, 15 bp, Homo sapiens
agcagacctttttgc

SEQ ID NO: 289139 - DNA, 15 bp, Homo sapiens
cagcagacctttttg

SEQ ID NO: 289140 - DNA, 15 bp, Homo sapiens
ccagcagaccttttt

SEQ ID NO: 289141 - DNA, 15 bp, Homo sapiens
cccagcagacctttt

SEQ ID NO: 289142 - DNA, 15 bp, Homo sapiens
gcccagcagaccttt

SEQ ID NO: 289143 - DNA, 15 bp, Homo sapiens
tgcccagcagacctt

SEQ ID NO: 289144 - DNA, 15 bp, Homo sapiens
ctgcccagcagacct

SEQ ID NO: 289145 - DNA, 15 bp, Homo sapiens
gctgcccagcagacc

SEQ ID NO: 289146 - DNA, 15 bp, Homo sapiens
agctgcccagcagac

SEQ ID NO: 289147 - DNA, 15 bp, Homo sapiens
gagctgcccagcaga

SEQ ID NO: 289148 - DNA, 15 bp, Homo sapiens
agagctgcccagcag

SEQ ID NO: 289149 - DNA, 15 bp, Homo sapiens
cagagctgcccagca

SEQ ID NO: 289150 - DNA, 15 bp, Homo sapiens
ccagagctgcccagc

SEQ ID NO: 289151 - DNA, 15 bp, Homo sapiens
gccagagctgcccag

SEQ ID NO: 289152 - DNA, 15 bp, Homo sapiens
cgccagagctgccca

SEQ ID NO: 289153 - DNA, 15 bp, Homo sapiens
ccgccagagctgccc

SEQ ID NO: 289154 - DNA, 15 bp, Homo sapiens
cccgccagagctgcc

SEQ ID NO: 289155 - DNA, 15 bp, Homo sapiens
ccccgccagagctgc

SEQ ID NO: 289156 - DNA, 15 bp, Homo sapiens
tccccgccagagctg

SEQ ID NO: 289157 - DNA, 15 bp, Homo sapiens
ttccccgccagagct

SEQ ID NO: 289158 - DNA, 15 bp, Homo sapiens
attccccgccagagc

SEQ ID NO: 289159 - DNA, 15 bp, Homo sapiens
cattccccgccagag

SEQ ID NO: 289160 - DNA, 15 bp, Homo sapiens
tcattccccgccaga

SEQ ID NO: 289161 - DNA, 15 bp, Homo sapiens
ttcattccccgccag

SEQ ID NO: 289162 - DNA, 15 bp, Homo sapiens
tttcattccccgcca

SEQ ID NO: 289163 - DNA, 15 bp, Homo sapiens
ttttcattccccgcc

SEQ ID NO: 289164 - DNA, 15 bp, Homo sapiens
attttcattccccgc

SEQ ID NO: 289165 - DNA, 15 bp, Homo sapiens
cattttcattccccg

SEQ ID NO: 289166 - DNA, 15 bp, Homo sapiens
ccattttcattcccc

SEQ ID NO: 289167 - DNA, 15 bp, Homo sapiens
cccattttcattccc

SEQ ID NO: 289168 - DNA, 15 bp, Homo sapiens
acccattttcattcc

SEQ ID NO: 289169 - DNA, 15 bp, Homo sapiens
cacccattttcattc

SEQ ID NO: 289170 - DNA, 15 bp, Homo sapiens
ccacccattttcatt

SEQ ID NO: 289171 - DNA, 15 bp, Homo sapiens
cccacccattttcat

SEQ ID NO: 289172 - DNA, 15 bp, Homo sapiens
tcccacccattttca

SEQ ID NO: 289173 - DNA, 15 bp, Homo sapiens
ttcccacccattttc

SEQ ID NO: 289174 - DNA, 15 bp, Homo sapiens
attcccacccatttt

SEQ ID NO: 289175 - DNA, 15 bp, Homo sapiens
cattcccacccattt

SEQ ID NO: 289176 - DNA, 15 bp, Homo sapiens
acattcccacccatt

SEQ ID NO: 289177 - DNA, 15 bp, Homo sapiens
tacattcccacccat

SEQ ID NO: 289178 - DNA, 15 bp, Homo sapiens
ctacattcccaccca

SEQ ID NO: 289179 - DNA, 15 bp, Homo sapiens
gctacattcccaccc

SEQ ID NO: 289180 - DNA, 15 bp, Homo sapiens
agctacattcccacc

SEQ ID NO: 289181 - DNA, 15 bp, Homo sapiens
cagctacattcccac

SEQ ID NO: 289182 - DNA, 15 bp, Homo sapiens
ccagctacattccca

SEQ ID NO: 289183 - DNA, 15 bp, Homo sapiens
cccagctacattccc

SEQ ID NO: 289184 - DNA, 15 bp, Homo sapiens
gcccagctacattcc

SEQ ID NO: 289185 - DNA, 15 bp, Homo sapiens
tgcccagctacattc

SEQ ID NO: 289186 - DNA, 15 bp, Homo sapiens
ctgcccagctacatt

SEQ ID NO: 289187 - DNA, 15 bp, Homo sapiens
cctgcccagctacat

SEQ ID NO: 289188 - DNA, 15 bp, Homo sapiens
ccctgcccagctaca

SEQ ID NO: 289189 - DNA, 15 bp, Homo sapiens
accctgcccagctac

SEQ ID NO: 289190 - DNA, 15 bp, Homo sapiens
caccctgcccagcta

SEQ ID NO: 289191 - DNA, 15 bp, Homo sapiens
ccaccctgcccagct

SEQ ID NO: 289192 - DNA, 15 bp, Homo sapiens
gccaccctgcccagc

SEQ ID NO: 289193 - DNA, 15 bp, Homo sapiens
agccaccctgcccag

SEQ ID NO: 289194 - DNA, 15 bp, Homo sapiens
gagccaccctgccca

SEQ ID NO: 289195 - DNA, 15 bp, Homo sapiens
tgagccaccctgccc

SEQ ID NO: 289196 - DNA, 15 bp, Homo sapiens
gtgagccaccctgcc

SEQ ID NO: 289197 - DNA, 15 bp, Homo sapiens
tgtgagccaccctgc

SEQ ID NO: 289198 - DNA, 15 bp, Homo sapiens
atgtgagccaccctg

SEQ ID NO: 289199 - DNA, 15 bp, Homo sapiens
catgtgagccaccct

SEQ ID NO: 289200 - DNA, 15 bp, Homo sapiens
tcatgtgagccaccc

SEQ ID NO: 289201 - DNA, 15 bp, Homo sapiens
ctcatgtgagccacc

SEQ ID NO: 289202 - DNA, 15 bp, Homo sapiens
cctcatgtgagccac

SEQ ID NO: 289203 - DNA, 15 bp, Homo sapiens
acctcatgtgagcca

SEQ ID NO: 289204 - DNA, 15 bp, Homo sapiens
tacctcatgtgagcc

SEQ ID NO: 289205 - DNA, 15 bp, Homo sapiens
ttacctcatgtgagc

SEQ ID NO: 289206 - DNA, 15 bp, Homo sapiens
cttacctcatgtgag

SEQ ID NO: 289207 - DNA, 15 bp, Homo sapiens
tcttacctcatgtga

SEQ ID NO: 289208 - DNA, 15 bp, Homo sapiens
ctcttacctcatgtg

SEQ ID NO: 289209 - DNA, 15 bp, Homo sapiens
cctcttacctcatgt

SEQ ID NO: 289210 - DNA, 15 bp, Homo sapiens
tcctcttacctcatg

SEQ ID NO: 289211 - DNA, 15 bp, Homo sapiens
atcctcttacctcat

SEQ ID NO: 289212 - DNA, 15 bp, Homo sapiens
gatcctcttacctca

SEQ ID NO: 289213 - DNA, 15 bp, Homo sapiens
tgatcctcttacctc

SEQ ID NO: 289214 - DNA, 15 bp, Homo sapiens
gtgatcctcttacct

SEQ ID NO: 289215 - DNA, 15 bp, Homo sapiens
agtgatcctcttacc

SEQ ID NO: 289216 - DNA, 15 bp, Homo sapiens
aagtgatcctcttac

SEQ ID NO: 289217 - DNA, 15 bp, Homo sapiens
caagtgatcctctta

SEQ ID NO: 289218 - DNA, 15 bp, Homo sapiens
tcaagtgatcctctt

SEQ ID NO: 289219 - DNA, 15 bp, Homo sapiens
ctcaagtgatcctct

SEQ ID NO: 289220 - DNA, 15 bp, Homo sapiens
ttgaactcctgggct

SEQ ID NO: 289221 - DNA, 15 bp, Homo sapiens
cttgaactcctgggc

SEQ ID NO: 289222 - DNA, 15 bp, Homo sapiens
tcttgaactcctggg

SEQ ID NO: 289223 - DNA, 15 bp, Homo sapiens
gtcttgaactcctgg

SEQ ID NO: 289224 - DNA, 15 bp, Homo sapiens
cccaggctggtcttg

SEQ ID NO: 289225 - DNA, 15 bp, Homo sapiens
gcccaggctggtctt

SEQ ID NO: 289226 - DNA, 15 bp, Homo sapiens
attgcccaggctggt

SEQ ID NO: 289227 - DNA, 15 bp, Homo sapiens
cattgcccaggctgg

SEQ ID NO: 289228 - DNA, 15 bp, Homo sapiens
acattgcccaggctg

SEQ ID NO: 289229 - DNA, 15 bp, Homo sapiens
tacattgcccaggct

SEQ ID NO: 289230 - DNA, 15 bp, Homo sapiens
ctacattgcccaggc

SEQ ID NO: 289231 - DNA, 15 bp, Homo sapiens
actacattgcccagg

SEQ ID NO: 289232 - DNA, 15 bp, Homo sapiens
cactacattgcccag

SEQ ID NO: 289233 - DNA, 15 bp, Homo sapiens
tcactacattgccca

SEQ ID NO: 289234 - DNA, 15 bp, Homo sapiens
ctcactacattgccc

SEQ ID NO: 289235 - DNA, 15 bp, Homo sapiens
cctcactacattgcc

SEQ ID NO: 289236 - DNA, 15 bp, Homo sapiens
gcctcactacattgc

SEQ ID NO: 289237 - DNA, 15 bp, Homo sapiens
ggcctcactacattg

SEQ ID NO: 289238 - DNA, 15 bp, Homo sapiens
gggcctcactacatt

SEQ ID NO: 289239 - DNA, 15 bp, Homo sapiens
agggcctcactacat

SEQ ID NO: 289240 - DNA, 15 bp, Homo sapiens
cagggcctcactaca

SEQ ID NO: 289241 - DNA, 15 bp, Homo sapiens
ccagggcctcactac

SEQ ID NO: 289242 - DNA, 15 bp, Homo sapiens
tccagggcctcacta

SEQ ID NO: 289243 - DNA, 15 bp, Homo sapiens
ttccagggcctcact

SEQ ID NO: 289244 - DNA, 15 bp, Homo sapiens
tttccagggcctcac

SEQ ID NO: 289245 - DNA, 15 bp, Homo sapiens
ttttccagggcctca

SEQ ID NO: 289246 - DNA, 15 bp, Homo sapiens
attttccagggcctc

SEQ ID NO: 289247 - DNA, 15 bp, Homo sapiens
cattttccagggcct

SEQ ID NO: 289248 - DNA, 15 bp, Homo sapiens
acattttccagggcc

SEQ ID NO: 289249 - DNA, 15 bp, Homo sapiens
aacattttccagggc

SEQ ID NO: 289250 - DNA, 15 bp, Homo sapiens
aaacattttccaggg

SEQ ID NO: 289251 - DNA, 15 bp, Homo sapiens
aaaacattttccagg

SEQ ID NO: 289252 - DNA, 15 bp, Homo sapiens
taaaacattttccag

SEQ ID NO: 289253 - DNA, 15 bp, Homo sapiens
ttaaaacattttcca

SEQ ID NO: 289254 - DNA, 15 bp, Homo sapiens
tttaaaacattttcc

SEQ ID NO: 289255 - DNA, 15 bp, Homo sapiens
ctttaaaacattttc

SEQ ID NO: 289256 - DNA, 15 bp, Homo sapiens
tctttaaaacatttt

SEQ ID NO: 289257 - DNA, 15 bp, Homo sapiens
atctttaaaacattt

SEQ ID NO: 289258 - DNA, 15 bp, Homo sapiens
aatctttaaaacatt

SEQ ID NO: 289259 - DNA, 15 bp, Homo sapiens
taatctttaaaacat

SEQ ID NO: 289260 - DNA, 15 bp, Homo sapiens
ctaatctttaaaaca

SEQ ID NO: 289261 - DNA, 15 bp, Homo sapiens
gctaatctttaaaac

SEQ ID NO: 289262 - DNA, 15 bp, Homo sapiens
agctaatctttaaaa

SEQ ID NO: 289263 - DNA, 15 bp, Homo sapiens
cagctaatctttaaa

SEQ ID NO: 289264 - DNA, 15 bp, Homo sapiens
ccagctaatctttaa

SEQ ID NO: 289265 - DNA, 15 bp, Homo sapiens
accagctaatcttta

SEQ ID NO: 289266 - DNA, 15 bp, Homo sapiens
gaccagctaatcttt

SEQ ID NO: 289267 - DNA, 15 bp, Homo sapiens
tgaccagctaatctt

SEQ ID NO: 289268 - DNA, 15 bp, Homo sapiens
atgaccagctaatct

SEQ ID NO: 289269 - DNA, 15 bp, Homo sapiens
catgaccagctaatc

SEQ ID NO: 289270 - DNA, 15 bp, Homo sapiens
ccatgaccagctaat

SEQ ID NO: 289271 - DNA, 15 bp, Homo sapiens
accatgaccagctaa

SEQ ID NO: 289272 - DNA, 15 bp, Homo sapiens
caccatgaccagcta

SEQ ID NO: 289273 - DNA, 15 bp, Homo sapiens
ccaccatgaccagct

SEQ ID NO: 289274 - DNA, 15 bp, Homo sapiens
accaccatgaccagc

SEQ ID NO: 289275 - DNA, 15 bp, Homo sapiens
taccaccatgaccag

SEQ ID NO: 289276 - DNA, 15 bp, Homo sapiens
ataccaccatgacca

SEQ ID NO: 289277 - DNA, 15 bp, Homo sapiens
cataccaccatgacc

SEQ ID NO: 289278 - DNA, 15 bp, Homo sapiens
acataccaccatgac

SEQ ID NO: 289279 - DNA, 15 bp, Homo sapiens
cacataccaccatga

SEQ ID NO: 289280 - DNA, 15 bp, Homo sapiens
gcacataccaccatg

SEQ ID NO: 289281 - DNA, 15 bp, Homo sapiens
ggcacataccaccat

SEQ ID NO: 289282 - DNA, 15 bp, Homo sapiens
aggcacataccacca

SEQ ID NO: 289283 - DNA, 15 bp, Homo sapiens
taggcacataccacc

SEQ ID NO: 289284 - DNA, 15 bp, Homo sapiens
ataggcacataccac

SEQ ID NO: 289285 - DNA, 15 bp, Homo sapiens
tataggcacatacca

SEQ ID NO: 289286 - DNA, 15 bp, Homo sapiens
ctataggcacatacc

SEQ ID NO: 289287 - DNA, 15 bp, Homo sapiens
actataggcacatac

SEQ ID NO: 289288 - DNA, 15 bp, Homo sapiens
gactataggcacata

SEQ ID NO: 289289 - DNA, 15 bp, Homo sapiens
agactataggcacat

SEQ ID NO: 289290 - DNA, 15 bp, Homo sapiens
gagactataggcaca

SEQ ID NO: 289291 - DNA, 15 bp, Homo sapiens
tgagactataggcac

SEQ ID NO: 289292 - DNA, 15 bp, Homo sapiens
ctgagactataggca

SEQ ID NO: 289293 - DNA, 15 bp, Homo sapiens
gctgagactataggc

SEQ ID NO: 289294 - DNA, 15 bp, Homo sapiens
agctgagactatagg

SEQ ID NO: 289295 - DNA, 15 bp, Homo sapiens
tagctgagactatag

SEQ ID NO: 289296 - DNA, 15 bp, Homo sapiens
gtagctgagactata

SEQ ID NO: 289297 - DNA, 15 bp, Homo sapiens
agtagctgagactat

SEQ ID NO: 289298 - DNA, 15 bp, Homo sapiens
gagtagctgagacta

SEQ ID NO: 289299 - DNA, 15 bp, Homo sapiens
tgagtagctgagact

SEQ ID NO: 289300 - DNA, 15 bp, Homo sapiens
ttgagtagctgagac

SEQ ID NO: 289301 - DNA, 15 bp, Homo sapiens
cttgagtagctgaga

SEQ ID NO: 289302 - DNA, 15 bp, Homo sapiens
tcttgagtagctgag

SEQ ID NO: 289303 - DNA, 15 bp, Homo sapiens
ctcttgagtagctga

SEQ ID NO: 289304 - DNA, 15 bp, Homo sapiens
gctcttgagtagctg

SEQ ID NO: 289305 - DNA, 15 bp, Homo sapiens
ggctcttgagtagct

SEQ ID NO: 289306 - DNA, 15 bp, Homo sapiens
aggctcttgagtagc

SEQ ID NO: 289307 - DNA, 15 bp, Homo sapiens
caggctcttgagtag

SEQ ID NO: 289308 - DNA, 15 bp, Homo sapiens
tcaggctcttgagta

SEQ ID NO: 289309 - DNA, 15 bp, Homo sapiens
ctcaggctcttgagt

SEQ ID NO: 289310 - DNA, 15 bp, Homo sapiens
cctcaggctcttgag

SEQ ID NO: 289311 - DNA, 15 bp, Homo sapiens
acctcaggctcttga

SEQ ID NO: 289312 - DNA, 15 bp, Homo sapiens
cacctcaggctcttg

SEQ ID NO: 289313 - DNA, 15 bp, Homo sapiens
ccacctcaggctctt

SEQ ID NO: 289314 - DNA, 15 bp, Homo sapiens
cccacctcaggctct

SEQ ID NO: 289315 - DNA, 15 bp, Homo sapiens
tcccacctcaggctc

SEQ ID NO: 289316 - DNA, 15 bp, Homo sapiens
ctcccacctcaggct

SEQ ID NO: 289317 - DNA, 15 bp, Homo sapiens
gctcccacctcaggc

SEQ ID NO: 289318 - DNA, 15 bp, Homo sapiens
tgctcccacctcagg

SEQ ID NO: 289319 - DNA, 15 bp, Homo sapiens
atgctcccacctcag

SEQ ID NO: 289320 - DNA, 15 bp, Homo sapiens
catgctcccacctca

SEQ ID NO: 289321 - DNA, 15 bp, Homo sapiens
ccatgctcccacctc

SEQ ID NO: 289322 - DNA, 15 bp, Homo sapiens
gccatgctcccacct

SEQ ID NO: 289323 - DNA, 15 bp, Homo sapiens
agccatgctcccacc

SEQ ID NO: 289324 - DNA, 15 bp, Homo sapiens
aagccatgctcccac

SEQ ID NO: 289325 - DNA, 15 bp, Homo sapiens
gaagccatgctccca

SEQ ID NO: 289326 - DNA, 15 bp, Homo sapiens
tgaagccatgctccc

SEQ ID NO: 289327 - DNA, 15 bp, Homo sapiens
ctgaagccatgctcc

SEQ ID NO: 289328 - DNA, 15 bp, Homo sapiens
gctgaagccatgctc

SEQ ID NO: 289329 - DNA, 15 bp, Homo sapiens
tgctgaagccatgct

SEQ ID NO: 289330 - DNA, 15 bp, Homo sapiens
gtgctgaagccatgc

SEQ ID NO: 289331 - DNA, 15 bp, Homo sapiens
tgtgctgaagccatg

SEQ ID NO: 289332 - DNA, 15 bp, Homo sapiens
ctgtgctgaagccat

SEQ ID NO: 289333 - DNA, 15 bp, Homo sapiens
cctgtgctgaagcca

SEQ ID NO: 289334 - DNA, 15 bp, Homo sapiens
tcctgtgctgaagcc

SEQ ID NO: 289335 - DNA, 15 bp, Homo sapiens
ctcctgtgctgaagc

SEQ ID NO: 289336 - DNA, 15 bp, Homo sapiens
actcctgtgctgaag

SEQ ID NO: 289337 - DNA, 15 bp, Homo sapiens
aactcctgtgctgaa

SEQ ID NO: 289338 - DNA, 15 bp, Homo sapiens
aaactcctgtgctga

SEQ ID NO: 289339 - DNA, 15 bp, Homo sapiens
caaactcctgtgctg

SEQ ID NO: 289340 - DNA, 15 bp, Homo sapiens
tcaaactcctgtgct

SEQ ID NO: 289341 - DNA, 15 bp, Homo sapiens
ctcaaactcctgtgc

SEQ ID NO: 289342 - DNA, 15 bp, Homo sapiens
cctcaaactcctgtg

SEQ ID NO: 289343 - DNA, 15 bp, Homo sapiens
gcctcaaactcctgt

SEQ ID NO: 289344 - DNA, 15 bp, Homo sapiens
tgcctcaaactcctg

SEQ ID NO: 289345 - DNA, 15 bp, Homo sapiens
ctgcctcaaactcct

SEQ ID NO: 289346 - DNA, 15 bp, Homo sapiens
tctgcctcaaactcc

SEQ ID NO: 289347 - DNA, 15 bp, Homo sapiens
ttctgcctcaaactc

SEQ ID NO: 289348 - DNA, 15 bp, Homo sapiens
cttctgcctcaaact

SEQ ID NO: 289349 - DNA, 15 bp, Homo sapiens
acttctgcctcaaac

SEQ ID NO: 289350 - DNA, 15 bp, Homo sapiens
cacttctgcctcaaa

SEQ ID NO: 289351 - DNA, 15 bp, Homo sapiens
tcacttctgcctcaa

SEQ ID NO: 289352 - DNA, 15 bp, Homo sapiens
ctcacttctgcctca

SEQ ID NO: 289353 - DNA, 15 bp, Homo sapiens
gctcacttctgcctc

SEQ ID NO: 289354 - DNA, 15 bp, Homo sapiens
ggctcacttctgcct

SEQ ID NO: 289355 - DNA, 15 bp, Homo sapiens
gggctcacttctgcc

SEQ ID NO: 289356 - DNA, 15 bp, Homo sapiens
agggctcacttctgc

SEQ ID NO: 289357 - DNA, 15 bp, Homo sapiens
cagggctcacttctg

SEQ ID NO: 289358 - DNA, 15 bp, Homo sapiens
ccagggctcacttct

SEQ ID NO: 289359 - DNA, 15 bp, Homo sapiens
accagggctcacttc

SEQ ID NO: 289360 - DNA, 15 bp, Homo sapiens
aaccagggctcactt

SEQ ID NO: 289361 - DNA, 15 bp, Homo sapiens
caaccagggctcact

SEQ ID NO: 289362 - DNA, 15 bp, Homo sapiens
gcaaccagggctcac

SEQ ID NO: 289363 - DNA, 15 bp, Homo sapiens
tgcaaccagggctca

SEQ ID NO: 289364 - DNA, 15 bp, Homo sapiens
gtgcaaccagggctc

SEQ ID NO: 289365 - DNA, 15 bp, Homo sapiens
ggtgcaaccagggct

SEQ ID NO: 289366 - DNA, 15 bp, Homo sapiens
tggtgcaaccagggc

SEQ ID NO: 289367 - DNA, 15 bp, Homo sapiens
gtggtgcaaccaggg

SEQ ID NO: 289368 - DNA, 15 bp, Homo sapiens
agtggtgcaaccagg

SEQ ID NO: 289369 - DNA, 15 bp, Homo sapiens
cagtggtgcaaccag

SEQ ID NO: 289370 - DNA, 15 bp, Homo sapiens
acagtggtgcaacca

SEQ ID NO: 289371 - DNA, 15 bp, Homo sapiens
cacagtggtgcaacc

SEQ ID NO: 289372 - DNA, 15 bp, Homo sapiens
acacagtggtgcaac

SEQ ID NO: 289373 - DNA, 15 bp, Homo sapiens
aacacagtggtgcaa

SEQ ID NO: 289374 - DNA, 15 bp, Homo sapiens
gaacacagtggtgca

SEQ ID NO: 289375 - DNA, 15 bp, Homo sapiens
ggaacacagtggtgc

SEQ ID NO: 289376 - DNA, 15 bp, Homo sapiens
tggaacacagtggtg

SEQ ID NO: 289377 - DNA, 15 bp, Homo sapiens
ctggaacacagtggt

SEQ ID NO: 289378 - DNA, 15 bp, Homo sapiens
gctggaacacagtgg

SEQ ID NO: 289379 - DNA, 15 bp, Homo sapiens
ggctggaacacagtg

SEQ ID NO: 289380 - DNA, 15 bp, Homo sapiens
aggctggaacacagt

SEQ ID NO: 289381 - DNA, 15 bp, Homo sapiens
caggctggaacacag

SEQ ID NO: 289382 - DNA, 15 bp, Homo sapiens
tcaggctggaacaca

SEQ ID NO: 289383 - DNA, 15 bp, Homo sapiens
ctcaggctggaacac

SEQ ID NO: 289384 - DNA, 15 bp, Homo sapiens
cctcaggctggaaca

SEQ ID NO: 289385 - DNA, 15 bp, Homo sapiens
ccctcaggctggaac

SEQ ID NO: 289386 - DNA, 15 bp, Homo sapiens
tccctcaggctggaa

SEQ ID NO: 289387 - DNA, 15 bp, Homo sapiens
gtccctcaggctgga

SEQ ID NO: 289388 - DNA, 15 bp, Homo sapiens
tgtccctcaggctgg

SEQ ID NO: 289389 - DNA, 15 bp, Homo sapiens
ctgtccctcaggctg

SEQ ID NO: 289390 - DNA, 15 bp, Homo sapiens
tctgtccctcaggct

SEQ ID NO: 289391 - DNA, 15 bp, Homo sapiens
ctctgtccctcaggc

SEQ ID NO: 289392 - DNA, 15 bp, Homo sapiens
actctgtccctcagg

SEQ ID NO: 289393 - DNA, 15 bp, Homo sapiens
cactctgtccctcag

SEQ ID NO: 289394 - DNA, 15 bp, Homo sapiens
tcactctgtccctca

SEQ ID NO: 289395 - DNA, 15 bp, Homo sapiens
ctcactctgtccctc

SEQ ID NO: 289396 - DNA, 15 bp, Homo sapiens
tctcactctgtccct

SEQ ID NO: 289397 - DNA, 15 bp, Homo sapiens
gtctcactctgtccc

SEQ ID NO: 289398 - DNA, 15 bp, Homo sapiens
ggtctcactctgtcc

SEQ ID NO: 289399 - DNA, 15 bp, Homo sapiens
aagacagggtctcac

SEQ ID NO: 289400 - DNA, 15 bp, Homo sapiens
aaagacagggtctca

SEQ ID NO: 289401 - DNA, 15 bp, Homo sapiens
taaagacagggtctc

SEQ ID NO: 289402 - DNA, 15 bp, Homo sapiens
ttaaagacagggtct

SEQ ID NO: 289403 - DNA, 15 bp, Homo sapiens
tttaaagacagggtc

SEQ ID NO: 289404 - DNA, 15 bp, Homo sapiens
ttttaaagacagggt

SEQ ID NO: 289405 - DNA, 15 bp, Homo sapiens
tttttaaagacaggg

SEQ ID NO: 289406 - DNA, 15 bp, Homo sapiens
ttttttaaagacagg

SEQ ID NO: 289407 - DNA, 15 bp, Homo sapiens
tttttttaaagacag

SEQ ID NO: 289408 - DNA, 15 bp, Homo sapiens
gtttttttaaagaca

SEQ ID NO: 289409 - DNA, 15 bp, Homo sapiens
tgtttttttaaagac

SEQ ID NO: 289410 - DNA, 15 bp, Homo sapiens
ttgtttttttaaaga

SEQ ID NO: 289411 - DNA, 15 bp, Homo sapiens
attgtttttttaaag

SEQ ID NO: 289412 - DNA, 15 bp, Homo sapiens
aattgtttttttaaa

SEQ ID NO: 289413 - DNA, 15 bp, Homo sapiens
aaattgtttttttaa

SEQ ID NO: 289414 - DNA, 15 bp, Homo sapiens
aaaattgttttttta

SEQ ID NO: 289415 - DNA, 15 bp, Homo sapiens
caaaattgttttttt

SEQ ID NO: 289416 - DNA, 15 bp, Homo sapiens
gcaaaattgtttttt

SEQ ID NO: 289417 - DNA, 15 bp, Homo sapiens
tgcaaaattgttttt

SEQ ID NO: 289418 - DNA, 15 bp, Homo sapiens
ttgcaaaattgtttt

SEQ ID NO: 289419 - DNA, 15 bp, Homo sapiens
tttgcaaaattgttt

SEQ ID NO: 289420 - DNA, 15 bp, Homo sapiens
ttttgcaaaattgtt

SEQ ID NO: 289421 - DNA, 15 bp, Homo sapiens
tttttgcaaaattgt

SEQ ID NO: 289422 - DNA, 15 bp, Homo sapiens
ctttttgcaaaattg

SEQ ID NO: 289423 - DNA, 15 bp, Homo sapiens
tctttttgcaaaatt

SEQ ID NO: 289424 - DNA, 15 bp, Homo sapiens
ttctttttgcaaaat

SEQ ID NO: 289425 - DNA, 15 bp, Homo sapiens
tttctttttgcaaaa

SEQ ID NO: 289426 - DNA, 15 bp, Homo sapiens
ctttctttttgcaaa

SEQ ID NO: 289427 - DNA, 15 bp, Homo sapiens
actttctttttgcaa

SEQ ID NO: 289428 - DNA, 15 bp, Homo sapiens
cactttctttttgca

SEQ ID NO: 289429 - DNA, 15 bp, Homo sapiens
ccactttctttttgc

SEQ ID NO: 289430 - DNA, 15 bp, Homo sapiens
cccactttctttttg

SEQ ID NO: 289431 - DNA, 15 bp, Homo sapiens
ccccactttcttttt

SEQ ID NO: 289432 - DNA, 15 bp, Homo sapiens
tccccactttctttt

SEQ ID NO: 289433 - DNA, 15 bp, Homo sapiens
ctccccactttcttt

SEQ ID NO: 289434 - DNA, 15 bp, Homo sapiens
cctccccactttctt

SEQ ID NO: 289435 - DNA, 15 bp, Homo sapiens
tcctccccactttct

SEQ ID NO: 289436 - DNA, 15 bp, Homo sapiens
ttcctccccactttc

SEQ ID NO: 289437 - DNA, 15 bp, Homo sapiens
cttcctccccacttt

SEQ ID NO: 289438 - DNA, 15 bp, Homo sapiens
ccttcctccccactt

SEQ ID NO: 289439 - DNA, 15 bp, Homo sapiens
tccttcctccccact

SEQ ID NO: 289440 - DNA, 15 bp, Homo sapiens
ctccttcctccccac

SEQ ID NO: 289441 - DNA, 15 bp, Homo sapiens
gctccttcctcccca

SEQ ID NO: 289442 - DNA, 15 bp, Homo sapiens
ggctccttcctcccc

SEQ ID NO: 289443 - DNA, 15 bp, Homo sapiens
aggctccttcctccc

SEQ ID NO: 289444 - DNA, 15 bp, Homo sapiens
taggctccttcctcc

SEQ ID NO: 289445 - DNA, 15 bp, Homo sapiens
ctaggctccttcctc

SEQ ID NO: 289446 - DNA, 15 bp, Homo sapiens
actaggctccttcct

SEQ ID NO: 289447 - DNA, 15 bp, Homo sapiens
cactaggctccttcc

SEQ ID NO: 289448 - DNA, 15 bp, Homo sapiens
ccactaggctccttc

SEQ ID NO: 289449 - DNA, 15 bp, Homo sapiens
accactaggctcctt

SEQ ID NO: 289450 - DNA, 15 bp, Homo sapiens
caccactaggctcct

SEQ ID NO: 289451 - DNA, 15 bp, Homo sapiens
tcaccactaggctcc

SEQ ID NO: 289452 - DNA, 15 bp, Homo sapiens
ttcaccactaggctc

SEQ ID NO: 289453 - DNA, 15 bp, Homo sapiens
gttcaccactaggct

SEQ ID NO: 289454 - DNA, 15 bp, Homo sapiens
tgttcaccactaggc

SEQ ID NO: 289455 - DNA, 15 bp, Homo sapiens
gtgttcaccactagg

SEQ ID NO: 289456 - DNA, 15 bp, Homo sapiens
ggtgttcaccactag

SEQ ID NO: 289457 - DNA, 15 bp, Homo sapiens
tggtgttcaccacta

SEQ ID NO: 289458 - DNA, 15 bp, Homo sapiens
ctggtgttcaccact

SEQ ID NO: 289459 - DNA, 15 bp, Homo sapiens
cctggtgttcaccac

SEQ ID NO: 289460 - DNA, 15 bp, Homo sapiens
ccctggtgttcacca

SEQ ID NO: 289461 - DNA, 15 bp, Homo sapiens
accctggtgttcacc

SEQ ID NO: 289462 - DNA, 15 bp, Homo sapiens
aaccctggtgttcac

SEQ ID NO: 289463 - DNA, 15 bp, Homo sapiens
aaaccctggtgttca

SEQ ID NO: 289464 - DNA, 15 bp, Homo sapiens
caaaccctggtgttc

SEQ ID NO: 289465 - DNA, 15 bp, Homo sapiens
ccaaaccctggtgtt

SEQ ID NO: 289466 - DNA, 15 bp, Homo sapiens
tccaaaccctggtgt

SEQ ID NO: 289467 - DNA, 15 bp, Homo sapiens
ttccaaaccctggtg

SEQ ID NO: 289468 - DNA, 15 bp, Homo sapiens
attccaaaccctggt

SEQ ID NO: 289469 - DNA, 15 bp, Homo sapiens
gattccaaaccctgg

SEQ ID NO: 289470 - DNA, 15 bp, Homo sapiens
tgattccaaaccctg

SEQ ID NO: 289471 - DNA, 15 bp, Homo sapiens
ctgattccaaaccct

SEQ ID NO: 289472 - DNA, 15 bp, Homo sapiens
tctgattccaaaccc

SEQ ID NO: 289473 - DNA, 15 bp, Homo sapiens
gtctgattccaaacc

SEQ ID NO: 289474 - DNA, 15 bp, Homo sapiens
ggtctgattccaaac

SEQ ID NO: 289475 - DNA, 15 bp, Homo sapiens
tggtctgattccaaa

SEQ ID NO: 289476 - DNA, 15 bp, Homo sapiens
ctggtctgattccaa

SEQ ID NO: 289477 - DNA, 15 bp, Homo sapiens
tctggtctgattcca

SEQ ID NO: 289478 - DNA, 15 bp, Homo sapiens
gtctggtctgattcc

SEQ ID NO: 289479 - DNA, 15 bp, Homo sapiens
ggtctggtctgattc

SEQ ID NO: 289480 - DNA, 15 bp, Homo sapiens
aggtctggtctgatt

SEQ ID NO: 289481 - DNA, 15 bp, Homo sapiens
aaggtctggtctgat

SEQ ID NO: 289482 - DNA, 15 bp, Homo sapiens
gaaggtctggtctga

SEQ ID NO: 289483 - DNA, 15 bp, Homo sapiens
agaaggtctggtctg

SEQ ID NO: 289484 - DNA, 15 bp, Homo sapiens
aagaaggtctggtct

SEQ ID NO: 289485 - DNA, 15 bp, Homo sapiens
caagaaggtctggtc

SEQ ID NO: 289486 - DNA, 15 bp, Homo sapiens
ccaagaaggtctggt

SEQ ID NO: 289487 - DNA, 15 bp, Homo sapiens
gccaagaaggtctgg

SEQ ID NO: 289488 - DNA, 15 bp, Homo sapiens
agccaagaaggtctg

SEQ ID NO: 289489 - DNA, 15 bp, Homo sapiens
aagccaagaaggtct

SEQ ID NO: 289490 - DNA, 15 bp, Homo sapiens
taagccaagaaggtc

SEQ ID NO: 289491 - DNA, 15 bp, Homo sapiens
gtaagccaagaaggt

SEQ ID NO: 289492 - DNA, 15 bp, Homo sapiens
agtaagccaagaagg

SEQ ID NO: 289493 - DNA, 15 bp, Homo sapiens
aagtaagccaagaag

SEQ ID NO: 289494 - DNA, 15 bp, Homo sapiens
caagtaagccaagaa

SEQ ID NO: 289495 - DNA, 15 bp, Homo sapiens
ccaagtaagccaaga

SEQ ID NO: 289496 - DNA, 15 bp, Homo sapiens
gccaagtaagccaag

SEQ ID NO: 289497 - DNA, 15 bp, Homo sapiens
agccaagtaagccaa

SEQ ID NO: 289498 - DNA, 15 bp, Homo sapiens
gagccaagtaagcca

SEQ ID NO: 289499 - DNA, 15 bp, Homo sapiens
agagccaagtaagcc

SEQ ID NO: 289500 - DNA, 15 bp, Homo sapiens
tagagccaagtaagc

SEQ ID NO: 289501 - DNA, 15 bp, Homo sapiens
gtagagccaagtaag

SEQ ID NO: 289502 - DNA, 15 bp, Homo sapiens
agtagagccaagtaa

SEQ ID NO: 289503 - DNA, 15 bp, Homo sapiens
tagtagagccaagta

SEQ ID NO: 289504 - DNA, 15 bp, Homo sapiens
gtagtagagccaagt

SEQ ID NO: 289505 - DNA, 15 bp, Homo sapiens
agtagtagagccaag

SEQ ID NO: 289506 - DNA, 15 bp, Homo sapiens
aagtagtagagccaa

SEQ ID NO: 289507 - DNA, 15 bp, Homo sapiens
aaagtagtagagcca

SEQ ID NO: 289508 - DNA, 15 bp, Homo sapiens
caaagtagtagagcc

SEQ ID NO: 289509 - DNA, 15 bp, Homo sapiens
acaaagtagtagagc

SEQ ID NO: 289510 - DNA, 15 bp, Homo sapiens
tacaaagtagtagag

SEQ ID NO: 289511 - DNA, 15 bp, Homo sapiens
ctacaaagtagtaga

SEQ ID NO: 289512 - DNA, 15 bp, Homo sapiens
gctacaaagtagtag

SEQ ID NO: 289513 - DNA, 15 bp, Homo sapiens
agctacaaagtagta

SEQ ID NO: 289514 - DNA, 15 bp, Homo sapiens
cagctacaaagtagt

SEQ ID NO: 289515 - DNA, 15 bp, Homo sapiens
acagctacaaagtag

SEQ ID NO: 289516 - DNA, 15 bp, Homo sapiens
gacagctacaaagta

SEQ ID NO: 289517 - DNA, 15 bp, Homo sapiens
ggacagctacaaagt

SEQ ID NO: 289518 - DNA, 15 bp, Homo sapiens
aggacagctacaaag

SEQ ID NO: 289519 - DNA, 15 bp, Homo sapiens
caggacagctacaaa

SEQ ID NO: 289520 - DNA, 15 bp, Homo sapiens
ccaggacagctacaa

SEQ ID NO: 289521 - DNA, 15 bp, Homo sapiens
cccaggacagctaca

SEQ ID NO: 289522 - DNA, 15 bp, Homo sapiens
gcccaggacagctac

SEQ ID NO: 289523 - DNA, 15 bp, Homo sapiens
tgcccaggacagcta

SEQ ID NO: 289524 - DNA, 15 bp, Homo sapiens
ttgcccaggacagct

SEQ ID NO: 289525 - DNA, 15 bp, Homo sapiens
cttgcccaggacagc

SEQ ID NO: 289526 - DNA, 15 bp, Homo sapiens
gcttgcccaggacag

SEQ ID NO: 289527 - DNA, 15 bp, Homo sapiens
ggcttgcccaggaca

SEQ ID NO: 289528 - DNA, 15 bp, Homo sapiens
tggcttgcccaggac

SEQ ID NO: 289529 - DNA, 15 bp, Homo sapiens
ctggcttgcccagga

SEQ ID NO: 289530 - DNA, 15 bp, Homo sapiens
taactggcttgccca

SEQ ID NO: 289531 - DNA, 15 bp, Homo sapiens
ttaactggcttgccc

SEQ ID NO: 289532 - DNA, 15 bp, Homo sapiens
gttaactggcttgcc

SEQ ID NO: 289533 - DNA, 15 bp, Homo sapiens
ggttaactggcttgc

SEQ ID NO: 289534 - DNA, 15 bp, Homo sapiens
aggttaactggcttg

SEQ ID NO: 289535 - DNA, 15 bp, Homo sapiens
aaggttaactggctt

SEQ ID NO: 289536 - DNA, 15 bp, Homo sapiens
aaaggttaactggct

SEQ ID NO: 289537 - DNA, 15 bp, Homo sapiens
gaaaggttaactggc

SEQ ID NO: 289538 - DNA, 15 bp, Homo sapiens
ggaaaggttaactgg

SEQ ID NO: 289539 - DNA, 15 bp, Homo sapiens
tggaaaggttaactg

SEQ ID NO: 289540 - DNA, 15 bp, Homo sapiens
ttggaaaggttaact

SEQ ID NO: 289541 - DNA, 15 bp, Homo sapiens
cttggaaaggttaac

SEQ ID NO: 289542 - DNA, 15 bp, Homo sapiens
gcttggaaaggttaa

SEQ ID NO: 289543 - DNA, 15 bp, Homo sapiens
agcttggaaaggtta

SEQ ID NO: 289544 - DNA, 15 bp, Homo sapiens
tagcttggaaaggtt

SEQ ID NO: 289545 - DNA, 15 bp, Homo sapiens
atagcttggaaaggt

SEQ ID NO: 289546 - DNA, 15 bp, Homo sapiens
catagcttggaaagg

SEQ ID NO: 289547 - DNA, 15 bp, Homo sapiens
tcatagcttggaaag

SEQ ID NO: 289548 - DNA, 15 bp, Homo sapiens
ttcatagcttggaaa

SEQ ID NO: 289549 - DNA, 15 bp, Homo sapiens
cttcatagcttggaa

SEQ ID NO: 289550 - DNA, 15 bp, Homo sapiens
acttcatagcttgga

SEQ ID NO: 289551 - DNA, 15 bp, Homo sapiens
gacttcatagcttgg

SEQ ID NO: 289552 - DNA, 15 bp, Homo sapiens
agacttcatagcttg

SEQ ID NO: 289553 - DNA, 15 bp, Homo sapiens
aagacttcatagctt

SEQ ID NO: 289554 - DNA, 15 bp, Homo sapiens
aaagacttcatagct

SEQ ID NO: 289555 - DNA, 15 bp, Homo sapiens
gaaagacttcatagc

SEQ ID NO: 289556 - DNA, 15 bp, Homo sapiens
ggaaagacttcatag

SEQ ID NO: 289557 - DNA, 15 bp, Homo sapiens
aggaaagacttcata

SEQ ID NO: 289558 - DNA, 15 bp, Homo sapiens
aaggaaagacttcat

SEQ ID NO: 289559 - DNA, 15 bp, Homo sapiens
aaaggaaagacttca

SEQ ID NO: 289560 - DNA, 15 bp, Homo sapiens
caaaggaaagacttc

SEQ ID NO: 289561 - DNA, 15 bp, Homo sapiens
acaaaggaaagactt

SEQ ID NO: 289562 - DNA, 15 bp, Homo sapiens
gacaaaggaaagact

SEQ ID NO: 289563 - DNA, 15 bp, Homo sapiens
tgacaaaggaaagac

SEQ ID NO: 289564 - DNA, 15 bp, Homo sapiens
gtgacaaaggaaaga

SEQ ID NO: 289565 - DNA, 15 bp, Homo sapiens
tgtgacaaaggaaag

SEQ ID NO: 289566 - DNA, 15 bp, Homo sapiens
atgtgacaaaggaaa

SEQ ID NO: 289567 - DNA, 15 bp, Homo sapiens
catgtgacaaaggaa

SEQ ID NO: 289568 - DNA, 15 bp, Homo sapiens
ccatgtgacaaagga

SEQ ID NO: 289569 - DNA, 15 bp, Homo sapiens
cccatgtgacaaagg

SEQ ID NO: 289570 - DNA, 15 bp, Homo sapiens
ccccatgtgacaaag

SEQ ID NO: 289571 - DNA, 15 bp, Homo sapiens
accccatgtgacaaa

SEQ ID NO: 289572 - DNA, 15 bp, Homo sapiens
caccccatgtgacaa

SEQ ID NO: 289573 - DNA, 15 bp, Homo sapiens
tcaccccatgtgaca

SEQ ID NO: 289574 - DNA, 15 bp, Homo sapiens
ttcaccccatgtgac

SEQ ID NO: 289575 - DNA, 15 bp, Homo sapiens
tttcaccccatgtga

SEQ ID NO: 289576 - DNA, 15 bp, Homo sapiens
ctttcaccccatgtg

SEQ ID NO: 289577 - DNA, 15 bp, Homo sapiens
actttcaccccatgt

SEQ ID NO: 289578 - DNA, 15 bp, Homo sapiens
cactttcaccccatg

SEQ ID NO: 289579 - DNA, 15 bp, Homo sapiens
ccactttcaccccat

SEQ ID NO: 289580 - DNA, 15 bp, Homo sapiens
accactttcacccca

SEQ ID NO: 289581 - DNA, 15 bp, Homo sapiens
caccactttcacccc

SEQ ID NO: 289582 - DNA, 15 bp, Homo sapiens
tcaccactttcaccc

SEQ ID NO: 289583 - DNA, 15 bp, Homo sapiens
atcaccactttcacc

SEQ ID NO: 289584 - DNA, 15 bp, Homo sapiens
catcaccactttcac

SEQ ID NO: 289585 - DNA, 15 bp, Homo sapiens
tcatcaccactttca

SEQ ID NO: 289586 - DNA, 15 bp, Homo sapiens
ctcatcaccactttc

SEQ ID NO: 289587 - DNA, 15 bp, Homo sapiens
tctcatcaccacttt

SEQ ID NO: 289588 - DNA, 15 bp, Homo sapiens
ctctcatcaccactt

SEQ ID NO: 289589 - DNA, 15 bp, Homo sapiens
tctctcatcaccact

SEQ ID NO: 289590 - DNA, 15 bp, Homo sapiens
atctctcatcaccac

SEQ ID NO: 289591 - DNA, 15 bp, Homo sapiens
catctctcatcacca

SEQ ID NO: 289592 - DNA, 15 bp, Homo sapiens
acatctctcatcacc

SEQ ID NO: 289593 - DNA, 15 bp, Homo sapiens
gacatctctcatcac

SEQ ID NO: 289594 - DNA, 15 bp, Homo sapiens
tgacatctctcatca

SEQ ID NO: 289595 - DNA, 15 bp, Homo sapiens
atgacatctctcatc

SEQ ID NO: 289596 - DNA, 15 bp, Homo sapiens
tatgacatctctcat

SEQ ID NO: 289597 - DNA, 15 bp, Homo sapiens
ctatgacatctctca

SEQ ID NO: 289598 - DNA, 15 bp, Homo sapiens
actatgacatctctc

SEQ ID NO: 289599 - DNA, 15 bp, Homo sapiens
cactatgacatctct

SEQ ID NO: 289600 - DNA, 15 bp, Homo sapiens
ccactatgacatctc

SEQ ID NO: 289601 - DNA, 15 bp, Homo sapiens
tccactatgacatct

SEQ ID NO: 289602 - DNA, 15 bp, Homo sapiens
atccactatgacatc

SEQ ID NO: 289603 - DNA, 15 bp, Homo sapiens
tatccactatgacat

SEQ ID NO: 289604 - DNA, 15 bp, Homo sapiens
ttatccactatgaca

SEQ ID NO: 289605 - DNA, 15 bp, Homo sapiens
attatccactatgac

SEQ ID NO: 289606 - DNA, 15 bp, Homo sapiens
tattatccactatga

SEQ ID NO: 289607 - DNA, 15 bp, Homo sapiens
gtattatccactatg

SEQ ID NO: 289608 - DNA, 15 bp, Homo sapiens
ggtattatccactat

SEQ ID NO: 289609 - DNA, 15 bp, Homo sapiens
aggtattatccacta

SEQ ID NO: 289610 - DNA, 15 bp, Homo sapiens
taggtattatccact

SEQ ID NO: 289611 - DNA, 15 bp, Homo sapiens
gtaggtattatccac

SEQ ID NO: 289612 - DNA, 15 bp, Homo sapiens
ggtaggtattatcca

SEQ ID NO: 289613 - DNA, 15 bp, Homo sapiens
aggtaggtattatcc

SEQ ID NO: 289614 - DNA, 15 bp, Homo sapiens
caggtaggtattatc

SEQ ID NO: 289615 - DNA, 15 bp, Homo sapiens
tcaggtaggtattat

SEQ ID NO: 289616 - DNA, 15 bp, Homo sapiens
atcaggtaggtatta

SEQ ID NO: 289617 - DNA, 15 bp, Homo sapiens
tatcaggtaggtatt

SEQ ID NO: 289618 - DNA, 15 bp, Homo sapiens
ctatcaggtaggtat

SEQ ID NO: 289619 - DNA, 15 bp, Homo sapiens
actatcaggtaggta

SEQ ID NO: 289620 - DNA, 15 bp, Homo sapiens
tactatcaggtaggt

SEQ ID NO: 289621 - DNA, 15 bp, Homo sapiens
ctactatcaggtagg

SEQ ID NO: 289622 - DNA, 15 bp, Homo sapiens
actactatcaggtag

SEQ ID NO: 289623 - DNA, 15 bp, Homo sapiens
cactactatcaggta

SEQ ID NO: 289624 - DNA, 15 bp, Homo sapiens
acactactatcaggt

SEQ ID NO: 289625 - DNA, 15 bp, Homo sapiens
cacactactatcagg

SEQ ID NO: 289626 - DNA, 15 bp, Homo sapiens
acacactactatcag

SEQ ID NO: 289627 - DNA, 15 bp, Homo sapiens
cacacactactatca

SEQ ID NO: 289628 - DNA, 15 bp, Homo sapiens
ccacacactactatc

SEQ ID NO: 289629 - DNA, 15 bp, Homo sapiens
tccacacactactat

SEQ ID NO: 289630 - DNA, 15 bp, Homo sapiens
ttccacacactacta

SEQ ID NO: 289631 - DNA, 15 bp, Homo sapiens
tttccacacactact

SEQ ID NO: 289632 - DNA, 15 bp, Homo sapiens
gtttccacacactac

SEQ ID NO: 289633 - DNA, 15 bp, Homo sapiens
tgtttccacacacta

SEQ ID NO: 289634 - DNA, 15 bp, Homo sapiens
ttgtttccacacact

SEQ ID NO: 289635 - DNA, 15 bp, Homo sapiens
attgtttccacacac

SEQ ID NO: 289636 - DNA, 15 bp, Homo sapiens
aattgtttccacaca

SEQ ID NO: 289637 - DNA, 15 bp, Homo sapiens
taattgtttccacac

SEQ ID NO: 289638 - DNA, 15 bp, Homo sapiens
ctaattgtttccaca

SEQ ID NO: 289639 - DNA, 15 bp, Homo sapiens
tctaattgtttccac

SEQ ID NO: 289640 - DNA, 15 bp, Homo sapiens
gtctaattgtttcca
